United States Patent Application Publication US 2006/0123505 A1 - sequence listing, part 3

SEQ ID NO: 4665 - DNA, 1390 bp, Oryza sativa
  ref <308>: DATABASE ACCESSION NUMBER: AK061942
  ref <309>: DATABASE ENTRY DATE: 2001-12-06
tctacaacaatttcatcactgatttcgagacgaagatcaatcttctcaaacttgcgcatttcgcggtcatcgcttcgcgccagtaccccgacaaggatgctgctataagtttcctcgagggggtaatcacaaaattgcgcgagacaaaggacctgcgcatcaatgaacccattctctacgtcaagatgcaaatcgctgcgattaacctggagaagggaaatcagaaggagtgcaagaaacttttggacgaaggaaaatctactctagatagcatgactgatgttgatcccacagttcatgctagcctctactggatatcatctcagtaccataaggctcgccaagaatttgctgagttctacaagaatgcccttctgtatctggcttacactactgtagagtcactctctgagtctttcaaactggatttggcatttgatctctcccttgcagccttgcttggtgataacatctacaactttggggaattgttagctcacccgattatcaacagtcttattggaaccaaggtggagtgggtctatcatatgttacaagcattcaacaccggcaacctagctctctaccaagaactatgtagggtccacaatgctgctctcagtgctcagccagctttggtgcagaatgaacggaaactgctagagaagatcaacattctatgtctgatggagataatctttagccgggcgtcagaagacagaactatcccattaagtgttatagccgagcgcactaagctttctatcagtgatgtggaatatcttcttatgaagagcctctcggttcatcttatagaggggataattgatgaggtggacagcacagttcacgtgtcatgggtccagcctagagtacttggaattccacaggtgaaggcgttgcgcgagcggttggacgcctgggttggaaaagtgcataccaccctgttgtccgttgaggcagagacgcctgatcttgtagctgcataacttatccaaccttccttttgctatatggccttggtcaccaagggtgcggtgcgaaaagagagatgatctggctgtggtggctgtagttttctgggtgatgaaaacatgttgccttgaacgtttccctggcaccctattgatcaggacctgtaatttcatttctctttaaatcctctggacgttgaggcctggagcttgatgcattgatcacggaaaaagcacaagcggatcaaaagtttcataccagtagggtgtcattgtagttcttttcccagtgtgatttagattgttactcagcgggtattttcatattcttttcctcatatatgctggacatggatggaggaaaatcttactgattttcgttatgttgaaaaggttatgttcccctgaacacaagc

SEQ ID NO: 4666 - DNA, 1345 bp, Oryza sativa
  ref <308>: DATABASE ACCESSION NUMBER: AK104837
  ref <309>: DATABASE ENTRY DATE: 2002-08-28
cttcctcaatgagcaaagccgaggcccacgtgccactaggcctaagaagcaaccagaggatggcggcaaggatgagaagccttctgcaggcgttgattgcgagttgtacaacaggcctgactttgttacagagtacaagaatgccagatttttcatcataaaatcatacagcgaagacaatgtgcacaagagcatcaaatatggtgtttgggctagcaccacaaacgggaacaagaaactagactcagcctaccgtgaagcaaaggagaaagaagagcattgcccaatttttctgctgttttcggtgaatgctagtgcacaattctgtggtgttgcagagatgattgggccagtggattttgagaagagtgttgactattggcagcaagataagtggactggccagttccctgttaagtggcacattgtgaaggatgttccaaataatcttttccgccatataattcttgaaaacaatgataataaacctgtgaccaacagccgggacacacaagaggtaaaactcgaacaaggtatggagatgctgaaaatcttcaaggatcatgaggaggatgcatcgatactcgatgactttgacttctacgaggagcgtgagagagccctgctggacaataaggcgcggctgcatcagcaacatcagctgcccagctctactgtggttgagcccaagaagcccttgactgtggccactgatctagttggtcatataactaagagctttgcgcaggcagttcggcttggtgaggccaagaatgtgagccctaattcagctgacaaaggtgccagtggggattcatctgtcgctgcaaagcctttggaagttaaagaggccggcttagcataaagccccagggtgattggttcatactgaaaattctctgatccatgctcttcctctttgaaatactaagaaatgggcgaagacaatgtccagcgcttctgtctggtgaagcattgtacactaggataggatggaagcctagctccttaaatagtttctttttttacctttcttttgttccttatcttttcctgttggtaatatttttcgttgcgtttatatgatgatcgattccttagtggctagccttaaggagagctgcagtttttgtgcaagcctctgtaaatttcccagttcaatcgatctcaagatgaataaggccttttgcctcctccagtaaaatcctctttaatctacttgtcttatactgaacaaggtgtgtctggaaaacaacataacatctgtttgggtgacctggtgatggtaacaataacaacttgttaataataaagagagtgtgaccttgtggtggtcgcttatgtg

SEQ ID NO: 4667 - DNA, 662 bp, Oryza sativa
  ref <308>: DATABASE ACCESSION NUMBER: AK061943
  ref <309>: DATABASE ENTRY DATE: 2001-12-06
tggagaggaatacaatcttgaaacaaggacatggagaagaatacatgatatgtaccctggagggactagtgcctctcaatctcctcccctagttgctgttgtgaataatcagctttatgcagctgatcaggcaacaaatgtggtaaagaagtacgacaaaggaaataacacctggaacatagtgaagccattgccagtcagagctgactcttccaatggttggggcctagctttcaaggcatgtggtgatagattgcttgttattggtggccatagagtaccccgtggtgaagtaatattgctgcattcttggtgccctgaagatgggaatggtggtgctgactgggaagtgctctcggtgaaggagcgtgctggtgtattcgtttataactgcgcaataatggggtgctgaattacatttctttcggtataatccgtatatgcctcttgtttagcaacccacccatttcttgctgctgcttagctaccccctataatgacctgtaattcagaaaaatgacaccccccttttcgtggagctctcaatgaaatgtttgggagagagcatagagcattcagttcagtttacctggaacttcttttaactcgttcaaaatttgttcttcttgtccagtatgaaatttatgcagtattctttattc

SEQ ID NO: 4668 - DNA, 1723 bp, Oryza sativa
  ref <308>: DATABASE ACCESSION NUMBER: AK061944
  ref <309>: DATABASE ENTRY DATE: 2001-12-06
aaaaaactgtttttgctgccgctgctacttcttccactagggttcgtcttgctgctccctccactgctcgcctcgcctccgccaccatctgaaatcgagtgagtgggagctaaggcggcggccccgtcgagatggcgctcgtattgcatactttcgatggaaacaagaatgcattcaaggcactcattgctgccgagtactctggtgtcaaggttgagttggcaaagaactttcagatgggtgtctccaacaagactcctgagtatctcaagatgaatcctattgggaaggtccctattctagagactcctgatggtcctgtttttgaaagcaatgcgattgcacgatatgttactcgctcgaagtctgacaacccactctatgggtcttcactgattgaatatgcccacattgagcagtggattgacttttcagccacagaggttgatgctaatactggaaaatggctcttcccacgtcttggatttgctccttatgttgctgtcagtgaggaagcagctattgctgctttgaagagatcattgggtgccctcaacacacaccttgcatcaaacacataccttgttggccattcagtgactcttgctgatattgtgatgacatgcaacctctacatgggctttgctcggatcatgaccaagaattttacttctgagttccctcatgttgagaggtacttctggaccatggttaaccagccaaactttaagaaagtcatgggtgatgtgaagcaggcagattctgccccacaagttcaaaagaaggctgcagcaccaaaggagcagaagccaaaggaagccaagaaagaggccccaaaagaagctccaaagcctaaggcagctgagaaaccagaggaggaagaggaagcaccaaagccaaagccaaagaatcctcttgatttgctccctccaagcaaaatgatccttgatgagtggaagaggttatactcaaacacaaaaacaaacttccgtgaggttgctatcaagggtttctgggatatgtatgacccagaaggttactccctgtggttctgcgactacaaatacaatgatgagaacaccgtgtccttcgtgaccatgaacaaggttggtgggttcctgcagcgaatggacctgtgccgcgaatatgccttcgggaagatgcttgtgatcggctctgagccgccattcaaggtgaagggtctttggctcttccgtggccccgagatccccaagttcgtcatggatgaggtctacgacatggagctctatgagtggaccaaggttgacatctcagatgaggcccagaaggagcgcgtcagcgccatgattgaggaccttgagccatttgagggcgaggctttgctggatgcgaaatgcttcaagtgaggcgtcgttggagcaaggataccgtggaaaaatgagctatttaggttttggatttaccgttcgaaaatagttcatgattctgaaaaagaaaacactatcagcttgtggttatattagtctatattgagtgtgctctcgtttctgtgtgctgtttttaagagttttggcccttctatcttgtagttcttagttgttaaagacactatccatcgaatcatcatcggaaacacaccattccttgtgaatcggctgctgctcatatgataaacttggcaattctgatgttttcgaattgttatgcaagtaaaagaggtacagtgatgttcatgtttgtc

SEQ ID NO: 4669 - DNA, 1273 bp, Oryza sativa
  ref <308>: DATABASE ACCESSION NUMBER: AK061945
  ref <309>: DATABASE ENTRY DATE: 2001-12-06
tacagttaagggtgttaaatacaagaccaagtcaggtgaagaattaaaagcatatgcacctctgacaattgtatgcgatggctgtttctcaaaccttcgccgcgccctttgctctccaaaggttgatgtaccatcttgttttgttgggctggtcctggagaattgtcaacttcctcatgcaaaccatggccatgttgtcctggccaatccttcacctatcctattttacccaataagcagcactgaagttcgctgtttggttgatgtccctggtcagaaggtgccttccatagcaaacggtgaaatggcaaaatatctcaaaacagtggttgcacctcagattcctccagaaatctatgattcattcatagcagccattgataagggaagcataagaacaatgccaaacaggagcatgccggctgctccacatccaacccctggtgcacttttgatgggtgatgcattcaacatgcggcatcctttgactggtggcggaatgactgttgcattatctgacattgttgtgctacgtaatcttctcaagcctctccgcaatctgcatgatgcatctgctctttgcaaataccttgaatcattctatacactgcggaagccggttgcttctaccataaacacattagctggtgctctatacaaggttttcagtgcctcacctgatcaggctaggaatgagatgcgccaagcctgctttgattacttgagccttggaggtgtcttttcaaatgggcctattgctcttctgtctggtctgaatcctcgaccattgagtttagtggcacatttctttgctgtcgctatctatggtgtcggtcgcctaatgcttcccctcccttcacctaaacgcatgtggatcggcgtaagactgatttccagtgcatgtggtataattttccccatcatcaaagctgaaggtgtgaggcatatgttcttccccgccactgtccctgcctattatcgtgctcctcgtccaatggagtaaggggggaaaatgaaaggagaagcgaagagaaaatccctgccactgtcctgatcggcggatgtttttcgtggatggcaattttcctgtgtaattggtagtagtcgtcaggccgtgaggttgtgtgtgctgttgttctaatggaacgaggggacctgtatacaccgtcacattccctgtacacttgccactttcgttgttccgtcagggatgcatgtcgactgctaatccttaagctgtatatcccccatgaattcatcatgattgcgtctt

SEQ ID NO: 4670 - DNA, 1879 bp, Oryza sativa
  ref <308>: DATABASE ACCESSION NUMBER: AK061946
  ref <309>: DATABASE ENTRY DATE: 2001-12-06
aactaacaatacctcgcacctagtcaccaccgcaccaaccgcgcgcgaccggccccccgtcagtcgaaagctgagcctgagcgagcaactgatgccgctagctatagctgctgcctgcagcacgcagcgcccgtaacctaacgtatcatttacttccattgcactgcacatcctgtgagttcgttgtctgagtgagagctggacgtgctgcaccgagctcctggccgagatgcttgccgtgtcgccggcgatgtgccccgacattgaggaccgcgccgcggtggccggcgatgctggcatggaggtcgtcgggatgtcgtcggacgacatggatcagttcgacttctccgtcgatgacatagacttcggggacttcttcctgaggctggaggacggtgatgtgctcccggacctcgaggtcgacccggccgagatcttcaccgacttcgaggcaatcgcgacgagtggaggcgaaggtgtgcaggaccaggaggtgcccaccgtcgagctcttggcgcctgcggacgacgtcggtgtgctggatccgtgcggcgatgtcgtcgtcggggaggagaacgcggcgtttgccggggctggagaggagaagggagggtgtaaccaggacgatgatgtgggggaagcgaatgtcgacgatggagccgcggcggttgaggccaagtcttcgtcgccgtcatcgacgacgtcgtcgtcgcaggaggctgagagccggcacaagtcatccagcaagagctcccatgggaagaagaaagcgaaggtggactggacgcctgagcttcaccggaggttcgtgcaggcggtggagcagctcggcatcgacaaggccgtgccgtcgaggatacttgagatcatggggatcgactctctcacccggcacaacatagccagccatcttcagaagtaccggtcacacagaaaacacatgattgcgagagaggcggaggcagcgagttggacccaacggcggcagatttacgccgccggtggaggtgctgttgcgaagaggccggagtccaacgcgtggaccgtgccaaccattggcttccctcctcctccgccaccaccaccatcaccggctccgattcaacattttgctcgcccgttgcatgtttggggccacccgacgatggacccgtcccgagttccagtgtggccaccgcggcacctcgttccccgtggcccggcgccaccatgggttccaccgccgccgccgtcggaccctgctttctggcaccacccttacatgagggggccagcacatgtgccaactcaagggacaccttgcatggcgatgcccatgccagctgcgagatttcctgctccaccggtgccaggagttgtcccgtgtccaatgtataggccattgactccaccagcactggcgagcaagaatcagcaggacgcacagcttcaactccaggttcaaccatcaagcgagagcatcgacgcagctatcggtgatgttttatcgaaaccgtggttgcctttgcctcttggactgaagccaccttcagtggacagtgtgatgggcgagctgcagaggcaaggcgtagcaaacgttcctccagcgtgtggatgatatttgcatgatagattgatggttccgttactgactgattgcttatctggtcagttcaccaaaaaatgggaaaattcgccgacatgtccttttatttttcttttggcctagcgtttcttggacatctcgtttaatttttaacttgtgcagagttcgaaagacatctttgtttcgactccgggagaaattaacctgcgtattgtaaatgtaaaatgtattggccgtgagttctcagcagctaagaataaattaaataatggtcctccgagtagggtttacttg

SEQ ID NO: 4671 - DNA, 1504 bp, Oryza sativa
  ref <308>: DATABASE ACCESSION NUMBER: AK061947
  ref <309>: DATABASE ENTRY DATE: 2001-12-06
aagcaaccaatccaattccgaacaagcaaggcaccaaatccccccaccatggatcaccgcctcctcctcctcggcctcctcctcctctccccggcggtggccgccgcctcagtccccggcgaggaggagccgctgatccggcaggtggtcggcggcggcgacgacaacgagctggagctggacgcggagcgccacttcgccagcttcgtccagaggttcgggaagtcctaccgtgacgccgacgagcacgcgtaccggctctccgtgttcaaggccaacctccgccgcgcgcgccgccaccagctgctcgacccctccgcggagcacggcgtcaccaagttctccgacctcaccccggccgagttccgccgggcctacctcggcctccgcacgtcgcgccgcgccttcctgcgggggctcggcgggtccccccacgaggcgcccgtcctccccaccgacggcctccccgacgacttcgactggagagaccacggcgccgtcggccccgtcaagaaccagggatcgtgcgggtcgtgctggtcgttcagcgcgtcgggggcgctagagggagcgaactacctggcgacgggcaagatggacgtgctctccgagcagcagatggtcgattgcgaccatgagtgtgattcatcagaacctgattcatgtgatgctggatgcaatggtggattgatgactaacgccttcagctatcttttgaaatccggtggccttgagagtgagaaggattacccctacactgggagggatggcacctgcaaatttgacaagtcgaagattgttacttcagttcagaacttcagtgttgtctctgtcgatgaggatcagattgctgccaaccttgtcaaacatgggccacttgcaattggcatcaatgctgcgtacatgcaaacatacattggtggtgtttcgtgcccgtacatctgtggcaggcaccttgatcacggtgttcttctcgttggctacggcgcatctggttttgctccaatccgcctaaaggataaggcctactggatcatcaagaactcctggggcgagaactggggagagcatgggtactacaagatctgcaggggctccaacgtccgcaacaaatgtggcgtggattctatggtctccaccgtgtctgccatccacacctcaaaggagtagattctgatcagtagtcccccgaccatcctgtggatggttcacagttggtgattctgatattatatataagctagaactacgaaatatacttagtttatgctccatctgcgctgttattgcagttatgataagcagcgatgatgtgaagctgcaactgaatgtttgtcctaagttatatgcttggtttgctacgcaatgctacacgctatttggaggtagctttaagtattatcgccattcacgaacttgtatttttactattaccaatcttttgaatggtctgtattatatgcatgtggtctgtttacatggaataactctgtctattgctacg

SEQ ID NO: 4672 - DNA, 1803 bp, Oryza sativa
  ref <308>: DATABASE ACCESSION NUMBER: AK061948
  ref <309>: DATABASE ENTRY DATE: 2001-12-06
aagtaatcggcgctttcgcgagagagagcgatacgaacaagagaaaatcttctccagacaccgcggcgggcttccccaccccatcggaaggaagaagacgaccagctcgcgcgctcggatctcagccatggagaaggcgatcgatcgccagcgcgtcctcctcgcccacctcctcccctcctcctcctccgaccaatcgctcctctccgcgtcggcgtgcgccgccggggacagcgccgccacagaggacttccgcctacggggacgacgtcgtcgtcgtcgctgcctacaggacacccatatgcaaggccaagcgaggaggtttcaaggatacatacccagaggaccttcttactgttgttctaaaggctgttctggacaacactaagatcaaccctggtgaaattggtgacattgtagttggcacggtgctaggtccaggctcgcagcgtgcaatcgagtgcagggctgcggctttctatgctggagttcccgaaaacgttcctgttagaactgtcaaccggcaatgttcctctggattacaggcagtggctgatgttgccgcggccattaaagctgggttctacgacatagggattggtgcaggcctggaatccatgtcagtaaatgctatgggttgggaaggacaagtaaaccctaaagtaaatgaagtccagaaagcacaggattgtcttttgcccatggggataacgtccgaaaatgttgcgcaccgatatggtgtaacaagacaagagcaggatcaggctgctgctgagtctcataggagggctgctgcagccacagctgctgggaaattcaaagatgagattgttccggtgcctacaaagattgttgaccccaagactggagaggaaaagaaagttgcgatatcagttgatgatggaattaggccagggaccacagcatctggattggcaaagcttaaaccagttttccggaaggatggtaccacaactgcaggcaactctagtcaagtgagcgatggtgctggagctgttcttctcatgaggagggacgtagcgatgaagaagggacttcctattcttggtgttttcaggagctttgctgctgttggagtagatcctgctgttatgggtgttggtcctgcagtagcaataccagctgcagtgaagtctgctggactccagattgaagacattgatctgtttgaattgaatgaggccttcgcttcgcagtttgtgtattgctgcaacaagctgggactggacaggtcaaaagtaaacgtgaatggaggcgcaatcgccctaggacatcctcttggtgcaacaggtgcccggtgcgtcgcaactcttctgaatgaaatgaagcgccggggcagggactgcagattcggtgttgtcaccatgtgcattggatctggcatgggggcagcagctgtgtttgagcggggtgactcggtcgaccaattctcaaacgtgcgccaccattagcggcagttttctaagagaaatgcaaagcaaagcagtggtgcaaaatcatcatggtggtcagtccaatggagcatactctggcagtaagatctataccgaaaactaaatgcaggaaacacgtaatcttctccggtgaaaggtgtaacagtatattgaagatcttttcatgtaacattttgcactaataataatttatgcgaataaggggcatgcatgctcaatgtttgttttgtcaagtgttccacacgaaacactgagaggagcacagtggttgcaaatgttgaagggcctgataagggtaggcctgatcatggataatttggcccaaatc

SEQ ID NO: 4673 - DNA, 1158 bp, Oryza sativa
  ref <308>: DATABASE ACCESSION NUMBER: AK061949
  ref <309>: DATABASE ENTRY DATE: 2001-12-06
cagatgctactgtttctgccttggtgaaggcacatggtagttcgcttgcacgcctcagtctcgaaggttgcagcaggatcactgatgcaagcctgtttgccatttctgagggctgtaccgatctcgccggacttgatctctcaaactgcatggtcagcgactacggtgttgcagtgttggcgtcagcgaggcagctcaaacttcgtgtcctctcactttctggttgtttgaaggttacccagaagagtgttcctttcttaggcagcatgtcggcatcgttggagggcctcaatctccagttcaacttcattggcaaccacaacattgcatcgctggagaagcagctctggtggtgcgacatccttgcttagaggaacaacaactagttgctggaggtgctgggtcatccatctccagatgcaaatatacgaccgtagcggtagtactcctacttcagtcaagcttcgcagcagcagagttggtttcttgggtcctgtctttgagtcatggtggacttccttcgtcttagagccggttgttttccggggggcatttttagccgagtgctcgttttttgcaggtatcctcttgggatagtgcctgttccttgagccttcggctgccattagcgtggcacccctgcccctctatcccaaccttggtccttgttgattacagtcattacatcatgctgttttttttccattgcgtcgtgttcggagctcaaatattgtcaaagcgtgttcttcttttccggtaattcttgttagtcgcggacatcaacaccgttcgtagaaacttggctgctccagttcttcagtgtccaggtgttcgcgatctcttcgggtgcgtatgtttgttccagttcaggtcttgtgcggcttgcggtatcgtgggtagtgtgtgtgtgtgtgtgtgtgtgtgtgtgtgtgtgtgtgtttgtgtttgcaatgggggttgcttcttatggtgtttgtaggggtctcctgatattatccttggggatccggcctttgcaaggtgcattctgaagggccttgccattgacaaccctgtgtggttgtttttctactccggatccctggttttgctggcagattgttgaatgctgtaatctttgtaaccttcccagattaaataaaatgtggtgtttcagtt

SEQ ID NO: 4674 - DNA, 1759 bp, Oryza sativa
  ref <308>: DATABASE ACCESSION NUMBER: AK061950
  ref <309>: DATABASE ENTRY DATE: 2001-12-06
ccggtcatcagtgactcaattgttgttcatgattctgagggaagagaagttgaatcacaacttctgcctatagctaatgcatctttgtacatgcgggagaaacatgtcaaggcttacctaggcatgttaccagctgcaaaacccaagttttggcttgcttttccagtttctgtaccacctcttggtttcaatacgtactttatatcaagcgggaagaaatcagcatcagtctctttgatgtccactctgcactcatctcaaggaagtgaaaatagtaacatgcaaattgggcaaggacagttgaaacttcaatacaatgcagctggagcattatctctgtactccaatagtaagacccaggttgaagcaaattttgagcagaagtacaagtattacataggacaggatggaaatggaagtgatcctcaggcttctggagcatacatatttcgccctaatggcacagttcctatcaagactgatggacaggttcctctgacagttctccgtgggtccatattggacgaagtgcatcagcagattaatccatggatatatcagatcaacagagtttacaaaggaaaggactatgtggagactgaatttatagttggaccaataccagtggatgatggaaatggaaaagaactatccactgaagtcgttacaaacatggcaacaaacaaaacattttacactgattccagtggacgtgacttcatcaaaaggatacgggattaccggtcagagtggaagatcgaagtgcaccagcctatcgctggaaactattatcctgttaatcttggcatttatgtggaagatggaagcagagagttatctatacttgtagacaggtctgttggaggtgccagcataaaggatggacagatagagctaatgctacacaggagactacttcatgatgatggtcgtggtgttgcagaggcattaaatgaaacaacctgttttgataatcaatgtgaaggactagttattcaaggaaagtattatctcaaaattgatccacaaggtgaaggagctaggtggcggcggacatttggccaggaaatatactcccctcttcttattgcttttgcagagcaggatggaggtaattgggtgaattcacacgttacaaaattctctgcaatggatccggcctacagcttgcctgataatgttgcattgcttactcttcaggaacttgaagacggaactgttcttcttcggttggctcacctatacgaggctggagagcacaaggatctttcagctctagctagcgtcgacctgaagagagtatttccagacaagaagattgtcaagattgttgagacaagcctatcagcgaaccaagaacgttcagccatggagaaaaagaggctgaagtggaaggtggaaggccctcctgctgatgaaaagatcgtccggggaggccccgtagatccttccaagctcgtcgttgatctgggccccatggagatacgcacattcctcatcaatttcgccccgcagtccggcaaacagttgatgtgaggggtgacatggccttggcaccaatgttttatttttagcttgagttcttctcatggtgatgagcaataagaaataatgtggccatggtgattggtgaccgaatgcagagatgcactggtagcatccaaccactgagccctgtttgtagcttgtaaatgaatttggcttcaccttaagttgagctcggtttcagtgaagataagtgactgaaacttttggtctc

SEQ ID NO: 4675 - DNA, 1543 bp, Oryza sativa
  ref <308>: DATABASE ACCESSION NUMBER: AK061951
  ref <309>: DATABASE ENTRY DATE: 2001-12-06
ttccaagaattatatgaacttgctgtttgtttgataaagaagggactagcttatgtcgatcaccagacaccagaagagataaaggagtatagagaaaagcaaatgaatagtccatggagggataggcctatagaagagtcactaaaactgtttgaagatatgaggcatgggttggttgctgagggaaaggcaactcttaggatgaaacaagacatgcagaatgataacaagaacatggctgacttaatagcatatagaataaagtttacacctcatccccatgctggcgacaagtggtttatctatccaagctatgactatgctcattgtttggttgactctcttgaaaacattacccattcgttgtgcacactagaatttgacatacgtcgtccttcatactactggctgctcgtatccctggaccagtaccagccatatgtttgggaatattcaaggttaaacatatcaaacaatgttatgtccaagcgaaagctaaataaacttgtgacagagaagtgggtagatgggtgggatgatcctcgcctgttgacacttgcaggactacggcggagaggagtatcatcaacagcaattaactcctttattcgtggaatgggcataacaaggagtgacaacagtttgatacgcttagaacgccttgagtatcatattagagaagagctcaacaaagtagctcctcgtgctatggttgttttgcatcccctaaaggttgttataaataatttagactatggaacaataatagaccttgatgcaaaaaagtggcccgatgctccaggagatgatgcttcggcctattacaaggttccattctcaagaactgtctacatcgagcagtctgattttcgtgtaaaggattcaaaagattattatgggcttgctcctggtaaaacagtactactaaggtatgcattcccaataaaatgtacggaagttatctatggtgataattcagataatatcattgaaatccgagctgagtatgacccttcgaaggctacaaaaccaaagggtgtgttgcactgggttgccgaaccttctccaggtgttaacccgctcaaagtggaaatcagattgttcgagaaattatttctttcagagaatcctgtggagcttgaggattggctgggtgatctcaacccacgatcaaaggaagtgataaagggtgcctatgccgtgccttcgcttgcaactgcagcgctgggggacaaatttcagtttgaacgcctcggttactttgctgtggattccgactcgacggctgaggaacttgtgttcaacagaaccgttactctacgggattcctatggaaaagctggacccaagtgatcgttttgtttgtggttgaaaagattggtgtaacagcatcattgctggtcttttgtattgcaccagcggtaaaatacaccagtgggtatacccctcaaattttgtttacaatcatctggaaccgccttttgtattagccagtcaaactctgtttacttgacagttgcaatagaaaccaaaattctgtggc

SEQ ID NO: 4676 - DNA, 1777 bp, Oryza sativa
  ref <308>: DATABASE ACCESSION NUMBER: AK104838
  ref <309>: DATABASE ENTRY DATE: 2002-08-28
agtgctcggcacgtcggttgttgctgttgctgctgctgctcctcccgttttccgatcgcagccatgggaacccgcagcgtggccttggtgctcctcgcggccgtgctgctccaagccctcctccccgcttcggcggcggagggtttggtgcggatcgcgctgaagaagcgcccgatcgacgagaacagccgcgtcgccgcgcgactctccggcgaggaaggggcgcgccggctgggcctccgcggcgccaactcccttggcggcggcgggggtgagggcgacatcgtggcgctgaagaactacatgaacgcgcagtacttcggggagattggcgtcggcactccgccgcagaaattcaccgtcatcttcgacactggcagctccaacctctgggtgccgtcggccaagtgctacttctcgattgcgtgcttcttccactctcgctacaagtccggacagtcgagcacttatcagaagaatggaaaaccagctgccattcagtatggcactggttcaattgctgggtttttcagcgaggatagtgttacagtaggtgatctggttgtgaaagatcaggaattcattgaagctaccaaggagccaggtcttactttcatggttgcaaaatttgatggcattcttgggcttggatttcaggaaatatccgttggagatgcagtacctgtgtggtataagatggtagagcaaggtcttgtcagtgagcctgttttctccttctggttcaaccgtcattctgatgaaggagaaggtggtgaaattgtgtttggaggaatggatcctagccactacaagggcaaccatacatatgttccagtctctcagaagggatattggcagtttgagatgggcgatgtcctgattggaggaaagaccacaggattttgtgctagcggttgttcagctatagcagactctggaacatcattgcttgctggccccacagccataatcactgaaatcaatgagaagatcggtgctactggggtagtcagccaagaatgcaagacagttgtttctcaatatggacaacagatcctagatctgttgcttgctgagacacagccatcaaaaatctgctctcaggttggtctgtgtacttttgatgggaagcatggtgttagtgctggaattaagagcgtagtagatgatgaagctggggaatcgaatggtctccaaagtggtcccatgtgcaatgcctgtgagatggctgttgtatggatgcagaaccaacttgcacagaacaagactcaggatctcatcttgaactacattaatcagctctgtgacaagctcccaagtccaatgggagaatcatctgtggactgtggcagccttgcatccatgcctgagatttcattcaccattggaggcaaaaagtttgcactgaagccagaagagtatattctgaaggttggtgaaggagctgctgcccagtgcatcagtggattcacagccatggacatccctcctccccgtggtcctctctggatcctgggtgacgttttcatgggtgcctaccataccgtgttcgactacggcaagatgagggttggcttcgcgaagtcggcctaaacgtgttgttgtcacgttcctaatgacgaggtggacgcatacgccgagagaagaagaccgtagcttttaactagcgtatttatccggcgatgtgtgtatatatgcatgctacataacatgtttatgttttccaaggcctgagatggcgcccgtctattttagcttggcaagaatatctcggacc

SEQ ID NO: 4677 - DNA, 1335 bp, Oryza sativa
  ref <308>: DATABASE ACCESSION NUMBER: AK104839
  ref <309>: DATABASE ENTRY DATE: 2002-08-28
atggtgcccgtggagatggaggtggacgacccccgcggctgggacttcgtcgactgggtcggccccgacgcctccgcctccatcttccgctccctcgacgaccccgccgacatcgtccgcgccgccgccgtctcccgctcctggcgccgattcgttgttgagaacgaattcagcaagagcatatgcttgcggatatgcccggagatcgccaatttcaccagcgcggaggaggtgagcagatcgccgccgcagccgccgcacgccgagtccagccatggcgtccagcgcaaggccctcgagagggactacaggatctactcctacctcagcggcgccctcgtctccaacagcccctccatggactgcatcctgcaatgcatcggcgcctccagcaccgacaacttccccgacgagaccatcgagaacacgctcataccacacgatcgggtcaagcaccgcccctcctactggtccagcggcggccacgacgatcccgacacaccagagaccttgacgtacaggctcaactgtgatatgtgcatcgtcgatgagatcaagctgcagccattcaaagcttattttcagtatggacatcctatatactcttcaaaggcagtcagattccggatgggccattccaagcttcctcatggctcggattcctttgttacggtcgaggatgagaatctgatggcaattgctgacgagaattatgtgtggacttacacttcaccagagttccccatgttgcaggaaaatgtgctacaatccttcaagcttccgcgcccagtcctttgcattggtggtatagtgaaggttgaactattgggcagagtacaaaaacaggaagcagatgataggtactacatatgtatctgccatgctcaagtgagagggcgttcactttctccagttttcatggttgatacctctgatcctgctggttattcagtcctcaagtacttgccggatgcaaaaatcctacgctccgaggacgcaatgctggacgatggcagcgaatcgctggagtggcactcacttgttgctaggtacaggcggatgaggcatctagcgataatgaatgtgcttcttggacctgaagagttcatggatgaagatgatattataggtggcgtgttaatggatgaagatgatttaggtggtatgttagaggacgacccttttgtgtaggcttgctgctacagaaccacccgggttttaaactctctgtagttagttttccttgcagacatctgtgaaacattctgcaacttcgtcgagaaaatacagttgttctgatctggagagaagaacaaatggattgttactgcgctc

SEQ ID NO: 4678 - DNA, 1673 bp, Oryza sativa
  ref <308>: DATABASE ACCESSION NUMBER: AK061952
  ref <309>: DATABASE ENTRY DATE: 2001-12-06
ttgatgcgaataagctaatgcaagtaactactatagagcgatatgtgaaatatcatgtgaaggagtttgagagatgcttccaaatgagatttcctgcctgctcgattgctgcaaaaaggcccatagattcatctactactattctggacgtgcaaggcgtgggtttaaagaacttctcaaaagctgcaagggatctaatcacacgactgcagaagatcgacaatgacaactacccagagacgttgcgccgcatgtatattattaatgccggccaaggcttcaagatgttatggagcactgtaaaatctttcctagatcctaaaactgcttcaaagattcatgttctaggaagcaagtaccaaaataagttacttgaaataattgatgagaatgaattgccagagttttttggtggaaaatgcaagtgcgaggcatttggaggttgcaaaaaatcagataaaggtccttggaaggatcctaacataataaagagggtcctgaatggcgaagcaaattatgggaggcaaattgtgaccatatcaagcactgatggaaaaataattcgttatgctgggccacaatacccaacaagaaaaggaagtgatggctcagcggagtctgggtctgaagtggaagatggcgcgtcacctatggcatcaaggaacctgataacgaatccccttttgacccctgttcatgaggagtcaaaattggcagcacatggatttacatctgcttccccttccattattgaagaaagcattcctgttgttgacaaggttgtggatgatggatggggcagtcctagagctagttcatcaccctcgagaagtttgcctatcacatttgatggcctctggacacaagttatcacatggctgactgtcttgatcgtgagccttttttgctatggttcgctctgtcccaagcaggatggctaaaagattctcaagccaatccactgaccatgatcactcctatgtggagtatcctcaagaagcagagtacaaggaagaattccggccaccgtctcctgctccgtcttatactgaaaaggatgtcctctcatctatggtaagacgactaggcgagttggaggagaaggtgcaggcgctcgaaacgaagccatccgagatgccatttgaaaaggaggaattgctgaatgcagccgtccgccgtgtggatgcattagaagccgagttaatctctacaaagaaggctctctatgaagccctgatgcggcaggacgagctgcttgcgtacattgacaagcaagatatgatcaagtttcgtaaaaagaaattctgcttctagcagctcaacgacgagttaattctccatacacagagctgttcgtgtatatttggatcaattaatcaccacgaatatgaatgaatgcagctagtttggagtgtaaaattaaaagtgtgcatatggcaaattgagaatccaacaataacaccacggtatcggtatgtgagttacaaggtggaccttgaggtgttgttggctggtcattcagaatccagacgatgcatcgtcttgtgctggagggtcctggctgctgtaaattaagcctgtaattaatcttgtgacttgtaacatatatagcacaaatgtgagttaaaatcgttgtaaatggacttcaccttggaatcatgcatcttctcatc

SEQ ID NO: 4679 - DNA, 1168 bp, Oryza sativa
  ref <308>: DATABASE ACCESSION NUMBER: AK061953
  ref <309>: DATABASE ENTRY DATE: 2001-12-06
atccgacgattcaaaaaattcgaagccatccaccaacgaagaaaaaaaaaagggagaaaaaaaaatccacgcacactttgcgtgcgaggcgaggcggttcgattcgagaggagagagagagagagagagagagagagagatggacgccttctactcgacctcgtcggcgtacggagcggcggcgagcggctggggctacgactcgctgaagaacttccgccagatctcccccgccgtccagtcccacctcaagctcgtttacctgacactatgcgtcgccctggctgcgtcggcggtgggcgcatacctgcacgtcgccttgaacatcggcgggatgttgactatgctcgggtgcgtggggagcatcgcctggttgttctcggtgcctgtctttgaggagaggaagaggtttgggattctcttggccgctgccctgctggaaggggcttcagttgggcctctgatcaagcttgctgtagactttgactcaaacattctcgtaacagcatttgttggaactgccattgcatttgggtgcttcacttgcgctgccatcgttgccaagcgtagggagtacctctaccttggtggtttgctctcttctggcctctccatcctgctctggctgcagtttgccgcatccatctttggccactccaccggcagcttcatgtttgaggtttactttggcctgttgatcttcctggggtacatggtgtatgacacgcaggagatcatcgagagggctcaccacggtgacatggactacatcaagcacgcactcaccctcttcactgacttcgtggccgtccttgtccggatcctcgtcatcatgctcaagaacgcgtctgacaagtcggaggagaagaagaggaagaagaggtcttgagagcttctcttcccgctttgcacataagaaaaaaccaccgcggctattgcctctacgtattatgacagagccgcacttcaactgggttttatggtgaatacaagttcttttgcattttgttgatacggtgtgaatcttctcaggtttgtcgtcgtagtagctttgcaaatactagcatgctacatgacacggatctttctgtaatggtggtcgcgttgatcgaaacgtgaaaacacatcttcatttgcgactaatttgtttgccttttggtgattgatg

SEQ ID NO: 4680 - DNA, 714 bp, Oryza sativa
  ref <308>: DATABASE ACCESSION NUMBER: AK104840
  ref <309>: DATABASE ENTRY DATE: 2002-08-28
actatactaccaccaccactgagctgccactactcatccagctaactaggagaaggaaaaaagaagaacacagatactttggtaacaagcaagaaattggcacagaaatggctctgaggctgtgggctagctcagctgccaatgccctcaagatctcatgcagtggagccaccagggctgcacctgcctactcaatctccagatacttctccactgttcttgatgggttgaagtacagctcctctcatgagtgggtcaagaatgatggctctgtggccacaattggaattacagaccatgctcagggccatctgggagaggtggtgttcgtggagctgccggaggcgggggcgaaggtgagccagggaggtgcattcggcaacgtggagagtgtgaaggccaccagcgacatcaactcccccatctccggtgaggtcgtcgaggttaacgacaagctctctgagacacccggcctgattaactcaagcccgtacgaggacgggtggatgatcaaggtgaagccgagcagcccgtcggagctggacgccctgctggacccggccaagtacaccaagcactgcgaggaggaagacgctcactaggctcttcctctctgttttttttcttcccattttgtcactccgacctaatttctccctgttgcaacaactgctctgtatccgtatacgattaataactgaatcttcaggcttt

SEQ ID NO: 4681 - DNA, 945 bp, Oryza sativa
  ref <308>: DATABASE ACCESSION NUMBER: AK104841
  ref <309>: DATABASE ENTRY DATE: 2002-08-28
atccatccatctcacccccaaagtcgccgtctcctcttcctccgacgagcgacagcgagagccttccactctcctctcctctcctctccacgccattccagaaccaaccctcgccgccgcgtcgctcctctccccgccgacgaatccaggcccccggattcccccgcgctatggccttcgccagctcgctcctcccggcgccgccggccagcgtcgccccggagctcgcctccttcctcccgccccaggccaagaggggcgccgtctccctcgccgccacgcggcgccggggagcccggattggagttagagccgaagtgaatgaatctggaagtgctttggctgctgacgccttcgcccaagtcaagcatgttctacttcctgtcaccgaccgcaacccttacctctcagagggcactagacaggctgcagcaacatccgcttctctagcaaagaagtatggagcaaacataactgtagttgtgattgatgataagcccaaggaagagttcccagagcatgatactcagatgtcaagcattagatggcatctctcagaaggtggatttacggagtttgggttgatggagcgccttggggaagggaagaaaccgacggctatcattggagaagtcgcggatgagttggagttagacctggttgtcctaagcatggaagcaatacattccaagcacgttgatgggaatttgctggctgaattcatcccgtgccccgttttactgctcccgctctgaaatgaccttagagcttttctttcacctgtcatgacttgaatggaaggcaaataatctgtttcacctctttccagatgtaatttctacagatgtcttctgggtcattttatggatgtaccttctgaatgattttctgttggattccataattttgattatgtgaatatcaataaaaacatgtttcaggttg

SEQ ID NO: 4682 - DNA, 1411 bp, Oryza sativa
  ref <308>: DATABASE ACCESSION NUMBER: AK061954
  ref <309>: DATABASE ENTRY DATE: 2001-12-06
ctgaatgaggaacttcaagcactgaactctgcaaagaatgaagctgaggaaaagctaagtgagttaacaaaagattatacagacctgaaggcttcttctgaagcaagagagagccgcaactctgagctactattagaaaaagataatatgatcaaacagcttgatggaaaactctctgatgcattaagtgattctagcaaagaccgtgagaacatcgctgcgctgaacaaggaattggatgcaacaaaagcaatgctagagaatgaagttgctgcagttaaaagtttaagagaatcacttcaatccacagaggaggcactgacagattccagaagtgaggtatccaaactttcagtggaacttgatgaagcaaattgaatgaaccaggacctggtgctgcaaatttctaaactccaggatgagttcaatgaaatgcaagagggccttactaacaagctaggagaggtagaatcagtatctaaagctctgtcagacgaacttgtctctgttaaggagatggttcacaagggacaggaagaacttgaagccacttctaatgagcttgcatccattgtggaagctcgtgacaacctgaagaaagaattgctcgatgtgttcaagaagttggaatccacgtcacaggagcttgttgatgaaaggaaaactgtcactactttgaatagggagcttgaggctttggtgaaacaactacagatggattctgaagcacgaaaagctcttgaagcagacctggatgaagcaacaaagtcactagacgagatgaacaggagtgcattatcactatcaaaggagctagaggaaactaattctaggaaggacactcttgaagcagagaaaaaaatgttatcaaaggctcttgctgagcaacagaagatcacaactgaagctcatgaaaacactgaggatgctcagaatcttatctctaggcttcagactgagaaggagagttttgaaatgagggctagacatcttgaagaggagttggcgttagcaaagggtgagatattgcgcctaagaaggcagattagtacaagcagatcacagaaagcaaaaactcttccaaacacaaatgcatctccagaggtcagtcaggctccagacgagcagcctgtgaatgataatcagaataccagcaaagttgctgctgggtctcaatatactgcaaagaggacgactaggagaagaaaaggtggtgcatcaacgtgaatgtgcttgggagattgataggaaaggaaatcatctgctttcattgcttcctgtttagtcatcaatgataacttcattttttatactgtcttcctttgcaacattattagtattatttctatttgcctatttgttgcagtggaaacttccaattcattagctattcctatattttgagttttgg

SEQ ID NO: 4683 - DNA, 1740 bp, Oryza sativa
  ref <308>: DATABASE ACCESSION NUMBER: AK061955
  ref <309>: DATABASE ENTRY DATE: 2001-12-06
ttgcggtttcttggccgctctgcggcgcagggactgaaggcctcggagttggagaggaggggttgagcagcattggtgcttcttctggttctaggaacgttagaagacttctgcagactggtggagtaaaccaaggtgcaccagctcctctaccacttgaacaatctccatcagcatcaggaccggtgtcttctccatcaccctcgccatgggtatccccaccgaaaggctcaccatcaccatcaccatcttcaaaaatcatagcacacagatctccacaccatccattcacaacccctccacaattggttaggcctaagcctacaactcggcgagctgagcacgatcattcagttgaaactacaggtcgctcttggtttaaacgttcctggacaacttatggttttatcgcagcagggattgctgctctccttatcatatcagcagctggtgcattctactgccgagctaaaaagatggggactgtgaggccatgggcaacgggacttagcgggcaattgcaaaaggcttttgtaaccggtgtgcctgcattgaaacgatcagagctggaaacagcgtgcgaggattttagcaatataattggttgtacatctacctgtacactgtacaagggaactttatctagtggagttgaaatagcagtggcatcaagtttggtaacgtctgcagacgattggtcaaaagaatgtgaatctcggtacaggagaaagatcacaagtttgtccaaagtaagccacaagaactttatgaacttgcttggctattgtgaggaagagcaaccttttaccagagtgatggtgtttgaatatgctccaaatggaacactttttgagtatctgcatgttagagaagccgagaagctggattggatgacgcggctcaggatatccatgggaatcgcttactgtctcgagcatatgcatcagcttaaaccacctgttgtgccaaggaatttcgactcgacgaccatataccttaccgacgatttcgctgcaaaggtgtccgaccttgaattttggagcggtgcaaaggaaccaaatccagccaccagcaactccagctcctcctcggacctcgagaacacggtgcgcaagtatggcatggtattgctggagatgctgaccggaagagttcccgattctgaggaggacgggccactggaacggctggcgtctcgctacttcgatggcgagacgcgcctcgcagagctgattgacccgagcatcggttccttctctgaagaagccgcgcgttcgctgtgcgaagtggtgaggagctgcattgatcctgatcctaagaggaggccgaccatggcggaggttgcagctcggatgagggagatcaccgcgctgggtccggacggagcaactccgaaggtgtcgccgctgtggtgggctgagctggagatcatgtcctccgagagctaatcactagctgcatcaagaatggcatttttcttaaaatttttgcggggaaagaatggcgttcatgtctgatgtctcgttctgaaaattctttcgtttgtcggttgccgctaatcttgctcgtggaatttgtgttcaggtagaatcttagaagatgttctgaatgtttgtttcctgtgcatagctgcagatatagtgagtgctactttacatgtaaaagagtggttagttttcagcagactgaactgcaaacattttagctgactctgcaatggacaaaagagttctgagtttc

SEQ ID NO: 4684 - DNA, 1640 bp, Oryza sativa
  ref <308>: DATABASE ACCESSION NUMBER: AK061956
  ref <309>: DATABASE ENTRY DATE: 2001-12-06
atcagctccacccccgaaaaatttctccccaatctcgcgaggctctcgtcgtcgaatcgaatcctctcgcgtcctcaagatgcagatctttgtgaagacattgaccggcaagactatcaccctcgaggtggagtcctctgacaccatcgataatgtcaaggctaagatccaagataaggagggcatccccccggaccagcagcgtctcatcttcgctggcaagcagctggaggatggcaggacccttgctgactacaacatccagaaggagtcgacccttcaccttgtcctccgcctccgtggtggcatgcagatctttgtcaagactctgaccggcaagactatcacccttgaggtggagtcttctgacaccatcgacaacgtcaaggccaagatccaggacaaagagggcacccccccagaccagcagcgtctcatcttcgccggcaagcagctggaggatggcaggacccttgctgactacaacatccagaaggagtccaccctccaccttgtcctccgcctccgtggtggcatgcagatctttgtcaagacactgaccggcaagaccatcaccctcgaggtggaatcttctgacaccatcgacaacgtcaaggccaagatccaggacaaggagggcattcccccggaccagcagcgtctcatctttgccggcaagcagcttgaggacggcaggacccttgctgactacaacatccagaaggagtcaacgcttcaccttgtcctccgtctcaggggaggcatgcaaatcttcgtgaagactctgaccggcaagaccatcaccctcgaggtggagtcttctgataccatcgacaatgtcaaggccaagatccaggacaaggagggcattcccccggaccagcagcgcctcatctttgctggcaagcagctggaggatggcaggacccttgctgactacaacatccagaaggagtccaccctccaccttgtgctccgccttcgtggtggtatgcagatctttgtcaagaccctcacaggcaagaccatcaccctggaggttgagagctcggacaccatcgacaacgtcaaggccaagatccaggacaaggagggcatccccccagaccagcagcgtctcatcttcgccggcaagcagctcgaggatggccgcaccctcgccgactacaacatccagaaggagtctaccctccacctggtgcttcgtctccgtggtggtatgcagatcttcgtgaagaccttgactgggaagaccatcactttggaggttgagagctccgacaccattgataatgtgaaggccaagatccaggacaaggaggggattcccccagaccagcagcgtctgatcttcgctggcaagcagctggaggatggacgcaccctcgccgactacaacatccagaaggagtccaccctccacctggtgctccgcctccgtggtggtcagtaatcagccagtttggtggagctgccgatgtgcctggtcgtcccgagcctctgttcgtcaagtatttgtggtgctgatgtctacttgtgtctggtttaatggaccatcgagtccgtatgatatgttagttttatgaaacagtttcctgtgggacagcagtatgctttatgaataagttggatttgaacct

SEQ ID NO: 4685 - DNA, 1506 bp, Oryza sativa
  ref <308>: DATABASE ACCESSION NUMBER: AK061957
  ref <309>: DATABASE ENTRY DATE: 2001-12-06
accatcgtcgggatcatcacccagcctctcccgctcggcgccgtcgcgctgctcggcctcggcgccgccgtgctcacgcggacgctcacgttcgccgccgcgttctccgcgttcggcgacccgatcccgtggctcatcgcgctcgccttcttcttcgcccgcggcttcatcaagaccggcctcggaagccgcgtcgcctacgccttcgtctccgccttcggcggctcgtcgctcgggctcggctacgcgttcgtgttcgccgaggcgctgctggcgccggccatcccgtcggtgtcggcgcgcgcggggggcatcttcctgccgctcgtcaagtcgctgtgcgaggcgtgcggctcgcgcgccggcgacggcacggagaggaggctcgggtcgtggctgatgctcacgtgcttccagacgtcggtgatctcgtcggcgatgttcctcaccgccatggcagcgaacccgctggcggcgaacctgacggcggggacgatcgggcaggggatcgggtggacgctgtgggcgaaggccgccattgtgccgggcttgctgtcgctggtgtttgtgccgttgattctgtacctgatctacccgccggaggtgaagaccagccccgacgcgccgcggctggcgaaggagcggttggagaagatggggcctatgagcaaggaggagaagatcatggctggaacgctgttcctcacggtaggtctttggatctttggtggaatgctgaatgtggatgcagtgtctgctgcaattcttggcctatccgtcctcctgatttctggagttgttacatggaaagagtgtttgggggaggctgtagcgtgggatacccttacatggtttgctgctcttattgcaatggctggatacctcaacaaatacgggttgatctcttggttcagtgagactgttgtgaagtttgttggtggccttggtctctcatggcaactatcgtttggtgtcttggtgctgctgtacttctactcccactatttctttgccagtggcgcagcgcacattggagcaatgttcactgcatttttgtcagtgtccagcgccttgggcactcctcctctaattgctgccatggttctttcattcctctcaaacatcatgggtggactcacgcactatggaattgggtctgctcctgtcttctacggtgctggctatgttccactggctcagtggtgggggtatggatttgtcatttccatcgttaacatcatcatctggcttggtgctggaggcttctggtggaagatgctcggcttgtggtgaggagcaaagtaaatgcgggtttttccgtttctgtttcggtagaagactgaaagaaacctagctgaaattgcggtagcacaggtacagccatccgcaaattttgtcgacatgattttgcaaccagcaacccattcttttagtttgtaccaatacatttgtttcatccttgggttctaactgttaattgcaaagcctgggcacagttttactggc

SEQ ID NO: 4686 - DNA, 1741 bp, Oryza sativa
  ref <308>: DATABASE ACCESSION NUMBER: AK061958
  ref <309>: DATABASE ENTRY DATE: 2001-12-06
atcaactgatgcgtcaaagccagcccagcctgtggtgaactctgtcacagtatcttctaggaggcctgttgttcttgcagatggtacttatgccacacagagtgctgccacagagactgccatttcgtctccagctgttgctccagggtcactgagttccacacagaatctcagatctctcattctgtctggtgatttctttttagctgctgttgttgcctgtaccctcaccaagcttgtgctgaggctggaggaggtccagccatcaaaggctgaagcaaacaaggcttctactggggccttgctgatcatggtgtccatactgcagttggggcagtcctcgtaccttccccaccctattgacaatgactcatatgataggattgtgctctgtgtgaggttgctttgcaatactggtgatgatgtgaggaaggtctggttgcagtcatgccgccagagctttacaaagatgcttgctgaaaaacaattccgagagactgaggagatgaaggccaaggcgcagatctctcatgcccagcctgatgatctcattgatttctaccacctgaagagccggaggggaatgagccaacttgagttggaagatgcagtccaagatgatttgaaggctgctactggtgaatttacaaaagatgcagatgacgcaaacagactgaatcgcattcttcaactaacagggttcagtgatcctgtgtatgctgaagcatatgtaactgttcaccactatgatattgtgcttgatgttacagtcataaaccgaacaaaggaaacacttcagaacttgtgcttggagttagcaacaatgggtgatctcaaacttgttgaccgcccccagaattacacgctggctcctgagtcaagcaagcaaattcgggccaacatcaaggtttcatcaacagagacgggagttatattcggtaacattgtttatgagacctcaaatgtaatggagcgatcagtggtggtcctaaacgatattcacattgacatcatggattatatctcacctgctacttgtgccgatgttgctttccggaacatgtgggcagaatttgagtgggaaaacaaggtggctgtgaacactgtcattcaggatgagaaggaatttttggatcatatcatcaaatcgacaaatatgaagtgtctaacaccaccatctgcgcttgatggagaatgtgggtttatcgctgctaatctctatgccaagagtgtttttggtgaggatgcattggtgaacatcagcgttgaaaagcaagccgatggcaagctgagtggctatatcagaatacggagtaagacccaaggaatcgccctcagcttaggcgacaagatcaccctcaaacagaagggaggcagcagttaactgagctgtgacgaagacgtcacacgtatatcaaattattacaaaggcccatccgaactcaatttttgctactcccaattttcatgagttgtcagttgttgtcaatttgtttgagttggaatgacaggcagtagagattatcctacatgaacatcattgtgtagccttgtattgtttttagcttacaaaaccgtgatatgtgctcccagatgttttatgatactgtctattctttgctcacctttgtactccccctgagacttcgacttcaatcctggtgttgatctttcttgatgtcccctaaatgccatgtacctgatcaaaataaaatatgagaaggcaattgttttacacttc

SEQ ID NO: 4687 - DNA, 1310 bp, Oryza sativa
  ref <308>: DATABASE ACCESSION NUMBER: AK104842
  ref <309>: DATABASE ENTRY DATE: 2002-08-28
cttcgcgccgccactctctccgagctctcgcctctcctcctcccccgtcttcccttcgcgcgcgccacccccacacacgcgaccatggcggcagtggcaggaggcgcagcgcgggcgctgtcgcaggcggagcaggacgtgcagatgatgctcgccgccgacgtccacctcggcaccaagaactgcgacttccagatggagcgctacgtctacaagcgccgctccgatggtatctacatcatcaacctcggcaagacatgggagaagctgcagctcgcggcgagggtgattgttgccattgagaacccccaggacatcattgtccagtcggcccgcccctacggccagcgcgccgtcctcaagttcgcgcagtacactggcgcgcacgccattgctggaaggcatacgcctggtacatttaccaatcagctccagacctccttcagcgagccccgtctgctcatcctcactgacccaaggaccgatcaccagccaatcaaggagtctgctctgggaaacatcccgaccattgccttctgtgacaccgattccccaatgcggtatgtcgatatcggcatcccggccaacaacaaggggaggaacagcattgggtgcctgttctggctcttggctaggatggttctgcagatgaggggtactatcctccctggccacaagtgggatgttatggttgatctgtttttctacagagaccctgaggaggccaaggagcaggaggaggaagctccagcacaagactttgctgccatcactgattacaccgcacctgaacaatggtctgctgaccagtggacctctgatgtggctgctcccccagctgctactgttggtgattggggcgcagctccagctccagttgctgctgccgaaggatgggatcaagcaggagcacccgtagccactgaagccgccgtcgttccaccggttgcgcctactggatgggacccggcagctcaaccagctgctcaaggctgggattaggctaggcaatcactttgagatgtcttccgcagcttaagttaaatatttcccgaggcatgaatgaacacccaaaatccaatgtgatcatctatagctacaccatgaactcaactgtttttaggaatttctagctgaacctgtgttgtttgtccgtccctatttcgaacaacaatgctgtgagggtgagctcggcaagatgtgtggtatatgttaagctttctacttttgtcctaagtttattctgtagcgtttatatcaatcttttcctcggtgcaatggcatggttctatacgctcagtttgttattc

SEQ ID NO: 4688 - DNA, 1589 bp, Oryza sativa
  ref <308>: DATABASE ACCESSION NUMBER: AK061959
  ref <309>: DATABASE ENTRY DATE: 2001-12-06
aagccggagtacaccgaccacctgacacacaagctgaagcaccaccctggacagatcgaggctgccgccatcatggagcacatcttggaaggcagctcgtacatgaagctggcgaagaagctcggcgagctcgacccgttgatgaagccgaagcaggacaggtacgcgctccgcacgtcgccgcagtggctcggcccacagatcgaggtcatccgcttcgccaccaagtcgatcgagcgcgagatcaactccgtcaacgacaacccgctgatcgatgtctcccgtggcaaggcgcttcacggtggcaacttccagggcacgcccatcggcgtgtccatggacaacacccgcctcgccctcgctgccatcggcaagctcatgttcgcgcagttctctgagctcgtgaacgacttctacaacaacgggcttccttccaacctgtccggtggacgcaaccccagcttggactatgggttcaagggcgcggagatcgccatggcgtcgtactgctccgagctccagttcttgggcaacccggtgaccaaccatgtccagagcgcggagcagcacaaccaggacgtgaactcgcttggtctcatctcctccaggaagaccgccgaggccatcgacatcctgaagctcatgtcctccacgttcttgatcgccctgtgccaagccatcgacctgcgccacctcgaggagaacatgaagaccgcggtgaagaactgcgtgatgcaggtggccaagaaatccctgagcatgaaccacatgggcggcctccacatcgctcgcttctgcgagaaggacctgctcaccgcgatcgaccgcgaggccgtgttcgcctacgccgacgacccctgcagcgccaactacccgttgatgcagaagctccgcgcggtgctcatcgagcacgcgctcgccaacggcgacgccgagcgcgtcctggagacctccatcttcgccaaggtggccgagttcgagcagcacgtccgcgccgcgctgcccaaggaggtggaggccgcccgcgccgccgtcgagaacggcaccccgctcgtccccaaccggatcaaggagtgccgctcgtacccgctctaccggttcgtgcgcgaggaggtcggcaccgagtacctcaccggcgagaagacgcggtcgcccggcgaggagctgaacaaggtgctcgtcgccatcaacgagcgcaagcacatcgacccgctgctcgaatgcctcaaggaatggaatggcgcgccactgccactctgctgaacagaaatggaatactaaaaaaaatgcaaaacaagaagacgtatagcaacacaaaactgaaagatagagagcatttcgagagtgtgaatgttttctactatgtctagatgaacatggtgatgatactattttacggttctttgtagttaacttgatgttactgttgctgtttcagcttctgcggttgccataacctgcagttccgcatggcctggcacgcagctttctgaaacttttggtgctgtaaatttgtataagttgggggactaaagtaaattattttgttttacagctgctgctcgttctctgaagaagttcttcacatc

SEQ ID NO: 4689 - DNA, 1385 bp, Oryza sativa
  ref <308>: DATABASE ACCESSION NUMBER: AK061960
  ref <309>: DATABASE ENTRY DATE: 2001-12-06
accacccaccgtagccaagcaaccctagccgctttccccatctcctcctcccagaactagaatttcgccaccccgaatcccttccatggtaggacttccgtttgattccgggtcgaatccgtcgcctccgatgccggaacggtgaggttttccctccctttatatggacaacacgcgtttgttttttctgttgcgcaggtttcagatcttggatggacttgctcatccttcggcggccatggatctatcggcggaagctgctgctgctgctcgtcctcgcgttcggcgagtcagatctggagccgatctgacctcttagaggtccggttggggcatgctccgcacgagctggcgtggatgaagcggcggggcgagggaggaggctggtcgtcgcctggatcctctccatcggggcctcgcgcgatgatgtctctttgtattgataattattcgatgaactttcgataattattagatctaagagatgttgttcgagggagccgtgtgctgagatgaaggcggcaaggtaagagaacatgtaacaagcgaggtgcttgtgtctgagggtcaaaagaaaaagagacgaaaaaaaaacgagagatgtgacatcgcaagattggcctttgccatgttgggtgcgctcgcatggcaggccaccgtaataaagatgatctttttgtgtcctggggggagttcgcacgggggttattttgtttagccccgggttctccccccaatcttgtgtcccgttgtcccctggttgtcctcagatcccactgcgactacatcgttcaacgatcgcgcgtgaatctaaacgtggagctacagcgcaacaaccaagaaattgtagcattctctcgtcgttttaaggtgacctgaagacaagttcaacctgaagtcacccgaagaaaggagtattcttgcgaatcaaacttggttgaggtggccgtctgggatcttgacatctgaagcttgacatctgaagcaagatgatgatgttttgctgtgatcacctgtgctcattacatggtgcttcaggaatgacttgtctaatgttggtaattgttggtgctcatcaattttcatggttattgttggaccgactttccggtatgctggattaagctgttgcagctttgaagtctggggtgccaaccttgtttggactaattgccagatgtatcattataaatttcttcggtgagagttgagcaccatggaggttctggataacagttccgtctctgctgcggaaggtttgttttcttgaggtcaatccggaggtaaatggctgtaatttgggtcgtgtaaacagcatggcggctacatgttataccaaaaggataagacactcgtttttattttacacgatgagttacactact

SEQ ID NO: 4690 - DNA, 1406 bp, Oryza sativa
  ref <308>: DATABASE ACCESSION NUMBER: AK061961
  ref <309>: DATABASE ENTRY DATE: 2001-12-06
agcattctatctcatcagcaatggccaccatgccgctaaccttctccccgcctcgcctcctccaccgccaccgccgccgcgaagccaagccccaacgccgctccgccacccgagtctccctcctccctcgacggggagcggcctcggcgcggcggccgctgtactgcgcccccggtggcggcggcgaagtctccgcccctccagccaccgagcagcaggagcaagcggcgaaggaggaggaggaggagtacacgctcctcgccatcaccggtagcgacttcaacgaggtcatcatgatcatcgactcgcccgccacccgctacctcctcctcgacaccaaccggaatgttcacagcgttctccccaagaccggagtctggaccaactcatattgggatgagttcgtgagcctaccagctgttgttccacgtggtcctgttgctcttctaggattgggtgctgggactgcagcacatctgatgctaaaattttatccttggttgcaacttgttggatgggagattgatcctaagataattgaactgtcaagggattattttggtttatctgatttagaaaaggcaacagaatcaggtggttcactttctgtgcgcattggtgatgcactttctccgtcagctacaattgaaggagggtttgctggtattgttgttgatttgtttgctgatgggaagatcatacctcagctacaagaagttgaaacctggttggaaatcgcgaaaaagctaatgccagatggacggatcattgttaactgtggtggagctgatgctgctgtatctcttgctaatgatacgggcctttcgtcctgggttcagaattccacaattaaggcactctgtgctgcatttccggggcagctcaactggaagagactatcagagaaagagagtgtaaattacgttgcattgacgggtcctcttccaaacttggatgagtggtctacctcagttcctagtgagatgagcacaaaagtgaaacagtgggtaccttgcgaacttgcttgaggttgagaatgaacaatttcttctagatgtaccctatttgcttcaacaacttgtgtgccccctctgttgatggctctctttctgtgtgttttaggcatatgcctctgatgcaacactgaaatgttcaaggaatagaagtgcaaggtaattgagccacactcaaattttgtttctgaagttaagtagcatagcgaagtgaagcataagttgaactcagtgaatgtgcgaatgttggaaggttgtcaagacaaacaagcagcacgaagttcagaacatactacacgacagttttgtcatctcttactgttaatattcatgcatttttgtttgaaggaaaaatccatgtcagcttcgtaaagtgacaaattggtttgtctg

SEQ ID NO: 4691 - DNA, 1490 bp, Oryza sativa
  ref <308>: DATABASE ACCESSION NUMBER: AK061962
  ref <309>: DATABASE ENTRY DATE: 2001-12-06
gtttatcttattgacaaggaattcaatgtcatggggtacacattacttcttagtttgattgagtacaagacacttgtgatgcgtggggatattgaacgtgcaaatgatattttaccatccataccaaaggcgcaatataataatgttgctcatttcttggagtcaagaggtatgctggaggaagcacttgagatagctactgatgctgattacaggtttgacctagctgtgcaacttggaaaattagaagttgcaaaggctatcgcgatggaagcgcaaagtgaatctaagtggaagcagttgggtgaactggctatgtccacaggcaagctagatatggcggaagagtgccttgtgcaagcgaaggacttaagtggcctgttgctactatattcatctcttggagatgctgagggaatcgagaagcttgcttctcaagcaaaggagcatggcaaaaacaatgttgctttcctctgtctctttatgcttggtaaattggaagattgcatacaattgctgatagacagcaatcgtatacctgaagctgcgttaatggcacgttcttatcttcccagcaaagtttctgagatagtagcaatatggagaaatgacctcagtaaagttaatccaaaagctgcagagtctctggcagatccttctgagtatccaaatttatttgaagactggcaggttgcacttactgtagaaaagaatgttgcttctcggagggtccattatcctcctgctgatgagtacttgaaccatgctgaaaagtcagacatgactcttgtggaagctttcaaaaggatgcaggtcattgaagatgaggaaacagaagatgcgctagatgaaaatggagagcccgatgaagaggttttggaagagaacaaagtggaggagagcacagatgaagctgtcgaagttgatgctgatgagcctgaagagaccgttcttgtaaatgggaaagagggtgaggaacagtggggtacgaacaatgaaggaacttcgtcagcctaaaagaattgtttggcaagtgtaaaaacccaaattttgtctgcgtgctaactgaacatgagtaaggaccaaggatgctgtgccgttttgcattggtgatgctgtgccgtttgagctttgatcttatcatatccttcaactgaactccaaactcaagacatggaagcatgcttgtccaatggtatcaatccagaccggcttcttttttgctgcaatataggtgattctttcgtcctgcaacattttcatacccactcttcacgtcctgaaatcagtgggtttgggtgcagagctggttgtaacgaagggttttcttaataatttctatagagatgtgtagtatatgccacattaccatagccatcgcatgtcttctaggagatcaaagttttcgttggccatccactgtaatttcatgttattggacaaagtttacatgtagcatatgattgtggtgttaaaagctttccgtgtat

SEQ ID NO: 4692 - DNA, 1438 bp, Oryza sativa
  ref <308>: DATABASE ACCESSION NUMBER: AK061963
  ref <309>: DATABASE ENTRY DATE: 2001-12-06
agctatacgcggtggctgtcaggggcaccgggctgagctgtatgctgctcgagtggcaaaatgtcttgctgctatggaagggcgtgaaaaagtatatgtggatgaccttaagaaagctgtagagctagttattctacctcgatcaatcctatctgataacccacaggagcagcaagaccaacaacctcctccacccccaccgccaccccctccacaagatcaagattctcaagaagatcaagatgaagacgaggaagaggaccaagaggacgatgatgaagaaaatgaacagcaggaccagcagatacctgaggagttcatttttgatgctgaaggtggtatagtagatgagaagctccttttctttgctcagcaagctcaaagacggcgagggaaagctggacgagcaaagaatctcatattctcatctgataggggacgatacataggttctatgcttcccaagggtccaataaggaggttagctgttgatgccacacttcgagcagctgcaccataccagaaactgaggagagagaaagatcgtgacaagacaagaaaggtttttgttgaaaaaactgacatgagagccaaaagaatggctcgaaaagcaggcgcactggtcatatttgttgtggatgctagcggtagcatggctctgaatcgcatgcagaatgcgaaaggtgcagcattaaagttgcttgcagaaagctacacaagcagagatcaggtttcaatcattccatttcgtggagattttgctgaggttcttcttccaccttcaagatccatagcaatggcccgcaatcgtcttgagaagctaccatgtggtggcggttctcctttagctcacggccttagcacagctgtcagagtgggtttgaatgctgaaaagagcggtgatgttggacgtatcatgattgttgcaatcaccgatggaagagctaatgtgtcactgaagaaatcgactgacccagaagccacttcagatgctccaagaccttcttctcaagaattaaaggatgagatacttgaggtggctggcaaaatatacaaggctggaatttcacttcttgttattgataccgagaacaagtttgtatccacaggatttgccaaggaaattgcaagggtcgcccaaggtaaatactattacctgccgaatgcttcagacgctgttatttccgccgccaccaagactgcactctcggacctgaagagttcgtgatcctggagagcgttttaccttcagataatgagtggtttttaccttttaccttgcttggtgcagcagtgtccatgtttcgtgtaactttgggacgtttcggctgtgataaccaattttggcataggatttttaccgtgagagttggaattcgggcgtagcaccgtgtaaagaatcatataatccctcttctgtctaaataattggccatgt

SEQ ID NO: 4693 - DNA, 1531 bp, Oryza sativa
  ref <308>: DATABASE ACCESSION NUMBER: AK104843
  ref <309>: DATABASE ENTRY DATE: 2002-08-28
atttcgctcacctgttcccctcctccgccctctccccaactcgccattttccccgtcttccacagtgacaaccaccaccccacgctttccccttcctcctcgcgatccagcagcgggagagatggatcggccgccgccggatcagcagcggcagaagcaggcgccgctcttctcgccgtaccagatgccccgcttccgcctcaaccaccgggtggtgctggcgccgatgacgcggtgcagggcgatcggcggggtgcccggcccggcgctggcggagtactacgcgcagcggaccacccagggtggcctgctcatctccgagggcaccgtcgtctcgcccgctggcccggggtttcctcatgtccctgggatatacaatcaagagcagactgatgcatggaagaaggtggtggatgctgttcatgccaagggaggcatctttttctgccagttatggcatgtaggcagagcttctcaccaagtataccagccaaacggtgctgcaccaatatcctcaactgataagccaatatcagcaagatggagaatactgatgcctgatggctcctatggcaagtatcctaaacctaggcgcctggcagcatcggaaatacctgaaattgtcgaacaatatcgtcaagccgccattaatgccattgaagcaggctttgatggcattgagatccatggtgctcatggctatatcattgatcaattcctaaaggatggaatcaatgaccgcactgacgagtatggtggctcactttccaaccgctgccggttcctacttgaggtaactagggctgtggtttctgccattggagcagaccgagtcgcggtgaggatatcaccagccattgatcaccttgacgcctatgattcagaccccattaagctcggcatggccgttgttgagcggctgaatgctctccagcagcagtcagggcggctcgcctacctccacgtcacgcagccacggtacaccgcctacgggcagaccgagtctgggcagcatggcagtgccgaggaggagagccgcctgatgcgcaccctccggggcacgtaccagggcacattcatgtgcagtggcggctacacgcgggagcttgggttggaagcagtggagagcggcgatgccgacctggtgtcgtacgggcggctcttcatatcaaacccggacctggtcgagcggttcaggctgaacgccgggctgaacaagtacgtgcgtaagacattctacacgcccgatcctgtcgtgggttacacggactatccgttcctcggacagcctaagtcgcggatgtaaatgtactgcgggataagtaaatcaaggatacgattgtgtattgtaaggaaaataaagggcaacggtgaggtgatttagcttatttttgggacctaatttgacggtaatttattctttcaccaaatctgatatgatccattgctgattcagtagctactctagcctatgtaaaccttgggtcatcagcacagattgtatctatatgtgtattgcataatgtttcat

SEQ ID NO: 4694 - DNA, 1344 bp, Oryza sativa
  ref <308>: DATABASE ACCESSION NUMBER: AK104844
  ref <309>: DATABASE ENTRY DATE: 2002-08-28
gtctaattgcgccccttatgcattagagcccccggagtcccctctgtttcgcagataagtcctttggttcccatctttttattacattcaggtcctcctagtttcttttcctttcgagtctactccttgcatccttgcgaggaagcccctcgggttggtcgaattttagtttccactccctctcctcggggagtcgttgctgttcttgttcttggtcgaggttgaggttggtggcgtagatccgatctgaggaatgtttacctatcctttcctctaacgttcgccgtactccgatgaagttgaacgtgctccgccgccgccgttcccactccttctccgtcgccttcctctactggttctacgtcttctcatgaactcatcgccttcctcccaagaacaccatctccagcctctaattgattatatcttgatttctttttcatcctcctactagtttctttcttgtgttctttggaatttttttgatctcttgaagagatccggttcttggattaagttttggacaagaaccgtactgtgaccatgtcgtcgccttcgcgccggagctccagcccggagagcaacaccagcggcggcggcggtggcgccgacgagcggaagaggaagaggatgctgtcgaacagggagtcggcgaggcgatccagggcgaggaagcagcagaggctggaggagctgatcgccgaggcggcgcgcctccaggccgagaacgcgcgcgtcgaggcgcagatcggggcctacgcgggggagctgagcaaggtcgacggcgagaacgcggtgctccgcgcccgccacggcgagctcgccgggcgcctccaggcgctcggcagcgtcctggagatcctccaggtggccggcgcgcccgtcgacatcccggagatccccgacgacccgctgctccgcccatggcagccgccgttcgcggcccagcccatcgtcgccaccgccatggccgacgccttccagttctgagccaccatggagagctcgcacgccatggccattggcatcaatggcatggttgcagctgcattacaactagtagtactagcctctgtggttgtgtctgatgatgcttattatgtttaattatggtttgcttcatgttgttttcattaatctagaccattaataagcaatgtgtgttgtaatcttgtctagtcttatgtgagatgtgttcatctccagtgctccttgctaataagggtggaagagaacaatccgatttgatgtaattcttggagagcacatgtgtgctggtttgtgatgtgatgaactgatgattgtaatattttgacattgaacctatgctataatgtttgcagc

SEQ ID NO: 4695 - DNA, 1980 bp, Oryza sativa
  ref <308>: DATABASE ACCESSION NUMBER: AK061964
  ref <309>: DATABASE ENTRY DATE: 2001-12-06
acaagattacttgccagacctgatgctgctcccctctactcagaacttgttcatcttcttgggaagcttcaagagtcacttgtcgtggatgtcaaatggctcctgcaagggcaagatgcccttctgggacgcaaatccacaaggcagcagcttgttcatattgctcaaagaaagggcctctcgacaaagactcaggtttggaaaccatggggctgggccagcttgcttagtgatgtaatagccagtaaaagtaccaagaggaaattggaagtcacttcaattgaggaaggagaagttgtggatgactctgctgatgctaaaaggcctagcaaggctaacccccataatgtggacagaagcttcgaggggattagatctattaataaatatttgactgagaaagccctttcagaattaatgttgccatgcattgatagaagctctgctgaatttcgtagtatatttgctggtgatttggtgaagcagatggggactatcagtgaacacatcaaagcaatagcaaggaatggtacgaaacaatctggtttagttccatcaggaactgaagcagcatcgaacaaatccagtagccgtaaagggattcgaggtggaagtccaaatattggacggcgagctccagttggtaatgatccaactcctccttcagcatctgctctgcgagcaacagtgtggttgcgcctccaatttatcattaggttgcttccattaatcatggcggataggagtatgagacatacacttgcttctgcaattctaggccttctttcagcacgcataatttatgaagatgcagatttgccccttcctcctaccaacactaccgttttaaggcgggacgtggattctttgctggaacctcccttagatgtccttctcgaccgccctggtgaaagtctttttgagaggctcatatgtgttttccatgcattacttggcaatggcaaaccaagttggctgaagtcaaagtcagtttctaagtcgaccactagaactccaagagatttccctgcatttgatagtgaagcagctgagggcttacagtctgtactagatcacctggagatgcctggaataatcaggcgaagaatccaagcagctatgccagttctcccaccttctcgccacccttgtatatcatgccaaccacctcagttgtctttggccgcattatcaccactccagagcggtacatctacttcaggtcctcaacagaaaggcaactctactagctgggttcctactaatgtatcgatcagaaacaaggcggcgtttgcaacccaagatcctgagatggaagtagatccatggacattgcttgaggatggcacaagttgcccctccatgtcatctggaagtaacagttccagtggcatggctggcgatcatggtaatttgaaagcttgtagctggctcaagggtgcagtgagagtgaggaggacagaactaacctatattgggtccctggatgatgatagctgatcatgcttgtacgctatcactgctgacgttgcacaaattcaagatggggattgaggaaaatttttcggttttggaccaggttgggcttgagtggtatacatgccgccaccatgataaactccactattgaagtgagttttgtgttgaaattgtggccttgtgggggcggccttgatgtagaatatcttacaccctggggtattgttgttactagggcctgcgggagcgaccttgtacataatgtaacattaatccatttgtcaagcaagctgtccctgaaagaagttgccccagggccctgtttgtagcttatattcaaagttaggaagatatgcatgcatgcagtagctgatgagtcgaaaggaatgtattggtttttgttttgctcgatatgtaacctagtgtgagttagcccctgctcaaaaccgagggttgatattatacaacattatgtatatcatatggtggctggcctcagtg

SEQ ID NO: 4696 - DNA, 1019 bp, Oryza sativa
  ref <308>: DATABASE ACCESSION NUMBER: AK061965
  ref <309>: DATABASE ENTRY DATE: 2001-12-06
aatagttctgttgacaatgatttgattttcagggcttcctcattgctcaatataatcaaactaattacttttacaacaagtggtggtgcatatctcaacttcattggaaatgaatttgcacatccaaagagaattgagtttcctatgtcaagcaatgactattccttctgcctagctaatcggcaatgggaactgctggacaagggtgtccataaacatatattcaactttgacaaggatatcatgagcttagatggcaaagagaggctaatttctgggggttcacccattgttcatcactgtgatgacactagcatgatcatatattttactagaggacctttcctttttgttttcaatttcaatcctgacgcctcctatcagctctattctgttggtgtggatgaagctggtgaatatcagcttatattgaacacagatgaaactaaatatggtggacgtggggagctgacgagcaatcaatatatgaaaagaaccagtgacaatagggttggtggttgccgcaactccttggaattgacattaccatctaggagtgctcaggtattcaagttggtccgaattttgagaatttagattctcaaggatgagcattgttgatagaccaagcaattcgggtcctcagaagacggaacttctctgttaatctgaactcttgcaaacttaaagattcgcatggcaaaaactgaggggaaaagaacaccaccgtagtgagaggatccttcaggtatgaatgtccatgcagatgcagattgttgggttgatgttcgacgtctctgatttgaccttctgttgtggtacaatatgaagtattgcagtatttatttagacctcaaattgcctgttctgctcactcgtgtaccttgattccatgcctagtgtgggcgtggcaccgtggctagtttaatcaaggatgctatagagtatatagactcatagctccacagtgaaacgctcataaggagtgctattgaaactaataaggctttgtttgttcc

SEQ ID NO: 4697 - DNA, 1300 bp, Oryza sativa
  ref <308>: DATABASE ACCESSION NUMBER: AK061966
  ref <309>: DATABASE ENTRY DATE: 2001-12-06
aaaagaaggaaaaggaaataatcagagaggtcctttcaaatgctgatgttgtcctatcaactaatattggggcagctgacccacttgtgaggaggattggttgctttgacttagtaattattgatgaagcaggacaagcaatcgaaccctcatgctggatccctatcttacaaggaaaaagatgcattcttgctggtgatcaacggcagcttgcacctgttgttttatcaagagaggctatgcaaggtggactagcaatgtctttactcgaaagagcttcatcgttgcataatgaactactgacaacgaaattaacaacacaatacagaatgcatgattcaattgccagttgggcatctaacgagatgtatgatggttttctcaaatcctccccatccgttgcttctcatcttcttgctgattacccatttatcaaggaaacttggataactcggtgtgcctttcttttacttgacactcgtatgccgtacggaagtttgaatattgactgtgaggagcatttagaccctgctggtacaggatctttttataacaatggcgaggcagatgtagtttcacagcatgttttgaaccttgtacaatgtggtgtctctccaaccgcgattgccgtccagtcaccttacattgcgcaagtacaactattaagagacaggctagaagattatccagaggcttctggtgttgaggtttcaactatagatagcttccaagggagggaggcagatgccgtggtcatatcaatggttcgttcaaacactttgggagctgtaggattccttggcgacaacaggcgcatgaatgtggccatcacaagggcacgccgtcatgtcgcacttgtctgtgatagttctacaatctgcaacaatgcttttctggctaggctccttcgccatatccgtcagcacggccaggttagacatgttgaacctggttcctttggcggggattctggtcttggctacactccacctgccttgccctcaatcagttagtttttcgattgcaacttgtcggtgttgtttctgcgtgtatatataaccacgatttctactgctaaaattgagaggtcgatctatcatggccctaaatataagtctggcagatgggaaaatataacgtcaattgattggcagacttgcattgctgatctaaccaggttgtcaaccatgcattttcaatcccgaaacaaaaacatcagtttcgtgtcctgtaatatgctgctgcttgttgctggatgatgggttccttgtgaatgtgaatgtttgtaatttgtatattc

SEQ ID NO: 4698 - DNA, 1513 bp, Oryza sativa
  ref <308>: DATABASE ACCESSION NUMBER: AK061967
  ref <309>: DATABASE ENTRY DATE: 2001-12-06
tctatcactccttttggaaccgtacgaccaaaccatctctggatcttgcaaaggaactgcttagcatgttcactgcaagggaaatgggaaaagtgttcttcacaaatagtggttcagaagcaaatgattctcaggtaaaactggtctggtattataacaatgcactgggaaggccagacaagaagaaatttattgcacgatcaaaatcataccatggatcaacactaatatcagctagtctatccggtcttcctgcactgcatcagaagtttgatctgcctgcaccttttgttctgcacacggactgccctcactactggcgcttccatcttcctggtgaaacagaagaagaatttgcaactagacttgccaataatttagaggaacttatcctcaaagaagggccagaaacaattgctgcattcattgcagagcctgtgatgggtgctggtggtgtcatacctcctccaaagacctattttgaaaaggtccaagcgatcgttaagaagtatgacatccttttcatagcagatgaggtcattactgcatttggaaggttgggaaccatgtttggaagtgatatgtataacatcaagccagatctagtctccatggccaaggcgctttcatctgcctatgtgcccattggagcaattatggttagcccagaaatatcagatgttattcattctcagagcaataagctcggttcatttgctcatggatttacatactctggccatccagttgcatgtgctgtcgccatagaagccctgaaaatttatcaggaaaggaacattcctgatcatgtgaagcaaatttctccaaggttccaggagggagtcaaggcctttgcaggaagtccgattgttggagagatacgtggtgtagggttgatacttggaactgaattcgcagacaacaaatcgccaaatgatccattccctgctgaatggggcgtcggcgcgatctttggagcggagtgccagaagcgcggcatgctggttagagttgctggagacaacatcatgatgtcaccaccattgataatgacccctgatgaagtcgaggagctggtgagcatctatggagatgcactcaaggccaccgaggagagggtggctgagctgaaatccaagaagaacaattagaccgagttgacaactcctcatcttgcaactgcacgagacgacgatgacgatgataatgctggcagcgatgatgatgatggtgatggtgttcttggtggatgtacagagtaataatccctcgtctgtcagaaaactctactcagagaacagtaataacgctgttcttagcgtgcaaaaaataatcaaaacagcgatcatgcattcacccagaaccggtgaatcttcaccagatttcagtcttacgcacgggattagctgccgtggtgaactggtggtgactgtcatcttgtagaccaaatcaggttggaataaatcaaatttacatgaagtcgcatgaactgcactgtttctttgagaatatc

SEQ ID NO: 4699 - DNA, 1828 bp, Oryza sativa
  ref <308>: DATABASE ACCESSION NUMBER: AK061968
  ref <309>: DATABASE ENTRY DATE: 2001-12-06
gcgctcactcctccaccgccaggtcgagctcaaacgagagagatcttttccgaatccgaggaggagaagccacagaaacgatgacctcgctgtcgtcctccgccgccgcggcgcgcgccaccttcgtcatgccgtcgtcggttcgtgggggcatgagccgcggcaggaggatggcgaggctggtgacgcgcgcggcggcgtcgagcccgaagctcccgagcgggcggcggctgcgggtggcggtggtcggaggcggacccgcgggcggcgcggcggcggaggcgctggccaagggcggcgtggagacggtgctcatcgaacggaagctggacaactgcaagccctgcggcggggccatcccgctgtgcatggtgtcggagttcgacctgccgctggacctcgtcgacaggaaggtgaggaagatgaagatgatttcgccgtccaacgtcgccgtcgacatcggcggcacgctcgcgccgcacgagtacatcggcatggtccgccgcgaggtgctcgacgcctacctccgctcccgcgccgagggggccggcgccgaggtcgtcaatggtctcttcctgaggtatgaggcgcccaaggaacccaacgggtcgtacgtggtgcactacaaccactacgacagctccaacggcaaggccggcggcgagaagcggacgttcgaggtggacgcgatcgtgggcgcggacggcgccaactcccgcgtcgccaaggacatgggcgccggcgactacgagtacgccatcgcgttccaggagcgcgtcaagatccccgacgacaagatgaagtactacgaggagcgcgccgagatgtacgtcggcgacgacgtctcgccggacttctacggctgggtgttccccaagtgcgaccacgtcgccgtcggcaccggcaccgtcacccacaagcccgacatcaagaagttccaggccgccacccgccttcgcgccaaggaccggatcgagggcggcaagatcatccgcgtcgaggctcaccccatccccgagcacccgaggcctaagagggtggcggggagggtgacgctggtgggggacgcggcggggtacgtgacaaagtgctccggcgaggggatctacttcgcggcgaagagcgggcggatgtgcgcggaggcgatcgtggccgggtcggcgaacgggacgcggatggtggaggagagcgacctgcgcaggtacctggccgagttcgaccgcctctactggccgacgtacaaggtgctcgacgtgctccagaaggtgttctaccgctccaacgccgcccgcgaggcgttcgtcgagatgtgcgccgacgactacgtccagaggatgaccttcgacagctacctctacaagcgcgtcgtgccgggcaacccgctcgacgacatcaagctcgccgtcaacaccatcggcagcctcgtccgcgccaccgccctccgccgcgagatggagaaggtcaccttgtgagcctgagctgccatgaccacgaccgcgatcgaacactttgcttcattttcttgaggcattagaaactgcaatttgcggtggatcagtgtgcatgtatagtacagattcgcggctgatcaaacagatttgaacaagcgtaagtagagatggataagagagagaggctgtgtaccgatcgaccctgtccgattttcttgtacaacacaaggtgatgttcagacttgggggcagtttggttggattactgaagcacaccaatcttcggtgtgaactcaatgtactactatataagctccatgtttctgcatggttcatgtttcctgacgaatggtgaatgacatgaaatggtttacttt

SEQ ID NO: 4700 - DNA, 1466 bp, Oryza sativa
  ref <308>: DATABASE ACCESSION NUMBER: AK104845
  ref <309>: DATABASE ENTRY DATE: 2002-08-28
gaaccaaacctatccaaaatccccatctcgccaccatctgcaaactcgccgccggccaccccgccgtcgacgaaccccacccaaacctcgccggggaaccagtccaagctccgtccaaccatgcggaagaacttccgcaagcggaacctcgaggcggacgccgccgccgaccactccgacgacgacgacgcccgccgcgtcgccctggaggagatcaagtacatgcagaagctccgggagaggaagctgggcatccccgccgccgccgccgcagcgggcgcgtcgtcagcggcttctgccgacggggcctccccccgcggaagaggcggcggcggaggtgggttagcggccggaggggatgccgagaaggaggacctcgtcctccaggacaccttcgcgcaggagaccgccgtcaccatcgaggatcccaacatgctgaggtatgtggagaacgagctgttgaagaagaggggcaagaaggttgatgtgaaggacaaggaggagaaagaccaggtcgatgagctctacactgtgccagaccacctcaaggttaggaagaagaactcggaagagagctcaacgcagtggaccactggcattgctgaagttcagctgcctattgagtacaaattaagaaacattgaagagaccgaggcagctaaaaagatgctacaagagaaaaggcttgccggtaaaacaaaatcagatgctaacattccgtcgagctataatgctgactttttccatcgcggaaaagattacaccgaaaagttgagaagagagcatcctgaactgtacaaagatcaaggttcacaggctaatggaactggaggtaaatcaatgggtggtaaccatccagatggtgctggtgcagggcggagagaagctgctactgatgagttgttgcttgagcgtttccgcaagcgtgaaaaattccgtgtcatgcgcagataacatgaaatggaataggatgctaacttatgctatttcctttaaagggcaagcgtgtcagtgtgaccacatgatggccctctatacatcggttgattttggcttttgcttctaaagccagtgtccatggctcatcatgttataggcgtatcttcgaagcatttgggaaaattggacaggtcttcatgaaactgatcaatattgttctgtactgagcagcaatccaggatctcgtttctctcttttctttaaaactgctggttcaaccatggataaattgccaatgatctcagatatgcctttccatcccgatcctgaggcttaccttccatgcttatcatttctgctgcttacacaaccaccttgcggcttgcaccttattactgaaaatttcctggatataagcaagcactggcaatgtaccttatgttatattttcatcagaaacactcagctttgttgatgttgcccttctgaaacaaggaaaagctgtcagtaaagaagttgttaatttc

SEQ ID NO: 4701 - DNA, 1690 bp, Oryza sativa
  ref <308>: DATABASE ACCESSION NUMBER: AK104846
  ref <309>: DATABASE ENTRY DATE: 2002-08-28
tcttcttcctctcccgcaagcaaagcgcacgccgcctttgccttagatctcctcgactccgccgccgccgccggcgcctccccacggtccctccctcgccatggagggtaacagtaccaacctcgatgcggcgatagagtcgctcctcaacgtggagaagcagatgaggctggccggcgatgtcgccggcacgaggaaggccgccatcgacatcgtcgagctctgctacaaggccggcgcctggaagacgctcaacgatcagatcgtggtcctctccaagaggaggggccagcttaagcaggctatcactgccatggttcagaaagcaatggagtacattgacttaacgccagacatggacacacgtattgagctaatcaagacgttgagcagtgtatctgctggaaaaatatatgtggagatagagagagcaagattgatcaaaagacttgcaaaaatcaaagaggagcagggacagattgatgaggctgctgatttaatgcaagaagttgctgttgaaacatttggctccatggcaaagacagaaaagattgcattcattctagagcaggtccggctgtgcttggatcgtcaagattatgtacgcgcacagattttatccaggaaaatcagtcctagggtatttgatgcagacccgtcaaaggaaaaaaagaaaccgaaagaaggtgataatattgttcaggaagccccagcagagataccttccctcctggaactgaagcgcatctactatgaactgatgattcgctattactcgcacaacaatgattacctggaaatctgccgttgctacaagtcgatttatgaaattccatcaataaaagaggatccatcaaagtggataccggttcttagaaagatctgttggtatttggtgttggcgcctcatgatccgatgcaatcaagccttctcaatgccacactcgaagacaaaaatctctccgagataccaaatttccggttactgctgaagcaacttgtaaccatggaggtgattcagtggacaagcttgtgggaattctttaaagatgaatatgcgaatgagaagaattttctcggaggagctttgggtgacaaagctgcagaggatctgaaattgaggatcattgaacataatatcttggttgtctcgaagtactattcaaggattaccctgaagaggctcgcagatcttctttgcttgagcttgcaggaggcagagaaacacctttcggacacggtaaactcaaagtcgctgattgcgaagattgacaggccaatgggtgttgtatgcttccgcacagcacaagacagtaatggtatactcaattcctgggcggcgaacctcgagaaactcctcgatcttgttgagaagagctgtcaccaaatacacaaggagacgatgatccataaggcggtgttgaaagcttaatctgtaaaccattttgcattggctggcttgcttaggttctctgcctggccttctatggtcaaattttacaatcacaggacgtcaagcttttctcagctcaagcatcacctgtttgctttgggaactcgtgcgtgaatgatcttaaatactgtgaccacagaatgatgacatattatttgttgttggggttcaatcgctgtcctccaatttgcttaacatgtgtatcttcccgaatattatttgaattctagattattc

SEQ ID NO: 4702 - DNA, 968 bp, Oryza sativa
  ref <308>: DATABASE ACCESSION NUMBER: AK061969
  ref <309>: DATABASE ENTRY DATE: 2001-12-06
gcgagatccaaaatccgaccagccagcgttagctcggagaggcgaggcgagaatgtcggccgcggcgggcgggtacagggcggaggacgactacgactacctgttcaaggtggtgctcatcggcgactccggcgtcggcaagtccaacctcctctcccgcttcaccaagaacgagttcagcctcgagtccaagtccaccatcggcgtcgagttcgccacccgcagcctccaggtcgacggcaaggtcatcaaggcccagatttgggacaccgccggccaggagaggtatcgtgctatcactagtgcctattaccggggagctgtgggagcattgctcgtctacgatgtcacccgtcgtgctacattcgacaacgtgggacgctggctaagggagcttagagaccacactgatcctagcattgtctgcatgctgattggcaacaaatccgatctccgccacttggtggctgtctcaaccgaggacggcaaagagtttgctgaagccgaatcaatgtacttcatggaaacttctgcgctcgacgctaccaacgtcgacaatgcgttcgcggaggtcctgactcagatataccagattgtgaacaagaagccggtggaggcacctgaggatgggtcggctggcccaggaaaaggagagaagataaacgtgaaagatgatgtctcggcgatgaagagagttggatgttgctcaaactaaagacaagagggacacaatttattcatttttccaagtagggatgctcagggtatactgtaatagatctattcaattgtctcatttctggtgttgttattgagggttagggtgatccaactatcattcaaactatcagttcttgatttgctctttgtatcaaactgatcatggtgttgttatctatcactgcaatgcaagtattatgttgacagaagaagcatatatccattgtttgagagtgtctgctctgatt

SEQ ID NO: 4703 - DNA, 976 bp, Oryza sativa
  ref <308>: DATABASE ACCESSION NUMBER: AK061970
  ref <309>: DATABASE ENTRY DATE: 2001-12-06
gacctctctctccccatctatctcctctccctctccgcccatttctcctctccacctgcgatccatccgcgcccgcgaggaggagggagccggacgccgccgcggggagagcaggggagagaaggagaggaggagattgccgtcgccgtcgccgtcgccgtcgccgatctcgagcgggagcggagatggggctcacgttcacgaagctgttcagccgcctcttcgccaagaaggagatgaggatcctcatggtcggtctcgatgcggccggtaaaaccaccatcctctacaagctcaagctcggcgagatcgtcaccactatccccaccatcggttttaatgtcgaaactgttgagtacaagaacattagcttcaccgtttgggatgttggtggtcaggacaagatcaggcccctgtggaggcactatttccagaacacccagggcctcatttttgttgtggacagcaatgacagagagcgtgttgttgaggccagggatgagctccaccgtatgctgaatgaggatgagctacgtgatgctgtgctgctggtgtttgcaaacaaacaagatcttcctaatgccatgaacgctgctgagatcaccgacaagcttggtctgcactccttgcgccagcggcactggtacatccagagcacatgtgctacctctggtgaggggttgtatgaggggcttgactggctttccaacaacattgccaacaaggcttgaagcatcttggccgggcttaaatgaaaggaagacatggcggatatccctgggtgaacgctgcctttttacgtatcgaaactatatagtcatgacagataatgatgtggatgttttgggaagataaagctctttaggttccaccaccaaaggagctagctatcagattgtttttcgtggggtgttaaaaaatcgtgcgtgtttcagtttggtttttaatcgaaaggcttacggtgcctgacttttgt

SEQ ID NO: 4704 - DNA, 523 bp, Oryza sativa
  ref <308>: DATABASE ACCESSION NUMBER: AK061971
  ref <309>: DATABASE ENTRY DATE: 2001-12-06
gttgcggacatctcgacagttctgcaaccaggagatacgctcaaggttatgattctaagccatgaccgtgaaagaggccgtgttagtctttctactaaaaagcttgagccgacacctggtgacatgattcgcaatccaaagcttgtttttgagaaggctgatgagatggctcagatattcaggcagaggatagctcaagcagaggcaatggctcgtgctgatatgttaagattccagcctgagagtggattaactctcagttcagagggcatcttagggccattatcatcagacacaccttctgagggctcgggagaagggcaaaccacagatgaatagcttcaataggaagattacgtctgagtagaaagctgtgatggtagctcatcaactcattttcccacgatctaaaaggcatgaagaagacctattgtattccaaccatttcccatcttcgatctgtgcttgtatcaatcaatgtgtatgaaagtaaagttactgaaagaaatggatgttgcttccc

SEQ ID NO: 4705 - DNA, 1853 bp, Oryza sativa
  ref <308>: DATABASE ACCESSION NUMBER: AK061972
  ref <309>: DATABASE ENTRY DATE: 2001-12-06
ctttggtgagcaatgtgttgccggagatattgttcaaactggtgtttaccgtttcatggttggaccacatacacctggaaaagtggatttttatttgactttggatgggaaaacgccaatcagtgagatttgcagtttcacgtatcatgttatgcatggtagttccttggaggctaggctgccgccatctgaggatgattacaaaaggacaaatcttaagatgcagatgagactagctcgcttgttgtttgccacaaacaagaaaaagatagcaccaaagttgcttgtagaaggcaccaaagttgccaatctcatgtcagcattaccagagaaggaatggatggacttgtggaatattcttagtgacccagaaggcacatatgttcctgttactgaaagcttgcttgaactagtgttgcgaaataggttgcaagagtggcttgttgaaatggtaatggaaggtcataagtctactggtcgcgatgatctaggacaaggagctatccatctgtgttctttcctaggttatacttgggctattcgattgttttctttgtcggggttctccttggatttccgtgattcttctggttggactgctttacactgggctgcataccacgggagggaaaggatggttgccactcttttatctgctggagcaaatccaagtttagttacagaccctactcccgaatcccctgctggactcactgctgctgatcttgcagcaagacaaggttacgtggcttggcagcatatcttgctgagaaaggattgactgcacattttgaggccatgtcactgtccaaggatactgagcaatcaccatcaaagactaggctaacaaaactacaaagcgagaggtttgagcaccttagtgaacaagaactttgcttaaaagaatctctagcagcctatcgcaatgctgctgatgctgccagtaatatccaagctgcactcagggagagaactcttaagcttcaaacaaaagcaattcaattggctaatcctgagattgaagcatctgagatagttgctgctatgaagattcaacatgcatttcagaactacaacagaaagaaagcaatgagagctgctgcacgaatacagagtcatttccgtacatggaagatgaggaggaacttcattaacatgcgaagacaagttatcaggatacaagctgcgtaccgaggtcatcaagtgagaaggcagtaccgcaaggtaatatggtctgttggaattgttgagaaagcaattttgcgatggagaaagaagagaaaaggccttcgtgggatcgcatctggaatgccagtagttatgactgtggatgccgaagcagaaccagcaagtactgcagaagaagacttcttccaggccggccggcaacaagccgaggacaggttcaatagatctgtggttcgcgttcaagccctgttccgttcttacaaggcacaacaggagtaccggaggatgaagattgctcatgaggaggccaagattgagttcagtgaagggcagctaggagcagcatgcaggagttgaaatggtttttagggacagctagtttctctaattcttgtcttgtacattattggaaatgctagaacaacctgcagtttgccgacgctgtacattttaggaccatctgaatgatctgatacagcttttgctgaccccttatggctgatgaatttgatgttagccctgtagtaactgtggtggtttgcgtttggctggctttaagctggacataaacagcgtgtgcttcaatgtacatgtagatgcaatgcaagtacatatcatgttgtaaatgctaataagattagcaataatcagcaaagccctgagcc

SEQ ID NO: 4706 - DNA, 1946 bp, Oryza sativa
  ref <308>: DATABASE ACCESSION NUMBER: AK104847
  ref <309>: DATABASE ENTRY DATE: 2002-08-28
aatatatcggcggcgatcccggctcgaggagaggaggctccgccgcgattttttcggtgtcgcatcgaaattatgattttcgatgcattttaggctaaaagtgctcgggtctgaaacctacgtgcttttcttgtcgccgaagatggtgtcagcaaatatacatcgacgcacatgaacagcgatgatgcgttgctgaatccgtctgaagctgcaataagcatgacggttttgcaaattatgatactaaaccattcatgctgctacgccctcgtctggaactttcttcttctgatgcaaccgtgcacaagcaaacctagcctcgaagcgattgtgatgagttttagaggtggtgcgggttcgatcacgtggagttctattggtgttcagtgactcttggcaaaagttctcttgtaaaatcgacgacgatggaaaggtacaaagtgataagggagataggcgatggcacctgtgggaatgtttttagggcttataacactgaaacaaatgaaattgttgcagttaaaaaaatgaagaggaagtttttccaatgggaagagtgcattagtctgcgagaggtgaaggcacttcaaaaactgaatcatcccaacattgtgaagttaaaggaggtgactatggaaaatcacgagttgttcttcatttttgaaaacatggaatgcaatttgtatgatgtcataagagaaaggcaagctgctttctcagaagaggagatacggaactttatggtgcagatactgcaaggtcttgcatatatgcataacaacggttatttccatcgtgacctgaaacctgaaaatctgttggtgacagatggcactgttaaaattgctgactttgggttggcaagagaagtatcttccagtcctccttatactgactatgtttccaccagatggtatcgagctccagaggtgctgctacaatcgtcagcttacacacctgctattgatatgtgggctgttggtgcaattttggctgagcttttcacactgtctccacttttccctggtggaagcgagactgatcagctatacaaaatatgtgctgtgcttgggacaccggatcatactgtctggccagagggaatgaacctgcctcgttcaagcagctttaattttttccagatcccaccaagaaatctatgggagcttattcctaatgctactttggaagctatcgacttgattcagcaactttgttcctgggatccacgaagaaggccaactgctgagcaatcactacagcatccgttctttaatgtgggcaactgggtaccaaggccactccatgcctctcacacaaagacaattgaaactagaccgaatccaaggttggaactgaacctgtgggattttggtacagaacctgaggacaactaccttgatttaactctgagtctaaagccaagttttcctggaacagatttttctaacaatgttccagagcatacaaaagaggaaattctgctgtacccaggatttgaaaatcctcctgtgcagtcagggttttggcctctcgttgcatcagaccggccaatgggcgatgttccagccatgtcatcctggccacaggcatatgtggttgacggccaagccacacttccagctgttggattctctggttctccattcggtttgtcccccttacaaccaaatctgtttgagaaccgttcgttcgcaacacccatccggcaggtcaatttcttctgaggggatacaattaacagattgagcactgaaactatttttcagtccatacattcaacttgttcctttatacattgaactcaaataaacgggggcggcagatgaaatgtatataatcgtagcttgtttcctttttcttttctccccatctaaattcccctcacggagtaccctataatgtcagattctatatttatctagattgtgaatatgtgactttcc

SEQ ID NO: 4707 - DNA, 1832 bp, Oryza sativa
  ref <308>: DATABASE ACCESSION NUMBER: AK104848
  ref <309>: DATABASE ENTRY DATE: 2002-08-28
tgccctccctccatctctttcccttcctccgtcgccgccgctacccttctctctctcttctgtgttccggcggcggcaaggccgacctgctcccccgccgcctctcctcctcctcctcctcgcgcgcgcgccgccggcgaacggccgccgtatacttacccgcggtgcggacgggctcctcttatctcctcccccgaccgcatcctaccccctctctctcccttgtgagccctcctcggcgcgcacggcccccgccgccggcgagcaggctcggaaccagggggggtgggggactcgacgcgacgagccctcgttccatcggcctctgtctcggttgagtcgaattgaagtataatggcataccatggacagctggatggacgccaagcttcaggtttgatgcgtgatggcgccttccctgcagccagcctttctggccgccaacctttggatcgcgctgccaccgctctggagatcttggaaaagaaacttgctgagcagaccgccgaggcagaaaagcttatcagagagaatcagcgattggcatctagccatgtcgtcttgaggcaggatattgttgatactgagaaagaaatgcaaatgatccgtgctcacctaggtgatgttcagacagagactgatatgcatatgagagatttgatggagagaatgagattgatggaagcagatatacaagctggtgatgcagtgaagaaggaacttcatcaagtgcatatggaggcaaagagacttattgctgagaggcagatgctcactgttgagatggataaagtaactaaagagctacataagttctctggtgacagtaagaaacttcctgaattactgactgagctagatgggctccgaaaagagcatcagagtctaagatctgcttttgaatatgagaaaaacacaaacatcaagcaagttgagcagatgcggacgatggagatgaatttaatgactatgaccaaagaggctgacaagttgcgtgctgatgtggcaaatgctgaaaaacgagctcaagtggcagcggctcaagcagtagcagcacaggcgggggtggcacatgtgactgcttcacaaccaggggcagcacaagctgtggcagtgccagctgcctcaaacccatattcaagtgcatttaccggtcatccctctgcatatcaccaaggagccacccaagctggggtttatcagcaagggaccacccaagctggggcatatcagcaaggatctacccaagctggggcatatgcttacccaacttatgatgccgctactgcttaccagatgcatgctgcgcaagcaaatgcatacgcgggctatcctggttatccagttgcagggtacacacaggccgctttgcccggttatcctagtgcgtatgctgcaccgcagcaaccaataagcagtggtgtagctacagatgttgcaagcatgtatggcgcgatcagtagtgctggatatcctgctggagttgttcagtcaagcagtggagctgccaatgcaggacaagcaccagctattatcctgtcgcatacgacccaaccagagcaggccagaggtgaaatcgtagtttcagtctcagacccaaatcactatttgctaaacccattttgtggtgtagctgtagtaagatccttggagaggccaacaacagcatggctctagttcgtttttcttgtagattccttccctatacattttagcggtcaatgaaaattagttgtatatcgaattgctgctcttggttcgatacttgaatttaattagttgtataccgaatagatcacggtcaacttgaatctctgtaattcccggttaag

SEQ ID NO: 4708 - DNA, 1420 bp, Oryza sativa
  ref <308>: DATABASE ACCESSION NUMBER: AK061973
  ref <309>: DATABASE ENTRY DATE: 2001-12-06
tcacaaacctaaagtctcatgactgtcacgtgttgatgacacaactgctaccagttgtaataaggggtatccttccagacaatgtccgggcaacaataacaaagctatgtgcattcatgaacgcaatttcgcagaaggtcatctatccggatagattagaagcccttcagaatgaagtggtgcaatgtctcgtcagttttgagttgatatttccaccttcatttttcaatataatgacgcatctgctttgtcaccttgtgaaagagatccgtattctcgggcctatgtacctacacaacatgtttcctttcgagaggtacatgggcgttctgaagaagtatgttcgtaaccgtgctcgtccagagggaagcatcgccaagggttatggaacagaggaggtcatcgaattttgcgtagaatttatcgaagaccttcgcccaatcggggtacctgaatcacgccatgaagggagactacggggaaagggaactctcggaaggaaagcaataacgacggtagacaacaattcattccgtaaagcccatttcactgttctgcaacactcttcattggtagctccttacatcgaggagcacttggctctagttcgcgccaggaacatcggtaagtccgatgcatggattacacggcatcacattgatactttccccgcgtggctacgacaacatctcatgggtaacgagtcgatcaaccaacaacttgccttcctggcgaggggatcgtctgggtcgatcgcgacattccagggatatgagatcaatgggtacacattctacacgagagcccaagacatgaagagcacgaaccaaaacaacgctgttcgtgtcgatgccatgggacacgatggaacaactgccacgtattacggtgccatcgaggacatatgggaacttgactatggccctctcaaggttcctctgttccggtgccaatgggttaggttgactggtggaggcgtaatgattgatgacagtgggatgacaactgttgaccttaacaaggttggatactcggacgaaccttttgtccttgccaatgatgtaacgcaagtctttttcgtgaaggacatgtctagcaaaggaaagaagggcagagggcctgatgagcctaagcgtcaagtggttctcccaggcaaaagaaaaatcgtcggagttgaggacaagactgacgaggattacgatcagttggatgggcaaccccctttcacggtgacgattgaccctagcatcctcctatcaaatgaagacaccccttactcacgcagcgatcacaaggagggaacaatagtgaggagaaagtacgtgccgtaattattgtgtacacgatgtaaactattttggatgtattgattatccatataaatcaattgatgtatggcatatgttaattacgcacgatt

SEQ ID NO: 4709 - DNA, 1865 bp, Oryza sativa
  ref <308>: DATABASE ACCESSION NUMBER: AK061974
  ref <309>: DATABASE ENTRY DATE: 2001-12-06
atccctcttctttgtctgatcgatcgattgcttctccctcctctcgctactagactagagagtaggtagagctagctttctagctcgtggatcgttaagtttgtagtcctgcccgggcgccggcggtgaggtcgcgatggccggcggcgcggtggtgagcacgggggcaggcaaggactaccctggcaagctcaccctcttcgtcttcttcacatgcgtcgtcgccgccaccggtggtctcatcttcggatatgacatcggtatatcaggtggtgtgacgtccatggacccgttcctgaggaagttcttcccggaggtgtatcggaagaagcagatggcggacaagaacaaccagcactgcaagtacgacaaccagctgctgcagaccttcacctcgtcgctctacctcgccgccctcgtctcctccttcttcgccgccaccgtcacccgcgtcctcggccgcaagtggtccatgttcgccggcggcctcaccttcctcatcggcgccgccctcaacggcgccgccgagaacgtcgccatgctcatcgtcggtcgtatcctcctcggtgtcggcgtcggcttcgccaatcagtcggtgccggtgtacttgtcggagatggcgccggctcggctgcgggggatgctgaacatcgggttccagctgatgatcaccatcggcatcctggcggcggagctgataaactacgggacggcgaagatcaaggccgggtggggatggcgggtgagcctggcgctggccgccgtccccgccgccatcatcaccctcggctccctcttcctcccggacacccccaactcgctcatcgacaggggccacccggaggcggcggagcgcatgctccggcgcatccgcggctccgacgtggacgtgtcggaggagtacgcggacctggtggcggcgagcgaggagtcgaagctggtgcagcacccgtggcgcaacatcctccgccgcaagtaccgcgcccagctcaccatggccatctgcatccccttcttccagcagctcaccgggatcaacgtcatcatgttctacgcccccgtgctgttcgacaccctgggcttcaagagcgacgcgtcgctcatgtccgccgtcatcacgggcctcgtcaacgtcttcgccacgctggtgtccatcttcaccgtggaccgcctcggccgccgcaagctgttcctgcagggcggggcgcagatggtggtgtgccaggtggtggtggggacgctgatcgccgtcaagttcgggacgagcggcatcggcgacatccccaaggggtacgcggcggtggtggtgctcttcatctgcatgtacgtggcagggttcgcgtggtcgtggggcccactggggtggctcgtccccagcgagatcttcccgctggagatccggccggcggggcagagcatcaacgtgtcggtgaacatgctcttcaccttcgtcatcgcgcaggccttcctcaccatgctctgccacatgaagttcggcctcttctacttcttcgccggatgggtcgtcatcatgaccgtcttcatcgccctcttcctccccgagaccaagaacgtccccatcgaggagatggtgctcgtctggaagtcccactggttctggcgccgattcatcggagaccacgacgtccacgtcggcgccaaccacgtctccaacaataagctccaaccataatccgctcacgaatatcgtcgtccatgtctccgtcacgccctatattcttcttcttgtgttcatccccgtgtacagtagatgccttttattagtttgttttgttttgcctagtcagtcttcaatcttaatgtacgtgtgtttcttgtttggccaaattgatcttaattgctgt

SEQ ID NO: 4710 - DNA, 1063 bp, Oryza sativa
  ref <308>: DATABASE ACCESSION NUMBER: AK104849
  ref <309>: DATABASE ENTRY DATE: 2002-08-28
tcattctttgtctaatgctcatgatggtccccacatacattatcagcaaacacttgttgcacgcgagtctcagcgtgttcctcttgacatagagcctcgtcttgtgccgcatgccctagagcctcgtcatggcccttctatcccagagattcagcatgttccacatgcatactaccgccatttggctccatctgatgttccatattatcgttctcaagtggatccactgcctgatcgtgttgctgccagaactgtggctgatccatttctttcaagagattatacagcagtcccagccacaagatctgatggtgctgcccgtgttgaggaactcaggcggataggggatattgcttcacttggtgctcgggtggaggagctctaccgtccaggagagcttgctgctcgcggttctcgtgtggaggagctctaccgtccaggagagattgttgctcgtggttctcgtgtggaggagctctatcgtccacgagaggttgctgctcacagtgctcgcatggaggatctgtatcgtccaggagaaattcctatccgtggtgctcgtgtggaggatctgtaccgtcctggagaaatttctgctcgtgctgttcgtgtagaggatctttaccgttctgaccaacgcatcactcatgctgtggacctccctctccacgcaccctatccaacagctcattatgaggtccccaatcccgcatattctgatatcagtcaaaggtatgcctctacaaggcttaatgcacctggtgcatcggtttcgtctctctattcctttcctggcgcgccagcgtatcgatgattggtactctgaatttaccatgtttttaccctgagccggttatactgctagatgcatcggtgccatttagaagttgtccaaaccttaggaaacctggatggttgtcacagttcctgtcactgtggtttgctttacctgtattttctgtcctcgttgatctgctccctgcacaaatgatgtcctggtccaaccttgttcacccatgctgttgaattgtgctgcaaagttatatccatgaatcttaagctc

SEQ ID NO: 4711 - DNA, 1214 bp, Oryza sativa
  ref <308>: DATABASE ACCESSION NUMBER: AK061975
  ref <309>: DATABASE ENTRY DATE: 2001-12-06
cactgtattggaacaagatgaggatgataagtggaaaggtatggggaaccaagagctaattgattatttcagtgaatatgctgcaagcaaagcacgccatgcctatggtccaaatgggcaccgtggcatgagtgtgctaatctttgacagctcggctgtgggctatatggaagcagaacgtttgcatgatcactttgttcgtcaaagaacagacaggaatacatggaacagtgctcacaaggttacattcttacctggtgggaaaaggcagctgtatggtttcttagctacaaaagatgacatggagacattcaatagacattgccacggaaaatcccgtttgaaatatgagatgagatcttataatgagatggtggttacccaaatgaagcagatgagcgaagacaaccagcaactgaattacctgaagaacaaaatggttaagaaagagcagcactctaaattagtagaggatacattgagtgttgttacccagaaacttagggagacaatggaagagaatactattgtacgaaataaagccaaagaaaagcacttggagtatgagaaagagatgaagtaccaggaggaatttttccatgatcaaatcgaaaaaattcacaaggccacagaggagaaagaaatcaagtttgagaagttgctgcaagaggagcgagcaaaggctagacaaagtgatgttgactctggaagtactgaagatcgcaggcaaaggaaggaaaagattcagaacttcatagactgccaggtgaaggatgttgaggaatttgaagccgaacgagacaaactgatcaaattgcatgaagagaagaaggtgaagctcaagaaggagtacctggcgaaggaatttgagcttgagaaggagctggacacagccctcacttccctgatggataaacacaagccggacatcttcaaatcctccacctcgccttcgacatgaagaactgcggcttaccatacatttcctgctcatctacaatagctaagactcccatttcctaagtacccgtaaaacttctagcgatgcgaaagcatcattctgtttgggtggatgcatgcctttggaaggaaacctgaaccagttccgtattatatggagtactatcagtttatggttgctgatgaactgatgactgtgcgctgcgcttttacagcaagcgtggaaatcgaatatatatctagtttatctcatc

SEQ ID NO: 4712 - DNA, 1655 bp, Oryza sativa
  ref <308>: DATABASE ACCESSION NUMBER: AK061976
  ref <309>: DATABASE ENTRY DATE: 2001-12-06
agcgcagcacaaagccctcctccttccaccgcagctgcgctacctacctccaagagggctggtccgctggtcgtggagaaggaagagagatcttccaggctgatccctcctattgctttctccttcccgagcccgcttgaggatccccgccggagtagggattagggaggggagaacaggaggcggcgattcaccatgaaggcgctcattcttgttggaggcttcggcactcgccttcggcctttgacgctcagtttcccaaagcctcttgttgatttcgcgaacaagcccatgattctgcatcagattgaggccttgaaagaagttggagtaacagaagttgttttagccatcaactaccgaccggaggtaatgctcaatttcctgaaggactttgaggataagcttggcatcacaatcacgtgttcccaagagactgagcccttgggaactgctggccctcttgctctagcaagggacaagcttgtggatggatctggtgagccattctttgtcctcaacagtgacgtcataagtgaatacccttttgctgagctcataaaatttcacaagagccatggtggtgaggcaacgattatggtcaccaaggtggacgaaccatcaaaatatggtgttgtggttatggaggaggtcactggaatggtggaaaaatttgttgagaaaccaaaaatatttgtaggcaacaagatcaatgcgggaatttacttgttgaatccatctgtcctggaccgcatcgagctgaagccaacttcaattgagaaagaggtctttcctcgaattgcatctgatgcaaagctctttgctctggtccttccaggtttttggatggatgttggccaaccaagggattacattacaggcttgcgcctttatctggattcacttaggaagagatcaaccaacaggttagccactggagcacacattgttgggaatgtgctagttcacgagagtgccaagattggcgaaggctgtctgattggtcctgatgttgctatcggtcctggatgcgtcgtggaggatggtgtgaggctttcccgttgcacggtgatgcgtggcgtgcacattaagaagcatgcttgcatatcaaacagcattattggatggcactcaactgttggacaatgggcacggatagaaaatatgactatcctgggagaggacgtacatgtaggtgatgaggtctataccaacggcggtgttgttctcccgcacaaagagatcaagtcaagcatcctgaagcctgagattgtcatgtgaactaaccctccttttatgttatggtatactcaagttcttttaatgcagtatctttagtttatacctgtgatccttccaagatgttgacctagcatgtgtgttactcacattctgaaaactgcttctcaatgagaattcagtgtgccatatttgattgtaccttcatttggaccatccagtaaagttctcaaccctgcaccaagaggaccagaagaaactctttttcctataaaagaagaggatcagccttgtactttgttctttttgaaacaaatatatactgctatatggaacagacccatgatgtattgcacaatttgtagcaaatgatgcaaagtggataataataaggatcaggcagatccatataaact

SEQ ID NO: 4713 - DNA, 1732 bp, Oryza sativa
  ref <308>: DATABASE ACCESSION NUMBER: AK061977
  ref <309>: DATABASE ENTRY DATE: 2001-12-06
acttcgattggttccaccgcgcctaccgagtttcccttgctaggcagtagagagagtctgtgatcgagagagaagaggatcgagcagctagcaagccggcgggcgccatggtgctctcgcacgcgagctccggccgggacgacgccgtgcgctgcaccttcgcgacgcgctacgcctgcgagacgctgccgcggttcaggatgccggagcagtcgatcccgagggaggcggcgtaccagatcatcaacgacgagctgatgctggacgggaacccgcggctgaacctggcgtccttcgtcaccacgtggatggagcccgagtgcgacaagctcatcatggactccgttaacaagaactacgtcgacatggacgagtaccctgtcaccacggagctccagaaccgttgtgtgaatatgatagctcacctgttcaatgcaccaatcaaggaggatgaaacagctattggagttgggacggtgggatcctcagaagcaattatgcttgcaggactggcattcaagaggaagtggcaaaacaaacggaaggaacaggggaagccatgtgacaaacccaacattgttactggtgctaatgttcaggtttgctgggagaaatttgccagatattttgaagtagaactgaaggaggttaagctcagtgaagggtactatgtcatggatcctgtaaaggctgttgaaatggtggatgagaacactatatgcgttgcggccatcttgggctctactctcactggagagtttgaggatgttaagttattgaataatctcctaacagaaaagaataaggaaactgggtgggatgtgccaattcatgttgatgcagcaagtggaggatttatagcaccttttctataccctgagcttgaatgggacttcaggctaccactggtgaagagcatcaatgtcagtgggcacaagtatggccttgtgtatccaggtgttggttgggtcatttggcgaagcaaagaggatttgcctgaagaactcattttccatataaactatctggggacagaccagccgacgttcactctgaacttctccaaaggttccagccagataatcgcacagtactatcaactaatacgcctgggattcgagggatacaagaacatcatgcagaattgcatggagaacacagcaatactaagggaaggcatagaggcgactggtcgattcgaaatcctctccaaggaggccggtgtgcccttggtggcgttctcgctcaaggacagcggcaggtacaccgtgttcgacatctccgagcacctgaggaggttcggctggatcgtgccggcgtacaccatgccggccaacgccgggcacgtcgccgtcctccgcgtcgtcatcagggaggacttcagccggagcctcgccgagcggctcgtctcggacatcgtcaagatcctgcacgagctggacgcccattcggcccaggtgctgaagatctccagcgccatcgcgaagcagcaatcgggcgacgatggcgtggtcaccaagaagagcgtcctggagaccgagagggagatcttcgcgtactggagggaccaggtgaagaagaagcagaccggaatctgctagtgtggctctgtgagaaatgcttgaataacgtggcatgctcgatttgtgcatgggatggccggatcggatgggactgactggcggtgtacggacatggctgcccttgttcttatgttgaactgttgatgtag

SEQ ID NO: 4714 - DNA, 1611 bp, Oryza sativa
  ref <308>: DATABASE ACCESSION NUMBER: AK061978
  ref <309>: DATABASE ENTRY DATE: 2001-12-06
gtgcacacaccaccaagaccaccaccttcatcttggttggcttcgttcactccgcctacctacctacctctgcagttggtttgctgaaccctcctcaagaacccacgcctctcctctcgcggcggcagctaaccgagccatggcgcgcaagaagatccgggagtacgactccaagcgcctcctcaaggagcacctcaagcgcctcgccggtatcgacctccagatcctctccgcccaggttacacaatcgacggacttcacagagctggtaaaccagcagccatggctgtcaaccatgaagttggtcgtgaagcccgacatgctgttcgggaagcgtggcaagagcggacttgtggccctcaacctagatattgctcaagtcaaggagtttgtgaaggagaggctgggagttgaggtcgagatgggtggctgcaaagctccaatcaccaccttcattgtggagccatttgtaccccatgatcaagaatactacctttctattgtctcggagaggctgggcagcaccattagcttctcagagtgtggaggaatagaaattgaggagaactgggacaaggttaagacaatttttctttccactgagaagccaatgacacctgatgcatgtgctcccttgattgctacccttccattggaggcacgtggaaaaattggtgatttcattaaaggagtctttgctgtcttccaagacttggatttctcatttctcgagatgaacccatttaccatcgtgaatggagagccgtatcctctggacatgagaggagaattagatgacacagcagctttcaaaacttcaagaagtggggaaatatcgaattcccactaccattcggtagagttctcagttctacagaaggctttatccatgacttggatgagaagacaagtgcatctctgaagttcaccgttttgaacccaaaggggcgcatctggacaatggttgctggaggtggtgccagtgtcatatatgctgatacaatttgggatatgcttcagaattagaaaactatgcagagtatagcggtgctcccaacgaggaggaggttctgcagtatgctagagtagtacttgattgtgcgactgctgatcctgatggccgcaagagagctcttctcattggagggggtatagctaacttcaccgacgtcggggccacatttagcggcatcattcgggccttaagagagaaggaatccaagttgaaggctgcaaggatgcacatctatgtccgacgtggtggtccaaattaccaaactgggctggctaaaatgcgcaagcttggcgcagaactcggcgtcccgattgaggtgtatgggccagaagcgacgatgactggaatctgcaagcaagcaattgaatgcgttatggccgcagcataaatgaagatgcaagttctgggatctgcaggcaagatgctgaatgcgtgatgggtgcgacatggatgagagtgtggtgtagttgcagtagttctctgcagatggctgatttgtttcttgatacatgttatacttggacgagatctggataggttattgatgtactgaaactactactgcgatgcaataaaagtgagagtagcgtttcctg

SEQ ID NO: 4715 - DNA, 1439 bp, Oryza sativa
  ref <308>: DATABASE ACCESSION NUMBER: AK061979
  ref <309>: DATABASE ENTRY DATE: 2001-12-06
agagtaaaggtgaaatttgggtggagaacatccttaatcttggaatttcgcctgctaaacttgttgagatcatgaaagaacgcttcgtttcttcaggaggagccatatttgaggggaaaagtttgtcaagcatttctgttcatgatgactttgctgtattaaacttgagtgatggtggttctctgccttgtcgacttgttattgatgctatgggtaatttttccccaattgtgcgacagatccggtcaggcagaaaaccagatggagtatgccttgttgttggtacttgtgctcgtggatttgacagaaatacaacaagtgacattattttcagtagctcatccataaagagagcaggaaattcaggagtacaactgttctgggagggttttcctgctggttctggtcccacggatcgcactacatacatgttcacctatgttgatccacattctgggggcccaaagctagaagaacttttggagacgttctgggatcttatgcctgcttacgaggatgtggttcttgaaaacctggatataatgagagtcatatttggaattttcccaacctatcggaatagccccttgccagctgcatttgaccgtgtcttgcaggttggtgatgctagtggaatccagtcacctgtttcttttggaggttttggaagcttgacaaggcatcttggtcgtttgtcaaatggtatatatgaagcagtttcaggagatcttctggatgcacgtagtttgcagctgctgaacccttatatgccaaatttaagtgcatcatggttgttccaaagagcaatgtcagcaaggccgcagatcgatgtttccccaacttttatcaatgagcttctctttgctaattttgagtcgatgcagaaacttggggattcagtacttcggccatttctccaggatgtaatacaatttggacctctggttaaaactctgggtctagtaatgatcactcgaccacagattttgccttccatttttaagcaggctggacctggggtcattcttaactggtcaggccattttgtgatgcttggttactatacattcctttccacctttatagacccaatcctcaggccttgggttgaatccttgccattgaggaacaaatatcaatggaaacgatatctcgaagcatggaagtatggagctggcttagattatcgccaaggggaataatcagcttcttttggaattagtctatatttcattgagaaagaaatacatacagataaaggaacatatataccttttctattaggtcaaatcactgtacagtgtagatacaaagaaaatttctttcttttttcagaccaagacagtgaataacatgttagttattgagaacaagtaatatgcggttcacttgtaagtacatattattaactgaagtgaatatgtaatgtctacattttc

SEQ ID NO: 4716 - DNA, 1273 bp, Oryza sativa
  ref <308>: DATABASE ACCESSION NUMBER: AK104850
  ref <309>: DATABASE ENTRY DATE: 2002-08-28
gaatcacactttctgaagaatgcccaagcaaagagaacaatgcattcacttcctgttctgcagaaagctaaatatgtggttttgctaagtggcacccctgcgttatctcgccctatcgagctgtttactcagctccaggcattgtatccaactgtatacaagaatgttaatgagtatggtaatagatattgcaaaggtggctttttgggctttatcaaggtgctagcaatcatgaggagcttcataatttgatgaaagcaactgtcatgatccgcaggttgaagaaagatgtcctttcacagttgcctgttaaacgcagacaacaggcctttctggatttaagtgagaaagagatgagacatattcgtgctctatttcatgagttggagactgtgaagatcaaaatccagtcctgtgactcccaggagacgatggactctctcaaatttgctcaaaagaatcttattaacaagatctacaatgattcagctgaagccaaaattccagcagtgctagattacctgggtactataattgaggccgagtgcaaatttttaatatttgcacatcatcaatccatgcttgaagctattcaccaacatctcttgaaaaagaaagttaagtgcataagaattgatggtcaaacacctgtacctgtaagacagactctagtcacagatttccagaataaggatgacatcaaggcagcagtgttatccataaaagctggaggtgttgggttaactttgacagcagcaagtacagtaatctttgctgagttatcatggactccaggtgaccttattcaagccgaagaccgtgcccatcgtattggtcaggtttcttcggtgaacatatattaccttcttgcaaatgacactgtggatgacattatatgggacgttgttcaaggcaaacttgagaatttgggacagatgctggatgggcaggagaaaacgctggatgtgtcccagagcgacactaggcccagcccttccaagcagaagacgctcgacgcctacctcaagcgatgcagcaattccacagaagctgatcagcccaagctcaagaaccctaggttctgacatttctcagggtttttagctctactatgtttttgtttggcaattggcatgaccctcttgccttaaacgaaggaatgctgcagtgtcaggtagctgtgtgttggtgttatgatcacagccatgctgtattttgtattacccagctaaatgcccgtgcgttgcaatgaaaattaagaataactttgatc

SEQ ID NO: 4717 - DNA, 1482 bp, Oryza sativa
  ref <308>: DATABASE ACCESSION NUMBER: AK061980
  ref <309>: DATABASE ENTRY DATE: 2001-12-06
aatcaagcaagcagcggccgcatcgatcggagcggagaaattccccaactctgctcaccctcaccgttgccgacgacttcgtgcggcggcgaagaggagaggcgatgggagggggagacgccagcggcggcgacgggccggagcaggagctgaagcgggctgctgcggcggcgtacaactacgagggcgacgcgcgctgggcggagtactggtccaacatcctcgtcccccctcacctcgcctcccgccccgacgtcgtcgaccactacaagcgcaagttctaccagcgatacatcgatcgtgatttggtggttgagccgatgtcatccactggttccacccagccaagcggaccagaagtaaggtcttcgtccttctcatccagtgagaatgtcagggcccgtagttcaggatcaagttccagatcagctgcaccaccgcccccaccgccacaaacagacagtgctacaaatcccttacggtttgatgcacggaccatacacttctccattaatgcctgggtacttgttgttgctggtctggggatgcttccaattttgccaaaacatcttgcagatagagcctgcaaactttcattgctgggaacaatactctcctctgcatactctctatacagcacttatgggaaaccaagagcatggaacatgcctgcagtccagggttggttgcaagctgtacttggaaccaaggattttatccatttgatgttctctcttatgctcttcacgtctcagttgcacttaaaaattgctgcactacctgtgttctgctgggcacttgatcatgttgctagattcctaaggcgtaattttgctcgctcatccttctataggagttacttggaggaaccctgtctttgggtagagacaaataacactacactcagtctcctcagttcaaatgctgagattgccttgggttttcttctgatcatatcacttttctcgtggcaacgtagcataattcagacattcatgtactggcaggtgttgaagcagatgtaccatgctcctgtaaccgctagctaccaccagagcgcgtgggcgaaaattggccggattgtcaacccgtacatccatcgctatgcaccattcctcaatacacccatttctgcagcccaaagatggtggttcaggtagcaaggctgaggacagaatcacgatatttgcagatctgatcatgcggagaacttatctacaatgtgttttgaagagctattacaaacttagcacgccgttgctctcgtcatgatggagctgtgcatcataaaaactcctgcaagtagttcccttttgtattggcttatactttgaggttaacattgatgcaagaacggtgttataaaccctggagggctttttcaccaccgtaatgctcgatcagtgatcacgacgatgttctatataattcctgccaaactcaggctgacctgtatacaatggattgctcttagattgcatc

SEQ ID NO: 4718 - DNA, 1751 bp, Oryza sativa
  ref <308>: DATABASE ACCESSION NUMBER: AK061981
  ref <309>: DATABASE ENTRY DATE: 2001-12-06
atcgccttgctgtccatcgccctctacatcatcggcgtcgtcgcctccttcgccgtcctctgcgccaaggaattcgccgagagagcccacgaccggccgccgctcgtcggaacagttttccggcagctcaagaacttcgacagaatgttcgatgaacatgtcaactatgcaaccgcgcatcgcaccagcaggattgtgtatcccggtcactgcgaggtctttacttctgatccggccgtcgttgagcatgtcctcaagaacagcttcaataaatacagcaagggggacttcctcactacagccatgaaggatctctttggagatggaatttttgtaacagatggggatatgtggcgtcatcagaggaagctagcgagctacgaattctcaaccaaagtgttacgtgacttcagcagtgacacattcagaaggaatgctgcaaaactggcagagaagatctcatgtgcagcagctaacagaattagcataaatattcaggatcttttgatgagagcaactatggactcaatctttaaagtggggtttggttttgagctcaacacactatctggatcagatgaatctggcattcaattcagcaaggcctttgatgaggcaaactcccttgtttactaccgatttgttgacataatgtggaaactgaaaaggtatcttaacattggatcagaagccaaactcaagaggaacattcagatcatcgacagctttgtgatgaaactgatccatcagaagagagagcaaatgaagattgcagctgactataaaaccaaagaggacatcctatcaagatttgtactagcaagtgagcaagatcctggaacaatggatgaccgctacttgcgtgacatagtcctcaacttcctgatagctgggaaagacaccacaggaaatacccttacctggttcttctacctgctatgcaagaaccccatagtgcaggataaggttgcccttgaaatcagagagtttgttgaatggagcaaggaagataacactattgaaagcttcaccaaacgactggacgaaggtgcaattagcaaaatgcactacctccaggctacaatttccgagacactccggctatatcctgctgtcccagtggatgctaagatggcagacgaggatgatgtactaccaaatggctatagagtggtaaaaggagatggaattaactacatgatttatgccatggggaggatgacatacctttggggtgaggatgcacaggagttcaggcctgaaagatggcttgtgaatggagtttatcagcaagagagcccgttcaagtttgtgtctttcaatgctgggccacgtatctgcttggggaaagaatttgcacacaggcagatgaagatcatggctgctaccctgatacatttcttcaagttcagactggaagatgaatccaaggagccaatctataaaacaatgttcactctccatatcgacaatggtctccatctgcttgcaaaccctcgagaaatttcaccatgaaccccaaacaagctactgcatccttttgttattttattggaacatatgcatttctaacatccgtcctattaggcaagtaataataatctgtcccaagtagtcgtatgaaaacaacaaagtagcaatgggacaatttgcccggtaaaagtaaggtgcttgtacaatttaatatgcttgtaatagggtgcttaaagaaagaggatgcagctatatcatcaactacgtatttaagcttc

SEQ ID NO: 4719 - DNA, 2522 bp, Oryza sativa
  ref <308>: DATABASE ACCESSION NUMBER: AK104851
  ref <309>: DATABASE ENTRY DATE: 2002-08-28
atctcctcactctctagcttgctccagtttcgcgtagctgcgtgacagttcaattgaactctctggattcgttggttacttcgtctgagctgctgcagcgttgaggaggaggaggagcaatggcgctcacgacgttctccatttcgagaggaggcttcgtcggcgcgctgccgcaggaggggcatttcgctccggcggcggcggagctcagtctccacaagctccagagcaggccacacaaggctaggcggaggtcgtcgtcgagcatctcggcgtcgctgtccacggagagggaggcggcggagtaccactcgcagcggccaccgacgccgctgctggacacggtcaactaccccatccacatgaagaacctgtccctcaaggagctccagcagctcgccgacgagctccgctccgacgtcatcttccacgtctccaagaccgggggacatctcgggtccagcctcggcgtcgtcgagctcaccgtcgcgctccactacgtgttcaacacgcctcaggacaagatcctctgggacgtcggccaccagtcgtaccctcacaagattctgaccgggcggcgcgacaagatgccgacgatgcgtcagaccaacggcttgtcgggattcaccaagcggtcggagagcgagtacgactccttcggcaccggccacagctccaccaccatctccgccgccctcgggatggcggtggggagggatctcaagggagggaagaacaacgtggtggcggtgatcggcgacggcgccatgacggccgggcaggcgtacgaggcgatgaataacgcggggtatctcgactccgatatgatcgtgattctcaacgacaacaagcaggtgtcgctgccgacggcgacgctcgacgggccggcgccgccggtgggcgcgctcagcagcgccctcagcaagctgcagtccagccgcccactcagggagctcagggaggtggcaaagggcgtgacgaagcaaatcggagggtcggtgcacgagctggcggcgaaggtggacgagtacgcccgcggcatgatcagcggctccggctcgacgctcttcgaggagctcggcctctactacatcggccccgtcgacggccacaacatcgacgacctcatcaccatcctccgcgaggtcaagagcaccaagaccacaggcccggtgctcatccacgtcgtcaccgagaaaggccgcggctacccctacgccgagcgcgccgccgacaagtaccacggcgtggcgaagttcgatccggcgacggggaagcagttcaagtcgccggcgaagacgctgtcgtacacgaactacttcgcggaggcgctcatcgccgaggcggagcaggacaacagggtcgtggccatccacgcggccatggggggaggcacggggctcaactacttcctccgccgcttcccgaaccggtgcttcgacgtcgggatcgccgagcagcacgccgtcacgttcgccgccggcctcgcctgcgagggcctcaagccgttctgcgccatctactcctccttcctgcagagaggctacgaccaggtggtgcacgacgtggacctccagaagctgccggtgaggttcgccatggacagggccgggctcgtgggcgccgacgggccgacgcactgcggcgcgttcgacgtcacctacatggcgtgcctgccgaacatggtcgtcatggccccgtccgacgaggcggagctctgccacatggtcgccaccgccgcggccatcgacgaccgcccctcctgcttccgctacccaagaggcaacggcatcggcgtcccgctaccacccaactacaaaggcgttcccctcgaggtaggcaaagggagggtactgctggagggcgagagggtggcgctgcttgggtacggttcggcggtgcagtactgcctcgccgcagcgtcgctggtggagcggcacggcctcaaggtgaccgtcgccgacgcgaggttctgcaagccgctggaccaaacgctcatcaggaggctggccagctcccacgaggtgctcctcaccgtcgaggaaggctccatcggcgggttcggctcccacgtcgcgcagttcatggccctcgacggcctcctcgacggcaaactcaagtggcggccgctggtgctacccgacaggtacatcgaccacgggtcaccggcggatcagctggcggaggcagggctgacgccgtcgcacatcgcggcgacggtgttcaacgtgctgggccaggcgagggaggcgctcgccatcatgacggtgcccaacgcgtagcagatgcgtggcgcctctggtagagacaatgctttgtacatgtagagatcagtgaattgtatattagtcggcgtcgggataaatattgattagtgatgctgaggggaacagttacagtttttttgctcttcagttgttcgtggacggagacccggctgctcgatgttcgatcgcttgtatatctaagaaatgttgtaagtggatagatttattgatcatgataaggattagtcgggtatt

SEQ ID NO: 4720 - DNA, 1144 bp, Oryza sativa
  ref <308>: DATABASE ACCESSION NUMBER: AK061982
  ref <309>: DATABASE ENTRY DATE: 2001-12-06
ctcccctccttctccccgcgttacaatcagcacacgctctctgctagtctgatcgctctcgccatcgcacctctgtctcgtcgaacaatggcctccaccgccgccgcttcctcccctttcgactgcgtcctctttgacctcgacgacacgctgtacccgggaagcgcgggcatcgggctggcgacgaagcgcaacatcgacgagttcctcatggcacggtgcggcgtcacggcggagcgggccgccgcgctccgcgtcgagctcttccgctcctacggcagctcgctcgccggcctcatcgctctcggctatgacgtgcacccggatgagtaccacagctacgtgcacgggaggctgccctacgaccggatcgccgccgacccgcagctcgccggccttctgcggagcatcccgcagcgcaaaattctgttcaccaactctgatcgcgcgcacatgaggaaggcgctgcagcggctgagcgtcgacgagggctgcttcgacgccgtcgtgtgcttcgagaccatgaaccctcacctcttcggtgaggcgccgtgcgcctccggcgatgaccgccccggcgtgatcctcaaaccgtcccccgatgccatcgtcgcggctctgcgcatcgccggcaccaatccacaccggacgctcttcctcgacgacggcgagaggaacatcgccgcaggaaaagctcttagcctccgcaccgtcctggttggcaagagggtgaggagcaaggaggccgactacgctcttgagagcatcggcagcctccggcgagccatcccggagatttggggcggcgtcgccgtcgccgtcgccggcgaacagctcgaccacggcgccgcggagaagacgaagggaatgaggtccgatctggactccatcatccagccaacgtcagtcctggcgtaatcggttcctaatccattcgcacataaacaaatcgccactaataaaagcaagtactgtccattaattatcatgtaaattattctgattcctgatgctgagtgcgtgtgcagtgtatttgtatatgggcctggctgacaaggaaatatgcatgtgtatatcagttctgatgatcagcttttgtttgctgtaaaatgtaaatggcactatgagcaaggaatttgtcttt

SEQ ID NO: 4721 - DNA, 918 bp, Oryza sativa
  ref <308>: DATABASE ACCESSION NUMBER: AK061983
  ref <309>: DATABASE ENTRY DATE: 2001-12-06
atgagacccttgacatgctggagaagaaggagaaagtcttagagaaaaaggcagccgcagaactggagagggctaaggagttctcaaaagcaaagaataaaagagcggctatccaatccttgaagagaaaaaagctttatgaacaacaaattgagcagctagggaacttccagttgagaattcatgatcagatgatcatgttagaagctgcaaaagctacgacagaaaccgttgatgctttgaggactggagctgcagctatgaaagcaatgcaaaaggcgacaaatattgatgacgttgataagactatggatgaaattaatgaacagactgaaaacatgaaacaaacacaagatgctttgtcagcccctcttggagcatctgctgattttgatgaggacgaactagaggcagaactggaagaactggagggagcagaattggaatctcagcttctcgagcctgttgcagctccacctgtgcatccagtgcaggtcccaggcaccaggataccaactcgccctgctccacagaaagcatcagctgaggaggatgagcttgcagccttgcaagctgaaatggcattgtgatcaggttcacaatgaagagacgaaatgtacaaatgattggctgtgctctacggaatttcaacgagtctagctacaatataatttcccatgtgtgtacaatctttggggatagtcagcaatcaaagagagatgctgcttcagtccagtactccagtgttctgttttagtggcttggggggtgtcgtctgttttccatgcacataatttaagttaatctggcacagtaagctccaagctaatccatagtcatgcaatgtgcattgctgccgcacaatatttttcattgaccatgaagccgtgtaaaacaagttgaagcgattgatacgtt

SEQ ID NO: 4722 - DNA, 1165 bp, Oryza sativa
  ref <308>: DATABASE ACCESSION NUMBER: AK061984
  ref <309>: DATABASE ENTRY DATE: 2001-12-06
atgcaataatcgatgcatttggcaagtcaaaggttatgatggaggatgattctgaagttggtgacatgggtattgttggggtttatggtggccaaattgttagggttgctaatccagtgtctagaggagggcgttctgcaactgatgtccggatgaggaggtcacaggaactgttcttcattctagaattgtttcagaagatggtccagcagggtgtaaggccaaatgttgtaactttttctgcaatcttaaatgcttgcagtcgctgtaatagtttcgaggatgcagccctgttactggaacaacttcgcttatttgataactttgtctatggtgttgcttatggtcttctggtcggttctcgagaagtttggtcacaagctcaatcgttatttaatcagttaggacgcatggactctccaacatcctctgccttttacaatgctcttactgatgtgctatggcatttcggccagaggtgaaaagctcagcaagttgtgtttgaagggataaatcgtcgtgtctgggagaacacatggggtgagttttgcttggacctgcaccttatgtcatgtggtgcagctcaagcaatggtccatgcctggctcctgaatgtgcgctctatcgtctttgaaggaagagctatgcctgaatttttaagcattcttacagggtggggaaagcatagcaggattgctggtgcaagcaccctccgccgtgtcattgaagcactgctcaattcaatcggagcgccgttccaggtggagcggttcaacatcggaaggttcgtgtcacccagcgctgtggtggcagcctggttgagagaatcgggcaccttcaacatccttctcctccacgacgagcgggttcagcaagcagccccatccaatctggtaccgaggttacaagccttgcagttgtagcaaagccccatagggcaggctcgcccttccttgtagtgttgtatctgtaatccttccaattcttcttaagttcatcttctcactttcagaaagatgtagttgtatcataggcgcagcggttagcttctcttctgctaaaaaaatcttactactatcagccagcaatgttgtaaattttggcaattctgcctttcaaactccttttcatcaagaggggaaatttcaaagaataccagaatccc

SEQ ID NO: 4723 - DNA, 419 bp, Oryza sativa
  ref <308>: DATABASE ACCESSION NUMBER: AK104852
  ref <309>: DATABASE ENTRY DATE: 2002-08-28
atcaagtgcaagaaagattcgaggttgacataaaggagcttcctgagcagattgatacttcgacatatatgccttcttaaagatccgggtggattgcttaaagcttacattcgaacggaaacgagagtatctccttgagatacggcatattaagaatctatcggataactaaaaacttagtgtgagaaatgctgccctatctatacttagacagcagtttagatctgctgctaagtgctgaatgccccgtaataatacttggaatgatgtatctgggcaattgggcatgtacgtatttgaattgcagtcgttcattgtaattccgagaattttattaggatttgtttgtgttaattttgctactccgcagatgctaacgtgggttagtttatagtactttgtttatggtacttttgagg

SEQ ID NO: 4724 - DNA, 742 bp, Oryza sativa
  ref <308>: DATABASE ACCESSION NUMBER: AK104853
  ref <309>: DATABASE ENTRY DATE: 2002-08-28
ttcaacaggaggcattccactgggcaatcaactccagtaaacaacgacagagctgggccttcagatcttcagtctttctcagactctctgaagtctcgcttaaatgctgtctctatgaagtacaaggaatctattacaaaaagtactcgaggatggaaggagagacttttttcgcgtcattcatctgtggcagatcttggttctgaagtaagaagagaagttaatgctggaattgcatccgtatcaaggatgatggagcgtctggaaactagaggtagtaatggtagaacaagtgatggcccagcaatatccacttctgaagttattcccagtacagaatcaagcaatgagagagttacagaaaacaatccaactactgcagcgacaagtagtggcaacacttctgcgtcttctgccccttgtgttacaacaaccggttcaaattagcatgttataggttccgaaagaaggcctgcacattcccattcttctccatcaaaggattgccattgccaggcatgggcaggtgaccaaaagcaacgtcatgctgtcatcctcagcattgcataaatcacctccagaaaatcggaatgacaaatttgatgtattggtttgataaaagggctcagcccgaggtattaccttaggatgccgatttgttctgcttcatctatgtaaaaagggaaaaaaatcagggacaagtttttaccggtataaataatggatttggtgacataatagc

SEQ ID NO: 4725 - DNA, 1777 bp, Oryza sativa
  ref <308>: DATABASE ACCESSION NUMBER: AK061985
  ref <309>: DATABASE ENTRY DATE: 2001-12-06
agtataatgccggcagcatctgaaacctgagactagagtctgtccattcctgcagttttgcccgtgtgtcctgatgatggcctctctctccaccccacctgctaccgccggcgtctccccgtcgccccgcccttccctcctcgcgtacaagaaggctgctgggctcaccccatctccatggtgcgggtggaggagggcggcggtggccaccgcagccacgagctccaatcggaccgctgcaccagccgagaccattgtcactggaaatgatgtccctctcttgtcttttgctgaggttgcagaaaggcttgatgaattccatgcatctggaaccagaaatcaaaattacatggccatgtactctagtatttttggtggaattaccacaaatctttctgcaatggtgataccaatcgatgatcacatggtccacagaggacatggcgtttttgatactgcagctattatgaatgggcacctctatgagttagagcagcatcttgaccgcttcctgaagtctgcatcaatggccaaaatcacgctgccttttgatcggtcaacaattcggagcatacttattcaaactgtgagtgcatcaaaatgcacccaaggatcactcaggtactggctatctgttggaccaggagacttccagctatcttcagctggttgtgcaaactcagccctgtatgctattgtcattgaaagtccatcgttaccagtaccagcaggatgcaaggtgatcacatcatcgataccgataaaatctcaacagtttgcggtcatgaaaagtgtaaactacctgccaaatgcactcactaaagtggaaggcgaagaaaatggtggattcaccggcatatggttggatgatgagggtttcgtagcagagggttccaacatgaatgttggcttcgtgacacaaagcaaggagctcctcatgccccgtttcgacaagatccttagcgggtgcacggcaaaacgggttctgacccttgccaagcagctagtggcagatggaaggctcagcgggatcagttcaaggaatgtgagtgtccaggaagggaaggcggctgatgagatgatgctcattggtagtggtattcttgtcaaacctgttgttcagtgggatgatcagataattggctcaggcaaagaaggcccaattgctcagatgcttttcaacctcattcttgaggacatgagatccggtccaccttcagtccgcatccctgtctcctattgaaactgctgacatctcaccgatctttctacagatatgtgataaataacagaacatgtattattaggaacaaggaacgattactagaattctgagactagtcacgtaaagctacactctatatttgcataattcagaaggtgtgttcttcagttgcaaccttgtgctctcagacatcttaatcctgaatttaaagctttgctatccagatgctacaccaagcaaggggggcaaggattttggtagctgttgatcaatgtagagaagatgtggatattgtacaaagaaacctgtgaaactgttaaatttgtacaggttttattatgtcttgagtacctcatactgcagcacagactcacagaggatggcttgcaagccacagattgccagaaccttgagctcaagccaccgaactaagtcagtttattatgttttacctttattcagaaggaatagttccgattcagcaacatcaacttgattcagagctactgcttctttctttggtaagctatggctttgtatttgattaatctt

SEQ ID NO: 4726 - DNA, 1590 bp, Oryza sativa
  ref <308>: DATABASE ACCESSION NUMBER: AK061986
  ref <309>: DATABASE ENTRY DATE: 2001-12-06
aaaacgcacactcgccgccgcactccacttccccaacacgccgccgccgccgccgccgcccgagctcgccgcgatgtcatggctcgcgcgctcaatcgcggctaccctctcttcttcccactctgatgaagatggcgataacctcgaggcgagcagcggcgacgaccatagggacgagcagccggacaccccgagcggcggcggcggcggagtcaagggcgacttgtcggagctgaccgactccctcacccgcggcctctggggcgtcgcttccttcctcgctccgccgcctgcgcccgccgccgaagccgcggagacggctacgggggcggtgggggagggggaggatggggctcggtcgccgcggatcgccgggatccggagcgacctggcggagatcgggggcagggtgaggagcggaatctcgttgctctcgaacgccaacgccgtggcggagatctccaagatcgcctcgtcgctcctgccgttcgggcccggagaggacgacgacgacgacgacgatgccgaggctgtgggcgtgaccgaggaggtggtggagttcgtgaggcacatctcgacccatcccgagacgtggctcgacttccccttgtttgtcaacgaccggcacgcggatgattttgaactgtcagacacacaatatggacatgcattggctatagagcgtgttgttccaagcttgtcatatcttaggaccgagctttgctctaccaatatgagtgaagcatgcttttggaagatctattttgtgcttcttcactcaaaactcagcaagcaagatgctgaacttctttcaacgccacagatcctaaaagcaagagaagtattattgcaaagttcaccgacaaagaaaaggctgggacctgatgatggttcatcacaaaactggaatgttgcatctaccaaaggtgacaacagtggaatgtctgaagcaccttcattggaagaagcaacttctgtaccgatgaatgtggttgaggctgacaagcatccgatttcagtcgctgaggtggaaataatagacaagtccgtggttgaagaagagctggtggtgaaaaatgagaccaagagtataccttctgactctgagaaggctaatctgcatatcacctcggacgatgatgataaagaggtggaggactggctgaaggatgtggctcctgtgtccagcaaaacaggcaacgtcaattcagcagggcaggaggaagacatatccttcagtgatctggaggatgaagaggatgattgagagacggctagcttaagcagcgcagccagtactagttccctcggttcaatgtcgcaaacacaagacaacggctagcttcatgaagaacatcaactgttactgaatgatcgaaactctgcagctacagcaaagggaaccgtgttgttgctgagtgacggattcatcctaattgcatgttgatgtaatgatgtatttatgttcgctctctttttgtacatagatatatacactatgtcacctgcgtgtgcactgtatatccacgatagcgtgcagcactcatacttactggattctgaatgcaagatatcctctcatttgctgtc

SEQ ID NO: 4727 - DNA, 1535 bp, Oryza sativa
  ref <308>: DATABASE ACCESSION NUMBER: AK061987
  ref <309>: DATABASE ENTRY DATE: 2001-12-06
aaaagaaagaaagagaaaaaaaaaaatccccccaaatcccaaggcctccctctcctctctctctctcgctctcccctccccgcgcgtcgctttcgccggacaccaccgccccccgccgctttcccctcctctcctctcctcgcgtcgcctccttccttccctttttgacccccccaattcccaactgggaatcccccctcggacggcggcggaagcggaagcagcagaggagagcatctggttcccctgcgctgcccgctttttggtggtggtggcggcggccggcggcggatcgctgcctcgccgtgccggtaagtaaggaatcgaggctcctgttgagaaactctactactccaccatacaattatgctagttatagaacaaccacattctcatgatgtaccatgcaaagaagttctctgtaccctttggaccgcagagtacacagagtaacgagcatatgagtaatattggagcttttggcgggtcaaacatgggcagccctgctaatcctgcagggagtgggaaacaacggctacgttggacctcagatctccataaccgctttgtggatgctattgctcagcttggtggacctgatagagcaacacctaaaggggttctcactgtaatgggtgttcctgggatcacaatttatcatgtgaagagccatttgcagaaatatcgccttgcaaagtacataccagaatctcctgctgaaggctcaaaagacgaaaagaaggattctagcgattccctctctaacacagattctgcaccaggaatgcaaatcaatgaagctttgaagatgcaaatggaggtccagaagcgactccatgaacaacttgaggtgcaaaggcagctgcagctgagaattgaagcacaagggaagtacttgcagatgatcatagaggagcagcaaaagctcggtggatcactcaaagcttgtgaggagcagaagctaccgcattcaccaccaagcttagatgactacccagatagcatgcagccatctccaaagaaacccaagatggacaacctgtcacctgattcggtacgggatgtgacacagtcagattttgaatcccatttgattggtccttgggatcaagaggctgcattccgagtggatgaatttaaagctgaccctggtctgaacaaatcataaagcaaaacctcactcatcggaaattcttgatccaagatgttaacctccactgcgggccgatcgcatgtgaatatatatcctcttaacaacagagcgagccttgtaaggatctttggatccacatctgattccttcaccacggccaggtgttgtcgtcactgtagtattcatcatcatcatacagctcttgtaattatcaggatgtcctaaaagccctagcaagcaattttccttcttttgaagggaaattgccctgagttgaatcatgtagccagaaagagtacacatttacacgcaatacatttgctgtgaagagggtgtgcctccctgaagttatatgtgaatgatttgtgttagattcatagtt

SEQ ID NO: 4728 - DNA, 794 bp, Oryza sativa
  ref <308>: DATABASE ACCESSION NUMBER: AK061988
  ref <309>: DATABASE ENTRY DATE: 2001-12-06
agccgtccacaccccaccaccaccgccgtcgcctccaccccgccgccgcgggagaaaccacaggtaagggcaagcgcgccgccgctgcggccgccggcgaagatgcagatcttcgtgaagaccctgacggggaagacgatcacgctggaggtggagtcctcggacaccatcgacaacgtgaaggcgaagatccaggacaaggaggggatcccgcccgaccagcagcggctcatcttcgccggcaagcagctggaggacgggcgcaccctcgccgactacaacatccagaaggagtcgaccctccacctggtgctccgcctccgcggcggcgccaagaagcgcaagaagaagacgtacaccaagcccaagaagcagaagcacaagcacaagaaggtgaagctcgccgtgctccagttctacaaggtggacgacgccaccggcaaggtcacccgcctccgcaaggagtgccccaacgccgagtgcggcgccggcaccttcatggccaaccacttcgaccgccactactgcggtaagtgcggcctcacctacgtctacaaccagcaggcttaggcgtaggctcctgttctttgggggcggaagtaaggaaggaggaggaaatcgaactggttattagatgataattaatccttttttgtcatgtcgtattaaactagtctccttggaactgaacaccttagcatcacctctgtgaagattgtgatgccctacttttggttttgaaatcatgttatgtactactgtcgaattatgtttgggttaatcatctttttatc

SEQ ID NO: 4729 - DNA, 1742 bp, Oryza sativa
  ref <308>: DATABASE ACCESSION NUMBER: AK061989
  ref <309>: DATABASE ENTRY DATE: 2001-12-06
agcattccttgccaacgtggatgctcagtctgataaaactgtcaaattcaacggaaacacgtataagctccctgcctggtctgtaagcatccttcctgactgcaaaaatgtggtattgaacacagcccagatcaattctcaggtaacaacttcagaaatgagaagcctgggatcaagtatccaagatactgatgattcattaatcacaccggaacttgctacagctggctggagttatgccatagagcctgttggtattacaaaggagaacgccttgacgaaacctggactgatggagcagataaacaccacagccgatgccagtgatttcctgtggtactcaacaagcatcgttgtcaaaggtgatgaaccatatctaaacggcagccagtccaatctgcttgtcaactcacttggacatgttcttcagatctacatcaatggcaaactagcaggaagtgctaagggcagtgctagcagctcgctcatctcattgcagacaccagttacacttgtacctgggaagaacaaaatagatcttctgagcacaacagttgggctatcgaattatggtgcattctttgacctggttggcgctggagtcactggtccagtaaagttgagtggaccaaatggtgcccttaatctatcttctacagattggacataccagattggactcagaggagaagacttgcatctgtataatccttcagaagcctcaccagaatgggtttcagacaacgcatacccgaccaaccaaccattgatatggtacaagaccaagtttacggctcctgcaggtgatgaccctgttgccatagacttcacaggaatggggaaaggggaggcatgggtgaatggccagagcattggtcgctactggccaacaaatttggctccacaaagtggctgtgtaaactcatgcaactacagaggagcttatagttcgaacaagtgcctaaagaaatgtgggcagccatcacaaactctgtaccacgtgcccaggtcatttctccaacctggtagcaatgatctagtcctctttgagcagtttggtggtgatccaagcatgatatccttcacaacaaggcagacaagtagtatatgtgcacatgtttcagagatgcatccagcccaaatcgatagctggatctctccccaacagacgtctcagacgcagggaccagcacttcgcctggagtgccctagagaaggtcaggtcatcagcaacatcaagtttgcaagctttgggacaccgagtggcacctgtgggaactacaaccatggtgaatgcagcagctctcaggctcttgcagttgttcaagaggcctgtgttggaatgaccaattgcagtgttccagtgtcatcgaataactttggagatccatgcagtggggtcacaaaaagtctagtggtggaagctgcatgctcctgacaggtttgatagtgctcgttagtaggaaacaaaagtagtttgagggggtgaagcaagaaaaccttctgtgtagaaagcaggcaacaaccaacaaggaataaatgttcccaaatgcaggtggaaaaggaataaataataccaaattgctttggagccttgcaagctgttagatcgtacgtttagattgagttgtacttgttaacatggtgaatctctacaattgtacaaggcaatgaatcttttgtaattcttttgagatatactttgtatttcaatcaaatataaagcacaccttcatctgttg

SEQ ID NO: 4730 - DNA, 1353 bp, Oryza sativa
  ref <308>: DATABASE ACCESSION NUMBER: AK104854
  ref <309>: DATABASE ENTRY DATE: 2002-08-28
aaaccgaaacgacaccaaccaaccaaacagacgccaccggataaacaaaaacgcacgtagcagcagcagcagcagcagccgcgatgctcctgacgcgcgcctcccccaccttcctcccctccacctccgccgcctcgccctcgccgcagcaggcgccgtcctccccgaccttcgggaggagccagtaccgccggggaggtggattggtctccgtttcttctccggtggccggtcagcgctgtgctgccaggaggaggtccgtgatggcggcggccggcgcggtccccgcggcgaagctggagaacgccgacgcgctcatcgactccgtcgagacgttcatattcgattgcgacggtgtgatttggaagggcgacaagctgatcgacggagtgccggagacgctcgacatgctcagatcaaagggcaagaggctggtgttcgtgacgaacaactcgaccaagtcgaggaagcaatacgggaagaagtttgagacgctgggactaaacgtcaatgaggaagagatcttcgcttcgtcgttcgcagctgccgcgtacctgcagtccatcgatttccccaaagacaagaaggtttatgtgattggagaggacgggattctgaaggagctggagctggctggatttcagtacctcggcgggccatctgatggagacaagaagatagagctgaagcctggattttacatggaacatgacaaagatgttggagcagttgttgtgggattcgatcgctattttaactactacaaagtacagtacgggacactgtgcattcgtgagaatccagggtgccttttcattgccacaaaccgggacgccgtcacccatcttactgatgcccaagagtgggcaggtggagggtcaatggttggtgcaattcttggttcaactaaacaagaaccgctcgttgtcgggaagccgtcaacattcatgatggactacctagcaaagaagtttgggatcacaacatcccagatatgcatggttggtgaccgtttggataccgacatcttgtttggccaaaacggaggttgcaaaactcttctggtcctttcaggtgtcacttctgtacagatgcttcagagccctgacaactcgatccagccagatttctacacaaaccaaatttctgattttctcaccctcaaagcagcaactgtctgaagaaatgggaagtaaatgtgttacagatgggcgaggccccttacttttgtataggcggcatccgccaatttttagcaactaaggtcacaaggatgctttttctttccacattgttttgtaaccatgagacaaatgtttatacactattatatgtaacacaagtgcatatcac

SEQ ID NO: 4731 - DNA, 1384 bp, Oryza sativa; identical to SEQ ID NO: 130
  ref <308>: DATABASE ACCESSION NUMBER: AK104855
  ref <309>: DATABASE ENTRY DATE: 2002-08-28

SEQ ID NO: 4732 - DNA, 1742 bp, Oryza sativa
  ref <308>: DATABASE ACCESSION NUMBER: AK061990
  ref <309>: DATABASE ENTRY DATE: 2001-12-06
gaattctgacatcaaatggtgatctatgggtacaccagagaaaagtgattgcacctgaactattcatggaaagggttaagggaatggtgaatttgatgatggaggctgcaatgtctatgttgaactcatggaaaaatgaagttgaggacagaggaggcagtgcagagattgtggttgatgagttcttgagaaccttttcagctgatgtcatatcaagggcttgctccgcgccctcgcgctgatacttgtaatcaatcaactcatcagcatggtcttcgcatggagctgctagctgcagagtcacagagcccaattgttgagctcgaaatgccacgtgttgtatgatcgttacatgctaactgctcagagtgagtgaggcgcttctttgcggctttatgtccttttcagctccaagcttcacatggagatggatcacccagcaaatatgcagtatacagtatatggatatgctatgaacatgtagtctccctcttctctcacacacacacccagatacgtacacacaaaaatggagctattctcatcacagcaatggctagcacttctacctccgatcatcctctgtatccttctgttctcctatgtgtatatcattctatggctaagaccagagcggttgaggcagaaactgaggagccaaggagtgaggggtcccaagccttcttttctctttggaaacataccagagatgaggagaatccagcaattggccaagtcagcacatgaacaagaagcagggagtaccgacatgttttccaaagtatgctcattggtgttcctggaagtaggtatttaccaacaaggagcaatagagggatctggaatctggatagtagcatccgtaccctcattttaaacatatcaaagaaatatgaacatgattcatcgacctcagtaaacaaggatctcctgcactccattattcaaggttctaaggatggtccctttgcttcatgcacgcccgaggatttcatcgtcgacaactgcaaaaacatctacttcgcagggcatgagacaacttcgaccacggctgcttggtgtttgatgcttctagcttcacaccatgaatggcagtcccgtgcccgggtggaatcccttgacatttgtcaagggagaccactagattttgacattctacggaagttgaaaaagctgacaatggtgatccaggagacactccgattgtacccaccagcctccttcgtcgcccgggaagctctgaatgacatgaaacttggcggcatcgacataccgaaaggaactaacatctggatcccgatcgcgatggctcaccgggatccttcagtatggggtcctagtgccgacaaattcgatccggacaggttcgccaacggcatagcaggggcctgcaaaccccctcatatgtacatgcccttcggcgttggggtccggacatgtgccggccagaatctagccatggttgagctcaaggttgttctgtcactcctgctgtccaagtttgaattcaagctttctccaaactatgtgcattgccctgcgttcagactgaccatcgagcctgggaaaggtgttccattaatttttagagagctctgacttgagattcttgaaggttatataaatgtttcccttttccccttgttatatttgtttggtatgtgtttgcaacaatgctgcaactcgagtgtaaacagtagtatattctacagtatgcaattctgtacaccgattgaagtgtt

SEQ ID NO: 4733 - DNA, 1538 bp, Oryza sativa
  ref <308>: DATABASE ACCESSION NUMBER: AK061991
  ref <309>: DATABASE ENTRY DATE: 2001-12-06
agtagctgctaattaagcagcaagcaaaggtacccagcaaccttccctttggcttcccccacaaaacgcggccgccgcgcgcgtatccgaggctgaggctcctcttcctcttcctcttcctcctcctctcggcggcggcggcggcggcgggtctccatttgctcaagcttgcctgccatgcccatggggacgaggtagcgcttcccttcctgcctgcggtacatactaactaagcagagggcatccctcatatataggctttgcgaaatcaatcaacaagcttggggaggagaagaggaagaggaagaggagatggagcaggggggtgaggccggcaccggcggtgggctgggcaacctgcgcgcgctgctggccatcctccagtggtggggcttcaacgtcaccgtcatcatcatcaacaagtggatcttccagaagctggatttcaaatttcctctgacggtgtcttgtgtccacttcatatgctcttcaattggggcttatattgcaatccatgtgctcaaagcaaaaccactcattcaagtcgaaccagaagaccgttggagaaggatttttccaatgtcatttgtcttctgcataaacatcgtgctcggaaatgtcagcctgcgctacatcccagtctcctttatgcagactatcaaatctttcacccctgcaaccacggttattctgcagtggttagtttggagcaagcattttgagtggcgcatatgggcttcgctggtcccaatagttgggggaatactcctaacttcaataacagagcttagtttcaacatgtttggtttctgtgctgccatggttggctgccttgctacatctaccaagaccattttggcagagtctctactccacggatacaaatttgacagcattagcacagtgtactacatggcaccctttgccaccatgatactggctctaccagcagtgttacttgaaggaggcggtgtggttacctggttctacacacatgactccattgcttctgcactagttatcatcataggctctggagtgcttgcattttgcctaaacttctccattttctacgtgatccattcaaccactgcagtgaccttcaatgttgctggcaacctgaaagttgctgttgctgtattggtgtcatggttgatcttccggaaccctatctctcctatgaatgcaatcggatgcgcgatcacgctcgttggctgtactttttatgggtatgtgaggcatttgatccctcaacagcaggctgtagctccaggaacaggaagcccaacaacatcgcaaacaaattcgccgagaagtcggatggagatgctcccccttgtaggcgacaagcaagaaaaggtttaacaaaagaatacactttgtactatgcaatagtcattatggtctggattcccttgtagttcgaactattgtgttccttcaagttactgttttcaaattggccagaaactgccgcacgctaaacttcctttctgtgtagtgcatacggaattttttctactactaggatgtcacgc

SEQ ID NO: 4734 - DNA, 908 bp, Oryza sativa
  ref <308>: DATABASE ACCESSION NUMBER: AK061992
  ref <309>: DATABASE ENTRY DATE: 2001-12-06
tatggactagcacaacctttgggacatacatgaagataatctgtgaaacaatacatttctgacgataaaaaacaatgaagattattcaagaagatgatatttggaactgcatttctttcccttgtttgattgagacaatgtatgtcgaccattgctgatgctatcataatgtatttgatttgataaaattagattagaatgcaaatatgcttacggtagtgccatgtttacccagttctgaattttcctctatttcttcgttattagtatggtggcggaagaaatatacgccttggtggagagactcgaagtgctgaagagaaggcagccaaggataaacgtaccaaagagctaatagctgcatataggaatagtcagaacatgatagttgatgcaaagacaaaggcagagtgcactgaggccttgaaggaaggtgatgagctgatgaatactggaagacttaaacaagcattgccttattatgaaaaagtgatgcaggctgtggacttcaagactgaacttcatggaatggctgctttgcagtggtccatctgtctagattcactctgcaggtccaaggaagccatgagcatgtacagcaaactcaaaaatcatccaaattctgaaatcagtaagaaagcaaacatgttcatgttcagctttcaggcgatggacttcatgaaggtgaacagctcccctttgccccgtaacacgggctacgagaagtacttcgacaagtttgggggccagaagaactactacgctgccctagacgaacctgagatgggcatcgatcagatcatcccgtacatgctcttccttgtttccccaatattcttggttgcttttgttgctttgagaaaatccttccagttataaaagtcaggaagcatatgcttgaatgcttc

SEQ ID NO: 4735 - DNA, 1280 bp, Oryza sativa
  ref <308>: DATABASE ACCESSION NUMBER: AK061993
  ref <309>: DATABASE ENTRY DATE: 2001-12-06
aactccacgagccgccatttcccaaggaggagcaaggattgttgttgtttcgccgtcagatcgattcctgacgggataatgggtgagaccatcgccaaggatgtcaccgagttgattgggaacacgccgttggtgtacctcaaccgggtgacggatgggtgcgtcgggcgcgtcgcggccaagctcgagtccatggagccatgctccagcgtcaaggataggattggatacagtatgatcactgatgcagaggagaaggggctgatcactccaggcaagagtgtgctgattgagccaactagtggcaacacaggcattggactggccttcatggctgctgcaaagggttacaggcttgtactcacgatgccggcctccatgagcatggagaggagaatcatattgaaggcttttggtgctgaattgatacttactgacccactcttgggaatgaaaggagctgtccaaaaggcagaagaactggcagcgaagacaaacaactcatttatcctccaacaattcgagaaccctgctaacccaaagatccattacgagaccactggacctgaaatctggaaaggaacaggaggtaaagttgatggtttagtttctggtattgggacaggtggcactattactggagctggacgatacctcagagagcaaaatcctgatatcaagatctatggtgtggagccagtcgagagcgctgtcttatctggtggaaagcctgggccacacaagattcaaggaattggagctggttttgttcctggggtcctggatgttgacctcatcaatgaaactgtacaagtttcaagtgatgaagctatcgagatggcaaaggctcttgcattgaaagaagggttgctggttggaatatcttcaggtgcagctgcagcagcagctgttaggctcgctcagaggccggaaaatgaaggaaaactttttgttgttgtcttcccaagctttggtgagcggtacctttcgtcggtgctcttccagtccatcaagaaggaagctgaaaacatggtggttgaatgaaatgcacaatatccgggaatccacaggaataaaagtttggtatctctgcttgtgtgattaaacatacattgtcctgccattttcaagttgttctgcttgtgtagcaatggggaacacagtgtgttagccttgtagtgttaaacagtttacattttatcttccctgtatatcagaaccctttacatgggcatttgtcagccagtgtgaatgaaataaagcatcatatgatttgtctc

SEQ ID NO: 4736 - DNA, 1749 bp, Oryza sativa
  ref <308>: DATABASE ACCESSION NUMBER: AK104856
  ref <309>: DATABASE ENTRY DATE: 2002-08-28
aagactgagaaggatcctgcatttaatagaaacaggcaaaacaacagggtggcgatatttcgagaccgtgagtcagatcgcaaggatcctgattatgacagaagctatgacaggtccgtttaacgtaataaactttatttttgtaactctttagctatagaatgttttgccattccaccgtacagttcctatttattattggtgaaccatttagtactctcaatatttcacgtgcatcctaaactatcaaagtagctcatgggtgatctatgcaatcatccatataagcatttcattcatataactattagattgcaaatttaaactctaattctaagagaagcttgtgtaaaacacatcaacaggaggtaatcatgtgataatatgttaaagatacaaagaacaatggggactgactttcaaaccaaaatgtaactctattaaaactacctgttgacttttttgttatgtcagtgaagacaaggactgcccttttgtatcaagccaactcatcatgaatggctttacaggtacatgcaaagatttgatcctggatttggatttaatggaggttcatacactattcaacctttgtatgcccctgctgttaactacaacactgagttccctcagcttgggtctcatgggtctccagttcctgttgaacagcagcctcagtcaatagcacagcatattcctgggccctggtcaccggctcaatcgcctaatgcgattgggtacagacctccggatggttccatgccaccaccttacagtcctggtcatgctggtgctcccattaggtcatctgtttttatgcatactccccaacaatttgctatgccttcacggccaggagtcacatatgtacatccacaggaacccatgcgtccatttgcacagactcaccaacaacaacctgaagctagtttgcgcttagcccggccccgatgaggggcctgggcatgcctgcaccctgccagcgtgccctgaatgtgtaaatcggatgtcatacccgattcatttcttgctggtagatggtagcaggcataaaagaaccgagaactacatatctgagctaaacaatccacttgatcttgttagcttgtggttcttggtgttgttgcaccctgcacattcaggtgcaggagaggcaccttcttcgtcctggaagtaaattgcagactgttgcatacgggacctcaagtccaatgcatagaagctgagaaatgaaggggagagcagtcatggctggcatgatcggtgctgttctgctgctgttccttgcagttcagttttgagattcaggaggggcacattgcccccttgaagtcaagcactcagcgcgggtgatgagaagagaatcggcacaacatctaatatgtggatatttattcaggacgtgctgcttggtccttgtcgcttgctgaagcttcgccttcgccttccacctgaagtggcgtcagattgactggaccgaagatgcagcgctgtagtccccacagtgaacctaagcccctcgctgaggcttaatcagtgtctgttatagatcattgtagttgtagttgagtaaccccaactttgtaactccactctagtaagttaaaacaatgtactaagctcgattgccaattgtactagtagcactatatgtattgtcgtatggactgggatgtcgcagttactgcttgtacagtggagctgcgtaactttaacccattactacagctttatgccgccgattttatt

SEQ ID NO: 4737 - DNA, 1936 bp, Oryza sativa
  ref <308>: DATABASE ACCESSION NUMBER: AK061994
  ref <309>: DATABASE ENTRY DATE: 2001-12-06
cccaatacaactagctaacttaattagttgttaattagagtttgcccatgctgctttaatattcgcgctcgatcgaacgagttgtagcagccatgtcgtggaaggccttcaccaagtccctcctcttccactccaacaagatcgtcaggcggctcaaatccttcgtcctccatgcgcatcctcctccgccgccgccgcacgtcgtcaggcggccgccgtcgtcggacgagctgccggcggcggcggacgtgacggtgtgcaaggtggagggcggcctgctgatgtcgccgtcgaccttcccgtacttcatgctcgtcgcgctggaggccggggggctcttccgcggcctcctcctgctgctgctctaccccgtgctgctcctgctcggccatgaccgggccaccaagctcatggtcatggtcagcttcgccggagtcaggaaggagaaggacgggtcgccgtccttccgggtgggcagggcggtgatgcccaagctgttcctggaggacgtcagcgccgaggtgttcgatgcggcggcgcggcggcggcggctggtgtgcgtgagctccatgccgagggagatggtggagccgttcttgaaggagtacctcgccgtcgacgccgtcgtggcgccggagctgagggcgttcagggggtattaccttggcctcgcggagtccgacggcgaggtcatgcagaggctggacatggaggaggtgatcgggatgaaggagcgcggcggcgccggcgacggtgacggtgatggacaggtcaccgtcgtcggcatcgccggactcgggaactcgttccatcagctcttccaaaactattgcaaggaggtgtacgtggcgtcggagtgggcgcggcggcgatggcgtcccctccatccccggcgatacgcgaagcccctcatcttccacgacggccgcgtcgcgttccggccgacgacgtcggcgacgctggccatgttcgtgtggctgccgctggccgtgcccctcgccctcctccgcgtcgccctcatcgtcgtcgtcctccccttctccctcgccgccccgatcgccgccgccctcggcatccactgccgctgcatcgccgcctccacgctgcgggccgccgcggtcttggacctcttcgtctgcaaccaccgctccctcctcgacccgctctatgtctccgccgtcgccggccgcgccgacctcgccgccgccacctacagcatcagccgcctctccgagatcctcgccccgatccgcaccttccgcctcacccgcgaccgcgccgccgaccgcgccgccatgcaggcccacctctcccgctcccggcgcggcggcggcggcggcggcctggtggtgtgcccggaggggaccacctgccgcgagccgttcctgctgcgcttcagcccgctcttcacggagctcggcgccgacgtgcagcccgtggcgctgcactcggaggtggccatgttccatggcaccacggccggggggtggaagatgctcgaccccttcttcctcctcatgaacccctcgccggcctacgtcgtgcacttcctcgaccccgtcgccggcggcggcggcggcccggaggtggccaacgaggtgcagcgccggatcgcggagacgctggggtacacctgcacggcgctcacgcggagggacaagtacctcgtgctcgccggcaacgatggcgtcgtcgccaacaacaacaagagcaattaatttactaatcaactactctactgtctactactgttgtgtactccactacgtggcttgtaattagcatccttaatcccgcagttaattaaggggaagtgtaagacacactggttgtactcatccaaatgctcatatcaagttataatgaactgcgaaattcgattgctgcttcaccttatattctcagttctttaggcaggtagtaacatatttcttct

SEQ ID NO: 4738 - DNA, 1494 bp, Oryza sativa
  ref <308>: DATABASE ACCESSION NUMBER: AK104857
  ref <309>: DATABASE ENTRY DATE: 2002-08-28
agaaaggccagaagcaaagatggcgatctccagcctacatgccaccacctccctgcactccccatgcaccaccaacacaagcttcaggcagaatcaggtcatcttcttcaccaccagaagcaacaggaggggtagcacaaggtacggaggagcaagaacctttcaggtttcatgctcagtcgacaagccagtggtgattggccttgcagcagactcaggatgcgggaagagcacctttatgcgccggctcaccagtgtgtttggcggtgctgcagagccacccaagggtggcaacccagactcaaacacactcatcagtgacacgacaacggtgatatgcctcgatgactaccattccttggacaggactggcaggaaggagaaaggtgtgactgccctggaccctagggcaaacgattttgatctcatgtatgagcaggtgaaggcaatcaaagaaggcaaggcaattgagaagccaatctacaaccatgttactggtctcctagacccaccggagcttatccagccccccaagatttttgtcattgagggcttacatcccatgtttgatgaacgtgtgagggacctcctagatttcagcatctacctggacatcagtgacgaggttaaatttgcatggaaaattcagagggatatggcagagcgcggtcacagccttgaaagcatcaaggctagtatcgaagccaggaaaccagattttgatgccttcattgatccccagaagcaatatgctgatgcagtgattgaagttctgccaacccagcttattcctgatgacaatgaaggaaaggtgctacgtgttaaattgatcatgaaagaaggtgtaaagaacttcaacccagtttacctcttcgacgaaggatcaagcatcacctgggtcccttgtggaagaaaactcacatgttcttatcctggcatcaaatttgcctatggcccagacacttactttgggcatgaggtatcagtgctggagatggatggccaatttgacagactagatgagcttatctatgttgagagccatttaagcaacctctcaaccaaattttatggagaggtgacacagcaaatgctaaagcatgcagacttccccggcagcaacaatggaacaggtctcttccaaactatcgtaggactgaagattagagatctctatgagcagattattgctgagagggccggtgcacctactgaagcggcaaaagtttaatgagctccacattcatatttcgtgaatctcttcatcaccataccatatcaatgacaatgggcatcctcgcattccttgtaactagttttggaaatattacagctagaagaaagtaggatggtcattgcataacttgtgaaaccatgcaatggaacttctaaaaatccctctccatgagggtgctcctacatctcttcttgacacatttcaatgtacatcttctatatttcaatgtagaaagaaatacggttgctttctactat

SEQ ID NO: 4739 - DNA, 1045 bp, Oryza sativa
  ref <308>: DATABASE ACCESSION NUMBER: AK061995
  ref <309>: DATABASE ENTRY DATE: 2001-12-06
ctcgtcgtcctcccggagcgaccgcctttcgccctccctccatggcgtcgacggatgccgacgaggaccagctcctcaagagcttcctcgccgaggtcagcgaggccgaacgcgacaacgaagtgctcaggattcttggttgcttcaagttaaaccctttcgagcatcttaagttgtcatttgattcatcagcagatgaggtgaagaagcaatataggaagttgtccttgttggttcatcctgataaatgcaagcatccgaaagcacaagaagctttcgcagctctggcaaaagcacagcagctcctacttgatccacaggagagaggatatattcttgatcaagttactgctgcaaaagaagagctgagggcaaagaggaaaaaggagctgaagaaagacagcgcgtcaaagataaagtcccaagtagatgagggaaaatatgaagagcagtatgaacgatcagaagaatttcagaagcagctaataattaaagttcgtgaaattttgacagacaaagagtggcgtcgcaggaaaatgcagatgaggatatcagaggaagaaggaagactgaagaaggatgaagaggaaacaaaagaaatgtggaagaagaagcgggagcatgaagagaagtgggaagagaccagagaccaacgagtctctagctggagggattttatgaagacaggaaagaaggcaaggaaaggtgagatcaaacccccaaagctgaagaccgaggatccgaacaaatcttatgttcagaggccggtgaagcgtgcttaagaggaatgatgttagtctttgcagccaaagcatatatacagtaaccattcttcttgttacccgatctaagctttatcctatcaaagctcctggcaggctgtaaggttcggttatgccttccgtgttcccactgtagtcagggaacataacacatctctgttagcagaatggcttcatgttctctacatagagttgtattggattaatgtacctcttggatataacacattcctggaaaatgttgaaaaaaatatgtgaaaaag

SEQ ID NO: 4740 - DNA, 1415 bp, Oryza sativa
  ref <308>: DATABASE ACCESSION NUMBER: AK061996
  ref <309>: DATABASE ENTRY DATE: 2001-12-06
ccgccgccgccgccaccgccgctccgtccccatccttctccttccccgtgcccaagaaagatggcgaggaggacgaagacgatgatgacgtcgacgagttcgatggcttcgacgcgcagagcgagtacgacggaggcgtgccggagattgatgaggaggacgagaaggctctcgctgcattcatgtcaaaggacacctcttcgaagcgctcacttggtgatatcattctcgagaagatcagggaaaaggatgcagaaatctcaacagaaggacggactcctgtgaagttggactccagtattattgaactttataaaggggttggggagttcttgagccgatacacaagtgggaaaattcctaaaggattcaagcgtatcccatcattggaatgctggccagatgttctgcagctggctgagcctgaaaattggtctcctaacgcagtatatcaagcaacacggctcttctcttcaaacatgaacgcgaagaacgctgtgcgattctatgaagctattttacttcctcgtgtccgtaatgacataaggaagaacaagaggcttcattttgcactataccagtctctgaaaaaatgcctgtacaagcctgcagcgtttttcaagggaatattgttgccgctgtgtcaggaaaggaattgcactctgcgggaagctgtaattattggtagtatcatctcgaaagtctccattcctcctctccatgccagtgcagctttaatgaaactagcagagatggagtactgtggcacaactagctactttattaagctatttcttgataagaaatatgctttgccatatcgtgttgttgatgcggtttttgctcatttcatgcggtttattgatgaggagagggtcatgcctgttatatggcatcaatcactcctagcctttgtggaaagatacaagaatgaattagagaaaaaggacaaggagaaacttgcacgcttgttggatcaccagaagcactatttggttactccagaaattcgtagggaacttcggatgagctgcaacaggggtgaaaaggacacaatcatgtcgatatgctccccagtttctgtgatcacgaaaccaattgaagaagacaggcggaatgttccggaagtacctatggaggagtaatcgtttgattcttaatactggtggggaggggcaattttccgtaccagtgttgtagttttgcttgccgaatgaacttttcaagaggtatttcagttctatgcagcaatggatcgatgccagcaagggaagttgtaatgcaaatttttgatcagtttggaaatgtatctgatagtaacagagtattcagcgtgtagctgtaatatacgtcaccagaattgtagtgttttgtacacaaattgtctttagttttcaaatataccatcacaattc

SEQ ID NO: 4741 - DNA, 1682 bp, Oryza sativa
  ref <308>: DATABASE ACCESSION NUMBER: AK061997
  ref <309>: DATABASE ENTRY DATE: 2001-12-06
atcttgcttgctctctcattgctgcagacaatcacagcagagggtgagcaggaggctgatagggttgccttcctccctgggcagccaaggagcccacagatgtctcagttctcaggctacatcactgtgaacagccagaatggcagggcactcttctactggttctttgaggctcaggcactgccttccaagaagcctctcctgctctggcttaatggaggtcctggttgctcatctgtgggctatggagcagcttctgaattgggtcctctcatggtcaatggaaatggaacaggtttggaattcaacaagtttgcatggaataacgaagccaatttgttgttcttggaatctcctgttggagtcggcttctcctacacaaatacctcgtctgacctagagagcatcgatgaccgttttgtcgctgaggacacctacaatttcttggtgaattggttcaagaggtttcctcagtacaaaaaccatgacttctacatctctggagagagctatgcagggcactatgttcctcagcttgctgatgtagtgtatgagcgcaacaagcatgttgaaacaaaccagcatatcaatttgaaaggatttattgttggcaatgcagagactgatgattactatgactacaagggactagttgagttcgcttggagtcactcagtgatctcagatcaactctataagcatgtcaacaatgtttgcgacttcaggttatcaccccgtagcaatgagtgtaaccatgtaatgggatacatatatgatcagtacgatatgatcgatattttcaatgtgtatgcacctaagtgcaacactgatgactcatccctcttttccacctcctacagtacagctgatatgaatgctaagaagaggcttaaaggcacgaggatgtactcagggtatgatccgtgctattcgtcacatatcgaagattacatgaacaagatggatgtgcagaaatcacttcatgcgaatacgagtggattgatcaaggacagaaaatggagtatctgcagttattcaatattcgacaattacgacatcacggtcttctctgttcttcctatttactctaagcttatcaaggctggcctacgaatatgggtctacagtggagacgtggatggcagggttccagttattggatcccggtactgcgtagaagcccttggccttcctgttaagtcacagtggcaaccatggtacctaaacaatcaggttgctgggagatttgttgagtatcaaggattgacaatggccacagtaagaggagctggacatgcagtgccacaagacaagccagaacaggcactggtggtaatcaattcctttctttcaggcaggcgactaccaacaaaaaacaaccgatgatacaacccagataaaacttacacataaaaataaagaaggaataagtcatcgatattatcatacatagatgaaacaatacatgtattgtaggctcttcatgtatgcaattgtctgtgtcaactagatgccaccctatacattaatctgtatattttccttatgtttgagttttatgttgagaatgataatttcaaccctatattttcaaacaaagactagaacttgcccttgttaattctttgaatgtttagcacaatcttatcaatgtaattgcttgagacttgagatgctttacc

SEQ ID NO: 4742 - DNA, 1315 bp, Oryza sativa
  ref <308>: DATABASE ACCESSION NUMBER: AK061998
  ref <309>: DATABASE ENTRY DATE: 2001-12-06
attggttcaaacaactgcattggggttgactgtataagtgctgactatgaacattatgtcaaggtgttgaagttaatatatcttcctgcagaatcaattatagattcttttgaatctgttaggtcagcggttggcgtgcttcgagcgtcaacacttctcaaatgtgagttaattaccagaagctgcattgaataccttgaagcagcttcatgggatgaaaaagaggaggaagagattttggaagtagctcagagccttggctcagaggaagcagtagctctgttagcccgtcttcaagccccaaatgtttctgctgtgaagaatgtcttcatctctgccattcgttttgctacgtccatggaaagtccatctcctcctttcttggatgatctcaagacttctgctcaggagcaaattgacttcatgctccatgaggacgatgacactgctttggttacaatggatgaggatgtgaggtctgtggtgcgagaaggattgaaaaaactgttctccacgcttaagattggactagatctgttgacctcggagtatgagcaattgcctgaacaggcagaacaaagggttctctgtagtttagctgacattgactggatggctaatgtcttgacaaagattgagatgatgaacgagtttgtctctggttggtcagaaatctctggctatgttctttcagttgttcaggataagaagtatagctcaggattgtggcttgtaaaagcaaaacttattgaagtgactggaaaggcctttgatgctgttggctatggctctgtggttttcccagcatcatccagagttcattttctgcggatgtggcttccattcatgcaaacaacgaagcgcttgcttgatgaaaagtcgaaggatgatgcgattccacagatggatgcagacttgtttcagaacattgagggtgcaatagtctcattggtgttagcattgccatcaggtgatcaggcagacattcttggagagtggatgaagaatgcagagcagttcagatatcctgatctcactgaggcatttgaggtgtggtgttaccgtagtaaaacggcaaagaggaggctagtaggagggctaaacgggagtggcaaccccacagtcagcttgtaactttgtaaggctaccattaattttaatcttttgttgtagcctatacaagtcagtgaaatcaggtggttggtaccaagcaatataccaactagattttcattgttgtatgttgtaaaacaactgctcatgtgtaatacacttgagctttcttgcagtatgttcattacccttgtccaagttc

SEQ ID NO: 4743 - DNA, 2272 bp, Oryza sativa
  ref <308>: DATABASE ACCESSION NUMBER: AK061999
  ref <309>: DATABASE ENTRY DATE: 2001-12-06
aattgccattcagtcgtctcgcatccgccgctctcgcactcgaaccaccaccaccgctcgctgcgtgtgagatccagcgccgccgtcgcgccgccgctgccgccgccgctggtggtgccgatgacgacgccgaagccgagcccgacgatccggaggctggacgtggcgtcgccggtgccggcggacatcgacatcgccaacgccgtctcgccgctccccatcgccgacatcgccgcggagctcggcctgcgccccgagcacttcgatctctacggcaagtacaaggccaaggtgttgctgtctgttcttgatgagttgaaagggcagcaggatgggtactacgtggtggtcggcggcatcacgccgacgccgctcggggagggcaagtcgaccaccaccgttgggctgtgccaggcgctgggtgcgtttcttgataaaaaggttgtcacttgcctccgtcaaccatcacaagggcctacttttggaattaaggggggtgctgctggaggtggctacagccaagtcatacccatggatgagttcaatcttcatcttacaggagatatccatgcaattacagctgcaaacaatcttcttgctgctgctatcgatacaaggattttccatgaggcttcacaatcagacaaagcgctgttcaatagactatgtccgccaaacaaagaaggaaagaggcgctttgctgatgtaatgctcagacgcctgataaagcttggaatctcaaagacagatcctaatgagcttactccagatgaagttagacgctttgcaagacttgacatagaccctgaatccattacttggagacgggtcatggatgtaaatgaccggttcctgagaaaaatcactattggacaaggccctgatgaaaaaggtatggtgagagaaacaggctttgacatagctgtagctagtgagataatggccgtattagctcttacaacttcccttgctgacatgagggaaaggcttggaagaatggtgatagggaacagcaaggcaggtgagcctattactgctgatgatcttggtgttgggggtgccttgactgtcctaatgaaagatgccatccatccaacgctcatgcaaactcttgaaggcactcctgtgttagtgcacgctggaccttttgctaatattgctcatggaaactcttcgatagttgctgataaaattgcactgaagttggttgggaagggtggatatgtagttacagaggcaggttttggttctgatattggaactgagaaattcatggatataaagtgtagatatagtggattaatgcctcagtgtgctattattgtggccacaattagagctcttaaaatgcatggtgggggccctgatgttgtggctgggaagcctttggatcatgcatatgtgagtgaaaatgtggctcttgttgaagctggatgcgtcaatcttgctaaacatatcgcaaacacaaagagttatggagttaatgttgtagttgcaatcaacaagtttgcatcagatactgaagcagaaatggacgtggtgcgaaatgcgtctttggctgctggtgcttttgatgctgttgtctgcactcaccatgcgcatggtggtaaaggagcggttgatcttggactcgcggttcaacgggcatgtgggagccaggcagaccctctgaaatttttgtatcctttagaatctggcataaaggagaagattgagtcaatagctaagttctatggtgctagcggcgttgaatactctgaacaggcggagaagcagattgaaatgtataccaagcaaggcttctcaaacctcccaatatgcatggcgaaaactcagtactcgttttcgcatgttccatccatgaagggcgcgccgtctggcttcgtgcttcctatcagggatgtgagggccagcattggagccggtttcatctacccactggttggcaccatgagcacaatgcctggtcttcctacaaggccctgcttctacgaaatcgacgtcgacacagccactggcaaagtcatgggtctgtcataagcgtttctggaatggattgcaatttggggcacaattgtgtagttgcaaattttgggacattcccttagctgaataatagcctcagtggcttcctgcaagtgcagcaatacatttttctttttgagtttcttggtgactgtaaatcagtaaatgtggtcgaaccatactgttcagactctgttccaatgccccatgtttcagcttaacatgctttctctgattcttcctgtct

SEQ ID NO: 4744 - DNA, 1552 bp, Oryza sativa
  ref <308>: DATABASE ACCESSION NUMBER: AK104858
  ref <309>: DATABASE ENTRY DATE: 2002-08-28
aagttggctatacaaaattgtttcttcgtacaggacaggttgctgcactggaaaatgctaagaatcggatgctccatggagcccttcggattcagaagaacttccgtgggttgtgtactagacaagaataccagggactgaagaaaggagcaatgactttgcaatcatttataagaggtgaaaaggcaagagttcactttgatcatcttgtaaagagatggaaggcatctgttctcatacagaagtatgctaggcgtcgaattgcagctaccatgtttattgatcagctcaaatatgttgttcttctacaatcagtgatgcgtgggtgcttggccaggaagaaatataagtgcctgaaggaagagaaggactcaaaggctagtcacagaaaagttatacatgtaaggaataatgtttcacaagcgcgggtgtatcatgaaacgaatggagattatcctcggcaaccagttatcacggaactccagggacgtgtttcaaaagctgaggctgcattgcgagataaggaggaagaaaacgaaatgctaaagcaacaattggatcaatatgagaagaaatggtcagaatatgaggccaaaatgaaatctatggaagaggcatggaagaagcagctctcctctctgcagttgagccttgtggctgccaagaagagcctaactgcagaagatgtggccagccgagcagctcgaaccgacgctgctccaatgcatgctcattatgattctgaagatacgtcgaccgggacccatacccctgaagggacagagttcaaatatcaaaaccacaactctgaggctagagtggcagcaccgaattcagataggcggataaacgcggtgaaccacctagccaaggagtttgaggacaggcggcaggtgtttgaagacgatgctggcttccttgttgccgtgaagtccggacaagttggttcaaacatgaacccagacgatgaactccgaaagctcaaggaccgattcgcgacatggaagaaagactacaagtctcggttgaaggagaccaaggtaaatcttcagaaggttggtgaggagaaatcccggaaaagatggtgggggaagaagagctcaaagtgaatgcattcaatctgaatccaagtgcatttccctacattccctgctactgcatccaagaagagacaatggaagagactgggaggtgaaaaacaaggcttcgaggttctctcctcttcatcgcaagcctgacgagatgatggtgatgttgttgatgacgatgatgagctccatcatcaatggcggtggtgctggcactcgatcgtccggtgtccagcttatcagagaaaagatttatataggtgaaagcaagaagtctgtacatgtatattagttctttgttgtcagtgtatgtatgccatcttgtatgtagagagatgaacctgagatatggaagggtaattaaatacagattatccgccatgagcgaatagagataatgcaacaccagctctgtaatatgtgtacagcaaggaaatcatcgaatttgcaaggcgtttttactc

SEQ ID NO: 4745 - DNA, 1561 bp, Oryza sativa
  ref <308>: DATABASE ACCESSION NUMBER: AK062000
  ref <309>: DATABASE ENTRY DATE: 2001-12-06
agcttaaagaattagaaccgaagtcagctgaagtaagtacagagtggagcatcgtacctggacgtgaaggccgaccaactctggcatccattcaacctggaggaactgtgtcatttgagcaccggaacatctatggtctaaacagatccattgttggttctgttacatccagcaacctgctcaaccctcaggatgatctctcattcaagcttgagtatgttcatccttatctggatggtgtggatgaccgtaataaaaaccgcaccttcaaaactagctgcttcaataccaggaaattgagtcctgtctttgttgctggccccaatatggatgaagctccacctgtttgggttgacagagttggattcaaagccaacataacagagagcttcacacgtcagagcaaattcacatatggccttgtggtagaggagattacaacgcgtgatgaaaccaacagcatctgcactcatggttctcgagcaatgcctagtggtggcctgagtatggatggacctcccacaaccctcagtggtactggcatagatcggatggcttttctgcaagcaaatataactagagacaatacagaatttgtaaatggtgcagttattggcgacagatgtattttccagttggatcaaggtcttggcattggaagcaaaaacccattcttcaaccgtcaccaacttactttgacaaagtttgttaatttaaacaagcaggagaaaggtgctggcaagccacttccagctgttttggttcttcatggtcattatgcaggttgtgtaggagatctgccaagctatgatgcatttacacttggaggaccttactcagttaggggctatggtatgggtgaactgggtgcttccaggaatgttcttgaggttgcgagtgagttgcgtattcctgtgaggaacacatatgtgtatggatttgttgaacatggcactgaccttggcagttccaaggatgtgaaagggaaccccacagagttcttccgacgggttggtcatgggtcatcatatggtcttggcgtcaagcttggcttggtaaggggagagtacatcgtagatcacaatgctggtactggaacagttttcttcagatttggcgagggattttgaaaacagttcagtcaaccaccagtggataatagatcattgaggtgggctgtttagctcatttgcaggcatagaatcctgaagcacctatgcatgttgtgtgaaccgttgatgtttctggattcaacttgaataggaacttctgttcccgctgaaataatgaagcaatgttgcttccatccaaagtgagaagttagctttcaggattagtattgtgtaggaagcaagatttgatcgcagtctggtgcttctttgacagaagtacttgctcctgtcattttcagtgctagagtttttttgttttgttcttttgctttggttagataaagtgttctagcagttttgtcccatattcgggctataaattttagttgaactatggtaagttggtaactactcctatctgttgctgcattttgtcggctcagagcttc

SEQ ID NO: 4746 - DNA, 1217 bp, Oryza sativa
  ref <308>: DATABASE ACCESSION NUMBER: AK062001
  ref <309>: DATABASE ENTRY DATE: 2001-12-06
ttgtgattaagacctgtgggactacaaagctcctgctcacaattccaaggattcttgagcttgctgaagggctttctatgccacttgctgctgtgaagtactcccgcgggatgttcatcttccccagtgcacagcctgctccccacaggagcttctctgaggaagttgctgtcctcaaccgctactttggccatctgaaatctggtggtaatgcttatgtgattggagatccagcaaagcctggccagaagtggcatatctactatgctactcagcacccggagcaacctatggttacccttgaaatgtgcatgaccggactggacaaggagaaagcttcagtctttttcaagacttctgctgatggtcacacatcatgtgctaaggaaatgacaaaactctcgggcatctctgacattatcccagagatggagatctgtgactttgacttcgaaccctgcggctactccatgaatgcaatccatggctcagcgttttctaccattcatgtgacccctgaggatggcttcagctacgccagttatgaggtcgtgggcttcgacgcctctactcttgcttatggcgacctggtgaagagggtcctcaggtgctttggcccttcggagttctctgttgctgttaccatctttggtgggcatggtcatgctggaacatgggcaaaggagctcaatgctgatgcttacaaatgcaacaacatggtagagcaggagctgccctgtggtggcctcctcatctaccagagcttcgacgctactgaagacgtacctgttgctgttgggtcgcccaaatctgttctgcactgcttcgaggctgagaatatggtgaaccctgctcctgttaaggaaggtaaactgggcaatcttctcccctggggagaggatgcgttggaggagaatgatggagtgtttgatgagtaagatgggacttctggtgacgattcgctgctttgttttcattccgtggcatttttatctgttgaggttgtcgtttggttattctgtgaagcagccagccaggctattagtattttcgcttgtaagcatgtgttctgatcttgggacgtatgcttggtctaaataataatggtgaactaaaagctctaggtggtcagctgcgtctgccacaatgagcatgcgtcgggagaaatgttgtcaaaacatatgaataagtatttgcgggaaatttcctttgccttc

SEQ ID NO: 4747 - DNA, 1555 bp, Oryza sativa
  ref <308>: DATABASE ACCESSION NUMBER: AK062002
  ref <309>: DATABASE ENTRY DATE: 2001-12-06
agtatgcttacggccttgctgctttgggaaggcagcttcatgcaatgggagcgactaatgtttcaaaaatccacccagatagcagcattgcttcagctttaatggatttgtaccagagcatgggtgatgcacttgctcatcaatatggaggctcagcagcacataacacagttttccctgagaggcaagggaagtggaaggctaccactcagtctcgggagttcctcaaatcaattagacggtattacagcaatgcctatactgatggtgagaaacaagatgccataaatctatttttgggttatttccaacctcaagatggaaagcctgctctctgggaattagactctgattactatcttcatgtgacaacatatggcgatgatcttatatctgatagctaccatatgacctcctcaactggaaatagtgcacctggggaatctggagctgcattgagccctggagccacattgagccctgttccagcatgtaaggaggacttctcaaggatgaaacttacttcatttgacaaacttattgaaaggacttgcagttcaataaggaacgtgcggcttcactgtgatgctgatctgaaacagagcggaactgttggaacttctggaatggccccagatgcagtggagatacagcttagaaccccaaactggttgtttggtcaaagaaaacacgcagagactgtcccaacagtaaaagttattccagtggaaaatgcaaatgagggtaacggggaggacacgaatgtttctctatgtggggaattgaattggctttcgtcagcagatacatgcgaggaggacaatttcagaaggtatcttgcattcacaacagcggacgtagagaatggctggtatggtggaacactgatatatgatcaagatgaaaacagcggggcttataaacattactctgaattttgccagggctcagtcatggatcccctcgagcacgatcccgagaaagaaatgcattatgcggaggccctcagcgtggatattgacatcactgatgatgcaacggtagaagcagaaatgcaagctgccctggacgattaccagataataggttcagacctcagcattattccatcttgtggatcgctcgctgaagatccaagccagctgacgaggtggatcattggtgatgataaactgcaagtcgcacagtagcccttttcttttttttgccaaagggctgtacagatttctacagcagccttgtcattcataaaccagttgcgtagatacgaagctcttaccatacaaaagagctaccccagccggtgtttttatccattttgctgggagcaaccatgcatgcaaataaacattgctggaggcaaggttagctttatttgtacatataggattggagagcataaacatggagggatagcactacttgggagtattaagtgtatgaagcagatcaaagctgtatttttttttgttgaataaactgtatgtgtgtagtcttcatttgttaagatttctggcctgtattttcttgggttggaaaaatgaaatgcattcac

SEQ ID NO: 4748 - DNA, 1433 bp, Oryza sativa
  ref <308>: DATABASE ACCESSION NUMBER: AK062003
  ref <309>: DATABASE ENTRY DATE: 2001-12-06
tcatctgcaactcagcaggaagcgcatgggaagatgttgtctgctggagagaatttcattcacccgggtggtgaacttctagaacttcagatggatgatgattgttcagctggagtttttcttggaaatgatcacgattcaagtcaaagcaacagccctcaaaagaagaggcgcaaatcagataatggagatgatggtgaggcatgcaagcgctgcagctgtaagaagtcaaagtgcttgaaactttactgcgagtgttttgctgctggtgtgtactgttctgaaccttgctcatgtcaagggtgtcttaacaagcccatacatgaggagattgttctttccactcgcaagcagatagaattcaggaacccactggcatttgctccaaaagtgatccgcatgtctgatgctggtcaggatattactggggaagatcctaacaacactccagcttcagctcgacataagagaggatgcaattgcaagaagtcaagctgtcttaagaaatactgtgaatgctatcagggaggcgttggatgctccagcaactgcagatgtgagggttgcaaaaacacatttggcaaaagagatgctgctgtatcaactgaggctgaagaaatgaagcaaggaggtgaagaagcagaaaattgtggaaaggaaaaggaaaacgatctacaaaaggcaaatgcacagagtgaagatcacccattccttgaacttgtcccgataactccacctttcgatgtttcaagttcgttgctcaaaccaccaaacttctcgagtgcaaagccaccaaggcctactaaagctcgctcgaactcatctcgttcatcttcgaaagctcctggagctgttcactcacagaagttctccaagattgctaatagtggcttgaatgaagaaatgccagatatattaagagatgatgcttctcctggtaactgtgtcaagacatcttcaccaaatggaaagagagtctcgccacctcataatgcactcagtgtttcaccaagccgaaaaggtggccggaagctgatactgaaatccatcccctcatttccatcactcattggagacgcaagcagcggttcatcaatgaacagttccgagagcgcattcaacactgcatcgcctcttgctttaggtccatcctaaaagctggctgctgattatgagcgtccggagtacaacttgtagtccgagaaaagtgcctcacatctgaagcacggcatcaggtactggatgagggtagtttaagttagaatattaagatcttgtagcatgtatttgtaacatatgttagtggcaaataatctgtatgtaagatagtatgttgtgatgatgataatgttgtcttgattgaattctatcaacactgtataaaatcacctctgtggaggtttttcaacttcaattccattttcccatcaccc

SEQ ID NO: 4749 - DNA, 443 bp, Oryza sativa
  ref <308>: DATABASE ACCESSION NUMBER: AK062004
  ref <309>: DATABASE ENTRY DATE: 2001-12-06
tatgtcagagaacacctgaaaagccctgcttgaatgatgtgagcgatgtcggaacgtggaggagagcagcattgatagtttcagtgtttcttgttgtattgactctcattccactctgggatgaacttgcagaggacctaggtgtaggacttgtgacttctttctgagatgaacttaccggtagagttaggccatgatgcaagtcaattttgtatgcgcttgtagtatccatagtgaaattgttgtaaaggcgtgcgaaattccgcttctaagtgaaatgttgacctactgagatgagccatttccttcctatggccagagcagttgtgcatccgaaatattgccgtttgttcaaaatacagtaattttgaaggttgatgtacagtaattcttttagacgcaactacagtaatattgaatgttaattgttattttttggcacg

SEQ ID NO: 4750 - DNA, 2267 bp, Oryza sativa
  ref <308>: DATABASE ACCESSION NUMBER: AK104859
  ref <309>: DATABASE ENTRY DATE: 2002-08-28
tttttccccccttcttccaccatccactaacccccatctcaacgcaaaccaccctctccgccgcgcgcgcgaggcagatctcgacggggagcgcagccgccgccgccagatcccgccccgatcgcccccgcctcgtccccacggtcccgtggatacctctctctctctctctctctctctctctctctcggatcggtgcgattgcctttctttttgcgcggcggggatcgggtgtgttttggggacggtgaaggagaggagtgaagtgtggaggcgaatcgaatcgatctgattaggagacctgccatttctgtgcttgattttgtttcgatctgctccttgggctgtagatctggaagggcttcgtgggatctgctgctcgagcttcgtgagttgcacaggaaagtcttgggcttttgcgctcagctccaccaccttcacctgttcctcgggccatggctgctctcgtcatctcgaagcagcgcagtcaccagcagcagtcatccgatcgccggaggaagccatcgtcgcacttcgcgtcaccccagtccatgcgtggcttcaatgctgtcaactgccgagccttccactccagcgtcagcattggcatcctgccatccccgcctccacccccagcgcgcacctactcctccccggagccgaagacgcccaagtcgcagccacaccacgggaagaagcggagcagggcaatatctataagcccttcaacgtctccgccatcccggcctgagctctgggctggccccgctttctcaaactctccgcctcccagctcgctgccgatacccaagttctcactccaccagaagcgcagtgtttcactcgagttgccacctgctggccgatcagatgatgtggtggtgcctttgcatgctaagtcagcgccttcgtcgccaaccgcaggctcaggtgtcagcttctttagtgatagtgatactgctatcgcgactgagaatctgaggagaatcctccacctgaaaatcgctgatcactgaatggatgatgggcaggtccttgtacataggctatctgcaaactaaccttggtagtgtgtatagagtaaccgagaatggccatctttcacctggatggtggttctgcatagttcatcaacaggaggtacttcaggcaggcaaagcacctcaagtatgcatggcagcgtgaaactgcggtgaatgacttggtggtgagactgttggttgtctggatgagagcacagcagtttctgggtagcctttgtagcttgtggtcacctctatgttactaatgtttttcagccttttgggtattccttctttaggttttagatcaccattatccatggtctcacatcattaacctttagtcgtagtctgtccttgttcctggtagttcatgcctggcagggtatgatagtgtcttagtactgttcaaatgcttagatgtctgcatctgattatctggcagctatccatgtgtgaaatatctgtaggatagcaatatcttgcagtgcatgcattttgcttcaccttgtagacattccttggttcctctggctcactctactcttgcttctggtgttctgcaaggaacattatgatctctcctagatgtctcttctgttttttggaaggaagaggcgcagtgggatttcatgaagctccaatcttccatgttcttgctccatatgacactactaattttatccatgcacctttccttttctttagtttgttccatagctaccatgtgagacctctcctatctttctttcatgcctctacaactagaattgtgtctagtagtgttatgccttttttagggcaccatcaataattcctagtccttgtttatgtccaagaaacgtatttggagttctactctcttctatatgatggacaagccagacttcagagacctttgagcatgcagacccaaatacggtttgcttatcacagtgcgcttcatggtattcatccctggagctcgtagccaccatcaagtttgaataatcttcgtagtcgacgggcagcacatatgctagaacgtcaattcagtgtagtgcctgcttggctagttgtacctggtactgtttttgttataacattttgtcgatgtcttgatacattagcgtagtgtctatttgggctggcagtgtagtacctgcctggctatttgtatcagcttgcttaatacttaaaagtagacctttttccactgccttccgagtttttatgatatatttggatgttaatgttgtagcactt

SEQ ID NO: 4751 - DNA, 1690 bp, Oryza sativa
  ref <308>: DATABASE ACCESSION NUMBER: AK062005
  ref <309>: DATABASE ENTRY DATE: 2001-12-06
agcaccagctcgacgaggagaaccagagagccgcgctcttccactcctctgccccatcttcctctttgggagctgacggggaggaggagagggagactgtgccgctgctgtcctgcaagatggccgacgataaatctgacactgtccaggtctccgaggatacggcgcaccagattagcattgatccctggtatcaagttggattcattctgacaaccggggtgaatagtgcatatgttctgggatattctgcatcaatcatggtccctttaggctggattggtgggacatgtggcttgattctagctgctgcaatatccatgtatgcaaatgctcttcttgctcaccttcatgaagttggtggcaaacgccatatcagatacagagatcttgctgggcacatatatggtagaaaaatgtattcgcttacatgggctctgcaatatgttaatctattcatgatcaacactggccttatcattttagctggtcaagccctgaaggcaatatatgtattatttagggacgatggagttctaaagctaccctactgcatagcattatctgggtttgtctgtgctctttttgcctttggaatcccttatctgtctgctctcaggatttggttgggattatcaacagttttcagtctcatctatataatgatagcatttgtcatgtcgcttagagatgggattaccacacctgcaaaggattatactattcctggatcacattcagatagaatcttcactacgataggtgctgtagcaaaccttgtgttcgcttacaacactggaatgctcccagaaattcaagcaaccataaggcctcctgtggtcaagaatatggagaaggctctatggttccagttcactgttggttcgttgcctctttatgctgtcacctttatggggtattgggcgtacgggtcctcaacatcaagctatctactgaatagtgtgaagggaccaatttggataaaaactgtggcaaatttatcggcgtttcttcagactgtcatagcattacatatatttgcaagcccaatgtacgaattcttggacacaagattcggcagtggacatggtggtccttttgcaatccacaacataatgttcagagtgggtgtcagaggaggctacctgaccgtcaacaccttggtggccgcgatgctccccttccttggcgacttcatgagcctgacgggtgcactcagcacctttcccctgacattcgttcttgcaaatcacatgtacctcacggtgaagcagaacaagatgtccatcttcaggaaatgctggcactggctgaacgttgttggcttcagctgcttgtccgtcgcagctgcggttgctgcggtgaggctaatcacggtcgactacagtacataccatttgtttgctgatatgtgaggctggaaagtgcaggcatgcagccctggatcagctgtaaattcgtcctcttcttttttatttttttggttaggggatgcatgtaggtcgatagaatgatggagattgcaataaataatttggctaaaatgttgtccagatttggttgtttgaggtgcaagatgtttgcctcaaaacgtaccgctatggttcactttttaagaactgtactgctacctctgtttgcggagatttttgtctgcaggcatgcaggatgaatattattcaagtgctct

SEQ ID NO: 4752 - DNA, 1245 bp, Oryza sativa
  ref <308>: DATABASE ACCESSION NUMBER: AK104860
  ref <309>: DATABASE ENTRY DATE: 2002-08-28
atccaacaaattgcctaacactaacaagcaacgatgaccgtcgtcgtcgttgccgatgacgccgccgccgccgcagcggcggcgcagcagcaggaggagctgccgccggggcacggccaaacggtgtgtgtcaccggcgccgccgggtacatcgcgtcgtggctcgtcaagctgctgctggagaggggctacaccgtgaagggcacagtgagaaacccagatgacccgaagaacgcccacctgaaggcgctggacggcgccgacgagaggctggtcctctgcaaggccgacctcctcgactacgactccatccgcgccgccgtcgacggctgccacggcgtgttccacaccgcctcccccgtcaccgatgaccctgagcagatggtggagccggcggtgcgggggacggagtacgtgataaaggcggcggcggaggccggcacggtgcgccgggtggtgttcacgtcgtccatcggcgccgtcaccatggaccccaaccgcggccccgacgtggtcgtcgacgagtcctgctggagcgacctcgagttctgcaagaaaaccaagaactggtactgctacggtaaggcggtggcagagcaggaggcgtgcaaggcggccgaagagcgcggcgtcgacctcgtcgtcgtcagccccgtgctggtggtcggcccgctgctgcagccgacggtgaacgccagcgccgtgcacatcctcaagtacctcgacggctcggccaagaagtacgccaatgccgtgcaggcgtacgtggacgtgcgcgacgtcgcggctgcgcacgtccgcgtcttcgaggcgccggaggcctccggccggcacctctgcgccgagcgcgtcctgcaccgtgaggacgtcgtccacatcctcggcaagctcttccccgagtatcctgtgcccacaaggtgctctgacgaggtgaacccacggaagcagccgtacaagatgtccaacaagaagctgcaggatcttggcctccacttcatacctgtgagcgactcgctctacgagacggtgaagagcctccaggagaaggggcaccttccagttctgagcaaagagatcccagaagagttgaatggtgtgccagcatgatactgttgaagaaacagagcatttaacgttctcctgtaacagtgttaggcatctgttgttatgtatgtaaactaagtggataacgaaaaaacatggagactatcattgaatataaacagacgtgaattctgccccttc

SEQ ID NO: 4753 - DNA, 1396 bp, Oryza sativa
  ref <308>: DATABASE ACCESSION NUMBER: AK062006
  ref <309>: DATABASE ENTRY DATE: 2001-12-06
tttcgttgtgggtggttaatttgtttttgttttaggtaatgcacatttgtgtagccaacaaatggcggcgccggtgaggtcggtgctccccgtcgtgctcctcggctgcggcggcgtcggccgccacctcctccgccacatcctctcctgccgccctctccacgccaaccagggcgtcgccatccgggtgctcggcgtcgccgacagctcctctctgctcgtcgccgacgacctccactccaacggcttcgacgacgcgctcctcgctgatctctgcgccgccaagtccgccggctcgcccttatcttctctgctctctcgagggcaatgtcagctattcaacaaccctgaggctaggaggaaagtcattgacactgccagcgttcttgggaaaacaactggtcttgtactagttgattgttctgcaacttatgatactgttggcatgctaaaggatgccgtggatcgtggatgttgtgttgtattggcaaacaagaaaccgcttacttgtgcttatgaggatttcgaaaagttggtttccaacttccgtcgcatgagatttgaatctactgttggagccggtttgcctgtaatagcttctgtgacccgtattattgcctctggagatccagtttctcgtattgttggcagtctgagtggtacacttggttatgtgatgagtgagctggaggatggaaagagatttagtgaagttgtgaaaactgccaagtctcttggctatacagaaccagatccacgtgatgatctcagtgggatggacgtagctagaaaggcattgatcttagctaggcttctggggcagcggatcagcatggagaatattaatgttgagggtttataccccagtgaatttggacctgatgcaatgtccacaaaggacttccttgaaagtggtttagtacagcttgataaaagcattgaagaaagagtaaaggcagcatctttgaaaggaaatgttcttcgctatgtctgtaagattgaaagcacagggtgccaagtgggccttgaagaactcccgaaaaactctgcactgggaaggttgagaggaagtgacaatgtggtggagatatacagcagatgctacgagagcgcccctctggtgattcagggcgctggagctggcaatgataccactgcagctggagttcttgctgacatacttgatctccaggatctcttccacaaaacggcttgaaacctatgtcttctaggtcgaaccgcagagttgattatgagtcttgtgacttgtggggttgttttggtcacagtattacttaaataaatcttgagcagatatcaatttttgtactgtacgcagaaggtttttgaacaaatttggaagttggaaccaatgagcagtgacatccttttgctt

SEQ ID NO: 4754 - DNA, 1241 bp, Oryza sativa
  ref <308>: DATABASE ACCESSION NUMBER: AK062007
  ref <309>: DATABASE ENTRY DATE: 2001-12-06
ggctatgaggacaagaccgaatggggaactgagattgggtggatctacggttccgtgacagaagatattctcactggattcaagatgcatgcgcgaggctggagatcaatctactgcatgcccaagcgcccagctttcaaggggtctgctcctatcaatctttcagatcgtcttaaccaagtgcttcggtgggcacttggttctgttgaaattcttttcagtcgccattgtcccatatggtacggctatggaggacgccttaagttcttggagagatttgcctacatcaacaccactatttatccattgacatcgatcccgcttctcatatactgtgttttgcctgctatctgtttgctcactgggaagttcatcatcccagagattagcaactttgctagtatttggttcatctctctcttcatttcaatttttgccactggtatccttgagatgaggtggagtggtgttggcatcgatgagtggtggaggaatgaacagttctgggttattggaggtatatctgcgcatctttttgccgtcttccagggtctcctcaaggtgcttgctggtatcgacaccaatttcactgtcacctcaaaggcttctgatgaagatggcgactttgctgagctctacatgttcaagtggacaacgcttctcatcccaccgacgaccatcttgatcattaacctggtcggtgttgttgctggtatctcatacgcgatcaacagcggctaccaatcatggggaccgctctttggcaagctcttctttgccttctgggtgattgtccacttgtaccccttcctcaagggtcttatgggtcggcaaaaccgcactccgaccatcgttgttgtttgggcaatccttctggcttcgatcttctcattgctgtgggttcgcatcgatccattcaccacccgtgtcaccggcccagatacccaaacatgtggcatcaactgctaagaaagcaggggattgtagagacagaaatactgccagttgtgttttttcagaatacaaagtgccactgccaccaattgtgttttaagttattaggaggtggctttatttacagctacgtacagaccagaaaatattgctcatcagaaagttacttgtgtcgatatgtattcttttgttgataagttatatactattttgatgagagtggctgacactgtcaacgagttttgtatcttatgaaggacacaataaactattagtttgcattcttt

SEQ ID NO: 4755 - DNA, 451 bp, Oryza sativa
  ref <308>: DATABASE ACCESSION NUMBER: AK062008
  ref <309>: DATABASE ENTRY DATE: 2001-12-06
ctggtgtttctatggttgcctcagtctccctggcaatctcgtacccaactattgctgctgcaccacacatgttcctcaatgggtacaagaatgtgcttgctgttgctgtggagaccgaatactcgtacccacatgctgataagatcaaggagtatttgaaagaccccagcaagttcgctgttgctgccccagttgccgccgacagtggtgctgctgctccatcggctgccaaggaggaagagaagaaggaagagcccgaggaggagtccgatggtgacctgggcatgagcctcttcgactaagcctcttgccatatcgctgcaaagttgaaagttttgtttcaagttctgaacatcgaagtttgtttttaatctttagcatattaattttctactagacaagaatgtatccaacaatggtatcgttaattatgcattttggttgtgcccgt

SEQ ID NO: 4756 - DNA, 1416 bp, Oryza sativa
  ref <308>: DATABASE ACCESSION NUMBER: AK062009
  ref <309>: DATABASE ENTRY DATE: 2001-12-06
gatatgctccaaagatagtaccaaagtctgtcaaaacctcctccgatagtcctctggatcgcacatctgttagtaagaggcctgattctctgaagcttggcatgagtattaaccagaaggctaagactgacaatgatcgtttattgagaggaccaaatgtagcgcctcataagatgtctggatcaaccgaaaggaacaagcttacaacaaaacaaacaggtgtcagaagaccttcctctgcatcctcacaacggccctctgtgggagagcggcaccggatagccagggagagcataaaaaagcctgctgatgtttccaccccacggcgtccttccactgcagaaaggcaccctgtcaccacagagcgtgcaaggaagcaagccgatgtagatacaccacgccgaccatctacttctgaaagacgtgctgtcaacaaagggagtgctgacatgaccactacacatcgcccctctactggagaaaggcgatctgttaccagggagagtgttctgaagatggacgtaagaacacctagcaagacaaggcctactatgacgcaactgaagggtgcaacaaccacagtgggtattgttaaaaaggcaggcactccaaatgcttctaaaagcatcaacatgggaacaaaaagcaatatcagagaactggaaggaccttcgaaagtgggcagacactctgttgggtcaaaaattacggacctgcaaattgctggcaaacagaaatcaagctctgtccaccttcctccacggaaactattgagttccagtattggagaaccagcactgcaaacctttacaaggccaaaaaagaaagatgttgcagcgcaatctcgagcatctacatcgaggagagcaatgactttgcacactggaaacgtaaaggggaggagttcaaatccacccccaccaccacctccaccgcgtcggccttcacggacgacgaacagaccaaatggcagtaactcatcaactgttggacaaaagccaaaggtttcatcagcaccaaaatggcattgatgcaaagggagactttcattcaacctactctcccgcacaaatgatggatctgcgacaagtcgcaccgctacacgaatcttaaagcatcggcattgctgtccacttcccctgaatgatgtttgatgtttctgtatatcagttcctctactctctagtgcctccccccttcccttcagagcaagtccaatatagtgtatgtagttacctgtatcatatcatcaactgcctagctttgtcgcccaaggaacttagaacagtgctgtacatacctcaaataaaatgtttcgtcagctaaagtaaggctaccctgaacatgtgaaaaatctgtggtctctgaacattgtctgcacatcatcagtagtaatggaaatcgttcattcttttc

SEQ ID NO: 4757 - DNA, 900 bp, Oryza sativa
  ref <308>: DATABASE ACCESSION NUMBER: AK104861
  ref <309>: DATABASE ENTRY DATE: 2002-08-28
agaggtagcggcggcgttctcctgctcccgccgcattcgctcaccgacaccggtgagggtgaatccatcccatccggcctccagtttcgtctcctcgatcgccccgccgcttgcttgcgccgatccccatcctgcgcccggcgtcctcctgcttcccaccgcatcgtcgctcgccgctccccatcccaccactaatggtctctctccggctcatcgccgcattcgcgcccgctccgccaccgccaccgccaccgcggccccgacgagcgccgccgtccgcggcgcgcctggcgagcaacggcatagcctttgtcactgtggcagccgtagccgctgcctcgccgccagcgatcgccgcgctggccgccgagccggccaacgcgctctcgctgcccacttgggccgtccacgtctccagcgtcgccgagtgggtgacggctatggcgctggtttgggactacggtgagaggacggggctcaagggttggaaaggcctctcttggggaatggttccacttcttggtggagcgatgtgcgcttgcacgtggcatttcttctataattcggagtctcttgaagtgcttgtagcgctccaaggtgctctaacagtgattggtaacattacaatgtgcatagctgcatttcgcatcttcaaagcatcccaggaaagctcaaaaagttcatagagttacacctgacatgaaatggcaaacggcagatgctgcgaaggaagaagataaaagctgctgatggcttgcagctacttcagaaagatgtttgtatgtatcaattctacaaatgccagctaaagccaccctgaaatttgtgtattgacttggtttttttctagacaatgagtgtatttactcagataagaagaaaaattacctcacctgctat

SEQ ID NO: 4758 - DNA, 670 bp, Oryza sativa
  ref <308>: DATABASE ACCESSION NUMBER: AK062010
  ref <309>: DATABASE ENTRY DATE: 2001-12-06
atgaacgttttacattgtaattagtcttggcaacagcatccagcagactaatcttagtgtctaaacaatttctgttactgaaaggcaaggggtttcttctggcttgtttggtatggccgttggttactctgatgaagttgaggggagcttctgtggcaagttcaatgccaatgctggattgaagaggcaaaatgtagatttgtacaaagaaagagggtactccatgtacagttgataacattattatgcgttgtagtcccttggcacaagctagggatgatggatatgattttttttaaccttttttggttggataactgcaaaaaaaaaatgctaaccgattgggagaggcaatgatggaatttttgggtattccggatcgtcgttgtgttcaatatgtgaagcatccagttcctctcaggcaaagaaagctccaattcaactggcaagcaccgcaggtgcctgctgaaatcccccatatgtgctgtgctcatagattatcttgtgctgctttaagtttccgtagaaggtttgcgtgatgtcattgcatgcactgggggacggccttggcccctgggggctgtacttatgctgatctaattgtaagcttggatgttatatcatattcgtcaggctgatgcagctagcagaaaccaaagaaggaaatgct

SEQ ID NO: 4759 - DNA, 1745 bp, Oryza sativa
  ref <308>: DATABASE ACCESSION NUMBER: AK062011
  ref <309>: DATABASE ENTRY DATE: 2001-12-06
gaacttattagttatgcacgtgccaacaacaaggtaatcattggaccagcaacagttggaggaatccaagctggtgctttcaagattggtgatactgctggaaccattgacaacattattcaatgcaagctttacaggcctggatctgttggctttgtttctaaatcgggtggcatgtcaaatgagatgtacaacaccattgccagagtgacagatggtatttatgaaggaattgcaattggaggggatgttttccctggctcaactctgtcagaccacatcctgcgtttcaacaacatacctcaggtcaaaatgatggttgttcttggggagcttggaggaaaagatgagtattctcttgttgaagccctgaaacaaggaaaggttcagaaacctgttgttgcatgggttagtgggacatgcgctcgtctattcaagtctgaagtgcagtttggccatgctggtgcgaaaagtggtggtgagttggaatcagcacaagctaagaaccaggcactaaaagatgccggggcagttgtccctacttcatatgaagctcttgaaactgcgatcaaggagacatttgagaaactggttgaggacggaaagatctctcctgttactgagattacaccacctcctattccagaggatcttaaaaccgcaattaagagtgggaaggtccgagctcccacacacattatctccactatctcggatgacagaggcgaggaaccctgctatgctggtgtccccatgtctacaattattgaacagggttatggagttggtgacgttatttcgcttttgtggttcaagcgcagtcttcctcgttactgcactcagtttattgagatgtgcatcatgctttgcgctgatcatggtccttgtgtatccggtgctcacaattctatagttactgctagggctggaaaggaccttgtttccagcttggtatctggtttattgacaattggcccccgttttggtggtgcaattgatgatgctgcccggtacttcaaagatgcatatgatagaaatctcacaccttatgagttcgttgagggtatgaaaaagaagggaatccgtgtccctgggattggtcacaggatcaagagcagagacaacagagataagagagtgcagcttctacagaaatatgcccacacacatttcccttctgtcaaatacatggagtatgctgtccaggttgagacctacaccctgtcaaaagccaacaatttggttctgaacgtcgatggtgcgattgggtcgcttttcttggatcttctttctggcagtggaatgttcagcaaacaagaaatcgatgagattgttgagattggttaccttaatggactctttgtgcttgcgcgttcaattggtctcatcgggcacacctttgaccagaagaggctcaagcaaccactctaccgccacccatgggaggatgtcctctacaccaagtgaagactcggttgttcttaatattacctagatattccagctttgtacacacttcaaaaggtcaagcgaaattgcataaaagtgaacgccgatgaaactagggggagaagaatggggtcaccggtgaccgctgttgttgcgtgtttcaagttagttgcaaattgagatctgttcctgatttttgtcaaagcaagaaccattaggacaacatgggggatattggaaatttactgtatcatcgtgtactatcgattctctcaacgaaaaaaaaatctagtctg

SEQ ID NO: 4760 - DNA, 1270 bp, Oryza sativa
  ref <308>: DATABASE ACCESSION NUMBER: AK062012
  ref <309>: DATABASE ENTRY DATE: 2001-12-06
agatcccgcaaaccgcgaaacaaaccacccccgcatctctctctctctctctcttcgtcgagctcctcctcctccgctgctgctgccgcccatggcttcgtcgtcgaagaggagaggcggggctggaggtggaggagcggagaagaaggacctcttccatgtcgtccacaaggtgcccgcaggggacagcccgtacgtcagagccaagcacctgcagcttgtcgataaggatccggagacagccatcgtgtggttctggaaggcgatcaactccagggacaaggtggatagtgccctgaaggacatggctgtggtgatgaagcagcaggatcgcgccaaggaggcgatagaagccatcagatcattcaggcacctctgctcaaggcaggctcaggagtcccttgacaaccttctgatcgacctctacaagaaatgtggcaaagtcgatgaacagatcgatctactgaaacagaagctgaagatgatataccttggagaggccttcaacgggaaggcgaccaagacagcacgttcccatgggaaaaagttccaggtctctatccagcaggagacttctcgcattctgggcaatcttggctgggcttacatgcagcagagcaactattcagccgctgaattggtgtatcgcaaggcgcaaagcattgagcctgatgccaatagggcatgcaaccttgggctgtgcctaattaagcagagcaggcatgatgaagcaagacaagtacttcatgatgttgtgctacgcagaatctccggatcggaagatgacaaggtggtagcccgagctaagcagcttctccatgaacttgagccggtgacgcatgttacgtcgccaaataatgctgggctgagtgtcagtgaagagatcatggagagactagaccttgtgttgaacgaatggacgccgttcaggtcaaggaggctgccggtatttgaggagatagctaccttaagggaccaaattgcttgttgatccctttattcgcaaggtttttgttcttttgcttaatgtgcatacgggtgcgttgccttagaaattcatgtgcatatgtagaggctgttgtgggcttgtggcagtgcgagtaatggagtaaaggttgtgatgttcagatagatatcatatagctagagatcatgcaaagcatccaaggaatagtgtattttgtcttcatgttctatgatgcttataatgtgttgtaaacattctacagactacaagaaatccaagtgtacacttcacttggcttgttgg

SEQ ID NO: 4761 - DNA, 1296 bp, Oryza sativa
  ref <308>: DATABASE ACCESSION NUMBER: AK104862
  ref <309>: DATABASE ENTRY DATE: 2002-08-28
catcgatctgcatgcgaagtcctgcagcctccgtagcagacacgtacaacgtaccgagcaaccttagctagtggcgcctgaaaattattaagcgcttcaagatggcaaagcatggcgttgcttccgttttaacactggcattggtccttggagttgcggccattcctacagtggtgcaatctatcggcgtgtgctacggcgtgatcgggaacaacctgccgtcgccgagcgacgtcgtgcagctctacaagtccaacggcatcgactccatgcgcatctacttcccaagaagcgacatcctccaggccctcagcggctcaagcatcgccctcaccatggacgtcggcaacgatcagctcggctccctcgcctccgacccctccgccgccgccgccttcgtccagaacaacatccaggcgttcccgggcgtcaacttccgctacatcacggtcggcaacgaggtttccggcggcgacacgcagaacatcctcccggccatgcagaacatgaacagcgccctctccgccgccggcctcggcaacatcaaggtgtcgacgtcggtgtcccagggcgtgaccgccggcttcccgccgtccgccggcacgttctccgcctcgcacatggggcccatagctcagtacctggcgagcaccggcgcgccgctgctcgccaacgtctacccctacttcgcctacgtgggcaaccaggcccagatcgacatcaactacgcgctcttcacgtcgccgggcacggtggtgcaggacggcggcaacgcgtaccagaacctgttcgacgccatcgtcgacacgttctactccgcgctggagagcgccggcgccgggagcgtcccgatcgtggtgtcggagagcgggtggccgtcggccggcggcacggcggcgagcgccggcaacgcgcagacgtacaaccagaacctgatcaaccacgtcgggcaggggacgcccaagaggcccgggagcatcgagacctacattttcgccatgttcaacgagaaccagaagggaggcgacgagacggagaggcacttcggcctcttcaacccggaccagtcgccggcatactccatcaatttctaagaagattgttctgagaagggatcgatcgatgatgaattaaacgtcgatcgatatagatatatacatacacgcgttccatatatagtttgggtttgaataagctttctgcctgcatattgcaaagctcaatgcatgcatgtaacggtgcagggacaaataatatgaacttgaataaagtttaccagacctattttcgcgtagt

SEQ ID NO: 4762 - DNA, 1070 bp, Oryza sativa
  ref <308>: DATABASE ACCESSION NUMBER: AK062013
  ref <309>: DATABASE ENTRY DATE: 2001-12-06
aatctcgaataggaagaaggatgcttggttttgcgccggcaccaggccggccgctcttcgtgctcttcggttcctccatcgtccagttcagcttcagcaatggcggatggggcgctgcccttgcagacatctacgctcgcaaggctgatatccttctcagagggtatattggttggaactcaaggcgcgcccttcaagtcattgacaaaatttttcccaaggattcgcccgtgcaaccttctttggtaatagtttactttggtggcaatgattcggttgctgcccattcatccggccttggacctcatgtgccactagaggagtacatagacaacatgagaaagatcgcagaccacctgaagagcttgtctgagaagacccgtgtcatcttcctcagctgcccaccacttaacgaggagacgctccgaaaatcaaccagcactgtcctgagtgagatagtgcggacaaacgaaacttgccgcctatactccgaagcctgtgtatctctatgcaaagagatggacctgaaggtggttgatctttggaatgctatgcagaaacgggacgactgggcgacggcctgcttcacggatgggcttcatctgtctgaagaagggagcaagattgttgtggaagagatcctgaggatcctcaaggaggcagagtgggatccatgcctgcactggaaggcgatgccgacagagtttggggaggactcaccctatgatctcgtctcctccagcggccaatccaccgtcaacccctccgactggaccttccacaggactatccaatgggactgaccttccattcgtctcaatctcagtatctcatgatggagcatatacatgcatgctccaacgtgcaacattacatgcatgattcataattaagatccccttcggtcttactatatatgtaggggtctaatgctagctgatgacgaggggtcatggattaggcttcagctcgatcgagctgaaaaaaaatcagatttaggatgatattaactgctttgctccctgcctgctatatatcataagtgagacaatgcacatgattatctcgct

SEQ ID NO: 4763 - DNA, 1462 bp, Oryza sativa
  ref <308>: DATABASE ACCESSION NUMBER: AK104863
  ref <309>: DATABASE ENTRY DATE: 2002-08-28
aggaggcgatgagaatggccgcgccgcagcaagtgcatgtgcgtgccgccccgctcgcgcgcgcgctccgaactcgcgtcgccgccgccgccgcgtctgcgagctctcccgaacgcgcgctcctcggcctctccgaaccggatctccggcagctcgccgtcgacctcggccagcaaagttacagggggaagcagcttcacgacctcctctacaagtccagggccaagcaaatccaagaatttagccacgtaccaaaggtgttccgtgaggccttggtcggcgctggctggaaggttggccgctcgccagtgcaccatgctgtgacggcctccgatggcactaccaagatacttctcaagttggaggataacagattgatcgaaacagtagggatccctgtcgatgatgacaaaggcccgtcaagactcactgcctgcgtttcatcacaggttggctgccccttgcgttgctcattttgtgccactggcaagggagggtttgcaagaaaccttcatgcacatgagattgttgagcaggttttggccatagaggagacgttccaacacagggtgacaaatgtagtgttcatggggatgggtgagcctatgttgaacctgaaatcagttttagaggcacatcgatgcttgaacaaggaactaaaaattgggcaaaggatgataacaatctccacagtaggtgttcccagcactataaaaaagttagcatctcacaagcttcagtcaacacttgcagtcagcctgcacgccccaaatcagaaactacgggaaacaattgttccaagtgcaaagtcatatcccttggaggcactaatggatgactgcaagaattacttcctcgaaactggacgaagggtatccttcgagtacactctgctagctgggattaatgacgcaaaggagcatgctgaagaacttgcagagctactgcatacatgtggcggtggttatcatgtgaacctaattccttataatccgattcaaggttctgaatacaagaggccctacagaaaagtggttcaagcgtttgttgatgcgctagaagctcggaagataaccgtaagcgttcgacaaacccgtgggcttgatgctaatgccgcttgcggacaactaaggaatgagttccagaagaatccactgcttgaatcatcaccttcatcagagcccaacctcgtaccagcttgatgagaagactgagttcatgatggccatgcacaatgattgcagattatcagtccatcacactgaaagctgatattgtactcgtagttgttatcggcatttcctgatgtatttgaattttcaagagttgttataagtagatatatatttagtgccacatacgggtgctatagaatcattatgcacattgcttaggtatgtaatctgcctgacgttgtgaaaaatggctcttcctgaatatcaccagatgcgaaaatttccac

SEQ ID NO: 4764 - DNA, 786 bp, Oryza sativa
  ref <308>: DATABASE ACCESSION NUMBER: AK104864
  ref <309>: DATABASE ENTRY DATE: 2002-08-28
gcggcagcagagagcacagctcggcaacaccatggcgccggcagcgctagccgctcccatcgcgtccatttcccccagctccgccgggagggtcaccgccgccgccgccggcctccgctctgccaggatggccagctcacctgtagcccagcccattggcgaggcagttgtgttacggcccaaccagatgttcagatcagtgctgcgacagcggaggcgtctggtggtccgaagcagcagctcagatgaaaccaattccaccaccgaagagaagacgccattcggatacacgaggaaggacgtgctgctcatcggcgtcggcgtgacactcttaggctacggcctcaaatacgggctggagctggtcggagtcgatcccttgcaagcaggaaacgccgtccagctgatcatcgtgctcgggatgacggtggggtggatctcgacgtacatgttcagggtggccaacaaggacatgacctacgcccagcagctcagggactatgagaagcaagtcatggaggaacgattggagagcttgacagaggctgaactgcaagttctgctcgagcaagtagaggaagagaagcagcggctgactccagtgagggatcagggtgttaccttcactaggaaaacggaggatcaggcgaatgccagctagaacaccttgattctgtaattagctagctctcctgcactgttagatagcttgaattaagaactagcggtggatgtggatcgtacgtcatacgaatgaccagctaatgtcttccatgtttgtgcatc

SEQ ID NO: 4765 - DNA, 600 bp, Oryza sativa
  ref <308>: DATABASE ACCESSION NUMBER: AK062014
  ref <309>: DATABASE ENTRY DATE: 2001-12-06
acaagaaccagggtgctgaattggaatttgcacggatagtgaaagccaagcgtcaagttgtgactggtaccttgcatgacctgatgttggaggtagttgattctggaaagaaaagcctgtatagtgcaaaggtatgggtgaagccgtggctagattttaaggcagtcgtcgagttccgtcacgttggggactcccagtcacagtcggccactgctgctgatgataacgctgggcaagatactgctgatcccactgtggcatcaaggaacgacctgcacaacactgagaacaataaagtctctgttgtcctgtcaaccttttctcagacatactcggtgtgaatctagctccatggagaggatatggaagacttgagcttctgagagctagctgtcagtaatttgtgaagtaaagtagctgttatccttttgtgaagttttccccactgttatggaatgatgtctagatcgtaatatgccgttgagcagacatgagtttgacatctggagtgtatatttgttgctgcaaactgcaaagtgaacactcccatgtatattccatacctttcgttcccatgcatgtatataaggcattactgct

SEQ ID NO: 4766 - DNA, 1232 bp, Oryza sativa
  ref <308>: DATABASE ACCESSION NUMBER: AK062015
  ref <309>: DATABASE ENTRY DATE: 2001-12-06
gacgcacgcatccttccttcctcctcccgcaccaccggcgaccggtaaaacggagagacccgtgggcgagcttgttcgaggcggggcaccaccaccatgtcggcccccgcggcggtggagcagcggctgcaggcgctgcggcagaagctggggaggaagcagcacttcgaggaggccgtcgccgacctcgccgccgcggtccgggaccaccacgccgccgcctcccccgccctccgcgatctgatgtattctacagtttgccgtgtggcaactgtccttcagactagatatacagcacctggattctggcgtgctggtctgaacctcttcttaggtacagagaagctggtaactaatccttcagaaaaggagcaactgaagactttcattctgagggcccgggagcatcttgatgagaaagagaacgaggaatccatgccaaacaacagggaaacagatacaagatttctttttgaagggcatcttacagtgggacctgaacccccacctcctgcctggcttgttgcccagaatttagcacgagaacttagcattttagctgaaccttctggagatcaaggtgcgaacaacaacggagagtccagggctgaggagatggcacctgctgctgctataatgaatttcttaaacaccatgacagtggatggagacctagaagccgctttggaagaatctctgcagaatgtgatggcgaatcctaaggtgcctccagcttcaaaggaagtcgttgcgaatctaccagttgtaaccgtgacagaagaaatcatagctagattgggcaaagagactcagtgtgctgtttgccgggagagcttgctggtggacgacaagatgcaggagctaccgtgcaagcatcttttccaccctccatgcctcaagccatggctggacgagaacaactcctgcccgatctgccggcacgagctgaggacggacgaccatgtgtacgagagccggaaggagcgggagcgagaagaggaggaagacaggaagggcgccgcgaatgctgtcaggggtggggagttcatgtatgtctgaacatctgaatttcaaccgaacgtgattatctctctgtaacgatttcctgaaattcagagtgcactggagttgaaaattcatgtacaaacaacgtttgcttcggttcaccaccgtatcttcgttgaatgatactaccactatacagccagcttattacagcatcattgttcgtt

SEQ ID NO: 4767 - DNA, 752 bp, Oryza sativa
  ref <308>: DATABASE ACCESSION NUMBER: AK062016
  ref <309>: DATABASE ENTRY DATE: 2001-12-06
accgctcctgctcccagtagtccagtactctcgctccactctcctcgccgagtcgccgtcgccgcctcggccagcttcggattgggttccagcaccggggcggataatctgctgctgctgctgctgctgcaaggtctcgaatacccagacttcgagagatggcaacaactaccgtcaccacaccaattctctgcaacctcagcgccaagccacgcgacaccctgcgcctgccgacgacgcgttcgccgaacgacggcacgaggcgaacgacgctccacctgagctcgtcaagagcccgcggcgacttgatccgcgccgccgccgccgtctacacggtgaagctcatcgggccggaggggcaggagagcgtgatcaaggtgccggaggacacctacatcctggacgcggccgaggaagccggcgtcgacctgccctactcgtgccgcgccggcgcgtgctccacctgcgccggcaaggtcgtcgagggcggcgtcgaccagtcggaccagtcgttcctcgacgacgcccaggtcggcgccggctacgtgctcacctgcgtcgcgtacccgaccgccaacagcgtcatccagacgcacaaggaggcagacctgtattagttagctagctgcgttgcacttgatgatttgatccatcactttcgatgcaatcttgacgctgtggtttgcacatgcacttgccgttgaaactagccagaatttatcgtcatcttccacttggattgagttaagtgt

SEQ ID NO: 4768 - DNA, 1675 bp, Oryza sativa
  ref <308>: DATABASE ACCESSION NUMBER: AK062017
  ref <309>: DATABASE ENTRY DATE: 2001-12-06
ggcaatagcattttttatgccctaagtcaaaaaattattgagcttgaggatgagcttcatgaagtaaggggtaaacttgatgcttccgaggaaaagaacatgcgttgccattgtaattttggtgctaactcagaactgtctgaacatgaggaaaagcaacaggtttcagatgtggaaaccagtagccttcagaaggatcttgatgaagtcaaaagtgaaaaggaagcattggaagctgttgtattggtgaacaaagatgaaattgataggctgaaggaatcaatggtatcggcagccaagcagtttgaagttgaacttgcgcatcgtgatactgaaattgataagtgcaaacaggagcttgaggtactttcggagaagtatctgcatgatatatctgctcttgaggctgaaattggaaagctccagggagtcatcaaaacctttgaagacgactttgcaaaaatatcacaggagaaattgatgctcgaatctcgggttgaagagcttgagcagtcagttaacagctcaaattattcggtttctgagatggttaatctgcaagaactaatgaaggatacacaagcagaattagaaaaggtttcacaggagaaagaagtgctcagagaacgtgatcttgaatttgagcaacttttgggggactttgagaattcaggcatggaggttgcaaagctaccagaaaccatcaagaacttgggagcccagatagagggaacactacaggagaaatcagtactccaggacaggattaaggagctggagcaggctgtccatgattcattgcagaaccattcactggagaagtcctctctgagtgctgagctttcaaaattatctgaagccaatgcttctcttgaagccaagttggcatccgtggaggcagagctcaaacaagtttacgacgaaaaggctaatgaatccctcaacagcgagaaggaaatctccaggctgaatcaagaactggccaatgtcaaaaccgatctggaattgctgttatccgagaaatccctggtggacaacaaagtaaccactctactaaccgacatcacaactcgcgatgaaaagatgaagcagatggatgatcaactgaatcagcttcagcttgagcattccaagctaatggcacaggccgatcttgcccgcaagtccctgtcagaactgcatgctcgggtatgcgagctcgagaaagaggtagagatgcagaagcttgtgatctctgagagcgccgaggggaagcgcgaggcgatcaggcaactgtgcttctcactcgagcactaccgcagcggctaccaggagctgcggcagctgctgcatgaccagaagagaccactggtgatggcaacatgaaccaaagctagtgatcctgatgccatccttctcggatgctttgtggatgttttctgtcaatggcaatgcatgctttcctgtgtctctctctctctctcttctaccagtagcttgctgctgctctataacttgtgcactgttgcttctccggctactaagaattctgtgttgtgtcttgcaatgtgatgggataatcaatatcgtttcttgtgtactcttataactgtcgtcaggtaatgggcatagtgatgtctatcaatctatgcttgatctttgaaagatgatatgcatatcagctgtcaactttgtc

SEQ ID NO: 4769 - DNA, 1198 bp, Oryza sativa
  ref <308>: DATABASE ACCESSION NUMBER: AK062018
  ref <309>: DATABASE ENTRY DATE: 2001-12-06
tagtgcggattggactataacagagagctgcaaattatcatacaaaataacacttgaagatggtgaagtagatgtgtactggttgaatactatgggccaagaattcttgtatgaacaattgatattccacaaagaggagttcgctacagtttgggtttatcaaagtactagttttatcaaaagtaagggcagtggcagggttgtcaccattgcagcaagtacctcatttaccaactctataccattgccactacagtattggaattatgggtctgtgtggaaattacagttctgttgtatggtctttctgatcagtgtcaaacaagcttgcggcgcctatggatatcttggatgaaaacttggaagaatctgatccagcaagatgaaagatgtggcctgctcattcaaaatatgttcagaggctgtgtaaatcaaatggatgaattgtgtcttagtgcacctgatctacaaatggcatgggatcctggtggtttatgtttactcaagtttctagctatctcttctcttggacaaatcacatttcaggcagtcaaattctcattgcaagacagttctctctttcacatgcgaagtgccaggatttgcttgagctgttcttttgagatgcaagttttctgttggcacgctgaaaacaaattggacattaatgaagcttttggaacgatgcaagaatactagagaaatcaaagtggaggtttgccatttctgaagtttacttgtcatcaacttatggacaagtcagtttcaaggagaggagattgtcaggaacccattgggctgcacatgggctgactcaattgctaatccatgccaagggccaaacaaacaaaggagagggatacaaaaggcagcagcaggagaacttcaagcaacgaacagatcaggcatcagcggcttcggccacggcggcggcttggttcggttgaacctcgtcgatctctatctctttcttactctctcgtgttcctcttcactgccatttctagaagcttcctctacttcttctcactcaatttctcttctattctctgagtttgtattgaattctattgttcttgagaacaattagtttggaggaagagggttgttaacaatggcagacaaaattaaacaattcgcacatgctcaagactgagatgcagaaaaatattgctaatatcatataatcatctccagc

SEQ ID NO: 4770 - DNA, 1629 bp, Oryza sativa
  ref <308>: DATABASE ACCESSION NUMBER: AK062019
  ref <309>: DATABASE ENTRY DATE: 2001-12-06
tccaagtaaactcggtctccgccgcctcctccgccgccgcgccgccgattcgcagccatgccgaccgtaagcgtgaaatggcagaaggagaccttcccaggcatagagatagacaccagccagccgcctgttgtctttaagacccagctatacactctgactggtgtaccacctgaaaggcaaaaaattatggtgaagggtggaatattgaaggatgatgcagattggtctactttgggagtgaaagatggtcaaaaattgatgatgataggtacagctgatgagattgtgaaagctccagagaaaggaccagtatttgtagaggatctaccagaagaagagcaagtggttgcactgggacacagtgctggtctttataacttggggaatacatgttacatgaattccactttgcagtgcctgcattctgttccagagctgaagtcagctttattgagttattcagataatgtgaggggtaatggtgttgaccaagcctcccataatttgactgttgcaactcgtaatactttcggagagcttgatcaaagtgttcggcctgttgcacctctactcttcttacagacgctgcgtaaaaagtatccccagtttgcgcaacaacaaaataatgtttatatgcaacaggatgcagaagaatgctggacccaattggtgtatacactttctcaaactcttacatcagaaacaagtgaacctcctgctggtcaaatgaaggaactttttgggattgatctcgtgagcagggtccattgtgcagaaagtggtgaagagagtttagagagagaatcagtttattctttgaagtgtcatatatctcatgatgtaaaccaccttcatgaaggacttaagcatggtttgaagtcagaacttgagaaggcttcaccttcactgggtcgcactgctctttatacaagagagtcaagaataaatgagttgcctaggtacttgactgtgcagtttgttcgtttcttttggaaaagggaatcaaaccagaaggcaaagattttacggaaagttgattacccgctggaactggatgtttatgacttttgctcagatgaactgaaacaaaaactccaagctccccgacagatgctgagagatgcagaaaatgctaagtttggattaaaagcacaaggaaaggccagcagctcaaaagaaaatgagggttcatcaagcaatgctggggaatcatccagcatggatattgacaaagccgattcttctgtgccaaagaaacatttgactggcatctatgatttaattgctgttttgacgcacaaagggagaagtgcagactcaggccattatgttggctgggttaagcatgatgacgggaaatggattgaatttgatgatgacaaccctagcatacgcaaggaggaagagattttaaagttatctggtggaggcgactggcacatggcttacatttgcctgtacaaagctcgtgttatctgaattggaatgccagacaggctgatgagctgatttgtttacatttctcaagttgccagtagtttgcttgccttttgtaatgcatgagcgaacgtattattgatttttccagtttggttcaaactgagaagtaagcatgtgacttgcatt

SEQ ID NO: 4771 - DNA, 1246 bp, Oryza sativa
  ref <308>: DATABASE ACCESSION NUMBER: AK062020
  ref <309>: DATABASE ENTRY DATE: 2001-12-06
ccttcccttcccttcccttggcggcttgacgggagagaaagaaaacctcccgtctctcggctcctccgctccttgcgccatctcgcggctgaacaggggaggtggcgagcagagcagcggagagcaggggaggggatcctgcaggttttctttagaatggcgacatctttggatatgtcactggacgatatgattaagaacaacagaaattctagggggagaggaaggggtaggtcacagggaggaggtcgaggcagaggtgatggccaaaggttcagctatggttcagggcgtggacgtggtgctggcaccttccgtggaaggggagtaggagtgccttcacgaaggccacttggtgttagtactcggtcatcatcgtatgctattgccaagtcattcaacaaaaccaaggatattgtatggaggcaagatctgtttgaggacagcatggttgctgctggcctttctgtgacagaatctagtacaaagctgtatatttcaaacttgcactatggagtgacaaaagaagatatacaggaacttttttccgagatgggtcatttgaagcattgtgctgttcattatgataacaatagacgcccaactggttcagctgaggtgatattcactaggaggagtgaagcagttgcggctttaaaacgatataataatgtgcgccttgatgggaagccaatgaagatcgaagtgataggagcagatttgggtatggctgctccttcagcaccccgtgttagtgttgtccctggtgcaaggggtagaggacagcgagaagttgtaatgatgcctggtgggagtgggtttggccgaggtgcagctggttcatctaatttcattcctgggtggaagcgtaacaattttgcacaaagaggtgggcaaggccgaggtcgtggccgtggacgtaataactttgggcgtgggcgtgggcgtggctatgttcggaagggacctgtggagaaatcagctgagcaattggacaaggagctggatagctatcattccggggcaatgaatgtcgactaagatgtcacctggatctcggtggaggcgtgaaatttgcagtttgttatataagtatctgtttacatttaccgctgagttataatagctggtgttatgtcagttattattcaagctttaatattaggtttcaactgcaaattcttgttctaggctagtcactactccattatattattataactggattgtaactgcttggccagcg

SEQ ID NO: 4772 - DNA, 1851 bp, Oryza sativa
  ref <308>: DATABASE ACCESSION NUMBER: AK062021
  ref <309>: DATABASE ENTRY DATE: 2001-12-06
acgtggttgagcagtgtctgtgtttggcacgtccacgacagcacgagacgggttggggacttggggggttgaagaagccaagctctccttggttggcgcgcacgtacgttcgcttcgcttcgattcgatggccactggtgacccaaaccctaccaccactccgccgtcgcagcagctgcaaggagcagatccccaaccccaatcccagcaggatgccgccgccaacgccactccggcggccgtggccgtgagagaggattatgtccagaacgccgtcaagttcctctcccaccccaaggtcaggggctcccccgtcctctaccgccgctccttcctagagaagaagggccttaccaaggacgagatcgacgaggccttccgacgagtccccgatccgcaacccagcgctactgctactgctgctgcttccccttcgccttcacagcaccccaacaaccagaaccactcttctaccgttgtgcaaccttatgcaccaaggcaaccagcaacacctgctggctctattattgttgccacacagcccaagttcagctggtaccgtgcattcgtcgctgcagggctattgcttggttttggagttagtgctgctgtgtttgtcaagaaattgctccttcctaggcttaagtcttggatccgcaaggtcgtagctgaaggtgatgaaaacgagggcaggcaaattaagtccaagatcgatgaggaaactgctgaagctgtaaaagcttctgcatctgctgtttctgctattgccaaaactaaccaagaattgcttgcttcaaaggatgaagaaaagaagatacttgtgacattaacacaagcactagattcccaagcaaaagaattgaaatccttatgtgagtctctgaaccatagcagggattctataaatattaccagggaagataggttttctcagtaccgggcattggaagagcatgccccttctgctgcaaggaatgggccagttaacactccatggagagcctctcagcaaactaatatgtatggtgtgccaaacagtgattttggctcagggaggccttcatttgcgtcaacacataatgaagctacacctggatcattttcaagatcgtacgttgagacatctgctgcacaccgaggggataataggtcttcagggagtaagccatgggagatgcagcaatactcacagcagaggattggctatggatccaacagccagttgagtgatgacggatgccctgaaactcaggacaactatggcgggggaccttcgtattcgtatcaccagaatcagaatcagaacgggaaggctccggctccggatattcaagcagaggaggccaggccatcggtatacataagtggggctgaggaaaggtcgcctccgcctccgcctcagcgccgctgggttcccccgcagcctccgggcgttgtgatgccggaagctgtggctgccatccgtcaaccaaagtccctcgcaaagcaaccgtcgagcgaagcttctcaagaggcagccggcgagacgcatgccaacggtgcttcaagttcgtcgcctcttcctgaagaggcgcttgttaatggcagtgacgccggacgtagtgagatcgaagaacaagcagaagccatctagaaacaatttgttttaaattgggacgagatgatgttgagaagctggaatatgtatttattttggatcagtacgggaacgcctactgtggtaacagaagatctcgatttgtggtcgagtttatactacactacgtcaaataacaagtgttgctactagctgtgactgtgagtaataccgatacattacattacattacatacatacacggtgattaaaac

SEQ ID NO: 4773 - DNA, 1604 bp, Oryza sativa
  ref <308>: DATABASE ACCESSION NUMBER: AK062022
  ref <309>: DATABASE ENTRY DATE: 2001-12-06
accaataccaattggagtagaaccaaccaaggaaagaatggcccggctgctactctccggcgtcgcgccgctccccctcctcccctgccgccgtcgcgccattgcatttgcgctcccacttgggaatgtccgcctccgcctccgtgtggccgcacccaccagccgcgtggccaccgtggaggaggacgacaatgaaaataatgctcctcctcctccttgtgaggacttcgacccgggcgcggcgcccccgtttggtctggccgacgtccgcgccgctatccccaagcactgttgggtgaaggacccctggcgatccatggggtacgtgctgcgcgacgtggtggtggtgttcgccctcgctgccgccgccgcgcgcctccacagctgcctcgcctggccgctctactgggcggcgcagggaaccatgttctgggcgctcttcgtcctcggccacgactgcgggcacgggagcttctccaacaactcgaggctcaacagcgtgatgggccacatactccactcctccatcctcgtaccctaccatggctggaggattagccacaggacgcatcatcagaaccatggccatgtcgacaaggatgagtcctggcatcccctccccgagcggctgtacaggagccttaacagagccacccggatgctccgcttctccatacccttccccatgctcgcctacccattctacctgtggtctcggagcccaggaaagtctggttcgcatttccatcccagcagcgacctgttccagcccaacgaaaggaacgatgtgctgacatccacagcgtgctgggtggccatggctgccctcctcgcaggcctcaccttcctcatgggacccctcctcatgctcaacctctactttgtcccttactggatttttgttatgtggctggacttcgtcacctacttgcaccatcacggccacaacgacaagctgccctggtaccgtggcaagattgatgatatgtacaggaatggagctatttgcggggaggactgacgacagtggacagggactatgggtggatcaacaacatccaccacgacatcgggacacatgtcattcaccatcttttcccccaaatcccgcattaccatctaattgaggcgacggaagcagcaaagggtgtgatggggaaatactacagggagccggacaagtctgggccttttcccttacacctgtttggagcgctgtcccggagcttgaaacgcgaccactatgtcagcgacaccggagatgtggtctactaccagaccgaccctgctaactaaattaattttacatttccttcaattcttttaagcccggaggcttaaattagcttaattagatagctgcgactgacctggacatgtattcaacattcgatccacagacagatagaaagagacctatatatatcgccgatcaatcgatatatatgtgcgtgtccgtgtggagatatggaggtcacaattctttccatggatatataggagtatacatacatgtattgaaggatatgtagctagatttgatgtgcgtgcgtgctgtactttgtaagacgcagcataaagctagtgacaatttggacaaggcc

SEQ ID NO: 4774 - DNA, 2026 bp, Oryza sativa
  ref <308>: DATABASE ACCESSION NUMBER: AK062023
  ref <309>: DATABASE ENTRY DATE: 2001-12-06
gtttctattcagtatacttggttgctgactatgttgaagtgatcagcaagcacaatgacgacaaacagcatgtctgggagtccaaagctgatggatcattcgctatctctgaggatacatggaatgaacccctgggccgtggaactgaaataagactgcacctccgagatgaagccaaggagtacgtggaagaagacaagctaaaggatttggtgaagaagtactctgagttcatcaatttccccatttacttgtgggcaaccaaggaggttgatgtggaagtgccagctgatgaggatgagtcaagtgaatcaagtgaagaagaggaatcatcccctgagtctacagaggaagaagagacagaagagagtgaagagaagaagcccaagacaaagacagtaaaggaaaccactactgagtgggagcttctgaatgatgtgaaggctatatggcttcgtagccctaaggaggttactgaagaagaatacacaaagttttaccactcacttgctaaggactttggtgatgacaagcccttgtcttggagccacttcactgctgagggagatgttgagttcaaagctttgctctttgttcctcccaaggctccacatgatctctatgagagttactacaactctaacaagtcaaaccttaagttgtatgttagaagggttttcatctctgatgaatttgatgagcttcttccgaagtatctcagctttttgaagggtctcgtcgactcggacacattgcctctcaatgtatcacgagaaatgctccaacaacatagcagcctgaagaccatcaagaagaaactaatccgcaaagctcttgacatgattagaaaacttgctgaggaagatcctgatgagtacagcaacaaagataagacagatgaagaaaaaagtgcaatggaggagaaaaagggccagtatgccaagttctggaatgagtttggaaaatcagtcaagttgggcatcattgaagacgcaactaacaggaaccgtcttgcaaagcttctgagatttgaaagtaccaagtcggaaggcaaacttgcctctcttgatgagtacatttcaaggatgaagccagggcagaaggacatcttttacattaccggaagcagcaaggaacaattagagaaatcaccgttccttgagaggctaaccaaaaagaactacgaggttatctacttcactgaccctgttgacgagtacttgatgcaatacctcatggactacgaggacaagaagttccagaacgtctccaaggagggtctcaaactcggcaaggactctaagctcaaggacctcaaggagtccttcaaggagctgaccgactggtggaagaaggctcttgacaccgagagcgtggactcggtgaagatcagcaaccggctgagcgacaccccctgcgtggtggtgacatccaagtacgggtggagcgccaacatggagaagatcatgcagtcacagaccctctcggatgccagcaagcaggcgtacatgcgcggcaagagggtactcgagatcaaccccaggcaccccatcatcaaggaactccgtgacaaggtcgcccaggacagcgagagcgagagcttgaagcagacggcgaagctggtgtaccagacggccctcatggagagcggcttcaaccttcctgatcccaaggacttcgcctccagcatctacaggtcggtgcagaagagccttgacctgagccccgacgcggccgtggaagaggaagaggaggtcgaggaggccgaggttgaagagaaggaatcatccaacatcaaggaggaggcggagccgtcgtcgtatgataaggacgagctgtagtgatgtgtcgccaccaactgttgtttttttatctagctcttgtgttaggttgtttaaaaatgtgatggtttcgagggacgtccatttttccatgcgaaaatgcatagtaccatgatacggggattttgtcgatgtacgtagtttgtgatactctagttcaaattaatggccgtctaatttcgatc

SEQ ID NO: 4775 - DNA, 1544 bp, Oryza sativa
  ref <308>: DATABASE ACCESSION NUMBER: AK062024
  ref <309>: DATABASE ENTRY DATE: 2001-12-06
gttaacctccatcttctcttctcctctcacgagctcgcagctcaagcgcacccagccatggcgactcctcagatctcgcgcaaagccctcgcctccctcctcctcctcgtcgccgccgccgccgcggtctccaccgcgtccgccgacgacgtgctcgccctcaccgagtccaccttcgagaaggaggtcggccaggaccgcgccgccctcgtcgagttctacgcgccatggtgtggtcactgcaagaagcttgcccctgaatacgaaaaactcggtgcaagtttcaagaaagccaaatcagtcctaattgcgaaggttgactgtgatgagcacaagagtgtgtgcagcaagtatggagtttctgggtaccccacaatccaatggttccccaaaggttccttggagcccaagaagtatgaaggtcaacgtaccgcggaagcccttgcagaatatgttaactctgaagcagccaccaatgtaaagatagctgcagttccttctagtgtcgtggttcttaccccagagaccttcgactctgttgtccttgatgaaaccaaagatgtccttgtagagttctatgccccatggtgtggtcactgcaagcatcttgctccgatttatgagaagctagcttctgtttataagcaagatgagggtgttgttattgccaatcttgatgctgacaaacacactgccttggcagagaagtatggagtttctggtttccccacattgaaattcttcccaaagggaaacaaagctggtgaagattatgatggcggtcgcgagttggatgacttcgtcaagtttattaatgagaaatgtggaaccagccgtgattcaaagggtcagcttacttcagaggctggcattgtcgaaagcttggctcctcttgtgaaggagttccttggtgcagcaaatgataagcggaaagaagccctctccaaaatggaagaggatgttgcgaagctcactggccctgctgccaagtacggaaagatctatgtgaactctgcaaagaagatcatggagaagggctctgaatacactaagaaggaatctgagaggcttcaacgcatgttggagaagtcgatcagtccttccaaagccgatgaattcgtcatcaagaagaacatcctttcgactttctcctcttaaagggtgtcccacgtaccccgacgagcaattggggtatagtcagtagcgcaatgcctgtctccaagaatggaaaacagaaagaaatgaaaagaaaaggcaatatcgatatcagcaagagatggcaatggaagttcgttagttgggtattctgttgaacaaacatgtatcccactgcccggcatgatctttttttttctttctgctatttgcttttgtggttacagggattgacatagcaatcagctagtttactcaagaacacaagaggttttgtaaccatcccgtgatgagtgatgacaccgttctacgtttgtcaatccaataatttgataattcagtttacattatttctgtttaccctggtgaaagagagcatatgttgcttt

SEQ ID NO: 4776 - DNA, 889 bp, Oryza sativa
  ref <308>: DATABASE ACCESSION NUMBER: AK062025
  ref <309>: DATABASE ENTRY DATE: 2001-12-06
gtccctcgtgtttgtgtcacgttcgattctcccaagctgatcttgtgtcgccggaattgagcagggggggacgtgccgcgacggatcgaggcgatgcggcaggcggtcggcttgtgcaaggcccatcaacttcggccggccgcgctgctgtccccgcggccgttgctccggcgagcgtccccctgcctccctgcagcgggagcgggtggggagctcaggagggccagcgccgcgtcgcggttggtggtcaggaggagatgccaagaagaggagcagcagcaacagcaggaggaggaagagcggagcaatggcggtggtggtgatggggagcaagagcagagaacatttctcagcttggaggaggccgggctggtggagatgtccggcctcagcacacacgagcgattcctctgccgcctcaccatatcgtcgttgaatctcttgagagtgatttcggagcaagaaggcgtccccattgaggagctcaacgcaggccttgtttgcgactggttcgtcaaggacaagctcaagagggagcagaacgtgggctcagctgtcctgcagtgggacgaccctggtttctagctccatcatccgtttatggatgatggtgatttggtggtcttgccggcgtctccaccgagaaacagggttcatcaagtcaacatttttctcggttgatagagctcactgatcactttctttgaattaaagagggttcctttgtcttgcgacactcgttgtgcctaattgggctttttacatgtcagtacatgacgacctgtatcacttcctttgtatgccagagaccaaagccagaaacacagcttaattacgaagaatcagtttcaagaatatatggatcagaaattgctgtcggattgttttc

SEQ ID NO: 4777 - DNA, 1333 bp, Oryza sativa
  ref <308>: DATABASE ACCESSION NUMBER: AK062026
  ref <309>: DATABASE ENTRY DATE: 2001-12-06
ttagataaccaatttatcaaataaacagggaccacagttttcctattgagagtagagttcaatatcttccattcaagatgccccctcaaggttaccctcctgatgcacaacttcaggaatttcaatattttgtggttattgactttgaagcaacctgtgacaaggagaacaatccacatccacaagaaatcattgagtttccatctgtcttggttaacagtgcaactggacaacttggagcttccttccaaacgtatgttcggccggcatataatcaacttttgactgacttttgcaaggagcttacgggcattcaacaaattcaggtagacagaggtgtgcctctaagtgaggcattgctcatgcatgataagtggttggaggaaaaagggattaagcacaagaacttcgctgttgtgacatggtctaactgggattgccgtgtaatgttggaatctgagtgcagattaaagagaatcaggaagcccccttactttaacaggtggataaacttgaaggttcctttccaggaagtgtttgggggtgtccggtgcaacttaaaagaggcagttcagttgtctggccttacatgggagggccgtgcccactgtgggctcgatgatgctcgcaacaccgctcgcctccttgcattgctgatgcaccggggcttcaagttttcgatcaccaactcgcttgtgtggcaatctgccccgcagtcaataacgtgccagtcgtcccctgcgcactctccgtatcccaaccaatcacaccataagccaatggaagtgatgggatctcctgtgcaggttaacccatacgccggcatcacagtgaagaagccgatgtactgccactgcggcgtgctgagccagatcaaagttacctacagaccaggcccgatgcacggtcgatatttctacggatgcggaaactggacatccacaaggggggcaaactgtgactactgggtatggttgtcatgaaagaaaatgaaatcctgcctccatgcgaaatccgaaatccgaaggagggcaaagacctggagcttttaacaagggaggctactagtttgcagttggtttggcttgctgcgcctccctcgtcgtatatatgatataactttgctcataagactattggaagtttgaactaggtagtgtctaacctgtcaatactgacttctgttgatagaagagaatgggggggatcagatgctgcttaggatgctttatccatgaataatcttaagtttgtggacgcttggttttaacttaaaagatgggaccatcgtaggtgtgatttgtgcgacaagatgtctgaagtttgggcttgc

SEQ ID NO: 4778 - DNA, 1287 bp, Oryza sativa
  ref <308>: DATABASE ACCESSION NUMBER: AK062027
  ref <309>: DATABASE ENTRY DATE: 2001-12-06
aaacagtgagcatcccagaagctactacaaatgcactttcacgaattgcgctgtcaagaaggtggagcgttctcaagatggccaaataacagagatagtctacaaaggttctcacaatcaccctttgccgccttccaaccgccgaccaaatgttcctttctcacacttcaatgatctgagagatgatcactctgagaaatttggttccaagtctggtcaggccacagcaacttcatgggagaatgccgcaaatggacacctccaagatgtcggtagtgaagttctgacaaaactgtctgcttctcttacgacaacagaacatgctgaaaaatctgttatggacaaacaagaagctgtggatatctcatcgacgctctccaatgaagaggatgatagggtaacgcatcgtgccccgctttctctgggctttgatgcgaacgatgactatgttgaacacaagagaagaaagatggatgtttatgccgctactagcactagcaccaacgccatcgacataggagctgtggcgtcaagagctatccgggagcctcgcgttgttgttcagaccacaagtgaggttgacatccttgatgatggttaccgttggcgcaagtatgggcagaaagttgtcaaaggaaacccaaatccaaggagctactacaagtgcactcatccgggttgctcggtgcgcaagcatgtggagcgatcatcgcatgatctgaaatccgtcatcacgacgtatgaaggaaagcacaaccatgaagttccagctgccaggaacagtggccacccaagctcaggctcagccgctgcaccacaggctaccaatggtcttcttcaccggagacctgaaccggcacaaggtggtggtggtggtagccttgctcagtttggctatggctcagctggtcacagaccagcagagcagtttggtgcagcagcagctggtttctcctttggaatgctgcctcgtagcattgcaactccggcgccgtctccggcgatcgccgtgccggcgatgcaggggtacccagggcttgtgctgccgagaggtgagatgaaggtgaacttgctgccacagtctgggaatgctggtgcagcagctagccagcagctgatgggcaggttgccaaagcagcatcctcagatgtaaaaatggcaggaacatgagacaaatggtgtttgctgcttatgtatatgaaacatttttggtgcttttgttaggagaatggagtgttattgtagctcaatttactttcgggggaaaaaaaagcagatagttcaggc

SEQ ID NO: 4779 - DNA, 1148 bp, Oryza sativa
  ref <308>: DATABASE ACCESSION NUMBER: AK062028
  ref <309>: DATABASE ENTRY DATE: 2001-12-06
caatttaagtgaacctaagagagctctgttgtggagttatcagaaattagatccatgtcttcagagatgctttctgtattgcagtttatttccaaaaggttacaaatacataattgacgagttggttcacctttgggttgcagagggatttattgatgcacgtgatacgaataaaagaatggaagataccggcatggattacttcaaagagatggtctctggatcctttttccaaccattttctgaaagatttgatagtacggtgtacattatgcatgacctccttcatgatttggcagagtcactctctagagaagactgcttcagattagaagatgacaaggtgagagaaataccatgcactgttcggcatttatctgttcgtgttgagagtattatacaacataagccaagtgtctgcaagctacaacatttgcgaactcttatctgcattgacccactagtgccagatctcccatcctcccttcagcgcatatccatagtggactgccccaatatatcatctttgccagatctcccatcctccctgcagcacatatacatacgtgactgtccactactgaaggagagctgtagagtacccgatggggaaagctggccaaagattgcgcatattcgttggaagcgtattgactgaattatgcttcagattcacaagaacaaaggaacagaaagtgctgttccttcgccccctgcattgcagacctccagagtctcacacagctgtttggctatgaacgagagggaccggttcgtattgactgatcggtctgagcttcttcttcttattcttgtgtggttgcatttcgctggctgctggctatggtctatatgcctatggactattaccgagatgtatctgtgtatttggatcttgctctgttatgtttcctgtgtgttcttttggactgaattgcttgtagtagctgttatctatggtgtgcaacgtctactgtattactgcaccggtgaagctttgtatgggagtaccatggtgcttttgaactcaggctactgttatcctctcttggagtgtttccttttggacttggtttctattgagtattgactgtaagcctgtaactattatctcttgtatgatgagatgcaagataaggcaaacctgc

SEQ ID NO: 4780 - DNA, 1777 bp, Oryza sativa
  ref <308>: DATABASE ACCESSION NUMBER: AK062029
  ref <309>: DATABASE ENTRY DATE: 2001-12-06
atgttgggcaccgtttgtgttcatcagcccatcactcttttctgtctatgtaggtcatggcggttgcaggtgcaatggtgatgtcaggtggcgtgctccttctcctcttggctttcacctgcgccgcctacaatgacgccggcgagctgccgccgatcagccggagaagcttccccaaggggttcatctttgggacgtcctcgtcgtcatatcagtttgagggtgccgcggcgaagggtggcagaggaccaagcatctgggacaccttcacacatcagtatccagacaaaatcaccgacaagagcaacggggatggtgcttgcaatagctaccatctctacaaggaagatgtgcgcattatgaaggagatgggaatggatgcatacaggttttccatctcgtggtcaagaattcttccaaatggaagtctcagcggtggagtcaacagagaaggcatcaactactacaacaatttgatcaatgaactattatcaaaagaggtccaaccatttgctaccctattccattttgatacacctcaggcactggaagataaatataaaggatttcttagccctaatatcataaatgactataaggactatgctgaaatatgcttcaaagagtttggtgaccgggtgaaacattggatcaccttcaatgagccttggaacttctgctctatgggctatgcatctggcaccatggcaccaggccggtgttcatcctgggagaagggaaaatgcagagttggagattcaggaagggagccttacactgcatgccatcaccaactacttgctcatgcagaaactgttcggctttataaagagaaatatcagttcactgaagaagctatcaggcagtcgccgttcatccgtgataataatttaaatcgaagatccgcaaaggctttacaaaaggggaggattggaataattttgaactcagagtggtttgttcctttctcccaatccaaatccagcaatgatgctgcaagacgtgttctagacttcatgcttggatggtttatggatcctctcattagaggagactacccactaagcatgagagaattggttggaaatcgcttgccagagttcagcaaagagcaatctgaaatggtcaagggtgcattcgattttattggactcaactactacgcttcaagctatgctgataatgatcctccatcatatggccataacaacagctataatactgattcccatgctaagattactggtagtcgaaacgggattcccatagggcctcaggctgcttcgttttggttttacatctaccctgaagggttgcgtgaattgttgcttcatattaaggaaaactatggcaatcctaccatctacatcactgaaaatggtgttgatgaaatcaataataagaccatgcgactcaaggaggccctgaaggatgatatcaggattgaatactatcacaagcaccttctcgccctgctaagtgctatgagggatggagcaaatgtgaaggggtacttcgcatggtctctgcttgacaactttgagtggtcagagggctacacagttcggtttgggataaactttgtggattacgataacggaatgaagagataccccaagaactcagcccgttggttcaagaagttcctccggaaatgaaacagagatggaaacaaaaggttgaaaatagttgcgcacactccctttttctcattgaacatcaaaatagtatataagctttatgagttaagtgccataaatgaaattagttcgtaaat

SEQ ID NO: 4781 - DNA, 1357 bp, Oryza sativa
  ref <308>: DATABASE ACCESSION NUMBER: AK062030
  ref <309>: DATABASE ENTRY DATE: 2001-12-06
agctcaaggccgagcgtgagagaggtatcaccatcgatatcgccctgtggaagttcgagaccaccaagtactactgcacggtcatcgatgcccctggtcaccgtgacttcatcaagaacatgatcacgggtacctcccaggctgactgtgccgtgctcatcattgactccaccactggtggttttgaggctggtatctccaaggatggccagacccgtgagcacgctcttcttgctttcactcttggagtgaagcagatgatctgctgctgcaacaagatggatgcctccactcccaagtactccaaggcccgttacgatgaaatcgtgaaggaagtctcatcctacctgaagaaggtcggctacaaccctgacaagattcccttcgttcccatctctgggtttgagggtgacaacatgattgagaggtccaccaaccttgactggtacaagggccccaccttgcttgaggctcttgaccagatcaacgagcccaagaggccatcagacaagcccctgcgtcttccccttcaggacgtgtacaagatcggtggtattggcaccgtgcctgtgggtcgtgttgagactggagtcctcaagcctggtatggtggtgacctttggtcccagcggcctgaccactgaggtcaagtcggttgagatgcaccacgaggctctccaggaggctcttcctggtgacaacgtcgggttcaacgtgaagaacgttgcggtgaaggatctgaagcgtgggtacgtggcctccaactccaaggatgaccctgccaaggaggctgccagcttcacctcccaggtgatcatcatgaaccaccctggccagatcggcaacggctacgccccagtgctggactgccacacctcccacattgccgtcaagtttgctgagctggtgaccaagatcgacagacgatctggtaaggagctggagaaggagcccaagttcctcaagaacggtgatgctggtatggttaagatgattcccaccaagcccatggttgtggagaccttctctgagtaccctcctcttggtcgttttgccgtgcgggacatgaggcaaacggtggctgttggcgtcatcaagaacgtggagaagaaggacccaaccggtgccaaggtgaccaaggctgccgccaagaagaaatgagcctcgttcaagtggtgctttccatatctgcatttgagatatctagctcttttagtactcgttaagttttgtcgacggtcatttcagttgttgcattgaccgttaatatctgctcgctttgtgcactatgtcagtcatttaaaactctattttctgttcggtttaaacttggatgttaagacttattattgcccttc

SEQ ID NO: 4782 - DNA, 1301 bp, Oryza sativa
  ref <308>: DATABASE ACCESSION NUMBER: AK104865
  ref <309>: DATABASE ENTRY DATE: 2002-08-28
acacacttgcacacttgcacccaccctctctcctccatccagcaccgaccatggccgccgtcacggctgcggccgtctccacctccgccgctgctgcagtcaccaaggcatcgccgtcccccgcccactgcttcctgccatgcccgccaagaaccagagccgcccaccagcgcggcctgctgctgcgcgcgcaggtgtccaccaccgacgccgccgccgtcgccgccgcgccggccaagaaggagaagatatccaagaagcatgacgagggcgtcgtcaccaacaagtacaggcccaaggagccctacgtcggcaagtgcctcctcaacaccaagatcaccgccgacgacgcgcccggcgagacatggcacatggtcttcagcaccgagggtgagatcccctacagagaggggcagtccatcggcgtcatcgccgacggcgtcgacaagaacggcaagccgcacaagctcaggctctactccatcgccagcagcgctctcggcgacttcggcgactccaagaccgtttcactctgcgtcaagaggctcgtttacaccaacgaccagggagagattgtcaaaggagtctgctccaacttcctctgtgacttgaagcctggttctgatgtcaagataaccggaccagtaggcaaagaaatgctcatgcccaaagatcccaatgctaatattataatgcttgcgaccggtactggtattgccccgttccgctcattcttgtggaaaatgttttttgagaagtatgatgactacaagttcaatggtctggcttggctcttcttgggagtcccaactagcagttctttactctacaaggaggagtttgacaaaatgaaggcgaaagcgccagagaacttccgggtcgattatgctgtgagcagggagcagaccaatgctcaaggagataagatgtacattcagaccaggatggcagagtacaaggaagagctgtgggagctcctgaagaaggaccacacccatgtgtacatgtgtggactgaaaggcatggagaagggtattgatgacattatggtgtcattggctgcaaaagatggaatcgactgggctgattacaagaagcaactgaagaagggcgagcaatggaacgtggaagtctactaattcttccaattttcctcacatctgtttcttttttttcttccatttgtatctgtgtgcacatctgtgcctgtgatcactctataatgttagataggcgtatatatatactgtttgtcatgttggttaaattcaagcttcatataagaattactacttatgtct

SEQ ID NO: 4783 - DNA, 1185 bp, Oryza sativa
  ref <308>: DATABASE ACCESSION NUMBER: AK062031
  ref <309>: DATABASE ENTRY DATE: 2001-12-06
atttccgccatgatcggtttaacggaagctgtggcaattgggaggacgtttgctgctctgaaggactatcaattagatggaaacaaggagatggtagcacttggaactatgaacatagcagggtcaatgacatcttgttatattgcaacaggttctttctctcgttccgcagtcaatttcatggctggctgccaaacaccagtgtccaatatcattatgtcagcagttgtgctcctgaccttgttggtcatcacaccactcttcaagtacacaccaaatgcgatcctcgggtcgataatcatttctgcggtgatcggccttgtggactacgaagcagtaattctcatttggaaagttgacaaaatggatttcatttcttgcatgggagcattctttggtgtggtcttcgcatctgttgagataggtcttttaatagctgtatcgatttcatttgctaaaattcttcttcaagtaacaaggccaaggactgtacttctgggaaaccttccaggcaccacaatatacaggaacactgatcagtatccagaagcaagacatattcctggggttgtaatagtgagggttgattctgctatctacttctccaactcaaactatgtccgggagagaactcttaggtggttgacggaggaagaagagaaagccaaagcagagggacagtctaaaatcaatttcttgatcatagagatgtccccggtcatagatatcgatacaagtggcatccatgctctagaagatctatacaagaatcttaagaagagagacattcagctcatcctagcaaatcctggatccatcgtcatggaaaagctcttgtcatccaagctcaacgagcacatagggagtaacaatattttcctcacggttgctgacgctgtgcgtttctgcacaagaaagtcgatgcaagaaccatgaagaaaaatagatgagagataaagagagagatgatgaacaatattatatagcatatgcgtatcatctacttatgatatagaggaatagatccatagtcaaatcagctggttcagtgaaatactggtgatagcatatacaattggaaatagttgtatggtgaatagggttgctataaaccaaaatgtcatgacagacaaatggaaggaaactgataataataggttaaggcaatccttcctaccctgaatt

SEQ ID NO: 4784 - DNA, 1358 bp, Oryza sativa
  ref <308>: DATABASE ACCESSION NUMBER: AK062032
  ref <309>: DATABASE ENTRY DATE: 2001-12-06
aatgcagcccaaatcgggcggtaaactccgtccaaggctaaatacaggcgagagaccgatagcgaacaagtaccgcgagggaaagatgaaaaggactttgaaaagagagtcaaagagtgctttcatctttttcactgctgtgtactgccttggaattctgacgtacggtgttgccgtcccatccggtctcttcatccctgttattctcgctggtgcaacatacgggcgcatagtggggacacttcttggatccatatccgaccttgatcctggtctttttgcccttcttggtgcagcatcttttcttggtggaacaatgagaatgaccgtgtcagtctgcgtgatccttctagagctcaccaacgacctggccatgctccctctggtcatgcttgttcttctcatatcgaagactatagcagataactttaataaaggagtttatgatcagatagtggtaatgaaaggcttgccatacatggaggctcatgctgaaccatacatgaggcacttggttgctggcgatgttgtgtctggcccacttattacgttttcaggtgtcgagaaggtgggaaacattgtccatgcgttaaggttcacaggccacaatggattcccagtggttgatgagccacctctaacggaagcacctgaattggtcgggctcgtgacaaggtctcatctgttggttttgctgaatggcaagatgttcatgaaagaccagctgaaaactagtggtagctttgtccttcaaagattcggtgcctttgattttgccaagccagggtcagggaaaggcttgaaaattcaggacctggacttcactgatgaggagatggaaatgtatgtggatctccatcccgttacaaacacctcaccttatacggtggttgagacaatgtcactcgcaaaagctgcaatcctattccgtgcactaggattgaggcaccttttggttgtgccaaagacaccagataggccacccattgtcggaattctcacgaggcatgatttcgtcgaagaacatatccacgggctgttcccaaatctcaatcctcacaagttccactcgacatcgatgggaggctgatttttaagcgttttgccgccactcgttttatgtgaagtataggaagtgttcattatatgtaatttacaaaattgtgtctgtcatttgttggagagagctcatcatctgtacatcggttgtagcatatcctcttttacaggattcatcttgtagcgtattttgtctcagcttgcttattttgagtctgacaggaagcgctctgtaaatgtagagcaaacattcggaacaccgaaattttatatcataaagttgtgctaaggcatatttg

SEQ ID NO: 4785 - DNA, 1185 bp, Oryza sativa
  ref <308>: DATABASE ACCESSION NUMBER: AK104866
  ref <309>: DATABASE ENTRY DATE: 2002-08-28
atcgcgatacctcctccttcccgtcgaaccctctccagtctccactccactgaatcctcccacctcggctcgaaggaatggcaagcggtagtgaagctgagaagtcacctgaggttgtgctggagtggcctaagaaggacaagaagaggcttctacatgctgtttaccgtgttggagatttggatcgcaccattaaatgttacacagaatgctttggaatgaaattactgaggaaaagagatgtgcctgaagagaaatatacgaatgcatttcttgggtttggacctgaggacaccaactgtgcacttgaattgacatacaattatggtgttgataagtacgacattggagcaggatttgggcatttcgctattgcaactgaggacgtgtacaaattggctgagaaaattaaatccagttgttgctgcaagatcactcgtgaacctggtcctgtcaagggaggatccactgtgattgcctttgcacaggatcctgacggttacacgtttgagcttatccagaggggtccaacacctgagcctctttgccaagttatgcttcgtgtgggtgaccttgatcgctccatcaagttctacgagaaggcccttggtatgaagctgctgaggaagaaggatgtacctgactataagtataccattgccatgttgggctatgctgatgaggataagacaactgttattgagttgacatacaactatggtgtcacagaatataccaagggcaacgcatatgctcaggttgctattggcactgaagatgtctacaagagtgctgaggctgttgagttggttacaaaagaactagggggaaagattttgcggcagccaggtccactaccagggctcaacacaaagattgcctctttccttgaccctgatggctggaaagtggttttggttgataacgccgacttcctgaaggaactccagtgaagatgagagatggcccaagttctgtgctaggaggcaaagcacaaaccttacgtagtaatgccagtgcaatgtaataaagaagcggtttccgctctatgaacaagaataaattctggcacatgcgttgtgcttatgctagtactgtctgggtttggctgtaaatccgctatgcattgctacctgtatcagcatgactgttggagtgttgttgataacaaggaccagtttgtgc

SEQ ID NO: 4786 - DNA, 1432 bp, Oryza sativa
  ref <308>: DATABASE ACCESSION NUMBER: AK062033
  ref <309>: DATABASE ENTRY DATE: 2001-12-06
agacaacatgctctacctgttgcgtggattataacccgatcagttaccaagcaagacactttgagatggatgaaagcacttactgagagaatatattctgttgattccacctggagaatcggtggatttgtaattgatgacccagcttcagagctggatccaatcagggatgtattctcttgcccaattttgttttctttatggcacattaggagaacctggcttaaaaatataatcaagaaatgcagcaacagtgaggtacagcgggaaatgtttatgcaactaggaaaagttatgtacagtatctggagtgagaaaaatcccatggatgctcttgagcaattatttcaagacttcgttgaccaaaccaccttcatacaatatttcaagtccttttgggttcccaaattggagatgtggattgacaccatcagaagtcttccactagcaagtcaggaatcatcaggcactattgaaggttaccatctaaagctcaaggttaaagcatatgatgactcacagcttgatgctctccagcgtgtggactggttggtgcataagctcacaacagagctccattcgagttactggctcaatctgtatgcggatgaaagcggttcatttcctgaggtgaaagcagagtacattgcgtccacttcatggcatagagcgctgcagatacctgacgatgctgttatatttgatgacaaggaaccattttcagcaaaggtgacaagccagaaggatactagtcagatgtggactgtctggaatcctgggtctgagttttctctttgtgattgttcgtggtcaatgcagggcaacctatgtaagcacatcataaaggttaacatgatgtgtggaccacgcaaggatttccagccctcgctctcatttcaatcgtttcagcgtgtcctacttgatctgtggcaaaaacccatggatgattcattctcactcgatctgtcagtagcatgggttatgcaaatgcaggagaggatccagaaggtgactgagcttgctaccgctgacggcattgcggaagtatctaacagattgccgattcaatggacaaacaagaaagggaggaaagtagctgcaaagcgcaccagccctttacgtgttcttcctcactccaatggtattgtgcaaaaggatttcacacccaagaagaacagaaagagaaagaggttgtcaacagtctcgggttaacagtactccaattgttcttgtccagagagttatttttctctctgtgtaattagatggctaaccgtcttttgtttgttttctgtctcaactagttacttttggtataggcattggttactaggatgatcacctcacgtttctgaaaccaattcttctgttgtttagttggatataattattcaggcagcataagaaatacatcgaatcagtctctctggtc

SEQ ID NO: 4787 - DNA, 1221 bp, Oryza sativa
  ref <308>: DATABASE ACCESSION NUMBER: AK104867
  ref <309>: DATABASE ENTRY DATE: 2002-08-28
gcgccgttcttttcggagattccgctcgcgcgcgccgccgccgccgcagccgcccgccggggagcccgggacgaggatggaggtcgtcgtggcgaggcagccgaaggcgaagaagcagataaacctcttctactgctccgagtgcgaggagctcgcgctcaaggtcgccgctagctccgacaccatccatctccagtccatcaactggaggagcttcgacgacgggttccccaacctgttcatcaacaacgcgcacgacatccgggggcagcacgtggcgttcctggcgtcgttcagctcgccgtcggtcatcttcgagcagatctccgtcatcttcgcgctgcccaagctgttcatcgcctccttcacgctcgtgctgcctttcttccccacgggctccttcgagcgcgtcgaggaggagggcgacgtcgccaccgcgttcaccctcgcgcgcatcctctccatgattcccaagtcccggggcggcccgaccagcgtcgtcatctacgacatccacgcgctccaggagaggttctacttcggggacgacgtcctcccctgcttcgagaccgggattccgctcctgctgcagcgcctccggcagctccccgatgctgacaatatcaccattgccttcccggatgatggggcgtggaagcgtttccacaagctattgctcaacttcccaatggttgtctgcgcaaaggttcgggaaggtgacaagaggatagttcgaattaaggaggggaatcctgaaggccggcatgtggttattgttgatgatttagtgcaatctgggggaactcttagagaatgtcagaaagttttggctgctcatggtgctgcaaaagttagtgcttacgtgactcatgctgtttttcccaagcagtcgtatgagcgcttcactcacactaattccgctgggtcagctgacaagtttgcgtatttctggatcactgactcctgccctcaaacagtgaaagccatcaaccagcaacctccatttgaggtgttgagccttgctggttcgattgcggatgcccttcaaatatgaactttgtttttggtaatgggctactcccatttttcctaaatgttagagttcactttcagctccagtaaaaacaaataatgtggagtgagttatcttaattatggctttggcctgacgtcttcataaacatctcaatatgtgatggtaaaataaggcatttgatgctc

SEQ ID NO: 4788 - DNA, 1567 bp, Oryza sativa
  ref <308>: DATABASE ACCESSION NUMBER: AK062034
  ref <309>: DATABASE ENTRY DATE: 2001-12-06
agcctctcttgttgcttgatgcttttagggagagtagagtggtgtagtgtagtgttgaatcctcctccacatcttggaacttcttcttcttcttcttcttcttcttcttcttcttcaaagtcttcaaaggcttatcttgggtgaagaagcacctgaagcttccatcatttttgctttaatggtggtggtcttggggaaacttctgaagaaatctccgggggaaagattgctgctttgctgctggtttcgcggcaaatcttgattgattgcgttggaagaggtcggcttcgtgaaggaatcttgcttgcgggatcaatcgcctccgctcgcttgcttgctttttgggcggttcttggtgctgctttattggggtgaaaggttgggggatctcgcggccactcgaggtagcgagcgatctccccgcggcttctcctcgttgccggcattgcgggggaggcgagctcgccgccgggtcgcttgttgatgcggtgaggcggcggagcggagcttctcgctgtgctgctgctgcggcggccgccaggtgttcggtgaaaggcgcgagcaagcgagcatgagggacttcccttcctgcttcggggagagcggcgtccagatcgcggacgcgtcgtcgtcgtcgtcgagcgccggaaagggcgcggcgcagaatctggtgacctgcctctaccaggcgcagttctcgggccggccatgcgtgatctcggtgacctggagcaagagcctcatggggcaagggctcagcattggcgtggacgatctgtccaaccagtgcctgtgcaaggcagacatcaagccatggctcttctccaagaagaagggctccaagaggcttgacgtcgaggacggcaagattgagatcttctgggacctgtccggtgccaagtttggtgctgggccagagccaatggaagggttctatgtcgccgtggtgtttgaccttgagctgatactcctgctcggcgacatgaagaaggatgcataccggaagaccggcgcaaaccggccgatgctgaatgctgcatttgtggctaggagggagcacatatatgggaagaagatttacactgccaaggcacaattctgtgaaaatggtcaattccatgatgttgtgatagagtgtgacaccgtcagcctcaaggatccatgtcttgagatacgggtcgacaagaagcccgtcatgcaggtgaagcgtctggcttggaaatttaggggaaaccagacaattcttgtggatggtttgcccgtggaggtgttctgggatgtccacagttggctgtttggattgacgacaagcaatgcggtgttcatgtttcagacatgccaagcacctgagaagtcgatgccttggtcatactcacaggtttttagggagtctcagttgcagggtcttggtttctcgctgatcctatatgcatggaagcttgaataggttcttgcagaatcataatttgcttctgcaattgcctccgttttagtgctaacgggatgtttattgagtgtcaattcttggaaatgttatggaggctctccaatatatgttctttcaatt

SEQ ID NO: 4789 - DNA, 1564 bp, Oryza sativa
  ref <308>: DATABASE ACCESSION NUMBER: AK062035
  ref <309>: DATABASE ENTRY DATE: 2001-12-06
agaacaaaataagggaaaagctgttgatatcgattataatttggaggaagatgaacaacttgcacgagctctccaggagagccttaatgctgactctcctccacgtcagaatattcctgttgagaatgttccatcagagcccccaagagagctgcctccgattctatttgcctcaagtggatccagaacttgtgctggatgcaaaaacccaattggtcatggacgttttcttagctgtatggattcagtatggcatcctcagtgcttcaggtgttttgcttgtaacaagcccatctctgagtatgagtttgctatgcatgaagatcagccataccacaaatcatgctacaaagattttttccatccaaaatgtgatgtctgcaagaactttattccaacgaacaggaatgggctgatcgaataccgagcacatccattctggatgcaaaagtactgtccttcccatgaagatgatggcactcctaggtgttgcagttgtgaaagaatggagccgatggacatcaaatacatcacattagatgatgggaggaaactctgcttggaatgtctcaattcttcaataatggatacaccagagtgtcaacagctgtatatggacattcaggaattttttgaaggtctgaacatgaaagtggagcaacaagttccaatactcttggttgagagacaggctctaaatgaggctttagaaactgagaaaaatgggcatcatcttcctgaaacaaggggactatgtctttctgaagagcaaattgtcagaacgatcttaagaagaccaataattggaccgggaaacagaattatagatatgatcacagcaccatataagctggaaagacgatgtgaagtgactgcaatcctgatattatatgggttgccgagattacaaactggctcaattctcgcccatgaaatgatgcatgcttatctacgtctgaaaggatttcggtctcttagtcctcaggttgaagaaggcatatgccaagttctttcccacatgtggctcgagtcagagatcatctttggttctagtatcgacatatcagccacctcagtggcatcttcgtcgtcgtcatcttcaactccaaccacatcaaagaagggcgcaaagaccgaattcgagaagaagctcggagcattcatcaaacatcagatcgaaacggattcatctgaggcatacggagatggttttcgagctgccaatcgggctgtcgaaagctatggcctgagaagtacccttaatcatatgaaaatgacagggtctttcccatattgatcattcctcaattgtgaggattgatgcatatttggagattattggagttacatataccctcatcatggtagcattaatttacagtaaattgagaaaagaaagaagaggattgaataggacataaattgcaccaatgctttcttgttgtctttgaaataatacatgtaagtcttcctatagagaggttttatagtttttcacagtgaacacatccttggaaaagaacaggcaatcagaagataattttgctgagttatgtacttatgt

SEQ ID NO: 4790 - DNA, 1169 bp, Oryza sativa
  ref <308>: DATABASE ACCESSION NUMBER: AK062036
  ref <309>: DATABASE ENTRY DATE: 2001-12-06
aaaaaaagtcgatctcttgaaaaagagaggcagagagcatccgaaagtagacaggagtacctggcaattaaggaggaggcggcaatgcaagaaggacgggcgaaacagcttgaagaagaaataaaggagcttcgtactaggcacaaaaaggagctgcaagatgcagcagaacacagggagctgcttgagaaggaccttgaaagagaaaaggctgccagggcagagcttgagaaaacatcttcccgtgatgcaccaaaaattccgcttccagatcagacaagaaatgctcctctcagaaagctctctagttctggcagtatcaatagtctggaagaaagccatttccttcaagcatcattagatttgtcagacaacgcttcattagagaggagaatgtctgctgaaagtaatacgtcgtattatcttcggagcatgactccaagtgcttttgaatcagcactccgtcagaaagatggagagctagcttcttacacatcgcgtttggcctcattagaatctattcggaattctctggcagaggagttggtgaaaatgactgaacagtgtgagaagttgcgtaccgaggcttctgctctgcctggtttaagggctgagctggaagctttgaaacaaagacactttcaagctctagaactaatgggggaacgtgatgaagagttggaagagctaagaaatgacattgttgacctaaaagagatgtacagagaacaagtggatcttcttgttagccagctccaatctttgggtgctcgtgtatagtgctgctgtatgtcagtatgtagcttcggctgccatccatttttttttcgcatcgcgctaatctactaagccccatacagcagatctgaagcttggcgtgtttcttcgaagttcaagccgtgacaaataccgaaagttcatagccataccagtgtgaaaatattcgtttttgtacatcttgaagcacaagtctttttggacagttgagcacccttgtttaatttagtaggttactctgttgtatactagtttggatagctttacggtttttaagcctattgtttgcaatcctttccagtgaagtgtatcaaatttgtaattcgattaaaagtgtatcacagcggaatgcaaccccaataatatgagagctcgtttttgtcattttcctc

SEQ ID NO: 4791 - DNA, 840 bp, Oryza sativa
  ref <308>: DATABASE ACCESSION NUMBER: AK062037
  ref <309>: DATABASE ENTRY DATE: 2001-12-06
tccaggaaacctactgttaggttttctctcaataacagcgatgctgataggaacacagctgacagttcaacatcgtcaatatcgtacaagcagaagctggatgaccgggaatcacttgctgataagaatcttccgaagaaaccagctactgccatgcagatatcagaagagggtgagacaaaatcatcggataaaagaaccaacgccctccaaagagtatcgtctatactcgacgtagcgccttgtccaaaaagaggcaattgagtcagaatgtagaaggacctggtggatagaagccaaccaaggtggctccttcgtggatagccagagtgtttgaagcattctccatgtggaaagcacatgcagccagcggagctggccagtgtaaccatgatattgccataggggcacggtcggccaaggttgtaaatttacaaacggcgcagatgggagttcttcaaagtgtgacttgagcttccgaccagaatattcgagtatttgacccctcaaggctcaagctcacatcactcagacgaggggtgacatggcagaattcatccactgatttagctactagatgctaatctgtgagatatgctttgtacaattgttagtttagttctgtaaaagaaaacaagcaattgccattagtggatgattaaagagaagcgaggaaagtcttgttaggctgacatctgtagctgacagtttcccagtagctaaccagaacatgagtgaattaagcacatgtaggttcaaatgtgctatgacgattacctgttgcgttgatgtatggctacatttgttgtgacttgtaatgaatccatgccagagtttttg

SEQ ID NO: 4792 - DNA, 1253 bp, Oryza sativa
  ref <308>: DATABASE ACCESSION NUMBER: AK062038
  ref <309>: DATABASE ENTRY DATE: 2001-12-06
aagatgggggaagaaatcaagaacggagaggagggaccagacatggctgcaccgggcgaggaggagcaggagcaggggaggaaaggcatcccgtctctgctctcctccagggaggagaacatcgcctctaacatcactcagctgattggatggacaccgcttgttgagatgaagaacatcgcgaagaacgaaggcgtacaggctcgattggttgggaagatggaagcataccagccactctgctctgtcaaggacaggagtgccctcagaatgattgaagatgcagaggagaaagggttgatcacacctggtgttaccacgctgattgagccaacgagtggtaatctcggtatcggtttggtgctggttgctgttcagaaaggctacaggtttattgctgtcatgcctgctaaatattcgcttgacaagcagatgctactgaggtttttgggtgctgaattgatattgacagatcctgcaattgggtttaatggtatgatggacaaggtggaagagctcatgaagagcataccaaattctcattgtctcaatcaagtaacaaacccagcaaatccagaggcacactttatgtggactggacctgaaatatggaaagacacagccggcaaagtggatgtgtttgtggcctctgttggttcaggtggcacattgacaggtgtagggaggtatctgaagatgaaaaatccatctataaatattgtgtgcgtggaaccttcagaaagccctgtaatttcaggtggttcaccagggccacacaagattcaaggcactggggcaggtttcatacctgaaattttggacaaatctgtcatcgatgaagtagtgacagtaaacacagaggaatccatggcaatggcgaggaggctggcgaaggaggaaggattgcttgttggcatatcttctggtgcaaatgtagctgcttgcatcaagattgcagacagagaggagaacaaggggaaaatgattgtgacaatgttcccgagcggcggtgaaagatacatgaactctgatctctttgcacctgttagagaggaatgtgataatatgaccttctgatgatgtcttggagctgctctccttttcaggcactgtacacatgtgttttccacttttcctccatattgttacttaagatatgcttcatagttcagagcacactatacatttttcttgttgcttctttgttgaggaagagcaagaatttcagcataatgtgatgtgctcctttgtgc

SEQ ID NO: 4793 - DNA, 1183 bp, Oryza sativa
  ref <308>: DATABASE ACCESSION NUMBER: AK062039
  ref <309>: DATABASE ENTRY DATE: 2001-12-06
tcaagcatagatgctaatggcttatcgaagctgggaatgcagggaatgtcacctgaattagtaaaaactgccagcgatatgattggcacaatgaaaccagaagaacttcagaaaatgtttgaagctgcttcttcgttgcacggaacaagctccagtcctccaaatttgggacctaatatgccagaaatgtctcctgagatgtttaagatggcatctgacatgattgggaatatgtctcctgatgaattacaaaatatgctgaattttgcttctaatatgggtggacctagtgcttcccccttgagaccagagaataagcttcaatcttcatcaagagccacaacaagtagtacttcccagagatcagtggataacagccaaccttcatcttctcaaaatgtcatggaaaatcctcatgaaatattaagcaaccaaaggatgggtgaatcatcatcccctggtgcaccttctacagctgatatgcaggaaaccatgagaaatgctatgaaagatcctgcgatgcggaagatgtatgcatccatgatgaagaacatcagtccagagatgatgtcaagcatgagtgagcagtttggaatgaaaatgacgaaggaggatgctgccaaagctcaagaagccttgtcttcattatctcctgaggctttggatagaatgatgaaatggatggaccgagcacagcaaggagtagaagctgcgaagaaaaccaagaactggctgttaggcaggaaaggattggtccttgctatcgtcatgctgatcctggccttcatccttcgccagcttgggttcatcggtgggtgatgtcctgaatgcagagatcggctgtaactagcttgcaatttgcaaataatcgtcgggtagcgatattgcgtgcttccactttctaacacctgctgaaattctccatgggaaggaaggggtatgaattcgatggatctgctgctttcttgtaacactgttcgttcttattctttttgtcgtgtcgagtcataattatttgtagcatcaattcatcggattcttgtatttcgagagcgtgaaggaatcgacttcaaattgaggtagcactgttattcagattcagataacttgccgacatgtaatgactaaatgagataccactgttgttattatgcacctgagatggttgagaattttttgctgg

SEQ ID NO: 4794 - DNA, 744 bp, Oryza sativa
  ref <308>: DATABASE ACCESSION NUMBER: AK062040
  ref <309>: DATABASE ENTRY DATE: 2001-12-06
aagtcattcagcaggagcagcacagctacaaggatcccatcactgaattcttggaatgcttgtatgttaactatgattttgatggtgcgcaacagaaactcatagagtgtgagcaggtcatattgaatgatcctttccttggaaagcgcattgaggaagggaattttgtcactgttcctttgagagatgaattccttgaaaatgctcgtctgtttatctttgaaacttactgccgtattcatcggtgcattgatattggcatgctttctcagaagctgaacatgagctacgatgaggcagaattgtggattatgaacttagttaggaattcaaagctcgacgccaagattgattcagtgtctggaactcttatcatgacgaccaatcatgttaacatccatgagcaggttatcgaaagcttaaagaatcttaacatgcggactttcctgctagcaaagaacattgtggagccggctcaagcagcacaacaggcagctcggtgagattgacagagaagaccacagttttgaggcgcccggaattatttaagtagagacaatcctctaaacttttggagttttgttgtttagcattgactccgttatcagtacctaagatcatctaggaggtggtttctcgttcgctacagcatatgccgacgttttctttctattttgtacttggaatcctgtggctgaagttaatcctttcgttggtactacaatcaagtattacctgattgtt

SEQ ID NO: 4795 - DNA, 1203 bp, Oryza sativa
  ref <308>: DATABASE ACCESSION NUMBER: AK104868
  ref <309>: DATABASE ENTRY DATE: 2002-08-28
aaataaagggtggcatatatacccttcccagtcatttgtcacctttggcaagggatttgattcccagaatgcttgttgttgatcccatgaagaggatcaccatacgtgaaatccgtgaacatcagtggttcacagttggtcttccgcgttatttagctgtgccacctcctgacactgcacaacaggttaaaaagctcgacgatgaaactctgaatgatgttatcaatatggggtttgacaagaatcagctaatcgaatcacttcacaagagactgcaaaacgaggcgacagttgcctactatttactattggacaataggctgcgcacaaccagtggctaccttggagctgagttccatgaatctatggaatcttctctcgctcaagtaactccagctgagacaccaaactcagccactgatcatcggcagcatgggcatatggaatctcctgggtttggcttgaggcatcatttcgcagctgacaggaaatgggcccttggtcttcagtctcgagcacatccacgagaaataataactgaagttcttaaagctctgcaagagctaaatgtttgctggaagaagattggacattataacatgaaatgcagatggagtcctagttttcccagtcatgagagtatgatgcataacaaccatggctttggtgcagaatctgctataattgaaactgatgacagtgagaaatcaacccacactgtgaaatttgaaattcagctttacaaaacaagggatgaaaaataccttcttgacttgcaaagggtcagtggaccacagcttctctttctggacctgtgctctgcctttctaactcagctgagagtcctttaattatgccgttgtctgcttcccaactgaacttcctgcagcataccgtggattgtcacgtttcatttaagatatgtacataatgaccataatcctccagtagataatatttcctggagtgtgtagacgttagaggctgccagtgatgtattttgacggtaattggccaaaccagaggtaacaggcaggaggcaaacctttctctgtttttttatttgccgttgttgttgttatatgacggtttagacttatctagagtccttgaaccactttgcttgtttacggtgatctttactagcctgattgcccagcctgagaatcacctctgtcgttatgaaagttgagcagttggcat

SEQ ID NO: 4796 - DNA, 1033 bp, Oryza sativa
  ref <308>: DATABASE ACCESSION NUMBER: AK062041
  ref <309>: DATABASE ENTRY DATE: 2001-12-06
cttcaccaccttccgccgccgccatcactgccgcaactgcgggaggacgctctgccacgagcactcgtcgtaccatatggctctcccacagtacgggatatacacggacgtcagagtctgctatgattgcttcaacaaatcctccagtcgtggtggtgttggcaatgccggttcacctgggagtgtatctagtgcagctgactccttttcagggttaaacttgggggaagatgatgcttcatcacctatgaaaaattcagcgtttcacagtgcacctgctgttattgagtgcaaatgtggaatgcctttgtgtatatgcgaggctccgaaaccagaacctgtgcctgtaaagagtatcagcacaacttcctcaagtgcacagtcgaatcctaggccaaaaaaatcttctaccaatcaacaatctgctgaatcaagtgtcaagaaggcttcggccacttcaagcagcaactcaagctcattcttaaatcttggcctgatgagcaatgatactaatgataagggtccttctgaatatgatgttactggggagggactgagggaagcaattaagagtggggatattaaagctgtcaagaaacttctcagccagggagtggattctaattactgcgataagcaaggatttgctttgctacatttggctgcactatttaaccagacagagattgctcttattctcatggataatggagcaaatattcagagcaaaaatggacaaggggaaactcctttggattgtgctccagccatgttgcaatacaagatgcgccagaggatggaagaacttgcggcatcacaacgaccctagtgatatttttctcctcttgttcatgtgccaaagatggtgcccccccttgcatggcccagaataaaaccatttttaccaaccgaggggcctctttgctgtgggtatagtagtatttctgttggcaccatcgcctacaaaatgtcaaaacaacaccagctcataaactgcatgtttcgccagctaaaaaaataattcattgtgctt

SEQ ID NO: 4797 - DNA, 1339 bp, Oryza sativa
  ref <308>: DATABASE ACCESSION NUMBER: AK062042
  ref <309>: DATABASE ENTRY DATE: 2001-12-06
gtgcactcagggacctcatcctgtctgattatgcaaagaaaaacaatgttaatacgtctgcgctgacacaatctgaaattcgtgacattatacttggtgctgaaatagctccaccatcacagcagaggcaacagattgctgaaattgagaaacagtctagagagacgactcagctgaccgcagttactacaaggacgaccaatgtgcatggagatgagctcatcatcacaacgaccagtccatacgagcaacaagcatttgcatcaaagactgattggcgtgttagggctatctctgccacaaacttgtatcttcgtgtcaatcacatttatgttaactcagatgatataaaggagactggctacacttacattatgccaaagaatatattaaagaagttcatatgcatagcagatttaaggacacagattgcagggtttctgtatgggctgagcccacaggataatccccaagttaaagagatcagatgcatagctattcctccgcagcacggaactcatcagatggtgacactgcctgcaaaccttcccgagcacgagttccttaatgatttggagccactgggatggatgcatacccaaccaaatgaagctcctcagctatcaccacaggatttgacatcacatgccaagatcttggagaacaacaagcaatgggacggtgagaagtgcatcattttgacatgcagctttaccccaggatcttgttcattgaccgcgtacaagctgacgccaagcggttacgagtggggccgtagcaacaaggacaccggaagcaacccacatggatatctcccgactcactacgagaaggtccagatgcttctcagcgacagattcctgggattctacatggtgccggataacaccccttggaacttcaacttcatgggagtcaagcacgacccgctgatgaagtacaacatgaagcttggcacgccccgggacttctatcacgaggaccatcggccgacgcatttcctcgagttcagcaacatcgacgagggcgaggtcgcagaaggtgatagggaggacaccttcacgtaagcaggcgccacgaacgcctatgctaccatagcctttctgctacgaacttcgcgctgtttcgagtagagatccgtaacctgtaacttgacgcaaccggtagtagcatatgatgcttgttttgaggagattgtataccctgatgtagtctgcccttgaaagaacagggtgtttgtagtttgtacaagtgcacgccatgataacagtgaagattttgcttactctcgatattgtattatgtagatctcggctaagatatattattgcatcctact

SEQ ID NO: 4798 - DNA, 559 bp, Oryza sativa
  ref <308>: DATABASE ACCESSION NUMBER: AK062043
  ref <309>: DATABASE ENTRY DATE: 2001-12-06
gcttcccttcatcacttccaaaatagaaaaaaaaaactcgttttcttttcttctcttctcttctcttgttgcggcgaagggggagaggaaggtcgaggtcgacgagatgggcggcggcaatgggcagaagtcgaagatggcgagggagaggaacatggagaagaacaagggcgccaaggggagccagcttgaggccaacaagaaggccatgaacatccagtgcaagatatgcatgcagactttcatctgcaccacctctgagaccaagtgcaaagagcatgctgaggcgaagcatccgaagagcgacctcaccgcgtgcttccctcacctcaagaaataatggcggtggcatctctctgctcaatcagaagagaaaaagagaagctgccataatccactagtatcatcttgtatgcaatgactggttgccctatgtatgggtctaaactttggtcagctgctgctgcttctttggttgtgtgcctcatctaaatatgtaatgctctatcaacctcttgtgcaacgatattaatcttgtgtggatttgctgcctgtgttc

SEQ ID NO: 4799 - DNA, 1791 bp, Oryza sativa
  ref <308>: DATABASE ACCESSION NUMBER: AK062044
  ref <309>: DATABASE ENTRY DATE: 2001-12-06
tcgagttcgctcgcagccgccgccgccgcctctctcactgccgccgccgccgcctgcctcgtactccaactcttcggcgactagatgacgaagcgcaccaagaaggcaggaatcgttggcaaatatggtaccaggtatggtgccagtttgcgtaagcagtattaaggttcagaggccaggaattgagcccatcatatatcgagatcttttcctgttccgaactctcgcatcctttttgaatggaattagccttcaaaaactaggctgcaatgcagagcttattgtggatgaattcggtgaaaaacttttggaagaacttgattacacccttgaagctacaaacatcgaggacttcttggaaaatttcaaggatgatccaactgtcaagatccctcaagtatataagcagtattcaggttctcgtgttttagtaatggaatggatagatggaatcagatgcactgacccacaggctataaaagaagcaggtattgatgtggagggctttctcacagttggagtaagtgctgcattgcgtcagttgcttgaatttggccttttccatggagatccacatcctggaaatatctttgcgatgcgtgatggtcgtattgcttatgttgactttggcaatgtggctgtcctaagtcagcaaaacaaacaaatcctaatcgatgctgttgttcatgctgtaaatgaagactatgctgaaatggcaaatgacttcacaaggcttggctttcttgctagtggaacagatgtgtccccaattgtcccagctctggaagctatttggcaaaactcagccgggaaaggcttagcagacttcaatttccggagtgtaaccgggaagtttaatcagcttgtgtacaattaccccatccgcatcccagaaaggttttctttggttattcgttcattgttgacacaagaagggatttgcttcactctgcagcctgattttaagtttcttgaggttgcatatccatatgtagcaaagcgtctcttgacagatccaaaccctgctctccgtgaacggctgatacaggtattattcaaagatggtctgttccaatggaaacggctagaaaaccttatagttcttgccaaggaaaacgtgtccaagatgagcagcaatcctgcactaaaaaagaatagctcgcaaattgagagaaatcgacaaatggagaagaaattagatctcaccgacacaataaaagacggagcacgtttgttccttatcgacgctggcatcaggagacaacttattatggctttcacggaggactccaagttgcatgtagaagagcttgttgatgtgtacagactggtcgaagatcaaatcgacattccatcagttgctctcgaggttatccaagatttaccatccgtcgcgcgcgatttcatgctttcttggagcgattccatcctgtcagatcggcaatactgatctcaggttaacagtttagagcagcaagcagaagtgctgtcaagacctgcaggagccattcttccttcagttaacctacactaaaatagatagatatagatgactacatttttcctctttgctgtacacaatttggtttgctattcttttctatagtatatcattgtataggaaacttgccatctgcatttcatttatatattttcgatggctctgtatatgccgtttgtatagcggaagaaaaggaacttgtatatagaatgagcttgtattgtgggagaaagtagctatatgtgtacatcgaggaaacttacattataagatcagatcatatgttttgc

SEQ ID NO: 4800 - DNA, 837 bp, Oryza sativa
  ref <308>: DATABASE ACCESSION NUMBER: AK062045
  ref <309>: DATABASE ENTRY DATE: 2001-12-06
tgctattattagccaacgtggtgaagctcgtagtgaacatgaagccagtcggcgattgaagactgagctattaatacagatggatgggttaactaagacagatgatctcgtttttgttctagccgccacaaatttgccatgggaactggatgcagcaatgttgcgccgtttggagaaacgtattcttgttcccttaccagagcaagaagctagacatgccatgtttgaagagctcttgccatctgttcctggcacaatgaatatcccatatgatgttcttgtggagaaaactgaaggatattcaggctctgatatacgccttgtgtgcaaggaggcggcaatgcaaccccttagaaggttaatgccggttcttgaaggaaggcaagaagaagtgcctgaggatgagttgcctgaagttggtccagtaacgacagaagacattgagcttgcactaaggaatacacggccatctgctcatcttcatgtacatagatacgaaaaattcaatcaagactatggcagtcatgtcctcagctaaaggtgagttgcaaaagcaaaggttatttgcacaacatagattgctgaatttcctccttgaagcttgaactgttccctagtattgtggaaatcctcctgacggaatcttgccgataagacttttcatttgcacctagtatggttgatagaatgctgaattaccgctgatgtatttacaactaatgagcattctctttacacaatatttgttcctgtaccatgtatattatcatttgtttgacgaataataagctatttgggtaatccttgccctttcggaatatgagagaaacattgtac

SEQ ID NO: 4801 - DNA, 1728 bp, Oryza sativa
  ref <308>: DATABASE ACCESSION NUMBER: AK062046
  ref <309>: DATABASE ENTRY DATE: 2001-12-06
aaactttatgctatcccgctcacatctacatcgaagcgcactgttcttagtgatctcattacggtgtatgcaaagggtgggaaaaccattgtgttcaccaagacgaaaagggatgcagacgaggtatcattagcactgacaaacagtattgcttcggaggcactgcatggtgatatttcacagcatcagcgtgggaggacactaaatggttttcgtcaagggaaatttactgttctcgtagcaaccgatgttgctgcccgtggtcttgatgtaccgaatgttgatttgattatccattatgaattgcccaatgatccagagacttttgttcatcgttctggacgcactggccgagctgggaaagcaggaactgcaatcttgatgttcacaaacagccagagaaggacagttagatcacttgagcgtgatgttggatgcagatttgacttcataagtcctccagcaattgaggatgtgctggagtcctctgctgaacatgtcatagctactttaagaggtacacggagtcgattcagtacttcattccagcagctgaaagactgcaagaagaattaggacctaatgctcttgcttctgcattggcacatctgagtggattttctcagccaccctcttcacgttctcttatcagtcatgagcagggatgggtgactttgcaactaactagagatccaggatatggaagggggttcttttctcctagatctgttactggctttctgtctgatgtttcttcagctgctgctgatgaagttggcaaaattttccttacagcagatgagaaggttcaaggtgcagttttcgatttacctgaggagattgcgagggatttgcttagtatggaactgcccccaggaaacaccataaccaaagtgacaaagctacctgcattacaggatgatggtcctgctactgatagttatggccgattctcaaactcggaccggggtttcaggaacagacggtccaggggtggtggctcaagaggcgggcggggtggttgggactctgatggtgaagacagatttcgccgtggtggcaggagcttcagatctgacaatgatagttggtcagatgatgactttggtggcgggagaagatcgaaccgttcgtcatcctttggtggccgcgggtcatcttacggcagtcgtagctcgtcatcctttggtggccgctcatcatcttttgggtctagggacagcagcaggagcttcagtggtgcttgcttcaactgtggcgaaagcgggcaccgagcatcagactgcccaaacaagtagatggtagaaacaacactcttccctgccgctcgggagttgctccttctgggcttgatcatgttccaacaagcggctggactattcaacacatgccaaggaacaccaaagcccagtcccccttcatctgatccatacatgcccaacactattgcctgacgaagattttgcactggttagtacagctctgtgtcgtcattccgtcgtgaagattttggcacgctgaccaccaaaggagagccttctgttcatttatatgtaatacgggttttacagggacgttaaatttttgttaccacctgggagttctcaataggatgttaagattaaatgaaccgtgtgtacagctcgttcctacacgactggactggctgatgccatcagaaactgttcgcgccaattagaatcactgtccaatgtcaaacaactttac

SEQ ID NO: 4802 - DNA, 594 bp, Oryza sativa
  ref <308>: DATABASE ACCESSION NUMBER: AK062047
  ref <309>: DATABASE ENTRY DATE: 2001-12-06
aagcagccaaggcggaggaggggagccggccggcgacgcgcgcgccaccatcccagcgacgatgccgcagctgagcctgaccaccaacgtgcccgtcgacgccgtcgtcgccgccgacatcatcaaggactgctccaaggcgctcgccaggatcatcggcaagcccgaatcctacgtcatggtgtcgatcagcgggtcggtgcccatgtcgttcgccgccagcgaggagccggcggcctacggcgagctcatgtccattggcggcatcggccccggcgtcaacggaaagctgagcgccgctctcgccgagatcctcgagaccaagctctccgtcagcaggtctaggttctacgtcaaatttgacgatgtcaagggattcaatttggggttcaatgggtcgacattctgaggccaagtccgtcaaaagttggattgctgcgtcgaatcaataaaattctaaggctaaatgttacatgtcatgtgtatcattccgttgcactttcgacatcatccatgaatgtgtttcgtttatgtgagagaccgaactttgcctgctttatttcaatcaaaaatagcatcgaagtctgtttgctg

SEQ ID NO: 4803 - DNA, 1375 bp, Oryza sativa
  ref <308>: DATABASE ACCESSION NUMBER: AK062048
  ref <309>: DATABASE ENTRY DATE: 2001-12-06
tgattgctattggggaagctgtggcatatgtgctgtctggaatgtatggtagtgtgagccaacttggaactggcaatgccattctcatcatcctacaacttttctttgctggcatcattgttatctgccttgatgaacttctccagaaaggctatggtttgggttctggcatttctctgttcattgctaccaatatctgtgagaatatcatctggaaggcgtttagccccacaaccatcaacagtgggcgtggtgctgaatttgaaggagctgtcattgcattgttccatttgttgattactagaactgacaaagtccgtgccttgcgtgaagctttctaccgtcagaaccttccgaatgtgacaaatttacttgcaactgtattggtcttcctcatagtcatctacttccaaggcttccgtgttgtgcttccagtgagatcaaagaatgctagggggcagcaaggctcatatccaattaagttgttctacacttcaaacatgcccatcattctgcactctgcactgattaccaacctctacttcatatcacagcttctctacaggaggtacagtggaaattttctggttaaccttcttgggaaatggaaggaatctgagtactctggccattcggttcctgttggtggtctcgcttactatgtaactgctccatcaagtttggctgatgttcttgcaaatccgttccatgcgttgttctatgtggtcttcatgctgtcagcttgtgctctcttctcaaagacatggattgaagtatctggctcatctgcaaaggatgttgctaaacagctgaaggaacagcaaatggtgatgcctggccatcgtgagtcaaacttgcagaaggaattgaacagatacatccccactgccgctgcatttggtggagtgtgcattggtgcattgactgttctagctgatttcatgggtgctattggttcaggaactggtattctgcttgctgttactatcatctaccagtacttcgagacattcgagaaagagagggcaactgagcttggtttctttggtttttgataccgttgcttgaggacattgttatgccaatagttggaccttcttgcaaatgaaagtacttctcggccggctgtttatggatgtaattggagagcttaaagtcagtttaggttgcctgacttatttgaaaatgaggtactcgtttaaggttctgcgtgtgttttcaggccggtatggtggtatatgtcctgtttcaagtacagtcatggccatcatcgatccgtcttccgcagccttctttcttttgactatgtagtaaccataatttgggatcagttttagtcatttggaactgaatatattatccccttttttgcgac

SEQ ID NO: 4804 - DNA, 2038 bp, Oryza sativa
  ref <308>: DATABASE ACCESSION NUMBER: AK104869
  ref <309>: DATABASE ENTRY DATE: 2002-08-28
aaggcctcagatttgacccgcaccgatacggacagaggagagagaaatcgaagccgtcttcctccgctccggcatctcgcctcttcccatcgccgccaccgccggcggtcgcagactcgcagctctcgcaaagattgacgggcgaggaagcgaggaggcgtatcttgggtgggtgcggggatggcttccgggcagccgcagttcaggtacacgcagccgccgtcgaaggtgatccacctgaggaacctgccgtgggactgcacggaggaggagctggtcgagctcgggagccccttcggcaaggtcgtcaacacgaaatgcaacgtcggcgccaaccggaaccaggccttcgtcgaattcgctgaccaaaatcaggcaattgctatgatatcatattttgcatcatcagctgagcctgcacaggtaagagggaaaaatgtgtaccttcagtactccaatagacaagagattgtcaacagcaagagttcaggggaagctgcaggcaatgttttgctagtgtcgatggaaggtgttctgccagatgctgtgagcatcgatgttctacacctggtattttctgcttttggctttgttcaaaagattgccacctttgagaaggcatctggttatcaggcattgatacagttctgtgatactgaaactgcatcatctgccaaagctgctctggatggtagatgcattcctagctatttgcttccagaacttgatgtgccttgcactttgagaataaattattcagcacatactgttctaaatgtcaagtttcaaagtcacaggagtagagactacactaatccgtaccttccggttgctccttctgctatagatggatctggaccggatgggaagaagcaggaagcagagagcaacgttctgcttgcatctgttgagaacatgcagtatgttgttacaatagatgtgcttcacgaggtcttttctgcttttggttttgtgcaaaagattgctatctttgagaagaactctggcttccaggcattaatccagtatccagatattcaaaccgcagttgcagcaaaagaagcattagaagggcacagcatctatgaaggtggatattgcaagcttcatctcacattttcgcgccataccgatcttaatgttaaggttaacaatgagcgtggtagagattacactggagggaacactgcaccgaccagcaatcaaccttccattcttggtcctcaaccagtatattccggtgcttacaacaacgctccttcgtcagcgactggtgcagtagtgccaccagggactactctcactccacctggagcaccatctcatccttacacatccagcgagccgcttccgcaaactcctgccgttccctctggtggagctccgctgtacactagccagggaattcttcaaggcccccctggtgttcctcctgcacaatttccaggctatggatctccacagtttcccccaggctcagctcaagctcaaatgcatcaacaacatccagtccagggaagccagcagatgcctggccaaatgaaccatcaaccacctccaggatcgttcatgcagtaccctggcgacggaggccgtccagttcaagacgcacctgggcaacaagcaatgccgttccatggccatggaggagggcagcatctacctccaggctatggaggccagccgcagtttcagcaaggtccaaggccacctatgccgccgcagcagtttccgatgtacggcgaccagcagtttcctcctggtacggggccccagatgatgatgccctttgctgggcagggaggaggccagcagcacccgtttcgcccttataacagccattagctgctctgttgattcagtcttacgttacatgtcatatacgatgcatgtacttttgcctctctgccgccattttgttgtgaggtatggcacagtagttgatgctgtggaatcgtttggtggagagatgtggtagaaactactagtttaacaatccagaatttctctgattaatgatgagttgctgagcactgtc

SEQ ID NO: 4805 - DNA, 691 bp, Oryza sativa
  ref <308>: DATABASE ACCESSION NUMBER: AK062049
  ref <309>: DATABASE ENTRY DATE: 2001-12-06
ggtatgtttctgccaattgctttgcagcttacttctgtcctaacctctgtcagatgaaaactctcctccctcccaaagagagagttggtgtgtatggagatggcaacgtcaaggtgtttttcgtggacgaaaatgatgtgggaacatatgcaataaaatcaatcgatgatcctcgcaccttgaacaagacaatatacataaggcctcaagataactgtctcactcagaacgagttgatctcaaagtgggaaacactcactgggaaaagtcttgagaaattccacatacctggtgatgaatttttggcttctatgaaagatttggattttgctagtcaagtaggaataggacattattaccacatcttttacgagggctgcctggcaaacttcgagattggtgacaatggtgccgaggcaactcagctctacccagaggttcagtacacccgcatggatgagtacctgaaacgctatatctaaccggttcaaatttaaagcatctgcttgtcaaatttaaagattgtaatccgcagatgagcatccctggtcgatcttcccctaccagaattgttcaacgacaatatgcctgctcgaatttatggtactagtagtctagtacatcccctcttgtttgttgactctgttgtactatcaagttggatgggtggaaagttcaaacgatggttagc

SEQ ID NO: 4806 - DNA, 418 bp, Oryza sativa
  ref <308>: DATABASE ACCESSION NUMBER: AK062050
  ref <309>: DATABASE ENTRY DATE: 2001-12-06
tacattgagagagactggtcttcaatcatcaaatttgatttcttggtattgaaataccaaaagcaatgacaagcaatgaatagtcaggtgatatgtgaggttttgcttccataggttgatggcttggtgattgaggatgcagtaatttgtagtgacatccatgttttggcttcattaattaggaggaaccaaagctgcaaaggaggtttttgagctcatgatgtcacagttttacgtacttctttgtgtcacagttgtcaaactgacgtctcaatattttcttgcgaacgaagctgacctcttaggcaatagtttttttcccttactgtgaatacatccgtccaattcctcttcaaattgggctcgattgcaatagttgttttttacatgaattcatttgaactgatgttgtgctctg

SEQ ID NO: 4807 - DNA, 748 bp, Oryza sativa
  ref <308>: DATABASE ACCESSION NUMBER: AK062051
  ref <309>: DATABASE ENTRY DATE: 2001-12-06
aacacacaccagaaaccgataagggacacgaaacaggggaatccggagcaaagtgcgacgcgagcgcgcgaggaagcagcagccatggcgctctccctctccacctccttcctcccgacccaagccgccgcggcggccacgaggaccaccctccgctccctcgtcccctcccagaggatgcggtgctcgatgcggaagaaggggctgcacccggagatctacgaggacgcgaaggtgtactgcaacggggagctggtgctggtgacggggggaaccaagccggagtacacggtggacgtgtggtcggggaaccacccctactacgtcggcgacacgtcggcgatggtcgtcatggacagccagatcgagaagttccgcaagaagtggggccacatcaaggagtactggcccgaggaccagtggagggagatgcaccccgacggcgacccggagttcgacccggaggaggagggatccgccggcgccagctgagcccccgcttcgcctctcgcctccgccgccggcctcgccggtgcggtttctcttggttgattttgggaattgcgtaaaatggattagctcctcttgcttgcgcctctcgttacacgtgcattcgcattgctctctaggtgttcgatcggtgttctcagtggatacgtgtgatcatatttgtggtatcgaactgtttgttctctgcctgtactctttgacatcgatataaaatggagatattgcaatttgcacactc

SEQ ID NO: 4808 - DNA, 755 bp, Oryza sativa
  ref <308>: DATABASE ACCESSION NUMBER: AK062052
  ref <309>: DATABASE ENTRY DATE: 2001-12-06
gtgcggagagagagagagagagagagctacccttcccttcccttctcctcctcctgctccgccgccgccatgggcaagtactcgacggagccgtccaacccgaccaagtcggccaaggccatggggagggatctcagggtccacttcaagaacacaagggagacagcgttcgctcttcgcaagctgcctttggtcaaggcaaagcggtaccttgaggatgttattgctcacaagcaggcaattcccttcagaaggtactgtggaggcgtgggccgtactgcacaagtgaagtctcgccaatcaaatgggcagggcaggtggcctgccaaatcagccaggttcattttggatctgctgaagaatgctgagagtaacgctgatgttaaaggcttggatgtcgacaacctcttcgtttcacacatccaggtgaaccaagcccagaagcagagacgccggacataccgtgctcatggacgcatcaatccttacatgtcctcaccctgccacgtcgagcttatcttgtcagagaaggaagaggccgtgaagaaagagcctgaaaccaccatcgccccgaggaggcagtgagcttatccgcccagagtcgcaactttagttcattttctagtactttgttatggcattgtgtgctatttatgtttctggtaccattgtttagtcggaacttgttaagtttgatgctatcctttcgtttgtgtatgttcaaatggtaacaattacttgccaacttatctgcc

SEQ ID NO: 4809 - DNA, 1454 bp, Oryza sativa
  ref <308>: DATABASE ACCESSION NUMBER: AK104870
  ref <309>: DATABASE ENTRY DATE: 2002-08-28
acacgctgtgctgctgctgctgccgctgctcctcctcctcctcttacatcccatcctcgccgcgatttccttcgccgccgccgccggcttcgtcttcttccccggcgccggggcacgcgaaaagggtttgtttctagtagaatatgtcgtgctttgcatgctgtggtgatgaagatactcaaggagtaccagacaacaggaatccatacccagggaaccatccagcaaggagcgatgcatatcgcacagctgatccaactccaagaggtcctcaacctgtgaaagtgcaaccaattgcagtccccatcattcctgttgatgaaattagggaagtgactaagaattttggtgatgaagctttgattggtgaaggttcctttggcagagtgtattttggtgttctaagaaatggtagaagtgcagcggtcaaaaagctagactctagtaagcagccagaccaagaatttttggcacaggtatctatggtgtcgaggcttaagcatgaacatgttgttgagctgcttggttattgtgttgatggaaatctccgtgtccttgcttatgagtttgcgactatgggttctcttcatgatatgcttcatggaaggaagggtgttaaaggagctcaacctggtccagtcttatcatgggcacaacgtgtgaagatagctgttggggcagcaaaaggcctggagtatcttcatgagaaagcacagcctcatatcatacacagggacatcaagtccagcaatgttctccttttcgatgatgatgttgctaaaatagctgactttgatttgtcaaaccaagctcctgacatggcagctcggcttcactctactagggttcttggaacctttggatatcatgcacctgagtatgcaatgactggacagcttagctccaagagtgatgtgtacagttttggagttgttcttcttgagctattgaccggaaggaaacctgttgaccatacattaccaaggggacagcagagtcttgtgacttgggccaccccaaggcttagtgaagacaaggttaggcaatgtgttgactcaagacttggaggggactatcctcctaaagctgtcgcaaagtttgcagctgttgcggcgttatgcgttcagtatgaagcggactttcgaccaaacatgagcattgtcgtgaaagcgctgcaacccctgctgaatgctcgggcaactaaccctggagaaaatgccgggtcataaaactttggtctaccttttgtatgatagatattaagttaagaagtatgagacatcgatattgttcttgcggatgtgtggctggctggaagtgtgtacatttgtgattattcgtcccttgttgtaatcaccaaggttctagcaaccgaaaatatttgattcttcgcatcgggtgagacataacttgtctgaaggtgacatgcatatctatctaccttactcaagagg

SEQ ID NO: 4810 - DNA, 1309 bp, Oryza sativa
  ref <308>: DATABASE ACCESSION NUMBER: AK104871
  ref <309>: DATABASE ENTRY DATE: 2002-08-28
agcagcagcagcaaaccgccgctttggcagaagaggaatccgggatggccggcggcggcggcggcgggaatcgcctggacctccccgtggtggacctcgcgtcctccgacccccgagccgccgccgagtccatccgaaaggcgtgcgtggagtccggattcttctacgtggtcaaccatggggtggaggagggattgctgaagaggttgttcgcggagagctcgaagttcttcgagctgccgatggaggagaagatagcgctgcggaggaacagcaaccaccggggatacaccccgccctacgccgagaagctcgatccctcgtccaaattcgaaggagacctcaaggaaagtttctatattgggcctattggagatgaaggtttgcagaatgatgctaaccagtggccttctgaagagcgcttaccaagtcggagggaaacaattaagatgtaccatgcaagtgcactgtctactggcaaaaggatactctctctaatcgctctgagtttgaatcttgacgctgaattctttgagaacattggtgccttcagctgcccatcagcatttcttcgattattgcactacccaggtgaagtagacgactctgatgatggcaattatggtgcatcagctcactctgattatggaatgataaccctcctagcaacagacggcactcctgggctacagatatgcagggaaaagaataggaatccccagctctgggaagatgttcatcacattgatggggccctgattgttaacattggcgatttgctagaaaggtggacgaattgtatttacaggtctacagtgcaccgtgttgttgcagttggtaaagagcgatattctgcggctttttttcttgacccaaaccctgatttagtggttcagtgtttggaaagctgttgcagcgagtcatgcccaccgaggttctcacctataaagagtggcgactatttgaaagagcgattgagcgctacatacaaatagtcctatgctttttcatgtgtaaaaggaggctaacatgtgctacacggccggccatcgttctccattgtccatttttcttctgcgtttagacatcacagtagtccagaaggttgtttgtgttgttttactgtaacgctgtaaagaaaaagtctgcagtgatgtgctatgcttgatttctctctccactgctcgacaccaacctgaactttttattgtttgtcgttcaaaaaaaaactttttattgtcacctgcgagctgactggtgtttggactagtattcttgttgacttggtaaagaaactccagtttgatcc

SEQ ID NO: 4811 - DNA, 550 bp, Oryza sativa
  ref <308>: DATABASE ACCESSION NUMBER: AK062053
  ref <309>: DATABASE ENTRY DATE: 2001-12-06
tctatatcaagattgttccaaccgagtacagatacctctcaaagcaggtgttgccaacaaatcagttttctgtcaccgagtattttgttcctaaacgcgctactgataggtccgcgtggccagctgtgtacttcttgtatgatctctcaccaattacagtcacaatcaaagaagaaagaaggaacttcctgcatttcctcacccgactatgtgcagttcttggcggtacctttgcaatgacaggaatgcttgaccgatggatgtaccggcttattgagtctgtcacaaaatcaaagaccagaagcgtactacggtaattgcgcatcacatgataagtggaggcaaactgtgacaaccctgtgtgttgtcactggtcatacaaatcagtcagagcatatcgtctcagatacggtcaaccccagtgggttttcatgttttgatatgctctatggctcgattgcttaaaatacttatgttgttagctttgccattaatcactcatgttagactggcacggactcataacagttttgtaatcaatgattcccac

SEQ ID NO: 4812 - DNA, 1896 bp, Oryza sativa
  ref <308>: DATABASE ACCESSION NUMBER: AK104872
  ref <309>: DATABASE ENTRY DATE: 2002-08-28
gatgttgatgcatatgatggatggagcacaaggtagtggctctgagctcatccatgatgatgcccacactggttcacagcttgagtttggtgttctgaataatcacaactcatcaagtgttccatcaatgcaaagccaagggctatctctgagcttgaacacacaaatcatggcgccttccttaccgtactggtctataaagccagacatgttaacgccgcagtcttaccatgacaaccttagaggggaagacatgcggatgaagaatttgcagtccgaagcttcacgcgcaatccggaactcaaggtatctcaaggcagcacaagaactgcttgatgaggtcgtgagtgtttggaagagcataaaacaaaaggctcagaaagagaaggttgaatcaggaaaagcagatggcaaagagactgatggagggccaaaaagtgagggtgtatcttctaatccacaagaatctggcgctaatgcagcacctgagctttccactgctgagaagcaagagcttcagaacaaaatggcaaaactgatggcaatgttggatgaggtggaccggaaatacaagcattattaccaccaaatgcaaaccgtggtttcatcgtttgatgtggtagctggaccaggatctgcgaagccttacacagcagttgctcttcagacaatctcacggcactttcggtgcctgaaggatgctatcaatgatcagatcaatgttatcaggaaaaagcttggcgaggaagagaactcatctggcaaggagggaaaattaacccgcctccggtacattgatcagcagctaaggcaacaacgtgctttccaacagtacggtatgattccacaaaacgcctggagaccacagaggggactgcctgaaaactctgttacaattcttcgcgcttggctgtttgaacacttcctccatccgtacccaaaagattccgagaagttaatgcttgctaggcagactggcctgactaggagtcagatttcgaattggttcataaatgcccgtgtccgcctttggaaaccaatgattgaagacatgtacaaagaagagattggtgatttagagcaagactccaactcttcctctgacaatgcaccaagaagtaaggataaaatggcatcttcagaagacaaggaggatctcaaaaactccagggcacggatttgcgaaacaagccaattgagcgagtcgagaaccagcattggagcaatgaatgttggcggagcgcctgttggcttccagaatgagcccaatcctgatgacagtttcatgaacctgatgctgaaggaccagcgatcgaacgaagtggatggcggcctccttctccacaacactgtcgcgcagcactcagacgagaacgcccggttcatggcctatcacttggcagagcttgggagatacggcaatggcaatgtgtcgctgacactgggcttgcagcactccagcagcaacctcgttcctaatgctcagccaggtttccctggtgttaatgaggatgacatctacaatgctactgctcctcttggtgtcaccgtcgcatcttcggactatgattcgatgaatcagatggatcaacggcaacggtttgagcattcacctcttctgcatgattttgtggcctgaagacagcagagaaacaatcaggaccatggacattaagagagagaattggggggcagcatttgtaacacctagtgggagaataacatgcctgaaagggcatgggatttgtagctttgtagttgccatttaatacagaagaggaggtatagcaggaaatgtaatataaggttagatggtgggggtgatagggtaaagaatcatatgtaaagataaaatccatcattactatatatatacgtgtaaaagcttgtgatttg

SEQ ID NO: 4813 - DNA, 1543 bp, Oryza sativa
  ref <308>: DATABASE ACCESSION NUMBER: AK062054
  ref <309>: DATABASE ENTRY DATE: 2001-12-06
aaaaggcaaatactgcaattcttgattcttttgaggcacctacatggccagcttcgagatactccaactggagtacagagcagggtgtcgataaatttagtggtagtacattcactgatggtcctttgcttgagagcagggagtcatttccttgttcagatcacctggaagctcttgaaagtgttgctgttccacttgcaaaattggcacatcctcctctgcttaatctgtctcctcttggcccaacatggatgcatggaacaaatactgtaggatctcatggagaatcattgagagaaactgaaggttcaacctgtgaagggtattcagaaggtcatggtaggtcaaggataagagatgcgtttgaaaaaactaatatcttacatgatgactttgatatgaggatccctaagaagagttcagatagaaaatctcaaaactggggcccggaatctgcctctgtatccccacgcattggatgtattcggagtattggtctccttcctgtacgaaggtcgttaattggctcttttgaggaatctcttttatctggtcgctattcctgtggaaaagacaatcagaatattgacggtttccttgctgtcctgaatgtgactggtggtaacttctctcccccaactcagaagcttccattttcagctaccagcattgatgagaacagctccttactctactattcatcgatcgatcttgtggggaggctgcctatgagcagtagcaaaagcccaaagctcaaaagaagcctgagtaatcatgattcacgatcagcgaagagtcggttacgtatcccagttaaagggcgtgtgcagctggttgtcagtaacccagagaagacaccgctacataccttcttctgcaactatgatttgagtgacatgcctgctggaaccaaggctgtagaccagggcagaactgcaacttgatcgatgactcggaaaagggcggccgcaagaacatgacatgttgctctatggagtgtgacattagagaatcaaatgactctagctctctagaaacttcagaaaatggcagtagtaccaatgtttgctgttgtcaatcagacacatttcccttaggtgaaaagaaatactgctgtagatcgtccaagatcaatgatccagctggaggtgctcttcgttatgctttgcacctacgatttctgagcccatttgccaagaaaccgtcaagatctatgcagcgtagcaaatctgatgtatcatcagaaccatacaaccatagttcagggcctgaggaacacagacgattctatctctacaatgatgttagagttgtctttcctcaaagacactcagatgcagatgaaggcgagctgcgggtcgagcacgacttccctgctgatcccaagtacttcgacataagcaactgatatttactcgcgcacttcacatgaaatctgtatatatcataccctcattaacccgtccatcaatcccttgtgttcataaacattcacccatttgtataggactaaaatcttccaatgaaatacctcatttcgttc

SEQ ID NO: 4814 - DNA, 527 bp, Oryza sativa
  ref <308>: DATABASE ACCESSION NUMBER: AK062055
  ref <309>: DATABASE ENTRY DATE: 2001-12-06
acatttgcttttggagtgattttgctggagatcatcagtggacggcttccttattgcaaggacaaaggctatttgattgactgggccatcaagtatctgcagcagacagaggagatcggtaagcttgtcgatcctgagctgaccaatgtcagaacagaggatctcatggtgatctgcagcgtagtgagtcgctgcatcgaccctgatccatccaagagaccatcgatgcagatcatcacaggagttctggagaacgggatcgacttgtcggcagccgccatcctgaaggaatcctctctagcatgggctgagctcgccctggcgttgtagcataccattcttaccgctgtaaattcgtccgtcacatcacacactaatatttatctgatcatggccattgcgtgctcggaatatagaggagctgagacgcacgagcaggcaggcactagttcagtttggtcgtgatactgtattgactgtttttgactcataatgctgtatgatttacagttgattgccggtattgc

SEQ ID NO: 4815 - DNA, 1551 bp, Oryza sativa
  ref <308>: DATABASE ACCESSION NUMBER: AK104873
  ref <309>: DATABASE ENTRY DATE: 2002-08-28
gtcttcctcctccctcccctctctccacaggtcaaatcctccccttccttgcttgcaatcctagcaagctccaagatcgcggcaagctagcctcgagggaggcccgcctgcccgggcctcgggctccgggggcccggttcttgaggtttcttggtcgtggggtcgaggaggtggtgggtggtggtggctgcggcttggcgcgatgaacaaccacgcggcgggcgggagcacgagcaacggcggatccggggtcgacggggatggcggcggcggtggcggcgcggccaggaggaacaccaagatgcccaagtattccaagttcacgcagcaggagctgccggcttgtaaaccaattctaactccaaaatgggttgtatcggtgtttttccttgtcggcgtcatcttcgtaccagttggtgttgtttcgctgctagctgcacaaaatgttgttgagatagttgatcggtatgatgatgcatgcgtgccagccaacatgactgataacaagcttgcttacatccaaaacccaaacatatccaaagagtgcacaaggactctgacaattacagaggatatgaatcagccaatttttgtatactatcaacttgataatttctaccagaatcataggagatatgtgaagagccgaaatgatggacagctaagggacgctgcgaaggcaaaccagacatctgcctgtgaacctgagaaaaccacggcagatggaaaaccgattgttccttgtgggctgattgcttggagtttgttcaatgatacatatagcttcactcgtggcaatgagaacttgacagtagacaagaaggacatctcttggaaaagtgatagggagcacaaatttggcaaaaatgtctatccaagcaactttcagaatggtttgctcaaaggtggaggaacacttgatccggcaatcccattgagtgagcaagaggaccttatcgtttggatgcggactgcggcacttcctacattcagaaagttgtatgggagaatatatgttgacctcaagaagaatgataccataactgtgaagctgagtaacaactacaatacatataactttggtggcaagaaaaagctggtcctttctactgcaacctggcttggtgggaagaatgattttctaggatttgcgtatgttatagtcggaggggtctgctttttcttggcatttgctttcaccttgctatacctcataaaaccaaggaaattgggtgatcacaactacttgtcctggaacagacatcctggaggccgttaagacgtccaaaacacttgtcgcataaaaatggctcatccggtgacatgtatcatgtacttaatgatgatatactgaaaattgtcagggagtgtaatcaggtctttggtttgacctagaccttcatgtacatcttagcataagaaccacgctgttttgtttcattgtttcttttgttatttcggaactgcatatagcagtgatgaatagaatcggtactgattgttttgtgatgaatagaatcctatcattctgaatgcctaaaccgttctgtt

SEQ ID NO: 4816 - DNA, 2024 bp, Oryza sativa
  ref <308>: DATABASE ACCESSION NUMBER: AK062056
  ref <309>: DATABASE ENTRY DATE: 2001-12-06
tttgcaagtgaatgttggtgttaacaaaatggaagctccagtgctagaagttcttcaatttgagaaatcttcatcaagcaattatataaccaagaatctggtcaatggactttctagtggtgatgaggatccatgtcaggagctgctaagctggctgctccctttggatcgcacacttcctccgcgatccttatcacctcctactctcaatcctagtgcatcacacaagcaatcttattctgcttctggttctcaaattttttcattaagtcacttcagaagctattccatgccttcagcctcctccactcaaccacccaacattaggccaccaccaatttctgaaagtcaagaatttgtgcctgaaaagcctgcgaaaacacctgatattataaatgatggacaactttcctttagaggagttccattggagcctgaacggtattccgtacgttgtggtctagaaggtgtatatctaccagggaaaagatggcggagaaaagttgagatcattcaaccaattgaggttcactcttttgccgcaaaatgtacttcggaaaatcttctgtgtgttctaatcaagaatatttctccacagcatgtgaaagatatagttgtattggtagatgcaattacaattgtctttgaggaggcatccaaaggaggtgctcctttgtcactcccaattgccagtattgaggttgggcacgggcatagcttaccaaatcttgcactcaggagaggcgaggagcactcttttattctcaagccagcaactatgtcgtttagggaccggaggaccaacaatgatgcacctctgactttgtcactccctaagatgaatggaactgccacaaatgtttctttggctaaggttggcgagaccattggctctcttatggatcagtgtgctgtacttgtatcatatcgctgcaattacacagaatcaaaacttttcttcaagcaggccaccagctggcgaccctgtgttgctagtgaccttatgatctctgtatcatcagaactgtctttgcgaaatcctatttcgagtgctcgagttcctcaactcccagtgcaggtcttaacccttgaggctactaatatgacatcagaaaaccttaccgtaacggttcttgctccagaagcgtctggttcttcttcagttgtatccttgaactcagctccaaccacaccaaatagttcgtatgacaatcttaatgagtctgtgagaagatctggcttgggtaaacatcgagctggttttcgaagaatgaattcagtccttgctggctcaccaaaagaaagtgacaatggaggaaatagaattagcacttctggaggctgtactcatctgtggttgcagagtgcggttcctttagggtgtattcctgcacgttcaagcaccaccgtcaagcttgagctacttccattaacggatgggatcattacactggatacacttcaaataacgataagggagaaaggtcttacatacataccagagcactccttggagatatatgcgtcagctgccaattcaacgggaagttcatagagtcaatatcagagtgtcaaatggtgcaattactgtcttggtgaattggggtctggggtctcaacctctgcgcagagtgtgaggtcactggatcaagtgtattgttgctcatttgtatccgatttttgacgtagaagctcctacagcacgatctcgaagccaaataacgctatttgtacgtgggaaggattttgctgcctacagtggagaaatgggcacaatgatctgtctatagactataaattgggtttccaaatccattcatacacgggggttgctgagctgctagtgttgtctatacaggctcatcgaaaatctgtaatgtttgtgttgcatagttcagattccatttttgtggtgttcatttttgttccgtgtaaacctggacagtgcccatcttttgttcgacaatcgacaggcagatgtatcatgcatatggtgtagcgaggaaggagaaattcgcagatgt

SEQ ID NO: 4817 - DNA, 925 bp, Oryza sativa
  ref <308>: DATABASE ACCESSION NUMBER: AK062057
  ref <309>: DATABASE ENTRY DATE: 2001-12-06
tctgttgctagcactaatagttcacaaggattgggtacatccacaccaggacagaacgaggaatctggtgatacagaaggtctgtttttaacattagtggatcagtttgtttcagaataaagtttcacctcaattaaagtattagtcttttttgcacgttcatggtaagtttccttctggacttcttgtctcgtctaagaatcagtttagttagcagctatacaagagcattctgtcaaagtatttgaggtgtctaccgtacctatgatgttcctcaatccatctaaggttgggtttagatttagttttcctggcttcagctgcataatcacgatgcttagttcatatttaacaggattgaaattcccattcatggactctgaaactgaaagcttgactccagcggaagtcaagcaattgcacgagctctacaggcaagtagtcaccagatatacgctgctgtctaaagctttaagaaagttatcggtagatgaggatcagctccttaattcagtagatgattgatgaagccatgtaaaaatgctgaccagagatgacatgtcctattaaccacataattgatcgagattgtacacgcacgcaaagttttccattgactgtaggaaagcaaacgagttccaggcatctgcaacatggttccagggattccaggatacactacaggtatggccaaatgatcatcagagttgagaatggattcttgtgcctttgcattgcaacttgcaagccctctgtaatagcgtccacttctgtaatttttagttcctgtctgccccactccttggagctagcgtagtctctaggtgtgcgtgaggaactgcatatggcacatgttgctgttgctgatcatgttcaaccgttctacctcgtacttcgtatgttatacagcaaatcttctgtgctg

SEQ ID NO: 4818 - DNA, 1288 bp, Oryza sativa
  ref <308>: DATABASE ACCESSION NUMBER: AK062058
  ref <309>: DATABASE ENTRY DATE: 2001-12-06
gactcacaaagtatgctcatttcattgctctgtctcacccctatactgtagaacaagtagtggaggcatttatggataacatacacaaattacatgggatgccactggtcatagtcactgatagagataggatatttactagtaacctgtttcaggagctgttcaaagccagaagggtcaacctgaggttcagcacggcctatcacccacaaacagatgggcaaagtgagagggtgaatcagtgcttggaatcctatctcaggaacatgactttcaaggaacctcagaactggtactcttggctagcactggctgaatggtggtacaataccacatatcacacagcaattcagatgaccccattcaaggcactttatgggtacactcccccacagatcaatgaattctccgttccctgcaatgtttctgctgaggcaagagtttctttggaagagaaggaggctataattcaaaacctcaagagtagtatggatgctgctcagaagagaatgaagcactatgcggacaggaacaggactgagagggaattgcaggtgggagatatggtatatctcaaattgcaaccatacaggcagaatgccttgggtgtgagaggatccttgaagctaaggtccaagttctatggaccatttcgggtggaacaaaagattggtcaagtggcatacaaacttcagctacctgaaggagctaatatccaccctgtgttccatgtgagccaattgaagaagcatctggggcgccatgctgttccaatgcctaatttaccactggtaggacccgacgggcagataaaggcagaacctgtagcaattctgcaacgtcgaatgattccaaggagaggagaaccagtggtacaatggctggtgttgtggcgcaatctatcgccagctgatgctacatgggaggatgctacattcatcagggctacattcccaaattttgaaccttgaggacaagtttcaacttaagaagggggcaatgtcaggacctgaagtctgaaatggaagagctctgtatctgaactttctgaattttctgaagaattgaagataacgtttgggagaaaggggaaatatgaagatctgacggctgagaaggatacatgttaaatccaacggtggagtcgcgtgtccgagtcactgtagtcgtcagcgtttgtcgttttgttctgtaactttctttacagctgtgtgtgtgctgagttatccaagagtgtaatcgatacttaatcagcccgatgaggaatgaaagatatgacgaaaaactc

SEQ ID NO: 4819 - DNA, 404 bp, Oryza sativa
  ref <308>: DATABASE ACCESSION NUMBER: AK062059
  ref <309>: DATABASE ENTRY DATE: 2001-12-06
gaaggccggatatcgaagaggctcggcgtgctggccctcctggagcagcctttcatcaaggatgacagcaagacggtgaaggatcttgtgaaggagacgatcgccacccttggggagaacatcaaggtacggaggttcacccggtacacccttggtgagaactgattgaggaggtgatctctagtctcaatcctgacatcaggagttgggcatattttgattcatggaagttcatagctgttggtagtatgataagtttccatctgtaattctgtatcacctgttatattgctgcccctttttttcagctgctgttattactgttgctggttacagaacacatttttgagcactcctttgtagatgacaagagagatcaatattgtcaatataaacattacggc

SEQ ID NO: 4820 - DNA, 1044 bp, Oryza sativa
  ref <308>: DATABASE ACCESSION NUMBER: AK062060
  ref <309>: DATABASE ENTRY DATE: 2001-12-06
aaatgttaggtcctatgtcattctatttggggaagaaccaaaatctttggaaatgtgtgaatataatggatataaatgcaaaatatccaaaagatacgtttgatgctgttcataggttcatatcttccacctctggcagctctgctataaagaattctagatccaagtatcaagctgcaattgccttaaagaatcaatgcttgaaacatcttgcccttggtgaagttcttcagattttgtatatcataatcaatacaaagaagtggtttgtgccgcattcttcagggtggcagccgttgtcgtttaacattatagtggttgatgccacgacaggtgctggtgggaaagcttagccttggtacatttgtctgctcatgtcagatggataatttgaggccctggtggtttcttcaaatgctatgctctggtgaaagttattagtatgatggtgcatctacagtatgccaaacctttcttctaaagatgaaatagttactagtttaagcttagtggttagttgggaacttgggatcaaactgtcactggtttttcttccagtactccaggaacagcataggtggtggttaatggtatgataaggatagtccagtggttcttcaatcagcaaaatggatacagaacaacgatcttttgttcaggcagtataatagtgcctgatattgggaggttatgatctgctcaaaatattattgtctattttgtggaaatctgccatagtggcaccagaatatgctaactattcaagctgttcggttcaatggagtaccgaagttgaagccccttcgtcttaacacgaatggatcgatgaatgaaccatgtgatgttcagagatcctttgctgtccatttaatcaatgtgtctgagtcttcgagtggatacaaggctacccctgctatggcttgtggtacatgtcaatattgtcagtaatgcattagaggcttagagctgccttggtaaccttgccagcgtgccatggaactataaacttgctatgatttatgtacatattcgttttgtgctgtt

SEQ ID NO: 4821 - DNA, 493 bp, Oryza sativa
  ref <308>: DATABASE ACCESSION NUMBER: AK062061
  ref <309>: DATABASE ENTRY DATE: 2001-12-06
ttgatgatgacagcaaggctgttattgaagaggcacttaaggactatcctaatcaagcagcgctcaaaatacaatcgatgatgatgaactaactcagtaatgcatgatggcctatgtacgtctttgatgcagctgccaggcgtcttactcgtcatgtaattatggtcattcagtatcacctgcaatctatcatcgtaagcccaacaagggagcacacgaacaacaggcgatgcaacagagtgggtgaaattatcagtttatctatctatctatctatctatctatctatctaccagttgttttggttgtttccattccatgaaattagaatggagttgtttagttggctctctataaagagcagtactatgttatttggaattcaagcaagaagatataagaccctgttagttttcatattattcatggtgggattgttgaaatggattatttactccacggattgaaatatatattctccactgcatttgtt

SEQ ID NO: 4822 - DNA, 401 bp, Oryza sativa
  ref <308>: DATABASE ACCESSION NUMBER: AK062062
  ref <309>: DATABASE ENTRY DATE: 2001-12-06
gatgtgaaggagcgcttaaagaagatggcttcaatgaagaaaaagaaatcaggcaaagagtcagacacagctgcaaaaattgcagctgctgaggctgcagcaaggagcgctaggctcgcggcagccaagaagaaagagaagaaccattacaaccagcaacctgtgcggtaaatggccgccaaagttttgaaaaatgttctgagtttgaaaaatccccttgttcgtttttggactcacaataaacttttttgagttgtatttatgacctttgagcgcctttctgagattcatttcgaattcttgaaggcctttctggtctcaaaacggtcatgtaattgtgttttgaattgttgacccggtggaacttaatggacggcatggccagtgggggctaattgggt

SEQ ID NO: 4823 - DNA, 1375 bp, Oryza sativa
  ref <308>: DATABASE ACCESSION NUMBER: AK062063
  ref <309>: DATABASE ENTRY DATE: 2001-12-06
aggttaaaccctctgctgctttctccaggccccatgtgccgtcggcggcggcctccctgcagccaagccgtcgcgtccgcgtcgtgttcgaggaccctgacgcgacggactccgactctgacgacgacgaggacgccggcgccgcctcaaagaagcgctactttgagctcttcattggcaagccagcttcgtcgacgaagcaggcctctccggcgtccaccgtcgctgcctacgccaacatcggcaaggttgggagcacctgctaccgtggtgtgcgcctccggaagtggggcaagtgggcggcggagatccgcaaccccttcaccggccatagggagtggcttggcacctttgacactgctgatgcggcctccgccgcctaccagtctgcctcccgcaacttcgccgaagagaagcgccgccgtggtgtggcctcctctgcctcacctgctagttcggcgacccctactccgactgcgtcctcgtcgtcctcgacttctgccgcgccattcgcccacccttcgccgtcgtctgtgctcgaagccaccaagccagctccaaagccagagtcgccgccgctgccggagcaagctgcaactcccctcctggtggaggctaccaacgagaccgccgagctgccggatgacccagagttctacaaggatatactgcgcggtctacagctgccggacattgacccgatggatttccgagctgggctggatgctctggatatctccgatgtgccggcttacatgaatggcgaacaagacgtactcttcactgaggacatgctgcttggagacttcgctgaagaagatgacctcgacctcgacgacatcggtgatgacttctgcgaggatttcccagagatacccagcggctacgacttcggccgtggtgatatgttccggcaggtggatttctgcgtgtgaattaagagcttgctaaagttattcatgttggtgtgatgggcctgtgagtgtgggtgcttgggaggagatttcttgggttttttccccgagcaaaatcaatctgctcgtgcccttgagatttcagttccgcccataagaactccaacgcacatttagcattcggagagtaattttgttaggttaaaagtatggtaagttataggtggtatgttatgtttttctttttcttttctcaatgttatctggtacctaagtttgtcaagaaaatcatagtggacaagtcaggtatttggggctgtcgtctctgttatggaaagaaaaataagttttgattacattacatatcttttgctctcgagatctggtcatgtcgtcgcattgcaactcgtctcgtctgtatgcattttactctgctggtttaatgttgagattgtgtagtt

SEQ ID NO: 4824 - DNA, 568 bp, Oryza sativa
  ref <308>: DATABASE ACCESSION NUMBER: AK062064
  ref <309>: DATABASE ENTRY DATE: 2001-12-06
aaagcaggttgaagaggagaaggctaggtatctgaactccgtgaggactagtcgagccatgacactgaacaatcttcagacgagccttccaaatgtgttccatgctctgatggggttttccggagtatgcgtgcaggcgttcgaaggtatcagtagatgcagtgagattgtcgccagccactcgggagcagtttcacctgccatttcttcgtgactgcatccggcatggttcgttgtgattgttcattgtaagtaggcaaagaaactggttctacgtgaatacacttctcttccaaaacttaaaaagggaaagaatttagcgacgattttaagtcagtacaggcatagtagtcttttgaatagatcaacatagtctcgatttgggaagaggtggatgtctatgaggttactgggaaatgattcatgtgtaactagatacttgaacagttgaacagtagtctgttgctgcatgttctcaacttctcaattctcattatatgatgctattttctatttctcaacaatacagttccaatatcagagtactgaatgtcaagtctcacatgac

SEQ ID NO: 4825 - DNA, 1116 bp, Oryza sativa
  ref <308>: DATABASE ACCESSION NUMBER: AK062065
  ref <309>: DATABASE ENTRY DATE: 2001-12-06
aaaaaaaaattgtagagtttttagatttatagatagcaaagatgtcggcacaggcggagctttcccgtgaggagaatgtgtacatggccaagctcgctgagcaagccgagaggtacgaggagatggtcgaattcatggagaaggtggccaagacggttgactctgaggagctcaccgtggaggagcgcaacctcctgtctgttgcatacaagaatgtgattggagcccgccgtgcgtcatggcgcattatctcctccattgagcagaaggaggaaagccgtggtaacgaggaccgtgtcacactcatcaaggactaccgtggcaagatcgagactgagctcaccaagatttgcgacggcattctcaagctgcttgaatcccaccttgtcccctcttccactgcccctgagtccaaggtcttctacctcaaaatgaagggtgactactacaggtaccttgccgaatttaagaccggggctgagaggaaggatgctgctgagaataccatggtggcatacaaggctgctcaggacattgctttggctgagctgcctcctactcatccaattaggcttgggctagctcttaacttctcagtgttctactatgagatcctcaactcgcctgatcgtgcttgcaacctcgcaaagcaggcttttgatgaggccatctcggagctggacaccctgagcgaggagtcctacaaggacagcactttgatcatgcaactcctccgtgataacctgaccctgtggacttcagacatctcggaggacaccgcggaagagatcagggaagctccgaagcgcgactccagcgaggggcagtaaagccggctttatgtgccctagaagcttgtagctagtgctttgctactgtgtaatgacacctatgtggctgtgattgttgtcgggaaatctggggctcccccgtatgtgaggttgctagcgatggttttgcagtctcgcctttaagctactcgtagcagagcaggtgggggtctgtggagccaggcctggttgggggtgggggagcctcttgaactgcttggtggcacttcctgtttttctgtttgcctttttattggtgtttattgttatggtcaatcctgtgtct

SEQ ID NO: 4826 - DNA, 1148 bp, Oryza sativa
  ref <308>: DATABASE ACCESSION NUMBER: AK062066
  ref <309>: DATABASE ENTRY DATE: 2001-12-06
aaagcacaaatacagtttccggcatatcgaagtcccttcttacccaattcatttttgtgactgtgaggagcactgtggacctccagaggcagctaatgatgaatatgcttctgttcttgatgctgctgcatatgaaaaggagcgcagtattatgaattctgtgatgagcaagctctttgagaaggagaatgaccatttagattcaatggaaattcagaatcatggtgtcgattttgatgccgcggaaccctctaacgccaggaatgagttgcaaatggataaaagagaagaaacttctgaggaagatttggatgaccaaatggaagaaacagaagatccttctgaggaagaattggatgatctcgtgcttaacatcgtgacttgcaagccaaaaagctctgtagcacaattgaatagcgaaaagcaagcagcggataaggactcgcgcttcagaaaacgtcaacaatttgaagaatcttctctgcagaagaggcataaatcctctgatttctctgaaactagaaataggaaacagtctttccctgctatatcaggagccatccaaaatgaacaaaaatcttcagatttgtcaggaaaaggtacacatgagttctcatcagaactcgatggagataaaagttctgctagtgtccaagatgttgaagcactagcagattcttctaccagaaatgggagtgaacaaaattcgcttgctagtgaacctaaaagagtttccttgtggactcagaaaggtgaagtgtgtccgttcatgagaaattcagagtcagaaaagcaatggtcaaaggcaaagaaggttctgactggtttcatcaagaagggcaatgagagcactggatcgaatgtcgggaaagggaagccatcaacaaggagataacaacgtagcatgtcattccagcttcatcttgttgaactacaagctcggtagcatgtcattccagcttcatcttgttgaactacaagctcggtggtttcgtgtctcataggaacatgtgttattttgttgattggtctcatagtctgcctgttaagaatgatctgtctttgtttgtgaagcacaatgctatgtacgagttttgttcaaattgttattattctttgtacgagcaatttaaagtcaaacatgtttc

SEQ ID NO: 4827 - DNA, 543 bp, Oryza sativa
  ref <308>: DATABASE ACCESSION NUMBER: AK104874
  ref <309>: DATABASE ENTRY DATE: 2002-08-28
ttggaaagtatgggatgctgtagaggtgtctggaaagaacgtgatgcgaacgtcgtcggttgtgacaacttctgttgtaacacatagatacggagatcaagctggacaggtcacacaggattaccttcacgcctctggaaacgctcttggagtcgcatgggctgtcttcaaaattcggaaagctctcgacccaaagggcaatctgaagaagtcgtctctggcgagcgctgctgcccatgctgtagctaaagaatcgatatctcggcaaagaaggaagtgagacaacacggtcgatggtggaactcgctgttactctctaatacggtgtactagcttcaatagaaatgctcttttgtgaacttggcggctatagcagattttgttggatgtgtcgcttgtaacttgtaaggcgtgtgactgttgccgtgatggttttgatgtttgttttggtttttggatgtttgcgaattgcgatgatgtactgatttgtaacctgtcgaattactatatgtgtatacatgatgcacagtgatctcacggttt

SEQ ID NO: 4828 - DNA, 1713 bp, Oryza sativa
  ref <308>: DATABASE ACCESSION NUMBER: AK062067
  ref <309>: DATABASE ENTRY DATE: 2001-12-06
ttgagtgatggccaatgctgccggcctgcagaatctgaggtgcatgagtgtcacctcttgccctggggtcaccaatctcgcgcttgctgctatcgccaagttctgcccgagcttgaggcagctttccttcaggaagtgtggacacatgacggatgccggtctcaaggctttcacggaatcggcgaggttgttggagagcttgcagcttgaagagtgcaatggggttactcttgttggtattcttgatttcctcgtcaactgcggtccgaagttcaggtccctctctttggtgaagtgcatgggtatcaaggacatctgctctacgcctgcgcagcttcctctgtgcaaatcgcttcaattcctgaccatcaaggactgcccggatttcactgatgcaagcttggctgtggtggggatggtttgcccttacttggagcaggttgatttgagtggtctccgtgaggtcactgaccgtgggcttcttccactgatcaactcttccgagggtggtctagtcaaggtcgatttgagtggttgcaagaacatcacagatgcagctgtttctaccctggtgaaggggcatggaaaatctctgaagcaagttagtcttgagggctgcagcaagataaccgatgctagcctctttgccatctccgagaattgcactgagcttgctgagctcgatctgtccaagtgcatggtcagtgacaatggtgttgctaccctggcatcagcaaagcacctcaagcttcgtgtcctgtcactgtctggttgctcgaaggttactccgaagagcgtgtcattcttgggcaacatggggcagtctttggagggtctcaatcttcagttctgcaacatgattggtaaccacaacattgcatcgctggagaagcagctctggtggtgcgacattctcgcataggcagacaagatggttcattgctggagggtgtcacctgtgcttgggtgaggcacctccagatgcagatatacatccttagaggtagcgcaaccagtcaattgctgtgctagtcatgtttttggctagtgcatgagtcatggtgggttctggatttgttcgaggaccggttgtttccgaggggtgctttccgccaagtgctcgttttttcacagactgcctcaagaggcaatctgttttttgagccttcggctgccattgctggcattctgccccctctacccagacattggtccttgccgctatagtcacaacaccatgattgttttttaggttgccgtagtgtcccttgtccttttttctttactgcttgcttcctagtcatgaagttgcaggcaccggcatcggcacaggggggctgtcatggagttccgcagctcaactgccggtgtcaccagtagtcggcagcgccggtgttccaggctgccgacgacgctggagtgcctgcagacttaccctgtgtgtatggttactgagtctgttggtgtcttgaggtcatgtgtgatgatgttttcggtagtgtgtaagggtcatagagggttgattttttgttacaggtactcttgggaatgcctggtgttgggggatctggccattgcaaggcgcatactagagccttgtcatgacagccttgtatggttgttttttcaccagatccctgtttttaccggcatattgttgaggactgtaatctttgcaaccttctcagaataaattaagtatgtgtttatgtg

SEQ ID NO: 4829 - DNA, 1487 bp, Oryza sativa
  ref <308>: DATABASE ACCESSION NUMBER: AK104875
  ref <309>: DATABASE ENTRY DATE: 2002-08-28
cgcagataggagaagatggccgcacttgataccttcctctttacctcggagtctgtgaacgagggccaccctgacaagctctgcgaccaagtctcagatgctgtgcttgatgcctgcctcgccgaggaccctgacagcaaggtcgcttgtgagacctgcaccaagacaaacatggtcatggtctttggtgagatcaccaccaaggctaacgttgactatgagaagattgtcagggagacatgccgtaacatcggttttgtgtcagctgatgtcggtctcgatgctgaccactgcaaggtgcttgtgaacatcgagcagcagtcccctgacattgcacagggtgtgcacggccacttcaccaagcgccctgaggagattggtgctggtgaccagggacacatgtttggatatgcaactgatgagacccctgagttgatgcccctcagccatgtccttgctaccaagcttggcgctcgtcttacggaggttcgcaagaatgggacctgcgcatggctcaggcctgacgggaagacccaagtgactgttgagtaccgcaatgagagcggtgccagggtccctgtccgtgtccacaccgtcctcatctctacccagcatgatgagacagtcaccaacgatgagattgctgctgacctgaaggagcatgtcatcaagcctgtcattcccgagcagtaccttgatgagaagacaatcttccatcttaacccatctggtcgcttcgtcattggcggacctcatggtgatgctggtctcactggccggaagatcatcattgacacttatggtggctggggagctcacggtggtggtgccttctctggcaaggacccaaccaaggttgaccgcagtggagcatacgtcgcaaggcaagctgccaagagcattgttgctagtggccttgctcgccgctgcattgtccaagtatcatacgccatcggtgtcccagagccactgtccgtattcgtcgacacatacggcactggcaggatccctgacaaggagatcctcaagattgtgaaggagaacttcgacttcaggcctggcatgatcatcatcaaccttgacctcaagaaaggcggcaacggacgctacctcaagacggcggcttacggtcacttcggaagggacgacccagacttcacctgggaggtggtgaagcccctcaagtgggagaagccttctgcctaaaagctccctttcggaggcttttgctctgtcccattatggtgttttgtttcctcgctgctcagcattgtgattcttaacctgccccccgctgccatttatgcccatgcacgctactttcctaataataagtacttataagggtattgtgtttgaatattttacctagaggaggaggaggatttgttatctgttattgcttaagcttatgtaatggtgaaagaaggaaagatgctacactactttgagaagaagaaatgaaacctcctatgttttggttattc

SEQ ID NO: 4830 - DNA, 1260 bp, Oryza sativa
  ref <308>: DATABASE ACCESSION NUMBER: AK062068
  ref <309>: DATABASE ENTRY DATE: 2001-12-06
tcgcgcatgacttcgatgccagtgatcatggcacgtcgagcttcccggttgctgctgttcataggatcggcatactggatatcagaattttcaacactgacaggcatgctggtaatgtgctggtgaggaagcttgatggtggcaccggtcgctttggttgtcagacggaattgtttccaattgatcatggcctgtgcttgccagagaatttggaggacccttatttcgagtggatccactgggctcagtcatcaatcccattctctgaaggggagctcgagtacattaagaatcttgatccaatgagggatgtggcaatgctgcgtagggagcttcctataatccgcgaggcctgccttcgtgtcctggtgctgtgcacaatcttccttaaggaggctgctgcttctggtctttgcttggcagagataggtgagatgatgaccagggagttcagagggttggaggaggaaccgagcaagctggaggttgtctgcatggaagctaggagaaaattagctgagtgggaaccatactcacctgtcatcgaacaaggggaggacatggatttccaattctcactggacatgttaggagagtacaatgatgtgattaggtcaccaagattcaatggcttaggagcaaaggggaatggtttcagaaaccctctttcaaagcttgtggagagcatcgatgaggacaatgatgatgatgatggccgaagtgaatcttccaagcgttcatcggagcgtgtccattctggagggttgaagttccccagtgctgataaatccagcggttctaacggcagtgtgcatgctctgaacaggagtgcagacgaacagcttccatcaagtgtatacttcgtcaggctgtcggacatgaatgcagaagagtggaatatattccttgagaagttccaggagctgctgaaagaagctctgcaggagcgtgcggcggctgcagggcagcggatgaagcagcggctgggcacttcctgcaagttttgagtaggaccatagagcagcagagaagaaaaataatgtaatgcttgctacttgtgttgcttattatggagtgagtacaggaagggatatatgctcatgtgagaaatgcctacagctttgtgcaatgttgccatgtaaacttgttatgttcaggtagacaagatcaggatggtgatgggtgtggagaagggctattatgcatgttgattaactatgttaaacaggtgcttcttaataaatgcttgtcagcttgtgt

SEQ ID NO: 4831 - DNA, 1313 bp, Oryza sativa
  ref <308>: DATABASE ACCESSION NUMBER: AK062069
  ref <309>: DATABASE ENTRY DATE: 2001-12-06
tattcaagcggcagcaggagcaggacgcacaatgcttgttagtgatgctggtagggtctatgcatttggaaaggattcatttggagaagtggaatatgcagcccaaggttctagggttgtcaccacaccacagctggtggaatcattgaaggacatatacattgtccaggcagcaatcgggaacttctttactgcagttttatctcgggaaggtcatgtgtatacattttcttgggggaatgacatgaaacttggtcatcagacagagccaaatgatgttcagcctcatcttctagcaggccctcttgagaacattccagttgtgcagattgccgcaggctactgctatctcctggctctggcatgccaaccaagtggcatgtctgtttattctgttggttgtgggttaggtgggaaacttggccatggttctcgaaccgatgagaaataccctaggttaatcgagcagttccaagctttgaatatacaaccagtagtggttgctgctggtgcttggcatgctgctgttgtaggcaaggatgggcgtgtttgcacttggggatgggggcggtatggctgcttgggtcacggtaatgaggaatgtgagtctgttcctaaggttgttgagtccttagtcaatgtgagggctgtccatgtagcaactggagattacaccacatttgttgtatctgataaaggtgatgtttactcgtttggatgtggtgaatcatcaagtcttggccacaacactataactgagggtaataataggcacactaatgtccttagcccggagttggtgacttctttgaaaagaacaaatgaaagggttgctcagatcagcctcactaactccatttactggaatgcacatacatttgcactgacagattcaggaaaactctatgcgtttggtgcaggggacaaagggcagctaggtaccgaactcgtcgcgcaggaaagcgagagggggacaccggagcgtgttgaaattgacctcagttaggtccaaattgcaacgccacttcatctccttttctctccagatgcactcttctaacgttaactttcaaattgattgcattgcgcgccctttagcttgttggctgttcatcagcctcatcctgctctgcagctaatccttgtgaaaatagttaccatcaattaaacagtctgttgttcatatgattggttcggtttagaaactttgtatatatgattatcatgtaaatataacagtcaggtctcattgccagttcctttaaaacatgagtagctggcttttaacatcctgtgaaatttaccttaactct

SEQ ID NO: 4832 - DNA, 1621 bp, Oryza sativa
  ref <308>: DATABASE ACCESSION NUMBER: AK062070
  ref <309>: DATABASE ENTRY DATE: 2001-12-06
gaaaaagtgatctacactgttatttccctattcattttcctggtatgcagccagctaccactgtatggcatccattcaactactggagctgatcctttctactggatgcgtgttatccttgcatcaaaccgtggtactgttatggagctgggtatcactccaattgtgacatctggcatggtaatgcaacttctagtgggatcaaagatcattgaagttgacaacagtgtgagagaggatcgtgctctgctgaatggcgcacaaaagttacttggtatcctgattgcaattggggaagctgtggcatatgttttgtctggaatgtatggcagtgtaagccagcttggaactggaaatgccatcctcattatacttcagcttttctttgctggcatcattgtcatctgtctggatgaacttctccagaaaggttatggtttgggttctggcatttctctctttattgctaccaatatctgtgagaatatcatctggaaggcatttagccccacaactatcaacagtggccgtggtgctgagttcgagggggctgtcattgcattgttccatctgttgattactagaaccgacaaagtccgtgccttgcgcgaggctttctaccgccagaatcttccaaatgtgaccaacttgcttgctactgttttagtcttcctcatagttatctacttccaaggcttccgtgttgtgctaccagtgagatccaagaatgcccgcggtcaacaaggctcatacccaattaagctgttctacacttcaaacatgcccatcattctgcattctgcactgattaccaacctctatttcatatcccagcttctctacaggaggtacagtggaaatttcctagtcaaccttattgggaaatggaaggaatctgagtactctggccattctgttcctgttggtggtcttgcttactatgtaactgctccatcaagtttagctgatgttctcgcaaatccattccatgcactgttctatgtggtcttcatgctgtcagcttgtgctctcttctcaaagacatggattgaagtatctggttcatcagcaaaggatgttgctaaacagctcaaggagcaacaaatggtgatgccaggccatcgtgagtcgaatttacagaaagaattgaacagatacatccctacagctgctgcatttggtggagtctgcattggtgcattgactgtcctagctgatttcatgggtgcaattggttcaggaactgggatactgctcgctgttacaatcatctaccagtattttgagacattcgagaaagaaagggctaccgagctaggtttctttgggttttgatcaccttagctgtataactcctagctggaacttcttgcgagtcgcagtgctgcttggccggctgtcatgtaatgggagacctcagaatcagcttaggttgccgacttacttacaatgagaatcttgtagcagtatgcgttttgttcatgccagtgtatggagttatttgtcctgctcctgccccgagtacagcaatggccatcgtagtaactggatgtgttgcgatcaatttttattatcttttaaactggatagtatatttgattcctgatctcttttttgctgc

SEQ ID NO: 4833 - DNA, 1314 bp, Oryza sativa
  ref <308>: DATABASE ACCESSION NUMBER: AK062071
  ref <309>: DATABASE ENTRY DATE: 2001-12-06
cttgaagagtgatgatgtggatttgatgatcattgccaggggaacacctggattctcaggtgcagaccttgctaacttggttaatgtggctgctcttaaagctgccatggatggggcaaaagccgttacaatgaatgatcttgagtatgccaaggaccggatcatgatgggcagtgagcgcaagtcagcagttatttctgatgaatcccggaaattgacggcgtaccatgagggagggcacgcccttgttgccatccacactgaaggtgctcaccctgttcacaaagctaccatagttcccaggggaatggcccttggaatggtggcccaactcccggataaagatgagacaagcgtgtcacggaaacagatgctggcaaggctggatgtgtgcatgggagggcgggtggcggaggagcttatttttggggatagcgaggtgacatctggcgcttcatctgattttcagcaagcaactgcagtggcaagagcaatggtaaccaaatatggtatgagcaagcagcttggctttgtttcttacaattatgaggatgatggaaagagcatgagcaccgaaacgagactcctgattgagaaggaggtcaagtgtttcgtggagaatgcttacaacaatgcaaagaatattctcatcaaacacaacaaggagctccatgctctagccaatgcgctgcttgagcacgagacgctcaccggtgcccaaataaagaacatattggcccaagtaaacaacaagcagcagcaggagcatgctattgaagctccacagaagacaccagctgtaccatcatctccagctgcatcagctgcagcggcagcggcagctgcagcagccgcagcacagcaagctgcagcgaaagcgaagggtgaaatcgccggtatcggatcttagcagtcaccaaatgatgttggatcgattgacagctcttgaggatcacgaagagtttgctaatgctgctgcagtcatcaatagaacatattgattgtgtgtaagctgttatttcgtttcatgttcctcaagtgtgtggtaagaaaacataagagaaatcataacattgtagaaggcacatttagactctgcttgatatgtgaatttttgtatcacatggccacacacacggaaatactgtttacatcctaataattttcagctaccttagacgttggatggttatacctaacagagaacctgttgtatttgtctagaatggtagctccagagtccatttctttagccctgtgatgctcccttgttgtactgtatgttctgcaagttgacaaaagaagtttttctgt

SEQ ID NO: 4834 - DNA, 864 bp, Oryza sativa
  ref <308>: DATABASE ACCESSION NUMBER: AK104876
  ref <309>: DATABASE ENTRY DATE: 2002-08-28
gttttcccgagctgagaagaggacagagcaagccgcatccatggcgtcagcggcgacccttccgaagcttcggttcaggccaaaatgccacggccacttccaggcaatctatccggttcatgtccatatcaagaactgcaatgcttgcagtgtcagattcctacccacgggttgcttgtttccagcgcgagaagtcgtcctgtcctgccagtgtcggcagttggatcaggcgggggctcatcggttgctgaggacgagaggaagagtggcttgtcgctgcagaacgccaagacatccgttgtgtcacgcgacgatgaaacgatcaatgtaagagtggatttgcctggaaaggcgacacagaaggtgtttgatgaagccttgacaagcttggctcgtgatgcgccgccagttccaggttttaggaagtccaaaggagggagaacatcaaatataccaagcagcattctgctgcagatgcttggcaaaagccgggtcaccaagttcgttcttcaggaaatactcagcatcactgttggtgattttgtaaagaaggaaaacctgaaggtgaaccctgaaatcaagacaacccagtcagaagaagagctcgagtcatcgtttacgccgggttcatcattcagtttcagtgttgttctgcagcttgagaagcctgaatctgatgagacctcagagaactctgaatctgacgaggcttctgagccctcttcttgatagtagtagttcagagaagtgcttcacatttgtatcactccttgctattctcgctagagaatgttcttcagaagagcaagcaaacaatttcagatgagacattgcagttgatatgcaggttgcaagtgacacatc

SEQ ID NO: 4835 - DNA, 1596 bp, Oryza sativa
  ref <308>: DATABASE ACCESSION NUMBER: AK104877
  ref <309>: DATABASE ENTRY DATE: 2002-08-28
aaaattcctatatcctctgttcgtcactgccttcctctccaagtccatccccttccccgatctaagatccatccgatccaggccatggcggcgaccatccagagcgtgaaggcccgccagatcttcgacagccgtggcaaccccaccgtcgaggttgatatttgctgctcggtggaacatttgcgagggctgctgtgcctagcggtgcatctactggtgtatatgaagctttggaattgagggatggtggctctgattacttgggaaagggtgtcctcaaggctgttgacaatgtgaactctattattggaccagcattgattggcaaggaccctacagaacagactgtcattgacaacttcatggttcagcaactggatggaaccaaaaacgagtggggctggtgcaagcaaaagcttggtgctaatgctatcctggctgtctcacttgctctatgcaaagccggagctattatcaagaaaattccgttgtatcaacacattgctaaccttgctggtaacaagcaacttgttttgcctgtgcctgctttcaatgtcatcaatggtggatcacatgctggaaacaagctagctatgcaggagttcatgatcctccctactggtgcttcatctttcaaggaggctatgaagatgggtgttgaagtataccataacttaaagtctgttatcaagaagaagtatgggcaagatgctactaatgttggtgatgaaggtggttttgctccaaacattcaggaaaacaaggagggccttgagcttttgaagactgcaattgaaaaggctggatacactggcaaggttgtcattgggatggatgttgctgcttcagagttctacactgaggaccaaacctatgatcttaacttcaaggaagagaacaatgatggttcccagaagatatctggagatagcctgaagaatgtgtacaagtcatttgttagtgaatacccaattgtctcgatcgaagacccatttgatcaggatgactgggttcactatgctaagatgaccgaagaaattggagatcaagtgcagattgttggagatgatctccttgtcaccaacccaactagggtagccaaggcaattaaggacaaggcctgcaatgctcttctccttaaggttaaccaaattggatctgttactgagagcattgaggctgtcaagatgtcaaaacgtgctggctggggtgtgatgaccagtcacaggagtggtgaaactgaggatacattcattgctgatctggcagttggtttatccacgggccagatcaagactggagctccttgcagatctgagcgccttgccaagtacaaccagcttcttaggatcgaggaggagcttggtgctgctgccgtctatgccggagccaaattccgtgcaccagtggagccctactagatgggaatagaaccacttcgtttccgtaaattttgtgaagattgtgagggtttgagcaataattccccacggtcagatgtgggtggacatgctcccacaaaacgcttaattttgatgttgcgtggcgcaagcgtgatttgaaggaacacaaatgattatattaaacgttataagc

SEQ ID NO: 4836 - DNA, 466 bp, Oryza sativa
  ref <308>: DATABASE ACCESSION NUMBER: AK062072
  ref <309>: DATABASE ENTRY DATE: 2001-12-06
gttatccgtaccgccatgttggtacagagcatcaagagctgtgctcttttggtcagctttaggaacattctgaaattgccacaagtgtgtgggtacctgaagctctgttgctagctgctgtgagagggagggatgattctcaggatgtaccgggaaacattgggatgaagcaggcttcgtgtcgacactgacgaatccgagctaaccatgccttgtcaggataaatgatgatgtggtgctgtatctggggttgaaagaaatgcaaatgtgctgctgacttctatggggaatgggaggagtcctgatgtttttccttttcttaagacaatagatgcaaaatgtctgcactaatgttatgttcggtttagacccttgcttttactgtctcctactgcactttcttgccttctagttctaccgtttgagaagttaaatttatgtgcacatgcaaaaaggtttggacctt

SEQ ID NO: 4837 - DNA, 1363 bp, Oryza sativa
  ref <308>: DATABASE ACCESSION NUMBER: AK062073
  ref <309>: DATABASE ENTRY DATE: 2001-12-06
agaggtggtggatagatagcgcggcagaggaaagaggagaagaaaagatggcggctttcgcctccgctctccgcgttctcccctcgccgccggctgcggtgcctcgtcggcttcgctcgagagaacaaaggcagggctgtagatctcgaaggtattcaaaagtcgtggcttactacgctctcactactccgccgtataaacttgatgccctggaaccttatattagcaagaggacagttgaacttcactggggtaagcatcagcaagactatgtggatagcttgaataagcagcttgctaccagcatgttctatgggtacactctggaggaactaataaaagaagcatacaacaacggcaacccattaccagaatataataatgcagcacaggtatggaaccatcacttcttctgggaatcaatgcagccagaaggtggtgggtcaccagggcgaggtgtcctgcagcagatagagaaggattttggctcttttactaattttagggaagagtttatacgctcagcattatcacttttggggtctggctgggtttggcttgtcttgaagagaaaagaacgaaaattttcggtagtccatacacaaaatgccatcagtccacttgcacttggtgatattccactcatcaatctagacttgtgggagcatgcttactacttggattacaaggatgacaggcgaatgtatgttacaaactttatcgaccatcttgtctcttgggatactgtcactctacgcatgatgcgcgctgaggcttttgtgaaccttggtgaaccaaatatcccagttgcatgatatgagatgatatggatatgacctagagatatctatgcatgtattctcatcatgagcgacgccgaggaatttctagatcacatgatacctgatgctgagattcgcatgcatgagagacacttacaccacctcatgtcctgcacggtgaaatagtggaaatctgcttgaggataaacagctttggttttatcgtcaccttggaattttgatatagcatcaaagcaaccttgacactagagcatgattacagagtatgggccatcgatctaacttcttcttgaagctgcaccacttcttgcaaacgtttatgcttcagaactaggacccatggtcccattatgctttctagattagatcttcatcctaagtttcgacaactcatagctgtagtttttgtctttcttttggcacagaattctgtcattgttaagcctagctttgttccctctattatgtaacctgacctttatgtccccattgctcattccttttgtcgacattgaattatttgatgcgatattttcgcatccattactaagcttttgctc

SEQ ID NO: 4838 - DNA, 1329 bp, Oryza sativa
  ref <308>: DATABASE ACCESSION NUMBER: AK104878
  ref <309>: DATABASE ENTRY DATE: 2002-08-28
agttcatcccttcactcacttccctcctccttatccacgaaatcaggaggcgcggcgagggcggcgctcacagccggcggcgggcggcgggcggccgcgtcgtccctcctccttccacgcaccgcaacctcgggcaggttggcgcatgtcgagtgcggcggtgaatggattggctggtgccggtggtggcatcatcgcccagatcatcacctaccccctccagactgtgaacacccggcagcagacagagaggtcagcaaaaaagaagaaggccaatggcgcagccatcgccaatacttccaccctcttccagatgctccagctgttccaaacagaaggatggggagggttgtatagcggccttaaaccctctcttattggcaccgctgcttcacagggaatctattactacttttaccagattctcaaaaacaaggtggaagatctagcagttgctcgcggtaagaagggtctaggggatggtactgttgggatgttctcctggcttggtattgcagctgttgctgggtcaatcaatgttcttcttaccaatccaatatgggttctcgtgactcgtatgcagacacatacacaagcagaaaagaagatcatggagtctaaaaaggagcttttgctgaaggatgttgctagggccaattcaatagaggtctcaattcttaaggacaggttgtataaacttgattctgaaaagcctcgtccatatgggacaattcaagcggtccgggaggtctaccgtgaatcaggcataagaggattctggaaaggacttattccaacactaattatggtatgtaatccatcaattcaatttatgatctatgaaacattggcaaagcgtctccggtcaaagagatctggaaaggaactcccaaaaaagaaccttactgctatggaggtattcttattaggtgcaatagcaaagctcggagctactgttgtgacatacccattgctagtggttaagtctaggttgcaagcaaaacaagaaattggcaggaatgtgatgtccagatacacaggtacgattgacgcgatcataaagatgatccggtatgaaggattgcacgggttttacaaaggaatgggtacgaagattgtacagagcgtctttgccgcctcagttctttttatggtaaaagaagagttggtaaaattcgtagttatgttaattgctaggagtaggactgtgctcggtcctagctctaagaaacgataggcagtttatatatatcgaaacaatttgcaacgacctcttcgagactatatatcgattatttacaagataggaaacccaaaatgtctccaaat

SEQ ID NO: 4839 - DNA, 900 bp, Oryza sativa
  ref <308>: DATABASE ACCESSION NUMBER: AK104879
  ref <309>: DATABASE ENTRY DATE: 2002-08-28
gattccgattgcgctcgcccatggcggccgccgctctccgcgaccagctcaccgctctcctctcctccatgttctcccagggtttggtggacgagcagttccagcagctgcagatgctgcaggacgaggggggcaccccgggcttcgtctccgaggtcgtcaccctcttctgcgacgacgccgacaggatcatcaacgagatcgccaccctgctggagcaacccgtcgtcaacttcgataaggtcgacgcctacgttcatcagctcaaaggcagcagcgccagtgttggtgctcagaaagtgaagttcacttgcatgcagttccgtcagttctgtcaggacaaaagcagagatgggtgccttatggcattggctgttgtgagaaacgacttctatgatctgcgcaacaagtttcagactatgcttcagctggagcagcaaatccaggcttatgatcccaagcagcaataattgaagcaaaagagtgtagctgcatgtgatctcacatgataaatgtatctttgaagatgtagaccatgttcaatgggcttctggcttagagtgtgtgcgcgtgtgcagaatcaaatcatttggtttgaggcttcatgcttccaactttgagctcataaccctttaattgttagtgacaactgatcgtctagtgtcgatgcacctgttacctgtctgtgttcggttgtctgccacctttgcaaactcttactggttgtctggtgacttgtttagctggcttgtgactttaggaagggaaagtgtgtgaaattgcaccataatttctgacttaagagttgtgaagtcttgatgctgggtggtatacaagtctataaacaacgatcaccctgtttaatatcaacatgaacaagcatccgtattcagttttgag

SEQ ID NO: 4840 - DNA, 1645 bp, Oryza sativa
  ref <308>: DATABASE ACCESSION NUMBER: AK062074
  ref <309>: DATABASE ENTRY DATE: 2001-12-06
ctgtatgaaagatttaattgattacagcagacaaaatggatctggaccaattgctagtttgcatagctttcctcggaggacttcatcaggggtcagccctcaccagtcacagcagcaacagcctgaagagcagcaatctataccgcagagttcaaaccaaagcggtcaaaatgctgctcccatgaccggtgtgcaggcttctgcctctgcaaatgcagatgtgacatcaaataattctctcagctgtgcaccctcaacgtctgcaccttcaccatccgttgttgggctcctccaaggttcaatgaactctagacaagatcatccaatgagcagtgctaatggtccatataccagtggaaacagtgctgcaattcccaaggtgaactcgacaacctcactgcagtcaaatccatctacctcttttccttcacccatgccaacaacatccaataacaacatgatgcctgcccctcagagcacaaaccaactcagctccccaaccacatcatcaaacctaccgccaatgcagccacctgctactcggcctcaggagcctgagccaaatgagtcccaaagctcggttcagagaatattgcaagatttgatgatgtcaccgcagatgaatggtattggccagcttgggaatgacatgaaaagaccgaacggacttacatctagtgttaacggagttaattgtttagttggtaatgctgttacaaataactcaggaatgggaggaatggggtttggggccatgggtgggctaggtccaaatcatgcagctggtggattgagaactgcaatggtgaacaatgcgatggcaatcagtggtaggatgggaatgaatcacagtgcacatgacctatcacagttgggccaactacagcagcaacagcaacatcaacagcagcagcagcagcagcaacatgacttaggaaaccaactgttgaatagacttagagcagcaaacagcttcaataaccttcagtatgactggaaaccatctcaataaagatagaacattacaagttcgacaacacggctgctctcattggcctcattgcttatgaagcatcagtaagagtgccaacacctcgaactgtgtcaaagcatttggcctttgcaataatgctgtcatggaaaaaggtcattcgcgacagcaagcatctgagcctgtcaactgtatgttgtaattgttcgtttagctgcttgtgtgttgtgcaactatggcattttgctgcttgcttcagttgtcttaccgaaagatagagttagaaggattagagccttgcctgcacctgttgctatcctttgatggtacggtgttacttcttacccggaaaagaagttttacctccctttttttccatgtcagatgacatccgatatgtaatttatcgtcccctccaccttccgcccttagcaagcatatgttctgatatctttctttgcctggggattctctctttgtagccttacttgactttgtataagctgccataatttagtagtggaaaaaagtatcaggaatgttttcgtaggcttgtcgcgagatctgactggcaagaaaactggcattctttctttttgaaagatttcaaccattgtggtggagatttttcttgaaatattcaggttgacctgc

SEQ ID NO: 4841 - DNA, 962 bp, Oryza sativa
  ref <308>: DATABASE ACCESSION NUMBER: AK062075
  ref <309>: DATABASE ENTRY DATE: 2001-12-06
atttatgatgcaaatgatagtgctcagtttgcagaattgctgactcaaggggaactcacacgccgagcttgggcaaaagatgtgcaggtaatgaatgaaggcccagggcacattccgatgcataaaattcctgaaaacatggagaagcaactggagtggtgcaatgaagcacctttctacacactggggccactgacaactgatattgcacctggttatgatcacatcacctccgccattggtgctgccaacattggggctcttggcactgcacttctctgttatgtaacaccaaaggagcaccttggattgcctaaccgtgatgatgttaagacaggcgtgatatcctacaaaatttctgctcatgctgctgatttggcaaagggccatccctatgcacaagcatgggacgatacactaagcaaggcaagatttgagtttagatggttggatcaatttgctctatctctggatcctgtgaccgctatgtctttccatgatgaaacattaccatcggagggtgccaaagtggcacatttctgctcaatgtgtggcccaaagttttgttcgatgaaaatcacagaggatattagaaaatatgctgatgaacatggttacgggacagtggaggaagcggtgatacaaggaatgaatgctatgagtgctgagttttcagctgcaaggaaaacaatcagtggggagcaacatggtgaagctggaggggagatatatgttccagaaagctatacagctcgcaaataagaatacaatctccgtgcagatcgtcttggtgtccatctactccgggtggagcgtttatcagcagcactcctcaccatcctatgttaggaggtggtaagcagtataagtgccttgaataaagctggtgttgcttagctcaatttgttaattctgtcgtggcttgtaataaaattaaactctatatgtgatccttccgtgtc

SEQ ID NO: 4842 - DNA, 1771 bp, Oryza sativa
  ref <308>: DATABASE ACCESSION NUMBER: AK062076
  ref <309>: DATABASE ENTRY DATE: 2001-12-06
tacaaatggacagcagagaacaactacaaccaatcacatgtcgtcttcaacattcagtaatggctcttctgcaaggactcaaaacaagggctccacacctcagcagatgggcatgaataacagaagacctacaactacaacaggatcagctgctcctacatatccgaataggatgtacccgagcacccggtcttacagccagtatggaaactcatacaaaactggtctttcgtacagcacaaatggttgtggaagtaatggctatggtagtaatggttatgattccaggctatatggtcggcggggtcttagtatggataacaggtacaagccaagaggccgtggtaacgggtactatggttttggcaatgagagtcaggatggaacaattgagttgaacagaggtcctagatcaggccgtttcaagaaccagaaattgtttggccatactgtcactattgctgtgaaagggcagagccttcctacaagtgacagcatgaatgctactgatgtacctgatagaacacagttcaaccgagatgacttccctgtccaatatgatgatgcaaagttctttgtcattaaatcatacagtgaggatgatatccataagagcataaagtacgatgtgtgggcaagtaccactaatggaaacaagaagcttgatgctgcttatcaggaagctcaggctaagagctccaaatgcccaatattcttgtttttctcggttaatactagtgggcagtttgttggtgttgctgaaatgactggcgctgttgattttgagaagaccttggagtactggcaacaagataagtggaatggttccttatctctcaagtggcacattgtcaaagatgtgcccaacaatattctcaagcacatcatcctagagaacaatgagaacaagccagtgacaaatagccgtgacacacaagaggtaaaccttgaccaaggcattcaaatgcttaagatattcaaggagcatgtcagtaagacctccatcttggatgactttgctttctatgagaaccgtcagaagttgatgcaggaaaagagggtgaaacaacagcagatccaaaagcaggtctgggacagtagggctccaagttctgtcactggagagaagcagcaggatgctgctactgcgaagccaaagctaccaaatggcgtcaatggagaactgaaggttcctgcagagaacggcacagctccagtcgttacctatgcagcgaaggtcgcccaaacagcagcgactgagaagcctgcccttgccaacggcaccgtcaaagctagttaactggatcacataccccatgttccctagctagccatgaagaacaagacggtcctgaagaactcaacaggcatgtggtcccaaggaactgatggtctggaaaactcttatctgtgaaactggcagcacgggcccaagatcctgctgcttggctgctactggggagcagttggctagttagttttgcctagttttcttttgccgtattcccgttttcggtttgcttttttttagctcgctctaagactccgtttatagtatcgtcgaaaatgccagaaaaaaacctagcggcaaagacaacaagttgcaaagaccatgtctggctttggtgcgttgcgtttcgcgcttattcagtggggggtggagtactataatcccgttgttgagtggttctggaagtgggttagattggtgctatttattttacttaaaagaatcttgctttatatacatctgatgatgcagggtctcgcc

SEQ ID NO: 4843 - DNA, 1174 bp, Oryza sativa
  ref <308>: DATABASE ACCESSION NUMBER: AK062077
  ref <309>: DATABASE ENTRY DATE: 2001-12-06
ctccactccctccgctcctccgctcctcgcctcttttacccgctcttccccccgatctccccggactcccacagccgcagcgaacaaatcccgcgcgggttgggaagagcgagctcgtgaggagagcagagggaaagcgcgagggggaaggaggaggaaaggtgcacaaggtcagactaagtttgcgttgaagaacaaaggagaggaaaaatgtcgcctgctgaggcatcgcgtgaggagaatgtgtacatggcaaagcttgccgagcaggctgagcgttacgaggaaatggtcgaattcatggagaaggtggcaaagaccactgatgttggtgagctcaccgttgaggagcggaacctgctttctgtggcttacaagaacgtgattggtgctcggagggcatcgtggaggatcatctcttctattgagcagaaggaggagagccgtgggaatgaggcatatgttgcatcaattaaggagtaccgtagcaggattgaaactgagctcagcaagatctgtgatggtatccttaagcttctggattcccaccttgtcccatctgccactgctgcagagtccaaggtgttctacctgaaaatgaagggtgactaccacaggtaccttgctgagtttaagtcaggagctgagaggaaggaagcagctgagaacactcttgtggcatacaagtctgcccaggatattgcactcgctgacctgcctacaactcacccgataaggcttggacttgcactgaacttctcagtgttctactatgagatactgaactcaccagaccgtgcttgcaaccttgcaaagcaggcgttcgacgatgctattgctgaactggacactcttggcgaggagtcttacaaggacagcaccttgatcatgcaacttcttcgtgacaatctgactctctggacctctgacaatgcggaggatggtggtgacgagatcaaggaagcagcgaagcctgaaggagagggccactaatctgtcctgaagtctatttctgagtccatttactcagctacctgctgtattactggatcataagatgtactaggatcaattgctatgtggaatcataagattagggctgcgtatgtcaaaatgtgtcgagctgaagtacccagtggacacagtttatgtgcactacattgcttccgtgact

SEQ ID NO: 4844 - DNA, 1418 bp, Oryza sativa
  ref <308>: DATABASE ACCESSION NUMBER: AK062078
  ref <309>: DATABASE ENTRY DATE: 2001-12-06
cttcccaagttctcatcgagggttttcctctctctctctcgcatcgcatccatcccctcgtgtcgccgccggcggaggctgcggcgagccttcaccccccacccgcccaccgccggcgagccacggcgtgggcgacctcctctcctctcccgatcccctctcgcccttaggtaggggcttctccccagtccccaccacacgcgcgtgcgtggccgacgagcaccccaggttcggatcggatggaagaccagaagaaaaatgcaaaaccagaggggtcttctggctcgcaaaggggagctcccccggcacctgatgcaggccttcccaatccttttgatttttctcagtttagcaacttgctcaatgatccatctataaaggagatggcagagcagattgcaagcgaccctgtgttcacccagatggcagagcagctgcagaagagtgctcatgtgaccggggaacagggtggccctgcattggatcctcagcagcacatggaaacaatgacacaagtcatgcaaaaccctcaattcatgtcaatggcagaacgtcttgggaatactcttatgcaggatcctggaatgtccagtatgctcgagagtttgactagtccttctcataaggagctgcttgaagagcggatgtcccgtattaaagaagatccctctttgaaggggattcttgatgagatagagagtggtggtccatctgctatggtgaagtactggaatgaccctgaagttcttcaaaagattggtcaggctatgtcaattaattttccaggagatgctgctacttccactacattgtctggacctgaagaaactgaagaggatggtggagatgatgatgagtccattgtccatcatactgccagtgttggcgatgcggagggtctgaagaaagctttagaggatggagcagacatggatgaagaagacgctgagggaagaagggccttacattttgcgtgtggttacggtgagttgaaatgcgcagagatccttctggaggcaggtgctgctgtaaacgcactggataagaacaagaacaccccactgcattacgctgctggatatggtcggaaagaatgtgtggatcttctgctgaagcatggcgctgctgtcacgccccagaatctggacgggaagacccccatcgaggtggccaagctgaacaaccaggatgaggtcctcaaggtgctcgagatggacgctttcctataaagaaaccaatgccaaatctcacgctcatcatcaccggctcgtcgctttacagttcagatttttactgcatacccaaatcatcatcgactcttttagctttggttttggtgtggtggtggtacattcgttgaatcgttgctatgtttggtgctccgatttgtaatctgtttcacttccccgttacactgc

SEQ ID NO: 4845 - DNA, 1296 bp, Oryza sativa
  ref <308>: DATABASE ACCESSION NUMBER: AK062079
  ref <309>: DATABASE ENTRY DATE: 2001-12-06
tcagcgattggttcttgtcgaaaggtggtactcgagagagcatcacaaggatgtgggatcctgttgcctatgctcttggtttcattgactgtgataatatcagtgcacgttgcatgcttaccattttcactctgtttgccacaaaaacagaggcatctttattacgcatgctaaagggttcacctgatgtttatctgagtggtccaataaagaagtacataacagacaggggtggtaggtttcacctgaggtggggatgtagggaggttctctatgataagtcacctgatggggaaacctatgttaaaggccttctcctatccaaggctacaagtagagagataatcaaagcagatgcatatgtcgcagcttgtgatgtcccggggatcaaaagacttttaccttctgaatggaggcaatgggatacatttgacaacatctacaagttagatggtgttcctgtagtcacagtacagcttcgttataatggatgggttacagaacttcaagatttggagaaatcaagacaactgaaaaaggcagttggcttggataatcttctctacactccagatgcagatttttcatgtttttcagaccttgcactttcatctcctgctgactactacattgaaggacaaggttccttgatccaagctgtgctaacccctggcgatccttacatgccattgccgaatgaggagataattagcaaggttcaaaagcaggtcttagaattgttcccgtcatcacaaggcttggaacttacatggtcgagtgtggtgaaaatcggtcaatcattgtaccgcgagtcaccaggaaatgatccatttagacctgatcaaaagataccagttaaaaacttcttcctgtctggctcttacacaaaacaggactacattgacagcatggaaggggcaactctctcaggcaggagaaccgcggcctacatctgtggtgcaggagaggagctgctcgccctccgaaagaagctcattgtcgacgacagcgagaaggccaggggtaaggtcgaggcccttcagacaagctgagcttcctcaaatgacacatgctggagtgagtggattgctatgcccaaaacaaaaacagcttcctgggtgtagtaggcgatttccgcagcgactctcatgtaaatcctacttgattgagcatttaggtccaatctgctgctgccctttttgccttgacacgatcgttcgttcgcccgtcaatggtgtgttcttcgttattgtgaatttgtgattgggaaccaaaggtggcatacgggattacatc

SEQ ID NO: 4846 - DNA, 788 bp, Oryza sativa
  ref <308>: DATABASE ACCESSION NUMBER: AK062080
  ref <309>: DATABASE ENTRY DATE: 2001-12-06
aacctcccgacccgttgctgccctcttcattcgctcgctcccctcctcgccgcgccgccatctagggtttcgtcttctcctccgccgccgaccgccatggctcgccgcagctcagcaaggtctcgccctgcaccacgtgctgctcccgtgaggaaccctccgcagccagcaaggcaggctcctcctccagctcctgcccagaacggaggtggctctatcctgggaggaattggttccactattgctcaaggcatggcttttggtactggtagtgccatggcacatagggctgttgatgctgtaatgggtccccgtaccattcagcatgagactgttgtctccgaggctgctgcctctgccaccccaatggccaacgccactccatctgactcatgcagcatccattccaaggccttccaagactgcatcaacaactatggaagtgacatcagcaagtgccaattctacctggatatgctgaacgagtgccgccgtggtggtgcatctgcttaggctggtggccttttggaacttttattaattgggcctcgcgttactctcatgattatacatgaataacttggcaaattcatgaacttggtgccactgcttatggctgtactctgataatcgttggtacacttgggtttgtggtatgctacttctgggagtaggtacattctactatcctaaaatgctagaactgcctacattgctctgggtgtcataaatattatggaattaaacccgttatttctcgaaacgctccgttgtttcatgtttcgtgg

SEQ ID NO: 4847 - DNA, 1454 bp, Oryza sativa
  ref <308>: DATABASE ACCESSION NUMBER: AK062081
  ref <309>: DATABASE ENTRY DATE: 2001-12-06
aaaaacgtactacggaaacttgtacactatcaagctcagcaactgcctgcccctctctttccctcgccattaagttttctcgtccggcggcgtcacccctgcgaattaactaactagctaggccggccatggagacggtggccgcggccagctacacccgcggggcggcgacgcgctcgccagcgtgctgcgccgccatgtccttctcgcagtcctacaggcccaaggccgctagaccgccgagcacgttctacggcgagtcgctgcgggttaacacggcgaggtcgctgccgtctgggaggcagtccaaggcggcgagccgggcggcgctcagcacccggtgcgagatcggggacagcctggaggagttcctgaccaaggcgacgccggataagaacctcatcaggctgctcatctgcatgggggaggcgatgaggacgatctcgttcaaggtcaggacggcgtcgtgcggcggcaccgcctgcgtcaactccttcggtgacgagcagctcgccgtcgatatgctcgccgacaagctcctcttcgaggctctggaatactctcatgtctgcaagtatgcgtgctccgaggaagtcccggagctgcaagacatgggtggaccagtcgatggtggtttcagtgtagcattcgaccctcttgatgggtccagcattgtcgacacgaacttcacagttggaaccatatttggtgtctggcctggtgacaagctgacaggcgtcaccggtggagaccaagttgctgctgccatgggcatctatggccctcgcactacttacattatcgctctcaaagattgtcctggaactcatgaattccttcttcttgatgaaggaaaatggcagcatgtcaaggacaccacaaccattggagaggggaaaatgttctctcctggtaacctgagggctacatttgataatcctgaatatgacaagctcatcaactactatgtcaaggagaagtacacattgcgttacactggaggaatggttcctgatgtcaaccagatcatagttaaggagaagggcatcttcaccaacgtgacgtctccgacagccaaggccaagctgaggctcctgttcgaggtggcgccgttgggtttcttgatagagaaagccggcgggtacagcagcgacggcaaacagtcggtgctggacaaggtgatcaacaacctcgacgagcggactcaagtggcctacggttccaagaacgagatcatccggttcgaggagactctctacggctcgtcgaggctcaccgccggcgccaccgtgggcgccgccgcctaatcttttgctgcaacgcgagcccagtgtctctgcaggcctcaaaaacgctgaaactgcagtcgttttagactcccatcctgtaatgcagattgggttgtagttgaagtgggacttgaaactgcaaagttatactcctttttgcaaggt

SEQ ID NO: 4848 - DNA, 968 bp, Oryza sativa
  ref <308>: DATABASE ACCESSION NUMBER: AK062082
  ref <309>: DATABASE ENTRY DATE: 2001-12-06
attcaaggacccttggttgggatcaatacccacatgggcggtggggtgattcccggaacccatcgtatggagcacttactgactaccagttcactcgaccacgtgggaggggtaagaagctccaagaggaatgggcggttccagtgaaatctgttgaagacattaacgagcgattcatgaacttctgtcaaggaaaacttacaagcagcccatggtctgagcttgatggccttcaacctgagacaaagataatagacgaccaattggtgaagattaaccagaagggcttccttaccattaacagccaacctgctgttaatggagagagatctgattcaacaagtgttggatggggtggtcctggaggctatgtttaccagaaggcctatcttgagttcttctgttcaaaagagaagctggatcagctaattgagaagagcaaggcattcccttctcttacatacattgccgtgaacaaggacggagagtcattctcaaacattcccacaaacgctgtgaatgcggtcacatggggtgttttccctggcaaggaaatagtccagccaactgtcgttgactcagccagctttatggtttggaaagacgaagctttcgaaatttggtcaaagggttgggcttgcctgttccctgagggcgactcatctagggagatactagacaaggtccagaagagctacttcttggttagtcttgtggacaacgactacatcaacggtgatctcttcgcggcgttcaaggagatttgatgacatcttatagtctgcaacctctcgtgtctgaattcctatctttatcaagtgttattgcttccacgactataggacagctttcgtcgaaagcttttgctcatgtgatctcgaaggattcatctagtctgatttttcgtgacttgtatcggttttattggattcatccaacatatatcaataaaaaatgagttgtgtttc

SEQ ID NO: 4849 - DNA, 1196 bp, Oryza sativa
  ref <308>: DATABASE ACCESSION NUMBER: AK062083
  ref <309>: DATABASE ENTRY DATE: 2001-12-06
agcttagcttccttttggagctgctgctgtttctcctctgcctataaaaagggcttcagctctcgatttccatttctgaattatcatcgcctgaagagcaattcaagaggagaggagaggagagctagctaaggcagccatggattactgcaagcagcaggagcgagacgggcaccgcgacgatggcgatgtgacggagtggaagaaggtggccgagctgagagccgtcgtcgaagcccaggaccctgcatgcaaggaggaggacgactaccagctgcgccggttcctgcgcgcgagagaccacaacatcggcaaggcgtcggcgatgctggtgaagtacctgcagtggaagcgcgaggtgaagcccggcggccgcgccatcgccgacgaggaggtgcgcggcgagctggcgcaggagaagctctacatgcagggctacgaccggcaggggcgccccctggtgtacggcttcggcgcccgccacttcccggcgcgccgcgacctcgacgagttcaagcgctacgtcgtctacgtcctcgaccgcacctgcgcccgcctcggcggcaatggcgggcaggggaagttcgccgccgtggccgacctgcaggggtgggggtactacggcaactgcgacatccgcgcgtacgtggcggcgctggagatcatgcagaactactacccggagaggctggggagggtgttcttgatccatgtcccctacgtgttcatggcggcctggaagatcatctaccccttcatcgacgacaacaccaagaagaagttcgtcttcgtcgccgacaaggacctccacgccacgctccgcgacgccatcgacgactccaacctcgccgaggactacggcggcaagctcaagctcgtctcgccccttattaatggcgccaccgaatccaatcgccgccggtagatagctctcgcgtcgcgtgcatgaagatcgatatgatgtatgtacacccatctcgagatccaatttaatggtatgtatgtagcacgtgtacggtgtacgtgaatgtatgttactagtatgtatacgggacaggaggacactacgaattcgaggacgtacgtgcgtgctatatacattgaattacggctctgaacagtactgatcatgaatgatcactgttgatgagaaatgcaagttcgtctgcatcaaagcatgcatcttgttggcaatc

SEQ ID NO: 4850 - DNA, 824 bp, Oryza sativa
  ref <308>: DATABASE ACCESSION NUMBER: AK062084
  ref <309>: DATABASE ENTRY DATE: 2001-12-06
tcactactggtgtcatatgccatggagagaagagtgtcatcaaagaaggtcacaagagctttccaagcgggcactcttcatggtcttttgctggtctaggcttccttgcatggtacttagctgggaagatcacagtttttgatcgtagaggtcatgttgcaaagctatgcatagtatttctgcctcttcttactgctgcacttgtggctgtttctcgagtggatgactactggcatcactggcaggatgtatttgcaggctctctgataggtcttacagtcgcatcattttgttatctgcaattcttcccatatccttatgacgcagacgctttctggcctcatgcatacaccttccagctagcggaggcctcgcgcaacaataacaccgcaaactcctacagcgtgagaccgaccgggttcgagactgtcaatgtcccagaagggcatggtgggattgctctgagagacaccaacctagaggccggcaggagaccgtgaaatctgagacctggactggagaaaatctaccaaataccatgacaatatcctgactttacgagttcgaattttgtccactcgacagacgatatggtaggctgtgttcatatatgtattacagttgtatctagatctgctgtttcatcacttctgaattggtctcttggcttccatggtttttgttttctgctaatgggatggctagccccagaagcattggctgtaaacaatctagtagacgctctaaaattacattgtacattaactctgcttattttgggtttggtcaagatagggttgtggtcataattgttatgcttatgt

SEQ ID NO: 4851 - DNA, 1958 bp, Oryza sativa
  ref <308>: DATABASE ACCESSION NUMBER: AK062085
  ref <309>: DATABASE ENTRY DATE: 2001-12-06
aaaaaaaaaaacattgttcttgcatttcatccggttctgagagcgtctcatcgactctcttaccccggtttcttccgcggtttttccccgtcctgtgcacgccaagatttcccaagaaacccgctcgctcgctgcccttagagcgaagggcggtgcggaattggagagggagagggatggggaggaggacatggcagtggcacgccattgcggcgctcggcgtcgcgtgcgcggccgccgccgccgtggccgccgataggagagccttctcggtgacctcggccgccggcggcggcgccgcggcggcggcggcggtggtggcggcgacgccggaggaagtgggcatccttcggaaggtggccaatttcttgtggcagactgatggcaactcgtaccaccacgtttggccggaaatggaattaggatggcaaatagtgctgggatcactgatcggattcttcggcgcggcattcgggagtgtgggcggcgttggaggtggtgggatctttgtgccaatgctgactttgatcattgggtttgatccaaagtcatctactgcaatatcaaaatgtatgatcatgggtgcagctgtctcaactgtctactacaatctcaagcttaaacatcctacgttggacatgccagtgattgactatgacctagccctgctgatccagcctatgctaatgcttgggatcagcattggtgttattttcaatgttttattccctgactggctggtcacagttctccttattatccttttcctaggcacatcaactaaagcttttctgaagggtgttgagacatggaagaaagagacaataatcaaaagggaggctgcaaaacgattggagcaaaccagtgaagaaccagaatatgcaccacttcctactggaccaggcgctgtagctgatgcaaaaaggccatcagatgaagcggcatcacttatgaagaacatttactggaaggagtttggccttcttgcatttgtgtggatggcattccttgttcttcaggtcacaaagaactacacagctacttgctccagttggtactggatcttaaaccttctccagatcccagtatcagttggagtgactatgtatgaagcgctgggcctgatgagcgggaagagagttctatcgtcaaagggaaatgaacagactacactgaaatttcaccagctctgcatatactgcttcttcggtatcactgcgggggtcgttggtggtctgctaggtctcggaggtggctttatcatgggtccactgttcttggaacttggcatcccaccccaggtttcaagtgcaacagccacgtttgcaatgatgttctcatcttcaatgtctgttgttgagtactacctgttgaaccggttcccagtgccctatgctttgtactttgtcattgtggcattcatcgctgccattattggccagcatgtggtcaggaggttgatcaattggttaggacgggcatcgctcatcatcttcattttggctttcatgatctttgtcagcgcaatttctctaggtggagttggcatctcaaacatgattcataggatcaaccaacatgagtacatggggtttgagaacctttgcaaatatgatgcgtaggaagccatgcgtaaaaagcaagcaggcttagaagaagttaataataccataatccatttctctatcagcatcagaaccatgtggaaggagcatttcaagatttggttttccaatcatgtgaccagagagaatttggtcgtgcaacagcttggaggggaaaactgcatggattagaattcagatcaattttggagcacaaatatactgttttctagtctttagtttaagccagtacagcatgtatcacatattcacattgtatgaatcttcctgactcaggtagagttctgccagagattgcatcatcctagtctcctagatgggcattttgctgtg

SEQ ID NO: 4852 - DNA, 1608 bp, Oryza sativa
  ref <308>: DATABASE ACCESSION NUMBER: AK104880
  ref <309>: DATABASE ENTRY DATE: 2002-08-28
tggatcttttgttcccccttttcctttcttctccggcagcggcggcggcgatgggggacggccgcgtcggaggtggaacgaatcggccggcatggctgcagcaatacgaactagtgggcaagattggcgaggggacctacggcctcgtcttcctcgctcgcctcaaacaatcgcatccccacgctgccgctggcgttggccgccgtggctctcccatcgccatcaagaagttcaagcagtccaaggagggcgacggtgtctcgcccaccgccatcagagagatcatgcttctgcgtgagatcaaccacgagaatgttgtcaagctcgtcaatgttcacatcaaccacgccgacatgtccctctacctcgccttcgattacgccgagcacgatctctatgagactatcaggcatcacagagagaagcttaacctccccataaatccctacacagtcaaatctttgctctggcaactgctcaatggtctcaactatctccatagtaactggattatccatcgagatctcaagccttctaatatactggtcatgggagaaggagaagaacatggaattataaagattgctgattttggactcgctaggatatatcaagctccattaaagccattaagtgataacggggttgttgttaccatctggtatcgggctccagagttgttacttggggcaaagcactacacaagtgctgttgatatgtgggcagttggttgcatttttgctgaattgcttacactcaaaccactgttccaaggtgttgaagccaaagctactccaaacccgtttcaacttgatcaactagacaagatttttaaggtcttaggtcatcctaccgttgagaaatggcctaccctcgctaatcttccatgctggcaaaacgatcaacaacacattcaagggcataagtatgagaacacaggacttcataatattgttcacttgcctcagaagagtcctgcgtttgatcttctctcaaaaatgctcgagtatgatcctcgaaagcgtataacagctgcgcaagctttggaacatgagtactttcgaatggatcctctgcctggacggaatgcacttttaccatcgcaggctggagagaaaattgtgcaatatcctgtgcgtccagttgataccacaactgattttgaaggaacaacaagccttcaaccaactcaagcgccatcagggaacgcagctcctggcaaccagtctgtggtaccgagacccattccgaggcaaatgcaacaacccatggtcggtatgtcgagaatgggtggtacaaacatggcggcctttggtgcagctccgcaaggaggcatagctgggatgaatcctggtaatattccaatgcagaggggcgctggagcccaatctcatccgcatcagttgagaaggaaagctgatcaagggatggggatgcagaaccccggttatcctactcaacagaagaggcggttctgaccgactgaatttgtaattgtatatctatttggtgtgttacttgtgagcacgcttggcttttgcggtggttgctcctagtcgtacagtgagaattgtatctgttctgttgtaattgaacgccatcacaacc

SEQ ID NO: 4853 - DNA, 456 bp, Oryza sativa
  ref <308>: DATABASE ACCESSION NUMBER: AK062086
  ref <309>: DATABASE ENTRY DATE: 2001-12-06
ttccttttctgaggcaatgagcagagtccgacagcgacacgatgaactaaaagagcgctatggagtttctgatataactgtttcagtacaaaatgtggcatctcaactgggctacagtagcatcgactcagtgaccctagaggacatggtccttgagattgtgaggcaaatagagaggctgatccgagcgaagtcgatgatggaagctgctgggaagcccttctaaaagaaggaaggatccattgatgtatagactgttggtcatgtatgtacctcctgatccctgaggaattgccttagatgttccaggaccaggaagcaaaaagtgccgccacagctactgattgattaattttgtaccgaatgatcaatcattcgattgatatttttacattcccttgtgacttgtgagggagacatatgtagcagaatgaaaaagaagtcgaatttattttc

SEQ ID NO: 4854 - DNA, 502 bp, Oryza sativa
  ref <308>: DATABASE ACCESSION NUMBER: AK062087
  ref <309>: DATABASE ENTRY DATE: 2001-12-06
tgaattttgctgcgaacattgatggctgcgtaacaagaatgctcaacactgttgattctgaaggcgacactccactccatcatgctgccagaggggaacatctgggtattgtggatctcttgcttaaagctggggcatgtgccaagaaggagaatacttatggccaggtccctgctgagatggctgatgaaggcactgaagtccggaaactgttaattcaagagcaagttgaggccagcacacatactagcaattaattgacgtatggcaatccttagttgaaattggtaaaatgagttactgtcaggctgaatatctgtagtcattggaactgtgtagtggtatgcgggaaacatcggcaaaccatccatcaccacccttttgttttgtattggcttgttgccatctgcctctatctttctatttcgtatgtttgggcttgcttgatgtctagcaagatttgtgaagaatcatttcatcaatagttgatagatccatgacg

SEQ ID NO: 4855 - DNA, 890 bp, Oryza sativa
  ref <308>: DATABASE ACCESSION NUMBER: AK062088
  ref <309>: DATABASE ENTRY DATE: 2001-12-06
ctttgtcttttaatgcgttactgcatacgttgcacaaatatgtaccacgtgggtcaacagttgttgacctgtattctggtgctggtgttattggattatctcttgctgcttcgaagaaatgtaggtctgtgaaatgtgttgagattaacaaattgtcaaaaatgtcttttgaaaaatcagcaagccgacttcccccaaacctgggttgtaccataacttggcacaacactgatgcttcagttgaacctgttcattggctcgaagggtcaagtgttgttattgtggatccacccaggaaaggattgcacccctctgttatctgtgctttacagaaagttgctttgtccgaacgcaaggcatataaggcgaaaagtacacttacaaaggtcaaagatgagaagaggccatggatcctaagagcaagagaggcagctgttcaggttgatagtacaccattggaaggaagtagtgaaacgtggccagaaactcttatatacattagctgcggatgggacagttttaagaaggactgcaaaagcttgatgtccagtaaggcttggcatttgcagaatgctcatgcttttaatttcttccctggcactgatagcatcgaagtgctggcaatcttcaaacgagaatcggaagcagttcaaaagaaaaagaagaaagctaagaagaagaaagccaagtagacacccgaaaagctaaccttacagaaacaattttgctagatctggaaggctggaagtgacaagatctggtatacgtttacctgtgtaattaacgtgggtcctgaagaatttaacaccctccaaccaggcatcaatttaatacccggaagattcatgtaattcaaagaacttgcccaattatctggtttagtttgtctc

SEQ ID NO: 4856 - DNA, 1571 bp, Oryza sativa
  ref <308>: DATABASE ACCESSION NUMBER: AK062089
  ref <309>: DATABASE ENTRY DATE: 2001-12-06
gtgcgggagctgagggagatgagggacggcatcggcagcatgtcgaggcgagccgctgacgggcgcgccggcggcgggcgcggcggctcgcggcattcttggccggtcctgtggtcggagcagcagcagccgccgcagcagcagcagctgcagcgtcaggagcatcagcagcagcaggggcggtgggcgaacctgccgccggagctgctgctggacgtgatccagagggtggaggccagcgaggcgacgtggccggcgcggcggcaggtggtggcgtgcgccgccgtctgccgctcgtggcgcgaggtcaccaaggaggtggtgaagacgctcgaggagtgcggcaggatcaccttccccatctccctcaagcagccggggcctcgtgagcatccagtgcagtgctttgtgaggagggacagggcgacttccacctatctcctctacctggggctcagcccatctctacatggagaaaacgacaagcttttgcttgcagcacgcaagattaggcgtgcgaccaggacttcttttgtgatctcactggtctccaatgacttctctctatccagtagcacctatgttggtaaactgaaaccaaacttccttggcacaaagtttacaatctttgacagccagcctccttgcgatgctgtagtgttgccaaacaaccgaccaagcaaacgacatttcaagcaagtatcaccgcgattgccactaggcaattacaatgttgctacggtctcatatgagctcactgtcctacgtaatcgaggaccaaggagaatgcaatgcaccatgcactctataccggcattgtgtattcaggaaggtgggaaggccccaacccctaccggcatcatccactcacttgacgaacaagttcccgccttatcaactagcaaaggaaaggaaccagccatagaattttcatcgacaagcctcagcgctgatttgtctggaccggtctgtacaaatgaagtgcctcttgttctgaagaacaaagctccccgctggcatgagcagctgcagtgctggtgcctcaacttccgagggcgtgttacagtagcatcagtcaagaacttccagctcgttgcctcagttgatccttcccttggtatccctgcggcagagcaggagaaggtcatcctccaatttgggaaaatcggaaaggatatattcacaatggattataggtacccgctctcggcgttccaggcatttgcgatctgcctgactagctttgacaccaaaccggcgtgcgaataactgaagaaaggtatcaaacctgtgtcttctctctatttagctcaggcagcgtctgattccgttggatgctgtaaaattctcggtcttgctatgccaaaatgagcctactcctgggggagacagtagctttgtcagatcaagatgaacaatggcatctatatcttggcaactggcaaaaccccaggaaagatttgagtgacaatgctgtaaccaacaaactgctattgtactattgttcttggaatgtttagcggtgaaatatcactgcgctatggataatatggacgctgttcatcgtgccc

SEQ ID NO: 4857 - DNA, 1872 bp, Oryza sativa
  ref <308>: DATABASE ACCESSION NUMBER: AK062090
  ref <309>: DATABASE ENTRY DATE: 2001-12-06
ctgcctttgccttgccagtcagtgctcgagttcgtctcgctctccgcatccgcaactagggtttccccccaagcaagtcgcagatggaggcgccggcgatggagcccggcgagatggaagcgatgctccgggcggcagcggagttcgcgtcctacccaggagcgcatggtgatgacaccgtgaggcagttcctggagcaataccctctgcccaagctgttaggtgcattgcagagtgaggctgatgtacctgggatggatgaaactattgccgcatgcttggacaaagtattttcttcgagatatggagcatcatttctgccaagctatggtgcatttattcaagctggattgcttgcaaactcgaagaataccagacaactagcctgcaaagctgtgatacatcttcttgataaggctggagatagtgctgttgttgtggacacatttgttcagcacaatctatatcctcttctgatgaattgtttaactgagggagatgaggagatttcagcaatttctctggatggcataaaacgtttagcacaaattcctaaaggcattgagatcatatttccaccaaatggtcaagggtctgtgcaactccacaaagtggcagctcagtcatcgtccatggcacgaattcgcattctatcactgatagctaagctctttgctgtgtcaacctatactgctactgccatttacgactcaaatcttctcagcttatttgaggatgagataaaagatagaagagacatgcttaaaaccctgagtgcactagaggtcctctatgagctcgtggaacaccctcacagcaatatcttcttgctgaagactaatttacttcaactcatggttgatgtgatcaacgattcatcggctgattctattgtacggtcaagggcaacattgattagtgggaggcttctttcttcagctgatgctttcacgacaatagatcgaaactgtgttgcaaatctgcttctagctatagacaaattattgaagatggaagaaagtcaaaatacagatgaaactgagagtgcattggaggccttaggcctgattggtacaacatctgctggagcatgtttgttgctcacagattcatcaaatgctgccagacatgtggtagaggcatcctttggtcggcagggtagaggtaaacagctggctgctttgcatgcatttggaagcatatctggtgttgatcggcaggaagaccaaataaaactggataatcaagcggaagaacgcctgaagcgttttgtctataccacagcaagaaacagtccaaaactgacaccttcggctcttcttctgtcggtgttacaacaagatccagacataaggataactggttacagagtaatatctggccttgttgccagagaatggtgcctaatggaaatttgttcaaagttggacataatcaaccttgttacagatcccaaaatggagatgacaaaacttggcatggaagcacggcatgattgttgtctggcgatcagcaaggcattatcatcatcacatcttcttcatgaaccaagcctttctgaactcattggaaagttgaatgaagcggttaaaaggggtccttatctttctgagaggaagcgtgtggagccacagccggtggttgtcccggcagagaggttttaactctttacctgaagcacaggccgtctaacctttgcaacccagagaaaactgaggacgcctatgcagctggctttttgtatatggttaaccaaaaatagagatgatggatgtaccacctgtgttcctggtgcgctaaacatgtctttgacgaccgaagatactgttatttcagctaagtaatataactcagtggatgctgttgggaacg

SEQ ID NO: 4858 - DNA, 863 bp, Oryza sativa
  ref <308>: DATABASE ACCESSION NUMBER: AK062091
  ref <309>: DATABASE ENTRY DATE: 2001-12-06
agcagcagctcgccatccaagcatcaaagcttctaaactgaagcttaatctatatataaggagagttcattttgattttggtgaggaagaagtagtagaagtgaattagtgatatcgatcagagtgtgaagaagatgtctctggtgaagctgtttgatacgttggcgttcgacgcctggaacccgttcagcatctttgggacgacggtggcggcggacgcgtggctggcgagcgacacgtcggcgttcgccaacacgtacatcgagagccgggagacggcggaggcgtacgtgttccgggcggacctgccggcgggggtgaagaaggaggaggtgcgggtggaggtggacgaggggaacgtgctggtgatcaccggcgagcgcagcgtccggcgggaggagaagggccagcggtcgcaccacatcgagcgcagctgcgccaccttcttcggcaggttccacctccccgacgacgccgtcgtcggcctcgtcagggcgtccatggacggcggcatgctcaccgtcaccgtgcccaaggtggtcactgacaagcagcccgccatcgccgccgccgcacccgtccccgccgtcgtcgcacccgctgtcgaggcgaaggcaatcgaagccagcccgtagtgatgcgatgaacacacacacacacacacagacagtcagtcaatccaacgatccgtatgtatacgttgtcgtcgatgataagttcaaagtgcttgcgagtaaggtgcttgctgtacttttggtttaattacctttggtgtgaaatgctttctcgatgtaagacaagaaagctagtagcaaaatcatactatttgcttgatgcaatacatgttccatcttagttccctt

SEQ ID NO: 4859 - DNA, 1888 bp, Oryza sativa
  ref <308>: DATABASE ACCESSION NUMBER: AK104881
  ref <309>: DATABASE ENTRY DATE: 2002-08-28
atctccttcctcctcctccgccgccgccgccaccactactaaaaccctagctgctcgcctcgcccacgccctcgctcgcctcgcctgatcccgccgcgtcgtagcagcagggcggagccatgtcgtccgggaagggaggtggaggcggcggcaagggaggcggagggaagaagaaggaggtgaagaaggagacgaagctcgggatggcgtacaagaaggatgacaacttcggggagtggtactccgaggttgtcgttaacagtgaaatgatcgagtactatgacatatccggttgttatatcttgaggccatgggcgatggagatctgggaattgcttaaagaattctttgatgcagaaataaaaaagctgaagctgaaaccttattatttcccattgtttgtcactgagaatgtcctacagaaggagaaagaccacattgagggctttgcaccagaggtagcatgggtcactaaatcaggaaaatctgatctggaagctcctatcgcaatccgtcctacaagtgagactgtcatgtatccatacttctccaaatggataagaagtcatcgggacttacctttgaggtgtaaccagtggtgtaacgtcgtgcgatgggagtttagcaatccaactccattcataaggagccgtgagttcctttggcaagaagggcatacagcttttgcaactaaagaggaggctgacgaagaggttctccaaattttggaactctaccgaaggatttatgaagaatttttagcagttccagtttctaaagggaggaaaagtgagatggaaaaatttgctggtggactgtatacaacaagtgttgaggccttcattccaaacacaggacgtggtgtacaaggggcaacatcacattgtcttggtcaaaactttgcaaagatgtttgatatcacttttgagaatgataagggctcaagatccatggtgtggcagaactcttgggcatacaccacccgctcgattggggtgatggtgatgacacacggagatgacaaaggtttagtgcttccaccaagggtggcacctctgcaggtcattgttattcctgttccatacaaagatgttgacacaacagctattgtaaacgaatgcaaaaagactgttgagacactggagaaagctggtattcgagcagacttggatacccgcgaaaactattctccaggatggaagtattcccactgggagatgaaaggcgttcctctaagaattgagataggtccaaaagatatggcaaacaatcaggcccgtgttgttaggcgagacaatggtgcaaaagccgatattcctacggctgacttggttgagaaagttaatgggttacttgatgaggttcagaaaaacttgtttgagacggcgaaacaaaagagagatgcctgccttaaggttgttaacacctgggatgaattcatagtggctctgaatgacaaaaaattgatcctggctccatggtgtgatgaagaggaagttgagaaggatgtgaaggctcggacaaaaggtgacctgggagctgccaagacattgtgtacaccatttgaacagccagatctcccagaaggaaccacatgctttgcttctggaaagcctgcgaagaaatggtcattctggggccgcagctattgatctgtaacggatctcggttgtgatcattcattcctgctggcgaagccgttgattcaccatagacatgtattgcagttttcatactagcaaagcatgatacacatacatctatttaccgtgcagttttgctgcttgtcagaaatcttgacattggaatgtttaagtaacatcttgtttggttcagaatcttgtttacccagcaacttaattgaactaatcgttgacattgtgttttc

SEQ ID NO: 4860 - DNA, 661 bp, Oryza sativa
  ref <308>: DATABASE ACCESSION NUMBER: AK062092
  ref <309>: DATABASE ENTRY DATE: 2001-12-06
tagccgcactgcgcgcctcccctcccctcgtctcgccgccgcttcgtcgccgccgccgcagcatcagccgcctcctccccgcggaaatgccgttcaagaggttcgtggagatcgggcgggtggccctggtgaactacggcaaggactacggccgcctcgtcgtcattgtcgatgtcgtcgaccagaacagggcacttgtggatgcccctgatatggtccgctgccagataaacttcaagcggctttctctgactgacattaagattgacatcaagcgtgtccctaagaagaccaccttgattaaggcaatggaggaagctgatgtgaagaacaagtgggagaacagctcatggggtaagaaactgattgtccagaagaggagagcatccctcaacgactttgacaggttcaaggttatgttggcgaagatcaagcgtggcggcgctatcagacaggagcttgctaagcttaagaaggaggctgctgcgtagatcattttggtggtgatcagttgagattttgatcaatgatgtttgatgtccctaaatatgaaacattgtgccagccactgttattgggatctcatgaaaaatttaagttttgaactcctgtgtttagaccttgtgccacaaattctattcagaatctaagatagtatgcc

SEQ ID NO: 4861 - DNA, 1304 bp, Oryza sativa
  ref <308>: DATABASE ACCESSION NUMBER: AK104882
  ref <309>: DATABASE ENTRY DATE: 2002-08-28
aatccactcgcttttcgataaaatttctgttgattgcgtcgaaaccttcgcaatcctctcgcacgcatcacgccttgcgcgccgcatctcgtagccctgaattttgatttgattctgctgcctccggcgcgcccctgattggcgaggaggtggtggtggttgtggtgggtgcggccatggcggcttcgacggcggcggcggtggcaccggactggtggaacgacgtgaacaactcgccgatgtggcaggaccgctccttccacgccctcgccacgctatacggcgccgtctcgttcgccgcgctggtccaattgatcagaatcgaatgtagagtacctgagtacggatggacgacacagaaggtgttccatttcatgaactttattgtgaatggagtgcggccaatcgtgtttgtgctccgacgagatgtgcaacttgtgcagcctgaggtatttcaacatgtgctcattgattttccggggcttgcattcttcacaacctatgctctgttagtgctcttctgggctgagatttactatcaggcacgggcaatgtctactgatgggctcagaccagctttttatacaatcaatggagtggtctatgcaatccagataatactttggatggcgttgtggtggaaaccagttcgagcaatggtcatcttgtctaagatgttctttgcagcgacatctttatttgctgcccttggatttcttctctatggagggaggctatttctgatgttacagcgttttccagttgaatcaaaaggaaggcgtaaaaagttgaatgaggttggatatgtgacaaccatatgcttttctggcttcttgatcagatgcgtaatgatgtgcttaaatgcgtttgataaagaagccgatcttgatgttctgaaccatccaatcctaaacttcttctactacttgttggttgagattgtaccttcagctttggtgctgttcatattaaggaaactaccacctaaacgggggatcacacagtaccatccaatccattagatcagtccagggatccccaatgtgcccttgcaaattgttccttcaaactggtgagtacagaaatgtaaatcttaaccacggatttctttgtaggtaggttgcttggttttcatgtgaaaaaagctcaacaaaaattctgggatatatatagtttgtaaaaagtctaacatcccgtcatcccaaattcctgcaattgctgtactgcgacccaggagtattctgcaactacaggttttcttctgtaaactgaaggacaaatatgctttgattatttgtttgatt

SEQ ID NO: 4862 - DNA, 1265 bp, Oryza sativa
  ref <308>: DATABASE ACCESSION NUMBER: AK062093
  ref <309>: DATABASE ENTRY DATE: 2001-12-06
ctatgctagaggttatgcttgggtatgggatcacttcttcaaccagattgagcctattgctgccaataccccataccatgtctgcataggaaatcatgaatatgattggccattgcaaccttggaaaccttggtgggcaactggtatatatggaacagatggtggaggtgaatgtggcataccttacagcgtaaagttcagaatgcctggcaattcttttttgcctactggcaatggagctcccgacacccgaaatctttactactccttcgattcaggggttgtgcattttgtttacatgtcaactgagactaattttgttcagggcagtgaccaatacaacttcataaaagctgacctagagaaggtcaaccgaagtagaactcctttcattgtgtttcagggccaccggccaatgtatacatcaagcaatgaagctagggattttgctcatagacagcagatgctccagaacctggaaccactcttggcaacatacaaagtgacccttgcactctggggacatgtccacaggtacgagaggttctgccccatgaaaaacttccaatgtgtcaacatgtcatcaagcttcgtataccctggtgcccctgttcatcttgtgatcgggatgggtggtcaagattatcaaccattctggcagccaaggaaggatcaccctgatgtacctgtctatccgcagcctgagaggtctatgtaccgtggtggggagtttggatacacaaaacttgtagctacaaaggagaagttgacactaacgtacatcggcaaccatgatgggcaagtccatgatatggtggagatattctctgggcaagtatctaataacaatggtgttcctgaggtgatcgatgatacaaagctcagcacaggggtcagcaccaaactgaaaatccctctgttctccttggaaattgtaggcagcgtgatgtttgcactggttctgggtttctctcttggatttctgatcagaaggaagaaagaagctgcacagtggaccccagtgaagaacgaggagacctaaaatcacacactgtatctaatgcaaatgcaaatggtttttgatcaacaacctgtttataggatcgtgccccatttcttggggctctacagtgttgtactatagtgcatagagtattgtaacatgtgctgtgtcaatcgtgggcattgtagagtttgatcagcatatctgttgccgtgattctacgatacataaaggtttcaataagtgacattacgttcacatc

SEQ ID NO: 4863 - DNA, 1592 bp, Oryza sativa
  ref <308>: DATABASE ACCESSION NUMBER: AK062094
  ref <309>: DATABASE ENTRY DATE: 2001-12-06
agccatccgaatccgcgagagcggaagccaccgaggcggaggcgaggaggagggcgcaatggcggggaaggaggagggccggatcttcgtgggcggcctgtcgttccacaccgacgagcgcaagctggccgacgcgttccgccgcttcggcaaggtcgtcgacgcccagatcatgctggagagacacacccaacgccatcgtggttttggcttcgtgacattttcagatccagaggcagttgatagcgctattaaagaaatgcactgtcaagaattagatggcaggactatatcagtgaacaaggctgagcctaagatgaatacagatgacacaaggtatgaaagtggtggtggacgaggagagtatcgtggtggtagaggtgatggaccacccccaggcaattgctttgagtgtggccgtgctggtcattgggctcgtgattgccctaatcctggtggtggtcgttctgcgcgatactcttcttctaagttcagcgctggtggcagaggagaccgtttttctggatcagataggtttggagaccgttacatggatgatcgttatgatggtgggtaccgtgaacctgttgatgtcagagacaggtatggtggaggccgtgaccgatatgctaatgatcgatacccatcaggtggtgaccgctatgttccagacagatatggaggtcccgatcgctatcagcctagtagttatggccgggaacgagaaagaagctacgagagggatggagtgcgtggcaatggcggctatgataggagtggcccaaggggtggtggaagctatgacagggatggcccaaggggtggtataagtggtggctatgacagggatggcccacgtggcggtggtgttgaccgttacggtggtggagggcctgctcgttatgatggaggaagctacagggacagatctgggccgtatgaccgccctagcagaggaggacgctttgatgatcgcttccagtgaagcctttcgcagaatcaagttatgtatttgcggtttaacgcttgcagtttcgcatggctgaatgtttagtgaatgctctggcacagttatatctattatgtattagaacctccagcactgttttgattctggcaaaaagtttatctatcagactgttttggattctgaattggctcgcattgcactgagtggttgtctgcctgattccctatttgctgaatgctttctgtggtttgtacatggtgattaaggcttgcatggtatcatcaatctaatctgcaaggattactacagaaacagtggctaaattatgccggcccagcacatttgtgagaaaccttagtatgctttatcttccgtccagaaagcggtagccagaaaagccattaccatgctgatgtgtggttttatttgtttgttaccagtggctgatgtgttcgatccatgcattgtggaagcagcatcctcgtttcatgttctttttttttcctatcatttcttctgtaaaagatggtacagattatcatcagttggatccctgaatcagtaaaacttcaatattctgacattactcgttgccttgcttgaaatatatgcagcatttcgt

SEQ ID NO: 4864 - DNA, 1429 bp, Oryza sativa
  ref <308>: DATABASE ACCESSION NUMBER: AK104883
  ref <309>: DATABASE ENTRY DATE: 2002-08-28
gcattgcctcatccatccatcaagttggtcatcgagctcgagctgaatctaaacctttgcaacaatggcggcgcgtgttgttgtggcgttcgcggttgcgtccgccatgttcgtggccgtctccggccagaagttcaacgccatcttcagcttcggcgactccatgtccgacaccggcaacctctgcgtgaacggcccccccgccggcctgacgctcacccagcctccctacggcgagaccttcttcggccgcgccacctgccgctgctccgacggccgcctcgtcgtcgacttcctcgcggagaagttcgggctgccgttgctgccgccgtcgaagaggggcggctccgacttccggcgaggcgcgaacatggcgatcatcggcgccaccaccatggactccggcttcttccagtcgctcggcatcggcgacaagatctggaacaatggccccctcaacacccagatccagtggttccagcagctcatgccctccatctgcggctcatcttgcaagacgtacctgtccaagtcgctgttcgtgctcggcgagttcgggggcaacgactacaacgcgcagctgttcggcgggtacacgccggagcaggcggcggggcagagcggcaccatcgtggacgggatcgggaagggggtggagcagctgatcgggctgggcgccatgtacgtcgtcgtccccggcgtgctccccgtcggctgcttccccatctacctcacgctgtacggcacctccaacgccggcgactacgaccagtacggctgcctcacccgcttcaacaccctctcctcccgccataactccctcctccaggccaaggtctcctccctccagagcaagtacccctgggctcgcatcatgtacgccgacttctactcccacgtctacgacatggtcaaatccccctccaactacgggtttagcacgaatttgagggcgtgctgcggggcgggaggagggaagtacaactaccagaacggcgcgaggtgcggcatgtcgggagcctacgcgtgctccaacccgtcgtcgtcgttgagctgggacggcatccatctcacggaggcggcgtacaagcagatcgccgacgggtgggtcaacgggccctactgccacccgccgatcatgccctagatcatcgccggcggcggcgacggcggccggaggatggccggctagctgctgctgatttgatttgtttagcagaagaagagaagaaaaatggatagcaagaggaagaagaagacatcttgcgatcgactgggaaatgaataagatggtgattagttgattttcgttgtgggtggttaatttgtttttgttttaggtaatgcacatttgtgtagtatgtatgagattgggaggcaatttaattatgtgttgcaattaattaattaaatcttagtaatttgttgc

SEQ ID NO: 4865 - DNA, 1502 bp, Oryza sativa
  ref <308>: DATABASE ACCESSION NUMBER: AK062095
  ref <309>: DATABASE ENTRY DATE: 2001-12-06
ctcggaggctcggacgcgccgccgccggttgcccggtctcctcgccggccggcggatccggtgaagctacggattagtgagtggtaggagcagcagcggccatggacgggagccgccaggagatgccgccgccaacggagctgagcgctctcggccacagggaagttgctgctgcagaaaggccctttaagaaaacctgccactcatcagtgcctacatcttctaccttgtgtgaaccccatgtttggccaggtctcctggaaggcctccttcaccaaatcattgctttgcttagctcattccaggacttgcttgcttttagtgccacctgccactcttggcgagctgcgctatcttcctttccatccgtatatactttcaacttcccacctctctgcctcaaactaaatacacctaatatccgtccccttcgcgtccttttgaaggacaatcttttatcttactgcaaatggcagcttgatgatccatccaagagaaacatatcccttcgttgttcagctccgccagatgctccaaatcgcatgcgctatttgggctgctcatatggatatctcatcttctcctatcatgagaagaactgcctctttgttgatgcttacactagcactaagctgaagtctcccaaactcaacttcatgggcgacagggatatctactacggcatccttacggctccacttaattcacccaactcacatctgatactttgttcgaggtcttccatattctattggcaggttggaacaaactcttggacaaagcacggttatggcggtgagcacattcttcagattgtgctcttcaaaggtgagatttttgcgatggatgttcttggcaggcttcacaccatgcaatttgcacctgagctcagcatacaggaagtagcggttctgcgacgagaagaaatggttacaggcccacgttctgggccatggctggtggcctgtggtgaaatgcttctcatggttgatttgtcaacagaccgcgaccaattgcctcgcacctttcaagtctttcgtcttgagttttctgctgaaacagttgagtgtgtgaagatggaaaggttggaaaatcaggctctctttgtcaaccttgatgggagggaccctacattctcttgcacgagccctgaaagatggggcggaaagagtaactggatttatgttgcgaaaccatctggagattctggtgaaccttggactgcggtcgagctcggtcagccagttcctagtagaatagaccgcgtcccagactttcaagtagacaacatgtgggtggtacccagtttgatttatgatgtcaaccaatgatgttctcatcaagttttagccagcgttgcacaagccatatccgtacttgctagtgtgatttaatggtttcttgacctgtggcatatgtatggattcttgtaagagtacactgaagttgtatctgtagtatgagaaatgcaggttcttgcatgtactgtgcagggttggtct

SEQ ID NO: 4866 - DNA, 1246 bp, Oryza sativa
  ref <308>: DATABASE ACCESSION NUMBER: AK062096
  ref <309>: DATABASE ENTRY DATE: 2001-12-06
agctggaagagtttggaatcagtggatcagatgcttcgaacatatgttatttgcgcaatcttgatgatgcggataagttagtgaatgtgatgaaatcatgtcctggtggaaatgctgtcgtcattggtggtggctatataggaatggagtgcgcagcagcattggttactaataggataaaagtaaccatggtcttccctgaaagccactgcatggcccgtctatttacaccaaaaattgcagaatattatgagaactattacacttcaaaaggtgttacctttgtcaaaggaactgtgcttacatcctttgaaaaagattcgacagggaaggtgacttcagtaatcctgaaagatggtaaacaccttcctgccgatatggttgtggttggtattggcatccgtgcaagcactggtctttttgaaggtcagctgttgatggagcaaggtgggataaaggtaaacggacaaatgttaacaagcgatggttctgtatatgccgttggcgatgttgctgccttccctatcaagctctttgatggtgttatacgacggcttgagcatgttgactcagctcgcagaacagcgagacatgctgttgcagccatcctggagccttcaaaaactaaggacatcgattacctgccattcttctactccagggtcttcacattatcctggcaattctatgggaacaataccggagaagtggttcactttggagacttcacaaacagcagcccaaggtttggtgcctattgggttgataaaagccggattaggggtgcatttcttgaaggtggaagtcgagaagaatacgaggcgatatcgaatgttgttcggcgtaaagctaaggttataaacattgctgaacttgaaaagcaaggtctgatgtttgccattcaagaaagccagaaggacttgcctgatggtgggcttgctcttggtgaaaagcctacatatgtatggcatacaacggctggtgtcattgcagctgcgtccattgctgcatttggttattggtacggcaggaaacgccgtaggtggtgaaaaatctgggagcgactcattccttttgcaaattcatcgtctcctgtgcctacataactgatggactaaagttactcagagaaaagtcctgtataacctgtatcagagaaaaaaatcatgtacaatctgtatgaaagtatcatctttgtaccaaatgtaaacaaatacacagatcccataatatatattgtttaatg

SEQ ID NO: 4867 - DNA, 456 bp, Oryza sativa
  ref <308>: DATABASE ACCESSION NUMBER: AK062097
  ref <309>: DATABASE ENTRY DATE: 2001-12-06
gaattatttaagatattcagggtactaggaactccaaatgaacaaagttggccaggagttagctcattacctgactacaagtctgctttccccaagtggcaagcacaggatcttgcaactattgtccctactcttgaccctgctggtttggaccttctctctaaaatgcttcggtacgagccaaacaaaaggatcacagctagacaggctcttgagcatgaatacttcaaggaccttgagatggtacaatgaccctgctatggctttacattggattggcatatgtatgggctgggctcctcatttcattccttctgtgaacgctgtgcccttcgtttgggcatttttgtcattcagctggatatttcaaatcttgtgtgtttgatatgtattcaggaacgctaaatagatcaccgtcttggtctctatttgttcagagtaaatatcttccaatgc

SEQ ID NO: 4868 - DNA, 1781 bp, Oryza sativa
  ref <308>: DATABASE ACCESSION NUMBER: AK062098
  ref <309>: DATABASE ENTRY DATE: 2001-12-06
cttgttggagttacactgggaccaaagggaaggaatgttgttttggagagcaagtatgggtcccctaggattgtcaatgatggtgttacagttgcaagagaggttgaactggaggatcctgttgaaaatattggagctaagttggttaggcaagcagcagcaaagaccaatgatttagctggagatggcacaactacttctgttgtgcttgctcaggggctgattgctgagggtgttaaggtcgttgcagctggtgccaatcctgtgcaaattacacgtggtatcgagaaaactgcgaaagcactagttgaagagctaaagaaattgtcaaaggaggttgaagacagtgagcttgcggatgttgctgcagtcagtgctggcaacaattatgaaatcggtaatatgatagcagaggctatgagcaaggttggcaggaagggtgtggttacccttgaagaagggagaagttctgagaataatctctatgttgtggagggaatgcagtttgaacgtggttatatctccccgtattttgtaactgacagcgagaaaatgtctgcagaatatgagaactgcaagcttcttttggtggacaaaaaaatcaccaacgcaagggatcttatcaatgttttggaggaggccataagaggtgcatacccaattctgataattgctgaggatattgagcaggaggctcttgctactcttgttgtcaacaagcttagagggtcattgaaaattgccgctatcaaagcccctggttttggtgagcgcaagacccagtacttggatgatattgccattctaactggagcaactgtaatcagggatgaagttgggctgtcacttgacaaggcagacaaatcagttttaggaacggctgcaaaggtggtccttaacaaagagtcaacaacaattgttggtgatggcagtacacaggaagaagtgactaagagggttgcacaaataaaaaatctcatcgaggctgccgaacaagaatacgagaaggaaaagctcaatgagaggattgcaaagcttgctggtggtgttgcagtcattcaggtgggagcacaaacagagaccgaactaaaagagaagaagttgagagttgaggatgccctaaatgctaccaaggctgctgttgaggaaggtattgttgttggtggagggtgcactcttctgagactggcagctagagttgacgccatcaaggacaacctggagaatgatgagcagaaggttggagctgaaattgtaaggagagcgctgagctacccgcttaaattgattgctaagaatgctggtgttaatggaagcgttgttaccgagaaggttctctctaacgataacttcaagtttggttacaatgctgcaactggacagtacgaggatttgatggctgctggtatcattgaccccactaaggtggtgagatgttgtcttgagcatgctgcgtcggtggccaagacattcctcacatcggatgtcgtcgtcgtcgagatcaaggagcctgagcctgcgcccgtcaccaacccgatggacaactccggctacgggtactgatgactaagttacagttacttgttctccgggaaggtcactggccgtcaatttttgggtagtaggcttgaatctgaattttggtgagatttgagtagtttcgagacaatttgatttgttcccatgggaagtgaaataaacagggtcactatagcaaaatttgtggtgtaactggaacggctgtcaaattacgaaggaagatatttgaaagatttcatgct

SEQ ID NO: 4869 - DNA, 669 bp, Oryza sativa
  ref <308>: DATABASE ACCESSION NUMBER: AK062099
  ref <309>: DATABASE ENTRY DATE: 2001-12-06
agaccgtgacgatccagccatcaggtggaaaggacgcggctgtggtcctctccacgaccaagaccaagaagcagaatgccccagctaagctctaccacaagtctgtgatgcgcaaggagttccgcaagatggctaaggctgtcaagaaccaggttagtgacaactactacaggccagatctgaccaaaccggctcttgcaaggcttagctcagtgtaccgcagcctccaggttgccaagtctggtgtgaagaagaagaacaggcagccagccaagctgtaaatcgcttgaagctgcgcgtttttgtcatggcacctcttgatgctcatgtttccagctacctctgttctaaaagtgtccagacttgaaatgagggatctctgttagaattggatcaaccttgtcacagatctgccgtgtagtttgtattctagacagtttatctgctcggtgtccttacaaattgtttgctttgcacttattatagtagctaatgtcatcaaattgtgggcccctgttgctactatgtggatttacaatctgcacgttagtagtagcaaatctagctatctccttgatctcctggacaagttgatagaaagcctatgaacgtaagcactccctccgttttgaaatgtttgttttgaaatgtttgttgatcattcgtctt

SEQ ID NO: 4870 - DNA, 1604 bp, Oryza sativa
  ref <308>: DATABASE ACCESSION NUMBER: AK062100
  ref <309>: DATABASE ENTRY DATE: 2001-12-06
ggcgtcggctcctactccaaggtggtgagggccaagaagaaggatacggggaatgtgtacgcgctcaagatcatggacaagaagttcatcaccaaggagaacaagatctcctacgtcaagatggagcgcatcgtgctcgatcagctggatcacccgggcgtcatcaggctcttcttcaccttccaggacacctactccctctatatggcgcttgagtcgtgtgaaggtggggagctgtttgaccaaattgttcggaaaggtcgcctgtctgaggatgaggcccggttttatgctgctgaaattgttgatattctggagtatttgcatagtttaggcctaattcatcgggatgttaagccagaaaatttactgcttacttctgatgggcacatcaagattgccgattttggtagtgtgaagcctacaaaggacaccccgatcaaagtccttccaaattccactaacgagagggcctgtacatttgttgggacagctgcatatgtaccacctgaggtcctgaactctgccccaccaacctttggaaatgacttatgggcattggggtgtactctatatcaattgctttctggctcttcaccatttaaagatgccagtgagtggttaattttccagagaattatagcacgcgatctcaaaattcctgagtacttctcagatgatgcaagggatctcattgacaagctgctggatgtcgacccaagcaaacgtccaggtgcaggacctgatggttatgtgtcattgaagaaacatcctttttttagaggcattgattggaaaaatataaggagcacacgggcaccgaagcttgcaatggaggcaaatgcaaatgaggatgaagatagtcaggattcaagttggttgtcacacatgggaagtgctccagtcaaccaacatgtcagtcctgttgggaatgatggtgcctcatcatcttctgaagtacgctcccatatatctagattagcttccatcgactccttcgactctagatggcaggacttcctggagcctggcgaatctgtcgttctaatatcaaaactgaagaagataaacaagctaacgaacaagaaggttcagttgatcctcaccgacaaaccacagctgatctgtgtagatcctggaaaaatggtgactaaagggaacatcatgtggtctgatgacccaagtgaactcaatgtgcaagtatcaaactcttcgcatttcaggatatgcacgccaaagaaggtgtcatcgtttgaggatgcaaaacagcgcgcctggcaatggaagaaggcgatcgaagacctacaacgctgccagaagaactgaccatgaccaactcaagacgtcaaaatggtgatattaagcattgtgtatacaccatagccatccttttcgcctggaggaacatgggggagactattgttcctggtctcctgcatctgtgcccgattgcaacgaagtctcaacagttggcacatcgatggatgttcctacatttttttgttttcttttccggccctgctaaattctcttatagcaaacaattttgctcgtttgttttgtaatttggtgcagcagatagcatcaggaattcaggatgattg

SEQ ID NO: 4871 - DNA, 886 bp, Oryza sativa; identical to SEQ ID NO: 1467
  ref <308>: DATABASE ACCESSION NUMBER: AK104884
  ref <309>: DATABASE ENTRY DATE: 2002-08-28

SEQ ID NO: 4872 - DNA, 1261 bp, Oryza sativa
  ref <308>: DATABASE ACCESSION NUMBER: AK104885
  ref <309>: DATABASE ENTRY DATE: 2002-08-28
aatctacttggagacgagaggcacatcgagaatctcactggtagtgcatcacatcagaagaaggacgcactcttcttcttcttctcgtctccgattccaacgaggcggcggagcagagcagaggcgcgggatggcggcggcgcaggggagcggagtgccggcggcgctggcgctgagcagcggccacacgatgccgtcggtggggttgggcgtgtggcggatggactcccccgccatccgcgacctcatccactccgcactccgcatcggctaccgccacttcgactgcgccgctgattaccaaaacgaggctgaagttggggatgcacttgcagaggcattccaaactggacttgtcaagagggaggatcttttcatcacaaccaagttgtggaactcagatcatgggcatgtggttgaagcatgtaaggatagcttgaaaaagttgcggctagattatctagatctctaccttatccacttcccagtagctacccgtcatactggagttggtacgactgctagtgctcttggtgatgatggtgtgctagacattgataccactatctcattggagacaacatggcacgctatggaggatcttgtttccatgggactggttcgcagcattgggattagcaactatgacatattccttaccagagattgtttggcttatgctaagataaagcccgcagtgaatcaaatcgagacacatccctacttccagcgcgactgtcttgtcaagttctgccagaagcatgggatcttagtcactgcccatacccctctgggtggctccactgccaatactgagtggtttgggtccgtctcatgcctcgacgaccctgtcatcaagtctctggctgagaaatatggcaagacaccggcgcagctggtgctccggtgggggcttcagaggaacacagtggtgatccccaagacatccaaggaggagagattgcaggagaactttgcggtcttcgatttcgccatctccgacgaggacatggagaagatgagatccatcgaccggaagtaccgcaccaaccagcctgccaagttctggggaatcgacctgtttgcttgatgaattatgagtctttagcacgaacaataatgggggcttttctactgtccctgggagcttcttgtgcaatcatttttctctgaactgaaacttcttgtgctgaaggatgaagttgttgggatcgtgtgaacttgaattgttattcaaagggaaaaaaaaagtgtgaacttg

SEQ ID NO: 4873 - DNA, 1240 bp, Oryza sativa
  ref <308>: DATABASE ACCESSION NUMBER: AK104886
  ref <309>: DATABASE ENTRY DATE: 2002-08-28
ccacgagctcgcgagcggggattttcccccacgatttttgctgttcatccgtgtgggggaggagagattccgcgtcgattggtggtcggatcggagcgaggagaagcccccgtgttcttggctttttttcccccgatcgaatccggtggaaagcgagcaataaaaaccacttcttttctttttcgtttctggttttctttttcttgttgggtttctcttcctcctgctcgagtttgatctcttgattcgtgaggagtgtggcgaagatgagcgcgagtttcctcgagatccagccttcggagctctcattcccctttgaactactgaagcagagctcatgctccatgcaactcaccaataagaccgaccattatgttgcatttaaggtcaaaacaaccaacccaaagcaatactgtgtgcgccctaatattggcgtcgtattgccggggtctacatgtgatgttacagtgacgatgcaagcacagagggaggcacctccggatatgcagtgcaaggataagttccttgttcaaagtgttgcagctgagaatggtgcaacaactcaagatattagtgcagaaatgttcaataaggtggcaggaaaggttgttgaggaattcaagctacgtgtagtctatgtgccaacgactacatcctccgcaatgcctgaagactctgaacaaggaagttctgctcggccatttgcacaagaaaatggtatccataattcaacaatgccacaacctgtttttagatcatctgctgaaccaacaaaggagaggcccacagagccatcgtccatgatctccaaactaaatgaggagaatagggttgctattcagcaaaaccagaagttacgacatgagctggagctcctacggaaagaaagcagcaaaagcagtggcggtttctccctcaccttcttggccatcgttggtcttctcggcatcatcgtgggctacatcctcaagaagacatagaagaggtagaggttcccaacaaaagttatactcccaggaaaggatacccctcatattggtatgccgcgcatcgtgtttttttccctcctaaaaggagcacctgtcctaacttgtaacaacaatactcctcctagatgccatggtttgtgtacattatggtggttttacgcttcgctgcggttttttttttttttacattgactaggcttgatttttaagagttttaactggtgcaactgtttgacattctccaaaaaaag

SEQ ID NO: 4874 - DNA, 523 bp, Oryza sativa
  ref <308>: DATABASE ACCESSION NUMBER: AK062101
  ref <309>: DATABASE ENTRY DATE: 2001-12-06
tcattaagaggctagtggacaccctgaatgcaaacatgaacccaagttctcattgccctgggatccggagggtggtacttgagcaatccatacacatgatggagtacaattctcgctatgccaattatttcaatgaataccagatgatggatgcactgtcgtttgtagaattgacaccctcaagggctgagaattacatggttttcttgggtgacgcaggtttcatggaatgtaacacacctctctctgccctagtggacagggcaaaagaactgatgggtcgtcagtggctgcaaggtatcagcagtgccaactgaaaaaaaataaaatgtttttgcatatacagtcagaagaccttgcatattgttagtgcagggcaaacaaagtgattctgcatttacagtcagaagacaacgcatgttgctagaaagaacatatatttacctttaagatgagcaaagggtattgtatctgtacatcatgaatcttgcactgtaatctgtgtgctattgatgatttatcc

SEQ ID NO: 4875 - DNA, 1518 bp, Oryza sativa
  ref <308>: DATABASE ACCESSION NUMBER: AK062102
  ref <309>: DATABASE ENTRY DATE: 2001-12-06
ttattgctttgaacatggaggatggcactcttcaccgtttccgtgctacaaatacaattctggccacaggaggttatggcagagcctacttctcagcaacctcagctcacacatgcactggagatggcaacgctatggttgcacgtgctggtttaccacttcaggaccttgagtttgtgcagttccatcctacaggcatttatggtgctggatgccttatcactgaaggttcccgtggtgaaggtggtatccttaggaacagtgaaggcgagcgtttcatggaacgatatgctcctactgcaaaagatcttgcttctcgagatgttgtttcaagatctatgacaatggaaatcagagaaggccgtggtgttgggccattgaaggaccacatctatctgcatcttaaccatctgcctccagaagttcttaaggagaggcttcctggtatttctgaaactgctgctatttttgctggtgttgatgtcaccaaggagcccattcctgtcttgcctactgtgcactataatatgggtgggatcccaacaaattaccatggagaggtagtgactatgaagggtgacaatcctgattctgttgttcctggtttgatggctgcgggagaagcagcatgtgcatctgttcatggtgcaaatcgtctgggtgcaaattcacttcttgacatagttgtttttggcagagcttgtgcaaacagggtagctgaaaccgctaagccaggtgagaagcagaaacctcttcaaaaaagtgctggagaaaagaccatagcctggttagacaagctgagaaatgcaaatggatcattgccaacttccaagatccgtctaaacatgcaacgtgttatgcaaaataatgctgctgtcttccgtacgcaagaaacactcgaggaaggttgcaaattgattaccaaggcatgggaaagttatcatgatgtgaagatcagtgaccggagtctcatatggaattcagatttgatagagaccattgagttggaaaatctcttgataaatgcatgcataaccatgcactcagcagaggctcggaaggaaagcagaggagctcatgctcgtgaagatttcacgaaaagagatgatgagcaatggatgaagcactcgctggggtactgggagaatgagaaggttcgcttggcatacaggccagtccacatgaacacattggacagtgaagttgagtcgttcccacccaaggcgcgtgtttattagttcgggattcacgcagcgccgtaattctgtgtggtgttaataattcaggggctgggcattcctagctgaaagtgcgacctgaattccatcctcctttttccctcggtattttgtgtaatttgctagaaaaataaaggacaaactcatgctaatgctagtgcctaactggtcccttctgggcaacttgtataaatgaaattttgtactgcttgccaatgatcttcgcctcatgcaagtacaatgtggtcatggactcacggtcccctgtgctgtgcttatc

SEQ ID NO: 4876 - DNA, 915 bp, Oryza sativa
  ref <308>: DATABASE ACCESSION NUMBER: AK062103
  ref <309>: DATABASE ENTRY DATE: 2001-12-06
agggtttcctctccgccgcgccgcctccctcgtacctcgtcgcggatctgtgctcgcaccaccggcggcgccatgagtaagttgcagagtgatgctctgagagaagcgatctctcaaattgctaatgactctcgtgagaagcagcgcaaatttgtggaaaccattgagctgcagattggactgaagaactatgaccctcaaaaggataagcgtttcagtggttctgttaagctgccccacatccctcggcctaagttgaaggtttgcatgcttggtgatgctcagcacgtcgaagaggcagagaaaatgggcctagactatatggatgtggaagccctcaagaaaatgaacaaaaacaagaagctagttaagaagcttgcaaagaaatatcatgctttccttgcttctgaggctatcatcaagcagattcctcgacttcttggtcctggtcttaacaaagcaggcaaattcccaactctggtgacgcatcaggaatcacttgagtccaaggttaatgagactaaggctacagtgaaattccagctgaagaaggttctctgcatgggtgttgctgttggcaactgtgctatggaggagaagcagatcttccaaaatgtgcagatgagcgtgaacttccttgtttcccttttgaagaagaattggcagaacgttaggtgcttgtacctgaagagcaccatgggaaaggtgtaccgagtgttctaagttattttctttaggcttctagatgttttggagactaagctacttgaaacttttgctactttcccagtcatcaaattttgtgcaacagctgaggattaaggaattcggatttaattgtcctgtactaagttgcctctctctttggttgaacatcattacattttatccatcgagatcattctgtgatgaccc

SEQ ID NO: 4877 - DNA, 1543 bp, Oryza sativa
  ref <308>: DATABASE ACCESSION NUMBER: AK062104
  ref <309>: DATABASE ENTRY DATE: 2001-12-06
acacaaacgcaagcgcaacgcaaacgcagcaagcgacgccaccccccacccacctcttcctcgagaagaaaagaaaactggaggaaaaaaaaaaaagggggaagaaaaagagaagaagaggcaggcagcggcggagggacggcgacgggggtcctccgatctggagtcgcgtcaaacccccccgattcctatcgtgaataccataaccatcctttgttcttttgaagtgttcagtgcatacaactgctccctgtagttcctacaagaatggctgtagatgttacatttgtaacacaagtcatcgacactctaattgcctagatcgattcagaaaaatgaatggagatagtaaggtccgtgcttcacactcaaccacttcggtgatttcaaactccaataacagaactgttgaacgaagctctcactatagtatgattcccagacatttacaaagcccaagactaggaagacatgtcaataatgctaataaccaagaacctgcaaattcaacattacccgtagaagatagcattttaatggaagaatgtcatgatgccatgcaaagttcagctgacttgaagtgccctctctgtagaggttctgtatctggctggattcctgctggagaagtgaggaagtatcttaacgagaagttgagaacatgttctcatgattcctgcaaatttgttggaacctacgagcagctgcgtgaacacgctagaaccgcccatttgcttgcaaagcctgcacatgtggatctttcgaggaaaaggacttgggatcgccttgagcgtgaacaggaggttggtgatgtcataagtgcaattaggtcacagaatcctggggcaataatagttggtgactatgttattgagactagagatgcgatgtctcctgatgaaaacactggagatgaaagcaacgatgagtggtggcgcgactcaatagaatcacctgataacaggtataactcccctaggctcttgccgaatgaagctccagaatcatcaataatctgggcagatgaaaggcatggactgccaaggtttcagcctcagaataacagagtgttgccccggttttcgttcaccaataggagcagctcacggtcagattggcaccgtatccgacggccgagtagacagagcctagcgcgtcgaggcttgttgaatcgaccctacaggaacaacagcgactatcatggctttcgtccccagctatttgatcagccgaatggtagtagccatcgttcaggtatcaacaggagccttgatgacccatcatttgtgcccagacggcagcgtttgagatacacccacaggagccatcatatccgtgattgatctaaagcagcattgctcttgctgtataaattaatttggcaaacagccaaagctatccttgtaaatagtaatgccaaactcaaatttatttttctttagttggtctacgctatatatcaatgtatattatccagcagtctagtctagatgcaaaactttgctccttaaatatcatcttcggtaccgtcactttcgaatgc

SEQ ID NO: 4878 - DNA, 1297 bp, Oryza sativa
  ref <308>: DATABASE ACCESSION NUMBER: AK062105
  ref <309>: DATABASE ENTRY DATE: 2001-12-06
tatgatgctctccatggtgttgctgggacttacgcaacacgcatctttgtggaagagcttggtgctgctgaaagctcattgttgaactgtgttccgaaggaagactttggagggggccatccagatcctaacctcacctatgcaaaagaacttgttgaccggatgggccttggaaaatcctcaaatgctgaacccccagaatttggtgctgcagctgatggtgatgctgatcgcaacatgattctgggtaaaagattcttcgtaacaccttcagattcggttgccattattgcagccaatgctgttcagtcgattccttacttttcttctggccttaagggagttgccaggagcatgcccacatcagctgcccttgatgttgtcgctaagaatttgaatctcaagttctttgaggtgcctactgggtggaaattttttgggaacttgatggatgctggaatgtgctcaatttgtggtgaagaaagctttggcactggttctgatcacattcgtgagaaagatggtatttgggctgttctagcatggttatctattcttgctttcaagaacaaggacaaccttggaggcgataagcttgttactgttgaagatattgttcgccagcactggggtacttatggtcgccattattatacacgatatgactatgagaatgttgatgctggagctgctaaagaacttatggcaaaccttgtcagcatgcagtcgtccctttctgatgttaacaaattgaccaaggagattcggtcagatgtttctgatgtggttgccgcagatgagtttgagtataaggatcctgttgatggttctgtctccaagcatcagggtgtccggtacctcttcggagatggttcccggctggtgttccgcctctctggaactggctctgttggtgctactatccgtgtctacatcgagcagtatgagaaggattcttccaagaccggcagggattcgcaggatgcccttgctcctctggttgatgttgcactgaagctgtcaaagatgcaagagtacactggccgatctgctcccaccgtcatcacataaacttttcaagagccattctagaatgcttttgaggctacccatgaactttctttatggcctcctgtttgatagcctttttacatctctccccgaataaacgtgtatgtatcaactgttctcgttttcttgccaatactgcgtttctgctgcaggtccggtaaagtgtgcggcgataatgttgtcagttctgaaactgaagagggtactttatataagcgatatatcg

SEQ ID NO: 4879 - DNA, 2099 bp, Oryza sativa
  ref <308>: DATABASE ACCESSION NUMBER: AK062106
  ref <309>: DATABASE ENTRY DATE: 2001-12-06
agacagaccaagcctctgtctaccaatggaggcctgagtcttagaggccggatttggtcgttggagagagagagagagagagagagagagcgagccgagcctgtgcggtgcggcgacgcctgctcctcttcgctcgcgcgcggcattccggtcgtgtttctgaggatccggattgcacggtgttcgggctgtttcgtcaaccatggggaagtctccggcgaagtggatcaagtctgtgctcctcgggaagaaatcagccaagtccaactctaccaaggccaaggatttggcgaaggctgcaaataacaagcctgtgctttctgaggatccccctgtgatttctgagccagctcttgttaattctcacaacgatggaaatgctgaaaattgcaagttaccaaacggagttgcagttgaagccatgggtcaaggagtggagaaccaaaacattgttggctccaaggcaccaactagtccagagaaactaagcgaagagctagctgcagtgaaggcacaagcggccttccgaggttacctggcacgtagggcattccgtgcattaaaaggtatcataagactccaggcactgatccgaggacatcttgtaaggagacaagctgcatcaacccttcgtgtgacatggttgatcgtgaaacttcaagctttagttcgtggaagaaatgttagactctccggtgcttccattcaatttgttgtgaagtccggccaacataagtttctgagtgataaaccatcggacgcttggaaagagaaggtatcttcaaacgcatatgttcgaaagcttctatcttcatcaattgggttagaagctcttcacttgcagtatgacaagagggaccccaattcattgtacaactggttggagagatggactataagccagatttggaagtcctcttcccaaccaaaaaaagttgctgatggcaaaccacaagtaaggaaggccagttatgcaatggaaactgagtcagccaaattaaagcgcaatgttcggaagagttctgctgtcactgttgatagcttccaaactaatatgacagttgaacctgaaaaaattaaacgaaattcaagaaaattctctagttccgctgctgattcagtaccagatagccagttatctgaacttgagaaggttaagaggaaccttcggaaggtaactaattccatggctgaagcatcaaagatatctagctccagggcagatgcctcaaaggtatctagctccatggctgatgcctcaaaggtgtctagctccacggctgatgcctcaaaggtacctgattccgtggctcaaatcccacctagtctcgtgaatgggatctctgatcatcaagacaaccaatgtgaggaagcacaacagaatgcatgcgtgtcatttcctcctgaaactcaggagttgcacagtggcattctgttggaggacaattcacatatgaatctgttggaacctgatttaatatctaacccggaaactcctttcacttcgattttaacctgggaaaaatttaatgattctactgctgatgctcaagaagttgaagttctgccactgcagaacattgataatgaagataatttcccagaaaatggtgtcttaggaaagaaagagaagccaaggtccaaggaagaacctctgtctaatggaaaccttaaaactagcaagaggaggtcttcgttctccaccaaatcagattacccggaaaatggagcccagaatacgccagttccacgaaggaagccaagctatatggctgcaacagaatctgcaaaggcaaagttgcgaggacagaattcaccaagactggattctgattcaccagcagacatgaatggcttcacacgccgccagtctctaccttcttctacaaacaacagagcgatcagagctgaatggagacggtggtgaggacaaccaacttccatttgaacggtgcaacgttgtggtggatgaagtgccctgctgtccgtgagattgtcgccattgttttgttcaagatgtaaaaatatgttggccctgtgttgatctattatctgttgcatatttgagttgttaatttattatccattgtttcttgtgc

SEQ ID NO: 4880 - DNA, 1532 bp, Oryza sativa
  ref <308>: DATABASE ACCESSION NUMBER: AK062107
  ref <309>: DATABASE ENTRY DATE: 2001-12-06
gaagcagagagatccccgaaatcaaacccctcctcttctcttccccttcctcctgcgttctagggttttgcctcccagcggcgactcggcgagcgagaccaccggcaagctcgtcggcgatggagcccacctcgtcggcggcgatggcgaggcagacgtgggagctggagaacaacatcccggcggcggcctccgacccggacgccctggacgcgatctaccgctacgacgaggcggcgcaggcgcgggtgcagcaggagaagccctgggcgaacgacccccaccccttccgccgcgccaagatctccgccctcgcgctcctcaagatggtcgtccacgcccgcgccggcggcactatcgaggtcatgggcctcatgcagggcaagtgcgagggcgacgccatcgtcgtcatggacgccttcgcgctccccgtcgagggcaccgagaccagggtcaacgcccaggccgacgcctacgagtatatggtcgagtactccaccatcaacaagcaggctggaaggttggagaatgtggttggctggtatcactcacaccctggttatggatgctggctatcaggcattgatgtgtctactcagatgcttaatcagcaatttcaagagccattcttggctgttgtgatagaccctacaaggactgtttctgctggtaaagtggaaattggagcttttaggacatatccaaaagattacaagccaccagatgaacctgtgtcagagtatcagacgataccactcaacaagatagaagattttggtgtccactgcaaacagtactatgctctggatataacttatttcaaatcatccctggattctcatctccttgatctactttggaataagtactgggtcaatacgttatcttcatcacctctcctgggcaacagggattatgttgctggccagatatttgatttagctgataaactagagcaagctgagggtcaactggcacacagtcgatatggcatgcttatgccatcgcaacgaaagaaagagcaagaggagtctccactggctaaggtaactcgggatagctcaaaaattactgctgaacaggtccatggtctcatgtcacaggtcattaaggatatcctcttcaactctgtgcacccgtcaaacaaggcaagcacaagcgcaccagattcatccgggcctgagcctatggttgaagcatgagtgttctacagaattccttcattagttagccttttgttgatgctggattcacatacactgggtgcctagttgtttcatgactaaaagctgtgtccagcataactacccgattcaaaatgcgttagctgcgttttatcgtcaaatcataactgatatgtaattatgagttgccttctgaatctttcggctgccattgtgaaggtgcgtggtctacgttaagataaccaattaccttggcccaacttaccatgttctctcaacaatgaatggtcccaacgtcgctaggcacagtgtatgttgatttggatgatctttctggtatttatcctc

SEQ ID NO: 4881 - DNA, 1434 bp, Oryza sativa
  ref <308>: DATABASE ACCESSION NUMBER: AK062108
  ref <309>: DATABASE ENTRY DATE: 2001-12-06
tacagcacttcttccagagcatcattggcctcgtggtttccgctgcaatggacatcttatgcttaattctgagaagatgtccaagtccacagggaatttccgaactcttcgacaggccattgaagaattctcttctgatgccactagatttgcccttgctgatgccggtgatggtatggatgatgcaaactttgtctttgaaacagcaaatgctgctattttgaggcttacaaaagaaattgcatggatggaagaggttatagccgctgaatcttctctgagagctgggcctccctctacctatgctgaccatgtgtttgccaacgagataaacattgcggtgatagaaactgagaagagctacaatgccttcatgttcagagatgcccttaagttggggttctatgacctacagttggctagagatgagtacagactctcttgtggagcagcaggcatgaatcgtgaattattatggcggttcatggaggtgcagactaggctcattacccccatttgtccacactatgctgagcatgtgtggcgaaacatcctgaggaaggaaggatttgcaataaaggcaggctggccaattgctggaaccccagatcccacactaagaattgctaacaaatatttacaggactccatagttaaattcaggaagctgctccagaagcaagaatctggttccaagaaacccaagaagggaactgcacctcctccatctgagcaaaacaagctgactgttggtctggtctacgtcaatgagaactattatggatggaaagagcaatgtttgagggttctccagtctaaatttgatagccaagcacgtttgtttgctcctgatgaggagattaatgaagcattgaagaactgctccatcggacaggaaactaacttcaaacaagtccagaagctctgcatgcctttcatcaagtcgaaaaaagatgaggcgaggagtgttgggccccacgctttgaatttgaagcttccttttggtgaaatgagtgttctcgaggagaacttggagctgatcaagaggcaggtaggccttgaacatgcagaggtcctgtctgcttctgatgaggctgctcgtgctaaagctggcgtgcatgcttctatgctggacaagaccccgccttctcctggtgagccagtagcaatcttcatgagcaaactagacctcgaagcgcggtgctgagcttaactgtcacaatgaaattgcaaaatgaatagttaggaggagttcactgagatttccttattttcatgcacaagttaaagttatgttagcttgcagcttctacagtatcatagtattttgtggaaaagaacagtttggttattccctgtaacagtgatggtataagaaacccattttgaagaataattgagtgtattgaatgagttttatttgcatcaggtttg

SEQ ID NO: 4882 - DNA, 901 bp, Oryza sativa
  ref <308>: DATABASE ACCESSION NUMBER: AK104887
  ref <309>: DATABASE ENTRY DATE: 2002-08-28
ggtgctgacattgtatattttgatgtcagattgcatgaaactgctttactagttgctgaagaggcaagccaaagaaaacttcctattttgattgatgccgaacggaagagggatggattggacgagcttctcaatttcgcatcttatgttgtatgctctgcaaaatttcctcaggcttggacaggagcctcatcaacaccggttgctttggtgtccatgcttttaagattgcctaatatcaagtttattattgtaacccttggagaaaagggatgcttgatgcttgaaagaagcacaacagatgcttctgaggcagaggaaatagatgtagagagtcttctggaatcactagagaagaaagaagttttgagttcaagcatgccaaaatgcatcgcctccaagtcaaatttgagaataagtgcagatggaataggatccatcagtggcagattacttttaggcactgccgaaattataccctctgaagagctcatagatacaactggtgcgggtgatgcatttatcggagcagttctctacggtttatgctctggcatgccgcctgagaagatgctgccttttgcagctcaagtggctgcttgcgggtgcaggggtttaggggctcggactgctcttccccatcgcacagatccccgcctggttgcctattgactcgaggaactgtagtgtatcaatctgtgttggatttgattgggatggattcattggattgtgggcgcctttgaaaaagaagagattaagcatttgaaatatggagtaataagaaagccgcctgcagttgaaatcggttcctaagttgtatgtaaacattgattgttgttgcatactgtcaatataccttggcttgtgttaataagagagatttgtgtgctgttgttgc

SEQ ID NO: 4883 - DNA, 1476 bp, Oryza sativa
  ref <308>: DATABASE ACCESSION NUMBER: AK062109
  ref <309>: DATABASE ENTRY DATE: 2001-12-06
aaagaatcaatgtatcatggtgccccagcatttggattgaattgtcaataccataaaaggagatgatgccaatgtgtgtgtccccttccattggcaccaggtgttagctcctcagctagttgcttgtcccacaccacatctttctttctcctcccttattaagctactagatgctgctattgctacatctccacatgcaccatcttatctcaactccttagaattcccactcctcttcttcttgttcttcttgcttccctccaacttcttcttcttgttgttcttgctgttcttgtggttcttggcctgccatcggcggcgagcatggccaggaaatgctccagctgcgggaacaatggccacaactccaggacttgcaccggccaaaggagcctgcaggagagtggcggcggttatggcggcggtggcgccggtggcgtgaggttgttcggggtgcagttgcacgtcggcggtgcgcctctgaagaagtgcttcagcatggagtgcctatcgtcgccgtcgccgtcgccgtcgccggcgtactacgccgcggtcgccgccgccgcctccaactcgtcgccgaccgtgtcgtcgtcgtcgtcgctggtgtcggtggaggaggccggcgagaagatggccaacgggtacctctccgatggcctcatggcgagagctcaggagaggaagaagggtgttccatggactgaagaggagcacaggaaattcctggtagggctcgagaagctcgggaaaggcgactggcgcggcatttcccggcacttcgtcacgacaagaacaccgacgcaggtggccagccatgcccagaagtatttcctcaggcagagcagcctcacgcagaagaagagaagatccagcctctttgacgtgattgaggatgcagaaaaggctccgagtgtgaatgaacgtctgaaactgagacacgagacagcctctgtgcctgctgaaatgggattccctgcactgtcactgggtatcagcagcatggcacagccagaagccatgctgctgcctcctccatccttaaccctgacgccaagctgttcatcaccagcagtgagcagcagcagcagcgaacaaccaagaacaatccatccttctctgatggtggcaaagcctcaggtgcaactgcaactccagccacctgatctggagctcaagatctcgactgtccgtcagaacgatcagcccagttcgtcgccgaggacgccttttttggggacaatcagggtcacttgaacttaaagagagagagaagaagaagaaaaggaattatcttagagattactgaattatttgtgcctaaaaggagaagcttttgctagtggtgtatgtgtgtgtccccttggcaaaaacacaatgccatcttccaccatgtatcatttttataaggctattaggaagtgaagcttttactggactaatctagtcttgcaaataataaaaggaacggctgct

SEQ ID NO: 4884 - DNA, 1884 bp, Oryza sativa
  ref <308>: DATABASE ACCESSION NUMBER: AK062110
  ref <309>: DATABASE ENTRY DATE: 2001-12-06
gcacctggaaggtacgggatagagggtcttggtttggcactcacgaagatgtccctcgctacagaaagaacgtgatatcaccaagcatgtttccttcagggaagggcaccatggatagccatgtggctattggcagtgttgagatcaacacagatgtaattgatgctgatatgaaagattcaacaaacatggtagagggagaacaagaaacgaaaacagcatctgatgatgtcaataatggtggtgatcccaatactgaagagacgagcaaacttgagtctaatgaagttccaaacgactctgataaaaagtcaaattctacgtctatccgcacagaacattcaaatttccctctgcatcgctgcatgagaattgttccgcatgatcaaaacagtggggcattttttattgcagtccttcagaaaatctcccctattaatgggaaccaagaggcagaacttataaaaggcgagcacaatatttcaaaggatagggctgagaaacttgagaaaggtctcggatcagataaggtgccacataaagaaaataccgtgcagcagcaaggagttgatgatggtaatgttatggatgaacagcaaaatggagatgtggataatgaaacatcaaatggtaaaagctcagaggaagctaaagtaattgttaatgaggcagaaaatgatcaagcaggaccaagagataggaggaggaagccacagaaccaaggaaggtggagaggggttgatccagtgatatttttcaaagatgaagctacaataagaagtatagtatctttctatggtatcaaggatacatttccgcttgagggtcaccttgtgactaggaatcctgatgctggccatgttaaaagaatatactacgtgtcaaaatcagtgcaagaagttttggagctcaatgtaaaagttggtgagcggcttaagattacctcacttggcctaaagatatttgaaagacagtcatcaaaggatggctcaccatgcacatttaggttgtcttcagagggtttaccactgctgcttccatacatcaccaaacagattctctacgcttctgcaattgacttccagcaccttttacaatacagaactattaaatttcctgattttgtggatgcaaaattcggtgaagaagcttcagctttgttgcctggttgctgtgttgtagtactttgggaagggcatcagaacatagattccatcgccatggatccttctgcaatcgccattgtttgctggaaagggaagaccaatttgtgcgtcatggtttctcccctggatgggaaggagctgcttgagaggatttgtttacgttatgggctcaaaatccccaaagcggatgatgtaaaacccagcatgaagattgatggatcagacgagcagcctgatctcagcactgaggcagttgatccagaagctgtgcccgaaagcaaagcatctgacatggagattgcagatgctaaagaggtggagtaatcctgctgaatgctgatgctatccaaggccacatattatagctggatacaacatcgccccatcatttgcctaccggtattagttgagcgatgagccgccatttttcattgattctggcatttacgccgttttcctgtttgatttatcatattctgtttctgaagaatgggtgaatgaactcgcccattagtgaaagggcaccacgttgctctaaagcccatttgtccatgtcatctggtaatcgtgcacgtattgccccctccatacttccggctggctcatccacctgtaacctatcagtatcagcttatttttcttcgaagagaatgtattacagggagtcttaacctgaactcttgaacctgataaattttgatatgacaatatttcagac

SEQ ID NO: 4885 - DNA, 499 bp, Oryza sativa
  ref <308>: DATABASE ACCESSION NUMBER: AK062111
  ref <309>: DATABASE ENTRY DATE: 2001-12-06
acgcacctatgggggtggaagcaatttccaacaaacagaaggtgctaaggaacagctgattcctattgtcaagaggaacctcaaactaatgtgtgctcagtccccattgggtcaatctgatttcaagaatgttgcacggagagcaacacacactatcttagcactgtctgggattgcacacaacgaggattttgttgtcagtacgcctcatcctctccctagccattgtaaccatgcctgtgatggtcaggaaccagcatttctcatgagaacctgctgctcatcatgcttcaactcctttgttggtggtgtcgtcagttacattgcagaaatgtttacctgaagatgctgccatcatctattgacttgacaatttttctctattgttgtcattctttcaattataaacagatcaaaagattatacaaccacagacatgttactcaatgtatggatagtttaaaatataatgcatttttaatgacgcattctgagctcc

SEQ ID NO: 4886 - DNA, 1436 bp, Oryza sativa
  ref <308>: DATABASE ACCESSION NUMBER: AK062112
  ref <309>: DATABASE ENTRY DATE: 2001-12-06
agcgagccacaggttgaagagggcccaccagttcctgcaatgttggatgacgaggcggactttgttgaagcctcgcctatcgtacattctgttaatgattctggcattgttgtgaggaagcacctgataattattacaacaacctctgttcgaccacaccaggcatattacttaaatcgtttggctcatgtattaaaagatgtcccgcctcctcttctgtggatagtggcagagtggccatatcagtcccgcgaaactgcagaaatactgaggtcttctgggatcatgtacagacatcttatctgcaatcggaatactacaaatataaggaagattgttgtctgccaaaagaataatgcaatttttcacattaagaagcaccgtctagatggtatagtgcatttcgctgatgaagagagagcatactcagctgacctgtttgaagaaatgcggaaaataaggcgttttggtacatggccagtagcaatacatgttgggacaaagtacagagtggttctagaaggccccgtttgtaagggtaatcaagtcactggatggcatacaaatcagagaaggggtgtatcacgtcgatttccaattggtttctctggatttgcttttaacagcactatactttgggatcctcagagatggaacagccccactttagagtctattatagtccattcaggtggcagaggtggcttgcagttaaacacgccctttcaagatctggtaagctcggttaacttattacacaattattgaggtgaggcaaatgcaaccactgtggtaccagttagatcaagtacataagacaaagtgctgtgaagaactagtaacacatggcaattccttgagtcaagatttatcgagaagcttgttgaggacgagagtcaaatggaaggccttggggataattgcactcgtgttatggtctggaatttcgaactggaacctcctcaagtcaactacccaattggctggctgctgcagaggaatctggatgctgttgtgccaataacataactgtcctgctgctcctctttttgtttgccatcctagtgtgaatgatgccttcctgaacttggtagcgtccaggatcatgagaagctgctctgccaagatctggtccaaataatgtcatactagtaacagttgaaaagtgagaagcctgacaaaagaaagtttttctctctgttgcattcttttctatatgttcattttttccccatattcatccagctagatatagccatgtacatttcattttttttctcgtttctgtccgttatatacatacatatcacctcacagatgtgaatgttcccctccattggaactgttgaagagcaaagcagatactctctttgatatacatgaacaaaggttaaatcaaaaccatagattgtacacacaatggtgtgcttggtcct

SEQ ID NO: 4887 - DNA, 997 bp, Oryza sativa
  ref <308>: DATABASE ACCESSION NUMBER: AK104888
  ref <309>: DATABASE ENTRY DATE: 2002-08-28
aacaagcaagaagaaatttctctccttgtagaaacaagcctagagagtactatggagcagaggaaatttttgttgtgcctaattcttggcttacttgcgacttcaggacctgccaagaccgtcaatgctgactcgccctttgatttttattatctcatcctcatgtggcctggagcatactgcactgacagcgagtatggttgttgcgtgcccaagtatggttacccgtcagaagatttcttcgtcaagagcttcatgacctttgactcgtcagagaacacagctgttgtcaggtgcaactccgacaatcctttcgacattaacaagctagactcaatcgagaacaacctgaaccactactggagcaacatcaagtgtcctcgcaccgacggcgtgaactcatggaagagcgagtggaacagctatggcgtctgctccggcctcaaggagttggactacttcaaggccggtctccagctcagaaagaacgcagatgttctctctgctctcgctgaacaaggcatcaagccggactaccaactgtacaacacggcgttcatcaagtgggcagtgaaccagaagctgggtgtgacaccaggagtgcagtgcagggacgggccatttgggaagaagcagttgtacgagatctacctctgcgtcgacaaggacgccaagagcttcatcgactgccctgtcctgcccaacctcagctgccctgccgaggtgctcttccatccgttccacacctggatgctcaacaccacatcggctgccaacatcgtgatgcccactgaaactgtgctggcctaattaagagcctttaatttgctagctaagctgccatgatctacttgatcaacctgtcctaagagcatgtagcatatgcttagcttgttgctttgggtgaataatcgcgcaacttttatacattgttgtgccctctgaataatatgtgcagtactatatatgaagtattgtaccgcatatgttatgtatt

SEQ ID NO: 4888 - DNA, 1852 bp, Oryza sativa
  ref <308>: DATABASE ACCESSION NUMBER: AK062113
  ref <309>: DATABASE ENTRY DATE: 2001-12-06
atccactccagagctccccgcggcacttggcaccaccaccaccaccaccggcatccggcggcgcgggcggtgatggcgaccatcaccacgcagctccggtcggccctcctctcgccggcggcctcgccgagccgccgtgccaggcgcgccccgtcgtccgtgcggtgcgactcctcggcagcgtcgtccctgtccgcctccgcgtcgctcgacgacgacttcgacaagaagcagttccgccacaacctcacccgcagcgacaactacaaccgcaagggcttcggccacaagaaggagacgctcgagctcatgagccaggagtacaccagcgacgtgatcaagacgctcaaggagaacgggaaccagcacacgtggggccccgtgacggtgaagctggcggaggcgtacggcttctgctggggcgtcgagcgcgccgtgcagatcgcctacgaggcgcgcaagcagttccccgacgatcgcatctggctcaccaacgagatcatccacaaccccaccgtcaacaagcgattggaggacatgggcgtccaaaacattcctgttgatgcaggtattaaggatttcgatgttgtcgagcaaggggatgttgtcgtattgcctgcatttggagcggccgtggaggagatgtacacgctgaatgagaagaaggtgcagatagtcgatacaacgtgcccttgggtttcaaaggtgtggaacatggttgaaaagcacaagaagggtgactacacttctattattcatggaaaatactcccatgaagaaactgttgccactgcttcctttgcagggacatacatcattgttaagaacatagcagaggctagctatgtatgtgattatatacttggtggccaacttgatggttctagctccacaaaagaggagttccttgagaaattcaaaaatgctgtttctccaggatttgatcctgatgttgacttagtgaaagttggcattgccaatcaaacaacaatgcttaaaggagaaactgaagaaattgggaagcttgttgagaagacaatgatgcgtaggtttggagttgagaatgtcaatgaccacttcattgccttcaacactatctgtgatgccacacaggaaagacaagatgcaatgtaccagctagtgaaggagaaagttgatcttattctggttgttggaggatggaactccagtaacacctctcatttgcaagaaattggagaactcagtggaattccgtcttactggattgacagtgaacaaaggattggacctggaaacaagatcagctacaagttaaatcatggcgagcttgtcgagaaagagaactggttaccagaaggccctatcacaaggagttacttctggcgcctcaactccggacaaggttgttgaggatgcgttacagaaggtgtttgagatcaagcgccaggaagttttgcaggccgcgtaaattttcatcaggtttggtcacggtagctgatggcttggtgaaggttaatagaaccagtgcacaagcgatgtctgtacagtagtgaagaatgctacgcttttaggagcgcatactacggcatgtgctgagatttacgtagtatgttgggggcaaatgttgtaatcaattatcacacgaagaacagttgctgtatcggctgtcataactttctgaccccctcaaataacgttgcagaagtatctttcttcggtataaatatcacccaatttgttagctagtactatttgatagagctcaaatgcaggactccctgtatatatatggcaagtacaagaaatgcagggttccctatgtataacattaggttcagaaccaatcttgatatgccacatatgttgttat

SEQ ID NO: 4889 - DNA, 1199 bp, Oryza sativa
  ref <308>: DATABASE ACCESSION NUMBER: AK062114
  ref <309>: DATABASE ENTRY DATE: 2001-12-06
gcatcacaatcgataggtagctaactactccatctagctaagacccgtagtgtatagtagtcaagatcaatggcgtcccgacgccttgccccgctgctggtcctactgctctcgtccagcctcgccgccggccagagcaccggcgacaccgtcgtgttctggggccggaacacggaccagctcgaggggtccctccgtgaggcgtgcgacaccggcctctacaccaccgtcatcatctccttcctcagcgccttcggctacatcccaggcacctacaagctggacatctccggccacaccgtctccgccgtcggccccgacatcaagcactgccagtccaggggcatcctcgtcctcctcgccatcggcggccagggcggcgagtactccctgccgacctcccaggcggccgtcgacctcgaggactacctctggaacgccttcctcggcggcggccgccccggcgtcgcccgccccttcggcgacgccgtcgtcgacggcatcgacttcttcatcgaccagggcgccacggagcactacgacgagctggcgcggcggctgtacgcgcacaacaaggactacaaggggaggctcggggtgatgctgacggcgacggcgaggtgcgtgttcccggaccagcggctgcaggcggcgctgtccacggggctcttctcgcggatccacgtcaaggtgttcggcgacgggcggtgcgcgtcgaggagggaggagctggagaagtggatggcggcgtacccgcagagccgcgtcctcgtcggcgtcgtcgcgtcgccggaggctgacagggacggctacgtgtcgcacaaggatctctactacgacgtgctgcagttcatcaacaagctgcccaactatgggggcatcatggtctggaacaggtactgggacaagaagaccggatggacggctggtaatgagcctggtctcctggatcaggttctgtgatggacggctggtaattaaccagaccttgatccattttcactttgatcactgatcacttcactggattcatgcacgagctactactagtacgtgcacaaataaagtaagtaatgtcatgtgacgtgcatgcacaaataaagatggaaatgatatgataaaagattggggtatgtgtgtgtgtgtgggttggataatgtaatgtaatgcacaaataaagtgaggtgatcaggacgggc

SEQ ID NO: 4890 - DNA, 1725 bp, Oryza sativa
  ref <308>: DATABASE ACCESSION NUMBER: AK062115
  ref <309>: DATABASE ENTRY DATE: 2001-12-06
atctgtccctcaatcccgcgacgccgccgccgttctgctccggtgctagggcttgggagttgagctccaccctgccccctccattctccagctcgcctcaggcatcgctgccgggcggctgttagctgaatcgatcgcaaggaaagacaaaggaggagagttcagtcgacttgggatcgagtagaatcgccggcttctgctgctattgcgctgaccattatatccaatcccaatccaatcgacgatgggcctctctcgtcggtttctgaacctgatcgtggacaaccgcatccctggagccaaatcgctgcgctgcatcgacctcaccctcgcgcgctacaagttgttcaacactacaacacctgctgcactgatactgaatgggaaaatatctgaatcagaacgcccacaagactccaccccatgggcgggtgccgacaataacgagaaggaagcggcagcaacgttaaagataggaacgattcagcttcctacaccaatcatgaactttcgatcttcagctgagtacttgagttggtatatcaactgtattccgcttgcaggtcgcaaggtgctctgcacagaccaatctggccgcgcctgcctcttcgatgccgatacgtgcaaagtggataccttgccctctctccacaagcccaagtgtttgccctactccatcttcatccccagtgccgatgacaaggacgaccacgacgacaatagtaatggaggtggcagcgtctacatcatggatacttgtcttaatcacataccaagagacaacatacagctgagcagtcagtttgaggcttttgtctaccgtaggtccaccttgacctccttcaccaagtcctggcagtgccagcgcctcccgccaccgccattcgtctgtgaccccaagtacaagcatgccagcccccacaagatcatttcatacgcagtggtcgacggcggctcccgcatctgcatatcggtggatggtgctggcacctactgcttggacacggtgaaacacacttggatccaaattggggagtggacactacccttcatcggcaaggttgagtatgtaccggagctgaagctgtggtttggcatttgtgccaatgactggaagcaatttggtgccgctgacctctccaccattctctccaccatggactctcagccacagctagtaggatcttggaaggagctggaggcaccccaagagtggacagagatgcagcatcctcatcttgtcaacctggggtctggcagattctgtgtcgcaaggttctaccacagttggacacccacggcgggcttatttggttctgatttaggtgagcttttttttactgtgttgaccggtacagatgtggtgcaatgtgttgtccatgacggcaatgggactggcaatgcctcttgcaatgacagttgcaataacccttatggcagcaacgggaaagtggaactccgaatgatcaagcacaactcaaaatgccacatgtcttatggcaccgatggtaacattaaggtattgttctgaataataacttactttggtgtattatcttacccatcattatcgtctgaataattttggcactttggtatgtaagagacaaatctttgagtactgtcatgaaatttaactctccctgtgttatttgcttcgcttagtatgatgatataaatttaacttcctgtgttatgcgctttgcatagcatggtgatactgtt

SEQ ID NO: 4891 - DNA, 1164 bp, Oryza sativa
  ref <308>: DATABASE ACCESSION NUMBER: AK062116
  ref <309>: DATABASE ENTRY DATE: 2001-12-06
aatcgtctctctcggccgatgaggtaagccgcctcgccgcggcgatcgatcccatttcagattgcgcctttaagaaggaggaggatggacagttgctaacctcacctcacctcgctttcgatttctccggtcttctcttctcttccgttccatccactttcttcttctgctggagcgcgcaaaggagcttgctttgcttccgccgtcgccgtggttgccgcgccaagattgtgtgactgcatattttccttggtcaactttgtttcataaccggatagatgggttctgaaggaccttctggtgttaccgttcacgttactggattcaagaagttccatggagtcgctgagaatccgacggagaagattgtgcgcaatcttgagtcatttatggaaaagagagggttgcctaaaggtttaacacttggaagttgcactgttcttgagactgctgggcagggtgggcttggtccgttgtatgaagtgtttgaatcagccatcgtagacaaagagtatgggttgaatgatcaggggcaagtgattctgctccattttggagtcaacagtggcacaacaaggtttgcccttgagaatcaagctattaatgaagctaccttccgttgccctgatgagctgggatggaaaccacagagggcccctattgtgtcatctgatggaagcatctcaaatttaagaaagaccactgtgcctgtgaatgaagtgaacaagtccctacaacagatgggcttcgatgtggcgccttcggatgacgctggtcgattcgtatgcaactatgtctattaccaatctcttaggttcgcagaacagcgcggtatcaagtctttgttcgtccatttccccctcttcacgacgattagtgaggaagttcagatgaacttcgtcgcaaccctcctcgaagttcttgcttcccagaactatgcacagtaacctgatggggggcagggtctacttcctaaggtttcttcttccaattttattaggaagttgccaagtgacaaaacctctctagtgctctgtttgctgtccgactgtaggccgtcgtcgccttttgctgtgaagatgaagtggagtgaataagattgtaaaatcattcatgacattgcctgtgctccaaattgtgtataaaaaaaggctggttagagct

SEQ ID NO: 4892 - DNA, 729 bp, Oryza sativa
  ref <308>: DATABASE ACCESSION NUMBER: AK062117
  ref <309>: DATABASE ENTRY DATE: 2001-12-06
aaactgtactttccagtagtatcgctgctgttttttttgcagctttcgtagttgccggaactatgtggtatgggtcagcaactaccccaattgaattgtttgggcctactcgttatcagtgggatcagggatactttcagcaagaaatatatcgagggaatcgcctcctcctcctcctcgaccccggaatccaggaagatggcgctcgccaaggccaaggagaccgtcgcctccgctcccgtcgtcgtctacagcaagtcttactgtcctttttgcgtccgtgtgaagaagttgttcgagcagcttggagcaactttcaaggccattgagttggatggggagagtgatggatctgagctgcagtcggcacttgctgaatggactggacaaaggactgttccaaatgtcttcatcaatgggaagcatattggtggctgtgatgatactttggcattgaacaatgaagggaagctggtgcctctgctgaccgaggctggagcaattgccagttctgcaaagacgacaatcaccgcatagttcttcgtgggacactgggactagccttcgttgacctctttatactgcatccattctattagataataaaggtggatgtttgtttggcaagaccattacttgttgccgtctagtatcgtgtgatagctatcctgtgcccgtgtgaaactccttggacatcaataatatcgtctttgtgatagcagttcgctg

SEQ ID NO: 4893 - DNA, 1908 bp, Oryza sativa
  ref <308>: DATABASE ACCESSION NUMBER: AK062118
  ref <309>: DATABASE ENTRY DATE: 2001-12-06
tcggcgggcagggtagagtgagatggccgccgccaccgccgcggtttttgcgctgttgatggcgtcggcgctcgctggggctgcggccggcggcgacatcgttcaccacgacgacgaggcccccaagattccaggatgctccaacgacttcatcctggtcaaagtgcaaagttgggtcaacggcaaagaggatgatgagtatgttggtgttggtgctcggtttggcccgcaaatagtgtccaaggagaaacatgcaaatcgaactagacttatgttggcagatcctattgattgttgcacttctccaaaagaaaaggtttctggagatattcttctagtccaaagagggaaatgcaagttcacgaaaaaagcaaagtttgcagaagctgctggtgcttctggtataataatcataaaccatgtccatgagctgtacaagatggtctgtgaaaagaatgaaacagatcttgatataaatatacctgcagttcttcttccaagagatgctggcttcgctttacatacggttcttaccagtggtaactcagtttctgtgcagcaatactctccagatcgtcctgtagttgatactgcagaggtattcctttggcttatggctgttggtactgtcctttgtgcatcatactggtccgcatggagtgctagagaagcactttgtgaacaagagaagctcctcaaggacggacgtgaagttttactaaatgttgagaatggaagttctagtggcatgatagatatcaatgtggcatcagccataatgtttgtagtggtcgcgtcatgcttcttaataatgctttacaagatgatgtcttcctggtttgtggagctactggtggtaattttttgcgtcggtggtgttgagggcctgcaaacatgcctagtggctctattatcaaggtggtttagagctgcttcagaatccttttttaaagtgccattctttggagctgtttcataccttactcttgcagtttccccattttgcattgtatttgctgttctttgggctgttcaccgtcatttcacctatgcctggattggacaagatatccttggtattgcactgataattactgttatccaaattgttagagtacctaacctcaaggtgggttcagttctcctcagctgtgccttcttttatgacatcttctgggtgtttgtctccaagagatggtttcatgagagcgtgatgatcgtggtagctcgtggtgacaagactgatgaagacggcgtccccatgttactaaaaattccacgaatgtttgatccatggggaggatacagcatcattggattcggtgacatccttctacctgggctgttagttgcatttgcattaagatatgattgggctgccaagaaaagcttgcaaactggttactttttgtggtcaatggtggcctatggttctggactccttattacatatgtcgccttgaaccttatggacggacatggccaacctgcacttctctacatagtgcccttcacacttggtgcgctgatatcacttgggtggaaaagaggagaactgtggaacctatggtccaaaggggagccagagagagtatgccctcatcacatgcatatgcagcctcagccgaagacgcccccactagtccagtagatccgtcatcttgttaattagtactgtagctatccgtcaccagctgcatccgtttgcctaagcgagcttaatggtgtaaaaaatcgtctcctgcatgttcttaattagtaagtattaatctcaatgagttggtcgtttgctgcttctctatagtgaaagatgtttttggttcgataaactagtcatgagtagaattctctgtaatttacaactacagaagagaagggaactatatatgcaagcttatggttgatagg

SEQ ID NO: 4894 - DNA, 1328 bp, Oryza sativa
  ref <308>: DATABASE ACCESSION NUMBER: AK062119
  ref <309>: DATABASE ENTRY DATE: 2001-12-06
aattaggaccagatgtcaagtgccgttgcacagatcctgggttgttgctgccacgtgccaatcttacattttggcgggatggtagtattgtccgtgagaggaacgctatgctacctaccatttcatcaaaggattggcttgacatagactttggaatttctgaaggcgtagattttattgcagtttcgtttgtcaaatctgcagaagtaattaaccatctgaaaagctatatagctgcaaggagccgtggcagcgatatagcagtcattgccaagatcgagagcattgactctttgaggaacttggaggagataatccgtgcttcagatggtgccatggtagcccgaggggatatgggtgcacaaattcccttggagcaagtcccctcagtacaacaaaagatagttaaactgtgcaggcagctcaacaagccagtcattgttgcgtcgcagcttcttgaatcgatgattgagtatcctacgcccaccagggccgaggttgctgatgtttctgaagcagttcgtcagcgtgcagatgcgcttatgctttcaggtgagtcagcaatggggagatatccagagaaagctcttagtgtcctccggagtgttagcctaaggattgagaagtggtggagagaggagaagcgccatgaggaactggaacttaaagatgtttcatcttccttctctgacaaaatatcagaagaaatctgcatttcggccgctaaaatggccaacaaattggaggtagatgccgttttcgtctacacaaacactggccacatggcctcactgctctcgcggtgccgtcctgactgcccgatcttcgccttcacgacctcgacatctgtgaggagacgattgaacctccaatggggcctcatccccttccgcctcagcttctcggacgacatggagagcaacctgaaccgtaccttctcgctgctcaaggccaggggcatgatccagtccggcgaccttgtcatcgcgctctccgacatgctgcagtccatccaggtcatgaacgtaccttgagaatcatcatgctcccctctcgtgtttgtttgttctgcccaaaacggaacacggctttagttgacatcatcttaagggcggttttctggtttgaaatttattcgtttgttctccattgtgttagacgacagaaccagagaatgttacaacaataatgctgcaacttccagcgcgttgtaaactctatgctatttagcctgatgtataaggccatgaactgttttgtcgcttactatgataggctatgtatttaccaataaacccttctatttaagctatgtaagaatttccctc

SEQ ID NO: 4895 - DNA, 1506 bp, Oryza sativa
  ref <308>: DATABASE ACCESSION NUMBER: AK062120
  ref <309>: DATABASE ENTRY DATE: 2001-12-06
attcgcctgcattttccatgagccagtcttccccgcgtttgctctcatcgtaggccgcgaccgacggacgcggcgagaggatagagaccaggggcggccgggcggacggacagagcaaccagcgccggctgccggcttagctagctcgcggcggagcatgccgagatccagggggtccgagctgccgcagcgagcgtcgccgcgggcgccgctgcacctcaagacgacggcctgctcggatgcgaatggcgcgcaccaccgtacagtcgtcgaccggagcagccccaagctcgccgaccgccactcgccgcgcagcccgctgcatgagaagaagcgcgcggggacgcgggtggctgagctggagacgaagctgggcaaggtgcaggacgagctcaagaagctgcgggagcagctcgccaccgccgaggccgccaagaaggacgcgcaggtcgcgctcgaggaggctaagaagcgcgttggcaccaaggggagccccgcttccgccgccgcggcgtctccgcgctccccatctccggttgcggtcgaaacccccaagaagactgagcagcagctgaaggtgacggagccgccggccgaggaggagagcagcataaactcccccgcgacggatgtgttcgaggtcgtccggaccgaatcgggggataaggagaaccagagcgcggtcggcgccgaggacggcgaggaggtgagctgtggcataaaggccgctttggctgagaaggaactggaggaggaagagacaaagaagatgatcgaagaggagagcattgacgcaacggccattgactccggcgagaaggagaacccggaggtcgcggaactaaaggccaagctgatggcgaaggacatggaggtcgccatactcacggccgacaatgccgagctcaagaagcaggttggtgaagccgcggaggcggccaagaaagctgaggaggaggcggcggccaaggcgtccttggtcgagcaggacctgaaggagagagcggcgcgggaggcccgcatgggcgagcagctgagggcgtcggaagccgctcgggagacgctggaggccgagatgcggcgcctgcgcgtgcagaccgagcaatggcgaaaggccgcggaggcggccgccgcggtgattggcggggatgcccacttcgtcggccacaatggcaacggctggggctcccccgcgacgatgccggacgactgcgacgacgaggggttcggtggcaagaggaagggagccggtatccggatgcttggcgacctgtggaagaagaaggggagcaagtgaaggtgacatggcatggccaaggcttgtatccgatcactgttcacggtggtgagctgcctcagctcgctggctccagcacccataaacaactagcaccgtcgtttactgcattttggttcggatttcacttatgtttgtatgatcatgagatgatgttcgtgagattaaactatgtttgaagtgccggacagccggagcattacattgac

SEQ ID NO: 4896 - DNA, 1440 bp, Oryza sativa
  ref <308>: DATABASE ACCESSION NUMBER: AK104889
  ref <309>: DATABASE ENTRY DATE: 2002-08-28
gcaagagatggagtgttgcttcgtagtgcccagcgagaagacgccgaagcatgtcctctggctttctcccctcgacatcgtcttggccaacagaggagccctcaccccgctcgtgcacttctaccgccgccgccatgatgccgccggcggcggcggcggcttcttcgacgtgggcaggctcaaggaggctctggccaaggcgctggtggccttctaccccctcgccggccgcttccgcgtcggcggcgacggccggcccgagattgactgcaacgccgatggcgtcttctttgcggtggctcggtcggagctcgccgtcgatgacatcttggctgatctcaagccgtcgccggagttgaagaggctgttcatcccccgtactgagccgccgtctgccgtgctcgccgtacaggtgaccttcttgagatggggcggtatagtgttagggacggcgatgcaccatgccgccgtcgacggccatagcatgttccacttcttgcaaacatgggctgctttctgccgggacggcgacgccgccgtggtggagctgccctgccacgaccgcgccctcctccgcgcgcgcccccggctcgccatccaccctgacgcctcctccgtgttctgccccaagctaaacctccgtccgccgtcggcgtcgggctcgggcctcatctccgccaagatcttctccatctccaacgaccagatcgccaccctcaagcggatctgcggcggcggcgcgagcaccttcagcgccgtgaccgcccttgtgtggcagtgcgcctgcgtcgcacgccggctgccgctgtgctcccagacgctcgtccgcttccccgtgaacatccgccggcgcatgaggccacccctcccggaccgctacttcggcaacgcgctcgtcgaggtgttcgccgccgccgcggtggaggacatcgtatcggggacgctggccgccatcgccgcccgaattaagggcgtgattggccgcctaaacgacgacgagatgctgcggtcggcgatcgactacaacgagatggcggggatgcccgatcgtccggacaatggcagcctgccggagacggagctgcgggtggtgagctggctgggcattccgctgtacgacgcggtggacttcgggtgggggaagccatgggcgatgtcccgtgcggagtcattgcgcggagggttcttctacgtgatggacggcggggcagcggatggtgacggcggggacgccgccgccgtgcgggtgctcatgtgtatggaggctgcaaatgtggaggagttcgagcgattgcttcgtgccaagtttgtgtacccgaggatttgatttagcatgtgtcggttggctttgttggagtctctcttctctgtgttgtgtaagcgcatatttattgggactagctacacaatttatgacagaaaatcccacgttgcatcttg

SEQ ID NO: 4897 - DNA, 1478 bp, Oryza sativa
  ref <308>: DATABASE ACCESSION NUMBER: AK062121
  ref <309>: DATABASE ENTRY DATE: 2001-12-06
tgctgatgacaagtatcccgcttacaaagataggcataaactcgccacagaacgggagaaggcaataaaagagaaggccgagaaagctagggtacaaagatatggcggtgtcaacagttcaggtattgtgccatctccaagatctgcactccctccaaaacttgctcaaataaaggaaaaggctcctacagctaatgctgaatccagtgaccaacctagtgataaccagaacaaccctctagttgtgacacaactgaaacttgcaaatattgagaagagagctccaagagttcctaggccacctcctgcaccatcagccactgccaacactgcaagtgcgttacctccaccaccgccacgcccgccaggtgcacctcctccaccaccgcctcctggcaaacctggtggcccgccaccgccgccaccacgccctggttccctacctaggaatcttgctggtggtgacaaggtacaccgtgctccagaggttgtagagttctatcaaagtctcatgaagcgtgaagccaagaaggacacaacttctctgggatcaacaacatcaagtgtctctgatgtgagaagcaacatgattggagagattgagaatagatcaacattcctcttagctgtcaaagtggatgtggagacacaaggagactttgttgagtctctagcaaatgaggtccgagcagctagttttgtaaatatcgacgacgttgttgcatttgtaaactggcttgatgaggaactatccttcttggtcgatgagcgggcagtactaaagcactttgattggccagagagcaaaactgatgcactaagagaggcagcctttgagtatcaagacctgctaaaattagaacacaaggtttcgtcgtttactgatgatccaaagcttgcatgtgaagaagctctcaagaagatgtattccttgcttgaaacagtggagcagagtgtttatgcgctacttcgtactagagacatggccatatcacgctacagggagtatggaataccggtggattggctgtctgattccggggtagttggcaagatcaaattggcatctgttcagctggcgaagaagtatatgaatagggttgccacagagctagatgccttgcaaggcaccgagaaagagcccaacagagagttcttgcttcttcagggtgtgagatttgctttccgagttcatcagtttgccggaggctttgacgaggaaagcatgaaggcgtttgaagagctaagaagcaagatgtgtacaacacagacatctgctccacaaatttcatagctctaaccatgcatgctgcattccacagttgactggtttattttctttgttgaaacttgaaaggcaagattaattgagtggctaaaaagtagaaaaatacaagtgtaaatcccaatatggcaggaaaggatgattaagtgtacagacgatgaatacatgcatactagattatgtatttctttgt

SEQ ID NO: 4898 - DNA, 936 bp, Oryza sativa
  ref <308>: DATABASE ACCESSION NUMBER: AK062122
  ref <309>: DATABASE ENTRY DATE: 2001-12-06
tcactgacaaggacaaggccgctgctcacctgaagggtggtgctaagaaggtcgtcatctctgctcccagcaaggatgcccccatgtttgttgttggtgtcaatgagaaggagtacaagcctgacatcgacattgtgtccaatgctagctgcaccaccaactgccttgctccacttgccaaggttatcaatgacaggtttggtattgctgagggtttgatgaccactgtccatgcaatcactgcaactcagaagaccgttgatggaccctcgagcaaggactggaggggtggaagggctgccagtttcaacatcatccctagcagcactggagctgcaaaggctgtcggcaaggtgcttcctgctctcaatggaaagttgactggtatggctttccgtgttccaaccgtggatgtctctgtcgttgatttgactgtcaggcttgagaagccagcatcctatgatcagattaaggcagctatcaaggaggagtctgaggggaaactcaagggtattctgggttacgttgaggaggaccttgtttccacagacttccagggtgacaacaggtcaagcatctttgatgcaaaggccggtattgctctcaatgacaactttgttaagcttgtgtcttggtatgacaacgaatggggatacagctctcgcgttgttgacctgatccgtcacatgtacaacacccagtagaagatggtcactctttcggaagaaatggagtagagtgctactgaaaataagtcggaccttttgcgagctactccagtagagcttcattagctgtatgctgccttttgtttttgctggcttttcgcatgatgttttattaaaactcgatgtaatgttaatttgtgtacttcatctccggcactttataaatcgtggtttttgaatttgaaggttcaagtggcattagacgaat

SEQ ID NO: 4899 - DNA, 845 bp, Oryza sativa
  ref <308>: DATABASE ACCESSION NUMBER: AK062123
  ref <309>: DATABASE ENTRY DATE: 2001-12-06
aagctaatcattccatacagcaaattattgaggtcatatctgaacacgaaaagtatcccagactcagtaaacttttatctgatctaatggatggaagcagaatcttgatatttttccaaactaaaaaggactgtgacaaggtcactcgtcaacttagaatggatggatggccagcattatctattcatggtgacaaagctcaagcagaaagggactatgttctggcagagttcaagagtgggaaaagtcctataatggctgccacagatgtagcggcacgtggtcttgatgtcaaggatattaagtgtgtgataaattttgattttccaacaactcttgaagattatattcacagaataggtcgaactggccgcgctggtgctagtggaactgcattcacctttttcacactctccaatgcaaaattctccaggaatcttgttaagatcttgagggaagctggccaggttgtgaatccagcgctagaatctatggctaaatctgccagttctatgggaggaggcaatttccggtcaagggggcgtggtgggtttggtaacagatctggctcaaatagcattcccataagaggaagaaggccatactgagggcggcaaaaagattaaaacttttactgtataccgataggtggaacatgtcacacgaatggccaaatatacttatccaacagcgtaggatatgtgttccaagtttagcttcgacttggagaatggtttgtccagtgttattttgactattgaggcaacgtcctcgtgcggtactggttattgtttactattgttgggttacttgaaagaacagtttgctccatttgttatcttttt

SEQ ID NO: 4900 - DNA, 475 bp, Oryza sativa
  ref <308>: DATABASE ACCESSION NUMBER: AK062124
  ref <309>: DATABASE ENTRY DATE: 2001-12-06
tctgactggattatcgttctacttcaaggcacaaggagtgtatgcacaactggttccaacattggctctttatggcatatcggtatattacgctgcatactcagttggaatgggacctgttccttgggttatcatgtctgagatattctccattgaaataaaagcaatagctggaagcttggtgacgctggttagctggattggttccttcgcaatttcctactcattcaatttcctcatggattggaactctgcaggtaccttctttctgttctctgcggcgagcttggtcacggtgttgttcgtggcaaggttagtgccagaaactaaagggaaggcactcgaagagatccaagaatcgttcacatgacagctcgaggaggatttgtatgtagaacgctcgttatcctctcaaattatttgtatcagtgtgttcatattactatatatatactaacttctgttttctgttggc

SEQ ID NO: 4901 - DNA, 1478 bp, Oryza sativa
  ref <308>: DATABASE ACCESSION NUMBER: AK104890
  ref <309>: DATABASE ENTRY DATE: 2002-08-28
atgatgtccggtgctgccactccgtctactagctccgccgcgcatttgcgcaaccggattggcggaggcagcggcgtgccaccggattcgttgcgggggctcgatttggtcagctcgagcagcaagggtggtgctcatcagttcgatcctccgaagctggtgcagccgttgtcggttcagttccagttcggcgctaccgcgcataggtacccgttccagcagcatcagcatcagcagaagttgcaggctgagatgttcaagaggagcaacagcgggatcagccttaagtttgatagccctagtgccaccgggacgatgtcgtcggcgttcatgtcgtcgcttagcatggacggcagcgtggctagcttggaagggaagccgccgttccatttgatcagcggcccggtcgcgagcgacccggtgaacgctcaccatgtgcccaaacggcggtgcacggggagaggggaggatggaagtggcaagtgtgccacaaccggaaggtgccattgctcaaagaggaggaagttgcgaattaagaggtcaattaaagtgcccgccattagcaacaaaatagcagacatacctccagatgaatactcatggcgaaagtatggtcagaagccgattaagggttcgcctcatccaaggggttactacaaatgtagcagcgtccggggctgcccagcgaggaagcacgtcgagcggtgcgtagacgacccggcgatgctcatcgtgacgtatgaaggtgagcataaccatactcggctgccaacacagtcagcccagacctaggaaacctgtagtatttcacgcgagccattcagaaaatgcagaggctccaagcttttgctcggggacggtcggaccggtcatgtgaaagtaggtcagcaaactgtgaaagtaggagtaacaaacagggaagccatctgatgagagctatagtgattcgcttgggtccttaactgagctacaagccatgtcgcatttctgctatggtctcaatgttctactgtccaaagtggggacatacacaacttgttctctcttttatgagctatggcactatcagattaagagagaatggaggaagaacatgtgattggatagtgaccggcaagatttgctcaaagaagggagggattaggtttgaagatttcaaaggaagattgacaaaaggaagtgaacaactgaaacatcgtgtaagcctggaaaaggataaacaggatttggcttttagcgtgcacaagtttacttgcaatgacttgcctctgtatgttgcttttgctttattgaaagatcaaaattttcttttggcagaagaatcattcagcattaaagctgtttctacttgctaacatactgacacacttggaccatcagggtttttttttccaggtgttagctgttgggtatgatttctcagtcgtacttctgcttttgtgtaaagcattccatgttatgttaatgactttgacatc

SEQ ID NO: 4902 - DNA, 395 bp, Oryza sativa
  ref <308>: DATABASE ACCESSION NUMBER: AK062125
  ref <309>: DATABASE ENTRY DATE: 2001-12-06
aggggaggatcaaaaaaatctgtccatgtgcgactctttggttctaaaatttccttatggagccaacttcgttcgcttttgaagtccaacacatgggtaatatctagataagatagattgtccatacaagtatgatgttagaagcttcagtcaaatattgtattcattattctttatttaaagtagtcagtttgatgtctagaactctagatatacccagtagacaggattttgaacatttctagtggatgtaaaaatagcaagcttcaaaattcttgtgccagaacaaagggagtagccaagtttagtccttgtttgtataggctatcaatctttatcaagttcaaattgtgacttctgtataagcagaaaaattggtatcatatgccattgtt

SEQ ID NO: 4903 - DNA, 1488 bp, Oryza sativa
  ref <308>: DATABASE ACCESSION NUMBER: AK104891
  ref <309>: DATABASE ENTRY DATE: 2002-08-28
ttctccggtctcctccctctctcgtcgtcgtcgtcgtcgccgtcgccggctcgccgcgttctcctccgccgccgctgctgagccgggatggccgcgcgtagcccctacttcgtccccgagagcgaggggatccgggccggggagtcgccggccgcggcgctccgcaggatcctcgcgtcgccgggggcgcaccaggccccctgctgcttcgacgcgctcggcgcccgcctcatccagcgcgcggggttcccgatctgcttcatgggcggtttctgtgtttctgccgcacgacttggattgccagatgctggtctcatctcatatggagaaatggtagatcaagggcgtctgatcactgaagctgtatcactcccagttatcggcgatggtgataatggctatggaaatgctatgagcattaagagaaccgtaaaagggtatattaatgctggttttgctggaatcatgctcgaagatcaggtggcaccaaaagcatgtggacatactgaaggaaggaaagttatctcaagggaggatgctatcatgcacataaaagctgccgtagatgctaggaaagagagtggttctgacattgttatcattgcaaggtcagactctcgtcaagctatctctattgatgaagcgctatggagggtacaggcttttgccgatgctggagcagatgttctattcattgatgctcttgcttcaatagaagagatgaaagcattttgtgcggtttcacctaaagttccaaagatggcaaacatgctagaaggtggtggtaaaactcccatattgagccctgctgaacttcaggagattggttttagcctcgtagtctacccattgtccctgattggggtatcaatgctcgcaatggaggatgctctgattgcgataaaaagtactggtgcaccccgacctggtagcttgccatcttttcaggagatcaaggatactctagggtttaaccgatattacaaagaagaaaagcaatatgcaacagtccagcaagcccagccattatccacaaatattgtacttcgattaaagatcacagaaaaaagtggaacgcagaagataaatgaagggatacctgctggaatcctagagaagatatcaaaagctattccaggcttggctggtgtcaatttgacggaaatacttcagggtgcagatcagtcccagaaaggaaaattgctgcttgatcgtgaggatgcaactggcgacaggatccaggtgtccatcgagtgatcaatgcctacatacattgcctagaagcatggatggccagtaatgtagggcaaatcgccttcaatattgaagcaaacgattttccaagttgtaatggtagccgtttagcgtagtaccttgaagtgttacttctgcgagttgggttttcctctttgcgttgccttgtggtgttaataatcctggattcctgtgttgattcaaataaaagaaacctatcatcaggggctttag

SEQ ID NO: 4904 - DNA, 786 bp, Oryza sativa
  ref <308>: DATABASE ACCESSION NUMBER: AK062126
  ref <309>: DATABASE ENTRY DATE: 2001-12-06
attccgtgtcagtcatcagtgttcgccatggcaagcagcagcaagctctcctcggcgttcgcgctcgccgtcgtcgtcctgctgctcgccggcggggtgatgccggcggcggaggcggcgtcggcgcacctgcacttcttcatgcacgacacgctgacgggggcggcgccgacggcggtgcaggtggtgaacggtccgcggagccacttcggcgacacgatcgtgatcgacgacgtgctgacggcggcggcgagccggtcgtcggcggcggtggggcgggccaaggggcagtacgtgtgggcgtcgtcggggaacccggagctgctggtgaccatggaggtggtgctgacgtcggggccgttcgccggcagctcggtcaccgtcgtcgggagggacgacatcgcggcgccggtgagggagctgtcggtggtcggcggcacgggggagttcaggatggcgtccggctacgtcctctggaagacggtcagcctcgaccaccccaacgccatcctcgagctcgacgtctacgtcaacccctgagatcgccgccgccgccgccggccaccgtgtgcttgcttccggcgtacgtggtggtggcatgacgtggcgtgtgccagcacacgacacatgtcgcagctgccacggatgctacactaccttacactatactactatactatactagtactgccacccagccagtgacgaataatatggacaagtccattccatgtgttgttagttgttaccgtggcgtgtaataattcatgagatttgtcaattatc

SEQ ID NO: 4905 - DNA, 1497 bp, Oryza sativa
  ref <308>: DATABASE ACCESSION NUMBER: AK062127
  ref <309>: DATABASE ENTRY DATE: 2001-12-06
ttgttgacggttcgtcggaatcatatgcagaagaaggaagcctaccaccttcaggctatttcatgggagctggatcagatcgcagtttaaagatcacggagaatgaaaggaaccccactatgcttgcaaatggatgcttgccatacaacacccaggctcatccattatctggccagattctacctaaggccccgacgttgtgttcagcattccaaaacgtttcctccttcatggaaccagtaaatctagatgctttcggtttccaaggggcacaaaatgttgctatgttgaacaaaacaagtcttccaaatgggaatccctcgctgtttgataatgctgccatagcatcactacatgatagcaaagagtttctcaatggtggttccatcccttcgtttggtactgtcctgcaggcactaggagcgggtggtttgaaggctgctcaacaggagcaaaatatccggaatatacctctccctacattcacatctggtagtcatttggcagttactgatgcacaagggccaccacttccttcaaagataccaccattgatccatgaccataatagtgagtaccctattaaccattcttctgatgtggaaccccaagcaaattcagctcctggaaatagtgccaatgcgaagccacgtacaagggctcgccgtggacaggcaactgatcctcacagtattgctgaacggcttcgccgagagaaaatttcagaaaggatgaaaaatctccaagtccttgtcccaaactccaataaggcagataaggcatcaatgcttgatgaaataattgattatgtgaaatttcttcagcttcaggtcaaggtattgagcatgagcaggctaggagctcctggagcagttcttccccttcttagggaatctcaaaccgagtgccatagtaatccatctctatcagcttcaaccatttcacaagggccaccagacatgccagactcagaagacagctctgcctttgagcaagaggtagtgaagctgatggaaacgagcatcatcagcgcgatgcagtatcttcagaacaagggtctctgcctgatgcccattgctctcgcttcggccatatccaaccagaaaggcatggctgctgctgctgcaatccctcctgaaaaatgaaaaaaaaaatgaaatcggaaaaatatggggggaacaactgcagaagacataataactcaacggctgcagaaatgtgctggacactgcaggttttgtgaatgaagtgaaatccaatccagggggtcataaaacataggaagttatctgactaattcaggcttatgacacaatctactctatagtctatagctattgtgtgcctgttgcacatcagttgatgtgtattcttttgttttttttgtattgcatccggatgctaattaggtagtagtgtttcctttgatgtacatgagtattatctatgcggttttatctaatgtgcatataaagtaaaatctggtatgttgctgct

SEQ ID NO: 4906 - DNA, 1156 bp, Oryza sativa
  ref <308>: DATABASE ACCESSION NUMBER: AK062128
  ref <309>: DATABASE ENTRY DATE: 2001-12-06
cttcctctgcggcgcacgcaggcggcgaatcctcctccgtcgacgcgactcctcctccgccgcccgccgctcatctcatcccactatggcagccaatgttggggaatccacaagtggcagcagcagcggcggtgccgattctgggggaagcttcgagtgcaacatatgctttgagcttccgcaggagcctattgtcacgctctgtggccacctcttctgctggccatgcctctacaagtggctgcacatccactcgcattcacctgagtgcccggtctgcaaggctgttgtcgaggaggataagcttgtccccctctatggccgtggtaaggaccgtgttgacccaaggtcaaagaacgtccctggggctgacattcctaatcgcccagctggacagaggcctgccacggctccgcaggccaatcctaacacccacttccccaatgccaaccccaacccttggttcatgggtggaggcatcccactagccaatgcacggtgggggaattacaccttctcggcggcatttgggggtttgttccccctgctcagcttccaagtccatgggttcccagatgcaaccgcctatgggcagcctgctggttttccctacggatatggacacggccacggtcacggtcatgggcacgcgttccacggcggacatgcccatgctgctgctgctccccgccatggaccgcctgggcaacaacagcaggcggatgtgtacctgaaggcgcttctcatcctggttggttttcttgtgattgcaagcctcatcacattctaggattgtgccatcatattgctgtgcttgtaataagaggaatgatttcccgagttgctttctgatgttgtgcattaccttgcctccacacacgacccagtctgaatcaagtggttcttttgcgcaaagtgttgatagaattcttgtatatacgaaatagatgtggtcgtgtggagcatatgtgtactgtggttcatgaataacatggaagctctgtctgaatgaactagagcaatgatacttatattgtgtttttgatatgatgatgctcagaatgagcaggctatgcaattgtttggagcacaaatgtattcctctatggtttgtactaaagactatcgcactgatatcatatctgtgttttgtggt

SEQ ID NO: 4907 - DNA, 1211 bp, Oryza sativa
  ref <308>: DATABASE ACCESSION NUMBER: AK062129
  ref <309>: DATABASE ENTRY DATE: 2001-12-06
agggacatgctaattttattgacaaactggatttgtggttcttactcaatccacccctagattcaagcagtattgtgttgtgcaattaattttcggaagaggatctttggcagctctcgccattaatggagacaaagaatcgacgaagttgcgtacatcagcctctgctatagtgaaacgttgttgggtggaattcacgcagcttcttggcaatcagcaagaacatctctagtttgctatatgccctagagcttaccggcgaggcggtgcagtatacggtgcgtctcctcggagatacggtagaagctggcgccctgtttcatcgtggcgagcggggcagcctcctgccgcggcgggattcggtggctagatcgatccgtgggtggagggcagggacgaggtagtggagacagaggcagcattggtagagggaagaacccttagtgatttggcctccactcttgttccttgcttcctgttcctcatcttgtgtcgctactgagagctgatgttcgcggtccgccgacccatcaggcgtgacagaagaggaggaagtggtggcgtcggggccttgggggctgagggcggagggccgcgactaggaggtggggaggcggcggcggcagtagggactagtcgccggtgtctcggcctatcgcgattctacactctggagcgtaggcgtcgacggagcaaactttttttttttcatacctttcagggacatggaaggattttttagcgaaaagaagtttcctgaagggtggagaagaaatttcgccaatcaaaggatcctacggcttgcatcatccggaaccgatatcgggcggcccatatttattggatgatgtggcacagtattttgcaagaaagcttgttgctttcactattttagatctttggtcaccaatggcagcaaatgtcacgatatctgcaccaaattaggtcaagatttactggcggtgtaccagaagacctgcaacctcttcttccgcaagagcgtcaaatctgcggtcacgtctgagcagaagcaactggacatggcgaaatctcgattgcagaagcttgatcaagcctgaagcatcaccgcaaccattgaactcctgaacatgaactgctctgctgaatcatatttacatgcagatttgcttattgttcctatgctaagaccttgttgtaatgtgattccggtcagctttatttgggatgac

SEQ ID NO: 4908 - DNA, 2030 bp, Oryza sativa
  ref <308>: DATABASE ACCESSION NUMBER: AK104892
  ref <309>: DATABASE ENTRY DATE: 2002-08-28
accagttagttcgggttgaaggtgatggaacacttattcctgctacggaggatgaggtcttacagtttgaaactttccttcatgatgagaaggttgatgatgatctgccttctattgacgatgtaacacatgtggaggaatattttactaatgattgcatagtgaagaagcctgagtttgaagaggggccttccaaattagacactgcagatgtacagacacaaaagttagatgctggcttagaggaagacaggttatgtacattgaatgattcgatagttcttccttcaaattgttcagctgttcatgaccagcagctggataaactaaatacagaacaaggggcaaatatcattgcccaacaggacaatgcttcgactgagactacaaaatcaacagtattaaatgacctttcttctgataaagaaaaggctgatgcctgctcgaaacctgtaaatgaggcatctgcaggacaatctgtttctggggttactagttcagttcctgatttttccattttaaagggagaagtctgcttggatgatcttacaatgagagaacttcaggaagcatttagagccacatttgggcgtcaaactactgtcaaggacaagctatggctcaaaagacggattgcaatggggttgatcaattcatgtgatgttccaagttcaggttgtgttgttagggattataaagttattgccatgggtgccaaacaagaaataccagtggttgaagcaataccaaagatggaacttgaggctaatttggttagggaccaagtaatgaatcctggacatgagagagatttaccatcaagtctttcctatcatagtgaggagcaacagagatcgtccaagagactcaaaagagtaccaacagataatgatgaaccacaagtaactatttttgccgaacaaggaactactaagagaattagaaagccaacaaaaagatacattgaggagctctcagatattgacactcatgaatccactgggagactttcttcacctggaaaaaggcatgtatatgatgaggtgttattgagaccacggatagcgcctttgcatgaggttgattcgttgagcacagcctatcctactagagaagatactcttggagggtgtagtgtgcatgtgccttatgtttcaaggatgagaagggggcgccctaggagtaacttcattccatttttggatcctgagccttctgtggaatgtactgaggcccctgctgcagatgtagtgaatttggaaaaggaaggtgaacggaagaaccatcagaagaacactgggaagaaaggagtacatgtagaaacatcttgtgaaaaggatgttcagggtctgcaggacaaggatttttgcgactctgatgacaatcccaaaacaaagcggggtgggaagcggaagcatcatcgagcatggacattgtgtgaggttgtgaagctggtcgatggtgtggcccgatatggggctggcaaatggtccgagattagaagactagccttctcatcatattcgtaccgcacctcggtggatcttaaggacaaatggcggaatctgatcagggccagccagacacaactttccactgaaaacgatggtgtttgtccacggaagagcaatccttctgccataccgataccagtgtcgattctgctacgagtaaaaaaactggctgagatgcagtctcaagctggcgacgtgagagtgccgatcaagttttcagggcagagcactacggttgtacaggggaaagtttcgggtttcttgtgatccacgtgttgcatgcaaatagagggggaaaccactgagattgatgtacgcttttggacgtctgtgaataccacacttgtatagcaaagttgtgatcgcgactcgcgttctcgtgcaaaagaaagagtcgacgtatgtattgtttgctcctttttctacacacgaacacttcctatgttctccgagagatttgactaacgtaccttgagattgacatagtcaccttaaacaccttgttattgaaagaat

SEQ ID NO: 4909 - DNA, 1324 bp, Oryza sativa
  ref <308>: DATABASE ACCESSION NUMBER: AK062130
  ref <309>: DATABASE ENTRY DATE: 2001-12-06
atgcgcagtggttccaagtaagcaaatcagcaaactgattgcagcgagagtttctgaagtgctcttgttattagccatgaagttggagcatgacttccatatggcaataggggaagcagaggataactatgcaaacaactctaggcttcagcgaagggctttgctcaagaccaagccggtgcttgacaaggctgtgagacaggtgtgcatggctctccatcctcgagctatgatagttgctgacctaggcttttctgtcgatgcaaacactctcctcttcgtctccgatgtgatcaacacggtagctgatgctcagcaccatgatgagctcaggtgccatcccatggaactccagttcttcctgaatgatctgtctggcaatgatttcaatcaggtgttcaagtcagttaaacagtttactaagtcgatcgcagcatctcatcccaagggagtagcactgcctccattctatatctctgggctaccaggctcctactacaccaggcttttcccttgccaaagtgttcaccttttccattcctcgtactgcctccattggcgttctcagatgatcaaggacatggatgaaaagatgtcagacataaatggagggaacatttacattgccaagagcatgccaccatcggtggtgaaaatgttccaagatcagtttcagaaggacatgtcccttttcctcaagctgcgacatcaggaactagtgcctggtgggcagatgctgctcacattccttggaaggaagaaagagggcgtcttggatggagatctgagccatctatgtgcattgcttgcagaagctttacaagcccttgttactgagggccttgtggagagggaaaagctggagtcattcaacctaccactgtatgggccatccattgatgaagtaaaagcagtgatcgcattgaacaagctctttggcattgaccatatccagctctttgagtcaaactgggatccctatgatgacatggaaaatgatggcatgtgcagcagccctcagcatggggtgaatgttgccaagagcatcagagcagtgttcgagcccttgctggcaagccatttcggagaatgtatactcgacgagctctttcagaggtatgcacggaatgtagagaggcaccttgcggaggacaatacaaagtactcggtcatagtcttgttgttgaaccgaaaagtatagatcagacacaggacacttggggaatctacatagaaacactacaatatatatttttaattacgcctgtatgctgctagtttacaataagatttccatcaactggttcttaagcttttaccgcag

SEQ ID NO: 4910 - DNA, 1102 bp, Oryza sativa
  ref <308>: DATABASE ACCESSION NUMBER: AK062131
  ref <309>: DATABASE ENTRY DATE: 2001-12-06
aggctcggttgttctaatggatcttctgtggtctgatccaactgaaaatgatagtgttgaaggacttagaccaaatgcccgtggcccaggccttgttacctttgggccggatcgtgttatggagttctgcaacaacaatgacttacagttaattgtgcgagcacatgagtgtgtgatggatggttttgagcgttttgctcaaggtcacctaatcactctcttctcagcaacaaattactgtggtacggcaaacaatgcgggtgcaatcttggttctaggaagagatcttgtagtagttccgaaactcatccatcctttgccgcctgccattacatctcccgagacctctccagagcatcatcttgaggacacatggatgcaggaactaaatgccaacaggccgccaactccaacaaggggccgccctcaagcagcaaacaatgaccgaggctctcttgcatggatatagtagctttggcatgcgctgaatttattcattccaagtcctcatcattgggttctggctaagctacatttatccgttctgcacagaggcagacgatctgtgctcaagagacgtgctagcccacaacaattgccaacttggaggtcgtttgcagaggagagctaagctacagaaagaaccaagggtggagaaacttcgccaatcaccaccgacagcgctctccaatttcttttcccaaatcatgagaagtaaatgaacatattcttggtcgttcatcggaagatcctacctgcgaggcttcgcccctgtatatactcagatgatgccccagcggataggtgagtggggtgtatgtgttttggtcaaccgatttgaggaacagaagggatagtgtaactagtggttattgtactaggtattcttttcctgtgtctagattttgtttttaccatgttggaaaagtattggagtggccaaaggagtaaacttattggatggggtccatctagttgttgtataatagctgtctcacctatttgtgttatcacgccttcctcccatttgtaatactacctgtctctggtgctgacatgatgtacaatattatccttgtcgtcaaaattttgtgtagtgaac

SEQ ID NO: 4911 - DNA, 1406 bp, Oryza sativa
  ref <308>: DATABASE ACCESSION NUMBER: AK062132
  ref <309>: DATABASE ENTRY DATE: 2001-12-06
cgcgagctcgccagcgccacgattcccgaggcccaggagagcgcgagccgccgccgccgcagcagcagcctagctcctagctagccagccatggcgctcgcccaccagctggtcgccaaccggccgctcctccccaccccggcgccgcgcgtccccagggccagcatcagcaacgcgcggccgcagccacttcttggccgggactgccgcctgacgctgctgcgggcggagaggaggacgctcgccgtcgcccgggcgtcgtcgtcgtcgtcgtcgtcgtcgtcgcagacggagcccaagtcggagggcggcgaggcggcggcggcggagggggaggagcagccgtacgaggagtacgaggtggagatcctgaagccgtacgggctcaagttcgccaagggccgcgacggcggcacctacatcgaggccatcctccccggcgccgccgccgaccagaccggcaagttcgaagtcggcgacaaggtcctcgccaccagtgctgtatttggggaggaaatctggccggcagcagggtacggacagaccatgtactgcatccgtcagagggttggccccctctacatgaagatggagaagagatttgggaaatgggatggtgctgctgagctcagtgagaaggagatcatcagggctgagaggaactccggggtgatcagcaacagggtgagggagatccagctgcaaaattaccagaggaagatggagcagaagatgcagagagaggaggatcttcgcatggggctgaggctgtacaaggatggtaaatatgaggaggcattggagaagttcgagtcagttttgggatcaaaacctgagatcaatgagtcttccatagctagctacaatgttgcctgctgttactcgaagcttgaccggatacaagctggtatttctgcactggaagatgccctgaaagcaggttatgaagacttcaagagaattcgcaccgacccggatctagaaaacttgaggaaaactgaggaattcaacgtcctgctgaacaagtacgacgaatcgttcatcaatgagaatgctatcaacgccatcaaatccttgtttggattcaacaagaaatgagcactgaactggtcatggtggtaggagatattgcatcttttctccagctgcagttgaacacttctgaagctttgctaggctatatagcacttggcaaacacggttcaatttttctccctgccattagttcacacttcacacaccagtagttttagctattcttggtgagattctgcagaacggtttcagtcttccctcttactgtaaccagtcgatggagatacactttgtaaattcaagcaaccaaatgttaaggaaatatattgtgattgtgcttataaatttatcccaaatagtatgttacgcac

SEQ ID NO: 4912 - DNA, 1750 bp, Oryza sativa
  ref <308>: DATABASE ACCESSION NUMBER: AK062133
  ref <309>: DATABASE ENTRY DATE: 2001-12-06
aatggagtccaagggtggcaaaaagaagtctagcagtagtcgttcctccctgatgtacgaagctcccctcggctacagcattgaggacctccgacctgccggcggcatcaagaagttccgctctgctgcttactccaactgcgcgaggaagccctcttgatagcccccttggctaccttgacctagtagtttagttactcctctgaattctcgttttgggctttcttacatctctctggctagctgcttcccagtgaccgggaaggtcatcagtcctgcttcctttcttcctcatctctggcatcgtccttcgaaacaatggcagtcctgtcagttgctgactctccaccggtctcggcgatcgggtttgagggatatgagaaacgcctcgagatcactttctccgaggcgcctgtctttgctgaccccaatggcagggggttgcgtgcactgtcacgtgctcagattgactctgttcttgatctggcgaggtgcaccattgtgtctgagctctccaatgaggtcttcgactcgtatgtcctttctgaatcgagcctctttgtgtacccatacaagattgtgatcaagacctgtgggactaccaagctcctgctcgccattccgaagattcttgagcttgctgaagagctatctctgccacttgaagctgtgaagtactctcgtgggacattcatttttcctgaagcacagccctctccacacaagaacttctctgaggaggttgcagtcctgaaccgctacttcggcggtctcaaatctggtggcaacgcatacgtgattggagatcctgcaaagccagggcagaagtggcatgtctactatgccacccagcacccggagcaacctgtggtcactcttgagatgtgcatgactgggctggacaagaagaaagcttctgtcttcttcaagacttctgctgatggacacacaacatatgctaaggaaatgaccaagctctcaggtatctctgacatcatcccagagatggaagtctgcgacttcgatttcgagccctgcggctactccatgaatgccatccacggccctgctttctcaaccattcatgtgactcctgaggatggcttcagctatgccagctacgaggtcatgggcttcaaccctgcttcccttgcctatggtgaccttgtcaagagggtgttgagatgctttggcccgttggagttctctgttgcggttaccatctttggtggccgcaaccatgcagggacctgggccaaggggctggatgtcggggcctattcttgcagcaacatggttgagcaggagctgccttctgggggtttgctcatttaccagagcttcactgctactgctgaaatcgccaccgggtcgccacgatctgttctgcattgctttgctgatgaaaacacggagaaagctggtaaaatggaggctctctactgggaagacgatgctgtcgaggagatagatggcacagagggtaagaagatgaggagctgctgatgagggaagcgcactgaagattaaagaatactcaaaactccagtagcgatcactctgttactttgtgaagcagccagccagactattcatatagtactagtatatgctatgaccaatgttctttattatcttgcatatattctgaataaaagggctctaggtggtctgctttgtctgccacagtgagcaaaatgtatccgaatatcaaactttaatgttgggaatataatacaagtcattttat

SEQ ID NO: 4913 - DNA, 934 bp, Oryza sativa
  ref <308>: DATABASE ACCESSION NUMBER: AK062134
  ref <309>: DATABASE ENTRY DATE: 2001-12-06
gagcttatcacttatcatcaatcggcgcctccctctctctcgctcaccgcctccttctcctcgcgatctatccaaacaaggggctcgctaagatcggcatgtcggactctgaggagcaccatttcgagtcgaaggccgacgctggggcgtccaagacctatccccagcaggccggaaccatccgcaagaatgggtatattgttatcaagaaccgcccctgcaaggtggtggaggtttctacctcgaagactggtaagcacggtcatgccaagtgtcactttgttgccatagatatattcaatggtaaaaagcttgaggatattgttccttcgtcccacaactgtgatgttccacatgtgaaccgcacagagtaccagctgattgacatatcagaggatggattcgtgagccttcttactgagagtggtaacactaaggatgatcttagactcccaactgatgacagtctcctgggtcagatcaagactggatttggtgaaggcaaggatcttgttgtgactgtcatgtccgccatgggggaggagcagatctgtgcgctgaaggacattggccccaagtaactccctcaagtggaaggcagaacagaggggcaactccctcaagtggaaggcagaacagaggggtaactccctcaagtggaaggcagaacagagggatccttatgtatcaaacctaaactaaaaaacaaagacatgtattgagaaggaatgctacaaaagacatccacccagcttgaagccgcagtaacaagtgcagtgattgctgggtgtggcattatctgattaccgctaccccatcatgacatttgggatcctgtattttccatggttttatttgtgccctctgtttggtatcaataattgatttggaacggtggaaaccatatactgaagctgaagattatcattgggtc

SEQ ID NO: 4914 - DNA, 1287 bp, Oryza sativa
  ref <308>: DATABASE ACCESSION NUMBER: AK104893
  ref <309>: DATABASE ENTRY DATE: 2002-08-28
aagtaggggagaaatttgaagttgtagctgtatccttggacagtgatgaggaattatccaatgagagttttgcaggcatgccttggcttgccatccctcaggaagacaagatgggtgagaagctggctcgttattttgagcttagaggcctgcctacacttgtcctgattggtcctgatgggaagacactgaacaacaatgttgctgacataattgatgagcatggtcaagatgcatgggaagggtttcctttcactgcagagaagatggaaattcttgctgagaaggcaaaggctaaagcagagttacagaccttggagtcccttctggtcattggtgatttggactttgtgcttggaaaagatggagcaaaggttcctgtatcagaacttgttgggaagactgtcctcctctacttctcagctaaatggtgcggaccatgccgagccttcctgcctaaacttgtcgacgagtacaacaagatcaaggagaagcacaacgacttcgagatcatcttcatctccagcgatcgagaccagagctcctacgacgagttcttctccggcatgccatggctcgctcttcccctgggtgacgagaggaagcagcacctgagcaagaccttcagagtccgcgggatcccttcgctcgtcgccatcggcgccgacgggaggacggtggccagggacgccaagaccccgctgacggcccacggcgccgacgcgttcccgttcacggaggagaggctcctggagatggagaggaagatcgacgagatggcgaaggggtggcccgggaagctgaagcacgagctgcacgatgagcatgagctcgtgctgactcgctgcaccacgtatggctgtgatggatgcgacgagatgggcagctcgtggtcgtacaggtgcagggagtgtgacttcgacctgcaccccaagtgcgcgctggggaaggaggaggagaagaagggcgatgacgaggctgaggctgaggctgacccagcatgcgagggaggcgtttgcaggaaggcctaaaagagacttgttcttccactggttatctactgctgatttaagcgtgcctggatgtttggatgtgaaattagagaattatgtagtgagtaataaatatggttttgtttacaaagtagtggtattggggttgctggtacattggtatttgtgttgatgaacattagttgagaccagagctttggattattcattattatgtgcaaaccaaaaccatatgtaagtatgagtccggattggtaattgggtatcttgaatc

SEQ ID NO: 4915 - DNA, 1557 bp, Oryza sativa
  ref <308>: DATABASE ACCESSION NUMBER: AK062135
  ref <309>: DATABASE ENTRY DATE: 2001-12-06
aagtgcttcgatcattttcaactgttcatccagctgagtttggatgtttgtacaacctaatccctaatcattgtatgtggatactatacaaaccgaattcaaggtactaatttatctagtaacttggctttctttatgtgccactgtcagtctgacctgaaaattttctgaacttcaaaataggacagaaaatgtttgtggatcttgagtaatgccttctaataatgataatgctgttgcaagaaatggagaatcatcctgtccaatgcatggccaagaccaactatgattttcttgccaggaataactatccaatgaaacagttagttcagaggaactctgatggtgactcgtcaccaacaaagtctggggagtctcaccaagaagcatctgcagtaagtgacagcagtctcaacggacaacacacctcaccacaatcagtgtttgtcccctcagatattaacaacaatgatagttgtggggagcgggaccatggcactaagtcggtattgtctttggggaacacagaagctgcctttcctccttcaaagttcgattacaaccagccttttgcatgtgtttcttatccatatggtactgatccatattatggtggagtattaacaggatacacttcacatgcatttgttcatcctcaaattactggtgctgcaaactctaggatgccattgcctgttgatccttctgtagaagagcccatatttgtcaatgcaaagcaatacaatgcgatccttagaagaaggcaaacgcgtgcaaaattggaggcccaaaataaggcggtgaaaggtcggaagccttacctccatgaatctcgacatcatcatgctatgaagcgagcccgtggatcaggtggtcggttccttaccaaaaaggagctgctggaacagcagcagcagcagcagcagcagaagccaccaccggcatcagctcagtctccaacaggtagagccagaacgagcggcggtgccgttgtccttggcaagaacctgtgcccagagaacagcacatcctgctcgccatcgacaccgacaggctccgagatctccagcatctcatttgggggcggcatgctggctcaccaagagcacatcagcttcgcatccgctgatcgccaccccacaatgaaccagaaccaccgtgtccccgtcatgaggtgaaaacctcgggatcgcgggacacgggcggttctggtttaccctcactggcgcactccggtgtgcccgtggcaattcatccttggcttatgaagtatctacctgataatagtctgctgtcagtttatatgcaatgcaacctctgtcagataaactcttatagtttgttttattgtaagctatgactgaacgaactgtcgagcagatggctaatttgtatgttgtgggtacagaaatcctgaagcttttgatgtacctaattgccttttgcttatactcttggtgtatacccattaccaagttgccttaaaaaccctccaattatgtaatcagtcatggttttatagaaccttgccacatgtaatcaatcacctgtttttgt

SEQ ID NO: 4916 - DNA, 393 bp, Oryza sativa
  ref <308>: DATABASE ACCESSION NUMBER: AK062136
  ref <309>: DATABASE ENTRY DATE: 2001-12-06
aagcgaatgatgcttggctaccgttataggccaaacccactgaacaatccaaggaaagcatactactgatataatgggaggtcatccaaggggcgatgtaaggcacaattttgttacattttagctaacagaactaactactgcctagggatatcactaacagtattgaaagtttttgttcaccagcagagaagccaagaagttcatttattcagcatataatctttgaatgccagaggcttcccggtgttctgcagtagctttggttttacgtagtgttacatctatgctactttcaacatgtcatttggtgtgtgtttccccttttgtttcacatggtgatgtattcatgttgctattgatgaataatgtatcttcatgattattcaaccc

SEQ ID NO: 4917 - DNA, 1358 bp, Oryza sativa
  ref <308>: DATABASE ACCESSION NUMBER: AK062137
  ref <309>: DATABASE ENTRY DATE: 2001-12-06
acatctctctctctcgcttctgccactgctggctgtgctgcttccctagctcctcggttggatcaaagagaagagaagagaagagttaatgctgatggcctccgaggcgtggctgtcgccggcttcccgcctcttccaccctccccgctcctccaccgccgccttcttctccgcttccgggctcccccgcctgcctcgccgctcctcctgtgcactcgcaacctccacgcgtgggcggcgcctccgccttggcgccaccgatcagcagcagcagcaaggcaaacaagatggtgatgaggttgtggacagcaacgtgctccagtactgcagcatcgacgggaaggggaagaaggccgagaagaggtcgctgggtgagatggagcaggagttccttcaggctcttcaggccttctactacgaccagaaggccatcatgtccaacgaggagttcgacaacctcaaggaggagctcatgtgggaaggcagcagcgttgtcatgctaagccctgacgaacaacgcctgctcgaagcctccatggcctatgctgccggcaaccccatcatgtctgacgctgaattcgaccaactcaaactcagattgaagaaagacggaagtgacattgtcaccgaaggtcccaggtgcagtctacgcagccgaaaggtgtacagtgatttgaccgttgactacctaaagatgttcctgctaaatgttccagcaactactcttgctctaggactgttcttcttcatcgatgagttgactggctttgagatcaacatattccagctgccagagcctttcggtttcatcttcacatggtttgctgctttgcctctaatattgttcatagcacagtcgataactaatgccatagtgaacgacttcttaatcctcaaggggccatgtccgaattgtggcgctgaaaacctttccttcttcgggactatcctgtcagtgtctagtggcggtgaaacaaacaaagtgaaatgtgcagattgtagcacggagatggtatatgactcgaaatctcggctcatcacccttccagaaccatcgcaatgaaatgaatggtgaattcttcaaggtacgatgccagatggagagatgcaaacaaggaggtgatcaggtaggaaacaacaaataaaatggaattattgtaacggatgggtgttcacaaattgcatgcagagtgtatatatactacagtaagaaatgtagatcgacttctatactactaactattaagcgctgttgcgtacagtatataaaatgtagtacatacatgtttactgatatctgactcaactgaaatactacacacatatgtgtgttggagatagaaactgttttgtctctt

SEQ ID NO: 4918 - DNA, 1270 bp, Oryza sativa
  ref <308>: DATABASE ACCESSION NUMBER: AK062138
  ref <309>: DATABASE ENTRY DATE: 2001-12-06
gtcgacttgcgcattagagattagtggtgtggttttcttatcgatttgtgcattggacaccatccggtcggccggcgccattggaggaggaacatggcggcgatggcgtcgccgccgccgccgacgagagtgtgcgtcaccggcgccggcgggttcatcggctcgtggctcgtcaagctcctcctctcccgtggctacgccgtgcacgccaccctccgcgacccgtgtgatcccaagaacgctcatctgaagcagctggacggggcgtcggagatgctgagcctgttcaaggccgacgtgctcgacgccggcgagctgtccgccgccattgccggctgcgagggggttttccatgtcgcctctcccgtgcccggagacaagatcgtcgatcctgagttagaagtaatggctcctgctgtaaagggaacactgagtgttcttgaagtttgttcgtcgtctaagaaggttcagaaagttgtggtggtgtcatctactgctgcagttcattacaaccccaattggcctccaggtaagcccaaagatgagagctgctggtcggacagaaagatatgcatggagaagaaggagtggtatagtgcttccaaggttatcgctgaaaagatggctttggaatatgcagagaaaaaaggtctaaacgttgttacagtctgcccttgtttagtttttggtccacagttgcaaccaactgtcaataccagcaatgaactcctcatctatataacaaaaggaggtccaaacgtaatgaggaacatgttgttgcacatagtagatgtccgtgatgtggctgaagctttgattctggtatacgagaaaccagaatcatctggcagatatctttgcgcaccgtatcacatcagcccaaaggctactgtggagtttctcaagaacatttaccccaactacaattatgtaaagtgtagtgctgaagtgaatggcaagactgaaatatttacaccaatttcgtcagagaaattgaagagcctgggctggaagccaaggaaattggaggagacactcacagacagcattgagtactatgaaaagacaggaattttgcaggatgctggtggaagaccttgcgttctgccttacctttttcactttcttgttgagaactgagcacttcaggagctgtgttttctctgtatgcttgagacactagcactgaatatgtgtgtgtgggaataacacaaaaggcctgtcttggcacgacatataacttccatcaatccttcagttctgcggtgac

SEQ ID NO: 4919 - DNA, 1160 bp, Oryza sativa
  ref <308>: DATABASE ACCESSION NUMBER: AK062139
  ref <309>: DATABASE ENTRY DATE: 2001-12-06
cgatgtcgccggcctcgagagcgccaagcaagcgctgcaggaggccgtcatattgcctgtcaagttcccgcagttctttacgggtaaacggagaccatggagggcttttcttttgtatggtccaccaggaacaggaaagtcttatttggctaaagctgttgcaactgaggctggttctacatttttcagtatatcttcatcagaccttgtttcaaaatggatgggagagagtgaaaaacttgttgcaaaccttttccaaatggctcgagaaaacgctccttccattatcttcattgatgaaattgattcattgtgtggtcaacgaggagaaggaaatgagagtgaagcttctaggagaatcaaaactgaacttcttgtgcaaatgcagggtgttggccataatgatgacaaagtactggttcttgctgctacaaacacgccatatgctctagaccaggctgtgcgccggcgctttgataaacgtatttacattccactacccgacctgaaagcaaggcaacatatgtttaaggtccatctcggggatacaccacacaacttaaatgaaagtgattttgagaacttggctcgtcgaacagacgggttttctggttcggatattgctgtttgtgtaaaggatgtgttatttgaacctgtccgcaaaacacaggatgccatgttcttctttaaggctgatggtgatatgtggatgccttgtggaccaaagcaatctggtgccgtacaaacaaccatgcaggagctcgcatccaagggccttgcagcaaagatccttccaccaccaatctcaaggacagatttcgagaaagtcctcgccaggcagagaccgacagtgagcaagaaagacttggaggtgcacgaaaggtttacaaaagaatttggcgaggagggttgacaagattatgcgcactcacttatgcatagctgctccacagaaatgtatattttatgacttcgattgttctggttggaagttggattcacagatttgtacaattgatagcctaactatgattaattacaacctgtttattgcgttaggctatcattgctcctctgtcgtcaacttatttcatttttactgtcacttatacttgaaattttccacaagtgtattaattaaggaataatacttaacgtgg

SEQ ID NO: 4920 - DNA, 1277 bp, Oryza sativa
  ref <308>: DATABASE ACCESSION NUMBER: AK104894
  ref <309>: DATABASE ENTRY DATE: 2002-08-28
aagatggaaagaggaaaacttgacaaaggaggatactcggcaatatcaggtcccagggtagttgaaaaagcatttggtgacatgagcattactggtagtggatttggaagtggttctggattaggtggactgagcatggatatggactcatttgctagcaagcctaaaggccgtccatctgcagctgctactgctcctggtaaaggtcttggaatgaaattagggaaaacacagaagacgaatcagttcctggaatctttgaaagctgaaggagaagtcattctggaggatgtacaacccagttcagttcagtcaagggtgtcgcctcttccaccaagtgatcctgtcacagtgacaattgaagaaaaactcaatgttacagttaaaagagatggaggtgttaataattttgatgtgcaaggaacccttgctcttcaggtccttaatgatactgatgggtttatccagttgcagattgaaaaccaggatgtacctggacttagcttcaaaacacaccccaatatcaacaaagatttgtttaacagtcaacaagttgtgggggcaaaagatccaaacaggccattcccaagtggtcaaaatgaaactcctctggttaagtggagaattcatgggatggatgagtcatcgttacctctatcagtcaactgctggccatcggtatctggaaatgaaacttatgtcaacattgaatatgaggctgctgagatgtttgacctgcacaatgttgtcatatctataccattgcctgcacttcgggaggctccgagtgttagacagattgatggagagtggaggtatgattcgagaaactccgtgttggaatggtccattcttcttattgatcagtcaaaccgcagtggctccatggaatttgctgtccccccagctgatccatcaacatttttccccatatcaattggattttccgcatctagtacattcagcgatttgaaggttactggaattcgtcctctaaaggatggtaacccaccaaagtattcgcagagggctcgtttggtaacagccaattatcaagtggtttaacgcccaaataagggagattacctcacttcagcacacatgtttgcgggcatttcctttcggcaatgagctgtttagaagtcatggagaagaaggattgttttgcatttataaagaatgtaattttgtctgtttcatatgtagtaacatgtttcaccaaattgctgttaatttgtactgccacctgatgagaaataaaagcatgtcttttcctt

SEQ ID NO: 4921 - DNA, 1363 bp, Oryza sativa
  ref <308>: DATABASE ACCESSION NUMBER: AK062140
  ref <309>: DATABASE ENTRY DATE: 2001-12-06
agccatgaaggatattaccctggtgaacaggtcctacccttcggcaccattaaagatggagttgcccctaaagaatcaggaactggcaacaggaatttagcattatctggcccaagtcagggcagtgctagcttagataagaaaagcttggagattcagttgcctgaagaagataatttgtttacagtgaacgactctttggatggtcaaaagcctgatatttttccatcggtgagatccagtagggttgaggggctactaccagaaaaggcagttgatgatcttaattataggcttcaaagtctagtgcctggtgattcagaacatgttcaagtacttggtcctgatgcgctgggatcccattctcatgaacggcgttatcaggctgaatctcaaaatctttatcatcttctacaaggtagaccacctgcactggctcctcgtcctatgatggatcacattggtaataggaatcagcaaaccccgtttgacatgacacaagcgatacagcatgatcctcaccgttccttttcatcgaacatgaatcctatgcaacaatctcttcatgctcctcgggctcctcatgtagacccagctgctcatcatcttatgatgcagcacatctccacacctggaaattttccaccagaaggcctgcaaagaggtgttccgccatctcagcctgtgcatcacatgcctggttataggcctgagatgagcaatgtaaataacttccatatgcaccctcgccagcccaactatggagaatttggattgatgatggcaggtccatcaggtccagaactgagaggcaatcacccagatgcctttgaaaggtttctccagatggagcttacagccagatccaagcagatgcacccagcaatggctggtcatgtacctggcggcatgtacgggcccgagcttgacatgaacttgagatacagatagatggatgcgtgtgattgcttatgcagtatgaaggacccagaaacggtttgctgtacttgcgtcaaatagtactctttacccatgccataccgctatgtacctgtgtcaatgagcttgggttagcgtttaccatcaatacaatcgtttggctgcgataaggtacctgatgattcactggtggtgggggttggttgcatttgcatataaatatggagaagttatgaatgggttggtgatctggagtgatctgttgtgaaagtggggaacccaacgaatattgggtgaggtccatcaccgtagcagccacctctgcattgtgtctgtctgcctgcctatctgttgttttcagtttctgtataaatactattctgcaaaagaaagtaccagattgacagacacatttggaagtgtt

SEQ ID NO: 4922 - DNA, 1357 bp, Oryza sativa
  ref <308>: DATABASE ACCESSION NUMBER: AK062141
  ref <309>: DATABASE ENTRY DATE: 2001-12-06
ttgcaaggcccatggtggaggaaggagatgccaatttcttggatgcacaaagagtgccgaagggcgcacagaccactgtatagctcatggtggtggtcgccgctgcagtcatgatggttgttcccgggctgcacgtggcaaatctggcttgtgcatcaggcatggaggtggcaaaagatgtcagaaggagaactgtatcaggagcgccgaaggtcattcaggcttctgcatctctcatgggggtgggaggcgttgccaatttccagaatgcacgaagggtgcacagggaagcacaaagttctgcaaggcgcatggtggaggaaagcgatgcacattctcgggttgcaacaaaggagctgaaggcagcactctcttttgcaagggccacggtggaggcaagcgatgcttatttcagggtggtggtgtgtgcccgaagagcgtgcatggcggaactcaatactgtgttgctcatggtggtgggaagaggtgtgctatttctggttgcaccaagagtgctagagggcgtacagagtactgcgtgcgccatggaggtggcaagaggtgcaagtttgagggctgcgcgaagagtgcgcaggggagcaccgatttctgcaaggctcatggtggaggtaagcgctgctcatggggccaggttgacttgaccttcggtgtcggcgcaccacagtgtgataagtttgctcggagcaagactggtctctgttcagctcactgtgctttagtccaggaccattgtgtccgtggtggtacattaggcgctgcaaccttccagttcgcaactgatgccaaattcgacgagatggaagtcaccccagtgaagggagatcctcacgcgcaggcaagcagcgacgaccagtctcatctcggtggtgctcatcctcctgctgtaccggcgatcacctcggatcgattttctgaaggaagagtgcatggtggtgggctactggccttactttcacggggtggaaaccatgcgaatgcaggtaactcaaagaatggcgcccttctaccatgatgacatgggagtgagattctcttcaagaaattggtggctcgcagttttgacctgtttccaagagtttgtgctgtgacggacgggaaaaactagtgttttcacatttcaccagatgttcttgtgatgcttggatttgttgttatggccctctcccgtgtgctatatataaataaggagctcgtagagcgtggagtaccgggctttctgtcttccgtgctattgtagttgatgtcgttgaactgcccttctgtcagaattcatgtaatcttggtacttcgtgtttatttgtattgtcagtgatttgccttgctgctttgctgttgg

SEQ ID NO: 4923 - DNA, 1585 bp, Oryza sativa
  ref <308>: DATABASE ACCESSION NUMBER: AK062142
  ref <309>: DATABASE ENTRY DATE: 2001-12-06
atgaccgtaagagacgattccgggactattcagctttactgtgagaaagacagccttactgaggaacagtttgaacaactgaagacaattattgatattggtgatataataggtgcaaatggttccataaagaagacagaaaaaggggaactatctgtttacgtgaaaaactttgaaatccttacaaaatccttactcccactacctgataagtaccatggcttaactgatgtggacaagcggtatcgccaaaggtatgttgacatgattgcaaatcctgaggttgctgatgtattccgaacaagagcaaaggctgtatctgaaatccgcaagacaatggaatcatttggcttcatagaagttgaaacgccagttctacagggagcagcaggtggtgctgaagcaagaccatttataacccaccataactcactgcaaagagatctttacttgaggattgcaacagagctgcatttgaaaaggatgctggttggagggcttgagaaagtttatgagattgggagaatatttcggaatgaaggcatttccactcgccataatcctgaatttaccacaattgagatgtatgaagcctattcagactatgaaagcatgatgaatttggctgaagaaattgttactagatgtgcaatggctactcatggcaaacttagggttgattatcagggaactgaaatctcccttgaaagaccatggaggagggaaaccatgcattctcttgtcaaagaagcaactggaattgactttaatagctttggagaagatcttgaatccgccaaaaatgctgcaagagggatcaaaacagagagcaatgagaatatctcattgcaagcttgttcatctgttggacatgttctcaatgaggtctttgagactgttgttgaatcaagtctggtacagccaacatttgttcttgactacccagttgagatatcaccattggccaaaccacataggaggtatgctggtcttaccgagcgatttgaacttttcatatgtggtcgtgagattggtaatgcattttctgagctcacagacccaattgatcagaggggtcgttttgaaaatcaaattaagcagcacaatgctaagcgtgctgcaatgaccaaggaggtcaaatctactgagggtaaacacgaggaagatgatttttcgtatgaagttaccttagatgaagacttcctgacttccctagagtacggaatgccacctgcttccggaatgggccttggaatcgaccgactagtaatgcttttgaccaactcggcgagtataagggatgttattgcctttccagtcctaaagattcaacaatagcacttctgctcggatagctctaccattactctctttctaaaatttgagtggatacaggcgagggtcaatagtccagccagatagtcaaaataggtatcaattatgaatttcattttgggtttccattttccaacagccatttttcattcaggaatactatataaatctgtactttccacccactttcaggctaatgaactcttgctacatttcagagatataaagtatttgcacattgcacggattt

SEQ ID NO: 4924 - DNA, 748 bp, Oryza sativa
  ref <308>: DATABASE ACCESSION NUMBER: AK062143
  ref <309>: DATABASE ENTRY DATE: 2001-12-06
catcgatcttgtggataagagattctgaagctagggtgctatccatctagcaatcgagcttcttcagcaaaactacaaaagaacactatgtcgagcaacgtggattcaaagacatccaacaaagcctcctatcctcttgcatcttaagccattgaaacaacagcagctcaatcccaacatatttactcttcttaccttctccattgcatatataatagacacagctagctttgttgtaccattgaatcaatcatcaattttgcagcaatagctagacaatcagcgagacaaagtcacaaaaccatggcttctgcagatgctatcctgtcttcgcaggtggccggtgaatgcctgaagatcaacaagctggcagcagcaagcccagtgaaagtagtgcaggtgcagaagccgagcaaagagacgaagaacatcagcggtgcacctgtggctgccgctgccgtcagggtggttgtgagcaagcaagtgatgaagccacggtttgccgtggagctggatgggctcaactgcttcgagacacttgtccctcgctgatgatatcatgaagcgcacacacgagctgctagctgtgttccatctgatttgttgattttctggtcattatttttgcggggttatattatatttgttcaaattttctatgagttggatcctttcgcacgcgcgattatgtattttctttctttgaagtgatatgtgtaatttgctcttacgagtgattccgactgtg

SEQ ID NO: 4925 - DNA, 1244 bp, Oryza sativa
  ref <308>: DATABASE ACCESSION NUMBER: AK062144
  ref <309>: DATABASE ENTRY DATE: 2001-12-06
gctggcagctccttcctgcgccacggatacgccatccacatgtacgctgctaacaagtccatggacggatgcgccttttgcaacgctgacggcgatttcctcattgtcccccagcaaggaaagctgttgatcacaactgaatgtgggaagctgctagtcccacctggtgaaattgttgtcattccccagggttttcgctttgctgttgatttgcccgatggtccttcacgtggctatgtttctgagattttcggtacccactttcagctccctgatcttggcccgattggtgcaaatggcttggcttcggcaagggatttcctttccccaacagcatggtttgagcaagtccaccgcccaggatacacaattgtgcagaaatatggtggtgagctattcactgccactcaggacttttctccatttaatgtggtagcgtggcatggaaattatgtcccttacaagtacgacctgagtaaattctgtccatttaacactgttctattcgatcatgctgatccatcagtaaatacagtgctgactgcaccaactgataagcctggtgtcgcattgcttgattttgtgatattcccgcctagatggttggtcgctgagaacacatttcgccctccatactatcatcgcaattgcatgagtgaatttatgggattgatctatggaatatacgaggccaaagctgatggttttcttcctggaggtgctagccttcacagttgcatgacacctcatggcccagacaccaagacatacgaggcaacaatcagccgtcctgatgccaatgagccatcaaggctaagcggcacgcttgcattcatgttcgagtctgcactcatccccagggtttgccaatgggccctcgattccccatcccgggatctcgattactaccagtgctggattggattgaaatcccacttctcacatgacaatggaggggcaaccagcgaagaaccatgcagaaagtagctttgatcagttttagtagcttatgatgctgtgcttgtgtatattttgtgaggctgtaactgaaccattcaccagatccgtgtaagtaaagacaataatgctcagcagcctgtactgtacaatcgtgggtatagcattatcagaagcaagaatgtcaatttcaataagaggttgcctacactgtaggcagattagtacaggcgtgtttgtaacaccatgaatgaatgaatggatggatggacaccgtgtgaggtacc

SEQ ID NO: 4926 - DNA, 1313 bp, Oryza sativa
  ref <308>: DATABASE ACCESSION NUMBER: AK062145
  ref <309>: DATABASE ENTRY DATE: 2001-12-06
gattccatttacaagaagaccactctttttggtgatcgacagcaatgccagctattcattcaaggcaggtttgtttaatcttatttttttatcccaagcaaccatcattattcaatactacctccgtcctaaaatataacaacttagtacatgattagacataatctagtacaacgaatatggatagaaatattttgagacggagggagtatttgttatgggtcacttatattaatttattctggctagtgcgggactgaagactgaagaatatttctttagtgggttatccatgagtgatgaacagttttactgagtcctgtaatgctttttgagagaaagcacatgtgcttggatctgcacatagacaggcttatagtttttgtaattttttaggttgaagcttttctcagtttacttctgtgtaaaatcatgcattatacttatccaagtgccattctattggcattcctcattttacttttgactatgcacctcttagattacgatggaatacatcatatttttactgtaggctgctggttggcatcatgccatttattgttagtgctgtcagtacgttgatcccctctaattttttcaaattaagcattgcagtcaattcatgggtttgaaaaaggggagacaacggccatgttactttctccaagttgccgatcttcctcggcaggattcagtggggattctgtacggcagattggcagtcaatttactatgtttctcacagctccattgcaagctttctgccatctgattggcaataatggggtcgacattgatagggatacctataacaaagctgaagagttactatcattgtccttaaatgaatgggccactactttggttgcatcatcttcacttcatcctgtttgggttgaagttttaggcgatccactcttgaggcggcttcttctcaggtttatattctgcagagctgcgcattcgatcttcaaacctacgtaccataaggtggacttcctcccaacttgcacaccccctttgccagagtcggttgatgcagagagcatgctttcccaatgctgcctgttgcgagttgcatctttctttggcgccaccaaccaattctcattttctgaggtaaccacatggcctgaggttgatgttgaggaggctgctgtcgtcaacccctcgatctagcggtaccaactgtgactcttgcgcatcacaatatttagtttctacctatcaaaagatgaagagatccattgtaataccttaatgtggtgtgtgtacagccaaatttgcaataccctatttatcgtcgtgct

SEQ ID NO: 4927 - DNA, 984 bp, Oryza sativa
  ref <308>: DATABASE ACCESSION NUMBER: AK062146
  ref <309>: DATABASE ENTRY DATE: 2001-12-06
aatgataaaaattttgtggtgatcaatcagaagggtattgaccctccatccctcgatctcctagctagagcagggattattggtctccgaagagcaaagaggagaaacatggagaggcttgtgttagcatgtgggggtgaagctgttgattcagttgatgatttgactgaagattgtcttggctgggctgggcttgtctatgagcatactcttggtgaagaaaagtacacctttattgagaatgtgaaaaatcctcgctcttgcactatactgattaaagggcctaatgatcacaccattgcgcaaattaaggatgctgttcgcgatggtctaagatctgttaagaatacggttgaggatgaagcagttgtgctgggagcaggagcatttgaggttgctgcgaagaagcatcttattgacaacgtgaagaaaactgtcaaaggacgagcacaacttggggtggaggcatttgctgatgctcttcttgtcatacccaaaacactagcagaaaattcaggtctagatacccaagatgttattgtctctctccagaatgaacatgatcgtggattggtggtgggattgaaccatcactctggcgaaccaattgatccccaaatggagggcatcttcgacaattactccgtgaaacgccagatcatcaattccggacccatcatcgcgtcacagttattgcttgtggatgaagtgatcagggctggccgcaacatgaggaaaccaacctaatactttccctacctgccgctgagtcctctgttttgtgggagatattacgcattttgtttggttattttgcctttctatctttagtttgtgcgtagtagtgaggtgggtgaaatgtccggaggttctgctagtttgttcctctttgactgtaacagatttcacttgtaatctttgtcacactgtcatttatgccgtcctgatgatttgggaatcagtatgtgcttatgctttcatgtc

SEQ ID NO: 4928 - DNA, 524 bp, Oryza sativa
  ref <308>: DATABASE ACCESSION NUMBER: AK062147
  ref <309>: DATABASE ENTRY DATE: 2001-12-06
tgtgcaagagcatcaagtgcgtcgtggtgctcatctccgggcggccgctggtggtggagccgtacatcggcggcatcgacgcgttcgtggcggcgtggctgccggggacggaggggcagggcgtggccgacgtgctgttcggcgactacgggttcaccgggaagctgtcgcggacgtggttcaagtccgtggaccagctgccgatgaacgtcggcgacgcgcactacgacccgctcttccccttcggctacggcctcaccacgcaggcgcacagcagctgatgcggcggcgatgtcggtggagagtgacgttggttgggacgtgacgccgtcgtgacgagagagatggcgatcatgtagtactacatacacatgttgttggggtggatttgtttgtggtgggggaatgcaataacgatgagagtgagtgatgtgctcaattcttgaggctgtggctgttgttagtgtcatagtgttgggttgtggaataataaaaaatcagatgcgcttttgccttctttctct

SEQ ID NO: 4929 - DNA, 733 bp, Oryza sativa
  ref <308>: DATABASE ACCESSION NUMBER: AK062148
  ref <309>: DATABASE ENTRY DATE: 2001-12-06
agcatgattgtcagcaaggacaataatatcttggagtcattcagtgccacaaatcaagcatctactcttcaatttcccaattactcttcacttgagggatcagtatttgaaagatttgatcctgatctcatcaagaaactaagcaccagttgtcttgtgatgcaaaaccacaaatatggtatatcacccaagacattgcgagagaatgttgccttatcaagtttcttcaagattctgacaacctcacctgatgaaaatggcgaggtctatgtctcaaccgtgcaagcaaacaaatatcctatcacatgcactcagtggcatcctgagaaagctatttttgagtttggtaaacaaatgattccacacagcgaggaggcagtacaagtgacacaaaattttgccaactattttatcagccaagcccgcaagtcccagaacagacctcccgcagacaaggtgttggacaacctgatttacaactacagccctacgtttattgggaaaaaatcgaaatcgttcgacgtggtctacatcttctcctaatggccaacctgatcattgaaagtcttcgctattgtattctacatggagtgcttcactgtgtatgagtatatatgtgtccattgtctaccattgtgctgcattgccgttgccgctgtaatttatcagacgaatcaagagcggatttcgctccctgctttggaaggaggtcccagctgtttgatccgcggtc

SEQ ID NO: 4930 - DNA, 1578 bp, Oryza sativa
  ref <308>: DATABASE ACCESSION NUMBER: AK062149
  ref <309>: DATABASE ENTRY DATE: 2001-12-06
acttcgtccccgcgtcgcgtggcccgaagcgagggagcggaggctgctcgccgcgccgcgccgcgccgccgcgcttggtcatctccgccgccgccggccgtcgccatgggcatcaagggtttgacgaagctgctggcggagcacgcgccgggggcggcggtgaggaggcgggtggaggattaccgcggccgcgtcgtcgccatagacaccagcctcagcatctaccagttcctcattgtggtaggaaggaaaggaacagaagttctgaccaatgaggctggtgaagtcacaagtcatctgcagggcatgttgaaccgaactgttaggattctagaagcaggaataaaacctgtttttgtgtttgatggtgagccacctgacatgaagaaaaaggaactggcaaaaaggtctttgaagagagatggttcttccgaagatctaaatagagctattgaggttggagatgaggatttaattgaaaaatttagcaaaaggactgtaaaggtcacaaaaaagcacaatgaagactgtaagaggctgttaagcttgatgggtgtccctgtagttcaggcaccaggggaggcagaagcacagtgcgcagcactctgtgaaaatcacaaggtctttgctatagcttcggaggatatggactctctaacttttggtgctagaaggtttcttcgccatttaaccgacctgagttttaagagatctcctgtaacagaattcgaagtgtcaaaggttttggaggaacttggactcacaatggatcagttcattgatttgtgtatccttagtggctgtgactactgcgagaatattagaggtattgggggacagagagctttgaaacttattcgtcagcatggttatatagaagaagtagtgcaaaatcttagccagacaaggtatagtgtcccagaagactggccttaccaggaagttcgggcattgtttaaggaacctaacgtttgtacagatattccagacttcctgtggaccccaccagatgaggagggccttataaactttttggcagccgaaaataatttcagtcctgatcgagtagtaaagtctgtagaaaagataaaggctgctaatgataaattttcccttgggcgagggaagcttttggcaccagtagcgaacttaacaggatctacatcaactgcagggaaggaacccaaatgtatcctgggtggtccagggcaagtcatgaaggctaggtcacctctacaagtgtgcaagagctcaagcttgaacttcatacatgacaattcaaaagcgttcatgctgggcaggcgatcaggatttctcagaatatctacatatgcttccatctgaatctggagctgctctatttccatgagttggttggctgaagctttgactgacaccatctacagcttcatgaagaattagtgatttcttgaaatgcgttgagcctatgctattattgtagttcagccttttgccttgtaaaatcaagttgaatgcttgagctttctcacatttagcactggttctcgcttgagtgttgaacggtgaccatgaagaatttgatcaccttttggctat

SEQ ID NO: 4931 - DNA, 1584 bp, Oryza sativa
  ref <308>: DATABASE ACCESSION NUMBER: AK062150
  ref <309>: DATABASE ENTRY DATE: 2001-12-06
gatgaaccggaagcctggttacggtgccgaactgcgcgctaacctaggacccacaaagggtgttggtcgattaagacagcaggacggtggtcatggaagtcgaaatccgctaaggagtgtgtaacaactcacctgccgaatcaactagccccgaaaatggatggcgctgaagcgcgcgacccacaccaggccatctgggcgagcgccatgccccgatgagtaggagggcgcggcggccgccgcaaaacccggggcgcgagcccgggcggagcggccgtcggtgcagatcttggtggtagtagcaaatattcaaatgagaactttgaaggccgaagaggagaaaggttccatgtgaacggcacttgcacatgggtaagccgatcctaagggacggggtaaccccggcagagagcgcgaccacgcgcgtgccccgaaagggaatcgggttaagatttcccgagccgggacgtggcggttgacggcgacgttaggaagtccggagacgccggcgggggcctcgggaagagttatcttttctgcttaacggcccgccaaccctggaaacggttcagccggaggtagggtccagcggccggaagagcaccgcacgtcgcgcggtgtccggtgcgcccccggcggcccttgaaaatccggaggaccgagtaccgtccacgcccggtcgtactcataaccgcatcaggtctccaaggtgaacagcctctggccaatggaacaatgtaggcaagggaagtcggcaaaacggatccgtaactccgccgccgaagccaccacacctaaacccttcttccccctcctcctccgccgccgccgccctcccctctcgccatggcgtcggagaagaagcagtcgaacccgatgcgggagatcaaggtgcagaagctcgtgctcaacatctccgtcggcgagagcggcgacaggctcacccgcgcctccaaggtgttggagcagctgagtgggcagagcccagttttctccaaggcgaggtacaccgtgaggtcattcggtatccgtcgtaacgagaagatcgcgtgctacgtcaccgtcaggggcgagaaggccatgcagcttttggagagtggcctcaaggtcaaggagtacgagctgctgaggaggaacttcagcgagaccggatgcttcgggttcggtatccaggagcacattgatcttggcatcaagtacgacccgtcaactggtatttatggcatggacttctatgttgttcttgagcgtgctggataccgtgttgctcgccggcgcaggtgcaagtcccgtgttggaatccagcacagggtgaccaaggaagatgccatgaagtggttccaggtcaagtatgagggtgtcatcctcaacaaggcccaagcaaatacgtcgtaattggcaagggtttaaccagttatcctgtagaattaagtgagggttcatttgaatcatggaactgtctttcttgaaagccaaatgcactgtcaattttgcctctgttggagttgacctgcgtctatatttccattaaatgcttaatgatatccttgttttaaatcttaatattaaggcagacttggaatc

SEQ ID NO: 4932 - DNA, 731 bp, Oryza sativa
  ref <308>: DATABASE ACCESSION NUMBER: AK062151
  ref <309>: DATABASE ENTRY DATE: 2001-12-06
ggtccaatgcctccactttcatccacaagtcccctccaaacattcctgaggtgaaaattccagaggacttgacagtaaacattgccctttctctgagatatgagatcaatagaggttttgcaaccttgagggagattggtcatggccgtgatctgaagaagttcctcattgtgatcgctggactctggattctgtcagttcttggtagcagctgtaactttttgactttgttctacatagtttttgtggcgctctacactgtgccagtactgtatgagaagtatgaggacaaggttgatgcttttggtgagaaggctgagattgaatttaagaagtactatgccctctttgaagagaaatgcctatcgaagattcccaagggtcctttgaaagataagaagcactagattagtagaaggtacctgcaatgaatcagcagccgtgttaatcactattgctcgacttttattttggaggatggttatgagtccttgtgtgtgtgtctagttgataatatatacttgcatgggcagttctagccttctagcatggctgatagttgttatgtggtggcagatggttgtggcgtgcaatcttttgtggagttgagcaatgctggctcaaatctgctgatcttttcccccctttcatgttcaactttaagcatagttactatatctggatgctagaagtattatggtactatcaatgccccaagtgaaccttgtgat

SEQ ID NO: 4933 - DNA, 610 bp, Oryza sativa
  ref <308>: DATABASE ACCESSION NUMBER: AK062152
  ref <309>: DATABASE ENTRY DATE: 2001-12-06
agaagcgttttgtgaagacgtacctaagcaattctgtaagtgaagaacctgatgcggaagaggtggagaaccttctccaaagcattgagaaatacacgctcgccagtcatctagtttggggcctctggggaataatatcggatcatgtcaatgatattgacttcgactacaaggagtatgcaaggcagagattcgagcagtattggcagaagaagcaagcacttttaacttcatgaattgcctgaaggcgtcaggtcgtacctgaaggcctgtgctgcacataacttgtgcgatgttactgacacataactccctgtgaaaagaagaaagatgaagatgataatgaagaagaaaccctttcgggatcaggagttctcatcccgaaatttccgtaaggttcagcttcaggaggaagctgtgggctttggttgctttgtttatagtctgaaaggcagcgaagaaaaagcccctggttgcgtgtttgtttgctcgacaaactagaggccgcttgtggggctagtagtgccgtcgtgtttcatgtgtatgtatacctaaatatatgttacataatggatcttgctttcgtcgactcgagagtcgagacagtgcc

SEQ ID NO: 4934 - DNA, 1108 bp, Oryza sativa
  ref <308>: DATABASE ACCESSION NUMBER: AK062153
  ref <309>: DATABASE ENTRY DATE: 2001-12-06
gagaatattgtcactgctgcgagagttgctgggaagaaagtccctgttttgctcaggataaacccagatgtggatccacaggtccatccttatgttgcgactggaaacaaaacctccaaatttggtatccgtaatgagaaactacaatggttcttagactctatcaagtcatactcaaatgatatcacactggtgggtgttcattgtcatctgggatctaccattacaaaggtcgatatatttagagatgcggcaggtcttatggtgaattatgttgatgaaattcgagcacaaggttttgaactggaatatctcaatattggcggtggcctgggcatagattatcaccacacggatgcagtcttgcctacacctatggacctcatcaacactgtgcgagaattagttctgtcacgagatcttacactcatcattgaacctgggagatccctcatagctaacacttgctgcttcgtcaatagggtcactggtattaaatctaatggtacaaagaatttcattgtagttgatggcagcacggcagagcttatcagaccaagtctatatggagcataccagcatatcgaactggtttctccttccccagatgcagaagtagcaacattcgatattgttggaccagtttgtgaatctgcagatttccttggcaaagacagggaacttccaacacctgataagggagctggtttggtggttcatgacgcaggagcctactgcatgagcatggcttcaacctacaacttgaagttgcgaccacctgaatattgggtagaagatgatgggtccattgctaagattcggcgtggagagtcatttgatgactacatgaagttctttgataatctctctgcctaactcgttttcctgcaattgtaataagatttttctcttgttatgtgtggctgtatcaggattcggattgatagcgcagtacagtttgctgtagaatcggtatttttttttattgtactgtgatgtcggtaccttattttatccaaagatttttggcaaattttgctacaggacacttaaattttgtagcctttgctgtgagacactaaaaaacgtatatcttcttgtgaacatt

SEQ ID NO: 4935 - DNA, 1827 bp, Oryza sativa
  ref <308>: DATABASE ACCESSION NUMBER: AK062154
  ref <309>: DATABASE ENTRY DATE: 2001-12-06
aaactacgaaacctaaaacagagaagaagaaaagatctttcttcaagagagcagaaaatcaatcccctgcatatgcacttggtgaaattgaggagggtgctccaggagctgaaaatgaaaaggctggtattgtaaatcaacagaagctggaaaagaaatttggccaatcttctgtttttgtcgcatccacacttcttgagaatggtggaaccttgaaaagtgcgagtccagcatctcttctaaaggaagcaattcatgtcataagctgtgggtacgaagataagacagactgggggaaagagattggctggatctacggatcagttacagaagatattctaactggttttaagatgcactgccatggttggcggtcaatttactgcatacctaaactacctgcattcaaaggttctgcaccactcaatctttctgatcgtcttcaccaagttcttcggtgggctcttgggtctgttgaaatattcttcagcaaccattgccctctttggtatggatatggtggtggacaaaatgtttggaaagattttcctacattaattccatcgtgtatccttttacatccattccactcttggcttactgtacattgccagccatctgtttgctaactgggaagtttatcactccagagcttacgaatgttgccagtctctggttcatgtcactttttatctgcatttttgctactggcatcctggaaatgagatggagtggtgttggcattgatgattggtggagaaatgaacaattttgggtcattggaggggtctcttcgcacctctttgctttgttccagggacttttgaaggtcatagctggtatagatacgagtttcactgtgacatcaaaaggtggggacgatgaagagttctcagagctatatacattcaaatggactaccttgctgatacctccaaccactctactcttattgaacttcattggggttgttgctggtgtttcgaatgcaatcaataacgggtatgaatcatggggacccctcttcgggaagctcttctttgcattttgggtgatcgtccatctttacccattcctcaaaggtttggttggaaggcaaaacaggacgccaacaattgttattgtctggtccattcttctggcttcaatcttctcactcctctgggtccggattgatcctttcttagcaaagaatgatggtccacttctggaagagtgtggtttggattgcaactagggagttgggaactcccccatcggtgtgtgctgaaggaatacacacttggttctgtgtagatagaaacacgaaaggtgatgttttgcttttgtcccatggtggtagctcagcctcatatctgcaatatttgggcaaaccggaggctgcggcaaccttgtgaacttcggccaccaagtacagccaaactgcgtttgattgtccagcattatttattactgctttggtggtaaatttaattgggtgagctgaacagaaggtgttggcattgctgttcatgtacaaacttgtgtctcaataaggcaggcaggaatggatctgctatggagtagaaaggtgatgcacagtatttatgtagtgaaacgtgtgtgggtgcccattgaagggcttgttcattccttgtttctcttttttacttatctagaaccaaatggatcatttagtgttagtaatgtagtgcatccagtgttgtaaaggcgccctatttttggttggtaattgtaatcaatatatacttctgttgtcttgacattttcaaagaaaggttgtaaggatgatcgtgatcagatataatatactcgtttctttttgtg

SEQ ID NO: 4936 - DNA, 1692 bp, Oryza sativa
  ref <308>: DATABASE ACCESSION NUMBER: AK062155
  ref <309>: DATABASE ENTRY DATE: 2001-12-06
caaagcgctctctctctctctctctctctcgcatcgcgcgcagccttcctcatccccgtcctgatccactccacctccctaatccacagcgcgcgccagaggaaatccggcgccggtcgaggcggccgcgccgcgccgccgtcacgcccagcccactcgattcggtcgcgtgtgcgctaggaagtgttttctgttgtattggcaacgtgatagtttttgtggtgcaaaacattcaagatgggcgccatggacgtacaacttgagtctactgctgttcaacatggacaagctaagataaatgtggaggaacatgctctagtttctctgttgtctgatgagaagtacgcaactgaaaagaccgaagatgtggaccctgatgattatgagaaacttgaggaagggataatgcagtatgggtgtgcacgttatcgaagaaggtgccgcattcgagctccatgttgcaacgagatttttgattgtcggcattgccacaatgaaacaaagaattcaattaaaattgatgctgtgaagaggcatgaactcccacgccatgaagtgcagcaggttatatgctcgttgtgtggcacggaacaagaggtacggcaagtatgtatcagttgtggtgtatgcatggggaagtacttctgtgaagtgtgcaagctctttgatgatgatgtttcaaaacagcaatatcattgcaatggttgtggaatatgcagaattggtggcaaggagaatttctttcactgctcaaaatgcggatgctgttattctatagtattgaagaacagtcatgcatgtgttgaaggagcgatgcatcatgactgtccaatctgctttgagtacctttttgaatcaaccaatgatgtttccgtcttgccctgtggtcataccattcatgtcaagtgcttgcgagaaatggaggagcactgccaatttgcttgcccgctttgctctaaatctgtctgcgacatgtcgaaggcatgggagagattggacgaggaactagcaacgatatctgacacctgtgacaataaaatggtgcgcatattgtgcaacgattgtggggcaacatcagaggtgcagttccatttgattgcgcacaagtgccagaagtgcaagtcctacaacacccgccagatctgaagtggcgaagttttgatgtgattcattttgtatgggaagagagccctgggggatgctcattttgcaacacaaatcccgctaacgcctctgggaatctgatgagctctcggtcgttttcttgctcattggatgcctcagccgaggcaaatcactcgcatctgaaattcatctatgaagtggatgctgttccctcctgtgttcaatttattacctcaccatgtcgcagactctgagtcctgttcagcttaagtttctactagcactagccgagataataagtgcacgtctactcaagcttctgggcataaatggtggctagcttgtgtgttatggtgtgtacttgttgagtctcgggcaaacactgtaacggttagtggcatagtattacttcttgctcgtgtgcgtgtgtagtaggatagcggattgcaggacgtgggtgttatttactggtaggaactgtggtacttgcagtagccaccatttctcatgttcaatgccggtcccatatgccggtcttgttcagttcctataccttgctcggttgag

SEQ ID NO: 4937 - DNA, 906 bp, Oryza sativa
  ref <308>: DATABASE ACCESSION NUMBER: AK104895
  ref <309>: DATABASE ENTRY DATE: 2002-08-28
ctctgccaccgctcgtcttcctcccaccttccgccgccgccgccgtcgctctcctcttcgctccgccgcgcaggtaagaaggagaggaggagaaaatggtgaagcacaacaacgttatccccaatggccacttcaagaagcactggcagaactatgtcaagacatggttcaaccagcccgcccgcaagcagaggcgccgcattgctcgccagaagaaggctgtgaagatcttcccccgcccaacatctggccctcttcgacccattgttcagtgccaaactttgaagtacaacatgaagtcgagggctgggagaggctttacccttgaggagctgaaggctgcgggcatccccaagaagtatgctccaaccattggaatttccgtggatcaccgccgcaagaaccgctcacttgagggactccaggctaatgtccagaggctcaagacatacaaggccaagctggttatcttcccaaggcgtgctcgcaaggtcaaggctggtgattccactgccgaggaacttgccactgccacccaggtccagggtgactacatgcctattgctcgtggtgagaagcgctcagttgaggttgtgaaggtcaccgatgagatgaaggcgttcaaggcctatgctaagctccgtgttgagaggatgaaccagcgccatgttggtgcccgccagaagagggctgctgaggcagagaaggaagagaagaagtgaagtgaccggacatagtatctgttttgttatattcagcagctagtggatgctatcagggactaaatctaaattttgtttttgtgctggaaatagagaccagcttatcattttggtgtcatcataccccttctgtttgatatctggtactgatttgcatgctctgctatcgaatgaaattccatcc

SEQ ID NO: 4938 - DNA, 1578 bp, Oryza sativa
  ref <308>: DATABASE ACCESSION NUMBER: AK062156
  ref <309>: DATABASE ENTRY DATE: 2001-12-06
gaaaacaatccctgaagatagtggaagtggcatggggaatgatgccactcattgtgctagctctttcttctacgaaaaagctaagaagcatctaatcgagaggctagacaatcaaaagaatgacacttctcagatcgtacacaaatcaaaaccctttgggaaattactttcatattcggagaatgatacgttttctcaaactgattgtcctcaagaggatgttaaactgtcagaggattcgactgcttcatcagcattactgacgactgaacaagaggatatttcatcaaattctgacccaccaatgaagtttggggagctaataccattggacaccagcacatcggctaacacacagctggatgaatttaagacagaccatgccagtcatccagtcaaagagggcactatctcgcaggagttaactagtgaagggattgacagcatgaatgatgcaacagataccccccaagtctctattcagatcgaaacttcaactgaaagcttggaacaaataaataccgaccaatgcttcgcagaagagtcacaaaccatgaatgcattaccagaagtatccctgcacactccagaaaaagttaacgagcaattcaatcatagtccatcggcagttgttggattaaccaagccatccatcttgacattttcttgctccccggagaatgcagatgacaaagaggagagactgagccctcaatctgttctagattctttcctgggagatggtatcagccccagccacaaaactcgaacgcaagatgaattgtccatgccaagcacaaggattctgtttaaagaggatgacactccctcgggaaccccaactttgcaaaacacaccacaagaagctattttggatgataaacaggcaaggctttccttcataaaggttgtgcttgaggcttcagacttcttgtctgaggaaagttcagagatatggtatgtggacggatcactgcttgacacatctgtattggctgaagtaggaactttgtactgcctgacagacgatgcggtgtttctctttgattgtgtggaagaagctctttgcaagatcagggataacttttttggttgtgacccttgggtagcttatctgaaacacagtgtgaggccagctccggtaggaacagggctcattcaagaggtggataattgcatcgattctcttgtcagtgatgaggttccaagtacattagatcgggtggtgctgaaagacctggagagtggatcatggatggaccttcgggttgatactgaagaagttgctatagaggtgtgggatactttgcttgatgatttactggaggaaatggtgtttgacttgtggctttaagattgttttgttgccatccgatggaaactgatagagtttatagttcggcacttcggcaggattttattcaccaaaaaccatagtacaaaaagctttgaaaaagtgagtgtgacagatttaaacagagtgtatacagcgcagtagagttaggcttgcctgactgtttgcatcatactataaatcttgactatatgtggctcctaacactaggaatttttcttctt

SEQ ID NO: 4939 - DNA, 1497 bp, Oryza sativa
  ref <308>: DATABASE ACCESSION NUMBER: AK062157
  ref <309>: DATABASE ENTRY DATE: 2001-12-06
attctctatggctgtggtccaggccaacaacttacttgaggatcagtgccagattgaatcgggtccattgagctttcttgactctggtccatacggaactttcgtcggggtttatgatggacatggtggcccagagacggcttgctatatcaacgatcacctattccaccatctgaaaaggtttgcatctgaacagaattcgatatctgctgatgtgctgaagaaagcatatgaagctacagaagatgggttcttctctgttgtcaccaagcaatggcctgtgaagcctcaaatagctgctgttggctcgtgctgcctggttggtgtaatctgtggtggcattctttatgttgctaatgttggggattcccgtgttgttttaggcagacatgtcaaagccacgggagaagttctggctgtccaactctcagcagagcataacgtaagcattgagtcagtgagaaaagaattgcagtcaatgcacccggaagataggcatattgttgttctcaagcacaacgtttggcgtgtaaaaggtctaattcaggtctgcagatcaattggtgatgcctatctcaaaagatcagagttcaaccgggaacctttgtatgcaaaattccgcctccgggaaccttttcacaagcccatactaagttcagaaccatcgattagtgtgcaacccctacaaccacatgatcaatttctcatatttgcatctgatggtctatgggagcacttaaccaatcaagaggccgttgacattgttcacagtagccctcgcaatggaagtgctaggaggctcataaaggcagctttgcaagaagcagccaagaaaagagaaatgaggtactcagatctcaagaagattgaccgtggtgttcgccgccacttccatgatgacataaccgtcatagtagtcttcctcgactccagccttgtcagcagggcgagcacctacaggggcccttctgtttctttaagaggcggcggcgtgaatctgcgcagcaacacacttgcaccttatgcatctcaaatgtgaccctgaatgcatggtggaggcaacacacctgactgaagaaggttttcttcccctgtggtaaagtaaaagccggtcatttcggccaagatcattccctcaatgatgtaaaaaaaaatggagagacacagaagctcttctccagctctttaatcccagcatcatagtaatgtatgtttcaagatcgacttaaaaagaatagctagctgttcaattgtgttgtgctgctgatgctccatggaaagctcaatctttccagccgaaaaagcaaaagtcttgttccgccgcaggaattttaacaccagtgcatatgaaataataagccaaaaaaggagtaacttaattagctgatgttgtggaccttatgtatactactactatatttttgacttgtacatgcactcttatttattgaccaccgtgtaaattgttgctttccccttggggaagattcactttgg

SEQ ID NO: 4940 - DNA, 1388 bp, Oryza sativa
  ref <308>: DATABASE ACCESSION NUMBER: AK062158
  ref <309>: DATABASE ENTRY DATE: 2001-12-06
aactctcagtattggtgatggtgctaatgatgtgagtatgattcaagctgctcatgtggggattggcatcagtggacaagaaggaatgcaagctgttatggctagcgattttgccattgctcagtttcgatatcttaccgacttgctccttgtacatggaagatggtcatatttgagattgtgcaaggttatcacatattttttctacaagaatctgacatttacgctaactcagttctggttcactttccaaactggtttttccggtcagcgattttatgatgactggttccagtccctttataatgtcattttcacggccctacctgtaattatggttggattgtttgataaggatgtgagtgcgtctctgtcaaaaaaatatccgaagctttaccaggaaggaatcaggaatacattcttcaagtggagggtgatagcagtgtgggctttctttgccttctatcagtcgatagtgttctattacttcactgcagctgcaagtcggtatggtcatggttcatccggcaagattcttggtctttgggatgttagtacaatggctttcacctgtgttgtggtgactgtgaatctccgacttctaatgtcatgcaactctataacaagatggcactatatcagtgtagctggcagtataacagcctggtttatgttcatcttcatctactctgcaataatgacatcattcgacagacaggaaaatgtatattttgtgatttatgttttgatgagcacgtttttcttctacctcacactattgcttgttccaatcatcgctctctttggcgacttcttatatttatcaattcaaaggtggttcttcccctatgactaccaagtaatccaggagatgcacagggatgaaccccacgagtacagcaggatacaacttccagagacaagccatctaagcccagaagaagcaaggagctatgcgatctccatgcttccccgagagagctcgaagcacaccgggttcgccttcgactccccgggatacgagtcgttctttgcatcgcagcaaggtgtcggtgtgccgcacaagccgtgggacgtagcgcggagagctagcatgaagcagcggcagaaaacgggaggatcataaccctagtagcgcccctaccttcctggccccccccattttgtgtaaagtttttgtacatcacatgcttttgctggcagaccacaggagagtgtgtataagcttgtagctttgtagccatttttcgtgttttgtcaccgatatgttgtgttggcgatgttagcagaggccattgatccagttggctgcagaattacttaggacacgccctttagttaaaaacaaagttggaaactgggaatgcagttagtagtgaaattctttc

SEQ ID NO: 4941 - DNA, 1474 bp, Oryza sativa
  ref <308>: DATABASE ACCESSION NUMBER: AK062159
  ref <309>: DATABASE ENTRY DATE: 2001-12-06
tttttttcatgtaagctcagtcttcagaacaaaatcatggctactttatgccactctgctcataccagaacattcggaaagattggcaggagaaatgcagcaaaggtcctctgctcaacgcagatgccgccatctcagagcacaatcaaggttgttatcattggggcgacaaaagagattggaagaacggcaatagcggcagtaagtaaagcaaggggaatggagcttgcaggggccatagattctcagtgtataggcctagatgcaggagagataagtggcatggaagaagccctggaaattccggtgctcaatgatctcacaatggttctgggctcaattgcacaagtattggcctcttcattgtactataaaatgcttatatccacttgtacagttgtactgttatacacttcacgggtttgctatttgaaacttatgttctttcagaccagagcaactggagtggtggttgattttagtgaaccttcaactgtttatgataatgtcaaacaggcagcggcatttggtttaaacagtgtggtgtacgttccaaaaattgagttagatacagtaactgagctgtcagcattctgcgagaaggcaagcatgggttgcttggtcacaccaacattatcaattggctcagtgctcctacagcaagctgctatccaggcctcgttccactacaacaacgtcgagatagtggaatcaagacctaacccatcggatttgccatcgcaagatgcaatacagattgcaaataatataacagatcttggtcagatatacaacagggaagatatggactccgataatccagcaaggggtcagatacttggagaagatggggtgcgtgtccacagtatggttctaccaggccttgcttccagtacatcgatccatttctcgggccctggagagatttacaccttaagacatgatgtgacaaatgttcaatgcctaatgccaggattaattctggcaatacggaaggtgatacgcttgaagaacttgatttatggtctggagaagttcttgtaggattttattagaatgctggtaggaattttcatcccacatatcaagagaaatacaagctatggatattcatggtaaggataatgcaaaacaatgttacccaagatacacaatcttgctgcaagttcaaggtggaaaccaaacacatgtcagcaatattcgggaaagcaaccatggtgataaccattgtcaccaaaattgagccaattaataaatgagtggttgaattgactcaaggcctcaagcatatgagttccatcacagaacataagggaactctagctgtaaggaactatgtttggtcctgggtgatgctgacgcgaaatgtttataacaatgcatggtgcgttgatagggaactgttttgatcccttgagatgaagtgatgtccccttgtttgtaaaacccatcaaaatagttatgagtaaccttt

SEQ ID NO: 4942 - DNA, 1488 bp, Oryza sativa
  ref <308>: DATABASE ACCESSION NUMBER: AK104896
  ref <309>: DATABASE ENTRY DATE: 2002-08-28
ctcttccggcgcctgggcgctcttcccccctcttccccgccgcaatgaggcgcttggcgacgcacctccaccgcctctcccaccgcgccatcccttccccgcctccatctcgacccccaaccaccactagcctccccttcctcctctcccgccgcctcctctccgacgacgccgcgcctccgcccgccgccgacgtcccaaacaaagagctgaagcggcggttggaaacttactatggggtggacgatgaggcagaactaccatctgtcacagaggctgttcttgagcggaagcttgcggatgtgcacagcgagacggacgatgaacttatcgaggagctgcgcagcaaaccactccctgaggttcgtgacagggattttgagtccgactttgaggagatgcacgatactgatgaggagctggacaacttgtacaacgccagacagtatgtggagaaaaagatcaagagtgacgagttctttaatatggatgacgacaagtggaataagatgatcaagaaggctgtggataatggccacctcggtaatatgaacgaatgtgagaatattttggaggacatgctccactgggacaaactattacctgatgaaattaaaaagaaggtggaggccaaatttaatgagttgggggacatgtgtgagaagggagagcttgaacctgagcaggcttatgaattattcaaagagtttgaggataagatggtttcagagtgcacagaactaatggaagctgagaacccaactgacgtggatgaattttctaaaatggaaaataagagtgttaagttggacgatccacctggtgagggacctgttctaaggtgggagtcacgtattgtctttgctcctggaggtgatgcatggcatcccaaaaacaggaaagttaaactcagtgtgactgtcaaagagctgggactttcacgacatgccttccgacgtttacgtgaggttgttgggaataggtacaattctggaaaagatgaactcacaataactagtgaaaggtttgagcatcgggaagagaacaggaaagattgcttgaggacattgtatgctgtagtagaagatgcaaacaaggccaataagttggctgatgatgctagaaatgcatatgttaaaaacagacttaaggccaatgctcaattcatggaaaggttgaaggtgaagacacagaaattgagggtagctgcataaggggctcctggagctacacgctctggaacaattcctctttcatgatatcagtacggtcattttgcaacaaaggatgcggcagtgagacgtagaacgggagcaaaaatgttttgttgtaatttacatgtgttgccttgtttggacggcctgttaggtttatctttagctgaagctacactttttgaatttaccgtgaccgagcaggcctgtttacatgatcgcatagtgaactggctgtatcctgatcttctctacaaataacaaattgcttctg

SEQ ID NO: 4943 - DNA, 1745 bp, Oryza sativa
  ref <308>: DATABASE ACCESSION NUMBER: AK062160
  ref <309>: DATABASE ENTRY DATE: 2001-12-06
tcggcaacctgctctcctggaagagcaggggcagcaaggacctgctcttccgcgtctgcatcgtgtccgccattgccagcgcgctcttcaccaatgacacctgctgcgtcgtgctcaccgagttcatcctcaaggttgccaggcagaacaacctgccgccgcagccgttcctcctcgccctcgccaccagctccaacatcggctccgcggcgacgcccatcggcaacccgcagaaccttgtcattgccgtggagagcggcatctcctttggacagttcttgcttggagttttcccggcgatgatcgtcggcgtcctgacaaatgctgccatcctcctctgttacttctggaagtacctttcagtggagaaggatcaggaaggcgggcagccggctgggccggaggtggtcgccgacgacgaggtcacctcacacaggttcacacctgcaagaatgtcacacgtctcatctctgaacccggatgatatggactgcataagtgagccaatcatcaggagcaacagcgtgaggagcaccagtgctaatgagaatctgaggagcaggagtgtgaattcggaggcggacatacagctcgcgatcaagtcgctccgggcatcgagcatgtcgcatgagatggtcgaggtctcaactgtcactgacaggagggatgaaggtgcatcctccaggaagttcacaagaactgctagccagcagaggagtgtgatcatagaggactcgccgccgtctcccgccagcaatggcgacaaggagaaggaagatgaggttgcggagaagagatggagggtgtttgtgtggaagactgctgtttatctcatcactcttggcatgctcattgcacttctcatggggcttaacatgtcatggacagccatcactgcggctcttgttcttctggcgcttgattttactgatgcacaggcttgtctggagaaggtgtcatactcattgctgatcttcttctgcgggatgtttattacggtcgatggcttcaacaaaactggcataccgaacacactttgggagctcgttgaaccgtattcacgaattgacagtgctaagggtgttgctcttcttgctgtggtaattcttatcctctcaaatgtggcctcaaatgttcctacagtactactgctcggcacaagagtggctgcatcagctgctgcaatctctcacgattcagagaggaaggcctggcttatcctagcgtgggtcagcaccgttgccgggaacctcacactactgggctcggctgcgaacctcatcgtctgcgagcaggctagaagagctcagttcttcggctacaacctctccttctggagccacctccggttcggggtgccgtcgaccatcgtcgtcacggcgatcgggctgctcatcgtcaccagttactgaagaagaagaagaagaagaagaagctgacagcagcataaggtagcgtacaagaaggagatagatgaacgaaccctttggatcaataagagagagtacatgtaaaatttctaaaataggcttgtcctgtaaaactcgtgtgtgttttgtgtgtatctatgccagctgctgcgtctgtgcccttgctcttttgttgtcgctaagcagacggtgattgagaaggatgcagatgtagcaggctaagcaacctgcattttcagtgttcttcttcagagtcggaagttgcaaatagggcgagtaaatgaagaatgctatgacaatctgattttagttttt

SEQ ID NO: 4944 - DNA, 981 bp, Oryza sativa
  ref <308>: DATABASE ACCESSION NUMBER: AK062161
  ref <309>: DATABASE ENTRY DATE: 2001-12-06
aaaacccccaccgccggaggaaggaggagacgccgccgccgccgccgcagccatgtcggggggaatcgcgcgcggccgcctcgcggaggagcggaaggcgtggcggaagaaccacccacacggtttcgtcgccaagccggagacgttggccgacgggacggtcaacctcatgatctggcactgcacaatccccggcaagcaagggactgattgggaaggtggatactttcctctcactcttcatttcagtgaggattaccctagcaaacctcccaagtgcaagttcccacagggtttcttccacccaaatgtctatccttcagggacagtctgcctttcaattcttaatgaagacagcggttggagacctgctattaccgtcaagcaaattcttgttggaatccaggacttgcttgatcagcctaatcctgctgatcctgctcagaccgatggttaccatctttttatccaggatcctacggaatacaagaggcgtgttcggctgcaggccaagcagtatcctccgattgtctgagaatattggcatagggacccatgctgcacattcgcttagttcttgctagatctaaaatgagtgcctctgcaaatatggattagaccaaaatatgacctggaaaaagggtgctttcggagtttgagaagtattatcatcgttgtggactaatgtcttgtgagatccgtcttggatgtaaacggttttcttaactgtgatttttcaaccgtttgagtgcttgctttatgggataatgtcaaacattggtttggcaggcaatctcaagagtattgctatttctgtgctagtctatatgaaaacccagattaaattcgacgaaacatattagtttgcaaaaagatgtggcaacttccatattttctgcatttttttctgttttgatccggatctgtcggctatacagaggtgaaaataatgtaaacgtcggaggcgtaagtacacagtgc

SEQ ID NO: 4945 - DNA, 1103 bp, Oryza sativa
  ref <308>: DATABASE ACCESSION NUMBER: AK062162
  ref <309>: DATABASE ENTRY DATE: 2001-12-06
aaagagtcatacacgattgcgcatggagctggacaagaaatttaaggtgctttgcctgcacggcttccggacaagtgggagttttctgaagaagcaaatcagcaaatggaatccttccatcttccaacaatttgacatggtcttccctgatggcatattcccagctggagggaaatcagagatagaaggcatatttcccccaccctactttgagtggtttcagttcaacaaggacttcactgaatacacaaatctggatgagtgcatttcatacctgtgtgattacatggtgaaaaatggaccttttgatggcctgcttggattctcccagggtgcaactctttctttgataggttaccaagcacagggcaaagtactgaatgatcatccaccaatcaagttcatggtctcaatagctgggagcaagttcagggacccaagcatatgcaatgtagcctataaggatccgatcaaggtgaaatcagtgcatttcattggagagaaggattggctcaaagtgccttccgaggagctggccgctgcctttgaggaccctgtcatcataagacatccccagggccacactgtccctaggcttgatgaggcaagtgtgaagcagctttctgagtggagctcaagcatcctggaagacatcaagaatgcagatgatgttgccaaggcttcaattgtggagaagccatctgagggtaataccgtggcagagtccggtgaaaacctggtggagcaaattgcagcttgagtatggtaactgacagtcttgacactgtctggaggctggagctgattgctgcttcaaattaaaccggattagtccgtcatgaaactcgatctatccaaatgtttaagtctttaagagctttcttttttagcgaagatgtttaaaaactttgttaccacaaatatatttgcctgggtactgcttgtattctctgggggaactaattgaatcgactcataaccggaccaaatggattcagggattcatcactgtagctccagctacttgagagagtaattggtgtaaaatgtccacaaaacattctgaggttcaaactgagatgattttcaattcaaaaaaaaac

SEQ ID NO: 4946 - DNA, 1342 bp, Oryza sativa
  ref <308>: DATABASE ACCESSION NUMBER: AK062163
  ref <309>: DATABASE ENTRY DATE: 2001-12-06
gacaagcagaaggcaggcagacaggcaggccagagcggcgtgagtgagctatacaggaaggcagttagcccgtggccagcctaagaaggtgatagcatgggacttaatgggaaatggaggaaggccatgccatacatggcgatggtcttcctacagttcggcttcgccgggctgttcctcatctccgtcgcgtcgctacggcaaggcatgagccactacgtgctcgtcgtataccggaatgccgtcgccgccgtcgtcatggcaccattcgcgctctggttcgagaggaaaacaaggcccaaaatgacgctttctgtgtttttcaagattatggctctgggactactcgagcctgtgcttgaccaaaacttcttctatatgggagccaagaacacgtcggcgagcttctcatcagcactcaccaacatattacctgctgtaacgtttgtaaatgccatcatactgaggatggagagaataagcatcaaggaacgacgaagtcaggcaaaaatagcgggcacactgataacagtggggggagctatgcttataatactcttcaagggccctgtcatcaattttccgtggaccaagaatgccaatcacaacatctctgatagtagtgaccacaataatggccactggcttatgggtatctttatgattttgctaagctgcttttgctggtctgccttcttcattctacaatcatacacactgaggggttacccagcagagctttctctaaccacactgatatgcgccatgggtgtagcacagagtggggcggtcgccctagtcatggagcgtgatatcaaggcctggttaattggctttgatatgaggctttttacagctgtctactctggcataatgtgttctggagtggcttattatgtgcaaggtatggttataaaggagaggggtcccgtatttgtcactgcctttagccctctttgcatgattatagtgactattttgggatctttcattctttgtgaggttgttaccttgggaagggtgattggtgcaataattattgttgtgggcctgtatgctctcatttggggcaagaacaaggaccatggcaatcaagttgatcaagatgacaattttgagaagcagaaaacttttgagctaccattgtccacgactaatgttaacgaagcacgtagtcctaatcatatttaactgtcaagttgacagcatcgacaacgaaagcttcaggcaattaatttactacatggtgacttcaatgtatctcttgatattctcggtttcatttccttggtaatggatgtatctggtcaattcaacaaagtctaccaaaatgttcttgtct

SEQ ID NO: 4947 - DNA, 1175 bp, Oryza sativa
  ref <308>: DATABASE ACCESSION NUMBER: AK062164
  ref <309>: DATABASE ENTRY DATE: 2001-12-06
caacttactatgccaaagctttgtgtacggcttaacagcctatattatggtatcagccagctaagcaagctggaggacagcataaatgagcggtgggctaggaggaaaagtgagagcattaacatcagacgatcaatgagtgaaaaatcaaagagtgctgtctcgagtcagaagaatcaatttgatggcagcagaaaagaaatcaatgctgcaattgatcggatatgtgagtttacagggctaaaggttatcttctgggacctacagcagccatttattgataatttgtacaaaaacaatgtttctcaagctcgactggatgctattatggaagtacttgatacggtgcttaatcagctttgtaatgtcattgtggagcaactacgggatcgtgtggttacagggcttctacaagcatctctggatggcctactccgtgtgatattggatggaggtcctacgcgtgtcttctctccaagtgatgccactcttttggaagaagatcttgaaattctgaaggaattttttatatctggtggagatggcctacctcgtggaactgtcgagaatttggtctcacgtgttcgccctgtaatagatctgatcaagcaagagacacgtgtgctcatcgatgacctacgagaagttactcagggcgctaaaagtaagtttggaaccgattccaaaaccctgcttagggtcctttgccacagaaatgattcggaggcttcgcactatgtgaagaagcaattcaagattcccagctcagctcctgccacctgatttacaaaaccaactggatttttcggatactgtacagccaatggaatgcgtcttggccttgcgacctggaaatcgtgtccagtatccgctcccctgcttgtaagttcatgtaacatttgtgtattattaacagtaggagctaggatgcccactgattgcagtacagcatttatacactagttctggtacatttggcctgattaattggctgttttaggctttagaccatggaaggtttagattatcctttttttttgtttcattcggtcctttggtggtatgtgattatgtgaaatcatgatcagaaatgtcgggaacagaacgaatgtttgacaaatctctagcttatttttgtgatgtttctgtttttaagtcgatgaagtgatttactt

SEQ ID NO: 4948 - DNA, 2243 bp, Oryza sativa
  ref <308>: DATABASE ACCESSION NUMBER: AK062165
  ref <309>: DATABASE ENTRY DATE: 2001-12-06
tctcaaagattaagccatgcatgtgcaagtatgaactaattcgaactgtgaaactgcgaatggctcattaaatcagttatagtttgtttgatggtacgtgctactcggataaccgtagtaattctagagctaatacgtgcaacaaaccccgacttccgggaggggcgcatttattagataaaaggctgacgcgggctccgcccgctgatccgatgattcatgataactcgacggatcgcacggccctcgtgccggcgacgcatcattcaaatttctgccctatcaactttcgatggtaggataggggcctaccatggtggtgacgggtgacggagaattagggttcgattccggagagggagcctgagaaacggctaccacatccaaggaaggcagcaggcgcgcaaattacccaatcctgacacggggaggtagtgacaataaactactaccaagaatcgagctcctgttgcttcctctagcctctgtctagtctgaagcctgaacccttgcatgctccagtttctgcactgtgtgagcagaattatttctgaagtctgaacagcagccaagcaaaagaaggcatctgacagtaagatatgaacacctgtgtttcaggtgaatttggctgatgattctgcccctgtgttctgatttattcaagacactagcaactgaatcatcaggtgttggtcgcgaatatcccagtgatggattcatcgagttctttcgtgctcgtggtgctgattctccaagctgtcgtgatcggttgctcctcactggacgagctacccgttcagcttagcaaccggaggctacttcatgacagaaatcacgctgctctactctacaaagatcatttcccaacagttggaaacatgacgtttccaacatctcatcaactgcaaaatgatccaaattacaagcctctagatagttcatcccaccctgccgaggcttctgcaaataaaggatcaagcaaaggattcaagaagtggctgtatatagttgtgattccagtggctggtttgattatgcttgctggcatggcatggatgttcttgccatgccgcaagaaatccgttgcgactattggcccttggaggactggatcagtggccagctgcagaaggcatttgtgtcaggagtgccccaattacagcgtccagaactggagcgtgcttgtgaggacttcagtaatattgtggcaagtcatccatactacactgtctacaagggaaccttatcatccggtgttgagatcgccgttgtatcgacaacgattaaatccagcaaagattggtcaaagcactgtgaagattgtttcaggaaaaagatagagtcgctctcgcgaataaatcataagaatttcatcaatctgctggggttttgtgaggaggaagaacctttcacgagggtgatggtgttcgaatacgcaccaaatgggacgctttatgagaatctccatgatgaggcctttgatcacatcgactggagaagtagaatgagaataatcatgggaatagcttactgtattcagcacatgcatgagctcaaccctgccaacgtgcaccctgatctgcattcaagtgcagtatttctttctgaagattgtgctgcaaagattgcagacttgagtgtttggcaggaagtggtttccgacggcaaaaagtcgacagcgaataatgatcatcatgaaccaatatctgctagactggcagggaacgtttacagttttggcatactgcttcttgaaatcatctcagggaaacccccttactctgaaaacgagggctccctggcgaatctggctttggggtgcattatcaaaggtcggagtatagcctccacgcttgattcagtactagagtcacacaaagaaaatgagctagatgtgatctgtcagataatcatggaatgcatccagagtgacccaacgaagagaccaggcatgagggagatcaccacaaggctgagagagaccatagccatttcgccggatgcagcaacgcccagattgtctccgctctggtgggctgaagtggaggtcctctcaccagtggagccaaggtaaaaacaatgataaatgtgcttctgaaaaaccaacatcctgcaggatgacgatcttgctgtgcatactgctgttcgtgcaacctttaccttgtgcaactccctgcccatgtttgatactgcccttgtgcaactctgctgcaaatgtcaaagatgagtactttctgtgtgtc

SEQ ID NO: 4949 - DNA, 1007 bp, Oryza sativa
  ref <308>: DATABASE ACCESSION NUMBER: AK062166
  ref <309>: DATABASE ENTRY DATE: 2001-12-06
gcgtcgtacaccgtcgtctgctgtgttgcgaaacagaagataaagcgaaagggaccaaaccgaccggcgggaggttcggagatggccgcggctgcggagacctcggcgaaggtgggggcgccgagaagatggtctcttcaagggaagacggcgctcgtcaccggcggcacccgcggaatcgggcgtgcggtggtggaggagctggcggcgctgggggccaccgtgcacacatgctcccggaaggaggaggagctgagcgagcgcctcaaggagtgggaggcccggggattccgcgtcaccacctccgtctgcgatctctcggttcgggaccagcgtgagcgcctcctccgccaagtcgctgacctcttcggcggcaagctcgatatcctcgtaaacaatgtggggacaaacataaggaagccaaccactgaattttctgccgaggaatactcttttatgatggcgactaatcttgaatctgcgtatcatctgtgccaactttcgcatcctcttctgaaagcatctgggtcagggagcattgttttcatatcatcagtctgtggattggtagctgtatttagtggttctctctatgctatgacaaaaggtgcaatcaaccaattaaccaagaacctagcatgcgaatgggcgagagacaacatacgatccaactctattgccccgtgcttttggcaaataaggactttgaaggtgctgtggtgagccgaactccacttaggcgtgttggagaacctgaagaagtatcatcgctggttgcttttctttgcatgcctggttccagttacattactggccagacgatctcggttgatggaggtatgaccattaatggactctatccaagttaagattaatggaccatcaagaagacggtatgttcctgctgtccagaaacggccatatatgttgttcttgggctttgcaagcagagcgaatattgtgtaaactgacatcaccatgaatatatatttcttgtgcgtttgaag

SEQ ID NO: 4950 - DNA, 1162 bp, Oryza sativa
  ref <308>: DATABASE ACCESSION NUMBER: AK062167
  ref <309>: DATABASE ENTRY DATE: 2001-12-06
aaaatttcacttcgctcgaaatccccgaatccaatccgaaccggcagcggcagccatgacgccctccgccctcgcccacctagcctccgcctcgccgctccccgccttctcccccaagcccagggcgaggcccggctcggcggcggggcccgcgctgcggcggctggcggtggcggcgccggcgccgcgggcgtacttctcgtcgtcgcccatgccgtaccagccgcagccgcagcagccggcggggtactcgtcgcaccaggcgttcggcctggtgccgatggtcatcgagaccacctcgcgcggggagagggcgtacgacatcttctcgcgcctgctcaaggagcggatcgtgctcatccacgggccaatcgccgacgagaccgcctcgctcgtcgtcgcgcagctgctcttcctcgagtcggagaacccgctcaagccggtccacctctacatcaactccccgggcggggtcgtcaccgcggggctcgcgatctacgacaccatgcagtacatccgctgccccgtcaccacgctctgcatcggccaggccgcgtccatgggctccctcctgctcgccgccggcgcgcgcggggagcgccgggcgctgcccaacgcgcgggtcatgattcaccagccatccgggggcgcgcagggccaggccaccgacatcgccatccaggccaaggagattctcaagctgcgcgaccgcctcaacaagatctaccagaagcacaccggccaggagatcgacaagatcgagcagtgcatggagcgcgacctcttcatggaccccgaggaggcgcgcgattgggggctcatcgacgaggtaattgagaaccgccccgcgtccctgatacccgagggcgccactggcgttgacctgccgcaccacagcgccgctggcgtcggcggaaggggcagagatgtcgaggagccctccgcggtgtgagctgtggccgcaaaggtgaaaccttttcgtgtcccatggccatgttgttgttgttattagatccaaggttcagttcttatactacataaacttaacttgttattattcaggttgccacttgttattcaggttgccgatgtgttcggctccttacatgttgtcttgattgcctgaattgagctactgctgatatttattgcaaatctaagg

SEQ ID NO: 4951 - DNA, 1148 bp, Oryza sativa
  ref <308>: DATABASE ACCESSION NUMBER: AK062168
  ref <309>: DATABASE ENTRY DATE: 2001-12-06
gaaaacaaggtccaaagaccgtattgtcggtgcacacttctttagccctgcacatgtcatgccacttctggaaatagtccgcacccagcacacctcaccacaagttgtcgttgatttgcttgatgttgggaagaaaatcaagaagacaccaatagtggttgggaactgtaccggtttcgcagtcaacagaatgttctttccttacactcagtcagcactcctgttcgttgatcttggtatggatgtgtacaagatcgatcgtgcatgtaccaaatttggaatgcccatgggtccattcagactggcagacctcgttggttttggtgttgctgcggccactggtatgcagtaccttgagaacttcccagagagggtctacaagtcaatgttgattcctcttatgatggaggacaaaaggacaggtgaggcctctcggaagggcttttacaagtatgaggacaagaggaaggcaactcctgatcccgaaattatgaaatatattgaaaaatctaggagtatggctggagtaacaccagacactgagttgatgaagctaagtgagaaggacatagttgagatggtcttcttcccagtcataaatgaggcttgccgtgttcttgatgagggaattgcagtcaaggcttctgaccttgacattgcctcaatctttggcatgggattcccaccgtataggggaggaatcatgttctgggcagattccattggtgcaaagtacatccatgacaagttggaggtgtgggcgaagcggtatagcgacatcttcaagccttgttcctaccttgcagaaagagcagcaaatggggttcctctgagtgcaccagctaagcaagtcaaggcccgactatagatgaacatcctgctttcctatcaactgcggaaactatgcagaataatagaacacacgccaatggggcatttatggtctgtagaatagcccatccaataataattagaataggattcttgaagagttatgtgtaatctgtatgacgcctctccaagttcttgaaccattactgcgacagtgttttgagttcagacattctttaaaatgtttcatgtgccaatggttataagcagattgaaaaggcatacataaaaacagcgggtgttaattagtttgcttc

SEQ ID NO: 4952 - DNA, 592 bp, Oryza sativa
  ref <308>: DATABASE ACCESSION NUMBER: AK104897
  ref <309>: DATABASE ENTRY DATE: 2002-08-28
aaaacaagcacagctgccacaaagacccagattcaggagactgacgaagcaaggaaaaaattctctaatgcaaaggcaatttcatcatctcagttttttggcaatcaaagcagagaagagaaagacgcccaaatgtcccttcaaaagtttgcgggttcttcgtccatttcaagtgctgatctttttggccgccgcgacatggatgactcgaatctggatttaagtgctgcggatctcatcaacagaatatcattccaggcatctcaagatctgtcttccctcaagaatatggctggagaaactggaaagaagctgacatctatagcctccaattttatcagcgacctcgacagaatcctttgagtggttgatggggcgagatcattagcattttttgttttggcaaacctgcacagaataccgtattgagtttaaaatgtggtgcagctcagagaagcatttgttgcacagctatgtagatgaaagtagaggattggcaattatgcgtctgtattcttttttccttttttactattgttggaaccctgtccgcatgaagatatttttattcgtttcttgacaagattgaaac

SEQ ID NO: 4953 - DNA, 1081 bp, Oryza sativa
  ref <308>: DATABASE ACCESSION NUMBER: AK062169
  ref <309>: DATABASE ENTRY DATE: 2001-12-06
aataacaatgcttgaaacaattagaaggaaagtaatggttaggatccatgatcagagaactatatcaggtagatggaccacatcagtttgcccaaacattctgaaaaaaatgaatgtatatatcaccgagtcagctttttgtcatgcaacatgtaatggaggtgatagctttgaagtaaaacaccatgacaataggttcacagtacacctagacaagaaggagtgttcttgtagatattggcagctgtcaggattaccatgccctcatgcaatatcatgcattttcttcaagactaagactaattcactggatgagtacattgctgagtgttattcagtgaaagagtttaagaaaatctatagtcaatgcctggaaccagtagagggcatgagcagctggccagaagatgacaaagagccacttaatgctcctgggtatatcaagatgccaggagagaccagaagagaatccaatgaaccattaaaagccaccaaactgtcaaggattggctcaatcatcagatgcagcaagtgcaagcaaattggccacaacaaatccacttgtaataagcatcatggaggaggctctagcacaccagattctctccaagttgtaaatccagctgataatttaatgctctcaaacacacaacaaagctctaaacaaagcaggaaaagaaagtcacgtacagctgctaacaccaattctgcaagtcagtcaaggaaaacagtgtcttcaaagcaaaaggcactagtggaattgcatgcccattctcagggttctacaagtgcaacaattaaggtcacttctgggcaagcttttgtcaatgtttcaactcaagaatcagcaaagttcaagccaaagaagcttacacctggtctactgctgcttatgcctccatgggaatctgacaaactgtgatgtaatgttagatcaagttatctgttattaaacttgtgtgtgatgtaacgccagacaattaggccatctattagacttatctgtgatgtaatgcaagactttatggcctgtcattgtagttgccagacttaatggcatattgatgcagtcaagaaaacc

SEQ ID NO: 4954 - DNA, 1478 bp, Oryza sativa
  ref <308>: DATABASE ACCESSION NUMBER: AK062170
  ref <309>: DATABASE ENTRY DATE: 2001-12-06
tcgaaatggaaatgtttgttggtgaggtgggatgacgacgctgagttccgtcgaccaaacagggtctctccttgggagattgagctgactagttcagtgtcaggatcccatttgtccacaccccattcaaagcgattgaaaccatgtcttccccatgttaatccagaatacatggttccacgtggaggtggttgtcctgattttgcggaatctgcccaattccacaaggtcttgcaaggtcaagaattattgggttttaaatctcatggtggtactgctgctgctacttctcagccatgtgaagcaaggcatttacagtacatcgatgagcggagttgctccagcgatgcgagtaacagtatcctaggggttccaagacttggtgatagagcaccacttggaaacccaggattttcctaccattgctcaggctttggggagtctcacagactccaaaaggtcttgcaaggtcaagaattatttcgtccctaccgaggaactttggttgatgcgtctatgggtagtaatgggtttcatcaacaagatagtcctcgtgcaccaggtgtggtgaataaatggcaggcacaacttcatggccgtgctgcttttcatggaccaccagcactggctcttccatctcaatcatcatctccgccatctgtcctaatgtttcagcaagctaattcaaagatgcccaggttggagtttgggcatggacagttggacaagcacgagaatgataggcgtgttaggtttggtccttctgaaggaattgaaagaagagagcaaagaataccactccagccttatcctacttctggagaagtgatagatggacaggttacagttgagaagtctcactcccctggtcgacatggaaaggatggtccagataacaaagctgttggcacaaatagttgcaaaatatttggcatctctttgactgagaaggttccagcaagagaagaactagatgatggcgacgccaactattcactccagtctttgaagcaagtgccaaaatccctgggcaatagttgtgctaccgttcatgagcaaaggcctgttgttggcagggtgattgatatttcaactatggatatgatgatctgatttatgagctggatttgcaaaattatctggaggtgaagtaacactaggattgcttccaaccacatattttgctgtggatctccagatggtggccgagtatcagggagatggagggactgatgattctgatatttttatcttagatgtaggcgttggagcacttatcatgtgacatagtacctagctgctcgtctgcatttgttgcctctgcaactttaactgtcagcggcatttgtcgccgctggaaccatctaagtacgtgtttataagctgtaagctatgacaagcgcattagagggtgctggtactgttagaacattaattaatgtcagtagcatgctttgatcttacgtgatgcttttcct

SEQ ID NO: 4955 - DNA, 1510 bp, Oryza sativa
  ref <308>: DATABASE ACCESSION NUMBER: AK104898
  ref <309>: DATABASE ENTRY DATE: 2002-08-28
attgatcattgcctaacctgggctaggtctgagtttgagggtttgcttgagaagacccccactgaagtaaatgccttcctatcgaatcctggtggatatgcaactgtagcaagaactgctggtgatgcacaggctagggatcagcttgagcgcgttattgaatgtctcgagagagagaagtgtgagacattccaagattgtattacctgggcccggctcaagtttgaggattatttctccaaccgtgtgaagcaactgacatacactttccctgaagatgcgatgaccagctctggtgctcctttctggtctgctccaaagcgtttcccacgaccactggagttcttgacatctgatccaagccagcttaactttattttggctgctgcaattttaagggcagagacatttgggatacccatacctgactgggtcaaaaacccagcaaagatggctgaagctgttgacaaggtgattgttcctgatttccaaccaaaacagggggttaagatagttacagatgagaaggctactagtctttcgtctgcatctgttgatgatgctgctgtcattgaagagcttattgcaaagttagaagcaatttccaaaacactgcaaccaggattccagatgaaaccaatccagtttgagaaggatgatgacaccaattaccatatggacgtgatagctggttttgctaacatgcgggcaaggaactatagcattcctgaagtggacaagctgaaggcgaagttcatagctggcaggatcatccctgccattgccacctcaactgcgatggctactggtcttgtctgcttggaactgtacaaggtactcggtggtgggcacaaggttgaagactacaggaacacatttgcaaaccttgcaatccccctcttctctatggctgagccggtccctcccaagaccatcaagcaccaggacatggcctggactgtttgggaccgctggaccataactggcaacatcacgctgagggagcttctggactggctcaaggagaagggcctgaatgcatacagcatatcttgcggcacctcgctgctgtacaactcaatgttcccgaggcacaaggagcgtctagacaagaaggtggtcgatgtggcgagggaggtggcaaaggtggaggtgcccccataccggcgccatcttgacgtggtggtggcttgtgaggacgatgatgacaacgacgttgacatcccactggtatcaatctacttccggtgaagtaggggctgtcactccgttgacatggcgttggatttggtcttttcagagagacgatgtataagttgcaccggtgcctgtaaactaagtgggggtttaagccacattactgattttattttgctaccatcttgatagagctcgttcagatgggtggtttgttaccatccccgaaacttgatacgataccatcatattgataattgatgcatgatgataccgtacgactgaattagatatggcatatgccctgtttgcg

SEQ ID NO: 4956 - DNA, 1492 bp, Oryza sativa
  ref <308>: DATABASE ACCESSION NUMBER: AK104899
  ref <309>: DATABASE ENTRY DATE: 2002-08-28
cccccctctaaggaaagactgcaaagaaaaggcctgtgtcaaggagagggtagtagcaccttgctctcctttgccttcagagaaaccggaagcaatggcgtctgctactctcctcaagtcatctttccttcccaagaagtctgaatggggtgccacccgccaggctgccgcccccaagccggtgactgtctccatggttgtccgcgctggtgcctacgacgatgagcttgtcaagaccgcgaaaaccattgcatcaccaggaaggggtatccttgccatggatgagtcgaacgcgacctgcggtaagaggcttgcgtcaattggccttgagaacaccgaggccaaccgccaggcttaccggaccctccttgtcaccgcaccgggcttgggacagtacatctccggtgctatcctcttcgaggagactctgtaccagtcaactgtagatggcaagaagattgtcgacatcctcactgagcagaaaatcgttccaggtatcaaggtcgacaagggtcttgtgccccttgctggctccaacaacgagtcatggtgccaaggtctcgacggccttgcctcgcgcgaggcggcatactaccagcagggcgctcgcttcgccaagtggcgcactgttgtcagcatccccaacggcccatctgaactcgccgtgaaggaggctgcctggggccttgcccgctacgccgccatttctcaggacaacgggctggtgccgattgtcgagcctgagatcctcctcgacggtgagcatggcatcgacaggaccttcgaggtggcgcagaaggtgtgggcggagaccttcttctacatggccgagaacaatgtgatgttcgagggcatcctcctcaagccaagcatggtgacacccggtgccgagtgcaaggacagggccacccctgagcaagtatctgactacaccctcaagctcctccacagaaggatcccccctgccgtccccggcatcatgttcttgtcgggtgggcagtcggaggtggaggcgacgcagaacctgaacgcgatgaaccaggggcccaacccgtggcacgtgtcgttctcgtacgcgagggcgctgcagaacacgtgcctcaagacgtggggcgggcagccggagaacgtgaaggcggcgcaggacgcgctgctcctccgcgccaaggccaactcgctggcgcagctcggcaagtacaccagcgacggcgaggccgccgaggccaaggagggcatgttcgtcaagaactacgtctactaatccgatccaatccaatcaagacagtgaacctgctgctgctgctgctacgtactacagctactgctatactgctagtacctcgagggcactgtagccagtgtgtcgtcacagttacaggttgagatcgatggacaaagttaaaactatactgcattaattaattttaccttgagaacatacgtggttcatcatgtatttcatcacatgaatcttttctagagcgtttgatat

SEQ ID NO: 4957 - DNA, 1194 bp, Oryza sativa
  ref <308>: DATABASE ACCESSION NUMBER: AK062171
  ref <309>: DATABASE ENTRY DATE: 2001-12-06
caaagggagtgcagagggtccccgaagtttaagaatgacaatgaagctccgtgatttttacaagactccgaaggttgatcctgaattagtcaaagaaatagaacaatggaatgaggcgcttaagtctgatgtgatcaaattttgcgaggagaacaattttcattctggattttttgatggcaatgagaataacatggtagctgatgcatatgaattgaaggtgcgtctagaacacatcattgaaaggatagccttggtctctgacgctgcaaataccgagcgaccttctcttgttatcaacaacttgttcataggtggggctctggctgcaagatctatgtacacccttcagcatctgggcattacccatatactatgtttgtgttcaaatgagattggtcaatctgattcccaatttcccgatctttttgaatacaagaacttttcaattagtgatgatgatgatgcaaatatcagtgatctttttgaagaagcctcagattacttcgatcatgtagatcatgttggaggcaaggttcttgttcattgctttgaaggaaaaagtcggagtgccacaattgtgcttgcctacctgatgctcagaaagggcctcactcttgcgaaagcttggaacttactgaagaaagtgcatcgtcgggcacaaccgaatgacggtttcgcaaaggctctgctagcgcttgacaggaagctgcatggaaaggtgtctatggattggcagcacaagcgacctgagatgaaggtgtgcccaatctgcagcaagaacgtcggactgagcacgagctcactcaaactgcatctgcagaaggctcacaagcggctatctgcaggtagtgtggacagcgccatgaccttggagattcagaagtcgatccagtcgctccggatcagccgcggtgggagcctgagcccttctcagaagcttaccaaggcgttcgctgatgagctcagcttctgaatctgttcttagtagttttttttttctctctcgaggatgctagtgttgtggcagtgtggtgatgtgcacggtacacgttttcaaaccgatgtaatttagcggtagatgtatcaagcagaccgaactttaggtgtggacagaataggtgtgatacaaggaaatgttcacttttaactgtatacaaccagtttattagcaggagaacgtttaggttttgt

SEQ ID NO: 4958 - DNA, 620 bp, Oryza sativa
  ref <308>: DATABASE ACCESSION NUMBER: AK062172
  ref <309>: DATABASE ENTRY DATE: 2001-12-06
ataagagatcatttgcattaatttcagagatagagtgagtgatcagttgagtgttgttgcataaacatggctgcctctgtcatggcttctctggctctgaaaccatctgcatctccattactagaacgttcgaagcttcgagggaaagggacaatggcaaggccatctttgatcatagtggccaagaaagcaaagaagattcagacatcccagccctatgggcctgctggaggagtggtgttcaaggaaggtgttgatgcatctggaagggtagccaagggaaagggtctttaccagttttccaacaagtatggagcaaatgttgatgggtacagcccaatatataccccagaagaatggtcttcaactggtgatgtctatgttggaggaaaggcaggtttacttctctgggcaatcactcttgctggaattctagttggcggcgctattcttgtctacaacactagtgcactggcttagctaagtgcagcagaccaagctgtgcctgcttccatgtatataatcttcactaggaatgtaaccagttatgtacctggactggacttgactgccagcggtggtaatgaataaggccgagtaatgttaattctaagttatgc

SEQ ID NO: 4959 - DNA, 1628 bp, Oryza sativa
  ref <308>: DATABASE ACCESSION NUMBER: AK104900
  ref <309>: DATABASE ENTRY DATE: 2002-08-28
agagagagaaagagagagagagagaggccgcttctctagtctagaccaaaggaaggaaaccaaccgagaggcgaggcgaggagaggagaggagaggagaggaggaggaggagggaggagaagatgagagagatcatcagcatccacatcggccaggccgggatccaggtcggcaacgcgtgctgggagctctactgcctcgagcacggcatcgagcccgatggcaccatgcccagtgatacaacggttggcgtcgcacacgatgcgttcaacactttcttcagcgagacgggcgctggcaagcatgtgcccagggccatctttgtcgacctggagcccactgtcatcgacgaggtgcgcactgggtcgtaccgtcagctcttccaccctgagcagctcatctctgggaaggaggatgccgctaacaactttgcccgtggccattacactgttggaaaggagatcgtagatctatgcctggaccgtgtgcgcaagttggcagacaactgcactgggctgcagggattcttggtgttcaatgctgttggtggtggaactggatcaggacttggttctcttctgttggagcgtctctctgttgattatggaaagaagtccaagcttggcttcacaatttacccttccccccaggtctcaacagctgttgtagaaccatacaacagtgtcctctccacccactccttgcttgagcacactgatgtggcagttctcctagacaatgaggctatctatgacatatgccggagatcccttgacatcgagaggccaacctacaccaacttgaacaggctcatctcacagatcatatcttcactcaccacctctctgaggtttgatggcgctatcaatgtggatgtcactgagttccagaccaaccttgtcccataccctcgcatccatttcatgctttcatcctatgcccctgttatctctgctgagaaggcttaccatgagcagctttctgtgcctgaaatcaccaatgctgtttttgagccctcaagcatgatggctaagtgtgaccctaggcacgggaaatacatggcttgctgcttgatgtaccgtggtgatgttgttcccaaggacgtcaatgccgcagttgcaaccatcaagacgaagagaactgtccagtttgttgactggtgccctactggattcaagtgtggcatcaactaccagccaccctctgttgtccctggtggtgacctggctaaggttcagcgtgcagtgtgcatgatcagcaacaacactgctgttgctgaggttttctcgcgcatcgaccacaagttcgacttgatgtatgctaagcgtgcgtttgtgcactggtacgttggtgagggaatggaagaaggtgaattctcagaagcccgtgaggacttggctgcccttgagaaggactatgaggaagtcggcgccgagggtgcagacgacgagaacgacgatggagaagactattagtagctggttaataagtagttctctggttaatgattggtttgtcagtatactccggttccgttgcattgcatattcctgttatgtgtgtttactttttgtactgtgctaaactgttgttagcccctcgttggccatgattgttcatatcttccc

SEQ ID NO: 4960 - DNA, 1508 bp, Oryza sativa
  ref <308>: DATABASE ACCESSION NUMBER: AK062173
  ref <309>: DATABASE ENTRY DATE: 2001-12-06
aatcgctgggagtctgcaagttggtgaccacatggaaacaccccgtgttaatgaggatgatctttcaacgaagaaattaaatgaatttctttctgaattgcaagctctacaaaaggaaaagagcaatagactgcacaagattcttgacttcgtgagttcagtgcatgatctctgttctgtccttgggatggatttcctgagcactgttactgaagttcatcctagtctcaatgactcggttggtgccgagttcaagagcattagtgacgcaacattatccaagctgtctaagatggtaattcaacttaaagaagagaaatcaaagagacttgaaaggattcaagctctagcttcccagctaactgatctttggaacctaatggacacctctgctgatgagcgacaactttttgaccatgtcacatgcaacatttcctcaacattggatgaagtaacagcaccaggagctcttgatattgatttgatcgaacaggctgaacttgaagttgaaaggctggatcagctcaaagctagtaggatgaaggatattgcgttcaaaaggcagactgaacttgaagatatatatgcccaggctcacattacgatagataccagtgctgcaagagatagaatactgactgttattgattctagtatcttcgagccttcggaactactggctgatatggagaaccagatacttaaagcaaaagaagaggcactaagcagaaaggacattctggagaaggttgaaaggtggatgtcagcatgcgaagaagagagctggcttgaagactatagccaggacgacaacagatacagtgcaaccagaggtgcacatctgaacctcaagcgggcagaaaaggctcgtcttttggtcagtaaaattccagtcattgttgatacactgatggcaaagacccgggcatgggaacaagagcatggtatgccgttcagctatgacggtgttcatcttctcgcaatgctggatgagtacaaagtactaaggcagcagaaggaagaagagaagcgacgaatgagggaccagaagaagataaacgaccagctagctgcagagcaggagaagctcttcggctcgaaaccgagcccagcccggccccaatcctcaaggaaggcgcctggcccgcgggccaacggtggcgcagtcaatggcacaccgaaccggaggctctcggcccaccagaacggcggcggcaggtcggtgagccgggacgggcggagggacagtggccggccggctgctccggtgaactacgtcgccatctgcaaggaagagtccagcaacaacaacccggcggcgtcctccccctgacgatcatcctcgccatgattgaccgtacatttcttggtgccagtggtagagagatactccatatctgtgcagtagcaggaaaaaaagaaaaactatagcaagatactagtaggacaagtgatccgaatgatagtagcagtattttggctgtatttgaatcgatttgttgctgtcc

SEQ ID NO: 4961 - DNA, 1763 bp, Oryza sativa
  ref <308>: DATABASE ACCESSION NUMBER: AK062174
  ref <309>: DATABASE ENTRY DATE: 2001-12-06
gagacgttcgtacgtaacgtgaccgagcgcgccggacgccgtcgtcgttaattaatcagccatggatccctacaagcaccgcccgtcgagctcgttcaacggcccgctgtggagcaccaactccggcgcccccgtatggaacaacaacaactcgctcaccgtcggctcccgaggcccgatccttctggaggactaccacctggttgagaagctggccaacttcgacagggagcgtatcccggagcgcgtggtgcacgcccgcggcgccagcgccaagggcttcttcgaggtcacccacgacatcacccacctcacctgcgccgacttcctccgcgccccgggcgtccagaccccggtcatcgtccgcttctccaccgtcatccacgagcgcggcagcccggagaccctccgcgacccgcgtggcttcgccatcaagttctacacccgggagggcaactgggacctcgtcggcaacaacttccccgtcttcttcatccgcgacggcatgaagttcccggacatggtgcactcgctcaagcccaaccccaagtcgcacgtccaggagaactggcgcatcctcgacttcttctcccaccacccggagagcctccacatgttcaccttcctcttcgatgacatcggcatccccgccgactaccgccacatggacggctccggcgtcaacacctacacgctcgtcaaccgcgccggcaagtcgcactacgtcaagttccactggaagcccacctgcggcgtcaagtcgctgctcgacgacgaggccgtcaccgtcggcgggaccaaccacagccacgccacgcaggacctctacgactccatcgccgccggcaacttcccggagtggaagctgttcatccagaccatcgaccccgaccacgaggaccgcttcgacttcgacccgctcgacgtcaccaagacgtggcccgaggacatcgtcccgctgcagcccgtggggaggatggtgctcaaccgcaacatcgacaacttcttctcggagaacgagcagctggcgttctgccccgggatcatcgtgccggggatctactactccgacgacaagctgctgcagacgaggatcttctcctactccgacacgcagcgccaccgcctcggaccaaactacctgctgctcccgcccaacgcgcccaagtgcgcccaccacaacaaccactacgacggcttcatgaacttcatgcaccgcgacgaggaggtcgactacttcccatcccgctacgatcctgccaagcacgccccccgctaccccatcccctccgccaccctcaccggccgccgcgagaaggtggtgattgccaaggagaacaacttcaagcagccaggggagaggtaccgttcatgggatccggcaaggcaagaccggttcatcaagagatggatcgacgcactctctgaccctcgcctcacccacgagatcaggagcatctggctctcctactggtctcaggctgacaggtctctgggtcagaaactggcgagccgtctcagcgcgaagccgagcatgtaaggagatcgatcagcgttgcaatctgcttcagtcacggaaggcctcaacctcactctatcggataataattgctactcatactctagcaataccgatcgatcgagtctattttggaaagaggacatatatgacttctatcaccgcacaattcgtgtaccaccatcatgtaataatctgtaacctgatgacacgtttctcctgatacttcatcattattgtaagc

SEQ ID NO: 4962 - DNA, 1331 bp, Oryza sativa
  ref <308>: DATABASE ACCESSION NUMBER: AK062175
  ref <309>: DATABASE ENTRY DATE: 2001-12-06
tgtgaagaccagaatgcaggttgcagaaggagggctttcacacatgtctggcttttctgttttcagaaggatattgagaagtgatggcatccctggtgctttcagaggctttggcacctcagcagttggagcactgcctggccgggtctttgctctgacttcattagaggtgtccaaagaaatggcattcaaatactctgaacattttgatatgtcagaggcatcaaggattgctgtagctaatggtatagcaggtctagtgtcaagtatattctcaagcgcatattttgtgccattagatgtgatttgccaaaggctcatggctcaaggactaccagggatggccacatacagaggcccatttgatgtgataagcaaggttgtcaggactgaggggctccggggcctttaccgcggttttggaatcaccatgttgactcaatctccagcctctgccctttggtggagttcatatggtggtgctcaacatgccatatggaggagcttgggttatggaattgattcacaaaagaaaccatctcaatcagaactagttgtcgttcaagcaactgctggaacaatagctggtgcttgctcatcaataatcacgacaccaatcgataccattaagacacgacttcaggtgatggataactatggtaggggcaggccatctgtcatgaaaaccaccagggtgctgctagaggaagatggctggagaggtttctacagggggtttggaccgcggtttctcaacatgtccctgtggggtacatccatgattgtaacttacgagctaataaagaggctctccgtcaagccggagtgatgagccttttggcttctgttccaaatagatggtgtaatcttgaagacccacaatccttatctgtgatgggctgacggctatctagtgagttcttctcaagaaagggatttggaaagtaacaaaatccaatcaagaagttttagtgatggaaactgttttataactacaggggaagtattagcaagttagtagcttaacaagttcctcctatacactgtaaatatttactagggttctgtatgaagttcttctgaaggtgcttcatccaggatgtaatagcctgaggcttgccctggctactgggggcaacatgtacgcggctcataaaaccctaaaaattttggcaatgagcttttgtatctctttccatgaggcaacaaattcccacggtatctcgcttggtttaatttgttatcatttttagcagattctagctagccacggtcttgagatggatgatgtagccaaaccaatttaatggaaaatgtactcgcttaatatg

SEQ ID NO: 4963 - DNA, 994 bp, Oryza sativa
  ref <308>: DATABASE ACCESSION NUMBER: AK062176
  ref <309>: DATABASE ENTRY DATE: 2001-12-06
ataaatcccaagcgcccactactctccttccactacccatcactcccccaagattccacggatattttctctccccctgctcccgtcgccatcgcaaaggagaaaaaaaagaggaggaaggaaggaaggatgagcgccacggcggtgtcgtcgctgaacccggacgcgccgctcttcatcccggcggcgttccggcaggtggaggacttctcgccgcagtggtgggacctcgtcaagaccaccgcctggttccgcgaccactggttccacgagcaccagcagctcgacgagatggccgactccctcgccctccacgacgccgccgccgacgacgacgacctcgccggcctcctccccgacgacgccttcgacgacgacgacgacgacgacctcttcttcgaccagacccataacctcctcgtcgatcccccgcagccgcccgccgctctcaagactgatgcggtgctcaaggcgctgagcctggtgtctcccaagggcggcgacgcgccgcgggggctccgggagaagccccggcactccgagaagcccaccaagtacgccggcagcccgaggagcggcggcgctccccgcgtcatccaccagcctcgctaggctgcgatggctaggatggcaaaaactaaaggatgtagcaaaagcattgcgtctttgcgccgcggtgttttgctttgcttccttcctcccggctgctgctgctggtgtggtctactcaaagtctgggtttgtccctagagtttatctaggaatttagttgtgtccttttgtatagtataaaccaaaatgaccctaaaaaaagtatgaacaaaatgcaacctttgttcagtgttgccttgtaagtttaatgttcatctagagttcgtctaggaaaattccaaaaagaagaagtggaagaagaatgtagtagtgtgcactcctgttaatgttctgatgatgtgcaatagcaagcagcctaatgttgaatattcagacttttctc

SEQ ID NO: 4964 - DNA, 800 bp, Oryza sativa
  ref <308>: DATABASE ACCESSION NUMBER: AK104901
  ref <309>: DATABASE ENTRY DATE: 2002-08-28
ttttttctgcggtttcttcttcttcttcctcctcctcgcgctcccccgattcgaagcgtgaagagaggaacggcgcttgcgagaggagagagatggcccgtaccaagcagaccgctcgtaagtccacaggaggaaaggctcccaggaagcagcttgccaccaaggctgctcgtaagtctgctcccaccactggaggagttaagaagccccaccgttaccgccctggaactgttgccctccgtgagattcgcaagtaccagaagagtactgagcttttgatcaggaagctgcccttccagaggcttgttagggaaattgcacaggacttcaagaccgatctgcgtttccagagccatgctgtccttgccctccaggaggctgcggaggcataccttgttggtctcttcgaggacaccaacctgtgcgccattcatgccaagcgtgtgaccatcatgcctaaggacattcagctggctaggaggattcgtggtgagagggcttaaattcccctcggcgattcctttgacaaatgaagcatgcgtcgtagtgttagtagtgggttttaatcttttgcttataagaacaatctgagtagggtgtattttgtggaacaatatgtttctcatgatggtgctgtattcgtcttattggtggatctgtcaaaaatactcagcatattgtcagtgtgtctggtgactcttattttgttagtctgattcgtttgcgtcttattctagcggtgctgcctctttggcactgtgcatggctagatacaattacattgtaattcacctgtctct

SEQ ID NO: 4965 - DNA, 726 bp, Oryza sativa
  ref <308>: DATABASE ACCESSION NUMBER: AK062177
  ref <309>: DATABASE ENTRY DATE: 2001-12-06
gaatccaagggaaatcagctcttattgctcacttccagaactccagtttgatgaatgaggacaagcgctgccgccccatactattccattcggatggtcctaatgcaggagatcaggaaccattccctatgggtacaaacatccgagccaggtcagggagatcgcgagcttcctctggcgaagaaagccaccaggacatctcaatcacctcggttaattgtgacacttctaccaatggagttgatactacagggcctgccaaggactgagtaacacaactgctctggatcactaacccccaaatcccaaatcataacttttgcgacgcggtttccatttcccagttttccgccctttttcccccaactttggtttttttggtatgacccccaatctgtatttattaacttccatgaatgcgggttaccgaagacttggctagattgctgcaacattttgtccctgatggaaacatggatagagagacagagagggtgcttccagtttcccctgaacctaccattatcatattaacctgaaggccgagaaaggtgaaaggcgcagcgagagcttccagattttggtcactttttaagaatgtattaaccccatgttgtatagcagtttccagtaactgtgctgaggggagagagagaaagagaggagagcaaggagacaatttacatgagtttttagtggtggtgtggagaggaagtctttccctgc

SEQ ID NO: 4966 - DNA, 1512 bp, Oryza sativa
  ref <308>: DATABASE ACCESSION NUMBER: AK104902
  ref <309>: DATABASE ENTRY DATE: 2002-08-28
cgcaaccgggagcctctgggatgttctcaaggagtggtgctaaagatgggagtaggcttagtggctgcagtagtcgagcctcttcagcttccatgcctccaactgcgaaaactgaatgtgagatactgcagtcagccaatgtgaagatcttcagttttagtgatctcaggatagccacaaggaacttccgtcctgacagtgtacttggtgaaggagggtttggatctgtctataaaggatggattgatgagaatacattatctgcttgcaagcctggcactggaattgctgttgctgtgaaaagactcaaccaggagagtttgcaagggcaccgagaatggttggcagaagttaattacctaggtcagttttgccatcccaaccttgtgaagctatttgggtattgcttagaggatgagcatcgactgctagtgtatgagttcatgccacgtgggagcttggaaaatcatctgtttaggagaggttcgcatttccagcctctttcatggaacctaagaatgaaggttgcacttggggctgcaaaaggactagcttaccttcacagttcagaggcaaaagttatttatcgagatttcaagacttccaatattctgcttgacacagactattctgcaaagctatctgattttggattggcaaaggatggtcctgttggtgagaagagccatgtatccacgagggtgatgggaacatatggttatgctgctccagaatatctttcaacaggccatttaactgcgaagagtgatgtttatagctttggggtggtgctgctggagatgatgtcaggtcgtcgtgccattgacaagaaccggccccagggtgaacacaatcttgtggaatgggcccgaccatacctcacacataagcgcaagatattccgtgtcctggataccaggctagaaggtcaatactctcacgttggagcacaaacagttgccacccttgctcttgagtgcctgtcgtacgaagctaagatgaggccttctatggaagctgtggtcactattcttgaagagcttcaagaatccagccatgtggacaggaaaccagcagcagagaggcgtcaagaatccaccacaggtacaggcaaaaaagcccctactgcaaatgctagcaagaacagcggtaagcctcgtcggaaaagcttgggagaaactcgggaaaagattggtccgaatccaacagcattggtccgctcccattagcaaggcagaatgtgagtgtcattagttggtatttggtagtttgtaaatatgttgtgcatattccttgttgtcatcagtcttttggcaacaagtcctttttgtgcattatcatgagcttcttaacttcagctaactagatgctgttgtatgtcgaaactcatggcattaaagtagagctcatgttacaaatctggcgtggctgtctcaatgggttcaagctttcctggtagctcatcgatcagcatgcaccataggtacattgtcatcaacacatcattggatc

SEQ ID NO: 4967 - DNA, 1535 bp, Oryza sativa
  ref <308>: DATABASE ACCESSION NUMBER: AK062178
  ref <309>: DATABASE ENTRY DATE: 2001-12-06
ggtagcatatgacaagacaaaagaacttgctaaagagttgcaatctatcagttgtggggatttggacattgaaggtctcactgaatccatatttgtttcccacaaagatgagtacacagaatttgaacaggcatcactcagacaacaataccaatcaaagatggctgaattgagagctgaggccaagcagcaatctgagtcaactggcacaattggacgttcaaatggagcggctgtgactacatcacttcagcagcagatatcagttactgtagtgactgaatttgttcgctggaatgaggaagcaatatctagatgcacactgttgttttctcagcctgctactgttgcagctaatgtgagatccatatttgcatgcttgcttgatcaagtaagccaatatttgactgaagggcttggccatgctagagagagtttaaatcatgcagcaactcaacgggatagatatgtcattggaacaagtgttagtagaagggttgctactgctgctgctaatgctgcagaggcggcagctgctgcaggtgagagtagctttagatccttcatgattgctgtgcagcgttgtgctagcagtgtggctattcttcagcagtacttctcaaatactatatctcggctcctgctgcctgtggatggtgcccacccctcagcttgtgaagatatgggatcagcagtatctgttgttgaggctgctgcccacaaaggactgctacagtgtattgataccgtcatgtctgaggttgaaagattgctgtcttcagaacagaaggctacagattatcgaacaccagatgatggagctgcaccggatcatcgaccaaccaatgcttgcataagaattgtagcctatctatctcgtgttctcgaggttgcattcagtgctctagaaggtctcaataaacagtcctttttgactgagctgggaaatcgcttgcataaggggctactcaatcattggcagaagttcacatttagtcccagtggtgggttacggctgaaacgtgatatcactgagtacggggaattcgttcgtagcttcaatgccccatcgatagatgaaaagtttgaactgcttggaatcatggccaatgtattcatcgttgctcctgaaagtctagcttccttatttgaaggaacccccagtatccggaaagatgccttgcggttcattcaactcagggacgactataagacagcaaaaatcgcttccatgctaaacagtatcatggctgaatagtgtcacgtcaagaagcagtatgtttgagccgcattcacactttctgctgcctatcaaacttcaagtctatgaaatgattcagtgccctccaaatgattttgaccatccatgtcgcctgtatagcacagattcatgattatgttaattctttgggttttctttgttccattttttttccctatcctattttgggcttgcatttgtacatgctgtatcagtctctctaaatatgaccattgtaccaagtggcataagtagtatttaacgttcagttgtt

SEQ ID NO: 4968 - DNA, 1412 bp, Oryza sativa
  ref <308>: DATABASE ACCESSION NUMBER: AK062179
  ref <309>: DATABASE ENTRY DATE: 2001-12-06
aaactctcctagccttcccctcctccgccgccgccatctgccgtcgagagccccggttgcccacccccgcggcgacgatggcgggccaggagtcgctcaccctggcgggcgtcctgcgcggccacaacgacatggtgacggcgatcgcggcgccgattgacaactcgcccttcatcgtctcctcctcccgcgacaagtcgctgctggtgtgggacatcaccaacccgtccaccgccgtggccacggatcccgaggcggccccgccggagtacggcgtctcgtaccgccgcctcaccggccactcccacttcgtccaggacgtcgtcctcagctccgacggccagttcgcgctctcgggatcctgggacggcgagctccgcctctgggacctagccaccggccgcaccacccgccgcttcgtcggccacaccaaggacgtcctctccgtcgccttctccgtcgacaaccgccagatcgtctccgcggcgcgcgacaacaccatcaagctctggaacaccctcggcgagtgcaagtacaccatcggcggcgaccatggcgccggcgagggccacaccgggtgggtctcctgcgtcagattctcccccaaccccatggcccccaccatcgtctccggctcgtgggatcgcagcgtcaaggtctggaacctcacgaactgcaagctgcgcaccaagctcgagggccacaacggctacgtcaacgccgtcgccgtgagcccagacggctccttgtgtgcctccggtgggaaggacggaaccaccctgctctgggatctcaccgaggggaagatgctgtacaagctcgacgccggcgccatcatccactccctctgcttctcgcccaaccgctactggctctgcgccgcgacagaggactccgtcaagatctgggacctcgagtccaagctcgtcatgcaggacctcaagccagaagtccaggccttcaagagccagatgctgtactgcacaagtttgagctggagcgctgatggcagcaccctcttcgctggctacactgatggaactatcagggtttggaaggtctcagggtttggcggctatgcaatctaggtggtgaatttgttgaaaggcttaggaatcttaatttaaacatcgtgatgcctatcaagtttttgacagttctgaggcataacatttgcctggtactttctacttcattttcattaattaatgattagatttgccaatgagcttatcggtactctggaactatggaagaggatccttatgcatattttttgtttttggctaagttgaaaagatattagttatgcaactttcggagcctcattgcctagatgtaaataatgcttcatcaattgctattttctgatgattttgatggtgctaattagctttttatctgccgctgat

SEQ ID NO: 4969 - DNA, 1319 bp, Oryza sativa
  ref <308>: DATABASE ACCESSION NUMBER: AK062180
  ref <309>: DATABASE ENTRY DATE: 2001-12-06
tatgtacaataaatgtgggtgtattcaagatgcaaacaaagcctttcttgagatgccaacacgaacttttgtcacatggacttctatgatctcaggctactcgcagcatggccaacctcaggaggcgatacaactcttcgaggaaatgagattagctggggtgaggccaaatgaaatcacatttgtaagtttgctctcagcttgcagctatgcgggtttggttgaggaagctgagcattacttcgacatgatgaagaaagagtattgtattgaacctgttgtggatcactatgggtgcatgatcgacatgtttgtgcggttggggcgggtagaggatgcattttcctttatcaaaaggacaggttttgagccgaatgaggccatctggtcaagtttggttgctggatgccggagccatggaaacatggaacttgccttctacgctgccgataagctgcttgagctcaagccaaaagggattgaaacctatatcctgctgttgaacatgtacatttccacagagagatggcaggatgtggcgagagtacgaaagctgatgaaacaggaagatgttgggattcttagggaccgcagctggattacgataaaagacaaggtgtatttcttcagagctaatgatagaactcatcctcaagcaactgagttgtatcaactattggagaatctgttggagaaagctaaagccattgggtatgaaccatatcagaatgcagagttatctgatagcgaggatgatgagaaacctgccgctggatcactaaagcaccacagtgagaggttagctgtcgcgctagggctgctgcaaacacctccaggtgccacggttcgcgtcacgaagaacatcaccatgtgcagggactgccacagctccattaagctattttcgctacttgaaaacagagaaatcattgtccgggacagcaaacggcttcacaagttcaaggatggccggtgctcctgtggagattttggtgctctattgtgagaaggatggaaatcttaccccccacatgctactctaggaactcaacagttttgtagtggaagcagggttacaagttacaggttgcacagaattcttttgatgaactgatcaccctttgtgatttttgtagatctttgtatgaaatcgaaatttataaactcaggcagtgtccccaaatgatctgtacacaaggttagcattataggacagtgaatacttgtgaatctgctgtaaatgctaaaatgctagcttcttaggatcagatctaagattttattgtttaaactcacaatgcaatatggcagtaaccccc

SEQ ID NO: 4970 - DNA, 1080 bp, Oryza sativa
  ref <308>: DATABASE ACCESSION NUMBER: AK062181
  ref <309>: DATABASE ENTRY DATE: 2001-12-06
aaggaactaactttatctactctttcaagcctcatatgtgattctgaacattttgtccaggaacaaactttggcactggtgcacaatcttgttgatggatatgtgaactcttttaattatgtcattggtgaagatggcatgattttaaatgctatttcaagacaactgaataatgcacctgccccaggagtatgcatacagggtatgtttgtgcttgcaaatgttgcagctgggggcgaattaaacaaggaggctgtgatgaatattcttgtacctcgtcgagcagatcgtgtcaaacaatcttttatagttaactttctgctgagcaaggacaaacaattgagagttgcaaccttgtggtgtgttctgaacttgatttatccaaaatgtgaggcctcttctgttcgagttgtcagactccaaaatgctggggtaatttcacaagtaaaaggcatgataaatgatccctgcttggattgcaagcttagagtacgcatggtgcttgaacactgcttggacaatgccgacgatggtttcatgtgagcagccgccattgcacctcgggccattgaagcttgcagaatcaaacactgcttgagcaaagagaagatggaagattgatctcttcgcatcagcaatccgcgccatgaactgtgaacaatgatcatccagtaaaaaaaagccttcaccgacatcttctcgtcgcctccaagcctgtcattgtaaatttggtgaactccatgaggaccatgactggtttctcttgcagaaacaagcaagaaaccttgttgtaaccatgccacgtcagaaaacctgagctgatttcctccgaaacggaaaaaggttttaggtgctagctctggagaaatttcattccttagcatgaccaaaaacctagtgcttgtgctgtgacgatgagtggtgagtgtataattgagggagatatgctactgctgctgtaaattgtactactctcttgggctatgtttttcacgttcggccatgggacggtgcccagcaagcagtgtgtaatggttttgccgcttgcttttgcttctcaataaagatactactcttgac

SEQ ID NO: 4971 - DNA, 543 bp, Oryza sativa
  ref <308>: DATABASE ACCESSION NUMBER: AK062182
  ref <309>: DATABASE ENTRY DATE: 2001-12-06
tatcaactagagacaaggcttacattggcatgccagtggtgaccaatgctgctgttcatgcagtggttgaggaacagggacgggatgataaagtgatagtcttcaaatataagaagaagaagaagtaccagaggaaacttggtcacagacagccaaacacaaggttaagaattaccggcataagtggatacgaggacttccctgctgacccgatacttgagtatgttccagcttaagagcaattgtaagttctgtagttacaaacaactggtagtacattagaatacgagtgctaccttttcttgtctggaagaacagtttttgaacaaaatttgctttgttcatgtgttcgagtgctgccagtcatccagttgttccatcctttgtttattccaccatctgttttgttcattctgatattgtgtatcctagccaactgtattattttcactgtgcttaaaaaagagagagcattttaccacgatacggatgttttagctttggtttgtgtaactttatacagtttttgtgactactgatgct

SEQ ID NO: 4972 - DNA, 2955 bp, Oryza sativa
  ref <308>: DATABASE ACCESSION NUMBER: AK062183
  ref <309>: DATABASE ENTRY DATE: 2001-12-06
cagttgcaagaacagctagaaagcaagcttcagaaggcaaaaaggcagagagctgagtacttgaagcagcgggtaggtccccgtagttctgcccatgctgattacatcaagcatgcagaatttctttcaacaaagctggcaagatgctggaaaagatttttgaaatctaacaagacaacatatgcactggttcaagcttatgacgccttgggaattaatgagatgtctgtcaaatctatgccatttgaaaatttagctatgttgatggaatctccaacgactctccagaccaccaaggcagtgcttgaccggttcgagaaacgtttgcttctttctcagccaactggttcatcatcagccgagaacattgatcaccttctgaagcgccttggatctccaaagaggaaggcacctgctagcagatctagggtagctgcgaaaaagccagcgaagggttccgagacaagcaagctttctagatactcactgcgggtagtcctctgctcttatatgatactggctcatccaggtgctgtattaagtggacaaggggagaaggagaatctacttatggagtcagcagaaaactttgttaaggagtttgagctattggttaagacagtacttgatagaccaggaggtgcctcgatgcaatcgactgatgctgccagtcagaaaaagttcaggactcagttggctgcttttgataaagcatggtgcgcttacctttaccactttgttgtgtggaaactgaaggatgccaaatcattggaacaagatcttgtcagggctgcatgcaagcttgagctgtcaatgatgcaaacatgcaagttaagttcagatgggcagtcacatgacctttctcatgatatgaaggcaattcagaaacaggttactgatgaccagaagctgttaagagagaagattcagcacctgagtggcgatgcaggcatcgagcggatgaactctgctctttcggatacaaggtcaaagttctttgaggcgaaggaaaacggaaatccattagcaacatctgttgcaaatgtatctactcctttgagcattaattcatctggacaggttccaaaccctacttccaagcctactgtggaaggatcaagtttcactgcccaatctttgcctggagctgcttcatcgtcaagcagtacatctccaatgaaaccgccgacggacaatgagcaaatggtcaatgagatgcttcatgaggacgatgtttcttttgctcgcaactctgataacgtcagttccgcggagaaggactttcaggccaaagtgaaagcaacgatggagaaagccttttgggatcttgttactgattcgatgagaggggacaaaccagattatagccaattaattaacctcgtaaaggaagtcaggaattcgttacatgagttggcctcaaatgagttgaaggaggaaattcttgagaacattgacctcgaaattttgtctcaggtgcttcagtcaggctcccaggacacgcgatatctggggcagattttgcagtactccctggatatggtcaggaaactatctgcccctgcaaaggaagatgacatgaagaggagtcatgagaaattgttaaacgagttggctgcaagttccgaagttaatgacaatggtatcagctcctttgtcattgttgtcatcaagggcctgcgtttcactctcgaagaaataaagcaactgcaaactgaagttagcaaggctcgcatccagctcatgcaaccaattattaaaggctctgccggagtggaatacctgcagaaggctttcacggatcgctatggacctcctgctaatgcatcagtgtctctccctataactaagcagtgggtttcggcaacgaagagcatcgtggaacaagagtggagctcacatttggagtctctccaagctttgccagcagatcatgctcagcacgttgttccggtacttcgagctggtcacggtgctccagcgccgcaggcttcttcgtctgcagctagcagttccggtctcccagaatgcaagggtgagaagatcgacaagctgacaagggttggcttgttgcaacttatcagcaatgtggagggcctgaacatgcagtcaacccctgagaccttccaaattaatctgctgaggttgagggctgtgcaagatcagtttcagaaggtgatagtgatcgcgacgagcatgcttgtcctgcatcaagttctgatgttgaagatcgctcctccggagctacagaataccatctcagagctctacgacgctctcgtgaagctcctcgacaacaacgctgacgcatcaacgaaggagatcgtggaggcgatgacgcgctctctggcctcggtcggctctctgccggaggaacagattcaggacacgacagagctagcaaccaagatgcttctcaagagcctccaggccggcgacatcgtcttcggtaaggtgtcccgggcggtctactttgccttccgcggcgtcgtcctcggtggcggcgccaagggcaagaagctagccgaagcgccgctgcgacgcctcggcgcggcgaagctcgccgacagggttgtcaaggccggggaggtgctgataaagatggcagtcatatcagagaaggtccatggacaatggtacaaggcgcttgccttgtgaagagcagaatagggtttgtgttgttttgtgaatatacattacggattacggactgtaaattcttgtcctaccggggtgaggtaggaaatattgggcattgtacataaatttatataggtgttaattggtaggctgatttcagtgtcaaaaattaattctgggtgcagggctaatatggatgaccctcaccccagaatttagccagtggttagatgtgctgaattgcacctgggtgtaagttaaatctgatgtaatctatttgctcttggaactgaaataatgtgaatattttaattt

SEQ ID NO: 4973 - DNA, 695 bp, Oryza sativa
  ref <308>: DATABASE ACCESSION NUMBER: AK062184
  ref <309>: DATABASE ENTRY DATE: 2001-12-06
gaaaacctagatccccatctcgcgccgccacctctccccctcctccatccgcgaggcgaaaccctagccgaggacctcctccccttccgcgccagccatggcggccgccgacgtggcgtacgcgccgccgatgaagtccggcaagatcggcttcgagagctcgcaggaggtgcagcacaggatccgcatcaccctctcctccaagagcgtcaagaacctcgagaaagtctgcggtgatctggtgaagggagccaaggacaagagcttgaaggtgaagggccccgtgcggatgcccaccaaggtgctccacatcaccaccaggaagtctccttgtggagaaggtaccaacacctgggatcggtttgagatgcgggtgcacaaaagggtgattgatcttgtcagctctgcagatgttgtcaagcagatcacctcaatcaccattgagccaggtgtggaggttgaagtgaccatcagcgaccagtaaaatgctgctatccaacaggtggagaaattcggtgaacagggtagggtatttcagaaagtttttagcatgagaacactggtggaacagagtttttgttcatctataggctctcggcggttaattccgaccatctgttatctaagctatcataaatcttgtgactcatgtctgttccaacatatgctataaatgaatgactcgctaaagatct

SEQ ID NO: 4974 - DNA, 1497 bp, Oryza sativa
  ref <308>: DATABASE ACCESSION NUMBER: AK062185
  ref <309>: DATABASE ENTRY DATE: 2001-12-06
atcgatcaactccttccccaagtcgaagcaaaatccctagcgatgtcgtcgccgccgcccgccgccgccgccgcgatggccgtcgacgacgccgacgacgaccagctcgcctccatgtccacggaggacatcgtcagggcaacccgcctcctcgacaacgagacccgcgtcctcaaggatgagctgcagcggacgaaccttgaggtggaatcctacaaggagaagatcaaggagaaccaggagaagatcaaactcaacaagcagctgccttaccttgtcggcaacatcgtcgagatattggaaatgaaccccgaggatgaggctgaagaggatggtgcgaacatcgatctggattcacaaaggaaaggaaaatgcgttgttttgaagacatccacaagacaaacaatattccttcctgtaatcgggcttgttgaccctgaaaagctcaagcctggggatttggttggagtcaacaaagacagctacttgatactagacacgctaccttcagaatatgattcacgggttaaggcaatggaggtagatgaaaagcctacagaggattacaatgacattggtggccttgagaaacagattcaagagcttgttgaagcaatagtattgcccatgactcacaaggaccggtttcagaagttgggaattcgccccccgaaaggtgttcttttgtacggaccacctggcactggaaagaccctaatggctcgtgcatgtgctgcccaaactaacgccacatttctgaaacttgctggtccacagcttgtccagatgttcatcggtgatggtgcaaagcttgtccgtgatgcctttcagcttgcaaaggagaaatccccctgcatcatttttattgatgaaattgacgcaattggaacaaagcgttttgatagtgaagttagtggtgacagagaagtgcagcgcacaatgttggagttgctgaatcagctagatggattcagtagtgacgagaggataaaggtgatagctgcaactaatcgcgcggacattcttgatcctgctttgatgaggtctggtaggctggaccgaaaaattgagttccctcatccatccgaagaagcacgagctggaattttgcaaatccattcaagaaaaatgaatgtaaaccctgatgtcaactttgaagagttggcacgatctacggacgacttcaatggtgcacaactgaaggccgtttgtgtagaagcaggcatgcttgccctacgccgagatgctacagaggtgacacacgaggatttcaatgaagggatcatacaagtgcaagccaaaaagaagtccagtttaaattattacgcttaattcttccgagagagttattaggcctaaggaaacgctccgtccaaaattgtttgtttgtaacactaccgttttatatatttgtgtggttcaagatgtgattgtacgaaacatgtcttgcgctgttccttctctgcttgatatatactgatagaagttgactcgtcc

SEQ ID NO: 4975 - DNA, 558 bp, Oryza sativa
  ref <308>: DATABASE ACCESSION NUMBER: AK062186
  ref <309>: DATABASE ENTRY DATE: 2001-12-06
atccctccctcgcctccccaccatcctccgccgccgccgccctccgccctcgccgccgctccgttggaatccggatcttccttcgtcgagggggtcgcgtcgcctcgccggcggccgtcgcgagcatgtcggatgaggaggtatctgacccgaaggcactcctagaggatcgatcgaaggctaagtgtgtgtaccagtggtatgaatatcagaaatgtgtcaagagaattgaagatgatgagactggtcagaagcattgtactggtcaatacttcgattactggaaatgtgtcgacaaaaatgttgccgagaagctttttgatagcttaaaatgacaaggaaaatgttctctcttgctaccgtttacgcaacagtgagaataatcatatcgtttctgcgccctgtagacatgtcaggtgcttaatatctgtaagaaaaaaagttttgcctgtcggataatacgacagtttttcaaccgccactttacttttatttctgccagaggcattgaactctctacatctgggttcgtactgcgttattggctcatgctttttc

SEQ ID NO: 4976 - DNA, 828 bp, Oryza sativa
  ref <308>: DATABASE ACCESSION NUMBER: AK062187
  ref <309>: DATABASE ENTRY DATE: 2001-12-06
tgcaagtaggaaggaagaggaaggggacatatactttaacttgggtaaacatttgagagctcacaggagatatttcaaggccagacaaatcattgaatattcacgcttcggggtaaggagagggaaaattaatttaataaaactgctgtccatcccaacatcagaaattgatgcacagctggaagaaatgtggatttcctgcacttttaaagcggctaagtgcgcaatccagctagggtgctacatgcaagcatcgtgctattacagcgaggtgctgaactacgatgtggctaatgtgcaagcccagcagcagcaaacgttgttgcaggaatttcctgatggttcctcaagagacccggacgcaatgcagcgaggctttgagcaattcccaccagagtacgagtcagaattgcagctcaatgcaactttcactcctgcagctttttcaccgagacggaaaggtgagcatccgtatcgtggcgaaattattggcttccctgatgttcaggcaaacagcagccagcctgcttctactcctagtactgctcccagtactcccaaccctgctacaccacagacgaacgccctcgctactggcactagtggcaccccgagcggcagcgctgctcaaagctcaggaacaatcaacacgaaccgcgggtttctattcagatgcttcgggccatcgcccacgagctgaaggatccatcaagcttatatcgtctcaatcgttgtcgccgccgcagctaattactacttagtaatatcatatcatacttggaattgcagtatgctggtaatgtctacattttcaaatggatccacatt

SEQ ID NO: 4977 - DNA, 1772 bp, Oryza sativa
  ref <308>: DATABASE ACCESSION NUMBER: AK062188
  ref <309>: DATABASE ENTRY DATE: 2001-12-06
actgctgcttagcccaagtccaagtctttcttcctcctccgacctccccccatctccatctccgtgctcatctgccttcttctctcccctttccccgtcgcttcctgcctggatcgcacacacaaagagatccctcgcaggcggagtggtgcttcccctctcggatcatcttcgcctctgcaagattggcaagcaatgaggtgcctgcctttcttgcatggagattccaaagaggaggatcccgtcaacaagtcggcttctgtccggtcgttgagcacaacatcgacggagcgggatgtccggtccggctccgacttcaactccttgaatgtctctgacatgagtgccgaatcaatacggaggacacagtatcccagcttcactgatcggcccagtaacctcagggtgttctctttccctgagctgaagaatgccactcgcaattttagccggtctcttatggttggtgagggtgggtttggatgtgtgtataggggtgtcatcaagaattccgatgaaccaactgagcgcaccgagattgctgttaaacagctgaatcgcaaaggacttcaggggcagaaagaatggttaacagaactgaatgtgcttgggattgtagagcatccaaacctcgtcaaactaattggctactgcgctgaagatgatgaaaggggcgtacagcgtctcctagtatacgaatacatgcctaatggaagcgtggatgatcacttgtcaagtaggtcaaattcaactctatcatggccaatgagactaaaagtagctctggacgctgctcggggactgaagtatctgcatgaagagatggaatttcaggttatcttccgtgacctaaaaacatctaacattctgttagatgagaactggaatgcaaagttgtctgactttggattggctaggcatggaccatcagaaggcctgacccatgtctctacagcggtcgtgggaactcttgggtatgcagctccggagtacatgcagaccggacgcctcactgccaagagtgacatatggggctatggtgtgctcctttatgagctcatcaccggccgccgtcccattgaccggaaccgcccaaagggtgagcagaagctcctggattgggtgaaaccatacatatctgatatcaagcggttccccatcatcatagacccacggctagaggggcactacaacctcaagtccatgacaaagctggctagtgtggcgaaccgctgtctcgtccggctaccaaagtcgcgcccaaagatgagtgaggtgtatgagatggttcagaagattgtggccagcattgagaccggcacaccacagcctcctctgcactaccatgggtcggtttctgaaccgggctcaaagcggccaaagaaggggtcactgaagagaaggttccaagaattcaaattcggttgccggcagattgtatggcggagctggaagcctgagatcataaagacttgctgagagaatacagtagcttcctgcctgtaagtatatagctaagttgttcatagggataaagctcttcttcctctgtatgcttcctgtccttggggtgatctgatcccatttcgggcacacagttgagtacttgagttgcagtgtgaagccttttatcttatagggttctgtgtgatgcatcttgaggttgtagattccatgtgttttcagtataatccctgtggctttcctcatcatgtaatatagatcttgtttgtgcaatatgaaagaaaaaaaaagatgagctttcttgtatg

SEQ ID NO: 4978 - DNA, 1501 bp, Oryza sativa
  ref <308>: DATABASE ACCESSION NUMBER: AK062189
  ref <309>: DATABASE ENTRY DATE: 2001-12-06
gcttccatttgtcttgcttggctcttcactctccccctgttcctgcaggggtcaggcactgcctgctacaagagtggtgtaggtgattcggctagctcagcgcgaagatgggggagatcaccaatgtcacggagtaccaggccatcgcgaagcagaagcttccgaagatgatctacgactactatgcatctggggccgaggacgagtggactctccaggagaacagggaggccttcgccaggatcctgtttcgcccacgcatactgatcgacgtatccaagattgacatggccacaacagtcctggggttcaagatttcaatgcccattatgattgctccctctgccatgcagaagatggctcacccagatggagagtatgcaactgcgcgtgctgcatcagcagcgggcactataatgacattgtcatcatgggctacttcaagcgttgaggaggttgcctcaactggaccagggattcgtttcttccagctttatgtttacaaagacaggagggtggtggagcagcttgttaggagagctgaaagggctggattcaaggcgattgcgcttacggtggatactccgcgacttggccgtagggaggctgacatcaagaacaggtttgttctgccaccatttttgacactgaagaactttgaaggcctggagctggggaaaatggaccaggctagcgattcaggactggcttcttacgtcgccgggcaaatcgatcgcaccctgagctggaaggatgtgaagtggctgcagaccatcaccacgctgccgatcctggtgaagggagtgatcactgcagaagacacgaggctcgccgtggagaacggcgcggccggcatcatcgtgtccaaccacggcgcccgccagctggactacgtcccggccaccatcagcgccctcgaggaggttgtgaaggcggctcgcgggcagctccccgtcttcctcgacggcggcgtccgccgcggcaccgacgtcttcaaggcgctcgccctcggcgccgccggcgtcttcatcgggaggccggtggtgttctcgctggcggcggcgggggaggccggagtccggaacgtgctgcagatgctccgcgacgagttcgagctcaccatggcgctcagcggctgcacctccctcgccgacatcacccgcaaccacgtcatcaccgaggccgacaagctcggcgtcatgccgtctcgcttgtaaacaacaacgacggcgaacttgtcgccgtcgatcgatcaccggccggccgccgcgacacgctttgccggccgacggatgatcggccgggaatgaagaagaaggtagtagctgccgaagaaaagattggaagatgcaaagttctataattttggatgatgctgcgtcatgtacttttgttaattgtcgagtgattgatcacctgtacctaattaaatggtttattggattattggcggtttatactaaacgaacaaattaataccatacggtctcttcgtgattgc

SEQ ID NO: 4979 - DNA, 1861 bp, Oryza sativa
  ref <308>: DATABASE ACCESSION NUMBER: AK062190
  ref <309>: DATABASE ENTRY DATE: 2001-12-06
gagttatctttgaattttggaccctgtgaatctgctgtgacgaatgtggacttctctgcagcaaccaaacaacaggccgtatttctgcaatcatgcaatatgtcctcagtgcctacagtggacgaaggatcaacatctgctcgctggaaatctggtggtaagctacttccttatctgtatcagtccaggaacaacactggtcatttttcaagtaaagagttaccaggtagctccaaccagtctcaagatcttgccccactgccaaaaatgatacaaacgccacaaagtccagtaaccagtacttctggtgttgtcagctttcaacaacgctgcaacagcacaaaaatctgttcacaaccaggatgtgcaaaaggtgctagaggttcttcagggcgctgcattgcacatggtgggggtagaaggtgccagagagaaggttgcaagaaaggagccgagggaaaaactatcttctgtaaagcacatggaggtggcagacgctgcgagcaccttggatgcacaaagagcgctgaaggccgcacagatttctgcatagcccatggaggtggccgccgttgtagccgtgatgggtgtagaaaggcagcaagaggaaaatctggcctttgtattaagcatggtggggggaagagatgccaaaaactgaactgcacaaagagtgcagagggccaatcaggcttttgcatcgctcatggtggtggccgtcgctgcaaacatgatggttgcacaaagggagctcagggcagcactaatttctgcaaagctcatggaggtgggaagagatgcacacatccgaattgcagcaagggtgctgagggaagcactgctctctgcaaggcccatggaggagggaaacgctgttcagctgaagggtgccctaagagtgtccatggtggcactgagttctgcgttgcccatggaggcggaaagcgatgtgtggtaccaggatgcaccaagagtgcaaggggacggactgactgctgtgtccgtcatggcggtggtaagcggtgccagtttaccggctgcagcaagagtgcacaggggagtacagacttttgcaaggcacatgggggaggtaaacgctgcttatggggccaatcagggtctggccttggagacggcagcggtacttgtgagcgctttgcaaggggtaagaaaggcctgtgcgttgcacacaatgcgctggtggaagatagtcgagtccgtggtggtcagacagttggaactattgccctgcctggttctactggtgctgattctgatgttagtcatgggacccttcctggaaactctttcaactttggtgagacatttgccgctaacaccaagcaggctcttcatcatgttcaatcacctgttccagaaggcagggtgcatggtggcaacattgcggctatgcttgctaacagtatggattatcagaagcaattgaactttagcaccggggctagcacctctgatcgcaactggctgtaatacagttcatgcattaaaaacaccaaccattcccttcgctgggccctgtttcatttcaactggcaagtaacttatatgttcctaccgtgctgtgtatttaggaactgtggatcctgatgatttagtggtgctgtgttaatagggggcttctagtgcttcgtttgtagccatcttgtgtcataaataaaaggggaaagtagtgtaatttatattagtgcgcaattgtaaaattctaatgtttgttgaagatgtaacatatcttcgaaactcatgttgagtgtttgtgattgcaatattagcattatggttggtacattggctcctgtctatgcatttaaccgtttgagctctgatattgagtttccttgct

SEQ ID NO: 4980 - DNA, 1531 bp, Oryza sativa
  ref <308>: DATABASE ACCESSION NUMBER: AK062191
  ref <309>: DATABASE ENTRY DATE: 2001-12-06
gactcttatgcaccaatttctgcaccactcccgctgcttgtgagggggctgcctagcaataataagcaatcagctcaacctccagatagccaatctagtgcatatggtgggactctctatggagaaggttggagctttctcattcctgacctcgtctgtgatgttgagaacgggctcttatggaaacttcatttagacctagaggctattgccgctagtacatctgatgctcctttgattctggaattccttcagagacgaaagtctgaccctagcatggttaagactctaagccttgctatagtccggactatcatcctggagaggagaccaattactatggttgcaaaggcaatggatgttgttcttgattcctattctcgtctgatgaaaatgggaggtggtcttcctgcagttaggagaacatctgagcaaaaccaacagcccggtgttcagcccggtgtgaacccagattcagcaagtggggatggaaatagacctgtgcagtcaaattcagaagttgagcatggaattgctaacctggcagaacatgtagataggacactgttaaatacatcatctgattctgatgatattatcgatgcatcaggagcatctgatgctcctgacagaaaaccacaagttttggggcaggatagcagaccattggcttctggtacatcaacgcagcatgggtcacatgttgctagtgtggcagtttcaccaagtgaaatgtttgagtctgtgtttgtacttgttgaagacgaaatgatggctgatcctgcgtatcttatttctatcatcatggagtttctacgaagtgtctcaagagctgggttgaaggctcctcctaacctttttgtgatgatgacaacactgctggcccgcagcaaccgttatcctgaaatagccttgtttgtatccaacaagatcctagaaccctccaaggaacttgcgatgcaactcatggaattaggtcaacaacactctccgacaaggaagctgggcgtggacatgctgagagagcggggcttgcaccatgactacgtcactgcgttactgcaagacggataccacctggaggctcttcgctacgctagaaaatacaaggtaataactgtgcagcctgtcctgttcttggagaaagctgtggccataaacagcgcgcagaacctcgccgccatgctgagcttcttctccgagttcacgccgaccttcaagacgacgtcggactacggcagataccggcatatcttgtctgagatgatctgaacaaatttcagtagacagggtgaactgcctgaaacgatttggcacgttttatgcaaatcccgtacagaagaaacttgatacgaggaatggtgtaaagttcagacgatttaagtataattgaacaaatggaacgaggttgctcagtgagacagtgaggattgtgatgaacgaattcgagtttctgcgagcctttcgacactacgaccgaacagaactgctgggaaatccatgacttgcaatgtggtgggtcttttttctg

SEQ ID NO: 4981 - DNA, 858 bp, Oryza sativa
  ref <308>: DATABASE ACCESSION NUMBER: AK062192
  ref <309>: DATABASE ENTRY DATE: 2001-12-06
tgttcgaattgatgcacctatctactttgccaacataagttacataaaagacaggttgcgtgaatatgagcttaatctcccaaattcaaaccgtggacctgatgtcggaagagtgtactttgtgatcctcgagatgtcccctgttacatacatcgattcaagtgctgttcaggctctcaaggacttgtatcaagaatacagggatcgccatatccagattgcaatagcgaacccaaaccggcaggtacacctgctgctttcgagatcgggcatcatagacatgattggtactgggtggtgcttcgtgcgagtgcacgacgctgtgcaagtatgcctccagaaggtgcagagctcatcatcaagttccataaagctgtcgccacaggcatcaggggacctagctgactccgttaccactccaaaggttcaacagcggtatagttttctaaagaacctctggaaatcacaggttggggacgggtgtacaggtagtgaggttcaaccgttgctacgccaaaaccttgtttaacattatggccgactacctttctattagtatctgtctgcctgtttatatttgatgtacatgtatgcatacagtgtaaaggaaaaaaaaggaatatgttattactctcttgcaattttatatagaggaattgagatggggttgtaagtggacagtatatgtgctgccaacacattggttatctacacataaggacgtagaatatgctgtgtactgtacggtgccgcggcttgcctatcgtgaggagttgaaatgttcgcaaaattcttgtttaacttgtaagtttatgtatatacattttcctaggcatgtaataacagccgctttccatc

SEQ ID NO: 4982 - DNA, 840 bp, Oryza sativa
  ref <308>: DATABASE ACCESSION NUMBER: AK062193
  ref <309>: DATABASE ENTRY DATE: 2001-12-06
accgatgatacaaacaaaaaactagtttttgaagaaatgaagaaagcagtagaaaaggaccgatcaacagttggtgtttcagaattgtcaaagctgggtttgatggagataactagaaaaagggttcgaccaagtgttacgttcatgatcagtgagccgtgtccttgttgccatggtattggccgtgtggaagctcttgatacttctttttcgaagatagagcgtgaaatctgtcgacgccttgctgcctctggacataaatcagaccctgagaaaccaaaatcatggcccagatttgttcttagggttgaccatgagatgtgcacgtacttgacatcaggcaagaaaacaaaactagggctcctcagcagctctcttaaagtgtggattttgttgaagatcgctagaggttttgctcgtggggcatttgaattgctaccatattctgatgaaaaggaaactgatgagcggaaggaagagacatcagaatcgcctccgaaagaagcaggcagcccaaaactctctgtatttcctatcaagaagtggatgagccgtgcaaagagagcgaagtgaatctctaccaaagagatgatttggttgtgcgatatgctttattgttattcccagatcaagaagtacagaatttgatatggctctgttgttaattctttcctgtggtgatccaacgtcagatagacgccttcctggtcaatggtttgatagattttttttttccttttccaaaattttagatgcaaaaccacagtgtgttaactatgacggatgcaaagaagtagcacgaacattttaggtgggaggaaactagattttctgagggat

SEQ ID NO: 4983 - DNA, 455 bp, Oryza sativa
  ref <308>: DATABASE ACCESSION NUMBER: AK062194
  ref <309>: DATABASE ENTRY DATE: 2001-12-06
gagaaatggatttctgaggcatacaaagccattgacaagacagtgaaggttggcgccatgcacaggaatactggtaaccatcgcaagtcccttcttgcgaggaggaagaaggccatcgagatactccgtggttggtatgttccaaacgctgaacctgctgctaccagctagtctattgacaaatcgtcttcaggaattcgcagcagattcattgtcaacacgtcttgccaattttggacatgcatatgttgtttaaggaattaaatagctttgttatattctctccattccaagcgatgtgtatacctttggtccatgttatgtgttcatgttcttgctctggaagccttgaaacagaactgggccaatacttttctcccacttctgttatccttcacatcagtgttgtaaaatgacaagctgaaatattttttttctatggtaaggatgttttc

SEQ ID NO: 4984 - DNA, 1666 bp, Oryza sativa
  ref <308>: DATABASE ACCESSION NUMBER: AK104903
  ref <309>: DATABASE ENTRY DATE: 2002-08-28
agctagtgtgccgtgcccgtgatcggagatggcaggctcgttgtctgccgcgctgtgcctcactctcttctgcttgctgggggcatgcattgcgcccggggcgcgtgctaacggccggcacagccggcgggacctcgacatcaacctcggcaacggcaacggcgggggcatcagcatcggcataggaggaagtggtggtggtggtggtggtggctccagtggtggctccagcggcggcggcggcgatctgcggccgtgcgacttcgagaacgagcggctgtacaaggcgtacaaggtgatccagaagttcaggaggacggtgacgtgcgacccgcagaacatcatctcctcctggagcggcgccgacctgtgcagcacctacaaggggttcttctgcgagcggccgcccaacatcaccgaccggaccatcgcctccgtcgacttcaacggctacaacctgcaggcgtcgtcgctgaaggagttcgtggacgccctcccggacctggcgctgttccacgccaacagcaacaacttcggcggcgccgtgccggacctcagccggctgcagtacttctacgagctcgacctgagcaacaacaagctgtcgcccgccacgttcccgacggacgtgctcaagctgaagaacgccaccttcgtcgacatccgcttcaacagcttctacggcgagctccccggcggcgtcttctgctcgttcccgcaggtgcaggccatcttcgtcaacaacaaccagttctccggcagcctgcccgacaacatcggcgactcgccggtgaactacctctccctcgccaacaacaacttcacgggggagatccccaagtcgatcgcgcgcatggccaacacgctcttcgaggtgctgttcctcaacaacaagctcagcggctgcctcccctacgagctcggcctgctcgccaaggccaccgtcatcgacgccggcaccaaccagctcaccggcccgatcccggcgtcgttcgcgtgcctgcgcaaggtggagcagctcaacctggcggacaacctcctctacggcgaggtgcccaacgcgctgtgcgagctcgccttctcgtggtcgggccgcctcaggaacctcacgctctccaacaactacttcacgtcgctcggctcctgctgctgggacctgatcaaggaggggaagctcaacgtcgaccgcaactgcatcccgtacgcgcccaaccagcggtcgcacgacgagtgcgccgccttcttccaccggaccaagacctccgcgtgcccctgcaacacctacgtgccgtgtggccacaacaagcactccgccgccggcgccggcagcgagcaggacacggcggcggcggaggaggacaagtacaggacttactcggcgctgcatccatgagcgcgagaaggaagggcaaaagcactgtgcttctcgtgaacgtgacacgattattgattgattcggttgctcttggctggttgtgttaattgatgtgttgtgtctacttttttgttacttttgtttcctttctcatccactgttacgtacggccaacttagtttcacatatatctgcatgtttaggtaaggtaatggagattttattttgatgaaccacagaagcttgtaataattcagatcaccatgaaagatcagctttaaatttccctgc

SEQ ID NO: 4985 - DNA, 1424 bp, Oryza sativa
  ref <308>: DATABASE ACCESSION NUMBER: AK104904
  ref <309>: DATABASE ENTRY DATE: 2002-08-28
aagagatggaggatccgactatcttggcaaaggtgtactcaaggctgtgagcaatgtaaacactattattgggccagcactcatcggaaaggatcccactgagcaagttgacattgataacttcatggttcaacagcttgatggaacctccaacaactggggctggtgcaaacaaaagcttggagcaaatgctattcttgctgtttcacttgctgtgtgcaaagcaggagccatggtgaagaagattcccctttaccagcacattgcaaatcttgctggaaacaagactctcgtgctgcctgtacccgctttcaatgtgatcaatggaggatcccatgctggaaacaaacttgccatgcaggagttcatgatcctccctactggtgcatcctctttcaaggaggccatgaagatgggagttgaggtgtaccaccacttgaagagtataatcaagaaaaagtatggccaagatgccacaaatgtgggggatgaaggtggctttgctcctaacattcaggaaaacaaagagggcctcgaactgttgaaggccgcaatagctaaggctggctacacaggcaaagtggtcataggaatggatgttgcagcttctgaattttacagtgaaaaggacaagacttacgatcttaacttcaaggaggataacaacgacggttcacacaaaatttcaggtgacagcctgaaagatgtgtacaagtcctttgtttctgagtaccctattgtgtcgatcgaagatccattcgatcaggatgactgggctacctatgccaagcttactgatgagattggacagcaagtgcagattgttggggatgaccttcttgttactaatcccacaagggttgccaaggcaattagtgaaaagacttgcaatgctcttctcttgaaggtgaatcaaataggctcagttactgagagcattgaggctgttagaatgtccaagcgtgctggatggggagtgatggcaagccataggagtggtgagacagaggataccttcattgctgacctctcagttggtctgtctacgggtcaaattaagacaggagctccctgtcggtcagagcgtctggctaaatacaaccagctgctcaggatagaagaagagctgggcgatgctgcagtttacgctggagaaaaattcagagcccctgtggagccgtactaaaccttggcaccttgcggtgatcttgtgcctatggaccatggtgccatcaatctactactgcgtttttacacgagtctacaagggcaataaaattagtacttcttgacagtcccagaaattgcttagttaccctcgctttttcgttaatggccagattgtttgcttactactgtgttgacacacttgagcaccaatatgtaagatcaataaaagagcaaatcgcttgatttttcatcat

SEQ ID NO: 4986 - DNA, 1027 bp, Oryza sativa
  ref <308>: DATABASE ACCESSION NUMBER: AK062195
  ref <309>: DATABASE ENTRY DATE: 2001-12-06
tgttagtttatgagtaccttgaaaatggaagcctagatcaagcactcttcaggaagaatagcttaaaactggactgggcaactcgcttcgagatcattttaggaatcgcaagaggactaacttatcttcatgaggagtcaagtgtgcgcattgtgcatagggacatcaaggccagcaatgtcctacttgacaccgacctcaccccaaagatatcagactttggactcgctaggctctatgatgagaagaagactcatgtcagcacggggattgcgggcacatttggttatctggctcctgagtatgcaatgagacgtcatttgactgaaaaggttgatgtttatgcattcggggtggtcgcattagagactgtcgctggtcgatcgaacactaataactccatcgaggaaagcaagatctatcttttagagtgggcctgggacctgtacgaaaaggagcaagcacaaagaatcgttgatccaagacttgaggatttcaataaagatgaagttctcagagtcattcatgttgcgctcctctgcacacagggctcaccaaatcagcgaccgccaatgtcgagggtcatggcagtgctcactggagatgctgaggtagttgagatggtgacgaaaccgagctacatcactgagtggcaatatagagatggaaacagcaccaactcagaatctaccacctcagagttcagcaggcagaaggagatcgaccctctcaccatgtcgccaacaatcaccggatctagtcatgatggaaggtgaatgctgcaacctgcaggtgatcttggtttgaaatgattgtatgtaaatgtaagacggagctaatagtggaacttaattattctgaagtatgtatgatgataaaagtatttactccttgtaatttgtaacaggtcaaatagagtagtatcctagtatatatcttagaaattaatcaacgtattcgcatgtttatgagcacattctgcagcaaaatagtaaaaactgtccatgaaatttgttggctggaggac

SEQ ID NO: 4987 - DNA, 1398 bp, Oryza sativa
  ref <308>: DATABASE ACCESSION NUMBER: AK062196
  ref <309>: DATABASE ENTRY DATE: 2001-12-06
gtctggatcagttcatcacaaagaatgccaccctaacaaatgagaaggaagctgatgcctgcccaatcagagcaatgaagttctcagtgtccccagttgtgcgtgttgctgttcagtgcaaggttgcatctgatcttcccaagcttgttgaaggtttaaagcgtctggcaaagtctgatcctatggtcctctgtaccattgaggagtccggtgagcatatcattgctggagctggagagcttcaccttgaaatctgcttgaaggatctacaggaagacttcatgggtggtgctgagattattgtttcccctcctgttgtctccttccgtgagactgttcttgagaagtcctgccgtacagttatgagcaaatccccaaacaagcacaaccgtctttacatggaagctcgccccttggaggagggactggccgaggccatcgacgatggacgtattggcccacgtgacgatcccaaggtgcggtccaagatcctgtctgaggagtttgggtgggacaaggacctcgccaagaagatttggtgctttggacctgagaccactggccccaacatggtggtcgacatgtgtaagggagttcagtatcttaatgaaatcaaggactctgttgtggctgggttccagtgggcatcaaaagaaggtgcattggctgaggagaacatgcgcggcatctgcttcgaggtatgtgatgtggttctccacgctgatgctattcacaggggcggtggccaggtcattccgacagcgaggagggtcatctatgcttctcagctcaccgcgaagccaaggctgctggagccagtctacctggtggagatccaggcccctgagaatgcccttggcggtatctatggcgttctgaaccagaagagaggccatgtgttcgaggagatgcagaggcccggtaccccgctgtacaacatcaaggcttacctccccgtcatcgagtcgtttgggttctcgagccagctccgtgccgcaacatcgggccaggccttccctcagtgtgtctttgatcactgggacatgatgacttctgatcctctggaggtgagctcgcaggcgaaccagctggtgctggacatccgcaagaggaagggtctcaaggagcagatgacccctctctcggatttcgaggacaagctctaagaaaaaacccttttggtctcgcatatgtttttgccattaatttacctgttctaatagctgttctactattgttaaagagttataagacaagtcagaaatatgatgtgtttgttacacatcaagtatcggtgttggtagtgttgtgctgtggaactatatattttgctgtctggtgatatgcaacagatatggaactttgataatgtatctgttgatagtttttacggttttc

SEQ ID NO: 4988 - DNA, 668 bp, Oryza sativa
  ref <308>: DATABASE ACCESSION NUMBER: AK062197
  ref <309>: DATABASE ENTRY DATE: 2001-12-06
tcaggttgcaagcaagataaataccaatgaaattattcgcagattcgaggagaagttatcaaaggtgatagaggagcgcgagatcaagatgatgaggaaggagatggttcacaaggcccaactcatgccagcgtttgacaagccatttcacccacaaaggtcgacgaggcccctgaccgttccaaaggagcccagcttcctgaggctgaaatgctgcattggaggagagtttcatcgccatttttgctacaatgccaaggccatcaaataatattaatacacactaatagaggggaattattgcacatatataccatcaccctctccatgaacaaactattttttgccggtcgtgttcatcagttaatccatctctattaagtacagtgtcgtttgtctcacatgtaccaaaaccgttgtttttaatttcttttgcctttctgcacgaatcttcacgtaggtatagtagcatagagaacgaaatggctccacatatgtaaatcctttttattttttcctttcgctttcacttctttgttgcctttgctttttgttctctctcttttttcccctttcttcactgaagactaggagagatatatgtgcgtcatccatgtatatgtccctgatctggtggtaacaatgataataaagctttgcattgtgac

SEQ ID NO: 4989 - DNA, 1064 bp, Oryza sativa
  ref <308>: DATABASE ACCESSION NUMBER: AK062198
  ref <309>: DATABASE ENTRY DATE: 2001-12-06
aaaaaaaaaaaatttgcattcactgccaacggatgggtgcaatcttatggatcacggtgtgtcaagccaccaattatctatggtgatgtgagccgccccaaccccatgactgtgttctggtccaagttggcgcagagcatgacctctcgccccatgaagggaatgttgactggtcccgtcacaatccttaactggtcttttgtcaggaatgaccagccgaggtttgagacatgctaccagattgctcttgccatcaagaaggaggtcgaggaccttgaggctggtggtattcaggtcatccaaatcgatgaggctgctttgagagaaggtctgccactccgcaaggcggagcatgctttctacttggactgggctgttcactccttcagaatcaccaactgcggtgttcaggacaccacccagatccacacccacatgtgctactctaacttcaacgacatcatccactccatcatcaacatggacgctgatgtgatcaccatcgagaactcccggtccgacgagaagctgctctccgtcttccgcgagggtgtgaagtatggtgctggcattggccctggtgtctatgacatccactccccaaggatcccgtccatagaggagattgcggaccgcgtcaacaagatgctcgcggtgctcgacactaacattctctgggtgaaccctgactgcggtctcaagacccgcaagtacaacgaggtcaagcccgcccttaccaacatggtttcggccgccaagctcatccgcacccagctcgccagcgcgaagtgaggatatccatagctgcaagttcccttcggttgcgaggacgatgccgtcatagccatctgtttttgaataatctgggtccagtggatccaattgtctgtggttaggtttagtcagtctcggtgggaagatccctcatacccgttttacttttgaatcaatttggtggtttttgaggcagtttgtcggtgtatttgtattgtgtgtaatctgagtgggaatcagcagtgtttcatctgcatctgaatcgttgcggatcaaattacaaaattttc

SEQ ID NO: 4990 - DNA, 1396 bp, Oryza sativa
  ref <308>: DATABASE ACCESSION NUMBER: AK062199
  ref <309>: DATABASE ENTRY DATE: 2001-12-06
aatgctttcaggtggagggaaactattggtccctgggaacagagacctgggcactttggagatgtttggaattattggaccgatgatggcctaggatattacgagtttctccagctttctgaagacctgggtgctgcccctatttgggtgttcaatgttgggatcagccaccatgatgaagtcgataccaccataattgaaccttttgttaaggatgtattggatagtcttgaatttgcaagggggagagcagaatcgacatggggttctgttagagctgcaatggggcatccagaacggttcccactgaagtatgttgctattggaaatgaagattgtgacaagggattttaccgaggaaattacctcaagttttatgatgctatacgcaaggcctatccggatattcaaatgatttcaaactgtgatggatcatctaggccacttgatcatcctgctgatttatacgatttccatgtctataccagtgctgctaatctttttatcatgaagaataagtttgataggacatcacgcattgggtctaaggtatttgtcagtgagtatgctgtcaatgaacaaagggatgctggtaaaggaagccttcttgcttcactggctgaggctgctttccttactgggttagagaaaaatagtgatcttgttcagatggcaagctatgcaccgctcttcgtaaatgacaatgaccgcacctggaacccagatgcaattgtattcaattcctggcaacagtatggcactcctagttattggatgcaaacatatttccgtgaatcaagtggttctgtgattcatccaattacgatcggttccagctactccgattcactggctgcatctgcaatcacctggaaagacacacatgatatctttctgagaataaagatagtaaactttgggccaaatgctgttaacctcgcaatatcttcaagaggacttcaagctggcgtcaatacggcaaaatcaactgtgactgttctcacatccggcaatttgctggatgaaaattcatttgctgaaccaaacaaagtcgtaccggttaaaagcgagctgccagatgcttcagaagagatggaagcagcgctctctccttattcattcacttcatttgacctcgctctagatcagtacagcaagctcgtggcagagatgtgaagcaatgatgcacacttataccagagaatagaacacaggatgattacgtgaggtgtggtacctgaatttcagaaagctaacagagtgtatatactgcattctggcatttgctaatcacacttcgtgtgaccctgttgtttatgacgctgtaagagtagtttaaggttgtcacattatcgaacctagcggtaacgctaattaatatcattgtcaataagct

SEQ ID NO: 4991 - DNA, 1519 bp, Oryza sativa
  ref <308>: DATABASE ACCESSION NUMBER: AK104905
  ref <309>: DATABASE ENTRY DATE: 2002-08-28
cccccaaaaccctaggccccccttctcctccgacgccggctacagtctccgacccctccggcgcaatcgcggaatcggaggcggcgggcggcgccatggacaacgccctcgcgagcgccgcggcgatcgccgaccagcgccagaagatcgagcagtaccgccacatcctctcctccgtcctctcgttttccccgccggacatctcgcaggcgaagcgcttcctcgaccacatggtttccgacgaggtgccgctcgtggtgtcgcggcagctgctgcagacgttcgcccaggagcttgggaggttggagccagaggctcagaaggaggtcgcgcactacgcgctcacgcagatccagcctcgtgtggtctccttcgaggagcaggtggtagtgattagagagaagcttgcagaactgtatgagtctgaacaacaatggtcaaaagctgcacagatgcttagtgggattgacttggactcagggatcaggatgctggatgacacaaacaaattatccaaatgtgtccagattgcacgactttatttagaagatgatgattctgttaatgctgaagcttttattaacagagcttcatttttggtaacaaacagtcaccaagaacttctgaacttacagtacaaggtatgctacgctagaattttggatctgaagagaagattcttggaagctgcacttcgatactatgacatctctcagattgaacaacgccaaattggtgacgaagagatcgatgaaaatgctttggagcaagctcttagtgctgctgtgacatgcacaatattggctggtgctggtccgcaacgatctcgtgttcttgctacattgtacaaggatgagagatgctcaaagttgaagatatacccaatactgcagaaggtctttcttgaaaggattttgaggaaaccagaaattgaagcatttgcagaggagctgagaccgcatcaaaaagctctgttaccagataagtctactgtgcttgaccgggcaatgattgagcataacctccttagtgccagtaaactttacactaatatcagctttgatgagcttggagcattattgggcattgaccctaggaaggctgaaaagatagcatcgcgaatgatttatgaagataggatgcgaggttcaattgatcaggttgaagctgtgatacattttgaggatgacactgaagagctgcagcagtgggaccaacagattgcggactgtgccaagcgctgaacgacattctggacagcatgtcaagcaagggaatggctattcctgtgtgagctcttcaagttgcttcgatggtactcgtgagaactgtggtcacggcgtcaggcctcacggacattttgtacagatgttcgcagctgcgagtaccagtcatgcttcggaacgaattttggccacaattagtcggtgatcggtacatgtgaagttgtgaactgctggatagattaaggcagtggcgccgtaatggcattatatcacaaaccaaaattgatcgtgat

SEQ ID NO: 4992 - DNA, 632 bp, Oryza sativa
  ref <308>: DATABASE ACCESSION NUMBER: AK062200
  ref <309>: DATABASE ENTRY DATE: 2001-12-06
aaaaaaaaaattaagagggcagatacaagcaaaactttgttgcaagcagttaagggtgagaagagtcatatagaagaaaaacttaaccaggaagagctgcagagttccagactgaagcaggaattagctaacgtggagacaaaaaatgtggaacttaccaaggaacttgacttagtccgcaatcaactttctgctgaagaagcaagggcgtcgcaacttgagaacgaaatttcggatcttcaacaaaggctgcagaagatggagaccctggaaaaggagtccgaatcgcttcggcttgaaaaggatgcagagtccgacgattcatcttcaggcagcaaccagcggcctgctgataagggcttctggaggtggaatggataaaaattcatcgatacaggtagtagcatactagcattggatgtatggaggatatttcctgcagagttgcacattctttcaatttttgcccatttcttttttcccctggagagcccagtattcacaagtagatcaaatatcgaaaaatgtttactcacagagaaacaggatgatagcaaatcgcggttccatcaagagaactgatcaaccatgagaagaatttaataaagtttacaggtggttctatttttttc

SEQ ID NO: 4993 - DNA, 1389 bp, Oryza sativa
  ref <308>: DATABASE ACCESSION NUMBER: AK062201
  ref <309>: DATABASE ENTRY DATE: 2001-12-06
gtacatgaataggattaatggcaagcaggaggtcatgattggatactcagactctggcaaggatgctggtcgtctttctgcagcatggcaaatgtacaaagcacaagaggagcttgtcaaggtggcaaagcattatggtgtaaagttgacaatgttccatggaagaggtggaacagttggcagaggaggtggtcccagtcatcttgccatattatctcaaccaccagacacgatacatggatcacttcgtgtaacagtacagggcgaggttattgaacactcgtttggagaggaacacttgtgctttagaactctgcagcgctttactgcagctactcttgagcatggaatgcatcctccaatttcccccaaaccagaatggcgtgctctaatggatgagatggctgttgtggcaacaaaggaatatcgatcaatcgtcttcaaggagccacggtttgttgaatacttccgatcggcaacacctgagacagaatatggcaggatgaacattggtagccgaccatcaaagagaaagcctagtggtggcattgaatcgctccgtgcaattccttggatttttgcttggacacaaactaggtttcatcttcctgtatggcttggatttggtggagcgttcaaacatataatgcagaaggatatcaggaacatccatacactgaaagaaatgtacaatgagtggccattcttcagggtcaccttggacttgcttgagatggttttcgccaagggagatccaggaattgctgctttatatgacaaattgcttgtggcaggtgatctgcaatcctttggagagcagctgagaaacaactttgaagagacaaaacagctactccttcaggttgccggtcacaaggatattctggaaggggatccttacctgaagcagcgtctgcggctgcgtgagtcgtacatcactaccttgaacgtttgccaagcctacaccctgaagcggataagggaccctagcttcgaggtgatgtcgcagccggccttgtcgaaggagttcgtcgacagcaaccagcctgccgagctggtccaactgaacgctgcgagcgagtacgcacctggcctggaggacaccctcatcctgacgatgaagggcattgctgccggcatgcagaacacaggctagattgtccacaagaatgcttccagcaggtgcaatcaatcaatcatcaataactccttccatgatgagatggtgaatatgtttaactagtacgttcgccgatgctagtgaattctggagacttttttttgctcgcacgttttcttttggttgtgtacttgatgtaaatgtcaaggggggacttatttggcttttgcagcccgatccaaaataaaatatggaccaatcattctacg

SEQ ID NO: 4994 - DNA, 478 bp, Oryza sativa
  ref <308>: DATABASE ACCESSION NUMBER: AK062202
  ref <309>: DATABASE ENTRY DATE: 2001-12-06
agctgcttgcaagtccaagctcctaggtgatgcaagctccaaggggagagggaggtctggtcggcatgcgacggtagcgtggtcgacactggagtgggaggtctggccagcgtgcgatggcagcgtggtcgccgatgtcgcctaggcagcagcaagctcctaggtgatgcatgcagcgaccctacgcgtcaagctgaccaaccaggcgatggcaccacttcttctctcgcgttcaatgtgtcgccgtggaggccggcaccgtcatggacgtcgacgcctcaccaccgggagcatgtaggggagaagtacaagaacgggtgtgttgagatttttttcaatgtttcagatagtttagtttgatgtttctttgggttggatcgaatgttgcaattggattttagatggtgttccataactttgctccttgatgcaaaccaccaatggaaatttgttgtttcacatgtgtgaatgaaatgtt

SEQ ID NO: 4995 - DNA, 838 bp, Oryza sativa
  ref <308>: DATABASE ACCESSION NUMBER: AK062203
  ref <309>: DATABASE ENTRY DATE: 2001-12-06
tagctaaagcattgcgtatgtctgggggagatcatatccacgctggtacagtagtaggtaagttagaaggggaacgcgaaatgactttaggttttgttgatttattgcgcgatgattttattgaaaaagatcgtgctcgcggtatctttttcactcaggactgggtatccatgccaggtgttataccggtggcttcagggggtattcatgtttggcatatgccagctctgaccgaaatctttggagatgattctgtattgcaatttggtggaggaactttaggacatccttggggtaatgcacctggtgcagcagctaatcgggtggctttagaagcctgtgtacaagctcgtaacgaagggcgcgaccttgctcgtgaaggtaatgaaattatccgatcagcttgcaaatggagtcctgaactagccgcagcttgtgaaatatggaaagcgatcaaattcgagttcgagccggtagataaactagatagctagaaactaagctagttggcaagccagcaagctcactcgtgagctctatacagaggagactcgattgatctattcggttttggcagctttgaacgttcgaatcgggccaccttgcattggtttcccctttctcagtttgttgcttcagttttttttttcatcttgtttgtgtcaacatcagctgtgtatgtatgtacatatgtatgtatcaacataggttgaagagcatgcatatgtgaatgctagcaccaggctaatcatatgcacatacacatcgtaataaatatattgtacaaatcgtcaaaaacgatacttatatgtaatactatactcagaccaaacttgat

SEQ ID NO: 4996 - DNA, 1536 bp, Oryza sativa
  ref <308>: DATABASE ACCESSION NUMBER: AK104906
  ref <309>: DATABASE ENTRY DATE: 2002-08-28
caagctcaagcgcttaatacgaatctggctgccatggagctctccggcgatgccgccgtcgtctccggctccggcaaccgcaagcgcaagcgccatgtgcagcagcactccctcgagtacccctgcgtgtcgcggctccgccaccgtcgcctcctcgccttcctcagccgccacgactacgactccaccttcgacgcgctggtgcaggagacgtccgtgctcttccgcgtggggcacatccaggcgctggtgaggcagggccggtgggcggacgccgccagctacgtcaaccgcttcgtgccgccgtctcgcgtgctcaccgatgccggcctggtcttccacgagttcctctacatccaccacgtcctcgactgcatcgtcgccggcgaccacttgcggggcgctcaggtggccgccagctaccagcgccacgtcagggacaaccccaacccctcccatggcgccatcaagctcatacgcatcctcctcaccattctccactgccatccaatcagggcgttcctcaactggcatctggtgaggtacaaggcggccgagatcatcaaggacttgatccctcagatccccgagttcaacgacctgctaaagctaccgaaaggtggccccatcaagccacacaacatcctccccattgggtccagttctcatcggaggcgccacgtgaagaatgaagaccggattccacctgatattgcccgcttctatcttcagaagaagagagggctgccctcttctactatctgtcaggagagatattacacaggattatcacgtaatgcagcaaactggcttgcagatatcatcgacaaatctttgcaagctggtgtgctgcgtgatggatatccatttaaacactcctgtaacgaaggtgttactggtgctccaattggtttggatagtcctgctaacagttatgggatctcaacacaaactattgcagacatgatgcgtccgttgatcattagtgatatcggtcaaggttcagttgcaagaaacaatccaacaaggccagaaacaactgctcaccaagcgattagtccaacaacgcaacagataactacggagtttgttcaacattcagaatcacaatttcaagaatacaactcccagatggatggaagagtcagaattgttgaaagtggcatgaaaaggtcgcgttccttcggtggtggttgcagctcatccgttgaaatttcgagttgatgacttctttagccggactggccggaagaatgaccagttcagtgacttgggttggtggtttcggtgttctcttgtgcttctcatcgaggggagacttaattgaatgagttaagggagctgttagaatatttagttagtgtagtctatgtcaatttttaccatttttagaacaatcacaatttgtggcttggatatactggtttcgcttttgtcttaagccctatagggcgttttcttgtggcgtggaattatcactccataccctttaatagaccgtcagtgatgaatactgccactcacaaaattactttt

SEQ ID NO: 4997 - DNA, 1269 bp, Oryza sativa
  ref <308>: DATABASE ACCESSION NUMBER: AK104907
  ref <309>: DATABASE ENTRY DATE: 2002-08-28
gtgaagatgtcgcagcctgctgagctttcccgtgaggagaatgtgtacatggctaagcttgcagagcaggccgagaggtatgaggagatggttgagttcatggagaaggttgctaagacagttgactctgaggagctcactgttgaggagcgcaaccttctatcagttgcttacaagaatgttattggtgctcgccgtgcgtcatggcgcatcatatcatccattgaacagaaggaagagagccgtggtaatgaggatcgttgcacgctcatcaaggaatacaggggaaagattgaaactgagctctccaagatctgtgatggcatcctcaagcttcttgactcccaccttgtgccttcatccactgctccagagtccaaggtcttctacctcaagatgaaaggcgactactacaggtacctcgcagagtttaagactggagctgagaggaaggatgctgctgagaacaccatggtggcatacaaagccgctcaggatattgccctggcagagttgcccccaactcatcctatcagacttgggctggccctcaacttctcggtgttttattacgagatcctcaactctcctgaccgtgcttgcaatcttgcaaagcaggctttcgatgaggctatctcagagctggacactctgagtgaggaatcctacaaggacagcactttgatcatgcagcttctgcgtgataacctgacgctgtggacttccgatatctcggaggatgctgctgaggaaatcaaggaggcccccaagggcgaatcaggagatggacagtgaacatgatcgaatgcgtgcgcccacaaactagaatagtgacgctgcaaatgtgctgtgggttatcgtttcattttatagattgtaatgtctcgtgatttgtcggaaacaggaggcgctccccatttatgttgtgctaggaaaccttgcagctgactcgctgcttggctggtggattctcgagctgcactttctttggggggagcctcagggtggaaccttcatgtcacttattggatcgattgttttcggtatgtcagttgtgagccttatctccagagtccacagtcctgccaagtgccctgcttgagtgtttttggtttcttcgatgtaaatcccgttgtgtgcacgatggttcttgattcaccacacattgttgtctacattgccaaaacgtatgcttcaagtgcccaaaaggccgaagcggtccgagaaacattattctgtcaggtatgtgtgataagcggtttcatatgc

SEQ ID NO: 4998 - DNA, 491 bp, Oryza sativa
  ref <308>: DATABASE ACCESSION NUMBER: AK062204
  ref <309>: DATABASE ENTRY DATE: 2001-12-06
ttgaggtccaagcatgtgggtcgctcataacggaggagcaaccacacgcgatgcttatacccatggagtacttcttcatgggttatagcctgtacagaccaagccagttggactgtagcccgcgcagccccctcagcccattctgtatatcacccgatctcctgtcacccgaaagcatgggagtaaaactaaagccaatcaagacaagagtcaggcttgaagtgtagcatagcacacaggtaaataagggtggtgcagaggggtgtcgcttagggctgacatggtgtgagtttaggctaacctgatggtcggtttactgagttataattttttggtgggtaaaacaagataatttttatactgtcatgtagatataggaaatgctaggttggtcaggtctggtggggtggggttgtattccattaatttgtagccataaacctgtaaattgttacacattgtttatcaaaagcaaaggaaaataatagcag

SEQ ID NO: 4999 - DNA, 2049 bp, Oryza sativa
  ref <308>: DATABASE ACCESSION NUMBER: AK062205
  ref <309>: DATABASE ENTRY DATE: 2001-12-06
gtcttgtgcttctctcttccccgacagcgcgtccatcgaagtagtagcatactactctctactcctctcctctcctctcctccgctttggtttgctccgatctgcagcgagagcgggaggtcgtcgccggcgaggaggcgcggcggaggaatcctctccttcctcttcttggtctgcgagtaaagctcggccgccgccggcgacgaactggtttggggagagccacgtacggcgccgcctcgaatcgaatcgaattggaggttgatttgactcgttggttggagcgctccatcgattaagcagacggagtcatgcttcttctttgggtataaaagtttggatctcggaggctcgattcaatctctggagtgggaacaatcgtttgctcgtggtcgtgggatagctcctctgcgagatgcagagtgggagcgagatgagacccgtgcacaacagtgtcgacacggtgaacgcggctgctgttgccattgttacagccgagagccgcacgcaacctcaggcagagccgcgaagaaaatgggctgattggttgagtgtgtacttctgctttggatcacagaaaaatggccgacgcatcagccatgctgttcttgtcccagaacctttacctccgaggacagatgcacctatgccagaaattccaatccatccgccacccccggtattcccctttgtcgcacctccatcctctcctgcttcttttctccaatcaggaggtgcatctattgtacaatcacctgttggtgctccatctttttcgcctctctcgccaaattctccatcccccactgggccaccgtccatctttgctatcggaccatatgcacatgagacacagctagtctctcctcctgtcttctcagccttcacaactgaaccttcaacagctcctttcactcccccaccagagtctgtgcatctgacaaccccttcctcaccagaggtgccatatgcaaagctacttacctcaatcaacaacagcaaaaatgctgaaacaggtgagcttcagtcataccagatttaccctgagagcccaataggacgtctgatatctccaagctcagcttgttcagggacttgctctccatttcctgaccctgaggtgcagacttcctcacgttccacattcccctcattcccagttcgtgagcctccaaagatactggatggcgagggaattgcaacacagaagttgatacctcgccatatgcgcaatggcggttctctcttggatggacatatttctgctgctgtaccagtcgtagacttctctgcccgacttcaaaataatgatcatgctatggatcatcgggtttcatttgagttaacagtagaagatgtagctcgctgtcttgagaagaaaaccaacattaatggggagtctgctgcagcttcttttcgccttgtgcccaccggtaacggagatcacattcatcccagagaatcgaatgatacaagagcagggctatgtgttgatgaaacataccatgatctgcctgagaaagcacggcgctccttgtcccttcgtaaggctaaagaattcaagttcaacaatgttgatgctcctagtgtggagccgagcgttggatcagactggtgggcaaacgagaaagttgctgggatcacatcagagccaaggaaaagctggtccttcttcccagtggcacagccaggggtcagctaacagttgcactgaccataatcttacaagatgaagaaataagcttctgtcatttttgctcctgctgtttctcagttccccagataccatcatcataactgcaggagatgcaaacttatgcaaaatattccagttttagcggtaagttggagttagttagtaactcagtgtccagctaatatcatcataagatactaaaggtgatgcagattctggaacctgttgttataaaaccataatacttccatggtgtagcgtctgttgtatcctccttaactgactggctgttctgatactgatgctgtttatgtacataataaactagcgaaaagagtagaactcttcctagc

SEQ ID NO: 5000 - DNA, 1545 bp, Oryza sativa
  ref <308>: DATABASE ACCESSION NUMBER: AK062206
  ref <309>: DATABASE ENTRY DATE: 2001-12-06
aaagctatccatagatgatgatattgggaatgaagaaagtgatgaaggtttagctcaagttaccgttcggttgcttgtgccatcagaccagattggatgcattattggaaaaggtgggcatattatacagggaatccgcagtgacactggtgctcatatacgtgttcttagcaatgaaaatctccctgcgtgtgccatcagtggtgatgaacttcttcagatatctggggactcaacagttgtcagaaaagctcttcttcaagtgtcatctcgtctccatgacaacccatctaggtcacagcatcttcttgcatccagcatgacacagccttatccagtgggctcccaccttggtagttcctcaactgcaccagttgtggggattacgcctttaattagttcttatggaggatacaaaggtgatgtggctggagattggccttctatatatcaaccacggagggaggagagctctgcaaaggaatttagcttgcgccttctttgtgctgcatcaaatgtgggaggtgtaattggaaagggtggtggaattatcaaacagattaggcaggagtctggagcctttatcaaagttgatagttcaaatactgaagatgactgcataattactgtttctgcaaaggagttctttgaagatcctgtctccccaacaataaatgctgcagttcatttacaaccaagatgcagtgagaaaactgatccggaatcagcgatcccgtcttacacaacacgcttgttggtgtcgacatcacgtattgggtgcttgattggaaaaggtggttcaatcattactgagataaggagaacatcaagagcaaacatacgtatcctttctaaggagaatgtaccaaaagtagcagcagaggacgaagagatggttcagatcagtggagaccttgatgttgtaagacatgctcttctgcaaataactactaggctgaaagccaatttctttgaaagagaaggtgctttatcaggtttcccacctgtaatcccttaccatcctcttccagttggtgtttctgaagggccaaagtatctaggcagagatactaagcctcttgggcatgattatccatattcaagtggatatcgtggctcagatgatattggccctattgacagctatgcaagttatggcagctcccaggtctctggaggaggttatggggcttatggtggatatagtggtcgttctggcagcagtgggttatctggccctagttcattttcctatggaaagcgacatggttattaggacttagattgacaaatgcaacagccaagacaaaagaatgccaagaccaatgaagtatggagcctgcttattggagccccttcccaaaccagatgaccaagagtatggccccaacctggaagctttgcctaagagggacctgcctggatgccatagaccatcttatttccctagtatacagcatttacttatattttcctctgggactatgttgattccccgtcttacatgttctaaacctatgtattgaaagttcacagttgagactt

SEQ ID NO: 5001 - DNA, 1179 bp, Oryza sativa
  ref <308>: DATABASE ACCESSION NUMBER: AK104908
  ref <309>: DATABASE ENTRY DATE: 2002-08-28
ttttagttgtcatgcttagtaagagtaaagcttctggttccagtggagctttaagttcactgacttcaagcacccctttgaccaggcaagaaactcctgcggatgcttcacgagcagctcctcaacccctagttgcacctacaagaacaccccagcccgaaaggccacctgcggaagccccttcaaacgcatatggtcaagcagcatcaaatctattgtcgggaagcaatcttgacactacgattaaccagctgatggaaatgggtggtggcagttgggacagagataaagtccaaagagctctacgtgcagcttataacaacccagagcgtgctgttgaatatctatattctggcattccaattacagcggaggttgctgttccagcaggtggtcaaggggcaaacacaaccgagccatcttctactagggaagccagtctgtctggaattccaaacgcatccccgttaaatcttttcccacagggcgatgcaaatgatggaggtggtgctggtggtggaacacttgagttccttagacataaccaacagtttcaggcgcttcgggaaatggttcatactaacccacaaatattgcagcctatgctccaggaactgagcaagaagaatcctcaacttctgaggttgattcaggagaaccatgatgagttccttcagttaataaatgagccctttgatggtgctgatggggacttcttagaccaacctgaccaggatgagatgccccattctatcaatgtcacacctgaagagcaagaggcgattggacggcttgaaggcatgggatttgacagagcacgtgtcatcgaagcattcttcgcctgtgacaggaacgagcaactcgcagcaaattaccttcttgaacatgctgctgatgaagattagatggaattatttaaacccgcttattctgtacacctgccctgcaatttatcagacttttgaagtttgcgggtgctttggatccaaattgaacaagctgagatggagctaacaccgcgttgcatcgatttatctcttgtacaatacttgctttatttaattgctggcttagcattcaaatacatggcttaacatttattcgagctgtctgagggacggatccttttgtccatccgtttttagccagaaatttcaatggatgtgaattgtgttgacc

SEQ ID NO: 5002 - DNA, 2018 bp, Oryza sativa
  ref <308>: DATABASE ACCESSION NUMBER: AK062207
  ref <309>: DATABASE ENTRY DATE: 2001-12-06
attgagaggcattgggcttcactcaatgaggagagtggtgggatgaatgatgtgctctatcagctctacacgataacgaatgatcagaagcatctgactctggcccatctttttgataagccatgttttcttgggttgcttgcagttcaggccgacagtatttcaggcttccattccaatacacacattccagttgttattggtgcacagatgagatatgaagttactggtgatcttctttacaagcaaattgcaacgtttttcatggataccatcaattcttctcatagctatgctactgggggcacatctgctggtgaattttggaccaatccaaagcgtttagctgatactctgagtactgagaatgaggaatcttgcacaacctacaacatgctcaaggtttctcgcaacctattcagatggacaaaggaattatcatatgcagactattatgaaagggcactgataaatggtgttttaagcatccaaagagggactgatcccggggtgatgatttacatgctacctcaggcccctggacggtctaaagcggtttcctatcatggttggggaacaaagtatgactccttctggtgttgttatgggacagggatagaatccttttcgaaacttggcgattccatttacttcgaggagaaaggagatagaccggtgctaaacatcattcagtacataccaagtgcttataactggaaagcagctgggcttactgttaatcaacaactaaagccaatcagctctttggacatgtttcttcaagtttcactctccacttctgcaaagacaaatggtcagtctgccacattgaatgtgagaataccatcatggacatctgccaatggcgcaaaagcaactctaaatgacaacgatttaggattaatgtctccagggtctttcctttcaatctccaaacagtggaactcagatgatcatttatcactacagttccctattacactaaggactgaagcaataaaagatgatcggccagaatatgcatctcttcaagcaatcctattcgggccatttgttctagctggcctgtcaactggtgattggaatgcagaagccggcaacaccagcgcaatttcagactggatatctccagtcccttcatcctacaactcacagctggtgaccttcacacaagaatccagtgggaagaccttcgtcctctcgagcgcgaatggctctctcacaatgcaagaacggccgacggtcgatggcactgataccgccatccacgcaacattcagagtacaccctcaggactcagcagggcagcttgacacccagggtgcaaccttgaaggggacctctgtgcagatagaaccatttgacctcccaggaacggtgatcaccaacaaccttacccaatccgcgcaaaagagttcagattccctcttcaacattgtacctgggctagatggaaacccaaactcggtctccctcgagctcgggaccaaaccgggatgcttcctggtgataggcgtggattactccgtgggtacaaagattcaggtcagttgtaagagttctcttccaagcatcaacgggattttcgagcaggccgcgagctttgtgcaggctgctccattgaggcagtaccatcctatcagcttcattgcaaagggggtgaagaggaacttcctgcttgaaccattgtacagcctgagagacgaattctacacggtttacttcaaccttggggcttgaaccttgaaagaggttactcattagtagaaagaatcaagaattcagaataatggttgtccttactatactgtaatttagaatatgcagccaaagaggaaacgttttgtttcttctgaaattgtaggataatttttactgagttcagtgcaatgttgtgcaattatgagttttttttctgtggcattttcgtatcttggtaattgaaaatgctgctgaaagcctgaaatacagccattctgcaacatatatgatgcagtagatgctacttcctctgtttc

SEQ ID NO: 5003 - DNA, 555 bp, Oryza sativa
  ref <308>: DATABASE ACCESSION NUMBER: AK062208
  ref <309>: DATABASE ENTRY DATE: 2001-12-06
gtatcaacaagatgctttcgtgtgccggggcagataggctccagactggaatgaggggtgcttttgggaagccacagggaacctgtgctagggtggatattggccaggtcctcctttctgtgcggtgcaagcccaacaatgctgtccatgccagcgaagccctccgtcgtgccaagttcaagttccctggtcgccaaaagatcattgagagtagaaagtggggtttcaccaagttcagccgcgatgaatacgtcaggcttaagagcgagggtagaatcatgcctgatggtgtcaatgctaagctacttggttgccatggtcgcctctctgctcgtgcccccgggaaggccttcctctcagccgcttagatatatctatccttatcatctgtgggaaacgaaatatcggacctttttgtttgtttgtagactcgatcatatatcactttgttgaaccctgaatcaccaagtgtctggtgctatattgcctggtctgaagctatcttgtgttgaacatctttatctgaaatatatatcagatgactttcgtgtcgct

SEQ ID NO: 5004 - DNA, 1668 bp, Oryza sativa
  ref <308>: DATABASE ACCESSION NUMBER: AK062209
  ref <309>: DATABASE ENTRY DATE: 2001-12-06
atatttatgagagaacatcgtctggtaagagcaatggaaaatacatgccctatccaaaagttgactcgtttttgaagatatgtcaaattctcgggttagctggaattgatttgtttaccccttctgatgtggttgagaaaagaaatgttcggaaagtttgtatgtgcatacgcttgctatctaagaaggctcggacgatgcgcctgactgtgcctgattttgatattgtcactcatacaatagccatgcccaactacattgttggaggcatccggagaagtctggagcaaccacaatgtagttcatctggttcaagtggttacagtccaagtgccaactctaaggcattaaatcagcagagagtttttggtgcagagaatgatcaacaatgtgaaacacattatgattctgatgaagctgaaagtaagctctctgcattagaacctgaggactcagtcagtgaagacaatatttccacacttttgaaatcgggcaacatgcccaaggaagaaaaggaaggctatggagatagtgagcatggtatgcatgaagagaagtcattgtctgaatcagttggatcgattgatttcggcaatatggaatctgattctgttggttcaactcctttatttcacaaaaatgaatcatattgctgtattgaatctccaactgaccagtgttcaagaactagaacaattaggtgttcattaagttcagaagagtcagattccataagcagtcatttggtagttgacagcagcaaggctaaaaggactcatggcgaacatctcgagcctcttaacggaaatgggaaaagatttgctaacgatcccgaaaaagaaagcgatgccctccaaaaggtcacctttgatcaacaatgtgatctgcttgcctgtgatggggagtctgtatgttcaaattgcgacagtacaccatactcgagtttaaccccaatagacagtgcttgtggcaaattgccagcagtttctgaagatgatagtgcatgccgagggctggaactcgaattccgttgtgggaataaaacggacgtttcccaaaaagaagataaacaggtggaatcagaatataaagctgaaaatgacagctctgctcaaatgaatgagaatggtgttcccaaatcagggaaagggatgctaaagtctgttgctggaggaattacacctgtcggcgcagtgttcttcatagctcatctcagaaggagcaaggacagaagcttcgcaggtgttatagctccattctctgaaaaatcagttcagggcgactcaagggcaaagaaagtagagaaaacaaaggcgggtgccgtgtatcccggggaatggctaaaagtttaatcaagaagaacggacatgccacggtgccacctaagcgcaatttggaagtttattttgcaatatgcatacatcttgtaaaagtaaaatccatatgctaaagaacacttttttttaatcagctactccagtttgcacgagtagagggctttaagaagcgactccactagtatagcaagtgttaatatttattttcttatagcagtccaaagcttacaataatctgtaatctggataaacaagatgcctcaagttctctccatgtacagaatgatccatgaagttgattaatttattataagcagcagccattattcag

SEQ ID NO: 5005 - DNA, 1965 bp, Oryza sativa
  ref <308>: DATABASE ACCESSION NUMBER: AK104909
  ref <309>: DATABASE ENTRY DATE: 2002-08-28
cccccgccgccgccggcgccgccgccaccaccactgccggagagagagagagctgcctgggaggagcagcctcggtgcgcgcgcgcgcgctaatcccctcctccactctccgtcgccgccgccgccgcagccatgatctgcgcaatctccggcgaggtgccggatgagccggtggtgtcgaagaagtccgggcttctcttcgagcggcggctcgtcgagcgctacatcgaggaccatgggaagtgcccagtcaccaaggaggagctcaccatggacgacatcgtggcggtgaagaccaacaaggttgtgaagcccagacaattgcaggctgcaagcattcccggactcctggggatgttccaaaatgagtgggatgctatcatgctttctagttttgctttggagcagcagcttcatacagcaagacaagaacttagtcatgcgctatatcagcatgatgctgcctgccgtgttatagctagattaaagaaagaacgagatgaagccagagcacttttggctcaagctgagagacagattcctgcatcgatggcaggagctgcacctacagctgttgtctccaacgggaaaagagcatttgaagacgaagttggaccagacgggaagaagattcgtcctggtatcaaccctgtgatgattgatgaactaacagagtgtaataccatgctctctgcgcatcgtaagaaacgacaggttcctccaactttggcatcaattgatgcaattgagagatatacccagatctccagtcatccacttcacaagacaaacaaaccaggcatcttatctatggatattcatccttcaaaggacattattgcaactggtggcattgatacaaacgcagtgctttttgacaggccatccggtcaaatcttgtgcacacttactggtcactcaaagaagataaccagtttgaaatttgttcctcgggatgagctctttgtaactggatcagcagataagactgttaaaatttggcaaggaagcgaggggggaaattacaattgcatccatacattgaaagatcacactgccgaggttgaagctgttacagtccatgcgactcagaagtactttgtgactgcttccaaggataatacttggtgcttctacgatattccatcaggatcttgcctcacacaggttggcgagtcttcaggacaagagggatatacatctgcatctttccacccagatggtcttatcctggggacagggaccactgaagctgttgtcaaaatttgggatgtgaagacgcagtcaaatgttgcaaagtttgaggggcatgttggaccagtgactgctatgtccttctctgaaaatggttacttccttgcgactgctgctctcgatggagtcaagctttgggatcttcgaaaattaagaaactttaggacgatatcaccttatgactcagacacgccaacaaattctgtggaatttgactttagcggaagttatctagctgttggtggttcagatacaagggtttaccaagtagcaaatgttaagcttggatggaatcttgtcaagaccttaccagatttgtcaggcacagggaaagtgacaaacgtcaagtttggcaccgatgcgaagtacattgccgtaggttctatggatcgtaacctacggatatttgggcatccgggagaagatgatcaaatggacgacgcaaagccatcggaagagtgatgaaaccaattgtacttcatttggcctgcgtaaattgctccctgtttgtgtgttttgacggtggatgagctggctgagattggaggcacataacaacgggaggcgagaagttccttgcaggagcaatttggtgggctttggtcgatgtaaacaaatttgacattgttattgtatttgtaggccttactacctaatgaggatacggtttgttttggagatgaatacaatgctgaagtgctcgacttgcgg

SEQ ID NO: 5006 - DNA, 778 bp, Oryza sativa
  ref <308>: DATABASE ACCESSION NUMBER: AK104910
  ref <309>: DATABASE ENTRY DATE: 2002-08-28
aaaagattacaagatgtttccaccctccgtagactgggacaatattaattggtcaactaggaggccacaaatggatttccctgtgcagtctgctatttgtaccctggaggatgtggatgttatcaaggaagggaaggctaggattgctggatatgcagtctcaggtggtggccgtggcattgagagagttgatatatctgtcgatggggggaaaacatgggtcgaggctcatagatatcagaaaagcaacgtgccatacatatctgatggacctcggagtgataagtgggcatgggttctattcgaggctacattagacgttccagcaaacgctgagatagtagctaaggcggtggactcagcagcaaatgttcaacctgaaaaggtggaagacgtatggaacctgagaggaatcctcaacacatcttggcatcggatcaaaatacagaattcttcgtgcgtgggaagatccaaaatgtgaaataagtaaactgcttggaatcagaagtcaagagtttatagtgcccggaataataagttattgcagcattcgatgattctcgcagactgtgctcctgtactatagtactatgttggaatcgtgttgctggcctgggcttatatgagacgaaacacaatttttgggagtgatgttaagaagatgattaatacgtactccagtatttatgttgtcttctaatggaaaatttgcagttcttgtgctccatatgataaaagaaaaaactcagtaaattcagttgcaaagatgtgacaagac

SEQ ID NO: 5007 - DNA, 1041 bp, Oryza sativa
  ref <308>: DATABASE ACCESSION NUMBER: AK062210
  ref <309>: DATABASE ENTRY DATE: 2001-12-06
ctctcgccgccgccaccgcctccccctccaccccccgcctcgccgtctcccgttcggaacaccaagctccagcgccccccctccggcgaaatggccccgaagcgaggcggcagggcgccggtgccggcgaagaagaagacggagaaggtgacgaacccgctgttcgagaagaggccgaagcagttcggaatcggcggcgcgctgccgcccaagaaggaccttcaccggttcgtcaagtggcccaaggtggtgcgcatccagcgccagcgccgcatcctcaagcagcgcctcaaggtgcccccggcgctcaaccagttcactcgcaccctcgacaagaacctcgcaactaatctgtttaagatgctcctcaagtaccgccctgaggacaaggctgctaagaaggagaggcttttgaagagggcccaggctgaggctgaaggtaaaaccgttgaggcaaagaaaccaattgttgtgaagtatggtcttaaccatgtcacatacctcattgagcagagcaaggcccaactggtcgtcattgctcatgatgtcgatccgattgagctggttgtgtggcttccagccctgtgcaggaagatggaggtcccttactgcattgtgaaaggaaaagcccgtcttggatcaattgttcacaagaaaactgcatctgtcctctgcttgaccactgtcaagaacgaggacaagcttgagttcagcaagatcctggaggctatcaaggcgaacttcaacgacaaattcgatgaggttaggaagaagtggggaggcggcgtcatgggatccaagtcgcaggcgaagaccaaggccagggaaaagctgctcgccaaggaggctgcccagcggatgacctaaattatagctcctgtagtttcatttttcagtcagattttgacgaggaactcgaattagcactgtacaaccgtgctgtggttttctgagtcttggtttcatatcttctctgttcaccggaccatgttgggatactatgcaattagtacaaccgtgcttcaaaaacctttttgtttc

SEQ ID NO: 5008 - DNA, 1422 bp, Oryza sativa
  ref <308>: DATABASE ACCESSION NUMBER: AK062211
  ref <309>: DATABASE ENTRY DATE: 2001-12-06
attcgatccaaaggaccgtccaactgccgaagaggcattggctcatccatacttcaaagggctcgcaaaagttgagagagaaccatcctgtcaacctatcacaaaaatggagtttgagtttgagcgtagaagagtgacaaaggaagataagagagttgatattccgtgaaatactggaataccatccacaattgctcaaagactatatcaatggcaccgagagaacaacctttctatacccaagtgctgttgatcaatttagaaagcaatttgcccatcttgaagaaaatggtggaaatggcccggtaattccaatggatagaaagcacacttctcttcccaggtctactattgttcactcaactccaattcctgccaaggaacagccccgcattggcccatcaagggataaaccatctgatgaaccctatagcaatccccgggaatttgacagattttctggcaatgccccgaggacctcacaagctccacaaagagtgccaacagcaagaccaggaagagttgttggtccagtattgccttatgaaaatggtgccacaaaggattcctatgacgcacggagattggcaatgaactcagggtatcctccccagcaacaaatccctcaagcttatggttattatcagatacccggtaagtcagcttgttctgagctgtcgcaggccgaaaggtatacgctgcaccagcgggcctacacttgcgcaaacagtgccactgtgactgatgttgctctggacatgagagcacccccgttccatctatcaggagggccgaaaagcgattcgtccgaaaggttagcagcagagacaaacctatacacgagatctctcaatggcctcgctgctactgctgcgggagtggcagcaagtgcgcacagaaaggtcggtgttgttccctacggcatgtcgaggatgtattagtgcccaaccatggcacatcctgcatgcccaatgggagctctgatgctagcttgcggcgaagcattgggaacaaagtggcagttcaagctagtttgggcaccaagagcacagggcaatctaaggttgacgacgatgcctaagaagttgcattggtgccctgctgctcctgttcctgcttgatcaggaaccaccaccggaggtgtcaaaagcttttcaactctctattcgctttaggcaaatcagcttgtatctgcctgtgtgtgtgtaagaaaatgtgcccttcgttgcacacttgaagggggtagtccagtggcttgtaatctgagcatattttaggcgccaattgtatttctagggtgaggggacaaaagggaaaggaaggaccactaaccttttcctcttttttttttctttttccaatgttgtatagagatgtttctcatatcaaaagtgctacatcagaatgacttgagaaagatat

SEQ ID NO: 5009 - DNA, 580 bp, Oryza sativa
  ref <308>: DATABASE ACCESSION NUMBER: AK062212
  ref <309>: DATABASE ENTRY DATE: 2001-12-06
caaggagttggctttagaatccggcatcaagcactggggacgagttcctgcattaggttgtgaacccacgttcataacagatcttgccgatgctgttattgaaagcttgccttatgttggtgctatggcagtttcaaaccttgaagctcgacagccactggtgccacttgggagtgtggaagaactgctagcggcgtacgactcgaaacgcgacgagctgccccctccagtgactgtatgggagtggggctggacgaagagcgcggagacctggaatggacgggctgctatgctggccgtgctggctctcctagtgctggaggtgacaaccggagaagggttcttgcaccagtggggcatcctgcctttgttccactgagccgatggccctcttcaggtcagctctttttgaggtgatctaatcataattttgattcatatggataatttcccgatgctgtatacgaatggaaaaagaaagaatattaactgaatttgactacgcaccacattacccatgttgtacatatgaaatattctacggactcttagtacgaagattaacaaattgaacactggc

SEQ ID NO: 5010 - DNA, 1356 bp, Oryza sativa
  ref <308>: DATABASE ACCESSION NUMBER: AK062213
  ref <309>: DATABASE ENTRY DATE: 2001-12-06
tcattgcaaagctggaaaggcgaggacaggattgatgatctccagtctgctactatacctgaagttctttccaactgcggaagagtccattgaatactacaatcagaaaagatgtgtagatggaaaagggcttattctcccaagtcagattagatatgtgaaatattttgagcgcatcttaacttacttcaatggtgaaaatcagcctccacgcaggtgcatgctcaggggatttcgccttcatagatgcccttattggattagaccatcaatcactgtgtctaatcacaatggtgttcttttcacaactaagaagcaccctagaacaaaggagctgatgccagaagatttctggtttagtgcaccaaagaaagggatcatggtttttgcgttgcctggagagcctggattaacagaggtagctggtgacttcaagattcagtttcatgatcgacagggggatttctactgctggttaaatacaacaatgatggagaacagggtgactttgaatccaactgatcttgatgattttgacaagaggaaattaccatcacctggattccaggttgaggttgtcctggtagactatgatggttcacaaccaccaaaaccaaaaccagctgccgcatctactgatcagaagtctgaagctgattcctcgactggaactgttgcaaaaggaaataatgcttcatctgcagaagtgtccaacaaggaatctgcaaggaatgataaggatgacgtcttctctgacagtgaagcagaagatggatcatccaagggcagaagggagaaggtctctaggaacgttgagggtactactaatgctgcaaaagcgtctgaaacaagctctgtgcaaaaggaggcgtctgctgctgcttccagaattgaaaaagtatcaataaccagcgaacaaggaagtgcaaggacacctgatgctgcacctctcaaaagtggagttagcagcaagagcagctccaccacagcaccaccaccacccccagcggctgctgactccagcatgagcgagttcaaggcaattgctgcagacgcttcggtcttctcgttcggagatgaagacgactatgaaagcgaataattcacacccttttgtgggcgcctggttcgccattgtatagtttggtgctttccagatcatgataggataccacctggaagcaacaggtagaaaagatgaaaagaattgctttgttctaccgttttatgtttcattgtagccctttttcaagctgtaatgttgtacaatggtgaactttgtaactccaaaaatgtcagaactttgttgatacttcgcttatttgtttacagagattctatacatggattcttacg

SEQ ID NO: 5011 - DNA, 1098 bp, Oryza sativa
  ref <308>: DATABASE ACCESSION NUMBER: AK062214
  ref <309>: DATABASE ENTRY DATE: 2001-12-06
ttctcggcatacaggtgactaaggcagaagatgttattggaccagatgttgagaaattggtatctgaattgccaaatggtagtgttttgctccttgaaaatgttagattttacaaggaagaggagaagaatgacccagagtttgccaagaagcttgcctccttagcagatctctatgtcaatgatgcattcggaacagcccacagagcacatgcatcaactgagggagttaccaagtttttaaagccttctgtcgcaggattccttttgcagaaggagcttgactaccttgttggagctgtttcaagccctaaacgcccatttgctgccatcgtgggtggttcaaaggtgtcatccaagattggggttatcgaatcccttttggagaaatgtgatatccttcttctaggtggtggtatgatcttcacattttacaaggcacaaggactctctgttggttcttccttggttgaggaagacaaacttgagcttgcaacatctctccttgcaaaggcaaaagaaaagggtgtctcccttctgttgccatctgacgttatcattgctgataagtttgctcctgatgctaacagccaggttgttccagcatctgctattcctgatggttggatgggtctggatattggtccagattcagtcgcgtcattcagctctaccctggaaacaacacagacagtcatttggaatggacctatgggtgtcttcgaatttgacaagtttgcagtaggaactgaggctattgcaaagaagttggcagaccttagcggcaagggtgttacaaccattattggaggaggtgattctgttgccgctgttgagaaggtgggagttgcagatgttatgagccacatttcaacgggaggtggtgctagcttggagctgttggaaggaaaggaacttcctggagtcattgcacttgatgaagctgtcactgtggccgtatgaggctaagtttcattttgttgcatcttcttcatgtaccattctaaacttgctatattctactcctttctcgcacctcttcaaccactcgaaatgtaagagaccaatgttttatagagatgctggaaatcgtttgaat

SEQ ID NO: 5012 - DNA, 1455 bp, Oryza sativa
  ref <308>: DATABASE ACCESSION NUMBER: AK062215
  ref <309>: DATABASE ENTRY DATE: 2001-12-06
gatccgcataccgcggcggccgtggtgggcccaccgtctagcgaaaaccacccccgccgccgcgcgtgccacgtttactcccgtgggccccgcaacgaggcacaaaccctaggccgcttatataaacccgacccgcccagctccggtgatcggatccccacagctttgcgtttgcactcctctcgatctccattcgtttttgagttcctcgtttgctccgcctctctttcactcatgggcaagattaagatcggaatcaatgggttcggccgcatcggcaggctggtggccagggtggcgctgcagagcgaggatgtcgagctcgttgccgtcaacgatcccttcatcaccaccgagtacatgacatacatgttcaagtatgacaccgtccacggccagtggaagcatcatgaggtcaaggtcaaggactccaagaccctcatctttggcacgaaagaggtgcggtgttcggttgcaggaaccctgaggagatcccatgggctgcggctggtgctgaatacgttgttgagtctactggtgttttcaccgacaaggacaaggcagcagctcacttgaagggtggtgccaagaaggtcgtcatttctgctcccagcaaagacgcccccatgttcgttgttggtgtcaacgagaaggagtacaagtctgacgttaacattgtctccaacgctagttgcaccaccaactgcctggctcctctcgccaaggtcatcaatgacagatttggcatcgttgagggtttgatgaccactgtccatgccatcactgctacccagaagactgttgatgggccctcgatgaaggactggagaggtggaagggctgctagcttcaacatcattcctagcagcactggagctgccaaggctgtcggcaaggtgcttcctgccctcaatggaaagctgactggaatggctttccgtgttcccacagtcgatgtttccgttgttgatctgactgttaggcttgagaagcccgccagctatgaccagatcaaggctgcaatcaaggaggaggctgagggcaagctcaagggcatccttggatacgttgaggaggaccttgtttccactgacttccagggtgacagcaggtccagcatctttgatgccaaggctggcattgctttgagcgacacgttcgtgaagcttgtgtcctggtacgacaacgaatggggatacagcacccgtgtgatcgacctgatccgtcacatgcacagcaccaactagacgagccctcctcatggaggcctgcagatacaggggagttgtgttttgccccagagaagagtagatgaagcctcttccgagaataaattttaaattctgtatggttttatgtccgtcgaaacctaaaactatacttggttgtatcatggtggttggttgggcctggtcatggctcatattttgtgtctaattttcttgcgcttaatct

SEQ ID NO: 5013 - DNA, 1055 bp, Oryza sativa
  ref <308>: DATABASE ACCESSION NUMBER: AK062216
  ref <309>: DATABASE ENTRY DATE: 2001-12-06
ctggcgccgcctcgccgccaccttcctcgccgccttcctcctcctcttcgcctaccacctcctcctcgtcgccgtcttcgtcgccctcctcgtcgccgccgactccggatcgggcctcgccgcgctgctcgccttcctcctcgccctcgcctacatcgcgggcctcgtctacctcagcgtcgtctggcacctcgccagcgtcgtctccgtcctcgaggactacaagggattcgaggccatgcgcaagagcaaggcgctcatacagggcaagctctggaccgcctccgccatcttcttcgtcctcaacgtcgtcttcatcgtcgtcgaggtcgccttccgggcgtgggtggtgcgcggggccacccacggcctcggcgccggctcaaggctcctcctgggcctcgccatgctcgccgcgctctgcgttgtcgtgatgctggcgctcgtggtgcagacggtggtgtacctggtgtgcaagagctaccaccacgagagcatcgacaagagcaacctctccgaccacctcgaggtctacctcggcgagtacgtcccgctcaaggccagcgacgtccagatggagcaattcaacctctgatcatcaaccctccgctccatccgatccgatcgctgtgagttgcgcttggattatatctctgtaatcatcatatttttattctcatcaacacagatactcataccacaaaaacacagtttgggatggctcaaaatcaggctggatctcaattgggagaataacctgtcagctgtatttgtaccagtagacattagaggttgtgtattgcattttctgttttgatcgaattcaatcccaaaaagcaacaacaaagtatactagtgcaaattagaacaacaaaggctagctacgttgattcaacggtttcttagctgtgaaaacatgatcatgcattcatgctaagctttggataattcagtgcgctcctgtattactagtacactactatcatttgaaggttatgcaatcaatgttctgatactagttgtgcagtaacaaagtttaagttgcttttacccat

SEQ ID NO: 5014 - DNA, 1105 bp, Oryza sativa
  ref <308>: DATABASE ACCESSION NUMBER: AK062217
  ref <309>: DATABASE ENTRY DATE: 2001-12-06
tttgtaataaaatcctataccgaagatcatgtacacaagagcataaagtatggtgtctgggccagcactgctagtggtaacagaaagttggatgctgcttatcgtgaagcaaaagagaaagaagccacttgtcctattttcttgtttttctcggttaatggcagcggccagttctgtggtgtggctgagatgattggacctgtggacttcgacaagagtgttgattactggcagcaagacaagtggagcggccagtttcctgtcaaatggcacattatcaaggatgtcccgaacagccttcttcggcacatcattctcgagaacaatgaaaacaagcctgtgaccaacagcagggacacacaggaggtgagactggaccaccggctccagatgctaacaatcttcaagaaccatgaggtcgagacaactatcctcgaggatttcgacttctacgagcagcgggagaaagccatgctggatatcagacagcgacagaagcagcagcatactgattccgaggtccagaagccgatggtggaggccaaggaaccagtggatcttatgaaccaaatctcagccacctttgcccgggccgtgcagcttggagaaaccaagggcagcagggaggacaaaccaaaggttgaagatgcttctgctgctgctgttgctgttcctgagaacgagcctgttgctcttgctgagactgaaggattgttagcagattcagagccaagccctttgaaggaaagtggttgatcttacccctttcatgtctgattgcgagaagcagctgggccttgtgatgttcacatggaagcaagaagatcaaaggaggttgatatgtgaaaaaaaaaatgctgcttcttttgtacttcaccataggctgcattataggctggaggagaaggatttggttcacctccagttaggttatgatgttagtcttatgtttccttcccaatttcttctttctgttctgtcatctgttccacaagcgccaccaagaatggtgctcagtggtttagccataaggaaagctgcatatataggccagagctctgtacagtttgcagttaaattatgttgttctcaatcttttcctgtg

SEQ ID NO: 5015 - DNA, 1425 bp, Oryza sativa
  ref <308>: DATABASE ACCESSION NUMBER: AK062218
  ref <309>: DATABASE ENTRY DATE: 2001-12-06
gcacctttggctgagtccaatgagggggtttacaatgatcctattgtcatcatcaagcgatctcattctcttgttggtccaacatcacttgttagccagtccctgcgacttagcaatctcactctaaataaaacagaggggtcatcagaacctgcagaagaaaaggaaaggaacctagggcagctcagtgatgaagagtttgacaatgccacaacagaaaatgaaggtattgggcttgatgactttgaaatcttgaagcttgtaggccaaggggcatttgggaaagtctttcaggtgagaaagaaaggtacttcagagatatacgcgatgaaagttatgaggaaggataagatcttggaaaagaaccatgcggagtacatgaaagccgaaagagatatattaacaaaagttgaccatccttttgtagtgcagctcaggtactcctttcagacaaaatatcgactttatcttgtcctggacttcataaatgggggacatctcttcttccagctctacaagcaaggattgttcagggaggaacttgcacggatctatactgctgaaattgtatctgctgtagctcaccttcacgacaacgggattatgcatagagatctcaagcctgaaaatatccttttggatgctgatggccatgccatgctcactgactttggccttgccaaagaatttaatgagaatacaagatcaaactcgatgtgtggaacagttgagtatatggccccagagattattcttggtcgggggcatgataaggcagctgactggtggagtgttggaatcctcctctttgaaatgctcacgggaaagcctccgtttgttgggaacagggataaagttcagcagaagatagtgaaagagaagctgaagcttccatcgtttttgtccagtgaagctcattccctcttgaaaggactgctccacaaagaaggtggcaagcggctaggaagcggtccgggcggcagcgatgagataaagaggcacaaatggctcaaaccgatcaactggaggaagctggaggcccggcagatccagccgagcttccgacccaacgtgagcgggctcacctgcatcgccaacttcgacgagtgctggaccagcatgccggtgctggactcgccggtggccacccctgtcgccggcggcgccggccacagcagcttcgccgggttcacctacgtcaggccggctccgttcctccaggatgtcaagcctccctcttcctctaggctgaaagactagctagcagccagtgcgagtgaagaaacggatgaaccaagagcaaggggaaagaggcgaagggtaggaagttactactaaaatatctgtaaaaggacaactggtccatgtgaatgcacttccggagctaatctacccaggagatatgatccatttgctcagaccctg

SEQ ID NO: 5016 - DNA, 1667 bp, Oryza sativa
  ref <308>: DATABASE ACCESSION NUMBER: AK104911
  ref <309>: DATABASE ENTRY DATE: 2002-08-28
attgcagcagctgctgctgttgctcgtgctgagctgagctgaacctgccaatctgcaacactgcaatcgttagcaagttcgctcaactggccagctgctacagatatatctgctgataattgagccccaaccacctttctcttccccctttaaacttccctggtctccgtcctcttcgatctcctctgccgtcgatctcatcggaagagagcgccaagcaagaaagaataattattcctgaagattcctcttctgcatgttgaagtgtacaagacagccacaacaactgaggatatgagctggtggtgttgcattccaaaatccaagaaaggagagaatccttactctcatggcgttagcggtattccgcctgagaaaaacataaggcttttctcttattctgagttgagatcagcaacagaaaacttcaaccgcagtaataaaattggccgaggtggctttgggacagtatacaagggaactattagaaatgggcgagatgttgcggtgaaagttctttctgctgaatccaggcagggcgttcgagaatttttgacagaaattgatgttattaccaatgtgaagcatcccaaccttgttgaattaattggctgttgtgttgaaggaaacaatcgaattttggtatacgagtatttagaaaacagcagccttgaccgtgcattgttgggttctaatagcgaacctgcaaattttacttggagcataagatctgctatatgcataggaatcgccaaaggacttgcatacctgcatgaagagattgcgtcaccgattgtgcacagagatatcaaggctagcaatatacttcttgacaagctttacaaccccaagatcggggacttcggtttagccaagttattccctgataatatcacccacatcagtacccgtgttgctggaacgacaggctaccttgcaccggaatatgcatggcatggccaattgacgaagagagccgatatatacagttttggcgtccttgtacttgagatcgtaagtggcaagagtagttcaaggagtctcctggctgacgataagattctcctagagaaggcatgggagctacatgaggtagggaagctcaaggagctggtggattcagaaatgggagattaccctgaagaggaggtcctccggtacatcaagacggccctcttctgcacgcaggcggcggcggcgcggcggccgtcgatgccgcaggtggtgacgatgctgtccaagcccatccgcatcaacgagcgcgagctcacggcgccgggctacatccacgactacaatggcacggtctccaaggccaccaactccagcaactcgaggttcaagcactcggcgtccgacacctccgacatgttcagcacggtggtgccacccacggtgtccgagatcagcccaaggtgaaaatggaaggaaaacatcaccaggctgattgatgctgatgctgggtctatgtttcttgtcttacctttgcatgttgagttgagtgacagtgcatagagggcacacgtttagatgtgtgccaattgtgaatcgtgttgtttctttccattccttgtgcaaattgcggcatctagatcttgtaaatagtagtaggttgatcctgacttgtttacgtcagagcaattcaagatcgctgcttgttggacatt

SEQ ID NO: 5017 - DNA, 1415 bp, Oryza sativa
  ref <308>: DATABASE ACCESSION NUMBER: AK062219
  ref <309>: DATABASE ENTRY DATE: 2001-12-06
gaaatcccagtctgaagaacttctggtacccagttgctttctccagtgacctaaaagacgatacaatggtgccaatagattgttttgaggagcagtgggtaattttccgaggaaaggatgggagacctggatgtgttatgaacacatgtgctcacagagcttgccctcttcatcttggctcagttaatgagggcagaatccaatgcccttaccatggttgggagtattcaactgatggaaaatgtgagaaaatgccatccacaaagatgctcaacgtgcgcatccggtcattaccatgctttgagcaagaaggaatggtttggatatggcctggcaatgacccaccgaagtcgactatcccttctctgctgcctccttcaggatttacaattcacgcagagatagtgatggagctaccagtggagcatggacttcttctggacaatctatcagatcttgctcatgctccttttactcatacatccacctttgccaagggttggagtgttccaagcttggtgaagttcttgacaccttcatctgggcttcaaggatactgggatccatacccgatcgacatggaatttcgaccaccatgcatggtgttgtcaaccattggcatctcaaagcctggaaaactagaggggaagagcaccaagcaatgttcgacgcatctccaccagctccatatctgtttgccctcctctaggaataaaaccaggctgctctaccggatgtctctcggcttcgctccatggatcaagcatgtccctttcatgcatatactatggtcacattttgctgagaaggtcttgaatgaggatcttcgactcgtgctcgggcagcaagaacggatgatcaatggcgcaaatgtctggaactggccagtatcatatgacaagcttggtatccggtatcggttgtggagagacgccattgagaggggagtagacaggttgccattcagtaaccaaagtgagagtggatcatagtagctgcattgccaatagcctcttttcaattcttgtcgtatttcttggcgagatgaagatgaagatgaagatgatgatggccagaactagtcagtggatgtatatgcacagtttgtttaggcgtgcgtccctgcatggttggttcaccatctccctgagcttcgttgcagattgaattgggttctggagaggaaaggctaatggaaggagagaatgataggcgacgtcattctgtgtaattttaagtgtacactagcgacagcatcacgggatgcaattgtaatctgaggttgatttgtttttcttcttttttttttcctccccttttacccatgtaaaagtcgatcgcatgtcacgctatgatgcatatatatgatcatactattgattattgagccatgaagaacatgtagcacgttaatc

SEQ ID NO: 5018 - DNA, 582 bp, Oryza sativa
  ref <308>: DATABASE ACCESSION NUMBER: AK062220
  ref <309>: DATABASE ENTRY DATE: 2001-12-06
catatacagtggtgatcatgatatgtgtgtaccttataccgggactgaagcatggaccagatctttgggctacggagttattgattcatggagaccgtggcacctgaatggccaagtttctgggtacacccaaggatatgaacatggcctcacctttgctaccattaagggtgctgggcacactgttcctgaatacaaaccacaagaatcattggctttctatagccgctggcttgctggttctaaattgtaaatgcttgtgaatccgacatccaataatgggaagcatacatatccatacagccatgaatcagataaaggttgatacaaagataatataaaaaaactacaaaccaatttagaaagccacatttatttcagaatagttggtgccaacaccatgttgtatgttcttttatgcaaacagtagatcattcatcattatttgtggaagcttactgtgctgtaacatcaaaatgtcaatccttttttctgatattttgtattctcaatttctgattgtcaatccaaagccacaaagataatttgtagatggattacaaggtaatctcttgacatatt

SEQ ID NO: 5019 - DNA, 709 bp, Oryza sativa
  ref <308>: DATABASE ACCESSION NUMBER: AK062221
  ref <309>: DATABASE ENTRY DATE: 2001-12-06
ggagatgctgacagtaaaattgttcgagaagtttgggccaggcttcttgaccaggcacttacaagaggtggtgttgcagaagcatgttctgtggtgagaagagtaggttcaaaacttgatcctgcagatggcgcttgtttaccattggatataatatgccttcatctcgagaaggctgcattggatagattaagctcaggagaagaattagttggtgacgaggatgttgcaagagcccttctcggagcctgtaaaggtctacctgaacctgtgcttgccgtgtatgatcaactgttatcaaatggcgctattgttccctccctaaacctgaagctgcggcttctgagatcagttcttgcaatccttcgtgaatggggcatgactgtcattgcacataaactaggcaccacaactgctggggcttcattctttcttgatggaacattttcgctgaatcaaacatggtctttaaatcaaggcgttcgagataaaataagtagtttggcaaaccggtatatggctgaggtgaggcggttaagccttccaaagaaccaaacagagaatgtctatcgaggtttccaagagctagaggagaaattattaactaattagacatttcaatttgtattctcggcactgtaaaacatgggttcgtgcatttgttgtacccaagtagagagataaagctaagccatcctggttcaattgg

SEQ ID NO: 5020 - DNA, 1245 bp, Oryza sativa
  ref <308>: DATABASE ACCESSION NUMBER: AK062222
  ref <309>: DATABASE ENTRY DATE: 2001-12-06
ggcattgaagattatgttcaccggattggcaggactggaagggctggtgccactggtgtggcctatacgtttttctgtgaccaggattcaaaatatgctgctgatcttattaaaattctggaaggcgcaaaccaacgtgtgcctcgtgacttggcggacatggcctctcggggtgggcgtggtggtaggaagcgtaaccggtgggcaacccgctctgataggggtggttcgcattctgaactggattctaggtatggtggaagagatggtctgtcagggtcttctggcagattggatagtagtcgcagtagtcgcaggcatgactatggtgatgatggacggtctcgcaggtctgggagaggtcgcagtaggagccgtagcagaagtgacagtgataggtatagccgaagtcctaagaggtcacgccgtcatagccgtagcaggaccaggagtcggagccgaagcaggagcaggagctacactaggaaccgtcgtgctagccgcagcaggagccgtagccctggtgctagccgtaggcatgaaagaagcgctactggctctgggtctgcactgccagactctgggcacggtgagcgcaaaagaacaccagaagctgacccatcaagaaaccatacaaaccactcagacccgaaagatgaccgacacccagaggatgggaaggtgggaaaggttgatctcgatcggtcgcctactccacaagacaagtctggcccatatagtcctgcttacaatggaaaaaccagtcgctcagtgagccctggtaatcaggtggaaggaaacaacaaagctgcggaggtttctaagaatcctgatccttcatcgccaccccatcatggtaagaccagggaggacgaagaggaaggtatgatagatgaagatggagagatagctgatgatcctcgggcaaatgcaaccgtgcagaatggcggtgataattgactctttggtcccaaaagaatttaacaaactgctgagcagccactacagatgatctgcgtgacaaagctcaaaatgttaaaaattgtctgaagctgtcttttcgtagtcaaaacttaagttatgaaactatccgtgtcgtagagagctggagattgttttgtgcctgagttgtcttataacattatatactttgtagaccctgtcgaagtagatcatgtgaagtgaagttggtagctctgttatttgtgaaccaataccggaggtgcaaatcatgcaagattatgc

SEQ ID NO: 5021 - DNA, 2278 bp, Oryza sativa
  ref <308>: DATABASE ACCESSION NUMBER: AK062223
  ref <309>: DATABASE ENTRY DATE: 2001-12-06
gaatactccaaagagaaacatttggatgaaggaacaagctcaaatttctttgctgcaaatgccaagacaaagcaggaggagaaacagttgattgataaaggtaaaccagcatacatgttttcacacccagatacagcgatgcaaatccacaaatgtccatgaaaggtgttgatgggagatctgcaagcaataaccagttttttcaccaaggtcaaaatggttcaattggatggtttgcaagaagtcctctggaagcccctgccatcaataattttcctaggcttgatcggtcacataattcaagtcttggtgcacttgctcctccgatgtctattcctcgcatagaccatccttcaggtgcttccccgataggttcctgtacggtagatccaaggagcagtgctatcaataacgctacattccaaccgattccaagcttcaaaggttcttcaactgtgaaccaaagcattggaacttcgattcttaaggtgaagaagaatgaggacttagatggcaactgtccaggttttgcacttgatccgttttgtgcatcaaggccacagcatcaggtggcaatttcaagtgacgaggagcaaaccgagtgcttgatgtttgaacattcagcacggcatcgtgagaatcctcattttgcaaatgacaagggcccaaagaactttaacttgaatgaagcattatcggatggacaggaagattatcttgtagaacaagatgggggaagcgttagtagcttaccacagagtaaagccagtgggttcccgtggctcataaaaacaacagatacatgtactcgcccatcagatttgcaaaatccaaggaaggtttttgcccattcaaataggattgtaatcgatctgaacagcaatactgataggaaagaagcagctttgactattcatagcctgtcagattctgcttcaacatccctagactgtggggttaagaaggaatcccaggattgcgggattaaaaaggatgaggcgttcggggacattaccactagaactgaggtggcatgtaatacgactcaggagagtgctacatgtttacctgttctatgccaggaatatgtgcctggagatgataaagctgctaatggaggtgacaagaaaagcagtgctcctgtaaggaatttcattgatctgaatgatgatgcaccaaatgaagacaattcagagtcatctgtggtgtcacatgaatgccatgtggtctccttacagaacaaccatggtaaacgcaaatttgtcattgatttagaagtgcctgcttgtgaagaaggtgtggcctgggattttaatcaggaatgttctccttctggcaaacttgatgtaactcaggaggctgatgatgcacattttacatgcactaaaattgcagcagagagcattattgctttgtccatgcatgtgccaacaattgcagagacgcctgatgatatgctgcagtggtttgcagatcttgctttatcaagcactgatgaccacgttgagcaagcagaagcccatgattgcgtgaataattccagtgatgatggtctggattcatttgaatcgttgacactgaagctggaagagaccaagattgatgagtactggagcaggccacaggctcctgaaataccaaatgatgaacaagcaggattatcagtgaaccttctcactaagccaaaacgaggccagcaaaggaggaggcggcagaagcgcgattttcagaaagatatcttgcctggccttacatcacttgcgagacctgaaatcatagaggacattcagttacttgaggggttagtacaggcatctggtggatcttggcaatcaagtttaactaggcgaggaagatatggtgggcggccaagaggaagaaaacctcgcaagaatctgtcagaaactatagaggaagaagaagtcccggttagtccaccggcaaaaccggatactgcaaagccagatgctgcggagatagaagctagtgatagggggatcattggttgggggcgaacaacgagacgttgtcgcagaccgaggtgtccatcaggctacaacatttctgccgcatcttgaaaagatgccgacagaaaacatcggactatatttggatttgtagtagagatcttgatggagtggtataagaaggtaagtatagccatgagtgcacatacctcgttggcctatttgggctcccaactttcatgctttggggttgagacatggtgtacatttttaataagaaattcttaaattagttcataagatatttctgc

SEQ ID NO: 5022 - DNA, 451 bp, Oryza sativa
  ref <308>: DATABASE ACCESSION NUMBER: AK062224
  ref <309>: DATABASE ENTRY DATE: 2001-12-06
agaggccgaggttttccggtgaggaggatgggcgagttcgacgactactgggcgcgggcgtacaggggcgactccggggtgccgcactccgacccgcagcggctggtcaccacctggaccggcgccttcgccctcggcgccgccgcctgcgtccaccaccacgcctccgccctcgcctccaacatcaagtccctcccccactactggcaagacatgacaatgatgctcgatcaaaagcgctggaagaagattcttgagaagaagcaacagcaagcttaaggaagtgttgaagctgtaaacaaattgcaacggatagactttttctatttggcattttcttccgtacctttacaacttcacatatgttttcaatacagaactggttgatttgtttaaccttcacccctaatattctcgtaatgcaagtgttggacgtcttatcagttttctt

SEQ ID NO: 5023 - DNA, 1208 bp, Oryza sativa
  ref <308>: DATABASE ACCESSION NUMBER: AK104912
  ref <309>: DATABASE ENTRY DATE: 2002-08-28
atcccattccagtgaccaatccacactgatcccagtagctctcattgtcctcacgcttcgactcgcttgctagatctttgggttcttgtgtgttgtgatcgcgcgatgaggacggtggcgcttggcattgtggcgatggcctgcctggtggccattgcgcatggaggcaacttcttccaggacgcggaggtgtcgtgggggcagggccgcggcaagatcgtcgatggtggccgtgggctcgacctcacgcttgacaggagctccggctctgggttccagtccaagagcgagtacctcttcggcaagatcgacatgcagatcaagctcgtccccggcaactccgccggcaccgtcaccaccttctacttgtcgtcgcagggttcgacccacgatgagatcgacttcgagttcctggggaacgtgaccggcgagccgtacacgctgcacaccaacgtgttcacgcaggggcaggggcagcgcgagcagcagttccgcctctggttcgaccccacccagtccttccacacctactccatcatctggaacccacagcacgtcatattcgcggtggacgggacaccgatcagggacttcaagaaccacgaggcccgtggcgtggcgttccccaagagccagccgatgcgggtgtacgcgagcctgtggaacgcggacgactgggcgacgcagggcggccgcgtcaaggcggactggagcaaggcccccttcgtcgcctccttccgcgacttcaacgccgacgcctgcgtctggtcgaacggcgcgcagcgctgccccgtcggcacaatggagaccgtcgcagcgccggccggcggcaggaggggcggcgccggcgggtggtggaaccaggagctcagcgacatgagctaccgccgcatgaggtgggtgcagaggaagttcatgatctacaactactgcactgacgccaagcggttcccccagggcacccccgccgagtgcaagctccgttgagatcgacacgagaagatgatcataacgtacgctacgcatgcatgatccgtcatcgatgaaaaaaatgatgagaagagcacgtcagatggcgaataatgaatgtgttttgttgccacggagatgtaaatgtagtatgcatatcgcattctttgatatctttttgtaacacggggtcgatgtacgtaccaagtttgataaattttagtgagctgcttttagcc

SEQ ID NO: 5024 - DNA, 1078 bp, Oryza sativa
  ref <308>: DATABASE ACCESSION NUMBER: AK104913
  ref <309>: DATABASE ENTRY DATE: 2002-08-28
tgctactaaagagctggatggggaagatggcaatagtcctgagcctatcatcttaaaccttcaggaaagtgagccaatatatcaaggagaagagcacatacttagcactggaaatttggcatatgaaaatcaggagccggtttatgagggagaggtggttcttgctgaacaagctgacaagactgagaaaagtagtgaggacatgcaagatgggcctgcagaacatcaatgggaactaatagataatttccttcagaacactgctagccagctaactgtctatggtttattttgtctacaagagggtcttaatgaaagagagctgtgcgtcttcttccgtaataatcatttcaacacaatgttcaagtacaatggaagcctatatctcttagccactgatcagggttttttcagccaaagtgatttagtatggcaaaagttggatgaggtgaatggagatggagtttttctgaccagcaatttcacaccatttaaggctgaaaacccgagaaatgattcttggaatgaacagcaggctatgacaagtaccgctgactatcttgctcaatttgacaatactaccctgcagcactcgtctggaaactctgatctagagctagctatagcacttcaacaacaggagtttgagcggcaacaacctcaacgacaccagtcgtcaacacagcagcaggagccggtgccccagcagcaacagcagacacccaatcaatcacatggcacaggtcggccaggattagttgttggtccaacaacggcaaggaggccacctgctccacagccgacgacaccgaagaaagagaagtgcatcgtgatgtaaagatacaacatatcggagacgggacaggagaaaggaaaagggagggggacaaggagcatcacatagtatactgtaaagaatcttcttgtctactcttcttctttagtgccgcggcatagcagcagcctgttgtttttttagccacttttcccaatcttgagcgctcttcattttgcgtgttttttcttccctggtgtaaataaccttcaaagaagtcataaaacgtaaacagatgctgtc

SEQ ID NO: 5025 - DNA, 908 bp, Oryza sativa
  ref <308>: DATABASE ACCESSION NUMBER: AK104914
  ref <309>: DATABASE ENTRY DATE: 2002-08-28
atctgaggcttctcgtgttcggaaggagtatgatgatgcaagctcaaagctgtccaagattcagtctaggatatccactctgacagataagctaaaacacgactttggtaaggagaaggagttctattacttttatgatcagtgccttgagagcaaggagggcaagtatgtttacaaggtatgtccattcaagaaagcttcgcaggttgaaggacatagtaccaccagcctggggcgctgggacaaatttgaagaatcctacagagtaatgcaattttcaaatggagacagatgctggaatggccctgaccgaagtctaaaggttaggcttcgatgcgggctgaacaatgaacttaatggtgtcgatgagcctagtagatgcgagtatgtggctgtattatcgactccagcgctttgcgatgaacaaaaactgaaggaattggaacagaagctcaaggcatcttcgaaccagcgtgaccatgatgaactctaaattatggggtgagacaataatgaacttgctacaaggaaaacaactctcaccatacagccatactcacaagagaggtttaacaggtttattatatgaatagaatagcatatgaaactggaattcttggagttcagcactcggattgccaccgaagcagcattagtttggcaagaaaaatttttgaacaaaagctgtaggatatcgcgaaattcctcaccctgatttgtcggtagattttcttttaccactcttccctgtaaacgtatttgctcaatttttctatgccaccccaaagatgctagactgttgtttgtgacaatctgagtgtttctgagttatgaatagtatatttatgaactacatcctggatattcatcactctggatgtagcatctgccggctgctgtttctgatc

SEQ ID NO: 5026 - DNA, 1162 bp, Oryza sativa
  ref <308>: DATABASE ACCESSION NUMBER: AK062225
  ref <309>: DATABASE ENTRY DATE: 2001-12-06
actatagccaaagcaattcacactcgcacgggctcgagacggcagcacagctccactccactccactctcccccaccacaccacactgcactgaggcataccgacgaacacccttggagccatggctccctgcctcctcctcgtcctcttcctcctcccggcgctcgccaccggccaccagcacccgtccaccctcggctcctccgccctctccgagtggcgctccgccaaggcctcctactacgccgccgacccggaagacgccatcggtggcgcgtgcgggttcggggatctggggaagcacgggtacgggatggcgacggtggggctgagcacggcgctgttcgagcgcggcgcggcgtgcggcggctgctacgaggtgaagtgcgtggatgacctcaagtactgcctccccggaacctccatcgtcgtcacggccaccaacttctgcgccccgaacttcggtctccccgccgacgccggcggcgtctgcaacccgcccaaccaccatttcctcctccccatccagtccttcgagaagattgcgctctggaaggccggcgtgatgcccatccagtaccgccgcgtcaactgtcttcgtgatggtggtgtgcgattcgcagtcgctggtcgaggcttcttcctgacagtcctaattagcaatgtcggtggtgctggcgatgtccgatcagtgaagatcaaaggaacggagtccggttggctctcgatgggccgcaactgggggcagatatggcacatcaactctgatttcaggggacagcctctctccttcgagctcacctcaagtgatggaaaaacattgaccaactacaacgtggtccctaaggagtgggacttcggcaaaacatacactggcaagcagttcctgctctagagaggaaagggtaccaatagcagcttacagttacaaatttttttctgatcctatgagttggattgtactattgtatattcctctgaggaacgataatagtatcattagagaaagaaatgtttagtgcagagcctccaatagtagtccaacatagaaaaggtgctcataaatgtggcatgtaccatttggaactctgataattgcactacagaggcttgatgtaccattcaaaatagaaggctgtacctgttgcctcgattgtatggt

SEQ ID NO: 5027 - DNA, 913 bp, Oryza sativa
  ref <308>: DATABASE ACCESSION NUMBER: AK062226
  ref <309>: DATABASE ENTRY DATE: 2001-12-06
gcttccttctctcctctcctcttctcttctcttctctggtggtgtgggtgtgtccctgtctcccctctccttcctcctctcctttcccctcctctcttcccccctctcacaagagagagagcgccagactctccccaggattcagccatgaagggggccaaatccaagggcgccgccaagcccgacgccaagttggctgtgaagagtaagggcgcggagaagcccgccgccaagggcaggaaggggaaggccggcaaggaccccaacaagcccaagagggctccctccgctttcttcgtttttatggaggagttccgtaaggagttcaaggagaagaaccccaagaataaatctgtcgctgctgtaggaaaagcagccggtgataggtggaaatccctgaccgaagcggacaaggctccctatgtagccaaggccaacaagctcaaggccgagtacaacaaggccattgctgcctacaacaagggcgagagcactgccaagaaggcacccgccaaggaggaagaggaggacgacgaggaggaatctgacaagtccaagtccgaggtcaatgatgaggatgacgacgagggcagcgaagaggatgaagacgatgacgagtgagccttccagtggacaagatgggagcagcaagacgctaagggcggcgggcgtcctaaggagcctatccatcatcatcatcgtctactagaattattcagtttcacttcacatcgtgatgttttactttttctctcgtcctataacggatagcgctccttgttggcgccactggtgggtgttgtggtgcagccaatgtcttgtctccaccgtcaatgatccgcttgtacctagattactctttccattgtcatcggctaacattgtgataatatcagtttgcgtatgttagatt

SEQ ID NO: 5028 - DNA, 1250 bp, Oryza sativa
  ref <308>: DATABASE ACCESSION NUMBER: AK062227
  ref <309>: DATABASE ENTRY DATE: 2001-12-06
ttgttgatttcatggataacaatcctggaaaagtaccttcaggcactgactatccgcttatgtacagagatgtgaggtctgctgttgacttgtgccatcgtgatggaacattaaagagaatggtcgcaaaggatcctagcaggtacatcaacgaagacttggccattgtaccgatgcttgaaatgattagaaaatctgggcgctcaacattcttggtgacaaatagtctgtgggactacacagatgttgtcatgaactacctctgtaggccatatacctcagatgtaagctccagtcacaaccacaagtggcttggatatttcgatgttgtgataacaggaagtgcaaagccagggttcttccatgatggtaaccgtgctggactgtttgaagttgagcctgattctggaaagcttttaaatgctgatcttcatattggaagccccagatcaggtcagcagccttcaaggccaatccacaaaatttaccagggaggaaatgttggtcatcttcacagattactttctgttgcttctagttctcagatcttatatgttggagatcacatttatggagacatactgcgcagcaagaaagtccttggttggcgcacaatgctagtaataccagagctagagcaagaggtgaaacttctttcggaatcaaaatctactcgaaaggagcttaggcatcttaggatggagcgtgattcaattgaagataaaatccatcgtcttgaatggtcactcaagtttgaaaatcttacagaagatgagaaggaaaagttattctcggagcatgacattctgctgcaaaagaaggaacatgttcgtcggcttcatcaagaggctcaaaggcaacatcatcataagttccatagtgtgggggcaactcatgaagacgggttatcaaaactcccgatttgctcatcaggtcgagagatttgcgtgcctttacagtagtcaagtcacaaactttgctttgtattctcccaacaagtactaccgtccaagcgaagattacatgccccatgagttcgatgtgcttgggctgtaggagttctcccggtctccttgaatagattttcagcttgcatctggataggagcatgatcttttgtcctgtggctcttaccgtctaataacattgtagtttctgttaattttgtaagcaagtgtgggattaatctggtgaatgttcacctgttcttttcaagttaccgctgaaaaaagaaagcgaaaggtttgtgt

SEQ ID NO: 5029 - DNA, 1433 bp, Oryza sativa
  ref <308>: DATABASE ACCESSION NUMBER: AK062228
  ref <309>: DATABASE ENTRY DATE: 2001-12-06
ccgcgttttgggtacaggcaattcagacagataacactccttttaattatgaggcgattggtcactcgtacagcctcacggttatttcttctcgccttaaggattcaaggaacagtaataacattcagttttttcagttgccgctgtcccttcgtagtgtttccttaacctcaaatggagtcctttccccttcttgccagcggtctatttttaccttggcaacaagcatgctagcttttgctgggaaagtctgtcacattactgaattgtttgatgtgctgaggtgctttacatcttgcaatatggatccttatctaagaattggtgaagacttgcaactctatgtaaggttgcaatctgatctaggtaactatggttctgatagcgatcaagaaatcgctagatctgtactttctgactgcaggacaaaagtggggattaatgatcagcgagtacttgatgtagttgcttgtgcactgtgtaatttaactgagatggacaaggatgtactggtgaaggagctcacagaaatgtttacacctgaagaggtgcccttgtttgggtcaaattcagcatttgactgggccaattttcatgttcaggcattttctgatgaatccctttcttttgatgaggagtgttcaagaacctcttcagtagatggtgggttgcatgagtcaccaattacaaacaccggtagctcgatatcaaagactacgatgccacaatctgttcctcgtgtcttaggtgttggccagttgcttgaatcggcgttacatgtagccggccaagttgcgggagcatctgtttcgacctccccgctcccatacggcacaatgaccagtcaatgcgaagccttgggatcaggcactaggaagaagctctcaagctggcttgtcaatggccatgactctacgccagacaatcctgctccaagccttccatctgcgcagcatttcatcattcctaaagtaaattcatgcggtttcgagagcagcatccggacgactttggagccttgctcggcagtgaagctcccacccgccagccccttcgacaacttcctgaaggctgcatatcgtgcccagtagcagccatgacaagccttcgagattatgcctaaccatgtttagtagtgctaggatgtagtacctgagcatcagaactagattatcttttgaaagacttggccgatctggcttatcctttattatctgtagcactgttagttgtagtagcttgtgtatcaatgtatggctatgtctgtgtccctccagtaaatgacaatcgtatatgtactatgtagtatgaccatgtagcccactagtaaatgtttgtagggtatgtatgacaatgtatgaccatattgtttttttgagatgtaggattctatttcagactcgagtaatctgtgggggacatgttcgtcgacc

SEQ ID NO: 5030 - DNA, 531 bp, Oryza sativa
  ref <308>: DATABASE ACCESSION NUMBER: AK062229
  ref <309>: DATABASE ENTRY DATE: 2001-12-06
acaccacaactgaattcagtgcttgctggactgctgatcttctgcaggctttggaggattatttgcctctgctcttctcagcctagtcaaagatgataacctgatttccccttctttttaattggtctgaatgaaatccaggagatttgtgtcagtcgaggttgaattcttttacagggagcgagttggaagatagtacaattttgcatttatgaacgaagaggatgatgcagaggtccgcgtgcacctatattgttgcatgtggtgtaggacaataggagtgatactgtactgtgtttgatcatctatttgtcttgtgtaccgtcaatgcccagtgcttagaatgagatgctacctgttgtcttggacacgtgacggctatgctgcattcgtccgaagcaatttttgtgcgtcttcctaagacatgtatcgagggataccatgctaatataaggtatctgagggtctggagcaatatgtaagcatatgagatacagataattagactctgaaactttgtgtttgtattcc

SEQ ID NO: 5031 - DNA, 699 bp, Oryza sativa
  ref <308>: DATABASE ACCESSION NUMBER: AK062230
  ref <309>: DATABASE ENTRY DATE: 2001-12-06
tttccacctgattacccttttaagcctccaagcatcagcatgacaactcctagcggaaggtttgcccctcacaaaagaatatgcctatcaatgagtgactttcatccggaatcttggaatcctatgtggtctgtggcaagcattctcacgggcctcctttcattcatgatggatgatgctctgacaactggaagcatcaggagtacagagggggaaaagagacgtttagcaaaggcttcccttgcctacaactgtgagagcaaaaattgccctcacttcaggaaaatgtttccagagtacgtcgagaaatacaaccaacagaaacagatggagcaaaccgtagcggaaccagaaactcaagagaaccctgccccagctccatctcctgcggtccaacaacaggctgcagtagtagccaataaggcgaaacctgcggcggaggccgcaggcgagcagaagcagaagaagcgagtgcccttctggatgatgctggttatgttttctgtttttggtgcggtgatggccttgcccctgatgcaactctgacaaataaaataaaaagaggctataaaagtgtgataccggggggtaatttttgtatagttttcccaaggtttgcgtaactcgattcttctgtggactctcttcactttggtgatggtaaaatctgtagaaccatatcctctctttacagaatct

SEQ ID NO: 5032 - DNA, 1109 bp, Oryza sativa
  ref <308>: DATABASE ACCESSION NUMBER: AK062231
  ref <309>: DATABASE ENTRY DATE: 2001-12-06
cggaatgcctatctgctaggatgctgttgattggtgctggcaagatgggaaagttggtggttaaacatttgattgccaagggatgcaagaaagttgttgtggtgaaccgttcagtggaaagggtggatgccatccccgaagagatgaaagacattgagattgtgtacaggcctcttacagagatgtatgaagccgctgccgaagctgatgtcgtgttcacaagcacggcatccgaaaccccattgttcacaaaggagcacgcagaggcgcttcccgctatttctgatgctatgggtggtgttcgactctttgtcgacatatccgtccccagaaatgtcagcgcctgtgtgtctgaagttggccatgcgcgagtatacaacgtcgatgacttgaaagaggttgtggaagccaacaaggaggaccggcttaggaaagcaatgggggcccaaacaatcatcacccaagaattgaaacggttcgaggcatggagggactcgctggagactgttccgactatcaagaagctgaggtcctacgccgacaggatcagggcttcggagcttgagaagtgcctccagaagatcggcgaagacgccctcaccaagaagatgagaagatccatcgaggagctcagcaccggcatcgtgaacaagcttctccacggcccattgcagcacctgagatgtgacggcagcgacagccgcaccctcgatgagacgctggagaacatgcacgccctcaacagggtgttcagcctcgacaccgagaaggcgatcattgagcagaagatcaaggcgaaggtggagaagtcccagaactgagattgaagaagagatttttttttttttcagcccgtgtatctactatgtatactactaccatatctgtccagacattctaattccaattttttttctctctctcttgagcctttgcttactgagccctcgctgagttggtcaaattgtctcgtgaattagcgccatggctgctgctagagataactaggaaaatgccttgtttgtaaattactgcatctgctgtggcaagagctccattttgaagatattatatacacgctgttggtgaaataaaatcagaagttcatc

SEQ ID NO: 5033 - DNA, 1742 bp, Oryza sativa
  ref <308>: DATABASE ACCESSION NUMBER: AK062232
  ref <309>: DATABASE ENTRY DATE: 2001-12-06
ctcactcccctcagtgacactctcttagcaagcaagctagcttagccaggagagctccattgccatggcggccaccaccaccatccctctcctcctcctcctcctggccgccaccgtcgccgccgccgccgccgagctctccgtgtaccacaacgtgcacccctcgtcgccgtccccgctcgagtccatcatcgcgctcgcccgcgacgacgacgcccgcctcctcttcctctcctccaaggcagccaccgccggcgtctcctccgcccccgtcgcctccggccaggcccccccgtcctacgtcgtccgggccggcctcggctcgccgtcgcagcagctgctgctggcgctcgacaccagcgccgacgcgacgtgggcgcactgctcgccgtgcggcacgtgcccgagcagcagcctcttcgccccggccaactcctcctcctacgcctccctcccgtgctcctcgtcgtggtgcccgctgttccagggccaggcgtgcccggcgccgcagggtggcggcgacgcggcgccgccgccggcgacgctgccgacgtgcgccttctccaagccgttcgccgacgcgtcgttccaggcggcgctcgccagcgacacgctgaggctgggcaaggacgccatcccgaactacacgttcgggtgcgtgagctcggtgacggggccgacgacgaacatgccaaggcaagggctgctcggcctcgggcgtggccccatggcgctgctctcccaggccgggagcttgtacaatggcgtcttctcctactgcctcccgagctacaggtcatactacttctccggctcgctccggctgggcgccggcggcgggcagccgaggagcgtccggtacacgccgatgctgaggaacccgcacaggtcgtctctctactacgtgaacgtgacggggctcagcgtggggcacgcgtgggtgaaggtccccgcgggatcgttcgcgttcgacgccgccaccggcgccggcacggtggtggactccggcacggtgatcacgcggtggacggcgccggtgtacgcggcgctgcgggaggagttccggcggcaggtagcggcgccgagcgggtacacgtcgctgggcgcgttcgacacgtgcttcaacaccgacgaggtggccgccggcggagcccccgcggtgacggtgcacatggacggcggcgtggacctggcgctgccgatggagaacacgctcatccacagcagcgccacgccgctggcctgcctcgccatggccgaggcgccgcagaacgtcaactccgtcgtcaacgtcatcgccaacctgcagcagcagaacatccgggtcgtcttcgacgtcgccaactcccgcgtcggcttcgccaaggagtcctgcaactaattaagaattaagattaattaagatgatctaccgctatctcatctagagccaagctgctgctagcaaatgcacgagaacggcttgtgcagtctatgtattctcttcttttccctttctgaaatcacggtgtcctcttgtgggcttgtagctttccgatctgtgcaataaggtatacgtgacatcaaaacttggtcacgggcgcctgtctcatctgtatgtgccaatagggctatatctaggtgattacgtacgtactcaaggttttaccagtgtgaattggtatgtttacatcgatcttaaagatcttcatcatttgcatcgctagaaaaacttcatatgagaataccaaatcaagggcagc

SEQ ID NO: 5034 - DNA, 1404 bp, Oryza sativa
  ref <308>: DATABASE ACCESSION NUMBER: AK062233
  ref <309>: DATABASE ENTRY DATE: 2001-12-06
atcggcaccaagaccaggtagccgcagcgagaggagagcgcgagcagagcaagcaaccaagcagcagcagcgatggccgccgcagccacgacatcctcccacctgctcctgctctcccgccagcaggcggcggcctcgctccaatgcggcctctccttccggaggcagcccggcaggctcgccggtgggtcgtcggccccgagcgtgcggtgcatggcggccgtcgacacggcctcggcgcccgccgcgacggaggctagcaagaagagcagctacgagatcaccacgctgacgacgtggctgctgaagcaggagcaggccgggaccatcgacggcgagatgaccatcgtgctggccagcatctccacggcgtgcaagcagatcgcctcgctggtgcagcgcgcgcccatctccaacctcaccggcgtccagggcgccgtcaacgtgcagggcgaggaccagaaaaaactcgacgtcgtctccaacgaggtgttctccaactgcctcaaatcgagcgggcgcaccggcgtgatcgcgtcggaggaggaggacgtgccggtggccgtggaggagagctactcgggcaactacatcgtggtgttcgacccgctcgacggctcctccaacatcgacgccgccgtctccaccggctccatcttcggcatctacagccccaacgacgagtgcctagccgacatcgccgacgaccaaaatcttgaccaggtggagcagaggtgcatcgtgagcgtgtgccagccggggagcaacctgctcgccgccggctactgcatgtactcgagctcggtcatcttcgtgctcaccatcgggacaggggtgtacgtgttcacgctggacccgatgtacggcgagttcgtgctgacgcaggagaaggtgcagatccccaaggcaggcaagatctatgccttcaacgagggcaactacgcgctctgggacgacaagctcaagagctacatggacagcctcaaggagcccgggccgtccgggaagccatactccgcgcgctacatcggcagcctcgtcggcgacttccaccgcacgctgctctacggcggcatctacggctaccccagggaccagaagagcaagaacggcaagctgcggctgctgtacgagtgcgcgccgatgagcttcatcgtcgagcaggccggcggcaagggctccgatggccaccagaggatacttgacatcatgcctacggagatccatcagagagtgccgctgtacatcgggagcgtggaggaagtggagaaggtcgagaagttcttggcttgactgcaagtttcatatacgggggtgtttctaaaaaaaaaagtattgtaactaaattataatatatttgtagaaattttcttttctgatggcgaattaattaaacccattgtg

SEQ ID NO: 5035 - DNA, 832 bp, Oryza sativa
  ref <308>: DATABASE ACCESSION NUMBER: AK062234
  ref <309>: DATABASE ENTRY DATE: 2001-12-06
ctcctcccctctcgccgggttaaacaacgaggaaaacctaacctaatcgggaaaaaatatcggaggaatccagaagcggggggctcccaccttgttggcgacgatgctgcgcgcgggagggaggcggctcttggcccccgggctccggcgggtcctcggcggcggggcggccgctccggtggccgtgggcggggcgaaggcgtaccacgagcgggtggtggaccactacgagaacccgcggaacgtggggtcgttcgagaacgacgaccccagcgtcgggacggggctggtgggggcgccggcctgcggcgacgtgatgaagctgcagatccgcgtcgacgagagctccggcaagatcgtcgacgcatgcttcaagacctttgggtgcggatccgccatcgcgtcctcctccgtcgctactgaatgggtaaagggcaagcaaatggaggaagtagtgactataaaaaacactgagattgccaagcacttgtcacttccaccagtaaagctccattgtagcatgcttgctgaggatgcaattaaagctgccgtgaaagactatgaagcaaagaaggcgaagctagcacaaaagggtgaagagaaggctgccgaagcatgagtgccagaggttctgtcatgaagaatgttgcagtgccctgcgtactcgtagtaaagaacctgtcatgaagaagtctctgctctgcttcttgctggcgggaaatagtgtgtaacgctcacaaactctatgcagcatgtatcataaggatgaaggcaaacatttttgaataaatgtgctgtcatcttgaaagaaaaaaaaaggtgtatgcgtgtg

SEQ ID NO: 5036 - DNA, 1498 bp, Oryza sativa
  ref <308>: DATABASE ACCESSION NUMBER: AK062235
  ref <309>: DATABASE ENTRY DATE: 2001-12-06
tgattttgattcggttaccaaagaatctcctgtgatcaaggcagtatacggaactctttttgaagctgagcacagatccactttttacattccctattggaatcttcctttaactagatggatagttccaaggcaacgcaagttccacagtgacctcaaggttattaatgattgccttgatagtctcataaaaaatgcaaaagagacaagacaggaagctgatgtcgaaaagctccagcaaagagattactcatcattgaaggatgccagcttgctgaggttccttgttgatatgcggggagctgatgttgacgatcgccagcttcgagatgaccttatgacaatgcttattgctgggcatgaaacaactgctgctgttttgacatggtctgtttttctactagcccagaatccctccaagatgagaaaagcacaggcagaggttgattctgtactcagcaatgagacaattaatgtggaccagctcaagaaattggagtacataagactgataattgttgaagctcttcgcttgtatccccagccaccattgttaatcaggcgtgctctgcggccagataaattgccaggtgggtacaatggtgcaaaagaaggatatgaaataccagctggaaccgatatatttctttcgatatacaacctccatagatctccatacttttgggatcggccagatgagtttgaaccagagagattttcagtaccaaaaaaggatgagagcatagaagggtgggctggttttgatcctgaccggagtcctggtgctatgtatcctaacgagattttagcagactttgctttccttccttttggcggaggaccccgcaaatgcgtgggagaccagtttgcactcctcgagtcgacagtagccctggccctgctattgcaaaagtttgatgtggagctgcgaggatcacccgatgaagtggagatggtgacaggcgcaacaattcacacgaagagcgggttatggtgcagagtgaggagaaggacctgatcatccaccagttggcaccaaaagctgtgcttgtgccgtgccgcagcgggatgcatgcagtgcaggaaacaagaagcacacaggaataaatgcatcgatgcagacaacaaccaatacaagggtaagtaaagccagctactcctactccttagttcttttttcgctcatgatgtgatggtgtatagaagtatatactattcgattatttgtacgatgcatacgcatctgtgcgtgcctctttgacggcgaaaaatcgttggggttgaactggaaattgtgctgagttgttacttcatctcaggctgaaacagcacgtttttgcgaccttttgtggtcagcaaattcgctgtcggccaagctgtatgaatagtatggatgatccagtccattttaatcaaatctgcacagacaatgaaagctagttacttttacatgttttaagcaaaaaacactgcttatatttagtgtggtgactatttt

SEQ ID NO: 5037 - DNA, 659 bp, Oryza sativa
  ref <308>: DATABASE ACCESSION NUMBER: AK104915
  ref <309>: DATABASE ENTRY DATE: 2002-08-28
aaataaggagctgtatgaatgcctgaagcagcagctgcagcctgaaatgcaggagcatctggttttgtcatgcagttacagcagcaaggtgtggctcgtgggcgacggggtgacggatgaggagcagatgaaagcccagaaaggatcccatttcgtgccgtactcgcagttccctcccaacaaggcccgcaacgactgcgtctaccactgcaccccggctctactcgtccctgaatccttcgaaaaccttcacgtttgcgagaattggttgccgaggagggtgatgagcgcgtggcgggcggcggggatcgttcacgcgctggagaagtgggacgggcacgagtgcggcggcagggtcaccggcgtgcagaaggcgtggagcgcggcgctggcacggggattccggccatacgacgaccaccaccaccccggcatcacccatgatggccgtggcgggctgtgaccggccggtggccggatcgaagcaacctggcctgattgtgtgatcttgtgtgtgcttcttcgctcggttgatatataggagtatctccgtgtgtgttatgatggggccagattaatatccagctataaaatcccaagctgtattgttaattctctgccggtgtcataatctattgtttgagcataacttaaatttg

SEQ ID NO: 5038 - DNA, 1613 bp, Oryza sativa
  ref <308>: DATABASE ACCESSION NUMBER: AK062236
  ref <309>: DATABASE ENTRY DATE: 2001-12-06
acgcgacccaagccgatccgcccgcacccgcacacacatcgctcggtcgaaggaggaggttctagaaacttctggaagcggcggaggtgtggggagagagagagagagagagagagagagagagaggcagagagccatggcgcggaagaagatccgggagtacgactccaagcgcctcctaagggagcacctcaagcgcctcgccgccatcgacctccacatcctctccgcccaggtcacggaatcaactgatttcacagagctcgtcaaccaagagccatggctctcgtctatgaagttggttgtgaaacccgacatgctgtttggcaaacgtgggaagagtggccttgtggccctcaacctagatcttgctcaagtccgccaattcgtcaaagagcggttgggagttgaggttgagatgggtggctgcaaggctcctattacaacattcatagttgagccatttgttccacatgatcaagagtactatctttctattgtatcagagaggcttggttccaccattagcttctcggagtgtggaggtattgagatcgaggagaactgggataaggtcaagacagtttttcttcccaccgagaaagcaatgacacctgatgcgtgtgctccattgattgccaccctaccgttagaggttcggacaaaaataggtgatttcatcagaggtgtatattctgttttccaagacttggatttctcattccttgagatgaatccgttcaccatggtgaatggggaaccatatcctctagacatgagaggagaattggacgacacagctgcctttaagaactttaagaagtggggaaacattcagttccctctgcctttcggaagagtcctcagcccctctgaaagctttatccatgaactggatgagaagacaagctcatcgctcaaattcacagtcctgaacccgaaagggcgcatttggacaatggttgcaggtggtggtgctagtgtcatatatgctgatactgttggagatttgggatatgcgtcagagcttggaaattatgcagaatacagcggcgctcccaacgaggaggaggttctgcagtatgctagagtggttttggattgtgccactgctgatcctgatggccgtaagagagctcttctcattggaggtggtatagcgaacttcactgatgtcgctgctacattcagtggcatcattcgagctttaagagagaaggaatccaaattgaaggctgcacggatgaacatttacgttcggagaggtggtccaaactaccaaactggccttgccaaaatgcgtacactaggtgcagaacttggtgttccaattgaggtatatggaccagaggcaacaatgactggaatctgcaagcaagccattgattgcatcatggctgaagcataattcagacaactatttgcgctgttcccagcttgagtccattttgtttcagaaattgtcagtgtgaggtgttgcctttctctctgagggaatgtgtgctgttgttggtgtaaaacaaaacaaagaaagatcgtattgttagaataaactacatctgtaagtttgtaacgtaattacgcaataatgttaatgtttgtttctagttctg

SEQ ID NO: 5039 - DNA, 1490 bp, Oryza sativa
  ref <308>: DATABASE ACCESSION NUMBER: AK062237
  ref <309>: DATABASE ENTRY DATE: 2001-12-06
gtatatatcacggtatgaaggtgatttggtggcaaaatgttacttcgcaaaacataagcttgtatgggaagttctggaaggtggtttgaagagtaagatagaaattcagtggtcggatattactgcattgaaggcatcttgccctgaaaatggacagggaaccttggatgtggtgttggcccgacctcctctcttcttcaaagagacggatcctcaaccaaggaaacacacactgtggcaagctacatctgatttcacaggtggccaagcaagtatgaacaggaggcattttctacagtgcccttcaagcttgttgagcaaaaactttgaaaagcttctccagtgtgatcagcggctaaaccaattgagtcagcaaccagacatcatattggactctcccgtttttgaacccagatgctctatatttgaggacccagttgaatcgaagtgccaaggttttactaatttgaaggacgaacatgaattatctgggttttcaggttctctgtcaccctgtgctggttcatccatgtctgctaagattgaagtcaatgattccattgcaacgcaagcaggatttcttgctcagccaggaaacccaggacctagtgcagtgaacgttcagggagtcagcagaaacgtaaatggtgctccagagttaaatatccccagctggtggagtcaactgaaagtgcctgggcttagaccgtctatgtcagtggatgatttggtaaaccacttgggaaactgcatctcggagcagatcacatcagtcaatcctacattgcccagcaacgaggtgccaacaaaagaaacactggaggagatcgctcagtaccttctcggagatgcacagggcccaccggcatcgacatccgacgagagatcgctgatggcgagggtggactccctctgctgtttgattcagaaagatacgccaccggtggcccagccaaagcctgaaccaaacgacagtgatagcattggaggcgatggcaccgaaggttccgatgaagaatttagctcggctgcgtccacagtgaaaactacaggtcccgctcagccaccagccatgtcaaggaaggactccttcggagatctgctgatgaatcttccccgcatcgcctcgttgccccagttccttttcaagatacccgaggattctgagaattgagtctggatatcccaggacttcgatcctcaattcctcattccctaaatgagggaagcttctgtaaaaagagatttgtacctgagcaataagccagcccgaccccccctctcttgtcttctgtggatgagatgagagagctgttcttagtcttcagtatccaccctgtaaatgtgtaatcgattaggttgcttcggatcgtgtcggtatctttcaggattgctatgggtcgtggataaagtgttcattggttctttttaactcgggcttgcccttgtgcaaaattagaattcaagtcaaattgtttacaactttcttc

SEQ ID NO: 5040 - DNA, 656 bp, Oryza sativa
  ref <308>: DATABASE ACCESSION NUMBER: AK062238
  ref <309>: DATABASE ENTRY DATE: 2001-12-06
ctaaagatacagatatcatagtagtttgccagaagggactgagatcattggccgcttgtgagcaactctatggtgctggtttccaaaatttattctgggtacaaggaggactggaagcagctgaagaggaggactttgagcgagaaggtccccagcctttcaagcttgctggtattggtggggtttcggaatttttcggctggacggatcagcaacgagcgcaggctgtgaaagaagggctgggctaccgtctgatcttcacaggccgtttggttggagcactcgtgcttgtcgacgcattatttcttggcgctcaaaggattggccctctgcttcaagaactgcaatctcgctaacgaatatcggtctatgagcaaactgctcttgtgacgtccaagcttttcgagcacctccggctgtgagttgttgcggctccgtaatgtaagcccattgtacatgtatgggggaaaaatcaagctttccatgttttgaatttatggctgtagcctgtaggttactaggtttcatctcgtttgggaggtagaatttccgtaggaatctctttctttcgtatacaatttggtcaaatttattgttcccaaacaggcctggatcattgctatcaagtttcaaggaaattaatggtagttctttac

SEQ ID NO: 5041 - DNA, 1356 bp, Oryza sativa
  ref <308>: DATABASE ACCESSION NUMBER: AK062239
  ref <309>: DATABASE ENTRY DATE: 2001-12-06
tgaaaagagggaaatctatgaccaatatggcgaggatgcactcaaagaaggaatgggaggaggcagcagcagtgatttccatagtcccttcgatttatttgagcaaatttttcagaatcgtggtggctttgggggtagaggacacagacaaaagcgtggcgaagatgtggtacatactatgaaggtttctttagaagacctgtataatggtactaccaaaaaactgtctttgtcacggaatgctctgtgcacaaagtgcaagggtaaaggatccaagagtggggcagcagcaacttgccatggttgtcatggtgcaggaatgagaacaataacaagacaaattgggcttggcatgatccaacagatgaacactgtttgccctgaatgcagaggatcaggtgagatgataagtgacaaggataaatgcccgagttgtaagggaaacaaagtagtccagcagaagaaggtcttggaggttcatgttgagaagggaatgcaacatggccaaaagattgtattccagggtgaagctgatgaagctcctgatacagtgacaggagacatagtttttgtcttgcaacttaaagaccacccaaaatttaagaggaagtttgatgacctctttactgagcacacaatctccctgaccgaggctctgtgtggcttccagtttgttctaacccatcttgatggtcggcaactcctaatcaaatctaatccaggggaggttataaaacctggtcaacacaaggccatcaatgatgaaggcatgccccagcatggccgccctttcatgaaaggtcgtctttttgttgaattcaacgtggagtttcctgagcctggtgcactcactcctggccaatgccgatcgcttgagaagattttgccaccacgacccaggaatcaattgtcagacatggagctagatcaatgtgaggagaccaccatgcatgatgtcaacatagaagaggagatgaggcgcaggcagcagcacaggcggcaggaagcatatgatgaagacgacgacgaggatgctggagctggaccaagggtacagtgtgcccagcagtaagaacaattcgatgccattcggactagacgatttagcgtctcttatcatccaaagaccgcggtagctactgagttcattctattcttttttttaatgtacccccacctaaagtagctgatgcatgttatgatttctcttttgtgggaaatgttatgctaccatttttgttgtcttaagattaaggagcttgctattagtcataatgatgttgcggcctcactacaattattacagcctgccgtattatataccaaaatgagctaatcctcgacaataattcttac

SEQ ID NO: 5042 - DNA, 1116 bp, Oryza sativa
  ref <308>: DATABASE ACCESSION NUMBER: AK062240
  ref <309>: DATABASE ENTRY DATE: 2001-12-06
aacaacagcgagagcgttgatgccaagcctgaacctgctctgccgtttaacccattggctgctagagctgccacaataagtctatctgcatttgggccattcggctttaacttctttaatggcaagggcaaaaggcagaacaagaagctcaacaatctaaatcagtcaaacaagaagcccagcaatccgaatcagaattccatgaaacagaaaggaggtaattcatcatcgcacgaggcaatgagcaacgaatggctggaaaatgggcagtgcccacttgcccggtcttaccgagcaatgagtggcattctgccccttgttgccaaggctttacaaccaccagccggtgtgaagctgaagtgcccacctgctgtggtcgctgtgcgtgcagcccttgcacggactgaacttgtgaagtctctccgtccccagcctctgcctgcaaagatggtagccattgcgttgctcggaatggcagcaaacatccctcttggggtgtggcgtgagcacaccaagaaattctcccctcagtggtttgcagctgtccatgccgctgttccattcattggaatgctgaggaaatctgtcaacatgcccaagactgccatggcattcaccatagcagcctccattgttggtcagacaatcgggtcgagggcggagcgcattcgtctgaaggcactggctgcaaagagcgacgctgattccaccaccgtggctgacatgtatccaaacaagactggaaattgcagtgacaccgagggcaaggcatgggatccgctcgcgatgaagatgatggcgggacgggcttctggtggtgctgctgctccaacaccaagcatgtgtttctgattgctcactgattggaaaatttgtatctaccagtatccctggagagtggagagttgatattgagtctattttatcttgtgatgtaattgcctttgcttgtccctcagaagtattcgtttgtttgtggggtgagacaagtggaataagagtgctactatatacacgatcattctgttgttaagtttgccagttctgcagttcatgtatctgtaatttgatgatgctggatttctactatttatcaatcgtcattatactgtgtgt

SEQ ID NO: 5043 - DNA, 1569 bp, Oryza sativa
  ref <308>: DATABASE ACCESSION NUMBER: AK104916
  ref <309>: DATABASE ENTRY DATE: 2002-08-28
accgccgcgcctccgcctccgcctccgcctcaagccgccgcccgccgccgccaggagcggcctctccatggcggcagcgccgtaccaccagccgaccagcctggaggaggtcaggacgctctggatcggcgacctccagtactgggccgacgagaactacctctacaactgcttcgcccacaccggcgagttacaatctgtaaaaataatacgtaacaagctaacaagccttccagaaggttatggattcatagagttcatttctcatgaagttgccgagaaagttctacagacttacaatggcacacaaatgcctggaactgagcatacattcagattgaactgggcctctttcagctctggtgagaggcgtcctgatgcaggacctgatcattcgatttttgtgggagacttggcgcctgatgtcacagattacttgctacaggagacattccgtgtgagctatccttctgtcaaaggggctaaggttgtcacggatccaaatactgggaggtccaaagggtatggatttgtaaagtttgcagatgaaaatgaaaagaatcgtgcaatgacagaaatgaatggtatgtattgctcaacaagacctatgcggataagtgctgcaatacctaaaaaaaccactggatctcagcttcagtatggagctgctaaagccatgtatccagcagcaggttatgcagttccgcaagtccaaccagttctaccagatagtgatccgacaaacaccactatatttataggtaacttggatcagaatgtgacagaagatgaactcaggcagatctgtgtccaatttggggagcttatatatgtaaaaattccagccaataaagcttgtggatttgtacaatatgcatctcgggcatcagctgaagaggcagtacaacgtcttcatggcacaacgatcggccaacaagtagtcaggctttcatggggcaggagtcctgcgagcaagcaggatcaatcagctgtctggagtcaacaagctgatcctaatcaatgggcaagtgcttattatggctatggatatgatgcatatggatatgcccaggacccatcatatgcatacaattcttatgcaggatatacccagtacccccagcaggttgagggagcgaccgatatggcatcagcagctggaagccatgccccaggaatggaaaaggaggaggtgtatgatccaatgaacttacctgatgttggcaagttgaatgcgtcgtacatcgctgttcatggtagagccatgcttgggcgatccctgtggttgagaacttcatcattgcctcagtcagcttgagcgcctatttatcactcctcgttgccttttttactgaagactgcaatgccagtagagccagttggtagtttgcaaaaacggagaaactgtgacaggctgactgacagcttaatgtatgttgatttgtcatcacatgtatgattagggaaccccttttgctgagcctcttctaagtgaacagattactgccaatgatgcggctactttatgatgccaagttactggatgaaaatcatcagaaaaaaaaattc

SEQ ID NO: 5044 - DNA, 726 bp, Oryza sativa
  ref <308>: DATABASE ACCESSION NUMBER: AK062241
  ref <309>: DATABASE ENTRY DATE: 2001-12-06
ctaatgcgaatcctctaaacctattcccccagggcattccaagtgctgggtcaaatcctggtgctgctgctggtgccggtgccggtgctggtgcccttgatgcattgcgacaacttccacagttccaagcgctgcttgcattggtccaggctaatccccaaatcttgcagccaatgcttcaagagcttgggaagcagaatccgcaaatcttgcggttgattcaggaaaatcaggctgaatttctccgtctggtgaatgaatctcctgatagcggcgctgctgggggaaacatactaggtcaactagcagccgctatgccacaggcacttacagttactccagaggaacgggaggccattcagcggctggaggcaatggggttcaaccgtgagctcgttttggaggtcttcttcgcatgcaacaaggatgaagagctggctgccaactatcttttggatcatggccatgagtttgaggatcaacaataggtgttgttagtttggtctcatcgtggctgggagacccaaaaaaaaaatgaaatcgaggcagaagcagtgcagttcagtatcgttattatttctgactgctgagagatacctggccgtgtgtgcaatgccgctgactatgttttaatttcctgtgtcttgggaatgcttttaaagtacatattagtttcatattcacatattatactgtgtataaaagttgcatgttggccttgtgtgc

SEQ ID NO: 5045 - DNA, 1563 bp, Oryza sativa
  ref <308>: DATABASE ACCESSION NUMBER: AK062242
  ref <309>: DATABASE ENTRY DATE: 2001-12-06
aaaaaaatctctcttcctatctccttcctccccacccacccccaaatccacctcgccgtcgccgccgcgaaaccctaggcagccatagccatggctgcggccatcctcctccgccgcgtcccccccgcgcgggcccaggccacggcgctcatcgcggcgcgctcgatctcggactccacggcgccgctcaccatcgagacctcggtccccttcacctcccacatcgtcgacccgccctcgcgcgacgtcaccaccaccccggccgagctcctcaccttcttccgcgacatgtccgtgatgcgccggatggagatcgccgcggattccctctataaggccaagctcatccgcgggttctgccacctctacgacggccaggaggccgtcgccgtcgggatggaggccgccatcacccgctccgattccatcatcaccgcgtaccgcgatcactgcacccacctcgcacgcggcggcgacctcgtctccgcgttcgcggagctcatgggccgccaggctgggtgctcccgcgggaagggcggatccatgcatttctacaagaaggacgccaatttctatggtggccacggtatcgtcggcgcccaggttccccttggatgcggtctcgccttcgcgcagaagtataggaaagaggaaactgctacgtttgccctctatggtgatggtgccgcgaaccagggccagctctttgaggccctcaatatatcggctctttggaagctgccagctatattggtctgcgaaaacaaccattatgggatgggaaccgctgagtggagggcagcaaagagccctgcctactacaagcgtggtgattatgtgcctggattgaaggttgatggaatggatgttcttgctgtgaagcaggcatgcaaattcgcaaaagagcatgctattgcaaatggcccaattgttcttgaaatggatacctacaggtaccatggccattctatgtcagatcccggaagcacttaccgtaccagggatgagatctcaggtgtaagacaggagcgtgatccaattgaaagggttaggaagttgattttggctcatgacctagcaactgctgctgagctcaaggacatggagaaagaaatcagaaaagaagtcgatgatgccattgcgaaagcaaaggagagtcctatgcctgatacttctgagctctttacgaatgtatatgtcaagggttttggtgtggagtcatttggggcagacaggaaggaattgagagctactcttccataggctgacaacgagaagatggcggcattatttcttctaatatgatatgatagcctggagaaataagcattggtgaagaagtcctcaggcatttctgccattctttgttgcaaaaatgaacctgtatagagatgcgtcaggaagaatcgcaccatatttgtttttgcttcttttccttttctgcaattcatctaaccgctgttgtcaggcttcaaattcaagcttgagactttgcctgcgtgattgctccttttcggaagaaaatgttcaagattatacatctagagtataaattgcctcgcc

SEQ ID NO: 5046 - DNA, 940 bp, Oryza sativa
  ref <308>: DATABASE ACCESSION NUMBER: AK062243
  ref <309>: DATABASE ENTRY DATE: 2001-12-06
aactgaggctaataaaccctctttgtctcctgaggaaatgaagattaaagctcaggaattaagggaacgtgctcgtaaaaagaaagaagaagaagagagaaggatggaaagagaaagggagaaggaaaggattcggatcggtaaagagcttcttgaagccaaaagaattgaggaggataatgaaaggaaacgcatgatagaactgcgaagacttgagaaagaagaggagaaaagagctagagaaaaaatccgtcagaaactggaagaggacaaggctgaaaggagaaggaaacttggattgcccccggaagatccagctgctcctaaaccaagcgcaccacctccggttgaagagaagaagagggcattacctgtcaggccagccacaaaggccgagcgcatgagggattgcttaagaaatcttaagcagcagaacaaggatgacgatgctaaagtgaagagggcttttcaaacactccttacctacattggcaatgtagctaaaaatcctgacgaggagaaattcaggaagatcagactgaccaacgctacatttcaggagagggttggcaatctgcatggaggcatagagtttctccagctctgtggatttgagaaacttgaaggcaacgagttcttgttcttggcaagggacaaggttgacaaggccgtcctgaacactgctggagccgagctgaattctgctatcactaatcctttctttggagtcctttaaatcgtatagaatttccatgtacacttgaacctctctgtttcacctttgcttgaagcacaaatgcacagaaatattgatattgagcgaatgatctttcactgcgctcacttctggtcgccagattgcacgagatggaaggatcttggaaagaatttcccaatatatttcttccaacgattaaagcaataaaacataaatacccac

SEQ ID NO: 5047 - DNA, 860 bp, Oryza sativa
  ref <308>: DATABASE ACCESSION NUMBER: AK062244
  ref <309>: DATABASE ENTRY DATE: 2001-12-06
agaatgatgctaaccaatggccttctgaagagaatttcccatgttggaaggagacaatgaagctataccatgaaactgcacttgctactggtaaaaggatactctctctaattgctctgagtttgaatctcgacgttgaattctttgactgcccagtggcctttcttcggttattgcactacccaggtgaagctaacgagtccgatgatggcaattatggtgcatcagctcactcagactatggagtactaacacttgtagcaacagatggcactcctgggctgcagatatgcagggagaaggataggtgcccccagctttgggaagacgttcatcacattgaaggggccctgattgttaatatcggcgatttgctacaaaggtggactaattgtgttttcaggtctacactgcatcgcgttgttgcagttggtaaagagcgatactctgtggctttctttcttcacacaaaccctgatttagtggttcaatgcttggaaagctgctgcagtgaggcatgcccaccgaggtcttcttcctcctgttaagcttagcattattgcagttctttcatgcttgcttctcactgttagaaattgatgcacgttcaggttcccacctataaggagcggcgactatttggaagaccgattgagggctagatacaaataatcctacgttggctgcgtacatccatgttggatgtaaaggccaggttttaatccattttctgaaaaacacaaataatcctacgtttttaaatgtgtaaagcttaagattagtgaacttcagtgagcagctattccgttgagatggacggaaacatcttgatcttatatgtagcccatctgctgttgctg

SEQ ID NO: 5048 - DNA, 1138 bp, Oryza sativa
  ref <308>: DATABASE ACCESSION NUMBER: AK062245
  ref <309>: DATABASE ENTRY DATE: 2001-12-06
acggctcttttcctcttggattatggagcaagcaactgtttggattgagtaattcaactgatgctccagacagaccaatttgtccttacatggttaccagaaaatgcaaaggggatatttttgctcgcatacgtgataaattgaccaagactgatgttttgaatcttgcatcatccttgggagttcaaatgcgaaatattcatcaattaccccttccacatgtggaacacatatccaaatctgggaacgaagatatcaaagcaaaggaaaattcaatttctgatgtcactcatgttccgcctgaatggaaacaagtagtttctactctagacaggagaaagaaaagtataaagaagcatctaagtaactggggtggttcaattccacaggttctaattgagaaggctgaagaatatctccctgacgacatccgctttcttatcaagtttgttaaggacgatgatggtgattcagtctatgtggtaccttcttggatacattcagatataatggatgataacattctcattgaggggaccacagaaccaggaacttccactgattgcattgccgttgaagatctgaacaaaatggatgcaattcatatcattgatttcagtgatctgtccattggggatcctctatgtgacttaattccactgcacttggatgtattccgtggtgatattgatcttctcaggcagtttttacgaagctatcagcttccttttctgagagcagaatcaaataaagatatatacaagtcaatacaaaattctaaattcagcagggcatcgtatcgtgcgatgtgctactgcatacttcacgaggacaacgtcctgggagccatatttagcctgtggaaggatctgggcaccgcgacgtcatgggaagatgttgaacacttggtttggggagagctgaatcaataccagcagtcatgcagcgtgggcgaaattaactgacgcgatagagttttccatactaagataaaggcacaagaaatttgatttgaaacctgaaactgtaccacaaagtataccatcgaaacagtgtattatgttacactaacacatgcttgatacgcaataacaacgcatcgaaaggacaacttcgttcagatgcaacatattggaac

SEQ ID NO: 5049 - DNA, 1360 bp, Oryza sativa
  ref <308>: DATABASE ACCESSION NUMBER: AK104917
  ref <309>: DATABASE ENTRY DATE: 2002-08-28
attagaatcgatggtgctctaaaggctggacaaaaacgtggaaggttgcttgtaaatcttgaagaagatgaacaaccaaagaagaaagttcgacttggaagcccagcaaatcagtggatatcagtctataatgctaggagacccatgaaacaaagataccattacaatgtagcagatgccagacttcatcaacacatagagaagggaaatgatgatggattgttcattagctcagtggcatcttcagccaatctttgggcccttattatggacgcgggaactgggttcacatcccaagtttatgaactctcaccaatatttcttcataaggattggattatggagcaatgggagaataattactacatcagtgccatagcgggtgcaacaaatggaagttccttggtggtcatgtcaaaaggaactccttacactcaacagtcttacaaagttagtgaatcgtttcccttcaaatggatcaacaagaaatggaaagaaggatttcatgttacatcaatgaccactgcaggaagccgctggggtgtagttatgtcaaggaattctggattttctgaacaggtagtagaattggattttttatatcctagtgaaggtatccaccggcgttgggagaatggctatagaataacttctacagcagccactggtgaccaagctgcttttatattgagtatacccaagagaaaattgatggacgagacacaagaaactcttagaacatctgcttttccaagcaaccatgtgaaggagaaatgggccaagaatctttacattgcttcgatatgctatggccggacagtatcttgaggcataccctgcacaccaactcgggcttagcatattcgcaactgagttgatgtcgggaaaaccagcaatctagttgctgctctctgttactctgtatgtgtaggtaacattggctaggtaaaccttacatcatggccagagttaggggcgcgagaggaagcagggaggaaggtggatggacagctaataagctgatgaggatgtcatccggctggtggtctggtggaggtggcagaagcggatgccgtcaacatattttgcatcaagatgtgctttgctgcagtccttgctgcggtgcacagcacggatgacccttatagcctctttggaggcctataatctgagagcccgttgtgtatagctcttatcgtgtcctgcgttttgtctggtggaagcgaaattaccatgtttccagaactccggaattgtctctaaattattgtgtgagaatgggtgtactgataaatcggtgtatcgattccattattcgatggtctcattgcattaatgcaataatgttgcattactgatc

SEQ ID NO: 5050 - DNA, 1461 bp, Oryza sativa
  ref <308>: DATABASE ACCESSION NUMBER: AK062246
  ref <309>: DATABASE ENTRY DATE: 2001-12-06
aatatatgaagtgacagatgcagattatagccgccgtctactgtttgggtacattcccgttcgttctgatgggatcattggagaagaaaggctctctgagccatctgatataattctccctgaacgacttaaaatcgaagcactctctttcaagggaaatcaggttgagagagagacactgactgttcttgaacaaattccaagcactgcagttcaacaacatctatggagtaactacaagaaagagataacatatcaatggtttgcttccagtggatctgaagtggatcagacttttgagccactggctaaccagtgctctcgctcatacaaagtacgtttcgaagatattggccgatgcctgaaatgtgaatgctcagtctctgatgtatttggacgatccagcgaattgatatccattgtgactgctccgatcttaccaggaaaacctaaaattgaaaaactggagattgaaggaagaggtttccacactaacctgtatgctgttcggggtacctattctggaggcaaagaaggcaagagcaaaatccaatggctcaggtctatggttggaagcccagatcttatctctatacctggcgaaattggaagaacatatgaagccaatgttgatgatgtaggttatagacttgttatcatttatacacctgtgagagaggatggagttgagggacaacctatctctgcttcaacggagccaattgcagttgagcctgaaatttacaaggaggtgaagcagaagcttgatgatggatctgtcaagtttgaggttttgtgtgacaaggacagaacaccaaaaaaggcacaagtgatgggacatttggagcgaagaattttagaagtgaataggaagaggatcaaagttgtaaagcctggatccaaggcatcattcccaactacagaagtgcgaggaacatatgttccacccttccatgttgagctatatcgcaacgatcagcaccgcttcaagattgttgttgatggtgagagcgaagttgacttgatggtgcaaactcggcacatgcgagacgtcatcattctggtgattagaggtcttgctcaaaagttcaacagcacatctctcaactcactcctcaagatagaagcatgaagatcgagttgccaacctgatataacttacagtatgaaaccgattagaaaaggttgttcagtatcgattcaagttgtttagtttggaggatgtgtaatatttataggatttggagcgtggcagcttttgtgtatgggtgtggttgagtgtgttaaagtttttctttttctcaaatcaggagcgggttgctcttctgaccctggttttccatactcatgaaatgtacataggaaagggagggttggtgatatggtgttgcattaatatacaagttgtgtatgcaattctcatattaggctatatgattgattgggaagattttctgtttt

SEQ ID NO: 5051 - DNA, 1360 bp, Oryza sativa
  ref <308>: DATABASE ACCESSION NUMBER: AK104918
  ref <309>: DATABASE ENTRY DATE: 2002-08-28
aaaaccagaaaagaggaaagtgagatagctcaatttctccttccttcctctctccatctaatctacacatgcacaaatgttgcagctgatatatggcttagctagcatatgcaaagcaagccttcctgcagtctagtcacctctcaagctacatactcccagtactgcttcatctagctctctctagtagctagctctatcatcatcgatcatcctcctctcaccggccggccaacccaagaagagattattcctcttcatcttcttcttcctctctgttcatcactggcttcggcggcggcggccgcggcggcgatcgatcagctgtgagaagaagaagaagaagaagaagaagaaatgtctgcccagatcgctccggcagagcaagtgtgctatgtgcactgcaacttctgcaacacgattctcgcggtgagtgtcccaggaaacagcatgctgaacatcgtgaccgtccggtgtgggcactgcacgaatctgctgtcagtgaacttgagaggactgatgcactcagccccagcactacaagatcatcatcatcatcatctccaggagagtggtctgagcggatgcttccgtgatcaaagtggctatccggagtttggtttttctgcagcttcgtcgtcttccaagctcaggctgcctcctgctgctgctgccatggtttcctactcgcagcaaaaccagcagctcgagcaagctctccatgctcgccctccagagaagaggcaaagggtaccttcagcctataacagatttattaaggaagagatacgaaggatcaaagcaaacaaccccgacattagccacagggaagccttcagcacagcagccaagaattgggcacattatccaaacatccattttggcctaagccctggccatgagggtggcaagaagctcgtcgacgtcgaccccatcccaactgctccatcttccaagaagatccaaggtttctactcatagattgaggggatcaatctgccgataccgataccgcaaataggaggaagagcatcaagagcacaaaacatatatatactgtgagtaaagaagcaaaggaaaaaagaaaagaaatgctgccaccttacctttgttcatgaccaaaaaacttgtgaagacgtatgtcataagtacatagaagaaatcaactcatatagagtgaaaaaaaacatacaaaaaatcaagctactatagctcatcgatcgactgaaaggctgaataaaccattcgaccataatgttgttacatgtataagtatgtttgaagctagctagctggctagttctttatttcctctttatgtcttccaatgaaattaatttgcaaacatattaacagcact

SEQ ID NO: 5052 - DNA, 1713 bp, Oryza sativa
  ref <308>: DATABASE ACCESSION NUMBER: AK062247
  ref <309>: DATABASE ENTRY DATE: 2001-12-06
aacaaaaaaaatcccatctcgcttcacccatgctcctcctcgctccctcaccagcggcggcggcggccgccgctcgccggaggaaggtcggtggatcagccctccgcgtccgctgctcgagcgtgcgggaactggagagatccccgaaccctcgtccgggggagcggctgccgccgctgcgggaggcgaagcgggtggtgctggtgcggcacgggcagagcacctggaacgcggaggggcggatccaggggagctccgacatctccgtgctaacgcccaagggcgagtcgcaggcggagacctcccgcctcatgctcctctccgactccttcgacgcctgcttcaccagcccgctcgcccgctcccgccgcaccgccgagatcatctgggccgaccgcgacgacgacctcatcccggactctgacctccgcgagatcgatctctactccttccagggattgttgaagaatgaagggaaggagaggtatggagttatctaccggcagtggcagaagaacgcggccaacttcagcattgatgggcactacccagtgcgggagctctgggaccgcgcacagaactgctgggagaggatcctggcacatgagggcaagtcggtgcttgttgttgcacataatgcagtgaaccaggctcttgttgcctcttcgttgggacttggcacagagtactttcggattctacttcagagcaattgtggtgctagtgtgctggatttcacccctcaggctggtggagggcctccagctgtatgccttaaccgcttaaatcagacgccaaattctcctgttgcctcaggaagttctgcagggagaaagacaagcaagaggattatcctagcatgtcaaggagctacacagaacagtgcagagattggtgtcagtggaatggggtatgcaccgcttaacatgcttgggattatacagtctcagaagactgcagaactacttttagatcaaaaggtaaatggtattctctgtagcccacaagttgcagcatttgatactgctactactatatgcgaggttcaagaggctgcagattgcttaggtgctgactgtgtgcctcgttatgtggaaatgaagaaactgctagaactagaaattgatgatgccttccaaacaaagcaaaagagctttggagaaatagctcagtctgggtggctgggcagcatggaatacaaaactctggaggggctatggaaccagtcgaaagctgcatggcaagccttgctaaatgagttgcaagatgatacttcagaaagaattctggtggtcgtaggacatccgggtataaatctagcattgatttgcaggtgtctggatttaacgatggactacatgtcatcttttcatctagacgatggcagcatcagtgtgatcgatttcccagatggaccaaaaggaagaggtgttgtcagatgcacaaattacacagcccatctaggaagatggtcaatacctattaccaggaccatggaaactgatgaagagttctaacttcctgcgaggtaatgttctggtgtaacatccttcaggaaagctaagtatgtcaatatcttatactgatgtacatactggcatcttgattaatatctgtagatctgatatgtaaatagcatccttctttcaaacaaaaggaatatgtaaataacctttttttctgaagctaaacagtaaaagtatcatactgttt

SEQ ID NO: 5053 - DNA, 1573 bp, Oryza sativa
  ref <308>: DATABASE ACCESSION NUMBER: AK062248
  ref <309>: DATABASE ENTRY DATE: 2001-12-06
gtttccgaaaattcgccacgaagaaacacgtacgaaatccgcagggcagcttagcgttttcttcttctccgatccgatcggattcccctgcccccgatcgcgggagctgccatggcagaaggcgacgcctacgccgcctcggccgcggcctccgcggcgtcgccgcggacccccgcgccgccggagacgccgtcgacgcagaagaggaggcagcgcgggctcgtgtcgcgggtgtggaaggggatattcgggcggcgcgaggacgtcgagaagctgctccaggcgctctccaaggaggaggaggccgtgcgctcccgcctccgccgccgcgcccgcgcctcccgccagtccgcccacaacgtcctcgccatcgccgccgcgctcgagattgcggctgttggatatgcgattatgactacaagatcaccggacctcagctggcagatgagagcaacccgggtgctgcccatgttcctgattcctgctttagctgctctcatttactcaactattacaagcgtcacgaaaatgcttgacaacagagatcaacatactcttgaaaacctccgtgctgaaagacaggctaagattgatgagttgaaggagagaacgaattactacactactcaacaacttatacagagatatgatcttgatcctgctgcaaaagctgctgcagcaactgttttggcatctaaactgggtgctgattctggattgagagtcttcttgggagatgagtcgaatagggatgcaacattgagtaaaagtaatgatgcccaaactactggaccgaggcaaagaaaaccaggacacttgagcaacagcactggaaggacatacggccctgagtcattaggcggttcatatgcctatgatggtaatgaaggtgtcaccactccaaatcagaggactgttgaccacttcagaggtccagctggtaatgatgggggatggctcgcacgagcagctgctctgcttgtaggggaagatccaactcagtgctatgcgttaatatgtggcaactgccatatgcataatggtcttgcaaggaaagaggactttgcattcattacatattactgcccgcactgtaatgccctcaatggaccacggcagcatgatgagcatgaaatggtatctcctggtaaggagactcctatttctcattccgatggcagcattggccacgccggtgcaaaccttgcaaactcaggtgccggcagccctatcgtgaaagacttacccacggttgaagaattacctgcggaaagttctgttgctactaacttaccatctgccgaagaactacctgcagaaagtcctattgccaacaacttaccagcagttgaagaattagctgcagagagtcctgttgccagtagcacacctgctattgaagaactacctgcagaaggtaccgtggagaaggcaagtattgatcatcctgccagttgatcttttgtaaagtaactgcatatgtatttgttcatggagggcttttaaatggctcacggtggttttatagtttgctgcactgctcgttgctcagaaagcacacagcttctgttcc

SEQ ID NO: 5054 - DNA, 1857 bp, Oryza sativa
  ref <308>: DATABASE ACCESSION NUMBER: AK062249
  ref <309>: DATABASE ENTRY DATE: 2001-12-06
aagcttattcttgcagacaacaatattactggcacggtgccgaaggaggttgctgctttgcctgctctgacggaggttgatctgtcgaataacaatctttatgggaaactccctacctttgcagcgaagaatgtgctggtgaaagctaatggcaacccgaacattggcaaggatgctcctgcaccgtctggatcaggtggtagtggcggcagcaatgcgccagatggtgggaatggcggtgatggaagcaatgggagtccctcttcgtcttctgctggaatcattgctggctcagtggttggtgctattgctggagtaggccttcttgctgcattaggtttctattgctataaaagaaaacagaagccttttggaagggttcaaagtccacacgctatggttgttcatcctcggcactcagggtcagatcctgatatggttaaaatcacagttgctggtggcaatgtcaatggcggtgcagctgcaagtgagacatacagtcaagcgagcagtggtccaagggatattcatgttgttgaaactggaaatatggtaatttcaattcaagtcctccgcaatgtgaccaacaacttcagtgatgagaatgtccttggccgtggtggctttggcactgtgtacaagggtgagcttcatgatggcacaaaaattgctgtgaagcgaatggaggctggtgtgatgggtaacaaggggctaaatgagtttaaatcagagattgctgtgctgaccaaggttcgccatcggaacctggtgtcactgcttggctactgtctcgatggcaatgagaggattctagtgtacgagtacatgccacaggggacactgagtcaacacctgtttgagtggaaagaacacaatctgcggccgttggaatggaagaagagacttagcattgcgcttgatgttgcaaggggtgttgagtatcttcacagccttgcacagcagaccttcatccacagagacttgaaaccatcaaacatactcctcggtgatgacatgaaggcaaaggtggcagactttggattggtccggcttgcaccggctgatgggaagtgcgtgtcagtagagacaaggcttgctggcacttttggataccttgctccggaatatgcagttactggacgagtaacaacaaaagcagatgtcttcagctttggtgtcatcttgatggagctgatcactggacgcaaggcgcttgatgagactcagcctgaagacagcatgcacctggtaacatggttccgaagaatgcaacttagcaaagacacattccagaaagcaattgacccaacaattgacctcaccgaggagacacttgcaagcgttagcactgtcgctgagcttgctggtcactgctgtgctagggaaccacaccagaggcctgatatgggtcatgctgtcaatgtgctctctactctttcggatgtttggaaaccgtctgatccagattcagatgacagctatggtatcgatctagacatgacactgccgcaagcattgaagaaatggcaggcctttgaggatagcagccattttgatggcgcgacgtcttcattccttgctagcttggataatactcagacaagcataccgacgaggcctccaggatttgcagaatcattcacctctgctgatggaagatagggtagcttgtgtgaaatctcaagcttgacggaagcagaacatccaagtgatcctttttgttcattcctttagtctcctcactcccctgctttttaatgtttcttggtttggctatgtgctgccttgtagctgtcctttgatcatgtatcttgtgatcttgactcaaagaattgcctggaagtttgcaaatttgct

SEQ ID NO: 5055 - DNA, 713 bp, Oryza sativa
  ref <308>: DATABASE ACCESSION NUMBER: AK104919
  ref <309>: DATABASE ENTRY DATE: 2002-08-28
tagggtttttgctgctcgagcggagagcagatggggaaggactccaagccgaaggacaaggggaagggcaagcaggctgccggctcgtccggcggcgatgacgccggcggcggcggcaagggaggcaagggcaagggcggcaagtccgccgacggcctcggcacctgcacctacgtcaaagctaggcacgtactgtgcgagaagcaagggaagatcaatgaagcttacaagaagttgcaggatggctggttggacaacggggacaaggtccctcctgccgagtttgcaaagatagcccaagaatactctgaatgtccatctggaaagaaaggtggagatcttggatggttcccgcgtggaaaaatggctggcccttttcagggtgttgcatttagcacacctgtgggagctactagcgcaccatttaagtcaacgcatgggtaccacttcatcctctgtgaaggaaggaagaactgatcagtctgcttcaggttggaacagaagcacctcagtctatacaagatgcagatgcctcgtgtctctgtcaacttaataagcactgaatgacgggcatccatattctatgtttagcctttctaatgctctctgaaagagtcttgaaaaactgtgctttctgtaagtaacctgtggtgtcaagcatgacatctatttgggatatgctgagatttagcatttgtctgtgtctcttatct

SEQ ID NO: 5056 - DNA, 1283 bp, Oryza sativa
  ref <308>: DATABASE ACCESSION NUMBER: AK062250
  ref <309>: DATABASE ENTRY DATE: 2001-12-06
ggacttgatgaatgttcctggcttaacaagagaaaacgttgctagccatctacagaaatatcgcctctacctgagtaggttgcaaaagcagaatgaggaaaggatattaggcgctgctaggcaagatttcagtcacaagggaacatcagaaaaccttaacctccgaagttccttccaagagcaaccaagcaacatagcaaatggatatccgcatgcttctcagaatatacaaactcaggccaacatgctagattctcagctagaggacaccaagagcacagtgcccttgcctgtgccagataaaaaaagaactctagcaagtgatgctgctgactcacagaatgtcaccagtgcttcaagtttaggtggggttctgtctttcaaaagcatgccggtgaatcaggacaggaagccatcagaaacaatgatcttggaatgccaggcctggaccggaggcattccatcgaagcagttcatgcagtatccaaagcataaccatgaacgctgtgacctattaggggattattcatgcctgccaaagccagacttagaacacccagttggccctagtaatctgtatgctccaccacctcttatctcaatgagttgcggtatggagggggatgccagagacttctcagacgtgaagccagctattatggactgcatcaagtccttatcaccggcgttgacatgtacagtggattcagtttctgttcaacttagcgacagtgtggtgacctcgattgacggtgacctgaagtcttccggtgtggacgggttgcccagcattaaagattgttgccttgatcagacgaacagccaaggaagtttgcgtccttcgcaagagccaagtatcataggcagcacagagttggcttctctgcctgaggacttacccagttatccacttcacggtgtctccctcgagaatataggactgagtagcattgacttactaaactacagtgacgcaatgatactatccggactacaaagtaactggtatgatgatctagagtttagcagcgaaatgatggactatccatcgatagatgaatgtctctttgcatcatcctgagctgccgcccttctttcgacaatgctattttgcgaggaaggatgatgttctttggtatgttcccatatagctcctcttgtagggctatagtcagctaacttgatcctacggtggaaggatttaattgtagtatctccacttttgataaatgtctgtattatagactgtgccatggtataagctatataccttttgaatgatc

SEQ ID NO: 5057 - DNA, 1005 bp, Oryza sativa
  ref <308>: DATABASE ACCESSION NUMBER: AK062251
  ref <309>: DATABASE ENTRY DATE: 2001-12-06
accgcaccgcacccgcaagcgcaagcccagccgcctcgtcgtgttcgcgttcgtcgcgcggctccgacctccaaagccgccgctacccttcccgtcttcgtcgtcgccgcgcacgcagatcgcgaaccagcccgcgcgccgcgcagcagcgccgcggagaggaaaggagagctccgccgcgcaccccccgccaccatcttgtagggagagatggggctcacgttcacgaagctgttcagccgcctcttcgcgaagaaagagatgaggattctcatggtcgggctcgatgcagccggtaagaccaccatcctctacaagctcaagcttggcgagatcgtcacgaccatccccaccatcggatttaatgttgaaaccgtggaatacaagaacatcagcttcactgtttgggatgtcggtggccaggacaagatcaggcccctgtggaggcactatttccagaacacacagggactcatctttgttgtggacagcaatgatagggagcgtgttgttgaggccagagacgagcttcacaggatgctgaacgaggatgagctgcgtgatgctgtgctgcttgtatttgcaaacaaacaagatcttcctaatgccatgaatgcagctgaaatcactgacaagcttggtttgcattccctgcgccagaggcactggtacattcagagcacttgtgctacatctggtgaagggttgtatgagggtcttgactggctttccaacaacattgccagcaaggcttgagcgttttggcagctggatatctgaacaattcactagtgccggtttacatattatataacatatacaccctaccacacatagtgtgggtgcctgtgaaggaaaaaactcctttgtggaggctagtaccagattgttccttttcgtgggcactataagtgcttatattttgtttggttttacaacatttactgtgctgtccatatgtacccgtttgttctgagatggtctagtaaattgatatgctttgtc

SEQ ID NO: 5058 - DNA, 1816 bp, Oryza sativa
  ref <308>: DATABASE ACCESSION NUMBER: AK062252
  ref <309>: DATABASE ENTRY DATE: 2001-12-06
ctagaataatctaggactcttcactgaacttattcataagtcaacttaaaactcggatatgacaattgttttgaccgaaaattaaggaacacagcaataacacgagctaactcagcctgtcttccaatggaggattgtgttggtatcaagtacagcagtgtcaatgagggcgaagagcgtaagggaggccatggcgtcccaaaggtttccatcatcccactcattttcctcatattctatgaagtttctgggggtccgtttgggattgaggatagtgtcaaggctgctggcccactcctagcaattgctggatttctgctgtttgcactcatatggagtgtcccggaagccctgattactgcagagatgggcactatgtttcctgagaatggtggttacgtcgtctgggtctcttcagcccttgggccattctggggttttcagcaaggctgggcaaagtggctgagtggtgtcatagataatgctctctatccagtcctcttcctcgactatgttaagtccagcattccagctcttggaggtggtctcccaaggaccttggcggtgcttatcctcacagttgcacttacttacatgaactacagagggttgacaatagttggctgggtggcagtctttcttggcgtgttctctctactcccgttttttgttatgggattaatagctattccccgaatcgaaccctcaagatggcttgaaatggacttggggaatgtgaattggggtttatatctaaacacactgttttggaacctcaattattgggactcaatcagtacccttgctggagaggttgagaatccaaagagaacactcccaagggcactttcttatgctctagttttagtggtggggggatacctctaccctctgatcacctgtacagcagcagttccagttgttcgggagttctggacggatggatatttctcagacgttgcgagaattcttggtggtttctggttgcactcgtggcttcaagcagctgctgcactgtccaacatgggcaatttcgtaactgaaatgagcagtgattcttaccagcttctcgggatggctgagcgtggaatgcttccagagtttttcgccaagagatctcgctatggaaccccacttattggcatcatgttctccgcgtttggtgtggtcctgctgtcctggatgagcttccaggagatcatcgctgcggagaactacctgtactgcttcggtatgatcctggaattcatcgccttcatcaagctgagggtggtccacccaaacgcctcccgaccttacaagatcccactgggcaccatcggcgctgtcctgatgatcatcccacctaccattctgatcgtcgtggtgatgatgctcgcgtccttcaaggtgatggtggtcagcatcatggcaatgctggttgggttcgtgctgcagccggctctggtgtacgtggagaagagacggtggctgaagttctccataagcgcagaactgccagatttgccgtactcgaacgttgaggaagacagcacaatcccacttgtgtgctgacctgcatatgcatgccatgaaagtagaatccccaaccatagccatgctagacggaaggaacactgcgatttgcgacttgtttcgtctcacggcttttcaaagcctcttcatctgccatgtataattagaagagaagcaagttcaaaattgtgatcatgctatttgtataccatgttggcgtcagggaggattgtaaatcccagggccagtttgaggaaaatacttcacttggctattgccaatagcacctggttattcgttc

SEQ ID NO: 5059 - DNA, 1542 bp, Oryza sativa
  ref <308>: DATABASE ACCESSION NUMBER: AK104920
  ref <309>: DATABASE ENTRY DATE: 2002-08-28
cgatcagtaccaagcagtagttgctgctgctgctgcttcccaatctggtggttacttaaaacagcaattcttgcaccttcagcaacctatgcagtcccctcaagaacactgcgacctcaacccattattgcagcaacaaattctgcagcaagcaagccagcaacagataattaatcctgatgcccaaaatatccaaacgatgttgagcccaagtgctatacaacagcaactccagcaactacagcaaatgcagcaagttcagaatgatcagaagcagaagattcaaccagatcaaagctaccaagttcctacaagtgcagttctcccaagtccaacatcattaccgagtcatttgcgagaaaaatttggcttctctgatcctaatgcgaattcttcaagcttcatcacctctagcagtagtgataacatgttggattcgagcttccttcagggaagttcgaaagctgtggacttatctcgatttaatcagcctgtagctagtgagcagcagcagcagcagcaacaggcatggaagcagaagtttatgggttcacagtcagtgtcttttgggggctcggttttgcataactcacccacaagcaaagatggttctgttgaaaacaaaattggtcgtgatgtgcaaaaccagtccctttttagtccacaagttgactcttcatccctcctgtacaacatggttcctaatctgacttcgaatgtttcggatggcaacttatcaacgatcccttctggatcaacttatctgcagaatgcaatgtatggttgcttggacgactcttctggtttattgcaaaatacaggagagaacgatccagcaaccagaacatttgtgaaggtttacaagtcaggttcggttgggaggtcgttggacataacccggttctctaattatgctgaacttcgagaagaactgggtcagatgttcggcattaagggtcaattggacgaccctgatagatcaggctggcagcttgtattcgtcgacagggagaatgatgtgcttctccttggagacgacccttgggagtcctttgcgaatagtgtatggtacatcaagatactttcacctgaggatgtgcataagatgggaaagcaaggaaatgatccacggtatctgtcctgaagtgagagaacatggtgccatttctgggcttccaggaggattctgcagtgcatggtggcactcttgctctcgacaatgcacgtcgtcagaagtcccaaatttgtatcttgcatgtacgccgtacatgtttccagaactctccgttacctattcggtgcaggccaccggaaccacgaaacctgatattttgtaggttccacttaggaatcagtatcggtttaactcttatcctagatgatttgtaactcgcacggcagtccactgttttcatgtttcatcgagtcttcctagacattaaacttagttgatattgtatcaggatttatgtgtattgagattcctctacatgctttcaaccaaaaaaaactgcgataatcgaagcgcacgaggattgtttc

SEQ ID NO: 5060 - DNA, 1690 bp, Oryza sativa
  ref <308>: DATABASE ACCESSION NUMBER: AK062253
  ref <309>: DATABASE ENTRY DATE: 2001-12-06
aggagaggcgaggaggcgaagcagcagcagctgaagcgagccgagccgatccctcctgcccctgctcgcctcccagatctcccccccattgccagttccccgccaagattcgcgcgcccttctcccagatccagcttcgcctattccgaattccgcgcaaggctctgtcggtggtctgattcggcgggttttggttggggaattttggtgttcctgctcggttttgtgcttgctgctggttgtggtggttcttgggagcggtggagatgggggtgacaggggagaagttccagctggggacggtgggggcgctcagcctctcggtggtgtcctcggtctccattgtcatctgcaacaaggccctcatgagctccctcggcttcaacttcgccactactttgacaagctggcatctcctcgttacattttgctctcttcacgtggcattatgtatgaagctctttgagcacaaaccttttgatgcaaggactgtcatgggatttggtgtgctcaatggcatttcaattggtcttctcaacttgagtctaggtttcaattctgttggtttctaccagatgacaaagctggcaattatcccctgcactgttatacttgagactcttttcttcaggaagaagtttagtcggaatatccagctctcccttagtgttctcctttttggtgttggagttgcaactgtgactgacctgcagcttaatgctgtgggatctgtcctgtctttgctcgcaatcattacaacctgcattgctcaaatcatgacaaacacaattcagaagaaattcaaggtatcttcaacacagctgctgtaccaatcatgcccataccaagcattggccttgttcatcgtcggccctttccttgatgggtttttgactaaccaaaatgtctttgcttttgattacacatctcaagttgtgtttttcattgtgctgtcatgcttgatatcagtctcagtgaacttcagcacttttcttgtgatcgggaaaacctctcctgtaacttaccaagtgcttggccatctcaagacatgcttggttcttgcctttggttatgttttgcttcacgatccatttagctggagaaatatacttggaatcctcattgctgtgattgggatggtatcgtactcatacttctgcacaaaagaggctccaccaaaacccactgaagcctccccacaactcaaccaggtaaaagaaagcgaatcggaccccttgatctcggactctttgagcactgctgaaaatgggggcaacgcaggcgacgacgaggcttgaaggtacctatgtggagctccaagtactcaaaggcatgaagaaactgctctgatgatactagtgtatggttctatacagagttcagcttagtaggcagatagtactagggttggaaggaagccaaccctgagtgtaatgaacgatgtctgttccatttttggtctttttttttctttttgcttaccatgtggtgctgtcagtaaatgaaatctcactttgaagaggaaattatttacctctacactccagatggcagattggccttaaagctagacacaaaagggctagatctctttgtaatatttttcatgtgttcaacttcagcatctgcttcagcattgtaacaacttgccagcaggacataatatcaacacgtagtttacattcttttt

SEQ ID NO: 5061 - DNA, 1642 bp, Oryza sativa
  ref <308>: DATABASE ACCESSION NUMBER: AK062254
  ref <309>: DATABASE ENTRY DATE: 2001-12-06
cctcgcgagcgaacttaaaatcgcagtcgcaccccggcgccgatcgcaaggtccacctcctcccctctccactccttctagaaccttctcgaccccgccatgcgccccgcggtcgccgccgccctcctcctcgtcgccgccgccgtcgcggcctcgccggtttccgccctctactccgccggctctcccgtcctccagttcaaccccaacaacttcaaatccaaggtgctgaactcgaatggggtggtgctggtggagttcttcgcgccgtggtgcgggcactgccagcagctgacgccgatttgggagaaggccgcgggcgtcctcaagggcgtcgccacggtcgccgcgctcgacgccgacgcgcacaaggagctcgcgcaggaatatggaataagaggatttccaactattaaggtgtttgttcctggaaagcctccagtagattatcaaggagcaagagatgtaaagccaattgttgaatttgctctttcacaggtcaaggctcttcttagagatcggttgaatggaaagacatcagcaggttcaggtggcaagaaatcaggtggttcaagtgagaaaactgaaccaagtgcgtcaatagaattaaattctcaaaacttcgataaacttgtcaccaaaagcaaggatctttggattgttgagttctttgcaccatggtgtgggcactgcaagaaattggcacctgaatggaaaaaggctgcaaagaacttgaagggccaagtgaagctaggtcatgtggattgtgatgctgaaaagtctttgatgagcaagtacaaggtagaaggctttcctactattttggtatttggtgccgataaggagagcccattcccttaccagggggctagagttgcctctgctatcgagtcctttgcattggagcagttggaagccaatgctgctccacctgaagtttctgagttgactggcccagacgccatggaagagaaatgtgcttctgctgccatttgctttgtatctttccttccagatatcttggattcaaaggccgaaggaagaaacaagtaccttgagctgctattatctgttgctgagaaatttaaaaagagtccatacagttttgtctggacagctgctgggaagcaagctgatcttgagaagcaagttggagttggtggttatggctatccagcgatggttgccctcaacgtgaaaaaaggcgcatatgctccactccgtagtgctttccagcttgatgaaataactgagtttgtgagggaagcagggcgcggtgggaagggtaatcttcctttggacggtaccccaacgatagtccaatctgaaccatgggacggcaaagatggtgaggttattgaagaggacgaattctcccttgaggagctgatggccgacaactctccagtaaatgacgagttgtgattctgataattccggaaatgatgttagagttgattagccagactgtaaatctgagtaacactaatgcttcactcgtgtcaactgtacaatttgggcgggacaattttcagaatgctcctttggtgttattacagtacattttagttgaagaaaaacatcgtttgtggtcttttaggagggatgcttttctctgggaaataaaactacttcgtaatct

SEQ ID NO: 5062 - DNA, 1314 bp, Oryza sativa
  ref <308>: DATABASE ACCESSION NUMBER: AK062255
  ref <309>: DATABASE ENTRY DATE: 2001-12-06
aatccccactctctcctcctctccgcttctccattcgccggcgccgcccgaaccaatcgccccgaggaggaggagacctagggtttcctcgtcctcgtcgtcgtcgtcttcccccgcgccgccgcccgctcctcccttcgtctatccccggaggtttgagaagagttgcttgtcctaaaatgaggccagttttctgtggaaaccttgactatgatgctcgccaatctgagattgagcgcctcttcagcaaatatggacgtgtggagcgtgttgacatgaagtcggggtttgcctttgtctacatggaagatgacgtgatgctgatgaagctatccataggcttgacagaattgaatttggcagaaaagggaggagacttagggttgaatggacaaaggaggatcgcagtggtggtagaagagggaactcaaagagatctccaaacaatacaaggccaaccaaaactttgtttgtgatcaattttgatccaatcaacacaaggacaagagatctggagaggcacttcgatcaatatggcaagatctcgaatgtcagaatcagaaggaactttgcctttgtccagtatgagttacaggaagatgctactaaagcactggagggtacaaatggaagcactcttatggacagggttatctctgtggaatatgcacttcgtgatgatgatgagaaaaggaatggatacagcccagaaagaagaggccgtgatcgatctccagacaggagggactatcgcgggcggtctgcaagtccttatggcagagggcgtgagaggggcagccctgactatggaagaggcagggagaggggcagcccggactatggcaggggtggtgacagaggtagccctgattatcaccgtggtgcaagtccgcaagggggcaacaaaggtgatgagaggggcagcccccctaacaactacgaccgtgaacgccgtgaagccagccctggctatgataggccccgcagtcgctcacctgcgaggtacgagagagaatgaagttgctccacatgatgcctgcgctgcaccttcctgcttcagatcaatggacgcactattattatgtactgaactgctgatgttgtctctctgaaagttgtattagtaattggtagcagacgattcgtgtactagctagctctagaacaatgttttgtggatctcaactcgtgttgttagcttacacctcttttcccgctttgatatgagatgcttaaacttccagtattgactattttggctgacagcctgacactatggtagattgctgcaccaaaacgaatttgctctttgtc

SEQ ID NO: 5063 - DNA, 1599 bp, Oryza sativa
  ref <308>: DATABASE ACCESSION NUMBER: AK062256
  ref <309>: DATABASE ENTRY DATE: 2001-12-06
aaaaaccttcttcttccctcacccccttttcccaccaaaaaccctagcctccccctcctcttccagattcatcgccgccgcgccgccccgagcccagagtagccggcgacgatgccgcccaaggcgtccaagaaggacgccgcccccgccgagcgccccatcctcggccgcttctcctcccacctcaagatcgggatcgttgggttaccaaatgttggcaaatccactttcttcaacatagtaacaaagctgtctatcccagctgagaacttccctttctgtaccatcgacccaaatgaggcacgggtatatgttccagatgagagatttgattggctttgtcaactttacaagccaaagagtgaggtgtctgcatatctagaaatcaatgacatagccgggcttgttagaggagcccatgctggggagggtttgggcaatgccttcctatcccatatacgcgctgttgatggaatttttcatgtattgagagcatttgaagacaaagaagttactcatattgatgattcagtggatcctgttagagatttggaaactattggtgaagagctgagactcaaggacattgagtttgtgcagaacaaaattgatgaccttgagaaatcaatgaagagaagcaatgataagcagctgaaactcgagcatgaattatgtgagaaggtcaaagcccatcttgaagatggaaaggatgtccgctttggagattggaaaagtgctgacattgagatcttgaataccttccagctacttacagctaagccagttgtctatttggtgaacatgagtgagaaggactaccagaggaaaaagaacaagttcctacctaagatacatgcctgggttcaggaacatggtggtgaaactattattccttttagctgtgcttttgaaaggttgctagcggatatgcccccggatgaagctgctaaatattgtgctgaaaaccagattgcaagtgtgatcccaaaaattatcaagactggttttgcagcaatccatcttatatactttttcactgctggccctgacgaggtaaagtgttggcagatcagacgtcaaactaaagcacctcaagctgctggtacaattcacactgattttgagagaggcttcatatgcgctgaggtaatgaagttcgacgatctaaaagaactgggtagtgaatctgctgtgaaggctgctggaaaatacaggcaggaagggaagacctacgtggtacaggacggggatatcatcttctttaaatttaacgtgtctggaggtggaaagaagtgagtcaatgtttgaaggtgatagcgttccgacagagtggtgcattttactttaaacttctacacttagctctgtagcaataaacaagttatgattcgatattttgtaccatgaggctataaaattatccaaggattgtatgatgaggctttaaatcattgaagaaaaagtgtacggttttgcaatacaagcattcttggcatgtttgtcttgcctgggtctacatctgtaatattaatggataactgccgtgcatgtttggacaactcgctgtcatgcagtcaaatgtggttctttccccacggt

SEQ ID NO: 5064 - DNA, 1508 bp, Oryza sativa
  ref <308>: DATABASE ACCESSION NUMBER: AK062257
  ref <309>: DATABASE ENTRY DATE: 2001-12-06
aaatccctcacctccgcacttcaaaattccccacctccactgccgctatcctcccgcaacctcaccaaatccggcgaattcccccatcgaccaaaccctaaccctaggtggccggccatgaaggcgtcgatcaagttccgggacgacgaccggccgctggtgcgcgccaaggtgcccgtcggcgtcctcgggctgccgttcctcaccggcgtctcggccggcggcggcggcgactcgcgggatctccgcttcgacctctccaccgccttcgcctccggcccggcgctccgcctctcgtaccgccccaacgacccgctccagcccttcgcgctctccgtccgtaccggcctcggcccgctcgggtcccccgcccgcgcgccgttcgccatatccgccgagttcaacctcctctcctccagcccgccggccttctccctcctcttcaagccccgcatcggcgacttctcgctcgccaactccgtcatctccccgcccgcgtccgcgtccccggccccgccgctgccgccgccgccgccgtcgcacaagctgaccgacctcgccaacggcggcgacgaccacagggcgttctcgttcagcgggaacgggttcgccgcgaacgtggccgccgcggggaagagcggcggcggggtcggcgcgctgctgtccgggatgcgcctcacgaccaggagcgtgctgccgctgtggagcaaggcgagcctgcggttccagtgggggctgcgcgtgccgcccgagctgaaggccgccctcgccgacgacgggtacggccgcaaggcgggtaacctggccaccaacaagttgccgctgctggtcatgaacaagatcacaattgagcacacgctgcggaatcctccacattccgatgccgacaaggggaagaagaaggatgcgccggaatttcagactgaagggttctcgctcgtcaagaggcagctcgaggtgctcaatgcagagagcatcatgctgcggcgtaccgtggaggacctgcgtgccgagatcggtggaaatagagccgcctcaatgcccggtaaaggcgacgcccgaaggatgccgtcgtccctggcaccaccaccaccacaaccattcctggcgaagccagatcgccacgggaacggcaaggagatggtggacagtggaccgaagccggtgtcgaatgaggcgagcgaggagttgaagaaggcactggaggctcgccggaagtgaagaagtatcagaatttgctgaaattgcaaccccctgcaatactgcaacttgacatggctgcttggttaaaattttgcgctcaataatacatttggtaggtgcagtttgcttccccagggaagcaaatggaattctcataaggtgatgtaataatctcgccttattttccaggccgttgcttgtgctagactgctactagtagtattatttatctccaattcgccatgtataaactcgctcttttgttagttgaagtttcagctccattgagatgtatgaaacgcttt

SEQ ID NO: 5065 - DNA, 1667 bp, Oryza sativa
  ref <308>: DATABASE ACCESSION NUMBER: AK062258
  ref <309>: DATABASE ENTRY DATE: 2001-12-06
atgcctgccagtggcgctttcgctgaaatggctgcagtcacagatactgcagagagtcgactgaggaagatgggaatttctcccttaaaactaatgatgagcctttacaaacccaagaataccagccagagataactcctgtgaaagctcaaggttcaaatgaggagaccaatggcggtggttacagttgtgatgttttttctctggatgagattttgcaggaacctgaaaatgtctgcaaaaatgaagagcagaatgccattgatgacaagttcactatcgcagagttatctggatacccaaggcaagatgatggctatgtaggcgagaatggtcctgtgaattggattgacccttcaaatggtgataatacaaactggcctttgagagcatatagtactcagaaccatgtcaatggaacacttagcgccgatggtttctttgacacggtgaatggtaccaactcatattcaggtccttcagataaccagaacctgtatttgcaagatgatggcttgacttcttctcatcaagtgggcgataacatgccattttatgacgcatcatctaatcacaaatgggtagatggaaaggatgattatttgaatttgaatgacctcctctacccgccagcagaaaatcaacccctgtttgatgctggggatgacctgatggcttacttcgatgccacggaggatgatttcaaatttgatattatgggcacagaagattctaattctcaacttccagacatgtcgaactttgtccaaaaggatgataacaacaataagtttacattagatgggatctctaataccgctttgtatggtgcttcttcatctggatcccatggcaatatgtatccagacactgcagtaccagatatgccgatggatgacactgttgacaaaagtttcggaaagcgccttgccagcatgctgggttcaattccagctccacccgcaatggcttcagagttcccgccgagcacaggaaaatctgttgtcccacttagtgctgtcaacccgagtagctctatccgtgtcactgcaggcattatccaactcggtggtatcacttttactggtagcaccgggcacctgcagaagaatggagatttcaatttgctcctctctttcactgtcgagggcgacgtctcaaccaaatccattggttttgaaccggatacgcagatgagcaccacgccaatggtgttgcgcagcggcatgtatcttttcttcgtatcggcgatgattctcatgttgagctacaaagttgggctgtgtatctacagcaggtaagttatagtagtttttgttgccccaggctgtttattaaattgaaggagtcatacagagtccactcgacgtagagggaactcctgcgatttggacagtttggttctttacattgttatagttggtataccgtcctgacagttgaaagatacatagcaataaactctggaattggagaaactagagttacacgaatttggtgctgaaacttttgttggtggcatgtactgtataatttactctatttatttatttcacccaattctgggaggctgtaagcgttccccgatcgatgtaagctgatctgaaacctgaatacgcgctcttcatttttcatacccaaagggccgagaggcacagtttgcagtt

SEQ ID NO: 5066 - DNA, 1303 bp, Oryza sativa
  ref <308>: DATABASE ACCESSION NUMBER: AK062259
  ref <309>: DATABASE ENTRY DATE: 2001-12-06
ggatgcatatgtactttgtcgtattaccaaaagaaatgactggatcccagggaatggcaatgagttggacaacagtgatcctcatccagaaccatatgatgctcctccatcagttatcagtactgaacagctaaatcctgctgctgaaccagttgtcggtgttgaagctgcaccagttaccgttgctgaacctgacggtgttactacgtcagctatcactgctaatataccatctcctagtgatgacattaatctggatgattggttgaatgaactatttgatcctttctttgaccctgaacagagtctggcttctgctgatctgtctccagatgaacaaaatgttgaatcatcgaacgtaggtgctttggctccaaaggtggaacaagactattctagtcctaacgagaacgtagtagatgatacggagtacttgttgcctgaagatgtttacaacatactgcaccctggtacagatgacttcaatatgctccagaatcctttggatcagtaccccattcaatatgcaaccgatgtttggagtggaattcagaaggaagaactgtggtcgccccaggccaatgctgagcctagtcagtcgaatgaagctgctgataatggaattataagacgttatcgtagtatgaaaacacctgaaactagtgtgccgcagttcaagggtaaaactcaggctaaaatgcgggttgggatcaacaagatggctacgagtagttctgaatctatcaaccagactatcaagtttgagaacagtggtcgtcttgttgagcaccagaagaaccaagcgcatgatgtagcttctaccaagcggtcagacgcagggaagccaagtacagagctcagcagcaatcgaggatttctcaggggtatccgaaatgcatttgcaggctgttcggatgctcgatggaacatgatacttgttgcgggtttcgctattggagtcgctgtggtagcgcttcatataggccaacgccttggattaagccagagagatcagcagcatacctagcctttaggtttgcaggttactgggtttctatgctttttgcaatctggagaaacgtaaacaaactccgatctttggttggtgcagaacatttgatgtatgcgccgttttttttgtgttggttttgtacatattattatcttcggttttggtcgacttttgttctcgccagctagtagtactatgttgacgaatgtagaagaaaacctcaaaaaaaaaagaacaaatgaaaaaaaattgacgatgaaaatttatataattaaccgcttgcattgtact

SEQ ID NO: 5067 - DNA, 1088 bp, Oryza sativa
  ref <308>: DATABASE ACCESSION NUMBER: AK062260
  ref <309>: DATABASE ENTRY DATE: 2001-12-06
acatttcaaaagtcagccggctttcaaaccctcatacaatatcagtcacgtcaaagtgcaatacaagcttatggtgctttacatggacggaacatatatgatggttgctgccagctagacattcaatattctaatctcagcgaattgcaagttcactacaacaacgatagatctagagatttcacaaatccatctttgcctacagaacaacgctcaagatcatctcagcctagttataatgatccaagcagtttgtttggtttccagcaacctggagatccgtatgcacagatgagtaaggcagcaatgatcgctgctgcttttggtggaacattgcctcctggagtgtctggcatcaatgaccgttgcacacttctagttagcaatctgaacactgataaaattgatgaggataagctcttcaaccttttctcaatgtatgggaatatcgtgcgtatcaagatactcaaaaataaaccagatcatgccctcatccagatggctgacgggcttcaggctgagcttgctgtactgtatttaaagggagcaatgctattcggaaagaagcttgaagtgaactactccaagtacccaaccgttactgctgatccagatgcacgtgactactcaacttctcacctcaacagatttgacagcaatgtggtgaagaactaccgccactgttgcgccccaaccaagatgatccacatctcagcgcttccacaggacataactgaagataccatccattcccttgttggtgagcatgggactatcgccaactcaagactgttcgagacgaacggcaaaacgcaggcccttgtgctgtttgaaagcgtggaagaggcaacagaggcgctcgtggagaagcacgcaagcaagctggaccgaaccaacatcaggatttccttctcacagatgcagaatatatagttctttcctgggaattgtgaggagccaaagctataagcttaccttaacttttggatttcgtgcacttagcttgcatgaaccgatatatgtttcacctttgcccaaaaagtggtgtgaactgtctttcatgtatggatggatggatcagttaaacc

SEQ ID NO: 5068 - DNA, 1016 bp, Oryza sativa
  ref <308>: DATABASE ACCESSION NUMBER: AK104921
  ref <309>: DATABASE ENTRY DATE: 2002-08-28
aaaaaactcctcctcctcctccgccgtgcaggccgcagccgctcgtgtggttggttggttcatcggcgatcgaagatggtgcgggggaagacgcagatgaagcggatagagaaccccacgagccgccaggtcaccttctccaagcgccgcaacggcctgctcaagaaggccttcgagctctccgtcctctgcgacgccgaggtcgcgctcatcgtcttctccccgcgcggcaagctctacgaattcgccagcgccagtacgcagaaaacaattgaacgctataggacgtatacaaaggaaaatatcggcaacaagacagtacagcaagatatagagcaagtaaaagctgacgctgatggtttggcaaagaaacttgaagctcttgaaacttacaaaagaaaactgctgggtgaaaagttggatgaatgttctattgaagaactgcatagcctggaggtcaagctggagagaagcctcattagcatcaggggaaggaagacaaagctgcttgaggagcaggttgccaaactgagagagaaggagatgaagctgcgcaaggacaatgaagagttacgcgaaaagtgtaagaatcagcctcccttgtctgctcctttgactgtccgggccgaagatgagaacccggaccgtaacatcaacaccaccaacgacaacatggatgtcgaaactgagctattcatagggctgcctggcagaagtcgctccagcggcggtgctgcagaagatagccaagcgatgccccattcttaagtaacaggccaggaataagctggatctctgcgttgagaaaggagatgatgctaggcatgcaatgacaccaaaccatcctaaaaacagaccacgctgtatattttacttacccgtattgtcgtccatggatgcgaaatgctagacgcatatgcacccacccattcagcaccaccaggcagaaacccttcgatcggcagactccactacccatctaaatctaaatcgagagatctcaagtgcatacttgt

SEQ ID NO: 5069 - DNA, 1653 bp, Oryza sativa
  ref <308>: DATABASE ACCESSION NUMBER: AK062261
  ref <309>: DATABASE ENTRY DATE: 2001-12-06
gatgttcacatgagagtacaattggtaaaggtggaaaatcaacaccgtctgtttgcttgcctgcagaaaatggggttagtaaggaaaatatcatccacttctcgaacatggatggtgcttcctccattagtcctgcatttacttcaaattatcagcaaagtaagctggcagatccaatccaatcaaaaccgaagccccttaccccaaaggatttaatgcctgtccaatttagttcgtcgctgcctgatcctacctcaatctgttttgagggtatagctgccataactacacccaattttgaggatcatggcaacagagccagcattgcttcaggggcaaaagatgtgaacatgttcccaacatttaaagaccagtccagtaatcgtcatgatgcactgttttctaatgtcgatgggtacatgcaacagagacgaaataatcactttggaactgaagtatgtggcttatctgaaagcacaggcatttcccagtcggaccagttcacagtatcgaaattccagaatggcaggcccagcagcttgggcctttcgaatggaaatcttggggttctatcgactgggagaagagaggaagcacgtgaaggcttgtttaggccttgttctgtcaagacaagtgctgggaatgaggagcagcaaaagcggcctggtgatgtcaagttgtttgggcaaattcttagccatcaatcatccttgcaaagctctggttcatcagttcatggaagcaaaagcaagcccccctcaccaaaggttgataagccagcttcttctaggttgttgagtaatccaagggaacgcctggtttattcttccaggcctccaatcattgctaactcggggctagaggagagagcgatgaggagttttgaccatatggatgggcgaacaatacagcctgagcctatggttatggtggcaaagtgtcagagaccgtcagctggtgtaccagtttactcaaccaaaaatggcgcgctcagcgtgtttgcggaatttcagcaaccttcaatgccgccacatacatcagatcacaaactactagaaaactttgccgatcttcataagaggaatggaatcgaactcctttcggggttccagcagcctgggaggcttgggggtgctggggtcctggttagcggtgtatctgaccctgtggctgctctcaaggcacagtacggctctggttcgaagatgttgagcagcagcaacgacgtggatacatggaaagacataggaagcaggtagcgtctgtagtgttggtagcggcaatagtgcaatgctttcttgctctctgtatcatacttagtttttgtaacttgggatgaaactaaacatgggaaagtgaatggctttcctgtccatattgttgtaggatttgcagtagaagttcgtttaaatttatcgctggtattaactttttgtacctttcttttttgctgcagccgctccatacttgatagtttttacctgttaacagtgatgtaggttttgctagaggtgttggtcatgctgtccgctggctgacaaggatgtttgttggtatgtctatcagtatttatgcagaaacctcacacagatcattgtaatgtggtaatgattcctaactgagtttactcctttgcctgctggagttttggtg

SEQ ID NO: 5070 - DNA, 1574 bp, Oryza sativa
  ref <308>: DATABASE ACCESSION NUMBER: AK062262
  ref <309>: DATABASE ENTRY DATE: 2001-12-06
tgatgttacaaacaaacttagtaccatgcttggttttggtttatcagaaccatgggtacaacacttgtccaagaccaagttcatcagagcagacagagagaaattgagaaccttgtttactttcttgggagaatgcttgaagctaattgtggcagataatgagctgggaagcttgaaacttgccctcgagggaagctatgttgaacctggccctggtggtgatccaatccgtaacccgaaggttctcccgacagggaagaacatccatgctcttgaccctcaggcaatcccaactacagctgccttgaagagcgccaaaattattgtagaccgtctgctggagcggcaaaaggttgacaatggtggcaagtatcctgagacaattgcacttgtcttgtggggcaccgataacatcaagacctatggtgagtcattggcccaggtgctgtggatgattggtgtgcgcccggttgctgacacctttggccgtgtcaaccgtgtggaacctgtcagccttgaggagcttggacgtcccaggattgacgttgttatcaactgctcgggtgtcttcagagatcttttcatcaaccagatgaatctactggaccgggcagtgaagatggttgccgaactggatgagccagaagagatgaactacgtgcgtaagcatgcacaagagcaggcacgggaacttggcgtttcattaagagaggcggcaacaagggtgttctcaaatgcatcaggctcttactcatcgaatgtgaacttggcagtggagaatgcatcatggactgatgagaagcagctccaggacatgtacctgagtcgcaagtcttttgcatttgattgtgatgctccaggggcaggcatgcgagagcaacgcaagacatttgagcttgctctagcaacagcagatgccacattccagaacctagactcatcagagatttcactaacagatgtgagccactactttgactcagacccgacaaagctggtgcaaggactgcgcaaggatgggcgggcaccttcctcatacatagcagatacaaccacagcaaatgcacaggtgaggacattgtcagagacagtgcgccttgatgcaaggacaaagctactgaaccctaagtggtacgaggggatgatgaaaagtggctacgagggagttagagagattgagaagcggctgacaaatactgttggatggagtgcaacatctggacaggttgacaactgggtttatgaggaggcaaatgccacatttattgaagatgaggctatgaggaagaggctcatggacaccaaccccaattcattcaggaagctagttcagaccttcctagaagccagtggcagaggctactgggagacatcagaggaaaacttggaaaagctcagggagctctactctgaggttgaagacaagattgaaggaattgaccggtaaatttatttgatctatcagatcctgcattcaaccaaggaggagaaatccttctgtctcactgaatctagagttgagacttgtacactttgtataatttataaaaagttgtaacatgacatacacgagg

SEQ ID NO: 5071 - DNA, 1288 bp, Oryza sativa
  ref <308>: DATABASE ACCESSION NUMBER: AK062263
  ref <309>: DATABASE ENTRY DATE: 2001-12-06
ttgcgatggttggaaaatatactgggctgtccgattcctacctgtctgttctaaaggcacttttgcatgcatcggttgctatgggaagaaagcttgtagtggagtgggttccttcctgtgatcttgaagattctgcagccaaagagacccctgaagcccataaaaaagcatggaagctactcaggggtgcagagggtatacttgtccctggaggctttggagatagaggtgttcagggaaaaattcttgctgcaaaatatgcacgagaaaataatgttccttatctcggcatttgcttgggtatgcaaattgcagtgattgattttgcctgttctatcatgaaattaccgggtgcaaatagcacagagtttgacccagatacaatgtcaccctgcgtcattttcatgccagagggttccaaaacccatatgggggcaactatgcggcttggatcaaggagaacatatttccatgccactgcatgcaaatctgcaaagctgtatggtaatgctagattcgtagacgaaagacatcgacacagatatgaggtaaatcctgaaatggtaccagagtttgagaaggccggactttcatttgttggcaaggatgagagtggaagacgcatggagattattgaactacccagtcataaatttttcattggagtacagttccatcctgaattcaagtcaagaccagggaagccatctccacttttcttaggattaatagcagcagcatctggacaactagaaactttgctccaaccaagttccaacattgtcaatccaaatcctatgcccagatttcccattcccaaaaagacgatttaccatgccaagaagccactggacagcttggtaaacggatactttgcaaatggcaacgtcatccacacttgattagcagttgtgcaaatcctaagcgaggccttgtttgagatttgtttctacggttctctgcttgaaccctaatcttttcttcttcttcgttttcgtgttttttttttggctttgtatttgtctctgctcaactgagaaggctaagagttgcaagctccagatacacggttcccatgttttaagaggaaacgtcctccggtcatgttgaagcaaagtttagctatagggtggtgtagtgtgctgtttatttcctgctgaggcctcaattaaggctggaaatgtattggtagctttagtatagcctggcatctcaactatttgtacattgggaaaaaaacctacctaagtactgaatatacaaatgcttggccaagattgcttacttc

SEQ ID NO: 5072 - DNA, 1118 bp, Oryza sativa
  ref <308>: DATABASE ACCESSION NUMBER: AK062264
  ref <309>: DATABASE ENTRY DATE: 2001-12-06
catatcaatttcctggcattcctctgatgtcaaatgttcaggctgaaagccatcaaacaaagccagctactacaaattaccgaacttcaatagattccccaaaacagtcaagttccgcagaaaagtcacaagatataccatcaagaccattgatgatgacaccccaagaaaagattgaaaagcttaggcgtcgacagcaaatgcaagcactgatagctattcagcagcagcagcagcagtttggtcaagatggttctggcagcgataccatggtacctcaagcgtactcaccaaagagcaaaaatccagattccttagggagttctgttgtcatagatgataatgcaaataaagttttctcactagagctgattccaactggccatgaagagattcagaagagttctgggattcctgatgacccctttatagaagaaaaaatatattatcagcttcaagatgctcttgcgaagttggataccagaactcggcgttgtattcgagacagtttactccgtttggcccatagtgtctcagagagacaaattactagtgacagaagtagtgctaacaagagtaataaagatgatgatgaagtttcagaagacacatctaaaagaagatctccagcaagtgaagcagaaacaaacacaaatccaatcgaccgcattgtggcacatttactgtttcataagccttgttcaaaggtttcaacacctgcaaaagaagagatcaaatcctcaactccattgccaactgaacctgattcgaagattcctacagacgcacctgggggaccatcagaaaatcaccagaatgggcaagaaatgacactgcagccttcactgtaatgtaagatgtattaatggaagattttgctcaaagaccagtgagatcataattctttgtgtatctgatggcccaatttctctgcgaatggctggtgtttctccttagagtatgtggcaggggaccaatgaattgctcaacatcaacatggttagctgcctctaaagatggccattgccagtccgctgatcacctccactgtcagagatcattacgtgatgtatcctgctgtatcagtttcaccatcctagtgccttgtgtcatatccc

SEQ ID NO: 5073 - DNA, 1270 bp, Oryza sativa
  ref <308>: DATABASE ACCESSION NUMBER: AK062265
  ref <309>: DATABASE ENTRY DATE: 2001-12-06
atatccatgcatttctcttaaaacatatcaattcctgggtcactgacatctactgccataaggttataagattatcagcagcaactcaggaagtcccaaggtcaatagtttgcaatgtccatggagtaaatccaaaatttattgaaattggtaaactgaagcatcagcagatatctcaaagagaacaagcattcttcaagggtgcatattatattggaaagatggtctggagtaaaggttatacagaactactccagctgcttcagaagcaccagaaggaattatctggtcttaagatggagctgtatggcagtggagaagattctgatgaggttaaagcatcagccgagaaactaaatcttgatgttcgagtctatcctggtcgtgaccatggagattccatatttcatgactacaaggttttcataaacccaagcaccacagatgtggtatgcacgacaactgcagaagctttggcgatggggaaaattgtgatatgtgcaaaccatccttcgaatgaattcttcaaaaggtttcctaactgccacatgtacaatactgagaaagagtttgtgagattgactatgaaagcattggctgaagagccaatcccactgtcagaggaactgagacatgagctttcctgggaggcagcaacagagagatttgtcagggttgctgatattgcaccaatcatgtctatcaagcagcattctccctctccccagtatttcatgtatatatctccagatgaactgaagaagaacatggaggaggcgtcggcattttttcataatgcgatttctgggtttgaaacggcccgttgtgtttttggtgccataccgaatactctgcagcctgatgaacagcaatgcaaggaacttggctggaggctccaggaatgacagtcatttcttcccacgctgttgtcaatgacaatagaatgccaactaacagcccagggaacttggcttggggaactaactacgtaacgcaattatcttttgctccaaaactacgaaggactgaacagacaagggtgattcttgttttctgctatggtggtacactggtattgcaattctccttcacaattgtggagtgtccatcagacatcagttactgtaatgcatcatatcttggaattgtaaatgtgcggcagttgaagtgattaccaatgctgtcttttcatgtagcctgtgtaatgtaaagcttactgttgcttcccgagtttggcacaattttaaagatatcttgtctggtgtttcac

SEQ ID NO: 5074 - DNA, 1198 bp, Oryza sativa
  ref <308>: DATABASE ACCESSION NUMBER: AK062266
  ref <309>: DATABASE ENTRY DATE: 2001-12-06
taggcaaacattgcagcctgaaactacagctgtcccagagtggtttgctgctgcttcatttggagtagttaccatcttcacccttttgctccgaaatgtacctttgctacaggacaacttgctatcaacatttgataaccttgagctattaaaagatggagtttatggcgccctagtaactgcggccataataggcgttcatgagattgcacatatccttgctgctagggatactggaatcaagcttgccgtaccatattttgttcctagctggcagataggatcttttggtgctattaccagaattgtcaatatagtccgcaatcgtgaggacctactgaaggtagcagctgctggaccattggcagggttctcccttggatttgttcttttgctgctaggcttcatcttacctccaagtgatggccttggccttgtgatagatccagcagtatttcatgaatcatttcttgttggtggtcttgcaaagcttattcttggagatgctctaaaagaaggaacaaaactatccataaatccactggtcttatgggcctgggctggtctcctgatcaatgccatcaatagcatccctgcaggagagcttgatggcggccgcatagcatttgccatgtggggaagaaagatatcgtctcgaatcagcagcttggccattggacttcttggaatttcagctctcttcaacgacgtcgcgttctactgggtggtgctgatcttcttcttgcagagaggaccgatttcccctctctctgaagaaataacagaacctgagaacaattacatcagcattggtgtagccatcttgctctttggacttcttgtctgcctaccctacccattcccctttgatccatcacaactaactgattttgacttgtgaaacaaaatcagtcacaggtcacaagctttcttcctcccaaatttatgttagatgctgagatgtatgtaacctgtcggctccctgttttatttatcttagccttggtcataaagatttggagtctatgagctccattgctccttgcagtagcaaaataaaatgcaggagcattcctgtggtagttcagttgttgtagtagtattttggtaggatgcatcagtgtagaacagcatatgagcagttgagcacatgattctggatgtaattttatcagtgcagtagttttttgcattaagg

SEQ ID NO: 5075 - DNA, 1165 bp, Oryza sativa
  ref <308>: DATABASE ACCESSION NUMBER: AK062267
  ref <309>: DATABASE ENTRY DATE: 2001-12-06
aaagcaaacggaggaggaactgaggaagacgcctgggctgagaacccgaagaagcccgacgactccggaatcgggggctcgggcagtcgagctcaccgcgcgcgcgcgtcccgtctcgccgaggtagtaacaaaaggacactatgagctccgcaagcggtgtgaacaatggtgatggaaaagaagcggcactgtttgagcagcggctatccaagattggtgaagttagagctgccctaggacaactatcaggaaaagctgcgctatattgctcagatgcttcgattgcgaggtacctggtagcgaggaactgggaagtgaagaaggccacgaaaatgctgaagaaaaccttgaaatggcgttcagagtataagccagatgagatccgttgggatgagatagcaaacgaagctgcaactggaaaaatctaccgaactgattactttgacaagagtggacggagtattcttgtcatgagacctggagttcagaataccaagaaggccaaggggcagatcagatatttggtatactgtatggagaatgcaattctgaatcttccgcatgaccagagtcagatggtttggctcattgattttgctggattctcattatctaacatatcacttcatgtgacaaagttgacagcagatgtcctacaaggtcactatcctgaaagattgggtgttgcaattctttacaatgctcctaagttttttgagtctttctggaagatcgcaagccccattcttgagccaaagactttcaacaaggtcaaatttgtatacccagataggcctgagactaacaagatcatggaagacctttttaacatggaagaattagaatctgcatttggtggcaaaaaccaggctacttttaacataaatgattatgctgcaaggatgagagaagatgacatcaagatgccattgttctggagtcctgaaaattctgctcttgcttcagagccatatgtgatggtgaacaaggacatggcacaagaaggtagttcaggtttgaagagtgaagagactgcatctgaaaagagggaagaaacagatactgaatctgaaaacagggaagaaacagagagtgaatctgagagggcagaaatagactctgtatctgggaagagggaagaaacagtggctgtatctgacaag

SEQ ID NO: 5076 - DNA, 827 bp, Oryza sativa
  ref <308>: DATABASE ACCESSION NUMBER: AK062268
  ref <309>: DATABASE ENTRY DATE: 2001-12-06
aaaatagtacaaaattatatcgatcgatcagcaaactaatcattgatcttcaagagattatttctacttatatatctctcgatcttcacaaattacacatacgacatagtatatggctcttctttgcagtgagctgcaggtcagggcaatggtggtgatcgccgccgtgatgctggcggcagcggcgccggcggggacgacgtgcgagcagctggagtcggtggcgaggtcttgcaccgggtacctgaagagaagcctgattttcctgaacgacgcgtgctgcgacggcgccgagagcgtgtacgatgccctgacgacggacgccgccgtcgacctcggcttcgtgtgccgctgcctgaggggcttcgtcatcagcgagtcgcttcgcccttacctctacagggtcgccaatctgcctcgcctgtgccgcttcaaggatcggggccccatcccatacaacaactccactatccacgactgcaggttcagtggtaccacacgtcactcgctctaattgtaacacgctaagagcaaatttaatagtataccccactactagctctaaatcatctatagccaatataatagctaattcatacaatagttgtttactatactattaatacctggtcccacctgtcatacacacattacgttttggagcccgtgctgcagctggctacagatttgtagcccgctgcttttctctctttttctttatctatttaaaatatgtttatagctggcttatagcctgctattgtacctgctttaagtgtacttaatttcgatagaaataaatatatatactccatggagtattatgt

SEQ ID NO: 5077 - DNA, 2024 bp, Oryza sativa
  ref <308>: DATABASE ACCESSION NUMBER: AK062269
  ref <309>: DATABASE ENTRY DATE: 2001-12-06
ccatgatgcaaagtacggagacggcatcatcattggaataatcgacacaggtatctggcctgagtctgcaagctttagtgaccatggcctaagccctattccttccaaatggaaaggccaatgtcaagctggcgaagccttcaggtcaaaccagtgcaaccggaagattattggggctcgatggtatgacaaacatttgagcgcagaggatctgaaaggagaatataggtcggccagggacgcgcatggccatgggacacatgtggcatccactgcagctggtgccctggtaccaaacattagcttccatgggctagctgctggttatgccaggggcgtcgcaccccacgcacggcttgcagtctacaaggcgtgctggggactgggggcaagctgtcatgatgcgggcatcatcaaagcgtttgacgatgccatacatgatggcgtcgatgtgctatccctttctattggtaagagcggtgatgagttctttagcagcttccacgctgtgaagaatggcattactgtcattttcgcggcagggaacgagggccctgctcctcggactgttacaaatgcattaccctgggttataacggttgcatcagccacgatagaccgtgttttccctactgttatcacacttgccaatggcagcagcagcattgtgggtcagtccttgttctatcagccaaaggataacaacaactggtatgagattcatcactccagctgtctaattaaggatggggagaaaattaatgcatcccttgcttctgggaagatcgtgttttgctacagtcctctttctgtgagcataacttcaccatttggctatgtgtcccacgctgtgaaagctgccaaggaggctggagcgaaggggatcattattgccacatatggtcttgatattcttgactactttgaaaagtgtggtgccatgccgtgcattttcgtggacttcgatgctgtaggacaaataaattcatctggtgatgaaaacactacacctttagttaagattgctccagcgcgtacttgggttggaggtgaagttcttgccccaaaaatctcaacattctcctccagaggacccagcccacttttaccacaattcctcaagcctgatgttgcggcgcctggatctaatatcttggccgctgtgaaagattcgtacaagttccagtcaggcacttcaatggcatgcccacatgtgtcaggtgtagccgcattactcaaagcattgcatccagattggtctcctgctattattaaatcagcactagtgactacagcaagcaatgacagatatggtcttccaatattggctaatgggctaccgcaaaagatagctgatccgtttgactatggtggcggctttattgatccaaataaagctactgatcctggactagcatatgatgttgacccaaaagactatgacttagtcgttaattgtgaatctgccaactcaagctgtgaatctatatttcaaaatctgaaccttccatcaattgcgatcccgaatctgacaatgccaacaacggtgctgagaacagtgacaaatgtaggccaagatgatgccatttataaggctgttgtccaatgccctcctggtgtgcggatatcggtggagccatctgttttacaattcaagcaaggaaagaagaagcagagcttcaaggtcacctttagcatgacacacaaggttcagggaagctacctgtttggaagcctagcatggtgtgatggtgccgctcactatgtcaggatcccaattgccgttcgaccagttatatctgagaattatgcagatctctgatgaagcataggactacaagattttcagagattcgatcagctgagaatggcttatcctattttagacccctcctcatagttgaatttgtcggccttgctgaaactgctccagtgttgaaatgcatgtttaattttgtatgtaactctgtgatatctctatggatattggtgtgaactagtaatgaataagtgaggggttgttt

SEQ ID NO: 5078 - DNA, 732 bp, Oryza sativa
  ref <308>: DATABASE ACCESSION NUMBER: AK062270
  ref <309>: DATABASE ENTRY DATE: 2001-12-06
acagtcgcctcctcccctgccaaaccagtctcccccaaatctcctttgcgtcctctcgattcctcagcgaccatgtcggcctactgcggcaagtacaaggacgagctcatcaagaatgctgcctacattggcactcctggcaagggtatccttgctgcagatgagtccactggcaccattggcaagcgctttgccagcatcaatgtcgagaacgttgaggagaaccgccgctctctccgcgagctgctcttcaccacccctggtgccctccagcacctaagtggtgtgatcctcttcgaggagaccctgtaccagaagaccaaggacggcaagcccttcgtcgatgtcctcaaggagggtggtgtcctccctggcatcaaggttgacaagggtaccgttgaggttgccggcaccaacaaagagaccaccacccagggccacgatgatcttggcaagcgttgcgccaagtactacgaggccggtgcccgcttcgccaagtggcgtgctgtcctcaagattggccccaacgagccatcgcagctttccattgacctgaatgctcagggtcttgctcgctatgccatcatctgccaggagaacgggctggtgccgattgtcgagcctgagatccttgtcgatggctctctacctgtcatcggtagtagttttttggtattcctgtaatcaaatgctgcgtatggtaaattggagcagcggctttaattccatgct

SEQ ID NO: 5079 - DNA, 1704 bp, Oryza sativa
  ref <308>: DATABASE ACCESSION NUMBER: AK062271
  ref <309>: DATABASE ENTRY DATE: 2001-12-06
cggctacgctcccggggtggcacggggcatggcgccacgcgccagggtggccgtgtacaaggtcctgttcgacgagggcgggtacacgacggacatcgtcgccgccatagaccaagccatcgcagacggcgtcgacgtgctctccatctcgctgggcctcaacaaccgcccgctccacaccgaccctgtggccatcggctcgttcgccgcaatgcagcacggcatcttcgtgtccacctcagccggcaacgacggcccgggcctctccgtcctccacaacggcgcgccgtgggcactgaccgtcgccgctggcaccgtggacagggagttctccggcatcgtcgagctcggcgatggcaccaccgtcatcggcgaatcgctgtacgccggctcgccgccgatcacccagagcactccactcgtgtacctcgactcctgcgacaacttcaccgccatcagacgaaaccgcgacaagatcgtgctgtgtgatgcacaagcttcctcctttgctctgcaggttgcagtacagttcgtgcaagatgccaacgcggccggcgggctcttcttgaccaacgacccgttcaggctgctgttcgagcagttcacgttcccgggcgccctgctgagcccgcacgacgggccggcgatactgcggtacatccagaggagcggcgctccgacggccaagatcgcgttccgggcgacgctgctgaacacgaagccggcgccggaggcggcggcgtactcgtcgcgcgggccggcggtgagctgcccgacggtgctcaagccggacatcatggcgcctggctcgctcgtgctcgcgtcgtgggcggagagcgtggccgtggtcgggaacatgacgtcgccgttcaacatcatctccgggacgtcgatggcgacgccgcacgcggcgggcgtcgcggcgctgctcagggcggtgcacccggagtggagcccggcggccatccggtcggcgatgatgacgacggccgcgacgctggacaacaccggcaggtccatcaacgacatggcccgggcgggccacgccgcgacgccgctggcgatggggtccggccacatcgacccgaacagggcggcggacccgggcctcgtctacgacgccgtcccgggtgactacgtcgagctcatgtgcgccatggggtacaacctctcggacatcagggccgtgacgcagtggtcgacctacgccgtgaactgcagcggcgcgtcgtcgccggacctcaactacccgtcgttcatcgcctacttcgacaggcgcagcgccgccgccgccgccgcggagaccaagacgttcgtcagggtggtcaccaacgtcggcgccggcgcggcgagctacagggcgaaggtgaagggcaacctgggtgggctcgccgtcagcgtcacgccgagcaggctggtgttcgggaagaagggcgagacgcagaagtacacgctggtgttgcgcggcaagatcaagggcgcggacaaggtgctgcacgggtcgctgacgtgggtggatgacgccggcaagtacacggtgaggagtccgattgtggcaacgactttgagctcaacacggctgtagactcttcttttcactcttgtgtactgtagcgtgcaagttgattcacatatctgaagttctgaacatgttgttcgtctctagctgttgggcaaataatgcttttggtggttagttagtgc

SEQ ID NO: 5080 - DNA, 1297 bp, Oryza sativa
  ref <308>: DATABASE ACCESSION NUMBER: AK062272
  ref <309>: DATABASE ENTRY DATE: 2001-12-06
cttcctgctgttcagagcaacggtagctgacagtgacggagttcagcagcttcagcaatggcagcagcagcagctggtggtggtggtggtggtggtggtagcggcaggttgctgagaggagcaaccgcgaaggcttttcatggagacggcagcagccatcatcgtatgatgccatcgtcgtcgtcttcggtggcggcaggcggcggcggcggcgtggctgggccgtgccgcatcccgtccctgaagttcccgtcgctgtgggagtcgaagaggcagggcggcggtgtcggcagccgcgcggcggagcggaaggcggcgttgatcgcgctgggagccgccggcgtgacggcgctggagagggagcgcggcggcggggtggtgttgttgccggaggaggcgaggaggggcgccgacctgctgctgccgctggcgtacgaggtcgcgaggaggctggtgctgaggcagctcgggggcgcgacgcggccgacgcagcagtgctggtccaagatcgccgaggccaccatccaccagggtgttgtcagatgccagtcgttcacgctcatcggtgtggccggatcactcgtcggatcagtgccatgctttctcgagggatgtggtgcagttgtgagatcattcttcgtacagtttcgtgccctgacacagacaattgatcaagcagagatcataaagctgctgatcgaggcaatagacatgttcctgatcggcacagctcttctcacgtttggcatgggaatgtacatcatgttctacggctcccggagcattcagaacccaggaatgcaaggcgataattctcacctgggatccttcaacctaaagaagctgaaagaaggggccaggatccagtcgatcacgcaggcgaagacgaggatcgggcacgccatactcctgctgctccaggcgggcgtcctcgagaagttcaagagcgtgccgctggtcaccgggattgacatggcttgcttcgccggcgccgtgctcgcctcctccgccggcgtcttcctcctgtcgaagctgtcgacgacggctgcacaggcacagcgacaaccacgcaagcgtacagctttcgcatgaacacgtacaggaattgccttatagctccgattcataattcatttattctttcatatcaagattaggaatagcaaaaaaaaatgagttgcaaagtgtgtgtttttatagtattctctctttcttcacttgtaaagagggtacgaagtagtttgtacagagtgtcaataaagcctctcgggggaagaaagaaatctccaattcggat

SEQ ID NO: 5081 - DNA, 1260 bp, Oryza sativa
  ref <308>: DATABASE ACCESSION NUMBER: AK062273
  ref <309>: DATABASE ENTRY DATE: 2001-12-06
gtctcctccgctccttgcgacaagaacagggggagggagaggcgccgatccccatctgctcgagcaaagcagcggaggggaggggatcctgcagatctggaagaagctcatctcttaatttcagagagagcctcaaccttttgatacaagagtaacagtattgggggttcatctgaacccccaaatgtcccaagttggatccgcccctgagacgatggatctggagacggagaatcgtcttgcttctttacttctcgaggaggcgaggaggttgcaggcggaggctgacagggaaggtgttcacgcatatctgcgaaagcccaatgtaaggcgccgtccgaattcgcgcttccttacggccacagttcgtggagttcagcaagcgaaccgtgttgtggaggtcaatgaaatgtggcgtgccagagagaaggaacttgaactggagtctaagatgaaaaggagtagaggtcttggtgacgccagaggtgaaaaacgcaaaagtgacttgagaaaccagagttccagtccaagggttgaagaagaaggcatagcttataacagttcatattcggatcaggaggatggtctaggggacgatgacattgagaagtttcttcattcgagggtgaagcgaggtcgaggggccgttggttctaggatggatgagcctggtccataccttaatgttgcatctcgtagtcaagagaacgaacctaatgctgatactcaggtggaagaaaaatgggaacgaagagtacaaggcccggagaaaccagtgtctttgagatcaagatcacctgatgactattggcgtagggaagcactagatggagaaccttccagccctgaactccacaagaaaaaagagaagaagaaggaaaagagttcagagaaaaaggacaggaaagagagaaggaagaaaaaagacaagaagaaatctaagcatcgccaccaccaccatcacaaaagtcggcaaagggagtgattgttctgcttgctgagcataaaaaatgtacacaagaaacatgttagcttctaattgctactgttacttctcacttgaaacatgttgtaccaaaaacttgatatcgtgtggaatggagaactgttcttctcacacggagtgttgatacaaagccatatgttagattttagtgctctcgttggtcttgtgtatttattatcatgatgactaaatcacaccctcgttaattaggaataacgtggttttggtagctaaatgttacagcttccaatctt

SEQ ID NO: 5082 - DNA, 2661 bp, Oryza sativa
  ref <308>: DATABASE ACCESSION NUMBER: AK062274
  ref <309>: DATABASE ENTRY DATE: 2001-12-06
tttttccggtgagtacagtggaggccatggcgacgatgaacaacacgctgagcgccccaatcttgcgcgacacagtgtgcgtgccgagcgccccgacgacagcgccgtcgaagctcgtggcggccatggatggatttttttcctactattgagtcttttcttgatcccatctgttactaattcattttgttaatggtttgcatttgcagcacctttgcagtcctgcagcaggtgcgaatgtttcaggtggtagtggctctagttctgttctcactagagctctccatgctgctcgagcaagaaagatgtatcagcggaagcagctagctgatctgttctcagatattggtgaccagcagaaagagctagtgaggcaaatggggtttgacgggttgctttccatgagactgactaaactgaacaagcaatttggagcatggattctgtgcaagctagacccatcatcaggtaatctgtttgctggatctaaacatgaaatttgtttgacctgtgaggatgtcagcttacttttgggaatcccttgtggacggaagcagattttacctgcaattaaaaacgaggtaaaagatgttaaggcttatatgtgtgaaatctttgagaaagattcatttgacggaataacaattgcaacgattcagaggattttggagaaaaaatttaccaggacaatgactgttcacgaacagattgtattcaagactgcttttataatcttcgttgtaaccaaattcttggctcctcaatctgttaacaatcacatatctataaggtatatgaaggctttggttgatgtagaaaatattcacaagtacaactgggcagaatttgttttgcatgagattaaagatgcagcagcagcactgcaagacaaaatacgccatcgaaaaagcattggttacatcaatggctgcattatactacctgagcttttttatctgcaccatctggattttgggacggacactcctgggcatgaaaacatttcaaggattggcgtgtacaatgactccatgatagcagaattcattgacagggatgtaattctcaagaaccggaaacctttccctgcgtatggaaagatgaagctgcgtaaccgacatgttgaaaaatgcaatcttggccatcctacgggtgcaacagaggctgcccatgtgaatcgaagcttcgacacctgaacggacatcgagcccccaagctttgatctaggtattacacaagatatcgaagatgcaaacatggtggcatgtaccccaggtcatgacatctccaaggtggttgaagactctgagaaagcacaagaactcaaagcacataccccagatcaggcaatctcgaagttagtacaagcctctgacgaagctggagaggataatgcggtgtagaaaactcccttttctcagagcggttaccgccaaacaaaacttagtagtttctctccgcactctttgctaaaagagacgagtggtgcgaggatttacatgcgtgaggagtacgcatgtacaaagttcccacctaaatccaagaggagaattatcggaggtccttctgatatcctattcgatcggccaaagaggtctattaaaccaagccgttcggtgaaatcaccatttctgagcaagcaacactctttcgtcagacatgacttgaaggcacttgatgatttatacacctatgtaacttcaatcactgatgaagaagctgttaagaaaatttgggttcacatctctcaacctgtccctatgtcattaagcctacatgacatacagcaggctattcggctagacactcaaatgcaagaagaaacattcaatgttgcagttcaagttttggcatcatatgagatacatagatttggaggggcatatttcgtaggctggagacatttcttaaaccaggattttgcaatgtttgcaactgctagtgatgacctatggaacccagaggatcatctaccatcattcaaagatgactccctgataccatatgacctaccaagttgccacctgatatttattccactccttcaacctctgcactattctctttacgcatttgatatggggaaaaacaattatgcatcctcgacccactgagagacgcctcgaaaagatcggaggatactgcagaaagacactccaaaacaaagattcacatttcaaatgctctgaaggagtgcatgaatcttgcatttccggattgggacgaggatataccaaactgggtttctgagttcccttcgaccataccagctttaaataacaggatcaaggaaatcttcgaaaggagtttctgtccaacttgctgtcattcaagaaaaacgaggctattctgccggacttcgtcactcacggcctaaagttatctaagaagatatgagcatgttatgcaagcaagccagaatagttgcagcatttttctttcgaaaatttcttagttcagaataatttatgtctggtataactgtattcaaggctatatgtacccagctattctttttacaaattaaggattctgtcattatccttccaaacgtcataaatccagggtataccaaaatcaaatccatgttcatttaagggttaatttgatccatgtcactgtaaatttggctattcagaaaaatgccattacaatttgcct

SEQ ID NO: 5083 - DNA, 1404 bp, Oryza sativa
  ref <308>: DATABASE ACCESSION NUMBER: AK062275
  ref <309>: DATABASE ENTRY DATE: 2001-12-06
tcaataggccaatggattcatcagggagaaacagccagcagcaattgcttaagcccagggttgacgctgagaccttgcagccttctcactggctttcagatccacagaatgaaagaaagggagagctttctcttcattatgttacacttgatgatggtggagaagcattttcacttctaaacagaaatctgcccatatatatgcactgcccacattgcaagagctcagataggaagggaaatcaagatgcaaaggttgctgctgctgtgtcacaacttcaacggatttttattgtcacacctgatttccctgttctgctggcaagctgcccagttgtacagtttgaggcctcatgtttgccttcaaatgcttctgaccatgatcaacaaggatcgttcagtcttggttgtcgagttgtccttccacctgagagctttcttaccatgagacttccatttgtctatggtgttgagacaagagatggaaatacagctcccctgaaataccttgaggaacaaccagaactcacagcttggcttgttggaggcacagctttgcagattgtatcagtagggcatactaatgagaaagaagcaccactgtgaagtgcgaaacgtgggctcttaagatttattcgttttggtgtatcctatttttgcattcagtgatgggcaattggttccagcattgaatttcaggattccggcaagtgtaatggctcatgatgtttacatggaggtctcgcctctcctgctggatttacgatgctatgctattgatacagctctagcttccttttgcattgagaaacaggagctctcttgacaagatgaatgatgcacaatggatgcattggagtgagctggtgatgcagggaactggacatgtacattaataggtgtcagcctttattggagagatgaacgctccaggttggcatggcagcagccccttcttgtagcctggaggttggagaatgttgaaactggaaggaaacgcatgaaccagtcctgtttgacaagtgtaaaggcacagaaagaaagtgacgagatcacagttgagccaagcctgtgcgacgatgcctgctttttcttcacctgcaaaacaaccgtttccacgtgatctgaagaatcattcattccagaatgctacttattgtcactcactgttcctggcctgacacgttagttatcttaactatggcaactcctatactgttttgtcagtcctggttgtgttttttttcccactccatcgtctagtcgtcactgaaggatcaactgctttgacaagcagatgtgctgcctaatattttcttggtcgataactgacctggacatgaacactctcctgcctaatcgaccaaagtcgaagtaaatgcaaacagcagctttgattgagaag

SEQ ID NO: 5084 - DNA, 2253 bp, Oryza sativa
  ref <308>: DATABASE ACCESSION NUMBER: AK062276
  ref <309>: DATABASE ENTRY DATE: 2001-12-06
actttccaatacaatactactccatttaccatcccaaccaccactttcctcttcctctcccccaacttcctcggttcctcatccctgtacagaacacaaatcaatccggcggcaacagtggtgacgctcgcgggaggaagcatcagtcgtaggaggaggaagcatcagttgcaggaggccacaacggcggcggcggctctcgcggaggcatgcggatctgacgggggaagcggtggcagcggtggcggcgctcgcgggattcggcgccggctgaggcggcagtcgcgggagaaggccgcggcggaggtggcagcgcttgccgaggaggcggcgacggtggcgacgtcgctcgcggaagaggcctgggcggaggcagtgctcgtgggtgtgcggggatttgatgaggtcggcgtctcacacgtaacggcggcggcagcggcgcttgtggtcggacctccatcggcgtgaagggcggtgctcacggcgaatcaccagcgacatcagctccgtgccctcttctcctttccatggcggcaaacaacgaagtgcattgaggagagaggagagttccagggaagagagatgaacactgcattttttttattccatatggccggtccttatgtataatgctagctcatccaaatgactcttatagagactatcttcacaatatatatggaccttttaggaggcttatgaccccctctatctctacattgctgatgcccttaacccaacaaccctttttcttgcttttagggcgttctctgctcctcaacggctcaagctcaacccaacctcccctcctccgtccagggtccagccaggcgaggcgattggagccatcggcggcgaggtgctcaccaatcgttcgacggaatgcctccaacaaaaagggccaagaaagcggctgcggcgggcggaggcgacctcatcggcgccctcccggacgcgatgctgcaccgcatcctctccctcctcccggcgcaggaggccgtgcggacgtgcgtgctggcccggcggtggcgccacctctggaggtccgccccaggcctgcgcgtcgtccgcgccgccggtcggccgccggcgaccgtcgaggagctccaggggttcgtcgaccacctcctgctcctccgcgggggctcctctctcgacacctgcgagctttccttcgatcagatccgcagacaagacattccccgcgtgaacctctggattcgtcacatggtcatgtgcaaagtccgagtgctcgtgcttcacctcaatccttattgtcatgaattggacgaactgcctctggtgtcgcagcacctgacgaggttggagctttctggtctgatcttaaacgacagcttcctcaatttctcgagctgcccggcattggattatctagagattgtccaatgttacttctcttctctgacaaagatcacatcgcagtcgctaaagcggctaagaatcattaaatgttttactggttcccgccctcatgtgcatgccacaaatctcatttcactgcatctggataccataacaaggactcctgtgcttgagagattgccatcattagtgaaagcagacatcaaacttaatagtcagtgtcgcgatttcagtagttttgatgacttttctgggggttgcaatcatgaattctgcggcggttgtcgtggcgtacaagctgagaactgcgtgcttctgcgaggtttatcagaagctaagaatctggcattggtagctgaaactaaaatgtttgttttcagaagagatttgaagtggtgccctatctttaggaatttgaagactttgttactcaatgaatgctggtgtgtgctttccgatttgagtgcgctagcatgcattcttcagcattcacctgttttagaaaagctcactcttcaacttttttcgatgggacctaaacataaagtgaaaatgaagggaagccgccatccatcgggggtgtcagctgcaatgttaaaatatcttgagattgtcgaggtcaaatgtgaagtggttgatgagagtgttctcgatgttttgaagttcctaagctcacttaacatatgtaagataactactggcactcatgccttttatattcattcgatttgcatttaaatgtggaatagaaaagcaagcaactaagaaactcccaggttagtaaaagaagcagtgaatttttgggattctaaataagttaacaattgtcatatggaaacatatatatagataagagtctttcatgttttc

SEQ ID NO: 5085 - DNA, 1241 bp, Oryza sativa
  ref <308>: DATABASE ACCESSION NUMBER: AK062277
  ref <309>: DATABASE ENTRY DATE: 2001-12-06
gatcctgccagtagtcatatgcttgtctcaaagattaagccatgcatgtgcaagtatgaactaattcgaactgtgaaactgcgaatggctcattaaatcagttatagtttgtttgatggtacgtgctactcggataaccgtagtaattctagagctaatacgtgcaacaaaccccgacttccgggaggggcgcatttattagataaaaggctgacgcgggctccgcccgctgatccgatgattcatgataactcgacggatcgcacggccctcgtgccggcgacgcatcattcaaatttctgccctatcaactttcgatggtaggataggggcctaccatggtggtgacgggtgacggagaattagggttcgattccggagagggagcctgagaaacggctaccacatccaaggaaggcagcaggcgcgcaaattacccaatcctgacacggggaggtagtgacaataaataacaataccgggcgctttagtgtctggtaattggaatgagtacaatctaaatcccttaacgaggatccattggagggcaagtctggtgccagcagccgcggtaattccagctccaatagcgtatatttaagttgttgcttataggactccgccggcaccttatgagaaatcaaagtctctgggttccggggggagtatggtcgcaaggctgaaacttaaaggaattgacggaagggcaccctttgccctggtgcaccccaagttcccaccgacgtcaggcaacaggtggaggatcacggaggacgacgactacgtgaagctgtggttccacgtcggggagatagacagggagaagctcaaggttcggatcgagcacgacacggtgctcctcgtcagctacggcggcgccggcgacgagacgtcgacgccggcgaactccctcgacgtgcgcctgctgctgccgaacaagccgtacgacacggccaaggtcgaggccgagctcaccttcgggacgctgctggtgaccgtcgccaagcgcaagcccctgcaggggcgtgacaaggtcggaatcccgatcactccggctccaagcaatgagaaaaccactaccgccaccggacaaaccggtagcgagacctagctatatatctaatcttaaaagtggcaaatagttaaatgtcgctcagcggagagcttagttacgagatagatccatgtgccgtcgatcaatcttgctccgagaaataaaaatgggtcaataatcttgttct

SEQ ID NO: 5086 - DNA, 674 bp, Oryza sativa
  ref <308>: DATABASE ACCESSION NUMBER: AK062278
  ref <309>: DATABASE ENTRY DATE: 2001-12-06
gctagctccagtgacagctcactcctcttcttgctgctgagggcttagctagccagtccacctcgtcggtgtgtgtcggtgtagtctagcagctgcggcgggaggaggagttgccggccggagatggcagcggcggcgcagcggcttgtcgccgctgtcgtcgtcttggtggcctgcctggcgttgccggcggcgcgggggctgaacatcacggcgatgctgaacgggtacccggactacaagatgttcaacaagtacctgtcggagacgaaggtgtgcgacgagatcaacgcgagggagtcgatcacgctgctcgtcctcggcgacgggccaatgtcgacgctcgtcctcgacgccgaccagtcgctggcgggcatcaagaacgcgctccgcctccacgccatcctcgactacttcgacccgaagaagatccgtggcctccccgacgccggccgacgcgccgtcgaagccggcggatcacaaggaaatgaaggcgtcgtccgccgtcgcgttgcggtcagtagtgctcggcgcattagccgcggccgtgtgttccttcgtgctgctttaagcacaagtttttttttccctttcttccatgtccagtgccggtgattgtgattgcacgagctgcattgccaattattcctctgtataatgcgagcaaactgtgt

SEQ ID NO: 5087 - DNA, 2219 bp, Oryza sativa
  ref <308>: DATABASE ACCESSION NUMBER: AK062279
  ref <309>: DATABASE ENTRY DATE: 2001-12-06
tgcaataatcttcacccgtggtgaaggcctgcaaaccatagacatgaaccaggataactatatggaagaagcacttaaaatgagaaatttgcttcaagagttccttacagaacatggagttcggcgcccatctatacttggagttagggaacatatttttactggcagtgtctcttctctcgcatggtttatgttcaatcaggagcatagttttgtgactattgggcaacggctgcttgcaaaccctctgaaggttcgattccactatggccatcctgacgtatttgataggatttttcatctaacaagaggtggtgtcagtaaggcatcaaggagtatcaacttgagcgaagatatttttgcaggctataattcaactctccgtggaggaaatataacacatcatgaatatgtgcaagttggtaaaggaagagatgtagggttaaaccagatctctaagtttgaggctaaggtggccaatggaaatggagagcagactcttagccgtgatatctaccggcttggacaccgcttcgatttcttcagaatgctttcatgctacttcactactgtgggattttatttcagtactctgctgacagttgtcacagtttatgtatttctgtatggacgcctttatcttgctctcagtggacttgaagaagggctcttaacacaaaggagatacattcataaccacccccttcaggttgctcttgcctcacaatctctggttcagctaggttttctgatggccctgcccatgatgatggaaattggccttgaaaaaggatttggtcaagcactaagtgaatttatcatgatgaacttgcaattggcagctgtgttctttacgttttcacttggcactaagactcactactatggacgaatgttgctccatggaggtgctcagtacagagctactggtaggggctttgttgtctttcatgctaagtttgcagagaattacaggctttattctcgcagtcactttgttaaaggcattgagttgttgattctgctcatcatttaccaactatttggtcaatcttaccgctcaaccattgcctatatttttgttacattctctatgtggttcctagtgttgacatggctttttgcacccttcctgttcaatccatcgggatttgagtggacgaaaattgtggatgattggtctgattggaataagtggatcagcaatcgtggtggcattggggtgtcaccagacaagagttgggaatcctggtgggagatcgagctagagcatttgaaatattctgggacaattggactttttgttgagataattttgtccctgaggtttttcatataccagtatggccttgtttaccacttaaatatcacaggcgacaaaagtatattggtatatttaatttcgtggctcgtgattttggtggtattgcttgttatgaagactgtatctgtcggaaggcggagatttagtgcggattttcagctatttttccgtctgattaagtttatgatatttgtttcgttcatcgccatcttgattgtactgatagcaatacttcatatgaccttacgagatatatttgtgtgctttctggcattcttaccttccggatggggaatattgctgattgcacaagcttgcaagcctcttgctcggcgagcagggctatggggatctgttcgtgcccttgctcgggcatacgagataattatgggagttcttctctttacaccaattactattttggcatggtttccctttgtgtccgagtttcagacacggatgctatttaatcaagcgttcagtagaggactgcaaatctctcggattcttggtggtcagaagaaggagcgggagcggtcctctcgcaacaaggactgatcttctctacccattttgtgcttgtggtcttcaagatttaagtattttggcgtatgtatgttgtaaatattccacagggcatattgtatctattgtagttacaacttcgctcaaacagtgaaatatatcctcttacttgtaacataagatgtataattggatagtgtagtgtgtaagaaacgccagcatgtcaattccgtgtgtaaataccgtatttgtttatacgacctttagcaatgatcagggttcaggacattagttcttaattacttttatggagttcatgtgtataaatttgtattattctccacagataaatagttaaatctgtactaat

SEQ ID NO: 5088 - DNA, 1651 bp, Oryza sativa
  ref <308>: DATABASE ACCESSION NUMBER: AK062280
  ref <309>: DATABASE ENTRY DATE: 2001-12-06
actatagaccacaaccgctccagagatcagaggaatggatgaggcagagagccaagaggctcaagatgaatgtccgcacactattctggacttccaatgatgtggttgtaaggatgaacttagtggatgcagtccaacgtctaggaattggtcacctcttcaaagatgagataaggcgcacactaaatgatatacaccaaagtgaatttactagctctagcctccatgaggttgctcttcggtttcgcttgcttagggagcacggcttatgggtatctccagttacattcaacaaattcaaaggtgacgatgggaggttcatgaatggaatagctgatgaaccaaggggtttattaagtttatacaatgcagcttacctccttgttcatgatgagccagaactcgaagaggcaatctctttttctaggtaccatctaaaatcaatgatgcagggcaataacctcaaacaccctttatctgaccaagtcaagcgtgcccttaacacaccattaccaaggacatccaaaagaacagagacattgcattatctttcggagtatggacaagaggaagggcatatgtcaattcttttggatcttgcaaaggtggaatttaaccttctgcagggggtccacttgaaggagctcaaagctatttctgagtggtggagagaccttaatgaacatgtggagctaagttatcttagggatcgtgtggtggagagctatacatgttcacacatgttgttctatgaagaaggcttagcattcacacggataacttttaccaagataattgtactaattattatgatggatgatacatatgattcccatgctaccatccaggaatgcaggaagctaaatgaagccatacaaagatggaatgagagtgccgtctctgtcctaccagagtacctaaaaaatttttaccataaattgttgaataattttaaggagtttgagaatcaagtggtggttagtgagaagtaccgggttgctcatgctaaaaaagagtttcgaatactgtcccattattttctccaggaagctgaatggtcacataataattacaagccaagttttgaagagcagttggctttatctacaaagacttcaacggtgcaactattatgtgtgtctactacggtcggccggggtgatgcaataacaaatgaagcattcatgtgggcagctagcagtactaccgtgacatcatgtgcaaagataatgcgtttcatgaatgacattgcttcatttgagcgtgggaagaacaaaggggaaattgcgagcaccgttgagtgctacatgaatgagcacaacatcataagtgaggtggcctttgccaaactcgattcactggtagaagatgaatggagaaccatcaaccaagcccgttgtgaacatcatcagctactcccggtagtgcaacgagttgtgaacttggctatttgtataatgttcttttatgacaagagaaaggatgcgtacacattctccacacatctacaagagattgttaggaatcttttcatcaatcccattaccatgtagttccccttttagactgtattgtcaaatattatctatttttttttctttttacttttggagggatagatgaaacaaaatctatattgtatgattttttc

SEQ ID NO: 5089 - DNA, 468 bp, Oryza sativa
  ref <308>: DATABASE ACCESSION NUMBER: AK062281
  ref <309>: DATABASE ENTRY DATE: 2001-12-06
atcaacgaccggttaatgatggcggagcgaggcttcatcaaccgggaagggctcgacggtaggccgtggtacaaacatatgatatacgcatcgtctgaccaagacgactggggcaccaaggcattccctggtatcgtgtcggccatcgacaaggcaaataagctcaacacaaccgaatcttggcagctcctgcagcatgaaatttacagggctgcaagggctgtgtccaaggcttcagctgtccttgatggtagactaacatgagagtgcataaattaagatcactacacgattccattttgtgcagtttaaagtaccagataccagctctacacgtagttttgtgcagtttaaagtaccagataccagttctacacgtagttacgatgatatgatatagttacacaagtacctgtgaagatactgaagaactatcctcagttagtatcataattattgatgttaatg

SEQ ID NO: 5090 - DNA, 1677 bp, Oryza sativa
  ref <308>: DATABASE ACCESSION NUMBER: AK062282
  ref <309>: DATABASE ENTRY DATE: 2001-12-06
agctagcaagcctccttatttttgcacttgcaaactgcattgtttcacttgtctgcagctagtttcaatggctgccatcaaagaggaatccgactacgacagtagccggtcttcgctgacggcgccggactcccgccggagctggatcagtgacatcggtagctccagctcggtctcggcgcgctccttcggcggcgacacaccggcgtcgtcatgccggtacaagccccacaaggcgaaccaggccgagtgggaggccatccggcgcctccgtgccggcgccggccgcgtcgggctggagcacttccggctcgtccgccgcctcggcagcggcgacctcggcaacgtctacctgtgccggctgcgcgagccgtggtcatcgtcgtcgatgacgacgacggcgggcggttgcctctacgccatgaaggtggtggacaaggacgcgctggcgttcaggaagaagctccggcgcgcggaggtggagcgcgacatcctccgcaccctcgaccaccccttcctgcctacattgtacgccgacttcgaggcgtcgcactacgcctgcctcgtcatggagttctgccccggcggcgacctccacgtcgcccgccagcgccagcccggccgccgcttcaccgtctcctccaccaggttctatgtggcggagactgtgctggcgctggagtacctgcacatgatgggtgtggtgtacagggacctcaagccggagaacgtcctggtccgcggcgacggccacatcatgctctccgacttcgacctctccctcaagtgcgacgtcgtcccgaagctgctccgccccgccaggagcgccgccgccggtggcaagccgccgctgccgccgccgtcgtcgtgcgtgccgccgacgatccagccggtgctgtcgtgcatcttccgcggcgtgcacaagtgccatcacgccaaggagtgcgccggtggcggcgcggcggcgggtaacaatggcgacggcgacggcaacgacgaggaggcggagaccgagacggcggagcccgaggtggtggtggtggagccggtggcggcgcggtccaagtcgttcgtgggcacgcacgagtacctggcgccggaggtgatctccggccagggccacggcagcgcggtggactggtggacgctcggcgtgttcatgtacgagatgctgtacggccggacgccgttcaagggcgagagcaacgagaagaccctcatcaacatcatcaagcagccggtcaccttccctcgcctcgccggcgccgccgccgccggcgaatgggaggagatgaagacggcgcaggacctgatgttgcagctcctggcaaagaaccccaagaagcggctggggagcaccatgggctccgccgaggtgaagcggcaccccttcttcaagggcgtcaactgggcgctcgtcaggtccgtccggccgccggaggttcctgcgccgccggcgccggcgccgaagaaggtgatgacgatgagcaagaaggagcggcaagagccgtacaactaccgaccggaaaaccacttcgattacttctgatcaagtagctgccatgcatgagcatgatgcatgatgcatcttggttaattaattaattaatcacttgtaagaggggagattagtagtgtacatagagtgctaatcaatgagtaaccagtgttagtttc

SEQ ID NO: 5091 - DNA, 1583 bp, Oryza sativa
  ref <308>: DATABASE ACCESSION NUMBER: AK062283
  ref <309>: DATABASE ENTRY DATE: 2001-12-06
aaaaaaaaataaacttcagctcagaattcagtataatgagccaagagacgccggcgcggcgttcgctgccgcacctcctcctcgtctccgcaccgttacagggccacgtcaacccgctcctctgcctgggcgggcgcctctcttccaggggcctcctcgtcaccttcaccaccgtaccccacgatggactcaagctgaagcttcagccaaacgatgacggcgccgccatggacgtgggaagcggcaggctgcgcttcgagcccctgcgcggcggccgcctgtgggcacccgccgatccccggtaccgcgcccccggtgacatgcagcgccacatccaggacgccggtccagctgcgctcgaggggctcatccgccgccaggccaacgccgggcgcccggtgtcgttcatcgtggcgaacgccttcgcgccgtgggcggccggcgtcgccagggacatgggcgtcccgcgcgccatgctgtggacgcagtcctgcgccgtcttgtcgctgtactaccaccacttatactcgctcgtggcattccccccggccggagcggagacgggtctcccggtccctgtccctggcctcccggcgctgaccgtcggcgagctcccagcattggtgtacgcgcccgagccgaacgtctggcgccaagcgctcgtcgcggaccttgtcagcctccacgacacactgccctgggttctcgtcaacaccttcgacgagctcgagcgcgtggccatcgaggcgctccgcgctcatttgccggtggtgccagtcggccccctcttcgacaccggcagcggtgcgggcgaagacgacgactgcgtggcgtggctggacgcgcagccgccgcgatcggtggtgttcgtggcgttcgggagcgtcgtcgtcatcggccgtgacgaaacggcagaggtcgcggagggcctcgcgagcacggggcatccgttcctgtgggtcgtgcgcgacgacagccgcgagctacacccgcacggcgagagcggcggcggcggcgacaagggcaaggtggtggcgtggtgcgagcagcggcgagtgctcgcgcaccccgccgtcggttgcttcgtgacgcactgcgggtggaactcgaccacggaggcgctggcggcgggcgtgccggtcgtcgcctacccggcgtggtccgaccagatcaccaacgccaagttactggcggacgtgtacggcgtcggtgtccggctcccggtgcgtcgacgaggtcatgagcgggccggaggcggaggcgatgcggctgagggcgcgggagtggagcgacaaggcgagcgcggcggtggctaacggcgggtcgtcggacatgggaatccgggacttcgccgatgctctgctgtccttgtccgtagaacatgggtgctgacttgtcagcgctctagcggcacatcgtacaactgtgcatcactgcgtgtcaaaataagctgtgtttgtacgtaacaagttgggattggttgcgtacatgtggctgtatatcacttcctaatcctcccatattttcgcgtttgcatggtgcataaattaaggcaaatatttgtggactccggcagagttcgt

SEQ ID NO: 5092 - DNA, 1403 bp, Oryza sativa
  ref <308>: DATABASE ACCESSION NUMBER: AK062284
  ref <309>: DATABASE ENTRY DATE: 2001-12-06
catttcaagtcgtgaacagcgggcaaaaaatgtctcaagtactatggagcgggaaaaagcagagcccctcaatcaagctagtgaactgaaaaaagcacaagctggtaagacgattggatgcccgaagagaaaaaggagcagcaagaatgctggtgagaataagaggaaaaataagggctttccgagttctccaaatgaaggactctatcttaggcgtagcaagcgcttgacgaaacaaccagaacaaccaataaatgatgatccagtccagcagccagctgcttctccaaaccaatataattctgatcctccagacagcagtacaaaaagccaaaaaagcttcaggttctcgtagctccaatagtcatgcagagtcagaggaggaagatgctacagaagagccaaaggacaatcagacagaaaaggtaaatgaggacgaggaccctttactgtggaaacccttcccccctgcatggatgcatccgaattggtgggagagattgtgtgaatattgggccaaaggagaagtcttgcagatgtctctgaagtataggaagaatcggtttgttggaggtcgtgctcatcacacatcaggttctcggagctttgccatgcaacggcagcttatggtcatagagaatggtgggaagccagtgtcagaacttgagatattcaacaagacccataagtttaatggtggcacaggagaatttgtcagtgagaaagcgaaacggattgtggagggtttcaagaagcgaatggaggaggctggtgataaacctgcagatcccgatgctgcatggatacagcaggtggggggccggaaccgtgggaggtactatggactcactggcaccatcgacaaggccaaaatcgcggagatagcaaagtccatccctggtaaaaggggtcagcagaagttctcgcaggaggaggtccaacagatgatcaatcatgctctgcaaggtttaaatcaatcctgggaggagaagtttaaatccctggagcaaagtgtgcgtggtgcgccattgttaggtgttgatcatgagcatgcccctgggtcttcggcagctggaggagatgttcaacaggaccagtcaaaacatcaggacgaatcagacaaacagcatgttgaaaggcgtcaatctgcgagacaccacgacgacgatgacgacgacgatgacgaagattatgaggttgaggaggaggaagtggtgtctacaagcgattgatctgcctcgccgcgtagaattttggccatgtaatatataaacctgcgtctaatgctgtttccctgtccctggtcttttggagagatgctgaaatgcactgccagcagtggtatttcccgctgctacgctgactccgatcgatagtgaaactcatctcttggctcttgaccc

SEQ ID NO: 5093 - DNA, 880 bp, Oryza sativa
  ref <308>: DATABASE ACCESSION NUMBER: AK062285
  ref <309>: DATABASE ENTRY DATE: 2001-12-06
agccgccgccaccgccgccgccgccgtcctccatggccgacgaccgagtagccggcggcgcaaccccgccgccacctcctcctccccctcctctcgacgcctccgcgttcacgcacaccccgtactactgtgaagaaaatgttcacttgctatgtaaggaactcattagaagtggaatttctgatcctgctggcaccaacttatatgctgttttcatatcaaatgaggaaaagaaggttcctctctggtatcagaaagcaagtcatagcggtgatggttttgtcctgtgggattatcatgtaatttgtatccagtctaggcgaaaaaatggagaagtacttgatcttgtttgggatttggactccagccttcctttcccatgttcattcatccagtacgtttctgatgccatacgaccattatcatttggcaactctacctacaggaggcttttccgtgtgattcatgctcctgtatttcttcgatcatttgcatctgatagaagccacatgaaggatcatgcagggaattggattcagttgcccccaaagtatgaatcaattgttgcagaagatggaaccaccaataatctgaatgagtacattacgatgtctatggatgatgtgaaggacctggaaagtatggctgatgatgtctactccagcaaacatggtgtggtgataaatgaaactatcctgcctgaattcttctctcgcttgcctggatgactcaacaggagctatctatcccgattcatgaagctattttgttgtccaatgagatttatgaaccaagtccagagttaaaatgatgttgtccaagcaattgttaacacaatgtttacacagttttgcttgctgagtaaatcacacttgcaatg

SEQ ID NO: 5094 - DNA, 1157 bp, Oryza sativa
  ref <308>: DATABASE ACCESSION NUMBER: AK062286
  ref <309>: DATABASE ENTRY DATE: 2001-12-06
atgataacatggagcaagcacagcttgtgaagtacaagcttactgataactcgtggtggaaacaagttgattacattctttctttcactgagcctatatattcgatgatgcgcgtgacagacactgaagagccacgccttcatcttatcaatgaaatgtggaatactatggtcgagaaggtaaaggctgccatttataagcatgaatcaagagagcctgaagaggagtcagcattttactctgttgtgcatggcattctagaagattggtggagcaggagcaaaactccgctccagtgtttggcgcactcactaaatccaaggtattacagtgacagctggattaatcaagctgctaatcgtctacccccacatagagatgctgagatttctcgagtgaggaataattgctggaggaaattgttttttactacagacaacttgagaactgtcaagtcagaatatggagagtttgctcttctgggaacaaaacattttagcttgaattcaagagctgatagggataaacttgaccccaagatgtggtgggcgacccatggaacttcagcacaggcagttcagagtttggctttcaagcttctcagccaacctgtttcatcttcttgctgccagaggaactggagaacttacgattctattcgcgacatcgtgagggacaaactccgtcctaaatgggccgatgatttggtttttgtgcacaacaatttgcggcttctatcaagaagatcagaagaatatcatacagaccgagaggcaaggtactgggatgtaggagacgacaactttaaatcattgggtggtgctggcatccttgagtctgctaacctctctcttgatgaaccgtagttcgagcttgccatgatagaaaacatcgtgtgatgaagaaaaccaaatggaaatcaagacagaagcttagcttagctaagctacccatgcttcaacttgtctggcgttttgaactcccagataacccctgtaatcgagtatgttttggctaagaacatgcaagactagagctaggtagacttatgggatgtttggctgtgtaagctggatggtgctgttgatcaatgttggtggagggcaattgaactttctttacctggctaattggcagctaatctgccagatttttgc

SEQ ID NO: 5095 - DNA, 1272 bp, Oryza sativa
  ref <308>: DATABASE ACCESSION NUMBER: AK062287
  ref <309>: DATABASE ENTRY DATE: 2001-12-06
aaccaaactcagtacgtgcctgcgtacgaagcgacctagattttgacatggcggggcagcaggagcaaccggagatggcgccgcctccgccgcggcggcgcgtcgtgtgcgtcaccggcgccggcgggttcgtcggctcgtggctcgtcgagctcctcctctcccgcggctacgccgtccatgccacggtccgtgacccagacgatcccaagaacgcgtttctgaagcaactggagaatgctccggagaatctgcaactgttcgaggccgacgtgctcgactgcggctcactgacggcggcgttcgccggctgcgagggtgtcttccatctggccactccggtgccggaagaaaagatcgttgatccacagaaggagatgatggctcctaccgtggaaggcaccagaaatgtactcgaggcttgctcagctgcgagcgttcagaaactcgtcgtggcctcctccattgctactgtttgccttaacccgagctggcctcaagatatgccgaaagatgagacttcctggtcagacaagaagctctgcattgaaaatgaggattggtactctgttgccaaaatcgaagctgaagagatggccctggaatacggagagaaaaatgggcttcatgtacttacgatttgtcctggaattgtttttggcccaatgttgcagacagtggaaatcaacacaagcagcaaagtgctcctctatatgattaagggaggagacggccctcacgttatgaacaacaaattctggcccatggtagatgtccgtgatgttgctgatgctttacttctagcataccacaaggcagggccatctgagcggtacttatgcactctagaacagatggacctgaaacatttattggatctgatgaagaacatgtaccctaactacaattatgcagacaagatggttgatgtggattacaaggtcgaagtgacatcagagaaactgaagaatctgggctggaacccaaggaaacgggaggagacacttgcggacagcatcgagttctttgagaaggcaggccttctagatgggcgaccttgccggcttccctatttcgctgtccaggaatgaactgaagatggccttggtcccaattctcagctaattaatcttccccatttactagtatggatgcaccttgtaaaaaaagttaatgcatgttttttttatgtatcttgtactgatacttaggaggccggtatcatgtatacttacaaaaagttgatcatagctacagttaataccgattttt

SEQ ID NO: 5096 - DNA, 981 bp, Oryza sativa
  ref <308>: DATABASE ACCESSION NUMBER: AK062288
  ref <309>: DATABASE ENTRY DATE: 2001-12-06
ctccttgatcactccgagcaattggtaagagttccataatggaaatcctacctcgacagctactgctcggtgtctgcggcgccgtcgtgctggtggccggcttggcgcatgctgcgtacgcagggacagcgccggtcgtggtcggcttggccatgtgctcgggttgcaccaggaagaacatgaatgccgaggcagctttcaaaggtcttcaagtggctgtcaagtgcaagaacagcaggggcgagtacgacaaaatggccgtggggaaggtggacaagtccggcgccttcagcgtccccctcgccgccgacctcgtcggcgaggacggcgtgctgaagcaggactgcttcgcgcggctgcacagcgcgtcgagcgcgccctgcccggggcaggagccctccatgatcgtcgcggcgcagcagcccggccacgacggcgcgaagacgttcgtggcgctcgccggcaaggtgcaccggccgtcggcggaatgcgcctccgcgttcctgtgcgatcctttccacaagcaccaccaccacatcgtcctccacccgcccgtgatcgttcctcccaagcatgaccatgatcactcgctcccgccagtccacgagcctccggtgaccgtgcccgaccacaagccggcgccggtgaccgttcccgatcacaagccgccgtccacgacgacgccggtgtacgcgccgccgaagccgaccccgatctacggccctccaacccagcagaagaacaagcactagaaagttcgatacgggctgtaaactgaaatgcatggtaacattcagtttcgccccgtcaggtcatgcggtttctaattctacccaataaagtttgtgaggacgatgattagattggcattgttgcgtttcattagctgggtacgtactacatagcattagattccatgttgctatgtatgacttctttgaagtacaatgtatgtaacgaatatgttgtcatgacttgtct

SEQ ID NO: 5097 - DNA, 745 bp, Oryza sativa
  ref <308>: DATABASE ACCESSION NUMBER: AK062289
  ref <309>: DATABASE ENTRY DATE: 2001-12-06
tggagatgaagattctgcatttccagtttccaaatcgtcacaattatcagaaaccgcaagttcagtctcagaggaaagtagtcatgttgagccagatgtacccaggccaccccgtccacatgtatttttgccatcgtacaacagtacaccaagggttactcccccagactcacctccaaggagtttcgcgtcaatatcacctccaaggcggcattcaatttcaattacatcaaggaatttgtttgatgacaggtcctcggcctattctggtcatagttcagtgacatctccatttgatgcaggaagtcacacaggacgaacacgagttgatggaaaagagttcttccgtcaagtcagaaaccgtttgtcttatgagcagttcagtgcatttctagccaatgtaaaggagttgaactcacacaaacagaccagagaggatacactaaggaaggctgacgaaatatttggtccagataacaaggacctatacaccatctttgagggcctaattactcgcaatattcactagaatcctgaaaagtcaaaactggaacatttcttgtaattaaaagcggtccaggtttttttacaggaattatgagaaaaatacgtttggtactttttgtatttcagtggctactaatttcagatttctggtgtatagtttttaaaatttattcttgatgttaatgtagaatctgtaaggtatggttatatatgtaatacaaatgaaaaaaattggaat

SEQ ID NO: 5098 - DNA, 1635 bp, Oryza sativa
  ref <308>: DATABASE ACCESSION NUMBER: AK062290
  ref <309>: DATABASE ENTRY DATE: 2001-12-06
gaaaaactatggtgtcaagagtagcatgcttgagtgcttaggaatacaacaatatttttagatgaaagatgagggttgaaaaatcattagtttacaaatgcagaactaccattttttctccaacccacctcactattttgctaatgacatgatgattggaggagggcagcgttgcaatcattcttgtgtatatattattggtatatacttttgacggatgatttcggtaggcgtattttatatatatatgcgatccttcattaccatatcagttcgaacagttgcttcccacccacataacctccttccctgcattgaaggtatatccaattaattcgcttaatttcctttactgtgtgttgccaattttcaacgtttttataatactaccatcagcaccactgggattctgcctgatggtttgtactggattgaactctaaaaaattttgacttatgcatttcagggttccaatggatagcaactttggggcctctcgaccgacatcgttgacaggatcagccggtgatcctccccctagagcgacacgtggtttgcggactacctccttcgatttgggaatggaaccgaggaggtgaacaaggaaggactcataggccttccttcggatatttgcgtgtcgtgcaaagggaatgaaacggacctcgaaaggctcatcgataccgtgttccccaacctaaacgataacctgacggacccaaactacatcacatgtagggccatattgtccactcggaatgagttcgccgatcgaataaacgtgaagatgattgagcggtttagatgggatgtgatgacatatcatagttttgaccgagcaaaggatgaccctcataactattacccgccggaattcttgaactctctaactccaaatgggctacctctgcatgtgcttaagctgaagataaactgccccatcatgcttttgaggagcattgacccagccaacgggctttgcaatgggacaaggctggtggttcatcagttcggaaaaaatgctattgacgcggagattgttgtagggaagcatgctggaaagagagttttccttcctcggatacctctatgtccttctgatgatgagatgttcccgtttcgcttcaagaggaagcaatttccggttagattgagctttgcattcaccatcaataaggcgcagggttaaaccattccaaatgcaggcgtctacttactagagcctgtcttctctcatggtcaaatatacgtcgcgctgtctagagcaacctctagaacaaacataaaaatactatcgatgccggtagaagacaagaaacaaaataaaaagtctaagcgtactggcgtgaaggacaatgagaagaaaggaaaggaattgtctaaacaggctgcaacatacacaaaaaatattgtgtttagagaggtcctcacatattagaaaaggtatattatgtgactaattaaccgtccacaatatgcttgcttaaattccattcttgctgctgagtgcttcttcacagtttagttcacgtatggctttgtatgtattaggtgttttctgaagacggtgaaataaatcacctataagatctgatctttggaggataatatcttatgttgaatattattatactg

SEQ ID NO: 5099 - DNA, 1555 bp, Oryza sativa
  ref <308>: DATABASE ACCESSION NUMBER: AK062291
  ref <309>: DATABASE ENTRY DATE: 2001-12-06
acagctgcatcggctgctgccgctcctcctcttcctcccattcttctacctcgccggcggacggcggcacaccaccacctccccgccgcgccggcgcgacgcgccctccggtggtctccccccggtcgtgctgctgccggggagcacctgcagctagctggaggcacgcctcacggacgcctacgtgccgccgtcgccgcaatgcgccgcgcaccaccacgaggccgacggccggtggttccggctgtggaagaacaccacggagctggacgaccccgtcgtcgcgcgcgccctgcgtcgccgaccagctccgcctcgtcttcgaccacgccgccggtgactaccacggcgtccccggcgtggagactcgtgtcctggacttcggctccacccgtgggttcctcgccgacgtgcccgccaacagttcagctcgccgagactactgtctcccatgaattgcgccaacaaaaacacatcgatcgtgacgagaaatactgtggtttgtacacgcgagcagagacctctgcatgggaaggctcgtcgaggcgttggagaaagtcggctaccgcgacggcgagaccttgttcggcgcgccgtacgacttccggcaggcgccagcggcaccggggaagccgtgcagggcgttctcgcggttccggcgtcagctccgggcgcttgtcgagcacgcgagcaggacgaacggggaccaaccggtcgtcctcgtgtcgcacagccagggcggctacttcgcgctcgagttcatcaaccggagccccatggcgtggcgccggaggcacgtcaagcacttcgtcatggcgtccaccggcgccggcgggttcgtgctgggattgcagtccctggtctccggcgtcagcgacgcctccccgatgggccttgccgggaggagcctcgcctgcaagttcacgtcgctgccgtcacccaaggtgttcgaccgcgacacgccgctggtggtcacgcgggacaagaactaccggagctcctgacggcagtcggtctcccggcgtacgaggtgacgctatacaagacgagggcgctgccggtggcgatgaatttcagggcgccggcggtgccgacgacgtgcatcaacggcgtcggcgtgccgacgatggagaagctggtgtactgggacggcgacttcagccaggccccggagatcgtgtacggcgacggcgatggggtcgtcaattcggcgagcatactggctctcgacacggtgatcggcgaagatccgaggcaggggtactacaagtccgtcaagatcgccggcacgtctcacgacggcgttgtctctgatggtgccgccttggagcgtctggttagtgagattcctcgggagaattttgtgcaagcttcgaaggaggaggatagtcgggttgctcaactgtaatttatcagcactgggattcctattagttgatcacttcattctcttcaactcatcgtacacggccagacaataattccgccgtgtttagttacaaagtttttcttcaaactttcaactttttcatcatatcaaaactttgctacacac

SEQ ID NO: 5100 - DNA, 1553 bp, Oryza sativa
  ref <308>: DATABASE ACCESSION NUMBER: AK062292
  ref <309>: DATABASE ENTRY DATE: 2001-12-06
gagcgtttgcgctcatctacaccagagccaacgtggtgttgacccctgcatacctggcctaccacatactgttggcgccgttccttcacatcaccgccatcgtgctcttcgccgccagcagcaagcgccaccacaacaccatcgacgtgaagatcacctacgtgctcctctgcctcaccgccgcgctggacatccttgcggagcccatccggcagctgctgttcaagctcatgtccatggcggatgtcgcagcgctatgcgagacagtcccccaatacaataacctcatccggtcagctctccaaaggacacagcctgctggggtcttgctcaagtgtgccgcacatgtcggctacacacagggattcttcgtttgccaacgcaagaacctgtaccacatgctggccgggttgatcttctccgacctagtggaggcgaatgccaagggtctcgacttcaccagctaccgaagcttcgcgccggggcgccgcaactgggtgctcaatgagaacctgcgcaaggtatgcggcctagaggtacagggcagcctgcgtgggtcctttgataggggtgtcatcctctggcacatcgccactgacctttgcatgcgccgcatgatggctgaaaacaccatcgacgagattgacaggaaatttctcgagtgcacggaggcgatatcggactacatggcccaccttctcaacctccgccctgacatgctcatgaccggcagcaggcagcacctcttcacgcaggcaatggaggaggttgagctcatcttgaaggatattgagtctcagcagcagcagccgcatagcctcaagaagctcggacgagacatcctggcaaagaagatcatcgacaaggcaaaagctggggtcaatgctgaggtcaatgctgcgatcgacatagaaatggtaagagaacaagagagggaaatcagggtggatgagccccctccccccaagtaccctctcgtccatgacgcatgcaggctcgcagaggagttgatggataagatgggccgcagaacacggtgccaagtgatgtaccgtgtgtgggtgggcatgctcttctactccgccagcatgtgtaggggatacctacatgccaagagcctcggagaaggtggcgagttcctctccttcgtctggctcattctctcgctcaagggcgccaagaccttggccgacaagctccagatgccggagccggagccggagccggagcgggagccagagccaaagtcggggccttattcccctagccaagagatagtacaaggagagcctaccgctaccgtcgcaaccaccgccgacgaaggcgaggacctcagcttcctgcttcctcatagccctcgttcataattacctcctagtactaaattagttggctcttaattatactctcttctctaaattagctgttatgtctagtgataattagtatcttgagtgctaatgtactattgctagcaattcttgtacgtgtttctttccctgatgaatttatgtattccggcctctagctagaagaataccatttcttgcttt

SEQ ID NO: 5101 - DNA, 2395 bp, Oryza sativa
  ref <308>: DATABASE ACCESSION NUMBER: AK062293
  ref <309>: DATABASE ENTRY DATE: 2001-12-06
gcgtagtgtatcatcttatcgagtttgtacaccgggtgtgtcgtgagctctgttcatggcggccgtgcagctcgactccggcctgctcgtcggctttctcttcttggcgacgtgcttggccgtcgcgattaggagctacctgagatcgggtggcgcggcgatcccgtcgccgccggcgttgccggtcatcggcaacctccaccagctcggccgcgggcggcaccaccgggcgctgcgcgagctcgcgcggcggcacggcccgctgttccagctccggctcggctccgtgcgcgcgctcgtcgtctcctcggcgcccatggcggaggccgagctcaggcaccaggaccacgtgttctgcggccggccgcagcagcgcacggcgcggggcacgctgtacggctgccgggacgtcgcgttcagcccctacggcgagcggtggcgccgcctccgccgcgtcgccgtcgtgcgcctcctcagcgcgaggcgggtcgactcgttccgcgccctccgggaggaggaggtcgcgtcgttcgtgaaccggatccgcgcggcgagcggcggaggcgtcgtcaacttgaccgagctcatcgtcggcctcacccacgccgtcgtgtcgagggctgcgttcgggaagaagctcggcggcgtcgatccggcgaaggtccgcgagacgataggcgagctcgccgacctgctcgagacgatcgcggtgagcgacatgttcccgcggctccggtgggtggactgggcgacggggctcgacgcgaggacgaagaggacggcggccaagctcgacgaggttctcgagatggcgctccgtgaccacgagcagagccgcggggacgacgacgacggcggcggcggcgacggcgagccccgtgacctgatggacgacctgctctccatggccaacgacggcggcggcgaccgtggccacaagctcgacaggatcgatgtcaagggactcatcttggacatgttcatagcaggcacggacacaatatacaaatcgatagaatggacgatggccgagctcatcaagaacccagcagaaatggcgaaggtccaagccgaggtgagacatgtcgccgcagctgcacacggagacgaagacgaagacaccgtcgccgtcgtcagggaggagcagctggggaagatgaccctcctccgggcggcgatgaaggaggcgatgcgcctccacccgccggtgccgctgctcatcccgcgcgaggcgatcgaggacacggtgctccacggccaccgcgtcgcggcggggacgcgcgtgatgatcaacgcgtgggcgatcgggagggacgaggcggcgtgggagggcgcggcggagttcaggccggggaggttcgccggcggcggggccgccgccggcgtcgagtactacggcggcggcgacttccggttcgtgccgttcggcgccggcaggaggggttgccccggcgtggcgttcgggacgcggctcgcggagctcgcggtggcgaacatggcgtgctggtttgagtgggagctccccgatgggcaggacgtggagtcgttcgaggtcgtcgagtcgagcggtttgtcgcctgggctcatcaacccgttggtcctcgccgcgaaacctctcaaataagaatggttaagccttacatggagtgcattttaagatggagggagtagtacagtcgcagcttgctccatttccaatttttcccatgtgggttgaatccaatcaagaaaatgattaaattcatttttggtctttatgctaggaatggttaagccttacatggagtgtattttaaaatggagggagtagtacagttcgcaactttgctccatttccagtttttccatgtgggttgaattagtgggcctgaacatggaagaatcaggccagcctgtaacttcctactgaaccggcccaccaagctgcaaccatatcaaagcaccgaaaacaggccaaataatggccagagagatgaagggactgttcactttggcaggattttgctaacttatcaaaattttggcatgattttttatacatagttactaaaatttgatagcaaactaaatatagctttttttttaactttactaataacattaaagtgaacagggtccagaggcacctgacatgaagctgttgccgtatgacgaggtgaacttgatcatcacagtacaacgcacaggcacagcatacgccgccaaaaaatcgtggcagggcgagcgaacaggagacctgtggtacactggtactacgtaccattttttttttaacattgtacactggtactccgtactggagtactagtatgcatgcacttatacacgcccagctattgggccaacagcgcggaagagaaaagggattaaagaatgaatgaaccatctctcgtgc

SEQ ID NO: 5102 - DNA, 956 bp, Oryza sativa
  ref <308>: DATABASE ACCESSION NUMBER: AK062294
  ref <309>: DATABASE ENTRY DATE: 2001-12-06
tatatagaagatagtgtgcattatgatggaaccttcatgcgtatatacatataatcatttactgagatatatatgttctgatgagcattgagctaagtatactcaacatgaatataacctggcaggctaattaatataaattcggtgttctcacaatgttgcattggagctatatgtatagttgctaataattaatccaccaatgtggaaatgaggatcctgagctggcatacaattaatctatctttttttttctacttcgtgtagtacactagtaaaagtaggcagtgctagctgggagtactcctctttcacaggtcttgtgtttgtttcggggtcgggatagaaccaattcatgtgtcatatggcaggtaatggtgaatttttctaggaagaggagacaagcaatggcgtggtttcatatatgtatataacagatgtcacaggtttactgttcacgattatgtctgaattgccagaagtgcatgatcagtacatgcctgtaagatttgtctcgtcatgacctatttatagctgtcatagaaaaaaaaactacaagacaacgaaggtacgtatgtttgtactgcatattgttaacaagttaatcaagtttacttttaggcgttatggggtacagctgtagcttcttgttggtctagcattgatcaaccattcttagcggtagtcggtttgttactatactagcccttttctcagtagtgtgggaaggcgtcagtgcgtagtggaggtgtttttttttttcttttctggactataacctcctagttgtagttctgtaatttttttttcttgttacatccaatgaaacttcatattgtctaagtgtcggttcattggaagaaaacatcatcaagtatacttttatgttgtgaaataggagtagcaaaactgaggaaaatgttcctatcagtacaaataagacttcaaagatatag

SEQ ID NO: 5103 - DNA, 570 bp, Oryza sativa
  ref <308>: DATABASE ACCESSION NUMBER: AK062295
  ref <309>: DATABASE ENTRY DATE: 2001-12-06
gaagctgctggcgtgcgtggacgcgctgaacgggctggtgcacgcggtggtcggcgccaaggccagcgacacctgctgcccgctgctgtccggcgtcgccgacctcgacgccgcgctctgcctctgcaccgccatcaaggccaaggcgttcggcgtcagcctcgtcctccccgttgccatctccctgcataattaataagtatagtttatcacctggctatgctatatacatataaatatatatagtgacatatgtagcatatatacatgagctctgacttgtgtcatggagatgtggaggcatgcatggagccttggattgtgcatttaattgatgtataataatatttgtgtaacatatattttgctgtgtcatgcatatatgcatgtggagttgtggtatttggtttgtagtggtttgggagatttattatgaaataaagagtgtgtgatatgtatgctatgaaatacaaagtttgatgtgtatgtatcatatgtatatgtgtggctgataaagcctgtcattctgtcaactttcatatatagtataaaacgtgctatgttgtgctt

SEQ ID NO: 5104 - DNA, 1436 bp, Oryza sativa
  ref <308>: DATABASE ACCESSION NUMBER: AK062296
  ref <309>: DATABASE ENTRY DATE: 2001-12-06
agataaaaggctgacgcgggctccgcccgctgatccgatgattcatgataactcgacggatcgcacggccctcgtgccggcgacgcatcattcaaatttctgccctatcaactttcgatggtaggataggggcctaccatggtggtgacgggtgacggagaattagggttcgattccggagagggagcctgagaaacggctaccacatccaaggaaggcagcaggcgcgcaaattacccaatcctgacacggggaggtagtgacaataaataacaataccgggcgctttagtgtcttgcaaggcactaagcgtatgcctggtacagctgttacaaaatctgttgttgctaccgaacctggtgggaagaagagggaggaaatttttgttgatatcattgagagaataagtgtgacatttagttcaagtggttacatacttacatctgagattgatggaaccatccaaatgaaaagttaccttactggaaatccagaaattcgtctagctctaaatgaggatttgagcataggaagaactggctcttcttcgtatgattacagaagttcttctggaggaggagctgtcattcttgatgattgcaatttccacgagtcagtacatctggatagttttgacattgacagaactctacatttaataccaccggatggggaattcgctgtaatgaactaccggattactcaagaatttaagccacctttccgtgtgaccgcactaattgaagaagccgggccatctagggctgaagttctattaaaaatacgggcagacttctctgcaaatgtcactgcaaacacaatagtagtacagatgccagtgccatcttacacaatgagggcaagttttgaattggaagctggagcagttggacagacaactgattttaaagaaggatccaggagaattgagtggaatctaaagaagatcgttggtggttctgagcacacccttcgggcaaagctcacattttcccaggagtcacatggaaatctcacaaaggaagctggaccagtaaacatgaatttcactataccgatgtacaatacttcaaagttgcaggttagatatcttcagatagcaaagaaatccaagacatacaacccctataggtgggtgagatacgtaacgcaggctaactcatatgtggctcgtctatgagatagcgatgctttgtatacatctccctctggtcatttccccttttccttgcgctattatcttcgagggacttcaagcaagcttggacagagtgtcatgcattgcattgtaattttatagagcaatcccaaacttaaactcttctcctgcagttaatatctacctagggcaatttatttttccttgtgtaatatgcaggagatacatgatcatatttttgtatgctgtgaaaatgaatgaagttattgttcatcac

SEQ ID NO: 5105 - DNA, 714 bp, Oryza sativa
  ref <308>: DATABASE ACCESSION NUMBER: AK062297
  ref <309>: DATABASE ENTRY DATE: 2001-12-06
atcccttggattgcatcactcttttctggggaaaattctcgagtaaatggcacaaatcagcatgcaccggcttctgctgagcaggtagatggtagaaatcatggagcaccagaagtgtcaggagtcagtgatgagggtctacggttcgctagcttagttcgccaaattatgccatttatttcccaagttgagtcacatcatcaaagtgcctcagcagtcagtagcagcaccccttcacaggctgcacatgggaacttgaatactgcaagagctggtccaagtcattccaggagttcacatcaacataaccgtgatccagttgatggacctaattctaaaaggcaaagaacaagtgagtgataaagatcttcatgtcctccggggtcaccgttttgcaagataagccgagaattttgccgattctcactgcgaggatggactgtcatgaatgtcttgacagagttgagggcagtggattattattatttggcagtgtatagttggcatccggttcattagtcaaggcaccatcttttttttttttgcccatttcctgcggatcggttgtaatgttattttactatcctatctgtagaaattcgattcaattggggttaaattatgcctgcaattaaccaaaagcttcgtttggtagtaattgctgtagcatgtggagaatttttgccacttaataataccctctatgatttgtac

SEQ ID NO: 5106 - DNA, 1357 bp, Oryza sativa
  ref <308>: DATABASE ACCESSION NUMBER: AK062298
  ref <309>: DATABASE ENTRY DATE: 2001-12-06
aaccggcaaccgccgccgccgccgccttcgattcgattccgatcgagttggagaaggccgccgctgcccaatggctccgctaccctcgccaccgctgctggccgaatcgctcgcgacgctgcgcacagcctcgccgtcgccgcccatcccctgctctcctcgccgcacccggccgttggtttcagctaggttcgcaagaacggccggccgccggagccggagcacggggggaaggagagaccttaggagctgtgcctatgcggcggaagctgagtacggcagcgcggaggatgaggtcgccgacgacttctactccgttcttggcgtcatgccagatgcaacccctgaggaaatcaagaaagcatactacagttgcatgaaagcgtgccatcccgacctcagtggggacaaccccgaagtaacaaacttctgcatgttcatcaacgaggtttacacggtgctgagtgatccggtgcagcgtgcagtgtatgatgaaatccatgggtatacagcaaccgcgaccaaccctttcttcgatgacagtgcacccaaggatcaggtgttcgttgatgagtttacctgcataggatgcaaatattgtgccaatgtgtgccccaatgtatttagaatcgaggaggattatgggaggtcaagagtatattcccaatcgggtagcacagagctaattcaggaggccattgatagttgcccagtcaactgtactcactggacttctgctgcacagctttctctccttgagaatgaaatgcggagaatagagcgggtgaatgttgggctgatgagtgctgggatgggagtttcagttgatgtattccgattggtaaatttgctagcgtgcgttgggaaaagagacagtcaaaagttttggaaaaaattaggacacggatgacaaacaaaaagtattcagatataagtagttcttggactgatatctggggatccccaactcgataccaaggaaatgaagaagaaggaacagagagagcgaagagagcagctgctgctgctaggagatggcgagaatactcgagaaaaggcgcagacaggccaccggagtacaaacttccagaggcagcgggcaataaagagtaatagcagaacaaagaaatatttctatcctgcttacgttatctgatagcatttcgtcacctgtacatatagccttattgtttgaagagagctgacatgtagattgctctctcccaattcctcatttttcatttgtaatatatagctgataacaataacctgtagaatacaaacgtcaatagttaaacattcggaatgtaaaagatgaatatgtgcacattctccttcaacaatggtatacatcctg

SEQ ID NO: 5107 - DNA, 1453 bp, Oryza sativa
  ref <308>: DATABASE ACCESSION NUMBER: AK062299
  ref <309>: DATABASE ENTRY DATE: 2001-12-06
taatgataccatgagtgctttaggtcgtccccaagatatgttttcggataccgccatacaattacaaccgatctttgctcaatgggtacaaaatctccatgctggcgcgcctagcgtaacagctcctggtgcaacaacaagtaccagcttaacgtggggaggtggcgagttagtagcagtaggcggcaaagttgctttgttacctattccattaggaaccgcagattttttagtccatcacattcacgcatttacaatccatgtgactgtattaatacttttgaaaggtgttttatttgctcgcagttcccgtttgatacccgataaagcaaatcttggttttcgcttcccttgcgatgggcctgggcgagggggaacatgtcaagtatccgcctgggatcatgttttcttaggtctattctggatgtacaattccatttcggtagtcattttccatttcagttggaaaatgcagtcggatgtttggggtactataagtgatcaaggggtggtaactcatatcacagggggaaactttgcacagagttccattacgattaatgggtggctccgagatttcttgtgggcacaggcatcccaagtaattcagtcttatggttcttcattatccgcatatggtctttttttcttaggtgctcattttgtctgggccttcagtttaatgtttttattcagcggccgtggttattggcaagaactgattgaatctatcgtttgggctcataacaaattaaaagttgctcctgctactcagcctagagccttgagcattatacaaggacgtgctgtaggagtaacccattaccttctgggtggaattgccacaacatgggcattcttcttagcgagaattattgcagtaggatagtggctaggaggatttgaaaggcattatggaattaagatttcccaggtttagccaaggcttagctcaggaccccactactcgtcgtatttggtttggtattgctaccacacatgatttcgaaagtcatgatgatattactgaggaacgtctttatcagaacatttttgcttctcactttgggcaattagcaataatctttctatggacgtccggaaatctgtttcatgtcgcttggcaaggaaattttgaatcatggatacaggatcctttacacgtaagacctattgctcatgcgatttgggatcctcattttggtcaacccgctgtggaagcctttactcgaggaggcaccaccgatttccacctctcctacgacgacgccgatgcctagccgctcacccctacctacctaccttgtacgtataccgtataccaccaccgcctgtattcctctttctttctcatgtatgctactactccagttcactaataacgccacgcctacaaacaaattactgtaatactaatcaccaatcatttcaataaattcagtcatatgagatg

SEQ ID NO: 5108 - DNA, 1184 bp, Oryza sativa
  ref <308>: DATABASE ACCESSION NUMBER: AK062300
  ref <309>: DATABASE ENTRY DATE: 2001-12-06
aagcaatggatagaacacacagacttggtcagacaaaggaggtaacggtgtatagacttatatgcaaagatacaatagaagagaagatattgcagagggcaaagcagaaaaatgcagtgcaagagttggtcatgaaaggaaaacatgtccaggatgatcatctgatgagacaagaggatgttgtttcattacttattgatgacacacagatatcgcacaaattaaaagaaatatcaatgcaggcaaaggaccgactaaaaaagaggcgtacaaagggcatcaaggttgacaaagaaggagatttgatgcttgaagacttggatgatcaaacttcaggggctgcagaacatgataacacatcaagcaaaaagaagaaaagctcccaaaagaagcttccaaagttgcaggataatggtagtgtggacaagaatgcagaggctgaaggcggtgaagtggaggatgaagatagtattgcagctcctaggcctaaaagatcgaagagactgatgaagaacttgaacgaggacaaggaaccagaacaggaaccaacgactgatggtgacaatccggcagaagcagctgagaataacatatctcctgacgataatgatacagaagaggcaaaagatcggactccttcagcctaactgacaaattaatcggataacaaacacagggtgctaaatggcaaggctagtgtgatctatcctgcccgatttatgacatgggcacgacagattgcatggttcattgtcaagaggaatagtcgttggatcttcctgaaggtgtcacacagttcaataagtgtttatgtgcacatctttttcggaagcctgggaactgggttagttgtatattcgattgtgttagaaggcatcagtgcagtggcatcggttgctgttaatcgtgacatgggcgaatcctctagctgttgctgcggatgttggaattgtggagacctgaccgctgatatctgtgatgctggctgtggccattatgtaaataatcatgaaaaatattgcatcacatatagaaataattttgccgtgtaaagagagtaggtgactatattaaccataagttttgtattgatagctgaaagagaacatagcaggaaagctgctgtgcttccaaattggaaacattttcgaccatttatgaacgtctatgctaatccctatgct

SEQ ID NO: 5109 - DNA, 1898 bp, Oryza sativa
  ref <308>: DATABASE ACCESSION NUMBER: AK062301
  ref <309>: DATABASE ENTRY DATE: 2001-12-06
atttccggtcgtccgatcccccctacccctctccgctgatcagtcgctcgctcgctcgctggctgactgcgcccgcgcccgctttgctgcgctcccccggcacgcgacgacgaaaagaccggcctcaaaagcgacaccacgcagcagacgcagcgcccccgcgcggagaagctagctaggtactcctgtctggttagctagctagctatagctagaagcctagcacatgaacccggcgccgtcgagggcgccgcagcggcagcagcgcggaggggagatgtcggcgcgctacggcggcgggctgcagttcttcgctgacgccccgccggcgggggtggaggggggcgccgcgaccgcgcggacgttcttcccggtgccgggcgggggaggggagcagcagccgccggagcgcgcgatgaggcagcagcactacggcggcggcgggagtggtgcggccgagatctcgctggggcacggccacggccacggcggcaagcaccatttccatcagttcggcgtcgaggcgaaggacggtggcggcggcggcgaccagtcggggtttctgacgcggcacaacagctcgcctcccgggttcttctcgagccccgtcatggacaacggttactgcactctctgctcacttaattacgtgtaccttcgatttgccgtcttgattcgtctcttccattactatcgagtttggaatgttccaattaaccaccgttcttctttctcttgactcattggagtattccaatttatttctctgtctttatttcttttttttcttcttttactgcgattttttttcttatggtgcgatgtttagtcaagtgtgatcttggttattttttctctcattttcttgatatttgagtgcttttgatgaatgtttctgggtctactgcacaggttacacgtacatcagcagctgtgcaatgtagtcatccaatacatttgcaacagcgccttcatttttctgttatatttacgccgcatgcatgttcattagcagccgcccaccgattagtgcaatattctttcgggggcagcaatattttactccattttatgttgaaaaaaaaggctgtatgatcgttttagtaagggtttagactacaaaacggatgttcgatgctaccaggtttgataaattaaaataaagttcactctatatatctgaaggtagaccggcgccataccctttttatttgccgcaggattttttttcgaggggaaatttgccgcaggcttaatttcgttactgtcgctctgtcgttcatctttgtgttcgttttcaaaataaactcaagtttaccatgaataaaatacttatttgaaaccccaagttccttttcggatcaaaataaattacctacctatgcaaagtgaaatatgatcgataaatcttttgtttgtgatgggttacttttgcaacaaaatcacaatatcgtaagcaaattacttcagcaaaaaatatgcaaatactatttttgtgtgtccggtctacaaacacacatgaagatatattgatatataatcaaagtttgtatataagtataggtgactttgtgtaccctaagaatttcactcattgaccaatattgagagtatagtctcctagctaatctgattctgcaatctgctgatttcaccaactatatccaaacttttgtcttcggtttgtttttgtttatatacgtgatatcttatgggttgctttcaaaccgggtggcttggaataattggatggaaaactacgggctgcacagttacggtggttttctggtgggggcaatgagaaatgggtgggtccttaggattgtataaccacatatgtacacatatgtacgcccacatgcttcttgcacatatttatttattccgaaatatttact

SEQ ID NO: 5110 - DNA, 1714 bp, Oryza sativa
  ref <308>: DATABASE ACCESSION NUMBER: AK062302
  ref <309>: DATABASE ENTRY DATE: 2001-12-06
ggcatgcctccattcttgtgccattcccattcatcgtctttcttgcaggtcttcagaagcaggcagcaagaacagctgcaaccatgagtggaggttcaggcttccctggcttccacaaacacggctacgatcgcgactacgcgcgaccgctgttccgtgtgtcgtcgttctccgacaatggcggtggcgaggagcaggagcactatacgccatcgccgccacgagggagaagcatgagccgcacgacgtccacggcaccacgcctctcgccatcggtgagcaagctcagcatgaagaagctgcagcaagttgtgaacgagaagtccctggaggatgaagagatggagctgatgaaggagaagtacaccaagctgcttcttggagaggacatgtctgggagtgggaagggtgtctgcacggctgtggccatctccaatgccatcaccaatctatatgcaactgtgtttggaacctgccacaggttgcagccactgcctcctgagaagaaggcgatgtggaacagggagatggactgcctcctctccatctgcgaatacattgttgaattctcaccaaaagtccaggccatgccagatggaagcactcatgatgtgatggcaacctcaccaagatcagacatactaatgaaccttccagcacttgaaaaactggaaactatgctcctggaaatattggatagctttgagaagacagatttctggtacatagatcagagaaagcagtccttcagtgacagcatgaagtttcagcgcagcgaggacaagtggtggctccctgaaccatgtgtcccagagtcaggcctgtctgatcggatgcaccgtgagctgcaacaaaagagggaccaagcaagccaaatccacaagatggccatggagatcaacagcggcatcctctctgaaatgcaggttccactgtcatacatagaaacactgccaaagagtgggaaggttggcgtgggtgatgccatataccggtacatgtctgcaggggatcagttctcaccagaccacctcctcaacttcctcaacttgagctcagaacatgaggcacttgagattgcagaccgtgttgaggctgcgatgtacgtatggcggagaaaagcaagcatgacccatgtggtgtcaaaatgggaaaatgttactgagctgaatgctgatggggacaagaatctgatccttgcaagtagggctaggagtttgttgttgtgcttgaagcagaggtttccaggcttgtcacagactaccctggacacaagcaagattcagtacaacaaggacattgggcaggcaatacttgaaagctactcgagggtgctggaaaatttagcctacaatattgtctcatggatagatgatgttctcattgcagatgggaatgccaggaaagggcataacatcagaatgcagaagcaggagttcagcaagctttctcctcaacagtactgaacatgatgaactaacatagaaaatgagtttatccttttgtaatataggattctctgtgattggactccttacttcactgcagtggcgtgtggaattttagttttggatatgcaacagtgtgttcactgcagtggcgtgtgcaatgctagtttttttatatgaggcagtgtgtgtaattggatttatgactgcttcatcatatatgcagattttatgtggatgtgaagaaaagtttgcaagatgagacc

SEQ ID NO: 5111 - DNA, 1394 bp, Oryza sativa
  ref <308>: DATABASE ACCESSION NUMBER: AK062303
  ref <309>: DATABASE ENTRY DATE: 2001-12-06
gcagtacgtgctgcgttccctgcacgaccccaactacgttcttggcttcgtcgaccgcctcgaaagcgagtgcctcttgttgcaaggcactaggagcacaagagtggcatcagccctgagcagggcacaacttcaggatggttatgttgcatacccatgggagaagaagatgcgtgactcgttgcgcatgcccaactccagcagctacctctcgatgctcgtcctccccaaagctctggacctgaattcatgtcgatacgagtcctttgaggacacccttgcccgtgccaacgcgtggatctactcctcgcaggtctcaggaatccccatcgagttcatgaatgtgcagagtgaggctcttctcaccaagatatctggagagacagcgtctgcaactgttaactcaggttctttgtctgatctgtctaacgtcacgaatgcgaccctgtatggttttgaggattaccatggggtagatattggggtggtgaaagcagcccgactttggtacagctccatagcagaagagatgccgctggagattccacaagaaggtgacacgaggctaggattcgccatcggccgtactgaagagggttttatcttcatatcttcagtggttgacaatgacaaggacaatgaggcgccatcgacacggtcagggctccgcgatctgttcaaccaggcaagggaggcatcaaaactgctagttatctcaagggtgtccaatgagaaggtccttccctggatgatctccagctcaggagcggtccgctgcttcgacaccatctccctcagccaaaagctttccttgcaccgccttgcggtgcgccccatccagctccacctgctcatgtgggagaaacctagtggtcctgtagaaaggatcattcgctctccgaaacttcccccacaatctgagctacctcaagtaccctggaatctaattgagagcattgaacctagagtagatgttgatgaggactatgtgggggatttgtcatttcggattgatgatctttcagtgggaaccagctgggtgtgatcctttcatgctgcaagcttctaatgtgcatatgtatgtcttcatttacatagttctcttgggcagtatgctcagttttgttccatttaagtgtagaagcctggctagaaatgtccagagccttactaggtttctggatataccaagggcgaggctttcataacatctgaaacattatgttgtgatgcaatgtttttgttgatcatagcataccattggaggaatacataagcatttcaataattatctaaggattatcccaattatgggcctgttaagttactcccaaacatattgttcaacactgacatttctgtactttgtactgaacataaagtttgttacactt

SEQ ID NO: 5112 - DNA, 2057 bp, Oryza sativa
  ref <308>: DATABASE ACCESSION NUMBER: AK062304
  ref <309>: DATABASE ENTRY DATE: 2001-12-06
cagcagcgatgtggaccttattaagcctacagtgaaagtgaatggagtttggaaaaatgtagaatatacaaaggctacactgaaagcgaatggagttgggaaaaatgcagaaaatacaaaggttccaactattcctagcacccaaaagtctaggagaagtaccagccaagctcataaaaagtacattcaaggcacttttcctgttgacgatggtgatgatgatactaggccatctattcgacaatctggttcaccagtttcaagatggagcagttctggtaaagcagttgacactgccaatcacagttatcaagacacaaaacaaaatcagctaccactattgtcttattcacaccgtgtgcatggtgctcactccgctggaagagagaattcaagtagtgagaaagttgacagtagtgcaatcccatcaacaaatctgtacattgaggatgacaaaaggttcaaggcagaccttgagagagctgtgcttcaaagccttggcacttctaatgaaaaagaagtctatgggactggccttaaaaatgctgctggtgaatacaattgtttcttgaatgtgattatccagtcattatggcatttaaagcggtttcgtgatggatttcttagaacatcatcgctgcataagcatgttgaagatccttgtgctgtctgtgcattgtatgatatcttcactgatctgagcaaagcatcagaggagcaaggggaagctgtcgcacctacttctttgaggatcgctttgagcaaatcctaccccaacagcaaattctttcaggaggggcaaatgaatgatgcatctgaggttttgggggtgatctttgagtgcttgcataagtcatacacttctcgtgctgactgccaagttaaatctcatgagatcaattatattggttcctgggattgtgcaagtagttcctgcatagcacactgtctttttggaatggatatccttgaacgaatgaactgccagagttgtcggttggagtcaagacgactcaagtacacttcatttttccacaatatcaatgctagttcacttcgaactgcaaaggatatgtttccagatcattcatttgatgatcttttgaagattgtgataatgaatgaccatctagcttgtgatccagaagatggtggttgtggaaaaccaaaccatattcatcacattctttctagcccccctcatgtttttacagttgttttggggtggcagaacaacaaagaaagtgtggatgacatatctggaactttggctggtatttcaactgagatagacatcagtactttctaccgtggtctagaccaaggaagcaaacattctctggtgtcagtggtctgttactacgggcaacactatcattgctttgcttttgaggatgggcagtgggtcatgtacgatgaccagactgtgaaggttgttggtaattgggatgatgtgctcgtaatgtgtaagaaaggtcacttgcaacctcaggtgctcttctttgaagctgcaaagtaattgttccttcagataggcttctccttgtggtgttgtgaagattagaaattgataccaaattcgttttgagctgtgggggataaaggcgtaaagtggtaattcagcagttgcactgatcagttagttttgtcatgccccgtcataaataaacggtcacatgagaatactagaaatagaaaagccagtaatccttttgtttaggttttttggagcttcggtatagttctgatccctgatcctgtcaataagattttggcataggagtgggagggtggccattcgatcgtttgccatctagaggatagagaaaatttcagagattcataagcattgctgaatttattttgaagctgatccgaatgcatcgacgatgtacagagttgtgtttaccatgggaaggctataggggtggtgttcattagtttttggagaagggcgagttgtgatgcaaaactggttgtattcgttggaaaatgttggggaagggatatgtttttgggagcacggtgcttacattgaaatgttacagaatttccat

SEQ ID NO: 5113 - DNA, 469 bp, Oryza sativa
  ref <308>: DATABASE ACCESSION NUMBER: AK062305
  ref <309>: DATABASE ENTRY DATE: 2001-12-06
agaaataattgctcaaaaggcaatatagatagccaagcttacaaaaagcacaggccagaacaacaaattcgatcacttgaagctttctccacaagatccttgcgaacaatgtccagttctaagggacttagtagctctgtgcctccccaaggtggctctggagcatccaaaaggcacgcggacattcatcatgaagtgacaaaccttccaggatcgaaaggttttacaccttctcggaacaacaaccagcagccctacaatggtcaaggtgctcacagcctcacgtacgggttcaaaacatttgccacaaaagcaagggcatgtccaaattggtcgtataagccatgaaccaaaatgagcagggattatcaatactaattcgttgttcaaacctctgtgaaaattacaatgtacatatatatatgtatatagggaaaggattattgtaaatagccgtccacctccccgc

SEQ ID NO: 5114 - DNA, 581 bp, Oryza sativa
  ref <308>: DATABASE ACCESSION NUMBER: AK062306
  ref <309>: DATABASE ENTRY DATE: 2001-12-06
aaaccttcttccccaaaatctccagccacaaccagaagaaagaggcaccagtctgctcaacctatacatttttagagagagaagctgcaaagggtgtgttagagagagatggagatgtgcatggatgacaagtggaagctcaccaagaagggcagccgaaggttggaggagggccgggcttcgagaggcccatcccggtctgtgccagggcggctggcgagcctggtgaaggagcaaagggccaggttctacatcatgcgtcgctgcgtcaccatgctcgtctgctggcgggactagtgatcgatctcttagagctacgggcctaaacgggtcgggctggctgatgcatcaagaggtcgccttgcctagtaacaaatttattcgtttagtgatgatgtttgttctttctttttttctgagaaagagagcgatgtgccttttcagtggccatcctgtggtagatagttgttaatttgtgtggaaagaattaaatagcttacgttagctgtttgagccatccatacagaaatgtaaactgtgacaagtgtctctttgaaagactaatacattccatggtttct

SEQ ID NO: 5115 - DNA, 461 bp, Oryza sativa
  ref <308>: DATABASE ACCESSION NUMBER: AK062307
  ref <309>: DATABASE ENTRY DATE: 2001-12-06
ctcttgctctctcccttgccctcacggcggcggcggccggccatcgctcgcttttctccgccgtcgacgaccagtccccttcctcctccatcgcccctctcctgcggatcggaaatgatttctcctcgtcccgatttgacctctggttcaaccgatatgaagcaagcggcggccgcgcccgcgaagagcaccggttcgtgcgaggatgctggccaagagagatcaaggaggagatagctggcggtcactgcggcggagtgaatctgcctggaacttgttcgttcttgatgtcattctcaagagcactgcatctaggcagtggattttgcttggatccgcttgtgctttgactccggtctgatggtatttggttaaaaaatgtcaggtctactttcttccctttcccttacctcaaatgattctcttatggtttgtggctggaatggagcaatcgatttggt

SEQ ID NO: 5116 - DNA, 597 bp, Oryza sativa
  ref <308>: DATABASE ACCESSION NUMBER: AK062308
  ref <309>: DATABASE ENTRY DATE: 2001-12-06
accccagccggccgggccttctcggcggcgcgcgtgggggctacagaggcgctgcgcggcggggctgtggcggcggcgcgcgataggagctacgaaggcggcgctcggtgggggctgcggtggcggcacgcagagaggacttcggcggcggcggcggcagccggcaggagctgtggagacagagatgcggaggcggcactcggtgggggctgtggcggcggcgcgcggagtggtcttcaccggcggcggcggcagcaggagctgcggaggcgacgcgcggagaagagttcgacggcgatggtgcgcaggagctgcggcggctacacgcgagtgcagcagcggcggaggcagcacgtagtgggaactttagcggcgacggcgcacggagggagcgaaagcggcatgtgggagctgcagcagcgcgtaggtgcggccacgacgacgcgcaggtgcggccgcaacggcaacacggtgagtattctcacggcggcgcgtagcagctgcggtagattgagcagcttggactcgagacacatctggttagcctcatggcgtttgtgtttttcttggaatatatagtttgagatttatgttgtc

SEQ ID NO: 5117 - DNA, 606 bp, Oryza sativa
  ref <308>: DATABASE ACCESSION NUMBER: AK062309
  ref <309>: DATABASE ENTRY DATE: 2001-12-06
agctagcagtgcctctctagtctctatacaagaagaataagaaaatctcattctctcttggattgcaagctacagtgtctgctcggtgcagtcacagagctagtagcaatggtcgacatggcggaggcggcggcgtccatgtcgccggagctcgccgcggcgctggcgaaggtggccgtgttcgcggtcgtgcaggcgctggtgtacctcatcctgcgcaagtcgtcgggcgtcttctccccggacaggacggcggcggcggggtcgaggtccctcagcttccggccgatgcggagcatgagcgtccgccgcttcctggcggcgctctccgacgtccccgtcggcgtcacggaggacggtggctcgccggcgccggcgccggcgccgccgcatcgcgggcctgcagaccttgccgagtagttcattgttcagtggtttcagctaattaatgacagtagtatactcgtaatgcatttgttcatggctattgtgaagaaggaatcatttaacattagatatacttagtaagttagtatgtgctgtttgtgaattattatgatatagtttggctttgtacacattaataaatcttttattttactgtcc

SEQ ID NO: 5118 - DNA, 608 bp, Oryza sativa
  ref <308>: DATABASE ACCESSION NUMBER: AK062310
  ref <309>: DATABASE ENTRY DATE: 2001-12-06
aaaacctacagcaaactgagcgaggagcagagccatgcgtcgcgaggggaggcagcgcgggtgggtgtgcgtgtacgaccgcgccctggtcgaccccgaggggaagcgccgcgtggtgggcgcggtggcggcgccggcgacggtggccaacggcgggttcatcagggcgccgcggaagccaaccaaccactccaagttcaccggcggccgcgccttcagggagctcgccagcggcaagggcgcctgcagcggcgggccggcagcgtcgacgacgggtggtaaagggaggcacaagttcaagcacgacgagatcaaggcgtactacctcgaactcgaagccggcgctgatgatgctgtcgatgagctaggatcgctatgagtgacatggattcgtggaggcagatggcatgcatcaccggaacggcggcacggcggcatgcagctgccaccgtcgataggagaattgcagcggcggcgctaattgacatggcagtttcctgttttggtgtgtatgtgtgtgagtgtgagtgaaactgtgttgtgaatgtggatctttttagtttggtgtttcgttgaataattgaactttctcgccacaaatgagtttg

SEQ ID NO: 5119 - DNA, 416 bp, Oryza sativa
  ref <308>: DATABASE ACCESSION NUMBER: AK062311
  ref <309>: DATABASE ENTRY DATE: 2001-12-06
actttgcaacttgccatccttcgcccaaccagccaagccaaactacctccactctcccaatcatcatgcagttccgctcgctcgttgttgccctcgccgccgtcgtcgccgtcacgctcgcgcccaccaccagcgccatggagctcgcaaccaacgcgactgcggccaactcgacggtgaccactgcgccgacgtccaactcgacggccaagaccacgaccccaacgccatccccgtcgaagaagtcgggggccagcaccgcggccctcgccggtggcgcgaccctcttcgcggccacccttgcgttcacgtcggcatagacagctccgtgttgagtgtactcacatgtcagggactcgtcttgtatcgcctgctgatctgagcaccatacagaaaaaaatacaacctattgtccc

SEQ ID NO: 5120 - DNA, 1109 bp, Oryza sativa
  ref <308>: DATABASE ACCESSION NUMBER: AK062312
  ref <309>: DATABASE ENTRY DATE: 2001-12-06
aatgcccaagtgccccttcactctgagtgactgcatctttggtggtgtccatgtatggtcgtaccagcagcaacactgaaacagcaagctcagcgaggagaagaggtgaggaggtggtggtggtggtggtggggctcgtcattacagagtgcagacttttccctggggcgccgcacagcaccgctcaactcagtagcttcactccagcagcagcggcagcagaagcagaaagcgggtagccatggcagaggagaggaagaaggagaaggagaagaagaagaagcacaaggagaaggagaaggagaaggcgggcacccacggtggggaggcgcacttcaagccgagcggggaggtgaagggggtgcggttcggcggccagttcatcgtgaagtcgttcacggtgcggcgggcgtcgccgctggagctgctccggctgctggacatcccgccggcgtacctgagcgagtgccagagcctgccgttcccgtccaccacggcgtacatgcccaccagcttcaccatcctggcgcaccaggcgtggcacacgctcacgctggggctgggcaccaagaagtccaaggtggtgctcttcgtgttcgagtccgagggcatgaaggccgccgtcgaccagctctggccgtccatgatcccgctcggcgacgtcaacaagaagctcatccgggggctcaccggcagcgagatggcccggttcaagttcaggaagggctgcctcaccatctacgtctacgccgtccgccgcctcggcgccgccggcttcatgtgcgccgacgacctcaggaggatactcgagtccgtggtggagctcaaggatttcttggatcacaccgccatgctcgccatgcccagccagaagagcatcaccttgcagtcccgggtcgcagtggctcactgatccaactctcccaagtgctcttgatcgtttcatcggtgcaggtactcctcctggcttgcaatctgcagaggagtctaattctttttttgcggttcaattggtttattccagtgtcgatgttccacttcctctgctggaagggagttgtatagatctactgagcaaaatctttcgaagatgataggttttttgtttc

SEQ ID NO: 5121 - DNA, 607 bp, Oryza sativa
  ref <308>: DATABASE ACCESSION NUMBER: AK062313
  ref <309>: DATABASE ENTRY DATE: 2001-12-06
ctcttcgctctccctcgtcctcgcggcggcggcaggagcatgccggcggacggagcggcggagggacgggcggagcggcggtaggccgcgggcggcggaggttgccggaggaggaagaggcagaggaggaggtcgccagcgagcgcgacagctacactccgttggccgctccgcccgcgatgtccagttgaacggcgctgccctcctcgctcggtcgccgcgcgccgcctccctcctcgccttgccgccacacgccgcctccctcctcgcccgaccgccaccgccgacatcctcgaagatcacatctgggtcggagctgcccctcccctcgcccggccgcctcaaaaaacccaagcttttgccgccgccccgactggctgaccatcccaagaaagaaggcacctcctcgtcgcctctgctgcctccacactgcccgcggcgtgagggccctagacctccgggagggctccggcgaggtcccggcggaccgcgagttggaaatgcaattaacagattcaaatattcaattcgcttcttgattgagcaagttataggtgcaaggattttacttatatgtataatgaagctattaatattccctcttgtg

SEQ ID NO: 5122 - DNA, 456 bp, Oryza sativa
  ref <308>: DATABASE ACCESSION NUMBER: AK062314
  ref <309>: DATABASE ENTRY DATE: 2001-12-06
cagcatttcaataaaagcagtttcaatttcctaaaggttgtgtctgtgccgtttttccttctgaagaatcttaacttgaaataaggtcactcgtgctcaaccttgccctcgggggctcggttcggtcagctaaaatcgccaagcggggcccagaaccgagccgtgccccagggcgtggtgaactccgggggggaatcggcaaaaacccacaatcgggtcacccataaccctcggtcaccatgttcccggcctggccagtctcgacatgtggatctccccaggcactagccccgacccgagccatttgaggatcgggacttgagcacgagcccttaaatcaagctaaaatgcaaaaggaccacggcacaaatcatcctcaactcatatgcatagcaaaataaagttaacatagaaatttttcatcatttttgattgcagattaagttgatctatacg

SEQ ID NO: 5123 - DNA, 662 bp, Oryza sativa
  ref <308>: DATABASE ACCESSION NUMBER: AK062315
  ref <309>: DATABASE ENTRY DATE: 2001-12-06
atcgtctccgtcgtcggcgcagatctccggctcctccatccatcagtctctctctctcgctttccatccccttcttcgttggccgggactcttccttccccccatgaactctaggagggacttccgcagccacagagctgctttatttgatggtattgaggagggtgcgatcagaagttcagcttactcttctcaaattcatgagcatgagaatgaccaagctatggacagtctgcatgacagggtcagcgttctcaaaagattgacaggagatatacatgaagaagtggagaatcataaccgaatgctggacagaatgggtaatgatatggatgcttccagaggatttctatctggaacggtggacaagtttaagatggtttttgagaccaaagcaagtcgcagaatggctaccatggtggcttctttcatttctgtcttcttccttatatactacctaaccaagtagaagaattgtctgactctgcctttcattttcctcttgcttgcacgtaaagtacatggctgacggtgtttatcaagttttgtgcacttgatgaccgaacatttgagaattttatctcaaactgtgtggattgattgtaaggcgagctgaacgttttctgaatgtggtgagaactgttgtaaaactttgtgacggc

SEQ ID NO: 5124 - DNA, 737 bp, Oryza sativa
  ref <308>: DATABASE ACCESSION NUMBER: AK062316
  ref <309>: DATABASE ENTRY DATE: 2001-12-06
aatacagtactatactactcttcttcttccttccaacctcctcaactccaaaccaacacctccccaataaatccatccaaccccatcacacaatcaccaccatcttctccatctcgttttgtcaaaccaaaccatacaatcagaagcagcagaagctagctagatatagctactccagccatggcgccgccacggtgcaccgctctactgctgctggcgtctctcctcctcttcttcctctgcatctcagctactcatgaggctgcgagaacagcatcaggccaaccgatccaagaacaagaacaagaacagcatggcaaggtggaggaggagacgatggcggcgagcttcgcggcggtggaagagcagtgtggaggggaagaaggagaggaggaggagtgcttgatgaggaggacgctggtggcgcacacagactacatctacacccagggaaatcacaactgatagttagtacaatctactactatatggtagcctagctcatgcagcagcgaaaattggatgaatttacaattcgctttgatttctgtttgctccaatcagttcactttcactgtgactgattgatgtcatcttatcttatccaatcattaattgctgctgctgacttctctctgtatgatcaatggatcaaaatgcgtgtcaacttcagggttttttttccagataatgtctcctcagttatatatagtatatcatatcacaggtgttctttc

SEQ ID NO: 5125 - DNA, 482 bp, Oryza sativa
  ref <308>: DATABASE ACCESSION NUMBER: AK062317
  ref <309>: DATABASE ENTRY DATE: 2001-12-06
ctcacgacgcattccagtgaacagcgccgcacgcccgcaccctttccttcgccgagaagcgtcctctaccccctgtaagagtgttttccccttccgctactaaccacgccgtcgctgcttcaccggcgagctctctccttcgaggagctgcgtgttttgcaggtggtgctcgtcgtcgtgctttcagaactagctgggtggatgatgttcggcattcatccatcccgccggcaagcgtgccggtgtcgggcaagatgggttcgttcgacccggcgggatggcggtgccggcggcggcggcgaagatggcgcctccgtctaaggtgcaggtcaaggaggaaccagtcgattctgatatgcggacagggttttttttaaagaagcatagaagcactcccttttattttcactaccaccagatcgatcatctgcaaactcaactcccatatatgttaataataaagctcatcaaattaatgttcc

SEQ ID NO: 5126 - DNA, 550 bp, Oryza sativa
  ref <308>: DATABASE ACCESSION NUMBER: AK062318
  ref <309>: DATABASE ENTRY DATE: 2001-12-06
ctccctttcgaaacgcgcaaaaaccctctccgactctccccttctcccactcttctccggcggcggcggcggcggcggcgggagcgcatcggagatgatcatcccggtgcggtgcttcacctgcgggaaggtgattgggaacaagtgggatctgtacctggatctcctccaggctgactacacagagggggatgctctggatgcattgggtttggtccgttactgctgccggcgaatgctcatgacccatgttgacctcatcgagaagttactcaactacaacacgctggagaagaccgagacagcaggttaagttgacccagcatgctccagaactcttgttccttattgcctttgttcacgaatgttccaaggaatttgtgtgatgatccatgctgcatttcaactatgtaactgttaccgtgatgtcagatgatggaagtgatataactagtgggcagagtacctctggttgtgtgtgaacttgttttcaagacttttatatcaaggggggtatgttcctgcagtaattttcttattgtgatttgct

SEQ ID NO: 5127 - DNA, 528 bp, Oryza sativa
  ref <308>: DATABASE ACCESSION NUMBER: AK062319
  ref <309>: DATABASE ENTRY DATE: 2001-12-06
acagatcaacaccggcaaccgactaactctgtctgaaggaagctaagattattaatcagtgagtaactagccatggctgaggagaagaagcaccaccacctgttccaccacaagaaggacggggaggaggagagctccggcgtggtggactacgacaaggagaagaagcaccacaagcacctcgagcagctcggcggcctcggcgccatcgccgccggcgcctacgctctccacgagaagcaccaggcgaagaaggacacggagaacgcgccttccacgagcaccacgagaagaaggacgccaagaagcacgccgccgaccaatactagatcgatcccgatcgaatgaacgcaagaacgaacggtttatatgcttaattactttctccccataattacatgtatgcatgtggttgatggcttaatttgcttcttcttgttcgtcgtcatacgtcgtcgcttttacttcgtgttcatgtacattaattctgtatccgcactgagtattaaataagtgcgtttgtgctgc

SEQ ID NO: 5128 - DNA, 558 bp, Oryza sativa
  ref <308>: DATABASE ACCESSION NUMBER: AK062320
  ref <309>: DATABASE ENTRY DATE: 2001-12-06
gaaataattctcgataaactatgccaatgctgcaaagaaacacatttttttctctcctctacttgcacagcagtaaatgacctctacttgcacagcagaaaaagtcatttaatgacattagttactccgtattatcatggtacatgctctattctctctgtatggtttagctagtcatatatggatttcttcaatttagtcaatgacaataatattcaattggacataatctgcaggccaatatcaggagcgtccatgaacccggccaggaccatcggaccggcgatcatcctcggccggtataccggtatctgggtgtacatcgccggcccggtttttggcgcagttgctggcgcgtgggcctacaatcttatccggttcaccgacaaaccgctaagagagatcaccatgactgcatccttcattagaagcacaaggaggaactaggtcccagaattgatcagttttattgtggtaaaatgtttcctttttttttctgtagctagtgatgttgatggaatgaatgggcagtaaaagtaattgacactgtgattgcat

SEQ ID NO: 5129 - DNA, 575 bp, Oryza sativa
  ref <308>: DATABASE ACCESSION NUMBER: AK062321
  ref <309>: DATABASE ENTRY DATE: 2001-12-06
agaaacgtgtgggcattccgtcgagcatgttgtggtcatgcctggacggcgtcgccgacccgcatcccagtttgccggcgttctccactacacagggaccacacatgagttctcctcagtcgctagtgccccctatcaattagctctagatgcaaccagacggtgggaattctgggtcattggggggtacttacctggggttttgcagttaggtgcattgcatccttggttgctggtgatggcagctccgaagactgatggaattggggtttttgcagttggatgcgtcgtcggtggctctgaactctcaggaccgaagaaatttgggcgtgtgatatcgctagctaggttttcaggtggctcatgccttggtcgattctttgacagcttcgtctggtcttttttttttttggctgcctccgggaggatatttgcttggtttgaaacgtgatttatcagctctagtgataggtaagtatatattgtattcgaggaaagaagtggtaacatgttggacctgtattaattatgctgtatttctacttgctgaaatctcaatttcaatatttggaccc

SEQ ID NO: 5130 - DNA, 779 bp, Oryza sativa
  ref <308>: DATABASE ACCESSION NUMBER: AK062322
  ref <309>: DATABASE ENTRY DATE: 2001-12-06
aaggactagagacgcatatgcgttcgctcggttctggataacgtgcacagaacgcgagctctcggtggttggttgagctgcgcgggagagcggcggtcgatggcgattgcctgcgcgctctcggtggccgccccgtccctaaccggcaagaccaactcaaacccgccgccacgccgcagcttccagcagcagtggcgcgagcgccgccgccgtggcgtggccgctcgcttctccggtaaatccgccgacgtcgacgcggaggcggactcggggcgaatcgaggatgactcgagctacctttggaaattgggccttggatcggttggcggcgcagcggctatcaagtacgggagcatcctgttacctgacatcacaaggccgaacatcgtggtagccttgttaatggtgtccattcctgtggctgttgctgtcctcctcttgctcaaagtcagctcgagagatgactgactagcttacaactttccagatgatgatgaattttcttgtatgatggaatttgaagcctcggcggctgggccttgagtactcttgtatggaattaatcgaaactagttcttctcagaatcataggctgccctcgaatttcaaactttgtttacagattatgcttgaactaaattcaagtgtgatactacatgtcacggttttttctctctagttcttgggtggtacatgtaacatggtacatccaggttcctctgttttgagtgctcttgttatggatcaagctggtgatcaagtctcaacacaaccttctg

SEQ ID NO: 5131 - DNA, 993 bp, Oryza sativa
  ref <308>: DATABASE ACCESSION NUMBER: AK062323
  ref <309>: DATABASE ENTRY DATE: 2001-12-06
tgcccaaaggcaacctgcaagacatcctcaatgggataggagaggtgaggatggactggccggtgcggctgcgaatagcgctgggcgccgcgagggggctcgcctacctccactccaccaccgctgtcggcgtccccgtcgtccaccgcgacttcaagtccagcaacatcctcctcaccgagcactttgaggctaagatctctgacttcgggttggccaagctgatgccgcaggatatcgacctgtacgccaccaccagggtgcttggcaccttcggctacttcgatccggagtacgctctgacggggaagctgacgctgcagagcgacgtgtacgcgttcggcgtcgtgctcctggagctcctcacggggcggcgcgccatcgacctcagccagggcaccccggagcagaacctcatcgtgaggatgcagcaggtgtccggcgaccggaagcggctgcgcaaggtggtggacagggacatggcgaggtcgtcctacacgccggagtcggtgtccatgttcgccggcctcgccgcccgctgcgtctgcttcgagagcgccggccgcccctccatggccgactgcgtcaaggagctccagttcatcatgtacgccaacatgaagatctgatcgctgcatccattgccaatcttcgtttggctcgttcatatcaatcatttgattactccggcgaagacgatggcggtggagaagaagaagaagaagatgatgatgatgatcttggtgtttgtacagaaaattttttgtggttttattgcggaattttctgcccaaagtccagagaaaaaaagaaagagcgggggctttgtggtggtataaaaatttctcacatatttgttcctgttggaaatgactcaagctgaggtagctagagcgaaatcatttttctttcaaaatttgactaattaaactttggaactatacttgtgtggaaagtgcacacgttgaatctgaaggccaggaatcaatcccc

SEQ ID NO: 5132 - DNA, 712 bp, Oryza sativa
  ref <308>: DATABASE ACCESSION NUMBER: AK062324
  ref <309>: DATABASE ENTRY DATE: 2001-12-06
cgtatgcgctttagcaacaaagcgctcatcccttcttctttcgcttggaatcccctcgcttcttctttcgcttctacgctcgtgctttcagcaagttcgtaccagtcgtcaggagctccaacctccgcgcctagccgcaaggaacctaaacgctggttctatcccggccaagcaagcaaggtgaaccccggtgggaaagaaagaccagggggaagaagcggggtagaggaattggtcaactcatcaggctcatgacctgaagactgcaggttcgaatcctgtccccgcctaatcacgtcagatacttctacgagtcctgatcacctgggtgaaagaatctatgttcaagtcgcctgcctaacaaatagacaactacgtgttctagttgctctgttccgttggtccccatggaaagtgttgttgtgtcaaatcgagattgtgtgggtgttcagtctaccgctcatgttcacgttctcaaaatcaggctttcgttggaaaaaccaacgccgaccccaaacaagtctctccaatataaggagagcggagcttaaaaggatatagttacctatgatgagatttagttcaatggatatgaaggatagaagaaataaagtattttctactactctacccactcgtagcttgacaattcctccccaaccagtggtgcaacctgctcctcctgctgatctgaaagggatcttcgtattgc

SEQ ID NO: 5133 - DNA, 792 bp, Oryza sativa
  ref <308>: DATABASE ACCESSION NUMBER: AK062325
  ref <309>: DATABASE ENTRY DATE: 2001-12-06
atcttctctcgcgcgcacagtgatggccgggcggcggcctggcggaggcggcagcagccgcgccctcccctccgtcggatccagctggaggggaggcggcgggcgacgggttgcggcggcgccctcccctccctcggatctggcgggaggcagcgggcgacgggttgcggcggcgccctcccttccctcggatctggcgggagggaggcgggaggcggcgggcgacgggttgcggcggcggcggcgccctcccctcccctggatctggcgggaggggaggcaggaggtggcgggtgacgggttgcggcggcgccctcccctcccctggatctggcgggaggggaggtgggaggcgacaggcgatgggctgcggcggcggcacatggcgatgatgttttttgtgaatttgttgatgaatttgttgttgaatatgttcattatgttatgtcaatttattttggtggtgatttgtgaatgattttggggtttggagatttagtttgatttggagaagggcgtatgcgcggtgacggcgcttggtgagttcggctcggattcgagccggctctctctctttttttttttctggattgggtaatgctaaaagtgccggttctattttcgttataggtgtcgcttagtagtattggtgccagatgaaaatctgttacctatggctctctatgaaccgatacctttggcacttttttaagtagtgtctgcacgattccgaaaggatcatcaaagtagctagggtttttcttgtgtgaaataaatgaagatcgttgactg

SEQ ID NO: 5134 - DNA, 753 bp, Oryza sativa
  ref <308>: DATABASE ACCESSION NUMBER: AK062326
  ref <309>: DATABASE ENTRY DATE: 2001-12-06
gtgcttgcctccaaataattttttcccctccgcttttgctgcctcgtcttctctagatcttaattaccacgaaattgcaatgagctagctcgtgtttgcgagtataggtagctaggtagctaggcgtaggggaggttgccggagaggcagggatcgatggaggtgttcatccacgaggagtacgtgcacaagcggagggagcagcggcggcggcggggacggcggccggcggcggtagcgctgcagctgctgcaggtacagtcgtcgtcgacgacgacgaagccggagaagaaggcggcggcggcggcggcggcaggaggaaggcggccgctggctccacttgcaacggagcttcaggatagcccgtgggacctaccggccggcagcggcggcggcgcgtcaccgtccgacgccgctgggtctccggcggcggcggcggcggctaccgtctccttcgcggaccatctcctcggctacctctaggtgaagtacagagatcggttgattaattagctagctatatatgcgtgtttccatcgtctgcctgtaattaagttggatcaggtaataataaatccgttggcatgattttattcttgtccgagctagctagtgtgctagtgtgttcgatttttctgctttttgtaagcatgaaattctctcgtgctgctcaacgtgagagtcccttgtaggaggcaccaatatttttggagttgatcaagtggaattaatagtggattatgctgcgtgatt

SEQ ID NO: 5135 - DNA, 419 bp, Oryza sativa
  ref <308>: DATABASE ACCESSION NUMBER: AK062327
  ref <309>: DATABASE ENTRY DATE: 2001-12-06
gaaattctgaaaaataatggccttgctgtcgagaagaagattatgacatctactgttgacgtcaaagatgattcgaggagtcgccctatgcagaaagccaagattgaaatagtgctgggcaagacggacaaatttgacgaactgatggcagcagccgcggaagagagggaggccgcggcagcggaggctgaggccgaggagcaaagctaatattagaagccaaaaagcttcctgttgtagctttaattttagtattctgctgctaggtgttgtatttggaactccttgatacatcaagggcttgtgtaatcaattagtggcacagcttatttggtgtgcttttacttgattggttaagttttgatgccaacttatgacagtgaaggtgtatgagtacggtgctcatcttgatttgcccc

SEQ ID NO: 5136 - DNA, 688 bp, Oryza sativa
  ref <308>: DATABASE ACCESSION NUMBER: AK062328
  ref <309>: DATABASE ENTRY DATE: 2001-12-06
tcagaaagacctattattcatttggatattaaacctagcaacatactattggatgacaacatggtgccaaaaattgcagattttggtctatcaaggctcttgggtgaagaacaaaccagagtttgcacacaaaatgtcatgggagcaataggatacatggcaccggaatatttatatcgaggtgaaatctccactcaatcagatatatacagtttaggtcttctaattatcgagatcacaacaggggagaaaaacttccccaatagagaggacatcattgctaagaacttcattgagaatgtacgccgaaatcggaccaatattgtgcatatatcactgaagtacccatcgttagacacaaattgcctccagcaggtaaagacatgcattgaaattggactgagctgtgttcagaccaaccggaaggacaggccttctataggggaaattgtcaatatgctcagttgaggagcaccatactcccttgtagacaagatctctccctttccaacatggtcgtcagtttgggagaggcactggagcaaccgagatgtatgagccttatcatttatgcttcttagctacaagaaataagatcctatgaaagagattctcatctcgaaataaatgttcttacagattccatctccttttgtacttgtaatcatgatataacaaaatattggag

SEQ ID NO: 5137 - DNA, 590 bp, Oryza sativa
  ref <308>: DATABASE ACCESSION NUMBER: AK062329
  ref <309>: DATABASE ENTRY DATE: 2001-12-06
ctgaacatttgatgatcggcattattgcatgcaaatcaccatgaaacagtagtgcagatggatggaggcgaattttagagaattaatgttttcagggaggagataatgagatggatcgattactatcgcgtttgcaggttaattgggagcaatgagcactgacacgagaagctgcgatgtgaagatatgaatggcttcctgtctctcccagcctgacgaagtcttgtcatctgcagctgtagtagcctaatctgaatatttatctgatatttcttgtcgtcagaaacggcttagaattagttggtgattgacttttggtgtgtaggaaaagaagaaaaaaaaaacagaaaaggaacagatgctaaaggtgttgtggggtgtgtgtgtgtgtgtgtgagtgtgatcatggactgctcggtgtacatattattgtccggttagtgtggatctccctttctttctttttgctactgatgttatcctttttttcttagtgcgcatcttgttgcattcatatggactttgaccgtggataaagataagggatttttttcaactttggaaagcatggatgatcgctatttaatctc

SEQ ID NO: 5138 - DNA, 994 bp, Oryza sativa
  ref <308>: DATABASE ACCESSION NUMBER: AK062330
  ref <309>: DATABASE ENTRY DATE: 2001-12-06
acaaaaaaccacacaagaaaacgcgcgccaaccaccgcatcttcccctccccccggcctctccgacgtcgaccatggccatgctcctcgcctccctcctctccccttcccctcttcccaccaccaccacctcttccacgtcgccgagggctgtcaggctcgcgccggcgaagccgctcgccgccactctcgcagcggtggccgcggcggggctcctggcgctgtccccggccacggcggcggcggcggcggccggggaggcggagttcaaggtgtactacggcacggcggcgagcgcggcgaactacggcgggtacggcgggaacgcgagcaagaaggacgcggcggagtacgtgtacgaggtgccggaggggtggaaggagaggctggtgtccaaggtggagaagggcaccaacggcacggacagcgagttcttcaacccgcggaagcggtcggagcgggagtacctcacgttcctcgccgggttccgggcgctggcgccggtgggcgccgtgctcgacaacctcgcgctctccgacgtcgggctccaggaccagatcgcgtcggcggacggcgtgctgtcgacggagcggagggacggcggcgggcagctctactacgagtacgagatcgccggcgccggcgcgcacagcctcatctccgtgacgtgcgcgcggaacaagctgtacgcgcacttcgtgacggcgcccaacccggagtggagccgcgacgaggccgtcctccgccggctgcaccagtcgttcaagaccgtcgaccccgccagaccgccgccggctagctcctagtcctagctagccattgttcgccgccgccggccggccggagtccacgacttgtctcgatcgagtggagagctagcagctgggcgaaacaatttctagtagctttgctgcccgagatgtaattaaagcagttttgtataaattatggatctactatacgcgtaatcaaacattgtcctgtaaattattttc

SEQ ID NO: 5139 - DNA, 672 bp, Oryza sativa
  ref <308>: DATABASE ACCESSION NUMBER: AK062331
  ref <309>: DATABASE ENTRY DATE: 2001-12-06
gcttatttgacattattctcccaaaattcgtttgtcacggggcaagcttcacgcgtgctggcgccggcagtcgtcgtagccgagccaccgccaccgccggccgtcgtcctcgtcgacgagcgaacgtcgcccctccgcagctaccgccaagccgccaccggtggtcctcctcgtcaccgagccaacgccgcccgtcgtcgccagcggcagccctcctcgtcgtcgagcagctgcccctccaccgccgctcctccgcatccaccgccagcggcgaccctccgcgtcgcgccgccaagccgccgctcctccgcagccgcagctaccgccggccctcctcgtcgccgagtcgccgcctctcctccgcatccgccgccagcggcggccttcctcgtcgccgagcgccgctcctcctcattcgccgccagcggcggccctccgcgtcgcgccgccgagccgcccctctgccgctacagctgccgccgagccgccgctgatagaggataagaatgatagatgatagagagagagaggataggaatgagtgatagaggatagattgacgtattaaggggcattttcgtcatttaggattgtaaattcttgttttctattttttctaagtgaaatactcacagtgtagtgaaagtagggtcagacggcaacttcaaattg

SEQ ID NO: 5140 - DNA, 621 bp, Oryza sativa
  ref <308>: DATABASE ACCESSION NUMBER: AK062332
  ref <309>: DATABASE ENTRY DATE: 2001-12-06
aatgtaataacataccatcacattccgtcaggtagacatgccaaaataaattccattgtagtttaaggcattccatcttactttagatttgttggttttcaaagtctgagatgatggtatgcattatatgttgccaacccaccgccacctcagctcaatcatgcatgatatgcacacaatccctatatatatctgtatagaataggcatatatatgtccaaggtctacatgcacaactactgtcatcttactatggaccattgcatattcttctcctcattcaaaccacccaggcaatgcaagacaaaactatttgtggtaggactagcatcagggcttgggcaatatactgaagtagtaagggaagctcagaaagggatcaaacttcgaaacgtgagatttgttgatgcaaagggtttgccactagaagatggccatctgcaccttagcacccaagcgcaagtccagcttggacatatgttggctcaagcctatttgaactatggtacttccacgctctagtcctctctgtgttgtttttcttttatcagataaatagctaagagactacgcaccttatgttctacttttcttatttagtttcatggaccactcattctt

SEQ ID NO: 5141 - DNA, 444 bp, Oryza sativa
  ref <308>: DATABASE ACCESSION NUMBER: AK062333
  ref <309>: DATABASE ENTRY DATE: 2001-12-06
cagatgcagttgttcgagcagcatcatcttctgcactgggccttctgataaagaggtctaacgtggttaagacgttgactccgaaatttgatcgggctgattcatcccagaattttcaacatggagatactcgtacgaaaacatcatccgagcctcaacaggagactatagatatgccaaacgatacacaacgagagccataaagatggtcaaaaccaatctctgctagatgtaactctgtaaatcgtgtatgtacggtttagtcgtgcatgtgcatgactgtagataatagaagagtttttgtgtaggacatgccaataggctttcggtagcgagtggcggctgtacagaaatccgtcacgttcgttgattgttatttcttttattgattgaattcgctcagcagtaagcatgtaaaaagatacctcagtgtcttgtgtgggt

SEQ ID NO: 5142 - DNA, 707 bp, Oryza sativa
  ref <308>: DATABASE ACCESSION NUMBER: AK062334
  ref <309>: DATABASE ENTRY DATE: 2001-12-06
gatggcggcggccgggtgcggcggcgaccggacgaggcagcgagacctcctcctggtcgtcgtcctcgtcgtgcacgtcgtcgctcggctccgtcaatgacagtgccgtcgtcgcgtgcgtcgtcaaggcagcgagcgggcgtcgtcaaggcagcggacgtcgtcgtcgtctctgcggggaacgtccccgccgccagccacttcctcaccgccatccacaaccaccctctccacgccctcgccgctgcccctcgccacgctgctcctgggccacctcctctcgcgccgtcgcgtccgcgaggccgcctccgtcgtccgctggatctgccgcccgaactccccgcagcggcccaacaacgccaccttcaccttcgtcgtcgcggcaggcgggctcgacggcgacgacggcgaccgggcgagcgtggcgtggtgacgactagcgaggcggcggcgagcgggccccgcccagatccgacgagttgcggcggccggttgcgtgcgggccggcgatttccgcttttttttttttttgtttcgtgcgggcggaataatttgaccgcacaggataatcgattatcccgtgtatcccatacggttggcccatccgcacacgaaaatattgatttttccagacacttgggtgtagacggacaaatcatccgcacggaaaaatcattttgactgcacggaaaaatcattttgactgc

SEQ ID NO: 5143 - DNA, 702 bp, Oryza sativa
  ref <308>: DATABASE ACCESSION NUMBER: AK062335
  ref <309>: DATABASE ENTRY DATE: 2001-12-06
ctccagcagcgccaccaccacggactccgccgccgctcccgccaccgccacatcccttgccggtgatccagatgaggttccgcggtgtacaggtggatctcgtgtacgccggcgtgtgcctcccgtggtgcccgacaacctggagtggacctcagcgcgaccggtcggtgctccgcggccttgacgacctcgccacggcgcgcagcctcacggcatccgcgtggccgacgagatcctgcggcttgtcccggacaccgcggcgttccgcaccatgctgcggtgcgtgaagcactgggctaaggcgcggggcgtctactccaacgtcgcaggcttcctcggcggcatcggctgggctatcctcgtggcgcgcgtgtgccagctctaccccaacacctccccagcatgctgctcccgcgcttcttccgcgtctttgcgcggtagaagtggcccagcccggtgatgctgcgcgccatcgagcacgacgacggcgagctcggcctcagacgccaccctgcgcgtcaccaccgagcagctcgccgtcggcgacgacgtctgccaggagatcgtcaaggccggcgccatgtgggtggtgattagttaagtactgcttagtcttaatgatcggtaactgcatgtgttgtagcttgactaacaaatcactgagtctgagaaataagagtggaagtgtagctagttcgccgc

SEQ ID NO: 5144 - DNA, 602 bp, Oryza sativa
  ref <308>: DATABASE ACCESSION NUMBER: AK062336
  ref <309>: DATABASE ENTRY DATE: 2001-12-06
gtgcgttttccctttctctccccactccggtagtccggccatctcgctggctcgccgcttcatcccactccgcacgccaaatccatccagagaagcatgtcagatcgagggcgaggagcaaatccgcgcgttggacgagcggcggaggcgtctgtcctcgccatcgtcgccgccttgggggcaagaagatgaagcacatgaaggccatccagagcagcagcgaattggggtggaacatcccgtctctccatcgcggatgccgcagtggtagtcgtcttcgtcagagtccgttgatcaaagccgtggctgtggcccatcaacttcccattcgtggtgctagtcttgcacaaatagaaatcaactgaagccagatgttgaggagttgatgaaattcatcttatctagtaaaccattgctttgtttacacaactcttccagtcttcctccacaacacacctttatccttttgttcagaaatcagaatttgtttagatcttggttcagaatttgttcagtaatcagtacttacttcgttggaacggtccgaattttctggtgtctgatggcttattcaaatggtcacagggatagcgttcactctt

SEQ ID NO: 5145 - DNA, 629 bp, Oryza sativa
  ref <308>: DATABASE ACCESSION NUMBER: AK062337
  ref <309>: DATABASE ENTRY DATE: 2001-12-06
ttagcttgtcatttggattcatgggcttatttcctactgaccatgtaaaatcagcagtatatttggtcatcagttcaattgttgacaaagttttgggcatcagttatggggaaacaattagagatgcatgcatttatcttccacctgatcctgcagagctgttgtatttacttgggcaatgtagctcagaagactttaacttggcatcatgccaatgtgcaattcttgttatattatatgtttgttcattctacaatgaaaggctggctgctgacaatcaaattctggcttcagtcgagcaatacattcttctcaatggtgcgaagttcccccatgaaatcccaggctctctgatgcttactcttctggttcatctttatgcctttgtcagaggcatttcatttagatttggcattccacatagtccagaagctgagaaaacactgttccatgcaatgacacacaaggagtgggacttgcttctgatccgagtccatctgatagcgctaaaatggctcttccagaatgaagaacttatggaaccactctcctttcatttgctgaatttctgtaaatttttttgtgaggacagaactgtcatgctttcaagcagcactcaattggtggac

SEQ ID NO: 5146 - DNA, 495 bp, Oryza sativa
  ref <308>: DATABASE ACCESSION NUMBER: AK062338
  ref <309>: DATABASE ENTRY DATE: 2001-12-06
cgcgccgcttcccggggtgcggacgccgccgtcgccgcctcgcagagcgccagcaccggcgccggcgccgctgacgcctgctctttcccagaggttcctggcggagcgcagaccagcgccggtgccggagccggtgacccggaagaggtccgacctgggcaccctcatgaaacccaaggaggacaaggtggaagagaccacgaagcctctgccgccgccggctgcagcggcggcggcggcggaggaggaggaggagaggatggcaagggaggcaagagggaagatggaagaagacaagaagaaggccaacgaggaggtgacggacatggcgcagctgaggaggccggcctcggcgagccgccggcagctggtgaacgtggcggtggcggccgtggtcctcctcggcatcaccctctacgtgtggaacaccctgaggaacgccgcaaccggcggcggcggcaacggccatggcgcgagctacagcgacgagatgtg

SEQ ID NO: 5147 - DNA, 746 bp, Oryza sativa
  ref <308>: DATABASE ACCESSION NUMBER: AK062339
  ref <309>: DATABASE ENTRY DATE: 2001-12-06
gagggtattcgaggggttcagtcgaccggcggcgagcatggcggcggcggcggcggcggcgggtctggaggaggccctcaggcccttccacgatagggcctccgatgccgagacacgtttagcaaagctggaagccttgctgctgaacaaagatggcctgacgagtggttcagagacaaattcatcagccgtgaaagatcttcagtcaaagcttgatgcagttaacacagaatgtcttgctgaaaaggaaaagaacaagaagctaatcatagagaacgagaagctccagtaccgtatcacccatctcatccgcgcattgaaagaggcagattcaagatagagagccctaccaagctggacctaaagctaaatttgtttaaattgaagcactgtgtatgatcttgtggttttgtggactgcgtgttcttagcaccatccatgaatttagccaaaactattctagcgatcttgatgggtatggttaaagcaaggtgggtgtgtgattgctccgacaactttcatgccagaagacaaaaaaggttaatcacacaaaatggcaccaaattcgacagcgaaaggagctgggtaaggggagcctcactcgtttccttgttagtttatcatccacggtttaaaaacctttttttttaagaaacactgcaaacacagacactcaaaaatgctcacacattcacctttatgaacacatatatacatcctaaacctgtaaaactgtgaacaccttc

SEQ ID NO: 5148 - DNA, 745 bp, Oryza sativa
  ref <308>: DATABASE ACCESSION NUMBER: AK062340
  ref <309>: DATABASE ENTRY DATE: 2001-12-06
agccacacggcatcgcgactttgcgagaccgcaagccggcggtggagcatcgcgctccacccaccgctagcgcccaccgcccggcgcccgcgccaccgctggtccaccgtcctcggctcctcgcgacctcgcccccaccgtcttcgccgtctcgtaccgccgccatctcgcgacgctgtcccgccgtttcgcagtgccgtttcgcggccgcggcgccgtcccgccgtttcaccgccactaccactactgacgacgacgccacagccacaccaaggagccgacgacgcctcgcctcgcagtcgcagcagcagcagcagcccagcggcaatagccaacagcccagcggcagcagccagcagcccagcgacgagccgacgatcataaaccattgatttgatttcttttgtgctgcagatttatgatggaatcatcaaatgtaagtagctgttttgtgattgatccaagtactgtactgatggattgatgtgtgttgctgttctgtgatgaccgaaacaattgatgaactatgtactgatgatggagtgatagctcatagcagattagcagtatagcactgaataatagtgtatactatatatcttatacaagggtgttatgcaaattatatgaaggtatagaagaatatattgctgttctgttttgctgtaatttttttaaaatatttgttatgcaaattatatgaaggtatagaagaatatattttgctgttaagacgatttcatat

SEQ ID NO: 5149 - DNA, 687 bp, Oryza sativa
  ref <308>: DATABASE ACCESSION NUMBER: AK062341
  ref <309>: DATABASE ENTRY DATE: 2001-12-06
aatctcgccacctgcatcttcctcgcgggctccgtcctcatgggcctcgcccccaacttcgccacactcctcgccggccgctgtggcgtcggcgtcggctcccttggcgttcctgcacccgacgccgccggtgcggcgcatcgtcatcgccgccctggggatctacttcttccagcacctcaccggcatagaggtcgtggtgctgtacggcccgagcatcttcaaggcggccagcatagctagccgcaactcggtgctcgcggcgacgatcggcgtgggcgtaaccaagacggcgttcatcatcgcctcccttgatgcgtctcaagctggcgtccccggccgctgtagcccgccgccgctccgcctactccagcagcgccattaacgacaccctcccgccgttgccggagccgtgcatggagcagcgaccatccttgtcgacgtcaggagcggtttcctttgaggacgccagagccatgccgctgggaaaggagtttcctcaagtccgtgctggtcggcgcgtgaaatttggacaatttgtcgtggcttattttgttttgttttttcaatcttcaatttcttgtttcgagatgttgaactgatgtagtggttttggttttgagcattgtaggatctgtcgtcattgtttagctcgtgtatagatgtgtcccagcactcctttgcttt

SEQ ID NO: 5150 - DNA, 631 bp, Oryza sativa
  ref <308>: DATABASE ACCESSION NUMBER: AK062342
  ref <309>: DATABASE ENTRY DATE: 2001-12-06
tcacgctgaagtagctgttgctcaagtcgaggtgaagacgcttgttgcgcagcctgctgagattgctggtcctagtgagggggtcacggtgaaccccaaggggagggaaggaccaaatcggtgctccacttgtcggaagagggttggtcttaccggattcaactgccgatgtggcaacttgtactgcgcaatgcaccgctattccgataagcatgactgccagtttgactatcggaccgctgctagggatgctattgccaaggctaatccggtggtgaaggcggagaaacttgacaaaatttaggggtttcatatggttggtgaacgaagcgtcacaatctgcggtcttcatcatccatctttgctgcattatccatgccttttcctttcatgttggctgctacaatctagttgttcggcatttgtgatgcatggcacaccacggcagcttcaagaaccctcatctctggtcagtccgaatggtttgcatgttggctatgttgtgtaagctttatttatgatcgtcttgcgctgacggtattgtggcttcgcatttagctagctctgtaatgtactattgtatccgaagtgttacattgcaaccagtaatagtaatcagcaatcgtccgtt

SEQ ID NO: 5151 - DNA, 667 bp, Oryza sativa
  ref <308>: DATABASE ACCESSION NUMBER: AK062343
  ref <309>: DATABASE ENTRY DATE: 2001-12-06
gcgcgcgagattccatggcggccgcgccgtcccgccgtggcgccacgctgcgggttcaagcgaagaaacagacgttctcttcgtttgacgagttactggagaagtctgaaaagcctgtactagtcgacttctatgcaacttggtgtggtccatgtcaatacatggttcctatacttcaggaagtaagcgaaaagttaggcgataagattcaagtcgtaaaaattgatacagagaagtacacaagcattgctaatcgttaccaaattgaagcattgccaacttttattatcttcaagaatgggaaaccttgtcatcgctttgagggagcgctgcctgctaatcaactaatccaacagattgagagtgctttggaggttgcaaagtagcatgtgtgcggaagctaccaattttcttgtggacaacagtataggtgaacaattgattctccgtgaattgatgctgtcttttttaaattacctcaaatcccagcaaacaagatatgggtgcaaacacctaagatgcagcttgctgatcttctgtggtctgttttttttttatgttgttgtaaaattgtgtgaactaactgatgattatactttgtacctctgggcaccatttactgtatttatcaattctgagggaaattaccttatcattttaccttttg

SEQ ID NO: 5152 - DNA, 854 bp, Oryza sativa
  ref <308>: DATABASE ACCESSION NUMBER: AK062344
  ref <309>: DATABASE ENTRY DATE: 2001-12-06
actccagttgtgatggccgcgtcttccccgcccgccgccgtgatgacggtcgcacgacagggcgccttcgccgcagctgccgccattgcgacatttgcggggcttcgtctgctgcgcgcgcgtgtgtatgacgcactcatcgtgaacctcacgaccgagtggtacgcgcaggtgctcgcgcggctgcccaagcgcgcctccatgctggacgttggcgtcggcacggggctcgcgctcgtcaacaacaagccgctggtgtgcgccaaggagctcacggtcgttggcgtggactacgatggcgattacgtcaagcgatgccgcgcgcttgtcgtgcagcggcagctcacggatgctgtgcgagtgcaccacgcgtccgtgtacgatttcaagggcggaccgtacgacgccgtctactttagcgcgtcgctcatgatcatgcccgacccggtcaaggcgctgacccacggcgcgtccatgctgaagcccggcggccgcgtgtacgtgacgcagaccatccagacccagcgatcccggctcgtggagctgggcaagccactgctcaagttcctcacgaccatcgactttggccaggtcacgtacgagccggatctgctcgcgacattcaagaaggctgggctctcggtcgtcgaggatgttgcgatctcgggatccaccaagacctccactcgctcctaccgtctttttgtgctccagccgtaacttgtgtgcggctgcggcatgggctcatgtacgaaagcaccttatcgtgataggctgcaagatttcatcatggagatagctttctacaagacgggatgcgaccgccacggatcaatacagactccaggttactc

SEQ ID NO: 5153 - DNA, 921 bp, Oryza sativa
  ref <308>: DATABASE ACCESSION NUMBER: AK062345
  ref <309>: DATABASE ENTRY DATE: 2001-12-06
agccaaccaaatccgcaccaaccacaccatgcctctcctcgcccgcgcgccaccgcctccaccaccgctccgccaccgcggccgcctcctcccgcgcttcacctcctcctccagtccccgccgccgccgccgcccacgcgccacccgcgtccgcgcctccggctccgacccgccgccgcagcagcagcagcagcaggtcaacctctccgtcctccgcttcaccctcgggattcccgggctggacgagtcgtacctcccgcggtggataggcctcggcttcggcgccctcgtgctcctcaaccacctcctctccccgtcgcccacccccgcgcagctcaggtcggaggcactcgggctgtgcctggccgcgttctcggcgactctgccgtacctcgggaggttcctagagggtgctggtgctgctgaacgtgtgcccttgcctgaggggagcaggcaggtgtttgccatgtctgatagcctgtcagcagcacagaaggaggacatggcgtgggcttcgtacgtcctgctgcggaacacaaacaccacatctgtcttttgattcttgctagctcatatcaattggcaatcagttgtgcatacgaggatattgggatccgcctgaagatatttccaaatatgccatgattgagtggttcaaaagtcagatgcaggaagctggaattgttgatttgagggaggatttgtacttccctaccttttctggtaaatgccactctcttaggccctgcagaatgccagagcatatttctatgtttaagttttgttcttttctcccccttttctggcataagtgagtctctgcaactgttttcttgtaacaaatggcaaagatttgtatgtgtggaactgtgggttgataacattgagatgaatgcatgaagcatcataccgtttgtgctg

SEQ ID NO: 5154 - DNA, 795 bp, Oryza sativa
  ref <308>: DATABASE ACCESSION NUMBER: AK062346
  ref <309>: DATABASE ENTRY DATE: 2001-12-06
gcttattacaacttaccaagagatttatttctaggaacttgtcaaacatcatgggtgcctataaatatttgcaagaaatctatcgtaaaaaacaaagtgatgtcatgcgttttattttccgtattcgaacatggcaatatcgtcaagtagctgccattcatcgtgcaccaaaacccactcgaccagaaaaagctcgacgtgttggttataaagctaaagctggctatgttgtctatcgtgttcgtgtccgacgtggttcacgaaagaaaccagtaccaaaaggtcaagtctacggtaaacccaaacatcaaggtatcaatcaattgaaattccaacgttcattacaatccgttgccgaagaacgtgccggacgtcgtttacctacattacgtgttcttaactcgtattggattgcacaagatgctacctataaattctacgaagttattcttgttgatccatttcatacaggtgttcgtaatgatcctcgtatcaattggatttgtcgtgcgaataagaaacatcgtgaattacgaggtttaacatcagccggcaagaaatctcgtggacttggtcatggtcatcgttattcattgaccacaggtggatcacgtcgaaaatgttggaaacgtcgacaacaactcagtcttcgacgatatcgttagaagacttgaacaaaatcatcaacaacaatattattcgaattcgtttgatttcttgcttattcatactatgatgattattattattgttgttgttgttttgtatttgttgagaaagaagaagtaaatttac

SEQ ID NO: 5155 - DNA, 537 bp, Oryza sativa
  ref <308>: DATABASE ACCESSION NUMBER: AK062347
  ref <309>: DATABASE ENTRY DATE: 2001-12-06
atggaaatgcagaaaaatttcttcccggaaatgcagaaaaatcaggtattagaggcggtcaacaatccttacggacaaaagaagcgttgcctaagaagaacattgacaggtccctggtaaaatttgagttattgataaccggagcttgacaagacacaccatattttaaccttaaggttcttgtacatattgtcaggatttcaaaactcatctctctgttgtaaattgatgatcaacagagtcgagtgtactagtgcttaacttgccctgtcaccttcaacttacagttctgcaagtcttctatcgtgctcttatgtccccctctgtgccccgctttctcttttcctaccctgagataagtgtgttgttcaatgtttttggtttcttggccccagattgcattgtctcagagagcttttgtagtttgccgacacggcaaacagctgtctgttctgggggtatcatgtcacaggaaggatgtatcatgaaggtgaactagagctacctgttgataatgaaggtgaagtttttggtttg

SEQ ID NO: 5156 - DNA, 699 bp, Oryza sativa
  ref <308>: DATABASE ACCESSION NUMBER: AK062348
  ref <309>: DATABASE ENTRY DATE: 2001-12-06
aataagttagtacaaaagtgattagttaaagaaaaaaatactactacatcgaaattttgaagtcttttatattttaggataaatttaaatggtaaaattttatattatagaatggaggaaatatgcaaagttttgtccattgactatgaaaagtcaggctgaaaaacaacaaatttaaacaaattaacaatgagttatttttttataaaaaaataagtaaagttatacctggcaaatccggaaaaactactcaaacggaccaggacaccgatcaaagttaacaatttttttagatcaatttttaaaatttaaccgtgctatcaccgcttatggaactaagcaccggtttgttgaaaaatgcgggggccacctatcagatgtcagatggaatggaatggaaggaaagaacaagacaaaggggagtcactaagatggccttattttattctaagtggggtcatcttagtacaatgagtgattctacacatgtttgtatacctttttcctgtttggtatttgtgtggtggatcctacattgaaccttcagaacaactctctaaagtctagattatattaaatctccaaatccctaaatattgccaagaactggttataaatggcagtgaaccggtaaactactctctctatccaaaatataaccaagaacaaattaaaaccgttcctctgaatatgggattt

SEQ ID NO: 5157 - DNA, 1015 bp, Oryza sativa
  ref <308>: DATABASE ACCESSION NUMBER: AK062349
  ref <309>: DATABASE ENTRY DATE: 2001-12-06
aaagaaaaatggttcgatgtggaaactatctctagttttttctggactgccttgctttggaacatcattagtcgagcaattcttctgaagaggaaagccatagagaccactgtttccattgtagatgtcaggatgttcattatagatgctatcaagttgtgtacctgatggtatccttcctgtcagattgttgttggcaatgtacgggctccaggtgctcgccgacgacatccaggacgacgccgggaacgtcacgcggttcgtcccgcgaacggacccggccattcaagacgagcatcgtgttcgcgcacgacagggagggcacgtcggtgctgttcaaggtgctgtcggccttcgcgttccgggacatcagcctcaccaagatcgagagccggccacaccgccaccgccatcccatccagttcgtcgacggcgccaacgtgggcacggccaagcacttcgagtacatgttctacatcgacttccaggcgtccatggcggaggtccgcgctgtcggagatacaggagttcacctccttcctccgcgtgctcggcagctaccccatggacatgacgccatggatgatgatcgatcaacaagactgatgctcaaattttatgtcgcaggagccggggaaaagctgcaggccaacatcagaattgcatctgggatgacgaggatattagctatttttttgggaccctggatccaaaggatcaatggtgcagaaggcattccacccacaatgagaatcgcttttagtttctgcagtgagcatatgtggtcaattaaaacttgtgctgacactccgtttctcttgctgggatgcggtgccttcagtcttcggaggcgtctcaaactttctatggctgcgatgcggtgccttcaacttcagtcttcggaggcgtctgaaactctctatgactgggatgcgtgggatgcgttgccttcaatctagagaggcatctgaaactctttgtatgacgaaaagatcataacatgggtcggtacttc

SEQ ID NO: 5158 - DNA, 471 bp, Oryza sativa
  ref <308>: DATABASE ACCESSION NUMBER: AK062350
  ref <309>: DATABASE ENTRY DATE: 2001-12-06
atttgccatggttagagtattgactattaccatcgtagctgcacaagacaccagtcagaggctttgcgcaaattgcagtgcgactgtgcaaattacaaattgcgcaatcataagcaaatggaaaaaaaaaactcaaatctagagtttcccgacatgatttcgcagaccatgcatatcgtggtcaagacaagaggatcattgataaattcagtttcttgaagcaagcaggtgcagagaagttgtaccctattttatgaggcatcacacaaatcagcggctggggaagctacgagctctggaactccctgtctgtcatcagtgtctagttcgtctctagctagttctcttgtacttcttgacttgttattgttgttcaggtcatctaactcctggggtttgttcagcgtgcaagtcaataaatttgtattgtgctattttgttaatgaaatgaaacgcgatcgtttggttttt

SEQ ID NO: 5159 - DNA, 560 bp, Oryza sativa
  ref <308>: DATABASE ACCESSION NUMBER: AK062351
  ref <309>: DATABASE ENTRY DATE: 2001-12-06
aaacgctagaatcgaccttcgcttgcacccgcgcgtgcagaacccatggatggggtcaccaccatccctcctctcctcctcctcatttgttccaaaccagtggaaagctagggttccgccgactcgcgactggagggcgctgctcgtcgcgccgtcctcgccggcgggagggccggtcgtccgtcagcatcctctcttccgttggtcatcctccctctctttcgctcgccgccatcgctttcttccactggttcactctctccgtcaagccgtttggtctctgctacgcccctctctttcgtcgactctctccgttgagctctctggtaagggctaggttgggcatctccttccctttctcagccgatttgtttggattagaccgtgtccccttcataaatatgctagatctactaaaagctgatatctttcttagttgatttcgatggaatgaaatgtctagtggcttgcttttttgttctaagatggccaatgatgactaatgttgctgatttgtgatgcttatgaacagatttttcctacacatattcctattttcc

SEQ ID NO: 5160 - DNA, 596 bp, Oryza sativa
  ref <308>: DATABASE ACCESSION NUMBER: AK062352
  ref <309>: DATABASE ENTRY DATE: 2001-12-06
tttgccgcgaatgcaacaacatactgtatcccaaggaggatagggaccagaagattctgctctatgcctgcaggaactgtgaccaccaggaggttgcagacaacaactgcgtctaccggaatgtggtgcaccacagcgccggagagttcacccaagtgctccaggatgtcgccggcgatccgactctccctcgcaccaaggcggtccggtgcgcggtctgtggccacggcgaggccgtgttcttccaggccactgccagaggggaggaagggatgaccctgttcttcgtctgctgcaacccgagctgcggtcacagatggagagaatgagatcaatttgtagtcaaccaagtgaagaaagtcattgatgcaaatgatcagagagacatatgattttgatttcatccaagagacattccatagaagcatagactgattgtatgtttaaatttttaaaaacacattcaggcatcggtattttgtgtaacttctgaaggaaaaggatcaagactactaggataaaacattctgtggtctattccttccttataaacaaaggatgggatgaggacagttttcttggtgattcaattctgc

SEQ ID NO: 5161 - DNA, 533 bp, Oryza sativa
  ref <308>: DATABASE ACCESSION NUMBER: AK062353
  ref <309>: DATABASE ENTRY DATE: 2001-12-06
atgtcgtcgtcgctgctgcagcagcagcagcagcagcagcaaccgcagtcgccgccgagcttggtcggggcctggctctgccagatctcgtcgggcctgcggcagcgtgaggcccgccgccggggcggccacgccgaggttgacgacgagcagtcgtcccccaagaacgccgccaccgccgccgggcggaataaggcggcgagagaggaagccaacaacaaggcttcaagcacggcggtgacggcgtcgtgccgcgccggcgcggccatgccggaggccaccgtctgcctgctcctcgaccgcttcgcccccagctagaggtttcgtcgacgaacgcacggcggcgaagagtatatatgtctgttcgtcgtgctgcctgagtacctgatgatcactgtaaatacggcttgtcgatctgatgatattcagatcttgccttttcatttcttttcgattcctctttcgatccgttctgcagatgtcaagcctgtgtacgtaagttgatgataaataaaaatggaaaaggggtgttg

SEQ ID NO: 5162 - DNA, 832 bp, Oryza sativa
  ref <308>: DATABASE ACCESSION NUMBER: AK062354
  ref <309>: DATABASE ENTRY DATE: 2001-12-06
atgcaaaacaaccagcaccggcggccgcagcctcacgcggcgacctgaaaacctcgcagccgtaaaaccctagaggcggattccggccgcagatcggaggcgcggcggcggcggcggcggcggcggcagaggaggagtgtccggtatgcagatcttcgtgaagacgctgacggggaagaccatcactctcgaggtcgagagcagcgacaccatcgacaatgtcaaggccaagatccaggacaaagagggtattcccccagaccagcaaaggctgattttcgcagggaagcaactggaagatggacgtacattagctgattacaacattcagaaagagtcaacgctccatttggtcctgaggctcaggggtggaaccatgatcaaggtgaagacactcactgggaaggaaatcgagatcgacattgagcccactgataccattgatagaatcaaggagcgtgttgaggagaaagagggtattccacctgttcagcagaggctcatttatgctgggaagcaacttgctgatgataaaactgccaaggattacaacattgaaggtggctcagtgctccatctcgtgcttgctctgaggggtggtcagtagatgtagtttccatgcccgcattatctctaaagggagaagcatatttgctattctatttctatctgtagttgctgcagacttatagctatatttggtaggtttattgaagtcctatgcgattggcgcattgtgtattggaatcaattgtcatctgtactggaaaggaaatattggaactaagttaagcagtagtttatcaattgccattctatttctgctgctgtc

SEQ ID NO: 5163 - DNA, 470 bp, Oryza sativa
  ref <308>: DATABASE ACCESSION NUMBER: AK062355
  ref <309>: DATABASE ENTRY DATE: 2001-12-06
aacaaacgctaaaaaagtaacagtttctgtactttattgaagagccaccgttttccgccgctaccaatcatgtccaagggaaagaagtctggtgagagcaagggcctcaacgcgaagcgcgtgaagaaggtgcttaaggattcggcgcgttctgtgacgaagggctcgatccgccgccttgcgcgccgcgctggcgtgaagcgcatctcgggcctcctgtacgaggaggtgcgcggcgtgctgaagagcttcgtggaaggcgtcgtccgcgacgccacggcgtacaccgagtacgcgaagaagcgcaccgtgacgactggcgccgttgtcgctgctctgcgcaagcgcggccgtgccatctacggctactagacgcgatgcggagcctgcccccagaccacgttttctttttccataaccaccagagccgacgtcgattccgccgcgagcgcgcgcacgcgcgaatgctg

SEQ ID NO: 5164 - DNA, 603 bp, Oryza sativa
  ref <308>: DATABASE ACCESSION NUMBER: AK062356
  ref <309>: DATABASE ENTRY DATE: 2001-12-06
accaccaccacgacgctttgtgatttgagtctcctctcgctcgcgtcgggctacgtgctacgtttttcttcttcttcttcgtcgggtttacgatggctccccgcgtggcggtgctgctgatggccgtggcctcatcgctcctcgtgatggcgtcggcgcaggaattcaacgcgccggcctcctcgccggcgccgtcgccgatggccggggcggcgcccgggagcgcgtccccgctcgccgtcgcgtcctccgcgctcgtcaccctgctcgcggcggcgctcatgcagtagacgacgacgcgacgactccggcttctcccgcgcgcgtggctccggatttggttgcgtcgatcgagctgcgatcaaatcatgcatagttggtttctttcttctttattataattccttcttctttgggggagagagagagagattattgagtgagggtagtttgatgttgagtggttcttgtgctcttgatctcgctgatggacattcttttctgtgtaccatttctgtacctcattaattactactactactatgtgccttcattcgtatgaataaatccggatcatttcatcttctgaaatgatccttttgc

SEQ ID NO: 5165 - DNA, 542 bp, Oryza sativa
  ref <308>: DATABASE ACCESSION NUMBER: AK062357
  ref <309>: DATABASE ENTRY DATE: 2001-12-06
gatgcttcgcttatgtatatggcgcggcgcaatgtgtccacggaaagaagctagtagtagtatggtgtagctgagctgagctgcttcatctgcatcctgcgcgcgcggcctttggatgtctgtcgtctcctcttcctgctgccttctttcctttccccttttgtgccttccacatgacacaagccatggcttttgcagcgcggcgcagcgcagccctgccccttgtttctcccctctctcggtatgctcgccgtgcatgcatgggcactggaaagagaatagcccatgcatagtggggagggaggaaagagaaatggattcggagagagatcatcaactgatgcaatgcaaggaccactcagtcacgggagggagcgtatacggtgatgctagcttctctccctctcacactcatcttttaccctcaatctctctcactcgcacacacaagaacacacacgattgcttttgttttatggtcgtttctttacattccagcgacttcgcaaactataatatcaatcatcagggcttttaagtgc

SEQ ID NO: 5166 - DNA, 687 bp, Oryza sativa
  ref <308>: DATABASE ACCESSION NUMBER: AK062358
  ref <309>: DATABASE ENTRY DATE: 2001-12-06
aaaaagaaaaggagcgccgtttcctcttcctcatcgccgcttgccgctcccctcagcttgccgccgccgattcatcaatctgctggtcgctgcattctactcgccgccggatctcgcgcctttgggctcgtggccagcaaatccgacggctggaggaaggtcgccggatcgggtgcgtcggagactcggagctcgtggagggaggcagcggggcagcgggttcctcccacagttggcagcgacaaagttcgttcgcgggctacaggcggacggatccggtggcagcttgggtcgcgggcggcggatccggtgtcggctcggggcatgggcggtggatccggcggtgacggtgacctagggcgcgaatccggcgagcacgggcggtaagtcccatggcactgctgattggagattgacaccacaagtcaaatcctcctccgtaaaatttggttagatcatctattgctctgccttgttgattgcttattgttagcagtcgtgtggaatcctttgtatttatgggttaatttcatccgattttgaacctaaatcgagtctgtatccatcttcctttcgtgttttcgtcgctctttttttaagacggacgacggaaacgttttaatttttttttcatttttttggatcattcacaaaattgaaattggattggaatttgaggaacggacg

SEQ ID NO: 5167 - DNA, 639 bp, Oryza sativa
  ref <308>: DATABASE ACCESSION NUMBER: AK062359
  ref <309>: DATABASE ENTRY DATE: 2001-12-06
atccccaccaagcccgacgcacccgcgccggcgccggccaagaagaagaagccctccccgccatccaagaagaagaagaagagctccaaggcccccgccccggcccccgtcgccgtcgccgagtcccccaagcactccaagaaggctaaggcccccgccgcctcgtccacggccgacgcccccggccccgccggcgacggtgtcgccgccgactccacgggagccgcagggaggaccagcgtgcaggcgatcgcgtcggcgtgcgccgtggcgctcggcctcgtcgccctcctcgcctaagcaaaacggcgtcgtgcaacgacgtgagcaacgacgacgacgcagatggcagcggccggtgcgccccaccacattttgcgctgtattttgctcgtcgattcttttacgggacgggagggaggaggaggagggaccttagctttggctttggctttaccactctcccaaccacatttgatgattgagcgatcgccatgcctcggattcttttgtttctttcttcttcttcttcttctctctgctacgcccacgatatgactctgctagctgctgcctgcccgcccttgtactgtaccactgagatcatctacttttaatttattttatgttgctgtcatc

SEQ ID NO: 5168 - DNA, 461 bp, Oryza sativa
  ref <308>: DATABASE ACCESSION NUMBER: AK062360
  ref <309>: DATABASE ENTRY DATE: 2001-12-06
gatccaatccagaccgagtcgccgtccgccgtccgccgtcccgccttgcggctgcgcgcacctacaccttgtgtcgcgctccctgcctccgtcccgcacggcgccgctccctgcctccaccccgtgtcgcgctctgcctccatcccgtgcggccgccggccatgcatctttgtccgccatggccatggagcaggaatgaataaaggaagctttctgctctctacttctccttcacagtatgaagcttaatttccgacatttctttttatggtgaaagatctcggtgttgttgtgttagcctttttatggggagatttcaggcttctctatgttttttaatcttttgaagatttcttggatggttttggatccatttagtcttgttgtgttcaatacttccattctatggatgaatggatgggacatattcacatggatatgaatcgtattacttgaatcat

SEQ ID NO: 5169 - DNA, 407 bp, Oryza sativa
  ref <308>: DATABASE ACCESSION NUMBER: AK062361
  ref <309>: DATABASE ENTRY DATE: 2001-12-06
gcagcatcaccatctgaggcaagactcacagaaggtctagcattcccttgtcatggccttcctcgtcgtctgttggtctcaaatccgttccatggcgaccgtgcgtcagagaagccatggctgacagaaggtccgcagcctgaaggaacgttgcatctgaaaagcctccggcgcagagggcaaccgagcatctttggcagtctcctatgtctccttgaatcgattataggtagtacggcatctccggaattcatctattcatcggaagttctatgctgtagagtagtgatcagttgatcacctgttcaatctcttactatgatcctatttcttccaattgtatgtcaagtatatataaaagcctattcaaatgaataattctatgtctcttgtggtggttgagctct

SEQ ID NO: 5170 - DNA, 534 bp, Oryza sativa
  ref <308>: DATABASE ACCESSION NUMBER: AK062362
  ref <309>: DATABASE ENTRY DATE: 2001-12-06
acaagatcacagaagctcacgtacaactctcaagtcaaaagcatcaagaaggcgctcatcatcctctccatcaccaacatgctcggcttcttcttcacgttcctcgtcccggagaccatgggtcggtcgctcgaggagatctccggcgaggacggcaacaccggcgccggtggcggcggcgcccctgccgctgccaatgccggcgttggcgtgagcgcttcggatgtgagcagggacgagaagttccctgcttcaagcaccgaatggcagacatccatgcacgcatgatacgctcatctgggatatgcatacctacacaataccagtacgtatacctacgcaataatagtactatattgatatatctgtattatgagagtggaaatggaccaaaataatggcaataacttgaattgccagatgctagcttgggaatttgatatacaagtatatatctccattaccatgttagagtaatatatatgtttgagtgtgtgcactcatgcaacaatagtatatatcgtgaccattcac

SEQ ID NO: 5171 - DNA, 686 bp, Oryza sativa
  ref <308>: DATABASE ACCESSION NUMBER: AK062363
  ref <309>: DATABASE ENTRY DATE: 2001-12-06
gtaccccaaccaccccgctctcctcgaggcgcagcagccattcgcctaaaaggaaaccagtactaacctcgggatggtgatggccgcgaccgcctgatgcgtgcgctgcggctgtcgccgtctcggcgcgggaggcggaggagaagctggcggcggccgggggcgagcaacggctgtctccccgtggacagccgcgtcgtcgacgccgatgaggaggagagcatcccctcattcgccgtcgctgccgggtggttgttggtgttgctggcgcgggatgtggcctccatggaacggccgcctccccactgcggccgccgccggcagccgtcgcagcgccgctctcctcctttgccgcgtcgccccggcggcctcctccccagccgccgaacagtttgcccagagaagaggagaaagaagaagagaagagagagagtatgaggaggaagggaaagagatggcgtggcatcctgacatgtggggtccacatgggtcctacgttgactcagccgctacgtaggataaaaccggggtcaacactatcgaaggagctattatgaccagttttgattagttaagggacggtcgatatctgattttgcggttgatggatgattttgtaacttgacgacaagtttagggaccttcgctgtactttttccttttaagagatgtttctttttcgaagc

SEQ ID NO: 5172 - DNA, 664 bp, Oryza sativa
  ref <308>: DATABASE ACCESSION NUMBER: AK062364
  ref <309>: DATABASE ENTRY DATE: 2001-12-06
tttgcaacatagattaaaagaaaagcaattcatcacacaaaatcttagagcaactacaccaaacaaaaacaagatttggagggagagaaaattgtgagtgagttaaggattgaacacggtaccttaaaattacaaccacacacaccccttaccatctccaactacaccaaacgaggttatcgtaacccaccgcaaaccaaaacgaagccttaaatgcttttaagccgcgtgcttaagaacttaatcgacgagagctaaccaagaaatcactagcccttgaccgctgaacactgaacagcattcttggccgtgaaaggcagggatttttattttcgaagctcactgaacactgcacaactagcggcataggccacagccatttcgatttataacgagttcacccaagaactcaactggaggacgccaagaactcaaccggaggacgccgtgttgctgactatgtatgtgaagccgatgcgcgccggcggcgccgcaaaaatttgcgagctgcagccgatggtcaactgcaaattctgtcgactgaaaagctggtcagataattgccgacatataaatatagtaacaaaaacttatttgattgatttctttcaaaaaaaaatataacttgtttgatggacaaatggccacataccttttacttttc

SEQ ID NO: 5173 - DNA, 614 bp, Oryza sativa
  ref <308>: DATABASE ACCESSION NUMBER: AK062365
  ref <309>: DATABASE ENTRY DATE: 2001-12-06
atcatccacaacccaaacatatctcatagctgaatactaccttatacaaaaaatttcagacaagaaagaaggagagcaaccatgatcagtgccaagaggctcgctcaaatggcaaagaagtggcaaagaatagcagccctcgggaggaagaggatcacatggacgacacccaaagcaaccgatgaatgctgcagttctgtggcagtgaagggccattgcatcatgtacactgctgatgggcggcggtttgaggtcccgttggcgttcctcgccacgatgatcttcgcagagctcctcaggatgtctcaggaggagtttggcttcacaaccgatggagggatcacattgccttgtgatgcagaggtcatggagtatgtcctgtgcttgcttagaagaaatgcatccgaggaagttgtcagggcattcctgagcaccattgtgaaatcttgccactatgggaatggctttgcacaatccttggggtctgtccaacaagtagcagcttctagcttctgaaagtttacgtatagctaatctttctccttttatcttcctttgaatgatgtaaatatggaaacatgatgggagtaatagacattgtgattattcatatc

SEQ ID NO: 5174 - DNA, 691 bp, Oryza sativa
  ref <308>: DATABASE ACCESSION NUMBER: AK062366
  ref <309>: DATABASE ENTRY DATE: 2001-12-06
attatgtcaacttctgcttctccgagaagaatgtctacaacagcaacaccaaaattgatgtctggaactacttcaccatcaaaaactcgaattgaaggatacatgtccatgacaccatggtacccctcaagcaagcaatcgtcagcagctaactcacctccaaggggacgtcccaacccaggtcgcactcctcgtattgatggaaaagaatttttccgtcaggccaggagccgcctatcatacgaacaatttggagcattcttagccaacatcaaggaactcaatgctcataagcaatcaagagaggatactctcaagaaggctgaagagatctttggtccagacaacaaagatctttacctctctttccaaggcttgctgaaccgaagcttaccatagagcatatgcttcacattggtcccgcttctgataatgtgaagttattcgattggattaacttattgcatctaaaggtgtggcgtccaatatgcagctgcaatttttgggtcatatgaacctgcattaggttatgaagtgatggggtctgtccgacatcagggtgtctgttttatttatgtatttgtaaaaaatgggtagcaattcattgcccatagtatccatgggagccagccttgtaaaattgcagatacaatcgtgaaagtatttaagcctcatggcaaccttaagttgc

SEQ ID NO: 5175 - DNA, 472 bp, Oryza sativa
  ref <308>: DATABASE ACCESSION NUMBER: AK062367
  ref <309>: DATABASE ENTRY DATE: 2001-12-06
attcgcttcgcgtgggcatcagacaacgggagaaagaactcagagacaccatggtcaagaacgtgcgcgtcacctaccgccgccgccactcgtacgcgaccaagtccaatggcatcaaggtcgtcaagacccctggtggcaagcttgtcgcgcagtaccgcaagaaggccaccgctggccccaagtgcggtgactgcaagcagtcgctcaagggcatcaagcacctgtcgcccaaggagtacaagacggtgagcaagacccaccgcacggtctcgcgcgcctacggcggctcgcgctgcgccacgtgcgtgcgccagcgtatcgtccgtgcgttcctcattgaggagcagaagatcgtcaagaaggtgctgctcgagaagctcaagaccaagtcggcctaagcgtcttcggaaactctacctcccccgttttagtaccaatgctaaaatggccatttgctgatgaaagcgcg

SEQ ID NO: 5176 - DNA, 452 bp, Oryza sativa
  ref <308>: DATABASE ACCESSION NUMBER: AK062368
  ref <309>: DATABASE ENTRY DATE: 2001-12-06
aaagatccagagatgagaaagcaggttcgctcaaatccgtacatatacaggggaaagctcccactgaagacctgtcatgaactcctgatggtcagcctagacattgagaagaacctgcatgaggtgacactgccgttcttggtcctacacggcggagacgacatcgtgaccgatccttcggtgagcaagctgctgttcgaagaagcatcaggcagggacaaaactttcaagctttaccctgggatgtggcatgctctgacggctgagcttcctgacgatgtcgagcgtgtctattctgacatcatctcctggctggacgaaaggtcggattgtgcaggcagtgttcctgaaactttctgagagatgtcaatcatgtgccattgcagtttccctgtgcttgtccgctgtaaatttgtcctaccgaaaacgatatactgaaacttgttctgaat

SEQ ID NO: 5177 - DNA, 677 bp, Oryza sativa
  ref <308>: DATABASE ACCESSION NUMBER: AK062369
  ref <309>: DATABASE ENTRY DATE: 2001-12-06
ggagaaattcgccacgcccaaatgctgccgaccacctgccgcgcgccgccgtgcccgtggccgcggccgctcgccgccggtagagccaggggaggctatggcctcggccgcgctcgcggggtgaagaggagagcggcggcggcgcgcgggatggtggtgcggtgcgggctgctccccgtggacccgtgggcgcccaccatggactcccagagcgtggcgtcgcagctgttcgccgtctcgctcttcccctacctcggcttcctctacttcatgaccaggtccaagacggcgccgggactcacgctcttcggattctacttcctcctcgccttcgtcggcgccaccacaaaagttcattatggaacctcgctgtctaacgtcgactggctgcacgggagtgcagaatcactacttactcttaccaatttattcatcgtgttggggttaaggggagccttgaggaaattggaggacacaaaagagagcgcttctgaagaatcccaggacattaaagaaaaaggttctatctagttactttgttttatatttttatcagcacagctgaagtcccatgtagtgatgtagaatgtatatttcttctgctaaaaatcttgtgtaagggtgcgctgtactgtaagaaattaagaaccctcgaagatttgctctgtgcatatgct

SEQ ID NO: 5178 - DNA, 780 bp, Oryza sativa
  ref <308>: DATABASE ACCESSION NUMBER: AK062370
  ref <309>: DATABASE ENTRY DATE: 2001-12-06
atcacaggcaagctagctggctcaaactggtcatcgtcagaaatggctctcaaaaattttcttgtccttggtgtcttcctggctgccctgctcatgttctccctggatgatgtagctcatgcaagagagctcactgaagccaatgaatctgagggaaagaatgtaaaacctacgggagggccaggggttgaggatcaaaagtggggaggtggatactaccctggtggaggatatggatatggtggtgggtacggtggagaatatggtcgtcctgggtacggtggtgggtacggtggaggatatggtcatcctgggtatggtggtggctacggcggtggatatggacgtgggtatggtggcgggtacggtggttcgggtggaggatatggcggtggatacggaggtggatacggaggtggatacggtggtggtgggggttacggtggaggatatggtggtggtggttggtactaagaagcagttgaatggtacataatatgcatgtttgtgtgtgctaaataagtcatgtatgacagatttgcttgaacatgtaattgcttcaatgtaattgcttcaatggtggtgtagtagtgagagctttgaagacccacctttgtttggtatttatgtttcatgcatgtattttagaatctagtattgtaatatggcatgtttgaaagtaattaaatctcgtccttctttcatgaacagttctttctctcgttgatgtaaaaggaacatttctttcttaatacttccaaagagaaatctatcgatcct

SEQ ID NO: 5179 - DNA, 563 bp, Oryza sativa
  ref <308>: DATABASE ACCESSION NUMBER: AK062371
  ref <309>: DATABASE ENTRY DATE: 2001-12-06
ctttttctcctctaacggcgatgagggcgacggttggagtagcagcgtgcggcggcggccgcgccctcccctccgtcagatccggggaggggcggccgcggaggtgcaggccagcggtggcatgcagcggcggtggggaggggggatgcggtggtggcttggcggtggcgccctcccctctcgactctctctcactgccctcggccggcggctggccggtggaggcggtagcagcggcggacccccccccctctctgccagatccagggaggtgcggcctagtggcgggaggcggcatgctgcggcggaagggagggggttgtggtggcgggacgagaggcggtggtggcctggcagcggcgccctccctccgtcggatctggcggcccggtggcaatgttctgtgaatgatttctttgatcaatgtttatgtgaatgatttttgtgatttctcattgaatgatttctgtgatttctctgtgaatgacttctgtgaaatatttctgtgaatgattggggattggggatgagctcgatgcatcggctcgatttgagcctttttt

SEQ ID NO: 5180 - DNA, 1105 bp, Oryza sativa
  ref <308>: DATABASE ACCESSION NUMBER: AK062372
  ref <309>: DATABASE ENTRY DATE: 2001-12-06
gtgagtgttctgagctttctgtccgcatccgcggatcttgaggttcttgatgggggaaggcagggccatgcagttgcagtatcaagcggcctggagatggatttgattctgggcagttcaatgatcaacttttactgtaaggttggtttggtggaggctgcagaggtgatatttgagcagatggttgaaagagatattgtcacctggaatctgatgatttcaggatatttgcaggatgggcaaactgacaaagcccttaccacatgccatagaatgctggagagtggcctgaagtttgattgtgtgacgttagcgtccgttatcatggcttgcgtgaaatcttacagaatggaggtgggtggagctgctcatgcttacgcagtgagaaacaatcttgaatcagataaaacggttttttgtagcctgatagaattgtattcaagtagtgggagaatcgaacaaatgcgcagagtatttgattcaattagacggagagatatagccacgtggaaagcgatgatctgtgcttatgcagaccatggaatgggttctgaggctctgaagcttttatatcaaatgcagcttgaaggcacatctccaactgcagcatgttgggattcagtactttcagcttttattcgaaatggacagttagatgatgccctaagcaccttctatgagatgcttcaaacgagcacacgccccaatctgcggacatggagtctgttaataagcggcttgtctcgaaatggtatgcatcctgaggttatgaatctatgttgcaagatgcaagaagtagagccagcacctagtccaacaatattttctgcagcacttcttgctgttaaatctgcagcttcagtacagtatggaaaagcaatgcacgcatgcattgttaagaagggcctattattgtcgaaatctgtggtgcagtcgctgctaaacatgtatggtagcttcaatgatagaggcacagtagagagtttgctaagatttcttgctgctgcacagtaaataatttcagggcgtcaagaatgtggtgctagtaaaataggacatacaggtttacaggttacagctgtacataaatacatggcgtttgcac

SEQ ID NO: 5181 - DNA, 560 bp, Oryza sativa
  ref <308>: DATABASE ACCESSION NUMBER: AK062373
  ref <309>: DATABASE ENTRY DATE: 2001-12-06
attctcggattctccagcttcccaacaccccaccttctgcctcccaccaccatgttcaagaccaccgtcgtgttcgccgccgtcgctgccgccactgtctcgggctacgccacgtacccggccttctgcccgcagtctgagcttgccaagctcgcgccgctcgccctcctcaacagcgatgacatcaaggcgtgccagaaggcgtcgggctggaccttgatcccgccgtcggccgaacccacggtcgcccaggagaccacgatgtgctcgacccagagctgcaagaacttggtcgcggccgtgcagaagctgaacccggcggactgcttcctgtcgctctcgaacaaccagcagggcatcaacgccaagaagctcgtcgaggagtttgcccctttctgcgccctcctcggctaagcaagcggatagcacgggggagaagcgagcgtggttgcagttccagactgggaaatccccacattggcgctgcacgtgtgccactaccgcttccattctcctttcgtaccgccataatcaaattaaaaaaaaagatacttttctgt

SEQ ID NO: 5182 - DNA, 909 bp, Oryza sativa
  ref <308>: DATABASE ACCESSION NUMBER: AK062374
  ref <309>: DATABASE ENTRY DATE: 2001-12-06
aaacgaaaatctcccgtctcgtcgtctcctccgctccttgcgccagccaagacgagccgcggctgccgatcgccatcgcaggggagggggagggggatcctggcaatcaaccatggttttccttaaggtggagatgtctttgaatgtgttgatctcacctagccagctgagcccccagggtctcttgctccgcaaggctgtcattgtccgccttctggaggatatagcaaaccggaaggcctccaaggatcatggttactacattgctgtgagtgagctgaaggcgatatcagaagggaaagtgcgtgagctgaccggagacgttcttttcccggtgacgttcacctgcatcacgcagaagcctatgaagggcgaggtcttagttggctccgtggacaagatcctcaagcatggcattttcctcaaatctggaccgatagaaagcatctttctgtcggagaagacgatgagcgacttcaagtacattggtggggagaacgcggtgttcatgaatgaacactcgaagctggagaaggacaccgtcgtgcgcttcaaggtcatggggttccgctggatggaagccgatcgccagttccagctccttgctaccctggctggtgactatcttggaccactatgaactgcttctaatggtggctctgctgcacattttgctaccttgatgaatggatttgaaatgtgttagccttaacctgctgtctgtagtttggtgtcgtgatgactgatcatacctgtatcgtatctgtgatgctggttgttgatgtaaatggcattaggccatatgtttagcatttcagcatgatgagaattgtcatggctgatgaacctctatttcctatggctgctcaccgttctaccatgcatatatttgctgccttcctttctgag

SEQ ID NO: 5183 - DNA, 639 bp, Oryza sativa
  ref <308>: DATABASE ACCESSION NUMBER: AK062375
  ref <309>: DATABASE ENTRY DATE: 2001-12-06
attcgcctccccatccatcccgacagttgcgcaggcgtgcggctggcggcgcgccgccgagcaggcggggcttgtggcgccggcccggccgcgcgactcgtgtcctcgtgctcgtggtcgtgggatgtggggcgccgcgccgggcgcagggcggtaggcggctgcgccactgagggctgccggcacctggcctggccggctgaccggctcagccgcgcagggcaggaccgcagaagcaggagcaggacagcaacagcaagccgcgcaggacaggagcagcacaacagtgacaacacaaactgaaacatgaagacgaagaagggccagctgttgatttaaactcttttttggagaaacaagatggggcttcattaaaaaaaattcaatttgcaagctaaggacaaggacatcatcgattattttcaaaatatcaagcgtcgaaaagttaatctctaaattgattgacttggacatcagcctcaaagagtggtacatgttccctgcagtgaaccttgtcactttactatcttagaatgtcaatgtattggaacaaacatgtaactatgaatggggaattggatactaaagaaaattttgccttctctgcatagagcagagaaaaaaaaaagcaaatttccg

SEQ ID NO: 5184 - DNA, 636 bp, Oryza sativa
  ref <308>: DATABASE ACCESSION NUMBER: AK062376
  ref <309>: DATABASE ENTRY DATE: 2001-12-06
aagccgccattgaccaccttcaattcattcctctttcttcctgtcaccattccaaagtatatacggcatggacgacgacgagaagccgccggcggcggcggcgggcgccatcggcggcgaggtggcagcgggtgccgtcgccgtggacgcgtgcctggtggcggcggccatggcgggggcgtcgctgctggcgtggtgggccgtggcgttccacccgtccaacagccggctgtggatggtgcccgtcggcctcgtcctcgcctgcactccggccatcgtctacctcgccctctccttgcaaccgccgtctactgtaagtgatcacaaaggatctcacgccgccggccacccgccgccgccgccgccattgtccatggtggtaatcgacaagtagctagctagctagctagcagcaacttacggtacacggacaatatatattgatagtgatcgtgcatgtaataattaattctttagttcttggagttcatcgatctcatctttttctgcttttctttctatggattatgtgcgtgtgtaattatgtacagatcacatgtagtagagctcagtgcatgatgagaattgctgtacttttaccgaattaattaaataaaggagaagctatagctagtc

SEQ ID NO: 5185 - DNA, 651 bp, Oryza sativa
  ref <308>: DATABASE ACCESSION NUMBER: AK062377
  ref <309>: DATABASE ENTRY DATE: 2001-12-06
cacgtagaaacggaaggagaaacaaacaaaaggcgccgagtaacgcagatagagagttgtttccgcaccgagcgcgtccgcggcagtgtgtgtgtgtagcggtagcgcacgcgcggctcgcgggcgcgccggttgcaccagctgtgcgttgcggcgacgatggaggtgacggccgagttcggcggcgcctactacggcggcgcggcgggccgcgagaagaaggcgctgcagcaggggtgcggggaccacttcgccgtggacgacctcctcgtgttgccctacggcgaggaggatgaaacaacaagggagggtgaggccaccggcggtaaggaggaggctgccggctttgggaacgcgtcggcggactcgtcgaccataacggccctggatagctgcagcaattccttcggcctagccgacggcgacttccccggcgagctgtgcgagccggtaaattctttggccaccttttgtcttgttaattaccttggattttgcagtagaggtgccaatcatttctggcagctcctgcatatcacttcttctgaaattgtcgtccctttcatttgctgaactgatctaaactagagctatgtattttatcatcttgttttacgcctcgagagaatttgaatgcattattagaaaaag

SEQ ID NO: 5186 - DNA, 626 bp, Oryza sativa
  ref <308>: DATABASE ACCESSION NUMBER: AK062378
  ref <309>: DATABASE ENTRY DATE: 2001-12-06
catttaatcccgtccccatccgagcgacagcagcaaccgccgtgatcttccccggatcacgccggccgcgcggatctcgtggcctacacaaccaccgttcttgctggtccatgcactgaatcgccggagttctcggcgacgacgaggagagaggcggcggcggcggcggcggtggcgggatgtcaatgccgtgggcgatggcggtgtcggtggtggacaaggtgtgggcggtgctggcggcgtgggtgtcgtcgtgcctgacggcggcgaccgccgtcgcgcgagcgctcagggcgggggacatcggagtcctccacgtcggctgatggcggggtccgtcgtcggagtcctccacgtcaggtcagagcttggagatggttaggtttcttgcgggggatgcaaagctttagttctgagcttttcttttttttttttttgtgatgtgttatgcaactatccatgaagatttatgtgatgggaggtgcttggggttagtgtttcacctgtaattaacatttgttttaggtctctgtattctttggtcttatcagaaaaagatggtttgtgtataaagttttatggctctttctagaaaagaaattgttagctccctcgtcgaggaaggt

SEQ ID NO: 5187 - DNA, 803 bp, Oryza sativa
  ref <308>: DATABASE ACCESSION NUMBER: AK062379
  ref <309>: DATABASE ENTRY DATE: 2001-12-06
aatttgctctgggcaccggtgacgtccgcggacggcgcggcctcgcctttcctccagggtgccatcgggcgtccgtccatcgttgcggccttcgatccaaggcgccacctccatccgtccagtgcgccgccgggactgccggccatcgatccagggcgtcgttgcttcacaaagacagcctccccgcttcttctgctagccatctccaccctccccgctgcagggcaccgttgccttcctctttcagccatctccgccccctttgctcctggtcatcgtgttcgccccaactccacacagcaccagtgagtacggatccaaattaagctccacactttgtcagtcatgccatgtccatagcatgcagagtggtttgttattctaagccttgtttagttccaaagttttttttttccaaacttccaacttttcatcacatcaaactttttatacacacaacttttctatcacatcgtaccaattttaaccaaacttccaaacttcagtgtgaactaaacacagccctagtagctcgcatgaagtgagtcttcagtattttagaagtgccaaagtctgtttctggaactctgaaccttctgaaactcacctgaagtggaagtgtggaactctaaattttctttagtgtagtattcaggtagtacacaatgcttattcagatcttgtttgtggaacataggatttgttaggaatttacatcagacatgtattcagaactttttgaggacggctgatcttcaagctccctgttccttctttagatgattattggagtattgttcttg

SEQ ID NO: 5188 - DNA, 714 bp, Oryza sativa
  ref <308>: DATABASE ACCESSION NUMBER: AK062380
  ref <309>: DATABASE ENTRY DATE: 2001-12-06
caaaagtgcgggtttccgaagatggaatgtctaatgtttttttacctggggaattaattggactattgcgagcagagcgagcagggcgggctttggatgaatcgatctattatcgggcaatcttattgggaataacaagggtttccctgaatacccaaagtttcatatctgaagcaagttttcaagaaactgctcgagttttagcaaaagctgccttacgaggtcgtattgattggttgaaaggcctgaaagaaaacgtagttctgggggggattatacctgttggtaccggattccaaaaatttgtgcaccgttacccacaaaacaagaacctttatttcgaaattcaaaaaaaaaaactatttgcgtcggaaatgagagatattttgtttctccatacagaattagtttcttctgattctgacgtaacaaacaatttctatgagacatcagaatcaccatttaccccatttatatgatttaaggatacataaagcagattttttactttaaactagatttttgaccttagaacgctaagaggttagattttctatttttattttaatttaaaaagaagtttagttaattcattaaggttatgcttataccatgtagaaggttccatcggaacaattattatttatttcaagctatttcggctctttcttaatcttcgaaaagaaagaaatttcgtaatggaaaggtaggatg

SEQ ID NO: 5189 - DNA, 702 bp, Oryza sativa
  ref <308>: DATABASE ACCESSION NUMBER: AK062381
  ref <309>: DATABASE ENTRY DATE: 2001-12-06
aaccacagcaaccaagcagcagcaagctcgagctactagctagctacactagctcgattagttgcagcaatggcggcgaaggcggcgcttgtgctggcggtgagcctcctggtggtggccatggccgtggcctgcccggactgcccttcgccgaagccaccggcgccgaggccgaagccgccgacgcctcactacggcggcgggtcgtcgtgcccgcgcgacgcgctgaagctgcacgtgtgcgccaacgtgctgggcctcgtcaaggccaaggtcggcgccgtgtcgccgtacgagccctgctgctcgctgctcgacggcctcgtcgacctcgacgccgccgtctgcctctgcaccgccatcaaggccaacgtgctgggcatcaagctcaacctccccatcgacctcagcctcatcctcaacaactgcggcaagatctgcccatccgactaccagtgcgtgcactagatcgagatctagagagctagtgttgcacttgatcactccatggctgggagtaccgtatcttcatgttgtttttacccccaatatcttgatgtgttgttaatttcttgctttttttttcttttgattctatggttcgtgatccgttggtagcgctatgatcattgtatttttttttgtttctcatgatttgttatagtttcgtcaataaaatggaaatgtatttttttgtcgcat

SEQ ID NO: 5190 - DNA, 1145 bp, Oryza sativa
  ref <308>: DATABASE ACCESSION NUMBER: AK062382
  ref <309>: DATABASE ENTRY DATE: 2001-12-06
caaattgatatcaaatgaaagccgttctcctcctcgctctcatcgcagtctctgccttcgcctactctgctcaatatgaggaactcaacctcctctggagcacctggaagaatctccacgccaagcaatacactgctggtgaagaagctgccagatatgccatcttcgttgataactacaacaaggtcaccaagtacaacgctgaacacaccaacgttaagctcagacttaacctcttcgctgatatgactggtgctgaattcaagcacaagcaagctggttgcgccttcgttgaagacaacgttgaactcatccaagaaaacaccgtcaagttcgaagctatcaaggctcctgcctctgttgattggagaaacaacaacgccgttaccccagtcaagaaccaaggccaatgcggttcatgctggactttctccaccaccggtgtcctcgaaggtttccattccatccaaactggacaactcctctccttctctgaacaacaaatcgttgactgtgcctccagtgctggtcaaggatgcagcggtggctggccttatctcgccgtccaatatgctgctcaagctggtcttgaacaagaaagctcttatccctacactgctgaaaacggcaactgtaactacaaccaaggtttgaccaccaagaccaacaacggatatgctttcgtcaccaactacaacgttgatgccctcaagtccgctattgccactatgccagtctcagtcttggttgaagctgatcaagacgtcttccaattctacagcagcggtgttgtcggtgccggcgacggttgcggtgcttcccttgaccacgctgtcttggctgttggttacggtagcgttgatggtgctgatgctttcttcgtcaagaactcttggggtgacagctggggtcaagctggttacatctacttctccactgatggtagcgctaacggtggtgctggtgtctgcggtatcctctctcaacctgttgttcccaactaagagaagggatggcttaagcagacttatttcatgactaaatatcagatgatactagtttaaatcatatgatacggctgcataaatttatatcatacatgaaataagattcactatagctcaattaactattgaaaacaaaac

SEQ ID NO: 5191 - DNA, 701 bp, Oryza sativa
  ref <308>: DATABASE ACCESSION NUMBER: AK062383
  ref <309>: DATABASE ENTRY DATE: 2001-12-06
aaaaaaccaacaagaagagttgttgcttgcgctcacgcgaagcgaagaggagcaaggcgagaaaagagagagagagagagagagaaccaaaccaagcacgcgaccgagatgagctccttcttctcgacgatgttcacgccgccgcccgccgccgacgacggcggcgactcgcgcgtggtggccgtccactccacggccacctgggacgagcagtggggcgcccacaagagcaaccccaacaagctgatcgtgatcgacttctccgccacctggtgcgggccctgccgcttcatcgagccggccttcaaggacatggccggacgcttcgccgacgccgtcttcttcaagatcgatgtcgacgaactttcggaagtggcgaggcaatggaaagtggaggccatgccgacctttgtgttaatcaagggcgggaaggaggttagtcgcgtggttggtgctaagaaggatgaactggagaggaaagtcaacatgttcatttcatcctcctcatcctaaatcccaaacttatgcctgcattcctcatttagtaccaggctctggtttctctcggtgctaggagtgagagaccctgtggttgtcctcttaaaaatgctgcaaaattcgatgtgaagtgggagtaaacgcgtttaagacaataaacttgtgatacttgggaatggaaatgtaattgcctgttgctcttg

SEQ ID NO: 5192 - DNA, 1104 bp, Oryza sativa
  ref <308>: DATABASE ACCESSION NUMBER: AK062384
  ref <309>: DATABASE ENTRY DATE: 2001-12-06
accgcaactactgcacgaaaaaaaaagtttcgctcccctctcgcggcgtatttcccttctctctctctctcttccccgtcgcgtggccggcgggaggcgcggcgaagcgcgcggcgccggtgtccaggattttatgcatggcagaaaacatgaaatttgctgaagggtcgtacgtggccaacgaattggatatgctctctctggcttcatcagtatatactgctccattatttcaaacagaatttgattcagtttatgtgcctgaatatggggacgtgggtaacagtcaggatggcctatttcctggtttattcatttcagatggctttgttttccctccaagcgagcatgagaatttgccaatagaatctgatcttgatggatcgaacaacaataacaatggtcaagaaagcagctgtgctgggaatatctatgagggttgtaatgaaccagccaaagaagttgatggcagaagtctgtctgttagtggtgacctgcactctgccaacgaaactactatcccgaatttagagccacctgaaatacgtgctgaacaagagaaagataatgcaaccatcaagtgtgatcttccatgtgaaggatggttgaaaaggaaatcaaattgtctttctcaccgtatgaaaggagtgacgacagtctgcactattgtggcagctggtgctttgatgggctttgttataataggtcagaggtggcagcaggacaaattgcaccttcatcattttcagttcaatatcggcactgagggcgtcaacagaatcgttggaatattcagccgttgtaaggatgcgcttcccagtagtcagcagctcaagtctctgcttccgactcgcgtgctccctcaagagccagtgagtgcgtgagtgggactcgcgtggcaaattttgatggcaggcatcgctataattgagtttttgttttctgatatggttggaggtagcagattattttttgtactagcgcaaccgtttgatctttgtccttgtgtaaatttgtgggggtattgatcttgctcgtggaaccaaaacatcattatttgtactctgtactccgtacgtactaattgtaaaaatacaggagaac

SEQ ID NO: 5193 - DNA, 612 bp, Oryza sativa
  ref <308>: DATABASE ACCESSION NUMBER: AK062385
  ref <309>: DATABASE ENTRY DATE: 2001-12-06
gtcgacgcagataaacaaaacaccgatcgagtcttcgagctcgttcccgtgagttcttttattagtttgctccatcgatccccctgctctcttcctctgcttctgttgttagggttcagaggacgaacaacgccggtggttggactactctcgcgctcggggagatggcaagcttcggcgaagacaacagagcagcgacacagagggaggagggatcgtcccagaacaaatatggaggaatttctccaaagaaacctctcattaataaggaccatgagcgtgcctatttcgattccgccgattgggcacttggcaagcaaggcgcaagcaacagcacaaaaggcacaaccgagcccctgaaacccaagttgcagcgcacggcatatccccagcttcctccacgaaggcctgcgtgcacgtcaggcgcgacggaatagtgtgctccaatctcagcagtcagcactacatgtttacatttgtcgctgagactgtgagagtatggcagggcaatcacagggggggcatagagtttgatccaattattaattgggatgtaaatatggatattgtcagcatgtagctatgtgcaatggaatttacaacatttctgtg

SEQ ID NO: 5194 - DNA, 464 bp, Oryza sativa
  ref <308>: DATABASE ACCESSION NUMBER: AK062386
  ref <309>: DATABASE ENTRY DATE: 2001-12-06
agacaagaacccaactcctctttctctcccggtcaaaatggtcaagcagaagaaccacacggcgcgtaacaacacggtcaaggcccacaagaacggcatcaagaagccgaagaaccaccgttaccactcgaccaagggcctcgaccccaagttcctgcgtaaccagcgttgggccaagaagtacaacaagaagcacgccaacaagtcggtcaaggccgaataagcgttcgttgcattcttgggggtcgaggcgtcccgtgcgccaatggatttgctcgaggaatccgtgggccacaggatggcgtttgtcttcggttgctagtcgtagccagggagaaaagggggatttgttgctctctctttttgcttgctcgcagagaggcttatgccagcggcgcgttggctggcgatgtaaatcaacagcgaactgcgcatggctccgttctttcgagcaggcaacctct

SEQ ID NO: 5195 - DNA, 560 bp, Oryza sativa
  ref <308>: DATABASE ACCESSION NUMBER: AK062387
  ref <309>: DATABASE ENTRY DATE: 2001-12-06
atgaaccaaatggcggcaatgagctcttgccatcacctttcttcctccatttccaccccaagatttggcacaaggaaggcaaccatggccaagttcgtcagagctccagtgcacagctgcagctgcagcaatgctcacctctcccaaactgcagcacctgccaagatggtatttgaagaccaggtgagaggagtggtatgttacagagatgataaggggaatatgatctgcgaagggtacgatgaagggcctaggcttggcatgcggctgccggagaaggcctgcttcccatggcctatgggggttcaagtcaccgatttcatcgagctgtcgacgcttcgagttttcgaagacgtcgattctctgcagcccaggaaagatcagaaggggaagctctgaaataaggtttctgaaattcagacatacaaggcctaagaattgctacatgaataagctgaaactctatccattttcatatatactcattatcatttcttgctgataaatgagttttagtattgttcgtctcaattatcaactggatccttctgtattccttc

SEQ ID NO: 5196 - DNA, 513 bp, Oryza sativa
  ref <308>: DATABASE ACCESSION NUMBER: AK062388
  ref <309>: DATABASE ENTRY DATE: 2001-12-06
gatgcagaaattgagcacagcaactacccaagccatccagaaggctaaggatgggatctcgacaagcagcagtaacagcggtgatctcgtggagcaatgtgttcagtgcccagcaagattttccaccgtgggggccttaatcgagcattgcgaaaagtcccatcagagcaactcgcaatcaagtcgtagcagagtgacggtcgatgtctgcccgaaatgcagcaaggcatttcgagatccagtgttgcttgtggagcatgttgagagggaccatggaggaacgtcaagagcgtagatctgcttatgtttactgtacctgtgtaacctgtaatttgcttctcattggtcaatggtcatcacactcaataggatttggttggattgtgctctattattacggttgggttcaaaatgtgcccatgaaagaaggtatagtttgttggctgtttcaaggcaagccattgtgaattgaacctcattctagacaccaggaaatcaaatttctgattagtt

SEQ ID NO: 5197 - DNA, 745 bp, Oryza sativa
  ref <308>: DATABASE ACCESSION NUMBER: AK062389
  ref <309>: DATABASE ENTRY DATE: 2001-12-06
acttttcgatttgctcgtgcctcggtcaaatacgcagtctccccacccaccaccttcctcgagaatgttctccaagctcgtcgtcattgctgcgcttgcatgcgttgcgctcgccgaggacgtccctcagtgctcaacgtcggatgccttggccgtcaacaagattgagaagcccgccgccgatttgtgcaaggccgagaccggcttccgtgccgtgccgccaacgggctccccggacgacgcgcagctcacgaaaatgtgcgcgtcgcccaactgtgttcagttcttcacgggactcaaggctcagtacacgctcgactgtgagttcaagttcccgaacagccccgtgaccaacctgctgacgatcatcaagggctttgagccaaactgccaacgtctcggagtgacggtgccgccgtcgacgccggtcgtcaccacggccccgccgagcaccacggccccgccatccaccacggctccgccatccaccacggccccgccatccaccacggccccgccatccaccacggccccgccgtccaccacgaccccgccgtcaaccacggccccaccgaccaccacggccccgccaccgtcgactccttcggttgccccgcactgctaagtctgcgattgagcttcactacgcccttgacaacttccgccactgcatcgaatttttgatcgtctgtctgttggcgaagaggaacgctgtgttttgttgcatataaatataagacgctct

SEQ ID NO: 5198 - DNA, 824 bp, Oryza sativa
  ref <308>: DATABASE ACCESSION NUMBER: AK062390
  ref <309>: DATABASE ENTRY DATE: 2001-12-06
cgcttttgttggccagcagagcttcgcgttgctgcccgagtcgacactgaaggacagcctccgcgtgggggcgcttgctgctgcgcccgctgcaatcgacgctgccctcgaggcttcctgcgtgcagggtgtcgtcgctgcgaagggaggcctcaacgcccaaatcgcttcgagcgccttgagtggcggtgaacggcaacgcctggcgctcgcgcaggcccatcttcgacggacggacagccctgggacgtgcctcgcgatcttcgacgaagccaccagcgccctcgacgttgaaacggagcgccgtctgtacgcgtcgctcgctgcggaggtcaccacggtctcggtagcacatcggctcttcaccgtgaggcatgcgcaagtggttgtggtgatgggcaagaacgggagtgtggtcgaaacggggtccttcgcggccctcgctgctcaaccgaactcggctctgagcgctctcatcgccttgcagcagttgtcgaagccaggcgctcgagtccgaaccgcggatggaagcactgttgacagcagtatcgacgacgacgacgatgacgatgacaacgaatccgatgatgggtcatctaccacgggcgatggaacgtcgacgtcagcctcgagcgctggcaactcgactgaaactcgccggcggcgggactcgatcgaagcagcactcaccgccttggagcaggcggccggctcgcatcctgaagctacggcaatcattgctcgcctacgcaaacagatccaactgcactgatcgacgggaagaagcttccggcctccagttcgcagagccacgtttcaacggc

SEQ ID NO: 5199 - DNA, 486 bp, Oryza sativa
  ref <308>: DATABASE ACCESSION NUMBER: AK062391
  ref <309>: DATABASE ENTRY DATE: 2001-12-06
tttgcattgcagacttgcagtgtgtgtctctgaagacgacgctgcaaatcgccgtctccgtgtgcttaattacgacaggtttgcaaggaacagcggctgttgatgttgctgatcgtcagcaattccgtgtttatgcgtgtctgattgcaggaaaaatgagtactagtagtacctggtatgacgatcagttccaggtcatcagtagaaatggcgatcttccacacaagatttttgtagagcaagagtacgttcgatgccctggatatgttttagtacatggtaaatctttccctcggccaataataacgctgtggtatcacaagttcacaaccccggagactgatcgagacaaagcaaggagcacagcggcacattgtgttcattttttgtttcatcgacaatacattttcaccctgaaaaggattatgtgaacggagcttccaatgtaaattgatacatgtgtggtcaataccataaacctctcat

SEQ ID NO: 5200 - DNA, 764 bp, Oryza sativa
  ref <308>: DATABASE ACCESSION NUMBER: AK062392
  ref <309>: DATABASE ENTRY DATE: 2001-12-06
gaagatcgaagaaataatcccccggtagggagcatatcgctcctccgctgctgtctcgcgcgagcgtccgccgcctcgtctcggtgaagaatcgccgcctcccaccctctgcgagcgccgccgccctccccaactccggcgacgactattcccaagggtgcagtggaagtgtaaacagtttctgtggaaggacagaaaaggcattcatttgctaaatggcatcaaagcttcaagccttttggaaccatcctgctggccctaaaactattcatttctgggctccaacatttaaatggggtatcagtattgccaatgttgcggactttgctaagcctcctgaaaagatatcctatcctcagcaagtcgctgtggcttgcactggagtcatttggtctcgctacagtatggttatcacaccgaaaaactggaatcttttcagcgttaatgttgcaatggctggtacaggcttgtatcagctttctcgtaaaataaggaaagattatttttctgatgagaaggatgctgctgcatcactggaaggataatgacgacagattagattaaccgacctacagcctttgagccagtctcagttcactctggagtctggacgtactgcagatatctctggctttacccaagacaagaacctgttgtttctttctgtatttcttctacacccactgctggagcagttgaaaatattgtccccaaaatccaaataatgcttttttgcattttgtgaaaataatatgcatatactc

SEQ ID NO: 5201 - DNA, 1024 bp, Oryza sativa
  ref <308>: DATABASE ACCESSION NUMBER: AK104922
  ref <309>: DATABASE ENTRY DATE: 2002-08-28
atgcaagctaaacccatcaccatggcaacggcgtcgatgctcctccggagcctcctctgcctcgccgtgctcgccgcggccgcggccgccgctcagccgcggttgcagtgcctggagaacccgccggagctgacggccgccggcgacggcgaggccggcgtggtcgtccaaaacctgggaggattcgcggcctacgtcaccggcgccgcccactccggccgggccatcgtcctcgcctccgacgtctttggatttgaagcaccattgctgaggaaaatagctgacaaagttggtgaagcgggatattacgtcgtggtgccagatttcttccaagggcgaccttacaatggagacccaagtataaacattacacaatggatcatggctcactctccggtgaaggcagctgaagattctaaaccgatctttgctgctctaaaaagagaagggaaatctgttgttggagttggaggttattgttggggcggaaagttagctgtcgaggttgcgaaaaccaatgaggttggagcgattgtcatctcccatccttcatcggtgactgctgatgatatgaaagatgtcaaatgccccattgaaatccttggagctgagaatgacgctgtaacaccaccaagattagtgtaccagtttgtgaatgccttgcgccaaagacctgaggttgattactttgccaggatctttccaggagtggctcatggctttgcttgcagatataacgccagcaacccgtttgctgtcagaactgctgaacaatctcttgccttaatgcttgactggtttgagaaacacttgaaatgacattagctaatcatgcatgcaatgcaaggccagtgcaattgtttatttccatcaaaatacattgctagtgtccatgtatatcctggtgttaagtgaaacttatataaataagcactagtgtaaagtgaaagtatgtgttgaatatggtgcgaagtgaaacaaagtgtactttatgaagtgcaaaatgcaaactctttttgttccg

SEQ ID NO: 5202 - DNA, 781 bp, Oryza sativa
  ref <308>: DATABASE ACCESSION NUMBER: AK062393
  ref <309>: DATABASE ENTRY DATE: 2001-12-06
agcatacacactactatcatcgatattttgtttgagatgtgcaacagacaaagcccgaccgaagaaccctaacaatggcgtcgaagctcgtgacggcggtcgcccgtcaagcggcggccacatctcgcgccgcccgcttagctgcggtggcgcgccatgacgcggcggccgcatctcgctccgccggcttagctgcggcggccgcatctcgcgccgcccgcttagctgcggcggccgcatctcgcgccgcccgcttgaagcctcgtcccccactggacgacgctgcccgcctctccttccgctacagcagtgaacctccagatgatggaaagtgcgtgacaaaagaggaccttgagtcggacgaagccgtgtgggccttatttgagcgctattgcaagtcatacaacaggaagtatgatcatgctcagatggttcgccgcttccgtatattcaagttcaatgcaaagagaacatattgctggaaccagtatcttcataaagacgtaaaggaattagctcgcgccaaaaaggatagggatttaggactacctgtcgactcttggtacctacaaaaagagttaggcgaatacgacgatgggggggagccacttactgaatattggcggaaattttgatggaaaaccatctgccgctggtgtgtcctgcatcactccacatgttactgcagtaagagcagtttgctccccaaatcacttcactgtaataactagtagtcctttgacgttccgtgtttcttactaaggatgcgttcgtttgggtg

SEQ ID NO: 5203 - DNA, 930 bp, Oryza sativa
  ref <308>: DATABASE ACCESSION NUMBER: AK062394
  ref <309>: DATABASE ENTRY DATE: 2001-12-06
agcacaacaccacaaaccaagatgagtaacaacagcatggctacttccaccatcctgctcttcctcctcgccgtcggcggcctcgccgccgcccacggcgacaccatccgtctccccagcgaaggcgacgcaccaccgcagcccgccaaaccctgggactgctgcgacgatatcgagatgtccccgctaaagatcttcccgccgctttaccgctgcaacgacgaggtcaagcagtgctcggccgcctgcaaggagtgcgtggcggcgccggcggccggagactccccctgcggcggcggcgccgccctcgtctgccgcgactggtactcgacggaggaccccggcaagccgtgcacgccggagcgggaatggccggagcggacgacgaagaagaggccgtggaagtgctgcgacaacatccggcggctgccgccgaggatccacccgccgttctggcgctgcgacgacgagctcaagcccggccagtgcttcgccgcgtgcaaggcttgccgggaggcgccggggccattcccggggccgctcatctgcgacgacgtctactggggcgccgacccgggtcccttctgcacgccgcggccgtggggggattgctgcgacaacaccacctgcaccaagtcgatccctccaatctgcagctgcggcgacaaggtggcggcatgcgacggcgcgtgcaaggattgccagccggtggcgtcgtcgtcggagccgcctcgcttcgtctgcaaggatcagttcaccggacagccagggcccaagtgcacaccatgcactcagaactgatccttgcagatatgatcgatgtccgtcaataactccagaccaagcagaagtacttgatcgttcgttcgatcatccagagttgctatagtctatattctctctggtttcattttaattgacgttttgaac

SEQ ID NO: 5204 - DNA, 706 bp, Oryza sativa
  ref <308>: DATABASE ACCESSION NUMBER: AK062395
  ref <309>: DATABASE ENTRY DATE: 2001-12-06
atgtaccatcttgctagctagagcttgaaatccctcctaactgtgatagatatacctagctaggctgatctccatcatctgatcaaagaggggcggtgtagaaagggagggagaagatgttccgcactggagccaagaacatgagcagcgatctcccggttgaaggtgtggtgagggtgaggaaggtggagaagatccaggcttacaacctcgtcaccaagccatcagcgaccacaagcaggatatcgccgataacaggtcaggccgaaagcatggccgtcaccgttgttcgggttggagctgtggctggaaaaccagacgacatcgtcccagtggctagaatgaacaactaagttatgatcggagaaatagacggtgtacgtcatcgtctagtggctatacataacaactaattagcacgcatggtttactagggaaaatgtgagtttctacttgggataactagggatgatggttataggctctgtcatatgtcatgtgtaactggccagtcatctaccacggtgtcgctagatgccatgaacgtaataatccatatatgtataagtttattatatgtcaataattgtgtgacatgcttgtaatgacatatatataagatacaaaagtggctactaccagtcatgtaaagggctaaaaggccccattttgtgtcttgaaacttcatggtaataaattgttttag

SEQ ID NO: 5205 - DNA, 1092 bp, Oryza sativa
  ref <308>: DATABASE ACCESSION NUMBER: AK062396
  ref <309>: DATABASE ENTRY DATE: 2001-12-06
catcacaagtaaatgcaatctctctataatctgtacaagatgatgctagtcgtcctagctcttctcggcgtcgcgacggcggcggcggcggcggccggcgacgttgtgtcgtacagctacccggccttcaacgcgacgacgacacgcgacgacagcctcgtcgccgccaccaacgcgtcaatcctcaccaccgcccgcctcctcttcgaccccgatttcccccacggcttcaacgtctccgagggcttcctgctcctctccggcgacatcgacgtctggcgcgacggcgtcggctccgccggggcgccggctcgcgaggcatccttcaacacgacgttcaccgtcgtcgccgccgcctctcccgtcgcgttcgtcgtcctcctcgacaggtatccaccgctccttgaccagagtggcctccgtgggagcaacgtctcatccgccgccgatggcgacgacggcaacgccacgaacagcctcgtcgccgtcgaggtcggcacggtgaagtcctacggcagagagtcccccgacgtcggcctcaacgtcaccgtcacgccaaaccgcactacggcgccgagcggcagcacggtgtggatccagtacgacgccgtcgagcaccgcctgtcggtgcacgtcgccgccgccggcgagccacggccatctaatgccctcctcgacgtgccgctatacctcgccggcgggcgcaccacccagaccgcgctcgtcggcttctttggcgggacgatcggggatatcatcgtcggcgtccgtggctgggagctgaccgtggagaggttgcgcggcgatgacggcggcggggggaagaagaggacgtcgtgggtggtgatactgctggcggtggtcgggtcggtggcgggcgtggcggccatggtgtccgtgctggtgtgtcgctttgtgcgcaagcgacgacacacggaacctaagcactagtatcatattcatataggactatgtataggtgtataagcttgtacgttaactagcttatttcgttttcaatatttcctcatctttctacggatttgttatatatagacttcctgcgacagaaaattggataaataactttcg

SEQ ID NO: 5206 - DNA, 743 bp, Oryza sativa
  ref <308>: DATABASE ACCESSION NUMBER: AK062397
  ref <309>: DATABASE ENTRY DATE: 2001-12-06
gaaattccccacacggccaccaaccgtgccgatggcacccgccaccgccaccgccgtggcgtccccctccacctcctcccggctcctacaccgcagcctcctctcgccaacacccacggccgctcgctgcctccggccgccgctgtgccgcgggcgcctccgcaccgttcgccaggttgtcgccaacggcgacgtctcctcgccgtcctcggacgtggccgccgaggagtccgcggcggcccccaagatcggcaagcgcgtgcgcgtcacggcgccggtacgcgtccaccacgtctccaaggcgccggacctggacatctgtggcatggagggtgtggtcaagcagtacgtcggcatctggaagggcaaacgcatcacggccaatctccccttcaaggtggagttcgagctcagggtggatgggcaggacaaaccggtccggttcttcgcccaccttcgagaggacgaattcgagctcgtcgaagacgaatagctgaataggtctcttttacagaataatgtgctctcgtcgtctgcagtctgcagatgcagtatctgtatattagaagagaagattgaagagggtgcgaggagatcgcaagtaagttgttgtttgtttacttgtcgcgtgctcttcctcactcttttgtagttctgttaaacaccaacattttgagatttgagaaactgagaacggttcggattatgacaattatgaatgaaagtggttatactgatggttc

SEQ ID NO: 5207 - DNA, 726 bp, Oryza sativa
  ref <308>: DATABASE ACCESSION NUMBER: AK062398
  ref <309>: DATABASE ENTRY DATE: 2001-12-06
gcgaaatgtcgcgtgctcgcgtcacgagctgctgaaatacctcgctttctccttctccagctccggtgatcatcggctgatcgccatgccgtcgtcttacctgatgagcaggaggttctcctaccgcaggctcaagaagcttccaacggcggcggtggcggcgccgcctgatgtgccgcagcagctgcaggagcagtactacgcggctatcaccgccgccgccgcggccgccgcgcagcatggcggcggcggcggcattggcaggaggaggaggaggaggatgaggccgaggctgaggatctcgaggctggcgagggtgctgcggaggaaggcggcggcggtgggcggcgcggtgagggcgtcggtggcgaaggtggtgcggcggctcagggaagggagcccctacgtcggggacctcttcgccgggaactacatgttcatgcaggtcaccccgtcgccgaccatggccgccgccgccggcctggccaagaacggcgtcgtgccgtactaccaccacggcatcatcggcggcaagaacagcaagctcggcacgacgtgttcacctagcgtgatgtacaaagttaagttcaattagtttgatttgacacgtactactacttaattggatatcatctcgtcattatcttttccttctttttttttttacgattgtcaaagtgtcaaaataattagttactcgagtaaagtaaagttaattacttctgt

SEQ ID NO: 5208 - DNA, 488 bp, Oryza sativa
  ref <308>: DATABASE ACCESSION NUMBER: AK062399
  ref <309>: DATABASE ENTRY DATE: 2001-12-06
aacacatgcgtggcacacgaggagccgcctccaactcccaagccgacggcggcaatggcgcggccgcgcgggagaggcgaggcgcggcggcggcgggtactgggcgagggaagagccgatcttcttcgcctacacgtggacaggatacggcgttcacatactaaagtggtataatcgcttcgatcgaatcgtttttttctaggcttggagcgcgtggatttgtagtctcctcactcagttggggcgcgttcgcgtacatccgtgttggtgttctcgaatctggaatggaggagagagtggaggaaatttgcagctagggttcgtgtttgggatgctagtgtttggaatttgccaatattcggattgatggcccggctctccgacctatttcgtactagtagaaattattctccaatatgcgacctacaatgtgcgaccctttaagcatgtcgatgattactatggttcaatcagctttggtgtggttt

SEQ ID NO: 5209 - DNA, 553 bp, Oryza sativa
  ref <308>: DATABASE ACCESSION NUMBER: AK104923
  ref <309>: DATABASE ENTRY DATE: 2002-08-28
aaaaaatcttcggccctgcaggctgcagcctcatcgctcgtccctgcagcctcccgctgtcctgccagattatctgcctttgtttgtttgatggcctcacctgcatcaccgagagagttcactcaggaagctgcccgtcagtctctgattgcgatctcccggtctgttccagcggcaggagaagccgtcaacatcaagtcaccgagcggcgccatggtgaatggccaccaccacgacgatgacggggcagagaagtacagatcaaagctcatctccatctccaacctgtcgcctgatgcccagcctacgccgtgctctcccaaggacaccgctgctgcttaggcttaattaaccgtgtgaccatgttactgcttacacttccaagtgtggatatcgtgtcccagcgtgtgtcgctaaatgctgagactgtgatcaggacccttggccttaataactgccatgactgtatatggtcttgtgatgaactgcccagtgggatactgcccttcttatgtgtgaaagatgcatcatggcctgaaatcttctcgcgtgt

SEQ ID NO: 5210 - DNA, 608 bp, Oryza sativa
  ref <308>: DATABASE ACCESSION NUMBER: AK062400
  ref <309>: DATABASE ENTRY DATE: 2001-12-06
cccctcacaggcagcgggcgggcagccggcagcggaggagctcgctcgggcagccggtggcggaggcggaggtagaaggcgctcttcgacgacctccaccaacgccctcgtcggcgccgccccgcccgcgactgggcgccgcccctcctaggaccaggtgatgccctcgacatgtcgagccaccgaactcgcctcgccggatcaccgccctcaccgcgatatgccagaggttattttggtcatttatgcaaaaacctgacagatcaatggatgctaacatcagtgaactcacggtagtggcatgagagggtgtgcaaatttgattcaatggcatataaggaaagagccaattttgtgtggcatatcagggatcggaccaaatttcaatggcatataagggattctctcttccatcaatgatgaccttttatctttgaaggttctaatcgtgacacgtcatcaccaatgaggattgtttgatgaaacattttgtttgatgaaaacaacacatagaaaatagggaaaccctgtattttattaatcacgattcattatcatgaatgtttacaaatacatcagggctcccacaggagttcgccttttgcctt

SEQ ID NO: 5211 - DNA, 973 bp, Oryza sativa
  ref <308>: DATABASE ACCESSION NUMBER: AK062401
  ref <309>: DATABASE ENTRY DATE: 2001-12-06
caagaatgtttacatatgatccaaaagcaagaattacagctcagcaggctctagaacaccggtactttttatcagtaccagcgccaacaaaaccatcacagcttccaaggccaccacctaagggtgattcagggaataacaagataccagacttgaacctgcaggacggccctgttgttctgtccccgccaagaaagttgcgcagggtgactgcccatgaagggatggaagtccatatgcatcgggcggatagaacagaagagcatccttcaggggcaaggcacatggatgacatgtccagccagagttctagaataccaatgtcagttgatgttggagctatttttgggacacgacctgctcctagaccaacgttaaacagtgccgacaagtctcgtttaaaacggaaacttgatatggatccagaatttggatacacagagtaaatcaccattttttccatactggcttgttgatttttaaaatattctttggggagatagttccactatctaccaacaaaagaggattgtgtcgaaagccataaaaacttcactgaagggcgctgacaggatggcacagccaactatgctgttatcgtttttgactaccaaagccggctcaggaagaggaaactgaagagttacgtgttacgatgctaatttacaccaggacgtgcacatgccatttcattttggctggcatacataaatctgtaatctttattgcatagatgagtttgcttgtgtgagcatgtttcttccagtgttcgcaaagattattatgaagtttatgtctcaagttctttctggtgtcaattttcgttcacttcttgtatggacattgaattttgattgttgtttagtcggtcatcttattcttaggtacagtaattcttgtaaccaggagcggcttatattacctgagtattctgacacgtcttcctgcaatacgctgtaacaatgcatgagtg

SEQ ID NO: 5212 - DNA, 419 bp, Oryza sativa
  ref <308>: DATABASE ACCESSION NUMBER: AK062402
  ref <309>: DATABASE ENTRY DATE: 2001-12-06
ctctcccctttctcttcgtctgcaggcggcgacgggtgttcgagggccgtagcggcggcagccagcgggagggcgggcgctgcctagagacggagcggcgacgaggcgccctcgtcgtcctcaaggcgtcccgacggctcccgccgcccatgcatgtcgcgacgcctgtgccgccgtcgccgcctcccccgccggggctctgctccacgttggcgtcggcgccgccggcccacgcacgcgcacacatggtgctctgccttctccctgtacctctccagtgtctccctgtgcctctcctcgtgctcccctctcatcagtagctggctagcttcacacgcaaaatacattcacacgcatcggctacatagctcactctcactgacatcatgtcacgtcaatgcaaggtgtttgttgctatc

SEQ ID NO: 5213 - DNA, 653 bp, Oryza sativa
  ref <308>: DATABASE ACCESSION NUMBER: AK062403
  ref <309>: DATABASE ENTRY DATE: 2001-12-06
atagccagattgaattccccgacgagaaatccgccacagccgccgcgttgcgccggcggcgatggatcgcggcggccgcccggggtggctgccgtcgctggggttcgcgttcctgagcttcaactgcggcatggcgatctaccgctccagcagcgacccctccgcggtggccttcgtcgtcgtcgcctacctcgcgctcatcgcgctcttccgctgcctccacctgctggagcgcgcccccgcgggggggcaggcccgggcgtcgatgaaggcggcggtgtgggggctctccacgctcctcacgctcatgttctcctacaaggtcgccgccatcatgccgctctggggcgccgcgggcgtctgggtgatggggctcggcaccatcgtcgccggcttctacgccttcttcgtgcaccgcgaggccccctagatgatgatggcgatggcgaacttctgtgagatcgatggattcccttttttaatttctagcagtcccgccaaccgctgctggctccataccactgcactcctgtatggtctacccgttgtctcccctgtttattttcattgagattttaaaaataaaacatgattgttattgcgatttatttttactttataaaagtcatgccaatctatgctgcttaacgtcc

SEQ ID NO: 5214 - DNA, 729 bp, Oryza sativa
  ref <308>: DATABASE ACCESSION NUMBER: AK062404
  ref <309>: DATABASE ENTRY DATE: 2001-12-06
acacaaagatcatctcgaacacctactccgacaccggaagtaaagcagcgcagcaacagcaaagaaatcaacccagaaagaggaaagaagatcatctcgatcatctctgcgcatacatggggaactgcgccgtgacgcagcacgccgtgtcgtgggccgacgacggcgagtgggagctgccggagtcgggggaggaaggcaccgcgccgccgaggagcggggctcacatgacggaggtgaccatcaggatcaccaagcggcagctgcaggagctggtggacaagagggcggccgccgccggcggcggccacggctaccacgtctaccggaagagccggcggtcggccgcggagcttctggcggacatcatgaacgccggcgaggtctaccaccagcactacagggtggcgcactggaagcccgcgctgcagagcatcccggaggccgccatggagtcatgacacgtcctgcagtggcgtggccaacttcgtttgcttttctctggctgcatccttgcagcttcgttcgatggaacacagcttttttgtgacctatgggtgttgttgttctctcctagctcagattccacgaacgatgtaaattagtaggatgattaagtgatgacagatacaacggtgtaaagaagatgatctgtcgtccacaatccattactgagacatggaaaatggagaattaattcatgtgaaaatgcatgatgatcatgggagc

SEQ ID NO: 5215 - DNA, 590 bp, Oryza sativa
  ref <308>: DATABASE ACCESSION NUMBER: AK062405
  ref <309>: DATABASE ENTRY DATE: 2001-12-06
agtgcaagggcacatgaagccagcagagattccattccattgagaacttgagatagtgctgctcaacagccttctatagtgcatgcatacaatggggaaatcaccagcactaccactctactatcttcttatcaccttgttggcattctacttcttgattgttccttccaatgctatacctctctcaagagtgcaaaggctgcacttgcaagagtccagtgagatgccattagtcagaggcagcacagcaaagccaaagatggaaatggagagaccagttgttgccctagaggaggacgccatgatcaatgcgaggatggctttggagacacaggactatgcaccctcaggcccaaacaaccaccacaagccaccgggttggagctgagcagctagctagctagctaggattcatatatatcacctatatcaaagtgtgtgcttatatcttactcatgcagtctcatgtgcatgtgcccttcccttcatgacgattttgcaaaacctcttgattggtagtctgagtcttgtgacatagcttatgtatgagatgtggctgtgagtcagcacaggtggcaacgatcacgtgt

SEQ ID NO: 5216 - DNA, 926 bp, Oryza sativa
  ref <308>: DATABASE ACCESSION NUMBER: AK062406
  ref <309>: DATABASE ENTRY DATE: 2001-12-06
atccaaatccaaaaacccattataatccataaacaaacaatcccctcctcctctccaatctccattccctctcgagaagaagaagaaatcgcaacaatttgacggccatggcggtgtcgatcgagctgaccaaggaatacgggtacgtggtgctggcgctggtcgcctacgcgttcctcaacttctggatgagcttccaggtcggcaaggcccgcagaaagtacaaggtgttctaccccaccatgtacgcggtcgagtcggagaacaaggacgccaagctcttcaactgcgtgcagcgggggcaccagaactcgctggagatgatgccgctgttcttcgtcacgctgctggtcggcgggctgcagcacccgctcgtcgccgcggggctcggggtgttctacgccgtcgcgaggttcttctacttcaagggctacgccaccggcatcccggacaaccgcctcaagattggggggctgaacttcttggcgatctttgggttgatcatctgcacggcttcgttcggcatcaacctggtcctgagggaatccatctgagctcttcagttgatccatgagctgaccagctgagagcttccgttgcgacttgtgatgttgcctataggcgtataggtcttgtgacttcagtcagctagattttagtctctgtttttcctttggtgttaataaggctggttgtagttccatcttaaaaatacgactacatggagatggatttgcagtcttccctgttcctttctactctacttcctttgtagaggggttgtactgttaagatttacctttcaccacatcatcagtgttaagtgcagttgtaaatttctttataagtttatcatgtcttgtcctgcgatgggaaatgattaacaacgtcaatgcagtacgtttttttatattattttccgtcct

SEQ ID NO: 5217 - DNA, 749 bp, Oryza sativa
  ref <308>: DATABASE ACCESSION NUMBER: AK062407
  ref <309>: DATABASE ENTRY DATE: 2001-12-06
ctctctgtgtgggctggcccccggccggcgggtggccgggtggggaggaggtcggcagggcgaggcgagagaggcgcccggcgacgggcgatgtggaaagaggtgctcgcgtcgatgcggtcgtcgtcgccgccggcaaggtggggggaggtggaggcagggaaggggaagagtggagggagtgggaagggcggcgaccggcggcgagagtgcgtggagagggaggagacaaggaagccagcggcgagcgcgcaggtagatcctcttcatcgccactttgggccgcctcgtcgcccgcaggaggtggccaagtcgatgtcggcagttctacgtcgcctccatgtactggttcatcaccaccctctccaccgtcggctacggcgacatgcacgccgagaacaccggagagatggtctacaccaccgcctacatgctcttcaacctcagcctcaccgcctacatcatcggcaacatgaccaaccctgtcgtccatggcaccagccgcaccaggaaattcgttagtagtcactttctttgatcgatcccttgctgtttcttgatcaacagcaattctttggtgttctatcttggttcagtatactctagtactcacaagtcacatcacatgatggtttcttggcgtgtgttcttggttttaatcacatgatctcaatgtgatcatgtgatttttatttctttccaattcttgttggatgttcgtgaggagtagttgatatcttctgtggtgt

SEQ ID NO: 5218 - DNA, 606 bp, Oryza sativa
  ref <308>: DATABASE ACCESSION NUMBER: AK062408
  ref <309>: DATABASE ENTRY DATE: 2001-12-06
tcctcctcttgcgccggtgccgacctcgcctcgcctcgcctgcgtcgcgtcgatctcgccagcggcggcgccagccggccggcgtctgctgcgtcctccgcatcctcgctcgccgagagttggggtcaagcaaagttggttgttttttactcgaatgtcgtgaggaacaccgaggaatcctccagtttcgcatgagacccatatgttgaacaaagtaggaaggttctctgtactgcaagtgtttggatttcctcgagccgaatgagctttcactggtggatgtggtaataaaagtccctgttttcaggatttttcatggacccgggaaaacacaatggaatgagtctgaaggacagaagagaattagtatatgaagtttcacaatggccacaaggtgcctctgagattttacaatgttggactcgcagagatcttcttgagcttatctgtgctgagttgggcaaggagaggaaatacactaatgttccaaaatctaaaatgattgcttatctgttaaaattagttttacgaaagaatggacagccaaaggatgataatgcaaatgcttcaattttggggcagaataacaaagatgacacagagaag

SEQ ID NO: 5219 - DNA, 887 bp, Oryza sativa
  ref <308>: DATABASE ACCESSION NUMBER: AK062409
  ref <309>: DATABASE ENTRY DATE: 2001-12-06
agcaaaaagacccaaggccaggtgagctctctcgctcgcccgctcgcacgtgtagcggacaaactcatcgctcggttgagttcttcttcttctcctcctcctcctcgtgcgcgctctgcaagcctgcaaccccatgagctagctagctcggcgaagcggccggcggcgagagagggggagagtgccggtggggacggaggagatcggtccgtacgtgctgccggccggcgagccgacgtcgggcatggacaccatacggtgctgcatcgcgtgcatcctgccgtgcggggcgctggacgtggtgcgcatcgtgcactccaacggccgcgtggaggagatcagccggccggtgctcgccggcgagatcatgaaggcgtaccccaagcacgcccaatgccgagctgcagaagggcaagatctacttcctcatgccggtgatggccccaccggagaaggagaaggagaaggagaaggcgaaggcggcccaagcgcaggcgcccgcggcggcgaggaggcggcggaggaggaaagaaaccgctgatgaggccgccggcggccgagctgccagcaacgcagcggccgcgccgcccacccgcgtcggctcggagggcgagaaggagcggctgctggccaacgagaggtacctgtcggagatcatgaaggagaaggcgtcgacggcgagagaccggcggcgcgggcgcgtcgccgtgtggcgacctcacctggagagcatcaccgaggatgacttgtaatcaaacgaggtgttcgtttttttttcttcttcttctctattttttcccattgggttcttgtttttttacttagtttcttttgccaattccttctgtttgccctccgggtttttattttttatttttacttttgcc

SEQ ID NO: 5220 - DNA, 620 bp, Oryza sativa
  ref <308>: DATABASE ACCESSION NUMBER: AK062410
  ref <309>: DATABASE ENTRY DATE: 2001-12-06
agatcccgctcgcctctgatccccccggatccgatccgagatcctccacccatggcgtccggccggtgctgcacgttcctcgagatcctgctcgccatcatcctcccgcccctcggcgtcttcctccgcttcggatgctgcagcatggagttctgcatctgcttgcttctcaccatccttggctatgtccctggcatcatctacgcagtctatgtgcttgttgctcttgactcagaccagtaccagagggaatatcatacccttgcttaggcagtccacttcaattctgtcgaaacctatgctctatccagaacagccaagttctgctgttgaattggtatctggtaacttcgtctgggttttttgatatggcgttgtgaatcttgtgattataaagtagaaacagtggttcgtatcaaggaggacgaggaggcacctagtcatttggtcgttaaatctccctattcatctgttttgtgctaaatgtataattttatctggatctcttgactccttatttcagtctgttaaatgctcaaactgtggtctggtctccattctgtaattttgattcaagaaaataagttgttgagggtaaatattattggtgtttgtatgtc

SEQ ID NO: 5221 - DNA, 1175 bp, Oryza sativa
  ref <308>: DATABASE ACCESSION NUMBER: AK062411
  ref <309>: DATABASE ENTRY DATE: 2001-12-06
actgaccacaccctctcgtccgcgtgacatctggatcgccggcggaatcgagtatggaggaggagcggcgcgtgctcgtgaccggcggcaatggtttcatcggatcctggatcgtgcggatccttctcgcacgcgggtacgccgtgaccgcaacctaccagccgggcacggacgctgcgcacctcctcgccctcgacgacgaaaggctcctcctgctccccgccgacctgcttgatgcgggcgccatctccgcggcggcggcagcgggcgggggctgccgggcgggcgtgctgcacgtggcctccccgtgcacgctggctgacccgcgggatccgcaggccgaactggtggagccggcggtgcggggcacgctgcacgtgctggaggcggcgcggggcgcgggagcgcggcgcgtggtggtgacgtcctccatctcagccatggtgcccaacccggggttggcggcgggagagctcgtcgacgagcgaagctggacggacatggaattctgcaaggcccggggcaagtggtacccggtgtccaagacgctggccgagagggcggcgtgggagtacgcggcgcggtggcccggcttcgagttggccaccatcctgccgtcgacatgcctcggcccgctcctgtagcccaccctgaacgccagctctgtcgtgctgcagcgcctcttgcagggctccacggacgaccaggcggactactggctcggcgccgtccacgtccgcgacgtcgccgccgcccacctcctgctgctcgaggctcccaccgtctccgggaggtacctctgcaccaacggcatctaccagttcagcgacttcgcacggctagctgccaggatctgccccgcgtacgcccacgccatccaccgcttcgaggaggggactacacaaccgtggctcgtgccgcgcgacgcccgtgacgcagcacgccggctcctcgacctcggcctcgtcctcactcccctcgaggaggccatcaaggacgcggagaagagtctcaccgataaatgcttccttccttgatactcataataattactgtacctataggagtagtatattgtttccttcattttgttttaagactcaatttatacttagtaattgaaccgtgctaacgctacggtaatatttagtaatgcaaattaaactattaaagtt

SEQ ID NO: 5222 - DNA, 957 bp, Oryza sativa
  ref <308>: DATABASE ACCESSION NUMBER: AK062412
  ref <309>: DATABASE ENTRY DATE: 2001-12-06
atcgactcgactcactcgagaatgcgagaatctcgactcgagcagacaggaagaatggcttcctccacctccgggagaagaggacgaggacgactcctctcgcctgcggcggttgtgctggcggccgtggctgtgctgctgtcggcgtcacaggcactggcggcgccgtgctacccgcgcgtgttcagcttcggggactcgctagctgacacgggcaacggccctttcctctacggcaacgagtcccgccggccaccgctgtggccaccctacggcgagaccttcttccaccgcgccaccggccgggcctccaacggccgcctcatcatcgacttcatcgctgacgcgctggggctgccgttcctgcggccgtactggggcgggcggaccacgggggacttcgccagcggggccaacttcgcggtgggcggcgccacggcgctcagcccggacttcttctgggagagaggcgtgcacgtgcgcgacaccgtgcacctcgacatggagatgaactggttccgcgatctgctcggcctgctctgcccagacgatcttgccgagaccgagggagccacggatccgggtgaaggccaagacccgcaagaccttgagcaagaagcgggagatgaagcttcggaggatccctatgcctactaccaggagggagatgaagacgaaggcgcccagtaggtcttagtacggtcgttgcctgtggcaatggcatgccgctgcttaaattctgctgccttacctatttctgcttttggatgtattccggaccgctcggtccgatgatttaagactatgcctgcaggcttatgatgtaataattcgtactagacattcgtgtatgtgtatttggtatttcagctatgaattcgtgtgtaccagactacttgatccagggaaatggtactgtttacacgattgattcctgttataaaaacgggggtccac

SEQ ID NO: 5223 - DNA, 607 bp, Oryza sativa
  ref <308>: DATABASE ACCESSION NUMBER: AK062413
  ref <309>: DATABASE ENTRY DATE: 2001-12-06
atgcaggcacacatatttggggacattcataggcgtattaatggtcttgacacttcagcgtgtgaagatagggccgtggggtggaactggaggccatgcttgggatgaaggaggccatggtgccagtgctggcagttacaccggagtacgccgaatgagtatagggtcttcctggtgtgtcagctcgatgttgtttgaatacgacgacaatggcaaacgtgtgaaaggtaccctgcatggagagagagacaatggaatacccgaggaggagctcgacttccatggggaggtgttgacgcacatgtgcggctaccatgacaaccacctcatccggtggttgcagttcaggagcaaccggaacaggacgttcggaccatacggcaatcttctagaagaccaggctggatggacgcggttcgaggtctccatggagcactcggggtccatcgtcggcttctgcggccggagtgacgacttcgtggacgccatcggcgtctacgtcgccgtctggaatcccgagaggttctatgatagcatgcgcaggcagggcgtccgcgtttaccgggcgtcgcctctgcgcatggacctgcgtcaaatagaagaagag

SEQ ID NO: 5224 - DNA, 470 bp, Oryza sativa
  ref <308>: DATABASE ACCESSION NUMBER: AK062414
  ref <309>: DATABASE ENTRY DATE: 2001-12-06
gtcttatcccagcggtgcctcatcttatccccccgtctcctcgcttcctcctcccgcagctcacctcaactccggaagcgagagctcactccccccatccccatggcttccaccgcgctcaccaacctggccctcaaggaggccaaggacctcatcgagggcctccccaagaaggtcaaggagggtgtcagcaaggacgaggccgaggatgccaagaagcagctcgaggaggtcggcgccaaggtgtccattgcgtgacactaggtaattttaggactcccctttttttctcaccctaatcttgtgtaccacctttgatatttacaatggtttgttgtttcatactatgagatttctgtatgtggatctgttagttcacattccatcttgtattgatatcgatgttccacgcgctaaattgccaatgtagattttgtatattggcgcaatcataatggtgagaattgtgc

SEQ ID NO: 5225 - DNA, 1061 bp, Oryza sativa
  ref <308>: DATABASE ACCESSION NUMBER: AK062415
  ref <309>: DATABASE ENTRY DATE: 2001-12-06
gtgcctttcaatccacgcgtccgtcgccgtcgccgcctcgcgcgcatggaccaccacccgccgccgccgtcgccgccgcgggactccggcggcagcctcgaggtgcgcctcttctacgtccgcctctcgccgcgggggcacaccccaccgccccgcctcgcgctcgcgctgcgcagcagccgcggcggcgacgaggaggaggccccgacgcccctttccctcccgctccgcctcgatcgccgggacccggcctccggcgaggccacctacgtgtccaccgcgtccgcccgcctccccccaccctccgcggccttcgaggtcgccgaccaccgcggcgccgcgctgctccgcggctctcttcggcggtgccctgatgccaagcccgattcctcccccgcctgggcaatcgactgcatccccgccgcgggggcggaggcggagacctccgcgttcgaggtctacgtcgccggatgctgcgccggcgagcccgccgtcctcacgtgcgctcttcggctagccacccccgaagaacagaaagctgccggcgggttggtccgccgccgatcgccgacttcgaacgctgctggtgatgaagatgtcaatggaagtatacagcatccagaaggttggtactccgacgatgatgacgggcaactcacatggttcaatgctggtgttagagttggtgttgggattggcctgggagtttgtgtgggtgttggtataggtgttggcctcctcatgagctcataccaagcaacagccagaagcctgaagaggcgattcttctaacgccgttgcgttgaatacacaaacttttgatggccggtagcagtatagagttggtttggttctgtttcaaagggcagaaatatcattgtatagttggtggatgtgttgtttatgtgtgaggtgttgtgttgcttttgcttgtgcagtttttgagcccctgtgcatccctctcagttctatgtgaactgtgaatgtcctctgacatgtgaaaatgttctcaactttcaacaaggagaaactgatgaatgggaatgatggattgccaattc

SEQ ID NO: 5226 - DNA, 568 bp, Oryza sativa
  ref <308>: DATABASE ACCESSION NUMBER: AK062416
  ref <309>: DATABASE ENTRY DATE: 2001-12-06
ctcgagatcgacgtcgacatcggcagctccgccatcgccagcgccatcctccacctcgcgctcggcgcggtcacctccgtcaccatcgacatggggttcctcgtcgagtcccagtccgaggaggagctccccgagaggctcttcggcgccgtgcgcatcgcgcagatggagatgggcgccgccaagtatgtcgagacggcgcccgacgatgtggtccccgacgccggcagggctggcgccggattcagggttcactcggcgaaggtggccaacgatagccgccaccaagaacgcgccgccggcaaggtcgggaggtcgatgagctgccaggaacgcgggagcggaggaggaggaaaatagatgcgaaggaagagagatctttggatggagaaagaggggattgagatcgaactagccggaggagaaaggccggggcacataaaatggggaagcggcgaatactcccttgatcataatgtgcaagtcactgattaagctgtgatcagaactgaaacctgatcgatgagaatagtatattattcgtaattatgatgccattcttctcttc

SEQ ID NO: 5227 - DNA, 838 bp, Oryza sativa
  ref <308>: DATABASE ACCESSION NUMBER: AK062417
  ref <309>: DATABASE ENTRY DATE: 2001-12-06
gtcgtctccgctcggcgctccggccgccgcggcaccaccgccgctgccacgaccttgctccgctcaccgcggccgccgtcgtcaccaccgcagcggcctcgctctgatctgcattgccatggagcagctgcgcctctgcgactgtctccctcccccgcgccacgtatctctctctgcttcgctaccggcacctcgggggcggcctcgatccgccaccgccgggccggccttgctcctgctgcgcgctgccgccgccaatccggcctcaatccgcacagcctccgctctcttcctagggattatgtgcataggtggcaccaccgccgtcgttgccggaattgcaaccgtcgtcatccctggtctctatccgcaccagcacgacgagtgaattaattacggcaacaagctcctgcggcctaggcagcaatgaaatcttcaattcatcgggaatttttgcggctagaacggctaattgcctcgtacgaccacgatctggagtaggcaagattgaagaataacaaaaggagttttaccaagccagggaaaatgcagaaggaacaataggagagaaagaatgtatctgaagcaaactagcttagaaacaccaaatatgactcaaggtccccaagaggggctaggggtgctcctaggcgagggtaaatatcattgtctcctcatctgttaatatgcatccttgctatggttatagaacaactattgaggaaacatgaaatgtcaaaattattgcactataaaaattctatgtatgtaacttgacaaccctttggagcactggtctcatgaaagctgatacagaatacaaggcattcattcttct

SEQ ID NO: 5228 - DNA, 1007 bp, Oryza sativa
  ref <308>: DATABASE ACCESSION NUMBER: AK062418
  ref <309>: DATABASE ENTRY DATE: 2001-12-06
acatcaccatcctccccttaatgccactcctcgcctcgctgctgccgccgcctcatcgcattctagagcattgctcatggcggaccaccaccaccagccgccgaccccaccacggcgccatcggcgtccccatgagctgtccatggcggcggaggaacgacaccatgggacgcagacggcgatggcgtcggatgacgatcgccaccatgatcgtggcggctggatcaggccggaggagaagcaccggagctccggcgtggcgtgggcgctggtgatcctgtgcacgctgctggcggtcggcgtgatcgtcgccggcgcgacggtgttcgccgtgtacctcatctacaagccccggatgccgtacctggtggtgtccgacgcgcagctggtgcggctggactacgaccagggcggcaccatcgactacctggaggcgctcgtcaccgtcatggcgaggaacaccaactccagggcggacgcctccttcgcccgcgtcgacctcgcgctccgcttccacggcgccgacgtcgcgcgcctccgcgccgcgccgttcgtggtggcgagcgcctccgcggcgccgctccggtacgacgtcgtgtcgaaggggcgcgcgctggacgccggcgggatgcgcgccatggacgcgtcgctcaagtccggcgtcgtgccgctcgacctcctcggccgcgcgcgcacgcggtggaaggtcgggatcttcgcgtcgctcaagttctggacgcgcatctcctgccgcctccacttcttctaccccggcaatggcaccgtcatggcctccgatcgcaacacctgcacctccaggtcgccatagccgatcgccattgattccaattcctccatttgattcgttcgttgcatctcgacgccatccgagacacgtacattactattacatcgcaccattacagatcatgtttcacttgtcatacttgtacagccaaataatgctggtacagtagaatctctgaatctacaagaagagtttattc

SEQ ID NO: 5229 - DNA, 595 bp, Oryza sativa
  ref <308>: DATABASE ACCESSION NUMBER: AK062419
  ref <309>: DATABASE ENTRY DATE: 2001-12-06
aaaaagaccttatcatcgaattagcgtggcagtttagctcggaagacaggcagagcaagaggtagcacatcctctccgaagggaagatatgagcgaccagagctcgtaccctaaccctgctcaagggtactaccagggtcccccagcctcggcggcggccgcccaagataacacggcggccggcggtggcaagtccaacgcagccaagaaagaccaaccgagcttcatggataacctccttgcttgcctcccctgtgcccgcccagccgaagccaagaacgacgcgagctaactaaccttgctccatcaggcagcctagcacgggaaggaaggctgcaaagctactgcatgattatgcccagtgtttgtttgattattcagcatctaagtaagcacgtcgttaattagttcaatccggattgctcatttgcgttttgtgtactagtgaacgatttatgtatttgtcgggggcgcatgtaatttaatttattcccctttggattcattattcagtttatcttgtcatgattttgtgaggaaagaatctgttttacgcatggttaaattgtactactactacttcacacaattcttt

SEQ ID NO: 5230 - DNA, 541 bp, Oryza sativa
  ref <308>: DATABASE ACCESSION NUMBER: AK062420
  ref <309>: DATABASE ENTRY DATE: 2001-12-06
atatctctccctctctctctcgcgtctctgtacccgtctctctcgcagcggctgcccagtggaggcagggtggcggcgggctcttctcttctctctcccatgttcttctcttctctcccttctagctatctgcatctggggcgggcttggggcggcacctctagcccccacggtggcgcacggcgggtggtgggcggcctccctggtccggcgggaagggagaaggcaggccatgggtggcggccaggcggaggcagtcgggtggtctctctctctctctcttctctcaggcggtggcaaccgagcggcggtccggcggaggcagcagcggcggcccaagttcatgcggaagcggcaacgcactgtttagttttttttttattcttgtttagttcatgcggcagcggtggcgcactgtttttgagttcttgtttaggtcttcctctcttttctcctccttgatccatgtcccaaatgtatgtgaacttgttgagttcttgatgcatgtaggatttcaattaatgtgattgttgttaagttt

SEQ ID NO: 5231 - DNA, 576 bp, Oryza sativa
  ref <308>: DATABASE ACCESSION NUMBER: AK062421
  ref <309>: DATABASE ENTRY DATE: 2001-12-06
atctcaggataccgagttgctaccccccgacccggcggccagatcgcgagctgggaagaggcggcggcggcgatgagcgcgggggtgggcgggctgcggcagctgctggcggcggcggtgacgacgggggtggcggaggcgcgggcggcgatcttcgggcacgcgctgaacccgacggggaagcgcgcggcgaccaagctgctgcggaagaagatggtcggcgagcagctcgcgcagtggtacccctacgacatcaagcgcgacgacccgctcgtcatggcgcgcgaggagaaggcgcgtttgtcaaagctggaaatgcttaagcgtcgcgggaagggtcctccaaagaagggccagggaaggcgtgcggtcaagagaagcaaatagttgccttaattctgcatacatcagttcctggcgttcatcctgtttgggcgctgaaatatttcgttgttgtcagcaatgtactctttctagtaggtcaaacaagatccattggcaatgaaatttgctttccttcatcataaaaccgatgtatttgtgctgccggcatgaatgcaagacaattttctattg

SEQ ID NO: 5232 - DNA, 442 bp, Oryza sativa
  ref <308>: DATABASE ACCESSION NUMBER: AK062422
  ref <309>: DATABASE ENTRY DATE: 2001-12-06
acgtgttgccggtggcggcggcggaggtgttcgacgcgggggcgttcgagctcgacgacgggttcaggttcggcgggatggacgccgggtcgtactacgcgagcttggcgcaggggctgctcgtcgagccgccggccgccggagcgtggtgggaggacggcgagctcgccggctccgacatgccgctctggagctactaatcaaaatctcgcactgaaaagtgtggacaaattttgattctccagaaattgggggaaaaaagagaacagagtattggtgaatttagaacagagtaggcaatgagactgaggatgaatggcaatttttgtaattttggaatgtgccagatttctccctccttttgtgattccatctgattttgaatgtgcagtcaatgaattcctgtaaatttacttctcctctccaaagagctattttggtc

SEQ ID NO: 5233 - DNA, 480 bp, Oryza sativa
  ref <308>: DATABASE ACCESSION NUMBER: AK062423
  ref <309>: DATABASE ENTRY DATE: 2001-12-06
attatattgctctgcactccacctgaaggacgtacgcgcacagctgttcatacgactatacgaagccctgtctagctaaaagtctcctcggtctcgatcctcaccttgcccctgcagctgcatacccggccctttcgatctggttatcaatcgatccggtcgccatgaacgacggtcaagggtactttgctggcaaaccagcgaaacccaacgacaaagaacaacaggccggtgatgaggagacgcaagctgttgatgcacaaacacctggcgatctatttaatatatacgtacgaaaaataatgatatatttgtaattaccggcacatgatgttcaaagagcagcttttctatttccatcactgttattttggctgcaagaagcaagatcatgttatcggtcaaatttgtgtacgcaaatataccgtgtggccacttgaaccaagcaatccgtattatgaattagtaacggcagaaaat

SEQ ID NO: 5234 - DNA, 509 bp, Oryza sativa
  ref <308>: DATABASE ACCESSION NUMBER: AK062424
  ref <309>: DATABASE ENTRY DATE: 2001-12-06
aaaccagccatggcgacggcggctggcggcgcgcggcgggccctcgcggggctgcgctcggcttcctcttccagggccttctcccagccggcgccggctgcggcggcggctcgttcccctgagctcgcggccttctctctgcctcgctccactcgccggcgccccgcgatctcgagggtcccggtggaggcgctcggcggcgcgcatgggttgatgccgctgcacagcgccactgcgtcggctttgctcacctccatgctcgggcttaagcccggatcttggggttggctctcagaagggtttgcaacacctctataacaggagtggtgttttggtcaccacacaagaaacttttctgttagcctttcccccagcaggttccaataacattagttacaagacttgtggactataatacccgggatttttgctgatggaatctgtactaaattttttctctgcttaaaacttatgatggcctcatgtgccagatgattgtccaagcgatc

SEQ ID NO: 5235 - DNA, 652 bp, Oryza sativa
  ref <308>: DATABASE ACCESSION NUMBER: AK062425
  ref <309>: DATABASE ENTRY DATE: 2001-12-06
agttgttgtcgcctccaacaccgctggttgcagtcgcctccactgctgcccagtaccgctgtcacatcggccaacggggaggcctaggcctccagatctagcgaccccatccttcccgctagtggaactagctagatagagcgggccgagtacaagcgacgacgatgagggagagggtggctgcgcggggaaggggccggcgcggcgcagggaaggaggtggtggcaacagcaccgggaagggattggcggtggctcacgacggtagaggtgcgggagagggtgcggcgaggaggggatccactgatgccgggcctcgggagcggtgctgggaaggggcagcagggactctcggggttagcgccacgggggaggggacgacagggaacggatccggtgccgacgagccttgggtgagtggatctggcgccaccgagcctcaggagcagagcggggaagggggtgacggcggcacttggcggcagcgacagagggagcaaatctggcaccgaccattcacacccttcctcgggagcacaaatccttccttacctcgtgtttcgtgatgtgatgtgaattttttgtgcttgatctgtgatgtggaatttatgctctgtgatatgaatttgatcttgatcgaaccatcattgtgg

SEQ ID NO: 5236 - DNA, 616 bp, Oryza sativa
  ref <308>: DATABASE ACCESSION NUMBER: AK104924
  ref <309>: DATABASE ENTRY DATE: 2002-08-28
ctctttcgcttcgctgaccccccaaaaccctagctcgagcgctcccttcttccccccacctctgcggcggcggcgggcggcgagatggcgaagtcgctgcggtcgaagcgggagaagcggctgcgcacgctgcggcgggagatcgcgcagcccttctacgacaagaaggaggcggccaaactcgccgcgcaggccgccgcgctcgaggcgcccgcgctgccggtccgcgcgcctccgccgccgtccaaggattccggcggctcccgcgccgcctccagctcggcatcggccatggacgttgagatggcggatgaaggaaataacaagtccaagtccttcttgaagccaattggtagcattagcaagaagaaggtacaacttcacttgaagatcaagaaagataaaagaaaagctaggaagaaggggaggtttagtaaaaagtaggtgtcaaagcttactctgttatgagaaccatcaattttggttagtttgaacaatgcatgtaatggtaatctcttgtgttgttgtgcacctaagtgttaaccatccattctgggtggataccgtattgaaatcagcgaaagcagtgagccagtgacaccctattcaggagctt

SEQ ID NO: 5237 - DNA, 1013 bp, Oryza sativa
  ref <308>: DATABASE ACCESSION NUMBER: AK062426
  ref <309>: DATABASE ENTRY DATE: 2001-12-06
aatccatcacatcacgaaaccacttcatgtactcttaacattatctgcttgtacccttatcattatcttgagcatttcatagtttcaaatacacatattgccgccctctctccctctcaggctctcagtgtgtcaatcaccttgtaacacacatccacacacaaacacacacacaaagatgttctccgccaaggctcggtggatcgtcgccgtcgtgctcagggtggccgccgccggcgccgcggcggtcgcggcggtgctcatggccatgagccatgatgaggtcatcgtctacggcatggaggtgcaggccaagttccgctacactccatcgctagtgttcttcgtcgccgccaacgccgccgtgagcgcgtgcagcttggtcgtcctgctcgtgccgtcgtcgacgagcaagctcgccgcgaggctgctgctgatggccgacgtggtgctcggcatggtgctcgccggcgcgttcgcggcggcgggcgccatggcggagctggggaagaacggcaacagccacgccggctggatcgcgatctgtgtccaggtgccgctcttctgcgaccgcgtcaggtcggctctcgtcgccggctccgccaccatcgtcctctactacctcatgctcatgtactccatttacacactccccatgttcccatgagcatctctactactagctttttagctttttagagtagtagaggtgtcgttctaaatttagagtcagtagtactctctccgttctaaaataaattaatttttatttatgtacagaattatgtacagaattttatttattttgagatagagtaggtgcttgtaagtgagattaacagcctgtttttttaagaggtttcttattattcttggagagttatatagccgttggataaaaatgccacggacgtctgtgcctcttcaagaatgggagaaaatctcttattttttttatatgttttcttgtaaaggcttttctatagtagtgatgatcaaacgttatagtatgg

SEQ ID NO: 5238 - DNA, 650 bp, Oryza sativa
  ref <308>: DATABASE ACCESSION NUMBER: AK062427
  ref <309>: DATABASE ENTRY DATE: 2001-12-06
acgagtccacgactacttgaggatggcgagcccaacaacaatggtgggagtggcaacctcggcgcatctccacaccaccaccaccggccgcctcagctgcgcctgtgcaccaccgacgaggggaacaaggcggcggcggctcgcggtggcggtgcgggtgcgggtgcgggtgcgggcgtcggcgtcggaggcgatggcgacggagaagctcggcgtccgtgtggagcgcaacccgcccgagtcccgcctctccgagctcggcgtccgcgagtggcccaagtgggggtgcgagaagagcaagttcccgtggacgtactcggccaaggagacgtgctacctgctgcaggggaaggtgaaggtgttcccggacggcgccggcgaggatttcgtggagatcgcggcgggggacctggtggtgttccccaaggggatgagctgcacctgggacgtcgccgaggccgtcgacaagcactacaagttcgagtagatttggggatttggcacgccaatcgatttcagccatatgacatggcgatggtttgtgcttctgctatcttctactagtaacttagctcgtgctcttatgcgttatatgctccagttgttgtggatcatctcctgcaaatgaaataaaacttgattagtggatt

SEQ ID NO: 5239 - DNA, 734 bp, Oryza sativa
  ref <308>: DATABASE ACCESSION NUMBER: AK062428
  ref <309>: DATABASE ENTRY DATE: 2001-12-06
agcaggagcgacctggaggctggaggatagatggccaggacgacgctctacaggccaagggtgaagagcttctgggtgctcgtgcgccgccttctctgctgccgccgcaagagttacaggccggattatgcggctgccggggaggaggacgacggcgagaagagcagcctcctcttgaccagcagaagctctttggaggagctcctggtgtcggacgacgccgacgacgacggcgccatcgacgacgccgccgtgacctgccggaacgcgtcgctgtgcgccaagaaagatggtcaggcgccggtggtcgtgctaccaccaccggggctgcatcacccagtgatggctcggccggcgcacggcatggtgacgacgtcgtcgggcggcggccgtgatggtgcggccgtgcagtgccggcggcggttcatgttcggcgggctccggcggcggctgatgatgaggagaccgtggcggccggtgctcgtcgccatcccggagtgagcatggacaaaccagaaatgacattccggtaaaatccgttggaattgaatcaatcgattgcagtatgcatatactctagtgtagctttgcgtgttgctcggtttctttctttgttcgttgcttgctgcagtatgtgactatactagctattgatgcttctatcactgttctgtaatcatcaacgatgtcggtgcataacagcatacttgaacatgtccagtgtctttgctgtg

SEQ ID NO: 5240 - DNA, 1037 bp, Oryza sativa
  ref <308>: DATABASE ACCESSION NUMBER: AK062429
  ref <309>: DATABASE ENTRY DATE: 2001-12-06
gtagaacaagaatagaagcagcagcagcaacagcaatcgcagtaagagcagtatatgtatattactatatatataagttatagcagacagcagcagtagaaactagaaaacttggaagagagtagacgatcgaagagatcagaattgcttacaggatcggccggtcgatggaggtgcagccggagctctccctggggccgacgttgctgggcttcggcgtcggtgccggcgccggcaagagctcgtcgtcgtcggagtcggacggcagcagcgacgacggcagcaggaagaggaggaagcacttcgcctgggaggaggccgtgtcccacgcgagcctggacctccacctcaacgaccccctccccatggactgggagcagtgccttgacctacactctgggaggatgtactacctgaacaggaagaccatgaggaagagctgggtgaggcccatggaggagcacggcggcagcaacactctggacctggagctcaacatctccacgatcccgtccaccttccacgtcggagccggcaaggcgagctctggcggcgccgctgccatcgcggaggacgatgcgaggatcgccggcggcggtggcggcgtaggctcgttgggaccaatggtggccgtcccgtgcgtcaactgccacctcctcgtcatgctctgcaagtcctcgccggcgtgccccaactgcaagttcgtgcagccgtcggtgccggcgccggccatgccgcggacgccgccgcgtcgccggctggaggccaccgtcaagccgctggagacgctcagccttctgcactaaagcaaattaagaaagatgacagtagaaaatgcgggggagagagtgacagacagcaagtgaaagcagctacaaatgtgttaattactactcagcagtagtgatgatagatgagctagattatgggtggggtgtgctgtgtgtgtggatcaatttactgtatgagtgctgcacatgctacattgcttcaatgcaaatgaggcgatcaagtagtaaatgggattaattaagcgt

SEQ ID NO: 5241 - DNA, 579 bp, Oryza sativa
  ref <308>: DATABASE ACCESSION NUMBER: AK062430
  ref <309>: DATABASE ENTRY DATE: 2001-12-06
aacgaacgctaaaaaagtaacagtttctgtactttattggtcgttcagaagatgcagatcttcgtcaagtcgcccgctgggcagaccttcgccctggaggtttcggcctccgcgtcgatcgagtccgtcaaggctatgatcgaggccgccaccggtgtcgccgcgtccgcgtgccacctcgttgcggacaagatgctcgaggagggctccaccctcggcgagtacggcatccagactgaggcgaccatccacgtcgtcctggctgttgatggtggtaagaagaagaagaagaagaagaagatcttcaagggccccaagaagcacgcccaccgccacaagaacgttgccatgcgcgtcctcaagtactacaaggtcgagggcgatggcggcgatgccgagtacaaggtcacccacctccgcacggagtgcccccaccccgactgcggtgctggcgtcttcatggcgcagcacaaggaccgccagacgtgcggcaagtgctccctgacgtacgtcgcgcagaagaagtaagctcgcggccttcgtttctgacgatcacctccctaccattctgctcctccc

SEQ ID NO: 5242 - DNA, 748 bp, Oryza sativa
  ref <308>: DATABASE ACCESSION NUMBER: AK062431
  ref <309>: DATABASE ENTRY DATE: 2001-12-06
acgagatacctatcgatccatccatccgccgccggcgatccctcctatcccctccatcaccaatgccgccgcggagcctcaccctctcccgccttcccgtggccgcccttggcctccccttctcttcttgctccccgcctcctcctcgccttcgcttccccttcgccgcacgccgcgccaggtccctcgccaccagggcctcctcctcctctccggattcctccttcggctcgcggatggaggactctgtcaagaggacgctcgccgacaaccccgtcgtcatctactccaagtcctggtgctcctactccatggaggtcaaggcgctcttcaagcggatcggcgtccagccgcacgtcatcgagctcgaccaactcggcgcacagggacctcagttgcaaaaggtgttagagcggctgactggacagtccactgttcctaatgttttcattggtggaaagcacattggtggctgtacagatactgtgaagcttcatcgcaaaggggagctagctaccatgctgtcagagctggatatcgacgtcaacaactcatgacaacattgaacatggtttgctatactggatatctgaggtttcaatgacttgagcagtcgtgtaatgagatttgttagccatgtttactaattcaatgcacattttatgtaaccgcttcccttgatcagctagggaattttgactaatgtgtatccaccggtgaacttgggagaggaaaaaaatgcgaacac

SEQ ID NO: 5243 - DNA, 967 bp, Oryza sativa
  ref <308>: DATABASE ACCESSION NUMBER: AK062432
  ref <309>: DATABASE ENTRY DATE: 2001-12-06
attgttattattctcaggctcatcagctggatgtccctagctcttgctcttcttcttcttcttcttcctagtccccagttcattctcgatctgccaacttcattctcccgtctataaatccatccacagctagccacccactctctactggagtagttgtaattgtttagagcgtgtggtcgaattaatatccatggaggacgagaggtggaagctgtcgagcagcaaggggaggagcaaatcgggcagatcctgcagcagcagcagcaactactactaccactcctccgatttcaacagcagcaacgccaccacgctcagccggagctactccgccagcgtcaccgccagcaggcacgctaccaccgcttggtccgccgccggcgccggtggtggtggcgccagcagcagcagcagctcgcagcatcagcatcagcagcagcagcagagcaacaattcgcagcggctgtcgaagaagtgcgtggaggcggtgaaggagcatcgcgcgaggttctacatcgtccgccgctgcgtctccatgctcgtctgctggcgagactactagctcagtctcctcttccttcttctttttcttcttcttctagctcagtttgattcaattttatttatttgtttcccttccataatactccattgctagctccatgcatcatcatcatcatcatcatcgatctctgtgtgtttctgcctgcatcttaatttgttctttctgtaattaatcttgcattgctctctctacaagtatatacttactagctagtagctagcattctcatcttcttactatctatttagttccttcctagctacctagtcgatcagctagtccaagtatgtaatgtatataaaggtgaggtgagctagtcgtccgggaatgttgattttggagctagccgatgaattgtgcttgctgatttctgttaaatatttatgaaatgccaatggt

SEQ ID NO: 5244 - DNA, 574 bp, Oryza sativa
  ref <308>: DATABASE ACCESSION NUMBER: AK062433
  ref <309>: DATABASE ENTRY DATE: 2001-12-06
atttcttgcttccatttgtcttgcttggctcttcactctccccctgttcctgcaggggtcaggcactgcctgctacaagagtggtgtaggtgattcggctagctcagcgcgaagatgggggagatcaccaatgtcacggagtaccaggccatcgcgaagcagaagcttccgaagatgatctacgactactatgcatctggggccgaggacgagtggactctccaggagaacagggaggccttcgccaggatcctgtaagtattcaatgttcttttttgctatgttacagctcctgccactgttacacttttgtgcatggtttttttcttgtgggagtgtatgtgagaagtgtaaaatagctgggccttaagtattgtttggtaatcagcctttaatacacattttttgggtaaattttacttccctaatccttttggggtaaatttttagtggttatttgtgagcaataacatgtttgttgatgcagttttggttctatgcttggtataaataattgttctcttattatactgaattttctattgtatttgattcacctaacataacattatcg

SEQ ID NO: 5245 - DNA, 627 bp, Oryza sativa
  ref <308>: DATABASE ACCESSION NUMBER: AK062434
  ref <309>: DATABASE ENTRY DATE: 2001-12-06
caacctctccggcgacgcatcgaaccccaaaattcttcctctctcgagagagagctaggttaggatcggatcaatctctcgcttccttcccgtgaagatgtcgtcgcccgcgggggaggatgagaagaagccggcggggggagagggcggcggcgcccacatcaacctcaaggtcaagggacaggatggcaacgaggtgttctttcgtatcaagagatcaacccaactgaagaagctgatgaacgcctactgtgatcgccagtccgtggatatcaaatctattgccttcctgtttgatggtcgtaggctcaatgctgagcagacccctgaccagctcgagatggaagacggcgacgagattgacgccatgcttcaccagactgggggctctctgcctgcctagagctcatatgaagctgttgcaacaatgcaaccgcattactattttctgccttgttagagtcagtcagtctagaggacatgaaactagtctaaagaacttgtgaatcgtttggtcctgtgccccagctgaaggacattagggtggctttgtttagcgagacttggtactttggtgtgttaatccatcgcctaatttatccatcctttgctggtactcccgatgat

SEQ ID NO: 5246 - DNA, 688 bp, Oryza sativa
  ref <308>: DATABASE ACCESSION NUMBER: AK062435
  ref <309>: DATABASE ENTRY DATE: 2001-12-06
attctacaacttgccacgcgcacccaatcatcacctccaagcttctgtcccaagtaccgaatgcagactatcaagacaatcaccgctgcagcggtcatgaccgctgcctttctcgacatcactgatgctcaggataactaccgggtgacgctctacgagcacgagaactacggtggctcggccattaccttcctcgccccatggccgagcacatgctacaacatttgggactgcttcaatgatcgagcgacgtctgccaagtggacggactttggcgtctacttcgagcccgacatgctcaccttctacgatgacgccgactgcaagggttccaagcttgtggtgcaggcgggccaatactaccctgccaacggcatccccaacgttggtgcggccatgaacgatcgcatctcgtcgttctcgaccttcacgggcctcactggcatcacaggatacgccggatacaagtgcagcgcccgtcgcgttggcaacgaaaccgttgcaccggttcagattccgatgccagcgagcggactgtgatcaaaggccgccatgtccacacggaaactgaagcatcgtctccatctcaggagctcaaaagtgactgcttgtcatcgtagagacgcgaaatggtcgtattagttcatgcactcctcgtatttgaaacatccccgcaatattcatttcc

SEQ ID NO: 5247 - DNA, 600 bp, Oryza sativa
  ref <308>: DATABASE ACCESSION NUMBER: AK062436
  ref <309>: DATABASE ENTRY DATE: 2001-12-06
tagtactagtgggcaccagccaccaagaactcgctggaatttgatgacttttgtcccggcaatttttctgggcatccatggccactgaatttgcaggtttgcaagatgtttcgatcgaattttcttgagatttccactgataacctgaaacggagggagtatcaaacccggtcagtcggcggcgagtggtgtggcggcggcggtggatgctggtccgggctggggttctacatgctgctgctgctgtgcctggtgctgtgcgccatgttcgccaacgagggtgtcaggttgtggattccagggacgctgctggctgcttcactgctcggctgctctgcctcaacctcttctcaggtggtcaggtcttaggctatggacatctctgaagatttcatcttttttgcaggaatttcttggcttcttgccaagttgccattgccagatgagatcatgcatgtgtagaatgaatgaacatgatgagtaaacagtatatttgtgtgcagtgcagtgttgttgatctatctaactatgaacaattaagcattttcatttttcatatatatgtttttggccttctgatcaatacatttgttttctctt

SEQ ID NO: 5248 - DNA, 557 bp, Oryza sativa
  ref <308>: DATABASE ACCESSION NUMBER: AK062437
  ref <309>: DATABASE ENTRY DATE: 2001-12-06
ccctatctaaccttaccctctccctctctctcaccatcagaccctctccctcttcctctcctcagagcacataagcctagctacaaggagcggcggtggcgaggcgaggaggagcaacgatgaggaggggagtcggctgtggcggtggcggctcggcgaggagggccggtagctgcggcggcttgacgaggaggagcgacaatgaggagaaggggcggtgacatatcggctcctcccctctcctccaatcccgtcggcagcagtagctcttcaacaaggaggagtggtgacaaggaggcagctggtggagacggtaacgatgactacacgcggcaagggtgatgcatggcgacagcgaccatgcgggaagggcaacgtcggcggtctctagagctccttcattattcttcttcctctagatccagatccataatttctttttttttctctttatttctgtggaatatgtgaatcttatttttttcatttgtgtggtgacatttgattatttgcattgtgcttgatctatcaaatagcagctgattggggatattttc

SEQ ID NO: 5249 - DNA, 633 bp, Oryza sativa
  ref <308>: DATABASE ACCESSION NUMBER: AK062438
  ref <309>: DATABASE ENTRY DATE: 2001-12-06
aagcaaactaaagaggaaagggaagagaaaagaatccgtgctcgaaggcgcatgcttgggaacattaggttgattggggaattgtacaaaaagaggatgttgacagaacgcatcatgcatgaatgcattaaaaaattgctgggaaattatcagaaccctgatgaagagaacattgaagcactgtgcaaattgatgagcacaattggagagatgatagaccatgcaaaggctaaggagcatatggatgcgtactttgatataatgctgaagctttcaacaagtcagcaattatcttcccgtgttaggttcatgctgagagattcaattgatctcaggaaaaataaatggcagcaaaggcgtaaggtggaaggcccaaaaaaaattgatgaggtgcacagggatgcagctcaggaacgacatgctcagtcgagtaggttagctcgtggctcagttgttggttctggtccaaggcgaggagctgcacctatggattatggtcctcgtggctcagcagcagcattggcttctccaagttctcagcaagttggccatagaggaatgccttcgcattcccgagggtttggtacccaagatatccggttgatgaaagaagtacaatggacctgattgtgt

SEQ ID NO: 5250 - DNA, 723 bp, Oryza sativa
  ref <308>: DATABASE ACCESSION NUMBER: AK062439
  ref <309>: DATABASE ENTRY DATE: 2001-12-06
atccatatcattccatcagtctcctttgcttccttctcctcatgcattctgtctgccctgaccaggacatgctgccatgtcgacctgccattcttcaccaccatcgctcgtggacctcgtgagcctcccaccttcttctccggcgggcggcggcggcggtggcgccggcgccggcgtggtgcaggtggtgccgctggacgtcagcgaggagctcctgggcaagttccaggacaccagcgagttcggcttcgagtacgagaagagcggcctctggtcgccgctggtggtgcggccggaggccctcgtgctcgccggcggcgggaagcgccggcgccggagctggaggaggaaggtgttttgctgctggtgagtgacagtctgacatgcatgaagcatggggagctttgatcattaggcaaaggactcatggatatgattctgcagtttagggagtttttcatgtaattatgggaatattgattggatgtataattgcgtttcacggagtagtaatttcaccttgccttcctctttttaattttggctttgtaacgaggaaacatgtagaaaattagtactcaaatgacttgtgtgtagtagggattgtagtggtgtgttcactgattttcagtttggtagaaaacctgatgctgtgcaaaatatatgaatgcttgtgttttaactgttcatttatttctagtgatatggatgtaccttgttttc

SEQ ID NO: 5251 - DNA, 602 bp, Oryza sativa
  ref <308>: DATABASE ACCESSION NUMBER: AK062440
  ref <309>: DATABASE ENTRY DATE: 2001-12-06
ctccacagccgccaagctgacgcgggaggtcgccgccgggaggggctctaggcggacatgggaggggcgccaccgtgccatgggaggtcaccgccgggaggggtgccataggcaccacgggaggtccgcgcgggaggtcaggtcgccgctgggaggggcgccacgggaggtcgtcgccggcggctccaccctctagccgttgtcgcctcgcctcctacccgtctgcgcgagctcccctccggccggtcatcaacgtctccaaccgcgcctccctccagtcgcgcctcccacctccggtcgccactgcctcctctgtgccgagccgccgagctcccctccggccggcaacgtcctcccctgcgctgagcaagtgatttgaaccaatggctacttcggccagtagcagccagtgtgctactccaccggtcagcagcaaccggcgtgagcaagcctcacaggcttctgtagatgcatccccaactgcaaaacaagctgaataggaagaagaggaaacttgtgtaattgaagtttgttgattgtgtaattgtgctaaagtatgacatttgaagttgtcttattgttgaacttataatgtttgtatt

SEQ ID NO: 5252 - DNA, 691 bp, Oryza sativa
  ref <308>: DATABASE ACCESSION NUMBER: AK062441
  ref <309>: DATABASE ENTRY DATE: 2001-12-06
agcctgcgtggtccagcttcccctcccctcgggtttccggcgtgctagggctcggccgcggtggcgaaggcgaaagggagctcggggatggaggcggccgccgacgaggagcaggaggggatctccgcccagtcgccggcccaggcgccgccctcctccgcctcgtcccttcccaaggagcaatcgcaggtggagctggagctgcgggtgcttcaggctctcgagttctaccctccgtccaaactgaaaggcattcatcgtcactttgttatctatggtctaatggaatacttgagaaaaagtcttgatagacaattctctgctgatgaagttttacaactactggaccgattcttcaacctagaaatgctgaagccagaggacgacgagaaggataacttcactcaaggagaagaattttccttacctgaaagtttctttaacaaggacgaatgatagcccagtaaccctgcagcgcaacatccttcgtaatttaacagaggggactacgaatcttatgatgtttccaatgattctcttgcgtagacatctcttgacggcacacttcgaactgaaagaacacattttgctcggccgtgtctttgtgttagtgcttactgtgacttgtacagcttctgttgacttaggatatgcagtcaatggtacgggatctcagtacccgttaactatc

SEQ ID NO: 5253 - DNA, 631 bp, Oryza sativa
  ref <308>: DATABASE ACCESSION NUMBER: AK062442
  ref <309>: DATABASE ENTRY DATE: 2001-12-06
atgcatggtcggtttcgtgggctaggttttcgcggcggcggcggcggccgtcgttcgcatcgcggcggcgctgcagcgagaacgccgtctcggctcgcgtctggaattgctgctcggtggcatcgccttcggatgtgctcgacaccaccagcgggagccggggaggtagtgcgccacccgggagcagacagcttggaaatggatcgtctccaccgccggcgacatcgtcggctgaaaggagaagctcgaggtgcgttcagtttggaaacctctctgaagatccatgccatcagtttgcatcctggtgcttccattgaacaccaacttagttatgttttcgccaattgtggatgtaattccattttcaatgtcagtgagttagctatatgcttgatagggtaggtatgtcaaatttatagtttaagtaattcattttctattgattgctctttcacagtaaagagttgcgagccagagtttctgatatcttcttgaacttgtctttaaaagctatcgacatatcgggcgtttcgatggtggtgagtaaatttgatcattggactctttggtactgaggcagctgattgtatcacttacatttaatatctgagaatggattttaacgaccaat

SEQ ID NO: 5254 - DNA, 603 bp, Oryza sativa
  ref <308>: DATABASE ACCESSION NUMBER: AK062443
  ref <309>: DATABASE ENTRY DATE: 2001-12-06
ggatcatggcgggcaaaggaggagggcacatcccaaggtttggagattggaagagcagtgatggtggcaccccttacaccgtcttctttgacgatgcccgcaagaggaagaatgcaggccatagaacacctcctcacggagctggttcttccactccccaaagaaacaaggatcccgcatctcgtcctcgcagccaaagcgcggtcgggcatggtggtgggtctgtgcctgcttggggccaatggaatgagggcaatgctggtggtggtggggcccagcagtacacgcttatgttcgaccagattagggatgagaggagaggcagtgctccttcaacgcctaccgtcgagcaactccagcgtgccactccaactcggtacaatcagcacaatcagcatgcaaatatgcgcaagagattcacatgtttcggactgtgcttgaagtagaggaatcatcatggatggatcaaggaaattgtgtattaatgtcaatggatactgcttttgttgtgcatgtatggagttattgctatgagttttccatcaatagtcaagattgtacgtataaaggattttgatcacgtaaaatgatgatgaagatacc

SEQ ID NO: 5255 - DNA, 475 bp, Oryza sativa
  ref <308>: DATABASE ACCESSION NUMBER: AK062444
  ref <309>: DATABASE ENTRY DATE: 2001-12-06
agctgtagagaagaatcgccgccttttctaagataaatcaaattccgttacaaaatctctatcactataagtcgctatgctgaactttaaaatcggcaccgccctcttagcgctcactatttctatttcaggagcccaagctcaagccaacgctagatgcaatggtgcaggcgacgattgcagtcgtttcaatagccagtgcggccgtgccgcttcctgtcagtggaacacgttcgcacaaccaaacgggtggttctgcgggtgttagaatcaatgctctttttattaagtgtttaaacactgtgctgcaggctatgcaagaccgcagaagcaatggagtttagctgagccgaaccaacaagccactgcaacggcaacaatgatccactatctcagtgagaaaaagcaatggctatgtaacatcaacgaagatagtagatagcaaacagcaaaactaattagttattttctttcc

SEQ ID NO: 5256 - DNA, 580 bp, Oryza sativa
  ref <308>: DATABASE ACCESSION NUMBER: AK062445
  ref <309>: DATABASE ENTRY DATE: 2001-12-06
atgagcagtgtgcagatcgtttgagcagctagcaacaaattacaagagggtggcagctagctagttaggccggatggcgcggctgcagcgacgacgtctggtgctggcgctcctgcagctcgccgtggcgctctggttggcggctaccagcggctgcttctgccgccagccgccgagtccgatagccggcgtctcgtcgccgccgattctgccggacggcaaccggccaccgaagtcgcctccagctcccgcatccgcacaacacatgaaccgctcctttcagccgggctgcccgccggattgcaccgaccagcaacgtcagccttaattagttatggactatcaacgacgtacgttcagcatatatactctggttgcaaacgtgttagtatgtactccactctgtaagttcgttccgatttcaaatgtaataatgcaaatttagcgcattgtattctcaactacttgtaagtataatttctattttactagtataaatgtagggccgagcgatcagattggtacatcttcaaaaacaatatcctagacttgattaattatatgtaaaaacgctcaaatt

SEQ ID NO: 5257 - DNA, 662 bp, Oryza sativa
  ref <308>: DATABASE ACCESSION NUMBER: AK062446
  ref <309>: DATABASE ENTRY DATE: 2001-12-06
atcctatggtgctagctgtagctagctccgacgactgaggtgaggagacgcaatggcggggagatgcgccggcggcggcgacggcggcggcgagggcatgctggcgcggctgcggagggcggcagccaggcggatcgggctctcctgcgcctccttcttctcccacgccgccacctccccttccccgcctcccaagaccgtatgcattctctctctacatttcatagattttcttttcttttctaacggttcagatataatttagcagcaatttgttcttaagaaagagtccagctacccaaaatgcctcattttttttctgcattttggggtgtttcttcccagttggtagatgttcaagatacactaagaagggaaaaaaatgaggctgtttttttttcttttctgtggttaattaagttttgggattttgttttcaccatcaatgtatcggtttctggttgttcttggctttcagtttcttgctatgttttgggactgggcattttttgtctctctactaccatctgcaggtgattttcaagttcctttccttctagcagtaaaactcaatgagctgtcactgcctgtccttttcacctcccacattgcaaccctgcttgattctctccttccatttcagatgttgtttcatcaaaagc

SEQ ID NO: 5258 - DNA, 747 bp, Oryza sativa
  ref <308>: DATABASE ACCESSION NUMBER: AK062447
  ref <309>: DATABASE ENTRY DATE: 2001-12-06
gtgaagaatcgtattccaacaccagttccaccctctacaaggcgcgtctagctaattaagcatgccaccgtcacgtcgccggaataactcctcactcttggagtcatcgaccatcatcacggccaacttgatcatggcctcctcctcctacctcctatccaagatcactccgcgtgccgcaccgtcgtccatgcagtctgcagctccggcgccggccagaccaccacagccgccgccagccgctgtgacggcccgggcatggcctacggcggtgtccgcacgctccgtcgagcctgcggtcacccgcaggaaggtgctcgtggcgcctgacgatggggaggacggcaaggtggacgaacgcgccgacacgttcatcaggaagttcaaggagaggacgcagtcggacatagcgcgtatggaagccgaggcggccgcagcagtcgccgctgctcggccgccgccggcactcggtgccgccaacttggctggaactgcgtacggatactatgggacgggatactattgttaagtaagactctgcgctgcttggatacgtcgttagtttgctactacaagtaagattgaaagtaccgccaactatgtatatatactgaacgcatgcttgctttgacctgtaaattaatttgaatttcaataattctggcagctgtcgatgggtagctagtttcagggtttaacattgtaaatactacttatgcatgatgattgtaagataactaatgtgct

SEQ ID NO: 5259 - DNA, 688 bp, Oryza sativa
  ref <308>: DATABASE ACCESSION NUMBER: AK062448
  ref <309>: DATABASE ENTRY DATE: 2001-12-06
atctctcattttcttgtgtccagaaaaatgtttcatgtagtagtggtcgggagcgtctcgccggcagcatcgtgcacgcaggcggccacgtcgtcgaagtagacggtctccttgctgtccatggcggcctcgatctcctctcgcgcctccgccgtcgagaaggcgcgcatgtgggggcaccccgggaaggggcggccgccgctgaagaggagggagcgccggcgtcgcgtgcgctggggcggtggtggcgcggaggagtagtcgccgtggaatcccatcaacaaccacgggcatcatacgcttggaaggagttgttcgtcgctgggtgggcggatgctgttcgtcacgcgaggctgctccagatcgtacgaggcgaacaagtatccaggctgccgccgccgaagccgaggagcggcgatgccactgctggccatgcagagacagcggcaagtggctggcggctgccggggacgtggacaagttcttgccggagcaaggcccgttgaaatactcaccgccggcttggtttctccagtaagagatttctgctgatcgatttggatgagatgtgcttacctcacatcgaggtgtccccccagtttttttttttcatgaatgataaacagataccacacatatttttaaaattataatgccacgtaagtgccacgtcaatgccacgtggaat

SEQ ID NO: 5260 - DNA, 631 bp, Oryza sativa
  ref <308>: DATABASE ACCESSION NUMBER: AK062449
  ref <309>: DATABASE ENTRY DATE: 2001-12-06
acacaacaaacaaaccaagagctaaaatttcagtcagtgatgatgaggaagcaaagccgctctccttgttcatcttcttcttctgctgctgttgtgtccctctgcaaggtgctcctgttggtcctggctctcatctgcaccctggaaactgtctcagtagaaggagggagagtggcagcagcagcattagttggtgggggcgtaccactgaatccacggtacccggcgattcctgaagaaccttacataggccggagaggcgatccgtacacaggtcggggaggcgaaccttacacacgcccgggacggggatgcaccgttgcatacggatgctatggaggtcctccagctgccaaaccatgacgatcgacatactactctgctactgctactgcatgctcgcttgttatttcgatcgatcaatctcatggcctgcgtagctcaccacataaacaaataaaaactatgcatctaataattaacccctgatctatcgatcgatcagtagacgggtatgcatcaatcggcatcagcagcatatgcgatgtgaattgtgatgtatgcatggtgtatttttgtggtaaataaagtgaagcagatatctatctagtatatacacatcgttcctgct

SEQ ID NO: 5261 - DNA, 539 bp, Oryza sativa
  ref <308>: DATABASE ACCESSION NUMBER: AK062450
  ref <309>: DATABASE ENTRY DATE: 2001-12-06
atgctctgttagtgccttctgtctatctatcccccttgctggtttcttcctcctcttctgcgtcgtcgacttcgtctccggcggccgcggcacgggcggcgatgtacaaccctccggcggcgcaggagatgtcctactccgaccatgtcaagaagcgccatgaggacaaaggctgcctctatgcatgcctgttcaccctctgctgctgcttctgctgctacgagacctgcgagtgctgcctcgaatgcctctgctgctgctgatctccttatctcatttcagcagtcaaaataatgatgatgatatatcatatatagtcaggaataaaagatataatatgccgtttgaaatgcaggaatttatttttccgatttcaaaccatagtttgttgttgtatgtgtactggtgacaatatcatggtagatgaaactttctgaaaatttggtaggtatcagcaagatttgatctttttagttgtgctcccatctataaaatgaataaatatatttaagctgcctgccgagataaaattattaatc

SEQ ID NO: 5262 - DNA, 864 bp, Oryza sativa
  ref <308>: DATABASE ACCESSION NUMBER: AK062451
  ref <309>: DATABASE ENTRY DATE: 2001-12-06
attccgtccattcccctcctgcgtacttccgccgcgcggctcgccgacgcactcatcccgctgccgcgcgtcgccgcatcccgtccacggccgcccgcctcctcgactacccacagtcgtcttgctcgcacctccgccgctgcggtggccgccggtcccggaggcggcctccgatttaatggagaagtcctacgcgtcggcgagctccggcgagctcggcgtcgtggcgggtggtgggggcaggtcggtgcgggttataccactgcggcatccacaggaggcggtcgctgggtcctcgccgtcgtggtggtccgtggtgatggtgaaggcgcggggaatggggccgcgggattgggcggaggcggctctgccctgcttgtcgtggatgcggacgtacaggttgaaggaggatctgcaggccgacctcgccgctggcatcaccgtcggcgtcatgctcgtgccccaagcaatgtcatatgcaaagttggctgggcttcacccaatatatgggttatacacaggctttgtcccgctatttgtctatgcaatttttggctcatcgagacagttggcagtgggtccagtggctcttgtctctcttctagtttctaatgtcctcggtggtattgttgattcatctagtgagctgtacacagaattagccatattattggcattcatggttggtgtattagaatgcttgatgggattgctaaggtaattctattctactctgggtagctggtgttcttttttaagtcattttacagtagataggacataatttaagaagtatggacacatctacacatattcctttggaattttacacttatgaatattcaagacaaatgctttattgtc

SEQ ID NO: 5263 - DNA, 551 bp, Oryza sativa
  ref <308>: DATABASE ACCESSION NUMBER: AK062452
  ref <309>: DATABASE ENTRY DATE: 2001-12-06
tgaaaccgtggttagaactcggcatacggcgatacaggaaatattggagaaggtacctgccaagggatgatccattcttgatagattgcaatgtgaatccatgaacaaggcaattttgttagtcctggagtccggaagtccatgttcgacgaacagcaccaccttgtgcgatagcgagagttcactgtatgcgggaaatttgatgagaggagaggggcttcagtgagcaccgcccaaactactgaggatctttcaggatgctgctgagatatgaagtaaaattgatttttttttgcaaactggtcgtctaccgtggtatgttgagtagtagttccatttgttcattgatcaatgtacagtgaggattggacagatgctgattcgtacaccagcatcacaaaatgggtgagggtgttgtagtttaggagagccttttggggcttgtagattcagtagattaggatcatggggcattaacccaaaaaaaatactgcatatattctgtgcccgttctgttgaaaccatgcttggaattcgttgactttgatagt

SEQ ID NO: 5264 - DNA, 720 bp, Oryza sativa
  ref <308>: DATABASE ACCESSION NUMBER: AK062453
  ref <309>: DATABASE ENTRY DATE: 2001-12-06
atggcgatctacgatgcgttcctcgcgcacgattggagggaaacgcttgagaagaccctgacatggcttgctccgatggcgcacaacatgatccggtggcaagccgagaggaatttcgagcagcagcagattgtgttgaaggggaatgtgctacttcttcagacattgtatttcgcggacagggagaagacggaggccgtgatatgcgaattgcttgtcgggctaaattacatctgccggtatgagcagcaacagaatgcactgctggattgctctagtagtctcgacttcgacgattgtatggagtggcaactgcagtagagtccatcagtccaaggtcaggtttctgcttggttccatagtgtacaaggaatatgaaacaacaaagggtacttgtgttttggtttggatttttttctcttctgtttttttgggtgcaagttgcacatgagatcatctatcattcatagatgaaaaaaatttataggattgcctaatgcttttgttcacttgagatatgctctgtctaactcagttgtacataaatgaatgttttgtgccaaagcaaatgagcaatctcaagtgtccaaaaggggtttgtgccttagtaaaattcaccttttttattttgtatttggtaggacatgtttgtggataactagttgaaagtatcctatttggtatttggtagtgaagtcacaaagttttactcctctgttt

SEQ ID NO: 5265 - DNA, 603 bp, Oryza sativa
  ref <308>: DATABASE ACCESSION NUMBER: AK062454
  ref <309>: DATABASE ENTRY DATE: 2001-12-06
tgccactgatgagctgtaacaacccaatccttattagctggtcaagcctttgccccgtgcactctggtagccccgtatcatctgcttatcatgacactaaatgattaaggagttcagaacaatggccatacaaggggaaaaaagaataaatacctgacacaggtattgtagactgtcgctgatctggaactccatgacctgatcggagggtggcaacaaatggctgagcctgttacgagggatgtgtaagtaaaatcaacagcaggtgaaaataatagatacttgaactactattgctacaaacagcggttgtgtactgctgtgactactgcataaaattaattcatagacttaacatgatcggtttctggcagagctgaaaaagagctgacatgctcattccattctacttccacggtatcttttgatgtggaaatccactgagcagttgaacggagagcaactgatgcattggacgggaatccatagcgatcagcaaaagccttctgcaggtattccactccacctgagccctttataattggttctaatagttggatacgtgctctactgacttctgtcttcagagcctgtttattttac

SEQ ID NO: 5266 - DNA, 593 bp, Oryza sativa
  ref <308>: DATABASE ACCESSION NUMBER: AK062455
  ref <309>: DATABASE ENTRY DATE: 2001-12-06
aacaagctctgactgtctgatacatcatttgcgagctgagagaaaaaaactgtaacgccctaggtgtctagaacccgtccctatgacagacgcagcgcacatcgtcagtctccctccctccaaacctagagccgatcccacaacacgcacgattcatcaggtcgggagtggagaggagagacgggaaaccgctcacctacatgatgtttttgtcggcgttcccggcaaaacccagcaggttgatggagcagcagcagcagcgaaaccccgcaggtccattggatcccgcccacctgcaaatcctagcaacagcgaggagcacgctttagtcggatcaccccgcggcccacttcgccgacacggcgacgcggcggctctccggacgagagagctgttacgacctaactccgtcgagatcgccgccagtgatcaccggagttcaggaagaacaagtttctagaaatggggagaagatgcgtggagaagaagaagttgttctcgaattttctttttcatttcttcattgtcgattccgatacagtgccgtggggttatatatatgtccccttccttacagctggccgaaggcccac

SEQ ID NO: 5267 - DNA, 981 bp, Oryza sativa
  ref <308>: DATABASE ACCESSION NUMBER: AK062456
  ref <309>: DATABASE ENTRY DATE: 2001-12-06
ttgggcctactcgttatcagtgggatcagggatactttcagcaagaaatatatcgaagagttagtgatgggttagccgaaaatctcagtttatcagaagcttggtctaaaattcccgaaaaattagccttttatgattatattggtaataatccggcaaaggggggattattcagagcaggctcaatggacaatggggatggaatagctgttggatggttaggacatcctatctttagagataaagaagggcgcgaactttttgtacgccgtatgcctactttttttgaaacatttccggttgttttggtagatgaagagggaattgtgagagcggacgttccttttagaagagcagaatccaaatatagtgttgaacaagtaggcgtaacggtggagttctatggtggcgaacttaatggagtaagttattctgatcctgctactgtaaaaaaatatgcgaggcgttcccaattaggggaaatttttgaattagatcgggctactttgaaatcagatggtgtttttcgcagcagtccaaggggttggttcacttttggtcatgctacctttgctttgctcttctttttcggacacatttggcatggggctagaaccttgttccgagatgtttttgctggtattgatccagacttggatgctcaagtggaatttggaacattccaaaaagtcggagatccaactacgaggagacagccagtctgaggccgcattgctttggtatctttcacctctcttttttgatttgacatgggaaacatctcccatcccttctttgactctttttccttttttatacgggaaatgatcccaaatgacaaatgaataggtgtggaagttataattgtaaataaaccacgatcgaatctatggaagcattggtttatacgttccttttagtttcgactttagggataatttttttcgctatcttcttccgagaaccacctaaggttccgac

SEQ ID NO: 5268 - DNA, 686 bp, Oryza sativa
  ref <308>: DATABASE ACCESSION NUMBER: AK062457
  ref <309>: DATABASE ENTRY DATE: 2001-12-06
atcacaggctagcaagctcgactgatcatctgaaatggctcgcaagaatctccttctgcttggtgtcttcctatctgctctgcttttcttcttcctggatgtagctcacgcaagagagctcgctgaagccagtgaatctgaggggaagaatgtgaagccaacaggtaggtcaggggtcgaggatcagaagtggggcggtgctcatggaggaggatatggatatggcggcgggtatggtggaggaggatatggtcatcctgggtatggtggtggctatggtggtggatatggccaccctggatatggcggtggctacggaggtggatacggccaaggatatggctgtgggtatggtcatcctggtcacagtggaggatatggtggtggttacggaggtggttatggtggaggatacggtggtgggggtggctacggtggtggtggaggttatggaggaggacatggtggtggttggccttaataggtattcgagtcatctaagtacaactgttaaataagtcaattatgacaaacttgtttgagtatgcatgctgctagtaggaacattgtatagtagcaagaaactagaagagcatcatgtttggtctcttcttatatatgtatgttccttccaacatgtattctggctttaagcataataatatggtatatctgaaaatatttat

SEQ ID NO: 5269 - DNA, 635 bp, Oryza sativa
  ref <308>: DATABASE ACCESSION NUMBER: AK062458
  ref <309>: DATABASE ENTRY DATE: 2001-12-06
acatctccacatgcaccatcttatctcaactccttagaattcccactcctcttcttcttgttcttcttgcttccctccaacttcttcttcttgttgttcttgctgttcttgtggttcttggcctgccatcggcggcgagcatggccaggaaatgctccagctgcgggaacaatggccacaactccaggacttgcaccggccaaaggagcctgcaggagagtggcggcggttatggcggcggtggcgccggtggcgtgaggttgttcggggtgcagttgcacgtcggcggtgcgcctctgaagaagtgcttcagcatggagtgcctatcgtcgccgtcgccgtcgccgtcgccggcgtactacgccgcggtcgccgccgccgcctccaactcgtcgccgaccgtgtcgtcgtcgtcgtcgctggtgtcggtggaggaggccggcgagaagatggccaacgggtacctctccgatggcctcatggcgagagctcaggagaggaagaagggtgagttcttgagagacatatggtttgtgcatgcttcactaatttgttgtggtttagcactaattacagccacctgacagtgatctaatcatcattaagactgaatttatttttgttgatgagaagtt

SEQ ID NO: 5270 - DNA, 703 bp, Oryza sativa
  ref <308>: DATABASE ACCESSION NUMBER: AK062459
  ref <309>: DATABASE ENTRY DATE: 2001-12-06
gtcaaaacgcaactatgatgtatcacttccacataacaagattccagacctcctatctgctcttgcaaaaaagatggccattccagccatgccatctggagaggaattcaagccagaggccgccatagtgaactattatggcccaagtgacatgcttggtggccacgttgatgacatggaagcagattggagtaaacctattgtaagcataagtttggggtgcaagtgcatttttcttcttggaggcaaaacgagagatgaagttccaacagcaatgtttctgcgaagtggtgatatcgtattgatggctggggaggcacgggaatgcttccatggtgttccacgaatcttcacaggaagtgatcaggcagaaatctctgcgctggttccgcagctatctgctgaagatgactcttttatcttaaactacattcaaaattcaaggataaatatcaacatcagacaagtctactgatcagtcaattcttttgttacagttaagagaatgtgttgtaaaatgctgcctttctgctgcctccccagatcaactcacatagtgcgatagtctgattgattgcctctggagttggagtagaccggttgtggaaagataggaaagttttggatccattttacagtttaatcccttatgtccaaactaaccatgaaaaagattctttgaccatcaaaagggtctcttagg

SEQ ID NO: 5271 - DNA, 775 bp, Oryza sativa
  ref <308>: DATABASE ACCESSION NUMBER: AK062460
  ref <309>: DATABASE ENTRY DATE: 2001-12-06
atcaaacactgcacttcgcagtggtattagcagctactacaaagaacaagacagtaagatcttactacttagcgaggagaagagatcgatcgatcgatcgtaggagcaatggcgtcgaccaggcaggctctcatcgcgttcgccgtcgtcctcctcgccgccgctttcctcgtcgccgcctccgccgccgacgaaacccaggctaacaagaaggaggacaccaaggtggacgtgcaggactactggcgcggcggcggcgggtacccaccacggggcggcggctatggctatccggggcgcggctacggctatccggggcgcggcggcggcggtggctacccgggcggaggaggaggctggcacggctgccgctgctgcggctacggctaccgcggcggatgccgctgctgcgcgagccccgacgagatcccggagcccatgtaccgcccggaggtggatccccacaactgatccaatcgatcgatcgatcgatcctcggcacatgtttaattttagtttggtttcgtcaataaaatcaaaggcggcgcgtatgatctctatacgtgtacgtgtgtgtggccgccatacttatatatgtacgtatgcacagtgatcttggagaagtggagaacacataatgcttattttccactgtttttaattagggtatggtcgatcgatcagtactgtgtgtgtgaccgatgtatgtatcactttgtattattatgcatgtgatggaataaatctacctctatatagttatagtggtattgtt

SEQ ID NO: 5272 - DNA, 707 bp, Oryza sativa
  ref <308>: DATABASE ACCESSION NUMBER: AK062461
  ref <309>: DATABASE ENTRY DATE: 2001-12-06
cacgatgagcacaccggaggaggctaatgctgcaattgagagcctgaatgaaactgaggtcggtggtagaaaaattaaggttaatgtgacggagagcttcttgcctaacattgatcggtctgcaccagaaccagagcctgtatttgtggacagtcagtacaaggtttacgttggtaatcttgcaaagagcgtgaccacagagatgcttaaaaacttcttctctgaaaagggagaggttctcagtgccaccgtgtcccggattccaggaactgcaaagtccaagggatatggttttgtcaccttttcttcagaggaagaagttcaggctgcagtttctactttcaacaatgcggaattggaaggacaacccatccgtgtgaataaagcataggcatctagcagatatttccagactggttgatggcaaagtgggtacctctgaggctgaagtaactttgtgaacacctgtagactgagggaaactttaaggctagatatttgcaacaaagtggaaagaccttccaatgcaatttcactttgcaactaaacaaattttgtacgataacagcatatgtgaagaaattttattggtattcatatgaagcatatattatttaccaccgtaccagcatgtttttttgtttaattagttgtgtaacatatttgttcagttggattggaatgtatacttggcagtcatctcagtg

SEQ ID NO: 5273 - DNA, 648 bp, Oryza sativa
  ref <308>: DATABASE ACCESSION NUMBER: AK104925
  ref <309>: DATABASE ENTRY DATE: 2002-08-28
atcacaggctagcaagctcgactgatcatctgaaatggctcgcaagaatctccttctgcttggtgtcttcctatctgctctgcttttcttcttcctggatgtagctcacgcaagagagctcgctgaagccagtgaatctgaggggaagaatgtgaagccaacaggtaggtcaggggtcgaggatcagaagtggggcggtgctcatggaggaggatatggatatggcggcgggtatggtggaggaggatatggtcatcctgggtatggtggtggctatggtggtggatatggccaccctggatatggcggtggctacggaggtggatacggccaaggatatggctgtgggtatggtcatcctggtcacagtggaggatacggtggtgggggtggctacggtggtggtggaggttatggaggaggacatggtggtggttggccttaataggtattcgagtcatctaagtacaactgttaaataagtcaattatgacaaacttgtttgagtatgcatgctgctagtaggaacattgtatagtagcaagaaactagaagagcatcatgtttggtctcttcttatatatgtatgttccttccaacatgtattctggctttaagcataataatatggtatatctgaaaatattt

SEQ ID NO: 5274 - DNA, 551 bp, Oryza sativa
  ref <308>: DATABASE ACCESSION NUMBER: AK062462
  ref <309>: DATABASE ENTRY DATE: 2001-12-06
tccccaggctaattcaatggacaatgcaggaagctctagaccacagttgtctgtaacaacagttaaataaatacgcacaaaaaattgaacctcatttgcattgatcatttgatgttgttcttttgttgtattgattatctttcatactggtgctcctgtccatattagaatgtcacagtatcaagttcacgcctttcggaggtgtcagaaacattcgatggctggttcaaggtatatatgcaattttgaattactcttttcactgctatgtgcagccaatgatgattgagaggaggcaatcttcacactggtcaaggaccttgctaccgacttgcaaaattcaccttctgaaattgttggctacagcggtgtgaaggtagtctcacttcaaaaacaaatcaggctgctgcatatgtgcgatatatttggtttaagttgtattttctaacgtgcattgcacgattactagtgtatatatatgtgtgtgcacgctggcacctgggctggaagcccagccaactccaaacttgatccacaaagattaattaagg

SEQ ID NO: 5275 - DNA, 625 bp, Oryza sativa
  ref <308>: DATABASE ACCESSION NUMBER: AK062463
  ref <309>: DATABASE ENTRY DATE: 2001-12-06
aggtcatcgtagctagcaatcctatacaaagcaagtagtagcaataactggttcttgatcatttttatctaagttcttaatttcgatcgcgaagggccatggcgaaggtggcgttggcggtggcggcgatggcggtgctgctgctgctcgcggcggcggcggcgccgggggcggaggcggcgtgcgacgcgctgcagctgtcgccgtgcgcgagcgcgatcatcgggaacgcgtcgccgtcggcgtcgtgctgcagccggatgaaggagcagcagccgtgcctgtgccagtacgcgcgcgacccaaacctgcagcgctacgtcaactcccccaacggcaagaaggtcttggccgcctgccacgtccccgtcccctcctgctaaaaccaaaccataatactccagttctgcgtgccgtttatacgtgtgtgagtgcgcctgtcgcatggcccacctgccatagacgccgtctatatatggacgtacgtacgtgtctcgcttacttgatttcgtgtctgcttcgacgagttcgatcgtgccgtgtattgcgtacggttatcctgctctgtattgggtatgtatgtatgtatgaataaataaagccagaaatgcagttgtacgaggtt

SEQ ID NO: 5276 - DNA, 526 bp, Oryza sativa
  ref <308>: DATABASE ACCESSION NUMBER: AK062464
  ref <309>: DATABASE ENTRY DATE: 2001-12-06
gtttttggtggctcctgattcgtttcctccgtctcactcctactcctcggctgcccccattcttctctggatatttttctttttcatcttctttgagttggagggcttgattttaggggggactgctcgatcggcagggttaattccgatctctttaaccttcccggatcagagccgggatcagtattaggctttttgctagaagcacaaaacaaaaggaatgctggaagatgtgcttctatgatagagagctaccttgtgtgggaattggaaaggtagctcaaaatatttatgctttgtgtgctcttgatgatagtgaagtacgggtttatgcacagcaagtgctccttgtgcatttgcacgatggggctagatgtggcagttcaaccatcatgttagattaccatcttgttggggacggttgaaattatttttcatttattgcctctctcatctgatactccctcatcaatcatcatcactaagttacatgattagtgctttctgaatacataaggcatttgat

SEQ ID NO: 5277 - DNA, 453 bp, Oryza sativa
  ref <308>: DATABASE ACCESSION NUMBER: AK062465
  ref <309>: DATABASE ENTRY DATE: 2001-12-06
caaattgcatggaccccctccaaaaacattctattgccctgcatgccgtcctaataatggcggagagtatatatcacttccatgcttagcccatgaggacgatagatcaacgaccgaagcaggacctcacacccctccggcatcttgtgaagcagcaggaagagtgggagctatccagtgcaacagtagtagccaatgggagaaaacacatgtaagggtcgatttaataaaacttctacgttgtcatagcgaaactgacagctcgtggagagaaagcaaaagggttctccatcgaacagctagaagacgtagtaattttttagggctgttatgatatttacatcaatcttctcttgtcagctttaggtatctcatttttaacatgaaaattcttgaggcaattcttttattatgatctggtgctgtcaatggatgtattgcggtttgaacctt

SEQ ID NO: 5278 - DNA, 544 bp, Oryza sativa
  ref <308>: DATABASE ACCESSION NUMBER: AK062466
  ref <309>: DATABASE ENTRY DATE: 2001-12-06
aagaattcagaaaggagaaggggaattatgagttaccagagagtccctcccgacgaaccctaccctccaccagggtatcctcaatccgggccatatccatacccacctccatcaggtgctgtgtaccctcctcagggttaccctagctcccatggtgtgtaccctccaccacaggggccttaccccccacctcaccagcctccaccaccagggtaccagggctacttcaatcagggccagcaaccttactacccgccgccaccactgccatatgaccactgccaccaccactgtggtgatgagggttctggagctgggtttctcaaaggatgtttggccgctctttgctgctgttgcctgctggaggagtgctgcttctaaggagaagaattattttgctctgtgcagcagtagtatgtgataagaggctattgtttctagcatttgtgtaaacatcagtatatttgattgtttttttttccagaaatccgcaaaatatttgttactctcaggaactgaaataaataagttgtattgttctagt

SEQ ID NO: 5279 - DNA, 622 bp, Oryza sativa
  ref <308>: DATABASE ACCESSION NUMBER: AK062467
  ref <309>: DATABASE ENTRY DATE: 2001-12-06
gacgatgatacttctgcaatgttttcactttttctattgcgtgctgctggatttctgctaccattctatataatggcttgggcagtgagtatcttgcagcgccgcagacagcgacaggaggcggctgccttagcagcaactgaggtggcattcattcttcagtctgggcaaggaaccggagtgcatttcaccattgcaccggattcgccgaccacaccgcagcacgagccacagccttgaaggagtggcttggtcggctgcagccgggcagtgctcgaatcgcccaaggctagaattcatcgacggctgctgctactgtcaagtgcagaaaccacagatacatttgttcgcgtgtgtgtgccagtgtactagtagtagagagtgtaaaggcgcatttggtttggtgtctctctcccagtttgcgctccggatttcgcttgtgcgttttgcttgtcggcccgggagtaacgtggtgtgtatataaagcaacaacgctactttgattaagtgttctgtaattgttccaagatggaacgggcactctacaagtgcagtttcttctctgcccatctcgttgtctacttgctcatgtcatctgatgctagtgcaaaactttgttgag

SEQ ID NO: 5280 - DNA, 594 bp, Oryza sativa
  ref <308>: DATABASE ACCESSION NUMBER: AK062468
  ref <309>: DATABASE ENTRY DATE: 2001-12-06
aagaagaagccgagcagcagcagcagagcttagcagcattccatggcgatctcctccgtcttcctgcgtccatcgctgttctcttccccgccggcggcggcggcggcttcctctccccggcgacatgcagcagtgctacgcgtcacctcgagcaagaggagaccactcttctcaagggcggcgacgtcgctgacggtgagatgcgagcagacggcgaagccaggcggcggcaccggcgccggcgccgccgacgtgtggctgagccgcctcgccatggtcagcttctccaccgccgtcgtcgtcgaggtctccaccggcgaaggcctcgtcgcgaacttgggcgtggcgacgccggcgccgacgctggcgctggtggtgacgtcactcgccgccggcctcgccgtctacttcatcttccaggccggctcccgcaactgaagaaacaaaccgaactgaatcgctgaaacatccaagaacttgacatctcaacatgttcttctcaactgatgatgagaattaagattattatctctgggatcggactagttcttgcaaatatacaagcatatatagaaatgatgattgatgacatac

SEQ ID NO: 5281 - DNA, 658 bp, Oryza sativa
  ref <308>: DATABASE ACCESSION NUMBER: AK062469
  ref <309>: DATABASE ENTRY DATE: 2001-12-06
attcagtatacatactcgctcgatctcgtagtagacatcgctacacacacatatatatacatacattaataactaatcatccgtcgatcgacgccggccggcggcgaccgatcgatcgagatggcgagaagagcgaccgcgcgcggggctgggctgccggcgccgttcgtcgtcgtcgtctctgtgctgctgctgctgctgggatcgctgccgctccacgaggtcgcggcggcggaagacgaagatcagattggtggcggtggtgggctggaacatggtgcgcgcggccccacttggcggggctgctgcaaccagtataaagagcgaggggagccagggggtagctacacagggagagggaggtttggaccttgcattcctacgcagccatgccacaaaccaataccatagatgccaggcaccagtggtgatcagtatatatagtgggcgtacgtgacactgatcgatacgcacacgtactatacgtatatatacggttatatatatacgtaggtactcgatcgctctccctctcctaaataatctatccctccgttaagttgtccttccgtaactcattgttaatggcaatattacgtactccctccgtattttaatgtatgacgccgttgactttttaagaccattcgtcttattc

SEQ ID NO: 5282 - DNA, 572 bp, Oryza sativa
  ref <308>: DATABASE ACCESSION NUMBER: AK062470
  ref <309>: DATABASE ENTRY DATE: 2001-12-06
agaacaaatcactcacacacagtgacagaggcaagaagaagaagctagagagagatcagtgtgtgttaagtcgcagccttgcagggtgatggagtacagctactacggcaactacttgagcggcggcggcgccaacatggcgaaggagaagaggccaccgctgaagagggggcaggtcaagcgcaggatcgtgaggagcatcagcaacctcatggccaacaacgctgctgctgatgacgactccaactcggcccaggctgcagatcatcgcaacagcttcatcaggagagaagcaagctacaataataactagatgtgtgttcttgcagttgcactacatatacttccttagtttgtgttcttctctaatgctctggtactgtgcaaatagatgcatatgctattttgattctccatcatgtctgtctctactctctgctactatacagagcagctgttcatttcttggcttgaatgaagacaagggaaatggatccgtctgccaagttcgatatgtgtatataaatgtattagagatgtataaatacaagtaaggcctggtttagttctct

SEQ ID NO: 5283 - DNA, 1212 bp, Oryza sativa
  ref <308>: DATABASE ACCESSION NUMBER: AK062471
  ref <309>: DATABASE ENTRY DATE: 2001-12-06
ctgcaataaaagcgtcttacccggacatcaaaattatatcaagctgtgacatatcttccatttcagcagtcaaccctgctgatctatatgatgtccatgtttatacatcatctggtgatatgttttccaaaacaagaatgtttgatagcacaccccgcagtggacccaaggcatttgttagtgaatatgcggtgactggaaatgatgctggccgaggaacattagtagctgctctagcagaagctgcatttctcattggattagaaagaaacagtgatgtggtcgagatggcaagttgtgctccactcttcataaatgacaacgatcgcgggtttagtccagatgccatagtcttcaactcatggcagcactatggatgtccaaactactggatgctacacttcttcaaggactcaagtggtgcaacacttcatcccttgacaattcaggtgtcaaactatgatcaattggccgcatctgctctcacttggcagaattctaacgatggaaacacttacttgaaaataaaggttgtcaattttggtaacaaagctgtgaatcttaatatagctgtagctggactagagaatggcattcaggaattcgggtccataaagacggtgcttacatctggttggctgcgggatgagaactctttccaacagcctgacaaggtggtgccggcggcaagccccataaccaacgcgggcgagaagatgggtgtcattgtggatccatactccctcacctcgtttgatctcctcctggacaccaacacagacaaatacccactattggagtcgagctttcattcaagcatgtgaatacagcgcgaaatgtaatggcatagacattaggggaattcccgtgtgggaaatccaaatttgtgaataagtataaactacagatactgctcgcctgtctgcagaagcagtgaaagtcctggtatttgttgtgtatgttatcatgtattcaccgtctccgggcctatgagcattgtctcattgcgtgaattgctgagaaacaactttaatatacctgtaacatcacgctcaagcatccgttgtagtctagctggttaggatactcggctctcacccgagagacccgggttcgagtcccggcaacggaatctttttgttgccctgtctttttaagaatgtaaacattggttccttttgttttgtactatatattttcgctctgtacttt

SEQ ID NO: 5284 - DNA, 656 bp, Oryza sativa
  ref <308>: DATABASE ACCESSION NUMBER: AK062472
  ref <309>: DATABASE ENTRY DATE: 2001-12-06
cacaagaagaagtataattgaatacgcccgtagccttggatttcaggttgaagagtgtcttattacaatagatgagttgcttgacgctgatgaagttttctgtactggaacttctgtggtactatcctctgttggttgcatagtgtaccaggggagaagagtggagtatgggaaccagaagttcagaactgtgtctcagcaactctattcagcacttacggctatccagaaaggcctcgtggaggacagtatgggatggactgtgcaactgaattagtagcctggtcgttatggacggtcttaaggttcttcctgtcaaatagtgctttcttgtttgaagcagcaataaagaaattcaccgaattttctcatttcaggcagtatagaatagagaatcacctcttgtgcatatgcaggtacacacagtatacaaataatctggggcccagagatagagaagcatgaactgtttcttctgactctattacctttcttactgaccatacttccagtgtaaataagtgctccttgcttatccgaggccatattccgtgcatcaattcggcccataactttgtcgtcagcttgtctcatgtgtattcaggacaaaattattggcactatttattggacaattaggtgtgtgcgtatggaac

SEQ ID NO: 5285 - DNA, 665 bp, Oryza sativa
  ref <308>: DATABASE ACCESSION NUMBER: AK062473
  ref <309>: DATABASE ENTRY DATE: 2001-12-06
atgcatctgccaaattgatagtgtatacgacgtggagtacagcaagagaagcggccggggtcgtatagctagctagcttagcgacccctgccacacaggtagatcaccttgcagtccctggtgtacggcaggcctgacttcgcggggcagtgcggcctgcaggcgctcccgtcaggacgcaacggaccaaacgggatcttcccggccagctcgcgccgccggtgatgaagctccactcctcctccgcccagctgcagctgacgtgccgccgccgacccgagctcgaccaccaccactaacctttcttctgtcgcccacggcgccgtcgcgttgttctcggcctcctccgccacgctgatgacgacgctggctgatgctacggcgacgagacgaagggcgagagcagcaagcagcaggtggaggaggaagagagacagcggcgtcgccagcgcctgcttgcttctgctcaccatggtggtgttctctcttctcctgcaatgaactgattttgcagtgatactcgcgaacgtgctcagttcatatatacttgtatataaggagagtagctcactgtacgtttctcgatcggtacgtggtggaactgcgcgatcgatcgagcaccgacggttttgttaccgcgtaatattgtttgcaaataccgccct

SEQ ID NO: 5286 - DNA, 437 bp, Oryza sativa
  ref <308>: DATABASE ACCESSION NUMBER: AK062474
  ref <309>: DATABASE ENTRY DATE: 2001-12-06
aagtctcaagtcgtcttggtgctcatcggcggcgagcaaaagcgagcttggtggccatggcgagcttggtgttcgagccccacggcggcgcggcggtggtggtggccggagtcggcggcggcgacgtggtgttctgcgtcgtcatcctctgcctgtccgtgctgtccatgatcatcttcgccgcggcctcccccggcggggagcggcggcggcggcggcggctttgctctgaaaatccgtacggctagctaattttcttcctttttttttcttcaaaaaaaaatgagagaataattactgctcctactctgcttgtacctagtactacaattactacacggcatgaggaacaaattactaactgtaatgagatggagttactgtaaattgtaattaagtctaataataatcatcatcatctttggattctcagtttg

SEQ ID NO: 5287 - DNA, 701 bp, Oryza sativa
  ref <308>: DATABASE ACCESSION NUMBER: AK062475
  ref <309>: DATABASE ENTRY DATE: 2001-12-06
atgaaacaaaaaccgttctgaactgcctcgactcccgtctcctcgccggaaagccgccgccgccgccgcccttctacttccgccgcctcctccttcttctcgagaaggctctgcaccacagacgagagctgagccgcggagcacaatgtcggcggactcggcggcggcggggagggacgctctcctggacgagctgcgcgcgctcatggcggcccactccccgtcgctccacgcgctcgtcgtcccgtccgaggacgcccaccagagcgagtatgtgtcggagcgggacaagcggcggcagttcgtctccggcttcaccgggagcgctggtttggcgcttatcactatgaaggaggcgctactttggacggatgggcgttacttcttgcaggcagagcagcaactcactaatcgctggaaattgatgcgcatgggagaagatcccccagttgaagtttggatagctgataacctgtcagatgaagctgtcattggaattaatccatggtgcatctctgttgacactgcccagagatatgagcatgcattttcaaagaagcaccagacactgtttcagctttcttctgacttggtagatgaaatatggaaggatcgtcctcctgttaatgctctacctgtatttgtgcaacctgtagagtatgctgggtgtagtgttaccgaaaaacttaaggagttaagag

SEQ ID NO: 5288 - DNA, 1012 bp, Oryza sativa
  ref <308>: DATABASE ACCESSION NUMBER: AK062476
  ref <309>: DATABASE ENTRY DATE: 2001-12-06
acaaaccagtaaaaatatacgccaaaacgcgccgccgcaagctcgccactctgagccgccgcgccgccgccgtcgcagaatcgaaggtggtggcgccatcatcgggctggtaggcacacgacccactcctcctcctcctcctcggccatggcagggccatggcccctcctccggtcgttcctgaggaactgcgtcgccggaaccctcgtcgtcgtcaccgtcaacgaccggtacgcctccgtcatcaccgtgcgtggcacctccatgaaccccaccttggagtcccaacaaggtgaccgcgcgctggtgagccggctctgcctcgacgcccgctacggattgtcccgcggcgacgtcgtcgtcttccggtcgccgacggagcaccggagcttgttggtgaagaggttgatcgcgttgcccggcgactggatccaggtgccggcggctcaggagatccggcagatacccgtggggcactgctgggtggaaggggataatcctgacgtcagctgggactcgcgaagctatggccctattcctctcggtctgatgcaggggagggtcacacacatagtctggccaccaaatagaattggcccagttgagagaaagatgccagaaggaagagtaatgcagcgatgacttttgaatctcttgttaggttggctaatacagtttttccccaactggagtaggatacaggttcagaagcctcaagattaattgtactatcaaagacagtgaagtaagaatgtcatggtcattgggaatttcattcctaatggcactgaagttgattctccttccagagttcgttgcagaatgcatggttagaagttttgcttcttgcagcccttagatatgaacgatgcaatgctgaaatattgcaaatttcattggagagaggaatcattgacatcttcagttcaaatttattatgatctgtcacctgttgcggttggaaagcagaaacaagtattgctatttaaaatgagcactgtagcaatttttc

SEQ ID NO: 5289 - DNA, 679 bp, Oryza sativa
  ref <308>: DATABASE ACCESSION NUMBER: AK062477
  ref <309>: DATABASE ENTRY DATE: 2001-12-06
acctcagcctcagctcaccttgtgattagcatagccactgcagatatcgaatattgcattaagctagctagcttaattggcatcataagcagcagaagaagaagagaagagaagagaggaagctagaagatataggagaggaagaggggatgggagggaagtcgtcgttcctgtgcccgatcttcagcttcctgtcgtgcaagtcgaggaggtacgaggacgacgacgacgacggcgagctgagcggcgagtggccggcgaggtacgggagcaaggtgaggtcgagcgacgaggactacggcgcgtggtgggtcggcgagcgcgacgtcgaccgcaaggcctccgactacatcaacagcttccaccagaggaagcaggtcgccgccgcctagctagctcgatctacacatctcgatctccaaccacacccacagctcaacgataccaatctttcattggatcgagggggactagcgtacgcgcgacggcgacggcggacgacggccgccggcgcggccatatatatgtactgcatctgttgtctcaaccggccatttgtgtaccgcaccgcatgtacgtacgtaggtctccgtttacataattaaattcttctcatatatgtatatgttaaattgttatgtatgtttgttgtggattattatgttatatatgtttattt

SEQ ID NO: 5290 - DNA, 640 bp, Oryza sativa
  ref <308>: DATABASE ACCESSION NUMBER: AK062478
  ref <309>: DATABASE ENTRY DATE: 2001-12-06
acaagcatcgccggccgccgctcctttcaaatcatattcattctatctctatcgtgtgctttttatcatcgtggtttgtagtcgtgtgcgttttattttcgtagtttgtgtaattggtttgattcgttgaattttcggggtggttttgagttgttcgtttctttcgatctggattttttttttggggggtgcggatttgcaagatcagcttcttgtttggatctcgagcacacgcacacggtccaggcaatcggcatatggtctgccatcttgcgagattgaaatcgagccagcttaaactcacctggatctgaccctcggtgattttctgggccctttcggctggcacatgcccctcgtcttcaaaatattcgagatttgtctttttgttcttggttatagatctcgaagcaaagcaaacgcactctgtcccaagacttgtcagtgttttgtggcaatttcttcgtttgcgagaaggatgttccgagaatctcgtacgccggtctgcaccaaattcgatctgaatgtccttgtgaagcgtgaaatcaaatttggaataacatagtacggagtagtgcagaaccgaaatccgcatgaaagtactctgtatctgttatctgataaactgagaatttcgaat

SEQ ID NO: 5291 - DNA, 647 bp, Oryza sativa
  ref <308>: DATABASE ACCESSION NUMBER: AK062479
  ref <309>: DATABASE ENTRY DATE: 2001-12-06
ctcttcttccacctccacccacccacccacccagcctcgtttctagggtttatcgcggcggcggcggtggcgagatggtgcagcggctcacctaccggaagcgtcacagctacgcgactaagtcgaaccagaccagggtcgtcaagatcccaggtgggaggcttgtgtaccagtacacgaagaagagggcgagcgggccgaagtgccccgtcaccgggaagaagatccaggggattccccacttgaggcctgctgagtacaagaggtccaggttgtctaggaaccgcaggactgtgaaccgtccatatggtggagtgctctctggaactgcagttagggaaaggatcatccgtgctttcttggtcgaggagcagaagattgtcaagaaggtcctgaaaatacagaaaaccaaggacaagaccgcaaagtagagctcctttgtaagggttgcacaatgctgttttgtacacagtgaagagtatttttgatggtggtttatgttggatgatgtttagcatgtgagagacctaccttttgagtttagggttttcaaatcctctcatcttataattgtcggagtattgggacatctgatccccttgttccttaattatgaaatttctgtatgaactattgggtactagtcg

SEQ ID NO: 5292 - DNA, 968 bp, Oryza sativa
  ref <308>: DATABASE ACCESSION NUMBER: AK062480
  ref <309>: DATABASE ENTRY DATE: 2001-12-06
ctcttccacttcccttccctctcttcttttgccgtgctcccagattctccggtcgccacgactgcttcgtgaacaatctgcatcgctccgcgattcgtgttggttcttttttttgtttcttggcattcacggcggcggcaatggcgaggagcacgcggtcggcggcgacggagcaagcgtacagccggttcgcgccgacggcggcgtcgtcacgcggccgtggcgtaggtggcggcaacggtttcgacgagttcgacgagtcggacatctggggatcgttcgagccggccgcggaggtagccgagtcaccccgggcggcacgtcatcaggtgccggccgcccggccgccggggcggaaggcggcggcggcggcgtcgaagccggcggcgcacgggtcgctgccggtgaacataccggactggtccaagatcctgggcgacgagtacagggggcaccacgccggcgactgggaggcggacgacgtggacgacgacgacatcgacgcggcgtcggccgtggcggtgctgccgccgcacgagctggcgtggcgccgccgcgccgcgtcgctgtcggtgcacgaggacgggatggggatcggccggacgctcaaggtccgcgacgcggtgtggaagaagaccgggttccaggcctgacactttagcttttgcacgtcacctccatccatcgagctgttttgtttgaacgaacagaggatagattaatttaactctctcgagtgctattggtagttggtgttttttttagcagcacttaactgcacaagtgtttcgtgcttttgcccttctctttttttgggcctttttcttttcttttcttaattttctcggcacattcaggagaggatcagaagaggtagtagtcaggtagaggaattagtgctagctgcttgttgttgattcatcgtgacatgtactatttctcgagagaatgaagatgataaacacgac

SEQ ID NO: 5293 - DNA, 388 bp, Oryza sativa
  ref <308>: DATABASE ACCESSION NUMBER: AK062481
  ref <309>: DATABASE ENTRY DATE: 2001-12-06
atccaaatccggtgcagggctcaagcctcaagcagttagcggcggcgggcggtgaagcgccacgggaaggcggcagctccagagggcagcgtacgggcaagcggcggcttcggcgatgatgtagaagggggaggagcagggcgcctcggctacgcttcagcagggggggctcgttgctctttcccctcttgtgcgtcaactacaggatgcccctcagcggcggtgagaagcgagcagcatggcgtggcaagctagcaacaacgacacacagcagcgactcgtccacagagacgaacgatgttgttgctgcttgatttttctttctattttttcccatctcatagtatttgcaacgcaaggaatttctcatgaattgtacaaggggcat

SEQ ID NO: 5294 - DNA, 634 bp, Oryza sativa
  ref <308>: DATABASE ACCESSION NUMBER: AK062482
  ref <309>: DATABASE ENTRY DATE: 2001-12-06
cacgaagaagagaaaggcgaaaccaaggttgagcaggaggaagtgaaaaccgagtgcaccacacaggagagcaacaaaatcatcgagaagcagccacatccagacagaaaacaagaaaccgtatcctccaaagatgaactggagcccaaggaggataccaacactgagcatccaaatgggacagtatcagaagataccagcaaagtggcaatgtccccgacaaaaccacagcagcaacagaaaaagaacaagcctcttctgaagaagtttgggagcttactgaaaaagaaaaacagcaagtaggtgaacgacacatgtactactattgctattctgatttgtttttttttgtttgacaaggtagtgtggttttctacgagtttactgtcaatggctgtacttgttctggtgattgcagtagtttgtgggtgtctcatttttttttataatttggacctcctgttcttgccctgtgtctgtggttgttatctacacgattgtggcagctcgagtgtaactggagttcctcctgatcagaatggtttttcatttctgagaatgtgcagctcctcctgataaaattcatgtaatgtaatgtaccagtgacaactcctaatcatatttgttggcattc

SEQ ID NO: 5295 - DNA, 935 bp, Oryza sativa
  ref <308>: DATABASE ACCESSION NUMBER: AK062483
  ref <309>: DATABASE ENTRY DATE: 2001-12-06
gtgcttggatctgctctcagaatatccaacctagctagcctgcaagcaagagagtgtagctactcgatccgatccaatgtctctcatcacggatgagtctcctagggattgctcctcctacaagcatcagcatcatcatcgcgccatccatggtcgccgaattagccgccgcactctggtggtggcgtcctcagcggtggtgtctctggcatcgctgtcgctcatcctgtggctcgtcctccgcccatcccccccgcgcttctcgctgctcgccgccaccaccaccgccaacgactctgcctctgtcgtcgccatcaacgccgccttcgccgcccgcaaccccaactcccacaccgccgttctctacgaccgcctccaggctagcgcctcctacgccgggctccctctcaccgccccctcgccgctgatcccgcccttcttgccgcagcagggccagggcgacgccatgctctccgcgtcgctcacgtcgccaccggcagcggctgctgtggcgggagggcgggcgctgctgaggctgcgcgtggaggggcagctccgctggaaggtggcggcgtgggtcaccggacgccacgcgctcaccgtcgactgcatcgccgttgtggagctgcagccgacgccgacgccgtcgccgagcgcgatcgtcggcgtcctccagccccaagatcaggccggctcccgctgctccaccaccgtcgcctaataatataatatccatcaaaaccaacaccacaaaccatgcaaactgatcgatggatgcatggaggaacagtcctagttcttgtacatgtacatgtattctctctcgcgttatgtatgtatattgtcctgtaccgcgcgcggtaaacaagtaataaatcaaagcaatctgaatcgtacaacgtatttcatgtgttgctttgatttttttggctttc

SEQ ID NO: 5296 - DNA, 540 bp, Oryza sativa
  ref <308>: DATABASE ACCESSION NUMBER: AK062484
  ref <309>: DATABASE ENTRY DATE: 2001-12-06
gcgccaaagcaaacgggcaaagggaattgaagtagcagcagcagtgaattgaagtaagaagacaacgggatgtgctgctgcggtggcgactgccggccgatcgggtggctgctcggcctccccttcgcgctcctcgccgtcgtcgtctccttcattggcgccatcatctggatcgtcgggctgccgatctcgtgcatctgcccgtgctgcctgtgcgtgaccgtgctgctggaggtggcggtggagctcgtcaaggcgccgctccatgtcatgacctggttcacctccaagataccctgctgatctgatctcagatcatcatcagatcttgctgctgctacatatatacactactatctccgtttggttgatttagtgtcgtgacagaattccagttggtaggaaaatgtttttgtgcatgattccttatggatagatcgattatctctactcgttggttggttctgaatttgtggagagattgtcagcgattaattgcatgcccatgcccatagacattgaagagttgttgcttcgtct

SEQ ID NO: 5297 - DNA, 700 bp, Oryza sativa
  ref <308>: DATABASE ACCESSION NUMBER: AK062485
  ref <309>: DATABASE ENTRY DATE: 2001-12-06
gtcgccgcttccgctgctcctgtcgtcaccgatgccgctcccgtcttcgccgacgacgccggtgactccctccaccgccccgcctccgtgccgctcgccaccacaattggacctgctggtccagggttccgttggcgccacagccccgtcgccgaccggtggtccagccttccgccagcgccactgctccgtcgttctccggtggtccagctttccgtcgcgcctccggtcttgccgccgttacgaggggcatagtctgccgtaggtacttccagccgtgcgtcaaaatttcttctgctggtgagatcgagtgagaccccattgactcaaattgactcttctgaatccccattagtcttctgtgtggattcttattcagctgaagggctatatcctatcaaggtgactggtgttgctccattcagactaacattgtagacttgtagttgccatgctgcgtctcttccagattactttatagagaaattatattgtacaggtttgagaattgttcaagtgatactgcattccaccatttgatttctttagctagggatactataaaattgtcgtaatacaagcttatacggatatgctggggatgggtgaacaggatggaaggcattttttataggcccttgtcagatgatggcttttggctttaagatgctctatgagaagggtcaaggagattttgttc

SEQ ID NO: 5298 - DNA, 611 bp, Oryza sativa
  ref <308>: DATABASE ACCESSION NUMBER: AK062486
  ref <309>: DATABASE ENTRY DATE: 2001-12-06
gttctttgccggtggcggcgttgcagaggcttgcggcggcgaggggacggaggcggaggcggaggcgagcggcggcggcggcgaggggagagagggatggcgaggcggttgtggaggtggtacgcggaccggcaattcaacaggtgggagaagacggtgctctgggacatggtggagccgtaccgcccgccgcgctcgttcgcgccactcatcggcacctacgtcgccgccttctacaccggcgtcgtcgcctccgccatcaccgagcagctttacaaggagaagtactgggaagatcatccgggcgaggccgtgccgctcatgccgcccaaattctactgggggccatggagggtgatgaacggagaagttccacgctttatgcagacaccagaagaggcgaaaccggcataaaatcttcaatgatcactgaatcttttaaatgttgcgtgtctgtaaggacacgatatgtagtgtttgttgcgtgaataaacagtttgcccccatcgatctcaaggcaagtagagttagatacgatctatattatacggtataaacggtttatttccccttatccccttataatgagaaattggaagtgttcatgagtc

SEQ ID NO: 5299 - DNA, 526 bp, Oryza sativa
  ref <308>: DATABASE ACCESSION NUMBER: AK062487
  ref <309>: DATABASE ENTRY DATE: 2001-12-06
aggctctgatgcgcaccagatcgctcagtctcacaccgcacagagacagagaagagctccgtcgtgccgccgggccagcagcagcagccagcctcccgcgccgacaccgacacagcaacggcagcggcggcggcggcggcgacgacgaccaccgtgtgggcgcccaaggccgtgcggtgcacgcgcgggttcttcttccacgaccgtgaaacggcgccgctcgccgcggcggcgccggcgccggcaggggaattaggagacggcgatgacgtcgactgcgactactactgcagcggcagcagctcggcggcgacgacgacgtcgtcgagctcattaccggcggtcgtcgagccgtgcttctccgccggcgacgactggatggacgacgtgagagccttggcgtcgtttcttgacaccgacgacgcctggaacttgtgtgcgtgacattagttcgtcgtccgtacgtacctacgtatatgcatgtgtgcgtctcatagaatgaatataaaataatattttctccatc

SEQ ID NO: 5300 - DNA, 585 bp, Oryza sativa
  ref <308>: DATABASE ACCESSION NUMBER: AK062488
  ref <309>: DATABASE ENTRY DATE: 2001-12-06
aaccaacagtgcagtcacactctcgcacactatctgcataagaaggggataagctacctgattcatgccatcagtttcagttgcatccagcatgagcaagctcaagttcttggtcactgtcgtcctcgtgatcctgctactgttcgattcatcgtcttcagggcaagctgagacagcatataccaattatgaagtgacttctaaagtgaaagagagaattcagaaacatagcaggagggttctgacagatgttcaggactatgactatggaggacccaaccctagacatgaaccacgtaagaagcctggaaatggacactaatcgcctcttctccacactgaaaccttgacaaagataagtcagatactcagatgatcccaaatgctacaatcaccagaccactatcttactgtaatgtactagaattaagcagaactgttaggtactattgtgtcgttaattaccttgtaatatgttggtcaggtgcatggagttcaggtcattttagacagtacctgcgtgtattcaggtgtgtgcttatataactagcaactggtaaaatacaactactgaggacattttgt

SEQ ID NO: 5301 - DNA, 619 bp, Oryza sativa
  ref <308>: DATABASE ACCESSION NUMBER: AK062489
  ref <309>: DATABASE ENTRY DATE: 2001-12-06
agggtgctcttcttcttctctaggttgatcttatatcatctgagagctccaaactaaagcctgcagccatggatctgatggagaagtccagacgagcaaatttcttgttcgacgacaacgacggagatgaggatcaaaacgacaaacaaaaaaaggagaggactcctgttaatcgagctggggagaagaataacaatgagaacttcacaagtcgtggactaccaaacgacactagtaaggatcgctcctccgggttgctggcaagcttgctgtgttgttgtggaccgcggcgaaattaactaagtcgtagtacaaaatgagacacacatcctagttctacgattcgggatttgaggtatgcttagatttacagtagtaggatataccatattatatactaagttgttatgttttaggatgtcggattttgaaccagctgtgatttgatcttatatgtactagtggcaccgccagttaccggtgattaccaattactctcatgtgtgttaagttaaccatgcatacatgaatgtagagactgggatgaatatgttgattattatcttataaaagaaattagatagtactacatgtgattgtgtatgtgtgtttagatatt

SEQ ID NO: 5302 - DNA, 628 bp, Oryza sativa
  ref <308>: DATABASE ACCESSION NUMBER: AK062490
  ref <309>: DATABASE ENTRY DATE: 2001-12-06
aactaacgctaaaaaagtaacagtttctgtactttattggggctttatcacacatggctttcgtgaagaagggcgacaaggtcgaggagaccgagaacatccacaagatccgcatcaccctgtcgagccgcaaccccaaggcgctcgagaaggtctgcgccgatctgatgctccgcgcgaaggaccagaagatcaagacccgcggccccgtgcgtctgcccacccgcaacctgaagctgaccgtccgcaagagcccttgcggtaacggttccgcgtcgtgggacacgtacgagatggcgatctacaagcgcctgatcgacctctacgccgtcctcgacgtcgtcaagcagatcaccgcgatcaacatcgagcccggtgtggacatcgacgtcgccgtcgctgaggcctaagcagtaggtacgtgcttctccaagcacccgtgcccacgccgcctttgtgtcaaagactgtggccacttccgcagagtgtcgttggcgttgcctcaccgcacgctcacgcctccagcagttgccacgaccaccaggcatcaaggcgtttctcccgagccggaacaacagacgtgtgtggcagcccccaagctgaatcccccctctctcttctgtctctc

SEQ ID NO: 5303 - DNA, 668 bp, Oryza sativa
  ref <308>: DATABASE ACCESSION NUMBER: AK062491
  ref <309>: DATABASE ENTRY DATE: 2001-12-06
attcggtagctggtttgctattaacactttaattttgcatgcagcaattaaggtgttaattaatatatataattaagctttaagctcattagtttaccgacgatggaagtggccaccaatacggcgacacgatcgccggtgaagctaatgctggtgctgacactgtcgccggcgagcaaggtgatcgccaagggcggcggcggcgtgaagcgggtgcacctcgacggcggcgcgttccagtgccggacatgcgggcggcggttctccacgttccaggctctcggcggccaccggaccagccacaagcggccgcgggtgcgcgccgacggccttgacctcctcctcggcgcgcgccccggcaagctcggcgccggcggcgcctcgacgccggtagtgcaccggtgcgacatgtgcggcaaggtgttcgccaccggccaggcgctcggcggccacatgcgccgccaccggccgctggtgagtcgtaatggcacaatgtccacgacgtggacggcggcggcggcggcggcggcgacaatgtccggctcctcgtcggaagagcgtgacgacgacgacgacgacgacgtgcacaattataatttcatccactttttgtgagtggctaatggacaaatcaatatatgaattgaataaaaccagtgattaatgtc

SEQ ID NO: 5304 - DNA, 600 bp, Oryza sativa
  ref <308>: DATABASE ACCESSION NUMBER: AK062492
  ref <309>: DATABASE ENTRY DATE: 2001-12-06
tgacagacatggaaagcttcaataatgtgaagcagtggttgagtgagattgataggtatgccagtgacagtgtatgcaagcttctagttgggaacaagtgtgatttggttgacagtaaggttgttgatacagaagaagccaaggcttttgcagagtcattagggatttcttttcttgagacaagtgcaaaggaatccatcaatgtggaggaagctttcttaaccatgtcgtcagacatcaagaaaaggatggcaacccaacctgccgtggagaggaaaccaactgtccatattcacatgagaggccagcccattcaacagcagaacagcagcagtagctgctgctcatcatgaactcaacaagacgccgttcctgtcatggcactagccaaatgttggaggattcatttcgtcacaaggctggaaaaaaaagcattggattggatgatactttagcattagacaacatcatcatgcgtgcacaaagtgttcgttacttgccacagtttgtgatatcatcggtttgttaaaacagtttataagcctaaatttaatatatatgatgcatgatgttggaactgaacatcatgatgcttgatgc

SEQ ID NO: 5305 - DNA, 437 bp, Oryza sativa
  ref <308>: DATABASE ACCESSION NUMBER: AK062493
  ref <309>: DATABASE ENTRY DATE: 2001-12-06
atcacacgcacactgacacacagtcacacaccatcccgctctctccatcgatctccatcacaagctagcaaaaccaagagccaagtcgagcaacacatcatacaatggcgggcatcaaccgcaagggcggcgcggcggcggcgtacgcggtggcgctgtgccagtacgcgcgcgacccatcctaccgcagctacgtcacgagccccagcgcgcagcgcgccgtcaaggcgtgcaacgtcaaggccaactgctaaattaaactgctgctactactctactagtactaatgcttgtgcagttttgctactgctactgctagtaaataaacgtggttgccgctagctaggcagccatgatcattgtgtgcatgtttcagttcactgtcacgtatgtatggggctatatgaatgaagttctgctatgcttgctatctcttc

SEQ ID NO: 5306 - DNA, 523 bp, Oryza sativa
  ref <308>: DATABASE ACCESSION NUMBER: AK062494
  ref <309>: DATABASE ENTRY DATE: 2001-12-06
acttcagctctcctgctcgttcgcatctcggtagccgagcgtcgccacctcctccgatccttgcccctttgctgcccatcgacctccctccttgccgatgcgctggacccgatgggccgcggtcgagcttgctggcgcagcgctcgagttgtacgtcccacctccgctccagttcgccccctccacatagaagcaggggagcaggtgccggcgacgcggatggcatgagaggagacggaggcgtacgcgcgggactggccggcagtgggatgcaagatatcgaagatgaaaattgctgccgcgtgctcgaaatcatcacctccggcatttaaatgtgtgaaagactggttcttaaatttatttttgctttcactgtaactacattgttgtgcttcttctttgttccatagctagaagctagactggaaacaactgtggctgtttcaggctttttttttatcttggtgaattaatgtaaatatatttagttatggttatatccggttttcgatggtttgttctt

SEQ ID NO: 5307 - DNA, 486 bp, Oryza sativa
  ref <308>: DATABASE ACCESSION NUMBER: AK062495
  ref <309>: DATABASE ENTRY DATE: 2001-12-06
caaacgcacacacaacttaagaatcgatcaatagagcatctatcattctgctggacaataacacccgtttcagtctcgatagcaagcagtttcaattggttgaattttgcttcattaatttgctgtgaccagaatgagttcatcagacagcaagccatgtggtggtcttaagacggagtggccggagctagttggcctcaccatcgagcaggccaaggcgaaaatcaaggctgaccgtccagacctccaagttgaggtgctcccagtaggaaccatcatcctgggagtggtcgtcccgaaccgtgtcatcctctgggtcgacactgtggccgagattcccaagattggctaattagttttaagctgtgtctagctataagtgtaatgatacaataatgaaaggtccttgctttttatatatatctgatgcatgttgtaatgtgataaataaagaaggtataaataaagaagatagtatgtgcatgt

SEQ ID NO: 5308 - DNA, 740 bp, Oryza sativa
  ref <308>: DATABASE ACCESSION NUMBER: AK062496
  ref <309>: DATABASE ENTRY DATE: 2001-12-06
attcgtagatttgctctcggaccaacaacaagcaagcaccatggcggaccagctcacggaagaacagattgcggagttcaaggaggcgttctcgctcttcgacaaggacggcgatggcaccatcacgaccaaggagctcggcacggtcatgcgctcgctgggccagaaccccacggaggccgagctccaggacatgatcaacgaggtggatgccgacggcaacggcacgatcgacttccccgagttcctcacgatgatggcccgcaagatgaaggacacggactcggaggaggagattctcgaggcgttcaaggtcttcgacaaggacggcaacggcttcatctcggccgccgagctgcgccacatcatgacgaacctcggcgagaagctcacggacgaggaggtcgatgagatgatccgcgaggccgacattgacggcgacggacagatcaactacgaggagttcgtcaagatgatgatgtccaagtaaaccactcgtctctctcgctgtcggggcggccagcgcggtgcggtcgggtggtgcgatcccgggcgcgtagctcgtcctcatggagctaagggtgaaggggatcgcacctttggacacaccgtggtgctcgtcattttgcattgcacatcttaaatgccatttccggcgctttttctctttggagaggggtgccggacccaccactatactagtagtacgattcaataaaaaaaaaagcagcgtgcaagac

SEQ ID NO: 5309 - DNA, 492 bp, Oryza sativa
  ref <308>: DATABASE ACCESSION NUMBER: AK062497
  ref <309>: DATABASE ENTRY DATE: 2001-12-06
accaccaccagaccagagacagggggagagatggtgtggctgcagtacaccgccacccgctcccagcgcgccgccaccgcctgcttcttcctcaccggcgtcgccctcatcctcgccgccgcccgcctctcctacgccaacatcgagccccagcgcgccaaggccgccgaccgacgccgtgtcctcgaggacttcatccgccgcaagcgcaaccacgccctggacctggaggatccccctcctaaaccctagctccacctgcctcctccttcttccttcatcccaggttccccgtcagattcctcactctgctgctctaatctaatcttgtaccatgtggattggatgcaactccacctagacctagcaaggaataaatagcatagggatttctattttacttactcactcactgctgtatgcatcactcttttgcctaaattacatcaataatattaatatatcgattggtttattcattcagtggtgatt

SEQ ID NO: 5310 - DNA, 477 bp, Oryza sativa
  ref <308>: DATABASE ACCESSION NUMBER: AK062498
  ref <309>: DATABASE ENTRY DATE: 2001-12-06
aaatcggcaaatcttcccccatcttctcggccatggcgtccgcggcggcggagaaggggaaggctccggccgacacagagcagacggcggcggcgaccgccgcgcggctcgcggcggagtggaccacgtgggcgatgaagaacgcgaaggtagtggcccactacggattcatcccgctcgtcatcctcatcggcatgaactccgagcccaagccccgcctcgcccagctcctctccccaatctaggggtcctagctcaattctcgccagctgctattcggctgttcctcaccacgacccgcgtggatgcgcgtctattggatacggcaacctgtattgcatttcttctacataattttagttcctttctgtttgaatgtttgttaattttgggtctccccaaatagctactgatgagagttaagactttgagttgcaattaattacaaatactggtattatatgtgtgttacggtgt

SEQ ID NO: 5311 - DNA, 1393 bp, Oryza sativa
  ref <308>: DATABASE ACCESSION NUMBER: AK062499
  ref <309>: DATABASE ENTRY DATE: 2001-12-06
agcttgactactggagatccagcaagagcctcagatttcagaaagagagagatgagccgggtgtgcgtcaccggagccgccggctacattgcgacatggctcgtcaagaagctcctcggcagaggctgcgtcgtccatgcaaccctgcgagatctcggggatgagaagaagacggcgctgctgaggaggatgcccggcgcggcggagcggctggtgctgttcgaggcggacatgtacgacgccgccaccttcgagcccgccatcgccggctgcgagttcgtcttcctcatcgccaccccgctgcagcacgaccccagcagcaccaagtacaagaacaacacggaagcggccgtggacgcgatgcgcgtcatcctgcagcagtgcgagcgatccaggacagtgcgccgtgtcatccacacggcctccgtcaccgccgcctcgccgctccgggaggacggcagcggcggctacaaggacttcatcaacgagtccttctggtctccactcaacctcacctacgacttcaccaatgctcatctggacggttatgtgtcatccaagtcgctctccgagaaggagctcctgagctacaactcctctccatcgccggcgttcgaggtggtcaccttggcgtgcgcggtcgtcggcggcgacacgctccagccgtacctgtggagcaccatcccggtgatcatgtcgccgctcaccggcgacgagctctgccacaacgtcctcaagtttctgcaggcgctgctgggctccgtgccgctggtgcacatcgacgacgtctgcgacgcgcacgtcttctgcatggatcagccgtccatcgccggccgcttcctctgcgccgccgggtaccccaacatgaaggactacatcgaccgcttcgccgctaagtacccagagatcgagatcaagctcaaagaggtcattggggagggggtgagggtgcaagctgacaccaagaagcttgtagatttagggttcaagtataagtatggggtggaggagacgctggattgcagtgtggaatgcgcgaagaggttgggagaactctgatgtgatgatgtgtagcaaaaattcgtgaattgcttgaccttatacacatgggtataccgtgtgtgtgttcggtaagaaacgaatgaacgacaaattcgttcttgctcgaatattcgtaaacgcagatcgatccgagatgtgaggaaatgttgggttatagtcatcatcaacggatcacaacttttggactgttttgagatatagtcatctctgacaggtccgcacttgtaacagttgatatttttcttattactagtgatcaccgacgaggcatacattatgtaggttatcatccatcacgaataaaggattttattgtagtgatctttaatgc

SEQ ID NO: 5312 - DNA, 903 bp, Oryza sativa
  ref <308>: DATABASE ACCESSION NUMBER: AK062500
  ref <309>: DATABASE ENTRY DATE: 2001-12-06
atgactctggagttaagccttgcagatgaccacgaagcacgggagcagcgccctcgggttcagcaggtagagctcctcgatgttggagtagggcccgaccttgccggcgagcgagtcgaagccggtctgtccggcgaactccttgaggttctcgagcggcttgtgcaccctgccggcgatgaccctgcacaccagcagcgccttgcgcgtcgccgccgggtcgtcgccaccgacgacggcgccggcggaggcctcgatggactcgtaggcgcggccgctggtggacgtggtgaagacgccgacgccggccttgccttccttcttggcggagaatccgtggcggatgatgcggcagacggcgcacttgtcggaggcgcagaggctggaggagcccgccgcgccgccgagcgcgcaggagagcgtggcgccgtggaatcggagcagctcgttgccgtcggcgaggcagcgcgggtgcttcttgggcagcttgctcgccttcagcttcaccgcctcacggtactcctcgaagcgcgccagcgtccgctgcgtgttgtgcaccttgaacacacgctcgatccgcacgcagctgctctccgacttgagcaggctcgtccggcagatgatctccacgatcttcctcgacgagtccccttccaccagctccgtcactgccatcgatcccgtcacatacatacacacatgcattcaagaccattggtcagtgtcgactctgcaagatgcttaattgagacttaatcatgctagtactatcactttacaagttagttttactacgataaatggctgggatgcagtaatggaggaaaaaagcatggagtgattactccctactttattttctactggtacaacaaaatgaaagatctagcaggatctctgaac

SEQ ID NO: 5313 - DNA, 567 bp, Oryza sativa
  ref <308>: DATABASE ACCESSION NUMBER: AK062501
  ref <309>: DATABASE ENTRY DATE: 2001-12-06
atcttatcaaaatcctactccttgaaccccttgctgagccactgaatcaactgctacaccagcagcaatgttcatgttccatgttcttgatgttcatgtcaaccttgctggctcccgggcttgatgagcggctgctgggagatcttcccccactcctcgggagagcacttcacctccttgaggaaggccaccacctccttcatggtgggccgctccgcgggcgccgggttcacgcagaagatggcgatccccagcgtctgcagcatctcctggaccagctggtccggcatgccgcgcagcttcgggtccaggatgttcaccgctggctcgtagctccccatcttcttcttcgcccactccacgatgtggagggagtcgcccaccaccgcctccaccgcgctccgcccgctcaggatctccaggagcaccaccccgtagctgtacacgtcgctcttctcggtgatcttcgtggtgtagccatactctgaaaatgaggaaatgtatgtcaggataaatttcttggatgttttaagcatatcaacataatcttgggccaggcatttcaac

SEQ ID NO: 5314 - DNA, 823 bp, Oryza sativa
  ref <308>: DATABASE ACCESSION NUMBER: AK062502
  ref <309>: DATABASE ENTRY DATE: 2001-12-06
cttcttcttccacgccccgcatcgccgccgccgccggagagggagagagagagagagagagagagagagagagagcgagagatgaagacgatcttggcttcggagacgatggagatcccgtcgggggtgacggtgcacgtggcggcgaaggtggtgacggtggagggtccccgtgggaagctgacgcgcaacttcaagcacctgaacctggacttccagctgctggaggtggagggggtgaggaagctgcaggtggacgcgtggttcggcacccgccgcaccatggccgccatccgcaccgccatctcccacgtccagaacctcatcaccggcgtcaccaagggctaccgctacaagatgcgcttcgtctatgcccatttccccatcaacgcctccatcaccaactccaacaccgccatcgagatcaggaacttcctcggcgagaagaaggtgaggaaagtggacatgcttgagggtgtgacaattttgcgttctgagaaggtcaaggatgagctggtccttgatggcaatgatatcgagcttgtctcccgttctgcggcactgatcaaccagaaatgccacgtcaagaacaaggatatcaggaagttcctggatggcatctatgtcagtgacaagggcaccatcactgaggaccagtgagctgcgtttccttactagctgtagcaaaacctgtcctagagagagtgcacaaggaacttttactgctctgtttttgagtcaaattacaaggtcattcgacaatgaaattttgtactactgggttaggatgttattatgtaattggagcatgtgctcctatggt

SEQ ID NO: 5315 - DNA, 723 bp, Oryza sativa
  ref <308>: DATABASE ACCESSION NUMBER: AK062503
  ref <309>: DATABASE ENTRY DATE: 2001-12-06
acaaatcacactaaataattactcaaaccatcatcagtaacaaccagattacagtattcattcccaaacatacaaatcatatccatggccaaacaggcgacagctgcggtgctcgccgtcgcgttggtgctcgcggcgtcggcggggctcgcgcacggcatctgcaacctgtcggacgcggggctccaggcgtgcaagccggcggccgccgtgcgcaacccggcggacacgccgtcgtccgagtgctgcgacgcgctggccgccgccgacctgccgtgcctgtgccggtacaagggctccgccggcgcccgcgtgtgggtgaggttctacgggatcgacctcaaccgcgccatgacgctgccgggcaagtgcggcctcaccttgccggcgcactgctagtgctagctagctgatggcaagcacaaactacagtgcggcgacctcgatcgccatgttgctgcaattcaattatgcagtcgtgaccactagcgctaccaatatatagcatatatatagtagtaatattaatatatatgtcatactatgcgatcgatgagcccggcaaggggagatgaataaatttggcaacatatatatgtatttatgctcttctttcagtatcatcaaaagatatgcgtgtgatgaataggttgggtgtttaaccaataatatatttgtaatgatactgatttgagtaaaagaggaagtcgttctatacttttc

SEQ ID NO: 5316 - DNA, 423 bp, Oryza sativa
  ref <308>: DATABASE ACCESSION NUMBER: AK062504
  ref <309>: DATABASE ENTRY DATE: 2001-12-06
aagattgacttgccttgttgttttttagtcgtagcagtggcaacaccacgcgtccaccttcctccctccgccatcgtcgccgcctctcttcctgtagagccagtaccgcagtaaaccatgcctgcgtctgcctgcctcctcttccaatttttcctccccggatgcgaatctcctatcccgtccccgatctggatctgtatgtatacacgcgagctgcgggagatccggatcgcatgcactaaattcactgaaatcaccgcagtgagttaagtatatactccacctaataacgaaatgcacttgagtaaatcgttcattttgtatcttcagtcctggatttctcttgttaagctccatcttatcaatgttggtagaatggtgatccatgggataattattatgacaagctctactttacagttc

SEQ ID NO: 5317 - DNA, 609 bp, Oryza sativa
  ref <308>: DATABASE ACCESSION NUMBER: AK062505
  ref <309>: DATABASE ENTRY DATE: 2001-12-06
aatcccctcgctccctaaatcacgctcgtcaaccgcgtcggcctctccaaccgccgccgcctccgccgccgtcgccgtcgccgtcgtcccgtagctaagtggtgatttggagcagctcggcggaggggcagattcccgggcatggcgacggcggcgaaggcgttctggaacagccccgtcggccccaggaccacccacttctggggtcccgtcgctaactggggcttcgtcctcgcgggcttagttgacatgaacaagcctcctgaaatgatatccggcaatatgacagcagccatgtgtgtgtattctggactctttatgaggtttgcgtggatggtacaaccgcggaactacttgcttctggcttgtcacgcctccaacgaaagcgttcagttatatcagttctcacgctgggcgagagctcaggggtacctggagaataaagagccagagggccagcagtgaagatgaagtctcttgctcaataagtaaagcttcgtttcctggatttctgtaacgctttattccgtgccctatagttgtctgcattgtgcattgtataaatatcctttatataaatatttggagaaaaataagtatttatgactg

SEQ ID NO: 5318 - DNA, 477 bp, Oryza sativa
  ref <308>: DATABASE ACCESSION NUMBER: AK062506
  ref <309>: DATABASE ENTRY DATE: 2001-12-06
agtacctcgcagcaccaagctagctagcttcgatcagtagctggaggatgatgaggaagttggcggtgttggtgttggcggtggcgatggtggcggcgtgcggcggcggcgtcgtgggtgtagcgggggccggttgcaacgctgggcagctgacggtgtgcacgggggcgatcgcgggcggggcgcggccgacggcggcgtgctgctccagcctgcgggcgcagcagggctgcttctgccagttcgccaaggacccgcgctacgggcgctacgtcaacagccccaacgcccgcaaggccgtctcctcctgcggcatcgccctccccacctgccactgatccatccatccatcgtctcctactcttttattttgtgatgtggtgtacgtgttcgtagtattgtcttggcgtcatctcgtcacgacgcgtatatgcatgcgcagtgcggcttttgaataaaaggggatcgaccgatgtt

SEQ ID NO: 5319 - DNA, 1048 bp, Oryza sativa
  ref <308>: DATABASE ACCESSION NUMBER: AK062507
  ref <309>: DATABASE ENTRY DATE: 2001-12-06
cctactggggcagaggtgtctaggaaggacaaagctagtgtttcagagctggaggatggaaatgtttgttcccatcatggcattgaagagcctaatgaagaatcaatgcaaggcattgtaatggaacaagaagaattaagtgattcagaggaagatagccagcatgtcgaatttgaacgtgaggaaatggatgattctgatgaggaccaagttcaaggtgtcgaccccttgctggctcaaaataaggaggtttcaacatcagttggttgtggggagtatgaaggcagtaataatcagagccagaaccaacaaaggttagtacaggtgggtggtaaacagggtgcagcaacgcagaaaccacagaggctttctaatgccagaccagcaagagagaagctgaagggggataatgcgaaacgtccaggatctagaacaacccaacgatcatccacgtcccctacaactgaacctagccaaacgaaaactagaaggcctaaagctcagcaggtacagattggtgctgagcgcaagtccagtgattcaagaagaagcagaaaaaaacctgctccaagttaaggtctttccaacatttcgtctcatttgcacatcagttacctgtttgcctggccgcaatattctccagatgatagcacggtaatctgctgtcattcgcacttctgtgaacggagcagcaagatcaacatgcgaaggcgagaccttgtaagtacatgtccactgttgaatagcatgactgaagcggcgatccatgattcacctctgacaccattgacacattagcctgccattggctcgtgagaaagcgttctacttatggtgggcacacagagatcgttgagtagttaattgcttttgattgacttgactgagtttgtgtcctcgtcctctccactctccaggaaagtctcagcgagtcatgcgttgtgttacagcttgtaacatgagccaatgtgttaatagttttgtgaagttggcgtagcgccatggccattgacgctataatgttagtaaagttgattagtgcatggct

SEQ ID NO: 5320 - DNA, 847 bp, Oryza sativa
  ref <308>: DATABASE ACCESSION NUMBER: AK062508
  ref <309>: DATABASE ENTRY DATE: 2001-12-06
cgtgttctccatgcgttacggcgagggtaagtcactccgacacgcatgggagaacgtgcgcaaacaacagggcgacgtggaaaccttcaccctgttcgtcattcgtgagaccgtgaaggcgctgcagtacctgtatgatactcaccgcgtggcgcaccgcgatatcaaacccgacaacattgtactctcgggcgatttcagcaacgtcatgcttatcgacttcgggctcgccgaacgtattgagagcgacacgcaaacgtattgcccctgtggcacgaagggcttcgcgtcgcctgaaaatattgccgctgtgacccgcggcgagtcacgtttcgtcgcgacgggggcgatgatgcacgagagtgacatcttcagtgtgggcgtcgtggccttcatcctgctcagcggcaccaagcccttccggagcctcggcttccgcgagatgcacgcgcagcttaaccacggtctccagtgtgccggtccgaaatgggagggcatctcccttcagtcacggcagctggtcgagtggatgctgcatcgcaattttgagcgccgagcgacgccagacgacattttcaaccacgccgcgatggtcaaccttgaccaacggatcaaacccctcttagatgaacgccggaaagcacaggaggaggaggaccgcggtgtcagcaaagagttcgaccttgttctggatgctagcgaaatcttcgggaaccaggcgagacagaaacaattcaaccaagcggatttgtgagcagcactcgggggcgcggccccctgcttctgctgtttcgtcgtcgctatctctcaacccagcatcgttgcaattctaccaaaccaacaatcc

SEQ ID NO: 5321 - DNA, 467 bp, Oryza sativa
  ref <308>: DATABASE ACCESSION NUMBER: AK062509
  ref <309>: DATABASE ENTRY DATE: 2001-12-06
atcacttcgtacgttcttcatacaatttacctacttcaaatcaaatttcaagcacaatgtttgctcaattattactcatcgttgccttggtcctcgctgtcctcgcttcagtctcagaagcctggtacggtttaggttggggatatggctggccatactcatacggttacggttacggtttaggctggccatactatggcggtctctggggccgttaaattgtttgctggcaacagtagacaatatgtatatatgtgatatccaatgaaaatttcgggacgaacatcggacgatcatcggttatgcgggtgtttgcatatatacaaaacgacgaagtggttcacacattttatacttctctattgtaaattaccgcttaaatctgtgtgttaatattttttctatctatctatctatctatttatctataatatctccatggaataaaatataaatgattacacttc

SEQ ID NO: 5322 - DNA, 692 bp, Oryza sativa
  ref <308>: DATABASE ACCESSION NUMBER: AK062510
  ref <309>: DATABASE ENTRY DATE: 2001-12-06
tgtttgtgattttgaccataagatcacgtatgtttctagtggatgggagggttctgctacggactctagagtgttgaggtctgctatgagcaaaggattcgaggtgcctccaggcaaggcttatcttgtcgatggcgggtacgcaaacacctcttcttttctagcaccatatcggggagtcaaataccacttaaaagagtttggggctggacatagaagaccacaaaatcctaaagagttgtttaatgatcgccatgcactacgatgtgaaaaggactctaggagtgcttaagaagcgctttcctattcttaaagtcgcaacattccacaagttgaagaatcaagtcaaaatacgcattgcaaccgctatatttcacaatctaatcagggaaatggaaggagatgagttgtggctagatgatcagccagataatatcgacccaacagactttgttgatttgccaagtggttatcaaaggcaatatagctagcagtgaagagggcaatgcattgagagactcaattgctcaagagatgtgggtccagtatcagcagcatgtacattagtcgacattagtcatgagtcatgtaataattgaataaagttatgtataatatgagtcatcatgtaatagttgaataaatttatgtataatatgacagctatggttggaagaggttcaccaaaactc

SEQ ID NO: 5323 - DNA, 679 bp, Oryza sativa
  ref <308>: DATABASE ACCESSION NUMBER: AK062511
  ref <309>: DATABASE ENTRY DATE: 2001-12-06
aactaacgctaaaaaagtaacagtttctgtactttattgcctgctcatcagcccctaccaccttcctcctttagccaaccatgttccgccgtgccgccctcaactccgccgtcctgcgcacctctgcccagagccgtgcctcctcggcgcaccccaacttcggtgtgtggaacccgatgggccccgtcatcttcggcggcgctgtcatcggtgcttgctggatggtgtttagcccgacgacccaaacggcgaagggcgacggcttgttggctcgctctggcctcggcttcgccagccgcaccttcgtgcagctgtggatgtaaagctgaacaactctctcgctctgttgcaccgcagaagtccgtcacatgtgtcgatacactatcccctgaccgtgcctagcgcagagttcatatggcctctttcccgctcgtccgtcctgctcgcgcgctcatcgtcttcgtgcaccctgcgcattcccctttgcgctctgcgcgtcgcggtgcagccgccaggccgatatttcgacgcgttctcaactacgttctgattacttcgacgttcactgaatatcaacccagtttccatcttttggatctctccccctcctcaccatcagttcttccttgtttcacttctcaaaacccttttccttcgccgtgcatgcgtggtgatagtg

SEQ ID NO: 5324 - DNA, 974 bp, Oryza sativa
  ref <308>: DATABASE ACCESSION NUMBER: AK062512
  ref <309>: DATABASE ENTRY DATE: 2001-12-06
gcttattacaacttaccaagagattaaaaacggaaaaaatgatgagttcgttcaatccattcgaagcacattatgatacaatcaatgataaagatgatttcaatattggttgtgtcagtaaaaattatacaattgacccgttagaaaccgaagccgaacgaaatattcgtacgcgtacagttacacccgttgtgacaggttcatcaattgcagcatttgtattcaaagatggtgttatactagctgctgacgttcttggttcatatggttcgctagctaaatatcgtaatctaccacgtattcatcaagtgaatgataaaacagttttggctgttagtggagatttatccgatgctgattacatcaaagaagccattgatacgaaagtagaagaagatctcgttcaagaagatggcggtgaaatgacaccattagctctctatgcctggtgtactcgacttatgtatcatcgacgaacaaaattcaatccattattaacaagtgttgtcgtagctggattagaaaatgatgaaccatttcttggacgtgttaatgacaaaggttcagctttcaaggaatttctcattatgactggcattgcaagtcatttagctcaaggttggattcgaacaattcttgaaaatgctggtcaacttaataaagatcaagctgaagcattaatggatcgtgttgtcaaacaactttactaccgtgattgtcgagcatttgctcgttatcgtgtttgcattgtcacgaaagctggtgtcgaattcaaagctaaagaagttcaacctgattggagtttagcaccattacttcgtaatggagaataaatggttgaactgcaaattctgaaagaaacatacaaattcaaatgactatttagtcgagattttcatcattgtgttgttatttctttctttctttctcttttttttatcatcattctaaatatatagacaaagtcttacacc

SEQ ID NO: 5325 - DNA, 499 bp, Oryza sativa
  ref <308>: DATABASE ACCESSION NUMBER: AK062513
  ref <309>: DATABASE ENTRY DATE: 2001-12-06
agcagcagcagcagagtgtgttttctcgcgacgccgttgtgatcttctcctgcctcggagagcagagcaagagggaagatcagcaatggcgaccgggggtcccagttccatgtccgctggcctcctcttcctcaccctcacctggagacgttcaccatcatcttggccgggacgcagctgctgtgcgccgggtcgctgcacgccggagcacacgtagccatcatacagaatccgatggttagcagagtgtgagggcgtcgtcgaccgggtcgaggaggaggattctgtgcaaaaccgtatcaatcttgggcgacggtttggtttgtggtgtacgtacgtgcgtacgtacgtgtacgcgcgtgaggaggaacgttgtgttgatttatgctagtgtgttgtgtgtggatgtatatccgtgtggtcgtggcgaatttgttcatttgtaaattgtctccggcggttaattcttttaattaagtttgatctaaagcttgtgatt

SEQ ID NO: 5326 - DNA, 542 bp, Oryza sativa
  ref <308>: DATABASE ACCESSION NUMBER: AK062514
  ref <309>: DATABASE ENTRY DATE: 2001-12-06
agaggcttaattccggcgatctcccaccgtttcgtctcgtaactccggcggcggcggccatgacgttcatagtccccccgccgcgtgcccgccgggtcgacgatgcggaggcggcggcggcgctgctgctcgaggagctctcgatccgcctgatggaagaaggcagcagcgccggcgggcatccacctccgacgagctgcagcgaccacgccttgcgctacttcatccggggatttacgactattgtcagcttagtaatggttgcctggctaatctatgcgagatatacgaccgacgattcagagcttcatgaccccgcaaagctgtcatttttaattgttctctctcttagtttggcggcattcggcttctgctctacttcagaaactgagctacagagactactagattgatgagtcctagcaaaagtggaacacagtgtcatagtgtgcatggtcctagaaggaaaacttcattgtgttgatatatactctttccttttctttaatactaattaatactagataataccgttaactttt

SEQ ID NO: 5327 - DNA, 564 bp, Oryza sativa
  ref <308>: DATABASE ACCESSION NUMBER: AK062515
  ref <309>: DATABASE ENTRY DATE: 2001-12-06
aactaacgctaaaaaagtaacagtttctgtactttattggtggaacttcgtccttataggaatcatgtccgctgatcttctgtggcaaattgtccagcgcaacaaccgcttctacaagctgcgcaacggcatccgcctctcgtcggatcccttcaacaacaccggcaacgacactctgcgccatgctggcttcctccagtccaaggctgccgtcgtgaaggtccgcggcgagaagaagctgtacgtgtcgatcaagaacggcgagcacgccaaccagccccgcaaggccttcaccaagaaggagttcgacgcgagcgcgaaggcgtccgacgtcgcccgcgccgtgagcgccgtgcgccccgacctggctgacgttgccttccgtcgcgcgcgcaagctcgcccgcaccctgtcccgcaccaagaaggtccgcgctgcccgcaaggttctctccagcaagcgcaccttcaagcgcaagaacgtccgcaagtccgccaagaagaactaaaatcggatgatgacccccaccatttacccttcctcccatggccattcccttcatgc

SEQ ID NO: 5328 - DNA, 433 bp, Oryza sativa
  ref <308>: DATABASE ACCESSION NUMBER: AK062516
  ref <309>: DATABASE ENTRY DATE: 2001-12-06
acaatctctctaacctctccttcaacctgattactatatatcttgaatcttgggttaatcttgacgttcttgttcgttcttgtttctcgcgtgcaggaggtgatggcaggagggcgcgggcgcggcggcggcggcggcggaggggtggccggcggcgggaacctgaggccgtgggagtgctcgcccaagtgcgcggggaggtgctccaacacgcagtacaagaaggcgtgcctgacgttctgcaacaagtgctgcgccaagtgcctgtgcgtgccgcccggcacctacggcaacaagggcgcctgcccctgctacaacaactggaagaccaaggaaggcggccccaagtgcccctaagatgcatgcctttttttctttcttcttttttttttgtttttttaccgtatgattaatacctcctaatagttctact

SEQ ID NO: 5329 - DNA, 577 bp, Oryza sativa
  ref <308>: DATABASE ACCESSION NUMBER: AK104926
  ref <309>: DATABASE ENTRY DATE: 2002-08-28
aaaaccccattccacgctctctctctctcccgctccaagaacccgattccatgtcgccggtgaccgcgttgctcgcaggcgccgccgcgccgcttccggcgatggcacggaggccgtcccgcgtggcgcccccgggatactcccccgtcggaggagggtgcgcgctggcggtggagtgctcgtcgcggccgcagaagaaggcgacgaagcaccacatgaagacgcggcccaagaagtcgcagccgtgggacaggaagcgccgccccacgcagtaccggccgctgccggctctcccgccggactggacgctcgtcgccgccggcgccacggtcgacgcgtcggcgcaggccgaggatgcggatgaggaggaaccggagccggtggccgctccggtcgtcgaggtggtggcggccccggccgccgccgacgactgattccggccatgtctctttctacgaaattgctcgttcattgctaggtttggtgttattgcttctcttgtttgtctgtgaccaaaatcttggatggtactgtttaaaatggttgctgctttatatatattgatttacttgatgat

SEQ ID NO: 5330 - DNA, 459 bp, Oryza sativa
  ref <308>: DATABASE ACCESSION NUMBER: AK062517
  ref <309>: DATABASE ENTRY DATE: 2001-12-06
ataagcaagggaaatatcagcatctgcaaaaatcatctcagattcgttcgccatggcgaggatcccgttcgccgccatcgtcgtcgccatcctctctttcgccatcgccgcggctgcacaggcgcccgcgccgtctcccaccagcgacgggacgtcggtggatcaagggatcgcatacctgctgatgatcgtggcgctggtgctcacctacctcatccaccctctcgacgcctcctccgcctacaagctcttctgagcttatgcagagatctcttcgtcgccatggtgttccttctccttcttggatctcctcctcctcccttttgatagtctagtggtggatctctcattctcggtgtaattaattagtgggatttttatattctttttcagctcgcgttcgtttgtaatttgggtcggtggtactgcgctgaggatcgatttcgcattgtgtatatc

SEQ ID NO: 5331 - DNA, 801 bp, Oryza sativa
  ref <308>: DATABASE ACCESSION NUMBER: AK062518
  ref <309>: DATABASE ENTRY DATE: 2001-12-06
gcttcctcctctcctctcctctcctctcgcgacttcgcggcggctcgctcgcctgatccatccgtgtctcgcgcggcggcgccatggcgggggaggcttcgccgcccgcgccaccggagatccccacgaggtgccaccactgcgccggccccctctccaaggacatggaaacgagcagctggacggtgcctccactggttcgagatagcttctccatgattggttctgctattgggggtacagctggagcattttatggtttcaaccacactatgccttttgttcgacggtacataaaagggccaatgtggatgcattttcttgttggtgcacctccagttattgtcttctcttctgcatgtgctgggttagcaggtgggacaataccagcgcttgcacagctggtatcatcatcctatcactcagccacagcgtcgtcctttgcccacacaacttctcgtgatgaaatgcataaggccagaagctcctcgacattgtgatctacagtggcagcaaattgttaactggaatcctaactatccaaaacaccatatactattataaatgtgcatgtgttaccacatatcatctgttttatgaggaatgctcttgtaaatggtaaaactttcccctgtggaatagtgcttatatatgttcccaattttgctatttatcaccatgcacaggctgttatttttgttatggtgtcgcaataagcctggagtgttgcgaattgtgatctgctttaaccttcaggatgccattttcgtttgcaatatatatgcacattaccttttgctc

SEQ ID NO: 5332 - DNA, 602 bp, Oryza sativa
  ref <308>: DATABASE ACCESSION NUMBER: AK062519
  ref <309>: DATABASE ENTRY DATE: 2001-12-06
agcggcgcgcaggcgctggccggcgggaggagaggagccataggcaaagcccgaggggtgagcctcctccctctccgccccccttaccgggcggtgagcttggtagagccagagccgagggggcagggatctgagagggaatggagagggagaagcggccgcttcccacgactcctttcctcccatcggtcaacgctcgcgcatcactcctctctcgccagccactgcgcgccacttctctcccaccggccactgtccgcgactcctttcctgctggccgccgctcgcgtctcctttcctacccgtggctcctctcttcctgccggccggcgcttgcatctcctctcccgccccggcgaggtcgatgaacacggcgacatccttctcatccacccgacctgctgctctacctgcggcctgccgccgctccatctcgcttggcctgcgagagagagaggatagagagaagagtggagtagtgaggatgacatgtggggacacatgggccccaacaattttattattttttgtgtgaaactgacatgtgggtcccgtgggttttattattttttcagattgaattaccacgtaagcgccgcgtc

SEQ ID NO: 5333 - DNA, 684 bp, Oryza sativa
  ref <308>: DATABASE ACCESSION NUMBER: AK062520
  ref <309>: DATABASE ENTRY DATE: 2001-12-06
acacaactacacaagtcgactatcattacaaggaaatttaagcgaccacgaagagtatgacgctggtgaagattggtccgtggggcggaaatggagggtcagctcaggacatcagtgtgccacccaagaagctgttaggcgtgacaatctacagctcagatgcaatcagatccattgccttcaactacatcggtgtggatggacaggaatatgccattggtccatggggtgggggcgaaggcacctctacagagattaaactgggctcctctgagcagatcaaggagatttctggaacccatggcccagtctatgatctggctgacattgtcacctatcttaagattgtgacaagtgctaataatacatacgaggctggagtcccaaatggaaaggaattcagcattccactgcaagactctggccatgtcgttggattctttggaaggtctggaacgcttatcgacgcaattggcatctacgtccacccttgattcccagtggtcaaagaattactacctactaccatatctacgaaataatgttccatggtgttgttgtacttcatgcaatccccccattgtctgtgtacgtgttgcaccgatccgtagtacaataaagttggcgatatatatgttgtcccagtcgactttttaatatttattactacaataagttggggtc

SEQ ID NO: 5334 - DNA, 943 bp, Oryza sativa
  ref <308>: DATABASE ACCESSION NUMBER: AK062521
  ref <309>: DATABASE ENTRY DATE: 2001-12-06
aaaatcttccttctcgaaatcgccggccgcaccgtctcctctctccccggccgtcgctgcgcctcctctctcgctggcgcgccacgccgccccagctccggtcgtcgtcctcctggcccctccgcgtccgcgtccccaagcgagcgctcgagctttgctttcaagctctcgctgagctccggagggtagagatgtcgtcctcctccgccgccgccttagccagaggcaaatccggaatctctgccgctaaattcgaagcgtctaagggattgggcgccaagccgaagcgatccgcctccgccaccggcagcagagggaagaccgagaagaaggtctactcgctgccaggccagaaattcgacccccctgaggagagagagcctctcaggatattctacgagtccttatccaagcagataccctccagtgagatggctgaattctggtacgcacaaatttttacaccttttagcgtaatatataaattttcttctatctcaactgttagaaatactcctacccctatatggaatatatatacagtagtagtacatactagtgacattcaggtgtctgtctaactagtggagtactagctatctagtaggattctgacagtaaattcttctaagaatacttgtagcttcaacgcatgaagcttactgctatcaactgactaatatcgcctactcaaagcagacactagtactaaatttggttgcctcatgttagcacaagttcacacatcattctaatgaagggcatgaaaccattcatataaataagttctctcacttaccaatgataaatcctaggtttgtcttacaaactgcagtgatcaattatattaccctagtacctcatccacgaaaatgtacaacaggttgatggaacacgggttgttatctcccgaaagagcaaagaaagcatacgaaaaaaaaac

SEQ ID NO: 5335 - DNA, 707 bp, Oryza sativa
  ref <308>: DATABASE ACCESSION NUMBER: AK062522
  ref <309>: DATABASE ENTRY DATE: 2001-12-06
aatcgaagccaccgacgcctcgagcacgagcagccgaccgagacccttccgcaagagcaacatggcggcggcggcggtgtacggcggcatgaagggcgggaagctgggcgtcgaggaggcccacgagctgcagctcaaccgcatccgcatcaccctctcgtccaagaacgtcaaaaacctcgagaaagtttgtgcggatctagtgaagggggccaaggacaagcagcttagggtaaaggggccagttaggatccccaccaaggtgctccacatcactacccgcaagtctccctgtggtgaaggaacaaacacctgggatcggtttgagttccgcatccacaagagggtgattgaccttatcagctcccctgatgtggtgaagcagataacctccataacaattgaacctggtgttgaggttgaggtgacaatagcagatgtgtaatgatgcaatgccgagattatttaccttctagttttgtgcgctagaatgtttgttgttgtgtgtcgcgtgttaaattggtccttgtgcaatggcaccttctttgttcaggagtaatctatgttgtttctcaacacacctcgatggagggtgacactctggctcagcttccgtcctgtgctgtcatctatagctgtttggtcgtttacatatcattttcacttttattctttggccccaaatgtgtgtcacgcaggatttcttg

SEQ ID NO: 5336 - DNA, 596 bp, Oryza sativa
  ref <308>: DATABASE ACCESSION NUMBER: AK062523
  ref <309>: DATABASE ENTRY DATE: 2001-12-06
ctttttaacccatccaatgccccttgttgctgcaacctcatttagatctcatccttctcttcatatatacatgcatactgctataagtctactgtacgtctaccacagcttgcagccataaagctcttcgtcctctctctttctacggctgtggagctgaagcatggcctagctgagctagcagctggttcttggttatataaagagagatagctaggatcaagagagaggcagatggcatggagaggtgttgcaatgtgcattggatgtgtagatagagcctgcagatctcgatcgatctcttcaagtccatgccatgcctttccacagctttcttgaacttctcttgtgcctcactcactttcattactggagagatatgcatcatcagtggaagcttatagggagaggagtgcaagaagagggtcaagaaagctgtgggaagaaatggcattacaaggactttgaattcagttagcaatgccatgagacaggcagagagagagagagagagagagagagagagagagagagatgtgatgctaattttccatttcatgtaagttagcttttcataattagatcaagttttctct

SEQ ID NO: 5337 - DNA, 711 bp, Oryza sativa
  ref <308>: DATABASE ACCESSION NUMBER: AK062524
  ref <309>: DATABASE ENTRY DATE: 2001-12-06
ctggatggagatcattatcctctcaccctgtgtcactctctcgttctttctctcctagccatcgtttctgttctccctctccctctctgtaagactgcaacgcagcggtgtggcagccggcgggagagccacggttggagcaaagcgaggcggcagacgggcgaccgaggcaggtgggcggggagcgaaccgacgacttcttcccctcccacacgcatcccatcatctcccttgctcccctcttgcgcggatcctccaccggtgactggatctcgtcctctctctggccgctagcggcggccgcggccttccccaccgtgagcggccacggcggctccctccactacttccgatgggtggatccggcggtggcggtggcagtggcgacggcggtggcagcggccgagggcggatccggcggcagtcggtggtggtggtgtcggtgacagccgccgcctctcttctgccttcggtggaggtggtggcgtcgggtggatccggtggcagtggcggtggccgagggcgatccggcggcagtcggcggtggtggcgtcagcgacggccgcgggtggatccagcggcaatggcagcggccgagggcggatccggtcgccttttttttcgcccgagtttgtttctttttcgtggaatcggacattgggatcaagttcatgagctctactcggattaaaattgctcttttatattgtt

SEQ ID NO: 5338 - DNA, 616 bp, Oryza sativa
  ref <308>: DATABASE ACCESSION NUMBER: AK062525
  ref <309>: DATABASE ENTRY DATE: 2001-12-06
ataaatgcgagtggtaatggcggcgtatgaggaaatagcagcgccgacgctggagggagggagcggcggcagcacgacgtggtgggagggagcagcagcggcgacgggatgggatctgcgccggcggggagggaggggatccgcaccagctgagcggcggcagtgccggggcgcggagggatttgtggcggcggcggcggcacacgcgcgaagcagctgcttcatgcagtcgatggccacggcggcttagctgttccaggcgacggagtaatgtcccgacaccggcgaccatgcaagccaagctcctccacctgctctccatccatgcggcgactgtgctggtgccgacggtggcctctcttcctcgcattggcgacggtgcatcagcggcgagccagtgacgatgagatttgaggaggtggtgacaggaacggtgtcggcacccctgcgcctctatggccagtggcttccacctctccgggcatcggccggcggtggtgcgacgcactccagggccgcaggctagctagctcttagttttttcttcagtatatgtaatttgtgatggataatatatgctgccaaaatttagttaaacttcagttgtagttttatc

SEQ ID NO: 5339 - DNA, 759 bp, Oryza sativa
  ref <308>: DATABASE ACCESSION NUMBER: AK062526
  ref <309>: DATABASE ENTRY DATE: 2001-12-06
aaccaccacgtacagcaaacaccaactcagctagctatactctactcatcttctctgccagctgctactacaccaaccagagctaatcaagtaacaatggcgggaagaggcagtgccatggcggcggttggtgtgctggtgctcctctgcgtgctcctccacggcgagatggccgagtcggcggtgttcaccgtcggcgaccgcggcgggtgggggatgggggcgggatcgtgggcgaacgggaagcggttcaaggccggcgacgtgctggtgttcaagtacgactcgtcggcgcacaacgtggtggcggtgaacgccgccgggtacaagggctgcaccgccgccccgcgcggcgccaaggtgtacaagtccggcaacgaccgcgtcaccctcgcccgcggcaccaactacttcatctgcaacttccccggccactgccaggccggcatgaagatcgccgtcaccgccgcctagttcttcttcttcctcgtcgtcgtcgtctccgtcgccggcatggcgccatgccgtccatctcaaccagctgcttattatatctatatacaaatgtttgtcgatcgtgtgtgttctaaccaccatcagctgatttataattctacgaatgaagaatacgatccaatgcatctatgcatgcatacacacatggatcaatatataatagttgtacacttctttgagtgacggatgttgtatccggtgaaatttatatacatataaatatgaataaaagccacattatgc

SEQ ID NO: 5340 - DNA, 774 bp, Oryza sativa
  ref <308>: DATABASE ACCESSION NUMBER: AK062527
  ref <309>: DATABASE ENTRY DATE: 2001-12-06
atcgcgtctcctcgcccaccgccctcgacgactcccgtctcctcgcccgccgccggcgccgatctccatcctgctagcagaggtggcgccggcgtcctcctcctgtccccgccgcaccatcgctcaccggcaatgtatattcgagtgaaacggaacaagactacctacttcatacaatgtgacccaacagagacgactttaagcattaaacaaaagttgcattcattagttgatcagcctcccggtaatcaacagctgatcttgttggccacaactgaagttgttttggatgactcaaagacattagcagatcagaaggttgaaaatgatgctgttgttgcattaacactgagaaaagatgacaatgtgtttgaggaagtttccattgcaaggcccgaagatttcatgtcgtcctcatgatgcagactcctcttttcaaccccgtgggttatatatgtactctcctaagcttgtctctttggattgctgctcagcttctctcctgttatagatgccgggcaacggcattgcattaatccttgatttgaccatccaactgatttggtcttttctacctaccgaagcctgtgcgttctggatattctcctaaacgcacccctgcttgtacctgagcagcatgttgagaaaggatcaattgtggattctgtgggatcaatgtaatgactgatttgttataatcatgattactcgcagattggttatcacaattcctatgggatgcaccaggtaaacactggtacaattactcttgtt

SEQ ID NO: 5341 - DNA, 520 bp, Oryza sativa
  ref <308>: DATABASE ACCESSION NUMBER: AK062528
  ref <309>: DATABASE ENTRY DATE: 2001-12-06
tggcgatctcgtggagattaagcgtctctacaagcaagacggaaagacgtatgagatgccgaacgccaactggaagggtattgatccagtcaacacgaccaccgacaagatgtgcaaccagcagaaggcggcattcaacatcacgaatgactttgctgtgaagggcggtgtccgttcgatgggagaggctttgagggccggtgtcgtgctcaccatgagcatttgggttgactttggaacccagggcctatggctggactcgtcgttccctgtggacaaggacccgtcgcttcctggtgtggttcgtggctcctgcccgacgacgagcggtaagccagcggatgtcatggcgcagaccccgggtgcgaccatcaagtacagcaacatccgcgttggtgacatcggctcgaccacccagtagaatcgtcgagggatcctttacagctgacgtgaatgatctatatagatatacaggcctctagaatgattctcctgttatgaaaatgccataattcactgc

SEQ ID NO: 5342 - DNA, 581 bp, Oryza sativa
  ref <308>: DATABASE ACCESSION NUMBER: AK062529
  ref <309>: DATABASE ENTRY DATE: 2001-12-06
acatcgataacattcgatcacattcggctagtaaccaagcagttcttacgctagagctagctcgagcaatggtgaagtgggcagctgtgatggagatgcttctgctgacggcagcagcgacggcggtagcggtggtggcggcgcagtgtgaccctgagcagctatcggcgtgcgtgagcccgatcttctacgggacggcgccatcagagtcgtgctgctccaacctacgcgcacagcagaaggaggggtgcctctgccagtacgcgaaagacccgacgtacgcgtcctacgtcaacaacaccaacgcacgcaagaccatcgccgcctgcggcatccccattcccagctgctaggctcgatctcccgccgccgccggccatgatgcgtacgtggcatatatacgcgtggtgtgtacgtgcgcttgaagaaaagggcgtgagtttgaattaataattatccagtacgcgatgtttgatcgatcgatgatgtgccttttttttttggtatttgaagtttgaactctgaatttcatcttgtgttaattggagtatgatagctgtgtgtacattcgttttggaggt

SEQ ID NO: 5343 - DNA, 780 bp, Oryza sativa
  ref <308>: DATABASE ACCESSION NUMBER: AK062530
  ref <309>: DATABASE ENTRY DATE: 2001-12-06
aggaatcgaaacggagaccccgaggaaatggaaggcggcggagcaaccgcacccgccgcgccgcacccggcggtggcgccgctggcgttcctgctggggaagtggcgcggggaaggcgaggggagcttccccaccatctcccccttccgctacggcgaggagctcctcttctcccaccacccctccaagccggtgatctcgtacacgcagaggacgtggaaggcggcgtcaggcgagccgatgcacgccgagagtgggtactggcggccccgccccgacggctccgtcgaggttgtcatctcgcagagcactggtctggccgaggttcagaagggttcgtttgatgctgaaaagaaaacagtgacgctccaaagcgaacttgtggggaacgcatccaaggtgaaacagatcacaagagcttttcaattggtagatggggagctctcatatgttgttcagatggcaacaatcacaaccagtctacagccacatctcaaagcccttctgaagaagatttgaacgatactgcgcccctctaggggcgcagtgcggcggcgtctgtggcacttctggatttttatgttaaaataataatggtatttttgcctattatatctgggaattggggcaacctgcccctactagtttgacataatagacgctgaaaatacgcccttcagagttcagataatgtccatgcgagttcgggcttgttcatgcgcatgagagttcaaactttgttgcgttaaacttaatttaatttaccatcagtattttcac

SEQ ID NO: 5344 - DNA, 579 bp, Oryza sativa
  ref <308>: DATABASE ACCESSION NUMBER: AK062531
  ref <309>: DATABASE ENTRY DATE: 2001-12-06
gtaggagattctctgccagctcggttttgcctataaccaaaccatcttcgtcagaaaaagcatgggggagaatggcgtggccgcgctgtggaggctgtggcctcgcacttcatggccccgtctccctgatctgtaccggcgttggaggggagaggggagaggccgccacaggggtgtgggagccgtggtcgtcggcggtcagagaacgaggcagagccctgcgcgctgtttcccgcttgcgcccgctggtcggagaccaaggtggagccccgccggctgtcgcagctctgctcgagtccgtcgccgggaaattctcggtgccgacgcctcgcttcctctacgatagcaaaaaagtgaaaagtaaaggaaagagagagtggtgggacccaccacgagtgaacttgagcttgtagctaataccgttgctagcataggtggtaagtgaggttcggtaaaaatgtgtggcgcactatgaatgtccttatatgttcttatatagtaccctctagtatatgtaccgaccaattggaaagctcagcacgaattttatatgaggtcttaaaattgacgaagacatgt

SEQ ID NO: 5345 - DNA, 551 bp, Oryza sativa
  ref <308>: DATABASE ACCESSION NUMBER: AK062532
  ref <309>: DATABASE ENTRY DATE: 2001-12-06
aagagtggtgctgagctatcaatgcagttaaaaccacacgaaatctatcattgggttgctggaccatggatgaagtgctcctcgccatgcgatggtggtgtgcggtatcgtgatgttgcttgttatggaaatttatctgatgccacaatcaaacattatcctgtagatgatgctagctgttcagcagatgaaatgcctgcaagacaggaagcttgcaatgagcagagctgtggtgtcgacatggcagagcaaacaaattctaggaagaatggaatgtctggttggttggtagcacttattcttcttctagggcttggtgctattgggggcattgtatttacaagctacacttactacttgaggagaacctctggacgaaatggttttgtgtatgtcatgatggaagcgtattcttgagaggaccatttacttgcaataaatgaatgctaaagttaacattccaaatccgaggagcaagtttgttcattatttttaggcctgtattagttgctgacttgctggaaatggttgtttttttatctcatctggtc

SEQ ID NO: 5346 - DNA, 623 bp, Oryza sativa
  ref <308>: DATABASE ACCESSION NUMBER: AK062533
  ref <309>: DATABASE ENTRY DATE: 2001-12-06
aaaataattattttttccaaaattaaacaacaaacatgaccggcgtcctcgtcttcaagcctatcgaagctaagcttacccacgataccgatatcttcaccaagatggacccctattgccaattcctcattggtgacagaaaagttaagggtgaagtctgcaaacacggtggcaagcacccaaaatggcacgacaccatcactttcgaaagacaccacgaacctatctgctacattgaacttaaggatcatgatactttcagctctgatgacatcattggtgttggtcaaattgatcttaatgccctccctccaggaagtgtcactgctaaatggtacccccttttctggaaacaaaagccagcaggtgaagttttacttgaaatcatctggactcccagtgctgaacagaagcctcttcctcatgaccataagcatcatcatcaccaacatcctcacttcggccaattctaaattcgagagggatgggaatgaaggaaagattgctctggtttatgtttagagcttaactataaatatatagcaacagtgctcaaaaatttgttgtttttctttatatctatgtaatggaaatatctcattttagagtgcaaaacctttctt

SEQ ID NO: 5347 - DNA, 710 bp, Oryza sativa
  ref <308>: DATABASE ACCESSION NUMBER: AK062534
  ref <309>: DATABASE ENTRY DATE: 2001-12-06
gactcgccgtccgtcagcggtggtcgcggcggccggctacaagatgatggcgtgcagggccctcgcgctcctcccgctcccggcgccctcccgtctcccccgcccgcgcgccgcctcgctcgcgcggctcgacgccgcccgccgccgcgcctctgcctccttattggtccggtgctgcgccaaccccgccggtcccggaggccaggaggatccgccgcaggacgccgtgctcaaggccatctcccaggtagcgaactctaaaggacgggttgcacagacaacaaatgttgtcatgggtggtactgtgacagatgatgcaactgatgaatggcttgttctggataagcaggtaaatacatatcctacagttagaggatttactgcaattggtactggaggagatgattttgtccaggccatggtggttgcagttgaatcagtactggaagaacaaattccaaaggctcagatttcccataaagtgtcgtcgaaggggaaatatgtttctgtaaaaattgggcccattcctgtggtttccagcgagcaggtccaagcagtgtataatgccatgaagaaggacgaaaggatgaaattcttcttgtaaacattaacagtacagtattattcttgtaactctagcatattgccacacgattggccatctttataagcaaaagccaagaaatttcaccatttcttggccaaacatt

SEQ ID NO: 5348 - DNA, 643 bp, Oryza sativa
  ref <308>: DATABASE ACCESSION NUMBER: AK062535
  ref <309>: DATABASE ENTRY DATE: 2001-12-06
tcgacgaatccgacatcgacagcctcgagtaccttcaggccgtcgtgaaagagactttccggctccatcctcccgcgccgttgctgctctctcaccgagccgagacggacacagagatcggaggctacacggtgcccaagggcgcgaccgttatggtgaatatttgggcgattggccgagatagcaaggtgtggtttgagcctgacaagttcatcccggagaggttcctgcagaaagaggtggatttccgtggtcgcgacttcgagctgattccatttggctccggccgaaggatctgtcccgggttgccgctggctgttcgcatggtgcatctgatgctcgcatcgttgctgcaccggtttgagtggaggcttctgccggaggttgagaggaacggggtgaacatggaggagaaatttgggatcgtaatgacgttggctacgcccctccaagctattgctacaccaatttgactatgtataaaaaccgtacacaaaaattaccggccgatcaacacttgtttctgatgttcactgaccgaaccacctgaaatcagtaaggtcggaaatggtagaaaacccagttaaaaacagtggtgaaaataatatgggcatctttgcaaaaaagatgacaaatttcaggt

SEQ ID NO: 5349 - DNA, 660 bp, Oryza sativa
  ref <308>: DATABASE ACCESSION NUMBER: AK062536
  ref <309>: DATABASE ENTRY DATE: 2001-12-06
aggggagagacacacgcacgccgacgccgtcgcccaccaccccctgccgccgcgccgcgcggccatggggctccacgcgatcctcctcctcctcctcctccggatctccgcctccgcagccgcctccaggccgccgctcgacaccctcggcatcccgccgcaagacgaggcgtacttcaggggcggcgtgatcaggtgcagggacggatcggggaggttcgccagggacaagctcaacgacgacttctgcgactgccccgacggcaccgacgagccagggacatcggcgtgcccggaggggaagttctactgccagaatgctgggcattctcccatcacgatcttctcgtcgcgagtgaatgatggtatctgtgattgctgcgacgggagtgatgagtatgatagcaatgtcacttgcaagaatacgtgctgggaggctggtaaagcggcaagggataaattgaagaaaaaagtagctacatataaaagcggagttgttattcgaaatcaggaaattcaaaaggcaaaagtggcatttgctaaagacgaggcagagctagcgaaactgaagggtgaagagaaaatactacaaggccttgttgacaagctcacagaacaaaagaaattgatagagaaggcagaggaagaggaacgcttaag

SEQ ID NO: 5350 - DNA, 754 bp, Oryza sativa
  ref <308>: DATABASE ACCESSION NUMBER: AK062537
  ref <309>: DATABASE ENTRY DATE: 2001-12-06
atgatgatgatgatgtcagcagcatcatcccccagctgcctcctcctcctcccccgcccgaccaaaccaacaccaccgctgctcccctccacctcctcctgccgccggccgcctcgctgccggatcagatcccttaggccggagaacccggcgccgcccgccgcaggagtagcgagagcggtcgcctcctcgtcgtctcccatggagatggaggcggcgcagacccaggcgtgcggtggcggggaggggcagcaggaggccatgaggctgctgttcgtggagatgggcgtcgggtacgaccagcacgggcaggacgtcaccgccgccgccgtgcgcgcctgcagggacgccatcacctccaactccatcccggccttccgcagcggatccattcctggggtgaacacggagcagatgaagctgcagatcaagctcggggtgccgaggccaacgcagcacttgctggacgttgagagagtcaaggccgtcttcccctatggtaaaattatcagctttgaggttgtggacggtgggatgatctgttcaagtggcgtatgcctagaagcaatgggagataaaaacgatgattgctatatagtgaacgcagcagtttatgttggttactaatattatctcgatgaatagttcctcttcgttggaacagtaaaaagacagaaaaatgttgtgcgcaataagcatgtcctgaattttctgaatcatcttttcttaatgtgtacaagtgcttatttgctcc

SEQ ID NO: 5351 - DNA, 870 bp, Oryza sativa
  ref <308>: DATABASE ACCESSION NUMBER: AK062538
  ref <309>: DATABASE ENTRY DATE: 2001-12-06
tctgcggcgccttggcaggatcgtcacgcagttcgcggcgcaggatcttgcccacgttgctcttgggcagttcatcgcggaactcgatgtacttgggcttcttgtagccggtgaactgttccttgcaataggccatcaactgctcggtggtcagcgacttgtccttgcgcaccacgaagagcttgaccgcctcgccggtatgttcgtcgggcacgcccacgcaagcacattccagcacccccgggtgctgcgccaccacgctttcgatctcgttgggatagacgttgaagccggacaccagcaccatgtccttcttgcgatccacgatcctggtatagccacgcgcatccatgatgccgatgtcgccggtcttgaagaaaccatccggcgtcatgaccttggccgtctcatcggggcgctgccagtaacccggcatcacctgcggcccacggatggcgatttcacccggctggcccagcggcagcggctggccatcgtcatccaggatggcgatttcggtggagggcagcggcagaccgatggtgccggtgtagtcatcgatggtgcagggattggcactggcaatgggcgaggtctccgacaggccatagccttcgatgatggggcagccggtcagcgccttccacttgtcggccacgcccttttgcaccgccatgccaccgcccacgcagcagcgatagccggagaagtccagcttggcgaagtcggcattgttgagcagcgcgttatagagcgtattgaccgccgggaaggtgttgaccttgtatttggccagttccttgacgaagccgggaatgtcgcgcgggttggggatgagcaggttgagcgccccttcgcgcgtgcccactt

SEQ ID NO: 5352 - DNA, 1066 bp, Oryza sativa
  ref <308>: DATABASE ACCESSION NUMBER: AK062539
  ref <309>: DATABASE ENTRY DATE: 2001-12-06
gtgctatggaccctaaacggctgcaaggcttgaggcctccgaggaggctgctgtgggctctgctgctgtgggtcctgtgcgccctggcagtgtctagtgtgttgccaagcgtgacaagtggtttgattttgatctcaggctgtggtgtgcagcccatggtggctgctgcattggtgctgtgctgctgtggggtgcaaccctcatggctggggtgcagccctcttgactgagcatgccaggcagcctcggtcagtttgggcagccggcttaggcagtggcgattcagattcagattcaagttacaaggccttcagcctgaggaggctgctcagcttgccgcctcgagggcagtggcgatgatgcttgcccttgggagggaagagcgaatgggagagcagagggttgaggcctccagccttctgaggccctccccaaggggatgcctgggtgaatgcgcagggggctgactgatgcgcagggggcgtggtgatggtgatggtgatgatgccgatggggtggtgctggctgtgcgggctggtgcgctggtgcgccgctcccggctgctttgatgtgcgtcaccacggcgcagctgcacggcgcttgatgcgggctcagaatcagatgcagattcatttgccgcacgtgcgggtgccgcgtgtgtggcatcgtcggatgcagagcccctcattgggccactggccaggcagcactgcacggctgggcaggcagggagatgattgagtgctgttgatgctggaatggcgaaaaaagagctggaatggacaaacgtgtgtttggcgaacgcgcagcagcatggtatgctgtgtggtgcggcccaggggctagtgctcttgccgtgtttgcatgcatgcatgtgtgactcatcactcacatggtcacaggtggtttaggtggtggacacacacactttgtggtggtctgcatcgaggctgcatgggttgggcagtaggcgggcattgtggcgtccgtgggcacatggaactggggagccactgccaacagtttgttgggtccagtgagaataagtgtcaaaagtgcacagttg

SEQ ID NO: 5353 - DNA, 749 bp, Oryza sativa
  ref <308>: DATABASE ACCESSION NUMBER: AK062540
  ref <309>: DATABASE ENTRY DATE: 2001-12-06
atttcccaagaatccatcgcttggtaattgaagatggcgagcaagatcgtgcgcgtgctgctcgcgctcgcactgtgcatgacggtcgctgtggaggccggaaagggacccaagatcacgaaccaggtcttctttgacattacgatcggcggcaaggatgccggtcgcgttgtcatgggtctctacggtaagactgtgcccaagacggtcgagaacttccgcgcgctctgcacgggcgagaagggcatgggcaagaagggcaagccgctccactacaagggcagcactttccaccgcattatccccaactttatgatccagggcggtgactttacggacggcaacggcatgggcggcgagtcgatctacggcgagaagtttgaggacgagaacttcaagctcaagcacacgggcgagggcgtgctcagtatggccaacgctggcgccaacacgaacggctcgcagtttttcatttgcacggtcaagacctcgtggctcgatggccgccacgttgtgttcggtcgtgtgatcagcggcatggacatcatcaaggctgtcgaggctgtgggctcgggcggcggtactcccagcgagcaggtcgtggtcaaggactcgggggagctcccggaggccgagtgggtcgccattgagtaaactgccacccgtttgcttttagcgagcgcagcttccagtaagctcgctagcgaggtgacgtccataacaacgtaattcaatacatggttgtctcc

SEQ ID NO: 5354 - DNA, 535 bp, Oryza sativa
  ref <308>: DATABASE ACCESSION NUMBER: AK062541
  ref <309>: DATABASE ENTRY DATE: 2001-12-06
atgcgatttttctgatcctgtacagctccatgggctgagggactgcaggaagtttgcggtcggcagggctctggtcgcctcgtcggcgttgccctcaaatactccaaggtgttgtcctggccactgacttcgaagcaatctgtgctccggttggaggtggcggagcactggtaccggctctacatgacggacaatcaaggggtaccacaatccggctccacctcgacgccattctggcaaccacgaaaacctcacgctccaatctatgccctccgcctgtgctcgctgcatctcgtgccaccgtctcggcctctcgatcgtcatggcctgaattattctaattcttcgttacaagtttttttttttaatgatcttggctaccattttggtgctgagactaatatgactcccatcaaacaatgcagttgagagtgagttcttacctgcattatatagtacattgtatttaaaccatagtacatggggacagtggtgcgttcagtgctaacactcaaatcaatttatggattgtggt

SEQ ID NO: 5355 - DNA, 594 bp, Oryza sativa
  ref <308>: DATABASE ACCESSION NUMBER: AK062542
  ref <309>: DATABASE ENTRY DATE: 2001-12-06
cctatgcactaactgctggaaactgtgtgcagtgcagctgtggaccaggagatctcaaattgtattgcacaccagcttcattaacagcatcatgttcaagtatgcagtgccccaatagcaacctcatgcttgggaatgtgactgcccaatccaccagtggtggatgcaatgtctcatcttgcagctatgctggacttgttaatggaaccattgccacgtcgctctcctctggtcttcaacccacatgcccaggaccacatcagttccccccactcagggcgacaccaattgcagtaaaccaaggatcataccttgctccatcacctgcaccaggagctggggaggctggcggcgatattccgggcttccctgggagctccaacgtttctcctgcaaacggcccttctgggagtgtctcccaagcggcttcggtgaatcggccacaccaaatcgtcgccctcattctttctgtagccttgtacttccagatgtgaattcgtgtgcagagtattgttgttgttgctggctgtgtgtattgaacagggggccctcatttgggcctggtggaaccctaatgtcaaggtcctttctatc

SEQ ID NO: 5356 - DNA, 418 bp, Oryza sativa
  ref <308>: DATABASE ACCESSION NUMBER: AK062543
  ref <309>: DATABASE ENTRY DATE: 2001-12-06
acatcagagcttgaagctctcttctctctctctacttgccatgtccggccatggctgccaccactcgatctctcttatcggagcattgccggccaagccctcgcgccaatatatttgcctcgacgaggagaacccatttcacccctttcccccaacccttccaccttgagttaagccaccaccgccagctcccaaatcggccgaaccaagcacttgccgccggcgttccggtctcctccctctccctctccgccagccaccgccctccctaggtgcgtggcgctcgggaacaccacccaccgacggcgtcgtcgccttccgcccgccggagagccagcgcccctcctctccttctcctctgttgctcggctggaaagagaagaaaagaagagaggaagaagaagatgagaggagagag

SEQ ID NO: 5357 - DNA, 1046 bp, Oryza sativa
  ref <308>: DATABASE ACCESSION NUMBER: AK062544
  ref <309>: DATABASE ENTRY DATE: 2001-12-06
atcttcacatctctcccctttcctctctcctctcaccggcggagatgcggacagcgtcgaggcgcggcctcctccactcccgcccccatgggcctaccgccggctgccgctgccctctcctcgtcacctgccgtgcctgcctccgccgcctccgcatgttcccgccgccgccgccgcttcccccttgcctcggcctccggtggccgttctccagcaccgtcttccgcccccgcgccctcctcaggaacggtcgccgcgctcgcctccgccggcgactgagcaggacgggtccgggcaccgaagcgatgcagttgtagtgggactgtgggagcaccccgccgacctcatcctaccgggggcgaacatgtcgaagcagatggcacaggtgagccgccgccggttgacccgcgtgggcacggtgctgttgcctacgttctccaccccgtacgccgccggcggccaccggcctgtacacgtcgccgtacacgatcatctcgccgtcgccgagctcgtcgttgagcctcgcgatcatgtcctggaggccgacgttgaagcgctcgacgacggtgtttttctcgtcggtacacgcgccgccgctccccgtggcgcgctccagcgggaggcagcccatgggcgggaggccgttaaggtcgaccttgcgggcaccgagcgcgtgcagctcgcggacgaacgagtacgactcggcgatgcgccgatgccgaggaggtagtcgccgtacgccgccgccgtggagtactccgccgcttgggcgcgcgccatggcgtagtagttctcgaggaagtcgttggtgcccatgctgacgatgtagagcgcctccgacagcgttgccgccgccgccgcgtcgtcgtccccccggaagctttgaagcctcgccgcgtactccttgaagtagtccagctccttccacatcggcagcaccgatgcacgacgcgacctcacaaaattactccatggatgtcatgtgtgatgtcacctaagaacaccatgaaaatgtagctaagctagctatcgttttgctctaatgg

SEQ ID NO: 5358 - DNA, 591 bp, Oryza sativa
  ref <308>: DATABASE ACCESSION NUMBER: AK062545
  ref <309>: DATABASE ENTRY DATE: 2001-12-06
agcacaacaccaaacaacggggcacgcacgcctttggcagcagggagcggcggcagaggaaggggggaagggagcaagcaaggcaagggattccgcctcgcgagaacgatggggttcatgctgcgggtgaggctggcctccttcttcgccggcgccgccgccgccggggccgccggcggcttcttcctctacaaggactacaagctcgcccacgactccatggccctccaggtcaaaggcctacaagaccatgtggatgcccgttacaaagctcttgacaaacgacttgctacattggaagaccagaaaaccagcgagactgctccagacgtgggcgtgccatctgattagtctgttcattggctggcttgagtatggatgatttacgactgtttactttaacctgtgttatcgtctcttggaggcaaaagccgatgactgactgcaaaataatttagtgaagagttttttttttgtgtgtggcaatgaagcttctgtagtgttatagatgcccatggggatacccaaccttgcaaaaccatttcacttttgatggcactgaaccttggcagtcaagctcgatcatttacc

SEQ ID NO: 5359 - DNA, 1240 bp, Oryza sativa
  ref <308>: DATABASE ACCESSION NUMBER: AK062546
  ref <309>: DATABASE ENTRY DATE: 2001-12-06
gtgcaacacggcttgcgagcggcggcgcggatggggctctgggagtggccgtgggatcgccggcggcgaggcccgtcgggcttaggccccacctccaccgccgaagaggtcaccgccggcgtagacgccacccacctcaccgccatcgtcacaggagcgacgaacgggatcgggagggagacggcccgagttctggcgaggaggggggcggaggtgatcatcccggcgaggacgatggagagcggcaacgcggtgaagcagagcatcgcggaggaggtcccggggtccaggctccacgtcatggagatggatctcgcctcgctcgactccgtccgccgcttcgccaccgcgttcgactcctcccacacccacctcaacatcctcataaacaatgcagggataatggggtgccctttcaagctatccaaggatgggattgagctgcagttcgcaacgaatcatgtcggtcatttcttgcttacaaatcttctgctcgacaagatgaaatcgacggctaggaagaccggcgtgcagggcaggatcgtgaacgtatcgtctattgcgcacaagagaagtgatggttcttgctttgatctgaacaagctaaacgataagtctaggtacaaaccactcattgcatatgcacattccaaattagctaatattcttcatgcaaatgagctagcaaagcgttttcaggaagaaggatgtaatttgactgcaaattccctgcatcctggagtgatcctcaccaatatcactcgttatgtcgtcacaaacagcgtgatggtttcaatcctttctgtgggaaacctctttctgaagaacacacaacagggagctgcaaccacatgctatctggcactgcatcctgaactgaaggatgtctccggcaaatacttcgcggactgcaaggaagccacgccgaggcctgctgcgagagacgcagagctagcgaagaggctatgggatttcagcgaacagctcgtggatactaatcgtcgtggagaattcaacagacaaaaatgacactgtttagactgtctgaaattctgaacctgaccatgtctcaacctgagatccttcagatacagaattttattttttatttctattttttattttttttcaatggaatgatacagcttatataatatgaccatagagctgtttgtcagtactgttgtttgcatgtgtaaacaaattcaaatgcattaataatcagcctgctttttttgcc

SEQ ID NO: 5360 - DNA, 684 bp, Oryza sativa
  ref <308>: DATABASE ACCESSION NUMBER: AK062547
  ref <309>: DATABASE ENTRY DATE: 2001-12-06
ataaaagaaaatcccccgtctcgtctcctccgctccttgtgcctgcgcccatcgactccatctggcgactcgcgagagcagagcaggggagggggaggggaagggcgccgtcgtcctgttgttcactcctgacctgcatcacatctggagatgtctttccgcagcatagttcgtgatttcagggacagtttcgggactctatccaagcggagtttcgaggtgaaaatttcaggcttttcgggccgtcacagagggaaatccattggaccatcaagcgagctggatgacacgcccgtggtagctcagcaaagcaagtgggctggtcttcctcctgaattacttcgcgacgtgatgaaaaggctggaggaagatgatagcaattggccctcccgcaaggatgttgttgcctgcgcttcagtttgtacgacttggagagacatgtgcaaagatattgtcaggaaccctgaattttgtggaaagcttacatttccagtgtctcttaagcagcctggacctcgagatggagtaatccaatgtttcataaaaagggacaaatcaaaactaacttatcatctctacctgtgccttagctctgctgtgcttgatgagactggaaagttcctactatcagctaaaaggagccggcgaacgacacacactgactacatcatttctatggactcc

SEQ ID NO: 5361 - DNA, 523 bp, Oryza sativa
  ref <308>: DATABASE ACCESSION NUMBER: AK062548
  ref <309>: DATABASE ENTRY DATE: 2001-12-06
aaaaccttctcagcacaaaccaaaatggcagccaggagctccctccatccttcctccatggccagcatcccaagattaattggcaccaggaaggcagccctaaggttcagagctcctgcccatggcggcaccagctcatcacagctttccatcgctgcagcaactgctaacaagaaggtgtttgaggaccagttgagagggattgtgtgctacagagatgacaagggagagatggtctgtgaagggtatgatgaaggtccaaggctcggaatgcggctgccggagaaggcctgcttcccatggcctatggaggttcagatcactgatttcattgagctggcgacgttccgggtcttcgaagatgccgatgttcttcagatcaagaatgatcagaagaggcagatctgagaagaactgatcaatgatcatgtagtgcaaggcagtagttgtatagaaatgctcatgtgtaagaataattttcaaggtatggaattcaagtacactgaagaggcagttctgatgt

SEQ ID NO: 5362 - DNA, 624 bp, Oryza sativa
  ref <308>: DATABASE ACCESSION NUMBER: AK062549
  ref <309>: DATABASE ENTRY DATE: 2001-12-06
gaagaaacttgctgctgaagcactccgcataaatgaaaatgatgctgacaaagcactagatctcttgacagatcctgagcaaaattgcatcctacaacacaaaatcatgtcaaaggcgaagcgattatctcgcggctcgggctcagggtcatcaagctccagggctgctgctgccacgactgcttcaggggtaaacaattcacaggctccggttgacacttcagctaatgttccagatggaagcgctatggaggagagtcatgtgttgcctgtgatcaatgaagaagctgcaaacaacgtagaggctgtgaacgatgacgaaactgtgaaccatgaggaggaagatatgagcgaggagtcagctgagggtgaagaagaagcaaatcctcctccagtcagggatgtggcgatggaaaacgagcttgcccatgaaatgacgggggatgccttggatgactatgatattgatgttagcaacgaagggcaggctatatcagagtacctgagcttactggattctgctgcttaggcttgatgtgcaaacatattactcacctggtctagatagtttttatcaaacctcagaaagaaatatagtcagcctcaatccgagagagtttgctt

SEQ ID NO: 5363 - DNA, 722 bp, Oryza sativa
  ref <308>: DATABASE ACCESSION NUMBER: AK062550
  ref <309>: DATABASE ENTRY DATE: 2001-12-06
gattctagttccatctacaaacggcaaaagacctctgagggaaaatactctacttgcagttttggagatggtcaactgactagcaaatgcttgtccaagatacccttgccagctgatcagcatacttcattagatgatgtgcaatatattggtagggttccagcagatccctgttctccaactaaaccaatcttggatcatgtgatccatgtcctatcttcagatgatgaagactccccagaacctcgtaataatctgaataagacatcactgaaggaagaagagggcccttctcctctactgtcactgtccctttctatggcctcaaagaagcataatcttaccggttctgatacaggagatgatggaccgctgtctctgtctcttgggctccctggtgtagtgactagcaaccaggctcttgagatgaagcagtttctgccagagaaacctggcatgaacacttcattgcttctctagatatttgagtgtacagttttgtgctgtgttttactttatggggtttagacagggtagtagtatggtatagctgttaaattatggaaacctttggtttatttcactgttctatgcatctggttgttgctagagatgctggtctggtgatggtattaggcttctgcattttgtgtgattatggtgttttagttcccaaacgaactggtatgacataaaggatagatcagaatgtgaagtttgat

SEQ ID NO: 5364 - DNA, 748 bp, Oryza sativa
  ref <308>: DATABASE ACCESSION NUMBER: AK062551
  ref <309>: DATABASE ENTRY DATE: 2001-12-06
cagctatgctcccaagaaggacattgaagcgcaggatcgccgtcctttcgatcttcttgttatcatcaatcctaagcttaagacgacgagtaaaagaactgcattgttcttcgaggggtgtttgagtgtagatggatacagggcacttgtcgagcgacacctggatgttgaggtttcaggtttggacaggaatggacgccccatcaaggtagaagcttcaggatggcaggcacgtatcctgcagcacgaatgtgatcatcttgaaggtacattgtatgttgacacgatggtccctaggacattcagaattgttgataacttggatcttccgcttcctgttggatgccctccaataggtgcacgctgaggtggagagcattccacattttaaaatttccaagtagagataattgcactctatagtatacataaaatttatcccaagtataatatttgcattgctgcttatttctgtgattgccaattttccatgaattgatttttcaatgtctgttgtggtcatacacatgcggagaatcactgccttgtatgttgaattgacatcatgtggtaacattcgttgttggttgtaagatgttcgctcaatgttttttgtatggtgtccatggactctgggagaacaggaattttacacttcaatagaactgtaccttttcctccagtttttgtctcttcaacataatttgcaataccatacacttaatagtgtatactgattatttttatc

SEQ ID NO: 5365 - DNA, 690 bp, Oryza sativa
  ref <308>: DATABASE ACCESSION NUMBER: AK062552
  ref <309>: DATABASE ENTRY DATE: 2001-12-06
cacacacagccgcgaggagagagaaagagagaggagagagagatggcggcggagctgacggcggcgcagctgcgggcgtacgacgggagcgacccatcgaagccgatctacgtctccgtccgcggcaaggtctacgacgtcacctccggccgcggcttctacggccccggcggcgcctacgccgtcttcgccggccgcgaggccagccgcgcgctcggcaagatgtccaaggacgacgccgacgtctccggcgacctctccggcctctccgacaaggagctcggcgtcctcgccgactgggagaccaagttccaggccaagtaccccgtcgtcgcccgcctcaccgaatgaaaaaaaaaatccccccaaatcaacccttagattattgtatcctcttgtgctctacagcttaattccatccgtaattccatgtgtaacttattattacttctccctgtgtgtcagtgtgtctgtgcttgcagctttgctctctggttgcttgattagctgcccaataatctgaacaataagaaatctggggagtaatttaagtattggattgtctggtctttcttttttgtgattgccgcttgatttcttgtgccataggttgttcttaatcttgatctgggtattcttgtatagaagaagcaatgtgctgaatgccttgaccacagaaatttcatggct

SEQ ID NO: 5366 - DNA, 604 bp, Oryza sativa
  ref <308>: DATABASE ACCESSION NUMBER: AK062553
  ref <309>: DATABASE ENTRY DATE: 2001-12-06
aaaccatagtaacaattcaacaaccattccatataaagaagcatcgacatcgagtactacacaaaacgatcaagtttggcccttccgagcgtgtgaaggaagtttctggaactcatggcacgctccaaaccctagcggatattctgacgtacctgaagattgtcacggatgttaccacgcacgagtttggtgtcccgaatggaacggccttcagtgtcccgctccaggacgacgctcgtgccgtcggcttctttgcgcgctctggactgctcgtcgatgctattggcgtctatgtccaaccatgatgcgatgccctgcagctacgtacctgtgccattgcccgttactgcatgctctacaatggtttgtgagaatcagagtggattatatatgtatttgcacaaccgaatatttcaataattccactctgattctgtgtcgtaagtcatatatatgtattgtaaatcgtatatgtattgtaagttgagggatcctgctgagtctgcgttctacctgataacctcaaaccttgccttgttattatttacaaagtgtgtgccgtcattgaataaagaattgtggtacataccacattataaatgtt

SEQ ID NO: 5367 - DNA, 780 bp, Oryza sativa
  ref <308>: DATABASE ACCESSION NUMBER: AK062554
  ref <309>: DATABASE ENTRY DATE: 2001-12-06
catttcaattttagcacaagcgaaagtcgcaatcctgaagtgtccttttgttaggactatagacattggcaactagattcttgtgataaataacagtaggtttcactgccctttatatgctatgttgctttggaataatagggttttaaataccagttaaataatcttttgagtgcttcttccttgggggtgggtgtggaattttcctgtcaagacacctagctgaaagaaccatctgtttaatattcatatttgaagtttttgataccaaaatatcaaaattttaagagctgctgcatttgcaagatctgtacttgttagtgtactttaaatggtccttttttaatagctacaactatgctggaactctgaatatctcccttacaaattaagttcttttttttcctcaaacacattttttttctttttcaaaatgatagctataggtacattcatacacatgttagttcttcttagagaaggtttctaagattatattttcttcttacaggtaatgtatgatgcatcaggaattcgattccacacaggtcgccaagctgctttgctaaatcaaatagtctctgatttcccaccagaacatccaattatctcatccttcagaccgctacaggaacctcttggacacagtccatttcaggtttttgctggagcgcttgttggttgttcaatagcctatttgatgggaaaatctgtataagatagttacaatttgtcttttacacaaatactgttatgttaatataaggaaccatttctgcg

SEQ ID NO: 5368 - DNA, 666 bp, Oryza sativa
  ref <308>: DATABASE ACCESSION NUMBER: AK062555
  ref <309>: DATABASE ENTRY DATE: 2001-12-06
gattcttcttctatccatgctgctgctgctgccccacgtcagtcctctttgttcaagagactctaccgcctcggccgcagtcgcagtgttcactgctcctcgcctcagattaggagcctcgatacaggcacgctccgattccatctcactcctctcacaagaaacagcagcaccagcaccaggctgagcattgcaaacaagatccaagggaggcgcctcaacctcttcgacttctttgctaaccaaagacaacaactatagtacgtcttactccatatattctacacccatcgagctctgcctacttgctggaggacatacgtttcagtatgtcccaaccctgtacatggttcacacagcctcacttctcatgcgcctggatctgtcaatcaccctttactaagttgctaaaagccgctggacatgtttatatcatcgtcgtcgtcatcgtcaactgtgagtccctgtccctctatatttcaccgttgatgacaatgttcgagttaccatgtttgacaacaccagctacacagtttgcattcggttcagtaattattggaaattgtaaagtagcatgttccttgataactgatagcgctaatgatttgtctcattttttttgtactatgtatgctattattattgttattacagaataagttcctc

SEQ ID NO: 5369 - DNA, 685 bp, Oryza sativa
  ref <308>: DATABASE ACCESSION NUMBER: AK062556
  ref <309>: DATABASE ENTRY DATE: 2001-12-06
aactaacgctaaaaaagtaacagtttctgtactttattgaacgacatggccgcccgcacgcccaagctgttcggcaagtggaccttccacgacgtcaccgtttcggatctgtccctccgcgactacatctcgacgaccccggtgtacgccccccactcggctggccgcttcaccaagcgccgcttccgcaaggccaagtgccccatcgctgagcgcctcgccaacggcctcatgttcacgggccgtggcaacggcaagaagctcctcgccgcgcgcatcctgaagcacaccttcgagatcatcaacctgatgaccgactccaaccccatccaggttgtcgtcgatgccgtcgccaagggtggctcccgcgaggactcgacccgtgtcggcactggtggtgtcgtccgccgtcaggccgtcgatgtgtcgcccatgcgccgcgtggatgaggccatctacctgatgtgcaagggtgcccgcgcctcggccttccgcaacctgaagaccatgcccgagtgcctcgctgacgagctcatcaacgccgcgaagggtagctccaactccttcgccatcaagaagaaggatgagaccgagcgtgtcgccaaggccaaccgctaaacccggaaccctcccaggtcgttcaaagagaaacctcttcctctctctactcccaccagttcacttc

SEQ ID NO: 5370 - DNA, 2018 bp, Oryza sativa
  ref <308>: DATABASE ACCESSION NUMBER: AK062557
  ref <309>: DATABASE ENTRY DATE: 2001-12-06
atggaaacttggtcggcatgatgaagctctttcagtatcaagaaacttggctgaaaacttatcgagtatgaagcaggagagtgcaactgcagctttaggattcatatgcacgttgacatacaacatctctgggaaggactctgcagctgcggtcattcataaactgcctggtcaactcaattacagcacacagctgaaatttattatctctgcattagatgctttacagccaaacaagcgttttcagttaccccagctgagtatgcctcctaggcttacatcgtatgaagtcatgagtgaagtccactcaaatattgctcttggaaatgctattggtggggaatcagacaagtttttaagggttgatggtggcctgtcttacctgaaaaaggttctacacatgtatcccgactgcagtttagtaagaaaccaacttggatctctgctactgtcaagtgaagattggatggcttctcataaagcagtaagggttacttcattgtcccggggatatacatccaataggggcttaagatctccacaccaaattcaagcatgtgcagcagtttcttgctatgctacctgcacttcttacccaaagttctcttttccaacatgtgaagatcaatacctaagcggatacaatgcaatatgccgcctgcaaaggtgggttcatctagaaccgtggaaccaagatgcacgtcgcctccttgtacttacccttttccaaaaagcacgtgaagaaaagtatccgaaacatatctgcaccattttgaagaggctgattttgcaagttctctccagtggtagcaattcacaagacaataaggtggttcagtatgggaactacttgttacttcttgtggcttcagaggttagtttgcaatctggtgaccatggcaactgtattgctcaagctactgaagctcttggagtaacttcttcgagcgtggattctttctttgcacacttgcaactgtgtcgggcctatgtgatgcaaggcaatcttttgaactctaggagtgagtacatgaaatgcctgcaaaaccgtacagatactgaaattggctgggtaatacttaagcaacttgcatctatatgttcactggagggtacccctgatgaaatagagatacatctcggaggatgcgttgaaaggaaaggtagcaatgcatccaaatggatgtctcttttttatctagcatgcgctcagtgttcagtatggaatgaggactttgcaagtgctgaaaaagctattgctcaggcatgtgctgaaggggatcctgacagctgtgtcttatttctcaacggcgcaatttgtatggacattgcttggaggttcgcggcccctcaatttatagcccgtgcagcttccagcctcagaaaggcacagcagaaatcacttgcttctttacctattgtgtccctcttactggcccaagcagaaggcagccttggctccaaagccaagtgggagaaaaaccttcgtctagagtggttctcatggcccccagaattgaggcctgctgagctctatttccagatgcatcttctggcaacgcagtcaagtgcagcaacttcccagcagaaccagctagtggaaaccatgcaaaccccagagaagtggcttctcagggcgatacacctgaacccgtcgtgctctaggtactggacggctctgatgcaactcgtgtacgtgtaacccttcgaaattggaagcactgatctttggtgaaaccaaccacaatgtagcgcatttcttgactcagctgtaagcatatggattggctggatgaactgccgacctgtctgtgataagtgaaaaacctgcatatgcttgcttaccgtgttgagggctgagacgtgagatgtttccggaattaccttttccctgatagactgcaggcatattgtcttcttgtaaactcttctcacaaaccaaccccccccccccccttctcagtttgtgttgtaaaccaattggtgacctttcaattagcagcaagcaagtcgtaact

SEQ ID NO: 5371 - DNA, 1395 bp, Oryza sativa
  ref <308>: DATABASE ACCESSION NUMBER: AK104927
  ref <309>: DATABASE ENTRY DATE: 2002-08-28
acgcactaccaggcagcccaacccacccgcgagctagggttttccagagttccagaacccccacctccctaaccctaaccacccatcctccccggcggcggcggcggcggcggcgaagagaagatgaggccgatcctgatgaaggggcacgagcggccgctgacgttcctccggtacaaccgcgacggggacctcctcttctcgtgcgccaaggaccacacccccaacgtctggttcgccgacaacggcgaccgcctcggcacctacagcggccacaacggcgccgtctggtcctgcgacgtctcccgcgactccacccgcctcatcaccggcagcgccgaccagaccgccaagctctgggacgtccagaccggggcggagctcttcaccttccgcttcgacgcccccgcccgctccgtcgagttcgccatcggcgacggcctcgccgtcatcaccaccgacaacttcatgggcaacgtgcccaccgcccaggtcaagcgcatcgccgacgaccccgatgaccagtcggaggagtctcttctcgtgatttctggcatcaaggggaggattaacagggctgtatgggggccgttgaacaggaccatcatcaccgccggtgaggatgccaccatccgcatttgggacactgagactggaacatgtctgaatgagtcagacaaagaacaaggacaccagaaaacaattacttcactttcaaaatctgcagattggtcacatttcctaacaggctccttggataagtctgctaagctatgggatacaagaactctgaccctgatcaagacatatgtcaccgagcgacctgttaatgctgttgacatttctcctcttctagaccatgtggttatcggaggtggtcaagatgcgatgaatgtgactatgacagatcgtcgagcgggaaaatttgaagcgaaattctttcacaagattttgcaagaggaaattggtggtgtaaaaggccattttggaccaattaacgcactggcatttaatcctgatggacggagcttctcgagtggtggtgaagatggatatgtaaggctgcaccattttgattctgactacttcaacatcaagatttaaagcaagaagttgtgaaactctgaggctgcatttgaggaaggccgaaggtaccttttggttgggaagatgtttcatctcctgtcatgtggaagagactaaggtgcagtgtttagctactgacagtgtactgcttctcagacattcttgttgcactggagatccagatttttagatgctcaagagattttgtacattcagcaatcgagggctccttatactgcaatactagcttaattctgttttcatcgttgttggtttactttgaccataaatatatatccagttttgggc

SEQ ID NO: 5372 - DNA, 2390 bp, Oryza sativa
  ref <308>: DATABASE ACCESSION NUMBER: AK062558
  ref <309>: DATABASE ENTRY DATE: 2001-12-06
aacgaaatttagctgcgagaagttgttcaggaaagcagttactgcttatgctctgagtgagaggaaggtgatcaactttataaaaagtgatccaaagagggttagagcaaagtgtgactggcctagctgtccttgggtctgtctactgtccaagacatcaaggtcacacagttggcagctagttaccctggacaatttgcatgcttgcccccctagaagagacaataagttggtgacctcaagaaggattgcagagaagtatgagaaatttattgtggctaaccctggttggaacctgtctcacatgaaggcaatagtgcaggaggagatgtttgctgatgcatctatctccaagctgaaaagagcaaaagccttggtgatgcacaaagtaatggatgcagcaaagggacaataccagaaactgttcaattatcagttggagctacttagaagcaatccagggagcactgttgtagttaacagagaggtgggactggatccacctgtaatcaagaggatatacatctgcctagatgcacttaggaaagggtttaaggctggatgtaggaaagtaataggactggatggatgctttttcaagggtgcaactaatggtgagctgttatgtgccataagaagggatgcaaacaatcaaatgtatcatgttgcttgggctgtggtaaacaaggagaacaacgaagaatgggactggttcatggacttgttgagcagagacctacaagttggagatggagagggttggttgtttatatctgatcagcaaaagggtattctcaatgctttagagaagtaggctccacaggctgagcacagaaactgtgctaggcacatatatgttaactggaagaggcacttcagtgataagaagtaccagaaaaaattttggaaatgtgccaaggccccttgcaggatgcttttcaacttggctagggcaaaactggctcagcttacacctccaggtgcacaggctatcctcaatacacatccacaacactggagcagggcttggtttaaggtaggctcaaactgtgactctgtagacaacaatatgtgtgaatcattcaacaaatggatcctagaagcaagattttttcctattatcacaatgctagaaataattaggaggaaagtgatgggtaggatcagtgcacaaattaaaaactctgctaggtagaacactgctatttgtcctggaatcttgaaaaaacttaatgtgtacattgctgagtcagccttttgccatgccatatcaaatggagctgacaaatttgaagttaagcataatgagaatagattcactgttcagttgaacaaaaaagaatgttcatgtggatactggcagttggctgggttgccttgcccccatgccatatcatgcattttcttcaggacaaactctttagatgcatacattgctgattgctactcagttgctgcattcaagaaaacctatgagcattgcctagagccagttgagggcatgagcagctggcctgaggatgaaagggtacctctcaatgctcctggatatatcaaaatgcctggtaggcctaagacagagaggagaagagagagaggtgaacctcctaaaccaactaagctgtcaaagatgggcacagtcattaggtgcaggaagtgcaagcaagttggtcacaacaggacctcttgtgataaacatcatgcaggagcgacatcaaacacagctcctcagcaaggtagcaatccaggacacaatttggttctatcaaacacaccccaaagttgtgtccagggtaggaaaaggaaggctacttcaactgccaacacaactgctgttagcatgtcaaggacactggcaacaaaggagaaggtacctatggagtccacccaagttgtcagggtgaatgcaaaggccaagatatcaacacagcaaggtggatcagcaactctcaacttgcaagccatggtgccacaatcacagggatcttcaagtgcatcaatttagataacatctgggaaggcttatgtttctgtcactgctgaagagccactgaggaggtccaagaaaactgatacttcaggtccatccaagaaggccaaaaaatcaagtgctggagcactcctcgttatgccaccatggaaatctgacaaactttgagtcagattcctatgtatgttgctatgccagactatgaaggcttaattatcacctgtgatgtaatggagctgacaattaggcttaattatgtgtgttgagcaccagacttaaatgtttatgtgtgtgctgtcatgtaatgccataccatatggccttttgctacaactatgtttcagtgccagacctgaattggcctatgttcaattgtctgatttaatggagtcatttgtgc

SEQ ID NO: 5373 - DNA, 1299 bp, Oryza sativa
  ref <308>: DATABASE ACCESSION NUMBER: AK104928
  ref <309>: DATABASE ENTRY DATE: 2002-08-28
acgagcaaagcggagtgaggagagtagtccacaactccggccggccactacgactctacgagtacgtacactgcaaattaaagctcaagatggccgcaacagcgggcaggaccgcgggcgcattggccgtcctgcagctcgcctccatcgtcgccgctgccgtcctcctctcctccccacctgcggctgctgctgagccgtctgtggacttcattgacgtggtggcgtgctcgcagtcgcaggtggactccatcgtgcgctcagccgtgcaggcggcgctccagcgtgagatcgccctcgccgccggcctcatccgtatcttcttccacgactgcttcccgcagggctgtgacgcgtcggtttacttgagtggcgccaactcggagcaggggatgccgcccaacgccaactcgctgcagccgcgggcgctacagctggtggaggacatccgcgccaaggtgcacgccgcatgcgggcccaccgtctcctgcaccgacatctccgcgctggccacccgcgcggccgtcgtcctctccggcgggcccacctaccccgttcccctcggccagctcgacagcctcgccccggccccgctgcgcctcgtcaaccagctcccgggcccgggcacctccagcgtccaggctctcatcgacctgttcgggagcaggggcatgggagacgccgccgacctggtggcgctctccggcggccacaccgtggggaagtcaaagtgcgccttcgtgaggcccgtggacgacgccttctcccggaagatggccgccaactgcagcgccaaccccaacacgaagcaggacctggacgtcgtcacccccatcaccttcgacaacggctactacatagcgctcaccaggaagcagggggtgttcacctccgacatggcgctcatcctggacccccaaactgcggccatcgtcaggcggttcgcgcaggacaaggccgccttcttcacgcagttcgttacgtccatcgtcaagctgagcaaggtgccgaggcccggcgggaacaaaggcgagatccgccgcaactgcttcaagaccaacagcggagcacgcctcgtggacgtcgtggagggcttcgctgcctctgcttaattcatgtcatgtcgctcatcgatcataatcgagatgaatatctagggtcgacatcattatgccgttgtatgtgtgacctagtacgtccgccccttttgggcccggtcggtcggtctcgccagtatggcctttgtatgtttcgttacggccgtgcgcgcgttaataagatgtactcccgcaccgtaat

SEQ ID NO: 5374 - DNA, 1963 bp, Oryza sativa
  ref <308>: DATABASE ACCESSION NUMBER: AK104929
  ref <309>: DATABASE ENTRY DATE: 2002-08-28
tcatgtggaccgtcggcaccatcctcggcgtcggcctcttcatcggcttcgtcatgatgatcgtcaagctcgtcccccacaagcgcccccctcctcctccccccgaccagtacacccaggccctccacaaggccctcatgttcttcaacgcgcaacgatctggtccgctgccgaagcataacggcgtcagctggagggggaattcttgcatgaaggatggcctctccgacagcaccgtccggaagagcttggtcggaggcttctacgacgcaggagacgccatcaagttcaactaccccatggcctggtccatgaccatgctcagctggagtgtgatcgagtacaaggccaagtatgaggcgatcggtgagctcgaccatgtcaaggagctgatcaagtggggcacagattacctcctcaagaccttcaattcatcagccgatactatcgatcggatcgtcgcacaggtgggtgtaggtgacacctcaaaaggtggtgcccaacctaatgaccactactgctggatgaggccagaggatatcgattaccccagacctgtcactgagtgccactcttgctcagatcttgcttccgaaatggctgctgcccttgctgcagcttccatagtgttcaaggacagcaagacttactctgacaagctcgtgcgtggcgcaaaggccctgtacaagttcggtaggctgcagcgtgggagatacagccccaatggctctgatcaagcaattttctacaattccaccagttactgggatgagtttgtgtggggtggtgcgtggatgtactttgccacagggaacaatacatacctatcggttgcaacagctccggggatggcaaagcatgctggagcatactggctcgatagtccgaattatggagtttttacctgggatgacaagcttccaggagctcaggttcttctgagcaggttgcggcttttcctaagtcctggatatccttacgaagaaatactgagaacatttcacaaccaaacagacaatgttatgtgctcgtatctgccgatgtacaattcattcaactttaccaaaggaggaatgatacagctcaaccacggaaggcctcagccacttcagtatgttgtcaatgcggctttccttgcctctctatacagcgattacctggatgctgcagatacacctgggtggtattgtggacctactttctacactacagaagtcctccgcaaatttgcaaggtcacagctcgattatgtcctaggtaagaacccactgaagatgagctacgttgtgggttttggaaacaagtaccccaagcgcgctcatcacagaggtgcatcaatccctcataatggtgtcaaatatggatgcaaaggaggctttaaatggagggagactaagaagccaaatcctaatatccttattggagcactggttgctggccctgataggcatgatggcttcaaagatgtccgtacaaactacaattacacggagcctactcttgcagcaaatgctggcctggtggcagccttgatttccctaactaacattcacgtcaaaagtggaatcgataagaacaccatcttctctgcagttcctccgatgtttccaactcccccacctccaccgtcagcttggaaaccatgaagagtcagatcgctgaatatttcttgagcatcaaacggagggaacgacagatgtttgtttggtacagcaaaggacacatacagaaagcagacaacataagcttacagagcctctattttctgtatcagtatgacagatcggtataaattcatctgtcgacaatagaccgggatgttgtgtgcaccttgtgaaactaatttttggggtccttgttgttattcgttcagagctcatgtgtgaagttctttttgtagaaatggaacctttataaaccgttttataggagtgactttatcatcatactaaaggatttgtgt

SEQ ID NO: 5375 - DNA, 2272 bp, Oryza sativa
  ref <308>: DATABASE ACCESSION NUMBER: AK062559
  ref <309>: DATABASE ENTRY DATE: 2001-12-06
atctcccttcaaagaaggaaaaccaaatgggtatcttagcttaagaagccatatttggactgatactgacaacaaccgctcagggatgcttccttttgtgttcgatgactcatttggatttgagcgatatgtggactacgcattagatatcccgatgtattttgtctatcgtaataagaagtacattgactgtactggaatgtcatttcgggattttatggtaggaaaactcccacaagctccgggggagctgcctactttgaatgactgggagaaccatctaacaacaatatttcctgaggttaggctgaagcgatatctagagatgagaggtgctgatggtggcccatggaggagattgtgtgctttgccagtattttgggttgggctgttgtatgatgaggaatcactgcaaagtatttcggacatgacctctgattggacaaatgaggaaagagaaatgctaaggcgaaaggtacctgtaaccggttcccctctccaccactcgcgcccccatcaccacccactccactccctcctcccccgagcccgagtgcctcaccgccactagctagcagcagcggcggcggcggcggagaagaggaggagatatggcggcggtggcggggacgggggtgttcgcggagatcctggagggggaggtgtacaggtactacgccgacggggagtggcgcgtctcggcctccggcaagtccgtcgccatcgtcaaccccaccacccgcctcacccagtacagggtgcaagcatgcacccaggaggaggtgaacaaggtgatggagacggcgaaggtggcgcagaaggcgtgggcgcgcacgccgctgtggaagcgcgcggagctcctgcacaaggcggccgccatcctcaaggagcacaagaccccgattgcagagtgcctcgtcaaggagatcgccaagcctgccaaggacgcgatctctgaagtggtgaggtcaggggatttggtgtcgtacacagctgaggagggtgttcggatactgggggaaggcaagctgctggtgtctgatagcttcccgggcaatgaacggaacaagtactgtttgagctccaaggtacctcttggagtagttttggcaatcccaccatttaactatcctgtcaacctagcagtctccaagattggcccagcactaattgctggcaatgctcttgttctgaagcctccaactcagggagcggtggctgcactacatatggtgcactgcttccaccttgctggtttccccaaaggcttgatcaattgtgtcaccgggaaaggttctgaaattggtgattttcttacgatgcatcctggagtcaactgcataagttttacgggaggtgatactggtatagccatttcaaagaaggctggaatggtcccgcttcagatggaacttggaggaaaagatgcttgtgttgtgttagaggatgcagatctggatttagtggcagcaaatatagtaaaaggaggcttctcttacagtggccagaggtgcactgctgtgaaagtggtgctgatcatggaatccgttgctgatatcgtggtagagaaggtgaaggccaagttggcaaaactgacagttgggccacctgaggctgactctgatatcaccccagttgtaacagaatcctcagcaaattttattgagggtttggtcatggatgccaaggagaaaggagcaaccttttgtcaggagtacaggagagaaggcaaccttatctggccgttgctactggatcacgtccggcctgacatgaggattgcttgggaggagccatttggccctgtcttgcctgtgattaggatcaactcggtcgaggaaggcatccaccattgcaatgccagcaattttgggctgcagggatgtgtattcactaaagatatcaacaaagcgatcatgatcagcgatgcgatggagaccggaaccgttcagatcaactctgcaccggctcgaggacctgaccatttccccttccagggcttgaaggacagtgggattggatcccaggggataactaacagcataaacatgatgaccaaggtgaagagcactgtcataaacctaccatctccatcctacaccatgggctgaggtgttccatatagatgatcagatttctataaccacatgagtacaatgtagagaattcaaatgttttgtaaccacgtgagctttgtacgctatttgcaccacagttctccctgtatgttgttggctcttttacaattaagaataatgcatgttgaagtaag

SEQ ID NO: 5376 - DNA, 1257 bp, Oryza sativa
  ref <308>: DATABASE ACCESSION NUMBER: AK062560
  ref <309>: DATABASE ENTRY DATE: 2001-12-06
agtgctgttattttgaaggtttcggaaccggaattcggaattgcagtagcagtggatgcctttataaatcaagttcttgtccttggcttcaaatactcgatgtgtttcttggctaatcctaatccctagctgcttgtgtgttgcgtgtgcaatttctgacccttttgtggtggtgtatatcaacagagaaatctctagctttttcagcggcgaagcgaatccatggccgagcacctcgcttccatctttggcacggagaaggaccgcgtgaactgccccttctacttcaagatcggcgcgtgccgccatggcgaccgatgctcccgcctgcacaacaagccgtcggtctcgccgacgctgctgctctccaacatgtacctgcgtccggacatgatcacccctggaattgatgctcagggcaaccccatcgaccctgagaagatccaggccgacttcgaggatttctacgaggacatctttgaggaactcagcaagtacggcgagatcgagagcctccacgtgtgtgacaacttcgccgaccacatgatcggcaatgtgtatgttcaattcagggaggaggatcaggccgccagagcgctgcaggcgctgacggggcggtactactccggccgtcctatcattgtcgagttctcgccggtgtccgatttccgggaggccacctgccggcaatatgaagagaacagctgcaaccgtggtgggtactgcaacttcatgcacgtcaaggagatcggcagagacctgaggaagaggttgtttgggcacctgcataggtcccggagaagccatagccatggccggagccgcagcccgagcccgtaccattaccggagggactatgatcggaggagctcatcgcggtccagggaccacgacgattactaccgtggaggtagccacgattactaccgtggaggtagccggaggagcagcgagaggcaccgcagcagctacgacagcgatggcagcaggcggcggcacaggtccaggactaggagtcctgtcagggatggtagcgaggagaggagagctcaaattgagcagtggaaccgtgaaagggaggctgcacaagtgtgatctctggattagttgctgtttgcaatggcccatgtttctcatcttgtactggtagccctagattaaattagcatcatatcttatcttaatgatctgagcttggatgtactcgagattttccttactgaacttgaattttctgtcagatgcatgtgttaactg

SEQ ID NO: 5377 - DNA, 1565 bp, Oryza sativa
  ref <308>: DATABASE ACCESSION NUMBER: AK062561
  ref <309>: DATABASE ENTRY DATE: 2001-12-06
cttttctactagggtctcttctaccagcgattcttcccctcccaccgtccaagcagggccggcgagatgtcctcccccgacgaggacccgccgacggagcccgagcggtggagggatctggacatgctcccctcccgccccggcaacctcgtccacgccgacttcaaccccagccccgggctgcgggactcgctggggagcctcgtggaggtgctggtggtgggcgcgggcgggctggggtgcgagctcctcaaggacctggcgctctccggattcaagaacatccacgtcatcgacatggacaccatcgacgtctccaacctcaaccgccagttcctcttcagggttcaagatgttgggaagtccaaggctgaagttgctgcaaagagggttatggagcgagttagtggagtgaacattgttccacatttctgtaggattgaagataaagagatagagttctacagtcaattctcgataattgttcttggtctagattcaattgaagctcgaagctatatcaattccgtggcgtgtggtttcttagagtatgactcagatgacaagccaatccctgagacgcttaaacctatggtcgatggtgggactgaaggtttcaaaggtcatgctagagtcatcatacctgggacaacaccttgttttgaatgcaacatatggcttttccctccccaggtcaaatttcccttatgtacacttgctgagactccgagaactgcagctcattgcattgaatatgctcatttgatcaaatggaatgaggttcatcctgggaaaccttttgatgctgatgatgcagaacatatgcagtggatttactcagaggctttaaagagagcagaactttttggtatttctggagttacatattcgtttacccagggtgttgtcaagaatatcatcccagccattgcttcaacaaatgcaattgtttctgctgcatgtgcgttggaagctcttaagcttatctctgggtgcagcaaaactgtgtcgaattatctcacgtataacggccttgatggaacacacattaatgtaagcgaatttgcaagagagaaagactgccttgtatgtggacctggtacccttattgaacttgggacatcgactaccctctcagagttcatcaagatgcttgaagagcaccccaagctgctaatgtcgagggctagcgtaacacacgaaggcgataacctctacatgcaggcacctgaagtcctagagcagatgacgcgaccaaacctgggtgtcccaatgtttgagctactcaaaggagctgcacgcacgactgtgcatgtaactggaatggcagaaaacaacgggaagaaagtatcctctctgaggaagctgcgtgttactttcaagggcgtcgaggaatcttcgaaaatggatgagagttcttgatactagtttatagctatggctttcaagaactgagaattaaccaattgtaccggggggaccgaagtgcttagagataaaatgcacaccacattcaaaactgtttatttgtttaaatgaaattggctaaaaaaagagaaaatgac

SEQ ID NO: 5378 - DNA, 1672 bp, Oryza sativa
  ref <308>: DATABASE ACCESSION NUMBER: AK062562
  ref <309>: DATABASE ENTRY DATE: 2001-12-06
atgctgcgcacaggcacaacctttaggcagccacacgctggtctcctcgaactcgaaccctagccttttgctgctccctccggcctccacacgcgcgagatcccttcccctctcctcccctcccggcgagatgtcgtcgtcggtcggcggcggcggcgggcagcagttccggtacacgcagacgccgtccaaggtgctgcacctgcggaacctgccgtgggagtgcgcggaggaggagctcgtcgagctctgcaaccccttcggccgcatcgtcaacaccaagtgcggcgtcggcgccaaccgcaaccaggccttcgtcgagttcactgacattaatcaagctatttcgatggtttcttactttgcatcatcttcggaaccagcgcaaatccgaggcaaaactgtttacattcagtattcaaacagacaagaaatagttaacaacaagagccctggagagactgctggaaatgtgttgctagttactatagaaggtgttcaagcaaacgatgtcaccatcgatgtgatccatctggttttctcagcttttggatttgttcacaaaatagccacttttgagaaggctgcaggttttcaggcactgattcaatacacagatgcagccacagcttctgcagcaagagaagccttagatggaagaagcatcccaaggtacttgcttccagagcatgtaacatcttgttgtttgcgtatttcgttctctgcgcataaggatctgaatatcaagttccagtcacatcgcagcagggattacaccaacccttaccttccggttaattcatctgcaatagatacgttacagcctgctgttggtgccgatggaaggaaagtggaagctgaaggcaatgttcttctcgcatcaattgaaaatatgcaatatgcagtcacggtggatgttctccatactgtgttctctgcatttggtacagtccagaaaatagctatttttgagaagaacggtggaacacaagctttgattcagtaccctgatgtaactacagcttcagttgcgaaggaagcattggaagggcattgcatctacgatggtggctactgtaagctccacctgtcatattctcgtcatactgatctcaatgtaaaggcacacagtgacaagagcagggattacacaatccctcaaggtgcgatgcaagcagtaccacaaccgcctggtgtaccaacaacatctgctgggtggcaaggtaatccacaagccggtggtgcatatgcaccacctggagctgctgctccaaaccacggcacaacagggcaagtgccaaattggaatcccgggaactctgggtatgctccagctccaggagcatatccaggtcaaatgtactcgtcaccaatgcagtatggcgcatcagggggcttctctgctcctgctgccccaccacaagagttgcatacttcgcagcagatgccgccgcctcaatatggaaatcagcctggaccagcaggtgcaccaggaaccgggcaaccacatccatattatcgctaaatttagattcctattcacaactggtactatgccctttctaattagtaactttgtgtacctttgcaatagggcaaaaccagttccttttccctgtctttcttctcatggaaccttttttataaataaactcttcatccagttgttctc

SEQ ID NO: 5379 - DNA, 837 bp, Oryza sativa
  ref <308>: DATABASE ACCESSION NUMBER: AK062563
  ref <309>: DATABASE ENTRY DATE: 2001-12-06
atcacagcatccgcgtgatcgaccagtcggtcgttttctcggctgtggttgcacgcatggcgaccttcactggacgtaccagtctcctggccacgctcgtcgtcgtcgtctccgcggtggtcatggcctgctccgtcgacgtctgccatggcgcccgcgagggagcattttcccgtcctgatccagcgccagctgatcaccgtcccaaagacgacgacgtctacgttcccggtggcggtggtgagggcggctacgggcctcggggaccctgctacgatcccctgatccccggccacggcggtggcctaatacccatcaggcctgatctccccgcccccggctatggacgcggacgctatccctgcttccgacctctcccctaccatcccacgccgccgctgccgccaccgcagaatggggacaccccgccgccgtgatcgagcatggccggccgccgcgacgacgacctcacgcgacccaatgcaccctataagctacccctccatcccaaaaagagttcaattgtaactatgaatctgaacacacatgtgtcgaggttcgtagttagaaattggctttgtatgggacggaatagtatacgcgtatacgtatgtatgtatctatatatgtcgagggcacgtatgtacgtacgtacgtatatacgttgatctctcgcaggtactagaacgtatacttgttactagctatatggatcatatataccgttcttccgtcttccatgtgctagtgttcattagcaggaataaaacggataggtgggtgcgtgagtgtgtgtgactggtttcaaacaaataaagtgccgctgtgttaattgtc

SEQ ID NO: 5380 - DNA, 801 bp, Oryza sativa
  ref <308>: DATABASE ACCESSION NUMBER: AK104930
  ref <309>: DATABASE ENTRY DATE: 2002-08-28
gcagctcacacaccgaaacaacacacatcgccactagctccctcgatccgattcggatcggatccatggctaacctcgccgcctccctcctcttcctcctcgccgtcgcgtcgtccgccaccgtgccagcgcatgggcgccgcgacctcctcccgactcgcatcaagctggtgaggggagccgacgccggcgccggcgccgtggccggcggggacaagatggagtgcgtgtacacggtgtacatccggacggggtcgatctggaaggccgggacggacgcgaacatcacgctggagcttgccggcgcggacggcaacggggtggggatcacggacctgccgtcgtggggcggcctgatgggggagggccactcctacttcgagcgcggcaacctcgacatcttcagcggccgcggcccgtgcatggccgcgccgccgtgctggatgcgggtggcgtccgacggcaccggcccgcaccacggatggtactgcaactacgtcgaggtcaccgtcacgggcgcgcacaaggggtgcgcgcagcagctgttcaccgtcgagcagtggctggccaccgacgccgcgccctacaagctcgaggccatccgcgacaaatgctccgccgcaggagcgggcgccgccgcggcgtgagcgagtgacgcggccacgccgtgggaaataagctcgtacgttatctgtggtgagtggcatctgtagactgtgggggggtgttcatgttttgatttgtaaagatggtaatccgcgtgcgttatcatgtacggtggatgctacagactatccgact

SEQ ID NO: 5381 - DNA, 1800 bp, Oryza sativa
  ref <308>: DATABASE ACCESSION NUMBER: AK062564
  ref <309>: DATABASE ENTRY DATE: 2001-12-06
ctctcgagtaagtgatggatttgtaaaagatatatcttccctcttcactgtcgggcaagaggtgtcagtgagattagtggaagcaaataaagagacagggcgcatctcattgacaatgcgaacaggtggtgattatgtcaagcctaaaacagaaacacctaaggctgcaagtggcgggaggaataccactgcaaccacgtccagaggctcgccaaggcaaacgagggaaagagatgaagccaagagcatgggcgaaacaaactatgtgcaaggacaatttctggatggcgttgtgaaaaattcaacaagagcagggtcatttgtgaccctacctgatggaagcgaaggattccttcccagagaagaggaggcagtggcattgttcacccttatcggacattctgcactggaagttggtcaacaggtaagggtgaaagtattgaacgtagtacgaggccaggtcacgttgacaatgaaggagggagaagatgatgaagaggatctggcttcattaaacacacagctgaagcagggttggtccagagggaccaatgcatttgagctagctttccgtaggaataaggaaatctctgcatttttggatcagagggaaaagataatagttccagatgtacaagaagctgctgttgcatcagtaggtactgaacttgatgcagaagtaggaattgagcaaagtccaggcaaggaacctgagacaggcaatgctgaatcagttgcaatcgatagttctataacggaggtcaaggagactgatagtatagctgcagtggagaaggatagcgaaattagcaagactgaatcagttgagactgctagttcagttgtaatttctgaagatgatagcacagttgatggcaaactcgttgaaccaactgcttcagtttctgcaactgaaactgagattaaagaagatagctctgagggatctgtcaccactgagcctacagaagctgcttcaacagaatttgtcaccgcagtcgttgaggaaagcgctccgactgctagttcagttgaaacttctgaagatgatagcacagttgatgacaaactcgttgagcctactgcttcagtttctgcaactgaagctgagagcaaagaagatagctctgggggatctgttgcttcaacagaatctgtcaccgcagtcgttgaggaaagcgctcctgtgtcatcagtagcaattgaagttcctgctcctgaagcatcagaggcctccgctcaggagataattgaggattctactactgtggaaggtgccgccgatgatcaaactgtagaatctgatagtccacctccagaaggtgttgagctgtcctcgaatggggctccagacagctctattgctgaggataagcctgatgaaccagaagaatcgttgatagtagaagaggttccagtaactgcaagtagtgagtctgaggataaagaacctgctgcggtacctgaagaagtagcagcctcaagtgagaaaactgcagatgttgctgttgcaggagctgaagcaagcacggccacaggtcagcagtaatttcgtcaaccagatcttacgggcctgacgtgtagtaatttcatgagccatattctgtctgcaaaaggcttttcgagcaactctacctaactaggaacagaatgttaggattagttgcatgtaaaacattcaagtgactgctttttccagttgtttacattttttttcttgtattaaatttcttcattaatgttctgtggtttaatatgatggtcaaaggatcaatcgatgccagtgattggtttcttgct

SEQ ID NO: 5382 - DNA, 2083 bp, Oryza sativa
  ref <308>: DATABASE ACCESSION NUMBER: AK062565
  ref <309>: DATABASE ENTRY DATE: 2001-12-06
aatgtgcagattcggcatagcgcgctggagcttctgtgctttttagttgaggatgaagaaggaaaggatatcattggaaaaactaaggccattgcccggacaattaagctcttgtcaactaatggcaccgatgaaaggcatgcagccatctctttcttgctggagctttcaaagtcacagctattgttggaggatattgggtcaactgctggaagtatcctgatcctcaccacaatgaggataaatgattctgatgatccaattgctgctcagaaagctggagaggtcctaaagaacctagagaaatgttcaaagaacatcaagtacatggctgaaagtggctatctagaaccccttcagagtcatcttgttgaaggttcagaagagatgcaaatggagatggtcggctacctagccgagctaatccaagagcaggagctcaccattgacatcaacggaagcacgtcgggggtcctcatcaagatggtgcacagctgcaacaccgtggcgcgtaaggccgcgctcgacgtccttgtccagctttcctctcaccgccccaacagcaagacgctcgtcgaggcaggcgtcgtcccggtcatggtggaggagctcttcatccgaaaggtagacgacgagccgctcagctacaaggccatggccgccgccgtcctcgccaacgtcgtcgagtccggcattgatccggacaacaccgtggtgaacaaggaaggccacgtcctcacgtccaagtactccatctacaacttcgtccacatgctcaagtgcttcatgcccgacgagctcaacctcagcatcatccgtgtcctgctcgcgctcaccgcgcacgccaaggcgctcgccgccgtggtctcggtcgtcagggagaaccaccggggccactccatcgtggagctcatgagctcctggacggaggcgctcggcgtcgcctcgacgaggctgctcatcaccctgtccgcgcacatggggcacaccatcgccgagaggctctgcaagacgcagggccagccgaggaggctggtcaggagcatcttccgcgccggccgcgccgccatcaccgagcggcacgccgccgcggtgacgctcctgtcgaggctaccgtaccggaacgtctcgctcaacctggccctcgtgcaggagggcgccgtgccggcgatactgcgcgggatcgaggagatggggagcggcgcggcgaggatgacgacgagcaggcacgccgcgccgtacatggagggcctcgtgggcacgctcgtgcggctcaccgcgacgctgtacaacccggacgtgctcaaggcggccatggaccacgacttcgcctcggtgctcaccgccctcctcgccggagcagccggtagcggcgaggtgcaacggctcgccgccgtggggctcgagaacctcagctaccattccatcaagctgtcccggcctccgccgccgccggaggacgagccgcggccaaagaagatgaccatactcaagcgcctgaaagacgcaagggtgcataaccatagcagcagcaagaacccaccgctgaacgtctgcccggtgcaccgtggcgtgtgcacgccggcgacgacattctgcctcctcgaggccggcgccgtcgagggcctcctcgcctgcctggagaacgacgacgcccgtgtcgtggacgcggcgctgggagcgctgtgcacgctcgtcgacgacagggtggacgtcgagaaggccgtggtcgccctcgccggacagggcgcggcgaggcgcgtgctcgcggcgctgaggcagcacagggggaacagcctgtggcacaggtgtttctccgtggtggagaagctgctggtgcacggggacgacgtgtgcgtgagggaggtgaccggcgacaggatgctgcccacggcgctggtgagcgcattccaccgcggcgacgcgaacgccaagcaggcggccgagagcatcctcaggaggctgcacaagatgcctgactactctgcaacctacatgtccgtggaattctagtgctttcatttcatcgagtaaataaatatataccaccggtaaatagcagcagatatttgctgccgtgcat

SEQ ID NO: 5383 - DNA, 1519 bp, Oryza sativa
  ref <308>: DATABASE ACCESSION NUMBER: AK104931
  ref <309>: DATABASE ENTRY DATE: 2002-08-28
ccttctctctccgctggggttctcgccgccgccgccgccgccgacgatctcgtctcgcaccgcctctctctcggtatctgagatttggatcgggcgcgaggccggcggctccagtcggcatggcgcttgtgttgcattgcggaagtggcaacaaaaatgcctttaaggcacttattgctgcagagtacactggagtcaaggtcgagctgaccaagaattttgagatgggtgtctcaaacaagacccctgagtttctcaagatgaacccccttgggaagattcctgttctggagactcctgaaggtgctgtttttgagagcaatgctatcgcgcgctatgttgctcgcttgaaggacaacagctctctttgtggttcttctcttatcgactattctcacattgaacaatggatggacttctcagcaacagaggttgatgccaatattggaaggtggttgtacccaaggcttggttttggcccttatgttcctgtgcttgaggaatttgctattacttcattgaagaggtcattgggtgctctgaacacacaccttgcttcaaacacataccttgttgggcattcagttactctagctgatattgtgatgacatgcaacctatttatgggtttgttcggatcttgatcaagagtttcacctccgagttccctcatgttgagcggtacttctggacaatggttaaccagcccaacttcaagaaggtcattggtgatttcaagcaagcagagtctgtgcctcccgttcagaaaaaggctgctccccctaaggaatcaaaagcaaaggaggccaagaaggaggctccgaaggaggcccctaaaccaaaggttgaggcttcagaggaagaggaggcaccaaagccaaagccaaagaatcctcttgatctactgccaccaagcaagatgattcttgatgagtggaagaggctatactcaaacacaaaaaccaacttccgtgaaattgccattaaaggtttctgggacatgtatgacccagagggttactctctgtggttctgtgactacaagtacaacgatgagaacaccgtatcgtttgtgacgatgaacaaggtcggtgggttcctgcagcggatggatctgtgccgcaagtatgcttttggcaagatgctggtcattggctccacaccgcccttcaaggtcaagggactctggctcttccgtggtcaggacatccccaagttcgtcatggatgaggtctacgacatggagctctatgagtggaccaaggttgacctctctgatgaggcccagaaagagcgtgtcaatgccatgattgaggaccaggagccgttcgagggcgaggacttgctggatgcaaaatgcttcaagtgagcagcacaatgtttagaagcaaaatcatcagttgcaaaagtactatttaggacttgaattcggagttaaaacagttgcctttttggtggagttttgttacttgctgtttatttgacctggtataccttttgaactggttgatttttgtgc

SEQ ID NO: 5384 - DNA, 1777 bp, Oryza sativa
  ref <308>: DATABASE ACCESSION NUMBER: AK062566
  ref <309>: DATABASE ENTRY DATE: 2001-12-06
gcttaaaagattccccacaccacctcctctcacctcgcgccacgagcgttgatcggtgcttttcattgttcttccttgctgcagaagagacagagagagggagaggcagaggacgaggatgatggcggtgctcgcgcggctgggcgtcattgtggtgttgtgggcggtggtggcggaggggattcttgaccccgtcgacttcctggcgctgcaggcggtgcggcggtcgctcgacgatatgcctggctcgtcgttcttcgaagcgtgggacttcacggccgacccgtgcgggttccccggggtgttctgcgacggcaacaaggtgtcggcgctggcgctcggcgacccgagggcggggtcgccggggctgtccgggcggctcgaccaggcgctggggcggctgtccgcgctcaccgagctgtcgctcgtgcccgggcgcgtcgaaggcgagctcccggagtcgctcagctcgtgccggaacctccgattcttggccgtcagcaagaacctcatctccggccagataccggacggcctcggcgggctgtccaacctccggacgctcgacgtcagcttcaaccagatctccggcaccatcccggcgtcgatcgccgcgctgccgtcgatcaccaacctcatcctctgccacaaccatctcaccggcggcatcccgtcgttcccggactcgtcgccgctcatccggctcgacctcaagcacaacgacctctccggcggcgtgccgaacctgccgagcacgctccagtacctctcgctctcggcgaaccggctcaccggcaccgtcgactccgtgctcccccggctcactcggctcaactacctcgacctcagcatgaaccagctcgacggcccaatcccggcgtccgtcttcacattgccgctgtccgtgctccagctgcagcgcaacttcttctccggcctcctccagccggcgaacgacgtgacgatccaggtggtggacctgagctacaaccgcttctggggccccgtgtcgccgctcctcgccggcgtggggcagctgtacctgaataacaaccggttcaccggcgtggtgccggcgcggctggtgcaggagctggtcggctccggcgggctccaggtgctgtacctgcagcacaacttcctcaccggcatcgagatttcgccggcgtcgtcgctcccctccagcgtctcgctctgcctcatgtacaactgcatggtgccgccggtgtacgcgccgtgcccgctcaaggccggctcgacgaacacccggccggccgaccagtgcccggagtggaggggctaatcaaagctggcaacacaacgccgacgccattgccggatcgcctcggatcgtccaagctcaagaaaaccggaaaagaatggaggagattgcaaatggcggtctccgattctttgattaatttgtccagttactagcgttccaatgtggattactattctttttggttggggggagatggatggagatagtcacagacaagaagtaagttccttaataatcttgggtttataggcgtaatttctttctcctttttttgtgtttaggtggtgtatgttcttttgtgtcccctgctgtatagttgcgtgagtagtaaaacattggctcttgatgttatgtgaggtggcgacgatcgattgatgtatctgatgatgatcatgatgatggtggtgttagaaatctgtgatgttatttatatatcgcattgccattgggcaagcatagtatcacaagcattcgctgtgcttcattttagtt

SEQ ID NO: 5385 - DNA, 1490 bp, Oryza sativa
  ref <308>: DATABASE ACCESSION NUMBER: AK062567
  ref <309>: DATABASE ENTRY DATE: 2001-12-06
tcagttgatcaagaagatgtcaggaatcaagacaacaatgttgctctaaattcttcaacaaatggggacgttgaagccagaattggcactagcatggagaatactgatgaaccttcagtttcacagcctgatattctgacgcagggtgctgtagatgtgtcaagtctacaatacaatctgccatcagtttcagatcatgtatattcaaacacaacacaaccaagtacgatggagagctcacagggagacatacaagtgcaacatcttcctcagttttcaagtttactgcaagcaaatactctacacaacaacttgctgggatcaaatcttcccaaccttcgggactttgacttttcaccattgctatcaacacaattagctacaaaatataacccaccagtaccgactaccagcttaccagcaatctccatgcaggagacattgaagccagggggattctcgaatgcacaacctacacaaaatcttcccagcgcgagcattccgtctgggcctcctctcccacaacaattatctgtacatccgtaccctcagccaactctgccccttggacctttttccaatctggttggctatccatatttgcctcaaaactactatctaccatcagcagcctttcagcaatctttctcaagtaatggacctttccatcaatctgctgctaccactggggtgcctggtgtcagtatgaaatattcgatgccacaatacaagggcagccttcctgctacaagcccaccacagccttcatcagtggtctccggatttggaggttttggtagctcaaataatattcctggaaatttcggcttaaatcagaatgtcccctctgcacccacaactatggggtttgaagaagctttaagcacacagttcaaagataacagtcaatacattgccttgcagcagaacgacaactctgcaatgtggcttcatggagctgctggttcaagggccgtttcagcggtaccacctggcaacttctatggtttccagggccagaatcagccaggtggcttccgccaggggcagcagccctctcaatacggtggccttgggtacccaagcttctaccagtcacaggctggtttaccgcaggagcacccgcagaaccttactgagggaaccttgaacagctctcagatcactccatctcagccatcgcaccagatctggcaacacatctactgagtcctgccctcgtgggagaagcccctctacactgccaggtgatctggtgacctggcatgcgccatgaaatgagcagactagctgagctgccgtcttgcgcgcggagaagagtggacaatgctttctacagtttcgaagtatgttgctgttttttcttcttttcttcttcacttgttgcgtgtgtccggggactaatttcagctgttacgagtttactcgatagtgagttgctatgttgtaacggtaagtcctaatttcatctaacaagagctgcttcttat

SEQ ID NO: 5386 - DNA, 1145 bp, Oryza sativa
  ref <308>: DATABASE ACCESSION NUMBER: AK062568
  ref <309>: DATABASE ENTRY DATE: 2001-12-06
aaaaaaaaaaaacccctcttctaattctctcagagtcctccatagttctttctgctccttttttctcatgaccacaatgcttgcagctagctctgtagtgaacagcaaccttccttgctcatcaaggatatcctcctgctcagacttcacatctggctactcctggcgtcctatagaggctgcaaaactctgccggacacgagctgtgcgctcgctgcagataacctgtactgccacaaagcctgcaaagtcaccagctgaagaagaatggaagatcaagaggcaagtgctagtagaaaagcgggtccgtagtgttgatgtgaaggaagcactgcgtcttcagaaggaaaacaattttgcaattcttgatgtcaggccagtagcggactttaaagaggctcatccacctggtgccgttaatgtgcaaatatatagattgataaaggaatggacagcatgggatattgcaagacgggcagcatttgcattctttggcatattttctggaacagaagagaatcctgagttcatacaaagtgttgatgagaaacttggtaaagatgcaaagattattgtggcatgttcgacaggaggaacattgaaaccaacacagaactttcctgatgggaagcaatcgaggtccctgatagcagcttacttgttggtcctgaatggttacaagaatgtgttccatctggatggaggactctacacatggttcaaggaaggcctaccggctgttgaaggagaagaataagcaattaggacatattacttgtaattagtgcatcagtattcatgaacatggaggtgtgatgagttgtaacgaggcatcttctcggataaatagtgcactagtttgatcctttcttcttcctttcccaaaaggatatgcctccttggacctcctgcctatatgaagatgtgttagatttctcatgacctgctgctgtcgacttgtcggtgtatgatacttgagcatgcccatttgacaaaatagataagtatgttagaacaagcatcaattctctcggatcttggacttggaatgcactatgaactttacaacatgatgttgtgatccagccatcagtgatgtcaagcagtaaaacttagtcaatgccagatacttatttgttggaacc

SEQ ID NO: 5387 - DNA, 1908 bp, Oryza sativa
  ref <308>: DATABASE ACCESSION NUMBER: AK062569
  ref <309>: DATABASE ENTRY DATE: 2001-12-06
aaattcaacgaacaacgactactcttgactccactcaggagcagagcatggcagtcaatcacaaactcagcgccctcctcgtggccacggcgttgccgctgctccttctctccactgcagatgcgggcgagattggggtgtgctacgggagggatgcgagcaatctgatcgatccgccggaagtggtgaagcttctgaacgcgaacagcatcacgatggtgaggatctatgacactgacccgacggtgctcaacgctctcgctaacacaggcatcaaggtgatggtgatgctacctaacaaggatcttgcttccgctggtgcggatgtggggagcgcaaccaactgggtgaagaacaacgtggtgccgtacctcaaccagggcacgctgatcaatggcgtggccgtgggaaacgaggtgttcaaacaacaacctgaactgactggtatgcttgtctcggccatgcaaaatgtgcaaatggcgttagcgaacctgaacctggcggatggcataaaggtgtcgacgccgattgcattcgatgcactcgatgtgtcgttcccgccatcagatgggaggttcaaggacagcatcgcgcagtcggtgatgaagcccatgatcgacttcttggtacggactggctcatacctcttggtaaatctttaccctatgtacgctgcggcggatccgtcgacccacatctctatcgagtacgcaacgttccgtcctaatagtggtgtgctcgacgaaaaaaccggcatcatgtatttcagcctctttgatgctgagctcgatgctgtttacgccgcaataagtaaagtttccggtggtagcttgagggcatcattggcccaaggagatcaaatgttagttcaagttgcagaaacagggcattcctctggaaatacatttggtgggccagtggtcgttgaagctgacgcggatttgaatgcaatagctacaatacccaatgccaaagcgtacaacaatggtcttatcagacgtgtgctctccggatccccaggtaagcacgacgtctctgcctacatcttctctcttttcaacgagaacttgaagcctgggccagccacggagggacactttggcctattctacccaaacggccagcaggtgtatgaggtcaactttcaaggtggtagaagtccctgtccaacgaatgcaagctggtgtgtggcgaacccgaatgttgataatgcggcattacagagagcgttggactgggcgtgcaataatggcgcagactgcagcgctatccagctgggcaaagcatgctatgagccgaacaccttagttgcacatgcatcttacgcattcaatgattactaccaacgcaagggccaggctagcggcacgtgcaacttcaatggtgtcgctttcatcgtctacaagccatcaccaagcatctgcgatccgaacccaagttggtgcgttgcgaaagatagtgtcggggaagcacaactacagaatgcactagactacgcgtgcggtagttgtgccgactgcagcgccatacagcgcggtgcacagtgctttaatccggacaccaaagtggctcacgcaacctatgcattcaacgactattaccagacagccggtcgggccagtggctcgtgtgactttgccggtgccgcaaccattgtcacacaacaaccaaagattggaaactgcctactcccaccaaacaacgcttgatcagaacaaactgtctaggaagaccaaaagctagcctagctagctaccaaaggcagtgaggatgggattaaagaataattccatattcttctacagagaaaataaggattaaactttttgtatttcccgttggaaattttaaataaataaatgtactgtttgctcctgttgaatgaaattccgcagttacttgtttcag

SEQ ID NO: 5388 - DNA, 1777 bp, Oryza sativa
  ref <308>: DATABASE ACCESSION NUMBER: AK062570
  ref <309>: DATABASE ENTRY DATE: 2001-12-06
gggcgtacctctcccacgaggtgctcaacggcaagcgcccggcgccggaggatgcggaagccgaggacatggacgaggttgacttcggcggcgggaagcgcagcaagccgccatcgccgcagccgcacacgccggacatatctgagggccatggctccagtcgccatgttgccgcctctggcggcggagaggagcatggcaacgggagcagcctcattggtgcgattggccgtgaccttaccatcaattgcctcctccggctgtcacggtcagactatggctcggtggcctccctgaacaaggacttccggtcgctcgtgcgcaacggggagatctaccgcctgcgtcgccagagtggggtggcagagcactgggtctacttctcctgtaacgtcctcgagtgggacgcttacgacccatatcgcgagcgctggatccaagtgcccaagatgccaccagatgaatgcttcatgtgttctgacaaggaatcacttgctgtgggcactgagcttcttgtgtttgcgatggcacacattgtgttcagatatagcattctaaccaattcatggacacgggctgatccgatgatctcaccacggtgcttgtttgggtcaacaagtgttggggcaaaggcatatgttgctgggggcactgattcttctggcaggatattgagctctgcagaaatgtacgactcggagacacattcttggacaccccttcccagcatgaatcgggcaaggaagatgtgctccggggtgttcatggatggcaagttctatgtggttggtggtgttgccagcaacaacaaggtgttgacatgcggtgaggaatatgacctgaagaggcgatcttggagggtgatcgaagacatgtctgagggtctcaacggagtgactggtgctcctccacttattgctgttgttaacaatgagctttatgctgctgattatagtgaaaaggatgtgaagaagtatgacaagcaaaacaataaatggatcactcttggtaagttgcctgaacggtctgtgtcaatgaatgggtggggccttgctttccgagcatgtggtgatcggttgattgtcatcggcggcccaaggacttctattggtggtacgattgagcttaattcatggaccccggatgagcggccgcccgtgtggaatttgattgccaggcggccatctgggaacttcgtgtataattgtgctgtgatgggctgttgaatccactgaataaagattcaatatggtggattatttatgaaggatggtatgcacaaaggcagcctgttcaattgcttcagtcctgatgctccgtagcgatttctgccttctgtccagtttcagattcaactgggcatctgctgagtggcagcagtcatgtaaccccctgagttcttctaatacttctgttttcctcgctaatccatttcaacatttgcatttggatcaactgctcgtgatttgaaagatacgagactatgcaaaacagtgttatattaataatctaggaacagctttcagaaggcttttcactattgatgaacaacctgttaagcaatactcgattcatatgtggctgcaacaaagatattcatcaattatgaacaccatgccttatgtttgctggtataattttcttttatcaactttacttgcttcatgatgtgcttgtctttcatgaagttttttactagcaacaacgatatgtttcatcctagttgtgacttttgtttgtataaacatgtctgggctgagagctgaccttgcttggt

SEQ ID NO: 5389 - DNA, 1289 bp, Oryza sativa
  ref <308>: DATABASE ACCESSION NUMBER: AK062571
  ref <309>: DATABASE ENTRY DATE: 2001-12-06
aaacaatagaaaatgcaagggaatgggtgaacacaaacttcattgctgagggtggcactgacatcatgcatccattgagtgaggcaatagctttgctatcaaactctcacaatgcacttccacaaatctttcttgtgactgatggatctgttgaggatgaacggaatatttgccgcactgtgaaagaacagctcgcaactagaggatctaagtcccccaggatttctacttttggactaggctcttattgcaaccactatttcctgaggatgttggcatccattggcaaggggcattatgatgctgcatttgatacaggatcaattgagggtcggatggttcagtggtttcagaaagcttcaagcacaatagtgataaatatttccattgatgccactaagtacattcgagaatttgaagtggattctgaatatattcaagatatttctgcaaaatgcccactatgtgtgtctgggagataccaaggcaagcttccagagacacttactgccaagggttacttggctgacatgagcgaaatatcgattgaattgagggtccaacatgtaaaggatatttctcttgacaaagtgttagcaaagcagcagatggatcttctcacagcaaaagcatggttttatgaaaacaatcaactagagatgaaggtggtaaaattaagtatacaaaacagcattccttcggagtacacacgcactatcctacttcaaaacttcgtggaaaaaatagaacagggaaagcagaagccaaagaaaaacagcacccagaatgagcaatcagcgacgtcgctcaacggactgacgctcgggttcggtgacacagctgcaacgagggagaacctttccgctgggttcggggacacgaaaccaccagagaggttcgagatgttcgacaaggccgtcggctgctgcagccgcctcacggactgctgctgctgcatgtgcttcatcaacacctgcagcaagatgaacgaccggtgcgccatcgtcatggtgcagctgtgcggcgcgctctcgtgcctcgcatgcttcgagtgctgctctctgtgctgcggcgggtctgactgaggtaggaccaaatgctgaaatgtgcatagaattctactgtataggatgggcaccacatatatttgtatacaatagttcaagaaagacccttgtgtggatgttttgatatcggccgtctgtaaaaacctataagatggaaatcatctgagcactgtccatttgatttcaagagttgaaagagtacataaaagaactatgtacagt

SEQ ID NO: 5390 - DNA, 1558 bp, Oryza sativa
  ref <308>: DATABASE ACCESSION NUMBER: AK062572
  ref <309>: DATABASE ENTRY DATE: 2001-12-06
ctctcgatactcgattcgatagtgacaagaggaaaagcgcggctctctccgtctccggcggcggtgacgcgaggaggaggaggaggaggagcccgcgccgccgggccaagccatcatggacgaggagcagctgcgcgcgctgctccgcgacctggacgcgctcaagcagcgccccgaccccgccgccatcgatcgggatatgagctcggaggtggtggacagcaatccctacagcaggctcatggcgctgcagcgtatggggatcgtggacaactacgagcgcatccgtgattactccatcgccatcgttggtataggtggcgttggtagtgttgctgctgagatgctcactagatgtggcattggtcgccttttgttgtatgactatgatacagttgaactggccaacatgaataggttgttctttcgcccagaccaggttggaatgaccaagacagatgctgctgtgcagacactatctggaataaatcctgatgttacgttggagagctattcattaaatattactacagtgaaaggatttgaaacatttttaggaagtctcaaagccagaagctctgatgggcgtaacactggagttgatcttgttttgagctgcgttgataactatgaagctcgtatggttgtaaaccaggcatgcaatgaacttggccagacatggatggagtctggtgtctcagaagatgctgtttctggtcatatacagttgctggttcctggtgaaacagcatgttttgcatgtgctcctccattggttgttgcatccggagtggatgagcgcacattaaagcgggaaggtgtttgtgctgcctctttaccaactacaatgggtgttgttgctggtctccttgtccagaatgctctgaaatatttgttgaagtttggacaagtttccccttacttgggatataattcacttaaggattatttcccaacaatggaaatgaaaccaaatccacagtgttcaaatccagcatgtgttcagagacagaaagaatatatgcagtcaaaacctgctagagatgcagcagcaaaagctaagatggaagctgaagcatcagcagcagatgaatgtccggtccatctagataatgattggaatattagtgttgtcgatgacagtgacacagtgacaccaagcattctaagcactggagctgatagcctcccagaaggccttgtccgcgaactcccaactgcagattcctaccaagaaccagttgctccagttacatccggggctattgatgacgaccttgaggagcttcagcgccagcttgatgccctaaactcgtcttaatgttttgtaaaagctggaccgtcatcattaacttggtttctaccaaagctcaacactgggttagaaaaccaacctgggtactgatgcttgtgtttactccgacagagttacccatttcagtggatatagcttctgttcataccaaagaggttgaagggttttaagttacttacctgtactgttttgagcttttgtgtacaattttgccttgagttaatgtagattttatgaggctgg

SEQ ID NO: 5391 - DNA, 711 bp, Oryza sativa
  ref <308>: DATABASE ACCESSION NUMBER: AK062573
  ref <309>: DATABASE ENTRY DATE: 2001-12-06
gcaaacaaccaaccaaccacttcctcctcctcctcctccgccgccgcgatccccaatccgatctcgaaaggtagtagtgaagaaagcaaggcagggcgcgcgtgatggcgaggagctcgttcaagctggagcacccactcgaaaggaggcaggctgaggccaaccgcatcagggagaagtatcccgatagaattcctgtcattgttgagaaggctgagaggagtgacattcctgacattgacaaaaagaagtaccttgttcccgctgacctcacggttggacagtttgtgtatgttgttcggaagcggatcaagctcagtgctgagaaggcaatcttcatcttcgtcaagaacacgcttccaccaacagctgccctgatgtccgctatctatgaggagaacaaggatgaggacggcttcctctacatgacctacagcggggagaacaccttcggcctgtttgtctgagtggcagcaatcatcaattcgacaatgcctcgtgtaaataggcatctaaaaaaaacctctgtatataatctggtctagcagcatgttcctaatcccttagcatcttattgtcaaaaacctaccctgtaatcatcaaagcacacggtgctcttagtacattaacaactgtctggtctgttctttctgttcaacaagttgcataattgcattgcttcagtgttctctctgaagctgctattctaac

SEQ ID NO: 5392 - DNA, 1582 bp, Oryza sativa
  ref <308>: DATABASE ACCESSION NUMBER: AK062574
  ref <309>: DATABASE ENTRY DATE: 2001-12-06
gtttccacccgaatcattccgtcccaagtcccaccgtcccctcggcttatcccccctcctccccggcctccctccgccaaggccgccggagcccgtcgccggaggcagctgcagggaaggacgccgtcgccggacacatgcggggttgggcttcccagatagcttgtctcttgctgcactaagctcttccaatttttaaaaatggcagctcccaagcccattgctcggcttatttcccatgtcattcttgatttagatggtaccctcttaaacacagactgtgttgtaagtcaagtgctgaaaccatttctagtcaaaaatgggaaaaagtgggacagcaagaaagctcataaattagttggaaagacaccttatgaggcagcagctgttgttttagaagattatggactcccttactcaacagaagaatttctctcaatgcttactccaatgttcaatgagcaatggtgcaacataaaagctcttcctggagctaatcggttgataaaacatttgaagagtaatggagtaccagctgctttggcttccaactcaccaagatcaaacattgacgcaaaaatttcctgccatcaaggatggaaagagtcgttctccgcaattgttggtggtgatgaagtagagaaggggaagccatccccagatatatttttggaagctgcaaaacgaatgaatacaaatcctccaaattgcttagtaatcgaggactccttaccaggtgttgcagctggaaaagctgcaggaatgcatgtcatagctgtaccttcagtccccaaaaggactgctgaattcagttctgctgatgaggtgatcaattccctccttgacgtaaagcctgaaaaatggggattgccaccatttagtgattggatcgatgataccttaccaatagaaccatggtttattggtggacctgtgattaaaggatttggccgtggttctaaagtactaggaattccaacagccaacttacctgcagaaaacttctccgacgtactatcagagcatacatcaggggtatactttggctgggctggactttcaacgcgaggtatatttaagatggtcatgagcattggctggaacccttattttgataacacggagaagactattgaaccatggttgcttcacgattttggtgaagacttttacggagaggagctgcgccttgttattgttggttacatacgacccgaggccaactttccttcacttgagagcttgatagagaggattcacgaggatgcaaggatatcagataaggccctgaatttaccattatacgccaagtataaagactcgccgtacctaagaaattccttgaaggaggacaattctgctaacgggaaccagtcagtgatagattccaagtgattcaacgttgtgaagtgaaagacatgaagaattctctttcgcagcgttgttgatgcagaaagagcactactgttcttgtgcttgtactgctgcattatgttccatgaatacttggaacatgctcttgactacaatgagaataccagtaagggtctatgttcgtcagaaagttgagttagaagcagcc

SEQ ID NO: 5393 - DNA, 1616 bp, Oryza sativa
  ref <308>: DATABASE ACCESSION NUMBER: AK104932
  ref <309>: DATABASE ENTRY DATE: 2002-08-28
aactccaccagcagcagtcacgcacgtctctctctctcgccccgcgtcctccacatggcggcgtccaccacctgccctgctcgctccatggcgtccgtctcccgagccctccgcccgcggccgcacgccgctatcgcctccgccgccgtccgcacggctgctcgtctcgggggcggattggggatcgtttgttcgatgccaagctatggtaggaaggagaaggaagaatggggattgaccattgcgtccgcaccggcgaccactgctgctccggctctgagaagctgtcaactattgtgcaaggctgaagctagcatatccagtaatctgccagagagcattcctagtgaagcaaaccagtacgagaaaatagttgagctgcttaccactcttttccctgtctgggtcatattaggtaccattattggcatctacaagccatcgatggttacctggttggagactgatcttttcactgtgggcctaggattcctaatgctatcaatgggactaacattgaccttcgaagatttcaggagatgcatgaggaatccatggactgtgggtgtgggatttcttgcgcagtatttgatcaaacctatgctgggatttgctattgccatgaccttgaagttatctgctcctcttgcaactggtcttattttagtgtcatgttgccctggtggacaagcatcaaatgttgctacttatatatccaaaggaaatgtcgcactttcagttcttatgacaacttgttcgactattggtgctatagtgatgacaccactccttactaaactcctagctggtcaactggttcctgtcgatgctgcaggattggccatcagtacttttcaggttgttttactgccaactattgtcggagtcttggcgcatgagtattttcctaagtttactgagcgcattatatccataacaccattgattggggttctcctcaccactttgctttgtgctagtcctatcggacaagtctcagaggtgttgaaagctcaaggtggtcaacttataattcccgttgctctgctgcatgttgctgcctttgcacttgggtattggttatcaaaagtttcctcttttggggaatcaacttctaggactatctctattgaatgcgggatgcagagttctgcacttggatttttacttgcccaaaagcacttcacgaatccactcgtagctgttccatctgctgtcagtgttgtatgcatggcgcttggagggagtgctcttgcagttttttggaggaacagagggcttccagcaaatgacaaagacgatttcaaggaatgaaacaccaacaccctccagtttctagtcattacctagtgttgttttttagttcagtggagttatcacagcatttttcttgttacccatattttagcaagttgattatcagtaggacttgcctacttggtaggtctgttgtattgcactcttatcttccaaataagctgcaggtgcttctctgcaaagcactcaatttatagtccgttgccaagtgaatgcattgtaatattatgcgcggtgagtaaatagatttccaagaattgctattccaatctattgaaaggtcaataagctttgtatgt

SEQ ID NO: 5394 - DNA, 1630 bp, Oryza sativa
  ref <308>: DATABASE ACCESSION NUMBER: AK062575
  ref <309>: DATABASE ENTRY DATE: 2001-12-06
aaacgcacgcacacctctcccctcctctcctcctcccgccgccgccgccgccgccgccgcaaaaacccgaggccgagaggaggagacgggcgcgggggctgatctcgtcggcgaggcgagcgggcgatccggtgcggtgcgggccgggtggacatggcatcgggggacgtggtggggaagagcaggggggacaccgcggtcaccaccatcgtcaacctggcggaggaggccaagctcgcgcgggagggggtcaaggggcctggttaccaggtgctctccatctgcaagtctctcttcgccggtggcgtcgccggtggagtatcacgtactgctgttgctccgctcgaacgaatgaagattctgcttcaggtccaaaaccctcacagtatcaagtacaacggtacaattcaaggtcttaagtacatatggagaacagagggtctccgtggactttttaagggcaatggtaccaattgtgccagaattgttccaaattctgccgtgaagttttttagctatgagcaagcatcaagtggaattttatggctttatcggcaacaaacagggaatgaggatgctcagcttagtccactattgcgccttggagctggtgcttgtgctggtatcatagccatgtctgctacttacccgatggatatggttaggggtaggattaccgtgcagacggaaaagtctccttatcagtaccgtggtatgtttcatgcattgggttcagtataccgtgaagaaggcttccgtgctctatacagagggtggcttccatctgttatcggagtggttccgtatgttggcctcaactttgctgtgtacgagtctctgaaggactggctgcttcagacaaatccatatgatcttggcaaggacaatgagttgcatgtagttacaaggcttggatgtggagctgtggctggaaccataggccagactgttgcttaccctcttgatgtcatcaggaggagaatgcagatggttggttggaataatgcagcatctattgttactggagaaggcaaagaggcgctccagtacaatggtatgatcgatgcattcaggaaaactgttcgctatgaaggtgttggtgctttgtacaagggtcttgtgcccaattcagtgaaggtggtgccttctatcgctattgcattcgtgacatacgagtttgtgcaaaaagttctaggagtagagatgaggatatcagactgaagaaattggagttagtgctggtcattatcaactgctatttttgtagggtggtgagttctgtttttgtaggaagggcaggtagaaggatcatagcactgaggctcccattcagcataaggccctctcagcccatgttggtatatcctactactgtttccagatcctaattgttgctggacccgtgggaaaaattaataagttggctgtaaagcatgaagcatttgcctaactcataaagtctattcagtcgtgatggtgtattgagattgaaaactcatgcagtatgctgtgtgctgctaatagttgattttcatcattttcttctctttgtctaagattgtttctgctgataaatactctacttaaaccgagtaatgttggtgcgttttataccagcatttccttttcc

SEQ ID NO: 5395 - DNA, 834 bp, Oryza sativa
  ref <308>: DATABASE ACCESSION NUMBER: AK062576
  ref <309>: DATABASE ENTRY DATE: 2001-12-06
agctctctctctctctcgctccatctctctccaccacacaacggtggtggcttggtggaggcggaccggcgacagaaagggaggccgcagcagtgggaggggaggcggcggcaacgccctcccctccgctccatccagcgggaggggcggtggaggtggtccgacggcttgggttttgcagcggcaccctcccctatgccagatctggcaggaagggaggtggcggcgccgccatcccgtccgctccatccagcgggaggggatgcggcggcggcccgacaactctggcggcgtcgtcccctctgccagatctggccggaggggatgcggtggcgcctagcaactggaggggtggcggcgagagaggagtctcgcccctcctcctctacatcgggcgacggtggcttccctcggcagcgctcttcatccggcgatggcggcggcggtggagacggttcttgatgtgttcgttcttgatgtcttcttgatgaatatgatgttgatgtgctcttgattaatgatgttctagatgaatgtgatgttgatgtgttcttgatgaatgatgtccttgatgtgctcggatcagcttgattcgagccgagtcggcattatttttttgggatcattagatgtcgtttcgaaaccaacacaggaactggcacctatttaattttcacattagtgccgccttcacggtgccggttgggaaaaccgacaccaatctctttttcggtggtagtgccacgtaattggccctccccttcgtgctatcggtggattgggagtgactgcatgctctcgagttatggaaaataaaatggatgtggggatatc

SEQ ID NO: 5396 - DNA, 1326 bp, Oryza sativa
  ref <308>: DATABASE ACCESSION NUMBER: AK104933
  ref <309>: DATABASE ENTRY DATE: 2002-08-28
actagattcttaatacacaacccagctggtgaaagagaggaacttgagagttagctagcatggcggcagcattgtcgttcccgatcatcgacatgagtctgctcgacggggcagagaggcccgcggcgatggggctgctccgcgacgcatgcgagagctggggcttctttgagatcctgaaccacggcatctcgacggagctgatggacgaggtggagaagatgaccaaggaccactacaagcgtgtgcgcgagcagaggttcctcgagttcgcgagcaagacgctcaaggaaggctgcgacgacgtgaataaggcggagaagctggactgggagagcaccttcttcgtccgccacctcccggagtccaacatcgccgacatacccgacctcgacgacgactacaggcgcctcatgaagcgcttcgcggcggagctggagacgctggcggagcggctactggacctgctctgcgagaacctcggcctcgagaagggctacctcaccaaggccttccgtggccccgcgggcgcacccaccttcggcaccaaggtcagcagctacccgccgtgcccgcgccccgacctcgtcaagggcctccgcgcccacaccgacgccggcggcatcatcctgctcttccaggacgaccgcgtcggtggcctccagctgctcaaggacggcgagtgggtggacgtgccgcccatgcgccactccatcgtcgtcaacctcggcgaccagctggaggtgatcaccaacggcaggtacaagagcgtgatgcaccgggtggtggcgcagatcgacggcaacaggatgtccatcgcgtccttctacaaccctggcagcgacgccgtcatctccccggcgccggcgctggtgaaggaggaggaggccggcgagacgtatcccaagttcgtgttcgaggactacatgaagctgtacgtgcgccacaagttcgaggccaaggagccccggttcgaggcgttcaaggccatggagaacgagacccccaaccgcattgccatcgcttgatagcgtgtgtaccacagcgacccctaccgggtcggtgtcagtaaggtttagtcgtgttcgtagtgatcagtgcgtgcatggtcagctactcagctcgcgttttctacctgaataaattaagctccgtcgtcgtcgtctcgtcaccttggataattgtcagttggtgtggcgtgctgttgcacgtacggccatgtatctttgtcggctgtcctcgtgtggtacttgatagcttgtgcggcgtgctgtaccgtgtacggtttattatctactccagttctatatcgtggtgatttctgat

SEQ ID NO: 5397 - DNA, 1681 bp, Oryza sativa
  ref <308>: DATABASE ACCESSION NUMBER: AK104934
  ref <309>: DATABASE ENTRY DATE: 2002-08-28
aatcatggagcaagcagcgaaggccaccatctcactgtcgccgccgagttacgctggatgttgcatggcagcatgtccctaccgatcaacgcggcacctgcgcggaggaggcggctgctctgctcgctccatctcctccctccggcatgccccttctgctcgtgtttacgccgcagccgcagccgcagccacgccggagtccaagtcgacgaaagagaatgacctcgtcttcatcgcgggagccaccggaaaggtgggatcccgagctgtaagggagttcatcaagcttggcttccgtgtccgcgccggcgttagaagtgcacagagagcatcgtcccttgtgcagagtgttgagcaactgaaagtcgatgacgatgcaacttcgcccgcagaaaggctcgagatcgtagaatgcgacctggagaagcaggcgcagtcagacatcgtgtcggccattggcaacgcggcgattgtggtgtgctccatcggcgccagcgagaaggacatcctggatgtaacgggcccctaccgtatcgactacatggccaccaacaacctcgtgcaggctgcaactgctgcaaaggttgagcacttcatcctggttacatccctgggcacaaacaggattggcttccctgcttttcttctcaacttgttttggggggttctgtgctggaaaaggcgagctgaagaagcgctcatcggcagcggccttccttacacgatcgtccgacctggcggcatggagaggccaacggacgctttcaaggagacgcacaacctggtggtggcagttgaggacacctacgtcggtggactcgtttccaaccttcaggtggcggagctcatcgcgtgcatcgccagcaacaggagaacggcctactgcaaggtggtcgaagcgatcgcagagaccaccgcgccattgctgcccacggaggatcagctcgccaacataccttcaaagcggcaacctccgcccgaacctgaggtagttcagcagggagagacccctccaaaaccgatccagcaaagccaacgaccactctcaccctacacggcatttgtggacctgaagcctccaagctcgccatcgccgtgcccaccatcagcagcagctcctgctcctacttctacagataccgctgcggcaggttcatcgtcaacgttgaactccagcgccaccggcacccccatcagcgtggatcaaccgaagcagcagcagaggcctctttcaccgtacactagatatgaggagctgaagccacccagctcgccgtcaccgacgccgccatcagcagcttcatcggcttctgtttctgcttctcctgatacacctcctgcagcagcagcttcatcggcggcgttggactccagcgccaacggcactcccatcaccggcgatcaactgaatcagcagcagagtcctctttcaccatacacaaggtacgaggaactcaagcctccaagctcgccaaccccatctacccccaaactatagaagcaagatagttagcatataaggctatattcgttttttgccttggccaatcatcactcaagatccagttatccactactagttaattaccttcatccaggaaaagcgacttgtatttttcatgtccaaattcaaaaaaaacaaagagtagtattggaattggaagtcaacaaattaattctc

SEQ ID NO: 5398 - DNA, 1265 bp, Oryza sativa
  ref <308>: DATABASE ACCESSION NUMBER: AK062577
  ref <309>: DATABASE ENTRY DATE: 2001-12-06
gcggtcgcctcgctttctccctcgccaactcgcctaccctccccacccccgcgtcggcggcggcggcagcggcagcggcagcgacggagcctcgccggcggcaagcgtactcacccgacaaaacaatgaggaggtatagtccaccttatcgcagtccaccaaggaggggatatggtggcagaggaagaagtccccctaggaggggatatggaggacggaaggaacagggttctggcagtctcctggtccgcaacatccctttaagctgcagagcggaggatcttagagttccttttgaaaggtttggacctgttcgagatgtttacctgccaaaggattattataccggggaaccgcgagggtttgcattcgtggagtttgttgacccttatgatgcttctgaggcccaatatcatatgaatcgtcaggtggtttttggccgggagataactgttgctcttgctgctgagtcacggaaaaggccagaagagatgcgcagtagagccagagtcagagggtactctgaccatgaaggccgtcgttcatcccattacgggaggtctcgttcacgttcgcgttcccgctctccccgttatcgtggtcgtccacggtcaaggtcatactctcctgctccaagacgacgagatgactattccgcatccccacagagaaaagacacacatcgtgcaaaatctcctaggcgtcagccaaaagaacatgaagtagacaagaagcggagatcctattctcctgccaataaagatggggaccggcgtgatgctgataatggttatgaaaagaggtcgccgccagctgacagcgatggatcccctccgcaccggaggtcccccaggcaatcctcaggatcgcctccaggatcccgctccaggtctgccgacgggtctcctgcccgcagtgactaacagaaggacactgcgcacgctgtgctacatcctctctagcttcttgttggtcagaccggaccagtttaagtaaaaacccttttgggcttgttgtaaaacttgtaatgctagcatctgtcgtggtttggtagcggaggacttggatcgtcaccattgtgtgtgctcgcttctcagtggatggagacattttgagtcgtgtgtgatgaaaccttagacttgctgcatggcattgtattgtgttaaacttatccgtatgccttgtgtattcttgtgcttgccatgtgctcatgcgcttgaattgctgtgcacgcggagtcgaactatgccgtcgacttcttttgg

SEQ ID NO: 5399 - DNA, 1764 bp, Oryza sativa
  ref <308>: DATABASE ACCESSION NUMBER: AK062578
  ref <309>: DATABASE ENTRY DATE: 2001-12-06
gtggtagttgtagtagcagcagcagtagagctaagctagggttttccctccccccgcgcgcgcagcaggcggcatggagagcctggtcctcgcctcctcctgctccgcttctccccgcctgcctcccctctccgcggcccgccgccgccgcccctcctcgcagactctcccggcgacggctgcggcgtccgggcggaggggagctgggaggtccaagctcgtcgtcgtcgccgccgccgccgccgcggcccgcgggtccgggaacggtttcgagggattaaagacaaatggatttgcaagcatgtcgtcttcgaccaacagtgagaatatgtcaactggaacgggttccctacctcccatgccacccccatcgtcatacatcggttcgcctgttttctggattggagttggtgtagcattgtccgcagcattttctatggtctctccgatggtaaagaaatatgcaatgcaacaagcattcaagtcaatgatgacccaggcaccgccaaacacttttggctcaaactcgcctttcccatttgccatgccaccacaggcagctcctgcagctcctagcagttacccatactcacaaccaaggaaagatacctctcctcaatctgcaactgtcgatgtttcagctactaaagtggaagcaactggaactttggaagaggctgatgtggctgaacagccaaagaagaaatttgcctttgttgacgtttctcctgaagagttgcagcaaaaggaacttcaatcttcactggagacagtggatgtaaaaagtgagagtaaacagagtgaaactatggaggatactgagcaaaaagctccaacaaatggaactgcttttaagatgaatgaaggttctgctagcgggacaactgaatctagcaattcagggcctatgttgtccgttgatacaattgagaaaatgatggaagatccagccgtgcagaagatggtttacccctatttgcctgaggagatgaggaaccctgattcattcaagtggatgctgcagaatccaatgtaccgccaacaactacaggatatgctaaacaacatgggtggatctcctgatcaatgggataaccgaatgctcgatcacttgaagaattttgaccttagcagtccagaagtcaggcagcagtttgcgcaagttggcatgactccagaggaggtagtatcgaaaataatggcaaacccagaagttgctgttgcattccagaacccaaagattcaaacagcgatcatggattgctcacaaaacccgctcaatattgtaaaataccagaacgacaaagaggtcatggatgtttttatgaagatatcacaaatcttccctcaaattaatggctagtggatcgtcgccgtgagattgcagttttgatttttgttgccctatcatctcttccaagtggctgcggtaacatctgttgatcggctgagtaaaaggaaacgaagttcatctgttcagtcattacggacaagatgtaaaagctttcctgtcagggttttttgagttgccaatgtacatcatcatatcgcctagtgtttggtttggtagtgaccctgcctcaagccagagcaggcaacgaagcgaagttaaggattttttttatttacatccccgcgcccccgtacaactgtgtagcttgtgctttgacgttacgaggtttgtggtaggttgtgaagatgcagagatagttcatatcacctcaattttgataatattatgtattatatctgtgttagcattgc

SEQ ID NO: 5400 - DNA, 1594 bp, Oryza sativa
  ref <308>: DATABASE ACCESSION NUMBER: AK062579
  ref <309>: DATABASE ENTRY DATE: 2001-12-06
aaaaaaaaactcgcgaaaaaactagggtttaccctagcggctctggcggcggcgaggcccctcccctctcctccgactccggctctcctcggtcgtcctccctctcttttgccggtcgtgccccctgctccaccgtcactctccgtcgagctgagcacaatggatagttgtccgtcgcccattgcaaggacaattgatgacttctgaaataaagcacggtggaaagctatcctgtagcggcatggattctgatggcccccatacttcacttatacatggtcttcctgatgagattgctattctttgcttagcgagagttccacggcgatatcataatgctctcaggtgtgtctcaaagagatggagggcactgctttccagtgaagagtggcactcttgccgcaagaggaacaatttggatgagccttgggtatatgtgatttgtaggagtacgggcatcaaatgctatgtacttgctcctgatcctacaacccgctccttgaaaattatgcaagtcatcgaacccccatgctcgtctagggaaggcatttccattgagaccttagacaagagattatttcttttgggtggttgtagctggctaaaagatgctaatgatgaagtattttgttatgatgcctcatcaaattgctggagcagtgtagctccaatgcctactgctaggtgctattttgtttctgcagctctggacaagaaactatacattactggtggactaggtttgacagacaagtcgccaaattcatgggacatctatgatccagtcacaaactcttggtgtgtgcacaagaatccaatgctcacccctgacattgtaaaattcgtggcattggatggggagttggtaactgttcacaaggctgcctggaacagaatgtactttgcaggtatatatgatccattgtgccgcacttggaggggcactgagaatgaaattgccctatgttggtctggatcaacagtcgtcatggacggaacgctctacatgctggagcagtcgctcggcacaaagctgatgatgtggcagaaggagacgaaggagtggatcatgcttggtaggctgtctgacaagcttacaaggcctccttgtgagctcgtaggcattgggagaaagatttacattattggaagagggctgagtatagtgacaattgacctggatactgtcagggcagatggattcttggtgtcctcttccacaggcccattggtggagcatgacttcccacctgagagatgccgggttatcagcatctgaaggcatcagcttaactgtatattgtccggagaaaatgtcacacatgtgaaggtgacatgggttgattgatgcacatatgaaataaggcaatcctccaggcattgtttactcgagagagtgcccgttgctaattggtgtttaattgtttgtagtatttttgctgtatctccgacttgtgcccgtttgctgtaacaaacgaagtctgaggttcagttgtttatttcacacctatacatattgagataataacttgttcataattcacgagtgtgatgcgtcctgtgattgttatgtgtgattgttcatttttcttgc

SEQ ID NO: 5401 - DNA, 1738 bp, Oryza sativa
  ref <308>: DATABASE ACCESSION NUMBER: AK062580
  ref <309>: DATABASE ENTRY DATE: 2001-12-06
gtcagattgtcgttgtaacaattaaaatggtgataggtggttgctagatccggtaaaagcttctccctttgcatgacctctacccaaagcactgaatgtgaacatcaccttctgcaatacgagcattttcttccaactaatggactctcactggtactcaaccataatcaaatgttccggccatctcttcgtcgagatgaatcatctctgtgcacacggctgcacctctggattcggatgccaagaaggtagataccgggatgaggtgcgaggccggaagatttgccaacggttagtccatttctgtgttttgtatcgccgattacaagatggaaggagtttttgagccgatgatggcagccgcggcgggccaagaaactaccgagtgaagcgagcaaggagaagaaaggaattggggcaacgagtgtgcaccgtcagatgagaacggatagtggataggatggaactgcatgcccatgactttgcatggcggtctgtacaatatccccaatatcttggtcagcgtgctgatgcagatccttatggttgacaatgttgacagcttgggttgacttactcctagttgtaatgatggcagactattgagtaaagcttgcaggaacatgtttccttctgccttctggaatcaaaacacagtattcattttggtctgtcgagcattctgatctgttattggtccatgcacatttgcacactagttctaagttttaaacttttcatagtatcatgctttgattttgtgtaacattctccatgatcttggccaattttaataaataaagggtagcaagtttccttgaatcaaatagctaagattgacactagaaatcctgtcaacatcttgaagttctgggagtgttaactttatgctagctataggcttagcctttactttgacagaaagttgtgctatttgaatctggagtttctataggtttagctaattaacgacttaaaatgtgctaccatatactttactagaattgtatatgttttacccttcatgtatgtgattgctgccaaggttacagaggcatttcatcttgttttaggattgtttccttgctggcattatcagatcattgtttcttggagtgcatgcattagttttaaagaaataaactcctgacatgcattgtaagtatagtgtgaccaaaactattgtgttctgacacttggtaggttttctgctggacgttctgggtagaaaaaaaataaatcattaacttctgtaggttgaaaacataccgatatgaaatgaatatgctgaatatgtagcgcaattggatgaaattttgtaatactagagaaaagaatactttgcgagttccaattaagtgtcaagtttattgttcatagccacattatttgttttccacaatttgtttcgaagtttcaacctataggtggttgagttagatgagaagcaccaaatatgcgtttactttcacaagtatgttttttgagttattttgaatcccctatatgccatgatcttgaatctttgcaaacagttgtttatttatcgaacaaaatggtgtctagtctcacagagagagatcctctcactagcagaatcacttgtctgaatttggttagagtagtttgttgtgttaccatgctatcttgttgtcctgtatgttcatgatagtttctatttttaaaaagtattttttttctttaggaaacaataaacttcgtaggatttgtacattgc

SEQ ID NO: 5402 - DNA, 1357 bp, Oryza sativa
  ref <308>: DATABASE ACCESSION NUMBER: AK062581
  ref <309>: DATABASE ENTRY DATE: 2001-12-06
tccaagtgcgtccgcgactaccaccggcggcacaaggtgtgcgaggcgcactccaagacggccgtcgtcaccgtcgccggccagcagcagcgcttctgccaacagtgcagcaggtttcatttgctcggggagttcgatgaggagaagaggagctgcaggaagcggctcgacgggcacaacaagcggcgtcggaagccgcagcctgatcctctcaaccccggcaaccttttcgccaatcaccacggagcggcaagattcacctcgtacccgcagatcttctcgacggcggcgtccatgtcgccgcaggagacgaagtggccggcgaacgtggtcaagacggaggccgccgacgtgttccaagagccgtactaccacgccctccacctcaacggcgccggcgccgccgcggccgcctccatcttccaccacggcggcaacaaggcgaggaagcaccacttccctttcctgacggccgaccacggcggcggcgccgccgcggcgtcgccgttgttcgggtgccagccgttcaccatcacgccttcctcggagagcaggagcagcagcagcagccggcacagcaacggcaagatgttcgcccacgacgggggtctggacaactgtgctctctctcttctgtcagacaaccccacacccacggcgcagatcaccatcccacagcctctcttcgccggcggcgggcagtacggcggcggcggcggcggcgacgtgtcgctcaccggcctgtcctacgtcagaatggccggcaaggacacgtccatcttggcaaaatctgccactaccactgctactactgctactactcctactaccacaagtgcacagctgcaataccatggctactaccaccaccatgtcagcgccgatcagggtagctccgatgctgcaatccaggctcttcctttctcatcgtggtagtggagattccgggttccgatttcgatctcagcgaggccctgttcttgagctgaattcctgatagatcagatgctagggagatggtaatgttgttcaacaaaatatgtcagtgataatagttgtattatcttggtgatactgaaaaatattcaccacgatatgcacattttccaactttgcctggtatttccagtttatgggaaatacccccaagccagcttatgattcacaattgcattattagaactagtgctattatttttggagggttattgacttgtactgtagtggtacagcttttgttgtgtgtacatttggctatccacttgattggtgtaggggctagttcagcaggaactagacataagttaactgtacttgaatagtcaaattagcctcaaaagctggaggattactgatt

SEQ ID NO: 5403 - DNA, 2274 bp, Oryza sativa
  ref <308>: DATABASE ACCESSION NUMBER: AK062582
  ref <309>: DATABASE ENTRY DATE: 2001-12-06
gtttatactatatgcttcctttatggtgaagttataaagctgggattctgatggtttgacgaaagctcttggtccccaaacaatactaaactcctttttctgtcacatcttaccgtatttatattaagaaggatggaccttaatatgacaaatctttggtttcatgggaaggaacatatagctgcttcgccattcccacaagttgcaacatcaatgaacttcacttgccttggcagctcaaaaacaatcgagacttctaaaaaaatgtttcagcagagcgatcaaagcttgtctattcctgatgatggatgcaggcttgtccttggacttggaccaacacctaatctacattatgctgataatgagtcatccggtggcaacagggataaagaatctgcaaatttgttcagccaacattttgccatagccgatcatggtctgatgttgggcatttcgagaggcggcacaagaaattttcaagccacaacaatgatcgagaagtattcacatcaaaatagaaatggtatcgtcttcccacttactgatgaaggatcaacttcagctaaaaggaaaccaggtggttatgtgctgccacttctgtttgctccaagatcagatgatatctgtcccaatggaacaccaccagtgaccgatattcaacatgttgaaactgtagatgattgtgacgatgatcacattacgtctcttaatcagcagaaggttcagattagccccgagccttcagcaacaactgattgttcttttgctgcaacttcagatatgatattctcctcaactagcacggagcagagaagtcaccaacgacatcctaagaagtgtaggttcaatgggtgttcaaaaggagcaagaggggcaacagggctctgcatttcccatggtggtggtcagcggtgtcaaaagcctggttgcaacaaaggtgccgagagccgaacagcttactgcaaatctcatggtggagggaaacggtgtcaggagctaggctgcaccaaaagtgctgaagggaagactgagttctgcattgctcatggtggtgggcgtcgatgcggaactccggggtgtacgaaggcagcaaggggaagatcaggattttgcataaaacatggtggagggaagagatgcagggtagagggatgcagcaggagtgccgaaggacagtttgggttgtgcatctcacatggaggtggtcgccggtgtcagtacccgaactgcagtaagggagcacaaggaggcaccatgttttgcaagtcccatggtggaggcaaacggtgtatatttgaaggctgtactaaaggtgccgagggcaacacgctgctatgtaaagggcacggtggtggtaagaggtgcctctttgagggaggtggtgtctgtcctaaaagtgttcatggtggaactagcttctgcgtcgctcatggaggcggcaaacgctgttctgtaccaggatgtaccaagagcgcccgtggtcgcactgattgctgcgtgaggcatggtggtggcaagcgttgcaaggttgacggttgcgacaagagtgctcaggggagcacggacttctgcaaggcgcatggaggcggcaaacgatgcgcttggagcaccggctgtgagaggtttgcaaggggaaggagtgggttatgtgctgcacatggaaccctgatggcttcaaagcaagtgcctgaatctgagcacagcagaggcatgatcaggaacagcctcttcagcaagatggtctctgcatcctcgatgacggctggtgctagcatggatcatgccatctcttcttctctccctggtgcctcgtcggatcgcggtgagtccttggaagagatgcggaacggcaagctcctgataccgcatcaggtcctggttcctggttcaatgaggccatcttcttcgcatggcaaaggtcaagagaacggagggagccaggagcagcagtgcttcgggttcgtcgtgccggaggggagggttcatggtgggggcctgatgtccatacttggagctagaggcaatcttgacgatccgagggactgaattttgctgaaaatgttaaagttgcagctatttttatgctgtcatttatgatttctgcatctagaatccataagatttcagatcaccattgcactatgctgtcaagcatgactgcttgatcgaaattgagttctgaattatgtggcttaggccttgtataaagtattttgtcattcatatggcacttacatacacaaagagcagaatacctgaagagctgtttgattg

SEQ ID NO: 5404 - DNA, 3714 bp, Oryza sativa
  ref <308>: DATABASE ACCESSION NUMBER: AK062583
  ref <309>: DATABASE ENTRY DATE: 2001-12-06
tataatgggccagcaaaaaaggagatcccttccagtgtaaagcatggcacatttccaggttctgaggaacagcagttgcatatgccgtcaaatggcgggattatacctggacctgcaaatgcagcttctcttcctgcacctgttttgatagaggataattgggtatgctgtgacatgtgtcataaatggcgtctcctcccctacgggacaaacacttccatgcttccaaaaaagtggatatgcagcatgcttgactggctacctgggatgaacaaatgcgacattagtgaggatgaaacaacaaatgctctaaatgcactttatgtcgctcaaatccctgccgctggtgtttcttcaggtggccctcacactgcgcatgcaagtgtagcagcatctagcacctacaatataagtggacaactgggacagagtaggaaaaggaaaaatgctctgaaagacgaaaactgttacgagcatgatcaataagcccctgcaaaaatgactctcacgagcaatcaacaagcccctgcaaaaaatagagaagttgttgatagtgaacattatactaatgacagagatcctgtaagcacacatgatctggtgccacagagcaaatcagcttctgaaaggcataagtctaagcacaagagtcgcagtagccactcagatggaggagatcttacagaaaaatcgaagaagcattcaaaatcaaaaaacaggagaggaattgatcgagatgagcacaaaacatctaagaagacaaaaaaagaggatcgacattactttaacaaagattggaaaaatgaatacgatttagctggcaacaaagttcgtgatgaaaccaaagctttatctgcaaaagcaaaaatgtcaaaggactcatgtgaacaagatgagttttctttacgcaaggaaaaagcttcaaggtttgatattttggaaaaaacaaagagaattaatgatgatgatgtggcctttcatgagaagatgaaagaacatcgtgcaggcatagaaacattagatttgtctggcaaaaagaagacagtgaaggaatgggaggataaccggctcagttcaatggaccacacaagcaaagggggcgataatgagaatttgaacgagagattatcaaagataaagaagtccgaagctaggcctgaagaagttcaggatgcaaatgcattattttcttctgctggaaggcgtcaagataatgagctagttgctgacaacaaatttgttacttgtaaagaaggtccatcagaactatgggataatcaacctcccagacaggtcttgaacttggcggaacccactaggagggatgttgcctgtcttcagtcttctacggttgcaacttcaagctcttcaaaggtctcaagctctcggagaaacaaaaattctcgagaagcaaagggctctcccgttgaatcagtatcttcatcaccactgaaaaattcaaacactgataagatttctaaggccaggaaaactggaaaagatggagaattgaatgctgattcaagcatcttgcataccccaatgaaatatccaacccacgaagttggtttactacatactgggcagcaagctgtgggtgaagccattctgcgtggttctacaaataactccggtatggggagagtagataatcaattgtaccctggtgataaaaagatcttggatatgcatggccctacactacaacctgatcagcaggattgttttaacccgagggctacagctgattccactggacataaaagtaaaaatagtgctccttcacgccaaggtagaaatggatccagtaacttgatttcagagggaaataagcagatagagatgtcatccagaaaagagaaattacgtcctagtattgataatcaagatatgcaaaagtctattggtcaagataatcattctcatatgaaagaaggcaaatcagaggttcacaccactagagtaaaaccaggtgcttcaaaaaaccacacacaattaaggtccaatgttgaaaatggagattctgcgagtccaattaggagggatggtaatatgattgcatttgcactcaaggaagctcgggatctaaaacacaaggctaatcatttgaaggaaaaaggacttgaacttgaaagtatgggcctgtactttgaagcggctttgaagtttctgcatgttgcatctctttgggaaactcctaatctggacaattcgagatcaggcgatgttgctcagtcaatgaagatgtatcctgaaactgcaaaactctgcagcttttgtgctcatgcctatgaacgatgcaataaaatggcttctgccgctttagcatataaatgtgtagaagtggcttacctcaaagcagcgtattacaaacaccctagtgcaagcaaggatcgacaagaactacagtcggttgtacagatagctccaggtgaatctccatcatcgtctgcctcagatatcgataatttaaatagccatggattgtcaaaggccctttcaaccaagggtggaaactcaccccaagtggctggcaaccatttgccactggccgttcgtaaccaagcacacttattgaggttacttgcctatacaaatgatgtcaattgtgcattcgatgcaactcggaaatcacaggttgctattgcttctgctgctagcagtcaggaaaggggaaaaactgtggacgatggtcttgcttcagtaagaacagttttagattttaacttcaacaatgtcaatgagctactgagacttgtccggctttctatggagttaatcaacacctgatatgttcagaattgcatgaaatggcaccccatgaatagctattgttggaatgcctggctgcagttacctcagcatatttacacggtgcaaaagagatgggtctactaagtctgcgtgagctccataggaactgggaccggcttgcctggtttatgtacatttagaggcatccagcgctttttcatacaaataggatcaccacttcggattaatcttatacgttttggaggcattcagtgtttttttttttttttgggtacagtttggagcatcttcgattaacctgttccttttggaagcatattgtacagtttagagcatcttcttggcagttggtacgcaattactgtgtgaacggatccagctgaggtagaaccggattttcatgcgtgatggtttgaactctggcaaccattctgctgtaggtaggcaaatgtgttttatcgggaacatatgggctccatatcaagcattcccctgccatggttctatagattaggtgaatctttgactgacgcttacttatactaacttcgaagcagcataataccttttattggtgttactgtggggcactgatgatgtgccagcactcaagaacaattttgtaattggtaattggtaagttccacctgagtataaaattctgaaggctaaatggttagtccttctcgtctttccatgacatttggtacagtcttgagcaggggggatgagagaaatgagctgtgctaaccaagataagtattctccgtctcctcaagcaggtcttacgaaatggaacggtttggaagcatggtgggcaatgaattctataaccctgtaaatctcatgtacagtagagattaacctgtttgttcattacagtaaacagaaccagcacctgcgcattgtcatttacccgaaaccaaagagattttttcc

SEQ ID NO: 5405 - DNA, 2260 bp, Oryza sativa
  ref <308>: DATABASE ACCESSION NUMBER: AK062584
  ref <309>: DATABASE ENTRY DATE: 2001-12-06
atgaattagaggtagaacatgaaactttaccccgtagatgcatattgccagtgtcttccatgttatcagactgtagtaatcaacaaagggcagcacttgaatgtcgccatatgtgcgtgcttcattccagagttccttgtttacaatgaggccaacgaaaaaacggaccactactgctccttcgcgcaccgcatcatattgcatccatgtccgtcggatcgccatccttcgtttgaagttgtttgctgttgaaaagataccaatcaaaaggtccacatcttttccctctggaataggtgacgacttcaacattgcaagatcgaagctgtctccaggtcttctgatgtgggcaggccacttgcaattgcacttactagcttgaaatcaccagatactcctacttcagtaacgaaccatgcttccaagccctacaaacagaagcatctatatggtaaggagtcaaataattgagttgagtaaatgtcggacttatcatggtccagatagaaggttaccgctttatatggaaatgaggtaacatgttttccatcaactgtcatgtgaatcccttctagccctatccgaagagttgagatagcaaggtgtccctgcttaaatggaaaatatgtgcttgggtgttcatctttcttggcattcaggtgctgttttgagtttatagctctcttctcttctctacccaccatggaattacatcgctccaaatcatccactgtgatatatgttagatgactagtgtaacggggcaaagaagaaacaataaagacgcaatttggaagtaccttgagttgcattattacagttactgcagggacatctatcctcataaccccagccattacttgcagtgaaggcattctgcactatgactggacctccagtaagttcatcacttgttagacgaacatcatagtgcagtacgatgggtttcccagatccccctggcaattctgtcccaacaagatcaatcctgaagttaccggagaggctacctggagtgcctataatagttactgaagaacctacaatcagcccacgaggtatatcgatggtaaaatctccagtgtctggcttggaggcattcattctgtggatagaatatggacactgcctctctttcttaatctgtttagaggttgaattgtgaactgatatcgtcaggttttcccatgcagttcttgcattgtctatagcctcatttgcgtgaggaaggccatcggagatgttggtcaactgcttcatgtgattccatgtatttaaccactgaaatccttcaagagaggaatttccggaatccgagctgtttgaagctgaagcatctgctggtatcacttctactggtgtattatctggattttgagccactgaatttcccaatgagtcgctcaaccaaccaaggagattagaatgtatgacttggtatcgagatggccctgacactgggctattcactatcagatgatgcacaatcagcagagggaagaggacgattagaaccgtaattccgagtcgctttgtcacccacatctgcagtgccgtttccatcagttatcgtggcaatcacctgagttcaatgaaaatgcagcccctgagtcttcaatccaagcttctggtcaaggtccagcatttcacctgccaatgcaattgatgttactgcttcttaggagtactacaatttgtgcatttccaatcagacatattttgatggactttcagtcaaagttcagggaggtatgtggacttttttccttttgataaatatgctaaagttgatgacatgtcatcacatgttaagaccagcagcaacaaaggaaatgatcattcaagaaactgagatctcacaagaagagcacatagactgggagcagttttggttgactggaaagggtagctgctaccgctctttctgtgcacgaaaatgactgtcaaatccgtcggccttgtgcccaattttcgtatctgtactacaaccactacctggagtacaaccaggtgatacgaaaatgcagccggaattggcaagcataccatgcaccgtagcggaccaggcaccctcagccgaagtcaagtcctgcacatgcctcacgcagtctttgaacgttgtggcattctggcttgcttagcaaattttcaaccaagaaatggatactcgtaacaaaattggaagagaaaaccatgaatgttcgcttatattctattgaatttctggaagtagagaaatcgaagaattttctaacatatc

SEQ ID NO: 5406 - DNA, 1710 bp, Oryza sativa
  ref <308>: DATABASE ACCESSION NUMBER: AK062585
  ref <309>: DATABASE ENTRY DATE: 2001-12-06
gaagtacagatgaaacagattattaatctcaaattcgtcgtcctcgcaaatcggatcagcatggctgccatcctgctgctgctgctcgtgttcttggtgagtgtggccttggttgttcgaacatggagtgctagtaggagatctcatgagaaggcgcggtatgcgacggccgagctgcggccgtatccgctggtcggccacctgccgcagttcctcgccaaccggcaccgcatcctggactggatgacggaggtgctgtcgcggcagccgacgcgcacgttcgtgctccgccgccccggcggcgtgcggggcgtgatcaccgcgaacccggcgaacgtggagcgcttcctccgatccgggttcgacaactaccccaagggcgagcgcttcgcgtcgctgctgcacgacttcctcgggcgcggcatcttcaacgctgacggcgaggcgtggcggtcgcagcgcaaggcggcgagctacgagttcaacacgcggtcgctccgcgccttcgtggcgcggtgcgtgcacggggagctgcacgggcgcctcctcccgctgctgcggcgcgccgcggcggagggccgcgccatcgacctccaggacgcgctcgagcgcttcgcgttcgacaacatctgccgtgtcgccttcgaccacgaccccggccagctccctgacgccagcggcggcggcgctctcgcggaggccgacgatggctccactgccagcggcaggttcgccgacgcgttccgcgacgccgctaatctcagcgcggggcggttccggtatgctgtcccgtggttctggagggtgaagaaggcgctccacattgggtccgagcggcggctgcgcgagtccatcgccatcgtccacgacttcgccgaccgcatcatccggtcgcggcgggaggagatacgcgccggcctcgagaagcacgacctcctgtcccggttcatggcgagccacgacgagtcgtacaccgaggtggccctccgcgacgtcgtcatcagcttcctcctcgcggggcgggagaccacgtcgtcggcgctcacctggttcttctggcttctctcctctcgcccggacgtggagcggcgcatccgcgaagaagtcgccacggtgcgcgcacgccgtggcgacggcgacgtcgacagggtcggcttcgacctggacgagctgagagagatgcagtacgtgcacgccgcaatcacggagtcgatgcgcctctacccgccggtgccggtggactcgctgcatgcgcaggaggacgacgtcctgccggacggcacggcggtggaggccgggtggttcgtggcgtacaactcgtacgccatggggcgcatggagtccgtgtggggcaaggacgcggcggagttccgggcggagcggtggctggaggacgcggcggcggcgacgttccggccggagagcccgttccggtacgtgtcgttccacggcgggccgagggtgtgcctcgggaaggagatggcgtacatacagatgaagtccatcatcgcctgcgtgctccaggagctcgagctcgccgtcgacggcgcgtaccggccgcggcaggtgacgtcactgacgctgcgaatggcggatgggctccccactagggtgaaagttagaggcaattgaatgtgacatttgggcttgtggaccatggcccgtagcagaaagaaacagtttcccatgcagatgatggtgccgatctct

SEQ ID NO: 5407 - DNA, 1086 bp, Oryza sativa
  ref <308>: DATABASE ACCESSION NUMBER: AK062586
  ref <309>: DATABASE ENTRY DATE: 2001-12-06
atccctcttcttcttcattccttcctcctccctcctcttcaaccatcaccaaatccacacgcttcccaaaaatccaaacccaaattgcaaccccccaatctccattgccgtcgccgccatgatcatcaagacgctcaaggcgcggatcctgtgcgcgctcaagtcctcgcttccggccgccgcgtccccgccgccgtcgccgaccaagccggggcgagccgccgcggcggtggtggtggtcgcgggtgacgcgttctccgacgacgcgtccttctttgacgcccacgagaccccgaccaagaacggggcggagccgatcgatgattgggagctcgtcgacgaggagggtcgggttggggttgccgcggcggcggcggaggaggaggaggaacagctcagggagttcccggcgaggtgcccgccgggaggggagggggcggtggtgctctacaccaccacgctccgcggcatccgcaagacgttcgaggactgcaacggcgtgcgcgcgctgctggagaacctcgacgtcgcgttccaggagcgggacgtgtccatggacaggggcctccgggacgagctctggtccgtcgcgggggagaaggccgtgcccccgcgcctgttcgtccgcggccgcgacgtcggcggcgccgcccaggtgctcgccctccacgaggacggccgcctcctcgccctcctctcgccgggcagcaacaaaaacaggagcgccgccgccgccgccgccaagtgcgacgcctgcggggggctcaggttcgtggtgtgcggcgagtgcgacggcagccgcaaggtgttcggcggcgagcgcggtcgcggcgtgcggtgccgcggctgcaacgagaacggcctcgtcatgtgcgcgctttgcttgtagtagcaaagtaaaaattaattagcggttaattgtcaattaccacctcccttttcactcactctaatctgcttatatctttttagtagtaattaattacccctcttgatggttttgagtgtgtgtctggacttagtggttggcctgtcatgtacataaactaccactactgctactagtacttgcttcagttaaactac

SEQ ID NO: 5408 - DNA, 1921 bp, Oryza sativa
  ref <308>: DATABASE ACCESSION NUMBER: AK062587
  ref <309>: DATABASE ENTRY DATE: 2001-12-06
tgttaaatacccagggttattgcagccattggaggtaccttctcaatcatggcaagtaattactatggattttatcgaaggtttacccagatcggcttcatttgactgtatactggttattgtggataaattctctaagtttgctcatttttttacccctgaaacacccctttactgcctttggagtggctcagcttttcatggaacatattcatagtacacatggtttacctcaagctattgtatctgaccgtgatcgagtgttcactagttctctttggaaggaattgtttcgccgagctggtactcaactccgaatgagttcttcgtatcacccacaatcggatggacaaacagagcgtgtgaatcaatgtgtggaaatgtttttgcgctgctttgttcattcttgtccttctcggtggaagcattggctggcattggctcaatgttggcacaatacgtcatttcattcagccttgggtatgactccttttgaagtattatttgggcacaaacctcgttactttggattatccacttcatctgttgatgctcctggagatcttgcaagttggttaagtgagcgaaatgacatgaatactttgattcatcatcatttgttgcgagctcagcaacggatgaagagccaagctgattcgaagcgatctgagcgttgttttgcggttggtgattgggtgttcatgaaattacaaccatatattcaacaatcagttatgactcgatctaacaggaagttatccttcaaatattatggtccatttcaagtcttacaacgaattggattggtggcttacagattacagttgcctgctcacagcttaatacaccctgtcgtccatgtgtctcagctcaagaaggctctcgcaccatctgaagcagttcagccttctttgcctgtgttgaatcctgatgctggtcatttagcgattccaatcaaaattctggatcatcgttcgattcgtcgaggttccaagatgatcaagcaagttctaattcgttggtccggtgtgtcttcttctgctgacacctgggagagtttagatgaaatgcaagctaagtttccagctgcaccagcctggggacaggctgaaactcaaggagggaggaatgttacggcatcaatacagagcactacccataactctagtatcattgggcctagaagatccaaacgagaagtccacaccaacccaaagtatatgggctgtgattggtctaatagttgaggaagtctataaatactagaaggatcttctagaggcgggtgtggtaattgaatctaacttctatctgaagaaatcattcctcctcctaactttgtttccttcttcctctgctctgaaatgctctgttctgttctgttcttcctcctcatccccaatttcatctgtgattcgatctagggttcgtaacagaagcttgcggggagtcgggacagcgttgaaggtagagcggaggagagcggcctgcggcccgcgtgggaagcggcacggcggacggtgatcagccttggcgagaggaggagggggacgtgggcttcgattggaggagcaggtggtggtatctcgctagcattggccgaatggaatggacatggacacgcctgctctctttttaaaggctgccatcctatacttttatacgtacatatacgccgcaatcttcttgaatggcaagaaacctctctcaaccgacggatcatgaatcaacggtggagatcccttcagttgatcagtaatatacctgtgcttctatctgctatgtttttggaaaactaggaaggtggcccgcgcgcatgcgtgggcacttatattattgaaagataagattattgttgttcaaaaattttgtctcatagattaagggcaaactaaagctcggataatgtcattttatgatt

SEQ ID NO: 5409 - DNA, 1607 bp, Oryza sativa
  ref <308>: DATABASE ACCESSION NUMBER: AK062588
  ref <309>: DATABASE ENTRY DATE: 2001-12-06
atcacctcctcgtcttcttcttccacctcgcaaatccgatcaacacatcagcttgagaaacaatggacgcgccggccatgctcacgaccaagcacgtccccgaggacgtcggcctccgcaacgtcgcggcggcggaggaggaggggggacaggggcagatgtaccgtggggaggagaagcagcacaagccggtgctcaagaagatgaaggagaaggtcaagaagatcaagaacaccatcgccggcggcggcggcggcggccacggcgggaacaacggcggcgagcgcgctagcggaagcagtagcagcagcgaggagggcgaggacgatgtggcggcgcagaggatgggtgacgtggaccagcgcgggtaccaggaggacgtcgaggaggacaagcccgtcgccatggagtccgatcccgaggtccatggcgctccgatgtacgactcggcgaggatcccctcggtgcaggaggtggagggcgacggcggcgcgccgagggtgcggctcggcgacctcggcggccccgtcgtcgaggacccggcggcgccgcgctccacgacgcgcgtgccgcgggagggggaggacatcggcacgacgcccgtcgtctgcgccttcgagtcgatgagcgtctccgacgacccgaagcacgtcggcgcggccgggaagccggacgccgacgtgcagaacgacccaatgccggtgtcggacgccgccaccgccggtgaggagtggaaggacgcgacgcccgacagcgcagctgcaggcgcgacgcccggcgcgacgtacaccgacaagatcaagtcggcggcggcgggcaccacggagtacggcaagaagctggccaccacggtgtacgagaaggtcgccggcgtcgggacggccgtggccggcaaggtgcggcaggtgacgcagtcggccggcaccgccacaccaggcgtcgccggcggcgccgccggctcacagtcgcaggacgacgtcgacgcctccaccaccctcgcctccggcgagccggcgaccggggggcagcagcagcaggacaagggggtaacagtcaccggctacatcgccgacaagctccgcccgggcgacgaggaccgcgcgctcagcgaggccatctccggcgcggtgcagcggcgcaaggacgacgtggcgcagcgcgttccggccgtggcgccggcggcgccgggcgacacgatcgccaaggtgcgggaggcgcccgcgcaggtgctcgccaaggcgcgcgacgccgtcacgtcgctcaccggcggcacccatgtctccgacaccgtgcagcccaccaccaccacagaggcggatggcgcggaggtggaatcggcgccggtgattcgcggggaggagatcggcgagacccaacgtcagccgaacgtaagcatgacatgaagcgttgtagaaatggatcctctcgtgtgtgtctgtatgttgccacgtatacacgtgtaagtgtaagaaaagtgtcagtgtgcttggaataataagccgttatgtacggcttttgtgtcgatgtgcagtttttgttttttgatgtcttctgtgtgtatgtaagcaagcccgttttgaaaatggccaagttcagttgaaacttgt

SEQ ID NO: 5410 - DNA, 1536 bp, Oryza sativa
  ref <308>: DATABASE ACCESSION NUMBER: AK062589
  ref <309>: DATABASE ENTRY DATE: 2001-12-06
aaaaaaaagcacaaaggccagagcgaaggccactccaatggatcactccacctccctgctccggctcatcttcctcgccgtgggcgtgccggcaagggcggggcgacccgaggtcgaagccgtccaagccgcggcgaccgtcgcacgagtccgacgtgccgcggcacccgctcgacccactcacggtgagggaggtgaaccgcgtccgcgagctcctccgcgcgcacccgctgtttgcgtcggcgccgtcgtccctgttcgtgcactcgctggagctcgacgagccggaaaagtccgtcgtcaagagctggcggaagggcgccgacccgctcccgcctcgccgcgccgtggccgtcgtccggttccgcggcgagtcccacgtcctcggcgtcgacctcagcgagggcgacggcgcggtgactcctctgcctgtccctgcctccggttacccgatgatgaacatggacgagcagaccagcctctgcttcgcgccgttcaaggacgaggcgttcaacgccagcctcctccgccgtggcgtcagggcctccgacgtcgcctgcctgcccatctccctcggctggtacggcccagcggaggagaaccggcgactcatcaagagccagtgcttctccaccgagggcacggccaacttctacatgcgccccatcgagggcctcaccgtgctggtcgacatggacacggcggaggtcctccacgtctccgaccgcggcgccggcatccccatccccgccgccgcgaacaccgactaccggcacggacactcggcgccgactccggcggaggcgcaagcgcaggggcggcacgggtaccagaccgtccgcgtgccgtcgatggagccgccggcgggcgggccggggttcgagctggtcgacgggcacacggtgcggtggggcgggtgggagttccacctgaagcccgacgcgcgcgccggcatggtggtgtcgcgggcgcgggtgcaggacccggcgaccggcgagcaccgcgacgtgatgtacaagggcatggcgtcggagctgttcgtgccgtacatggacccgacggaggcgtggtacttcaagacgtacatggacgccggcgagtacggcttcgggctgcaggccatgccgctcgtcccgctcaacgactgcccgcgccacgcccgctacctcgacgccgtcttcgtcgccgccgacggccgcccctacgtgcgcgagaacatgatctgcgtcttcgagcgctacgccggcgacatcgcgtggcgacactccgagagccccatcaccggcatggacaagttgacggttttgacagagattggtgatggatattttcaactttaggacactaaagaatatcgttcgcatataccgtcaacaaggagtcgacaagattccaatcaattccgatgcaagctttatatatatttcaaactagaaaagacatatcaccatcgttccatcaatgtgggatatgtttatgtataggcctaggaatacctcatattaggaatttacctatgtgacctatattttttat

SEQ ID NO: 5411 - DNA, 1663 bp, Oryza sativa
  ref <308>: DATABASE ACCESSION NUMBER: AK062590
  ref <309>: DATABASE ENTRY DATE: 2001-12-06
atgcgccatagctgagctgagctagagctctcactacagctagctaaccgagagccacacgtcggtgactcgtgacctgtggagccatttcgccgacgccgaggccgcacttcctcgtgctcacgttcccgctccagggccacatcgcgccggcgctccgcctcgccaggcgcctgctcgccgccgcccccgacgcgctcgtcaccttctccaccgccgccgccgcgcaccgccgcatgttcgccgagggggagggcggcgacggcgacggcaggctcgagctcctcccgttctccgacggcaccgagaacgggttcgtcaagcgcggcgacgccgcggagctcggcgcgtacatggcgtcgttccacgcctcgggccggcgcagcgtcggggagatggtcgacgcgctcgcggcgcgggggcgccccgtgtcgagcgtcgtctacacgctcctcctgccgtgggcggccgacgtcgcgcgcgaccgcggcgtgccgtccgcgctctactggatccagcccgtcgccgtgctggccatctactgccactacttccacggcctcggcggcgtcgtcgacgagcaccgccgcgaccattcgttcgtcctggagttcccgggccttccgccgatggcggccggggacctcccgtccttcctcaccgaagccaccgacccctccgactacttccacagcatcttcaccacgttccgcgacctgttcgacgccctcgacagggagacacccaaggccaccgtgctcgtcaacgtgttccaagaactcgaggcggacacgctcgccgccgttggggcgtacgacgtgctccccatcggcccggtgctcccgtccggcgacgacgccgcgctgttcaagcagaacgacgccaagtacatggagtggctcgacaccaagccggccggctcggtggtgtacgtcgcgttcgggagcttaaccgtcatggcgaaggggcaggtcgacgagctgctccatggcctcgaggagagcgggaggccgtacctctgcgtggtgcggaaggacaacaaggccgccgtggcggagacgggcgacgcgacggcggcggcggcggcgcgcaggaacggcgtggtggtggagtggtgcgaccaggtgcgcgtgctgtcgcacgcggcggtggggtgcttcgtcacgcactgcggctggaactcggtgctggagagcatcgcgtcgggcgtgcccatggtgggcgtcccgcggatgtcggaccagcagatgaacgcgcggctcgtcgagcgcgactggcgcgtcggcgtgcgcgcggaggtggacggcggcggcggcgtgctgcgcgcggcggagctgaggcggcgggtcgaggaggtgatgggagacggggaggcggcggaggtgcggcgctcggcggcggcgtggaagcgagcggtggcggaggctctagggaaaggagggtcgtcggatcgtaatctgacggccttcgtggagggtgccagaagtgtcatttgaaaacgacataatttgaaaacgttataagatgtattttaatttgaaaacgatttggggatcctagggtcttcccttgttggtttggctgtttgttcacttgtatgtacaacctctactgaactactccctccgtcctatgatataagggattttgagtttttgcttgc

SEQ ID NO: 5412 - DNA, 1424 bp, Oryza sativa
  ref <308>: DATABASE ACCESSION NUMBER: AK062591
  ref <309>: DATABASE ENTRY DATE: 2001-12-06
acccacccatcacacacgcaaaaccaccgtcgtatctattgctgtatcaaagcggagacgccaagccagagtcgacgactcgattaaacaaggaagaggaagaggagagagagagagagattggagtggcattagcgcgagggggaggcgggcatgggggtgctgcggagcacgcagagcatggaggcggaggtggaggagatgcgcgccgcgctagcgctcgcgccgctcggccgccacggcgcgtggaggtcgggggccgcggcgaagcgggaggccggggcggaggagggcgcggcgcccgaggcccgcaccgtgtgcgtcaccggcgggatatcgttcgtggggctcgccgtcgtcgaccgcctcctccggcatggctacgccgtcaggctcgtcctcgagacgcaagaggatctggacaagctgcgagagatggagatgtttggtgagaacggcagggacggtgtctggaccgtgatggcaaatgtaatggacccagagagcttgaaccaagcattcaatggttgtgttggtgtcttccacgcatcatccctcattgatccagggggcatctctggctacacgaaacacatggcgattctggaagccagagcggccgagcaggttgttgaagcctgtgtcaggacagagtcagtgaggaagtgtgtgttcacctcatcgctactggcatgcgtgtggaggcaaagctaccctcatcaccgtcgtcgcttccccgccatcatcgacgagagctgttggagcgacgagagcttctgccgcgataacaagctgtggtttgcgctcgggaagacgatggcggagaaggcggcgtggagggcagcacggggcagagacctgaagctcgtgacgatttgcccggcgctggtcaccggcccaggattccgccggcgaaactccactccgtccatcgcctacctcaaaggagcgcacgcgatgctggcggagggcctgcttgcgacggcggacgtggagagggtggccgaggcgcacgtccgcgtctacgaggcgatgagcggcggcggcgcggccggcggccggtacatctgctacgaccacgtcgtccggcgcggcgaggagttcgccgagctgcagcggcagctcggcctcccgatcaccggcgtggcagctgcctcgcggcccggctactccgacgacggcgacgtcggcggcgacgggcggttcgcgctctgcaacgggaagctggcgaggctggtgtcctcgcggaggaggtgcacctatgacgtctactaccccgcctcgtacgactaaaaattaaatgaaagcgtcgagttcgtgggtgttgcgattcatcttgtacagaattttggtgcgttaataaacctagctagatagaacttgtacagtacaaaacatgaatatggatagaaattagaagtagt

SEQ ID NO: 5413 - DNA, 2086 bp, Oryza sativa
  ref <308>: DATABASE ACCESSION NUMBER: AK062592
  ref <309>: DATABASE ENTRY DATE: 2001-12-06
tcctcgacgtcctcccggcggcatcactccgcctctcgcacgacgccaccggcctgctcgacctcctccgcgcccactgccgctgccgcgcgcccgcgcaataccatgaccccgacgaggcggcgctccgggaacgcctcatggatgcgctccgccagttcgacctcggccagccacctgaccacccctcgctccaatcgctcctcgccgacatgggcatctccaccgcggcttcttgccgcgcagaaatcgattacctggaggagcaaatcttgagccaagaagaggacaccgacctgccgctcgtcggcagcgtcctcgccttgctccgctactgcctattcgccgtgttcgaccctagcaacgcgaaggcgctccgggattggccgttgtcgggcaacaggcagcggcttctctcgattggcggcggcgatgacacctccttctcggtgccaaaggagttctcatgcccaatttctctggatttgatgcgtgatcccgtggtggcgtccaccgggcagacgtatgaccggccgtcgatcatacagtggatcgaggagggccattccacctgccccaactccggccaaacccttgcagatcaccggcttgtgccgaaccgtgctctccgcagcttgatttcacagtggtgtggggtgtatggcttgcagtatgattcgcccgagagcaacgaggggatggcggaatgtgttgctgcatcttgcagtagtcgggctgcaatggaggcaaacaaggccacagctaggattttggtcaggatgctggaggacgggtcagaaaatgtaaaggcagtcgctgctaaggaaattcggttgctggcaaagaccgggaagcaaaaccgggctttcatcgccgacttgggtgcgattccgctgctttgcaggttgctcttgtcgaatgattggatggcacaagagaatgcagtgacagcgctgctcaatttgtcaatcttcgagccaaacaagggacggattatggaacaggaaggctgcttgcggcttatcgtcggtgttctacagaatggatggactacggaagcgaaggagaatgctgcggccactctgtttagtctatcagtggtccataatttcaaaaaactgatcatgaatgagcctggggctgttgaggagctggctagtatgctgaccaaggggacatcaagggggaagaaagatgcggtgatggcactcttcaacctctcaacacatccagaaagctcagctcggatgctcgagtcatgcgcagttgtagctttaattcagtcgctgaggaatgacaccgtgtcggaggaagctgctggtgctttggccctgctgatgaagcaaccatccatcgtgcatcttgttgggagctctgaaactgtgatcactagccttgttgggttaatgcggcggggaactccaaaaggtaaggaaaatgcagtctcagctttatatgagatttgtcgtcggggcggctctgctttggtgcagagagtagcaaagattccagggttgaacacagtaatacagaccatcaccctcaacggaacaaagcgcgccaagaagaaagcaagcctgattgtcaagatgtgccagagaagccaaatgccatcagcaatggcactagggagcacattgacagtcgttgatcgttcattggtagggaacaacacattaaggcgtgctgcgagctttggcagtggagaattgtcaaacccgatttcgatatcagtgcaggtgccctaggtgaaaggtttctaccctggattatatggatggttacatttggtgagttttgtccccaaaattctttcatttcatgctccaatgaaggtatacaaaatttaatccaaaggatttaatactcgaaatatatcagatgttcctatgtttgtgtgtgaaatgtggataactgtgcagacatatagatgtgcaattagagttccagcttgatgttcctccttggcaagctcggaaattgtccaatttttgttttatttttttataaaaaagcaccaaatatgtatgctgtatgctgtaaactgtttaaattaattagaagctttacactgaggcaacagtgg

SEQ ID NO: 5414 - DNA, 2405 bp, Oryza sativa
  ref <308>: DATABASE ACCESSION NUMBER: AK062593
  ref <309>: DATABASE ENTRY DATE: 2001-12-06
agtgcaactgcactgcaaccacgtacggtagcaccattccatggctgtcctcctaaacccttcgtcttcctcaagcagcaaagcaacgccgcggccgccgcagcagcagcagctactactactcttgctccacttgctgctcgttgccgtccccgccacctctctcaccttcagctatgacgcggactcctccgtctccgaagatttcaggcaggaggacgacgccatggtcaccgccggccggatcgagctgctcggtgaggagttcgcggcgcgggccaggggacgcgcgctgtacaagcggccggtgcagctctgggacggcgccaccggcgaggaggccagcttcgccgcgagcttcaacttcaccatccggtcggtggctggcaggggcaacgccctcgccggccacggcatgacgttcttcctcgcgccgttcatgcccgacatgccgcaggagtgctacgagggatgcctcggcctcttcgaccagagcttgacgaggaacacggcgagcgccaccatgggcaacgcctcaggcgccgccagcttcgtcgccgtcgagttcgacacgcacatggacgggtgggacccgagcggccggcacgtcggcgtcgacatcaacaacgtcgactcgcgccgcgggaactacgtggtcttgccggaggacagcctcgtcgacgccggcgtgatgtccgccacggtgtcctacgacagcggcgcgaggcggctcgacgtcgccctcgccatcggcggcggcgccgcaaccgcaacgtacaacctctccgcggccgtccacctgcgaagcgtgctgccggagcaggtcgccgtaggcttctcggcggccaccggcgaccagttcgccagcaaccacaccgtgctctccttcaccttcagctcgacgctgccgacgaggacgaccaacccgccgccgccatccacctcgtcagccaagacggctcatctcagcgccgccgtggccgcagccggcatagcactgttactcctcgtcctcgccatcaccatcctcattcgccgagcgaggaaacgccgccgacgcgacgacggcgtctcctacgacgactccctcgacgacgacgacgaggaggacatggagtcgggcacggggccacggcgaatcccgtacgcgcagctggcggcggcgacgggcgggttcgcggagatcggcaagctcggggagggtgggtcggggtctgtgtacggcgggcacgtgagggagctcgggcgggacgtggcgatcaaggtgttcacccggggggcgtccatggaagggaggaaggagtacaggtcggaggtgacggtgatcagccggctgcggcaccggaacctggtgcagctgatggggtggtgccatggccgccgccggctgctgctggtgtacgagctggtgcgcaacggcagcctcgacggccacctctacagcaacaaggagaccttgacctggccgctcaggtaccagattattaatggactagcctccgcggtgctgtacctccaccaggaatgggatcagtgcgtcgtccatggcgacatcaagcccagcaacatcatgctcgacgaatccttcaacgccaagctcggcgacttcggcctcgcgcgcctcatcgaccacggcatgagcctccagaccatgaccgccgttgccggcacgccgggctacctcgacccggagtgcgtcatcaccggcaaggcctccaccgagtccgacatgtacagcttcggcatcgtcctgctcgaggtggcaagcgggaggcgaccaatggtagtgacacctcgtgcagccgctgccaccgcgggtggtgggaaggacgacgacgacggcggcggacaggtgttccgcctggtggagtgggcgtgggagctctacggccggggtgatgatgatcagtcgtcgctcgacgccatcgccgacacacggctcggcggcgcgttcgaccggtgggagatggagcgtgtggtgggcgtcgggctgtggtgcgcgcaccccgacccgaaggcgcggccggcgatcaggcaggcggcggaggcgttgcagtcgaggaagttcaggatgccggtgctgccgccgaggatgccggtggcagtgtacctgcagccgttcgcggcttccaccatgaagtactacggcgacagcatgacctccgttgggtcggaggttgttggttactcgtcgaccagccttgcgacggcgacgctgtcgtccagctctagcttgccatcggccatggctaacaatgacagcttgagcccaagagaatgagggttttggttatattagaagttggtcagttggtactgccgtactggtagatggcacatggtagataaaggatatactcccatgttgcaataactcattccaatctgcttgtaatatttgaatg

SEQ ID NO: 5415 - DNA, 2300 bp, Oryza sativa
  ref <308>: DATABASE ACCESSION NUMBER: AK062594
  ref <309>: DATABASE ENTRY DATE: 2001-12-06
actggcacacaccaacccaacccgagccccccaagcgcagccatggtgttcgacgcgggcaccggcagcagtggcggcggctcgccggcggcgccctccccgccgccgccgtggcagaaccctctccgcgtgatcctgacggcggcgttcgcgcggcaggtggcggtggggcggtggttcacggtgttcgcgagcctgctgatcctgacggcgtcgggcgcgacgtacatcttcggcatctactcgccggcgctcaaggcgtcgctcggctacgaccagcacacgctcaacaccgtctccttcttcaaggacctcggcgccaacctcggcgtgctctccggcctcatcaacgaggtcacgccgccgtgggtggtgctcgccatcggcgccgccatgaacctctccggctacctcatggtctacctcgccgtggccgggcgcacggcggcgccgcccgtgtggctggtgtgcctgtacgtgttcgtcggcgccaactcgcagtcgttcgccaacaccggcgcgctcgtcacctgcgtcaagaacttcccggagagccgcggcgtcgtgctcgggatactcaaggggttcgtggggctcagcggcgccgtgtacacgcagctgtacctggcgttctacggcgacgacgccaagtcgctgatcctgctcatcgcgtggctgccggcggcggtgtcggtggtgttcgtccacacggtgcggatcatgccgtacccgcgccgccgcggcgggcaggagaccagcgtcgaccccttcttctgcttcctctacatctccatcggcctcgccgcctacctcctcgtcatgatcgtcgtgcagcggcagttcgccttctcccgcaccgcctactcctgcgccgccgccgcgctcctcatcgtcctcttcctcccgctctgcgtcgtcatcaagcaggagttcaagatccaccgcgagcgcctcgagctcgccgccgccgccccgccgccgcacaccatcaccgtcctcgaaatgtcgaaagagacggagcggtcgccgcggccttcatccccggcgccggcggagacgtcgtgggtgaagggcatgttccggccgccggcgaggggggaggactacacgatactgcaggcgctggtgagcgtggacatggcggtgctgttcgtggcgacgatctgcggcgtgggcgggacgctgacggccatcgacaacatggggcagatcgggcagtcgctggggtacccggcgaggagcaccaacaccttcgtctccctcatcagcatctggaactacgccggccgcgtcgccgccggcttcgcctcggaggcgttcgtcgagcggtggcgcctcccgcggccgctggtgctcaccggcatcctcctcctcgcctgcgccggccacctcctcatcgcgctcggcgtcccgcgcgcgctctacgccgcctccgtcgtcatcggcttctgctttggcgcgcagtggccgctcgtgttcgccatcatctccgaggtgttcggcctcaagtactactccacgctctacaacttcggcggcatggcgagccccgtcggctcctacatcctcaacgtcctcgtcgccgggaggctctacgacgcggaggcgggcaggcagcccggcgccggcctcgccgccggcgccggccgcgacaaggtgtgcctcggcgtcgactgcttcaagaagtccttcctcatcatcacggctgccaccgtgttcggcgcgctcgtctcgctcgtgctggtctggaggacgtggagattctacaagggggacatctacgcgaggttccgcgacggcgacggcgccgtcgccggagagggaggtgacggccggttgccggtggaccagcggcggcggccgccgccgccggaggaggaggaggagtcaacggcggtcaacggagggaaggagtgagccagtgaggaggaggaggaggtgggagtagttggtaggttgacttggtcaatgatgacgtcatcagcggtcactggtgatggattctatctactctggctttggctgctgacgtggaatggaaattacagcatttacagaagatctggaaaagcacagcacgaaagcggctgtaaatttggtttcaccaaaggaaatgcaaatataagtttcttacttatttgctttggaaattttcggtttggcgaaatcgcatcgaatgtaaatatgagtactgagtacatgtattgtatccgtaacttataaagagtgacataggtttgtaattggaaattcctctgttttaagagagagagagatatgagtaaaactttatttttttc

SEQ ID NO: 5416 - DNA, 1064 bp, Oryza sativa
  ref <308>: DATABASE ACCESSION NUMBER: AK062595
  ref <309>: DATABASE ENTRY DATE: 2001-12-06
atgtacatctcctctccacacacttcacacttcacctcgatcgatcgatcgcccgcagtagttagcgagagtgatcgatcgatggaagaggcggcggcggcagcggacatgaacggcggcgtgcatcagtcccggttccggcgggtttgcgtgttctgcgggagcagctccggcaagcggcgcagctaccgcgacgccgccgtcgagctcggcaaggagctggtggcgaggaaggtggatttggtgtacggaggaggcagcctgggtctcatgggggaggtcgccgaggccgtgcgcaacggcggcggccacgtcattggcgtcatacctaccactctgatgggcaaggaggtaacgggagagacggtgggggaggtgcgggaggtggggagcatgcacgagaggaaggcggagatggcgaggaggtcggacgcgttcgtggcgctgccgggagggtacgggacgctggaggaggtggtggaggtgatcgcgtgggcgcagctgggcatccacgccaagcccgtcggcctcctcaacgtcgacggctactacgacttcctcctcgccttcgtcgacaaggccgtcgccgacggcttcatccccccttcccaccgccacctcttcgtctccgcccccgacgccccctccctcgtccacaagctcgaggagtacgtgccggtgtagcaggagggcgacccggagacgcccaagctgcgttgggagatcgagcagcaggcagccgtccaggtcgtcggctacagctcctcgctccacgcccagctagctattgcagattaatctctcgatctgaattacttagtaattaatctggttgactaagtagatcatcaacgagaggatgcagaggaggaacaggtacctagtacgtacttacgaattctaaaaaaaaaggtactctgtactcctcaattatctgcctttagctagtgtattatgtacgtgctctggttattgcttattgttagctggtctggctgcatgtactctatatatatatgatgcagttctgtacatatacatcgatcgatcgagcgtgtcgcttt

SEQ ID NO: 5417 - DNA, 1097 bp, Oryza sativa
  ref <308>: DATABASE ACCESSION NUMBER: AK062596
  ref <309>: DATABASE ENTRY DATE: 2001-12-06
aattaattaattatggcagcggccgccgccgccgccgccgccgccgccctccccgccggcagccaggaccacatgaacgcgctccgctccaccgcactccgccgctccaccctgcactgggacgccgccgcggccttcttcgccccgcccttccgctcccgaagctgccgccgccgccgcgtgcctgctcctgccgccgccgccgagacgaggcccaccaggtccccctctagggctagggccagggcgcgggcgaagctactggcggacgccgatacgagggacccctggctggcctccctctcgctgctcccggtcgacgacggcgaggccgccgccgccgccgccgcggcctccaccggctgggcgattggggtggatcccgatacgggcggcgcaatcgccgtcctctcgcccgacgggtcctcgcaggtgtttgataacccgttcgtgcacatagtggtctcggagttcatccggaagcgcttggacaccaaatccatcatcgagctgctccgtggcctcgatgcgcctcctggaactacggcatatattgagaagtcaagcccatttccaactgatggaaagctgggatggtggagtacaggtttttcgtatggcctgtggattgctgctctagttgcatctggtttttcagttgttccagttgcatcacagacctggaaggcttattttgggctaacacgaagcggatcacctaaggactatagcaggcaagctgcttcaatcttgttcccggacaaggccctgtccctgaataggaagaaacatcatgggcgagcagaggcccttttgttagcggcctacggaaaaggtcttgtgctgccatcaggggagttcagcaaaacattatgacaatccgacttttatagggaggcttgactgactgatcattttgagtggactggtgcaaacattttggtatttccccatgggcgccatcaagtatataattgaagtaagcccggagggtgcgtgcactagtccgttcaattttcaggaacacattagcagtgtaccattgtgtttaacaagctactgtaaatgatattattgctgtttgaacgtttgatttg

SEQ ID NO: 5418 - DNA, 415 bp, Oryza sativa
  ref <308>: DATABASE ACCESSION NUMBER: AK062597
  ref <309>: DATABASE ENTRY DATE: 2001-12-06
acgaattaccttagaaccactcggagtcggagcaccgatcagagcggcgccctctcccacccacccccggggccgaatcgccaacgactcccacacctccgcctccgcctccgccgccgccgcggcgccggaactgggggcggtggtccggatctggcaaaagctcagccgccgcggccgcacccccagcgagcgccgcctcgccgtcgccgagagctgagatggctgggctgcctagggtttccggagtcaagctcgggggggagggggtgcgatgcgattgcgagagaagagggaaggagaggagagagagagagagagagggtgtgggtataaaagcgggtgagaaaagaaaaaaataataatataagtagcactactactcccctcgcttcgcttcgctccgcggcggagg

SEQ ID NO: 5419 - DNA, 722 bp, Oryza sativa
  ref <308>: DATABASE ACCESSION NUMBER: AK062598
  ref <309>: DATABASE ENTRY DATE: 2001-12-06
acacgctctatctctccatggctgccgccgccgcttcgctgctccacctcgccacctccgcctgctccccgccgcgcgtcaggctcgtcggccccaccaccggccggagatcgccgctgcgcgcggctccggcgccgccgccgccgcgggcgtacaaggtgacgatcgagcacggcggcgagtcgcgggtggtggaggtggaggagggcgagaccatcctgtcgcgggcgctcgacgagggcatcgacgtgccgcacgactgcaagctcggcgtgtgcatgacgtgcccggcgcgcctcgtcgccggcgaggtggaccagagcgacggcatgctcagcgacgacgtcgtggcgcagggctacgcgctgctctgcgcctcctacccgcgctccgactgcaccatccgcgtcatccccgaggacgagctgctcaaggtccagctcgccaccgccgacgactgaggcacatcgcgcgcccgccgccgccgccgtcgccggcgtgtgtgtcatctccggctagcttgtacaacttttttcccctcaagtggtatttcccgagatatttgtgacaattgctcctttgcctagctagttgtttcagttgtgataatgtagtatctactatttttgttttaagcattatgtaggatacatagtattatttctatctttttcatattctaagagacgaactacaaaagggtaatgtacaaaaatttgggg

SEQ ID NO: 5420 - DNA, 577 bp, Oryza sativa
  ref <308>: DATABASE ACCESSION NUMBER: AK062599
  ref <309>: DATABASE ENTRY DATE: 2001-12-06
actgcaccatcagctcccacaaacccagctaaccaagtttaattgccaccaagctcaccaatggcgctcgccgtgaagctcgccgtcctcctactacttgccgcggcagcagctggaggaagcagcacgacgaccgtgccgccgctggaggagaggctgggcgcggcgttcgacgggatggcggcggcggcggagggaggaggagggggagggtggatgatggagtgctggagcgcggtgacgaagctggggtcgtgcacgaacgagatcgtgctcttcttcgtcaacggcgagtcctacctcggcccggactgctgcgtcgccatccgcaccgtcacccgccgctgctggccggccatgctcgcctccatcggcttcaccgcccaggaggccgacatcctccgcggcttctgcgacgccgagctcgccgccccgcccccgccctccaccaacgcctcctccgccgcccccgcgccggcgccggcgtccgcttagcgccggccggtggcgcgttgaacacgctcttaatgtaataaaataaacttggaaataaattaattatagccagtttgcagcc

SEQ ID NO: 5421 - DNA, 901 bp, Oryza sativa
  ref <308>: DATABASE ACCESSION NUMBER: AK062600
  ref <309>: DATABASE ENTRY DATE: 2001-12-06
ctgagactgataggtggggcccacatctgtcctctaattctctccacccttctcgtttcggaacgccgccgccgccgccgtccaccgccgcaaccagcccccaccaactccggccgttcccggcgcgtcctcccgaacgcctcagcccccacccgccagcaggtggaggcctgcgccggcgcgtcgaccccggctctctctctatctctgtctcacctagtcgaggcgtggagatcggagcatggagtcggaggtggtgaagacggagatggtgctcgcggcgacgtttcccttcaagaaggtgcagatcgccgacaagtaccccaagggccagtcccgcggccgccagtggaagcacctccgcctcctcctccaggccgccgacgccacctcccttccccccgaccgccccaactatttgaatatccagtcgcccccatcaatttatccacccaagagatattgtgacataactggttttgaggcaccatatgtggatccaaggacaaagctgcgctatgctgatccagaagtgttcaagcaaatccgaatgcttcctgatgaatatgtccaaaggtatctggcactgagaaatgctgccgttgtactgagataactatgcaaaatctatgtagaagagaaatggggatttgtgctcttgagtctgttggcaaatacatctctagatctagtgtgaatgtatatctacttgtatgcttgtttcttagcaaattgtaagagatgacttttcctccgtagtgatagctgacatcatggctggggacgttcagttcgtgctttatcgacgttcatgaattactggtaatctgttctcgtgcaccatagccgaaattactttctggattgccctgatctttatcaaggaatgcaatgacggatg

SEQ ID NO: 5422 - DNA, 773 bp, Oryza sativa
  ref <308>: DATABASE ACCESSION NUMBER: AK062601
  ref <309>: DATABASE ENTRY DATE: 2001-12-06
gtgtgagaacagagagcagtagtgtactggtgtcccgacagcgccgcctccattcctctaaagtctaaacctaaaatctccgcggcgcccgctgccgctgccgtcgtccacctccggagtcgcgatggggcggtgggcgagcccaaagacccgtggcgtcggagggaagccgtaccggaatgacagctcgcaaaaggacgcgacgcggatcaaggccgggatcccaagcgacgatgagggcgacgtggatcgcgaggacgtccccttctcagagaaggaagaggccgccatgaacaggatccacgcgagagccatggccaagaaggctgccgcctccgccgcgatcgcccccgcccccgccgtcgtccccgccgcgatcgcccccgtccccgccgacgtccccgccgcgatcgcccccgtccccaccgacgcccccgacgcgatcgcccccggcccgtgaccccgtcgacggcctcgcccgcgactccatgaccaccgccatcgccactgcgtgaatccccatctccactgatgcgatcagctattgtctaattttgcttagggatgctagtcttatgttgcttaggagctaccgttgcttaggaactaccgtactaactatcccaggttatcgatccatggatgctgcgaagtacaatttgcgatgaatttcctatctatgacagatatctggttgtgatgatgttgccaagtgatatacctgattgtgatgctgatgttgccaagtatctgatatatctgttttgtgatgc

SEQ ID NO: 5423 - DNA, 505 bp, Oryza sativa
  ref <308>: DATABASE ACCESSION NUMBER: AK062602
  ref <309>: DATABASE ENTRY DATE: 2001-12-06
caccattgaccgttggcctaggcagtggcttggctgtcgccatttgccatctcgcgatgctacttgatgtcacacactgtgaagctaaggtagccctagttgttccttcttaggatacacttctattctggacgtttaactatttgttactttcaaccaaacaagtacaatctcattaacaatatactctctcacaaagtgacagattatttgccactcacgatcctctgaagtggcaaaggttaaaaaaaaatatctcttcctcgtctcaactctcaacctatatatcttcccactcctaccttacgttagaatccaatcttagtttgtcgtctaggaagaaggttttggttgactaaaatgagaaatgccatggttattgtagttggtgggcacaggttaaacattgggagttcaacgaattagtgtacagagaagaggcatatggaggttgaacatgttacaagaaaccaatgataatatcagttgcctaaaaaaaagctat

SEQ ID NO: 5424 - DNA, 1239 bp, Oryza sativa
  ref <308>: DATABASE ACCESSION NUMBER: AK062603
  ref <309>: DATABASE ENTRY DATE: 2001-12-06
atctgctcagataagctactaacttacacagttttgcatgcattgctatatctctctctcgtcgatctgcagatcgaccaagcaatacacaatggccactcgggcaaacggcagctcatgctccctggccagcctcatggcggccatcttcttcctcctagtcgtctcctcccggggcgcccatggcggcagaattgccatctactggggccagaacggcaacgagggcaccctcgccgacacctgcgccacgggcaactacgccttcgtcaacctcgccttcctctgcagcttcggctcgggccaggccccgcagctcaacctcgccggccactgcgacgcctactcgggcgcctgcgccaacctcaccgccgacatcgcccgctgccagtccatgggcgtcaaggtcctcctctccatcggcggcggcgccggcggctactcgctcgcctccaagcaggacgtgtcccacctcgcccggtacctctgggagagcttcctcggcggccgcccgtcggcgccgggcggcaggaggccgctcggcgacgcggtgctcgacggcgtcgacttcgacatcgagggcggcggcggcgacccccgctactacggcgacctcgccgcgtacctcaaggcgtacagcggcaagggcgccgccggcaaggaggtgctcctctcggcggcgccgcagtgcccgttcccggaccagtgggtcggcaaggcgctcgacaccggcctgttcgactacgtgtgggtgcagttctacaacaacccgccgtgccagtacgccgcagggagcggcggcggcgccgccaacctgctcgacgcatggcgccagtggacgtcgggggtggaggccaggtacatcttcctcgggctgccggcgtcgcccggcgcggcggggagcgggttcatcccggtggggagcctcgagtcgcaggtgttgccggcgctgaaggcgtcgagcaagtacggcggggtgatgctgtggtccaggtactacgacgatcaggatggatacagctccgccatcaagaatgccgtctgatttgatcgattgatcgatctctcgtgcctctgcacgttgtgattctatctgtgtacatttatctgcttcgattcctactcgtagtttatctgtatgcatgagagattgagagattatatggaaataaacgattatgccacatctacaagcttggtttactgaggattatccaataaagaactgttcttagtttt

SEQ ID NO: 5425 - DNA, 997 bp, Oryza sativa
  ref <308>: DATABASE ACCESSION NUMBER: AK062604
  ref <309>: DATABASE ENTRY DATE: 2001-12-06
acacaaaaaagcactagccatggcagcgtcgcgctacgaggtggaggtgacggtggcctcggcgcgcgacctcaagaacgtcaactggcgcaacggcgacctcaagccctacgccgtcgtgtggatcgacgacggcgccaagtgctccacccgcgtcgacctcgacaacgccgacaaccccacctgggatgacaagctcaccgtccctctcccgccctccacccgcctcgacgacgccgtcctctacctcgacgtcgtccacgccaacgccaccgacggcgtcaagcccctcgtcggctccgcgcgcctcccgctccgcgacgtcctcgccgacaccggcataggcgcccgagcctcccgctccctccgcctcaagcgcccctccggccgcccccatggacgcctcgaagtccgcgtcgccgtccgcgagcccaagcgctactacgacccctcgccggcgtaccctgctccctaccaccagcagtcgtcccgtgacccctacgcctacggtaacactacaactggtggctatggctatgcctatggcggggcccctccggctccgtactccgcggcccctcctgctggatacccgtcggcctatggaggagcggctcctactcaacctgcctatggctccgccgcgccacctcaacctgccgctgtcagctatggagcgcctcctgtggatgcaaagaagaagagcaagatgggcatggggggtgggctggcggttggcgcggcggccggcgttcttggcggtctggcgctggcgggcggcgccagctacctggagaacaagtttgaggatcgcgtggcggagcgggtggaggaggaccgctacggcggcggcggtggtggctacgacgactacggcgatgacgactattaataatttatatgatattcgaattgcacttgcaggggagtcagattattgtaattgagtcttgtgtttttatcatccttgtcttacaaatcaatatcaaattaaatt

SEQ ID NO: 5426 - DNA, 617 bp, Oryza sativa
  ref <308>: DATABASE ACCESSION NUMBER: AK062605
  ref <309>: DATABASE ENTRY DATE: 2001-12-06
ctctttcgcttcgctgaccccccaaaaccctagctcgagcgctcccttcttccccccacctctgcggcggcggcgggcggcgagatggcgaagtcgctgcggtcgaagcgggagaagcggctgcgcacgctgcggcgggagatcgcgcagcccttctacgacaagaaggaggcggccaaactcgccgcgcaggccgccgcgctcgaggcgcccgcgctgccggtccgcgcgcctccgccgccgtccaaggattccggcggctcccgcgccgcctccagctcggcatcggccatggacgttgagatggcggatgaaggaaataacaagtccaagtccttcttgaagccaattggtagcattagcaagaagaaggtacaacttcacttgaagatcaagaaagataaaagaaaagctaggaagaaggggaggtttagtaaaaagtaggtgtcaaagcttactctgttatgagaaccatcaattttggttagtttgaacaatgcatgtaatggtaatctcttgtgttgttgtgcacctaagtgttaaccatccattctgggtggataccgtattgaaatcagcgaaagcagtgagccagtgacaccctattcaggagcttc

SEQ ID NO: 5427 - DNA, 577 bp, Oryza sativa
  ref <308>: DATABASE ACCESSION NUMBER: AK062606
  ref <309>: DATABASE ENTRY DATE: 2001-12-06
gatgcgcgcgcgagtcttgtcgccgttgcgcacgatctggaacgcctccccgggccccggcgacgccaccgtcgccacgacggtgaccccgtcgccggcgacggtgacgaacaggttgtcgaacaccctgaggtcgaacgtgtcctcgtcgatcctccacagcttgaaggtctcccaccccgaggcgctcgtccggttcgccaccaggatggtgccgccgccctgctcggcgcacaggaggtctttgtttggaatgtcgtcgaagagggagggaaggatccagccctccgtgacgagccaacctccgaggttcaccgcccgaatggggggcgacggggcgccccgtttcgcgggccgcaccgtcctcccatcggagactgagaagaggcacggcgagcagaggaggaggaagaggaggagctcaaaatggcgcatgatgaagacgaagatttttcagctcttgatgactatcttagctcagcttgccaatgtatatatatacacaacgtagtgcagcgatcgatgcatgtgcgtgtacgaactgcgtaattaatggatagacgtgcgtgcttagaat

SEQ ID NO: 5428 - DNA, 505 bp, Oryza sativa
  ref <308>: DATABASE ACCESSION NUMBER: AK062607
  ref <309>: DATABASE ENTRY DATE: 2001-12-06
gatgtacgagcgcctgccgccgctggaacaggaggaggacggcgacgacgacagtgcggcggtgaggcggcggcggcggtcgctcaagatggccgtgtgggcgctgtcgacggcgttgagcgccgccttcgcgtggcgcgtggcggcggtcatgccggcgccggcgatgaaggccgccgtctgggggatgacgtcgacggtggcggtcgccggattctacctcctgttcgtccacaggcctgccgccatttcgtcctattccgagctggatacttgcaagcacgagcaggcgtcgtccaagctcgatcagatcctataacaaaagatttggggaagaggagcttaatgtttaatcttgtagtattcaatggaaatttaggctgtgttctttcctaggtgatctgggtgattgtcactgagttttatttcgttttccgcgtacacccttcccaaactactaaacggtgtgttttttgaaaaaaaattatataggaaagttgctttt

SEQ ID NO: 5429 - DNA, 680 bp, Oryza sativa
  ref <308>: DATABASE ACCESSION NUMBER: AK062608
  ref <309>: DATABASE ENTRY DATE: 2001-12-06
aacaaacgctaaaaaagtaacagtttctgtactttattgaagtctcgccccctcgcgaacctgaccatgtcctggaccaccggcctctgcgactgcgcggctgacacttccgtgtgctgcgaagccgtcctctgcgctggttgcttgattggccgtcaatgcgctgccctcgacaaccaggtcgacacgctcaactgcatgatgtgcatcgggtacttcttcgcccccgtgtgctgcgtctgccaggttcgccgtggcgtcgtggccaagtacggaatcgacgagagctgctgcgcatccgcgctctactcgtggctctgccccacctgctccagctgccagacccaccgcgagctgaccgcccgtggcgtgtggcccggtggcacgtgctgccacaagcagcccggcaacttcatgaacgcccccatccgctaaacgcatcgcgggggaatccctcctgacaacccacgtcctgttttaagtgaaatcaaagccaaaaaaaaaacaacaaacgctcttgtgtaaagagttcggctccgtgttcccctttttcaactctcgatccacacgagatgcaaaaaccgcgtcccagtgttgcgcagaccatgctgcgacgttcggtgggataggcaggcaacaatccaaccacacgcatcacaccgtaaggttcggcgccagcg

SEQ ID NO: 5430 - DNA, 558 bp, Oryza sativa
  ref <308>: DATABASE ACCESSION NUMBER: AK062609
  ref <309>: DATABASE ENTRY DATE: 2001-12-06
tattgagatcacatgcagtcactactatgactgcaagttagtgactgcatggtatctcatccatccattttccaaatcaagggtacatatcaaagtgctacaacaccattgctataggtatgtacagtattatttttttctgtgcgaacagtgctccgagaatctcagccattggatataacttggatggtcctaatgtgactgcttaagttgcagtcacactagtaactgcacctgaaccaaatcccatctgtccgccactcccctcgtaaacgtgcgagttacctttctagtttttctacgcatctagccctctacatgtgtttatatattaaattaaaattgatcgaaattgggaacaaattaagccagattgtcaatgacaatcctttccaagtacgtaagggctgaggcatcattacttgacacgcacagcactccgcccatccccgcggctggcctcgtccgtcgccaccacaaaagcaagactgcaagaatcgatcgagcataaccccccattgctccagcaacacaccaaggctggcacccaagcaaagc

SEQ ID NO: 5431 - DNA, 666 bp, Oryza sativa
  ref <308>: DATABASE ACCESSION NUMBER: AK062610
  ref <309>: DATABASE ENTRY DATE: 2001-12-06
acattgctacaggaaagaggggcgaggggcgaggcagccaacggggagaggagcggcggcgccgcggggcaggtcgccggcgagctcgatctgcaaccggcaccgtcgctactagggccacccgatgttgtcgtcgctgctcgggccgtccctccacccggcgcctccgtcgggacggggtcgacgttgttgccgctgctcggtacggggggcgccagatctgagtgctggtaggagaggaggcggcggggtcgtcgccgctgcatgccgccggtgggaggagaggagggggcgggggctggggggtcgtcgccgtgtgccgcctcgtcgtcccagcgccggcgctgccctcgccgccgcgctctgccgacgggtgtcgaaacaagaattcggcaataataaaagggggtagcgcatgagacctaaaagtggatgggtgcggagacaaggatttagacaggttcaggccctctcaatgaggtaataccctactcttgtttggggatttgaatccgccgggtgtgttattgatctgatgatcaggttgtgtgtcatgccccctagagggcctcctgcccaccttatataggatggagggcaggattacaagatagaaatcttaaccaatacggtatcggtttcctaaatctattttacaatattatc

SEQ ID NO: 5432 - DNA, 593 bp, Oryza sativa
  ref <308>: DATABASE ACCESSION NUMBER: AK104935
  ref <309>: DATABASE ENTRY DATE: 2002-08-28
cttgtatggtgcaaaatcgtttgatgtgataactagggtaaatgacatggttttaatcggattgggctatctgattggttatccgatttcatctgcatctgttggtgcactgcaaggcttgctgacaaacaatttggttgcactaaaaggttcttgcccaaattgcggtgagcaggtctttgcatttgtcaagacggataattccatcaaagctccccatagagcagaatgtcatgtctgcagctgcccactggagtaccgcactaaagttgagaaatccttgtcgggaactagaagaacatgggtttatggcagagtttatcttgtgaagcaagggcatccaaggaagcggaaatggttgaaagactaaattgccagtgctagatgctgaagaaagtttagaggatgattttaagttatgtggctattctgaacttctgattgactgaaacatatttagagatgttgctcttactgctccaatgtgcttatttgtttctctgttcaaccaatgtatcttgtaaagtggtaaattccttggaaagattgccaaacatgaacaaatgttaaattgatgatgcagtattatgaat

SEQ ID NO: 5433 - DNA, 733 bp, Oryza sativa
  ref <308>: DATABASE ACCESSION NUMBER: AK062611
  ref <309>: DATABASE ENTRY DATE: 2001-12-06
atcttgttacattctcatcggcaagcaaagagcaagagagaagagagaggagatggtggatgtgaagcacacggccggccacgccggcgcgaggagagtcaagctgttccgggtgccgcggcggccggccagggcggcggaggaggcgggggcgccgctggtaccggctggcgagaggaggaagaggaagatggcggtggcgaggctcggcggcggcgccggcgggcggaggcggctgttcggtgcgttccggcggctgcgggtgcggtggctggcggcgctgtaccgccgctcgctgcggcggctgcgcgcgtactacgccaaggcggtccaggacctcctcgagggcgcggcggccatgagcacgctgcgctcgcaggccgccgccgactgctcgttcggcactgcgttcgcgccggtggtcgccgtcggctactgatgagcgcgtgcatgtctgcagcaccgttctggcctgtgcatgaagaacatgaagccatggagcagtagcacccctgtgtatagacgtggttaactgtccatgatgaattccagtgctgatcttttttctctcttcattttatggatctcgagttctcgacaatgatcagtgttcatcctgttcgtaattagctagcatgtagtacaactttccggatctgaaaaaaataattatattatgttaaagaagagagaagatagtaagagaaaaaaaatatattcgcttgattgcttc

SEQ ID NO: 5434 - DNA, 1492 bp, Oryza sativa
  ref <308>: DATABASE ACCESSION NUMBER: AK062612
  ref <309>: DATABASE ENTRY DATE: 2001-12-06
gaaccaatcagcagctaaaagtcaatccacgccaccatcgatctctctatccaatccaagcgcgcaaatcaatggcagagcatttcagccacgccggcatgtacatcggctacacggcagacgccgccgcgtcctcctcctcctcctcctcgtcttcgtcgtcttcctcctcggagatgcttcggttcgacacgggctggcccgacgagacacctgcgccatcctccgtggcggggaggaggaggagcgcgggcggtgatcatcgtcaaggtcggggacagacggaggcggcggcggcgttcatcggggtgcggaggcggccgtggggcaggttcgcggcggagatccgggactcgacgcggaacggcgcgcgggtgtggatcggcacgttcgacagcgccgaggccgccgcgatggcctacgaccaggccgcgctctcggcgcgtggcgccgccgcggcgctcaacttccccgtggagcgcgtccgcgagtcgctccacgcgctctccctcggcgcggccgggggctcccccgtgctggcgctgaagcggcggcactcgaagcgaaagcggcgcaagaaagctgaactactcgccgccgccgccgccaccgccgcgacggcgaatgccacgccgcagacgcggaggatcagcaagagcacggaattgactactgcgacgacggacgagcagaagcggttcgtcgtggagcttgaggacctcggcgccgagtacctggaggagcttctctggctgtcggagatcaatggtggtagtgaccctgctgactgatcatccaaaaggttggcaatttgcaaggcacctcttgcgaattacatttcgcgcgcatgcagttgcaatggaacgtgcaaactgcaaaaagctgcatgcaagtatgcaactgcaactggaagtactacttgaacacatgcaagtatgcaactgcaagtactacttgaacacatgcatgtgtgttattgcatcctactacttgctgtctggctctctctagagtgccaataaagtgcagacaatgcaacacatgctggagcaagcaacaatttggtggtcaccaccatattatacgcacaacatgctgaagtattttcaaggtgtgtactttgggcggggactgaactttatgtctttatcggacacaaggacctacttcccaaaagctagctagcttgatgcatgcatcttgccccatgggtacacataataatattattaaactttgtatggcatgtgcccaaattagtactatcaacatttatatgtactagtatgaccgtgattttactctcgaaattcactgtacttaacaactttctatgctccctcgagtaattaaggtaaaagagagtaactcaaaaatacgttaagctaccattaaacactttcagcttgttgttaaacggaatactagctagtgtgtacaagaagatgaactgaatgaacaaaaggaaaatctagcggggaattggctcgag

SEQ ID NO: 5435 - DNA, 487 bp, Oryza sativa
  ref <308>: DATABASE ACCESSION NUMBER: AK062613
  ref <309>: DATABASE ENTRY DATE: 2001-12-06
taaatatttccgttcataactctcaaccaatattcaggtgggcattagcaattagaaagagtctcttaaaatgatctccgttacatggccaaaactctagcaacttagaccgaagaatttagagcacttacagttattaatcaaaacgttaacaagagtttctgaaatatattactcttgtttagagttcaaatttctttctctctttatctctttcgaagtatactatatagttcaaaattttcttatctgccgccaccgtttcccggcgttgattttgggatggaaacaacaccaagtcaccgtgaacgtcacgtggcatttgaaaactcaggtcagggaaaggaacccaacaatacaattataccgacttggaaaccaaatcagagggaagtagaggaggccaatttggtctcgccgtttgttgctttcatgagaaacaagaacagccaaattttcaaaacgtgggggctccgttcatccaagt

SEQ ID NO: 5436 - DNA, 666 bp, Oryza sativa
  ref <308>: DATABASE ACCESSION NUMBER: AK062614
  ref <309>: DATABASE ENTRY DATE: 2001-12-06
atgcaggttccatgacctattcgatactagtcctacacaaacataacacgccatgtcaccgaaggtcatagccatttgccttgtagcacttctccttcccatcagcataagccatggtggtagaattgggccaattgaacccagcaaagcttccagtaaggttgtggagaggggaaactacgatggtagagtggaaggttgcgaagaagatgattgcctagtggagcgtttgctcgtggctcatctggactacatctacacgcagggcaaacacaattagaagcagaggagtagatgcacgtttgcaatgagcaatccatgcaagaataaaccgccgagcagaaaaaagaaagcgagcaagcttgacgttagatgataatgtgtgtacaacctatatatcatgggaaaatagagccgctggatatcaggaagacaggaaggagcctgatatcaataattatgaagaaatatgagcacactccggaaatggaatcaagtgcgagaaggcgtccagctaagctaataactgagctaggcgcagttctctgagctacccattgtgtttttttctagagtggagaaagtatatataaagtttgtatgaagtttaagtgtttgtatgtatgtatgaagtttgtaaaggtaattatgaacttatgttgttcg

SEQ ID NO: 5437 - DNA, 699 bp, Oryza sativa
  ref <308>: DATABASE ACCESSION NUMBER: AK062615
  ref <309>: DATABASE ENTRY DATE: 2001-12-06
atccatcccgtctgccgccggcgccgatctccatcctgcgagcagagcagaggtggcgccgtcgccgcagaggagcgggagcatggccggaggcgggaggatgccgttgttgggatggtggctgatgctggtcggctccctccgcctcgcctccgtctggttcggcttcttcaacatctgggcgctccgtgttgccgtcttctcccaaactgacatgactgaaatacatggtcgcacttttggggtctggacacttttgacctgtactctgtgctttctgtgtgcattcaacctggaaaacagacctctctatctggccactttcctgtccttcatctatgctcttggtcatttcctcaccgagtacctgatataccatactatggctgtggcaaatctgagcactgttggcttcttcgcagggacatcgattgtatggatgctgcttcaatggaattcacatgggaaatctcgtggttctcaatctgttaagcagtcatgagtggtagtatttgctttgccagtgatgtacacagtgtaggaatcgggatgcttgaagaaacatcacagacggccttttccatgtggttcagtgacacattatttctatgtactttgcccccttattttttttatcaaaaaaattggttgtagcttgacaaatgagaaaccataacaataataatagctcaattcttg

SEQ ID NO: 5438 - DNA, 787 bp, Oryza sativa
  ref <308>: DATABASE ACCESSION NUMBER: AK062616
  ref <309>: DATABASE ENTRY DATE: 2001-12-06
gaggcttgcaggcaagcagatggttgaggacccggcgagctcggaccggtgcacgacgcggaaggggtctgggtgaccggcgagggcgcggccgacggctgcaacgcccacggcctcggcggcggagaggaggagatcggcgaccagcgccgccgccgccgcgcttcctccacgcgctggccaccaccgcctccacggggacctcgccgtgggcggcggccatcgtcgacctcgccgcccctagggccctccacgccggcgcacaaggggcttgccgcggaggacgagcggcgtggagctccagacgcgccgccagcggaaggcgagcgcggcggtgcgagtcgcgtccttgacgggaggcgggcgacgaggaggtcgtcggggagtgcgctgacgcggtcctcgccgtcgtagccctcggcggcggaaagcgtggcgccgttgtcggaggcgggatggccggggaaccaccggaggcggccttggacgtggcgctgtcgtcgtcgtcgtcctaggcgtcggggaagaaggtgggcgcggcggcggcggaggctagggggttgccgcggctagtgtggatggaaagctgaacattgcttcttcagctccaagatactgtaattcacgagcctttttattttgatggttgcttcttcagttcgaaaggtgtctctgtttttattcttgttcaagccatcggcaagtctgaagaacctagactgaattctatactgtagtacagttctaccatcgtcagtacagtataaagaagcaatcttttgaatcc

SEQ ID NO: 5439 - DNA, 964 bp, Oryza sativa
  ref <308>: DATABASE ACCESSION NUMBER: AK062617
  ref <309>: DATABASE ENTRY DATE: 2001-12-06
aagataactctcccacatcctcggcgcgagacgtgaacgaaacgtcccaagcctaccgccgccgcgaggatctctcgaatcgcgcaactcacagcagagggagaggaagaagccgagcgccatggacgccctcgtctgcaccaacgccttcgccaccgccatcgccgccggcaggtttcccctcccgcgaggccgctcgcccccgtacgccgcggcagccgtccccgccctccgctcccgccgctgcctcccgactcgagggctgctacgcctgcgctgcgccaggggggtggattggactgatccgtcgttcgtggcagtcgcggagaagcccgacgcgggggcggaggcatggaaggcgctcgcatccgcgggcggcggtggcatcgaggaggaggaggatggcccgtttgaggcgatcaacggtgatggaggatactcggtggaggagtctgtggtcttgccgccattcgagcagagcttggtggcggcggtggcggacagtgtcgaggacgatgcgctcagtcaggcgctcagctctaagttggatttcaaggagacgtctacttttgtcatgtatggcagtggtgctttcattgccggatggattttgtctgctgttgtttcagcaattgattccattcccttgttcccaaagatactgcaaattgtaggccttggctacacaatttggttcagcacacggtatcttcttttcaaggaaaacagagatgaactgtttgttaaagttgatgatctcaaaaggaaaattactgggtatggtgatgaataatgtgttagaatgaggctggactttagtttcgtcttgtgtttagttagattttttttatcatgctacaaaattgcaatgcctgtgcaattatatgtattgttatcggctatttgtaatgaatgaatattctttgccaacaaatcgagcagtcatctgctgttttgaatagtg

SEQ ID NO: 5440 - DNA, 732 bp, Oryza sativa
  ref <308>: DATABASE ACCESSION NUMBER: AK062618
  ref <309>: DATABASE ENTRY DATE: 2001-12-06
tcgctcgccgcttcgcctctcctgatccccctcccctcctcaagaatcctcgcgaaaccctaggcgcgcggcaggtagggcatggcgaaggatcagaacggctcggccgccggcgagggggaggcggctgcggctgtggcggcgcgcagccgcagcaagtccatagaagccgacgaggaggagcgttcgaaggggagacgggaccgggaccgggaccgccgtggcaagtcgaagaggcgggaggaggaggaggaggaggaggaggaggagggggacgccgggagcgagtcctccggcgaggactcaggcgagcggcggaagcggcgcaggaaggaaaaggagcggcggcatcggcggcgccggagccgtagcgcgagctcgggctcgtcgtcggagtctgagtccgaatccgagtcttcttactcggattgcagtgcggggtcagagagcgagacagactcagaggaggagaggcgaaggaggcggcggcggaggaggaggaaggagagggaggaggaggagaggaggcggaggaggaaggataaggaaagaaggaagaggaaggagaaggagagggagagggagagaaagaaaaaggagaagaagaaaaattcatttttcaatgagtactaaaaattttaaaaagggtaaaaacttgaagaaaatttatggaaaaaaattgtaccacatgcagaatctctcgaaaatgtcaaggcccaaatggcgccacgt

SEQ ID NO: 5441 - DNA, 556 bp, Oryza sativa
  ref <308>: DATABASE ACCESSION NUMBER: AK062619
  ref <309>: DATABASE ENTRY DATE: 2001-12-06
agaaggcaacacacacccaaacacaaacaagagcatcatctgagcgtgcagagctcacacaaacacacgtacagatcgttcgtacaagtgcaacaaacacatggcgagcggcggagggaaggcgaaggcgtcgtcgtgggcggcggcgatgagcgtgggcacggtggaggcgctcaaggaccaggccggactgtgccgctggaactacgcgttccggacgctccagcagcgcggcaggcagcaggccgtggccgggacgagcggcgccaagagcggcggcggcgcgcgtgcgctgcagcctgcagcggcggcggcggcgaggaggaaagcccagcagcaagaggaggagctgaggacggtcatgtacctcagcaactggggcccaaacaactaattgttactgagctgatcagtcagattaggatcgtgttaggtggttagattggttttggtgcttgcaagatggaactgcttgtatatgcagacgagttttgcacaagatgtatatatacgatatatatgatatggcaactaatcaagagctttggttatgcac

SEQ ID NO: 5442 - DNA, 479 bp, Oryza sativa
  ref <308>: DATABASE ACCESSION NUMBER: AK062620
  ref <309>: DATABASE ENTRY DATE: 2001-12-06
gcgctcccactgtgcgctggtgcgggtgggtggccttcaaacctagcccccgtgtggttgcagcggagcaggaaggggaagtcgggggaaaaccgagaagaattcaagaatcatgagtggtacgggatacacagttgaagttactaacctgtcaagcagggcatctgaaagtgatcttcatgagttcttttcattctctggagcgattgagcatatagaacttatcagatcaggagaatatggttctactgcttatgtgacattcaaggaaccctattccttggaaactgcagtattgctcagtggggctactattgtggatcagccagtttgtatagctcgctggggacagcctaatgaaccatacaatttctgggacacaccaaattggtatacagaggaggaaattgaatacaggacctatcaaacatgccagttcaattccactccacaagaagctttgacgattgctcaggatg

SEQ ID NO: 5443 - DNA, 603 bp, Oryza sativa
  ref <308>: DATABASE ACCESSION NUMBER: AK062621
  ref <309>: DATABASE ENTRY DATE: 2001-12-06
ataggcaaaggccaaggcaaacgcaacgcctcctcctctgcttcttcctctgctgctactgctagtgctaatcccttcctagttcctgctgctcgtgctcaagctcaagctccggtctccaacctcgaggtcaatcgcagcaggagaggagaaaaggatggaggtggagatgatggaggacgacgtgttcttcgccgagctcagcaagcggatatcgctcctcatcacggacgacgacgaggcggccgacttcggcgccgcacgcttccccgcctccgccgccgcgcccatcccgggattctcgctcgcccatgtgccgatgggcgcgtcgatggtggcgccaccggcctacacgttgtaccaccacgccgccagctataacaacggcggcggcatgatcggcgccggcgacaacgccgccgtcagggcgtggcagcagcagcagcagcagctgtgcggcagcaagggcaccggcgtgttcatcccccggtcgtcgccgggatccgttcaccccaagaaaaagggcaagagcaagggcaacgtgcacaaggcggtacggggccaagcggcgccggcgaagaaacaatcctctcaaaaatgaag

SEQ ID NO: 5444 - DNA, 668 bp, Oryza sativa
  ref <308>: DATABASE ACCESSION NUMBER: AK062622
  ref <309>: DATABASE ENTRY DATE: 2001-12-06
cttcgccgtctcgccgccgtcctgcctgcgatagccctgacctagggcggacgaactgacgaagaatcccgctcttccgggacgtcagggtgggatggccgagtttctcttcgaggacatcttcactgtcaccaggctcgaccctgatggcaagaagtttgacagagtttctcgtatcgaagctcgcagtgaccagttcgatatgtacatgcagttagatgttgccacagatgtctatcctatgcatccaggtgacagatttaccatggtcttggttcctactttgaacttagatggtaccccagatagcgccttctttacacaggctggcaggaaaactctggctgacaaatatgagtatgtcatgcatgggaagctttataagatctcagaagacaaagacacctctgatcaaaatgctaaaaaagtggagatgtatgcatcatttggtggcctcctagtgatgcttaagggtgatccctccagtgctgcgaattttgagctggaccagaggctgttcctacttatgcgcaaggtgtagaattgtcaaatttttaggagaaaatttgtcgacaaatgtataggtagtcccttacttaaataaatgggtgaactacataatatcctaatgttgatgggcctttgtgtgggtctctctatgcttgaac

SEQ ID NO: 5445 - DNA, 517 bp, Oryza sativa
  ref <308>: DATABASE ACCESSION NUMBER: AK062623
  ref <309>: DATABASE ENTRY DATE: 2001-12-06
atgccggcgcagcctgagatagactcaacttctcctcgccctcaggtccgcgtacgccgggcctaacgacgcggtggtgcaggtgggtggctgcgcagcccgagcccggcgtgtggaggagaccgcgctgctcctgccacgccacacgtcccgatttcggcagcctcgactccacgatggatttcggcgtccgagcccgcatccagagcccgtacaggtcggctgcccacttcgtcgccggcgagaggtgacaccgccgcccggcttcgtccagggtaggagttattggcggttgagtttgtggagaacaccacaccttttcccatgcccgcgaggtgtttgtggaaatgccctgccacctgggatgatgcagagtcctaattggaagtgaattgttattgtttggctttgtgagattgggaaaattgattctgtaatcttgagagtaatttggttgtatgactcatatatgctgtaatttgaatgaatgaatcagtaacttctgatgatattttct

SEQ ID NO: 5446 - DNA, 818 bp, Oryza sativa
  ref <308>: DATABASE ACCESSION NUMBER: AK062624
  ref <309>: DATABASE ENTRY DATE: 2001-12-06
tgctgtactcttctatgcttcctggtgcccattctcacaagaatgcaagccaaattttgagatattagcatctttgttcccatctattcggcattttgcgtttgaagaatcctcaatcaggccaagtataatatcaagatatgggattcatggttttccaacactatttctcttgaattcaactatgcgagtgcggtatcatggaccacggactgttaagtccctggctgctttctaccgtgatgtttcaggtttcgatgtttcaatgacgtcagaggccgtgctacattcagtagatggtattgagcttaagaaggatgctgaacaggaaaattgtccattctggtgggcacgctcaccggagaaaatacttcagcaggatacttatctagcactggcaactgcatttgtaatcttgaggttactgtatcttctctttccaaagataggttccttcgccaaacgggcgtggaggaggcatactctttttccaaacttggtgggtgtgcatgaatatttcttcacctaccttgaacaagcaagacacaaattctttaggttatacccttcgaagcgagggaatttacaggaaggggccaggaatgccactgcttgggcttccaagtcattagcatccgtctcaatcggagaaccaagcactattggaaggacaaactctacaaatgagctaagataaagtgcaacttttttgtccgcagggatatttgtacagtagagtatcaggatatgaacactaagaatctgttgtaaccggctttgttagatattgtaacatccttagaataatcacttttacc

SEQ ID NO: 5447 - DNA, 595 bp, Oryza sativa
  ref <308>: DATABASE ACCESSION NUMBER: AK062625
  ref <309>: DATABASE ENTRY DATE: 2001-12-06
tgggcagtctatgtatgttgtgttaccctggcccctctgattgcttttggcctcttgaagatctcccatttgctggttaaatcagtatttctccgggttggatgcgatgccatttccttttagagcatgtccaagtggggccttttgaatcaactgcctggctgcctgagaaatggcagagacatcgactgattttgcttgatgggctgacgatttccaatcttgaagcatttgacacagaaagcaagcatcttgtttttaagcgcttcattttctgaaggatcttgtgctgtgcaacaagatggtggtatgtggaatcatgtttcactttcagttttatttggaaaagaaaagcattttcaccatggtacttgtaccaggaaagttgttcaagatgctatctgtcctcattttccgttcaatttagtaaatggtatattatagttgaaagaaagcattaccagctaccataggaagtattatgttttcattcaaaatcttgtcaattttggccagagttccatccccaatgtacagatcgacaatggtgaattactatcagtttagtaaataataataaattagaaggtttttc

SEQ ID NO: 5448 - DNA, 659 bp, Oryza sativa
  ref <308>: DATABASE ACCESSION NUMBER: AK062626
  ref <309>: DATABASE ENTRY DATE: 2001-12-06
tatgagaagagccgcgtcttttgtgccggatctctatgccatcgatgcagattatgcactttccgagttgtgcaaggatgaacaaaagcttgagaaagtgcttctgagcagggagtttcatgtaagtttaggaagaactgttgcaattcaggtgcatcaaattgagtcccttgtcgcaatgcttcggcaaaagttccgctcacagcaacggtattggatggacttcaacaaatgggagcattttgtcaatgatgattgtacacggtcatttctttcgctagaagttacaagtactgggttgccagagattagtaaacagataacgatggtagatgatgtatatcgattacatgggcttcctgaattctataagaatccacggccacatatatcactggcgtgggcattgggtgatgttagctgcaaactgaaacaagcaattaaggagatcgaaaaatctcagagcagtctgggcacatctcaaatatctaatctgagatgcaagtttagtcatgtagtgtgtaaaataggcaagaaggtgtatgatatctgtaaacttgcagactgagagataaatttcttgtgcacttgaccgttgagttctggggttgcaacagagatatacaaatgagcatgaaaacagagtggaagtaacttgg

SEQ ID NO: 5449 - DNA, 476 bp, Oryza sativa
  ref <308>: DATABASE ACCESSION NUMBER: AK062627
  ref <309>: DATABASE ENTRY DATE: 2001-12-06
actgcagcagcagcagccgccatcacagtctcagctcactcgctcttctccagaggaggcggcggtctctcctccccccctcgccgtctgccggagatgaagtgggccgccgccgccgccgccactgcctcggccgcggccaccgccgtcgcgtccgccgccaccgccgccgccaccgagcgctgcgtcaccccatgctccaatcccacggggtcgccggcgtcgagggggaatgggcggaggagcgcggcggaggaccggttcgcgccgcggttcgacgggctgcgcttcatcgagaccctcgtcaccgctcaccgttgaaccgccatggcagagcaggattcatggcttagttaggtagctagattagcattcgcgaagagcagaatggatttcagttagcctcaggatgggtgaaagatgaacgaattagttactactaccatcattaattgactgtgctgttcttcctgctt

SEQ ID NO: 5450 - DNA, 705 bp, Oryza sativa
  ref <308>: DATABASE ACCESSION NUMBER: AK062628
  ref <309>: DATABASE ENTRY DATE: 2001-12-06
tctccagtaggcacaccactgcatcacccctctctctcctcccaaaaccctaacaatggcttcccgcctcctccacctccgccgcctcctcccctccgcccgcccgtccgccggcggcggcggcggcggcggcggtgcggtcgccgccttctcaaccgtaaccccgaccccgcgcgtctccgcgctcgtagacgagatctgcggcctcaccctcatcgaggcctcctccctcaccgacgccctccgcggccgcctcggcgtcgaccagctccctccgctggccatcctcaccggcggcgcggccccgctcgctggcggcggggcggccaccggggcggccggcgaggaggcgaaggcgaaggaggagaagatggcgttcgacgtgaagctggagggcttcgacgccgccgcgaagctcaagatcatcaaagagctgagggcgttcacgaatctgggcctcaaggaggcgaaggagctcgtggagaaggcgccggccgtgctgaaggcgggagtccccaaggaggaggcggagagcatcgccgagaagatgcgagctattggcgccaagattgttctcgaatgagagcacgagagctatgtatggcttcgtttcttgatttgtttctgtttcttgtatgaagtaaaagagagaattttgagacctaggaatcaataattaacgaaattcactatggggattttctc

SEQ ID NO: 5451 - DNA, 755 bp, Oryza sativa
  ref <308>: DATABASE ACCESSION NUMBER: AK062629
  ref <309>: DATABASE ENTRY DATE: 2001-12-06
aaaagtcagtcggccacaactcctcctccgccttgccgcgaccatcgcgaaatcggaaggcggcggcgcgatggagcggaagcccgacgagccggagaaggcagcctccggcgccggcgccggcgaccctcctccaccgccgttcttggaggtgaagtgcaggagctccggcgaggtgcggcggttcgcgttcgggacgacggcgcggtacgcgctgcacgccgtgaaccgcaagctcgcccccggcgcaccggcggcgctgcacgtcgaggccgtgaaggacggcgaggagcccgtcagcttcggccccgccgcgccgctcgccgactacggcgacggatggaagctgcagaccatcaccgagcaggacgcgccgggttactaccagacgccggcgtccgacacgagacgagatgacacgaagcagtcggcgaagaatcctcgcgaccaggagacgatggcagcgtacatcaccaagatcgtgctcgcgttcgtgttcatcttcttgctgggcgggctgttcacctacctgctcgagacgctccccgacatgttccagcctgcatctgaacctcaacctctgtagaatttactactgatttgctgatgaaaatgcagcacaaattgtatcgtttatttttgagtgattttggccttcttgataaggataaagtttgctgttttgagcctcgtacggcggtcagctgcaggccttctctttgtttctgtgcaatgtcagtctgccaaattggagt

SEQ ID NO: 5452 - DNA, 609 bp, Oryza sativa
  ref <308>: DATABASE ACCESSION NUMBER: AK062630
  ref <309>: DATABASE ENTRY DATE: 2001-12-06
agtagtccacccccaccaacctcctcctctcggcctctccatccacccccttcccatccccatcccctcctccccagtgcagccatgctggtgaccgacggtggagctcccggatagcctcccgcaggctgttcctctacctcccgtgggccatagcctccgcgccgccgcttccgacgccagcgctacctgctactgctgctcggtcagctggtgactggtgagcggcgtcaggaggaggatgaggaggaggaggaggggggggggagagcgccgacgagggtaggctcgcgccggcagagagttcgaacgacggcgttgagaggaacagcatggccggcgcggcggcggcagggtgggccctgcctgggattcctctgctttggtggctcgcgtcatcgtcgtatccgcaccccggtggatgggatctggagcttctggtagtcggtagaatggtggagatcgacgggacccaagtcatggcaagatcgatttgatttgatttgcttcttttttttttctgaatcatatgcggcatcatattgtagttcttcatccgacttacttcgattcattgatcttgtatggagtacttatttttgtgtgatt

SEQ ID NO: 5453 - DNA, 481 bp, Oryza sativa
  ref <308>: DATABASE ACCESSION NUMBER: AK062631
  ref <309>: DATABASE ENTRY DATE: 2001-12-06
ctcattataatccattgtagcatgtgattgttctgtgcctttgtgatatgtcacatagctaaggcagcgtcgacacctgcgtgcggctggttcaagcggccgtagccgaacgaggcgtccatccctgagtccggcgagcccggcatggcgctggacaatggacaagagcttcggcttctccaagcacttcgccgccaagtacaagtttggttacacctgcgctgccacctgcagaagggcgagttcaagggcgacgacggtgacgtcgccttcaaggtcaatccaatcccttctttctgtccagttcacgacttgttctccttcgctgaggttttgagtcaattttcatgtttattttcctcgcttgggtttaattaattaacacttaaatcttctcctgcattgtttagtgtttacacctgattgaattcatattatatttctgcttgattgtattgtttaatgctagactgatgttttc

SEQ ID NO: 5454 - DNA, 655 bp, Oryza sativa
  ref <308>: DATABASE ACCESSION NUMBER: AK062632
  ref <309>: DATABASE ENTRY DATE: 2001-12-06
tgatgcaatccaaatccctcgcccctcagcgagggagcagggagctggacgtgtgcgtggaggacgagacgatggggtacctgaaccggaaggacgtgcaggaggcgatgcacgcccgcctcgaaggcggcgtgcccaagtggacggtctgcagcagtgttctggagtacaagcagctggacctgcagatcccgaccatcaacatcgtcggcggcctcgtcaagtcgggcgtcccggtgctggtgtacagcggcgaccaggactcggtgatcccgctgacggggagcaggacggtggtgcagcggctggcggggtggctgcggctggggacgacggcggcggggtacagggtgtggttcgaagggcggcaggtgggcgggtggacgcagtcgttcggcggcggcgcgctgtcgttcgccacggtgaggggggcgtcgcacgaggcccccttctcccagcccgagcgctcgctcgtcctcttcgccgccttcctcgccggccgcccccttcccgactccttccagtgacgtcgtcccgaacgacgatgatcacgtctcatgtcaagcgcggaggtgcattgttgttgcgttgcaaatgcgtacgagcgatttcgtgtgcgccaccgctatatatagtactccgtattgttgctggg

SEQ ID NO: 5455 - DNA, 390 bp, Oryza sativa
  ref <308>: DATABASE ACCESSION NUMBER: AK062633
  ref <309>: DATABASE ENTRY DATE: 2001-12-06
tgcactcgcaagtgttgcggcagctgtgggcatgtggaccgtgttcccttatgcagcagccgcatgtactgcattgttcttctacctcagtcgtcgcaactccagtaactgaatgtggtgatacttcatttgcaatattgcatgttgcgacgcatgccaactcagtcctcttctgagttcagacacatccatgaatcttatatctgaacataggcttgcatgcacactaacatacccttttcccctaatgtacaattttatatattattttccttatttgtatgctagcttctgaagagctatgaaatgtagaagtatattggttcagaaagcttgtatagaagtatagaactgccattcttctgaaactgttttactcgatcttttccc

SEQ ID NO: 5456 - DNA, 594 bp, Oryza sativa
  ref <308>: DATABASE ACCESSION NUMBER: AK062634
  ref <309>: DATABASE ENTRY DATE: 2001-12-06
aggttgcaagttagttaagatggtatcagagcaatggtctgaaccctagctgccaattccccatcgccggccggcgcggcggcgtgccgccggcgtttcactgctaagcaacctcctccaattcatatttatccactgctccactgtccttttcaccgtcgcctcgtgggctatcggaccccagcgcgatttgtcgttgaccgccgtcgccgtcgccgccgccgcgactttgcccttacccgcgtgggcctgcagttgcgcagccgcgcgtggacgtcgtccaactctccgtccgccgctgtctgcgcgcttgaccatctacatcgttgctggcttgctgcacaggtcgaggccctgttcctcccattgcctgctgcggtgctgccgcttctgctttctgcttccagaaaatcagaggaggaggctctctgctatcagataaaagatcagactcaagtagctgagttgctagtgatctttggtttatacaattgttttgatatatcatggtgtcagatggaattcttggtccctatccatgtgctggtattgcctcatgttcatctatatcaactgttaccccaattgcctccc

SEQ ID NO: 5457 - DNA, 626 bp, Oryza sativa
  ref <308>: DATABASE ACCESSION NUMBER: AK062635
  ref <309>: DATABASE ENTRY DATE: 2001-12-06
attcactcatgagttaaaattttactcggagttaaattttaactcatgatgacgtaaacgaatctcggacgtccatttctcgatccaatggtagttttcaagttttcactacatatgtggtttgtactgtatattttcccttgcatctccatgtatctcaaaagttacatgagtggcacttgctactgtgcatgtagtatgtgtagcagctaggttataaatttctttatgtgtaacatgtgtgtgatgcatagtatatgcaatgtgaaacactgacacagctagaccaggtgtggggggtgtgcttgttcttgttgcaaggaagttatctggaggccatcatcaatgaagatcccaccaagggacaaaacatgagatggttggagacttgggtctgtctagtctctattcaaccatttaaagcattgcgtgtgtaggctacactcggagagagaacacagagcagccgtccaaaccgtctgaaatgataacttactctaagctagtaggagtgctagtagtaccctctatatgtgcaattttattcgttaaaaaggtttccatgcatgcttttttagtttatcaatagcctaaaccttttgaattattaagagttaattagtccc

SEQ ID NO: 5458 - DNA, 890 bp, Oryza sativa
  ref <308>: DATABASE ACCESSION NUMBER: AK062636
  ref <309>: DATABASE ENTRY DATE: 2001-12-06
tcgcgtctcactgcattgttgtggatcgagtagctatagctagctagtgatggagatcttggtgagtgcactgctcctgctcctcgtgccacccttgtccgccctcctcgccgtcgccgcgccgagcctcgcgtggccgtcggggtcgtcgtcggtgaggaagctgatcgccaagaaggtggcgccggagcaggcggcgcgcgacgagctgctgcgcgtggcgcggtacagtagcgctagcgccgccgctgccgctagtgctgtccaacaaccaggcggcagcgagagtagtcgtccggcggcggcggcggcggatgatggtgggcggccggatcagtgcgcggtgtgcctgagcggcatcgaggagggcgacgaggtgagggagctccggtgccggcacctgttccaccgtggctgcctcgaccggtggtggttgtcggcgcggccgcccgccacgtgcccgctctgccgctgccggctcctgcagagcccgtcggcggcggcggacgacggcgacggcgacggcgaggaggattcggactcggacatggtgatgttcatggcgtacctgcgaagcagtagcacctggctctagccattaagggcgtgtttagttccaaaaacttttctcaaaaacatcgcatcaaatctttagacacatatataggacattaaatatagataaataaaaaactaatggcatagtttgcatataaatcgcgagacgaatcttttgagtctaattaggccatgattaactataagtgctacaataacttacatgtgctaatgacagattgattaggcttaaaagattcgtctcgtggttttagtttttttattcgtgaccgaaaatcccttttgacatccggtcaaacgtacaacgtgac

SEQ ID NO: 5459 - DNA, 507 bp, Oryza sativa
  ref <308>: DATABASE ACCESSION NUMBER: AK062637
  ref <309>: DATABASE ENTRY DATE: 2001-12-06
accatcgatcgatctccacctcgccggagttgagagagacgacgctgcagggatcgagatcgagatcagagaggttggcaatggcggcgcgcgtggcggttgtcctcctgctactgttcggcctcgccgccgtggcggtgacggcggcgaggatcatgcccgacgacgactgcggcgacacggcgaacgccgccggcgccgccggcgtgggggaagccaagacggcgttcggcgggagcgacggccgcggggggctcttcggcgccggcggcgggccgttcggcgggttcggcggcggagttggcctcggcggcggcggcggaggattccggccgtaagacgatgactcgtaggacgacgtgtgcgcatgcgtatagtagtatagtgcaattaatgtgattccacgtgtataacgttgtgggttaattgtgccacgtcagatatatgtactaatgtacggtgagatgtatctaccgtacgctggagtttgtacggctatcgttgatt

SEQ ID NO: 5460 - DNA, 553 bp, Oryza sativa
  ref <308>: DATABASE ACCESSION NUMBER: AK062638
  ref <309>: DATABASE ENTRY DATE: 2001-12-06
ttcagtggatattcgggtttgttgctttcttcttcccccgtgcttcgccaagcgtgaggaagggtgttcttccttggcatatactgtttgggctcttcgtctacattttagccctggccaccgcagaactcggatttcttgagaagctcactttcctccaaagctcagggctcgacaaatatggcgcagaggcatttttggtgaacttcacggctttgattgttgtgctattcggtgcttccgtcgtggttgctgctgtttctcctgctcgcgttgaagaaccgcatgagtatgctccaatccctgaaagttagaacatctgtagtttacaactttacagcatatacaaacacaaccaaagaagtttgttgttgccacagtgagacctggtggctggtgttcatataactccccttgaaacaaagaaagaacatactggacatacaaagaaaggaaatatgcatatttgttgtgtgtgtatttgttatgtggttaatctatattaatatagaaggcgtcggacgtgtcactaccgtccatgccatgttcgtgt

SEQ ID NO: 5461 - DNA, 868 bp, Oryza sativa
  ref <308>: DATABASE ACCESSION NUMBER: AK062639
  ref <309>: DATABASE ENTRY DATE: 2001-12-06
gcttattacaacttaccaagagtaaactcttaacatgccccgagttcgagtgcccgtccgacgttcgggatatcgttatactgcacgacctggccgacgatatccagtcgcaccaccacctgcccgcggtggcgctggtttactaggaggcttagctggtttacttttgtgtttactgtgcctagcaacactcggtttacttggccttttcgcaacattcattgccgtaacagcttatctcggagatgtttaccgagccatcagagatgctggtggtgctgcatctggcctctacgtaaatatggccatcttagtggctgctttgtgctttgccgccttccataaattgcaacgatcattataaacaattttcttctcctatttttaatgttttattttgagtcgtcgatttatcgtcgctgttattatttttattccaattgaactctacgggccttttttctttcgcgtattttttctccttaaacaccaagatttttctactcagttcaattcttcttttttctaactacgtatcacacacagctttgcacacatacacacacatctattttccgcttaatgaccagattttttcaagcaaatgtcgatcttcgaaaaaacaaatgtatctgcaacaatatgaaataacgaatccattttggccatcatcatcatcaccaagcactcccactcaatcaacaacgatatcactttgtattcgcaaaactttttttccaacatctcaaaatgaccaacgggttttttcttttcatgtcttgtagatgaattgtttttcattgtatcagacacaagatcacctttttttctttgtgtgtgaaaaataaaatacaatgggtggctacat

SEQ ID NO: 5462 - DNA, 747 bp, Oryza sativa
  ref <308>: DATABASE ACCESSION NUMBER: AK062640
  ref <309>: DATABASE ENTRY DATE: 2001-12-06
agagagaaagaatggcttcctctacctccgggagaagaggagagctgcggcggtggtgctggcggccgtggctgtgctgctctcggcgtcacaggcactggcggcgccgtgctatccgcgcgtgttcagcttcggggactcgcttacagacaccggcaacatcgctttcctctacggcaacgactcccgccggcccacgctgtggccaccctacggcgagaccttcttccaccgcgccaccggccgcgcctccaacggccgcctcatcatcgacttcattgctgacgcgctggggctgccattcgtgcggccgtactggagcgggcggaccgcgggggacttcgcccacggggccaacttcgcggtgggcggcgccacggcgctcagcccggatttctaccgggagagaggcgtgcacgtgcgcgacaccgtgcacctcgacatggagatgaactggttccgcgatctgctcggcctgctctgcccagacgatcttgccggttatccgcattttatcctccactgccgatgatccgtttccagcagccgccagtaggtgaggctttaatgccatgaaggtggtgggagagaccagagactatattttggacttttttttttgtttaggccttgtttagttcctaaatttttttttttttctcaaaaacatcacatcaaatatttgtacacatacatggtgtattaaatatagataaaaataaaaaactaattgcacagtttgcatgg

SEQ ID NO: 5463 - DNA, 487 bp, Oryza sativa
  ref <308>: DATABASE ACCESSION NUMBER: AK062641
  ref <309>: DATABASE ENTRY DATE: 2001-12-06
atgcgaacggtactttgggttcggttgcgagattgacgaggaaacatccaacaagctggaagggctaccaggtgttctatttgtgcttcctgattcctatgttgatgccgagaacaaggactatggcgctgagttgtttgtaaacggagaaattgttcaaagatcaccagaaaggcagagaagggtggagccagttcctcagagagcacaagatagaccccggtacagtgaccgaactcgctatgtgaagcggagggagaatcaggcgtaccagcggtgaaggctcaccttacctgcaactggctagatgcatcgactcctgcgtttagaacagcagctcctgcacgagaaatgccttagattttttgtatgctgctgctgtgtaatctggtaatgttttatgcatctgggcatgtatgttttgtctacttcaatcgactaatctattgaactatggcatatgaatttgaagccccactttttggcc

SEQ ID NO: 5464 - DNA, 499 bp, Oryza sativa
  ref <308>: DATABASE ACCESSION NUMBER: AK062642
  ref <309>: DATABASE ENTRY DATE: 2001-12-06
gacgcaaagcgtcaggaagcaatgaattgcattcttgaagcctttgtccccaagcccactaccaccaaagccatcaccgtcactcaccaaccctagggcgagctctttgttcaatggccctgcaaatgcagtctctgctccattgttggccgagcagcaagagaacaaagagtaaacaagacaaggtggtgcagtaagcagggaactaaacagcagagggattcatgacactgagacacagtcaactgacccactcaagtggaagaagaccatggagcaaagtagctcttcttactgtttctgagaatattcctccctcgtcggccatagctgtgtgatttcccatggcttcattttgtaatgataagttacctgacatggtcatggtaaagtaaagttgatgaaaaaagtcagcttaggttagtaaaatgtactccactgtagaactccaaagtgacgtgatatgacgtctcgaagttgagtggcttcttttacttgt

SEQ ID NO: 5465 - DNA, 843 bp, Oryza sativa
  ref <308>: DATABASE ACCESSION NUMBER: AK062643
  ref <309>: DATABASE ENTRY DATE: 2001-12-06
agctcgattcgatccccacccaaaccaatccaagaaaccaccgcgaatcatggacaccggcagcggcggcggtggcggtggcggcggcggcggcgggggcacgagcatccacatcacggcgctggacggcatcgtgaacgtgaactcgctcttcaccctggcggccttcatcggcctggcgtggcgcccctccgccgacgggcccgagctcgccggcggcgccgaccgcctgggctccgcctgcgccgcgggggaccgcgtcgagtccgacctcgtcctgttccacgtcctcgccttcgcctgcttcctcttctccagcatcgtcgcgctctgcctcaagcagatcgtgcgcacccacccgcactaccgcctccggagcggcggcggcggatccgccgtcagccgcacggccatgatcaaccgggtggcgctccgcgtcgggatcctggcgtcggcggtgggctccgtgtgcgggtgcgggttcctgatgatggcgctcgtcaacgtcgtgcaggtcaagctcggccgcctcggctgcggcgccggcggcgccgccgcgtggggcgccgtcgtgccgctcgtctcgctcgtgcccaccgccatgctcatctacatcggcatcgtcttctacgccttcacccgctagcccaaccaccggatcaacaactgaagcgcagcaatgctagtattgattttttgcttgtgattttgagagatctagatgatgctgcattgctgccgacacggcgacattgtatatacaactatgcaagtgtatgcagcttgtgtgttcttggagttacctgctaattacctaattaatatgttcgatgttttttattt

SEQ ID NO: 5466 - DNA, 439 bp, Oryza sativa
  ref <308>: DATABASE ACCESSION NUMBER: AK062644
  ref <309>: DATABASE ENTRY DATE: 2001-12-06
gaccccagtgagttcaggcctcggcctcggcaggtagcaggagtggtggcgtcctcgtcctcagcctcgagcaagcaactaggtatgcatctgggcatgctgtgggtattgatttgggtatcaatatgtgatttggacagagccgactcgaattgagcttctttctgttttgtgatataaatcgaggcttaggagacactggcaatgtgatcctattaaggttggctggacttttggatttgtgtgattttttttctttccttgttttcccttttctaagtaactatagagcgtgcacgtgcaaggcacgttgatacatagaatgacagctcactgaaaattcagttcatccttagaccattctgtaaaggagaagcttagcaaaccgtttcttcagctatgaaatgataaatcaaaataaacagagtgatgtaagttt

SEQ ID NO: 5467 - DNA, 563 bp, Oryza sativa
  ref <308>: DATABASE ACCESSION NUMBER: AK062645
  ref <309>: DATABASE ENTRY DATE: 2001-12-06
gaaacagtgccacccacttctcagcggagcgcacaatgtcgctgaggggagggggtgaatccgccggcagcgattctccttgtcggcgagaggaggccaagagtaggactcctcggccacagccgggctcagccggcgagcgtagcgcggcggcctccgctgagatgtcgtcgaggggagggagcaaatcttgcggaggcgattcactgcagccaggcgaagccggcgagcatggtgtggcgccctccgccgccgccgtggagacaagctccgaggtcgccaaggtcaggggccaggcggccacgccctactcggctgccccctttgatgaatccatgctggtgcagcattcaacaggcaaggcgatggggaatcgtgaggctgacgttgctgctgttggtttgggtccaaaaaactcaggcctcaagatctgtccagctcgttccttggtgagcaatttatttttgtttttgtgatgcttatgcacgctgatttgtttggatatataaggaggatgtaatcacaaattttttatggggttcttctctaatctgttactgtgg

SEQ ID NO: 5468 - DNA, 1073 bp, Oryza sativa
  ref <308>: DATABASE ACCESSION NUMBER: AK062646
  ref <309>: DATABASE ENTRY DATE: 2001-12-06
atcttgcttgcttgcttgccgctctcagcctctctctcggccatcactctctttaaagctgcagccagcaagctcaagaaaaaggaagagatagaaccgatcgatcaatccaggctactccagctagcagcttcagcctgcaggccacaatgcatcgacagaggaggagcatctcctccccgggaggcaacctctcgccgccgctcctcgtggtagccgccgccgtattcgtcgtcgccggcctgagcgccgccgtccctggcgccgccgcgtacaagaactacaccgtcggcgacgacaagggctggtacgacggcctcacccaccccggcgtcgactaccaggagtgggccgacggcaagaacttcagcctcggagatttcctcatattcaacacggacaagaaccactcggtggtgcagacgcggaacgagacgctgtacaagagctgcgactacaacgactccggcccggacgacaccgtcgagtggtcggccgccgcgccggagttcagcaaggacgccgtcaccgtcgccgtgccgctgctcaaggaagggagcagctacttcttctccgggaactacgacggcgagcagtgcgagagcggccagcgcttcgccatcgccgtcgcccacggccagggcctcccgccggacctccgcccgccggcggccgaggctcccggcccctcctcctccgccggcgccgccgccgacgcgccgcccaccttcgacttcagccaccccaagaacgtgtccaactcgccggccgacacgtcgacgaccgcgccgctggacgacgccgacgacgcgccgaccaccggcggcgcgggtcggagtatagccaggctcgggtccggtctggcggcggcggcgactctgctcttcttcgtggtgcaagtgtagttcacacacatgggtgctcacatggcgcttgattaagcttttgcgcctgatttaagttatgggatttgtttaatttgttgtagtttatttttttgagctgtttgagtaggaagagtgttgtacactataccacctgagatggagtatatgatttgcttctttacgtgt

SEQ ID NO: 5469 - DNA, 621 bp, Oryza sativa
  ref <308>: DATABASE ACCESSION NUMBER: AK062647
  ref <309>: DATABASE ENTRY DATE: 2001-12-06
ctctctctcccttatctctctggattggatcggcgggcgaggcggcgtcgggcgggcgctgcgacgacgacgtgcgggcgagggctgaagcggcggcggcctcggcccgcacgcccgggcctacaatgcctccaagcataccatcgtgatgccgcctgcgagctcggcgcccatagcatccgcggccgtctcctccgccggtgagccatcgatggtgaaggagcggctccgcgtgctgggccacctcgttcccggatgccggaagctccccgcgccgatgctgcttgggccaactatgtggccgcgctggagatgcagtcaaggccatgttctcatagacctcttggccgccaccgccggtgacgcgtgcgacaggggacgccgcgtcaacgggcagcgagcggcacatgacgtcggagatcgagcagtaccgccgcagcgacggcggtggggcggcgcgaccatgcgcttgcggtggcgatcgatcccctcgtcgattaggataatgagaagctaatacacaaagccattttgatttctttcagcttggttactggcagcaatcgatttggttggttgccttgttgatcaatcggagaaggaggtgaaggtcgccggcgt

SEQ ID NO: 5470 - DNA, 1028 bp, Oryza sativa
  ref <308>: DATABASE ACCESSION NUMBER: AK062648
  ref <309>: DATABASE ENTRY DATE: 2001-12-06
aactcaagaaccgcgacctgccaagatgaccgacttccgccgcacgctcaacacgtttggcgacgcgttccccgtgagcgacgacgcgaaccacggcggcttcaacttcgacaactgccgtcgcaatgagctcatcatggctgctggaggtggcaagggcccggcgatcaaggcgatgaagacgggcacgacgatcgtcggcgttctctacaaggacggcgttgtgctgggtgccgatacgcgctccacgggcggcagcacggtgatggacaagaactgtgagaagatccattacatcgcgcccaacatctactgctgtggcgctggcacggcggttgacacggaaaacacgaccgctttgatttcgtcgcagcttgaactccaccgactgaacacggatacggagtcgcgcgtgtcgacagcgatgacgctcctcaagcgcatgctcttccagtaccagggacacgtctccgcggcgttggtgctcggcggtgtggactgcactggaccgcacctgtacacggtgtaccctcacggcagcacggacaagctgccgtttgtgaccatgggctcgggtagtctggcggccatgtcggtcttcgagaacggctacaaggatggtctcacggaagccgaggctaagaggctcgtgcaggacgccatcctcgctggtgtctggaatgatctcggatcgggcagcaacgtggacatcaccattatcaagcgcgtcaacggcgtcgtcgaagtcgtccaggatatcaactcgatcacgcccaacaacgtagcggatcttcgctcgcagatcaagcgagacatcgtcacgtccattccgcgtggggcgacacgtgtgttgagctccacgtttgagccgttccccatcgtcgtcgaagaagctactccgatggaattataagcaaatccatgacgttggaaggcccatccgactcgtaagatcccaaggcgtctttcactagaggaagccacttttttttttttgctcacgaaagagaatggagaagcaaaaatgc

SEQ ID NO: 5471 - DNA, 769 bp, Oryza sativa
  ref <308>: DATABASE ACCESSION NUMBER: AK062649
  ref <309>: DATABASE ENTRY DATE: 2001-12-06
agaaactctgcagcaaggactaaagtttatgatgatcaaagtgactactttgaaatggaaggaaatagttggctttcttcaaaggaaaagtcagacctaaagaagcagcacggggaagctcaggaagcagctgaaaaggataaagggaaagtggtcgtcacatttgatttggtgggccgcaaggtaattttgaacaaggatggagccaccgtgttggaatccgagcaccggatcttgggaccacctgaagagaaggatcagatccaccgcatacaagccaaccccacaatcagagagcagcccgtgttcatcgaaacagggccagtgaagccaaaaactgacagagctcgacagagcaagagactcaccaagaatggcctgtgcctggaggtaactgggaggctgcagcacgatgacaaggacccccagagcttcctgggtggcaagatgaagaagggtgatcatctggcgtacagttctttcggccaaccccgtgaaggggacgacttcgactgctcccaagattttgattgagcctaatttgcttgtggatggtgatggtcgatgggtgccttccattgtaggtatgtcatccccgattttggttcatactggttgttgagttctcagcttttacccagaggaggcaaaatacagaccaggctgtagaaatgctatcatacacatgaacacatccatatatacccatctccttttttgtaaggataccttggaacctattgaaaatgtgagaatggcacatttggtt

SEQ ID NO: 5472 - DNA, 529 bp, Oryza sativa
  ref <308>: DATABASE ACCESSION NUMBER: AK062650
  ref <309>: DATABASE ENTRY DATE: 2001-12-06
gcgtgcttctcttcctcgctcactcctcctcgcgtcctcgcaggagcgactcctcgctgccgccgctcctccgcgtcctcgccggagccgacgcggccgtcctccttcttccccaccgccgcggctgtcctccttgctcgctcctcctccgccccgctgccggcgccgccgcggccgtcctcctcgctcgctcctcctccgccccgctgccggcgctacgccgcgtcctcgccggagccgacttcggccccttctccggcgccggaaccgacctcgacctcggcccctagagtacaagtcccaaaaatcctgtgtctttccttaatcttttctgtacgtgtgggaattttaatcttcttccttcttgagcattggcctgtagcatttggtagttgaaaacacgacctgaaaacaagtgaccatgattttccttttttgttgaagttagtgaacaatcggataattacattgaggtgatcttcttttgtgaacttttgaacaaaatttttaacaacggttgctgtaaatt

SEQ ID NO: 5473 - DNA, 472 bp, Oryza sativa
  ref <308>: DATABASE ACCESSION NUMBER: AK062651
  ref <309>: DATABASE ENTRY DATE: 2001-12-06
actgttcatctcctcctcccctccctcccaattcgattcccaaatcccaaaattgaccacccaaatccgcgccaatccatggattggatgcctcctccgaagcccacctcgccgcgctcccctcccctcctctgggactgggccgacgccgccgtgccgggctcctcctccggcgaggtatccgccgccgccgccgccgccgcggctcatccgggaaggcggcggaaggagaagcgaggcagggcggaggaaggaggaggtggtggtggggaggtgaggtgccaggtggaagggtgcggggtggagctcgtcggcgtcaaggactaccaccggaagcaccgcgtgtgcgaggcccactccaagttcccccgcgtcgtcgtcgccggccaggagcgccgcttctgccagcagtgcagccggtgagctcgccggagtcgcgcctcctcttcctcttcctctctctctatattgc

SEQ ID NO: 5474 - DNA, 536 bp, Oryza sativa
  ref <308>: DATABASE ACCESSION NUMBER: AK062652
  ref <309>: DATABASE ENTRY DATE: 2001-12-06
taacgtgttgtacattgtacgtgccaatatatttttgcttataggttaggaagaattcggaagagagctcaacgcagtggaccaccggcattgctgaagttcagccgcctattaagtaagttcacgtgtcccttcttttgttcatgtttattaaaataagtttacactgccttgtaccatcgatgtgtcccttcttttgttcatgtttattaaaataagtctgccttgtaccatcgtatacgcagatcatcacccaaaagtatgttcaaaactgcactagcgtgaatcagctagttgcggcattctctaggaatatttctgtccgtagtttcatatgaaaccactggttgttttacagcaagatgttggtagttgttatatgaaattatcgccattaggtttaaggcagattggagaattggcattagttagtaaattagaacccctttatttcatatgattattcgtactccttagtttcaggttttgatatggggacatgggtatactggacatcccccccacccccccccccc

SEQ ID NO: 5475 - DNA, 551 bp, Oryza sativa
  ref <308>: DATABASE ACCESSION NUMBER: AK062653
  ref <309>: DATABASE ENTRY DATE: 2001-12-06
attgcgctcatcatctcaaaagctcttcttcttctccttagttgatttcatcttcagttgcttgagcttaattacagactgagagaagatgtcttgcagctgtggatctagctgcagctgcggctcaaactgctcctgcggaaagaagtaccctgacctggaagagaagagcagcagcaccaaggccaccgtcgtgctgggtgtggcgccggagaagaaggcgcagcagtttgaggcggccgcagagtccggcgagaccgcccatggctgcagctgcggttccagctgcaggtgcaacccttgcaactgctaagatgcctgcctgcatctaccatctatcatgtgtgcgtgtgaattgtgatgcagaaaaataaagaagcttggccatttgggttggtgcttgaccaatatatatggggtgtgtgtgtgtgtgtgtgatgggttaatcgatgtgctatgttattggtttcactattcacgtactatgcttgtaatggtgtatccacagatgaagtgatgaatatattaaactggtttggctattatttcct

SEQ ID NO: 5476 - DNA, 736 bp, Oryza sativa
  ref <308>: DATABASE ACCESSION NUMBER: AK062654
  ref <309>: DATABASE ENTRY DATE: 2001-12-06
atcccaagctagctagctagcagcagcaaaatatactatatcatcatcaattaattaagctagtacaattaagaagtagctaagtagtccaatacgatgggcggcggcaagaataaggtgcaggtttgtgcggtgttcgtcgttgctctgaatatggtcatctccatgcagatgggtgcagtgcaggcatgcgagccctactgccccaccccgacgccgccggtgacgccgcctccgtcgccgccgtcgggtggagggaataagtgcccgatcgacgcgctgaagctgggcgtgtgcgccaacgtgctcaacctgctcaagctcaaggtgggggtgccggcgagcgaggagtgctgcccgctgctgggggggctcgtcgacctcgacgccgccgtctgcctctgcaccgccatcaaggccaacgtcctcggcatcaacatcaacgtccccgtcgacctcgtcctcctcctcaactactgccacaagacctgcccttccgacttctcctgcccactcatctgattcttaatcttcattaccaccacaaccctagctacctaattaaggcttaagctttgcatggcttagtctgtgtgttgcagttgtgtcatacatatatacttatctcgatctatcagtgtgattattgatgatcagatcgatcatctaatatatgtatcttgttattttaatgcgtactgtcaaataaaagtttcctccagtgtacgtacgttct

SEQ ID NO: 5477 - DNA, 937 bp, Oryza sativa
  ref <308>: DATABASE ACCESSION NUMBER: AK062655
  ref <309>: DATABASE ENTRY DATE: 2001-12-06
attacatctatctcaaatcatctctctgcctcatctcaagaagaacaaagcttactatacccaagatcgatataaatttccctctgtatagagcttctttgatttcatttgctagctatgagctaccagactcctcctcctgctgccacaggtaattacgtactgctcatccattagccaagagtgcttgagcagctagctcatgtgacttttactactctgaatttgtagctaattaagctagtactatctcagttaatttgttctttctttttttctcatgatgtgcgtgtgatatcaattgcagggtacccctacccggcgcaagaagcagggcagcagcagcagcaggcgtaccctgcctacgtggcgccgccgccggccggctacccgaccaaggacggcccgcaggagcagtaccccgccggcgccggcgccggcgagaccaccagccgcggccaccaccaccaccaccaccacggcgacggattctggaaaggatggtcagttccatcagctagcttctctcctcatttctttctctttttcagattaaaatactaattcctgcttaattaattaactgtgtgatctcctgctgacgaagcatgcattctctgctctcctgtgttgtgttgtttcagctgcgctgcactctgctgctgctgcctcctcgacatgtgcttctgatgagcaagcatggtggttcatcgatcatgcatgcatggtgatcatgccatatgatgtgctgtgtgtattgtgtatatcactagttcatatatactactccagtatttattgtgtacttaaattatgtgttgagtggatgtgttgagcaccatctttttgtctgatggtgtttgtttacttgatcatatcttgttcattctgtatatttggggtcatttgtgatattcaatttggtggattatttggt

SEQ ID NO: 5478 - DNA, 627 bp, Oryza sativa
  ref <308>: DATABASE ACCESSION NUMBER: AK062656
  ref <309>: DATABASE ENTRY DATE: 2001-12-06
atttctccttgcctttcataacctcctctccatcttccctgacgaaggagcacacaagagaagacagagagaggagtacaggagatggcaggctgtgatgaagctaagtcgttggcttcaatggaggaagaggcgtgcattgagaagaagtatggagggattgcaccaaagaagcctctgatttcaaaggaccatgagcgcgcctactttgattccgcagactgggttcttggcaagcaagctgcaaacagcaacggttcaaaggccgcggttgagactctcaagcccaagctcaagagaacgcctcatcaccagctccctcctcgcaagccaacctgcgcatcaagctgagccgcgaggcatatcagaatgcagcggcagctggagacctcgaagcaacaaggggacaggtggactaagatcagtgttgtagcctgtcctaaatcgtaggtggaaagaaacagcccagcaactctgcatttgcagattagcctctctggcagttgcagcctctatgtctatcagaattcagaacggattaaccattgctcagtgatatctccattatctaaaaaaagggattaacgaacattgtcatgataaattgataatgatatcacttggtac

SEQ ID NO: 5479 - DNA, 712 bp, Oryza sativa
  ref <308>: DATABASE ACCESSION NUMBER: AK062657
  ref <309>: DATABASE ENTRY DATE: 2001-12-06
agctcctccttcagcttgctcgatcagctcaagctccagctgcagccatggcgaaggcggctctccagctgcttctgttactgtgcgtggcggcggtggcgtgggcgatggacgacggcggcggcggcggcgccgggatgacaaagatcaaggtgtactggcacgacgtggtggcggggccgaacccgacggcgatccgggtggcgcaggcggcgtcgacgaacgcgtcgtcgacctacttcggcgcggtggtggccatcgacgacccgctgacgagctcgccggcggcggcggcggcgggggaggtggtggggcgcgcgcaggggacgtacacgttcgccgaccagagggtgatcggcctcctgatggacatgaacttcgtgttcaccgccggcgaccacaacggcagcagcctggcgatcatggggcggaacgaggtgatgtcgccggtgagggagatgagcgtcgtcggcggctccggcaagttccgcatggcgagggggtacgccgaggcccgcaccgtcgactccggcttcaagtccggcgagaccatcgtcgagtacaccctcttcgtcaaggcgtagctagaagatgatgagcgacatacataagcacatttatgtttgttaaacatcgtttgttgttgtaacatgcttgatttatcgattgtttatcaagcttacaataagataagcagctccgacttgctacg

SEQ ID NO: 5480 - DNA, 980 bp, Oryza sativa
  ref <308>: DATABASE ACCESSION NUMBER: AK062658
  ref <309>: DATABASE ENTRY DATE: 2001-12-06
cagatgttaaaccatatgcctaataatttgatttagttgccagtcttatcttatggtgtcttttctcagcttttggtcatttctcattgacagcttttacactctttttttctttttctttttctctctcttttttttggtgggatagaacttttataattgggccctgctttaccaaacaaaaatagtgtaatgaaaatttgggtgctctgcaacataccatatctggtcaagaagtaccatttcagtcttcaaagcaatactgacatcttttacactaaatttagcatgggtactttttttctgccagaaagaaaatatgttgtaggaaattatcggttacaattctacacaagaatgtgcatgtatgaaacactcagaagtcaaaacgatttcacacattacatttgcctttctgtttgtgtttgcagtcataaggggaggattgtagaagagatttcgaagccaagaggccgatccagaagtcctagtccaaaacggaggtatcgtgctgactaccgagacaggggctaccgtgatgactatcgggacagacactatcgtgatgactatcaggacagggagtataggagaagccgaagcatagagaggtatgaacgtgagaggtatcaagaaaaaggctatcgtcgcaggagccggagcattagccctgattatgacaggaggcatcgcaagaatgggcccagggatgaacgttctccacgctctcgaagccctttgacctagctgaatgccctacacaatatatcatagatagcttgaggatgaatagaccggagccttgtctgcttgcttaggacgaatactgataatggtgtagtgttcaacatggctgcatttgagcatccaaggctgcttccttgttaacaagacagcaccttttgagaacaatgtagatttctgttattttttgtatctactttatttcttatatccatgtcagtgctattttttccctc

SEQ ID NO: 5481 - DNA, 664 bp, Oryza sativa
  ref <308>: DATABASE ACCESSION NUMBER: AK062659
  ref <309>: DATABASE ENTRY DATE: 2001-12-06
gtgccaaaacccttgagctctccaccctcctctgtacgcatcttccggcggcgcaccaggcggcgtcgagggcggagtgggagacagcgccagggacgtggttcgggcggcgagggcggtgcagctcctggcggcgcagtcggcaaggacctaggggggggggggggggcagcgagcagaccaacacccatttttgtccttccattcctctccaaatcaagtttctgcagcaaccggtgcaaactaaagatggcgggattcggcagcctggcacccaagaccaagaacatagtggtggctggaggactctctgctttcgtccttggcgtgtattactacaccatgagagcggtgggaggcacagatgagctgcaggtcgccattgataagtttgaaggcatgaagaaaaaggatgctgggaactcatccgccgcgggatcctaagaacagggtttagaattggctccatatccgcctctatactgaactgtggttttgtacaataatggctcaatactaggttgtgcttatgctttgacgttaagctggaataatttttgactgaatcgactatattaaaacctccccggagttgctgggctgagagcgttttggactggtgctcgcacgcggcgctatccatttttattcacatgacattaag

SEQ ID NO: 5482 - DNA, 710 bp, Oryza sativa
  ref <308>: DATABASE ACCESSION NUMBER: AK062660
  ref <309>: DATABASE ENTRY DATE: 2001-12-06
atccacatcgcggctgtgcgcggcggcgaggatgcatctccgcttcgtcccgttcccggcgatcgccgtcggcggagcgagcttgagattcctcgccgataacacacgtgcagtgggcggaagcgggaggaggcggtgctccgacgtggtcgccttctcgtcgtcggagaaggggccggggccggggtcgggggaggagcgcgagccgcgggctgaggaggcgctgcggcggctggcggagctcgactcgcagctggaggggctttccgagcccagggaacggccgccggcgccgcctcttccaccggacccttacatggaccgagatatgataactgggcggggatcaaaagatgaacttcctgaattttctccaacgtatgtaacattctcaacacttgcacttgttatcctcacgatattcaccaacgttgtgttcaatctttacatcaaaccttccgtggacggcgtcgatcagcctgtaagaattgagagggtgcctatggttaatccagcagaccagcaattcaagtagcttctagactaggcatataaatttgttatagcaagaagtgatatgatatgctagtaaaatagatcatgattcatgtgtattcaaccatatcttctttttgtatttagcacccatacgttctaaatgaatcattttgttggctctgggaattcaataatagtaggacgttttgcac

SEQ ID NO: 5483 - DNA, 814 bp, Oryza sativa
  ref <308>: DATABASE ACCESSION NUMBER: AK062661
  ref <309>: DATABASE ENTRY DATE: 2001-12-06
gcaaacctacacacactattgagcctctgtcacgagaagccaatgtactcgtgcgaccacgaatgcacggcgccaacgcacaccgcgttcggcgccaagtaccagccgtgcatcggtgtctcggggcgccctgaccatcacgccgtcgggaggctgcagcagccggctggcaaggccgccgccgccgccgtcgtttccgcggccgcgcagcctcagcgcgccgccaagaagaggcatgcggcggcgccgccgccgcgcccgtcggcgtcgacgtcgcgccgctcgtcgaccaccgtggtggcgaccgacgtgtccagcttccgctccatggtgcaggagctcaccggcttcccggcggccgccatcttccggccgctgcctcgtaggatccccgtccacgcggtcaacccgtcgcccgcggtgcgtgggtacggtggtggcgcgcttcaggggcacggttcggacacggcgactgctgccggcagcagcagcagcagcaacccgggcgtctcgaccgtgcagctgatgcagtgctcgccgcccggcgtgttcgatgggctgccggaccttgggtcgccggagttcgactcgtggctcgatttgtccgacgagtaacctctccttgtcggactggtcaatggaagccaatacaatactgtagtaaaggtttggtaattggcagtacagtactttctttctgcgcatgcatctcttaaggttagtgtgttataacatccttgaaaaaaatgatggcgtttgtactcaagctttcccaaatttgcagaaatatgcgttaatacactcatgtaatctc

SEQ ID NO: 5484 - DNA, 732 bp, Oryza sativa
  ref <308>: DATABASE ACCESSION NUMBER: AK062662
  ref <309>: DATABASE ENTRY DATE: 2001-12-06
aggctcccttttttctcttcttcccctcccgcaaccctaattttttttccccatccgcgaaaccctagccgccacgcgaaaccaaatcccgccgcgcgggatccttttccgccggattccacccgcgaatcggggttccccttacgattcgcgggcggattagcgcgaggcgcgcctccccctacctctgtgtgatccgggggtgaggttaggccggacgccggggcatcagccatgtcgaggtgcttcccctacccgccgccggggtacgtgcgaaacccagtggtggccgtggccgcggccgaagcgcaggcgaccactaaggtttgttgaaccatcggatttacacacgcacgtgccggatcatttgctcttgcctgttggttttgatcggatctgttggttgtgcgtgtgtgatttggggatcgcacgtgcggggaagctaacctttgcatggataacttgagatttgtgaggccgcgcttcgaccagatcggtcgccaatcttttagtggctgaccgtggaaagaggatattactgaccttcggtttgctaattttggttgtgccgttgaatctgaaataaccagaatagtcatggggaaaaaagtctgatctggaaggttcgaattacatttctatatattgttgtgctcccagacgatggttgcaagaaatcactcatgctggataaaattgtggatgtaagagtctgcagtcgttaaaatctgg

SEQ ID NO: 5485 - DNA, 853 bp, Oryza sativa
  ref <308>: DATABASE ACCESSION NUMBER: AK062663
  ref <309>: DATABASE ENTRY DATE: 2001-12-06
acgcacggcggagaaacagctggaacctgcactgtggagggcatgcctccgactcaccgtcacctcgcgccctctcacttcgcgtcaccgacctcgtcgtcatccccgcgctctgctccgcgccgccgcctccgagaccttgacgccggccggaagtggagacgaagtgaggcggacgatgaccacgagcggctccgtctcctcgtcgccggccgagagaggaggggtccagattcgcgccgccgccgccgctcggcccggaggagaggagagccggcgccggcggagcgaggaggggagagtcggctccgctcggccccgaggacgccgccaccgtaggtcccgctacctcgccacgcgcgcagccgtcccgccgtcgaggtcgtcgccgtcaggccccgacaaggagaggagggggcgggcagttcgccgtcgtgcgccgccgtggagccgagtgagggagagcctcatcgtcgtccacatgctccgctccgcgttgccgacctcggtgtcaccggggagctcgttgccatgtcgcttcggtatgcgccgccgccactgtcctcgtcggagaagctcactggctcgatagggaaagcgcggagaaggagaggagctcgaggttgaggccgcgtccgagctcgccggcgtctgtgccttcttgcccgccgtcctcgccccttgccgcttgccgtcctggtcagtggcatgcgaggagaatggatagagatagagggagagatgaatgtgaaaagagagatggtgggacctactaacatgggtgggacccacaaagagagtattgtttaagatacatgcactgtgaagtatagttctttacccggttatttgt

SEQ ID NO: 5486 - DNA, 1065 bp, Oryza sativa
  ref <308>: DATABASE ACCESSION NUMBER: AK062664
  ref <309>: DATABASE ENTRY DATE: 2001-12-06
caacaagatgccaaccatgatttggatggtaatgaaaaatccaccatttgtgaggacatacttgatatttgtgctgtgcaatcaaccagcacttcagagggaacaactgctttaactgatgtacctgcatcattggattgtcgaagtggaaacctgaataaactaggactgaatgaggtcctaaatagtacacgcgaccaacccagccctacgtcagttcttgatgcaccctctgaagatagcagttgtaatgaacctgaatcatctgcaagcactacatcaaaaaatgctaaagctgtctcaagatcttcagcaattgaggctgttgcttgttccttatcatgggacgacaccacttcagaatcagcattacctggcacccgagggcagtcttcttttctccctgatgtagatgacgatgaatcggaatgccatgttcttgtgcaaaatataatgtcgtctgctggattagacgatgcgcagtcgagtatgcttttcactggctggcatttacctgactgtcctcttgatccgattctgttcaacaaagtcttggagcttcgggagcaaagttcataccaaaggcttcttttcgattgtgtcaatgttgctcttgttgagatcggcgagaacaccttgctaagtacattcccatggagcaaagcacactcaagaacatggatggacgcctcctctcctgcattggggatagaagtctggagcatcctgaaagattggatttacggggcacggatgttcgtggtgagcaggagagataatgctgggatcatgatagagagagttgtgaagcaggaggttgaaggaacaggctgggtgaaaacgatgaggacgcagttggttgacattaccgagcaaattgagggtggagtctgggaggagctcgtgggagaagctgtgctggattttgttcctgcctgtcaacgatgatatgtctttgcaagttacaactgatgaatttctcccctttttttgtacactgtttatgtcattttacgccagaaacaaatgtgtactcgcttcgtctcaaaataaatcaacttctgt

SEQ ID NO: 5487 - DNA, 587 bp, Oryza sativa
  ref <308>: DATABASE ACCESSION NUMBER: AK062665
  ref <309>: DATABASE ENTRY DATE: 2001-12-06
ttgccaaggatgttttcattaatcaagaacgaaagttgggggcatcctcccgctgcgcaaacaccgcagctccatcactggccgctatttcctccccaaatcgcgttcctagctttgtaccgtgcccagacaacccaccaatctgccatgccgtttcctccgtcccagcgcgaaggagagctcgcgactcacgagaggagtcgtccgctcagctgcgccccggttgccgccgcctccgcatcgctatggaactcgccggtggcgcagcgagccacttgagggtgggttaccatcgtcgctgcccgcaaccaacgccgtcgccctgcccacaggaccacaacaccatgcctccgccgacgccgcaaccagatcgactagtcaagcatcccccgtgccgatgaaatccccagtcaagccagatcgacgaccggatccgatgcaccggccagaagaatgggctgctcagttgtaggtgagttaaactttgccatcttcctttcactcaatttgttgttttgtctaccatgattgtttcgcacgaaactgaagtgaaagaatttgtggatgaaaagaaagttcagaattgc

SEQ ID NO: 5488 - DNA, 603 bp, Oryza sativa
  ref <308>: DATABASE ACCESSION NUMBER: AK062666
  ref <309>: DATABASE ENTRY DATE: 2001-12-06
gtgcaatgacaatgagaagaagaccaaagcaaatgctgatggccatgtgaataactacgtccaggtctccagggatggtaccagcgatgaagagagagaattaagggagcgtttgactggtcaaaatcccgatcttacgaaggaggaaaggctgatgattagagagtacttggaacagtacgttgagcgatagagaattgacattggattatcgactcgttttgggctcgctgtgcaacagggaagacctgctgatgatcaacaacagatcatggagcttcccgatgaacagagtagacggagcttccaaatgttatcatcttgggtcgccatgtcaatactattaattaattagttcaaatcaaccctgtaaatggtttactcatgagtaatcacgagtcgtcgctgtaaacaaacgatgcataagacgagcaatatgcgtttgctcatagtaacactgtggccgtataacaaggtagaattaataaggctgttagactgtaataagggctgttaattaacataacaggttacaaagttgtgtaacatatatgttattaatgctgactcgtgaatggaagacaaattaattttgtttgggac

SEQ ID NO: 5489 - DNA, 626 bp, Oryza sativa
  ref <308>: DATABASE ACCESSION NUMBER: AK062667
  ref <309>: DATABASE ENTRY DATE: 2001-12-06
acacgcacactgacacacagtcacacaccatcccgctctctccatcgatctccatcacaagctagcaaaaccaagagccaagtcgagcaacacatcatacaatggcgggcatcaaccgcaagggcggcgcggcggcggcgtacgcggtggcgctgttgcttgcggcgggcgcggcggatgcggcggggtgcaacccgtcggcgctgtcgccgtgcatgagcgcgatcatgctgggcgcggcgccgtcgcccggctgctgcgtgcagctgcgggcgcagcagccgtgcctgtgccagtacgcgcgcgacccatcctaccgcagctacgtcacgagccccagcgcgcagcgcgccgtcaaggcgtgcaacgtcaaggccaactgctaaattaaactgctgctactactctactagtactaatgcttgtgcagttttgctactgctactgctagtaaataaacgtggttgccgctagctaggcagccatgatcattgtgtgcatgtttcagttcactgtcacgtatgtatggggctatatgaatgaagttctgctatgcttgctatctcttcaatgggaatcttgttgttatgttgctttgtgttacacataaaagaaaagagttcagc

SEQ ID NO: 5490 - DNA, 865 bp, Oryza sativa
  ref <308>: DATABASE ACCESSION NUMBER: AK062668
  ref <309>: DATABASE ENTRY DATE: 2001-12-06
ctgatcccccgatcccatcccctttcccttgcgaaccctagcctcttcctctcaagcgccgccgcagtcgtgttgcctcccgatcattcgccgccagatcaccgtctttgctgtcctcttaggtgcagccgctacgcacacccacggtgcgcacttcctttccccggttccccagcccagtgctgtccccctcccttcaccgtgcaaaaccctaagcgccgccaccacaagcaggtaccgttgccgccaggagatcgccctcatgtcacctcgcttcgccagatcatcgacgcaccgcctcgccgtaccggtccggcgtcgactccgcacacgcttcagttaatttcaacagagtaaaacggaaggagcgatggattctctacgccttgcaagtgcaatatgaaatgctggggatacgacatttcagattcatgcttcaagtgatcaccatatgctgataagctgagagtatgctcaaatgctcagccagaccttctcttagaggtttcacttgatgaggaaatgagtttatagatgtgtagagaatctgaaaaagatatttgggaagagatggtaggtgcatttcagacaatggcaaggagccaaggaggttcagaggttgcttaacttgatgaacctattggaaagggtgacaaagatttcgacaggtttttacttgttttgagcttaatccatatgggaactgttacagtaaactgaaattcacatttgtaattcacatgtaaaccattgacatgacagtgaaaccactggccattttgctggtatagtgatattagggccatacatgaattatagttcagtctttttttataaactttggtgatgaagttcagatctcttc

SEQ ID NO: 5491 - DNA, 857 bp, Oryza sativa
  ref <308>: DATABASE ACCESSION NUMBER: AK062669
  ref <309>: DATABASE ENTRY DATE: 2001-12-06
gctttccacatccgccgcggccatggcgctcgtcaccgtccacgcgcgcctcgccgccgccgcctcctccgcctcgccgccgcttcgctccgccgcctcctgcacccgcctccgtgccctcagtacagtcaccggaacccgcctcagcattcggcaccaacagcgccggcgctggcggcggccgaggcgcgccgccgccatcgccgcgtcgctcgacctcaacgaggacaacgtccgcctcgccatcgacgaagccaaggccgagctgggtcagctgttcgacacatcggtgggaatcacagggcaagttgatctcgcggagctggacgggccgttcgtgaagctccggctcaagggcaagttctggcacacccgcgccaccgtgctcgcgcggatcggcaactacctcaagaaccgcatcccggaaatcttggaagtggagatagaagatgagaagcagcttgatgatagccctgcagccttctgagtggcattcaccagtcaatggctccctccaatgcacattgcacaaacctgaatttctgaagttaagctgaagaaccaagtctgctggaatgcactatcctacattcctaccttacttttctggtcaacatcgcacaaattcagggatctccaattcccctacattttgattgtggagatgcgtatgatttgagactattctattttactagcactcacgagtcgcaagaacctgaaaactgtactgacgggacctacttacggagaggtttattagacgcttttcctgattctgagcttgttggtatcacctttatgtgtatttatttaaaaaaagggtgtagcaatgatgtgctgctattctgagtact

SEQ ID NO: 5492 - DNA, 509 bp, Oryza sativa
  ref <308>: DATABASE ACCESSION NUMBER: AK062670
  ref <309>: DATABASE ENTRY DATE: 2001-12-06
ttgattcaggagagcgcgggaggagaagaaacacgcgcgcagagagggcgatttggggatgaagcgcgccgggaggaaccgcgcggcgaagacacgcctcagcaatgcgtcgtgccctcgtttctccacgccgccccacctcgatagcattgaagaacgggtgaccaaatttggtcacatgcgctcacgatttgtgggccaacactaggacgtggcggcgatttttggctgctcaactacgtggaccgctcgggctgaatgccagcagggtgcactgtgaatggcctgccagccgcgcccctgcacgttatggccagctgcagtcagctcgtagtaatggcgagctgaagtcagctcgtagcaagggcatgtttgggagttttattccgaaaagcagcatgctggtaacgagtttatgagaatcttttctagctttggtcttctagttcatttttttattctatataactataagttcttagaatctgaataaaaaatgaactctttgg

SEQ ID NO: 5493 - DNA, 675 bp, Oryza sativa
  ref <308>: DATABASE ACCESSION NUMBER: AK062671
  ref <309>: DATABASE ENTRY DATE: 2001-12-06
cgatatatcgatcgacaatggttgttgcatcagcagcatcgccgtgcgagtccagtgcgttgttcgcgacgttcgaccacgacggcgacggcaggatctccgcggcggagctgcggctgtgcatgaagacgacgctcggggaggaggtgtcggacgaggaggcggggcagctggtggcgtcggtggacgcggacggcgacgggctgctgtgcgaggcggagttcgtgcggctggtgcaggcggcggaggtggaggaggaagacgagcggcggggcaccggcctccgggaggcgttcggcatgtacgagatggaaggggaagggtgcatcacgccgacgagcctcaggcggatgctgcgccggctgggctccgaccaggacatcgacgactgccgcgccatgatctgcaggttcgatctcaacggcgacggcgtcctcagcttcgacgagttcaagatcatgatgaacgcctaaaccagctgctatctgctgatccctccgctagctccatcagagcgcgcgcatccatcgatctgcagtacaagtagtgttcttgcagcgtgtcgtgtatatacacataggtgctgtaaatcatgctcagttcacttgattggtttaggtgtttatacatcattcatttcatttgttaataatgggatttatacatagtaaattc

SEQ ID NO: 5494 - DNA, 535 bp, Oryza sativa
  ref <308>: DATABASE ACCESSION NUMBER: AK062672
  ref <309>: DATABASE ENTRY DATE: 2001-12-06
agagttgcttgtacttacggagccgagatgggaaaggaagcaagcgcgatggttgcgaggagaagcaccagccgccgtgattggaggaggtggtggtggtggctgctgcctctcgcctgctgcttcgtttgttgggttgcctcgtcggcggcgacggtggcgccggcggccggtgtcgccgtgacgagccttcctggattcgacggcccactgccattctccctcgagaccggagatacgcgttacgggtctcaaaagcatcaatacgtcaatacggcgagtatatatatctataggacgcgactagaccgaaatcggtctcgcgatagctctatcgcgcgacgcgcgcccctgccagaaaaagcaaccgcgcgcccctaccaaaagaggaaagcgtgcaacgcacggctctcgcttcgcatggtatagctggcatgggcccggctaggacagagcgctgcgcgcctccttcccccctccaacccatcaaatccggacagccggcggcgtcaatccacacgcagccgccatggtg

SEQ ID NO: 5495 - DNA, 678 bp, Oryza sativa
  ref <308>: DATABASE ACCESSION NUMBER: AK062673
  ref <309>: DATABASE ENTRY DATE: 2001-12-06
gaactagctctctcaccgtcactgatacaccgagacgagctagaaattaactgcatttcgatcgtcgacatggcttccaagaactccatgtcctcctcgcttctcttcctcatggcgctgctgctctcatggagctccatcagcagcgcagctcgctacctggaggaggaggccgcgcccaaggaggagtacccggagcttccgaagcccgagctgccgccgcacctcgccgtgccggagctgccaaagcccgagctgccgcatggcgccgccgtgccggagtttccgaaggtgcctgaactgccacaccccgaggtgccggaattgccgaagcctgaattgcctgagcaccctgcggtgccggagctcccgaagcctgagctgccatcgttgcccaaggtcgagctgccgccattgcccaagcctgagttccacttcccggagccggaggccaagccatgatgaacgagcgatcagatagagcatccgcgtatagcgcgcgcgccattttatctgtactgaataatacttgtgtgtggtttttatttgcgatggttcactgtttacgtattctgtattcactatctacactggcttgtatcagtacatgattacaggttaaccatggagttgtgtttatattcatgtacaaatcaatataatggagagttttctttg

SEQ ID NO: 5496 - DNA, 998 bp, Oryza sativa
  ref <308>: DATABASE ACCESSION NUMBER: AK062674
  ref <309>: DATABASE ENTRY DATE: 2001-12-06
cagttagcagccttggactttattgcatgtgcagctgccgatgcctttgccatgactgacccaggtagccagttctcttcccttgtccaaggatatcgcatgtactatggtggtggggaccttcctacaattagaccaaacaagcgccggctagccagcatacttctgaagaatgccacaatggagtggaatgaatttgaaactagagtaagaaaactcatacagcaaactaagcaagtccatgagagaccagttgcaaggagtatattcagacatcctcgatgtcttgattgtatgtgcagaacagagaactgagatatttaggaactgtcttgtgcctatagcaattttagaagacaatgtttggtgctttggcagacagatgggtttgttcctcttttccctgaagtaccatttggaatcaaattgtaaagggggtgattggctctcactgctagcagaaacaattgcactctctgatgatggctctagcacagtttaatatgatcaactagcatttcctggcttcctgatcagacaaatttgttttggatttcaataccatggcactttcttatctcctatgtgatggtaccaaggactgaagtgtgcatccaagctgcagtgctgccagattttttgatacagctaaattgaacaatgcggttactgggagtacatcatcagcatctgtcacaaaaagaaacaatttcattttgccgagcaacgttagcagcaccattctagttttgaaggctgtcttgtttgtatcatttgacaattcaggatgcaggtttttggcaaattgagtatgtgatcttcaatatggtttctttcagtcatttgatgagtcaagtggcaactagttctcttctattctttagttgattgagtagtcttgtattatacgagccgtacataacattgttgtaacttgtaagtttatacaaattgaggaagttaaaatgaacagcaagaggaacacttatcttgttctt

SEQ ID NO: 5497 - DNA, 1202 bp, Oryza sativa
  ref <308>: DATABASE ACCESSION NUMBER: AK104936
  ref <309>: DATABASE ENTRY DATE: 2002-08-28
acaccgacttaacacttggtcatttctcatttgtgcgtcacggagtgagcagtgtacatacgttactagctcaaggctgcagcggagagagagagagagagagagagagagatgggcgctgtggctgcggttcgtgccgcggtcctggtcgtggccgtggccctcgccgcggcggcggccggcgcgtcggcgcagctgtgcgacaagtactacgacgggacgtgcccggacgtgcaccggatcgtgcggcgcgtgctgaagagggcgcggcaggacgacccccgcatcttcgccagcctcacccgcctccacttccacgactgcttcgtccagggttgcgacgcgtcgatcctgctggacaacagcacgagcatcgtgtcggagaagttcgcgacgccgaacaacaactcggcgcgggggtacccggtggtggacgacatcaaggcggcacttgaggaggcctgccccggcgtcgtctcctgcgccgacatcctcgccatcgccgccaagatctccgtcgaactgtccggaggcccccggtggcgcgtgcccctcggccggcgcgacggcaccacggccaacctcaccggcgccgacaataacctccccagcccccgcgacaacctcaccacccttcagcagaagttcgccgccgtcggcctcgacgtcaccgaccttgtcgccctctcaggggcgcacacgttcgggagggtgcagtgccagttcgtgacggacaggctgtacaacttcagcgggacggggaagccggacccgacgctggacgccggctaccggcgggcgctggcgaagagctgcccgcggcggggcgggaactcgtcggcgctgaacgacctggacccgaccacgccggacgccttcgacaagaactacttcgccaacatcgaggtgaaccgcggcttcctccagtccgaccaggagctcctgtccacgccgggcgcgcccacggcggcgatcgtcaacagcttcgccatcagccagaaggccttcttcaagagcttcgccaggtccatggtcaacatggggaacatccagccgctgacgggcagccagggggaggtccggaagagctgcagatttgtcaatggaagttaagggaggaggacccgttagctcgaaggactgagttattcttgtactgtaaaacggattgaagatcaatttatttcatttacggatttgct

SEQ ID NO: 5498 - DNA, 1345 bp, Oryza sativa
  ref <308>: DATABASE ACCESSION NUMBER: AK062675
  ref <309>: DATABASE ENTRY DATE: 2001-12-06
atggacattagctagctcagctcagctcactgccactgccgctctgcctgccggcgatcgaggagaagaccggccggcggcgagctagcaggagagggctagtgatggaggaggggttgccgccggggttccggttccacccgacggacgaggagctggtgacgtactacctcgcccgcaaggtctccgacttcggcttcgccacccgcgccatcgccgacgtcgacctcaacaagtgcgagccatgggacctccccagcaaggcaagcatgggggagaaggagtggtacttcttcagcatgcgcgaccgcaagtacccgacggggatccgcaccaaccgcgccacggactccggctactggaagaccaccggcaaggacaaggagatcttccacggcggcgcgctcgccggcatgaagaagacgctggtgttctaccgcgggagggcgcccaagggcgccaagaccagctgggtgatgcacgagtacaggctccagtccaagttcccctacaagcccgccaaggacgagtgggtcgtctgccgcgtcttcaagaagctccagtgccacctcgccaagccccgcccgccgcacgacgacgtcgacggagacggcgcctcgccgccggagatggtggacgcctcgtcgctcggcgagcttggcgagctcgacgtctcctccatcctcctcggcggcttcgcgccgccgtcgggcgagctctgccatggcggcggcggcggagacggtttcggcgcgcacaggcttcatgtcggcgcgtacatgagctggctgcaggcggcggcggcggccaaccagggcatgttccagtggccggcggccacgcaggcggggctggtcggaggcaccgtgttcgcggcggcgcacaaggcggcggggacgatgccgttcggcggcgggtgcagccagcagcaagcgcgggacgtgggcgtttctctggcgaacgtaggaggaggcgatgcgttgttcggcggggcgccgctggcgaaggtggacatggaatgcggcgagcaggcgccgcagctggacatggacgactccacatggagagccttctgaacatggccacgccaccatcaatttggataattattaagcaaaccatgcatacacgtattatatactcagttatatactagatgaagaattaatgtggtcgtcatccaagatatccacagtacagtacactacagtcagttattaattaattaatcaaaaatgaaagtgtagtgttgtcacctagaaaaaatgtgccgaaaatattttggtggagacggggccctcaagtttaatacaaagcagtaagtctattttgcatactcatcttt

SEQ ID NO: 5499 - DNA, 1229 bp, Oryza sativa
  ref <308>: DATABASE ACCESSION NUMBER: AK062676
  ref <309>: DATABASE ENTRY DATE: 2001-12-06
gctcgccgctccgcttgctgctctgctcttgcagctcccgatcccaatcagcctcaagccccgcagcacggacaccgccgccgccgccgccatggacgccgccgcttccgagatcgagttcgatatgcccggcgtcctgcgcatgtacaaggacggccgcgtcgagcgcttcgacggcacgcagaccgtcccgccgtccccatccggcgaccccgccaacggcgtcgtctccaaggacgtcgtcctcgacccggccgccggcatctccgctcgtctctacctcccgcctggtgtggagccggggaagaagctccccgtcgtgctcttcttccacggcggcgcgttcttggtccacaccgccgcgtccccgctctaccacaggtacgccgcctccctcgccgcggcggtccctgccgtcgtcgtctcggcggactaccgcctcgccccggagcagcccgtcccggccgcctacgacgacgcgttcgccgccctcagggcggtcgtcgctgcgtgccgccccgacggcgccgagccatggctcgccgcgcacggcgacgcgtcccgcgtcgtgctcgcgggcgacagcgccggcgccaacatggcgcacaacgcggcgatccggctgcggaaggaagggatcgagggctacggcgacaaggtcagcggcgtggtgctcctccacccctacttctgggggaaggaccccgtgggcggcgagtccaccgacgccggctaccgcggctcgttccacggcacgtgggagttcgtcagcgccggcaagctcggcctcgaccacccgtgcgtcaacccgctggcgtcgccggaggagtggaggcagctcggggccggccgcgtcctggtcactacggcggagcactgctggttcgtggagagggcgcgcgcgtacgcggaggggatcaagaagtgcgggtgggacggcgaggtggagctccacgagaccgatggcgagggccatgtcttcttcttgcccaagcccgactgcgacaatgccgtcaaggagctcgccgtcgtgaccgatttcgtccggcgctgttgaagccagccgcttcggttatccctcgtgtcgccggtgagcgattatactactactactcgtaactagtaataaagggaggaatatatactgtctatgattttgattctcattgatgatttgcatcattgaagtggaaaagaaaaggaatattttagttgattatgaatttcct

SEQ ID NO: 5500 - DNA, 683 bp, Oryza sativa
  ref <308>: DATABASE ACCESSION NUMBER: AK062677
  ref <309>: DATABASE ENTRY DATE: 2001-12-06
aagagagaaagctaaagaaaacactcggcaaccatgggcatggcattttcgcgcgtgtttgaacgcctcttcggcaagcaggagatgcgtatcttgatggtcggtctcgatgccgccggtaagaccaccatcctgtacaagctcaagctcggagaggtcgtgacgaccatccccaccatcggcttcaacgtggagacggtcgagtacaagaacatcagcttcaccgtgtgggatgtcggaggacaggacaagattcgtccgctctggcgccactactaccagaacacacagggtctcatcttcgtggtcgactcgaacgatcgcgaccgtgtcgacgccgcgcgcgacgagctccaccgcatgttgaacgaggatgaactccgtgattcgatcttgttggtgtttgccaacaagcaggatctgccgaacgccatgagcgcggccgagatgacggacaagctcggtctccacggtctccgccaccgtcagtggttcatccaggcttgttgcgcgacgacgggcgatggtctgtacgaaggcttggactggctttcggccacgctccagaagcggaagtagatttgtatgcaagctcgcgcttgtttttcctcctccagatccgcaagcggcaaggtttgcatatcttcctataaagaatgtatgacaatccccgttccttgttt

SEQ ID NO: 5501 - DNA, 623 bp, Oryza sativa
  ref <308>: DATABASE ACCESSION NUMBER: AK062678
  ref <309>: DATABASE ENTRY DATE: 2001-12-06
tgctgttttcgtttccgtgctgttcgaattgttgccgaggtgttggattatatttgtagataacggacgaacggttttcggcccccttcagttagatgttggatgcgtttcttatccagtagctggatgttcagttttggacggtttagatggatttctagctgcttgctacctcgaattaggtggattgggaggcggtgctacgggggttttgacttgttttgttggtttgtgcgatatgctagtagttggctaggatgtgtttagctgcaagactgatagcttgctcgagcacaaccattaggattgattgtgcggggtggatggggcgtgcatgactgctgttgtctccactctaggatcgctggaaagaggccttttggccctctattaaaaaaaaaaacagaactgaaactctgatctgttgtccttttcttgattgtgcttgcttgtttggttaaagtttcagggtgtatgaatctcatgcatgtgtcaaacatacaaatcttcctatgaaaaagagtagatgttttcttttccagacgttcgagagtaaaattatatgccatggagatgcgtaagaagtagtgtttttgttgggaagtgggagcaaggtaaagtag

SEQ ID NO: 5502 - DNA, 473 bp, Oryza sativa
  ref <308>: DATABASE ACCESSION NUMBER: AK062679
  ref <309>: DATABASE ENTRY DATE: 2001-12-06
atcaggcaaagatgctgccgcgctccgccgccttggccgcgcgatcgttcgcccgccgcaacgccagcaccagtgtcgctgcacgtctctgtacgcgcagcttcgcttcgggcaacggcagtgccaccaatagcaactccagcaagctgctggacgagagcatcatggaccatatcgtgtgtccaatctccaagctgccgctgcgatacgacgctgcgcgcggcctgatcgtctgccccgagatccgcgtcgcgtaccctattgtcgatggcgttcccgtgctcgtgccgaccgaggggcgcctgctgcgcgacgacgaagaggtgtaatgtgctcgctgtctgcgggaggaatatcaactggcgactgtctgcatgtccacgatcgacgtggaacccacaacaagacgccggtgacatcaagatgaaacgaaatcaagtacacaaaatccatttccattccgattaggtatc

SEQ ID NO: 5503 - DNA, 605 bp, Oryza sativa
  ref <308>: DATABASE ACCESSION NUMBER: AK062680
  ref <309>: DATABASE ENTRY DATE: 2001-12-06
actcacgactacctgcaggtactccacatatctggccttggacggtctagcttgcaaccaagttagtggcagcgctaggtaggcgagaggcaatgtctcgtcatcggcgacagccatcccgctcgctccccctcgacttcaacgtcgacatggacgacgagccagcggcggcggccaagggcacggcggcgcacgtcgacggcggcggtggtcagcccggccggcgccgcaatactaccgatgatgccaaatcccaggaagctgggaacaatggcaagaagctgccgccgtcgtccgccactacaggcggcggccggcccgtggcgtcgtcggaggagacagggaagaagaagtagtgcgacgacggtggatttgtcgttagccatgcatgtactgtgtgtgttgcatgccggcatgcaggtgtagttcggcctgggtaactagctatagctaggcctttgctttgtttttgtcctctccatattggtcctcatgtatcctgttttttgcccatctcaaccgacttatatatgtccctgtaaacgttaaaacgctatatgtaaggccagaaaaactttatatatgctagctttcatcccgttcct

SEQ ID NO: 5504 - DNA, 629 bp, Oryza sativa
  ref <308>: DATABASE ACCESSION NUMBER: AK062681
  ref <309>: DATABASE ENTRY DATE: 2001-12-06
acattgcaaaacatctcaggacagaaatagaggcaaactgatcagtgaacagtactgatcagtgcgtgcaaataacgacatggcttccaagatcgccatctccctcctgctcgcggcgctgctggcgtgcgccgccgcgagcggcgcggcggcgaggaggctggaggaggaggagccgtcgtcgacgacggctccggccgaggaggaagatcaggaggagccgaaccacccggccgccgtcttcccggagctgccggtgccggagcacgagctgccgccgctgcccaaggtggtggagctgcctccgttcttcccggaggctcaccttccgccgttcccggaggtcgacctgccgcccaagccggagttccccggcgtccccgagttccacttcccggccgagccagaggccaagccatgatcgatcacgattaattacgtgcaattaattaatccggtgtgaagtagatcgagtagagggtatatttgaactgttgccggtgagcatgcgggctcgatcttgtggatagttaattttcagcatggatgtgagtgtaactgggtgtgcgagttcgatcgatgtcgttgttttgagtcgttgtgtgttaataaatggatttatgattatg

SEQ ID NO: 5505 - DNA, 512 bp, Oryza sativa
  ref <308>: DATABASE ACCESSION NUMBER: AK062682
  ref <309>: DATABASE ENTRY DATE: 2001-12-06
gagctagcacagcaactcatctgtcgagggagtggtgctgtggtggtggtggtcatggactcattgggcatggccgcctcgtccgagccaaaggcatgtgaagcgctcggagtcagagagaccagggctgggctggcgcctgctcgcttcccgagagaaccccttgtgaagattcgagccaaccccttcccccttcctcttctctctctttttctctcgcttctcctcttctttaaagcatggaccagcgcctagtagcatctccatccacggcagtaggcagccggtgccatgggaggggggaagtaggagggtttttcttcttcttctttcttctctctcgttttctcgcagaatcatctgtgtgcagattccatgcttttcgttagggttagcctattgtgctaagcttgttttttcttccatggcttcttgttcttattcgtttggttatgttgagctgttcttgtcgttgctggaaagtgttgtggacgttgagctcctttcggtcc

SEQ ID NO: 5506 - DNA, 1021 bp, Oryza sativa
  ref <308>: DATABASE ACCESSION NUMBER: AK062683
  ref <309>: DATABASE ENTRY DATE: 2001-12-06
attccgttctacagcgacgttgtgagtaacgcctcctctctctctctgagaagcgcggagcggagttaagagagggagagacgcagcaaccaacagcacgcgcggggctgagggggatgaaggccgagaaggcagcggtcgccgtcggcggcggcggcggcggcgacgagtggcggtgccggaagcacccggtggcgagatccggcggcggggtgtgcccgcactgcctccgcgacaggctcctccgcctctgccccaactgcgcgcacgtgcgaccctgcccctgcacgtgcgcgtccccgtcctcctcctcgtcggcgtccggcgaagcggtcggccgggtccacaccctcatcgagcgggagcaccggattgcgcggtcacggtccgtcgccgcgtcctcctccctcgcggcggcctccaccgcatcagccactgccggcgcggtcggggggaggcggaaggcgagggtctgggggtggccgccgttctggaagcccgcggccaaggacggcgttgctgctgcggcggaggaggacgaggaggagggggggatggggctcgcgaggtcgagctcggtctccgcgacggtagtggaggcaaaagcggcggccgcggcggcgaaggcgcggtgggggtggcacttcccgagcccgctcaaggcgttccggcaccggagatcgtcggcgagcatgccggagcgaggatgagtgagatggctcggcatggccggaaaaagcgatcagtagggatgtgtgctgctttagaggactaaattaattaattaactagacgggggagattacaggagatttttccttttggcctttttgtggcttcgcgtgctaatcttatgattaaattagaccaaactccaaagcctgtgatttgggcgtaatgtgtgcatatgctcctgccagtggtgttctcttcgttgcttttgctcctttttagcgtgcttgaaaacgttgtagcctgtgtacatcaaattgggaattttaaggtcgctgatttgatccgc

SEQ ID NO: 5507 - DNA, 613 bp, Oryza sativa
  ref <308>: DATABASE ACCESSION NUMBER: AK062684
  ref <309>: DATABASE ENTRY DATE: 2001-12-06
tgtgcaagaggcatttgatactcaattgaaattcagtacggcttttcaccctcagactgatggtcaatctgagcggactattcaaactttagaggatatgttgagatcatgtatcctttcatggaaaggcagttgggaggatcatttgccgtttgtagaatttgcttacaacaatagtttccatgctagcattcaaatggcaccatatgagtcactttatggaagaaagtgtcgatccccattgtgttgggattccataggggagagagctattttaggacccgattgggtacaacagaccacataacggatagcagaaatacgacaacacatgcttgcagctcaaagtaggcagaagagctacgccgatgtcagaagacgagaattagagtttgaagtgggcgatcaagtacttctaaaggtatctccaaccaaaggtgttgtgagatttggaacgaaaggcaaactcagccttaggtatattggtccattctcgatagtggaaagagttggaatcctagcgtatcgccttgagttaccagagtccatgaaaggtgtacatgatgtattccatatttccatgttgagaaaatattgaacatcatattaccgt

SEQ ID NO: 5508 - DNA, 668 bp, Oryza sativa
  ref <308>: DATABASE ACCESSION NUMBER: AK062685
  ref <309>: DATABASE ENTRY DATE: 2001-12-06
aactaacgctaaaaaagtaacagtttctgtactttattggaggacactcaccaaaccaacatggccgccaagacgaagcagaccgctgtcaagaccaagaccaccaccgcccgcgctctgggcaccaagacgggcaagaagtctgccggcagctccggcgcgagcggcgtgaagcgcgctcaccgctggcgcccgggcacggtcgcgctgcgccaggtcaaggcgctccagaagtccacagagcttttgatcgccagggcgcccttctcgcgcctcgtgcgtgagatcgccgagtcgcacaaggccggcctgcgcttccagtcgtccgctgtcgccgccatccaggaggcgacggaggccttcgtcatctccctgctcagcgacgccaacctcaccgccctgcacgccaaccgcgtcacggcgctcccccgcgacctgcagctcgtccgccgcctccgtggcgagcgcctctgagcacgcgtggtccgatgacctagacgacgggcggcgcagacactcgtaacaacggaaggaagactcaaggggcgacgtgcgaatccaccccaccaaaacccacaatacaaatccacggtcaccaccccatacgcgatgcccccattttgccccccagcaagtgcagggttatcgacaaaaaacgctgacggatg

SEQ ID NO: 5509 - DNA, 499 bp, Oryza sativa
  ref <308>: DATABASE ACCESSION NUMBER: AK062686
  ref <309>: DATABASE ENTRY DATE: 2001-12-06
attcaagcgaggagacggcgacggcaacctactccaacctctcgagaatggcgaacatcgacctctagggtggagaaggacggatctggaggacgcacaccctcatccgcaatggtggccctgaaacggtgttcaagccggaaagaagcggaaggctgctttcaaccttgtgcagcactaacggacttcaaccccggcgatcagcttccaggccggcatcgatgcgtatagggaggaggcccatgtagacgctggttgctgcgtcggatctggacagattctggagggaggccggcgcatgctgcagcaccacggcgtgcttctcaggccatccatctctgctgtgtttatccttccatggatgggagatgcgtttctttttttttttctctcttcgctggttctgtagtttttcacgcagagattttgtacgatttatatgcgcatggttgaatgtaatactgagcggcggcaataaagaagatagataggattgctg

SEQ ID NO: 5510 - DNA, 620 bp, Oryza sativa
  ref <308>: DATABASE ACCESSION NUMBER: AK062687
  ref <309>: DATABASE ENTRY DATE: 2001-12-06
caagcatataggttgcaccaggaactcccagatgcaattttaaggcaggtacgggagtgtggtcatattcctcatgttgaaaagccaagtgaagtgttaaaacatgtccttgattttctcggaactgagaggaggccagaaaaggcagagcagggttcttccttaccatcgacagttgggacctgctgaaacagaattggatccttaaggctagggtgtagatggtacatgtacactgttggctcaatgatgcacatgtgagtcggtcgatatgcttgggaagttgcaatgctctgtccatgctgttcgactcagaagatgcttcacagtaaagttggaatttgttctcagcacatgttctgtcttctgcaaaaggggggacaataatcctgttggaggtggttccgaggctgtgccacggagatggaagaattggcataggaacatattgagcaggacatctctgctgatcagctgctactcacttttaggttgttagtcagatagtgttgcaaagatgtatcattccttcctctgttctttctcgctgaacatgttgaataaacttcaagtatgtttaagactgtctagactgggaatatgaaagctatgtttatctt

SEQ ID NO: 5511 - DNA, 690 bp, Oryza sativa
  ref <308>: DATABASE ACCESSION NUMBER: AK062688
  ref <309>: DATABASE ENTRY DATE: 2001-12-06
cagatggatggaattgaggatgttatgtctggcacaactgaattaagagttgaaaaggagattgaagttttgtctggaacctcggtacctgagagcacaataggagaactattaccaggttcaacggaaattagtacaaccaggcaccctgaaccagttgatgataggaatcctatggagccccctatgggtgaacaaaaagcagaaagctgatgaaaaatcaggcgaaatagaaacagactcgtgggaaaaggtggatgtcataatgatgattatggatgtgcaggatgcatggggaacaagtcaaaccattcattcatgtataatagaactgctgatgtattgatcttctgcccctgcatgcatcatacaactgctgaccatgcagcattctctcatggagctgcttaagttttcatatcttcgccaatatgctggcaacattcgaatgcggaatgctgaaaatagccagctctcattcttaaacgcgtagtgtgatctgcagtctgctcgtgtcaccgtggtaaatactagtaactgattggtgatctgtggtttcgatgctttagtttctgtagttggtgctgttagcacaacaattttgactcggattcaggccgatgaatgttatcatattattcatgatttattttgtaaacaactaagaacatcaatattattttcccatgt

SEQ ID NO: 5512 - DNA, 490 bp, Oryza sativa
  ref <308>: DATABASE ACCESSION NUMBER: AK062689
  ref <309>: DATABASE ENTRY DATE: 2001-12-06
cagatgcggaaagcacaaattctttaggaccagtaactgatttggcgagccccttggatccattctccattcacccaataatggatcttcttatgggcaactattatttagcattcacaaatgaatcattgtttatggcggtaactgtagtttttttactacttcgagtttattttctatatatatgggtccgtgcagcatttccacgatatcgttatgatcaattaatgggacttagcgatgatccaaagctaaaagattaaaaaaaggcgagagcagcataatcgttagttaggggacgggcccgtatagaaagtcaatccttctttttccgatatgccgccccgcaagcaaggagtgccgcgcacgagcggagcgaaaactaagcaaggggaattccgtcattccatggaaagcatgcgaaatcctttgattgtttatagaatcaaaatcactatatagtctttcttgttccacttgcaaggcaagg

SEQ ID NO: 5513 - DNA, 646 bp, Oryza sativa
  ref <308>: DATABASE ACCESSION NUMBER: AK062690
  ref <309>: DATABASE ENTRY DATE: 2001-12-06
atccatcgccggcgacgaggagacgctgactgaacgaagcttacctagctactcgatcgatcatccatcagtctagatagatatggcggctttgaacttcaaggcggtggccgccgtgatggtgatggcgatggtggtggcggcgccgggggcgtcggcggcgataacgtgcgggcaggtggggtcggcgatcgcgccgtgcatctcttacgtgacggggaggggtggcctcacccagggatgctgcaacggcgtcaaggggctgaacaacgccgcccgcaccaccgctgaccgccaggccgcctgccggtgcctcaagaccctcgccggcaccatcaagtctctcaacctcggcgccgccgccggcatccccggcaagtgcggcgtcaacgtcggcttccccatcagcctctccactgactgcagcaaggtcagctagatcgattaatcctgcgtagaccgaccgatcgatatatcgatcgatgctggctcgcagttgatcaactagccaaaataatagctacagtaaaaataacagctggggcatatcattcagcgctggtcatctctctctgtatctctgtatactttatgttgcacgctccgtgcgtgcatcagcatgctatcttaattttcttgagtctgt

SEQ ID NO: 5514 - DNA, 526 bp, Oryza sativa
  ref <308>: DATABASE ACCESSION NUMBER: AK062691
  ref <309>: DATABASE ENTRY DATE: 2001-12-06
aaccagactcagctcaccattgcccatcagcacaacaaacacacacacacacacaacacacagagtaaaatcagtaaggaggagaaacgaggatgaagcttgtggggagcgagaggaggcagaggggaggaggcttcgggagggccatcaagcagcagagggcgaggctctacatcatccagcgctgcgtcgtcatgctcctccgctggcaagactgatccccaccaactcgatcctccaaatccatccctcgatcctcctcggtcggtcggttcgttgcctcgttggttgggtcgctccttcgcggaaagttttggttcttttttggttgtgtgctgtgccagaatggtgtcggccgtttgtacatagaggccaacaaaaaaaaatggtacaagtagcagtagcagtagcagaagtaggattttagttctagtgttcgcgagtgtgtgcattgtacaatcaccatgtcactactgtcgaatgcaaatacgatgaaccaagtgagaacatatgattccatcgcctg

SEQ ID NO: 5515 - DNA, 1182 bp, Oryza sativa
  ref <308>: DATABASE ACCESSION NUMBER: AK062692
  ref <309>: DATABASE ENTRY DATE: 2001-12-06
tgtcgatgattacttgcggaacttgtcagcagatgtaattgccagggcttgctttgggagtagcttcacaaaaggagaagaaatattttgcaagcttaggcagctccaaaaagtaattgctcagcaagattcgtttgttggtctgtctgcactgtggaaatacctgccaaccaagagcaaccaagaaatacagatgctggatgaacaagtccgcttactgatcctggatgtcgcaaaggaacaacaccactaccaagactcacacaacagtcttgtcaacgccatcattgatggtgcgcaggatggtcgcagcgctgcagaggctgaggactttatcgtcggaaactgtaagaccatctacttcggaggtcacgagagcacggcggtcaccgccatctggtgcctgatgctactcgccacgcactctgaggcaatggaggtttgccggggaaggtcgacattggacgtggacgcccttcgccggttaaagattgtgacgatggtgatccaggagacgcttcggctgtacccgccggcgtcggtgatgatgcaggaggccctgacggacgtgaagcttggcaacatcgaggtgcctcgcggcaccatcgtgcaggtgcccaggctgatgctgcacctggacaaggaagcctggggcgccgacgccgacgagttccggccggaccggttcgcgaacggcgtggcggcggcgtgcagggcggcgcacatgtacgtgccgttcgggcacgggcccaggacgtgcatcgggcagaacctggcaatggcggagctgaaggtggtgttggccaggctgctgacaaagttcgccttctcgccgtcgccgaggtaccgtcactcgccggcgttcaggctgaccattgaacccgggttcggcttgccactcatggtgacaaagctgccatgagctagcagccctgttactcacacccacccagtcgattcatgacagctccagttataattgctggccacagacagcaatgcttgttataataaagctccttttttgagatgaagttgttaagcactctaagctcgttgaacccaatcaaagggttttatgatggagaacattgttgcgatccattcttttgggttgaaaaagtaagagaggccatcactcccttttgtatgaaaaaaaaaaaggcatttgtctggtttgcc

SEQ ID NO: 5516 - DNA, 660 bp, Oryza sativa
  ref <308>: DATABASE ACCESSION NUMBER: AK062693
  ref <309>: DATABASE ENTRY DATE: 2001-12-06
gtttcctcttcccttcccccttcctcctcctcctccccctcctccggtgcggtgcggtggagtccccttcctcctcgcgctcctcctcctcctcaaccctactccttctcctcctcctccgaatccaaacctgacacacagaggcggcagcgagaaggtggaggagaaatttgaacggaaaaggttgggggatcgcatcgcaacgaacccagcactgcagcccccccgattccgattgggtggggggtcggatcctcggatccccccgcgccgccgataattcggccccgcccccgcccagatccccgcgattccggcgccggcgccggggatgagagccccgaggacatggtcgccgtggcacgagtgaggcggccccggttgctgcgccaccaggaggaggggaggaggaccgcccgcgcccgcgcccgcggcggcggcggaggaggtgtctgcggtggtggtggtggtggtgacctgaggcggaggagggaggaggtggtgggtgatccggggcccgaggcggccgtgccatgtctcgctgcttcccgtttccgcccccaggatatgagaagaccgcccgccccgacggccagctagcctcgcacctgctcgaaaaggagaaacacaaggagaagaagcataagaaggacaagaagg

SEQ ID NO: 5517 - DNA, 727 bp, Oryza sativa
  ref <308>: DATABASE ACCESSION NUMBER: AK062694
  ref <309>: DATABASE ENTRY DATE: 2001-12-06
acaaacgtacgtacggtctcactcactcactcgcaccaccggacctcacctgccgcggccatggagttgctgctcctcccttctcgaggcgccgccacacgcccgcttcaccaaccgagccggcgacgcgtcgccggcgtgttcaccgcccggccggcggcggtggcaagctccagcaacgtcgaggtcatcgacaccaccgctgcggcggcggcgaggggggacgtcgccaagaaccgccaagaatggcgcgcggcgggcgggctcgggctcgggctcaacctgtcggaggacatgaggcgcgggatgatgtggcggatgctggcgccacccgcggcggcggtcgcggcggaggccgcgttcctgagggtgcttgacggcgcggcgagcgacgcggcgccggcctgggccggctccgcgggctccgccgtgctgttcgccgtggggctgctcggtttccactacgggttcctgtcgtcgaggtggaacgccgcggagaggggctcgctggtggggtgggagctcgccgctagccactggagcgaactgtccatggccaagcattcctccatagacgacgaagtggacgacgacgaggacgaggaggaggaagacgaagatgaggaagaagtagaagatgaagacactgactaattaactcgatttcacagcactttgttcgattaaaccatgaaatactcagtaaagtggtttaagacttgtagtc

SEQ ID NO: 5518 - DNA, 475 bp, Oryza sativa
  ref <308>: DATABASE ACCESSION NUMBER: AK062695
  ref <309>: DATABASE ENTRY DATE: 2001-12-06
aagtcctcccatccagcagctcagccgccacaagccatggccgatgcgagctcggccgccgtcgctgcccccaagccccaactggccgccggcacttgagcaccaagcagggccagctcgacgacgccgtcgccgcccgccaccaagctcgaacagatcagctccagcaatgttcaatccaacgacttttgcattgattgattgattttctctgctcgtgtgattgtgtgattggaatcgactagcttgaaccaattgatagtatccctgtgctgtgcgtgcattgcatgtgtacatattaccaaatctctgttgcatatggatccactcttggatatcggttttcgcttgaatgccgttttcttctgttattttgttgttcctttttttaagctataaaacccaaccttctctttatgatctgtttgttttcaatattgtaattttttttctggaatttgttgttaattataac

SEQ ID NO: 5519 - DNA, 493 bp, Oryza sativa
  ref <308>: DATABASE ACCESSION NUMBER: AK062696
  ref <309>: DATABASE ENTRY DATE: 2001-12-06
tttgttcttgctagtgatggagtttttgagtttctttctagtcaaactgttgtcgacatgattgctaaatacaaggatcctcgtgatgcgtgcgctgcaattgttgctgaatcctatcgcctctggctacagtatgaaactcgtacagatgacattacaataatagttgttcatattaacgggttaactgatatggaatgtactcaaactgtaatgaaagtatctttacaaccttcccaacaagtcgtagaattggtaggctcagaatcaccatcgacaataagtttgaatcccaagaaccagcgttccaggcaagatctatcacgtgctcggctgagagcacttgaaagttccctggaaaatggtcgactatgggtccctccatccccatcgcatcggaagacatgggaagagcaagtaaggtcaccaatttccatcactgttgaactttgtattagttcaggagttcttgatatcctattactgacgagtt

SEQ ID NO: 5520 - DNA, 513 bp, Oryza sativa
  ref <308>: DATABASE ACCESSION NUMBER: AK062697
  ref <309>: DATABASE ENTRY DATE: 2001-12-06
tcgtcgatcgatcgatcggagtgagccggtgaaacgggagaagaacacgagatgagccggaggagcggcgtggcgacgagccgccggaccaggcgggccgccgagcaggaggtgcagccgccgccgctgtttgccgcgaacccgatcttcctgtgcgaggacgacggctcggcggggcggctgatcaaaccgggcggcggcgtacgcggctacgggccgggctcgctgcacgcgctcgtgcgaggccgcggccgcggccgcgacgtggcggcggacgacgacgacgacgacggtggcaacaagatgctgccgttgccgctgccaccgtgcagggcccaccgcgaggggcgtggtgggacccgggttcccacggcgtggcacgttgggcccacgatcgtggtgggcccgcatggcgcggtggtgaggatccgtgcgccgccgccgcctcagcagcatgacccgttcctggccgcctacgtggcgtgcaccaagggccgcgccggcgccggcaac

SEQ ID NO: 5521 - DNA, 856 bp, Oryza sativa
  ref <308>: DATABASE ACCESSION NUMBER: AK062698
  ref <309>: DATABASE ENTRY DATE: 2001-12-06
atcgacctcatgtcctcatcatcatcaatggagtgcaccggaaacatgtcggcggcgccattgctcgtcttgacggtggcggtgctcgccgtgctagcctccacctgcgccgccgacccagagccgatacaagacttctgcgtggccgtgccccgtgccggcggcgaggcgtcgccggcatacccgggcttcccgtgcaagccggcgtccgcggtcgtctccgacgacttcttcttcgccgggctcgccgccgccggcagcacggacaacccgttcggggccagcctgaagccgggcaacgtggaggcgttcccggcgctgaacacgctcggcgtcgccatcaaccgcgtcgacctcgcccccggcggcgtcaacccgctgcacagccacccgcgcgccgccgagctggtgcacgtcatcaccggccggatgctcgtcgggttcgtgagcacggcggggaagtactactccaaggtggtcggcgagggggagacgttcgccatcccgcgcgggctgatgcacttccagtacaaccctgggaacgcctccgcccgcgccatgacggtgttcaacagccagctccccggcgtcgtgcccgccgcgacggcgctgttcggcgccgacccggagatccccgacgccgtcctcgccaagagcttccaggtggacgccgagatcatcaaactgctcaagtccaagttcaagaagtgacactgacgtctcatccgccatggctacagcatatctgttttgctttagctgtcctagatacagtaaatagagttgtttcacgtttgatattttggtccgatatttgcccatttggcacatcaataaagtaaatttgaattgtcct

SEQ ID NO: 5522 - DNA, 755 bp, Oryza sativa
  ref <308>: DATABASE ACCESSION NUMBER: AK062699
  ref <309>: DATABASE ENTRY DATE: 2001-12-06
aaaccatcccccgaccggcgaacagctcgccgtccgccccccgtgcctcccgccgcgcgaattcacttccccctacgccgggggctgttcctgttgctattatagcccccaatggcggcggaggctcgggccgagagccccgccgcgcccgtcgtcgtacccgccgcggcctcccccgagaagcgcgtgctctcgggtgacgccgggagggaggaggagcggcccgagccgaagcggcgcagagcgtgcgtcgcggcgctcgacagcgtcccctgcgccgcgccgccgctggttgacggggacggctcgtccttctccttccagcacgcgcgcggcggcttcgtggtgctcgagacgacccccaagttcgggtccttcaacccgcccgccgcggctgccgtcggcccgaagcctgcgccgcctgccggtgccgggcagggctcgccggaggaggaagggggaccggctcgcgaggaggctgaggccaaagacgggaattcgcagttagtggggccgggcgttcaggggcagaagacatgagtgctgactttgttttgacttttgaccagccatgcaaagtttgcttggagcggtagccaactcgtagtttacgtctactttttttttttttgtgtaaattggtcccatttttctcttggtgtcgatgcagttgtgcatcaccattgttgctcatttctgttgcagtcatgggttgttacatttgttatggaatggaaattttcttcaaaaatgct

SEQ ID NO: 5523 - DNA, 755 bp, Oryza sativa
  ref <308>: DATABASE ACCESSION NUMBER: AK062700
  ref <309>: DATABASE ENTRY DATE: 2001-12-06
atgtcgacgacaacgcaactgaacaacctcgccggtgagcagctaaagctaagctgaggttagccatggcggcggcgatggggttggagaggaaggcgaaggtggcggaggtggcgctgcggtgcgcggtgtgcgccctggcggcgctggcggcggcgctggtgggcacgggaagccagacgaggaccttcttctcgctggagaagaaggccaggttcacggacatgaaggcactcgtcctcctcgtcgccgcccacggcgccgccgccgtgtacagcctgctccagctggcgcggtgcgccgcggccgcggcgtggaaaggcggcagcaatggcggcgcggcggtggtggcgtggtcggtgttctcgtgcgaccaggcggtggcgtacgcgccgtcgccgcgggcctcgccgccgtgctcctcgccgccgtctccgcgttcaacctgttccgcctctacggcggcggcggcggcggccgcaagagcagcgccggcgccgtctccggcaatggcgcgaacacgtggtaggcaaggctagtttagctgcttcgatggagtttaatttctttgtagtttcagaattaaattaagcgagactggctcactgacacgtaattaagttcgttaaatcgttggtaataactgttatgggcttatggctgtggatgataataattaagtcagatttgccgacgaccaaatcgcctgtttaatactccctccctccatcctaaatataaataattttggttgg

SEQ ID NO: 5524 - DNA, 918 bp, Oryza sativa
  ref <308>: DATABASE ACCESSION NUMBER: AK062701
  ref <309>: DATABASE ENTRY DATE: 2001-12-06
gatctgcccgtgccctccctccctctgcatactgcgcggctaaatgccagccatgtgaagatgagaatcaacaacaacaaatcgaacccaaatcatctcaaccgatccatcctgcacaaccgaatcgattgatggtcatttcaaccaaatccatggggggtcttggagcacttgcagccttgatgtgtccggcgatggcgcggccaccgggctctccgtccgccgccggcgtggccaccatgtcggactcaaccacgttgcagtggagtatgggagaggcggacgccggtgcggtcggccctggcctcctctgccgtatttgccgccttcggccaccaacaccggcgtgggagggagggcatggcggcggggcagcggcaagcctgccttgcaaccgcacggatttgtcgtcgtcgtccgccgtcgtcgctgctcatcatcccaatttgtcgtcgccgccagccgtcgccatccatagtcgccgccacacggatctgtcatcgccatccgccgtcgttgccatccgtcgttgttgcccgttgtcgccgcccgccgtcgccgccatccgtcgccatccttagtcgccgccgcatggatttgtcatcgccgtccgccgtcgccgcccgtcgtcgccgcccgccgttgccgccagccgttgccatctttagtcgccgtcgcacggatttgtcgtcaccgcccgtcgtcgccgcccgccgtcgccgcgatagagagagagggccaaggagtcaaggatgcctagcagaagaggaagagggggagaaagaaggggaagaagttgggatgtagagactgacatgtggggtcccaatgtcatatacctaaaatagagaggatatatggagagtctgttgtagtgagcaacgagattaacttgctaaatcaattggagagttggct

SEQ ID NO: 5525 - DNA, 715 bp, Oryza sativa
  ref <308>: DATABASE ACCESSION NUMBER: AK062702
  ref <309>: DATABASE ENTRY DATE: 2001-12-06
gcattcacgcctcacggagtcaatagcgtgaacaatggtgtccatggcgccttcctcctccgccgccgccacccgccgccttccccttcttcttctcctcgccgccgtcctccttctccacccatgccacgccgccacggaggcgtcggcggcggcgaggcgggagtgcacgtacacggtgcgggtgaagacgagctgcgcgtcgccggcgcggacggcggacattgtcagcgtcgcgttcggggacgcgtaccggaacgaggcgtacggcgcgcggctgccggcgggcggggcgtcgggggcgctcgaccggtgcgccgtcgacgcgttccgcgtcggcgggcagtgcgggtacggcgtctgctacctctacctccgccgcgccggccgcgacgggtgggcgccggagtgggtgcaggtgttcgagcctggcgccgccgccggggagaagccgtccaccttctacttcggctcgccgctgcccgacggcgtctggtacggccacaaccgctgccccaaggcgtccccggccatggcggcgcgccggacgaacacctccgcttcacctctaggctagggtagctgctcgctccgcaatgtactagtagtactacggaattggcgattttcggaattcggatgcatccatccatcactcaagaataaacagcctcgtgtgtgtgagaaatatcggaaataagagctttcggatgac

SEQ ID NO: 5526 - DNA, 741 bp, Oryza sativa
  ref <308>: DATABASE ACCESSION NUMBER: AK062703
  ref <309>: DATABASE ENTRY DATE: 2001-12-06
aacgaacgctaaaaaagtaacagtttctgtactttattgcctgagccaagtcctactccgccctcaatcaacatcatgttccgccgccccatgacgaccgctgccctcgctcgcacccgctccaacgcgctcgtgcagatgcgtgcctcctccgagcaccccagcttcggagtgtggaaccccctgggccccgtcatcttcttcggtgcggtggttggcggggcctggatggttttcgccgaacgcccagagacgtccaaggaccccaacaacctcatggcgcgctctgggctggggttcgtgacccgaacgttcgtcaacttctggatgtaaaccaaaggcgtcttttctcatccacgcgtgcccctccacagcagcaacagccccccttgagaagcagaaccctttcatccacatcgttcgcacaccttgacgtttgaaaaatttcgctcgttccatcaaccgcctgcaccccttccctccgcaccactgagataggcgccgtggaggacactctgatcgcctccactgccctttcttcgctcgagtgcgccccgtgttgggcaggcacgtcccccccgcgaccctcatcgattctacacgttcccacacacacacacaatttgcaatattcctttctttcgttcctgatttcgaatgcctgttcactggcccagacccccctcacaccccccgtcctacgacgcactgattttccacgttcttttcccaatctgcgtg

SEQ ID NO: 5527 - DNA, 729 bp, Oryza sativa
  ref <308>: DATABASE ACCESSION NUMBER: AK062704
  ref <309>: DATABASE ENTRY DATE: 2001-12-06
acgagatgagcagagtccggagagaaacgcaaacctgaggctcgaagcgtatttctcttctgcgccttcgcttttgcctaagcacgatgtctgctacaatggacatcgacggcgccgccgatccacacggcggcgagcagcggaaaagctgagatcatctccatcctgctcgatcaaggtgctaatgttgatttgacaaccgatgctggccggactgctcttcattatgctgccagtaaaggacggcttaatatagcagaaacactaatagcgcacagtgcaaatgtcaacaagaaagataaggaaatgctgaactgtgtgaattcctaattgaggagggggctgatgttgatgcagttgacaaaacaggacaaacaccactaatgcatgctgttatttctgaggacaaagcggttgctcttctgctagttagacatggtgctgatgttgccattgaggacaaggaaggctataccgtacttggtcgagcatctgatagctttagacctgcactaattgatgcagccaaggcaatgcttgaaggctgaaaatgttatgctgcacaaaggttaacgaaggggaacaaattttggtatcgaaaacctgtactaattttttttggttgaatcctgtcttttttaagtatgaaccattctgatctagaatcagatttgatcaactggaccataattcatactagccaagaattattgtagtaactgtcatgtc

SEQ ID NO: 5528 - DNA, 646 bp, Oryza sativa
  ref <308>: DATABASE ACCESSION NUMBER: AK062705
  ref <309>: DATABASE ENTRY DATE: 2001-12-06
agccatggccgtcgcagcacgcgcctcctcctccctcctccgcggcgtggccgtgttgaggcggcggccgccggtccgatccatccacgaggggcccgacaccatcgacgagctgctcgaccgccacctcgccaagaagtccccctcctcctcttccggggcgctcgacggagacgcggcggacgccgaggcgcgccgccggctgacgagctcgcggcgggaggcgctggggctgtaccgggacatcctccgggtcacgcggctgttcgagtggcccgacgaccgcggcgtcccgtggcgcgaggtgctgcgcgccaacgcgcggcgggagttcgaggaggcccgcggcgagcgcgacccggaggtggtggcgcggctcctcatcggcggccgcgacgccgtgcagcaggcgctcgaccggctcgccgaggcgtcccgccgcatggtcgaggcagaggaggccaagcgccgcggcggagcatagctgaagtgcggctacatgccgtttcgatgcgtttcatatgcttaattttgttctgaagtttgtatgaaaacgagtaaaacttggccttgtgtcaagcaaatgttcttctaaatctctaaattctgttttgttaagaattgcaaatgaaagtagttttctgtt

SEQ ID NO: 5529 - DNA, 621 bp, Oryza sativa
  ref <308>: DATABASE ACCESSION NUMBER: AK062706
  ref <309>: DATABASE ENTRY DATE: 2001-12-06
gatgctaagctaatcataccagtagaacgccgccgggttgcggtagacatgcgaaaggagcgcatagtccggctcgcgtagaacgccagccagttggcggagcggacgtcttcaccctcacctccgcatccgcggcggtgatgttgccatgcagcacgtcgtatcgcggcgcgtgccacgttgagctcctcctccacggtcggctagaagagagaacaacacaaagctatatcttagaacaaaccgctggtccatggacgacatcaaggctatcgggtccgcccgagctcgacatcaccggccgcaagctcttctactccgaccactccatgaatcatagcgtatcatatcctccgagatagaggtgcgtcgagtttcgacgagtgcgatgaagccaatctccgacatcgccgtatttgaggatgttcttttcgtctcggattcaatccagccgaagggattagtcccggcgatttcattgatttaatcttcaaaatcatttggctttgccgtttcagtagttagattgttttataactgcagattaattttctgttactctcttgtttttgtatgccgactgagaacaagatcaatggctgccatctcggtgtgtctgcc

SEQ ID NO: 5530 - DNA, 866 bp, Oryza sativa
  ref <308>: DATABASE ACCESSION NUMBER: AK104937
  ref <309>: DATABASE ENTRY DATE: 2002-08-28
atgatttgcctccgagccgccttccccttgacctcctcccctctccgccgcctcgccctcaagccctcctcctcccgcgccgccgccgccgccatgtcgtccgccatcgccgcgccggtcgagcacatcgtgctcatcaaggtccgcccggaggcggcgtcgtcgggcgccgccgcggcgatggtgtcatcgctgcaggcgctgtccacggcggtgcccgggctgtcgtacatccacgtcggccccgtgctccgcctccggtcgccggcggcggaggcgctgggtccgacccacgtcctccactcccgctacgccaccaagcccgacctggcggcgtacgcggcgcacccggcgcacgtcgccgccgtgcaggggcacgtcctccccaacgcgctcgactccaccgccatcgactgggtcaacgccgccctggtgccgtccccggtgaacccgggctccgccgtgcggctctccctggcgaagttgaaggagggtgtggaggcgcaccagctcgcggagaagctcgccgcggcgacggcggcggccggggaggcgaagggcgccaaggtgagcttcggggagaacttctcccccgcgcgggccaaggggtaccagttcgggatggtggcggtgttcgacagcgtggaggggctcgacgcggtggacggggacgggaaggtggaggcggccaaggccatagtcaggccgctgctcgacgacgtgctcgagctggaattcgtcgtcggacctgccgccgcggaggctccggcgccggccaacctctgagaggtttgcctttggttcgaaaactctagttgccttgtttgatcggttgagaataatacaatccttgtgattgggtgtgc

SEQ ID NO: 5531 - DNA, 682 bp, Oryza sativa
  ref <308>: DATABASE ACCESSION NUMBER: AK062707
  ref <309>: DATABASE ENTRY DATE: 2001-12-06
agatgcaatgtagaagtcaggatcggtttaatgccagagcttcttgctggaggactaaaacgtgaggaggacttggacgaaagagatgagtttgatgcgttgagttgctcaacaaacagtgatcgactaaagggaattcgaaacccatcaagaaatttaaattattctgaagagatcgagaaaaaactggagaaattcagctgtgcttcagctgctagtggaggtttgcagtcatgcaccactgaagggaacacaggaatgcatagaactagagggaaagaagtctctgttgaacaagcgaaagccgtgactgttgaggagcaaaggttagaaagtgcatggcttcaggctgttgaaaaacatgcacctgggattttgaatcaaatgagacctgagagaaatcaagttgtgccacgaattagtggtgaacagtaccacaggatgcccgaaacggacactgtttttccctcaaggcaagtcgacaaggaactgagcaatggattaaaatccttaaatattggcagccatggtctccgccaaaatggacaaatggaaaatggatatgccatttcaccaagcctcttgcatagcaataaccacttggcaaactgtgacaatgagagtgtggtctctgagcccggagcacctggctgtcatggtctgttcccctgctggaaaactg

SEQ ID NO: 5532 - DNA, 439 bp, Oryza sativa
  ref <308>: DATABASE ACCESSION NUMBER: AK062708
  ref <309>: DATABASE ENTRY DATE: 2001-12-06
atcgaagaaattggtggcggcttggcggtggcggcgcttgatccggttggatcgagtcgatgaaactacctgagttcttgtgtgagagagtcgtggagaggaagaggagttgaccccccacaactccgttcgtctcctccacgtctccctcttccctcacctcctgccgccgccgccgccgccgccgccgacgaggaggccacgcgagaaccccggccatggcgttgtcttcgtcagctcgatcttcccggagaagacgacgacgacgggagacaaggagttggttcagttaccacctgccggctgccgccgcaagcatcctgaattaatttctgatgtacttttattttttcttcttctttttttgtggtcgttgttaacgactctgctcacgccgtactaggtcaaaagtttcttcagtttaccaattaccaaaccc

SEQ ID NO: 5533 - DNA, 742 bp, Oryza sativa
  ref <308>: DATABASE ACCESSION NUMBER: AK062709
  ref <309>: DATABASE ENTRY DATE: 2001-12-06
ctgacgaaatgacgagcagaaataagtccaggaatcgaaacggagaccccgaggaaatggaaggcggcggagcaaccgcacccgccgcgccgcacccggcggtggcgccgctggcgttcctgctggggaagtggcgcggggaaggcgaggggagcttccccaccatctcccccttccgctacggcgaggagctcctcttctcccaccacccctccaagccggtgatctcgtacacgcagaggacgtggaaggcggcgtcaggcgagccgatgcacgccgagagtgggtactggcggccccgccccgacggctccgtcgaggttgtcatctcgcagagcactggtctggccgaggttcagaagggttcgtttgatgctgaaaagaaaacagtgacgctccaaagcgaacttgtggggaacgcatccaagatcacaagagcttttcaattggtagatggggagctctcatatgttgttcagatggcaacaatcacaaccagtctacagccacatctcaaagcccttctgaagaagatttgaacgatactgcgcccctctaggggcgcagtgcggcggcgtctgtggcacttctggatttttatgttaaaataataatggtatttttgcctattatatctgggaattggggcaacctgcccctactagtttgacataatagacgctgaaaatacgcccttcagagttcagataatgtccatgcgagttcgggcttgttcatgcgc

SEQ ID NO: 5534 - DNA, 614 bp, Oryza sativa
  ref <308>: DATABASE ACCESSION NUMBER: AK062710
  ref <309>: DATABASE ENTRY DATE: 2001-12-06
cctgccagtagtcatatgcttgtctcaaagattaagccatgcatgtgcaagtatgaactaattcgaactgtgaaactgcgaatggctcattaaatcagttatagtttgtttgatggtacgtgctactcggataaccgtagtaattctagagctaatacgtgcaacaaaccccgacttccgggaggggcgcatttattagataaaaggctgacgcgggctccgcccgctgatcaatatacgaggaaatcttacctgtatatgtcaaggagctcagttggagctagaaaacgaagtccgaagattcgaatcacttgcctgtttgggtgatgagtaatccagttgcctgttgtttccttttcttaagtttaaagatagttacctttcaattttattcccgcgctggacttgacgcgtgctgtgttcacggtggagtccaagtgctctatttttcaacttttcaattgttgccgtgcgtgctgcgatctggtcttttgatggcatgattgtgtaggaccgtcgcagcattttagacattattcagttgtacaaactccttctgttcggggataaataatgaacagaaccgagaaaatgctgcacaagtttgcagcacc

SEQ ID NO: 5535 - DNA, 889 bp, Oryza sativa
  ref <308>: DATABASE ACCESSION NUMBER: AK062711
  ref <309>: DATABASE ENTRY DATE: 2001-12-06
ctagctcaccacagccacacttctgatcactgctcactcagctaattaagctcaagcttttgcttacggcaagtcttgcaaccatgtcgaacaccaccgagaagaagatgccgcagcagcagcaggttgagaggccgacggcgttggcgccggcggacgcggagatcgagagggtcttcacccgcttcgacgcggacggggacggcaggatctccccctcggagctggccgcggtgacgcgcgccatcgcgccgccgcccagcgagtccgccggcggccgcgaggtggccgccatgatgaacgagctcgacaccgaccgcgacggcttcgtcgacctcggcgagttcgcggcgttccacggccgcgggcgcggggacgccgagcacgaggccgagctgcgcgccgcgttcgacgtgtacgacgtcgacggcgacggccgcatcacggcggccgagctcggcaaggtcctcggccggatcggcgagggctgcagcgccgaggagtgcgagaggatgatcgcctccgtcgacgtcgacggcgatggctgcgtcgggttcgaggagttcaagaagatgatgtgccgtgatgccgctgcaaccggcggcgctgacaaggccaagacggagtaaaacagtgtcaggtcatctagatgtgctcgcttctgtttgtcattattttgacctagaaatgatgtaataaaagggtagtaatatcgatctgaatccatgagaccatgactgatgcttccatgtgtaattagcagcgccgtgtatattattatatgtgattatgtgtacaccgatctgctgatgtatgctactttgatctggaccagctaagatttggccgaacttttaatgacagaattgctggtcatcttctcttccac

SEQ ID NO: 5536 - DNA, 570 bp, Oryza sativa
  ref <308>: DATABASE ACCESSION NUMBER: AK062712
  ref <309>: DATABASE ENTRY DATE: 2001-12-06
ctcgcatttcccatctcatctctcgctcgctcgctcgctcgccgctacgcctcacgattccgacgactccgacgccggtagggtcataacaccctcctagacgccggcgacgacgagggtggttgggttgtggatagcggctgcgacgacgagggcgctctcctgaccgccggcgtggggtgccccagctccaccaccggcgacgactcctcctccgccgcgagcgctcccccagcctgcttcttttgcgggggtagccggggctccggcctcggcggctttcaaagcccccttcctcacaacaggatccaaaatcccgtcctagagttcttctacctccccttccaaaacttcctcttttggcatccttgattcaatttcccttccctttctttctttctttctttctttctttcgatttcttcttcttgctttagatttcttatccttcttcttgttgctaatctcgatcgatccatctatccatccaaacaacctcattcttttttcctttgatttgattcttcgctgctaacgccaccgaaacagacaacagatttacagcaaaag

SEQ ID NO: 5537 - DNA, 962 bp, Oryza sativa
  ref <308>: DATABASE ACCESSION NUMBER: AK062713
  ref <309>: DATABASE ENTRY DATE: 2001-12-06
caggcttgaacccattggggatttggagtacagtaccgatcaggattcagattcgataggcaaatgcacgttggattcaggttaggattcagcatgcttaacagttatgaacagtttaacaagatcccctggatgtgacagctttttttcagacctgtgtaggattagtgaactgaagcaagaagaaaccaaagcttgaggaggcgaagagaatgatgcataccatggtcattttggtgctttgatgcctttagagagaaggaaacaacaggtttttccggtagattgggatacttcccagttgttgatgcatgagtaaaaccaggttttttggcttctgtgggtgcacacggcagagtattcagagttcttgtaatgcctaaacgaactccttgtgtttgtaacactgggaatttgggatacaacattaatcaggattcatactttagagtgtagatgcaaaaagtttttttttaagcaggttcaattgttgcacagtttgcactacaggcacaacactcttaactagaggagtatttgtttttcttatgtttcacttttagacaacagatgttctatgcactggtcattttactgcacctcagtagcatttttgcacaaaatttactgcacaatagtttcatgaagtgaccatgatactgcacctggagtgtatttcaaattttcaatgtcacctctggccaaattctgtttgatcttctttggtgattgctctgatcagcaatgtttcttcagacaatgtactccttcgggttgcaagttcagcaaatctttagcagcataatttgtatagctggaatttaattgtgttttttagataatggaatttaattgtgctggaacatgatctgtgtgtaagctggaactccagccagcctagtcatctggagtttcgactgactgcgatgactgaggatctttcaacaacacacaagtggggc

SEQ ID NO: 5538 - DNA, 575 bp, Oryza sativa
  ref <308>: DATABASE ACCESSION NUMBER: AK104938
  ref <309>: DATABASE ENTRY DATE: 2002-08-28
gcaaaactgccaacccaaggtcgtcctctccctctcctccgccgcttcgccgccggcgtccgtcgccgccgagctcaccgcccttcgccgcctccacggcggggcgccgccgtagaatctccacaccgaggctcacattctacatctttggaaatgcatccccctctaaccttacacaggcatcctatgtgtgccgagattattgaagcattccagaagtgccatgtggaccatcccgtcaagaagttttttggcgaatgcacagatcttaagattaagctagatcagtgcttccggcaagagaaagctttgaagagaaaggcaaactttgaagagagcaagaagttcaaagaacagttgctggcctataaaaaggaaatggctgaacaagacaaggaatcataacgtgagacagaggacaagaacctgaatcaaatgttttcccctacaatgcaatgactccaactttgtgaagaagttgcaaattgtctttacttggcatgcgcttttactatctttactgtttaaaaggttgccattgatgaactatagccagataataaattgcagtttag

SEQ ID NO: 5539 - DNA, 534 bp, Oryza sativa
  ref <308>: DATABASE ACCESSION NUMBER: AK062714
  ref <309>: DATABASE ENTRY DATE: 2001-12-06
tgaacgtcggcgacttcctccagctggtgtcgaacgaccggctccggagcgtggagcaccgggtgctgcccaccggcgctgccgggccggctcgcgtgtcggtggcgtgcttcttccgcgtcgagtacgcgtcgacgaggccgtacgtcccggtcgtcgtcggcggcggcggggcgcgggcggcggcggtgtacaggggcacgacggcgggggagttcctggcgcacttcaacggcaaggggctcgacgggcggtcggcgctggaccacttcaggattccggcggcggcgtcgtctcctcctccactgtagctggatggatcgtttcggtgatgtagtcggcgactcggcgtttggatggtgatggtcgtagtcgtatatacttggcgatttgggaaccattcagccgttatgtgtcaatgcttaattaattggtgtgttggaaaataaacatttacagatatacatgtatgctcagatatatagtgcggtaaaactagaaattcgaagtaataaattaatgttatatctctgt

SEQ ID NO: 5540 - DNA, 509 bp, Oryza sativa
  ref <308>: DATABASE ACCESSION NUMBER: AK062715
  ref <309>: DATABASE ENTRY DATE: 2001-12-06
ccctacgcatccccgaccagcaccggcaccggcggcggcggcggctaccccccttcaatggcgactgtgccagttaacccgaagcctttcttgaacaacctgacagggaagcctgtcattgtcaaacttaagtggggtatggaatacaaaggatatcttgtttctgtcgactcttatatgaatctgcagctggctaatacagaggagtatattgatgggcaattctctggaaacttgggtgagatactgataaggtgcaacaacgttttgtatctccgaggcgttccagaggataccgagatagaggatgcggaatgagatagcccgggccatgtccagattgattattgtaatatgctgctgacatgaacaattaagtgtcatgtacaactgatgcagattgacctggatctttaactatgccatgatatggtaatgttatgcgttgaaactgtcgttgctcggaatgtgtgagatcatatttcgtaagaaaataccatttgcctgtc

SEQ ID NO: 5541 - DNA, 731 bp, Oryza sativa
  ref <308>: DATABASE ACCESSION NUMBER: AK062716
  ref <309>: DATABASE ENTRY DATE: 2001-12-06
gcagcacatatatatgcagtcgtagaaagcagcagcagccgattatatatagctagctactagctctaactgatcggccggccatggggaagacggagcacaagaagaagcagcagcagcacggcggcgatgaggcggcggcggcggccaaggagaggctggatcgcttcaaggcgtggctgatgcatttcgacggcgacggcgacgagcatatcagccggagggagctccgggacgccatccgctccggcggcgcccggttcgccaccgtccgggcgtgggtcaacctctacctcgccgacaagaaccggaacggcgtcatcgacgacggcgagatcaagcacctcatggacctgaccgagaaggacctcgacctcagcaagctgcagcccacgcctgcggcagcacggccgacggcgaccggcgccccgccggccatggtggtggtctcggcgtgccagttccagacgactcctctcgtctctcgtaccattgacctacgcaaattaactgccaaaccagtactttctagtaccgccaataattagatctcgttcagtttggagggggttaaaaaggattaagagggaataattcctcaccgggataataaactctattcgatatttcgattaatgcccaggcgagaaggattgaagaagattcattccacactaaattatatggtgtagaattattccctctataatccactagtcattttttatccc

SEQ ID NO: 5542 - DNA, 558 bp, Oryza sativa
  ref <308>: DATABASE ACCESSION NUMBER: AK062717
  ref <309>: DATABASE ENTRY DATE: 2001-12-06
gatcgatatggagggtgagacgcggagagcaaggcgtcggtgtcggccggtgcagctggccgccgccgcatgtgcgccgttcgtcgtgcttctcctagccgccgctgccgcggcggccggcggagaggccgtggcggcgtggaggacgacggtggaggacacggtggtggaggtggcggcgctgccggcggagctcgggggcatgctccatcggcgcgtctggtcgtccaaagagagcattggtaagcacgcacttagtcgggacggtggcctgtgcatccaggactgcgctggcaaaggtccaggcgacccatacacaccccctgtgacggagcactgtaaccgtaggtattacaaccaggggtgctagctgatctgcctttctgatcgacgccttaccgcagtacactactactacattggttccccgcatgcatatgaccggattaataaaagagtaaagtgcatagccggtatctaaacttgtataactgtgttatttgagtccccaaactcttaaaatgcatatctaaatctcaaaacttattaaattgtgtc

SEQ ID NO: 5543 - DNA, 827 bp, Oryza sativa
  ref <308>: DATABASE ACCESSION NUMBER: AK062718
  ref <309>: DATABASE ENTRY DATE: 2001-12-06
gtgcaaatgtgaagtatgtgcgagaaggtgattttttgactgttgatattgagaaaggaatgcaagatgggcaggaagtttcattctttgaggaaggagagcctaagattgatggtgaacctggagatttgaagtttaggatccgaacagcaccacatgagcgattcagaagagaaggcaatgacctgcacacaactgttacaatctccctgctccaagctctggtcggcttcgagaagaccattaagcatctggacaatcatatggtggaaattggcaccaaggggatcaccaaacccaaggaggttaggaagttcaaaggggaaggaatgccattgtaccagagcaacaagaaaggcgacctatatgtaactttcgaggttttattcccgaaaaccctaaccgacgaccagaagtccaagctgaagagcattctcacataaccgaaggcccaggttttcgcttttatgctgcagctagttcgttctcatttgaggtgggaaggaaaactgcctcaaaaaaggaaattttcccagcttacaagcaccagcagctgccttttctgtgggtgtgattttgcgttggtaattgttagcagttcagcagtttaatttctcttttaccttattttgtttctcatgtcattaacaaccgggtgtagcatttaggaagttggatgatcatgagctgtaccaaaatatttgtattgctggaagaatatattgatggtagaattgtagcttacacttcccaaaaatgtatttactggttgtacaacagtcagcagtaaaattaaatggaatttaagtcagggtcattcgttgtcc

SEQ ID NO: 5544 - DNA, 863 bp, Oryza sativa
  ref <308>: DATABASE ACCESSION NUMBER: AK104939
  ref <309>: DATABASE ENTRY DATE: 2002-08-28
agtagctttaggttttacctcctctcccgactctcctccgctttaatcgcaccgccggccgccggcgaccatgttcaaaaagttctcttttgaagatatatctgcgcagaatcaagttaaggcctctgtgcagcggaagattcggcaaagtattgctgatgagtaccctggcctcgaacctctactagatgacttacttccaaagaagtcgcctatgattgttgttaaatgccaaaatcatctgaatcttgtggtggtgaataatgtcccactgtttttcaatatccgtgatggtccttacatgccaaccttgcgccttcttcatcagtatcctgacatcatgaagaagttccaagtggatagaggcgctatcaagtttgttctctctggtgcaaacataatgtgtcctggattgacatctccaggtggttccttggatgttgaagttgaggaggaaacaccagtggctataatggctgaaggcaaacagcatgcattggcaattggatatacaaagatgtcagcaaaggacattaagactatcaacaaaggaattggagttgacaatatgcactatctaaatgatggcctgtggaagatggaacggctcgaataagtaaaatccactagggaagcataatttgctgcgccatattgaaatgtaatgagggctggaattatgtatcaatgcatcttgtgtcatgtaaacacataaaatagccagcagctacatggtgctccaagcctgttcgagtttactgtgaccatcaagttttggagatgtttggcaaaactttgactgatagtgctgtgttcaacgcttcacttggtattatcaatccagaacactgtacaatgttggt

SEQ ID NO: 5545 - DNA, 623 bp, Oryza sativa
  ref <308>: DATABASE ACCESSION NUMBER: AK062719
  ref <309>: DATABASE ENTRY DATE: 2001-12-06
gtgcgttccctccactcgcgcgggctgagcttagcttagctccccactcactcgccacttgctgcaattgcaatggctgctgctgctgctcgatgcgccggccatggcggcggcggcggcggcggcggtttcttactccggcgacggctgctcgccaccgcggcgttcctggcggcgtttgggctctgcactgctgctgctgatgacgctgccacggggagaggacaagggcatgatcatgtgatgctgagcgtggaggacatgttccctgactcgtcgtcgtcgtcgccgtcgtgcgacgcgccgccgcgaggtttgattcgttttgctcgccatggcatggcatggccacttcttgatcgagctctttccaagtctctgtctgtcatgtcagaatctcagtgtgagtgtgaggtgtgtctgctgctgttgcatttgcatatatcatgcattcattcatgcatggatagatgcttcagattgctctctgcatcagtgcttctttttctttttcttttcttggtttggtttggtttggttaatttgtttgcttattcaattgatctatcacccgtttgtttctggacttcaggtttctctggtttcagagctgcttttgtggt

SEQ ID NO: 5546 - DNA, 381 bp, Oryza sativa
  ref <308>: DATABASE ACCESSION NUMBER: AK062720
  ref <309>: DATABASE ENTRY DATE: 2001-12-06
cgaacgctaaaaaagtaacagtttctgtactttattgcatccccttcaggcatgtcgaagcgtacccagaagatgggcatcatgggcaagtgcggtgcccgctatggtgctaacccgcgtaagcgtgcccgcaagctgatcgtttcgcagcacgccaagcacttctgcgccttctgcggtaagttcgccttcaagcgaaaggccgtcggcatctggcgctgcgccgcgtccggctgcgacaagaccgtcgctggcggtgcgtacatgctcaacacccccaactcgtcgaccgtgcgctccaccgtgcgccgtctgcgtgagctgaaggtcaaggcgtaaagaagaggattcaactcattgccccctctccacaaccccttc

SEQ ID NO: 5547 - DNA, 521 bp, Oryza sativa
  ref <308>: DATABASE ACCESSION NUMBER: AK062721
  ref <309>: DATABASE ENTRY DATE: 2001-12-06
ctggtactggaagcggttcgccatggacgccaagctggacgcccaagtgaactgcctctaagactgtcattgttacagcggtgtgcgcgcgcggaaaacgattctaaactctcgacgagacatccctgtgtctatatggtatcataacagttatgaaaattttaacttgcatgcatgccatctaagaaacgagggacttttccaggagagtttagaagaattcagtgtgtgcgagctcatccatgtcttggttggcatgcagcttatgtgtcagtgtgacagtgtgtgacttcattgttctgctgaaatcttcaaactgtggtttcggttgacaagcatgcatgtggtaaacaatgtgtcaagttgtaaacagatatagcttatggccaactgaacatgtcggcgtgagttggcaataagagcgtccatggagtgtacaccaaccagctagatgcgtgtttgcatgtttttgttgattgattaatctgtaaagggaaagaaggagatgaatgttgttgatt

SEQ ID NO: 5548 - DNA, 607 bp, Oryza sativa
  ref <308>: DATABASE ACCESSION NUMBER: AK062722
  ref <309>: DATABASE ENTRY DATE: 2001-12-06
acaaaaaaatttcccattttacgagcgaggcggcgagaaggttgtgcgccgccgcaacttccttgccgcgatcctcggcgatggcgggcgacacgcccacaacaacgatgtcggcggcggcaacgacgatgtgagcgcgaaggatcctccccggcggtccacctcccagctctcctcgatagtccaacacaagcggcggccggatgccaatagcgcggtggagtcgccgcagccgccgctggacgaggcgcccaactcacccgaaggcagtagcaccagtagctggaggttccctttccccttgccggcaaggcaggcaggcagcaccgccgcaggaacactggcatgggcaccagcggtgatgggatctcagaatagaagaaggcagaggtgtgtttgttttgggaattttagtgaagttgcatattatttgtatctttgttgcactttgttctattaagttgtttcgttctgttttgattctttgttgcatacatcgatttttggtgttgcaatccgtatgttcgactattgatttggttgaaacaattttgatcaagcattgaaacattttttctctgctagtgaaactttcactcattgttgc

SEQ ID NO: 5549 - DNA, 776 bp, Oryza sativa
  ref <308>: DATABASE ACCESSION NUMBER: AK062723
  ref <309>: DATABASE ENTRY DATE: 2001-12-06
atatccccaaagcacatagggatactgtttacacccaaattgccaacagatacagggcccatttcttgctctagcttgtcagctggtgttatcgtatcgagtgtgagcgaggagttgctgatctgagacaggatggggcacttcatgatggacgaccagaacatctttgcatggttatgtacatcatgcgtgctttgttgcttcatgggatgcgcatacatattctacataatcgttaccatcattcttcctccgcttcctgttttcataaggcaccactgcgaggtgagtcaaatttgcaggttttacttagtttctgatgttctcaagaggaacaaacttgttttcattagttgctatagctttcggtgcttggcttaattggcagaaggagttctggatttgcttgctgcttactatatgcggctacatccctggcgtcatctactccttttggatcaacaaatttgatctattttgcgagaaaaacgacgactcgacctaattaagatatatactagctactaagattataacgtgcaatcaattggtcccaaatatagaatccttatatctcagattgtaatcatgcattctcgacagatacagtgacttgctttggggctttcagatgctactccgttactgagtgtttataaaagtaatctttggatttgttaggaagaatgtgtaatgggatgaggatgagaattacccctcccagtagttaatagaaaggatatatatctagcctccttgcgagaagattcaagcac

SEQ ID NO: 5550 - DNA, 592 bp, Oryza sativa
  ref <308>: DATABASE ACCESSION NUMBER: AK062724
  ref <309>: DATABASE ENTRY DATE: 2001-12-06
aaaaaataaaagggagtgcttactctgagctaaagaaagagtactctgaagtctgaagtagtcttacttcttccaagcaatctgaagtctgaaccttagaatggatcagaaggattagctgcagatgaaggagaatacattccaggaaggaacagccatggcgtcgtcctcctcatcatcgtcctttctcgctcatccatcgtcgctgctgcgtcaggtcgtccatggcttcgccggctacctcgccggcctctgccgttctctccagaatctgaaaccatctgcagctccgaaacaagacgctgacgacgaatttgccgtcaataacactgctgcgtcaagctccgaagaagttgagaatgttcagatgaaaaggcggagcacaccacaacgctggcctttagcttcaatcgatgcaaagctttgatcgatcgatcgacgcgatcattatgtacaataataagttcgggtaatccatgcatggattactgttcttcgaaccgagcagtggctttgatgatttgttaccctgactgtacgaggaaaatatcaagtggaaataaaatttgcactcacagatttaaccatgagt

SEQ ID NO: 5551 - DNA, 1057 bp, Oryza sativa
  ref <308>: DATABASE ACCESSION NUMBER: AK062725
  ref <309>: DATABASE ENTRY DATE: 2001-12-06
tcaccacagcagctcacgagctcaaaagacacacattccaaaagcatctgtggccatctcctcctagtcctaggctcgcgtcaatggcggcgtccaccatggcactctcctcccctgccgccctcgccggcaaggcggtcgccaatgccaaggtgttcggcgagggccgcgtcacgatgcgcaagtcggcggccaagcccaagcccgccgcggcgtcggggagcccgtggtacggcgccgaccgcgtgctctacctcggcccgctctccggcgagccgccgtcctacctcaccggcgagttccccggcgactacggctgggacaccgccgggctgtcggccgacccggagacgttcgccaagaaccgggagctggaggtgatccactgccggtgggccatgctgggcgcgctcggctgcgtcttcccggagctcctcgcccgcaacggcgtgaagttcggcgaggccgtgtggttcaaggcggggtcccagatcttcagcgagggggggctcgactacctcggcaaccccagcctgatccacgcgcagagcatcctggcgatctggggttgccaggtcgtgctcatgggcgccgtcgaggggtaccgcgtcgccggcggcccgctcggcgaggtcgtcgacccgctctaccccggcggcagcttcgactcgctcggcctcgccgacgaccccgaggcgttcgccgagctcaaggtgaaggagatcaagaacggccgcctcgccatgttctccatgttcgggttcttcgtccaggccatcgtcaccggcaaggggccactggagaacctggccgaccacctcgccgaccccgtcaacaacaacgcatgggcctacgccaccaacttcgtccccggcaagtgagtgtggatctccggcgagcaacggcggtgaggtccattgctttcatgcaggctgcggtgagacgcgcgacgttctcctctttccgcgtacccgaatatttgcttcgttcgttcagattgtgtaaaacaatgttatctggttggttgatgaaagaagtacaatggacctgattgtgt

SEQ ID NO: 5552 - DNA, 538 bp, Oryza sativa
  ref <308>: DATABASE ACCESSION NUMBER: AK062726
  ref <309>: DATABASE ENTRY DATE: 2001-12-06
cgaatggaaaattgaccctcctctggtaaccatcgcttcccgccaacaggatgccaaaccagaaacaccactcaagcggaccacgctattgaatactgaaggtcagcactagaggccattttttgttggaaaatagaaatcagatcgaaaccatacctctatatggctcactagatctgccccaagtacttcactgatgcatctatgcctcgtcggtgccaaacgctctcaagtaacataatgtaactcagctcagattatttctctggactctacagaaaccatagacagtacatgtaatcttggggataaatcaccgcgcatattttgtaccaccgtgtaaaatagataaaagtttaattatatgtgccatctgtcccttgtctggtagatagcaaattaggcatattgtttttgtgtaatatagatcagagcagggacttttaaaaacgaattgatgtggtgtgggtaactgggagttaaaccattggttgtatactcgtctgaaataataacaatccatttttcattctcctcc

SEQ ID NO: 5553 - DNA, 813 bp, Oryza sativa
  ref <308>: DATABASE ACCESSION NUMBER: AK062727
  ref <309>: DATABASE ENTRY DATE: 2001-12-06
aactaacgctaaaaaagtaacagtttctgtactttattgaggttcgcttcgctagagagaaatgtccgctgctgaccgcaaggccgtgatcaagaacgccgacatgtccgaggacatgcagacggacgcgactgaaatcgccacccaggcgatggagaagttcaacatcgagaaggacatcgccgcgtacatcaagaaggagttcgacaagaagtacaaccccacttggcactgcatcgtgggccgcaacttcggctcgtacgtgacgcacgagacgaagcacttcatctacttctacctcggccaggtcgccatcctgctcttcaagtcgggataagcccctcaccattggcgcggcttatttagattgtagtgagacatgagagaacggtgggttcgcctgaacggatacatcgcgagaggcactctttttactgaagcccccaacccccgacttctggaaccctgtgtcgtgtcgaggcgatttcccaccttctccgctttcacacatcccccctccaaaagccaacgccacacactccacacgccacaccatcaacatctacgaatcccccaagcgccatcgcgaccttctcccgcaccctctcgctctgtgttcgaatttcgattcaagaaagaccactaccacgcgccctctcttcatgtccgtcatcatcggatgtggggtgggcggtgcggtttttttcggaacgtcaatacttcgaggggtggtgggcctgttgctttgggccgcctttgcgccacaattgtgattttctttttcttcggatttaccaattctcacctactact

SEQ ID NO: 5554 - DNA, 585 bp, Oryza sativa
  ref <308>: DATABASE ACCESSION NUMBER: AK062728
  ref <309>: DATABASE ENTRY DATE: 2001-12-06
atctgcaaacagtatagcaatctaagcgtctctacttcattccttcagagcaaaagttcatttagctaagaacacagaagaaccatgatcagttcaaggaagcttgctcaattgggcaagaagtggcagaggatggtggcatccagtgggcggcagactgcaagcatcgatggatgctgcagcacagccacagcgtatgtcgcagacaagggccattgtgtgttgtacaccactgatggggcacgcttcgaggttccactgatgtacctcaacacggcgatcttctgtgagctcttaagggtgtctcaagaggagtttggctttgcaagcaacaacaagatcacattgccttgtgatgcctcagtgatggagtacgtgatgtgtttgattaggagagatgcctctgaagagattgagaaggcgctcctgagctccatagttaggccatgtcttaatactagtgtggttccaccaatgagactcaatcagcaatttgctgtttgcagctagtttatatggtttttgttcaatcctatgtaaattatcaggattacagattatgagacaaagatacaaatttttcct

SEQ ID NO: 5555 - DNA, 764 bp, Oryza sativa
  ref <308>: DATABASE ACCESSION NUMBER: AK062729
  ref <309>: DATABASE ENTRY DATE: 2001-12-06
aatcacgcactaaaccgatcccaagaaaatggaaggctcgacgtcaccgaaggcgttgagagttgcggcgatctccggctcgctgcggaggggctccgccaacaccggcctcatccgcgccgccaaggagatatgcgaggagtccatcccggggatggttattgaccacgtcgacatccccgacctgccgctgctcaacaccgacatggaggttgacgacggcttcccgccggccgtcgaggcgttccgggccagtgtccgcgctgccgactgcttcctcttcgcctctcccgagtacaactactccatctcaggtcctctgaagaacgcgttggactggggatcaaggccgcccaactgctgggctgacagagccgccgccatcgtgagcgcgtccggaggctccggtggcagccgatcaatgtaccacatcaggcaagtcggggttttcttggacatccatttcatcaacaagcctgaagtgttcatcaaagcacatcagcctccgaaaaaattcgacagcgatggcaatttgattgatccggagattaaagaagagctcaaggatatgctcctgtcactgcaagctttcgccctgaggctccagggcaaacctgcaaactctaaacatgcagcttaagcgggttttcagaaaaaaaactggatgaatagaactcattggattctaggacaacttatcttaacgccgaacaattgtgtagccgtgatttgaacggtagcttaaataaatcttttggttgtgt

SEQ ID NO: 5556 - DNA, 605 bp, Oryza sativa
  ref <308>: DATABASE ACCESSION NUMBER: AK062730
  ref <309>: DATABASE ENTRY DATE: 2001-12-06
atccacacactcgcagtcatagcgaagggacgtgtttggatcgccggcggcgatgcggcggcgggaccatgacgcggctgatgccttcgacatcgctctctcctccggcggatggagcccttgatgtcgtcttctcctccggtggacttatagcccggcacaaaggagggtgtaatgcgagcccctctcctcgccagccgctgctccgatccagccgcctgctgttttccctctagccctccttccgcccgcgaacctcgtctcgaaggagttcagagcaagaggagcctaggggccatggccgacgatgcctttctagagacccaagcaattccaaatgtgccaaagtgagcaattcctatgtgctacttcacattgtgcaaactacagaggcaagactattgttcaaactgtttctgttcaaatgtttctgttcagactgtatctttcagtttccgatatgcctgaccatttctagtagaatctagagttctacacacttccggttctgctgtaattagcgttcaacaaattgactcaagattgtagcaaacactgcataccattcatatatctccagaaaaaatggcagcacatttttagtt

SEQ ID NO: 5557 - DNA, 813 bp, Oryza sativa
  ref <308>: DATABASE ACCESSION NUMBER: AK062731
  ref <309>: DATABASE ENTRY DATE: 2001-12-06
tatctttacccatcctcacagtataggtcttttaacaaatggaagcctattggctagtaataatgatccaagtcgaatatggcctctcagctatgcaacttgtgctccgatacttcaagtcagtgttgtaggatcagtcatgatagttgttaatgaaagcaatgtgcttgggaggcggagatcacatgacactgtggagttattatcagaaaaatgtgaagtggatgtagcaaaccggttgatctcagtttgtgtgttctgttcaattagttcaagactgccaaggctagataaaatcttgaagacttggtttagcaataaaactcaggatagcaaatcaatgcagtttatccaagctaaagtgacatcaatacctttgataaaattccgtttggagcttgagagggacatcactgaagaggatggcatctgggaaaatatttccaagtggaaaacagtacctatggtccagcgcgtcgcacttgatgttgtagctaaggttgaagaagaaggcaggctgaaggctatgtcagtgaagaaggttaaaaaaccttatccagtagtggacgcttcttcttggagcagcttgacttcaaatatttctttcacaaagttcatgtctttcgttttgccaccagaaccgttgacactggatgtgaagtggtgatattttctggttctcatttactcatagggtttataggaaattgcacatattaatcaaatccgtgtataattgactaggctgaaagaagttgtacctgaaaatggggttggaatgtactactatattaaaattttggattttccctg

SEQ ID NO: 5558 - DNA, 770 bp, Oryza sativa
  ref <308>: DATABASE ACCESSION NUMBER: AK062732
  ref <309>: DATABASE ENTRY DATE: 2001-12-06
gtgcttaaaagcagcaagaacagaagtagcataagaagcagaaagagctcaaagaagaagaggtgatcatgagctactaccggggtacctcgccggcgtgggggctgggccgccgcggcggcggtggtgggccgtctccggtggtgccactcctcatcgtggtggccctggtctgggtcaactacaacgagaccctgacggagtggtacgacaaggcggcgaacctgccggggacggtggccgacaatgccgtcaccctggtcgccgccggcgggctcctgctgctcgccgccgtgctcctcagccgccggagcgaggtggtggtcgtgccggtggcgatcgtgctatccgtgatgctgctgcagaacatcatggcgttcttggtcctgctgctggtggtcgcctacttcgccggaatatactactacccggcggacgccgccaagtacggcgtcaccgccggcggcgagtggtgcggcggcggcggattctggtccgggctggggttctacatgctgctgctgctgtgcctggtgctgtgcgccatgttcgccgacgagggtgtcaggtggtggattccagggacgctgctggctgcttccctgctctgcctcaacctcttctcaggtggtcaggtcttaggctatggacatctctgaagatttcatcctttttttttcaggagttcttggcttcttgccattgccagatgagatcatatgcatgtgtagaatgaatgaacatgatgagtaaacagtatatatgtgtgc

SEQ ID NO: 5559 - DNA, 951 bp, Oryza sativa
  ref <308>: DATABASE ACCESSION NUMBER: AK062733
  ref <309>: DATABASE ENTRY DATE: 2001-12-06
aactaacgctaaaaaagtaacagtttctgtactttattgatttggtcggtgtgttcctctttggttgaacccccctacgcaaccctctagtttcatttcttctttctttcttcgtccgattctctcttctccaaacactttcactccttcttcatcccaccagacgcgaccaatgcgcttcgttaccctatcgttcattgtgttggccgttgtcttgctgacctcgtgtgtggatgcctacaagagtgtgaagctgcgccgcccgcagacggacgaggagcgtgccgagcgccacgctcacaacatgcgtcgtcctgaacgaccgtacgacgacgccgcgcaccttcgagccctcgctgagggccaacagagggcggtgcgtaaccccctgctcgcttccaagctgcaccaccaccagttcggccccaagtatggcaagaacaagcagaacgaactcgccttccgcaagaagcgctacgatgggcgcggctacgaagtgccgcaggacgtgcctgcccacatcgaccccaagctgttcccccagcgccgccccatgtaaacggcccttcgcagccgatggcatggtgtttgacgtccacgtctgcctttcgtgttcgtctcgttgtactacagtgcacagtgaagcctgagctgcgagacgagaagcgagtgcgagtccgagacgaccgttgtccaaccttacgcaaccgtgatttcaattcgtgtcgactgcttcgtttaccgtcgagcaacgagcagtgcaaaagatctggaaaacttgagagagagagcaccttcgaaccttcgcggtcgagcttcgaatgccgacggcaagctcccgtggacaacgcgtgaccgatccggcgacgtcggtcgctctgttgttcggccatcgcgttctgttgtacctccccctcccaagtatacgcgaggcacgtatggtattgagtg

SEQ ID NO: 5560 - DNA, 766 bp, Oryza sativa
  ref <308>: DATABASE ACCESSION NUMBER: AK062734
  ref <309>: DATABASE ENTRY DATE: 2001-12-06
caatccattcctccatctaatcccgattgaaatggcgcccaaggtgttcgtcccgctctgcgtcgtcgtcctcgccgcggcgctcgccgcggggccgccggtggcggacgcggcgtcggcgcacctccacttctacatgcacgacgtgctgggcgcgtcggcggtgcaggtggtgcggggcccgcgcggcatgttcgggaacacggtggtgatggacgacgtgctgacggagggacccgcggcgacgtcgtcggtgctggggcgcgcccaggggcagtacatcgtggcgtcgacggggagcatggacctgatggtcaccatgaacgtcgttctcagctccggcccgttcgccggcagctcggtgaccgtcgtcgggcgcgacgacaccggcgcggcggtgcgggagctgacggtggtggggggcacggggcagttcaggatggcgagagggtacgtgctgtggaggaccatccgccctgacctgctcgagctcgacgtctacgttaacccgtagaaaagataagagagacgatgacgatgaggatgatgatctgtcgaaaacggacacgtcattcgcccagtcagcatctgtgttcgtgtgtatgtgtgtgacgtggcgtgttcttgcacaggtgtcgtaccggtaaaggcttatccttgtggtgtgtgtgtgtccggtgaaaaaataagcttgacatgggcgaacctgatgggtataataataattcttatatactatatatttaatttactgaacattattatc

SEQ ID NO: 5561 - DNA, 637 bp, Oryza sativa
  ref <308>: DATABASE ACCESSION NUMBER: AK062735
  ref <309>: DATABASE ENTRY DATE: 2001-12-06
aactaacgctaaaaaagtaacagtttctgtactttattggtggtgaaatcatgaacgccatgtactgtggagagcaaattcgcgtgccggaggagctcggcgccgtcctcaaggacttcacgaaggcagcgatccgtgattcccttaaggagggtgatgtgctcaagtgggccgccaactacttcgccaacttgtcaggccagcccgctcccttcgacggccaaggacggctcatgtcggaaggtggcaagccgcgtacatcgggctccgccggccagatggtgtccgacgtgttagaaggcgccggtggctacgaatccctcgacggcgctgcgaacgatggcaacgaagccctcatccgtcaaatcttccagcactacgacaaggacggcagcggccggctcgagaagggtgaggtgccatccctgatcgcggacctcaaggcaagcatgggcatcgacttcagcgacgagcaacactccatgctgatggacatgctcgacactgacaaggacggcaccatcaacctgcaagagttccgacagctcttcttctcaagcgaatgaagagggggcctcacgttgtaagtagactacacaccctcaaagttgaggcacgcacgcttcttccgccctgt

SEQ ID NO: 5562 - DNA, 408 bp, Oryza sativa
  ref <308>: DATABASE ACCESSION NUMBER: AK062736
  ref <309>: DATABASE ENTRY DATE: 2001-12-06
acattatcagagcttgaattgaagctcttcctctctctctcctgtcaagtccggccgacgccgccatcggtcgatctcctcctctatagttcccctagccaaatccttgcaccactgactccccctacctccggcgaacccatttttcccattttccccttctcccccaccccatagcaaccaccacaaccacttcctttgccggccgaagagagctcttgttgtcgccgttccggcctcctccctaactccctctactggccaccaccatcctcggatgcgcgttgcgcgggaacacgcgtggccgccgacttcgtcgatccccggccaccggagccccagcacccctcctccctgttactcggccagaagagaagagagaaggagatgacgggaggaagaagaagg

SEQ ID NO: 5563 - DNA, 547 bp, Oryza sativa
  ref <308>: DATABASE ACCESSION NUMBER: AK062737
  ref <309>: DATABASE ENTRY DATE: 2001-12-06
ctctcgccatcccggtgaccggagggcaccgcaggggttcgtcgcggccgcgtggctcgggggacggcgtgtactccgccgcggcgaccacgctgccctacgaggacgcggatgggctcatcaagtacttcgccgtcgacgactcccgcggccgcgtgttcgtgttctctgtcgccgtggacgcgctgctcgagctggagcctagggtgtgcaacgagccgccgatcactgccctgcttgtgtacctctctccgcgccacacctcttcttcctcttcaccggccatgccgacggctccatcgctgcccaccgcctcgtcgagtcgtctcattatttgttttcgttgcacctttgtcgtgaaatgatgtttcattgtatttttattggatgttgcatatattattgtctttttgttgcaatcagtagttttcaactgttgcattcacccaccgcctgatcgagtcgtcccattatttgctttttgttgcatcttgtcgtggaatgatgtttcattgtgtttttaatcgatgttgcacatattgttgtc

SEQ ID NO: 5564 - DNA, 635 bp, Oryza sativa
  ref <308>: DATABASE ACCESSION NUMBER: AK062738
  ref <309>: DATABASE ENTRY DATE: 2001-12-06
ataattctgtcttgctggtgattagtccatctcaagatgatgaaaagctttcttgctctcttcctcctcctactcacctttgcctcccatggcacatggtgtgctgctgctgctgacagaagccacaggattactacagctcatctgaggcctcatctccatgtagaagaattgcatggcaagaagctcatggagattcaggtccccaggaagcttggccatgaggtgaaggttcccaagagaatggccatagctcacaagggtggcagcgcgggcgccgccgcggccgccggcgcaggcggcggaggagtgtccgagtcgcggccgcgcaacgggaagaacggcgcggcgacgctgccggctccggcgacgacgtccatcctggcactggctatcacctgtgccgctgttctctcatctttcagcttctgatcagatgtgtcggtggtgttcttgcaagaaaggtactagtagagtgtgtgtgtgtgttttcttttgagatgatagtatgatgtgtgtcggtggtgtgctgatgatcactgaattcgtgtgctgtgtgtccagttcgtcagaagtacactgaaattgttttcatggctaattatcagcatgcatcttattgttgattcgtcatc

SEQ ID NO: 5565 - DNA, 668 bp, Oryza sativa
  ref <308>: DATABASE ACCESSION NUMBER: AK062739
  ref <309>: DATABASE ENTRY DATE: 2001-12-06
aagcccatacttgtcttgttcatacttcatagcatcgcaggcctatttaaggatgcaagcagcatcacagctaaattccctcctgagctccgctaacactatcgaagcttcacaaattctgttcacgcacttgtagctgttgcctctcgtctccaagtgttggaggcaaaggcgtacttcgatccgcaggcaggaccgagggcatgggttccaaagatgcattcttttgcaccttctgctccttgcttcttttttgtttcagttccaaatgcctatcttcagagctggacctgcctcagacagcactagtagaggttgatgcttcatgggaggtttcacgaaagatccctgacacactatttggattattttttgaggaaattaaccatgctggagctggtgggatatgggcggagcttgtcagtaacagaagtaactctcagtttgataaacattcctcatggaagctgtgagaagtgaatggatgcacttgactaagttgaagatttgttatttacacaaaaatagataaatcagtccaaatatcaagcagtgaatcagtttcttgcactgcgcacatgtcaaaaagacacattgcaggttttgctgtataagaaatattcttatgttcacatacatccaatagtcaatgaaggaaattaaagtgt

SEQ ID NO: 5566 - DNA, 593 bp, Oryza sativa
  ref <308>: DATABASE ACCESSION NUMBER: AK062740
  ref <309>: DATABASE ENTRY DATE: 2001-12-06
aaaaaaaatccaactcctgattcaccgtggtcgtcggccgctcgctgccgacgtcgtctcctccggcgcaggcgggggtggagctgatccccgaggaagcccctcccctcgccgccaccatccccaccaggcctcgcccctcgtctccatccccaccagacctccatgccgcatcccgcatagaggtcagggcctgccgcctgcctcgacgacgtcgccttcaccgagcctttcgctaaacccactcgggactctagtacaccttgcatacgagtgtcgtcttgctctcaccgacgatggagacgacagacaagggcaccgccggtgacggcgtcgggcgtcgttgaggagctgctccttgagcatgtcgctgtactccttgagcagcaggttatatacacttgcagacttgtagttcgaggttgctgactgattctagtttcaatgttcatgagggcttctgaattggaaggtgactgcaagtcagcaacagcatgagaatcctagatcgagattgtaaattgataatggagattataaattgatgtaaattgggattgtgacttgtgaatcaatactaaatgcaatgattg

SEQ ID NO: 5567 - DNA, 696 bp, Oryza sativa
  ref <308>: DATABASE ACCESSION NUMBER: AK062741
  ref <309>: DATABASE ENTRY DATE: 2001-12-06
tcagatcaccaaagactccttcacaggttggagctgtatgatcttgctgagctcaaggttgaaggggatggcaattgtcagttccgagcattgtccgatcaattttaccgcaccactgaacaccacagatttgttcggcaacaaatagtgaaacagcttgagtcttatccggaaatttatgcaggatatgtccctatggattatagggaatatctaaaaaagatgataaagaacggggagtggggtgaccacgttacattgcaggctgctgcagactcgtatggtgtaaagattttcatcctgacatcattcagagatacttgctacattgaaatccttcctgttgttcagaaatcagaaagagttatatgcttgagtttttgggctgaggtgcactacaactcgatatatccagaaggagagttaccagttatggagaacaaaaggaaaaggtggtggcatttttagatcagcaactggtgtacactccattgggctgggtacactccatttgatttgatttgatgttggttagatcagtggccattttgttggggctatatgtcagtgtaggaatgttgatttgtgagtgtacataacacatttagtcaggaggaagaatagctgtgacaatagatgaatgtatcatgtattggatattattgatgttatatagggtcacttagagttgggttt

SEQ ID NO: 5568 - DNA, 411 bp, Oryza sativa
  ref <308>: DATABASE ACCESSION NUMBER: AK062742
  ref <309>: DATABASE ENTRY DATE: 2001-12-06
tagagtctggagaacaggccaatcttgtgactctgccatcttgctcaaagatgctttgctgctgacaagttagcactaatcaggagcctcactgtttaaccaactatatgtctactagatgtatctacatatatggcagaatgcaggagggcctcaattcttgtgacatattgcccctctgtagtattgtgggggaggccagtcaggcggtgtatgtatatatttgtctgacactagaatgccttagccaatttttggatcccaggcaccgtgccttttggccttcggatgtattctgtgcccatcagctacctgtgtttatgctacaacaagcaaagtacttgggatatttgcaagttgtaacaggtcttatatttgtatgtgtttatgcactcctttttgttcttttag

SEQ ID NO: 5569 - DNA, 864 bp, Oryza sativa
  ref <308>: DATABASE ACCESSION NUMBER: AK062743
  ref <309>: DATABASE ENTRY DATE: 2001-12-06
atccgttcactctccctctctctctctctcggcgcggcggcagcggcgcgtccccctcgcagcctgcccccctctcctcctcctcctcctcgtggcgccctccaagtcgtcgtcggctgtggcggcggcggcggccaaggtgcgggaggagggagaggtctcctcctgcgccgacgacgacgatgtgaggagggctcccgacggcgacgacggtgacgaggtgaggagggagaggtctcatccggcagcagcagcagtgaggagggctcgatggcgtccagcggcgaggaggtgtgcagcggtggtgtggtgcggcggcgctaggcagtgctaggcggcgaggaggaggcgagcggcggcggcagatccatcccacgagagcgggcgcgtgttcgccgcgggcctcaacgactttgggcagctcgggataggctcctccgtgactcatccgctggtactgcttcttgtgcatcatgcctccatgtgaaattttcatctacattgtgagtcagcctacttttgcacaggaggcaaaagctggctggacatatatcagaattgcaattttcactcctgtaaagtttcttttgtgtgcaaatcattttccagtgcaactgcaggttccaatttttgtaggtgtcatgtagatgattctcatatatgttcttctcaatatgaattttcttgttcctgttcgatgtctgctctaatttttgatgaacaacgatgtctgaatctgaatatttaaactaggcatattttgagttaggatatatatgcaaatgtttaggatttaaagataggaatttttgaacttacgaatttttagacttaccgaattttaacttaggcttgtatgttttt

SEQ ID NO: 5570 - DNA, 1174 bp, Oryza sativa
  ref <308>: DATABASE ACCESSION NUMBER: AK062744
  ref <309>: DATABASE ENTRY DATE: 2001-12-06
cgcatgctcttcctcgtctttggagtagattaagatatcatcgatgaatactaccacaaatttgcccaagtaatccatgaacactttgttcataagattcataaagtatgccggggcgttggttaatccaaacgacattactgtgaactcatacaatccatagcgcgttgagaacgcggtcttgggtatatccccgatcctaattttcaattggtggtatcctgatcgaaggtcaatcttagagaacaccttagctcctttgagttgatcaaaaagatcatcaattcgtggtaatggatacttgtttttgatagtgacttcgttcagtgagcggtagtccacacacattctcatgctaccatccttcttcttgacgaataacactggggcgccccaaggtgacgaactaggacgtacaaatcccttctcttgcaactctctgatttgctttttaagttcctcgaactcattgaccggcatccgatatggtctcttggatatgggggtagtcccgggtatcaggtcaatagtgaactctatgtcacgatctagtggcattccaggtaaatcttctgggaacacatcggggaatcgctacactacgggcattcctttcaggggtagcatggtaaatatgcctccggcacgttcagttagtctaggatcttgatccatggttgctctcatatccgatccccagggtgtggtcagggtaacttctctacgtctacagtcgattactcctctattctttgttaaccaatccatacccaatatgacatcaagggtctgaggcatcagcaccataaggttggagggaaataccacatccctaaggcgaatgggtacgtcaatgcaagctgtatccacggctatttcacccccaggtgaatgtactaacattggttgccttagtttaactctggtcaaattgtgttgttggcttgctttcaaagatataaatgaatacgatgctcctgaatcgaagagaactttaactggagtggagttgatagaaaacatacccatcaatacgccctggttgtcacgcccagaaattcactagtaatttccaaactaatttgtgcataaaaccctcgtccaggaatcagccgaggtacacaaactgacaatttaatatacagaatcatcaataataacgttacatacttac

SEQ ID NO: 5571 - DNA, 560 bp, Oryza sativa
  ref <308>: DATABASE ACCESSION NUMBER: AK062745
  ref <309>: DATABASE ENTRY DATE: 2001-12-06
ctcgctttgcccccaacgaatccctcccccataccaaactccgccgccgccgccgccgcccgccgccgccgagaccgacccgaccacgatgggcctatgggacgcgctctaccgcgtggtgatgcgccgcaacgcggtctacgtcaccttcgtcgtcgccggagccttcgccggcgagcgggcggtggactacggggtgcacaaggtctgggagatgaacaacatcgggaaaaggtacgaagatatatcagtgctggggcaaaggccggccgagtagaacaatgaaagcccagcactcatcatcttgcttgctttacgtgaaagtagacactcttttaagctctaatgtcttgtcattttcttcggcacaataagcaatgtaaaacccctatctccgtttctgagagttagcactcgattcatttactcgaacatgatttgtgaattttgagatgcatggccaaaacctttcctgtagccatgtgatggtgcgctctggaatcagttgaaaactatacaaactcctcggaatgaaagttattttgaggttttgtttctgt

SEQ ID NO: 5572 - DNA, 779 bp, Oryza sativa
  ref <308>: DATABASE ACCESSION NUMBER: AK062746
  ref <309>: DATABASE ENTRY DATE: 2001-12-06
accttgcttgtacccgcatccacctcctcaccctttttctctctcatcaatctctctctctccacatccatccaaccctacccacacccacgcgaccaaaccctcggcgcggcggcggcggcggcgaggaggcgaggaggaggcgtagcagccgccgcgttggcaagcgccaggtgcgggcggatcggatccggggggcggagcggaggtgtggtggtgggggggagctatggcgtacgtggaccacgccttctccatctccgacgaggacgacctcgtcggcggcgccgtggggggcccccgcggcgcgcccgtcaaggagatcgccttcgcggccgcgctcctcgcgttcggcgcgctcggcgccatcggtggcgtcctcatggccgccaacaacgtcggcggcgaccgcgcgcacggaatcttcttcatgattctgggtattgtgatgttcatccctgggttctactacacaagaattgcctactatgcttacaaagggtacaagggcttctcgttttcgaacatcccgccgatctaaagaaagaggtgtatcatacgccgacttggttcatctcatcacgtccaatggcgaacaccatttctcattttcatcttgtctatttcttcttctgctgcccccctttgtaggatgaacttctagacatgtacatataaaatgctactcccataatgtatcattatggtgtggtgagctgaaaggttgtccattgtgtgattatgttgggttactatgacacatgtctgataagaacttt

SEQ ID NO: 5573 - DNA, 647 bp, Oryza sativa
  ref <308>: DATABASE ACCESSION NUMBER: AK062747
  ref <309>: DATABASE ENTRY DATE: 2001-12-06
ctctctctctctcctcaccggcatggcgccgcctcgcgaggacgggagcggcggagggcggcgggcggccagtagcgggaggcggagttcgcccgggcagccggtggtggaggcggagacggaaggtgctctccgacctcctcctcatcaaccgacgacgcggctgctgcgggtggggcggcgacgccaattcctctcctcggacgtccatgcccagaccacgcagccacgctcctactcgtcgccgtcgtaccgaataggcgacggcgttgtgccggcgcacagcggccgattgatctgttgtctgtacttcaaggctttggaggcggtggtgacgttcccgttcccctgcaccgcgccagcgctcaccatgtcggcgtagaggcggtcggcgatgacctggttggtggcgtcggaggtgtggtaggcgtcccagaacacgaacgtcgtgcggtcgtcgcagagctgcgccatcggcaggcacagcccgcccaccgtcgtgtccacgtcacaacacgacgtgtgcgatgttggattaagtctttgtgctcagcattttattttctattagctagcttgcatgtgagtcacggtggtgaggtcaagtcagtacatggcaaagtgcaagaagttcttcagtcctgatc

SEQ ID NO: 5574 - DNA, 706 bp, Oryza sativa
  ref <308>: DATABASE ACCESSION NUMBER: AK062748
  ref <309>: DATABASE ENTRY DATE: 2001-12-06
ctcacatgtgcccgatcagaatccactggcatgtgaaactcaactataaggaatattggagagtgaagatcacgattacgaacttcaactaccgcatgaattacacacagtggaatttggtcgctcaacatcctaacttcaataatatcacccagctgtttagcttcaactacaagccacttactccatatggaagcaagataaatgatactgcgatgttctggggagttaagttctataacgatttgctcatgcaagctggtccacttggaaatgcacagtcagaacttcttctgcgtaaggattccaaggacttcacctttgacaagggatgggccttcccacaccgcgtgtacttcaatggtgataattgtgtcatgccacctccggatgcatatccatggttgcctaatgcaagtcctctgacaaaacaaccattgacactctcggttttggtattttcgattgtgttggctactttgctggcttatgcatgatgagtgaaaccaagaaattcggtgagcttcaagttgtcaggttccatggtgtgcactgcaacagatcatttgttcattcagttccacggttgcatagaagagaagatgtcacgctgaggaaagctgatatgtgtgtgtgtgttgtatgttaaaagaaggccaaaatgtatttcttttttggtatatatactggccacagcattttggtg

SEQ ID NO: 5575 - DNA, 611 bp, Oryza sativa
  ref <308>: DATABASE ACCESSION NUMBER: AK062749
  ref <309>: DATABASE ENTRY DATE: 2001-12-06
aacaccatctccttgactccttcccattctctgtctgccccattcgctcgtgaaccacgtctcgcctccccatccgcgcacagaggcagagagggtggtggcggcgtgtggaggaaacggcagctgcggcgcacgggagcctcgacgtgcgccgcgcggagggtgcggcggcggcgacgcgtggagggagtggcgacggcggcggcgactgcgcgcggagaaagcagcgggcgtcggcgccacgggagctccggcggcacgcgggaacctcgagatgcggcgcgcggtggtggtggcgcacggatgaagctgtggcgacggcgcgcgaagaaagctgtggcgccaacccagtcctccgccccaggcgcttctccttcctggtcctcagccgtgcagctccactcgtctcagcctactccgtgccatcatcttcgtcacgatgccaacaatagaccagctcatggagttgtgcacaaattatgctgttgcacatggatttgtgctttgggatgtctttgttagacatgaattaacttatgttctttatcttttgacaaatattggtcaaatttaacaaaaatatgacaaatctaggtcaaatctttcttgat

SEQ ID NO: 5576 - DNA, 999 bp, Oryza sativa
  ref <308>: DATABASE ACCESSION NUMBER: AK104940
  ref <309>: DATABASE ENTRY DATE: 2002-08-28
gtgctcagtttcactcttatcagtgaattagatcatatacttgtgtccttgatagctcgttaattagcatggctaggtcactcgctgctgtcctactccttttggtcgccgccgcgggagccagccatgccgcgtcgccggcggagatgtactggaagatcgcgctcccgacctcgccgatgcccggcgccattcgcgacctcatcagcccagcgagctcagtgggctcagcttcgaaggaggacacggtgggcaacgtgttcttcctcgagaaggacctcttcccgggctccaagatgacgctccacttcacccgcgccaccgccggcgccgcgctgctcccccgcggccgcgccgagtccgtcccgttcgcctccgaaaggctcccggagatcctctcccagctctccatcccggccgtctcgccgaccgccgacgccatgtggtccacgctcgccgagtgcgaggccgcgcggctcgccggcgagacgaccaagcacaagcactactgcgccacgtcactcgagtccatggtcgagttcgtcgcgtccagcctcggcacccgcgacgtccacgccgtgtccacggaggtgatcagcacgttgacgccgacgccgaggcaggcgtacagggtggaggccgtgaggcccgtggcggtgcccggcggcgacatggtggcatgccacgggatgccgtacgcgtacgccgtgttcgggttgcacgggctcaagggcgcaggcggtggccgcgtgccacggggacgtggacgggcacggcgcggtggcggaggcatacaagaggctcggcgtggcgcccgggagcgtggccatctgccacttcctgcctcaggacgacatgatctgggtgcgcaactgaattaatgaagcagctaccttgcgcgccatccatggctaattattttagacatgctccttcctatattttggatctacctgccggctatcatgttatcataaatttacgcgtgtgcgcgcgacg

SEQ ID NO: 5577 - DNA, 728 bp, Oryza sativa
  ref <308>: DATABASE ACCESSION NUMBER: AK062750
  ref <309>: DATABASE ENTRY DATE: 2001-12-06
gcgctcccccatctccgcccgaatcacgcgcttccccgtcgatgcccgacgccccacgcagcgccgcccctccccacttgagttcatcccaacgccagttcgccgtcgatcccgcgtccgccgctcctcgatttctctcctctcccgcgccgcccctctgcctctccgccgtcgtcgcatctcctcacccctaccccgcgcaacgccggtcgccgcctaaccctaaccgtcgccgctccactctttccctctcccgccgccgccgcgcgccgccgtcgatctgtcgattccgacaccccgccttcgcgcgtgacgccgccggcgcccctccacgccgaccgtgtatattattgaatgctcttttctattagcttctcagtctggatggagactggcggccatggacgttgacaaccgctttaatagaatcatgatcgccgatgccaactaccaggactccttgcccctgtgcccccttctctactgcgacaccacaaagtgatctccggaaccctctccactgcacgacagagaaggtaatactattcaagtacaaatgtagatttgctggtaaatagtggatgtgattgtgaactatagtgtcacatatctattacgtgtatatgtgcatatccacatattaaggagctgcttataagtcatggtatgcaagttttttctgtaatttgaatgcatggatgctatttaaaatctcaatttgatgtgac

SEQ ID NO: 5578 - DNA, 820 bp, Oryza sativa
  ref <308>: DATABASE ACCESSION NUMBER: AK062751
  ref <309>: DATABASE ENTRY DATE: 2001-12-06
gaaccaaacataaagatcaaatgggtagctccagtgttccagagcaccgtcggcagcttgtcgccgccgtggctctcatcctcgccgtcgcggcctgccgtggcgccgctgggcgaggcgcgtcggcaggcggtgcggctgcgggtgtacatgcacgacatcgtgggcggggcggggcagacgtcggtggtggtggtgaaggggccggggccggcgaacccgtccatgtcgccggggaacaacttcggggacacggtgatcatcgacgacgtggtgacggagggcccaagcctggcgtccagggaggttgggcgggcgcaggggacgtacatgcttcgtccatggcgaggccggtgttcatcgtcgacatcacggtggtactcaccgacgggccatacaacgggagcaccatcctcatcgccggccgcgacgacacctccgaggaggtcagggagctggcggtggtcggcggcagcgggatgctccggcgagcgtccggcacgtgctgtggaggacggccaaggtggagtccaagctgcacgccgtgctggagctcgacgtgcacgcctcggtgcctgctgctgctgttgctcctagtggtagtggtagccatggccacccatttttggtgacctctgcctcagagtagaccactcacaaactaccagttaggtgtgcaattatccttttgtcctttttttttctgaaattatctgcaatatctttttttctggacaatgaattgcacacaataatcaacatcgttcatatatatactgtgccaccacgatcatcaatttcaattaatcacttgttgttg

SEQ ID NO: 5579 - DNA, 590 bp, Oryza sativa
  ref <308>: DATABASE ACCESSION NUMBER: AK062752
  ref <309>: DATABASE ENTRY DATE: 2001-12-06
accaacccctcgctctcccactcatctcgtcggcggcggcggcggagcggaggagcacggcgagctagctgctctaccttggaatggcgactgttccagttaacccaaaacctttcttgaacaacctgacagggaagcctgtcattgtcaaacttaagtggggtatggaatacaaaggataccttgtttctgtggactcttatatgaatctgcagctggctaatacagaggagtatattgatggacaattctctggaaacctgggagagatactgattaggtgcaacaatgttctgtatctccgaggcgttccagaggatgccgagatagaggatgcagaatgagataacctggacctatgcgcagatcgatttgtgtaatatgcagctgacatgaacaatttaagtgtcatgtaaaattgatgcacagattccttgttgacctggatcttaactatggtcatgatatggttatattaggcattgaaactgatttcatattgactagtgtcattgctcaaatgtgtgagagatcatatttcgtgagataatataccatttgcctgtcgagatggatgacgaactgaacat

SEQ ID NO: 5580 - DNA, 545 bp, Oryza sativa
  ref <308>: DATABASE ACCESSION NUMBER: AK062753
  ref <309>: DATABASE ENTRY DATE: 2001-12-06
aaatcacatcattcttcgttgcaaattagcaggggaagtctggaagaagctcaacctatatgagacagccgtgcgcagctctaacatacaagattttgtggaatcaatcctggacacctgccagaacaccagaaaccgggatggcctgcatgctttgctgcttgttcgcacggtctctggaaagcacgcaaccagctgatcttcaagctcacggaaacaagcgttgcatacatcctgcatcgaatcagagaaagtctccagttatgggttcaccgcttaaagcctagccttcgcgaacacctcaacacttgggcagacaagcttagctaggtttcctttttattcctgtatttttatttttattcctgtgttttgttttttcttcttccttttcttctcctttccttctttttttatctttctttctctttatccttcctctctgttcccccctgtataatctcttgccagccactggctttgtcacttttatgaccaccattaatacaatggaaacaaggtagagtctctctaccttgtgcgtc

SEQ ID NO: 5581 - DNA, 417 bp, Oryza sativa
  ref <308>: DATABASE ACCESSION NUMBER: AK062754
  ref <309>: DATABASE ENTRY DATE: 2001-12-06
ctctcgcccaccggaatcctcctcctccgcccctaggcaaggcaaggctaggattgccgcccgccggaatatctcccccaccgccgccgccctcccgccggcccacgggattggattcgcctctttacaaggtctatcctgccctctctactaccacccttatcgatctctatctggtttcctttacctttcgatttgattcaaccacatcgaaatcgattctatctctacccgcgacgcgatgaccacctcctaccggtgtatttcacttactcttttggatagcatggcttatatcggaactacctctatgctaacattgtctaggtctcattagctagattaacttaactgttttcacttagtggtgttagtctgtaaagaaaatgaatacccagtcttagttgagtcttttgt

SEQ ID NO: 5582 - DNA, 864 bp, Oryza sativa
  ref <308>: DATABASE ACCESSION NUMBER: AK062755
  ref <309>: DATABASE ENTRY DATE: 2001-12-06
cttttgctgtagcctgtagtagcttcgtcccaagaaaccaaaccaaaccaaactgaagccgaaaccaccctccttcgtctcctcctctctcgagaaaccaaatcgatcgaatccgaccgaaaccatccatggcgagcgcccctacggccgccgcctgcttcgggttgctggtggcgatgtgggccatcggattggtctcctacctcgaccagttcttgggtgccctgatgagctccgctcgagctctgccgccgctcgacgttgctgtggaggtggtgatggcggtggcggcgatcggctccctcaacaccgccatggcgtccatctacttccgtgtctacaacggccgcgccgcagctgcgaacaggcggatgctggatggtgcgtgcttcgccgtgtgggcgtcggccagcgtcctcctccacctcatcttcttcctccagccgggcgccatggacggcgctgatcaagatctgctacctctcgccgccgccgtcgtccgcgccctccttccagcttctgcggcggtgacgttcttcgcctccatcatcctcatctacgcgtatctccgtagcggcggcgccggcgccggcaccggtacctccgtgaagctcctcaccaaggtgaccaactcggctgcgcttgtcacgattgttcttagcctcgtcgtcgctgccatcgttgtcttctactccgagtaaatttgcccaaagcttgtcgaaccaaccatcgatccaatcctataccgctgcagttcgttcgggtaagcgactttaatgtctcgagtgtgtgttcatgctttgtggtgtaataagaacatatttcgctgtcaatcgtatgcatccgagtactactcttttacgc

SEQ ID NO: 5583 - DNA, 543 bp, Oryza sativa
  ref <308>: DATABASE ACCESSION NUMBER: AK062756
  ref <309>: DATABASE ENTRY DATE: 2001-12-06
gacctgctctgcttctcctccgcacccaaaaatatcaaagaactcaaaagcggagagaggcgaagaacaggggggacgccatgaacgtggaggaggaggtggggaagctcaaggaggagatccagaggctcggccagaagcagcccgatggatcctacaaggtaactttcggtgttatcttcaacgatgaccgttgtgcaaacatatttgaagcactagtcggcaccttgcgggctgccaagaagagaaaaattgttaagtatgatggtgagctgcttctacagggggctcatgacaatgttgagataaccctgttgcctcctccagcggtcgctgctgcctgaagagggaagcatctgcgagcctctggtgttaaggcgttgatatgcatataatctattgtgtctagattctcatgaaccatttgatattcgaagcggatgcctatcgcgtgatgtatgaactatgggtatgcagtttcttggacatgcttgtattggaactgaaatgataagttcactgctgatatattgtgcagtgtag

SEQ ID NO: 5584 - DNA, 448 bp, Oryza sativa
  ref <308>: DATABASE ACCESSION NUMBER: AK062757
  ref <309>: DATABASE ENTRY DATE: 2001-12-06
ttctttttccaccgcgcgcttcgatccgtttggggatctagtttttggtgttttggggttttccggggtttttttcggaaaagagaaaaaacactttgcgttccaatttttttccctctcatcttccctttcccccctcttctttttttgacccttgtaatttttggttttagcattaggggctttttgtgaagctgctgttcttcaccccttctgccgagtagaactagtaatctgttacagattgtaagcagagtgatcaagtgatgctacttgcttgcttgctgcaaagcctcgtgatcttctgctgcttctccacttgtagttggataaatcctaaaaaaaagtttccctcttgttttaccagtttttagtattaccgcccatccttgttaagttgtagcacttgtaatctccatggaagagatgaacaatgagtaattagctc

SEQ ID NO: 5585 - DNA, 536 bp, Oryza sativa
  ref <308>: DATABASE ACCESSION NUMBER: AK062758
  ref <309>: DATABASE ENTRY DATE: 2001-12-06
atcctgcacacagccatttcacttgctttgctccacgcctccacctacctaaatcgctctcattagtactcaattaagtcgatcggcgagcgattcagcgcggctcctcgaccgatctctccgtttcgtcagatcgatcgatcgatcgatcagggctgtgtattgcgccgtgtagtacgtgagaggatcggagtcggagcagcgagcgagatttgttgaagcaaattaagtagatcgatctcatatcgatcatccttaattaatttatcatggagctggtgctggtgatatcgctgccgctgctggcgctcatcataatcgtcgccatcgtcctctgcgtcatctgccgctagcttagctgattccttcctgcctccgcgatcattttgcatacatgtagtatgtcagtatgtggtgcatcaaatgtgatcattttgccgcccgttgttgttgggcacggtgattgacgacagaaagaattactcccttcatattttaatgtatgacaccattgactttttaaccaacgtttgacc

SEQ ID NO: 5586 - DNA, 518 bp, Oryza sativa
  ref <308>: DATABASE ACCESSION NUMBER: AK062759
  ref <309>: DATABASE ENTRY DATE: 2001-12-06
aaaaggttttcttgtagcttccagcagctagcttagctcttagctcttcccttcatcttggctcttcttgtagaagtagcaagttagcaagcctcctccattatgagctcatggtcatggagcgtgagacttatggttctcactctcactctcctgggagcagagctggcaggcatccgccatggccgccgaataatcccgagcttagaaggggactcgccgtcgccgtcgccggcgagtaagggctgcggccttttgacggaggagatggcggcgccgcccggccattactacagcagcaggcgcatgatgcaggaggaggaggaggatcatggtgtgtctgcgtccaagcgggtggtgccggagggcccaaacccactgcacaactgatcgatcgatcgaggtagtgtttgtgtttatcactgcagaagtgcagaaactgatcaatcagcggacgagtatgtatagcgagcttgtattgtaatcgaccgatgcaattaatcaacgcaagttatagc

SEQ ID NO: 5587 - DNA, 426 bp, Oryza sativa
  ref <308>: DATABASE ACCESSION NUMBER: AK062760
  ref <309>: DATABASE ENTRY DATE: 2001-12-06
aaatcattccagcacaagcgagcagcaccagcggcggttgctcgaaccagaggcagacgggtggctggagtggctggcggtggctccgcggctctccggtgtgacgacgacaacacaagccacacggcagcgcgggcctcgcatcctcatgctggagtgccagcgacggctccgcggcttcggctcgacggcgacacaagccgcagacctcgcatccttgtgtttggttggagtggccggcggcggcgcggctgtcgggcgccgccgcgacgacgacagaaggcacgcaagccgcagaggacgcgacgatacaatccttgcgtttcattctccgatcctgtccaaatttctgtaattttggattggatggactcaatgcatgtttatattctgatatatgtcaaatttcagtaatttttgttgttc

SEQ ID NO: 5588 - DNA, 993 bp, Oryza sativa
  ref <308>: DATABASE ACCESSION NUMBER: AK062761
  ref <309>: DATABASE ENTRY DATE: 2001-12-06
attagaagaagcatatgaaggttagaatgccatggagatgatggaggtggtagccaccgagattatggacgccgcgctgcacgtagccgtggccgggcgcacgctggccgtggctgagcgcgacggcacgcacgacccggccacggggcgcgcgctcaccggctcatggctctgggactcctccctcgtcctcgcctcccacctcgcgtcctgcgtccaccaccaccacctccgtggcgccaccgtcctcgagctcggcgccggcacgggcctcccgggcatcgccgccgtcgcctgcctcggcgccgcgcgctgcgtgctcaccgacgtgcgcccgctcctccccggcctcagggccaacgccgacgccaacgggctcaccgccgagcaggcggacgtgcgtgagctccggtggggtgggcacctcgagcccgaggtccaggtggacgtggtgctcatgtccgacgtgttctacgacccggacgacatgccggcgatggcggacacgctgcatgggctatggcgagacggcgacagcgacagcgacggcggcggcacggtggggtgggcggcgagcgaggcgcgcgacggcgtgcaggactgtatcgacgtgctgcgagagcaaggcttcgaggtggtcgaggtagacagggtcactaggccgctgctgcgcgaccccgagcaggccgccgacttcgccgtctatcgtctttttcgccggacaacttcgccgtccatcgtctccaatccaacgccgataactacagccgggtgttgactttcactctgtaacagtaaagccaagcttgtaacggcaccagaatcacctttgaccttttattttccaaaaggccattttgtacgtactttcttctcggttgcaggacttgtaaatgttccacaatgagtcaaggggacaaagacatagcaattaatatatgcaagtctactgtaggaagctacagtagtatacattgagaaggattttatagc

SEQ ID NO: 5589 - DNA, 712 bp, Oryza sativa
  ref <308>: DATABASE ACCESSION NUMBER: AK062762
  ref <309>: DATABASE ENTRY DATE: 2001-12-06
aaaacccgcctcgccggcagcggccatgacgttcgccgcgcgcatgaaggagctcatgaggaagtacggcaaggtggccatcggcgtccacctctccgtctcctgcgcctccatcaccggcctctacgtcgccatcgacaacaacgtcgacgtcgacgccatcttccgcaggatcggcatctcccccagcggcggcgtcgccggcgacgaggccgccgagacccccaccccttccgccgccgtccccgaggaggcgccgccgcgcaaccggacgcgggagctcgtggcgtccagcggcggcgcgctcgccctcgccctcatgtgcaacaaggcgctgcttcccgtcagggtccccgtcaccctcgcgctcacgccgcccgtcgccaggttcctcgcgcgctggaagctcgtcaagacctgagctcgtgttccctgttctgggagaacgatgcatattcaccatccaggacagcctgcagtgaatgcaacgctgtaaattactccatgctgcagtttggtgccgtctgattaatctgcgtaccagtttaatgatgaatgcccttgccacaacaaagttttacacttgaactcgcgatatgcttgtaacttggtttggtattccattctctaattttttttgtaacatcgacccccccaaaaaaaggttgagaccaaaataagcactacgactaatgcaagaagatcatttatt

SEQ ID NO: 5590 - DNA, 541 bp, Oryza sativa
  ref <308>: DATABASE ACCESSION NUMBER: AK062763
  ref <309>: DATABASE ENTRY DATE: 2001-12-06
ttggaaccaaacttttgattttgttgtcgaagatggtttacatgatatgcttatgttggaagtatatgatcatgatacttttagtagagattacatgggacggtgcatcctaacattaacgaaggtcttgatcgaagaagattacaaggacagcttcaaactggagggagcaaagtccgggaaactgaacttgcatctgaagtggtcgccgcaaccaatcttccgtgattcgcgagaagaggacagcttaagattcagatgagttttgtatgcgcggagagtcatagatgcgtgtgggcatctggtttctgcgggccggatgtgatgagggtttcctcctgaaaacctgatgagttcagtcatctcttttttgcggtgcaatttgatcatccgctgcacatatacatggaagaagagttatggtgttgatcagctagcttataatgtaattgtcaaacaacatttatgtgtttacttgcaatgtatgctcaaagcacatttatgtacatgtgaaaaatatataatttgagctgttggagtg

SEQ ID NO: 5591 - DNA, 665 bp, Oryza sativa
  ref <308>: DATABASE ACCESSION NUMBER: AK062764
  ref <309>: DATABASE ENTRY DATE: 2001-12-06
aaggtgcagtcccagtgcaccagccagtcatcaccaaccaccatccagtcccagtccgtgcagatgccggcttcagagaacgcacagattctgaacctacctcaaggtgagctgccgagctcttcacaggactgcttgctgaatccgctccagtaccagccgctcaacgaggcgctggaagacgtcctccagacagccggcggcagccaccaccaacaccagggtggtagcggcgagctgccatggatagcgtcgtcgttcggagcgggcggcttcgtcgacgcgagggaccctttcgacgtgcagttcagcggctcccagccgtgcgggctgctgctctccagcagcggcgccagattgtgaggacgagacgcgtgcgtgtgcagcaatgtgcaatgcaagcctccgtctctttgcatggagccgagtaatggcgccgccattgtagctaagctaagctcgagggtagtggcgtggggtccatctaactgtttgtctgctaacactcacaaagttgttttgggtgggatatatagagagagagatgatgatgcagagaagacaataagtgggtataatttggtagggtatgtgatctaatctgtgctgttttgtggcatgtaaaatgacaagaaagcactggtctggagattttttttagtgct

SEQ ID NO: 5592 - DNA, 521 bp, Oryza sativa
  ref <308>: DATABASE ACCESSION NUMBER: AK104941
  ref <309>: DATABASE ENTRY DATE: 2002-08-28
aaaggaagaagggaagaaacatatcgtcatcagattaatctcaatctccagctagcgtctccatgggttccaagaaggatgcccaaacctgggcagaccagtggggctcatctggtggcgacggaagcttcaagaaaggaggaggaggaggaggcagcagcgggaacagcgagaagaagacggtggccggcaacgtgaaggccgcggcgtcggagggcctcgtgaaggcgaaggcggcggcgctggtcggagcgcacaaggtgaagtccgggacgagcagtggcatcaagtgggtcaagggccagtaccagaagagggctggaaagtgattggatttctgatgcgtttgcctggttgctatgccatcgtctcactagctgttgctcctttagcttgaagcattgaagaaagtatcgaccagagacgggaggttatgtctttggcgctattcatttggatgatcttgtgagcaattaattaaactgttgctgattttaatacaagagagtgtcttttggtgc

SEQ ID NO: 5593 - DNA, 396 bp, Oryza sativa
  ref <308>: DATABASE ACCESSION NUMBER: AK062765
  ref <309>: DATABASE ENTRY DATE: 2001-12-06
gaagcagaactagctagctcgatcttgcacttgtctccgacttccttctcgtttttgtttcattccatagctgaagcaaaatgggtgacaagaaacaagtgaagctaaaggttcggggtgcaagcgagactgaggtcaagaatgtacttcgtcaagaattcaaagaatctatcgagtatagaaactacagcaaaaatccagagagcagcagtttgaaggtggaggtgcgagggactgtggatgtggggaagctgtacgaacgcctcaagaagatggcatccagtgtcaagattgaatcggttattccggatgatgtaaaggaagaaatagagagatacaagaaagaccttgaaagaatgaagagacagaaggaagatctagacataaaactaaggg

SEQ ID NO: 5594 - DNA, 498 bp, Oryza sativa
  ref <308>: DATABASE ACCESSION NUMBER: AK062766
  ref <309>: DATABASE ENTRY DATE: 2001-12-06
aatttcgcgaagcttaacacaattaatttcctcgcaaaacatctcacgcagcagcagctagcaagctagcttgccaagccacagccatggcggctttgctcggagctctccgcggcaagctgcacggctgcgcgctgcgcctgcgcggcgattcgctgcccgtcgtcgtctccgtcctcgccgtggctgctctgtgcgccaccgctctctcgaggacggcgaggaggtggtgttcgccggcaggctggccgccgtctgcggcggcgacggcgacgatgtcgaggaggagctcgcggcgctgcgggtggaccggctggcggagggcgtgtgggacagctacttcggcgggtggtcgaggtggaactacgtgacggatgggcactactacgacgaagacgccaccatttttctggactcttaagcacccctgagctgatgtaagtagtggctggccatttcggactaattaaattttggagctaatctgaattttgaagc

SEQ ID NO: 5595 - DNA, 710 bp, Oryza sativa
  ref <308>: DATABASE ACCESSION NUMBER: AK062767
  ref <309>: DATABASE ENTRY DATE: 2001-12-06
ctagccggcgccatcgcccctgccctcgattattccccccttctctcgcctcgctccgagcaggcgtatgcgtcctgaccaaggtgttcgacgtgttgccgcaggccggtggtggactgggcgaaggcggccggcgtggggcaattcgtcagcagcgccggcatctacacgcccagcgacgagccgccgcacatcgagggggacgcggtgaaggagaacgccgggcatgtcagcgtggagaagtacatcgcggagcagttcggcagctgggcgtcgttccggccgcagtacatgatcggctccggcaacaacaaggactgcgaggagtggttcttcgacagtaaaatcacccaaatcccgccaaccaaattctcccaaattccataccctcacaccaaaatattttcaaattcaatacaaactggaagagtttttaaacgagattttggtcgcgagttgcggtgcttgcatgtgcatgtagatttgacattgtctaggctcatttgttaagccccaattgacttagttgattgagcttttttttctctcttttttatgatggtgtgctcttcttgatggcctttttaatgtactggtactgtaatcgggcagtaagccatgttgtcttcctgtgctcttttgagagaacaaaatgggcataaagcccatatatgtcataacaaaactaggcttgctgttttctttttaag

SEQ ID NO: 5596 - DNA, 680 bp, Oryza sativa
  ref <308>: DATABASE ACCESSION NUMBER: AK062768
  ref <309>: DATABASE ENTRY DATE: 2001-12-06
attcctcaatttgccttcgcccagtcaaattagcttcccgcaacaaccatgaagtttgccgccgttgccgttgccgccctcgccgctgtctcgactgctgacgccgctctcgcgtcggcgcgttgcgttggagaaccctacttggcgtggatctccaacgacgtcgacccgggcctcgcatgcttcaccgccacgggcttctccggttcgggataccccttcccgtcgcaggaaaccgccgccaagttctgctccaactcggcgtgccgcacgctcctcgatggcgtcattgccgccacgcctgccgagggcgactgcacggtccagcagctccaggctgacggcacccgcgtcaagatcaacttctacgagaacattgcgtcggtctttgctggcgtctgctccaagagcacgctgccacctacgcccacccccactcccaccccgactcccaccccgactcccaccccaacgcccaccccgactcccactacgacggctccttcgccgacgccgaccgtcacgcccgagccgaccacgcagcgcccgcagtgctaagcgaagcgctcctgcgttttcagttttgaaccaaacctcctcgcttcgttcatgccgactgcttagtctctcctaacggcgtgccggtagtactacgtagtaatgcacaccattcttttgtt

SEQ ID NO: 5597 - DNA, 615 bp, Oryza sativa
  ref <308>: DATABASE ACCESSION NUMBER: AK062769
  ref <309>: DATABASE ENTRY DATE: 2001-12-06
aaactcaaagtcatccttatcttatcctccccaccgggagcaccactttcgcagttcagcgagctcggccggtgagagtcgacggaactgtcggggaatggagtctgcggcggtagagccaccagctggcggtgggtccggtgtgatggcggccgcagcgcgagcaaacaccctccgcggcggtgcgccgggtttgttggccttccactcgtacgcccgaggcagtctcatggcgtcctggagatcatcaggcttctgcagttcaacgtcgatgctgatatcatcctgaagaccggcgatgaaaagttgcacttgctgactctcggtgagggggtctgggatgcgactggtaagtgccagaaaacactcctggtacgccaccacggtgctcgtctgcgtgaggcgcttgagctcaccaaatgggttgtggcggatcgggggagaatgatcggcgacccgtgatggacacagcgacagaaagagatgagaaacagaggaagctggagatgaggagatagctttgatcttgcttgcctttattctaagattaattgccttaaataggtatacaaaatgtaacaaacggatgctaattgaaaggaaactaatcgtaac

SEQ ID NO: 5598 - DNA, 623 bp, Oryza sativa
  ref <308>: DATABASE ACCESSION NUMBER: AK062770
  ref <309>: DATABASE ENTRY DATE: 2001-12-06
tgacacgccaggtggtgctggtgaattgcaggatgctaggagcgtggatgagagtggtgtcctggagaatgctggtagcgacaccctgccggacgatttggatgatcggatagggggccctgacctttcctgtggcagcagcggcaggccatcggggtggaaagcacggatgggtgcttttatgtcaaggagcttgtctgtttccatgttccggaggcggccgcgtgtgagttgttatgagtcatgagaattggatgctttggttgctccattagcttcttcattctttcatgtttgtatgttacattaatttatgttgttcgttgcgaccgatgtttttgtcttttgggatggtaacatgctgttcttcctgatcggcttgtttatagaaattccagtttatgttggcaggatacttaattatttattcttgcttttaatagcagggatggatgcaatagcacagcgcaatcttattttaggtagcctttttctttggaaacaagatatggaaaacctgcaatttgattcatgtttatcttagcttcccatgtttgtttcaaggtctgaacaaaaatcattacttcaattcaaggaagaagaaacaattattgttagcaatc

SEQ ID NO: 5599 - DNA, 627 bp, Oryza sativa
  ref <308>: DATABASE ACCESSION NUMBER: AK062771
  ref <309>: DATABASE ENTRY DATE: 2001-12-06
aaccctttaattaccacccgatctcaccaacaagcggggcagctcgatcttgatatatatatatggtcaggctcgccgtggacgcaggcttcgccgccgccggcggctccatgcccgacgtgagcaggagtgttgtcggcatagctctggtcttcgtggcggccgtagcgatcgtggcgttcgtcgtgtttaactgcgccgatggcaagggcagctccggtggacggaagcggcccagctatggaggaggtggcgggtgtggaggcggtggaggtggctgtggcggcggcggcgggtgtggcggcggcggaggtggctgtggcggcggcggaggtggctgttaataaaggaacagagcatggaggagagggcgtgttgtggaaacgatatttcctatggaatttcatgccctctgatctacacaccagtttgattttgctttgcagtgtttttcatttacatcagtcgtggaataagaataataaacacattggtagttttgcttatgtgtcactatatgtaaacatcctcttacatgtttatgtattatattagcaaaaactacctatactttcttatgggtaaaatgtactttattatacatatactactcccttcgtttcggtt

SEQ ID NO: 5600 - DNA, 807 bp, Oryza sativa
  ref <308>: DATABASE ACCESSION NUMBER: AK062772
  ref <309>: DATABASE ENTRY DATE: 2001-12-06
acgtctcgtctctgtctctcggcccaccgcttccatcgttcgtcctcgtctccacgctaccgtttcgcaaccacccgcttcctcctccggagaccgctcggccgccgctcgctccagcatggccgccgcgccgtccgccacctccgtccacgacttcaccgtcaaggatgcaagcggaaaagacgtgaacctgagcacctacaaggggaaggttctcctcatcgttaacgtcgcatcccaatgtggcttaactaactccaactacactgagctgagccagctgtatgagaagtacaaggtccaaggctttgagatattggctttcccgtgcaatcagtttggagggcaggaacccggctccaatgaggagattgtccagtttgcttgcactcgcttcaaggctgagtatcccatttttgacaaggttgatgtcaacggtaacaatgctgcacccctgtacaagtatctgaagtctaacaaaggtgggcttttcggtgatagcatcaagtggaacttctccaaattcttggttgacaaggagggtcgcgtggtggatcgctatgcgcccaccacctcccctcttagtattgagaaggatatcaagaagctgcttgggagctcttaaacctaaaggtcgggatctgtagagcaacctgcacttatgcactgtattcagcactgagagttgtattaataaattggtgacatgtacttcacaggttgcatttgcactatactccttgcatcctgaatccttattgtactctgtacctgtatagttttcatgtcaataaatttccttgctgt

SEQ ID NO: 5601 - DNA, 525 bp, Oryza sativa
  ref <308>: DATABASE ACCESSION NUMBER: AK062773
  ref <309>: DATABASE ENTRY DATE: 2001-12-06
taattaaatagtgaaaagttattttggaacaagtcatgaaaggcaagttatagcattcttataagtagattaggttgattttagtttacctatgataatgaaagtaatacagactagcttacacaagtttagtttgacttctgaatgcatgctttttgtctctgtcttcagacgtggatgagtgcgcattacgtaagcaggatcccaagtatgaagatatatatccttgcaggaaaggagtctgccacaacacaccaggaggatatttatgcaaatgcaagttaggaaaaagatctgatggtacaaattatggatgtcgacctctgcgtactacagcagagcaagtggttattggcaccagtgtttcggccattgcgctaatggctttgacatgcgtgttggccatgcaaatacaaaggaaaaggcataagaaggacaaagatgagtatttcaagcaaaatggaggtctaaagctatatgatgagatgagatcaaggaaggtagacacaatccgcatactcactg

SEQ ID NO: 5602 - DNA, 849 bp, Oryza sativa
  ref <308>: DATABASE ACCESSION NUMBER: AK062774
  ref <309>: DATABASE ENTRY DATE: 2001-12-06
aagctataatcaaagctacttctgcctagctgaatcccttcatcctgcggcacaccgattttgggggtgaattgagcggtagctccgtcggttgaggaggaagagatggacggcgccggcggccgctcgtacgaggacttcaagccgccgcacaagatggtccgcgagccgcccacgcacaccctcaccatcgatctctccgccaaagggtacaagaaggagcacatcaaggtgcagctggtccgcagccggcggcggctggtcgtgagcggcgagtgccccgtcgccggcgagaccaaccggtggagccgcttccggctgcagttcccggtgcccgacggctgcgacctcaaggccatccaggcgaggctccacgacggcgtcatccgcgtcaccctgcccggcgtcaagccgcagcagcagccgccgcccgccaagacggccgccgccgccgcggtagtaggaggggatcagcggggcggcggcgaacgatgccaattcctccgggagcggggaaagctcgcgaccaccctgctcggcgtggtgctcgtcttgtttagcttcgtcatctacatcaggtacagcgtgaagccatgaaccggggggacacacggtatttatttctgagatgacgagcactgatcgatcgcgatgatgcgatgggtttcgctgtaagaattaatgaaatccatctgaatggaaaaatgaaaatggaaatgtaaacaaagccttggctttttctgttcatatatatgatcatccatgtcgcatgaaagagatgtccccatgcaaatccttgtgcagtactatcatctgactttaagtggctaacatgtgggccttataccc

SEQ ID NO: 5603 - DNA, 510 bp, Oryza sativa
  ref <308>: DATABASE ACCESSION NUMBER: AK104942
  ref <309>: DATABASE ENTRY DATE: 2002-08-28
aaaaaaaaaaactgttgacaaaaaaaactcagatcttcaagctgccagagcactgaaaaaggaagcaaagcaatggtcttggagcttctcacaatggctgctcaccgcgtggggcgatgcatgctcctgcaaccaccgcgcctcgccacctgcgtcctcttcctcctgctaccgctgctgctgccgtgctcggcgtcgtcgtcggtgatcacccacctcccgggcttccacggccgcttgccgttccaccttgagaccgggtatgttggtgtggacgaggagacgggcactgagctcttctactacttcgttgaatcggagaggagcccaagtacaggccctgtgatcctctggttgacaggcgggcctggctgctccggattcagcggtgtcgtctttgaagtaggttagtagtagtgattgggatttgatgatgagaaaaagatttgtagaactgacagagactatgctttcattgctctaaggttaatactattctcatgttggctc

SEQ ID NO: 5604 - DNA, 880 bp, Oryza sativa
  ref <308>: DATABASE ACCESSION NUMBER: AK062775
  ref <309>: DATABASE ENTRY DATE: 2001-12-06
ggttccgcaacatgcttcgcgccgtcatcgccgtcttccttgctgacccgacctcgcctctgtctcaaacttggttacacacttcagtgtgtggtgtgttcgagttgaatggtaagccgaggcggagacggggcgagctttatataggtggacgggctcgcttcgacgcttcgttgaactttcctcccgcgcgcgcactcacccacgtggtggaaatggcatttttagttacgaagagtaaataaaaaataaacggagaaagagtgagccaggccagataggtgggtcgagtagctgatgcttgtttagttgggcgttttggggaggaggttgagataaccatttcttttgttggggtcgccccgtgcggtggcgtcagcgatgaggtcgttagctcggctctctcggcctctcgaggggagcagtgtgtggcccggcacgcctcgtggtcgctcgctcgagccggtttgtgggcgctgcaggctgaagcctgcaaggcaggatcgtgtaggcggcagcagagcagctagctagcgctgttggtgcgattgattattatctgctctctagatggtccagtccaacttgtgcttactttggggatatcctcggaacattcaggtcatcaggtgaatgactgcgtttttccgtctaccataaggctgcatacttatctctgtcttgttgatggctaaaggcctaaagcgctatcactattgcagaatgcatgttgcttaaactatcacaccagccattgaataatccccttgcgtttctgtaaacgacaggctagttgtaacttgtaacttgtactactggtatgagtgtattcgtactagcagaattaactacagtaactggatgccgaattttcactggc

SEQ ID NO: 5605 - DNA, 735 bp, Oryza sativa
  ref <308>: DATABASE ACCESSION NUMBER: AK062776
  ref <309>: DATABASE ENTRY DATE: 2001-12-06
tgatgctgcaaagcgtgctatagacttcatgtttggatggtttatggatcccctcattagaggcgactaccccctaagcatgagaggattggttgggaatcgcttgccacagttcactaaagaacagtctaagttggtcaagggtgcatttgactttattggacttaactactacactgcgaactatgctgataaccttcctccatcaaatggccttaacaacagctataccaccgattctcgagctaatcttaccggtgtacgaaatggcatccccataggaccgcaggctgcttcaccttggctttacgtctaccctcaaggcttccgtgacttgctactttatgttaaggagaactatggcaatcctaccgtctacatcactgaaaatggcgttgatgaattcaacaataagaccttaccactccaagaagccttgaaggatgacgctaggatagaatactaccacaagcacctcctttccctgctaagtgctataagggatggagcaaacgtgaagggatactttgcatggtcgctgcttgataacttcgagtggtcgaacggctacacagttcgatttgggataaacttcgtagattacaatgacggaaggaagagataccccaagaactctgcccattggttcaagaagttcctcctgaaatgataaaaaagcaccattgcactcattgcttttctcattgaataataaaagagtatatgttttgcgtg

SEQ ID NO: 5606 - DNA, 574 bp, Oryza sativa
  ref <308>: DATABASE ACCESSION NUMBER: AK062777
  ref <309>: DATABASE ENTRY DATE: 2001-12-06
gaagtcgacgagcgaagagaacagaagcgagcgagcaaggaaggcgatccaaggaagaagatggcggcggcggcggccatggcgatgaaagatccgagcctgtggcacaaggtggccgccatatccggggttgctgcccttggacttggcacctatggcgcgcacatgttccgccccaagaaccccgcgtacaaggaggtttggcacactgcgtccctctaccatctcgtccacaccgcggcgttgctcggggctcccatcaccaagcgccccgatgtttttggagggcttcttactgctgggattgttctcttctctggaacgtgctacactgtggcttatcttgaagacaggaagtattcttccacggcaccgttgggtggctttgcgttcatcgctgcttgggccagtctgctcttctgattatatcgtgttttagcatgtgaaaacgtattacattactgaatgctttgtatttggtgccctatcagttcatgcaattgactcgtatgcatctctatcatgaccttctagaaaagaaatgaaataaaatcaaaagtaccttgatggttgc

SEQ ID NO: 5607 - DNA, 781 bp, Oryza sativa
  ref <308>: DATABASE ACCESSION NUMBER: AK062778
  ref <309>: DATABASE ENTRY DATE: 2001-12-06
taaattaggccactagttaaggtagtgaacctaatccaccctacaaatcttcacgtgtgcttgaaatgggcctgagttgggttggatatggaaaacccgcctttccaccaaaaaatatgggcctggattggctgccaacgtgggtcctatacttccttcatcgccggaggcgccgccgtgccggtgaccggcgggcggcggcgatgggggcgaggcggagggggaggagggatcccgctccagttccggccatcactctcgccgtacgtgcccttgctccggccagaggggctcccctcgcagaggcttcttctccgggggccaccttccgtcgggggcagccctagctcgatccgcggacggagcagaggcagcgcggcgcggcgcggcgcagctcggccgcatcacggatgaccgccgcggctgccattccggggcggcgaatcagtcagagcccgagggagttacggatccaagcaaggaccaagaaccgcaagactttgagcaagaggtcggagatgaagcttcggagaatccctacgcttactaccaggagggtgatgaagacgatggcgcccagtaggtcttagttacggtcgttgcctgtggcaatggagtgccgctgccttaactccgctgccttacctacttctgtttttggaatgtattccggaccgctcggtccgatgatttaagactgtgcctgcgggcttatgatgtaataattcgtactagactctcgtgtatgtgcacttgatatttcagctatgagttcgtgtgt

SEQ ID NO: 5608 - DNA, 625 bp, Oryza sativa
  ref <308>: DATABASE ACCESSION NUMBER: AK062779
  ref <309>: DATABASE ENTRY DATE: 2001-12-06
gtgttgtgttatgtgctaagaactctgctccattaagtggtgtagtgagcaaagctagtgcaggctcacttgagttgatcgaactgctctcctgtaggaacatgatgcagtttttatcttcatcggctgaaaatgggtggcgagttcttggtggtactgttgctcctaaagctatacctctatctgaagttgtgccaggagaaccaacaatccttgtgttgggtagtgaaggcactggtttgaggcccctggttgagcgatcctgcacacatttggtcagaattccgggtaatgttgatggatcttttgtaggagcagatacagacacagatggaggggaagaaggtgataattattcaggtaaccaagatatgaaatcattccttgcagtggagagcttgaatgtaagtgtcgcagcaggggttttgctttatcatctggctggaacaaatgcatcccctgtaagtgataagcctagcatccctcttatgtaaggatgtcacataattcatccatccatatcataattatttatattagttctcttttaacacttactccctctatgtactgagttcagtttcagtcgcatgcttctacataaatgattctttgtcatagtgcc

SEQ ID NO: 5609 - DNA, 715 bp, Oryza sativa
  ref <308>: DATABASE ACCESSION NUMBER: AK062780
  ref <309>: DATABASE ENTRY DATE: 2001-12-06
ggccgttgaccagggcgctctggcagctgtcggtcgtcgggcacgcgaagagcgtgcgactgatgagaacgaggcaccaccggaggttcaagccagaatctcggccttcatttcgtcgatctccaccacaccgcctccatccatcctaggggggccgccggcctctgtcccagtcactaggactcgacgccgtgcaactatcctagaaggattcacgccatggcgaagcccgcggttggctctgcaggggaatgggacacggcggcacacgatctccaaagcccagaaggtgactatgaagaagttgggaattattgaggaggaagaagaggcaaaccaggaagcggttcaggaattcgagaagctctttgatgaaccgctgcctccgcatcatgtccaggccattgcagaactgttgcaaatcgacatggccgcaccccttcaacctctgcctgaagttcttccgggggtggaggtcgcgtctccggcctgattgctttgtttcccttttcagctaatctgaagtgtgtccagttccctatgttaggttttagtttcctagtgtggaatgtaaggggtcttaataaccctgctaagcgtgcgttggtgaaagagtctgtaatctcctctagttcctctgtcgtttgttttcaggagtccaagttgtccgctgtcaaccagtcgctaatttatgaactttgtggtctggattttg

SEQ ID NO: 5610 - DNA, 713 bp, Oryza sativa
  ref <308>: DATABASE ACCESSION NUMBER: AK062781
  ref <309>: DATABASE ENTRY DATE: 2001-12-06
gcacaccagctagctatagctaagccccccaagagacatcgagagcgagatcgccatggccgccgccgccgccaagaacggccgcattgccgtcgccgcgctcctcctggcggcgctggccctgtccgcgcagctcgcgccggccgcggcgtgctcctgctgcccgctgctgtccggcgtcgccgacctcgacgccgcgctctgcctctgcaccgccatcaaggccaaggcgctcggcgtcagcctcgtcctccccgttgccatctccgtgctcgtcaacgagtgcggcaagcacgtcccctccagcttccagtgcccatcataaatcacctcaattatgtatgatcactaattaattaataatcacctactgcatctgatctctgcatgcatgcatggattaattaattaagctatcaaattacatattacctgcataattaataagtatagtttatcacctggctatgctatatacatataaatatatatagtgacatatgtagcatatatacatgagctctgacttgtgtcatggagatgtggaggcatgcatggagccttggattgtgcatttaattgatgtataataatatttgtgtaacatatattttgctgtgtcatgcatatatgcatgtggagttgtggtatttggtttgtagtggtttgggagatttattatgaaataaagagtgtgtgatatgtatgctatg

SEQ ID NO: 5611 - DNA, 515 bp, Oryza sativa
  ref <308>: DATABASE ACCESSION NUMBER: AK062782
  ref <309>: DATABASE ENTRY DATE: 2001-12-06
caaaaccctcctcacccgcttgacctcgccaatcgccggcgagcgacaggcgagacgagagcccgcggcggcggcagcggcggcggcgatcaggacccgatcctcaccggcgcacttctcctgttcattgcaggagcaaagcagtaaaaatgaacgagcacctccgctttgaggatggctggaagatcctggaacaggggattgtgaaatgctcaaagcttttggaggattgccctggtggaaggccaactgtgaatgagtacatgaattactatgattgcgcttaccggatggctgtgcagaaagaccagtattgtcaagagatgtacaattcttacaaagcaacacatgaaagttgcgtctgtgcaatggtactacagtactagactgttgctagtttttaaatccacaatgtcatatttctagacatagccaagtaagtttattgtgttgcataatgatgattgaaatcctcaatttgaatctaatgaaatgtcaacttcatttacctccat

SEQ ID NO: 5612 - DNA, 448 bp, Oryza sativa
  ref <308>: DATABASE ACCESSION NUMBER: AK062783
  ref <309>: DATABASE ENTRY DATE: 2001-12-06
atcctctgcaactcccagtcccgatgcccgacggtgcagcaccgcccaacgccgcccgacggaggagcgcctcccaagaaggtcgtgcggctgtggcgatcccttcccaacccgacgcactctagcccggtcgcccagctgcaccctggtggacggtggtggaagagacctcgctggcggaggacgccggccgtgagcttgtgattaaagcgatggcagccgcgggtagccgggaacaacgacgatgggagacgagatggatgagatatggagctttcggaggggcgatggagatcgacgggatccaagtcacagtaggattaatttgcttgatttgcttcttttctctgagtcgtgctctacctgctacttgctcgtgggatcatcatattgctgtcgacctgtcgttcatccgagctgctttgattcgatctgagttgatttgatt

SEQ ID NO: 5613 - DNA, 498 bp, Oryza sativa
  ref <308>: DATABASE ACCESSION NUMBER: AK062784
  ref <309>: DATABASE ENTRY DATE: 2001-12-06
aacaacaagaacacctgtgtcatcacaacaattgagcagcagcagcagaagcaattgagatttaattccatggcgatttcgaggtcagctccaatggaggagagggatcagctgcagggagcaagaagatcagcggtcggggattatctggagacgcggccggccggcggcggccgctgcccggcgacgacgctccgggcatcccggtcgctctccccgctccgccgcgccggcggcgccatcccggtcggggagtgatcgatcgatgatgatctttttttttttttgtgagatcggagagttagtacctgatgcctgtccatgctgacatgctgtttactgtgatgtctatctgcatggttcagagctttagctgttggttgtagcacaccagatgtacatgttattcccctctcttgtttgtgttgtaaaatatcagtgatcgagtttacttaccttgcttatatcttagcaaaacaatccttggatgttttcgtg

SEQ ID NO: 5614 - DNA, 747 bp, Oryza sativa
  ref <308>: DATABASE ACCESSION NUMBER: AK062785
  ref <309>: DATABASE ENTRY DATE: 2001-12-06
gtgcgagtcagctgctcctcccagaaacctcgccaccctctctctccgccgcgaatcgagactccgatggcccccgccgccgccgccgccgccgcgctcgtgcgcctccctctccgcccggcgcgggccaccctgccgaaccaaggttttggccgccgccgcgccggggcgtcttcgctggccgtgcgggcgaaggactccgacgatctgagagtgctgatctcggagaagcccgcggagccggcgcctgcgaagcgggaggggtgggaggggtttggccgggaggtgggtgatggggatggagaggtccaggtgcagggggaatcgacttcctggaatgttctcaaccagattggcgtcgagttggactctgaaaattcatatactgctcttgtttatgggacatctgcgcttgttacgatctggatttcatcaattgttgtttctgcacttgattcagtccctttggttccccaggtgatggaagttgtcggccttggattcacagtttggttcacctcgcgatatttgatttttaaggaaaatcgggatgaattgatcaccagaattggctccatcaagaagcagatacttggatctcgtggtgactgagtagttctcctacacggttagtgatgaatctcgaaaggtgcttcgaatgtttaatgggtacccatgttgtgttcttgaaaaagttgttatgaacatttaatatgttatcttagtgctttagtgctggttctgaat

SEQ ID NO: 5615 - DNA, 596 bp, Oryza sativa
  ref <308>: DATABASE ACCESSION NUMBER: AK062786
  ref <309>: DATABASE ENTRY DATE: 2001-12-06
gaaaaagaagccgactgtccaggaacttaacgccacgagcatgaggaagctcaaaaccatgctcaaggaagagctaattgccaaggctgccgctggggaagggaagaggctggcgcttgcagagctggacgacaacgccggtggcgtcgactgctgatcgacgatgcggatggggggcgtgaggagctgcaaaacccaatgccatatgagactgaataaaatgaggagagctatagttgtgaagtgataactaaggcttcgtcttgctggcgtgagtacccaagttttagttgtgaagtgatacttaaggcttcgtcttgctggcgtgagtgcccaagttttagttgtgaagtgatacttaaggcttcgtcttgctggcgtgagtgcccaagttttcgtgtgtggggagaggcgcatcaggttgtgaaaccatggtttctctgaacaacctgcagtttgcgttggttctctctgtttccttttttctcgtggtcgttttgtgtctttgtatccgttccgtgctgagactctggcttggttaagccctaaatgtattttactgctatttacaagtaatcgagttctctgttactgct

SEQ ID NO: 5616 - DNA, 725 bp, Oryza sativa
  ref <308>: DATABASE ACCESSION NUMBER: AK062787
  ref <309>: DATABASE ENTRY DATE: 2001-12-06
cccaaccatatctcatcgtaaaatttgcagctcgtataggacagtaaacgaagaaaccatcgtcgtacgtcgtccatgtctgacgcccctcccatggccgagaaaccaactatcaaggtggagacgacgccgggagactggaggttcccgtcggccaaccagaccaagcgatgcttcacgtgctacatcgagtacaacaagtgcatagaagccaagggtgaagggtccgacgagtgcaccaagtatgccaagtgctacagatccctctgccccggggaatggatcgagaggtggaaggagcagagggcaaacgggactttcgctgggcctctctgaaacggggacagcgaccgatcgatcgaccatatctctacatatatcgatcggctacagctaataataccaatcaatcctgtatgcaatgtcgtctcgatcgtcagggtgaagcctcgtcgtgacactcctagctagtattatgtacactcatgacagtgtcagttattaattggttgttgtgtctaattgcagtattagtagcgaactagcgatgcccctgcactgctgtacagtgccgtgacaagctactctgaattttttagatagtacgctagctgcacccgtcataaatttggttgtctttggtttcggttggctctgcttccatgttgctctactactagtctactactaataatgggtaattagctactcacaggtcgatcagt

SEQ ID NO: 5617 - DNA, 502 bp, Oryza sativa
  ref <308>: DATABASE ACCESSION NUMBER: AK062788
  ref <309>: DATABASE ENTRY DATE: 2001-12-06
catgatatgtcatatcaattcaaaatgtttattatctaagaaactactatagtggtaagagagattaattttgggtgcaggacggtggaggaggcgatcgagagggcgaacgggacgaggtacgggctggcggcggggctggtgacgagggacatcgacgtggcgaaccggatggcgaggtcgatccgggcaggggtggtgtgggtgaactgctacttcgccatggacaggagctgcccgttcggtggccgcaagatgagcgggttcggcaaggacgacagcatgcacgcgctcgacaagttcctcgccgtcaagtccgtcgtcacccccgtccatggctccccctggttctgagttctttctggatctcgtcgccgatcgagtcggccatgcgtatgtacacatgttggtgttgttggatttgctgggtggtggagtatttgtaacggtggaagattattacagagagtcaataagttgcattatccattattttccttgt

SEQ ID NO: 5618 - DNA, 991 bp, Oryza sativa
  ref <308>: DATABASE ACCESSION NUMBER: AK062789
  ref <309>: DATABASE ENTRY DATE: 2001-12-06
tagtgctattcctacagtttcatttttggtttgttcttttgtcaatcttgcttccactctcttcttttaaaattttttacaagacctgaaccaagcccagacattcatgtgctaaaggcctgctcgacattaagatggtttatgaatttatgataacctcagggttgtcgataataatagttccatgacaggattccctatgattctgtcctctccatgaaattaatcataatattacacatatttgaattaaaaacagcatacatagataatatactcctagatttctgttttctttaagattcctaaacctgtttaaacttcaagaatggggagtactggatgcaacacctactactactacctgctagacaattagattgccaatcttggtggcaattgtcaaaatatcgaattatgctgaaggaagcattttggaagttacatgatcaaggccagtagatccaattgtttctctcttttttttcatgttgaactcaaccacatctattatttagttaaccttattacactaggtagaagaagatttgaataaggtgcactgactgatttgaacaactcgattatggtcaactctgacctaatgatgtagtttgttttctaactatcgtcttgttcaaatgttttaatagttttgtatttgtactggtattgtcttgtcatcgatgagtgttctgctttttattagcaattagtaaaaactggataactcttgattcatcatgttttacctttgtaactctgttaaatgtcaattggaaattctgtaagagaactgacccttttcacgttgttgcacagtgcacatagtgtcaacctgtgcaccttgtgtcaaccagctactacaattggaccatttgaagccccaatcttcacttaactgttgatgtcaaaatgattctaagttaatattaatttggatattcctcgtatgccactgacatctgacatataaagggacattctgtgg

SEQ ID NO: 5619 - DNA, 510 bp, Oryza sativa
  ref <308>: DATABASE ACCESSION NUMBER: AK062790
  ref <309>: DATABASE ENTRY DATE: 2001-12-06
attctaaaaaccacaaactagctaggtaactctggttttttatcgctttctgaaactaggtggcaagatatatacctattctgaagcaatgagtttcctgctgaagactaggagtgaatctgacaagccgaagtcgccatcttctgaagaactgcagcaaaagatagttcaagtccgggaactcctgggaagcctggcagctgagatgccggcattcttatcagacaccaccatccgccgtttcctaagggcaaggaactggagcacggaacaagcaaccaagtcgctcaaagaaactgtcaagtggaggcgtcagtacaggccagaaagcatttgctgggtgctctcacaaatcccaaatcaacccctttgttgagtttgtaccaattgttttttctaaagcataattgtttgtaattattatgttttggacgacattgctgacaaggagtatgagggtaggagagcatatatagctgactaccttgatgccaaaggaagatctatact

SEQ ID NO: 5620 - DNA, 506 bp, Oryza sativa
  ref <308>: DATABASE ACCESSION NUMBER: AK062791
  ref <309>: DATABASE ENTRY DATE: 2001-12-06
gaatatgagctagctcatgatgatgtagacggggaatgctgtttgctttgccacagtagcgctcctggagattgggtgaactgtggtttgtgtggtgaatgggcacattttggttgtgacagacgacaaggcctaggcactttcaaggattatgcaaagacagatgggctggaatacatctgccctcactgtagtctagcaaactataagaagaaacctcctccccaaaaggtagctaatggctttgcgaatacagtgtctgtatcacgaaatgtttagttttcctttcttcttttttgccctgtgtttcggggagaagagcccagtagagtagagaataggcaggctgctgatagagagaggaaggtgtgtagtgttgtgatctgtattaccctattaatttggttcagcgtaggaagcttaagttttatatagaatgtaacaactgacaacacagctaagctactacggtagctggtcaaattaagttaagagcctgttgatat

SEQ ID NO: 5621 - DNA, 658 bp, Oryza sativa
  ref <308>: DATABASE ACCESSION NUMBER: AK062792
  ref <309>: DATABASE ENTRY DATE: 2001-12-06
ggtgcccgcgatgtcgccgcctttgttgctccgccgcgccctgcagaggcttctcccccaccgcacccgctctttctgcagcagcagattatcctcctcatcttcctccccgggagaggtcaaaagtatcaggcgatttgatgaatttgaggcgatggcacaaagggagattgttgaagatgtggaggaagtgaggaaactgaagagcgaagatagaaattatctcaacaggctgttaacttcttggggggtgcccaatggggagtttcgagataagctaatgtggggcggtaatgttgcagcgatatttattgcgtccagtgcagttgggactttgagtgctaaaatagatgggagtgcgtaagtatgcatgcaaacgattcgggaaaggaagcacttgttctcctgttatcagctctcatcgtgtgtttgtgatgacttgttattgctgacataacagccattgcacttaatatccttttgtcctaaccgtggtgtgtaacatattaacatatatttgaattgtgttctcagtatatgcatgtgacactgaggggatgtatggtgctcgtcttctactacattttgttatgttatcagtagtggtcatgcgcgatcttggttctgtttaatttaatggcttcgttttttccccctc

SEQ ID NO: 5622 - DNA, 507 bp, Oryza sativa
  ref <308>: DATABASE ACCESSION NUMBER: AK062793
  ref <309>: DATABASE ENTRY DATE: 2001-12-06
tagctaagatatatttatgatcatatgttatgaaagatcggcatatacgtaccgctgtttttttaaaaaaaacagatcacctgaagaaacattagtgctctctattacaatcactgtgttagaaacaaaatacaaccatgaatcaaaaaaataaaaggaacagaagaaggtattaccatactccctccgtcccaaaatataaagaattggagggatataacataatattcatactaataggatatgtcatacctctctaaaatctctaatatatattagagtaggtataataggtaaatttttgctggctatattgggtccaaactgaataaaatacagagttagagaagaaatgagtagaaagagggtctgagcgggcgactaattacatactagtcgccagctccacacaggctccaattcaacagtagcagcgcatgaccagtttcggttgagctccagtagctgctcacttctcaaggaaaaatgagtgtacaggaaagcttc

SEQ ID NO: 5623 - DNA, 679 bp, Oryza sativa
  ref <308>: DATABASE ACCESSION NUMBER: AK062794
  ref <309>: DATABASE ENTRY DATE: 2001-12-06
gtttggattgaggcggtagcttgtcagtgggggaagctcaggctgccgaagcaatgccacctagtcccgggttctccttcggccaaatctggcgaggcggccggcgggtggtggaacggaggagtcctgggccagctctcaggggtggtggttcgttgaagtcggccgatggaggggcgtcggtgcggtgtggtggatgccacgtgctgccatttgtctgtgtggtggttctgagttggtggacggcgatctgcagtcaaggttgtagggtcccaagcgaaagcctagtccggtggttcaccgggccgacagcggctacgtcttcgggcgtcgtaatttccttggagcgttgtcgagggttaccctctccctttcttggcgagcttctctgggtgaaaaccacatctttttagatgggcgatggcggcatcctggatgtcgtgaccaccatggtggcatcgttttcggagcctcgtctctgtggtgttgccgtaggcctagcggcgttcggccacatttagcgggggtcgtttggtgctaggtttcaccctcagcggtttgtgcttgggtggtagtgtgtggtgtgtggcaatgcaccttggtgcattttgatgttttttctcttgtaacttttattccttcttaatatactcggttggcctccttcggccttcccggc

SEQ ID NO: 5624 - DNA, 862 bp, Oryza sativa
  ref <308>: DATABASE ACCESSION NUMBER: AK062795
  ref <309>: DATABASE ENTRY DATE: 2001-12-06
atcagcaatagctacacagagctaagctagggttagctcagcaatggcaggtgctcctcgaggactagttctcctcggcgtttgtgccgtcttgatggcggtcgccgtcggcggagaggcggcgtcggtcgtcgtcggcacggccaagtgcgccgactgcaccaggaagaacatgaaagctgaggatgctttcaagaacctccaggtggcgatcaagtgcaagaacggcaatggtgagtacgagagcaaggccaccggaaagctcgacggtaccggcgtcttcagcatccccctcgacgccgacctccacagctccgactgcgtcgcacagctccatggcgcgaccaacgagccatgccccggacaagagccatccaagatcgtgccaatgtcagagggcacctttatcgccgtcgccggccagacccactacccatcagcgttgtgcgcatcggcgaccatctgcggtcccatcaagaagaagatcatagaccacttccacaagaagccggtgccacccaagccagagccaaaaccggagccacccaagcccaagcctgagccggagcacccattcctcgaccacatccacaagaaggagaagcacttcttcgatcacttccacaagaagcccgtgccgcccaagccagagcccaagccggagcccaagccagagcccaagccgcagcctgcgcctgagtaccacaacccgagccctccggcgaagaattgatgaatatgatctgcattggatggacattagcatgtttgatcatgccgcagatgatgatcctgctcagcacaggagtgtaatttgtacttgattatcgggcatcagcagggatgtttgtactatttgcat

SEQ ID NO: 5625 - DNA, 518 bp, Oryza sativa
  ref <308>: DATABASE ACCESSION NUMBER: AK062796
  ref <309>: DATABASE ENTRY DATE: 2001-12-06
aggccagcaactgagaagctccatacaagtaagcagcagctagttgccgacaaggccagagaaggaagaagaagctctcatcatcatcaccatgtcgtgctgcggtggcaactgcggatgcggctccagctgccagtgcggcaacggctgcggcggatgcaagtactctgaggtggaacccacgaccacgaccaccttccttgccgatgcaaccaacaaggggtctggtgctgcttccggaggatcagagatgggggcggagaacggcagctgcggctgcaacacctgcaagtgcggcaccagctgcggctgctcctgctgcaactgcaactagaagaaacttatctccatccaattcatcacctgatcaacgagctaccagtaccactacatatgccatgtactagctacctagcttgcatgcaagtccttaatttgctgctagctagctagctacctaccttagcgtctcatgtatgtcatgttgccgcctggcccctaaataaaattccttactt

SEQ ID NO: 5626 - DNA, 707 bp, Oryza sativa
  ref <308>: DATABASE ACCESSION NUMBER: AK062797
  ref <309>: DATABASE ENTRY DATE: 2001-12-06
tatgaccgattcgatagaaaagagggagtagtgtgcatttttcgttggggattccctggaataaaacgtcgcgtcttccttcgattccttatgcgggatatccaatcaattagaattcaggttaaagaaggtctttttcctcgtcgtatcctttatatggaaatccggggccagggggccattcccttgactcgtactgatgagaagttttttactccacgagaaattgaacaaaaagctgccgaattggcttatttcttgcgcataccaatggaagtattttgagtaccaattgaattttttgaaatgaattgaatgaagaagaattggaagaagaaaagttttctcaacacgagggaaaaggtcccttcgaaattgcattattgtaaggggattttgagtatttatctaaaggaaggaacaaatgaggataagagaaaattgcttctaatttgtccaagtgggatatatggcgtaatattcttccattttcatccgaaaggacttttttctatttctctattccactccatctagatctaagaaagaactcaatgcaatgaaattctactagtatagaaaaaagaggaatagatacaaggtctcaaaccttgttatagaatttttccttcaaagaaaaagaaatatcatatagagtcagcgaataaagcggattcattaacaactcaatttacagatcaaaaatg

SEQ ID NO: 5627 - DNA, 1157 bp, Oryza sativa
  ref <308>: DATABASE ACCESSION NUMBER: AK062798
  ref <309>: DATABASE ENTRY DATE: 2001-12-06
ccgattcccacgcatcgaaaaccctcaccacgcgctcgcctagggtttcgcctcctccgccaccgccgccgccgccgcagcagcagccggggacgcgacgcgcgatgcagcagccgccgccgccgccgccgcagtacgcgccacctccgccccagcagttccagctcccgcaccagcagtacgcacctccccctcagcattacgcgccgccgccgccgcagcagcagtacggggcgcagatggctggcgggcccgctccgggaggcgacgagatcaggtcgctgtggatcggggatctccagtactggatggatgagagctacctctccaacgcttttgcccccatgggacagcaggttacctctgtgaaagtcatccgcaacaagcagagtgggcactctgagggttatggttttattgaatttcagtctcacgctgctgcagaatatgctctggctaactttaatgggaggatgatgcttaatgttgaccaacttttcaagctaaactgggcttctagtggtgctggtgaaaggcgtgctgctgatgatggtcctgagcacacaatatttgttggtgatttagcttctgatgttacagactccatgttggaagaagcattcaaaaccagttatccttcagttagaggagccaaagttgtttttgacaaagtcactgggcgatccaagggatatggttttgtacgttttggagatgaaaatgagcaaacacgtgctatgactgagatgaatggagcgaccttgtctacaaggcaaatgaggcttgggccggcagctaacaagaagaatatgggtacccagcagacatattcaacaaatggacgccatgccaccttatagggtctggaattgtcttcagctgagatacatgtcacaatccatggcctcagttaggtcagtgtttaatttttgcgagaatttggttctgaagtaaggagcaaatatgctaccttcctgttctccctttctgccactacattgagataactacattctgcgaagttctctatcatattccagtacttccaattttagctttaattatctatttaggtttctctatctagccttcccacagtcttaatgtacctttctgcttcaacctatcattccttttatttgcaccaacctataagc

SEQ ID NO: 5628 - DNA, 728 bp, Oryza sativa
  ref <308>: DATABASE ACCESSION NUMBER: AK062799
  ref <309>: DATABASE ENTRY DATE: 2001-12-06
aaagccattgggctcgtcggagagacaagtagagagcagcgtagtcgccgcacttagccatgctcgcctcgccggcgctcgccggcgcgcgcgccttcgcggcgaccgtgtccgggagcctcggcatccccattccggccatctccgcgccctcgccctcgcaggcgcggcggcgggcctctctcgtcgtcgttgcaaaggtcaaggtgtccactccccaggccgaccgcatcgcccgccatgtccgcctccgcaagactcagtgttttccgctcaaacaaacatttatatgctcaagtgattgacgatacaaagtcatgcactctggtttcagcttccacaatgcacaagtctctttcaaaggacttggaatactcggcagggccaacagttgaagtggcacaaaagattggtgaagtgattgccaagtcttgcttggagaaaggaattaccaaagttgtttttgaccggggtggtttcctctaccatggtcgcattaaagctctggctgatgctgctagagagaatgggcttgatttctgaaacctccaaatgtttgttcatatctccagaatcacttgttactttctttttcgcccacctgtcgaacagagtttttctttgtagtaatttgatttgctctgcaggcttggctactctttaattgtatatcaccccactatcagctcaccagttattgagtttgtctgcttcatgaagtttctttt

SEQ ID NO: 5629 - DNA, 1034 bp, Oryza sativa
  ref <308>: DATABASE ACCESSION NUMBER: AK062800
  ref <309>: DATABASE ENTRY DATE: 2001-12-06
gaaatgattgtgtagatgctctacaagctcatgatgacacatctgggagtcttgaagctctgagtgctgctgaattaaagttgaaagatatactgaattcaccttccgtggatgctgcatgcagaaagatagatgacttagctgagaaaaaggaattggattctgcgttagtcttaatgctttcaaaagcttggtcagctgcaaagggtactgacatcacaaaatctgaggctaaagatataatgtttcatctatacatgactgcagtagccaatctccagagacaaatgccaaaggatatcagaatactaaagcatcttataatgattgaggatccagaagaacgcttgagtgcattgaatgacgcatttactcctgggcctgaacttcagggggataatgttgatacattatacacgagtccagaggtattacacacttgggccagtgctattgttgatgcatattataacagcagagaaggcactctccttaggcaagcaagggacttgatgaaccctaaaatcatcaaaagaattgaggagatactaaaattaatcaaggataaatacctctgactctttaagaaaatgggggtttcacattcatactttcctagtgattaggcagtataattaaagaaattggatggccttgcatactctgctttctgcgcagcatcctgctcatcgttccaatcggattctccattgctgcttgaaatggacaatggttatacttgactgattaaatgcagattgatgtagctttgtatggtgtaaaagtgattgtagcatgtgatatatcaatgcaattttcagttagaagtcttgccttcctttctttttgcacttatatgcttactggttaacagggttgtaactctctgataaatatagatttttttccctctaaagttgtatgtatgtctccaagatccttgtgatgagttagttaatgattcaactcgaataattgtacagatccttctgatctaccacatatttacttaatggtatggaaaggtttgttat

SEQ ID NO: 5630 - DNA, 912 bp, Oryza sativa
  ref <308>: DATABASE ACCESSION NUMBER: AK062801
  ref <309>: DATABASE ENTRY DATE: 2001-12-06
aatcctaaccctcccctccaccacccccacccaccgacaccgtcgtcttcttcttctcccattagtcgctactcgccatggctgcatcccgttattaccttaatctggattttgacgtttccgatatgaagcctctgcccgactactgcttttccgaggcctgggaggtgtgggaagcccatgctgatcaatcggattatgaaagggaacaggctgttttgaggttctatgaagaaaaggagaaggagataaaagctgcttattctgaagccctaagtgacgaggatgatgaggagaaagatggagaaatatgtcagcttctgggttacgaagaggaacatggacaagtctctgcagggatggaagatataccagaaaaccatgtcaaaaaaggctgcacttacgcgagcccagagtacctggcggagctaactcagaaaattctattggaaataaatgtaaatgaagaccttggcaatttgtctcttctggagtcatggaaggtgatgaggacaagaaaactgttaaaacaggtgctatgtcatgaaatgaagcatgctcgtaatgaaggaggacaagtatttgaaggtgagctggaacacaagaaggcaagaatggcagaaagctcacagaacaaaggagaagatgaagagacccttctgccagtcggtctgacaccggatgacatctgaggtggctaatcaatgtgattcaatagaaactcaatctgctgcagtggtcctttggtgtcccaacattgttaaaaactgtgaacaacgttcatcgttgttccttgatgtcgacttctgtctagtgtcttgaattggcaagcctgaataatcactgttggtatttttaatatggggctgtatagatatcagtcaactaaagttttattaccaagttttgctc

SEQ ID NO: 5631 - DNA, 843 bp, Oryza sativa
  ref <308>: DATABASE ACCESSION NUMBER: AK062802
  ref <309>: DATABASE ENTRY DATE: 2001-12-06
gaacaactctctgtctctctcgttcttgcaacgacggcgtcgggcggtgcggcggcggcggcggcggcgtctgcgggtgcgccgggtgcagcggcggcatgaagctgatccccaccggcgcgctcgggcttgcggcggcggcgtttgacgaaacggtggcggcgtctgcgggtccgtcggtggcgctgagggggcggtggcagcgtaaagctgactccccgccggcacccgctcgtggaggtagagggcggcggcggtgggatccgcgtcggcgcccagccgtgaaggtaaggagcggtggcggcgggatccgtgccggcgaccggccgtgaagggagcgtaggcggcgcggcggctcgcggaggaagggagcggcggcggctcgcggaggaagtgagcggtggcggcggatccccagcggcggctgcgcgcagtggagcttattgcaactcgttatcttgcttgattccaaattagacgctgcagagcagatgattcactcacggatgacgggggagatcgagcagtgcggcggcgagatcgaggcggagatcgagcgggccaaggaggtcgtcgccaacaagggcagggcgctcgacgacgaccgcgagaggttccagaaggccgccgtcgccgcgctcaacatcctcagcggcggcgccgccggcagcatctgatctcatctgaccatggtggcatgatatctgatcaaactaaacctgaatgttgccatccctgattgatttactcatgtaatcctgatctccactgttccagtactacttgatagtactagtagttgttaccacttactagtgtataggcaaagtgctcaaatttggc

SEQ ID NO: 5632 - DNA, 989 bp, Oryza sativa
  ref <308>: DATABASE ACCESSION NUMBER: AK062803
  ref <309>: DATABASE ENTRY DATE: 2001-12-06
gcgccctccagtgggtgcagcgtgacgagagggggtcgagcatcccgtcaccttcccactcctcatttgctcgctcggtcggtgcctcacgagcgtcgtcgccgtcgtcgccgccgttgcgcaacgacggttgctgctttcccctcccttcacatcaccgggacgatggggacgaaggtccggcctgaagggagggcttggggatgagggatggattgcctccactcctcttctcgtcgtcggccgccgcctccactttccacgccggtcgccgctactcttcctcaccgacgaccaccgccttccaactctctctctcgctgctctttggccctcgcaaaacgccggatccagcggctacgagctcggcaccgccggatccgactcgtcatacggcgggcgtgcggttggggcgatggagcggcatgggcaggcgcagcggcgtgtagcggcatgggcaggcggagcggcgtacgggcgagcattgcggcgttgcggactgctctatgacggttctctttattttgcttgttttttttctaatccgattgattgccgggtgaattaagggtcatttgaatattaggaatgaaaaaatggaggaataggaaaaacgtaggattctgacagaaatataaatgcaaaacagaggattgcaaaacgcagaaaaaacacagtaatgaccgtttgattgaaccgcaggaaaaacgcaggaatcggatgagagagatagactcaaaggaatgttttcaagaggttggagctcttgctaaatttccttcaaaattcctataggattgtccattccataggaattttaaaggatatgataggattcaatcttttattttaaagggtttcataggaaatttttctatatggttcaaatcctctaaaaattctatgttttttcttcaaatcaaagaggccctaacaatgtgtaagttactgtttggctgtttgcatgctaatcgtatagaattcccatc

SEQ ID NO: 5633 - DNA, 518 bp, Oryza sativa
  ref <308>: DATABASE ACCESSION NUMBER: AK062804
  ref <309>: DATABASE ENTRY DATE: 2001-12-06
gagtctgctattctatactcgacaagggatactgcaagaatggtgagcactgcaacttttcccattcaataccgaatgatggatatccatcaagaaacagtcggcacttcgataggcaaaattcaggtaacgagagacggtacgacaggcaaaacgagaggactgatcggcagtttgatcggcaatcgtcaggcaacgagaggcgtgatgacaagcacaacggcagggatagtgacaggcatgatgacaggctgactgatactaggtcacaatcaagagagaggcagtagatccgttctcagtttcatctgttgtatcctcccttttgttgtagttcctcagtagacatccatatcacatatgcatgtttctgaacttggtgcattgtagcgagttgcatctcctcagaattgtcatgtagaacagttgtagttataaatcatgtgcatcctacccttctgtttcttgcttcggaacaagcagtaatacattctgaataaatcctggtgtcaggtagg

SEQ ID NO: 5634 - DNA, 435 bp, Oryza sativa
  ref <308>: DATABASE ACCESSION NUMBER: AK062805
  ref <309>: DATABASE ENTRY DATE: 2001-12-06
atgcggcatcgcacctcacttcccagccactacttgccaccaccaccaccacccacaccgaactaacctcgccgtggaaaccaaacccccgcgtccggatgattctgcactccggcaagtatgaaaatggtgatcgactgagccctgaacatgaaaaggcaattttggaacgattgcttccttatcacccacaatatgagaagaaaattggatgcggtattgactaccttacggtagggttacatccagaatttgagaactcaagatgtcttttcatagttaggaaggatggtgagcaagttgatttttcattctggaagtgcatcaaaggtctcatacgacaaaagtaccccatgtatgcagatagtttcattctcagacattttcgcaggaggcaagattaccgaattagtgactcgtaaaattatttcttgt

SEQ ID NO: 5635 - DNA, 482 bp, Oryza sativa
  ref <308>: DATABASE ACCESSION NUMBER: AK062806
  ref <309>: DATABASE ENTRY DATE: 2001-12-06
ctcttttcttgtccagatctcccagatctatccccaaatccatggcaggagaggacggcaacgatgggatattgaatcgttccgctgaggcacgcgccatcctcctgtcagggctggtggacctcgtcgccggcgcgagcagcatggccatcggcgagtctgcgtccatccacgcgtaactggacatcggtgttgtccttcatagccgacgcggccatcgtcctgctcgcggtgtggttcgtcgcaaaaaagggtcggtatgattgtgaccgccgtcacgacggtcagtgctttgctagctcttcaaatctttaggacacagtgtttgattggctcaaagatgattaactaggctgaatcgacagcaagcattctcatgttttttttcctttgctgttaactgaatgcaaaagcttctgttttgacttgtccattcaataatcactggtttgtgttaactgacgcaaaccattatttgtctt

SEQ ID NO: 5636 - DNA, 788 bp, Oryza sativa
  ref <308>: DATABASE ACCESSION NUMBER: AK062807
  ref <309>: DATABASE ENTRY DATE: 2001-12-06
actgcgtgcgtacgtgaaggaaaatggcgagaaacgccgcaacagcatgtagtactcttcttctcctaattgcagctgcaacgacgctactagtaccagcagccagtgcggccaagctagtggctggcaaggacgctgcgacggcgacggcggcggaggcggctcttggtagcaccgtggcgccgtgggtggaggccgacgccggcggcgtcgtcggcgggatgatgatggtggcggcggcggcaggcagcgtggagtacgggcatggaggagtacaccaccggcgcgtcctgcaggcgcggggtggtggcaacgtcaacccgtcgctggtggccgaccggcagaggtgcatcggcagctgcccggcgcgagggggatcgtacaccgggaggggcaaccagtgcatctaccacaaccgatcgtgttaagtacgtacgtacctcgcgaccgattttgttgggcgcgttgccgttggataataatcttggtgcatgatgagagacgttgaggaaatgttgacgttggatgttacgaactttcggtctatacagtatatatgctaccttcttcctttcttctttttttgtgtgtgtgtgtggtgggggttacgaattgattgccgtgataatgaatatgttaccaatcttggtgagtggtctacggtaaataaaaagatttccggtagaaatacaatttagaaagggattatacctattaatttttctatatatagatttagaaagggacaacccgttttaaatgaaataaaaaagtcaaaattcacaatc

SEQ ID NO: 5637 - DNA, 643 bp, Oryza sativa
  ref <308>: DATABASE ACCESSION NUMBER: AK062808
  ref <309>: DATABASE ENTRY DATE: 2001-12-06
aaactgctttactactctgctccccgacaccaacacatggccacgagctcccccgcgccggctcggcctcgccgccacctcccttctccttcgccgtctggcctcccacgcgccgcacgcgcgacgccgtggtgcgccgcctcgtcgccgtcctctccggcgacaccaccaccgccctccgcaagcgctaccgctacggcgccgtccccgccgccgacgccgagcgcgccgcgcgcgccgtcgaggcccaggccttcgacgccgcctccgcctcgtcatcctcctcgtcctccgtggaggacggcatcgagacgctgcagctctactccagggaggtgagcaaccgcctcctcgcgttcgtcaggtcccgctcctccgccgcaggcgcgcccccggcctccgcggcggccggagaggtggcctgagctgctcgctcggccgccgctccgtccatagatgtgtttgattgatgcatttttgttgatgttgtttgggattatctcagaggcttattctctggtgtgtagtaatttgctggatttctacctgatgttccacttgagttgtgcaagtaaatgcttccaatttgtgattctgtagaaggtaaaattggttccaatttgtctgcaatttggtgatgact

SEQ ID NO: 5638 - DNA, 515 bp, Oryza sativa
  ref <308>: DATABASE ACCESSION NUMBER: AK062809
  ref <309>: DATABASE ENTRY DATE: 2001-12-06
taacaagtaacctatcacgttagcttaacattgtatatttgtggtggaattatgtaatattccgatatcgcatttgaagttttgaacatgtgtgctcaaattgagggacacatgactgtagtgaaagcaaatataaatgtctgagcaatggactatactttgtattcattactacaagttatgtccttttgcaggttgctaatgtcctcttacattacttgtcaggataaatgagtttgttggtacaaaacatgacccactaataccaacaaagagaaggaggcacagatcttgccgtctttttcggtggatcgggtatgttttgatccaatatagtttgctcgcaggttctgaggggcaagaacattcaaatatctataatgttttctgttggattcaacattcatcactatttccctcgaaaaaaaagcattcgtcactattggaattgaaagtctgaaagtgcctctagtccctttgtatgttaaaagtcaataaacaagcagtagttttct

SEQ ID NO: 5639 - DNA, 914 bp, Oryza sativa
  ref <308>: DATABASE ACCESSION NUMBER: AK062810
  ref <309>: DATABASE ENTRY DATE: 2001-12-06
acacttcactccccactacgatctcctctcctcgtcgcaatccacgcacgcacaagcgcctccgcctcctcacctcctcggtcgcagtcagcagcagcatcagcagcagaagcagatgggtggcctctccgtaatcgcgccgccggcgggcgactcggcgtccccggcgcaccgccgcgcgcgccgcgcgttcctggtgtcgaactacatgatcctcggcgcggcgtccgggtgcggcttcctcacgctctcgctccgcctcgtgccctccgtcgacggcttcctcctcatcctcctccacgcgatcaccgtcgccgccgccgtcgccgggtgcgccgtcatcgcggcgcccgacccgccgagggggcgggtctacaccacccacatggcagggaccgtcttcgtctccatcctccagggcgccgccgccgtgctcaccttctcccgcacctcggacttcctcgccgacggcctcaagtcctacgtccgcgaggaggacggcgccgtcatcctgaggatgatcggcgggctcggcgtggccatcttctgcctcgagtggatcgcgctcgccctcgccttcgtgctgaggtactacgcctacgtcgacagggagtgcggcggcaacccgctgcgccgcagcgccaaggtcggcggcgaggacggcgccggcacctggccatggccttttcaggtgtgatccatccaagaatggacttctgcgagacaagtagcgggtgtttgagaaggaagaagaactgagaactgtgagttcttggaagaaaaaaaaatagtggtactgtttgatgcattactgcatcttgggatgggatattattcgttcattgggttagatctgtattactgttatatgatgattatgttgtaatgcagctgttgtgcatctatgttatgtg

SEQ ID NO: 5640 - DNA, 757 bp, Oryza sativa
  ref <308>: DATABASE ACCESSION NUMBER: AK062811
  ref <309>: DATABASE ENTRY DATE: 2001-12-06
aaagcaaccattaaaccaacccgagcaccgtcaagcaactctagcgaagggcctagtacaaagcaaagctctgcggcttcagattctgagatacacgcatcgatcatctcgcatctcttcagttctgaatttctgcgtgtatggggaactgcttcaagtcgcagcgcgccgccgcatcgtgggccgacgacggcgagtgggaggatgaggaggagcagcagcagcagcagcatctacatgagatggcggcggtcgagaagatggagcgggtggaggtgaagatcagggtgacgaggaggcagctccaggagctgctggagaaggccgccggcgagggcaaggggcggccggtcgagaaggtgctggcagagatgatcagctccggcaaggtttgctacgagcaggaggcagcgggctggcggccgtcgctgcaaagcataccggaggccgacgagtcatagattattcagtggatcttttgattccataggactgttttatgttccttgattgattctccacatgtgtatagttgctctagctaggaagatattgtagtttgatcgtcattctttcggagatgtacaggctacgagactgattgagagagattgctggaactttttttacttgagcagatttctgatatagctctgtccctgaactttgtactcatatggcctcagatgtctcgatgatcactgatgaactgcagagagacgatgaacttcacagctagtaatgaaaattttgagcc

SEQ ID NO: 5641 - DNA, 638 bp, Oryza sativa
  ref <308>: DATABASE ACCESSION NUMBER: AK062812
  ref <309>: DATABASE ENTRY DATE: 2001-12-06
agctgggaagcagttgacaatctcggcggaaagcggcggcggcggcgacggcggcggctgcgggtccgatggatctggtggaggcggaggcggaggagcagccgccggacgaggacggcgacgaggaggggtacgtcgaggcggaccccgcaggccgcttcatccggtatgatgagatcgtggggtcaggggccgtcaaaacggtctacaaagccttcgataagctggagggtgtcgaggtagcatggagccaatcccggatcgatgactctgtcatggggtcctctaagaagatgaagcaactaaacacagagattcaacttttgaagacactcaagcataagaacattgagaaaatgtttgcttcatgggttgatggggagaagaagactgttaacataatcacagagttgttcacatccgggagcttgacacagtaccgcagaaagcacaagaaagtgaatatgaaggctatgaaacgatgggcaatacagatattaacagggctagaatatctgcacagtcagaagccagcaattatacacagggatttaaaatgtgacaatatattcataaatggaaatcatgggaaagtgaagattggtgattttggtttggcaacattcatgcagcaacag

SEQ ID NO: 5642 - DNA, 724 bp, Oryza sativa
  ref <308>: DATABASE ACCESSION NUMBER: AK062813
  ref <309>: DATABASE ENTRY DATE: 2001-12-06
ctctttcccttctgctgctgctgcggaggcggcgctgcggccgtggccggccggtggtgacgttggagaaggaggcggctcgcagaccgggggcggaggcgacggcgcagggcggcccaaggggcacctcttcaaccggccgccgccgctgcaggggatccgctggtgatgcacacggccttgcgtggatgccctccgtggcgggctggcggcgtcgcgcgagacggacgggtgcgccgcgaggagggaggggacgaggccgatgaggcggcggcggaggagaagcgggcccaggagcgcgatgaggcctaccagcgggcgctggacggcgccacgcccgtgtcgccggagtcgctcgccgcgatgctcgaccaggcgctgcagtccgtgcgccagccgccgccgccgccgcagcagcagcagaactgccagaacacgctgcgacacggcggcatggttcgccggatgcgcacgggattctgacgccgatcgattcaccgtcgggatgaggcacgagcgatgctacgccaactagttttggttttgtatgttactgccccaaattttttcggtctttggtaggctgtgtcaatctattgtattgcgagagctgatttcatcagatctcctatagttgagttggttgtatgaatttcatttggttgtaagcaaatatgcaagcattgttcaggttcaataattcaaatctatgtcaagcgcttcc

SEQ ID NO: 5643 - DNA, 560 bp, Oryza sativa
  ref <308>: DATABASE ACCESSION NUMBER: AK062814
  ref <309>: DATABASE ENTRY DATE: 2001-12-06
aaccaacaacacacgtgtgttccagaggcttcaaccgcagcgaatccccccacctgaagaaaaacgagacgagattctctcgctctcttccggcgagattttcgtctttcccccctctcctctccgctcctcgtctcgtctctccgcttcccctcctctctcgattccccaccatggccggagccgccgcgacgccgccggcgatgatgcgcgccgtgcagtacgacgccagcggcgggggagccgccgggctcaagcatgttgaagtcccggtcccttcggcaaagaagaacgaggtgctgttgaagctggaggcagcgaccatcaatccagttgactggaagattcagaaagggatgctgcgtcctctgctgcctcgtagactgccttttatcccagtgaccgatgttgcaggagtggttgctggtgttggtcccggagtgaatgatttcgcagtaggtgatcaagttgtcgctatgttgaacagtatggtaagttctttccactcctgtgtcatgttttttggtttgccatttcaacttaacaatatcatgccctgc

SEQ ID NO: 5644 - DNA, 482 bp, Oryza sativa
  ref <308>: DATABASE ACCESSION NUMBER: AK062815
  ref <309>: DATABASE ENTRY DATE: 2001-12-06
aacttcacgatccgaacccaacgactcgtcgacacattaccgtcaagatgccttccgaagtttccgacattaagcagttcatcgagatctgcaggcgcaaggatgccaagtccgcctgcataaagaagaacaagaaggtcaacaacatcaagttcaaggtccgatgctcaaccaacctgtacacccttgtccttaaggacaccgacaaggccgagaagctcaagcagagtctgcccccgggtcttaccatctccgacgttggcaagaagaaccccaagggcaagcgcaccgcataaacggatcgaaaggcatgaggaactcaggacggaagtgtgcaaggacatcaatgcacgatgcgcacgaagcatgaaggcatgggcggacggcgtcacaacggataaaccttgttcaatgacactaaggaaccctttacattgggttaccaccaggaatgaaaaatgtcaaaatcgttctaaagcacc

SEQ ID NO: 5645 - DNA, 703 bp, Oryza sativa
  ref <308>: DATABASE ACCESSION NUMBER: AK062816
  ref <309>: DATABASE ENTRY DATE: 2001-12-06
cacggctaagctcagctagctacaatcgcaaatagctgcagcgatcgagcgaatattgatcgtgctcgatcatcttagccgcattgcaaacgatcgaatcgatcggccgatagcctttctcgttggcattttatttcaagcagaacacgatgaagcaaaagatcgtgatcaaggtgagcatgccgtgcgagaagagccggtccaaggcgatgaagctggtggtgatggcctccggcgtgagctcggtggaggtcaccggcgacggcaaggaccggctgcaggtggtcggcgacggcgtcgacgcggcctgcctcgtcacctgcctccgcaagaagatcggccacgcggagctcgtgcaggtggaggaggtgaaggagaagaagccggaggagaagaagccggaggagaagaagccggagccgtgctactgccctcatccctgctactaccaccaccactacggtgggataccggtggccgtcggcgaccagccgagcgacccctgctccatcatgtaatcatatatagtcacacagatcgatcgaattttgcagtgatttcttcagcgatttggtatggctatgtacaaagaaatagtaggagtggtagatatactatactactatatctttgtggggcttccttcgccttgtttaaatccaaacttaattggaaatgaaaacttactataatgttcagtagc

SEQ ID NO: 5646 - DNA, 409 bp, Oryza sativa
  ref <308>: DATABASE ACCESSION NUMBER: AK062817
  ref <309>: DATABASE ENTRY DATE: 2001-12-06
attatgatgctttagctatgtcaccatttgaaggtgcaccggaagaatttgatcagactatcttccctgtcgaccacaaatggtcgattggcccagtagagggccttgctcttaacttcgtgaaggatgaaaagaggaagaggagctacacagacactgcaaacttcaccttgcgctgtggcgtctgccaaattggtgtgattggtcaaaaggaagccgttgaacatgctcaggccactggacatgtcaacttccaagaatacaaatgactgtacaagataaaacctgtgttgtaacttgtaaaacccatgttcatttgttccaattgataattcttctcgggttggatatggtatagaactgtattacaacatttgttacagggtaatttaataatgccagtttggat

SEQ ID NO: 5647 - DNA, 630 bp, Oryza sativa
  ref <308>: DATABASE ACCESSION NUMBER: AK062818
  ref <309>: DATABASE ENTRY DATE: 2001-12-06
aaaaaaaaagcaggggaaccggtttcccttgggcaacgaaagcttcacggcgagcgagggaaagagaagagaagaaaagaaaaaggaaatctctcattcccctcgtcgctccccgcgaggaaggcaaggaaaggcaggaagccgtccacttcccacttcggcctccgcgccggccactgacgtcgacggcgaaccactcgtctcctctcctcttctccctgctgctccgagtcgtcgcctctgcatggagacgggagagagagagacaggggggaggcggacgtccggcgtgcagtacagctgctagctagcttgctagccagtgcaggtcagccaccaaccatactcctgtttgctgattgctccgtgtgctttgttgattgttggtgatgcgatggtgtaatgaactagtgatctcatctgatcgtgttcttggtttttgagtcggcgcctctggtttcttttgctggtgcctgctgttgtttcaatcgatcaggtgaattcttgcgagtttgagtgcatatgattctgtttgtagttgattcagggttggagctttgcccttactgctttttagccatgcttctagatcatttaaaagtagagaaatgaaatgagaaactgattcgc

SEQ ID NO: 5648 - DNA, 466 bp, Oryza sativa
  ref <308>: DATABASE ACCESSION NUMBER: AK104943
  ref <309>: DATABASE ENTRY DATE: 2002-08-28
cgtgatctatgcttgatcggcctttggaggtataaatagttattgcgtccgcttcactcatcatgtccaaaatgttggaccaagatggtccttcctcctgtatctgtaacccaagtgtctaccggaactgctcagggtcgttactcgttaccaactggtagcgaggtcacgaggactatcttctatggtgttactggtatcggtatcagaactaccgtctattgtgttactggtatcggtatcagaactgttgttatgtgtttaatttttcattgctatgtgctcagcagttcctcgacttccgagaacggcactttgttgtccgaccaaaataaatcagttcggatgagaaacccatgctttggggtcttatcggtgttgtgtaagcctggattgttaaaacttgtactatttgtacaaattgttttgctgttttgcagtgatgtgtattatgtgaaattgtttc

SEQ ID NO: 5649 - DNA, 999 bp, Oryza sativa
  ref <308>: DATABASE ACCESSION NUMBER: AK062819
  ref <309>: DATABASE ENTRY DATE: 2001-12-06
tcatcttctttctctccctcactcactctctccccctcatcttccttctctccctcctcactctctccctcacagatcgggccatggcgtcctcccgagcgccggccgctgttgcctccccacctcccgaccggcggccggcgccgcctcccctcttcccgaccgccggccgccggatctagcctacgaggtgcggacccgaccaccacggcctcttccccgaccgtcggtcaccgccgcctccccgcttcccgagcgctggccgctgacgcgtccccgcgtcccgaccgtcggccgccgccgcctccccacctcccaaccgtcggtcgccggatctggccgccgcgcggcctctcccccgaccgtcagtcgccgccgcctccctgcctcccgagcgccggccactgactcgtccccgcctcccgaccatcggctgtcgctgcctccccgccacccgaccgccggccgccggatctggcctatgaggcgtggatccgaccaccgcggccacgaccccaactgtcggccacttcctcctccgccaccacatcgccaaccgccggatccggccaccgcagcctctcccccgagtgccggccgcttcctcctccgccactgcaccgccaaccgccggatccggcctcgacaagtttgtggggcgcggatccgaccaccgcggcctctcccccgaccgtcggccgcttcctcctctgccaccgtaccaccaaccgctggatccgggcgaggatccggccaccgcctcctccaccactgcaccaccgccagatgaatatgattgttatgatttttgtgattttgttttgtgcccaaatcattgtgaatgtgaagtgattttgttctttggccagatgaatgtgattgcgatgatttttgtgattctgtcttgtgtcaaaatgactgtgaatgtgattatttttgtgatttgtgatgcctaatggtctacgactagctaggcttataatattatttttttgcccc

SEQ ID NO: 5650 - DNA, 720 bp, Oryza sativa
  ref <308>: DATABASE ACCESSION NUMBER: AK062820
  ref <309>: DATABASE ENTRY DATE: 2001-12-06
gagccggagacgagatacctatcgatccatccatccgccgccggcgatccctcctatcccctccatcaccaatgccgccgcggagcctcaccctctcccgccttcccgtggccgcccttggcctccccttctcttcttgctccccgcctcctcctcgccttcgcttccccttcgccgcacgccgcgccaggtccctcgccaccagggcctcctcctcctctccggattcctccttcggctcgcggatggaggactctgtcaagaggacgctcgccgacaaccccgtcgtcatctactccaagtcctggtgctcctactccagccgcacgtcatcgagctcgaccaactcggcgcacagggacctcagttgcaaaaggtgttagagcggctgactggacagtccactgttcctaatgttttcattggtggaaagcacattggtggctgtacagatactgtgaagcttcatcgcaaaggggagctagctaccatgctgtcagagctggatatcgacgtcaacaactcatgacaacattgaacatggtttgctatactggatatctgaggtttcaatgacttgagcagtcgtgtaatgagatttgttagccatgtttactaattcaatgcacattttatgtaaccgcttcccttgatcagctagggaattttgactaatgtgtatccaccggtgaacttgggagaggaaaaaaatgcgaacac

SEQ ID NO: 5651 - DNA, 501 bp, Oryza sativa
  ref <308>: DATABASE ACCESSION NUMBER: AK062821
  ref <309>: DATABASE ENTRY DATE: 2001-12-06
attttgctcttcattcatttgtgctgtgctctccacgcgccctcgcctctctttcctccgatcctccgcttcgttcgaatcccacaggtgaggtgacctcttctctccagtctcctctccttagtaggattaggatcattacgaatttaggatcgagaatataggattatgaaccagtagtattaggattatgttttcttcgattctttttctccttcaaatcaattcccaattcgatttagggttgacggatacgcgagcagggatagccctcccgcccgcagaaagattgggctttcttggtttccctgtcgtaatcccttctctccagccaacgcggtgaaaattttgtttcggtgggggtggggtgggtggttgccgggtaggtgctggtgcatctgctttcagtttcaccaccaccatggattggccgctaaacatatactgatatacacctgtttcctgtcccctacccctaggctagactactagggagaattc

SEQ ID NO: 5652 - DNA, 449 bp, Oryza sativa
  ref <308>: DATABASE ACCESSION NUMBER: AK062822
  ref <309>: DATABASE ENTRY DATE: 2001-12-06
aactaacgctaaaaaagtaacagtttctgtactttattggttcgcccagcatgactaccaagcgtcgtaacgccggtcgctccaagcacggccgtggccgctgcaccccgatgcactgcttcaactgcggtcgcctgtgccccaaggacaaggccgtcaagcgcttcgtcgtgcgcaacatgctcgaccaggcctcggcccgcgacgttgcggagtccagccccatctactcccagggcttccccctgcccaagctgtacatgaagcagcgttactgcatcgcttgcgccatccactcccgcgtggtgcgcggtcgtgccgttgtggaccgcaagatccgctactcttcccgcgatgccgccttcaaggccacccgcaagtaagagccctggagtccatgtccgaaccacaaacccgcagaaggttccccccttactcattttgatctc

SEQ ID NO: 5653 - DNA, 691 bp, Oryza sativa
  ref <308>: DATABASE ACCESSION NUMBER: AK062823
  ref <309>: DATABASE ENTRY DATE: 2001-12-06
ctcgctccagaaccgcgtccgcccgcgcagctgcgcttcgcctcgccggtcgccctcgtccggctgggaggcgcgccgccgcgaatggggaggaaccagcgttgccgccgcgacccgcccgcgcagccgcgcttcgcctcgccggtcggcctcgtccggctgggaggcgcgccaccgcgagtggggaggcacccggcgcgtggaggaggccgcggtgctcttgccggccgtcgggaatacactccgcccacgccgcacctccaatttcggtggcctcgactcgttgatggagttcagcgtcagagcccgcaccggttggccgcccacttcgtcgccagcgaggggggacaccgccgcatggcttcgtacaatggagaacgctgcactgtttcctgtgcccgcgaggtgtttgtggaaatgcccccgaggttgtgtggttctgtattgtgaaatgccctgcccctgctctgtggttctgtattgtggaaaatgccctagtcctgccctgctgcctgggatgatgcagactcctaattggaagtgaattgttattgtttggcattgtgagtttgggcaaattgattatgtaatcttgatttttgtcataaaaaaaatggtgaaacatgattcagcagttctgatatgctgaacagagatttatgatgttttttatgactgcacaaaacaggtg

SEQ ID NO: 5654 - DNA, 688 bp, Oryza sativa
  ref <308>: DATABASE ACCESSION NUMBER: AK062824
  ref <309>: DATABASE ENTRY DATE: 2001-12-06
tattcggcagcaatgccgctgccgccgaccaatatcatcagcaggcacaattttgtcgtggaccttaccttccagatgctcagttctatgccatgtcagtcgagtcggcaacatttccgctcatgctgccgagtcgcgcatacgagctgcttgaaaaggaatttgagcaagacaatcctcttcttatcaagtctcgcctccaacccatgaacacttgctacaaaggcagtgtcgacgatattgctgacaatgccactataacgctgcatttccatggtggcattgatttgcagttgtccaggaatgccacctttatggagatcacctccatgaatggcgaccaagaggagcgctatgtgtgccttatcgttgacaagacggtggatgggacagcggtactgggcttatcaccccaacttgaccacaacataggatttgatctggagaacaagcagatctcaatttatcgcaagatatgttagtttgtccccttattaattacattgttaattttcttctactagctaattagactcattgttactgtacttttctgcaagcaccattcatatctaatatatgcatgctgatgaaatgtaataatgactatgactctcgtagcttttatttttttattaatatcacatagcttgccaattcatgctgggcaagacatgcaggttgttac

SEQ ID NO: 5655 - DNA, 550 bp, Oryza sativa
  ref <308>: DATABASE ACCESSION NUMBER: AK062825
  ref <309>: DATABASE ENTRY DATE: 2001-12-06
aggctcccagccactcaggctcagccgcccaccagccagcgccgatagccgaccgcgcccggcgcctcctcctcaactccgcgccgccggcgccaccaccggcgtccccaccccgcaagcccgcgtctctgcgccggtgcggcgccgccacctccgtccgcaccgacaaccgtcccctcccctcctccgcgccggcgccgcgcggcctcccctccagcctcccctcctccgtgccggcgccgcgcggcctcccctccgacctccccgccgtccgcggctcctcgccgagtcgccgacgacgacgccgcgccgtgctgccgacctgccgactgccgtccgcccgtcccttccccttccgtggctcagcccactagccaggtaacaaatagatgcctaaactaaatggctagatttgtgaatttgtgattagaagatttgtgaatttgtgattagagattagttagtctgtgaataactgagaatgcaatttataaattgttactaattagtgaatgtgtgctaaatggtaattgctattgtttgtaggatc

SEQ ID NO: 5656 - DNA, 889 bp, Oryza sativa
  ref <308>: DATABASE ACCESSION NUMBER: AK104944
  ref <309>: DATABASE ENTRY DATE: 2002-08-28
gaagaaaatgagtgaaaaggctgaagatgctttcttaaggatgaagacagatggcattatgccaacgtcttctacatacacttcactgctttgtgcatatgcagttaatggattgcatgaaaaggcttatttgacttatgtggatatgaaaagagaaggacttaagccttccttagaaacatatacagcattgattgacatgtttaggagggctggtgacacggagaagctaatggagacatggagatcaatgatcaatgaaaaggttcctggaactagggtaatattccacatggtgcttgatggtctggcaaaacatgggctgtatgttcaggcaacggatgttatatatgagtttagaagggctggtttgcagcctaccgtaatgacatacaacattttgatgaatgcttttgcaaggggaggacaacattataaattaccccaactcttgaaagagatggctgctatggaattaaaaccagattctgtaacatactctacaatgatttatgcgtatgcccgtgttcgtgacttttcgagagcattctattaccacaagctgatggttcgaagtggacaattgcctgatgttagttcatataaaaagttattgaatacattggatgtgaaagctgcaagaaagaacataaaggataagaatgccatagtgggaatcttaaaaggaaagtccagcctaaaacataggaaggagaagaaggatgagttttggaagaacagaaaaaaacgttctatgatgaaccatgtctatgggtacccaaggaaaagatttttgtgatgcttttcttatgtgtacattagaccataccttgtattctggatgttcatcccttatccattacagcagcatataaaatgaactttcagg

SEQ ID NO: 5657 - DNA, 511 bp, Oryza sativa
  ref <308>: DATABASE ACCESSION NUMBER: AK062826
  ref <309>: DATABASE ENTRY DATE: 2001-12-06
aagagaggggctctcccggcgctcggagcgcagaagcagcgagccgcttcccgaagggagcaagaaaattcgcgcccagtttggtcggcatgggcgcgaacggccacccgccgccggcgagcgccgccgcgcagaacgggtcccattccagtggcggcggcggaggaggagatggtggaggagggggagcaaaccctagccccggcggcacggtggcggcgctccggcacgaccccggcctggcgcgggagtggtcgccggaagagcagtccaccctcgacgagttgctcgtcaagtaagtcgcgtgcttcgctgcgtcatgcagatttgggggtttggcaattcggattagggggtgcgtatgggtactgattttccgagttttggatacaattgcttggattatgtcgggtaattaagattgtaactgtacgacggctccatttagggtttcaattatgtaatatttcttaattttgcatgtcatttttttctgccctgtaaaagctac

SEQ ID NO: 5658 - DNA, 911 bp, Oryza sativa
  ref <308>: DATABASE ACCESSION NUMBER: AK104945
  ref <309>: DATABASE ENTRY DATE: 2002-08-28
aggtgtacgtgtggtggtaggagagggaatccatccatggtgatggacgcagctagagcggtggcgatgccgtcgctgtcgccggccaccgtcgcggcgaggccgagcagccgccgccttcacaaggtcgccgccatggccacccagaagcccacctccggcacaagaagggggacgacggtgtacttcccggtgggggagccggggccgaggcagacgacgagcgggaaggcggcggcgccgccggtgaagctgctgacgaacgtggagaagctgcggctgctgacgaaggcggagaaggcggggctcctgtcggcggcggagcgcgccgggctgtcgctgtcggcggtggagcggctgggcctgttgtccaaggcggaggagctggaggtgctgtcggcggcgaccgacccgggcacccccggcgcgctgctcggcgtcgcgctgctgctgctcgccgccggccccgccgtcgtctacctcgtcccggaggagtacccatgggaggtcgccgtccaggccgtggtcgcgctcgcctgcgtcgtcggtggctccaccgccttcgccgcctccagcttcgtgtccaagctccagagctcgtccagctgaagcgattacatgttcactgccttagctttgagtgattaattaccacttaatttgcaattagtgtgtaattaagcagagtatttagtgtgtatatcaattactgtgcccctaccctacgccttgattttgtacgagagcattggtgtacctgcaaaaattgtataaaacctagtattatctgataattgtatctaaatggcttggcaaggttaatttacctagctgatgttgattaggatgtgacgtgcatacgtatgagtatgtataaaacatgctatatttataaatttttttctctactt

SEQ ID NO: 5659 - DNA, 742 bp, Oryza sativa
  ref <308>: DATABASE ACCESSION NUMBER: AK062827
  ref <309>: DATABASE ENTRY DATE: 2001-12-06
cttcttcttcttctccctcacattctctcacactccgatcgctctcgccatggacgccgtcggcggcggcggctacagcccgcgcttccagcgccaggcctcctgctcctgcgccccctccatctccatgtcccgccgctacgtccgcggcggcttcgacctcgcgggcgactacgacgacgacgacgaggaggagtacggctacctcggcgccggggtgttcgacggtgtccaccacgccgacgggaagcccggcgcggcgtcccgcggcgcgggggctcctgcgtcggcgtcggcgtcgtcggggcgcgggtgcgggacgaggctgaagggcctgtggcggcggatcctgcgggagaacaagaagcggatcctgctctgcgccaccggctgcgttccggcgtcgtcgtcggcggcggcggcggcgagggtgccctacgacgcctacagctacgcgcagaacttcgacgacggcgcggcgtgggtggagccggagaacctctcgcgctccttctccgcgcgcttcgccgtcccgtcgagggtgctgcagcgggtcgccgtgtagacgacgacgacggcgacggcagcggcggcggcggcggcggcggcgatcgtcggagagaaaaccggtggctttctcgttcttgattttctttttctctcaatttctctccttttcttctcctcctcctcctcctcccaattttggagtcaaaaattgtgagaaatcatatctgtcccc

SEQ ID NO: 5660 - DNA, 514 bp, Oryza sativa
  ref <308>: DATABASE ACCESSION NUMBER: AK062828
  ref <309>: DATABASE ENTRY DATE: 2001-12-06
aacgaacgctaaaaaagtaacagtttctgtactttattgacgcggaatcgcccagcatggttgccaagcgaaaggccgagttcactgtgcgcacccagcagttcaagaccaaccagctgctcaaccgccgccagttcgtcgtcgtggttgaccacaagaactggaacggtaccgtgccgatcaaggacgtccgcaagaaggtcgcggcgctctacaaggttccggatgagggccaggtctccctgttccacttcaagactgccttcggtggtggtcagtcccgcggcttcggcatcatctatgacgacatcgctgccatgaagcgtgttgagcccaactaccgcctgctgcgcaacggcctcggcaagaagcgtgccgtcgcccgcaagtcgcagaaggagcgcaagaaccgcgacaagaaggtgcgcggtatctccaagggcaaggccgccgccaagaaggacaagaagtaaaacgtttccccgcgtcactccccctttctctctctaccatc

SEQ ID NO: 5661 - DNA, 543 bp, Oryza sativa
  ref <308>: DATABASE ACCESSION NUMBER: AK062829
  ref <309>: DATABASE ENTRY DATE: 2001-12-06
cgtatctttccctaccgaactatataacccaatggtcagcgaaaattattcatctttgctggcggcgcatctaagtgactgccagcgaaaatgaacatatctttgctggcggccggtataacgtggctgctagtgaagatccatttttgctggcggtcagtgccccccacccccttgttacgatcttgctggcggtttttgtatttttccgccagcgaaaatcatagaccaacgttatgaaaaatcgtttttttagcagtgatagttcagactcagcagcaagtgttcttttcacgtttatggcagagcactggaaatgttcttttcacgtcacagtctcatggattaaatattggaagtgtttttcttccactcgggggggacgtacactcttggtatacatagcatttaaaataattgtaacattccggatatttagctatagtcttaatcatgctaataatttgatcacactagctgagagcggtgttgattgagccacgatgttggctaggatctataaatatatttgattgttattct

SEQ ID NO: 5662 - DNA, 942 bp, Oryza sativa
  ref <308>: DATABASE ACCESSION NUMBER: AK062830
  ref <309>: DATABASE ENTRY DATE: 2001-12-06
actttttgctttcctctctcaaacaatgaccacgtcctccactttccttcacacgtggcgaaactccaccatcctacttctcctttgtctcgtcgccttcttcctcgtttcctcttgttctgcagaggactgtctcgtcgtttgtgagtcgaccacgtgtcaggacagtgtgtgcgacaccgatgacggactgtgcaagatgacacccaaggatccgtttccagaaagctgctgcaagaccaacaaagattgtgaggacggcgatgactgcaccatcaacatctgtgacattgacaccaacacctgtgacctcatccctctctgcgtccccacgccccctgatcccaaccagaacccaggtgacgacgagacttgcaacgaaaacagcgattgcgtcaacgagagcctctgtctctcctacctttgcgtcagcaacaagtgcacgagctgggttcgctcgccgttgcctgatggttgctgcatgtccgtcgaggactgtcccgccgttgagtgcagtgtcagcttctgcaactttgcgacgcaagagtgtttctatcaggatgagatgggctgccaaaagtcgtccgatcaacaaaagacctccaacgaaggagaatcggatggtgatgactctggacccaagagacacactctcctgaatgacgtgctcttcctcacagcgatcgtgtgtgtactggtggtctttgtgctctctgccgtcgtggccttcctgtacatcaagaaactcagaccggccaacaagtggcgcaagttgtcggcctccaatccctcctcccaatcggacgacgtttcttctctttcaggctttgagatccacgatgatctgtgagccacttgtctcactcgttctgtctttcaacatcctgttattttcgttcttgggccctgctttgtttgtgtttgagggccaactcgacttgt

SEQ ID NO: 5663 - DNA, 778 bp, Oryza sativa
  ref <308>: DATABASE ACCESSION NUMBER: AK062831
  ref <309>: DATABASE ENTRY DATE: 2001-12-06
acaaccacaagaccaaggaagcagtagcctttcagccctcttgctttagtttgttgatccccgactaaatctcattggaaaacaagctagaaagcatggaaggagtgaagagtttgatcatgtgtatgctagtgctaggcttagtcctgcaacaagagaagatccaggtggaagcaaagagttgttgcccatccaccacagcaagaaacgtctataactcatgccgtttcgcgggtggctcaagaaacacctgtgctaaactttctggctgcaaaattgttgatgggaactgcgagcctccttacgttcaccatacccttcacccagaagctgaggaatcggaggtagttgacttctgcaagctgggatgtgcttcgtctgtgtgcagcaccatgagcactctttttgccaatgaagaagccaatcatgccgtcgatcgttgcaacgaagcatgccgccgcttctgtaccaaggaagctgagactgtcaccgctgtttcctaagcaagtgcaacatgcaagcataagggtcctcacacatggaagcccatggtaggctatgctaccctggagtactcagaaataaaatggatatcatgatatccaatccagtgtgccatcgatctctcttgatttctgtcacgttttatttccaataagctatgataatcacgatctgccatcatatattatcttttcttgaggatgtgagcatatgtagagtgatgatatcattgcctaagaaataaatcttgtcatcgggatggatcccttttgtt

SEQ ID NO: 5664 - DNA, 585 bp, Oryza sativa
  ref <308>: DATABASE ACCESSION NUMBER: AK062832
  ref <309>: DATABASE ENTRY DATE: 2001-12-06
gtgcagtgaacaagaacaaggacaagaacaagctagccggtcgagatcagtttcagtttcaggcttagctagcacagcaacagcagcgtcgatcgatatgggccgttggttgaagccagatgtttacccgctgatcgccgccatgaccttcgtcacggggctgtgcaccttccagctcacaaggaacgtgttcatgaacccggacgtcagggtgaacaagaacaaccgtaaaagtgcggtgctggagaacgcggaggagggtgagaagtaccaccagcacgcgttccggcgattcctcgccacgcagcggccggaggtcttcccggcgctcaaccgcttcttcgccggcccggcgacggtggcgagaagtgatcgccacgactgatcaatcgacgacgacgaagacgaagacgatgatctcgatcacctacgtgttggctaatcaatgtatccaccaattgtaagagtatggtgtacgagtacgtgtgtagtagtgtatgtgcgtgtgtatcttatcttcttttatgtaatcggaaagataaaaaaatggaaatgagaagttaatgcgggcgggtgtttacacgt

SEQ ID NO: 5665 - DNA, 734 bp, Oryza sativa
  ref <308>: DATABASE ACCESSION NUMBER: AK062833
  ref <309>: DATABASE ENTRY DATE: 2001-12-06
ctctcctccatcctcccctccggcctccacccgccgtcgtccgtcgccgttgcgcgcgcgccaccccctccctccttcccgtgcgccgccgcctcgtcgttccatctaagtcgcgagggaacgagctgaaccccatctgcgctggtaagcgcgatggcgaacccgctgcacggctcgggtccgcttcgatccaggaatgcgtcgagctcggacgagatccagctgcggatcgatccggtgcacggcgatcttgatgaggagatcgatgggctgcactcgagggttcgcctactgaaaggcgtggcccaggagataaatgctgaagccaagttccagaatgatttcctcagccaactgcaaatgaccctcataaaagctcaggctggagtgaagcataacatgcgaaggatgaacaagagcatcatccaacagggctcgaatcatgttgtgcacgtggtcctttttgctctgttttgcttcttcgttgtctatctcttgtcaaagttctctagaagataataacactgttagacatatggctataagatagttgagttctgtcaacctagtgaccatgagggtataccattggttttaacttgtatactacatatggacacatctctgaagtttatgtaatggcttctgtgatatggatataatatatcctgacataggtatgttactctatggattaatgcatacaagctatactcttaattccagtttttctt

SEQ ID NO: 5666 - DNA, 682 bp, Oryza sativa
  ref <308>: DATABASE ACCESSION NUMBER: AK062834
  ref <309>: DATABASE ENTRY DATE: 2001-12-06
atccatcgcagcgagcgaccgtcggcatcacaagccatctccctctctcttgtcttgtgatctagctcccgtcgcgatcattgtgatataggcatggccaggtcatcgtcgtcgctgctcgtcctcacggtcctggtggtggccgcggcggcgtgctccactacggcggcggcgcgcagcgtcccggcggaggagaagaagacggctgcgccggtggcggcggcggacgtgaagcagccggagacgttccacgaggggacggtgttgatccctgggctcgggcggttcgagctcggcagcacctacgtgccggacatcaccggagtcgaccacagcgtcccggcagccgagcacgggcagttcctccccggcgccgacgacacatgggtccccaaccccggcttcgaggtgcccaaccccttccagcccggctcgtcttctccctgaatcacccgccggctcgccgtcgtcgccgagctagctagctaggcggcggtttgccggagtaataatgtgtgtgatcccacgtgtccccgtcggtgcacggctgccgtagtggagtcgtttagtttttcaattgtgtgtggatgcgtaggatgcattcagatgtttggcttgatcgatcgcgtgcttttgttagctttgaactcgtaataatgtattaattggtgagtgattatgc

SEQ ID NO: 5667 - DNA, 1008 bp, Oryza sativa
  ref <308>: DATABASE ACCESSION NUMBER: AK062835
  ref <309>: DATABASE ENTRY DATE: 2001-12-06
agcgtccggtccatctccactccccccacactcctactcctttaacctccccgcgccgccgcctcccctccgccgagacacccaactgtataccagcagcagccatcctcgcgcgcgcgcgcggcgtcggcgatggcgggcggctcaacctcctcctcctcgtcgtggggccccagcccggctctggtgaccgcggtggtggcgctgctggggctcggcctcgccgcctacatcgtcggcccgcagctctactggcacgccagcgaggcgctcggccgctccacgggggcgtgtcccgcgtgcgactgcgactgcgacgcccgcccgctgctcgcgctccccgaagactgttccaaacaattcaaggatgttaagagccgtgcgtctggtgaagaaacagagaagagtttcacggagctactcatagaagaactgaagcagagagaagaagaggcaacacaagctcagcagcaagcagatgtaaaattgctggaggcgaaaaaattagcttcacaatatcaaaaggaggctgacaaatgcagttcaggtatggatacatgtgaagaagcccgggaaaaatcatcagaagcattggttgaacaaaggaaactgactgctttgtgggaagaaagagctcgtgaactaggatggaaacctgggaatatcaaaccacaccagacgtagtaacgagccctagcgggatcgcgagcagctcaagccacagagatctaattccacacatgctcctcaaagatatagtaaagtgaccgaggtaacaaaggtgcgaccttacctccgttttgcgctgcttcacaagcttttgtccatagttgatttatattcagattgtagtatacgtccatagctgtttgtgagcatatgttaaaatgatcataggatcagaatgctgctcatccacctgtatctgtatgtcttgaagggaatattggttgttgtgtatgatgatggtaataaaggaattgtagtccaagtgcatctatttctgtt

SEQ ID NO: 5668 - DNA, 821 bp, Oryza sativa
  ref <308>: DATABASE ACCESSION NUMBER: AK062836
  ref <309>: DATABASE ENTRY DATE: 2001-12-06
gcaaagcccacgacggggagcgggagcgggagcgcgagggagatgggctcgacgaacagcccggtggtggtggtggtgccggaccccgtggtggtgggggtggggctccaccacccgcacccggccgccgcgctgatctcccgccgcgtcgccatggcgcgggactacgccgccgccgccgccgtcctccgcccgccgtggctcctcgacctcctccccttcctcatcgtcctcctcatcgccgcccacgtcctcgccctcggctactggatctacaggctcgccaccgacggctcaaggcagcccgcgcggagcaagaagcactagccgcccccgccccaggatgtttcctggtaatgttttccatttggatctggcgtcctctgcttgttgatctccaaggtttccaatgcgaagtgatagcgtggagaacccatgaaaggactagaaacggaaccagtcttccagtgatttttgttcagatgttggtttcaaaagtgacgttagctgaatacccccgtgtgaaaagaagaccttgtgatcataaataggtacttagttgttgaaaaggtttgtcattagttgatctttcatgtaaagaccagtagcaggtagacaggtgttgtcatgtctatctgattgtgcgtgtacatcttgagcaactttttctttgctcgactcagatacaggcgaagcttcaggctccaccatgcttctttctatctgtctgaagaacgcaataccaataagtaactgaagattccacatgagccatgccattgcaacctgctcgccatggctattttgcagcccagatcagc

SEQ ID NO: 5669 - DNA, 597 bp, Oryza sativa
  ref <308>: DATABASE ACCESSION NUMBER: AK062837
  ref <309>: DATABASE ENTRY DATE: 2001-12-06
ggcgaattcccttttgctagacagcttacaatcactaagaagctcttacggagacatacaagaaagctccgtcccagggggcagaagaacacaggcctgacattgcaagattcactgccatctagtccacgcgaaacaacgccatatcaaagcgactcggactcatcatcagagtcaccttacgaggatttccatgagtagagaagcaatgagagtagatcagattcttggtcatcaggagctgctaattgctgtcaacttgtgtgtttggtggataagatgtaaccattccacatgcacggtgctggagtggaggctttgttagtagagctcattggccagtgaagtgataatatatcggtcgttccgttccaaccctgaaggagctattcaggtgttgtcttggattcctcggccttgtatatgtatatatatagtagggtgaggaagttgtatcgagctgtagccaacaatccaatgtagcagctagcatgcagagaaaaatgtgatgtattgttgtagctagacatcttctcgtaactagttgaatggccttcgtataagttaaataagaggtctcttcatttgaacatatgt

SEQ ID NO: 5670 - DNA, 949 bp, Oryza sativa
  ref <308>: DATABASE ACCESSION NUMBER: AK062838
  ref <309>: DATABASE ENTRY DATE: 2001-12-06
acaaccagaagaagaacggcccgaccaaagcgtcgctcagttctccatacagttgacctcgtagacgaacctcgccgccaccatgaacccggaatacgactaccttttcaagctcctgcttatcggtgactcgggcgtcggaaagtcgtgcctcttgctgcgtttcgccgatgacacgtacacggagagctacatctcgaccattggtgtcgacttcaaaatccgaactatcgagctcgacggtaagaccatcaagctccagatttgggatactgccggccaggagcgtttccgtacgatcacgagcagttactaccgcggcgcccacggcatcatcgtcgtgtacgatgtgacggaccaggagtcgttcaacaacgtgaagcagtggctgcacgagattgaccgatatgcttgtgagaatgtcaacaagctcttggtcggtaacaagagcgatctcacagccaagcgcgtggtctcgacggacgccgccaaggagtttgccgagagcctcggcattgagttcttggagacctcggccaagaacgccgcgaacgtcgagacggccttcatgatgatggccgcgcagatcaagaagcgaatggcgaacgcgccgacggccgccaagcccaacgccggcgtgcgcctcacgggaacgtcggtcaaggagagcaagtcgggctgttgctaaatggtctcagcgaacagtgtcccgcgttggcttcgacgaatccaccgtttccctcgcggttgccgagcgggagctcggcagtagttaggtcgtggagacaggccgtgggcgtctggtgcttttggacttctttttgatgagaaacgacgtcgggttttcgacggctttgattgagaggtagaaagagtgggcaggcccccgggttatcctcccgcaccgaagctgtagtcgtgacgcatatatttcccgcctctatatcgc

SEQ ID NO: 5671 - DNA, 750 bp, Oryza sativa
  ref <308>: DATABASE ACCESSION NUMBER: AK062839
  ref <309>: DATABASE ENTRY DATE: 2001-12-06
actccttcgcgccttcgcctccctaccgcgtgctagctactcgtccaccaccatggcgcggctaggacgctcggcgtggctcctcgcggcggccgtgctactgtacgcggcggcggcgcagccggactgcgcgaacgcgacgttccaggcgggccggacgtaccggcggtgcgacaccctgccggtgctcggcgccagcctgcactggacgtaccacccggcgaacggcaccgcggacgtcgcgttccgcgcgccgcagagtagcagcggcgggtgggtggcgtggggcatcaacacccagggcgccggcatggtcggcagcagcgtgttcatcgcctcgcagatcaacgccaccggcgccggcgccggcggcgtgtccgtcgtcacgacggtgctggagagcttcagccccagcctgaggaacgggaccctcaggttcgacgtgccggcgccgcccgccgccgagtactcggccggcgcgtacaccatctacgcgacggtggcgctgccggggaactcgacgacgcagaacatggtgtggcaggccgggccggtcaggggaggggccatagcgatgcacccgacgacgggggcgaacctgaggagcaccaagaagcacgacttcacgtcttgatgcgtagtaggcttaggaataagcattattattatcattgccataccatacagcatatgtttctgatgttgtttgctatcggtttttatactaaataaaagtgcaatgtgttgagg

SEQ ID NO: 5672 - DNA, 653 bp, Oryza sativa
  ref <308>: DATABASE ACCESSION NUMBER: AK062840
  ref <309>: DATABASE ENTRY DATE: 2001-12-06
gaaagggctctcagatgcacatatagtacactacaaaccaatcagttaatcccaagtatataatcctaataaaatctcgccgcgacgatgaagatagtgctcaaggtgccgatcacctgcaagaagtgcaaatcctgcatcctgcagatcgtctcaaggaacaaaggggtcaagtcgctgacgttcgacgacgagaagagcacgctgacggtgatcggggaggtggacgtggtggtgatcgtggacaagctccggcacccgaagaaggggaaggagaagagggaggggtacatggtggaggtgatggcggtgagcgacgagaagaaggaggccgaggagaagaagaagaaggacgaggaggagaagaagaagaaggagaaggagaaggaggaggaagagaagaagaagaaggagtgcgccgagaagctcaagcagtgcgccgagctgcagcagtgctgcagggcgtgccggccctactacgtcgccgtcgacgaccacccaggctactcctgcaccatcgtctgatcgcgagccacggatctaacccgctgctacattctctggccttcaaggctctgcagattcgtgtgtaaatcgtgttcatcggtttcgaagattcagccttgatgctattcacactcctttcttctctg

SEQ ID NO: 5673 - DNA, 823 bp, Oryza sativa
  ref <308>: DATABASE ACCESSION NUMBER: AK062841
  ref <309>: DATABASE ENTRY DATE: 2001-12-06
aatgctcccttttgtgcgctagcctgccgccgcctcctcccgccggagccgctggcctcctcctagcgcgcgccagcccgctgctgccacctcccgccggagctgctcgcctcctcctcgcatgcgctcggcggaggagcctcaccctacccgccgctgcctgcttccctgttcgcgccgcgccgtgacgaagaggaaagagaggcggggtctgctcgccctaccccgcctcctcctcacgcgcgtgggctggacatccgggcgcggccgccagaaagggcatatgaggtggcggagagtctttctaggaggagaagagggggccattgaaggagggttggaggtcgctgcgcatggcccgtgggcggcggagcgatgaggccgggaggacgtcggcatcggcgaggttgactaagcaagaggcaagcgtcaacagaggtgccggggaggagcaggccgccggcgcggtcgcaggagaaggtgccgaccggaggcagagacgaggacccctaggaccgcacccgccccaccactgctgccatcgtcagcatcctatatgatttttcattgttgttgttatcagggatgcgctggaacgatagcacaggactagggccgctggacatcatcgacgctagcagataaggacaccaacaacaggtcactcttgtcgtcaaacactttgatgatccaaggatagtgagtgcagacttgaaagatcttcttcttcttcaatcaatatctgttcttgtacagtacaaagaattcatgtttctatttgagaacaatcggggggctataaacagaatgctaagatcacttc

SEQ ID NO: 5674 - DNA, 747 bp, Oryza sativa
  ref <308>: DATABASE ACCESSION NUMBER: AK062842
  ref <309>: DATABASE ENTRY DATE: 2001-12-06
acaacactgaatttattgcagtagttaattagaacactgaatatattagctgtgctaagtgtagctagctcagtgggcaaagcaagcaatatttcaatggcttccagctcgaacttgctcgcgatggccattgccgtggctgccgtgctcctagcgggcaacggcaacaccggccacgcagcgcggcacctcgccgacacgaccgaggcgccggctgccgccattcctgctgttccggccatgccgaaaccgacgatccccaccatcgtcccggcggtcacgttaccgccgatcccggccgtgccaaaggtgacattgccgccgatgcccgccatcccgaccgtgccggcggtgaccatgccaccgatgcccgccgtgccggccgtgccggcggtgactctgccgccgatgcccgcggtgcccaccgtgccgccgaacactgtcgtcgttcccgccgccgtcgtgccggcgttgccaaaggtggcgctgccgccgatggccgccgtccccaacgttccaatgccattcctcgcgccaccacccaaggcctaaacgtagctcgtttcgccatgtgtgcacgatgagtgtcagtgtgtgtttaatgctattttgttgattgtacgtttttgcatggcgtacagatattttgtcattctttcatgtatgtactgtatactatatatgtgggcttgtacttgattgaattttatggaatcggttgtcgaggtttcttgacaataatctctg

SEQ ID NO: 5675 - DNA, 544 bp, Oryza sativa
  ref <308>: DATABASE ACCESSION NUMBER: AK062843
  ref <309>: DATABASE ENTRY DATE: 2001-12-06
gtatatactactacgtgattaataaatacatgtacatgtatatttacatcttacgaaatgagcgtagctcaactagttaggggctgctgatggatggcttgccacgcgcctagcacggtcacctcacctccttacatcccctgtacgtttgtacatacttttgcagtggtagagctaactcaagggcaggtcgggcggtcgcttaggctctgtcgctggcgtctcggctgtagatagcatttgatgtcccaaaaaattagttgattactgaaaaacgctaatacttgtctgggcttcatggcatctttgctccaccactgtacttttgtatacacacgtataaactgtgtacatgtatatataccaagtttatacatgtatatatactaaatttatatgtatgtatacaaagtataaacttcacatatacatctacaaattttctatatttagaaaaattgtgtgtatactttttagatgtataaaaaatacacatacgcatataaactttatacttctatgtacaaattatgcgtgtatgtat

SEQ ID NO: 5676 - DNA, 535 bp, Oryza sativa
  ref <308>: DATABASE ACCESSION NUMBER: AK062844
  ref <309>: DATABASE ENTRY DATE: 2001-12-06
gttcagtacattcagctcttcaagtctacgacgttcgactccaaagaatcaatcaccttcactcatccaccaaatcaactctaccaatctacacatttcaaaatggtctgctgcggacgtaacaacggcacctgcgtgtgcgcccaggaggctaaatgctcttgcggaaagcagcccgcgctccagtgcacttgcgaaaaggctgccaccgagaacaagctcccctcttcaacatgtgcttgcggaaagcgcgctgaagatgcctgcaactgcagccgctcggagaacaacggctcatcaaacctcgagaccgacttcaccaccaagaaataaatgtattggtgcaatgaaagacttgtggatgcattttgaagcgtggagagtgtggcatacggaagggagtttctggcgtttattgagtgtttatgaggcgtgggatggcgattgtgcctggattgcatcgaacttacgagtgacgcttacgactgagatcatcgaaagtgccaaatataaatcaaagttttcttgacaaaat

SEQ ID NO: 5677 - DNA, 828 bp, Oryza sativa
  ref <308>: DATABASE ACCESSION NUMBER: AK062845
  ref <309>: DATABASE ENTRY DATE: 2001-12-06
cttccagctgagcgcgagggcgtcgtcggcgtcggcggcggcggcggcgaggaggtcgccgcgggcggcggcgaggctggggtggctgcggccgtcgcgcctgagcgcggtggtgccggcgagcgagagcgggagggtggggccgacgtgcttcttcaagttcgggaacaaggacgccgagggcgccggcatctacggcagccagggcagggacgacttcgaccgcgacgacgtcgagcagtacttcaactacatggggatgctggcggtggagggcacctacgacaagatggaggcgctgctgaaccaggacatccacccggtggacatcctcctcatgctcgccgcctccgagggcgacaagcccaagctcgaggagctcctccgcgccggcgccaagtacgacgtcaaggacgtcgacggccggacggcgctcgaccgcgccgccgacgacaccagggagttcatcctcggcttcgccgccaccttggccgcctgatcgatcgcttcgccgacgacgacgaccttgatgcctggatatgtttcggctatactagtatactacgtatttatcttttcttatttttttctttttcaagtttctccaagtttttcttgtgtttggtagagtttagccgggaaattcacaagttgtttacagttcaagaggaagtagcttcatctgtatctttcactttcttcgctgtgtgaggctatgctttgtagaaattgttgttacaagtagtatcttccactgtttcaatatgaaagtaagaagaagctttggatgcatgatactattggaattggaagctttgatgttcacat

SEQ ID NO: 5678 - DNA, 445 bp, Oryza sativa
  ref <308>: DATABASE ACCESSION NUMBER: AK062846
  ref <309>: DATABASE ENTRY DATE: 2001-12-06
aattttcctcattggcgtcaacagcaccaaactcatcgaaaatgccttcgcaaaagacgttccgtatcaagcagaagctttccaagaagttgaagcagaaccgtccgatcccgcagtggatccgcatgaagacggacaacaccatcaagtacaacatgaagcgtcgccactggcgccgcaccaagctcggcttgtaagcgttgcgctgtgatcgcgtgctgttggaagcgagaggacgaccagcctgttggccgagatcatcgacgcactggctgtgtgggtggtctttcgatgagaagggtttcaagacggcggagcccttcgtagccgagtggacggataccttcgtgatagacacgaaggaagaaacaaacgaacgctgcgcgggttctcaacaacgccgtctcgcctccttttggaaagtgctctctcggtgtttagtttt

SEQ ID NO: 5679 - DNA, 891 bp, Oryza sativa
  ref <308>: DATABASE ACCESSION NUMBER: AK062847
  ref <309>: DATABASE ENTRY DATE: 2001-12-06
ttgcaatggatcaacatcatcactgggggtatgatatatggttcaggccgtatttgaaactactttacaagaggttcttgcaaaagtagtttcttttggcatgtagggctgtagtggggtttcagcctcttaattgatttggttgccgcaagactgcaatgagacatctgcatttccttgattccttcttgagggacctactatctctactctctacaacgtaaagtatgtgagttggtgattgggatggtaagttctacgcctgcatccttcctccaattttcgctcacaactttgacatacatctcaaaggaacatcttttaccaggaaaaataggatgcatttaggttcactattatgaaaatcaatttcatcgctgtcatgggcagttgggcactgctagtattgtagaaacagcacaatatgttgaagatcaatcggattgtcagcacttgaagacgatagataaccacttcatcaaagaaaaaaaaatagtaccgtgatattctgcggttatcactcaagaacaaaagaaaagatggtggtaattagttccactcaaacgaggggaacaaccaacatatgccatatccttagattattagagaaagtttagactttttctttctttaaggaagcttgtggattaggtattgatcgtcatctgttcatcaaataattataaaggagtgttactgtggtttttggcccctcttctctttcatagtctagtctatctgctgtgttgctttcgctggaacaaagcagagaggggcatgagcctcaggtgggatttttgtccaataaaggtggcctgccatagggtaggtgggacatgttcttggcccctcacttctaaggtgtcaagtcttcatcaagaaacacaatac

SEQ ID NO: 5680 - DNA, 662 bp, Oryza sativa
  ref <308>: DATABASE ACCESSION NUMBER: AK062848
  ref <309>: DATABASE ENTRY DATE: 2001-12-06
actgtctactccactagctagcaccattactagcttagctagatcacttcaccacttgagcaatggcttccaacaagatcgctccccttcttgccctgaccctcctgatcctgttcttcgggtgtgcagtaactaactgcaccggcaagccagttgcccggacgccgccgtcgcacgacgatcacggccgctgcccgatcgacgccctgaagctgagggtgtgcgccaacctgctcaacgggctgatcggtgtgaagattgggcgcggcccagacgattgctgcccgctgctggccggtatcgccgacctcgacgccgccgtctgcctctgcaccgctctgaaggctaacgtgctcggcctcatcaacctcaacctgcccgtcgacctcagcatcatcctcaacaagtgcggcaagaactacccgtccggtttcacctgctaattatttgagctgcaacaatattcactagagtttatgtgtctcaataagacgagtttagtttcgtgcaatgtctgtctgttgacgctgttgagttgaataagcgtctcgcgtctgtttgcaggcagtactcgatcgatgtatgtccagttctaccgtccttgaccacctggttattctaacttgtaatacccatcttatatatattagatcgtttttatc

SEQ ID NO: 5681 - DNA, 552 bp, Oryza sativa
  ref <308>: DATABASE ACCESSION NUMBER: AK062849
  ref <309>: DATABASE ENTRY DATE: 2001-12-06
atttttgtcaatttgccgccgttactaggttgtagcaaatctctctcctgcatccactatgaaggcctttgctgctgtcgttctcgccgctgtcgccgtgtccagcgccgtggctatcccggacctcccggtctccgtctgcaaggacgcgacgtacatcctcccgggtgcgcgtggcgccatgtgctcgggcgctggtgccgcgcccgccggcaaggcctgcccgctcacgaccaagccgctcccgtcgaccccgtgcccgtcgctcacgaccaagccgctcccttcgacgccgtgcccgtcgctcacctcgaagcccatctaaatggagactccaacttctaggtactaccacacttcctcacttccacccaatttcttcagctcggcaagggtcgagaacgttgccgctctcagcttcgacgtcgagcagccactaccctccccccattttttgacctcgtggatgtacatgtttcaaaagcttagcgttccgaagctaggaagattttttttctaaagcatgcagcaatggatgttgtcttcctgcgg

SEQ ID NO: 5682 - DNA, 851 bp, Oryza sativa
  ref <308>: DATABASE ACCESSION NUMBER: AK062850
  ref <309>: DATABASE ENTRY DATE: 2001-12-06
gacgcgcatcttccgaaatagagaaattgccacggatcgagggcgaccgataatggaaggcgagcagcagcagcagcagcagcagagcgtcgcggcggtgaggccgtcgctggggaaggcgccgtcgccgtcgttccggctccggaacggcagcctcaacgcggtgcgcctccgcagggtgttcgacctgttcgaccgcaacggcgacggcgagatcaccgtggacgagctggcgcaggcgctggacgcgctcggcctcgaggccgaccgcgccggcctggccgccaccgtcggcgcccacgtccccgacggcgcggcggggctccggttcgaggacttcgagtccctccaccgcgccctcggcgacgcgctcttcggctcgctggacgtccccgaggacggcggcggcggcggcggcggcgacgaggagatgaaggaggcgttcaaggtgttcgacgtggatggcgacgggttcatctccgcctccgagctgcaggaggtgctgaagaagctcgggatgccggaggccggcagcctggccaacgtgcgggagatgatctgcaacgtcgaccgcgacagcgacggccgcgtcgacttcggcgagttcaagtgcatgatgcaggggatcaccgtctttggcgcctgaccacttcttccatccagggtagccatggcatccgctcaccctcacctagtcaacgttcttatcggcggggttacaaggaaggacaacgtgttaatcatccattagcagctggtctttgcatcgtgtgatgaccatcatttctcattgaacgagtgaccaactcgatgattctgtcagtcccagtgagcgtgattgttttggttgc

SEQ ID NO: 5683 - DNA, 751 bp, Oryza sativa
  ref <308>: DATABASE ACCESSION NUMBER: AK062851
  ref <309>: DATABASE ENTRY DATE: 2001-12-06
actgcagctttccactatactaccaccaccactgagctgccactactcatccagctaactaggagaaggaaaaaagaagaacacagatactttggtaacaagcaagaaattggcacagaaatggctctgaggctgtgggctagctcagctgccaatgccctcaagatctcatgcagtggagccaccagggctgcacctgcctactcaatctccagatacttctccactgttcttgatgggttgaagtacagctcctctcatgagtgggtcaagaatgatggctctgtggccacaattggaattacagaccatgctcagggccatctgggagaggtggtgttcgtggagctgccggaggcgggggcgaaggtgagccagggaggtgcattcggcaacgtggagagtgtgaaggccaccagcgacatcaactcccccatctccggtgaggtcgtcgaggttaacgacaagctctctgagacacccggcctgattaactcaagcccgtacgaggacgggtggatgatcaaggtgaagccgagcagcccgtcggagctggacgccctgctggacccggccaagtacaccaagcactgcgaggaggaagacgctcactaggctcttcctctctgttttttttcttcccattttgtcactccgacctaatttctccctgttgcaacaactgctctgtatccgtatacgattaataactgaatcttcaggctttgccatgtgttcagttggttctctg

SEQ ID NO: 5684 - DNA, 430 bp, Oryza sativa
  ref <308>: DATABASE ACCESSION NUMBER: AK062852
  ref <309>: DATABASE ENTRY DATE: 2001-12-06
tggtgactggatgcttgttggagatgtcccgtggcagatgtttgtcgagtcatgcaaacgcttgaggatcatgaagggttccgaagccattggtcttgcaccaagagcaaaggacaagtacaagaacaagagctgaaaatgttgcagtattaagatgctgagcatggtgccataagaatggtgttcttgcagtgtgttatggtttccttagaaatataaggttttacttgtttagctggattaaaagaaggaagagttgtcatgtttaatttgtttatggaccagaagcaataatctatttgtgtgtagctggattggtgttatgtgatgtcccctaccgtgtgtcccaagatctacttgatgattttattccaatgttgttaatttaagtttgtgtgattgtgaagtaaagggtatcaatgagactatt

SEQ ID NO: 5685 - DNA, 1185 bp, Oryza sativa
  ref <308>: DATABASE ACCESSION NUMBER: AK062853
  ref <309>: DATABASE ENTRY DATE: 2001-12-06
acctccgtaatccccgttaccgccgtggtcggagccgccgagcgccgccgtcgcgcctccctccaccgtcttcccacgccgccgcgcgacggctgcggcggtcgtcttccccattcgtcccatcgatcctcctccggctcagttccacagaagcgccacctcatcacgaaggcaattttacagttcgaacattaggaagcatgagctatttccaggctacaacatacaagcctcataatgggatcattgtggacaaggtagcaataggtcttgggagtacttgcaaattgcttcatgaaagggccaaatgttcgtattccaatagattcatcaagcttcaagagcaagtatacccaaggcttcttcttgttgctgcttgccataacaggattggtcctgtgtatgcctcaagtgggaaaggaaactctgagcgtgtcaatgatcccttctccatggaatctttgaacaaagctatagctggaactaaaaagcaatggcccatacaagatatgctgatagatcaaatttctaagattagagggtctggctctggtggaaatggtggtggtaataaaaacagtcatgaaggcagtggtggtggctcagaggacgaatctttgacggagtcattatatgaaatggtccaagttttgttggcaactattgcctttatactcatgtacatccatataataagaggagaggagttataccgccttgcgagggactacactagatacctggttactggtaagagaacttccagactgaaacgcgccatgttaaactggcacaatttctgtgagggcatcaccaacaaggatagcgtgcaagagtcaacatttgaaagatcaacttctgaaccaatgtggtggcagcagcccctaaagtttgtccatcgcattgaggaactttacagaggctattttcgcccacatgcccaggaatcatagttctgatgattgaggatccctttggactcttctcaagatttcagtgtatgttgtaaccgtgcataggtaggcactagttgcatggacggtgcagtgaagcgcatggaggaaactagacggtctgttctttactgcattcagtttttcttgcgtagtgcagctgaatactacgttatatattgtctgtattgttcattacagaacataaaggaaggtgatagttcgtctggac

SEQ ID NO: 5686 - DNA, 888 bp, Oryza sativa
  ref <308>: DATABASE ACCESSION NUMBER: AK062854
  ref <309>: DATABASE ENTRY DATE: 2001-12-06
gatttttcttatcccctccctcatcttctccacgcacccacccctcgagagggaagaaggaacccggaaagggaggaaagcatggccggagcagcagccgcctccgccgccgccgccgccgtggcgtccgggatctcggcccggccggtggccccgaggccctctccctcgcgcgcgcgcgccccacggtccgtcgtgcgggcggccatctccgtcgagaagggggagaaggcgtacacggtggagaagtccgaggagatcttcaacgccgccaaggtgacccgcctcctctctttcctctccttgttgcgtggagatgcgtctcctcgcgcttcgttcaggggggggggggggttactccattacttgcggcatttctgtgactgcgaattgtgagatgacgctcgtttgcgctccattgatgggacctgttcttgggttgaaattggtgggcaagatggcggtgtttcttcgttcatgccagcgatgcgatatgtggggtatagtcgggtggaatttcagttatgttttggatgggaaccatgggctgtgagagttggacaatgtgagcttttggcaaggtcaactgtgttcgtagtccaggttgttagattaagatggacatatatcatagacagctagacactgcatcaatcatttaggtaatattcaagcaaacaaaaactagtttcaaagtacatggtccctagagagtacatctatgaatctatgatgattttaccatcccaatttggatcatgatcttgatgggtgtattggttatcgaaggcacaattgccataattaatagaactgaataatgtaaaattcctatatataaatttccaggcttattatgcacttaaccatccccttagattcatgttt

SEQ ID NO: 5687 - DNA, 802 bp, Oryza sativa
  ref <308>: DATABASE ACCESSION NUMBER: AK062855
  ref <309>: DATABASE ENTRY DATE: 2001-12-06
aaaaaaatccacatcactccctcacactctcactcgtagcgaagcaggaagctagaggctagagctaaggcagacaagacagatggcgcagcgcgcgtctcgccgtcccgccgcggcggcggcagcagtcgtcgtggccgtcgtgctcgccgtgagcggaggcgtcggcgcgacgccggagacggcgtgcagggcggcggcggaggaggacaggcgcgtggactacgagttctgcgtgtcgcggctgagccaccaccacgacagccccgacgcggacacgtgggggctggccaaggtggcggccgacgtcggcgtctgcatcgccggcgacgcggcgtacgacgccaaggcgaagctgcaggccgccaaggcgggcggcgagcgggaggcgctggagcggtgcgcggagctgtacgaccggatggggtcggcgttcgcggcggcttacgacgacatcaaccggcgcgagtacgcggcggggaaggagaaggccggggaggcggcgtcgctcgcgcggcggtgcgacggcgccttcgccgacgccggcgtcgccccgtcgccgctcgagcggcagaccgcggagtccgtcaagatcgccatcgtctgcacggccatcaccaacctcgtcaagtagacgaaacaagtgttgtttccttcgcttaatgcaggttaatcttagaggaataaacgagcgccattgttgatttctcgtctgctcgatcgttcgattgctacgcatgtactagtagtagctaggttaatctagaggaataaacgagcgacattgttgatttctttgctt

SEQ ID NO: 5688 - DNA, 543 bp, Oryza sativa
  ref <308>: DATABASE ACCESSION NUMBER: AK062856
  ref <309>: DATABASE ENTRY DATE: 2001-12-06
gcttcgctcctactactctactagtcgttactgccacgaccgcaaacaaacgcgccgagctcccggagccggagcaaaccggcgcccggaacggctcctcccgctaaggcatttgttcgaacaccttgcgggcgtggactgcgggggcgaccccctcgtccccgcctttggcgttccgtcgaacaggcgggcgggggtgggcggcgtgagttggggcagtctcgtgcccggtcggcatcgatctgtggacccatcctcgccggccgccggggtcgtcgtcgactggtccgccgccttgatgagcaatcgctgcagtaaacaaaagacccaattcgcgtcgtcgtcgttgtctcgtctcgtcacagggctgagtggtgggtggggctccacgaggcacggccgcatggggtaggctccactactccagtactccgtacttggtgagctcaccgcatactccctccatcgaaaaagaaaatccaacatagatactctgtttacattctaataataccttcgtaaaaaatatagcaacttagaatg

SEQ ID NO: 5689 - DNA, 444 bp, Oryza sativa
  ref <308>: DATABASE ACCESSION NUMBER: AK062857
  ref <309>: DATABASE ENTRY DATE: 2001-12-06
cacagctttgcagttgccctccaattcatcagctgacgttgatccattcacaccacaccacacaatactccagcagccgaagcagcactgacgattctagtacaacggagtttaagcaatctcatggaagtggaatgtggttatgccttctgactgtcagccctggtgctaatccgcagtatgctgcccccttcttgtacagcttcatttgacttaggaagatcgtagcacggttactgtatttacttagggacttaggtacgattgacgcccaaggcgtgtagccaagccgtacatctccttgtggagacagccgaacggactgtaccgtggttttttttcgcgtacactcgtagttgtagcctgtagcaaagctgcagtttagtactagtactagtagtcgtcttggtgtttatttgatgtttaaatagcgtatgcatatat

SEQ ID NO: 5690 - DNA, 715 bp, Oryza sativa
  ref <308>: DATABASE ACCESSION NUMBER: AK062858
  ref <309>: DATABASE ENTRY DATE: 2001-12-06
acaaccgcacacgagacgacgtcacccacaaccgcacgcgcagatccgagaggcgagagcgagagcgaggtgggaatggcagggaggctgaccgcggcgggatcccgcgtcctgggcggccagggcgccgctgcccgcgccgcggtgtccgcgctccgccaccgcgccggcatgggcctccccgtcggcaggcacatcgtccccgacaagcccctgccgacgaacgacgagctggtgtgggacaacggcacgcccttcccggagccctgcatcgaccgcctcgcgccgcacatcggcaagtacgaggcgctggcctggctttgcggtgggctcggattcttcgctactcttggcttggctgccaccttgaacgacaaggcctccaagatcccctatactccaaaagtctacccatttgacaatttgagagaggaacttggtgatagaccatagaagaagaccccacttcctcaagtgatgtgatggactgaattctcttgccttctttaatcagagaaaaaaacaggacaattccaatgttcctgatggttgtctttgttgtcgctgtatttttataagttacaatcttgtgatttgctgaatcctgccaagcatggctttgttctataataatgcgatgagtgtctttgagcaactattgcacatgctaaggaattgactcttgacgatttaaagttagaattttcaagtgcct

SEQ ID NO: 5691 - DNA, 585 bp, Oryza sativa
  ref <308>: DATABASE ACCESSION NUMBER: AK062859
  ref <309>: DATABASE ENTRY DATE: 2001-12-06
aaagaaaaaggaaatctctcattcccctcgtcgctccccgcgaggaaggcaaggaaaggcaggaagccgtccacttcccacttcggcctccgcgccggccactgacgtcgacggcgaaccactcgtctcctctcctcttctccctgctgctccgagtcgtcgcctctgcatggagacgggagagagagagacaggggggaggcggacgtccggcgtgcagtacagctgctagctagcttgctagccagtgcagcgaaggatgtcggtgatcaattggagctgctgctcgctacaccggattggtgtaattgcgcattttgccagatttgtcttcagccctgttgtgtcaccaaatcttttaggataaactcataaacatggtagtaattatatgccttggtttctccatcttaattcatttgcatgctaaacagaagtttgttactagttttatgtttcacccatttgttcttgtgatttatctcaaggccgtttacatgtggttatcctttctttgatgggaagtgtaactgacagccttaaccctattggaaaattagaaggaataattaagatgttgcttcc

SEQ ID NO: 5692 - DNA, 493 bp, Oryza sativa
  ref <308>: DATABASE ACCESSION NUMBER: AK062860
  ref <309>: DATABASE ENTRY DATE: 2001-12-06
gcgtggatcttttgcaggagatgttggaagaagaagaggaagtggttgcgccgacgacgaggtgagcgggttgacggaggaggaggcagcgcgcgccggcttcgggtgtcgttgtccctgctcgccaggtgctcgttgctcctccagactgcagctagcgtgacgagaaacatcttcttgagacgatatcagaaggttttctctacaagcttcccttcgatcgtgtagccagcatctgtaggctatagctcgttagctgtaaaacttgtgctagctcgtttattggttctttcatttgtttcctgttagtcagtttctcctcccccagttttttagcttgttctcttctgttttccagtcgagtgcatgactgcgatttgctcggtcgtgcacatgtcgagcttgacgtgcgcttagtccgcacggagcgcgtcgcgcggcttgatcccacgtttttactttctgtactgaataaaaggaagaaaaaacagag

SEQ ID NO: 5693 - DNA, 533 bp, Oryza sativa
  ref <308>: DATABASE ACCESSION NUMBER: AK062861
  ref <309>: DATABASE ENTRY DATE: 2001-12-06
gaactgaaacacaaacttcgtcggcagctgaggcgcgatgcgtggcggcgcgccacaactggagcggccctcccctgagcctgaggggcagaggtgggctagctggagcctggaggtggcagcggccgccgcgcactcgcaactactcacaagccgcctcggccccctaatcttccgcgagaagaacgcggagtagcagcagcagaggcgtgcggggtcggtggactcggtgctaacggagcaacctttctgctgggtaatactaagttcttgccaactctaatatcgcctgcaaccgttcttagctatgggttgccgccgcaacggcctaaatcggttagatcaaaataatccatctttagcgatgaggcagatttattattttaacacattgaaatcacatcacatggtactgtactagtattattgattgatacacttgtgatgtcatgccagtaataatgctgtaatggtaaaacagagggatctaaaagcatttgactgaacaagaacagtaggatcaatctttgtgc

SEQ ID NO: 5694 - DNA, 858 bp, Oryza sativa
  ref <308>: DATABASE ACCESSION NUMBER: AK062862
  ref <309>: DATABASE ENTRY DATE: 2001-12-06
aaataggtgtcaagtggaagtgcagtgatgtatcacagaaaccataaacacacaggcatctgattagagaaatctaatggcttcttcttccttttccttcctgcttgttgctgctcttcttgggttggcctcatggaaagccattgcctcagaccctagccctctccaagacttttgtgtcgctgatctgaattcgccagtgcgagtaaatggatttgtttgcaagaacccaatgaacgcgagtgccgacgacttcttcaaggcagccatgctcgataagcctagagacacaaacaataaggttgggtccaatgtcactttggtcaatgtcttgcagcttcctggtctcaatacccttggcatctcgatagcacgtcttgactttgcacccttgggtttgaacccaccacacacgcaccctcgtgcaaccgagatcttcacggtgcttgaaggaacactctacgttggctttgttacgtccaacccagataacaggctattgtccaaggtgctcaacaagggtgatgtgtttgtgttccctgaggggctcatccacttccagttcaatcctaacccacacaagccggcagttgccattgctgcactgagtagccaaaatcccggggttattactattgccaatgcggtgtttggatcgaacccacctatctcagatgatattttgatgaaggcgtttcaggtggataagaagatcatagatttgctccaagctcagttctagaagaacaactactgattgtcctgttggttgcaccatcaaggacagtatactacatgcacctgatgctatgtaactatcatatatgatacgtagaataagtggggttttatgtgctg

SEQ ID NO: 5695 - DNA, 495 bp, Oryza sativa
  ref <308>: DATABASE ACCESSION NUMBER: AK062863
  ref <309>: DATABASE ENTRY DATE: 2001-12-06
gaaatccaaaattaatctgaaaagcaaaatacaaaagcaagtcgaggaatccccatcatggtttaaggcaatgcttgggttctttgaggtgccatcagcggagattatttcaagaagacttgctctttttgcttttattgctgggtggagcattgtaacgtccgctgagactgggcctactttccagcttgcactatcactcgtctcatgcatatatttcctcaatgaaaagatgaaaaatctttccagggcgtctatgacagggtttggagtttttgtgggtggctggattgtgggatctttgcttgtcccagtgattccaacatttgccatcccacctacttggtccatcgagctcctttcttctcttgtggcttatgttttcttgttcttgggttgtactttcctcaagtgaaatttctgttaagaacctggcaacagggcggcgctattgcttttttttttggttcccaatcaaatcgatgctttttttcc

SEQ ID NO: 5696 - DNA, 678 bp, Oryza sativa
  ref <308>: DATABASE ACCESSION NUMBER: AK062864
  ref <309>: DATABASE ENTRY DATE: 2001-12-06
caattgcgcttatatccatcactgtaggacttgggttcaagctttccctagccccttttcatcaatggactcctgacgtctacgaaggagtgtggttcgttcgacaaattcctacctctatatctatctctgaggtgtttgggttttgcaaaactccatagatatgcagaagagaaatgctatccccactccgaccaagacagaacttttaccaaaagtttattgtgatctttttgttcaaataacaattaaggtgaagcagggtcaggaacaacgaatctctttatgataaacagatccattttgcaagctcgttattacgggtagttcctacaaagaatcggactaatgacgtatacaatgcttgaattatcgacgtagatgctacatagtgggttctcatccttcagagactacgagtgtaataggagcatccgttgacaaaaggatcaccctaagatgatcatctcatggctattgggaacgaatcaaatcagatggttctatttctcaacctttctgacttgctcctacggaaccaaggtcgaaaggattgaaaaagtcagtcattcacaaccactgatgaaggattcctcgaaaagttaaggattagtagttctttttcgaaatcgatttcgaaaaagaatggattcggtcttatacatacgcgaggaaggt

SEQ ID NO: 5697 - DNA, 553 bp, Oryza sativa
  ref <308>: DATABASE ACCESSION NUMBER: AK062865
  ref <309>: DATABASE ENTRY DATE: 2001-12-06
ctctgcatgcgtgccaacctgtgacctccccgccggcggcggcggcggcgactccaggcagtggcctcgccgtcctcctctgcggcttcaccggtggctcccctactgtccacggcggggcacgggcggcttcccggccgggaccccgattctctccgacggcgcaaatggtggcgcggtggcgccggcaagtcgtcctctccgctccggccgccggtggtgcggctgatttcttcggggacatggtcaccaaacaactggagcctattcagttttggaaggtttttgatgccggagagagactctatcctgctcaaggtccaggttatcttctccatcttaggcacagctccgtcagtgaaggtgattttgtttatggcagggcagtcgacagtaagtaaggtgagcttcaggaactcttctttcttgaaggtaagtttgctttcattgtaagaactgtccaagagggaaaatgttttaaacactcgggtgaacgtccacccgtttcttgcatgtcatctaaatggttataaaaaattttcaagtttggttt

SEQ ID NO: 5698 - DNA, 449 bp, Oryza sativa
  ref <308>: DATABASE ACCESSION NUMBER: AK062866
  ref <309>: DATABASE ENTRY DATE: 2001-12-06
acgcacgcccacacggcaaaagctcccgcaccaaaaagagaaaaaaaaacacgcaaaagcgcatcgcctttctcgtgctccgccgccggcgagatgtgctgctgcccgagcaaggcgtgctgcatctgcacgctcatcgtgctggtgctggtcgccgtcggcatcgtcttcggcttcggcgtctacacccgcggcttccacaagctcaccagcagcatccacgacgcctcctccaccgccgccggctccctccgcgcccaccaattcttcgcgccgccgccgccgtactagctagctagcccctcctcctcttctcttctctccctcccgagatctatccatgggggatagtaggggagaccgggagtagtagtagtactaatcgtttgtaaagaagaattcgccggatttgattttattttatttccacctgcattttggttgcaatc

SEQ ID NO: 5699 - DNA, 467 bp, Oryza sativa
  ref <308>: DATABASE ACCESSION NUMBER: AK062867
  ref <309>: DATABASE ENTRY DATE: 2001-12-06
gtagtaccagtttacgcctcctgctccgcctccgatccaaccgcatccctcccagatctccgacttctttcctcctccgacgatcttcttcttcttcttcttccttcatccaagacaacaagacaaagagaaaggcaagcgatggagctggaggcgccgtcaccggcgaggtacctggtcggcgccgccatcatgatggccggcgttgtcctcccgctcgcctacatgatcttccgcagcaagcgctcttcctcctcctccaccgccgtcgccgcttcctccgctccatcctcctccttctccaagcagacgtaggaccaagggcctcatctgatctcaccaactccttctgctgctgcaacatcatcttcttttcaatttttgtcaagcaactttgccttcagctgctgctgctgctgccattcgatccatgtactactactactagatgcaaccattaatcagtc

SEQ ID NO: 5700 - DNA, 697 bp, Oryza sativa
  ref <308>: DATABASE ACCESSION NUMBER: AK062868
  ref <309>: DATABASE ENTRY DATE: 2001-12-06
ttaaaatgcatatgtgaaaaaactgtgggtataaaatgatatgctgcagattatcttttcctgttataggttcatcaataatggtttccctaattcaactttcagattgctgaatcttatggtctagattgatagctgatgcattggggtgatcatacaaatgatttccgttggtaatcatttttccctaccttaccatggaatctctactcctcactgaagcttgaaatgctagctcctcagggctcagctgctggaacctagaatggtctacttcattgtcagggagtagaaggtggtggagttgtctcggaggcactccctcaaggctgctgaggccaccccgttcaagagactgaatgtgaatatactcttgagaaatttgcagtaaattggcagtaatggcaccaaggatcaaagaaaatactaccattttttttgctgagtccaagttatggtttagcactggagacacattattaattttcttcttgcaatatgtattcagcgtgtgggttgataatttagagagctctaaaacgatagcggaaaatcaaacaaaaatcttactaggcgcaagtgctaaataatgacaggtatttccaaagagatgcaagattggtctaaatgggttgaggcaaagtcatgtttctagggacatgcaaaattgcaattgatgcatacttttttcccttac

SEQ ID NO: 5701 - DNA, 667 bp, Oryza sativa
  ref <308>: DATABASE ACCESSION NUMBER: AK062869
  ref <309>: DATABASE ENTRY DATE: 2001-12-06
aaaaaccaaaaccaccatctcatcatcggaaaattcatctcaaaaaatcaccagtgatcccaatccactactacggcgagagctagctcgatggaggcatcgccgccgacgtcgccgtcgtcgctaaggcacagactgaggacgacggtgtgctgctgcttcggctcgccgggggagcggcggagcggggagaagctgaggtggaggcggcgggtggccgcgggggagttcgggtacgacccgctcagctacgcgctcaacttcgacgatggcgacggcgacgacgacgccgcagacgacgccgccgcggccttccggtacaagaacttctcctcccggctcccgccctcgccggtggcggcgccggcgcggcggtcgacggccatcgccatctcatgaactgtaccccacctgtctcctcctccacgccctaactcttcttcactatagagagattaaactgtgtactcatgattaaactacagcatcaaaaattgtgagattattactacactattagcttagaggaaatgttcccatggtttcgacacatggtttcctatgtaattcgatacatatcgagatgtttgtgaaaaattggtgatgtatcccagaattggggcgattttagtcttgaaaaaaaatctctccctccttttaccgcggt

SEQ ID NO: 5702 - DNA, 396 bp, Oryza sativa
  ref <308>: DATABASE ACCESSION NUMBER: AK062870
  ref <309>: DATABASE ENTRY DATE: 2001-12-06
gtgtggggcatgacgagagccgtattgtcctaatcgccaagaaaaatgtctctgccggcgaagagctaacgtatgactacttatttgaccctgacgaggctgatgatcgcaaagttccttgcctctgccaaacggctaattgtcgtaaattcatgaattagtttactgtagatgtcaaattggccattagtttactgttctttctttctttctttcttttttctgggttggctggtggtatatgctttaccttgttctttgttgcttccccattctttaacatagcatttagaaaataagtttagctatagctcagaagcgcgagcttccatccctgtaaatggcactaatttatcgattacagtcgttcttttctaatgcaaaaaattttgcccc

SEQ ID NO: 5703 - DNA, 727 bp, Oryza sativa
  ref <308>: DATABASE ACCESSION NUMBER: AK062871
  ref <309>: DATABASE ENTRY DATE: 2001-12-06
agctgaaggcttgagcatcgcagtatcgcactcgtggaatctcctcccgtcccatctcctctccaccggcgatgcagcagatgaggtccgccgccgccgccccctgctccctcgccgccatgctcctccgccgcttcgcctacacctcctactcctcctcctgtgggcccatccgccgtcacgccgccgttgccctctcctccaccaccaccaccaccaccaggttcgccgcctggtcccctcctcctccttcgggcggcgccaggagcagggggttcgctgcctgggcgtcggcgcccgggccggcggggtccacggattcccccgccatgcaggcgctggagaccaagatcaaggagcagctggaggcggacacggtcaccgtcgtcgacacatctggcgacggccgccatgtctgcatagatgtagtttccaaggtattcgaagggaagtctgccgtaaatcggcagagaatggtttacaaggctatatgggaggagctccaaagcaccgtgcatgctgtggaccaaatgacgaccaagacgccttctgaggctgctgccaaccagtagcaagcatctgcttgagataaatttggagtgccacagtgggaactgttgtactgggacctgaccattgccgagagggatcacgattctttatatgtacacaactgaatggttaatattttttttttgatacgattggcatggcttcaagcgttcag

SEQ ID NO: 5704 - DNA, 449 bp, Oryza sativa
  ref <308>: DATABASE ACCESSION NUMBER: AK062872
  ref <309>: DATABASE ENTRY DATE: 2001-12-06
ggcggcggcgcagatgctctcctcaccccgtgtcggccataagggcggagcgaacacaccggcggcgaggcggtgaaggggttggaggaggcggtcgagcgggttctccctctgcagaacgatggatcgagccgagcaccttgagcccttctatccacaggcggaagtgcagtggctggcggcgcctcgatttcctggtgttggaatcgtcagtcccattccatccggaggagtaattctgaatagtgtgtggtcctcatcctcacgcacgggccgggtaaatccttccaaaatggatgtcttgtaaggcttgaaaaggattcaatctaaggcaagttgttggataagtctccatagtcatttcttcttgttgacagattacccaggtttcaccattgtttggctattgcaaatcattttaattttatcttccaattaatttggactcc

SEQ ID NO: 5705 - DNA, 771 bp, Oryza sativa
  ref <308>: DATABASE ACCESSION NUMBER: AK062873
  ref <309>: DATABASE ENTRY DATE: 2001-12-06
ctctctacctctacctctgtgtgggcagccgcaggaggaggccggctgggctgcgctgcgcgatggaaccggagagggaggcatcgtcggagtggggagatggtgtcggggtgctgggtttccgggtgaaggcgtcttcgtgcgagccggcggcgcagaaggcggccaatgtgctgtagccagacctgcgctcccactggtccaccgccaccaacaccaaggagtggatcctgctcgagctcagcgtgcgtactagcgacttgttgtttcttccccctctctaactaggagtctccttctctagccctgaatgaattgctgaatttgctgctgcaggagccgtgcctcctctcccacatccgcatctacaacaagtccgtcctcgagtgggagatcactgccggcctgcgctacaacaagccagataccttcgtcaaggttcgcccgcgctgcgaggctcccaagcgcgacatactctatcctgccaaccacaccccttgccgctacgtccgcatctcttgtatgcgcggcaaccctatcgccatcttcttcatccaggtaggagtaactactagtataacttttactcttcctccggatatattccgagtaataagtcactcttcttcttcagctcattggaatccctatacctggactggaacctgacctccagcctctagtcaactacctattgccacaaattgttccgaatgatgtcatatgtaatatcctgaaaaattatttgaagtcaataagtactttcgatgt

SEQ ID NO: 5706 - DNA, 1163 bp, Oryza sativa
  ref <308>: DATABASE ACCESSION NUMBER: AK062874
  ref <309>: DATABASE ENTRY DATE: 2001-12-06
ctgttctgaggattctagctgtctttcttcactgctgcagatacatgatttcctcaaacattggtgaagttgcgtcaattttcctaacttctgctctgggtattcctgaggggttgataccggttcaacttctatgggtaaaccttgtcaccgacggtcctcctgcaactgcattaggtttcaatccacctgataaagacatcatgaagaaaccgcctagaaagagtgatgactcactgattactccctggattttgttccgttacctggtcattggcctttatgtggggattgccacggtcggcatctttgtcatatggtacacacatggatctttcatgggcattgacctcaccggagatggtcacacccttgtcagctactctcagctctcaaactggggccagtgctctacctggaacaacttcacagttacgcctttcactgctggagctaggactttcaccttcgatgacaatccatgcgagtacttccatggtggcaaagtgaaggcgacaacgctctcgctgtctgtcctggtggcgattgagatgttcaactcactcaacgccctctccgaagacactagcctcctgaggatgcctccttgggtaaacccatggctgctcctcgccatgtcagtgtcgttcgggctccatttcttgatcctctacgtgccgttcctcgcgcaagtgtttggcatcgtgccgctcagcttgaacgagtggctgctggtgttgcttgttgcactcccggtggtgctcatcgacgaggttctcaagtttgtcggaaggtgtacaagctcatcaggccccaagaggcgaaccaggaagcagaagggcgagtaaaatgctaacagtgattcttcagactcatcagtaacaaaagtcactgaatttgttgtgatcaagtaacaatgatcaccaaatgatgtttattcaatagaaatatgtccaatacaagaaagttcaggaaagagattttctcaaaacaggtcatcactctttgggaagtttataacctttgctgttcttttattccttgtcctaaatggtactatactgagctcacagcaaaccagcaggcagcagcattgttctgttggcaacattttgcttctgtgaattattatatatagatgaaatatttagatcaaattatac

SEQ ID NO: 5707 - DNA, 1007 bp, Oryza sativa
  ref <308>: DATABASE ACCESSION NUMBER: AK062875
  ref <309>: DATABASE ENTRY DATE: 2001-12-06
gcattcttgttgtgtgtggttcaggttcaggttcaggggcatctctcctcttttctttcccttgccgccattagcccaagcagctatctggattctggagagttgttctctggtactagttctctagcgcacgaacaacatccgcgacgaagcgcatccatggcagtggcaccgacgagagcggaggcactgtccctcttccggtccctcctccgcacggcaaggcagttctctgactacaacatccgcgagtacacgcgccgccgcgccgcggacgccttccgtgagaaccgtgccctcggcgacacggctgccgcggcggcagcattcgcggacgggaagaagcagctggaggtggcaaagcggcaggcggtggtgtactctctgtacgccccaaaggccaagagcatcatggagatgaagttgcagtgatcgacgcgagaggtttcgtgctctcttgcttgctgtcctcttactcaggatttctttctgctctgtttctaaagttatgtgataggttcgaggaaaattggtgcaatcaaagctgagatgttatcatgtttgctggataattgccatgacatggttgctatgagttgaataaatcagtcaattccacgattttggtctcttgtgttcaacataccattacctgttaactgtggttggattggtgccgattgcagcacttcgaccagggctcctcgttgctgctggggtccctcgtcctgttgccggcttgcagccaccagtcaccgttgctggtggtggtgccttgtacctgctgctctccgtcctgatggccatggccttcgtcccactggacgagctaagagatctagtgcatctgttctgaatttttcaggacggttcatgtgtcctgtattgttctatgctatgtgttcccatttttgtttttgttgtatgctatgacattgttgctgctctgatctttttttttttctgaaataatgaagataagcttgctagtatttgctttttgggct

SEQ ID NO: 5708 - DNA, 470 bp, Oryza sativa
  ref <308>: DATABASE ACCESSION NUMBER: AK062876
  ref <309>: DATABASE ENTRY DATE: 2001-12-06
aagagtcgaccaacgtgcaggccgcgctcgcgacgcaggccgaccgcgacaagatccagcagatctacgacaagctcgtgagcgtccaagacgtcgcagcgtcggtgccggcgctggtggatcggctcgtgacgctcaagaccgtccacgatgagagtctcgacctgagcacgcgggtcaagaagatggagcagtcgcaagggatgctgcaggatctgctcgagtcggacgtgagcatcctgacgaatattgagaagagtctccaggacaacgtccagatcttccaggccaacatccagacgctcgacgaacgcatgaaccatctgctgagtagccatcgtagctagccggccacgacgggtagcggcacgggcggcgccgtgaccatcgagttgcgtttgctttgcagacagccaaaagaggcgcgcgtctggtcgtaattgggcgtcaaaaaggcactggatgttcgc

SEQ ID NO: 5709 - DNA, 553 bp, Oryza sativa
  ref <308>: DATABASE ACCESSION NUMBER: AK062877
  ref <309>: DATABASE ENTRY DATE: 2001-12-06
tctagaaagcagagagccttggttccattcagacaaaaaagctgacttagatgttaagtggtgagaatacccataaaggagccgaatgaaatcaaaatttcatgttcggttttgaattagagacgttaataataatcaaccaacgtcgactataacccctagccttccaagctaacgatgcgggttcgattcccgctacccgctccattctgtataaaataactattctatttgtctagacatggtagaggcctgtattcaacctttttcgtccaccggtttccagcgctccagagcggagtagagcagtttggtagctcacgaggctcataaccttgaggtcacgggttcgattcccgtctccgcacttagcagtctgtataaaataactattctatttgtctagacatggtagagggctgggtggttgggcggtatccaaccctttttattcattagttcccgaccctataaggccaaattgagcaggttgcgaagtaacttgctaccacaagaggaactctcaaggccccctccctaccttgcagaaaag

SEQ ID NO: 5710 - DNA, 675 bp, Oryza sativa
  ref <308>: DATABASE ACCESSION NUMBER: AK062878
  ref <309>: DATABASE ENTRY DATE: 2001-12-06
attggcacgagctcccccttgagatgcatggccatcaccttgctggtgctgccgacgaggctcccgccgatgaacaccgccggcacggcgggcccgccgcggccgccggagccgtagagcctcctggcgagctccctctccatctccttcccgagcggctccctgtcgagctcgtgcacggcggcgctgacggcgagctcgccgagcagcgtcgtcaccgcggtgcacatgcagcagccgctcttggtgaacaccaccaccgccctctccgacgccagcctcgccaccatctccgccattgttcgattagctaccttgcttctggaaggttctagaggcttcttctgtctagctttgcttgcttgctttgtgagcttgttgatgatttgtgttgtggtgtgcatggtttcttccttatttatagttgatcgatcaatggctgtcagattatcagtttagttgtcgcataatatagctgtcagaatctgcagatgaaatgcatgtttgctaatcgacgcgcacactgaattgaaatcgatcgtgaaaaagtgtggcgatagagattgcgcgtgtgcactggattctactagataattgttccaggccatgctagcttgtttttatgtatcgcatcagcgaatcggaataacacctaatcgtgatttgacttgtgag

SEQ ID NO: 5711 - DNA, 410 bp, Oryza sativa
  ref <308>: DATABASE ACCESSION NUMBER: AK062879
  ref <309>: DATABASE ENTRY DATE: 2001-12-06
atgatgctctcgcctctcgtttttgcatcgtcaaagccccaggcggcacggcgccgtcaggagatcggcgatgcccaaggcggcgctaggagctccagccaggctctcgacggtggcgcttatatcagggtgatgctcttgccagcggcagttaggatcttaatgaaatctcaagaggcaaagatcaggggtccggcgaagctctcggcggtggtggtcagaagctcggtgatgccccccagctgcgctcatgggctactgggctagaagatgctgccagttgcacagctgacttcccgtcctttaatttcagcgaagctcaatagctcacccacctatttctttcgtggtacaaatatactggtgttgatttttggtggaaaaaaacttcgttgttactcttgcttact

SEQ ID NO: 5712 - DNA, 597 bp, Oryza sativa
  ref <308>: DATABASE ACCESSION NUMBER: AK062880
  ref <309>: DATABASE ENTRY DATE: 2001-12-06
gcacagatcaacaccggcaaccgactaactctgtctgaaggaagctaagattattaatcagtgagtagctagccatggctgaggagaagaagcaccaccacctgttccaccacaagaaggacggggaggaggagagctccggcgtggtggactacgacaaggagaagaagcaccacaagcacctcgagcagctcggcggcctcggcgccatcgccgccggcgcctacgctctccacgagaagcaccaggcgaagaaggacacggagaacgcgcacgggcacaaggtgaaggaggaggtggcggcggtggccgcgctgggcgccgcggggttcgccttccacgagcaccacgagaagaaggacgccaagaagcacgccgccgaccaatactagatcgatcccgatcgaatgaacgcaagaacgaacggtttatatgcttaattactttctccccataattacatgtatgcatgtggttgatggcttaatttgcttcttcttgttcgtcgtcatacgtcgtcgcttttacttcgtgttcatgtacattaattctgtatccgcactgagtattaaataagtgcgtttgtgctgcacacag

SEQ ID NO: 5713 - DNA, 587 bp, Oryza sativa
  ref <308>: DATABASE ACCESSION NUMBER: AK062881
  ref <309>: DATABASE ENTRY DATE: 2001-12-06
ctgagcactgactaccgaggcaccgagtgtgagaggcaacggcggtcagggagcaggcgtggttcgtcggcgagcagctgcgggcaacggtgccttggcgtcacgcatccgccgtcactcacctcaagcttgcgggctctgcgaccaccctctcatagtcataggccacagaaggtgtagtagtacttcatacatttcgagcagtttctttcagattgtttgtttttgagcttctaattttgggatgcattagatagtgatgaaagcctaagagtcggtaatatgacttattggaattttagtgttggtactcacagtcagaacatactcctattttgcatcacatttgccttgtgcgtgctgctggtctgttccactcgtgaacatcagacgcgaagattatagatccacccctgatttgaaggtgttcacagattcaggtactgccaattgcctggatgaacaccagcccatttgctccttttccccttgcgttattttccctgtattttactagctgccgtagctggaacacaattccctttcaagatgtcatttatggaatataattcatttttaagatgccg

SEQ ID NO: 5714 - DNA, 834 bp, Oryza sativa
  ref <308>: DATABASE ACCESSION NUMBER: AK062882
  ref <309>: DATABASE ENTRY DATE: 2001-12-06
acttcaaactcacaccgagacgagagctcagcagccagcagcgagagaacacaaactcacatgaccaaccggatctccgccatgggaggcaaccaggagtacatgatccgattcgacggccacatcgacgatgcctcgccgagctccgccactgcagagccaccgccgccgcggcggcggctggcgccgcggcggggcagaggaggaggaggaagaagaagaacaagtaccgcggcgtgcggcagcggccatgggggaagtgggctgcggagatccgcgaccctcgccgagcggtgcgcaagtggctggggacgttcgacaccgccgaggaggccgccagggcgtacgaccgcgccgccgtcgagttccgcggcccgcgcgccaagctcaacttcccgttccccgagcagctctccgcgcacgacgacagcaatggcgacgccagcgccgccgccaagtccgacacattgtctccgtcgccgcgcagcgcagacgccgacgagcaagtagagcacacgcggtggccgcagggaggaggaggcggcggcggcggcggcggcggcgagacaggggaccagctctgggaaggcttgcaagacctgatgcagctggacgaaggcgggctcagctggttcccacagtcgtcagattcttggaattgaacgttgtgattagatcccagccgttggaatagcttgaaacaaagaaggcagattaactagagttttttttttctccttttctttttctattttctattggctctggtgtactaattgaacaaagcagagtttgtaaattatccatagagttgactactaaactgtattgaac

SEQ ID NO: 5715 - DNA, 872 bp, Oryza sativa
  ref <308>: DATABASE ACCESSION NUMBER: AK062883
  ref <309>: DATABASE ENTRY DATE: 2001-12-06
gtcaagatcaagcacctcctccacgccttcgtcctcaagcacggcggccgcctcgccgccgctctcggcggcgcaaaggcgctgctcctcaccattgccgcccggggcagcattgccgggctgaggaacaagatcaggaggaggagggggaggaacaccaagaaaccacggtgccgcggcagcggcggcgatgccatgatgacaatgcagctcaagctactgcttccggccgccgtcgccgtgccgccgccgtcagagatcgccggcggcggcgttgagccgttcgacgccgagctggcctactacgactcgtcgtggaacaccatgatccccgcggaggagcagctgctgcggccgatcaccggctacctcagctggcctgagcaggaggccgaggaagacgacgatcagggtgaggaggaggaggatgagaagaacgagatcgacaggctcgcagacaagttcatagaaaggtgccatgagaggtttattctggaaaagcaggagtcctacaggaggttccatgagatgctagccaggagcttgtaggcacagctcgatcagattaattcttttggtggtttaatttgattttgattagtgattaattcttttgttcacattttgttcatgtgggagtagctaattagtcatggtttaacttgtaagagctcatgaattcagtggttgctggtggagatcgatcactgatcactaggattttaatttaatttcctcccctgaagagtccttgtttttgttcactttcttggtttttaagttcaggattaagggttcttcttagtccatgaatgttcatgtaactttttttttctctcccaggaattagctaatgaaccatcaggttactc

SEQ ID NO: 5716 - DNA, 539 bp, Oryza sativa
  ref <308>: DATABASE ACCESSION NUMBER: AK062884
  ref <309>: DATABASE ENTRY DATE: 2001-12-06
aagttcgttgctaggttgcatctgctatttttttgcccccaatttttgatggttctaccaatatccgaagcctcaaaaccctatctttgtcactctcctgcttgattctgcctacgcatccgaatcttggccgctttgtaagctgaatgtcgcctgggttttctcgagcggagtaactgggtttggatctttgttcttcttttggtcgccattttggagttgaatctcttcaccgcgtcggacttcttccctctcctggggattctttgtgccgcaagttcttgaatgcagtgtcactcatccacaaatggtgatgcttgtttgctgcggacaaccggaagaagcagaattcggccgatatagtaccaaattgcaataagaaaatgcatccatattcacttaaaagttccaagggagcaccgtttccaccgcgaccgattcttgtcttcctcattgcaatatttggattctatgtatgctacatctcctttaaccagataacactagaaaataagttggcaatgagaatcgcaagcgct

SEQ ID NO: 5717 - DNA, 493 bp, Oryza sativa
  ref <308>: DATABASE ACCESSION NUMBER: AK062885
  ref <309>: DATABASE ENTRY DATE: 2001-12-06
attttcgattcctgtggagccgttcaaaagccgagaagcaagaatccagcaccatggttgcctctaagaagacgaagaagaccaccgagaacatcaactcgcgtctgcagttggtcatgcgctcgggtaaggtcgcgcttggctacaagcagaccatgaagagcctccgctccaccaaggccaagctcgtgctcatcgccgccaacacgccgccgctcgtcaagtcggaggtcgagtactactcgatgctcgccaagacgcccgtgcaccactttgccggcagcaacaacgacctcggcacggcctgcggcaagtacttccgcgtcggcgtcatgacgatccttgacgccggtgactcggacatcttgcgctcggcgtcggagtaaactctcggttccttctttagctcgagggatttgctgcttttttctagtcgtgcggcagtgccgctcgcggttaaaaagcggattcaatcaagtctaacttctgaggc

SEQ ID NO: 5718 - DNA, 794 bp, Oryza sativa
  ref <308>: DATABASE ACCESSION NUMBER: AK062886
  ref <309>: DATABASE ENTRY DATE: 2001-12-06
gcagagtcacagagaggagtaaataaatactcacgaaagaaagagttcagagaaaaaaaaaagttgaaacgaaagcgaaacagtagctctctcgccgagacgacgccgctgtctccagaagctacgagcatctagagcggcaatggatcgggtcgaggaaaaggaggggaaccgattccaagaaccagcatcggatcggtgcgaagacaacgaagataaggagcaggacaactctgaagaatcatcgtcggtggaccagcgcaaggaggaggaagaagaagaaaaggagggctgtgaggaggccacgccagcggcagcggcggcggcggcggcgccgtcattcttcgcgcacccttgctcgctgctgcagtacatagcccgggtctgcgcctgctgcctcggcctcagcgattctttctgcgacccaaaggcaagctctgttcttgtccctgaacctgaacctgcagctgccgacccgtctcaagaaggagaagaggacatgaagagcagttatttctacatgcaggaggcgaccactcgggtgcgggcagcgcggctaaggccgaagccgccgggcaatccgagagaagggagcggcggcaatggaggacaccatcactaggcagcctgcttcgatcgtcgtcttcagtcttcagttgagctgtgtctacttgttctaagcggcgtgcttgtataaaaatgtggccgaacaagttctactagtttacgtggacttttgaggatctgaactttcagtgaaaacttgttcgagtgtttaattaagtcttttctgt

SEQ ID NO: 5719 - DNA, 1302 bp, Oryza sativa
  ref <308>: DATABASE ACCESSION NUMBER: AK062887
  ref <309>: DATABASE ENTRY DATE: 2001-12-06
aatcacaaaaacacaaacgcgacaacgcagcagcaaaaccgcgagacacatgacgacggcgacgacgacgacgaccttgccggcggcggcggcgctgctgctgctgctgctgtcggcggcggcgcagctgtgctcggcgtgcccgccggcggcgagccagacggcggagaacaacccgcggctgcagcgggcgtacgtggcgctgcaggcgctgcggcggcgcgtcaccgacgaccccaagaacctcaccggcgggtggtgcggccccgacgtgtgccgctacttcggcgtctactgcgccgccgcgccggacgacccgtgcgccgccaccgtcgccggcatcgacctcaaccacggcgacctcgccgccaccctccccgacgagctcggcctcctcaccgacctcgccgtgctccacctcaactccaaccgcttctccggcgcgctccccgacaccctccccaagctctccctcctccacgagctcgacgtcagcaacaaccgcctcgccggcggcttcccggaccacatcctctgcctccccaacgtcaagtacgtcgacctccgcttcaacaacttctgcggcgaggtcccgccggcgatcttcgacaagaagatcgacgcgctcttcctcaacgacaaccacttcgacttcgagctcccggccaacctcggcaactcgccggcgtcggtcatcgtgctcgccaacatcaagctgaggggttgcatcccctccagcgtcgggaggatggcggcgacgctgaacgagctcgtcgtgctcaactccggcgtgcggtcctgcatcccgccggagatcggccacctcggggagctcaccgtgctcgacgtcagcaacaaccagctgcaggggacgctgccggagtccatggcgtggatgcggtcgctggagcagctcgacgtcgcgcgcaacgagctcgccggccacatcccggaggggatctgcgcgctgccgcggctcaggaacttcacctactcatacaactacttctgcggcgagaagtgaaattcgttggtgaattattcctacacacaaaaatcagtcaatcactcaatcaagcatcgtatatatatacactgtaattttttttcttcttcttattctctttggattttttttctctttttttgttttctttttctttttcacagagaggttggtaattaataatgggatttgtaggaagagtacatgatacattacagtatatttgtgacttactgatcattgtttgtttgtctgtttgttgggtattttcgtatatactatagtagttaattagt

SEQ ID NO: 5720 - DNA, 685 bp, Oryza sativa
  ref <308>: DATABASE ACCESSION NUMBER: AK062888
  ref <309>: DATABASE ENTRY DATE: 2001-12-06
ctgcaggcaaagcaaggctccttccattccgtcagattcaatatcgtcacaggcatgtcatgcacactcagctctccatctccatcggtgattcatcagaggagttgagtgagctgatacagtgcatctcgtgtttagtcatctccagtccacaccacaagcagcagcagctacccggcaaaaacaagcagcagcagcagctagtgattgatgaagaagagaacagaggctggctggttggatttcagcataagcttgctgattgctgcctacatttgcctaaccaacagaccttctaagcctgccatgtggcccactcgccttgccgggcccacctgtcagcgagacactgtgcagttaacaaccccctctcctccatttgcatctagattgctagcaacatgattgatgtctgacctaatggcaaggtattactctacattaggagaagaatggaacttaattatgcatggatcttctctacccttcatccagccctaccaatctgttttgtttttcatgtggtcctatgtatctgtgatatgcatgctactggtaatagtgtggggggaaaaaaagaaaagaagctgctcatctcagtggtgagaaaacacattgatgggcatatccactatgcacttgttgtattcattgcaaatgatgggcctgtaaaagccatcttttc

SEQ ID NO: 5721 - DNA, 694 bp, Oryza sativa
  ref <308>: DATABASE ACCESSION NUMBER: AK062889
  ref <309>: DATABASE ENTRY DATE: 2001-12-06
gtgcccaaactaaacgtgacactgacacgcacgttttgccgtggtgtgtggctatgtgcagtgttccagtacagcatgatgcacacggtggcggaggtgagctcggctgactacagcgcgtgctccgccagcaactcgatccagtcctacagcgaccagaacaccaagatcgcgctcaccaagcccggcacccgctacttcatctgcggcaccagcggccactgctccggcggcatgaagctcgccgtcacggtctccgcggcggccgccaccacccccaccccgacggcgtcgtcgtccccgccgtccaccgcgacgcccgccacgccgtcatcggaccccggcatggacacgccctcgtcgacgccggacgcgaccacgacgccgacgacgacgacgacgaagtcgacgggcagcaccggcggggccagcggcagcgaggcccgttcggtgatgggcctgctggtcggggccgtcggcctcgccatgatgggctaggctaggcaagaggcagtgctgctcatcttcatccagttcggctattatttctccgcgacgtttaatttttccttattagtttacgcgctccgtgaactcgtctttgtattgtactactacgaccgcgatttcgtattggaactttgattactccctttgcaaaaatactccgtaatattagcactatttgatggtg

SEQ ID NO: 5722 - DNA, 761 bp, Oryza sativa
  ref <308>: DATABASE ACCESSION NUMBER: AK062890
  ref <309>: DATABASE ENTRY DATE: 2001-12-06
gtgctcgccaaaagagaaggggaaggaaagccatggcggccacgagctccacctccacggcgctcttctcgctggccatcccttcctcccgcgtcgtctccacccgaggccaccgcaaggctagctctggcagtggccccttccgggcggcccgcatcaggtgctccaacgccgcctcgccgaacgcgtccgccggagccgcctccgcggaggaggcagcgccgccgcccaagccccaaatcgacctcgagttcgtcggaccgaaggcggatgccgatgggtcgttcccggtggaccgggcggcggcgggcagcggcgagaagctcctccgggacgtcatggtcgagaacaagatcgagctctacgcggcatatgggaaggtgatgaactgcggcggcggcggcagctgcggcacttgcatcgtcgagatagttgatggcaaggagctcctgaatgaaagaacaaacactgagaaccggtatctgaagaagaaaccggagtcatggaggcttgcttgtcagactattgttggaaacaaagaaaattccggcaaggttgtcgtccaacgtctgccccagtggaaaaaatgattgtagtgcacacgtgatgcactaactgcatgtgatcagcgatcaagttgtactacctgctatgcactgttgaacacggaagcatgcaatgatttttctcctggaatttattggcaatatgtaaaaattataccatatcattgaaatttacatttacttcggtagaaaaat

SEQ ID NO: 5723 - DNA, 749 bp, Oryza sativa
  ref <308>: DATABASE ACCESSION NUMBER: AK062891
  ref <309>: DATABASE ENTRY DATE: 2001-12-06
gtaaccccctctcgaagcgataagccccgtgggagagacgagcgcgcgctccgctccgagcagaaatggcggcgaggttgtgggcggcggcggtggcgccggcgaccttaaaccctcctctcctcactctctccgcctcctcctcgccgtcgtcttctcgcctccggcgttcggttctcggacgcctgcgcagccgcgccccgcgccctgccgatttcgtgtgccgccgcgccaagaacgcggcgtacgacgactacaagttcccggaccccatcccggagttcgccgcgcaggagacgagcaagttcaaggagcacatgatgtggcggctggagcagaagaaggatgactacttcggggagcacgtggaggaaatcgtcgacgtctgcaccgagatactaggaactttcttggagcatgattattgcggacctgggactctcctagttcacccattcttggacatgaagggtgagatcaaagagagggggcttcctggggcacctcaggctgcgcgtgcagcgattgcatgggctgagaagaatattgacaaggactggaaggcgtggaccggagaatactaggcctattttttccgccatttcttctgtttgttgtatgatgtatcagcggatgtatcactagttttggtgtttgagtagaggcttgaatctagactagtcatgttatcagatccagaactcacgcaatgcattaattatatcttctgatccgatggatctttggtg

SEQ ID NO: 5724 - DNA, 1015 bp, Oryza sativa
  ref <308>: DATABASE ACCESSION NUMBER: AK062892
  ref <309>: DATABASE ENTRY DATE: 2001-12-06
gaatgatctactaaggctcgtgcggctttcaatggagtctatcagctgctgacatgttcagaatccaggaaaatgacatccctttacaaggtgctgttggatgtgcattccatatttgagtaatgtcccagacttgccagtagcatttggttgaaaagttcaactgtgcgaaattcataggtcttctcatttaagtgtgctggttaatttgtacatgaagtgtttgtcttatcttctattccggaggcctgtttttacccattgctagcatctagttggatggttttatccatgagggaggttgctgaagatgtgctttgcagattgcactgatcaacttgattttgggcaagactgcctagttacagactgcacttgataagcttatacacaatgctactggacagcagctcctttgtagataatcttctttcctccatgctgtaaatgatgtattttcgtcatggagttgacttatggttgaatagtatcatatgttcctttgagaagggcaaaatggtggtttccacttagcaattttgatgcaggtcagaggacaaaagtgttaattagtgtgctaaccaagaaatcagccagtggtgtctctttttcagtgccacttctggataaagttcaagcagatttcaaacaagaaatcacttggaccatcacatgtgtatgaacaatgtacaaagattttcatgtacaataggctaactcgttccttgactatcagtacgacgactataaccagcgcgtgtacatgtatatatacccgaatggtcgaagcgtttgtcttgcgtgctggtacactcgtgacaccaatgtacttttagtccacatttttcttctggcaaattttgttagtttcacattagtcgttgagatgtgatagaacttatctggactgagaatgtgttgcagaatgcaaaataagctctgtattctgtactgtttgtatcgcgaatcgcatcttcagttcagttgagtaaagtgatgctaattttagttatgc

SEQ ID NO: 5725 - DNA, 1108 bp, Oryza sativa
  ref <308>: DATABASE ACCESSION NUMBER: AK062893
  ref <309>: DATABASE ENTRY DATE: 2001-12-06
gatgctcacatatatttatggaaatggaatgcacgcattgtcatttcagatgttgatggaactatcaccaagtctgatgttcttggccagttcatgccgctggttggtgttgattggtctcaaaatggtgttgcacatttattttctgcaataaaggaaaatggatatcagttgcttttcttgagtgcgcgtgctatttcacaagctcacctgacaaggcagtttcttttcaaccttaagcaggatggaaaagctcttcctgatggccctgttgtgatatctcctgatgggctatttccatcactttacagagaagttatcagacgagctcctcacgaattcaagatctcatgcctaggggctatcaaagcactatttcctcctgactcaaatccattctatgctggatttggaaatagagatacagatgagcttagttacctcaaggttgggattcctatgggcaaaatttttattataaatcccaagggtgaagttgcggtgaatcgtcgagtagatacaaaatcatacacatccctccatgctcttgtcaatgggatgttccctccgatatcaacgtcatctgagcaggaggactacaatacttggaattactggaaaatgccgttacctgctgttgatatttgaggtatagccgcagtgcacgctatgctgtacaaggtctctggcacgcagcagcggccatgagaaatggcttccatgttgaacaaaagcaccctgagaccaatcgctggttggtgtcatgtggatgctcctgacataaattcttgcgaggctgacactgtacataggatcataatagaaaaacttacaacctgtatgaccaatgagtcggcagaagcagtgttaattagttccttgttactcaattagtcaatctgttgttgtccaacatgagctgcaagcctgcaactgaatatgtgtaatatactgacttgagtgactgaatggaggggaaatctgtgtaggatgttgccctgcaactcacgtcacttctcataagatttcagttctctttttttttaactatgtagttgtgtttacattgtataatttgtacaagttagcagtttaataatgcatttgc

SEQ ID NO: 5726 - DNA, 974 bp, Oryza sativa
  ref <308>: DATABASE ACCESSION NUMBER: AK062894
  ref <309>: DATABASE ENTRY DATE: 2001-12-06
acgccaccaccaccaacctcctccgccgcgccgctctcccgccatgaagcagctccacaagtcgtcccccacccacgcgccggcggcggcgcacgccccggcgtccaaggcgtccaaggcgtcccgccccgggccccgatcctgggtcggctacctcctccgcgagcagcgcctcctcttcgtcctcctcggcgccctgatcgcctcctccttcttcctcctccgcccctacctcttctccctctccccgtcctcccacgtccccgaccgccgcccgctcttctccttcgcctcgcacacctcgtcggcgtcgggcgtgccccccgggttccgcccgccgccgcgccgcgtcgtcgtcaccggaggggccgggttcgttggcagccacctcgtcgacaggctgctggagcaaggggacagcgtgatcgtggtggacaacttcttcaccgggaggaaggacaacgtcgcgcaccacctccggaaccccaggttcgagctgctccgccacgatgtcgtcgagcccatcctgctcgaggtggaccggatctatcacctcgcgtgccccgcgtcccctgtgcactacaagtacaaccccatcaagacgatcatatccttctcgtcccggatctgcacatacctttgatttgcttacattcatgtcgacttgatttgatcttctcctttatttttttttattgggttggtgggtgggagatatgcttgaagcaaactagcacataagtggtccagatcaagctcgtatgctgaaacttttggtggttggtttggattcaagtgaaccctggatcctaaatttgcctccttttttcaatatcaagtggttgttctgttgagatcttaggaagacgcgatagatttgttagttgtgatgcacaggtggtaaatgtggggtagccggttctactgtagtgccatttatctacaggattttaacagagagtagtagttgttcc

SEQ ID NO: 5727 - DNA, 700 bp, Oryza sativa
  ref <308>: DATABASE ACCESSION NUMBER: AK062895
  ref <309>: DATABASE ENTRY DATE: 2001-12-06
gtgtcataaattctcctctgttacccatcgtacgtagaccaacatccccgggggtattttactatactagtagaggctattgcatgggtgatcactgatcagaattgcgtctcgctgctgctgctgttgatgctgctccatatctgccatggccgattgcttttgaccagagattccatggcggaaaggccattgcttcccttggccccttgggtggaggaagggtgcggcatggcgacggtggacgacatcgcagcggcggtgcaccacgtgctctgcatcatcgacgccgaggcggcgtcgcagatgctgctcgccggggaggcctccggttagcgtggccacctagcaagataggcgcgcggcggcggccggtgtaacaaatctgtaaagtgtagcggatctcgatcgatctctcccctcccgtaggcgagtcgggtgatttgggggtcggtggcgtagggcaaaagcccgtgtaagtgcaataacatgcggcccgttgtaatcctagccggttttttttttttttgccgtcgagtgtgtgcgttttgcggttttctcggcggaagtcgacgtggaatccgggggagtgagacggtgaagagagggtttttttatccttgcttgtccctccatgttgggccgactaggtacacagcctatgggcttgagattagcacatggtccggcccaattgaac

SEQ ID NO: 5728 - DNA, 1030 bp, Oryza sativa
  ref <308>: DATABASE ACCESSION NUMBER: AK062896
  ref <309>: DATABASE ENTRY DATE: 2001-12-06
gagatggtgctgttgcatgccatgaaccaggcagcagcagctgcacatatgcagtgctgctagctaagcttagctagctgatcgctgtacgtacatgtgtccacacagtgtcaatcagctggcccttctgcctaccttatgtgtgcctgactgcctctcggtcctcgggcatgcagtaacgtagtaccagaggcgtacagctccctcgttttcgtcgttgcagcggcagcgatgaggggggcagcgtacttgcatatattcaccaatgtgcataggttctgagggtactttaccctgctcccagcccacggaacgacgattgggaagcctactttgtactagcgcactgcgccccatttccatgtagccatagagatttattgttccagcctgttgttaccaatggcgatatgcagttgcagatgccaagtctatcacagatagcatggttgataatgacaagtctgtcgcagatagcatgattgattattgcaatggttgattgacaatggcaatgattgaaaatcacagatagcatggttgatgctgatctaaaagtgctgttgacccttgattgcattgttttacttggcgaacttgtaaagctagctctattaacctgggaggtcctgcttacattgttctgatctgttggtgctctatctgtcaggcaaataaaggtgtatctatacagttctgttattgactgcggctgcagctttgctcgtgaagcgaagaatgaaagcggcccagtggattgcagacggcagaattcctggctgcattattgttcggcctctgtcttctcgtccagtccaagagctttgcttgtgtgttgcatcctgctgctaatcaatctctcgtgatccacgcacgcggcgtctcttggccgtggccggggccctcccctcttgatttctgggagccgtcagatctgagcgattggacgatcagtactagcaacaaatttccagtcgcgactctttcagaaaaagaaaaaggattcagtcatcaatcactagagagaagt

SEQ ID NO: 5729 - DNA, 400 bp, Oryza sativa
  ref <308>: DATABASE ACCESSION NUMBER: AK062897
  ref <309>: DATABASE ENTRY DATE: 2001-12-06
agcacaatttgcatttcgcacgcagagaagagaaaaaaaaagggaaaaagaaaatgtaccaggcgagctcgtgcccattctgaaggaggccggtgcactctggctctgaatcaacaacgcagtagcgatcaagctgttttcctttttttttttctttttctctcctattaggttcaaatcatctgatgcttttagcttcttttttttttcatggcattaataatggtgttgtaattagataggacgaaaaacttgaattcttttaggattttaataaggatgattaggagaagtgtgtgtccgttaacgctactgtacttaattaccttgtaactagtacctatacctattttcgaccatgtaaatacgaatgggagaaatgaagagaaatatttgcggt

SEQ ID NO: 5730 - DNA, 586 bp, Oryza sativa
  ref <308>: DATABASE ACCESSION NUMBER: AK062898
  ref <309>: DATABASE ENTRY DATE: 2001-12-06
attcacaaacaagatactagcaatctaagcatccaatttcagatcaaccagactgcatctagtttagccaaaaagctagcaaatcaaccatgatcagtgcaaagaagcttgctcagttggccaagaagttgcagatgaggatggcatcagccggtggtagccgacagaaggcggtggtcgccgccgatgattgctgcagcacggcgtctctatccctcgccggcaagggccactgcgcggtgtacaccgccgacggcgcgcggttcgaggtgccattgccgtacctaggcacgccgctcttcggcgagctcctgaccatgtcccgggaggagttcggcttcgccggcgacgacggcaggatcacgttgccgtgcgatgcgtcggtgatggagtacgtcatgtgcttgcttagcagagatgcctctgaagaggtcgagagggcgttcttgagctccatggcgaggccctgccgcaatatcggagtaatcagccaccaatttgctgtttgtacttagctcattagctcctagctcctgatgtaaactcatccggatgataatacaaaagtagcacaattttcctgtcg

SEQ ID NO: 5731 - DNA, 817 bp, Oryza sativa
  ref <308>: DATABASE ACCESSION NUMBER: AK104946
  ref <309>: DATABASE ENTRY DATE: 2002-08-28
ggactgtttttgctgccgctgctacttcttccactagggttcgtcttgctgctccctccactgctcgcctcgcctccgccaccatctgaaatcgagtgagtgggagctaaggcggcggccccgtcgagatggcgctcgtattgcatactttcgatggaaacaagaatgcattcaaggcactcattgctgccgagtactctggtgtcaaggttgagttggcaaagaactttcagatgggtgtctccaacaagactcctgagtatctcaagatgaatcctattgggaaggtccctattctagagactcctgatggtcctgtttttgaaagcaatgcgattgcacgatatgttactcgctcgaagtctgacaacccactctatgggtcttcactgattgaatatgcccacattgagcagtggattgacttttcagccacagaggttgatgctaatactggaaaatggctcttcccacgtcttggatttgctccttatgttgctgtcagtgaggaagcagctattgctgctttgaagagatcattgggtgccctcaacacacaccttgcatcaaacacataccttgttggccattcagtgactcttgctgatattgtgatgacatgcaacctctacatgggctttgctcggatcatgaccaagaattttacttctgagttccctcatgttgagaggtacttctggaccatggttaaccagccaaactttaagaaagtcatgggtgatgtgaagcaggcagattctgtcccacaagttcaaaagaaggctgcagcaccaaaggagcagaagccaaaaaaaac

SEQ ID NO: 5732 - DNA, 863 bp, Oryza sativa
  ref <308>: DATABASE ACCESSION NUMBER: AK062899
  ref <309>: DATABASE ENTRY DATE: 2001-12-06
gaaatgccactcttcgcttccaaattcgcgccgctgatcccccggctccgccgcctctccaccgcggcggcggcggcgacggcgacggccgccggggaggacccgaagctgtcgcgcatagcggaccagctcctggaactctcccctgccgagctcgacgactactcggcgctcctgcggctcaagctccgcctctcgctcacgtcgagcgccgcatcgggggccgcggccactggcgcggccggagacgccgcctccggctccgccggcgcggaggaggccgcggcggtgaagacgtcgttcgatgtcaagatcgagaagtacgaggcggcggcgaagataaagatcatcaaggaggtgcgcgcggtgacggacctggggctgaaggaggcgaaggagctcgtggagaaggcgccggtcgtggtgcgatccgggcttcccaaggaggaggccgaggcgctcgccgccaagctcaaggccgccggcgccgccgtcgcgctcgagtgatcccgagcggaagaacgggttcgccctttttatttttggttcctactgttatccttagatcgaagatgctacgcttgtgggtgccttggtttgtttggattgaaattcgatgcaattggggcaattgatcaggtgtataagaagatgcaggtcttgattgcattgttgtagcttgcctagttactgatttatcttgttgaatcacgcaataatgtctattttagtggtctgggatcactggatggtatatctgattagctgaattgacttgtctgggggggcttacagagatacaattgtagttggctctactgtatcgagtgattcgcatatggttagcttcagttatttgttgc

SEQ ID NO: 5733 - DNA, 1193 bp, Oryza sativa
  ref <308>: DATABASE ACCESSION NUMBER: AK062900
  ref <309>: DATABASE ENTRY DATE: 2001-12-06
accactcagcatcagaacacaagcaaatccaacacttcttccttgagctcctttccatcgtcaacttccttagctggttacacttcgttgtccaatcgaaaagcatagttagttccaaaatggctgcaaaggcagttatgcttgcactgcttgtgcttgtgagcacggctcaggtatccatgggtgcaaggcggcgcatggagctgtacaagccagacccggctgacatgctctcctaccacagcggcgccgtgctccagggcaacatcccggtgtccatctactggtacggcaagttcacgccggcgcagaagtcgatactcttcgacttcctcctgtcgctctcggtggcgccctacgccgccgcgccgtccgttgcgcagtggtggagcagcatcgacgagctctacttatccaaggcggtgcaaaccaactccaacggccagagcaagaaaacccaggttctggtcgcgagccaagtgtccgacatcaactgctccatgggcaagtcgctcaccctggcgcaagtcgccgccctagcggcgcaggccaagcccaagaagggcggcattgctctcgttttcacggcgcaggacgtgaccgtggagggcttcggcatgagccggtgcggcctgcacggctccgacgccaagtccggcaccgcctacatctgggtcggcaacccggcgacgcagtgccccggcgagtgcgcgtggccgttccaccagcccatgtacggcccgcagggcgcgccgctcgtggcgcccaacggcgacatcggggcggacggcatggtgatgaacctcgccagcatgctcgccggcacggtgaccaacccgttcggcgacgggtactaccagggcagcagggacgcgccgctggaggccgccacggcgtgcccgggagtcttcgggagcggcgcgtaccctggattcgccggtgagctgaaggtggatcaggcgaccggggcaagctataacgccaatggcgcgaacgggaggaaatacctgcttcccgcgctctacaacccctccactggtacatgcaacacgctggtgtagagcaaaatgcaacagatggcgatttttttgttgatgtatatacggatcgtgtgtaattctttcatttgtggcagtcatgtaagcagttggcaataatgctgatcggagaaatgaaagtgagtttccggaacc

SEQ ID NO: 5734 - DNA, 572 bp, Oryza sativa
  ref <308>: DATABASE ACCESSION NUMBER: AK062901
  ref <309>: DATABASE ENTRY DATE: 2001-12-06
ctacctttggtccgattcctctttcccctcttcgtcgtctccaatctcccatcgaccgatcggcggcgcccggagcaaacgaccgccggcgacgatgatctaccgcaactggtcgctgctctcctccaccgtcgtcatctggggcggcgtcgccaccgccggcctcgccgggatcttcctcttcggcggcaaggagaaattccagaactatctttgccgtgaaggtgagaggcttaggcaacaggacagagcagcaatgggcaagaactagctgaagacctaagataatgcactagaacaaatttcctcctagagagaaccccagtggcgttggctcactcaaactatctccacaataaattgtgatgcctggaaggaactcttatctcttcttctctagtttctggctgttgttaatcatctgtataaaatggttgacgatatcgttttagccgctgatagccatgtttgtcaaagctttttacttgtttttatcaacttgtgtgacatgtcgatgtccaacttgtttgtgggtactcaataaaaggttgtttcagttgacgggacatcat

SEQ ID NO: 5735 - DNA, 780 bp, Oryza sativa
  ref <308>: DATABASE ACCESSION NUMBER: AK062902
  ref <309>: DATABASE ENTRY DATE: 2001-12-06
taaaacaaagcattgcgatggtcctcgcggatgctgacgcaatgtgatttctgcccagtgctctgaatgtcaaagtgaagaaattcaaccaagcgcgggtaaacggcgggagtaactatgactctcttaaggtagccaaatgcctcgtcatctaattagtgacgcgcatgaatggattatcgagattcccactgtccctgtctactatccagcgaaaccacagccaagggaacgggcttggcggaatcagcggggaaagaagaccctgttgagcttgactctagtccgactttgtgaaatgacttgagaggtgtaggataagtgggagccctcgggcgcaagtgaaataccactactttttggatggatatttaccttttggggtcaattcctatgcgcgcaataatgatgaggaactcagtgtcaaggatgaggaagatatgctaagacgtatgtacaagggcctagataagccaggcggattcaagagacccatccctaaatttgcaacacgaattgtgtggaaaactgaggaggaagctggtgtggaagctggttgaagctggaaccttgcatttttctactagatgtgttaggcaaatgtgctatcgtatacattcatgtaacacaagttaaacttatcaccatcgaacttgtccaccagtgccccagcagtagaagcgcatcttatcacaattggtggtaaatttagtggaatggatgaacatccacgctaatggttgctgaaagctgaaatgacaatttgcataacatttcagt

SEQ ID NO: 5736 - DNA, 640 bp, Oryza sativa
  ref <308>: DATABASE ACCESSION NUMBER: AK062903
  ref <309>: DATABASE ENTRY DATE: 2001-12-06
gacgaccaacaccaaacaaaccctagctcaccggcgtcggcggcggcggaaggcggtcgccggcacgccacagcaaaggcaaacccgcagcagcacgaacaaacaggcgagcgatgggaggaggcgaggccaccagcggaggaggaggagggttccgcgcgcgggtggagcactacctgtacagcggcgagaagaagcacgtcgtcgccggcatcgccatcttcgccgccatcttcggcgtcccctggtacctcatgacccgaggggcaaagcatcagtcgcaccaagattacatggaaagagctaacaaggcgaggtcggagaggctttcttctggacaggcatcttcgccaaaagagtgaaacagtaatcccctaactcagatttgcaaaacctcaggccgacacagctatgataatctgagaattcgatcctgttgtgaaataagcagaccatctcgattctcatctttcagttgtaggaaacatgggttgaatgtaatacgtcacatgaaattttgtcaaatgcagctagctctctttacattccgcactattctacaaggagatgattgacaaagacaaacacctgatttatttgtctcaaatgacgattctagagccaattaccttgacttgag

SEQ ID NO: 5737 - DNA, 398 bp, Oryza sativa
  ref <308>: DATABASE ACCESSION NUMBER: AK062904
  ref <309>: DATABASE ENTRY DATE: 2001-12-06
aacttgcagggagttcaggaatgcagcttccataatggggaactccgcgttgcataagaaaatggagactgcgtccaatgccattaagcgtgacatcgtctttgcagcaagcttgtatgtcacagggatatgatgcatttaaacatgcatcctaaatcctaaatctaggcccgtgatgtttgtaagtagagaaatttcatttctggctggcaaatttatgggcaatcccagcctttaacactgtaacagtccatgagcaactctgcattaccaggcagataggaaattatatggacgtggtagcatctcacagcactgataccatgcaaagaaagattgcccatgcaagactttgtatcagatcattcaactaatcctgatgcgagtgcgcactagct

SEQ ID NO: 5738 - DNA, 679 bp, Oryza sativa
  ref <308>: DATABASE ACCESSION NUMBER: AK062905
  ref <309>: DATABASE ENTRY DATE: 2001-12-06
catcgcatccatggggatccaagaagtgaagaagaggctgcatctccatgtcgaagcccaaccggagagctgcaagaagaaggagcaggccgccgtgtgggtgctcgccggcggcggcggcggcggcggcggcggcggcgagatcacggtgtcgctgaagccggtcaaggtcagccggccacagctcggcgacgaggaggaggaggaggaggtgacgacgccgagaggggaggagtgcagattaccggcggaggcggcgacgtgcccgccggcgcccaagaagccgaggacggcggcggtggcgatcgtcgccggcggcggccggcggtgcaactgctgcgacgacgacggcggcgactcgctggagttcttccgcgtgccggcggatttggaggccgtctttgccaaccgagttgcaaaggcaaattagtagtaattaatttcatagagagataaattcgtcttgaattttaagtgtaatttgatccaagtctagctctgaagatcagtgcaattaatggtgtgtgcatgcatgggtgagtgagtgagagatcagtgcagctgtaaaaaaaagtttctctttgtagcacatgatagtgtgagtgatttccatatgattccatcccttttgattgatcatttcttcaagaattaatcaagaggcatttgtaatttgctc

SEQ ID NO: 5739 - DNA, 756 bp, Oryza sativa
  ref <308>: DATABASE ACCESSION NUMBER: AK062906
  ref <309>: DATABASE ENTRY DATE: 2001-12-06
ctcgagtctcccgtctcctttcccctccttcctcctcccctttcgtcttagcctcagctcgccgcgagacgaatcctcccctcgccgccgccgggtccgatcgacggcggtatcgagggacggagggggcgcgcccgttctctcgccgtacaccgtcgtcgccgaccggctccctcgacggcacggtaaaataaaaaataaaaagcctcctcctcctcctcctcccctatgatggcggatgcggcggcgggggggcgggccgatctggacgccgttgacccgcccgattcggctcggtcgcatccccccgtgcgcgcgtttactgggaggatctgttgtatttggacgttttagactggatcgagtgagggggattttgcggtgttcttgctgtgacgggattcagctatgtaggtgtaggaatcttatgttaacttgttgggtggctctgctgcttctgattctttctgtgaatctggagtaacaaattctttctgtgaatctggagtaacaaggacttgtgctatggccgatctctacttttagtacttcgttatgttctatacggcataggagtccatctctcgatagataagagttctctgattttggatggggatttgcttgatggatccggagtcatataacatgtttgcaaaaaaagaaaaaggaggagtccatctctcgatagataagagttctctgattttggatggggatttgcttgatggatccggagtcatataacatgtttgc

SEQ ID NO: 5740 - DNA, 757 bp, Oryza sativa
  ref <308>: DATABASE ACCESSION NUMBER: AK062907
  ref <309>: DATABASE ENTRY DATE: 2001-12-06
caaatgactgcttgtgtcggacagcagaatgttgagggcaagcggatcccatttggcttcatcgatcgaacgttgccccacttcaccaaattacagtccaacttcaccaagctacaatccttcttcggccaagtacagtccttcccacgcgtactctccaagcagcccaaggctgagcccttatagtcagacttcaccaaattacagcccaacatcgccgacatactcacctacctcaccatcatattcacaaccaagtccgtcatacagcccaacaagcccatacaccacatctggagggcccagcccagattatagcccaacatctccgaattacagccctagcggaagctactcccccactgcaccgggctactcaccatcctccaccggccagcagttctctccccaagctgccgacaaggacaaggagaaggcaaaatgaagccgctgaagaaggatgggtggtgatttgctggggatgaatccgctgcgcgctgcaccgacttttccagtttttgtttggttgatgaattatctcaatagtaagtttccttgtgctgctaatagcagcgagggtctcatgtactcatgtatgacttgtccaccaaagaaaggaccttaacttttacgcatgctttgaagctgctctttttatcataggactcaatgccaatatccatcgagtgccatggctcgatggaattatgctgaagttgtaagactcttgtctgccattagagctaaatcttctctg

SEQ ID NO: 5741 - DNA, 441 bp, Oryza sativa
  ref <308>: DATABASE ACCESSION NUMBER: AK062908
  ref <309>: DATABASE ENTRY DATE: 2001-12-06
ctctcggcttctcctctcctctctctctctctctctctcccgcctctcccatgggcagcgtaggcggcggtctcccacgggcaggaacgcgcggcagcgggagggaggcgacagctgcggtggcagctgcagcgacagcggcaggaagcggtggtggcccggcggcgggacggcggtggtggtccggcggcgggacgagaggcggcggcaccctacctccattggatctggagggagggcatgcggcggcggctcgacggcaggaggaggtggtgtcccggtggcggaaggagtggcagtggtggagccctcctctgaattttgtgaaagattcaatgttagtgaaagattttagtgatgcttttcaatgtttattgttctgtgatttgtttgattggggattgggattgattctagtgatgttagtgatgtttgttgttc

SEQ ID NO: 5742 - DNA, 417 bp, Oryza sativa
  ref <308>: DATABASE ACCESSION NUMBER: AK062909
  ref <309>: DATABASE ENTRY DATE: 2001-12-06
cagatcaatgcaattgcctattcgtcggaacaggtcattcgccaaggacatcgcaggttctcagaaatgaacctgaccaggtgaatcggacattatatactccaccggcggaaggggggaatagcttgccatcatcagaagttaacccccctggtgaaaaataacaaccagcaaaaacagtagagtcctcatattcatgacagatcatgatccactaagctaggaccctgcaactagctgcttgaaatttctgctgttctgtctgctctctgccaggtgaaactacctgtaatattagaaacatcgacacagggggatccgtggattgctgtcataggttagttttggagcggttttgatgtaaatatgagaaaccgttcaggtttcttgtaaagaaaaccacatttgtttgtcatc

SEQ ID NO: 5743 - DNA, 910 bp, Oryza sativa
  ref <308>: DATABASE ACCESSION NUMBER: AK062910
  ref <309>: DATABASE ENTRY DATE: 2001-12-06
aaaaaccctactacttcaatggttcttgccatctgtatctgtactaagactgagttccttcaaaagggctccggtaagcgcaacacaacgcacgggcttctctctgctacactagctctctctctcctgtgcagagctaagcgggaggcattaaccccccgcgtcacgcgcaatgggtgaggcagcggcggacgagcgcggcctcgccgccgccgccgccggggaagacgaggaggagacgtcgccgatcgaggaggtgcggctgacggtgccggccggcgacgacacggcgctgccggtgtggacgttccggatgtggagcatcggcctcctctcctgcgcgctcttgagcttcctcaaccagttcttctcctaccgcaccgagccgctcatcgtgacgcagatcacggtgcaggtggcgtcgctgccggtgggccacttcctggcgcgcgtgctgccgcgccgcgcgttccgcgcccccgcgctgctcggcggcggcgagtggagcctcaacccgggccccttcaacatgaaggagcacgtgctcatctccatcttcgccaacgccggctgcgccttcggcaacggcaacgcctacgccgtcatgatcgtcgacatcatccgcgccttctacaagcgctccatctccttcgtcgccgcctggctcctcatcatcaccacccaggtgcttgggtacgggtgggcggggctgatgcgcaagttcgtggtggagccggcgcacatgtggtggccggggacgctcgtccaggtctcgctcttccggtgagtagctactagctcgcttcaccttcactgctcctgctcgcgttctacttcagtttcttctcctctctttgttaattcttctcaacagaaacggtagtaggttttacgctacgttctttttgcc

SEQ ID NO: 5744 - DNA, 757 bp, Oryza sativa
  ref <308>: DATABASE ACCESSION NUMBER: AK062911
  ref <309>: DATABASE ENTRY DATE: 2001-12-06
acacacaaagcaagaacctcgagctgatctactagctacctagtactctcatcttcttcactagcttttgcttgatcaattgcagcaatggcggcgaaggcagcgctcgttctagcggtgagcctcctggtggtggccgtggcgagcgcctgcacctactgcccggagccgccgacgccgaagccgaagccgccggcgccgaggccgccgacgcccggcggcggcgccgggtcgtgcccgcgcgacgcgctgaagctgcacgtgtgcgccaacgtgctcggcctcgtgaaggccaagatcggcgcggtggcgccgtacgagccccgctgctcgctgctcgacggcctcgtcgacctcgacgccgccgtctgcctctgcaccgccatcaaggccaacgtgctcggcctcaacctcaacatccccatcgacctcagcctcatcctcaacaactgcggcaagatctgcccatccgactaccagtgtgcttaatcacattgggacactgcagccgatcgatcgatcgatcgattgacagtgtgctacacgtcgtctacatgtttttgttggttggtttactgtgagcagtctgaactctctgaactttggaaactgtctgttttgtctttgtttatgcttgcaaagtttaattagttctgggaaaaaaccattggccagtatgtattattacatgtgtaagtgttggttgtgaccccgggtgatcagtttactggtcaatatatatgtattttttgtgctt

SEQ ID NO: 5745 - DNA, 833 bp, Oryza sativa
  ref <308>: DATABASE ACCESSION NUMBER: AK104947
  ref <309>: DATABASE ENTRY DATE: 2002-08-28
agtcagaagctaaggaagaaaaagtatagacacagtgatacaatggcctgcatcaacacattccagagctgctccgtcctcaagggagcaaagatcaatggtaccaagatcggaggagggaggggatcaccaaccttccggtgccgggcatcgacgttcatggacgggagcctccggctagagatcgacgagaaccctgaagccatcatctccggtgagtggccggagaacttctccctgctcagctacgacgatctccgcgcctacctccagtcacaggaggccgctgctcaagccgacaaccagcgtgtggcgctcctgagtgaagccatgtcggcgcctgtgctggtagccactgcccagcagacgctggaggaggttgagtgccactttgagacggtctcaggtctcccagttatagatgccagcctcagatgtgttggagtgatcgtcaagagtgaccgggccagggcttctcatgggtcaaagacgaagattgcagaagtgatgacctctccagccatcactctaccatctgacaaaacagtaatggatgcggcagctctgatgctaaagaagaagatccacagattaccaattgtaaatcaggacagacaagtgataggtatagttacccgtgctgacgttcttcgcgagttggaagccctgctggaggtttagacgtgcagtggtccatatgcttcggccttgttgtatatatgtaaatatatgccatggtgtttttgaatagcaggcatctctaatctgtaagagtgttgtagcgcgaatcaccaagataagcctgagaaaataaccggagagcttttctttgt

SEQ ID NO: 5746 - DNA, 835 bp, Oryza sativa
  ref <308>: DATABASE ACCESSION NUMBER: AK062912
  ref <309>: DATABASE ENTRY DATE: 2001-12-06
atggccgcagccatggccgcggcggtcgccgcccggcttcctccggccgccgctcgccgggcacgtcttgaagccaccaccccgagctctcccttcgcagtcgcagctccccgccgtgtcatggcgccgacgcgccgcccgcgactgggtacgcgcctcgtcgtggtttccgcgcagtccaacttctccagagttgttcaaacagcatggaaggttggtagggatgctgttgaggcaggaactactctagtcccaggttcggttccacggccagttgccaggataggtgttacctttgttgctttgtccattgccctttttcttctcaagtctgttgtctccaccgcattcttcgtattggcaatgatggggcttatatacttgggtttcctggctatgaacccaaaggagggctctagggtggatgaaggagccaattcatctgaagaccctgtggaagaagcccggcgcataatggagaaatacaaataaataatctcggtatgttaaaacaactactgcattcgccacttggaatatatagcttggtctcttgagccatcaatatgttcatagggtgctcattatgcaaagaaagaataggtgtgattttggctcgagagttgaactgtggacatgtatagcaagagagctggtgtacaatatcacagtagtaatttgattccgcatcagtctattgagttgttgtacagttgtattcggttcaactcagggtgccatttgagcttactttagaaatgataattgaattactcaacagaaaattgtaggcacaaattgcctggtgtatcagtaattcgacatttgctgggat

SEQ ID NO: 5747 - DNA, 668 bp, Oryza sativa
  ref <308>: DATABASE ACCESSION NUMBER: AK062913
  ref <309>: DATABASE ENTRY DATE: 2001-12-06
aaaagggtggagaaaccaagagggggcgtcgccggagtcggagtcggagacgtcacggcgagctccgcggcggcgatggagagctccctgggcggctggccgtcctacaacccgcaaaacttcagccaggtcgtccccgccgacccctccgcgcagcccttgaatgtcgtaccagccacttacattgcaacacacaggacggatccacctcccggtcaagtgataacaacagaccccaagaacatcctgttgaggcatttttatcaaaaatccgaggaaaagttgaggccaaagagagctgcaccagacaacctgaccccacagaacaacggcaaacaaccaagaggccctctctctgatggtggtggtagccaggcaactgcaagtggtagaagctaaaacgcagctgttgttctctccggcatctcttgtgctgctgaactgacagcatgcatgtcatactacctgtatgtatgtgtgtgtgcttgttcaggcatatgcttactagtagtgtcatcatctctcttgtgtgattgatcaaaagagctccccatgcatgtacatacaccctcatcctcagtgtcagtgcggcacctttgatacggaactagcactattgcagtcttttatgccgacactagcacaacttgatgaaaccatttttccct

SEQ ID NO: 5748 - DNA, 518 bp, Oryza sativa
  ref <308>: DATABASE ACCESSION NUMBER: AK062914
  ref <309>: DATABASE ENTRY DATE: 2001-12-06
gtaggtgttggggtcggagttgggttgggacccggcggcgtgtccgtttctgggtctggttcagggtctggctcggcggctggggttgggtccacctctggatcgaggtctggctcggtctctgtaggaggggctagttcgtcggctgggtctagcgcaggttcctccgctgggtcaggtggatcaaggacgggatcctctgctggatcttcagctggatctagtggcggatcaggattaggcatcggatttgggcaagggtctggatctgggtctggcttgagcggaaacccttgacattttcaccatgttatttcgttatgatgggttaattagactgcaaaagagtgtttctttctttgttgtgagagagatgcaaaagagtgtttctacacttagaagttttagtaaatcaataagatgtctccactaaacatgcaagatctttggcctccctcttccagctgtaatccgtcagtaaagaacaggagagaaaagaagtagggattcgattagtg

SEQ ID NO: 5749 - DNA, 477 bp, Oryza sativa
  ref <308>: DATABASE ACCESSION NUMBER: AK062915
  ref <309>: DATABASE ENTRY DATE: 2001-12-06
actccatcttgtctctgaatttaactaaattgtcttcagctccgtgcagctgctcgtcctgctcagctcaggagatggtggtgatggggcagctggggaggttcatggacgggatcaagtcgaagcttcgcggcggcggagggaggaagacagggaggaagaaggaggcggcggcgatgatgacgtacgacaagatggacaagacggagagcatgagggtggagatcaggagcaggcaggcgcagaagctcatcgccaagaacctcgtcgccgccgactccatcggccgccgcaacaagcgcttcttcctcgccttctgatttctgattcatcagttcatcaccatcgagaatccaattaagcaaacaaaatatatatttatgttgttatattgatcatcgccaacatcgaaacattcaagcgacagtatttactatgttgttatagatgcggagaatcccatcaaaacagttactg

SEQ ID NO: 5750 - DNA, 590 bp, Oryza sativa
  ref <308>: DATABASE ACCESSION NUMBER: AK062916
  ref <309>: DATABASE ENTRY DATE: 2001-12-06
atcgatcgcagcacggctcagagttgcagacgacgccgagaagacgaagaagaaaaggaaagcggcgggcacgggatggagagcaaggtgaggtgcgtgtggtttctcctggtggttgcggtggtggtggccgccggggtggagaccgtgcgcggcgcgggggagtgcggccgcgtccccgtggaccaggtggcgcttaagctggcgccgtgcgcggcggccacgcagaacccgcgcgccgcggtgccgcccaactgctgcgcgcaggtgcgcagcatcgggcggaaccccaagtgcctgtgcgccgtcatgctgtcgaacaccgcgcggagcgccggcgtcaagcccgccgtggccatgaccatccccaagcgctgcgccatcgccaaccgccccatcggttacaaatgtggcccatacaccctgccatgaggagcaaagggatggaactggaagggcactcgaacactttgactatccgatatatatatatataaactgatgttacctttgtcacgtgaaacttttcataaatctttctaaataacgcagttgtaatgactctgttgaaataaagtacctttatgact

SEQ ID NO: 5751 - DNA, 474 bp, Oryza sativa
  ref <308>: DATABASE ACCESSION NUMBER: AK062917
  ref <309>: DATABASE ENTRY DATE: 2001-12-06
agctcccggcgcgcccacgaacattggctatcccgattctgagagcgacgcgacgaacgccgagcagagcccggctccatacctagttccgatctcgggcccgttggtggcgccgaacccgccgttgcccgagtacctagctcccggcgcgcccacgaacattggctatcccgattctgagagcgacgcgacgaacgccgagcccgccaagactgccgccgagccagtggcgactcccaagcctgcatctgcttaagcgctgacccccacgtctccaccaactccgtctagctctggaaaaggtcgacaacgaacaagaggacggacgctgaggttgtctagtgtagagtggaatcactgtcgacttccttttctgtttatacgagcagaaggcaacgtgtcccgttgaactgagattgcctgtatctctactgtagcaattggtctattgtaagacgcttcgtctcgtgcttg

SEQ ID NO: 5752 - DNA, 1080 bp, Oryza sativa
  ref <308>: DATABASE ACCESSION NUMBER: AK062918
  ref <309>: DATABASE ENTRY DATE: 2001-12-06
gcaaccagtaaaaatccaatcttttcctcctccgctgttgacagtccaatgtctagcttcactcacttcatctcgcttccgttgggtatccacccacaacttgttgataagctgaatgaattcaagaggtcaatcctgacttctaatgaatataaagctgcaggtttccgcatcgacgagtcaatatttgctattcccgaatcacttcacctaacggttcttatgttggagctaaagggtgagaacattgctaaggcttccagtgtgctccagtcagtatcggacaaactaatggaagccttgaaaaacagacctatctccatacagcttagaggtctggcatgcatgaaaggctcaccagataaggcctgggtagtatatgctcctgtgctggaagttggtgaacagggacgcctacaacaagtttgcgacattataattgatgcctttaccagctcaaacctagcacctacaagtgatgagaagcgagaactgaagttgcacgctaccgtgatgaatgcaaggttcaggaagggctactgtccggatgcttcatttgatgctcggaagatattcgaaaaatacgcggaacatgaatggggcgaatatctcattcccgagattcatctttgtcagacacgcaggtttgatgaaagtggacactactactgctgctcttcgcttcccttgcccgggaatatgcaagcggagcgagcctcggaataaccatttcatcccccaaggatgaaactgcggtttactattactgaaccaataatgtgccattgttggtgtggcattcttgagtgagtgagttcatataggtcttttcttttgatagtggaataagcagccatgcataatcctgtgtggcaactcttcggttttttttccttcttaatatgaagcaggagctacctgcactcctttatgaggtttagtacctcaaaaataatcctgtatggtgttgtaaacctgttgttggtctggaccttgtacaatcacactactgcaagtttatttctctgttgtttttactaatatatcttcagtttgaactcatcaatcatcttagctccc

SEQ ID NO: 5753 - DNA, 596 bp, Oryza sativa
  ref <308>: DATABASE ACCESSION NUMBER: AK062919
  ref <309>: DATABASE ENTRY DATE: 2001-12-06
agaagctaagctagctacccttccaaacaagagagagagagagcttgaattgaagtaacccaaagggcaattttttcccctgctagctagctagctgtagatccaggctcagatcagctagcctagctagctagctaccggtgttcgagacgacggctggccgccggccggccggcggcgggggcggcggcggcgtccatggactgcgcagtggtccagatcgtgatgcaggtggtcctgaggaggagcatctgcaggctgcaggaagtcttccgcgtggcggtggagctcggcgcggcgatcctcgcggcggtgcggttgtccggcatggcttcccaccggccgacgacgccgacgtcttcgccggcggccgcatcaaggacgacgacgacgacgtactactactcgccggtggtggcctccatgatcggcatgtccaggcttgacaggcactagctagggtgagctacacagatcgatcatgctttgcctttgttaaataatcatcacatcgttaatttgtctgagaatcaaattgagttgagtactgtttatacaattagaggcatgtatatggatatgtcaattgattgttt

SEQ ID NO: 5754 - DNA, 893 bp, Oryza sativa
  ref <308>: DATABASE ACCESSION NUMBER: AK062920
  ref <309>: DATABASE ENTRY DATE: 2001-12-06
ctctcgcacacccaccgccaccgccggcgtcgatctgtcgtcgattcccatctccagatcgacgccactagcgccccctcacgccgcaagaacgctgtcgcctcggctcatcgatctccgacaacgccgccgcgcgccgccgtcgatctccgccgcaagaacaacgtcgccccgcctcaccgagctcctccgacgatattccgcgtcaattaatcttcagagcaataagggacatcaatttccaccttgctgatatcgcggcaccgttgataccggtcaccggagagcgtctatttcacctgcactgctcctgttgtcatccacgaccacactgcatcaatgtcctcgacctctacctgtcgctgacgaccatccaggaaggtcgccctcgcagcgttctaagctgggttccgtccgtgcccaccattgagaatatcagattttaggccttttaaggtttgttttctggtcacattctatgtctcatattttccatcacaattttgtcccgaactttttggatcccgcctttctgtttctgtaggtatttgacagcattttgatgcttcgctacttcatggacctttgcatgaccttattcaacatgtaataagtactaccacaacgcattttattttgatgatgactgagctaggctacttttgagttactcacatttggatctacaattctgctgatctaaataataattgctaatgtaacagcagttccaggagaatctgacttagcagatgtaaatatgtttctaacattatatgagattttctttttatgcgtagctatgcaagccacaactgagttcctatacaccatttctcacccaaaagttgtaagaactaggaggcacttcaagttttgaagttaatttgagc

SEQ ID NO: 5755 - DNA, 789 bp, Oryza sativa
  ref <308>: DATABASE ACCESSION NUMBER: AK062921
  ref <309>: DATABASE ENTRY DATE: 2001-12-06
atggccaccattgttgcatgggagagtagaaacctgcagctgcaaggaggaggaggtggccatggcgaggacgcgcggggcggcgacagcacgtggcgcttccgctactcctactggagcagcagccagagctacgtcatcaccaagggatggagccgctacgtccgcgacaagcgcctcgccgccggcgacaccgtctccttctgccgcgccggtgcccgcctcttcatcgactgccggaagcgcgccgcctccgtgtcgtcctcgtcgctggtgccaccggccttgatcaaggtgcagctgccgccgtcgcggcctgtcgtcgacgaggaggaggctgcgtgtggccggcggtgcctccggctgttcggcgtggacctccagctccgcgccgatgcctcgccggcgctggatttgcagctttgatctagctgaggcatctcatcagttttgtactaattctccaactgattagtattcattttccctcaaaaaaattagtattattcatacacgaacatgcatgctgctctcctgtcgaataaaatgaggtcgtcgaagacgaagttgtacattagattagcacaagattaattaggaggggtgaatttaattaattagacatggatcgattgatatatatgcactgaagatgattaattggacgatggaagcaagcaacaacacaaggctaaggtacctagctagctttgctttcatttttccaaattaaatttcatgtttcttgtcagatcgatgaatagaatttgtttttgcgggttgattgtg

SEQ ID NO: 5756 - DNA, 404 bp, Oryza sativa
  ref <308>: DATABASE ACCESSION NUMBER: AK062922
  ref <309>: DATABASE ENTRY DATE: 2001-12-06
cttgctttgagccttcgagtagtgtcgctgttgctttccttcctcctgtaccacagctagctgtgcgcggcggcacggccacgcttcagctcgcttctttctttaattttttttcttcttcttctttgtttttaaatttttttctttcgtgtttgttatttaaatttttaccggtggtatgatcgatcgatcgattcttgatgtacgatgcattggttgtcagtccgcatttcttctggtgatcagcgggtggttggtgatgatggttagtgaaagatctcttggtgtcagctcgctatgtacgttaattactacttttttttggttctatagagggaagatttgtgtatatttttggtgtatcattttcggtggcagttgaataaaaaatctccatgcagctc

SEQ ID NO: 5757 - DNA, 674 bp, Oryza sativa
  ref <308>: DATABASE ACCESSION NUMBER: AK062923
  ref <309>: DATABASE ENTRY DATE: 2001-12-06
gatctgtgcccagtactaagtgtccagcagctgtacaaaatatgcacacagtactgggatgacaaatacaacacagagagtgtatctgaagaggtacttgatgaaatgaggacgctgataacgaaggaatcaggccaagatagttcagagaatacctttttattggatgatgaaataagcatgcccatatcacttgaggagattggggattctatggattctaaagaatttcagcacatagccccaccaccagaacttgttgcaatccccgcattccaattcttgaagagctgagagccctcaaagaccatatacatacatgctgcacagccagacctcttttttgtaccatcgatgttgtagatttctgtccttgcggttccttgtgtaaattattctttttggtaggtaggggttccttttcccctatgttttcgttggcttgggttgggaaaattatttgccctcccaaaaatgtgtccaaaatatgaatatagaaattcttagtttttttgtaggcatggtagggttgtagacactcaagcgccacgcttgggttaccttatcctgcacaacttgtagttagtaacatttttttaaaaagccatatcgattccattttattgtacagaactactggaaaatatcaataagttaaatcatttttttttcgc

SEQ ID NO: 5758 - DNA, 651 bp, Oryza sativa
  ref <308>: DATABASE ACCESSION NUMBER: AK062924
  ref <309>: DATABASE ENTRY DATE: 2001-12-06
gtgcgcccctctcctcgttcatcttcttcccccagatccgatcggcggtggcggtggcggtggcggtggccgatctgagccatccgccaccgcgggttcgtcgggtggttggcttgattttttttatttttttggggtttttttttggggggagggggttattgggagatcgggatgggtgtggttggatctgtgattgttgttgttgttgttgataggggttgcttgcttgcgatttgattgtgtgttcggaggttgaccttatggttatcgattttgctgtgatttgattgcttccaaatttgctgcgatttgatttgattctaagatgtagtcatgtaggggagatgatttttttttttttactttttgagccaatcagcatagggaggagtgggagacatagaattctctcgcttatgaggaaaattggatgtggcatgttgctcccagccttatctcaatcgtgtgaacctccatgagaggtgagggaagctacgccaacgattgatacacggtttctgtgtgctttgcctttgcgcggagattgataaaggattaaagggatcaacctttcttgccgtgcatggcaaatcagcgattgattatattctggggggatagcgccatgggatttcttgataagcctgt

SEQ ID NO: 5759 - DNA, 472 bp, Oryza sativa
  ref <308>: DATABASE ACCESSION NUMBER: AK062925
  ref <309>: DATABASE ENTRY DATE: 2001-12-06
cgatgaagaggcggatcgacctgatactgaagatgatccttcagggataggagaaatgattgacatggaagctgaagatgattcattggccagcagagtagattctgtgctggaggaaatcctttcggattaattcagttatgcatctagctaggagacatttagctaagttatgtagatttaacttctcggacgcttgttgtgtgtggtagcaaactagcaattgatggatttcacgcctgaaagtagctagacctgcagttgctggtgtacatagatttttgaggtggacctgtacatcaacacctcttgccgcagtgcctctagctcaataaggctggcctctttttatttttggcgtctccactctccagcgtcgtcggctagtaattttctcacactttgtagcagcatgcttgtatatcatggaaacttgtttgtgcagcagcttaattcatttttttttagtttc

SEQ ID NO: 5760 - DNA, 516 bp, Oryza sativa
  ref <308>: DATABASE ACCESSION NUMBER: AK062926
  ref <309>: DATABASE ENTRY DATE: 2001-12-06
aataaacaccatcagtacaccatccatccatccatccatcgtctcatcctaccacagatcacacacacaccaagaacacctagcggcgagctcttcgccctcgcggccgttcttggctttgtctggctcggtttgcttctgcttttgctcctgcatgcgccgcgcaatggagaggaggcctcgtgacctcgtcgccgtcctggctctgtcctgcctcctcctcctcctcccactgctcgtctcctcggtgcccatgtcgagaagcctgcacttgagcagccagcagcagcaacacccgccgtctctgaacctctctccagatgagatggcggcggcggcggcggcgagagggctcggcaggaggccggcggcgaggatggacgtggaggtgaacgactaccccgggtcaggacccaacaaccgccatgaccctcccaaaggtcctgggagagcatgaattcagtagtatagtaagtaaactagtaaattaattaatcagtgattttgtcgacatgc

SEQ ID NO: 5761 - DNA, 588 bp, Oryza sativa
  ref <308>: DATABASE ACCESSION NUMBER: AK062927
  ref <309>: DATABASE ENTRY DATE: 2001-12-06
attccaacagagtgcccaaggtcgcccagacgtctgtcgccatgaaggagtacacgctcgacgagatccgccgcctcgcggacaccaacccggagaagctcgcgcaggagtacgccgctgcgcgctccgccacggccgagctcgcgagccgcgcgcgcgctggtcttgctgctcgcacggccaacccgcctgttggccgcttccagacgtggatccagggctacggccagcgttacatccacacgggcagctccaagccgattgtccacatgatgctgattattggcgccacgggcgttggtgtcgagtggtgggcccaccaccgccacgcgcacgcgcacagcgaggagcaccactaattgtgtcaaccgttcatctcgaccgcggtctcgcgacgagtcgccgtgatggaaatcgcgatcgctgtcgtggggcaggattgttggttttcccatgccaacaaatttcgcccgctgacgatcggatcctcccaggcagcgggccgtgtttcccacaaagataatacaaccggagttgaagaaaaagcaagtaaaaaaggagaatgttctgctgtagaacaaaaaaaac

SEQ ID NO: 5762 - DNA, 397 bp, Oryza sativa
  ref <308>: DATABASE ACCESSION NUMBER: AK062928
  ref <309>: DATABASE ENTRY DATE: 2001-12-06
gagcaagaggaggaggaggagatgttccccggcctgatccaccaccaccgcctcctcgacgccgatgtcggcggcggcggcggggggagcagcgccggcctggtactgacggccgaccccaagccccgcctgcggtggacggccgacctccacgaccgcttcgtcgacgccgtcgcccagctcggcgggcccgacagatgctccttgtagtggatcagcaggagttggtgcattttcttgttgcccttttgttatgcaagtctgccttgtttcgtttgaaagtggattccggtttgtttctggcagtgaacttattattgaagcttttgataagacaaatgtattgattctgatcttcatgcggttgatcaagaagtttgaagttgtagttcctgtt

SEQ ID NO: 5763 - DNA, 635 bp, Oryza sativa
  ref <308>: DATABASE ACCESSION NUMBER: AK062929
  ref <309>: DATABASE ENTRY DATE: 2001-12-06
gacgctgtaggtttcccattcccgccgccgccaccgacgccgtcgccgacgatcccatggctcccgttaagaagacgaagaagaacgcggaggggatcaacaacaagctgcagctggtgatgaagagcggcaagtacaccctcggctacaagaccgtcctcaagaccctccgcaactccaaagggaagctagttatcgttgcaaacaactgccctccacttaggaagtctgaaattgagtactatgctatgctgggaaaagttagtgtgtatcacttcaatggaaacaatgttgatcttggcactgcctgcggcaagtactaccgagtgtgctgtctcagtgtcgtcgatcctggtgactcggatattaccaagcaattacctgagagtcattgatgtgcatgcattggccttgtgaccgatcttatcttcactttttgctcacatgaaaaagatatatatcttcatacggtgttcttgtgaagttgcgatacattgatgaaccaaacctggcacacttcaatagcatcgcctagttttgctctgctaagcatctgtcaacggtaaaggtaggagtgaaatgtatgtaggatttggaggtaatgggaaataaatggtgcaatctgttttactttc

SEQ ID NO: 5764 - DNA, 756 bp, Oryza sativa
  ref <308>: DATABASE ACCESSION NUMBER: AK062930
  ref <309>: DATABASE ENTRY DATE: 2001-12-06
ataaacgatgccgaccagggatcggcggatgttgcttataggactccgccggcaccttatgagaaatcaaagtctttgggttccggggggagtatggtcgcaaggctgaaacttaaaggaatcgccaaaaaggagatcatctggtacccactgttcgggcagctctacgtgctggccaatcacctccgcatccaccgctctaaccctgccgctgcaatcgagtcaatgaaagaggttgctcgtgcagttaccaagaacaacctatcactgatcctgttcccagaggacacacggtccaaaaccggaaggctactccccttcaagaaggggttcgtgcacacggccctgcagacgaggctgccgatcgtgccgatggtggtgaccggcacgcacctggcgtggaggaagaacagcctgcgggtcaggccggcgccgctcaccgtgaaggtgctgccgccgatcgagacggacgggtgggtggaggagaggatcgacgagtatgtggagatggtgcactcgctgtacgccgacagcctcccggactcgcagaagccgctcgagcctgtgaacaccgggaagaagaagatgagctaagttcacggttagttaacgcacacacggtgacaatgggtgtagttttgtgcatacgcgctgtgctgattgttgtatagattggtgtgtgcgtgatatacatgcttgatttggggatttgtagatgcaacagaaggttaaaaaaaggttattgattttgtgagc

SEQ ID NO: 5765 - DNA, 594 bp, Oryza sativa
  ref <308>: DATABASE ACCESSION NUMBER: AK062931
  ref <309>: DATABASE ENTRY DATE: 2001-12-06
attccaacttggacggatcggaagagcaagcgctcaccaccatggcgcgtcactcgcgcgagcggtcgcgatcaccgtccaccagtcgccgcgacaagcgtggtcgatcgcgctctccgcgtcgcgagtctgcgcaccgggcgtcgcgctctcggtcgcctcatcggtcggagaagcggcgccgccggcacagtcgcacacgcagtcgcagtgtgagctcaagcagcagcagcagcgacagtgaacacgacggcaagacgcgacgcaaagagagcaagaagcgcaagaagccaaagagcaagcgcgacaagaaggacaagaagcgccgccgcaaggacggcaaaaagaaaaaggccaggaagcgcagtgcttcgtcgtcgccctcgtcgggttcctcatcgggctccgagtcggactcgggttcggatgtcgtccgcagtgcgatctcgggcaagaagatcaagcgcaagctgagccgctcggacgccgacgtccaggcgcagaagaaccgccagcagctcctccagttctacaacagcatgcacgactagcggggtctattggcacaaggaagcttgactgagttcagtctct

SEQ ID NO: 5766 - DNA, 377 bp, Oryza sativa
  ref <308>: DATABASE ACCESSION NUMBER: AK062932
  ref <309>: DATABASE ENTRY DATE: 2001-12-06
agctctatcaatggcactgccgtcgtcgtctccgacgacggcgacgttggatagttgcaaagatcatcgtcggtttcggaggctgtcatggatggaggctagcacttcagaggaggcagatgatgcagtgctgctgctgcacgagaagagcaagagctgatggattttgttggagctgtgtaggcaagtctgatgcttggctgattttctcataccgtgttcttgagagaggcaatccttttccctttcaattctctacctattaatttcgtggttcaggtttgttgttcatttgtgattctgtgctgttcgattgtttttgttctatatacttctgtaaagatcatttgatggtattggtctatgaataatcgatc

SEQ ID NO: 5767 - DNA, 500 bp, Oryza sativa
  ref <308>: DATABASE ACCESSION NUMBER: AK104948
  ref <309>: DATABASE ENTRY DATE: 2002-08-28
ttagatgatcatgttgagatagatctcaacagtgatgatgacttggaatactccatgaacaagatgtccataacgccgaaccgctctttctttcatcaaattatggcaaatagtgacactggccttaccatgcctgcgaggatcagaccatcaataagccccccatcataatgggtccaaagatcatcgccgccgccaacttgttgttcacttcacaaaagaaacagccgtatgctgggagtgcattaggatccagcttgtataagagtacaagtatcggatagaattggagctttacttcatagctggtagaagggtcgaacgacccatcttttgcgatgtatccagcccaaataggttagttgttgggatgaaatgtgaagtacagatgtgttattaaaaacgaagcgggagtggttgtgactatagactagcaggtagccctctggtatgtaaaagacaggcctgttttgatgtagaacgatttaccaatatttttt

SEQ ID NO: 5768 - DNA, 460 bp, Oryza sativa
  ref <308>: DATABASE ACCESSION NUMBER: AK062933
  ref <309>: DATABASE ENTRY DATE: 2001-12-06
ctctctctctttctctcaccgagcgggaggcactgggcaacgggcggtgcggccgacgagcaggcgctgggagcaggcaccaccccacgacacagactacggcggcggcactggggggcatgggcgacggcggcggccctctcccgcctggatccgccggtggttgccctcccctgctccgatccgctggcggcggccctcccccgcctggatccgcaggccggtgccctcccccaccctgatccgtcggctgtggccctcccggtgcctcctcaccgtgacaggaggaggacgacgtcgacagtggctgcgaaggcttaaggacgacggcgaaccggtagtgggtgtatttttcgacttttggaatttttatttttttcacgatttttccttttcgcttgcagttgcacgggccgcatatctcgtcctaagcttcataatccgtttcatattaaaatac

SEQ ID NO: 5769 - DNA, 724 bp, Oryza sativa
  ref <308>: DATABASE ACCESSION NUMBER: AK062934
  ref <309>: DATABASE ENTRY DATE: 2001-12-06
ctctgactccgagcaaggaggcaagcagtagcgtccggttcgctacctctacctctcctttcctccacctctcatcctccgcctcgagcattccctctcatcctcccgccccgagcgtccggttcgcaacgaccacggcgaaggggacaagaaggcggcagcagaccagcagtggccatggtgatggtggatctagcaaggcggaggctggcgttggggtggaccggtggagggcagcgtgaaggctggcaacgacctcaacttctccggatctggtggttgtaagtggcaatggaggaaggtgcaagcgcaggcggcaacggtgtgaccacaacatcaagtggtccagcgctgttcatcttctatccaggctagtcgccatcgatctagtgccggacctgaagaagctgaagaaagaggtcaagatggatatgtaagaagggatttgtcaattgctttaggttgcaatgctaattttgttggggtggattggagttctcccatggatccctttgttgattttatttgggtgaatctttggttattgtgtttgccttatggtgttgtgcatccgatttggatttggttgtgtcgaactatgaaagtctgattttgggaagtggttctatgagattagattattgttaggattatcggtcggtgtagttgtaatacttacaatgattgttcgattggtttgttaatcgatctttgattttttttt

SEQ ID NO: 5770 - DNA, 450 bp, Oryza sativa
  ref <308>: DATABASE ACCESSION NUMBER: AK062935
  ref <309>: DATABASE ENTRY DATE: 2001-12-06
gtgctggcatttagagatattaatccacaagcccctgtgcatgttctagtcatcccaaagataagagatgggttgactggactagacaaggctgaaccaaggcatgtcgaaattctgggctatcttctatacgccgcgaaaatagtggctgagaaggaaggtatagctgaagggtaccgtgtcgtcataaacaatggacctaaaggatgtcaatcagtctatcacctgcacttgcatgtactaggtggaaggcagatgaaatggcctgctggctaattaaccaagtgggatgctttctgtactattgcctaagttctcttgtagtaagacaatatgatcggttgaagtaatacccgcattggtgaatggtgttttctatccatctgtaacgtctttgttgtcaatgataccttcacaacagagcccgtgagaatgctcaaagaatctgtt

SEQ ID NO: 5771 - DNA, 982 bp, Oryza sativa
  ref <308>: DATABASE ACCESSION NUMBER: AK062936
  ref <309>: DATABASE ENTRY DATE: 2001-12-06
gattatttcatcgaatttttgaacatataaatcaagtcagattggatgcaaacatatggctgcaataggaactctctcacaaaataataatctccttccgaaatttagcgagtatcgatctcaagtcatgcttggcgatcttccgtcagattttcttcgtgttcaattacttgaatcacaagtttacgatccattccttgctccacaagaaaatatgattaatccaaattttcttggttatttaactcttaccattgttgaagcaagattaatcaaaaattccggtccattaggttttcttcgcatggatccttatgttcgttttcatattggacatgtttcacgtgaaactccgacagcatccggtggtggcaaaaatccacaatggaaaatctcctatcgaataaatttattcaaaggaatcgataaaattcatctcgaaatatttgatcaacgtagttttactgaggatagttttattggtgaatgtaacgtcaatattcctcatgatgttctcgatggtcatacacatcaacaatggtatacattaatgggacgtgaagcgaatttgaacgaaaatcaaggagatattcttatcattatgagtttcacgtcgactgtcaatgaaaatatgccaattgccgattcatcaagttttcctagtagtccaactgtttcatcttcctcttcaccctcgaatagtctcgtcgaatcagctaggaattattcgtctgcagacattcaaacaatcaaagaaatgtttccaactattgatcaacaactaattatcgatttattagatcgatatgaaggaaataaagatcttgttgttaatcatctcttacaaaactaattctgacaaacaatatatatatatcgactatcctcttctcctctatcttattgctattgttgttgttgttgttgtcgtcgtcgtgtgattatttgtacagaaatcaagcaaatcgaatcttcattttag

SEQ ID NO: 5772 - DNA, 919 bp, Oryza sativa
  ref <308>: DATABASE ACCESSION NUMBER: AK062937
  ref <309>: DATABASE ENTRY DATE: 2001-12-06
aagtcacacgacgccatcaatcaccatctacacctctagagagctaattaagctaaggaaagagaaaaatggcgccggcgaaggtgtacgggccggcgatgtcgacgaacgtgatgcgcatcctggtgtgcctggaggaggtcggcgccgagtacgaggtcgtgcccgtcgacatgtccaccggcgagcacaagcgcccgcctcatatctcccgtaacccctttgggcaggttccagcgttcgaggatggcgacctgactctgttcgagtcccgcgcaatttcaaagtacatacttcgcaaacatggatctgacctactaagggagagcaacctctctgagtctgcaatggtggatgtttggctggaagtcgagtcgagccatttcgacggcgcgatgtcgccgatcatcttccagtgcttcatcgtccccatgttcatgggtggagcaactgacattggagtggtcaatgagagcttagagaagctgaagaaagcccttgaagtctacgaggcgcagctgtccaaatccaagtacttagccggggatttcattagcttggcagatatcagccatttcccgacggtttattacctgctggcatctgcccatgcttctgtgctcgaagcctatccgcgtgtgaaggcttggatcgatgatgtgatgcagaggccgagcgtgaagaaggtgacagaggctctgaagatgccgtctgcttaataaaaactgaagctatacagtttgtagtaatgaactcaatttcagcgttgcgtgacatgatgcagcagtttgcatcatctgtatgactatattcgtctagaaaaaacgtgttgtttgttcattaataagcagtgtagcgcctatatttatgagatgcatgcacattatcttcaataaatttatatggtattgaacttttc

SEQ ID NO: 5773 - DNA, 424 bp, Oryza sativa
  ref <308>: DATABASE ACCESSION NUMBER: AK062938
  ref <309>: DATABASE ENTRY DATE: 2001-12-06
attgcccaagaccagccctgccacgtgcgcagccaccggcgagtcggcggcgacctcgctctccggccttctccccccctcgccatcgccggccgcgatgcgcaactccggcgaactgatcctcccgggttgcccgcccccgatccgcgtcttctcagcctccattcaccgtcggtgtggtggcttggcttcgctcgcatcacctcacctcgccctcgtcgctggcgtcgctcagattcgatccaccttctgatgatccccttcccccaaatcaatagtcctgttccatttgttttttcggtcttgaactattagattgttcctctgattcttgatgctagtatatttatttatagctgtatagtttcaacttaatgtgcactgcatatttatgatggataatgcaatgttcatggcttgatgc

SEQ ID NO: 5774 - DNA, 688 bp, Oryza sativa
  ref <308>: DATABASE ACCESSION NUMBER: AK062939
  ref <309>: DATABASE ENTRY DATE: 2001-12-06
ggataatgtgtgtgaagattctagaaaaacaatcacaaatatcttcatggtatcagagcttggtcgccagcgactgcgccaaggctaaaccctagctagcggtggctgtggctggagaagcagggcgcaccggcggtgtattggcgtgtggtgctggagctcccggcgaggaagcgagcgtgttgacggtggaggtagcggtggctgctgtggttgtgcttggaggattccgacgtggagagaagaaggtttggctagcagggagcgccaacggagaccgcgtgcacggagggcaagttggcgacggcgtgtggagagaagaaggtgctgttgcttgctgccgtgtgaaggtgctgcttgagaaggtgcagctgctgcttgctgcttgagaaagtgctgcggctgctgctcgagaaggtgaggattttctgctgctgctgctgctgagaaggtgaggatttggtcagattgaggtctcacagcaagaaaagaaggggaagagattaacttgtggaggcaagaagaagggatatagctgctattaacttgctgtaatagggaaaaccaagggattgaataggtgatgggtaaattggtagatatgcttgctaagaaatttagcgagacatctaataccagccatgcgattgtttctcatgttgaatcagtaaaacaattgagttgatgc

SEQ ID NO: 5775 - DNA, 576 bp, Oryza sativa
  ref <308>: DATABASE ACCESSION NUMBER: AK062940
  ref <309>: DATABASE ENTRY DATE: 2001-12-06
gatggccgccgccgccgcgaggtcgctgctccgctcgtccgcctctctcctccgcgcggcgccggcgaggtccgcgtccgcgtcctcctccgccgcgcgcccgtctctccgtcgcgcgctggccgcgccccctcgcatcctcaggtcgcctgttgagctgagtgtatgcgtggagtccctgctgcctctgcacagcgccaccgccgccgcgcggatgacgtccatgctcgccgttcccgggcaaggcctcgggtggctcacggaagctgatactgatggagtatgacggcagcctgcttctggaaccaggagattagtagtccgtcaagttcatttgtgagcctgcagaattagttagaaaaggaagcactcttttctttttatttatgtgaactatgaagatggcttaataaactactttggatattgctcagaaccctttctccctcttcattgaccagatccttttgtaatggaaaccattggaggaccaatgtatgcgttgctagctactgtaaaatgttgcagaatttttttttcttttgatcaagtgatttaaaaatgctttcatggtgc

SEQ ID NO: 5776 - DNA, 620 bp, Oryza sativa
  ref <308>: DATABASE ACCESSION NUMBER: AK062941
  ref <309>: DATABASE ENTRY DATE: 2001-12-06
acaacccacacggacacggccacaccacccaccaactgagagctgagcaggcgagcgagcggacatggcagcatcgctccaagccgcggccaccctgatgcagccggccaagctcggcggccgggcctcctccgccgcgctgccatcgcgcccgtcttcgcacgtcgccagggcgttcggcgtcgacaccggtgccgccggcaggatcacgtgctccctgcagtccgacatccgggaggtcgccaacaagtgcgccgatgccgccaagctcgccggcttcgccctcgccacctcagctctgctcgtctcgggcgccagcgcggagggcgtgccgaggaggcttaccttcgacgagattcagagtaagacgtacatggaggtgaagggaaccggcacggcgaaccagtgcccgacggtggagggcggcgtcgactccttcgccttcaaggccggcaagtacaactcacttgggcatttcaactgagaagagcatgccgacaagaaaattcatatgctttgcattgctttctcttctgcgaattgatgcaaggttatacattaatcatgacactgaaagaggcaaatttgcacttgacattccagaaaacacccagtaaagc

SEQ ID NO: 5777 - DNA, 480 bp, Oryza sativa
  ref <308>: DATABASE ACCESSION NUMBER: AK062942
  ref <309>: DATABASE ENTRY DATE: 2001-12-06
accgagcactcaagctcatccctgccctcaaaccactccaaactgccgccaaggtcactggccaaatccaccgtcgctggccctttttctgccacaacagcacgccatcaactttgccactcatcgatcgcgttgaagatcccactggactcgcaggaactgaagtggaccaagaaggctacgttgaagcttccgaaggacacgttccacaagaagaggagttgctggatgatgaaggctttggtgtctagctcgtgcctgccgtcaagcgcctgtggtcgtcgccctagtcttccgccatttttcgttcgtcttcatgtgtgctgggccttcgccgcccatgtaataaattaactatttacgcttccgcttgttaaactctgtattgtatcaacttttggtgtaccttgcctcctgggacaaggaataatacacgcacgtaaggaacgcccgttgggttatttccggtcgtgactcatc

SEQ ID NO: 5778 - DNA, 744 bp, Oryza sativa
  ref <308>: DATABASE ACCESSION NUMBER: AK062943
  ref <309>: DATABASE ENTRY DATE: 2001-12-06
aaaaaccctcagccgccgccgcccgagcagagaagccgccttcgccgccgccgccgcactccaccgcgcgctctccgtctccggccgccgccagacaagatggtgagagtcagtgtcctcaatgacgctctgaaaaccatgtacaatgctgagaagcgtggtaagcgccaagttcttatccggccctcgtcaaaggtgatcatcaagttcctcatcgtcatgcagaagcatggttacattggtgagtttgagtttgttgatgaccaccggtctggcaagatcgtggttgagctgaatggacgccttaacaagtgtggtgtcatcagcccacgctttgatgttggtgtcaaggaaatcgagtcctggactgctaggctgcttccctcccgtcagtttgggtacattgtccttaccacctctgccggaatcatggaccacgaagaagcgaggcggaagaacgtcggaggcaaggtgctcggctttttctactagagatattcatctcacatggaagattttctcaggtgttagcaagaagagctttgttagtagtgggagtctgagaacttgttaagattattgtctcctatgtctgaattaccccccaatctgtttttattttgcttggcgactgagtgagctgctgtacttttctccatcgtatgatggctcagaatcttgcatgatgcgtgcctgcctttttgatactcctaatcttttacaagttactataaacttcctggg

SEQ ID NO: 5779 - DNA, 464 bp, Oryza sativa
  ref <308>: DATABASE ACCESSION NUMBER: AK062944
  ref <309>: DATABASE ENTRY DATE: 2001-12-06
ctctctctcactcttctctctgactctaggcaggccggccggcgggcggcggtgacgtgggagaaggggaagatggcggcagggcgaggcggtgtcgatgagcgagtgcggtggcggagaggcggcgacagctgccacgcaggaggggaggccggcgccgacccagaagcggaagccgaaggcgacggtgtgggcgagcgtggaggcagaggaaggccatggcgacgaaggccgcgtgcgcgacgtgtccgctccgcaaggggctcctccgggaggccaccgccatcaccgagtgcctccacacctgtatggaagtttgctgatgtgttgttaacaatttgctcgaagtcatcgaagaactgaagatgtggtttggggtggttcattatgcaacaaaggtaaagttatctagtccaaagtgaaaagattggacaaaggatagtccaaagtgaaactttgacaat

SEQ ID NO: 5780 - DNA, 582 bp, Oryza sativa
  ref <308>: DATABASE ACCESSION NUMBER: AK062945
  ref <309>: DATABASE ENTRY DATE: 2001-12-06
ctcctcacattcaccgcgccggcgccccctccgcctcctccctccaccaagctcgccgcctccgcccagcgccgagcgccggcgccacctgctgcctccaccgcgcagcgccccatccgcctcctccctccaccgagctcgccacctccgcccggcgccgagctcgcctcctccctccaccgagcgccggcgccgcctgctgcctccaccgtgccggcgccccctccgcctcctcccttcaccgagctcgccgcctccaccctccgcctcggcgcctccagcctccaccgcgccagcgccgcttcctgccctcacggctccaccgcgccggcgccgcctcctgcaccgcgccgggcgccgcctcctccctccacatctagccggtcggctacatcccggaggctgaagttgaagtggctgtgtgcgccagttgtgttcgatttgccgatttcctttctagatcgtgtttgatttgcttctttttttttttgtctaagtagtgctcgatttgctggtgagtggtgacatcaatttgcagtgtgttgtgtatggcctaattgcttaattcatttatcttgtacc

SEQ ID NO: 5781 - DNA, 483 bp, Oryza sativa
  ref <308>: DATABASE ACCESSION NUMBER: AK062946
  ref <309>: DATABASE ENTRY DATE: 2001-12-06
aaaaaaataaaagatggttaatgcaatcaagggattgttcatctcctgtgatgtgccaatggcacagttcatcgaatgcttcaatgcccgcatcagacaagttcatcttgcacatgcttgatccaacgcacatgttcgtccagcctcacgtggcggatatgatcagaagtaagatatcagagttcagggaccagaacagctacgagaaaccatcatgaactatcaaggatcatcctgtcctcagactcccatataaacatatcaccgtttgttgttaagcctgtaatgtggagtagtgataagttctgagcatcacatctcactcatgataatcaagaatgattgacattcggtatcagaatgccacttttagagtgatagataatgcaactgtgagattgtaatggaataactgtattttaatatcagaaacaagtcgagttgtgatggtggaattcggccgaataaatcttcctgactgac

SEQ ID NO: 5782 - DNA, 670 bp, Oryza sativa
  ref <308>: DATABASE ACCESSION NUMBER: AK062947
  ref <309>: DATABASE ENTRY DATE: 2001-12-06
acgcgccgccgcccctccccaatcgcgcccccctctccaaccctaatctctccctctcacgcggcgccaccgccgtcgccgccgccctcgactgccgccgctccgccgttgttgcatccgtcgtctcgccgccaccgatctcaatcgcgtgatttccttttcttatcccgaaatcgtgcaaccctctcaccctaaccctaatcttgtccccgccgaccgacgcgccgcccctccccgctcgagtccatgccgccgcaagttcgccgtcgcaggccgcgtcacccggatcagcgttgacgtcgcacgccttcctcctcacatcgcccggcatacgctcgtcctcggtcatatcggcgccaccgccgtcgccgtcacacgcagtcctccccgtccacctcgccggcctcgcgccctcgccgctcccaacctcgcccacgaggtaactatagtttttgttgctctggatcgattgatttacggttgggcgtgaggggattgcgacaagccagtgaggtcactgttttggttcatatcttcatgtaaatcttgatgttgcagttcaggctgtcaggaattatgttagctcgttttcgtccatgctgttattactgatgtaaaatgattgatgggttgaaccaacttgtcagcattaacgattgttatatttctt

SEQ ID NO: 5783 - DNA, 819 bp, Oryza sativa
  ref <308>: DATABASE ACCESSION NUMBER: AK062948
  ref <309>: DATABASE ENTRY DATE: 2001-12-06
gatatccagctttgcgacgagaaggatcatggcgaagcccaagtactccgtgctgctgccgacgtacaacgagcgcgagaacctcccgctcatcgtgtggcttctagagaagacgttccgcgaaaatgacctcgcgttcgagattgtcatcgtcgaggacaacagccccgacggcacgctgcaggtcgcacaggatctgcagaagatctacggcaagtcccagatcgtgatcttgccgcgcaaggggaagctcggcctcggctcggcctaccgcgacggcctcaagctcgcgaccggcgactttgtctttctcatggatgccgacctctcgcaccaccccaagttcatcccggaattcatagctgcgcaggcgcagagcaactgtgacattgtcacgggcacgcggtacgtgtcgggcggaggagtctttggctgggacttgcgccgcaagctcacgagccgcgtcgccaactacctcgcgaccgtgctgctgaacccgcactgctcggatctcacgggctcctttcgtctctacaagcgcgccgtcattgaggacatcatggcgtcgatccagggactcgggtacgtcttccaaatggagattctcgtgcgcgcgcgcatgaagcagtactcgctcgccgaagtgcccatcacgtttgtcgaccgcatctacggcgagtccaagctcggcgccggcgagatcgtggcctatctcaagggactcctgaacctcttcttcaccacgtagacagagggctcgggataagcaaggaaccagcaaggagttcccagacaaaaaaatacgatactttaatattc

SEQ ID NO: 5784 - DNA, 721 bp, Oryza sativa
  ref <308>: DATABASE ACCESSION NUMBER: AK062949
  ref <309>: DATABASE ENTRY DATE: 2001-12-06
gatcagctagcacagcacaatcgctttagctaccttgagaaactcttctgcattggatcgatctgcaataatggcgcggaaagtaggctttgtcctggtgctactggcggcggcgacgctcgccatggaggccggaacggcggcggcgcagagctcgccgcaggacttcctcgacgcccacaacgccgcccggcgcggcgagggcgtggacctccccgacgtggcgtggaacgcgaccctggaggcgttcgcggagagcgtggtggcgagcgccgccgccggcggcgcgtgcgatctccggcacacgtcgggcagcggctacggcgagaacctctactggggccccgccgggaaggcgtggtcggcggcggacgcggttggcttgtggatggaggagaaggcgtcctacgtgtacagcagcaacacctgcaccaaaggggcgctgctcgactgcggccactacacgcagatcgtgtggcggagcacgacgtcgatcggctgcggccgcgccgtctgcaacaacggcgatgtcctcatcagctgcaactatttcccgcccggcaacgtccccaacgagcgcccgtactagctagtagaattaatactggagtagatgcatgtacgttaggcgcgcatcagatatctatatgtaaaacatacagaatacagtacgttattcgtacttaaggagtacatgataaataaaggatttgttatgttg

SEQ ID NO: 5785 - DNA, 446 bp, Oryza sativa
  ref <308>: DATABASE ACCESSION NUMBER: AK062950
  ref <309>: DATABASE ENTRY DATE: 2001-12-06
aaaaggccaaatcttcttcttcctccattgcttcagctcatccgctccaatcacctaaatttacagaaggcgacttggcaagaggatgcggaggagagatagatataggcgtcgaactccggcagggaggcgacggtgctgtgcgcgcctcggccgcggaggatccagatccacccctgcagcgctgacctcatcctcagccctcctcacttcctcctcacctccaacaccaccaacaagaactcttggaaatcaacggaattcagtaggatctgtgagtagtttgactgttgaattaatgaattgtagatgcagtctcttttgtctaatataagtagcacataatccatatttagatgttttatttctttcatgtcagcaatgcatgtttgctagcacttattttcttgttatcagaaaggaaacaaatggcattccataattcc

SEQ ID NO: 5786 - DNA, 583 bp, Oryza sativa
  ref <308>: DATABASE ACCESSION NUMBER: AK062951
  ref <309>: DATABASE ENTRY DATE: 2001-12-06
agctaagctagcagctggtctctctcttgatttgtgtttccccagagagagatctagggagagatgtcagggaaagatcaaaagaaagcagcagctttagaagagaagctcgagctcctacgttctgttacaaagtcaagtgcggcaaacgagacatcaatcctcgtagatgcgtccaagtacatcaaagagctcaaggacaaggtatctcaggagcctgaacagctgggcagcactagcagttccatgccaatgccaagaagtgaagctgcagagagaagcgtggatgagcaaatggttcggcatgcagtgctgcaagccatcaagaaatgcatggacggatcatcaatttgatccagaatgaactactttatgtttagttctaaaaaaagtactttatgtttcgacttaatactcatctgccgtagcgcaagcttattgtgaggatactaaatagtatactatctatattttcagttaattttgttgtaaaaatttgctcatctcttggtgctgaatgaacaagaacggcgttttgtcgtttaaatattcgtgcaaagaatctaaattgtatatattgatc

SEQ ID NO: 5787 - DNA, 1672 bp, Oryza sativa
  ref <308>: DATABASE ACCESSION NUMBER: AK062952
  ref <309>: DATABASE ENTRY DATE: 2001-12-06
tagtagttgttgtattgatcgatcgatcgatctagagacgacgatgagcatatcggtgaacgggcagtcggtggtgccaccggggttccggttccacccaacggaggaggagctcctgacatactacctgaagaagaaggtggcctcggagcgcatcgacctcgacgtcatccgcgacgtcgacctcaacaagctcgagccatgggacatccaagagaggtgcaggattgggtcagggccgcaaaacgactggtacttcttcagccacaaggacaagaagtacccgacggggacgaggacgaaccgggcaacggcggccggcttctggaaggccaccggccgcgacaaggccatctactccagctccaaccgcatcggcatgcgcaaaaccctcgtcttctacaagggccgtgccccccacggccagaaatcagactggatcatgcacgagtaccgcctcgacgacccctcctccgcctccgcctccgtctccgtcaacctcccctcctactactcttcctcctcatcgtcatcttccccaatgcacggtgtcgccggagaccaaggagctcaggaggaaggctgggtgatctgcagggtgttcaagaagaagaacctcgtgcaccacggcggccatggagggcagcccgagcaactgctcgacggtgaccgttagcgaccacgtcaaggcgcagatgctgcactcgtccgccagcgacgacgccctcgaccacatcctccagtacatgggccgctccggctgcaagcaggagaccaagccggcggcgatgtcggcgtcgtcggcggcagcggcggcggcgctggagcagcacctcagtacgcctcagtacggcaagttcatgaagcttccgccgctcgagcacgtcgccggcggcgtgggcctcctggcggcggccggcggcggcggcgagtactgctccgccgccgacgcgtcggggatcgccgactgggacacgctggaccggctcgcggcgtcgtacgagctcaacggcgccctctccgacgtcgcctccggcaagaacatggccggcttcttcgacgtcgtcgatcagcccgccggcgccgccgccttctcctccggcgacggcgacctgtggagccttgcgcggtcggtgtcatcgtcgctacacgcagacttgacgaccatgaataacgtataataattggagacaagaggtgacgatggagatgatgcatctagacgtggatggcgtatgcgtgcactaactctactcttaatctggtcggtctacgcatattgcatgcatgcatggacgacggtattgtacgtacgtgatcaataattaattactagttagggttccagcgagagtacaagacgacgacgacgacacaatagctagctgagctggccatgtgagcaagctctagacactaggtcaagatctaaccgtcgatcgatctgagccgttgatcgatcgatcgacgatgatggtgttgatcgatcgaattatagtgcagtggtcgagcgagttgttgtgtcgatctgaaacaagagagaggaaaaaaagaattaaaaggacgtacggcgtggtaggagagagagagagagagcatatataaatattatgtatctatatattgttatatattgtacctatagcttattatatatcaaagacatttttct

SEQ ID NO: 5788 - DNA, 612 bp, Oryza sativa
  ref <308>: DATABASE ACCESSION NUMBER: AK062953
  ref <309>: DATABASE ENTRY DATE: 2001-12-06
acaaggatatcgtcgcttccgcttctctccctctctcgccccgctctacctccatcctcttcctcctcgcattccttgccaacctcgccgccccggcctccgacgatcgccggccgccgcctccacagtttccatcgaacgccaggggggggctaaattaaagaaggatacaaaatggggaggagatggcacgccctcgccgccgtcggcgtggccgcctgcgcggccgccgcagtcgccgccggcgacagggggttcacgttcgccgacgcggtggcggcgccggaggaggtgggctacatgaggaaagtcgtcaactttctgtggagcggcgaggcctcttatcaccacgtgtggccgccgatggaatttggttggaaaattgttttgggaatattaattggattctttggagcagcgtttggaagtgtaggaggagtaggtggcggtgggattttcgtgccgatgctgaccttgatcattggtttcgacgcgaaatcatcaacggcgatatcaaaattcattgtcagcactcagcagtgcaatcaatatcatccttattggtaccattgaaccgtgcctttcaaaataaaagataagtactgttgcttc

SEQ ID NO: 5789 - DNA, 1020 bp, Oryza sativa
  ref <308>: DATABASE ACCESSION NUMBER: AK062954
  ref <309>: DATABASE ENTRY DATE: 2001-12-06
cacaagtgcattatggcaagagctgttcaagcttgctgatgtgaagctgaatatgagctcttcttaccatccccagactgatggacaaacagagcgattaaatcaatgccttgaagcttaccttcgctgtacagtgcatgcttgtccgacaaagtggtccagctggttatctcaggcacaatactggtacaacacctccttccacagcgctttgggcaaaactccatatgaagtcttgtttgctcgaaagcccagccactttggagtagcagatctggggcaaagcactgtacccgatgtgcaagtgtggttataagaaagggcaggtctcaatgaactacttcgtcaacaattgctgcgagctcaacagcgaatgaagcatcaagctgacaaacacaggtctgaacgacaattcgaagttggagatatggcgtatcttaaattgcaaccctatgttcagttgtcagtggccaagagaacctgccagaagctcagtttccgttattttggtccatatgaagtcctggaacgaatcggagctgtagcttgtcgtctcaagttgccggaagggagctaaatacatcctgttgtgcatgtctctctgcttaagaaggtaatacagttaggtacgcctgtttgtgctgatttgcctgtgcagaatttggaagatgcaggtccagtgcgccgccaactcatcaagcgtggccgaacagcagtccctcatggtctggtgcagtggacgggcatgcctgcagatttggctacctgggagaacatcggagaactgcggcaacgttttccatcagcgccagcttggggacaagctgcaacataagggggagggaatgtcatgttcttatgttgtcgtggtgtgttacagtactcttgggtgtattgagtctttgggccacttcatcatgttgggctgaacccgtgagagcccatgtgtcggtgtataaatacagacctgaccaattgagtcaaggcattgatgagaagaaatataaaactaatcctacc

SEQ ID NO: 5790 - DNA, 1288 bp, Oryza sativa
  ref <308>: DATABASE ACCESSION NUMBER: AK062955
  ref <309>: DATABASE ENTRY DATE: 2001-12-06
aaaaatttacacctatatctatctatatttctcgtttgtgctcgggctagctcaccatatgcgtaaaattctgtagccaaaaggagcaagcaaactaggaggaggattagttcttgcgcatcgcttctgagctcgatctacgtcgtccggccggccgggagggatcgatcgatgggtctgagggagatcgagtcgacattgccgccggggttcaggttctacccgagcgacgaggagctggtctgccactacctctacaagaaggtgtccaacgagcgcgcctcgcaggggacgctggtggaagtcgacctccatgcgcgcgagccatgggagcttcccgacgtggcgaagctgacggcgagcgagtggtacttcttcagcttcagggaccgaaagtacgcgacggggtcgcgcacgaaccgcgccaccaagacaggctactggaaggccaccggcaaggaccgcgaggtgcgcagcccggccacgcgcgccgtcgtcggcatgcggaagacgctcgtcttctaccagggccgcgcccccaacggcgtcaagtccggctgggtcatgcacgagttccgcctcgactcgccgcattctccaccaaaggaggattgggtgctttgcagggtgtttcagaagagcaagggagacggcgagcaagacaaccccaccagcgcagcctccccggcggcgaccttcgccggctcgtcgcaggcggcggtgcctggccaagccgcgtacagcagcgacgaccatacgggctcgtcgatgggattcgcgccgaggcagaacgagatactcgacagctcgagccatcagttgctgaacttggcgatgctgcagtgcaactcggttctcgatcatttcccgcaggaggtgaacagctcgccgatgatggggttggcagggtccatcggaattggggatgaatacggcttcttctacgataccggcttcgaggagacggcgagcctcgggggcatgaggttcccacaagggtggagttgatgccaattgatcgtgcatgcagtgagatcatcgtgcctgcgcgcatttgcgaaggaaaatgattgaattaattccattgatacagttatttcgtcctaaaaaaataaactattgctactgtaggtagtgtttggtttagcatagaacctgcatgagatggttcggtcacttgaactgtatatatattgtgtgagtcaaaatgtatcgctctactcgtatgcaagttgatacaatccatcccaaagttccagttcatagatcaaacgatctatgagctatc

SEQ ID NO: 5791 - DNA, 911 bp, Oryza sativa
  ref <308>: DATABASE ACCESSION NUMBER: AK062956
  ref <309>: DATABASE ENTRY DATE: 2001-12-06
gatgtcaattttgagtcaggcaagatctagcaagggaactgtttactggatggcccctgaggttgctaaggctaagcctcatggacctccagcagatatatggagtcttggctgcacagttttagaaatgctgactggcaaagttccataccctgatatggaatggacgcatgctttgcttaaaattggtagaggaataccaccagaaattccagctacactgtcagaagatgctcgtgatttcataattaagtgtgtaaaagtaaatccaaatgatcggccatctgctgctcagctgttggaccatccatttgtccagagatcactgcaacataaaggcgcctaatcactcttgtgttgctaacaaacttgcttgtacataagctggaaagctgttgatgctgaggatgatcccaaatcccttgccatgatacagcggtagtttgtaggaagtcgagcttacagcatgtgcaagctatattcaactgaagatacctttcaggctgctggatcatgtgaacagaagataccttgtcaggtgtttactccgtgccttcacaaccatcagggtgaacagttggttgtccaaagtttttagtgctgattgtcagggattatgagttccagtgcgaaccatcgaactacgtttcatgacttggataaaaactgggaaaggttcaaaaggaggattagtggtatctcgcctagtggcctatggaagcagccaagcaggggacgtagaaagctcagtgctcacggcacagttaacttttctgaccgcgtttctgtacagcgtttttgtacctgtaaagtggcttccttgtgtatgtcattgactgttgacgagaaaatccaatttgttttatagccataccgtgaaattgtccagaaaaatcagtgtgttttgcgat

SEQ ID NO: 5792 - DNA, 471 bp, Oryza sativa
  ref <308>: DATABASE ACCESSION NUMBER: AK062957
  ref <309>: DATABASE ENTRY DATE: 2001-12-06
gtgtatctctttctcccccttccccttgtcccgaagacgccgccgttgccaaatcccaaatccgccgcggagcgaaagggtgggagatcggaggagaagaaggaagatggtgaaggtggcgacctacttcgccatgaccttcggcgcgttcctcttctggcagtccatggacagggtccacgtctggatcgccctccaccaggacgagaagaaagagaggatggaaagggaacaggagataaagagaatgcaagctgagctaatggcccaagcaaaggagagtgaatcatgattatcatttggcaatggttttagtagttgctttgtcaaatttcttccttggaatgtactttccaagtgataatgcttggctgatgtattctccacagctccaataaacaagagatcttataactttttgtcaaatgcaagcggctaagctcatgatgagttatttgcagtttgtattat

SEQ ID NO: 5793 - DNA, 988 bp, Oryza sativa
  ref <308>: DATABASE ACCESSION NUMBER: AK062958
  ref <309>: DATABASE ENTRY DATE: 2001-12-06
acagctcagcggaaggctgcgtagtcatctcgtttgatcgagctgagcacgagaggagaagaagcaagcacgcgacgcaaccatcgccgcgcctccgcgacccctgactgcgcgaggaggcgagctcgggccggagctgagggagctcgccatggcgaccggcaacctggccagcgtggtggtggcggtggacgggagcgaggagagcatgaacgcgctgcggtgggcgctcgacaacctccgcctccgccccgacggcgcgctcgtcgtgctccacgtccagccgccgccgagcatcgccgccgggctcaaccccggacccatccccttcggcggcccgagcgaggtggaggtgccggcgttcacgcaggcgatcgaggcgcaccagcggcggatcacgcaggctatcctggatcacgcgctcaagatttgctccgagaagaatgtggaggtgaagacggatgtggtcgttggggatcctaaggagaagatctgcgaggtgacggcaaatctcaaggccgatctgctcgtcatggggtgccgtgcttttggccccctcaagagaatgttcttaggaagtgtgagcaactactgcatcaacaatgtggtctgtccagttgttgtaatcaaaggcacttgagccatcttcgatcagtattctttgctgcactttaagtcaagcctctgaggttgctactgcgctatcatccgtaatggtactgcatatttcacatttggagactagtttgttgtgcatctttttgtcacatggtggtatttacggatgatagttgtcgcgtgcatttgagcaaggaaatatgtattgattgttcaattgtagaaataaatgtgccatgtagcacattgttttgtatattcttgtatttgttctgtgctaaacatcacaaacttggcagaagtgagttcccttttgtatgaatcctgtcatacttttatgttccttgagatgtccaaagtaaactattcc

SEQ ID NO: 5794 - DNA, 691 bp, Oryza sativa
  ref <308>: DATABASE ACCESSION NUMBER: AK062959
  ref <309>: DATABASE ENTRY DATE: 2001-12-06
aataaacgctaaaaaagtaacagtttctgtactttattgtaagtccatgtcctcggcgattgggtggttacagagcagctttgggctcgacatcactggtgaatggaatcggctcgtccatctcagtgtcggcgggatgacgtacagttgtcaaagaaaaaccttccgcgctcgccaagaggaatcggtgctttgcaaaatgatcctcgacgatgcatttcctcgatctgaggacggtgcagtggtgattgatcgcgacggtgaatcctttgggcatgtgctcaacttccttcgaactgacaagctcttgttgagtgacagcttcgatagctgggatctgcttctcaacgatgctgcgtattatggtctgaagagccttgaagaggctattctggcgcatccaagcttccagcgtcgccaactccgacgtgccttgccgaactctgtctacttgcgattcgatgatattcagaatcccctgggacgggttcacttggttcccgcgttgcccatgttgtcggtcgacaacgaatcggggcgtctgcttcaccacggacgcgaaatttcgtccgtcgacgaggccgcaaccattctgacctcggcgtacgaaatgacgattcagcattgggagaccagagacgtaacgacggcggtcattttcgctctgcgatcgtaggctttagattggttg

SEQ ID NO: 5795 - DNA, 718 bp, Oryza sativa
  ref <308>: DATABASE ACCESSION NUMBER: AK062960
  ref <309>: DATABASE ENTRY DATE: 2001-12-06
ggcatctccaaaaattttatccacctgaactcgaagataccgtatttgcgtcccctttgcttgcattccaattcaaacaccagaccgaacgcccgctcccatttccgccgcatttaagcgctctccggcctaactgtcctatgcgctagtcgcctccgaccaaacgcgacagcttcatttcagatcagagaccaccacgctcccccgcctacaaagagccaaaatgcatcggcagcttagcctctcaccggggccgaagcagcagcagcacgacgacggcggcaacatcggcatcggcagcgacgcggcggaggtgatggcggtgccggaggagtcgtcggcggccaagggccggtcggtcagggaggagaggaccatccacctcatcccgctgctcaccttcctctgcttcctcctcctcttcctcttctcccacgacccttcctccgctgatatgtcgagcttcagggacggagggaacggtggcaacaggaggctgaggatgctgtaaacttctagcatcaattattgtcagctatgttttttttttctgatccgttttgctttgcgaatttggatcagattttgtgctgtatttgctctcaaatatgcgactgcgtacgcagctacttaagcagcagtaattagtatttgtaatctgcaactttatgcaatcttttggtgagttcttaaatcttaatcgtttgaattgcctctg

SEQ ID NO: 5796 - DNA, 628 bp, Oryza sativa
  ref <308>: DATABASE ACCESSION NUMBER: AK062961
  ref <309>: DATABASE ENTRY DATE: 2001-12-06
gacgacttaaatacgcgacggggcattgtaagtggcagagtggccttgctgccacgatccactgagatccagccccgcgtcgcacggattcgtgtccgtggccgctgttccccacctcccggaggaggagaccacgccaagcgtggacgtggaaatcgcctccccagatcagcagcatctagctgctgctgctgcaccgtcgatggccgtatttcctccggcggccgacgaggaggaggaggaggaggcggtggcggtgttgctgtccggtgagttcttcacgtgctggtcttcgctgtcggagtcgacggatgatgagacgacgaggaggacgaccaccgagtccatgttctacatcccgacgaacgggagtaatgatgttgggaggaggaggaggaaggtccggtcctggagtcgggggagcttcctgggacgtggatcctttgggatggtgttcgaggggatcaccaagtaagtaacaagtcctactcatctaattagaagtaactttggatccatcatttctattccctccatttcatctgtttactttctgctatgatgctaccatctatttctactgccatcttagttgacagtagtagaaacgtaaagagatgtaactgtc

SEQ ID NO: 5797 - DNA, 474 bp, Oryza sativa
  ref <308>: DATABASE ACCESSION NUMBER: AK062962
  ref <309>: DATABASE ENTRY DATE: 2001-12-06
ctctcctccggtcttccccacccgcgagcaccgatggcgcaccagcggctggactgcccggatccggcgccactcctccggcggcctcacatggggagggagcttcggggggcctccccacggtgtgggctcggcgggaggcctccacggcggcgtgacggacggtgcagtgggtggcctctcccggcggcgtgaccatggaggggcgcagcgggtggcctctgctctgcggcgggcggccagatcgggctggtgtgctcgatggcgggaggattcaccacggtgtgctctctctagcttccttccttgttgatttttgattttgtaatttcggtctctccgtgctgttattgggtgcatggtgatgaggttgtgagaaatttgttctcgattcttggtacatacatggatgatgatgatgatgatgaatgtgctttttcgtactagtgtgatactagctgccagcagtttagt

SEQ ID NO: 5798 - DNA, 422 bp, Oryza sativa
  ref <308>: DATABASE ACCESSION NUMBER: AK062963
  ref <309>: DATABASE ENTRY DATE: 2001-12-06
gatacaactcctcctctcctttttaactcatctcctcacacagttacacccttatctcttcctctccctcctccctccttcccacctccccacctccctctgcaacggtggggcgcggagtgcccgccggcgccaccgccgccgccgccgacgtcgagcggtgcgccaagtgcaacgagaacggcctcatgctgtgccccatctgccactgattgtgctccaccgccgcgaatccttctagcgtttaatccgcgcccatgtatatttatccataatatactcgtataattgtgagtttaaactacactctattagtggtttataaatgagaattgaaatggtatatagtgcttgtaatagtattgtatagcagtgtattttttgtaaatcttttttgattaattattggaacaaatgctaat

SEQ ID NO: 5799 - DNA, 650 bp, Oryza sativa
  ref <308>: DATABASE ACCESSION NUMBER: AK062964
  ref <309>: DATABASE ENTRY DATE: 2001-12-06
atcacaggctagcaagctcgactgatcatctgaaatggctcgcaagaatctccttctgcttggtgtcttcctatctgctctgcttttcttcttcctggatgtagctcacgcaagagagctcgctgaagccagtgaatctgaggggaagaatgtgaagccaacaggtaggtcaggggtcgaggatcagaagtggggcggtgctcatggaggaggatatggatatggcggcgggtatggtggaggaggatatggtcatcctgggtatggtggtggctatggtggtggatatggccaccctggatatggcggtggctacggaggtggatacggccaaggatatggctgtgggtatggtcatcctggtcacagtggaggatacggtggtgggggtggctacggtggtggtggaggttatggaggaggacatggtggtggttggccttaataggtattcgagtcatctaagtacaactgttaaataagtcaattatgacaaacttgtttgagtatgcatgctgctagtaggaacattgtatagtagcaagaaactagaagagcatcatgtttggtctcttcttatatatgtatgttccttccaacatgtattctggctttaagcataataatatggtatatctgaaaatatttat

SEQ ID NO: 5800 - DNA, 608 bp, Oryza sativa
  ref <308>: DATABASE ACCESSION NUMBER: AK062965
  ref <309>: DATABASE ENTRY DATE: 2001-12-06
ctctttcccacgaccacacataagcttctccctcgatctctcctacaagccacacatgagcaacgcagcggcctcggcccctacgagcaaccacaagccgacaacgatggtggcggcaaccccgtccgacgagcaacgacctcaggctcatcgagtagtgagagaagcaacggcctcggcccaacggcaagcagtggccttggcgagtaacgatctcggtctcattgagcagcaggagaggcgacaacctcggcaccgataagcaacggccccagtgagtagcgactttggcattgttgtgcggcaggagaggcaacggcctcggcacaggcagtggcgaccccagtgagttcaggcctcggcctcggcaggtagcaggagtggtggcgtcctcgtcctcagcctcgagcaagcaactaggtacggcggcattggtgacctcagcatgttggtgattttaatttctttggttgtcactgagacctgaatggttcacatattttcttttttatttagttttaaatgtttttttttatttaggtatgcatctgggcatgctgtgggtattgatttgggtatcaatatgtgatttggacagagccgactcg

SEQ ID NO: 5801 - DNA, 439 bp, Oryza sativa
  ref <308>: DATABASE ACCESSION NUMBER: AK062966
  ref <309>: DATABASE ENTRY DATE: 2001-12-06
ctaagaaataagattgtcgcccaccaagatgatccttatcaaaattacactggacccaaggagcaaattggcgtggctaaagccctcttggagaagcttgtgttagactccaagcctgcttacatgataaagctcatcgaagagatccgaaagcttaactggataggagagtcaccacttgttagaagccttacgagctacgtgaaagcattcgaccccaatctcaagatcaggacttcatgagacttatggtggtactgcgactgatatggtggtttttgggtgtttgtggtgtacttacctggaatagttgcttatctgattctgatgtatatatagtctgtcagacgtaatctgtgcatgttttcttccaggatggataacttaggtgtacggtgcaaatgtttttcggtaataaatagagctatattgttgcctt

SEQ ID NO: 5802 - DNA, 955 bp, Oryza sativa
  ref <308>: DATABASE ACCESSION NUMBER: AK062967
  ref <309>: DATABASE ENTRY DATE: 2001-12-06
taaagacgagagcttcgcctttggaagcgccagtagcgtagggcgaccgggccagccgagcccctctgaattagttgacggctttgatgactcgacggtgaatattaaggaaacgccttggcttgggagttgtgatgccacaactctgggttgcacgttgagcaaatccggagtcccacgacttgctttgggggcaaaggagaagcagaagcaaacttgttcgtggtcatcgtcactcgccgctccccacatccgcgcgccgagaactcccggtgagctcttgtccagatctagagagctcgcgtgccttggctagatccactgccactgtcgctcgaggagaaggccggcgagctcgcagccatatccttcgccatggggatccggcatcgccaccgcgatgatccgccgctgacactcgcgaagaaggggaggtggagaggatctatcgccaccgccgttgtggtcgcgttgccgctccccaccaaggtcgccggatctagtgagctcgcgagccgcaaccaaatccgctaccgctgtcactcgagaaggggagggggagaggccagcgagctcgcgggaaaatcgagcgccactgcttgcgaagaaggggagagggagaagccggcgagatcgctttggatccggcgaggtcacggcggggacgggagggatcccgctgaccggggtggtggaggggagcagattgagaccaagggcggaggtgcggtgtcggcggcggtggagaaggggatcgggagagagtaagagcaagttcactagtatagccaactattagctctaattcatctatagacaatctaatagcatatttatacaataattgcatactacactattaatatctggtctcacctgtcatacacatactgcatcttggagtccgtgctacagctgattacaaatttatagtccgctgctcttctctcttctt

SEQ ID NO: 5803 - DNA, 1132 bp, Oryza sativa
  ref <308>: DATABASE ACCESSION NUMBER: AK062968
  ref <309>: DATABASE ENTRY DATE: 2001-12-06
tgtttgttaatatgtgagcaacgctaagaaaattttagttcatcagttggctccttcccatagtacgtgattgttggaaagcaaatactagtaatctaggtcgatcaaattaaacataatcgaatcaaagaacctgtttacaggaaaaaggtaagctttgctcccctgaactttagctatgggaatttttgtaacataggttctgatcccatctatcatcccataaattttcaacttagaacacagcttgtacgacaggaagcaaaaatggcagttgtttttagggattaaaacaagctatcacttcttttggtgaaatagttccgctgtagaaaaatggactgattaacttagttatgcgacatgagcatctgcatgtatagtttctcgttttctggagaaatctccagttcaattgaacctatgaaaactcgatttctctatgttcacgaagaaattattaaaggtagggataggcatgatctctttctcaccaaatttctaagaccaaactcaacttcgtttggaaagttaaaataagacaaattttgcatgaaacttccctatcactatccgtgcaaagtttgtatttcttgtatcttgcaagcaaatttgaatttggtcttgaaattttgtggagatatagaccatgcctatacctaccactaatatttatggatgagagtcatctcgctgggatgtactagaaagtaggggtggtctattttgtttattttgaatgaatgggtttattgttggcttattgtaaattgcatttcaacttattccatttttattctcccgtgttgcattttgagcatattatgtcgttatggttgctctattgttttttctaaattgggtcatttcccttctattttctccgtcccataatatcacaaaatttgttggacatgagacttgttcagattcgccaatcctaggttgctatgggacagggagagtataaaatattgaactttacatcatcacaatcagaagcataaaatcgcatcagggagagaggtgaaggggagtaagaggctgacgagtgggtcccacaccttttccacccgagtttgccatgagggcaaaagtggcaaatagttaagaccatctcttaagaaagggc

SEQ ID NO: 5804 - DNA, 529 bp, Oryza sativa
  ref <308>: DATABASE ACCESSION NUMBER: AK062969
  ref <309>: DATABASE ENTRY DATE: 2001-12-06
agatggcgatggagtccacgagcaggtaggcgagccagaggagcaggccgagcacggcggagacgttgcgcttgcagatgacggcggagaagaggaggaacacctgcagcgcgaggctggagagcacaagcacgcggatttcccacgcgttccacaaggccaccacgcttgccatggatccctccatcttcgtcttccaatctgccgcctgtagcacgattccagcgtttcttctccccggtcattgcctaatcctctcggaaacactgatctcgtcttccctcggtgaacgcatttttttttctcgatggaaagcttaaaacgcgtaaaggagaaacatgccaagaaaactgacctgatttggctaaactgattcaaccatctcgaagtcttgcatactgtgtacttgtgtagcttgtctactactgatttggctaaactccttcctttgttagtgagttggagaggccagagccattgatggcggtggaagttgtccagtttcttgtaagaaagtttgtggaggagg

SEQ ID NO: 5805 - DNA, 445 bp, Oryza sativa
  ref <308>: DATABASE ACCESSION NUMBER: AK062970
  ref <309>: DATABASE ENTRY DATE: 2001-12-06
tatatatttttccagtagtaattctaggtactattgcatgtaatgtaggtttagcggttctcgagccgtcaatgattggtgaaccggcggatccgtttgcaactcctctggaaatattacccgagtggtacttctttcccgtgtttcaaatactccgtacagtacctaataagttattgggcgttctcttaatggtttctgtgccgacgggcttattgacagtaccttttctagagaatgtcaataaattccaaaatccatttcgtcgcccagtagctacaaccgtttttttaatcggtactgcagtagctctttggttaggtattggagcaacattacccattgaaaaatccttaactttaggtcttttttagggatttttcagtttgattcattcaatcgtgaagtaccgtgcataggtatctaggaaatagttacttccaag

SEQ ID NO: 5806 - DNA, 592 bp, Oryza sativa
  ref <308>: DATABASE ACCESSION NUMBER: AK062971
  ref <309>: DATABASE ENTRY DATE: 2001-12-06
agacgcaagggcggcgctgctgccttctgcacgctgcggctgcgacggccgacggcgacgggcgaggggcgctcgctgcttgggcgcctgggtggtcggcgtgacgccgccgagccgaggtcgccaagacgccatcgccgacaccgaggctgccggccgcagcgccgccgagcagccgaggtcgcgaactcgcgaggcgtcgacggcatttgccgatttgcggcgttggcggcgagccggcgacggcgcgatggcgttcaggcattggcggctggtctgctactgctacccgtgctgctgcctgctagcccgtggctcaagattgggtacttctaagttgtcgagtttgggggagactccaccacgctttcgtacctctgagatatatggaacattattttgatatgggataaaagtaattccttgctcatgtattactgtggtttgtactgattgttgaaggaaccttaggccaattattatgtcatcattaatcattgacaaatctcttattgtaatctcatctattatatatttagttgcattaatgtaaacctccatattataagctaactgattatgaattttcttt

SEQ ID NO: 5807 - DNA, 942 bp, Oryza sativa
  ref <308>: DATABASE ACCESSION NUMBER: AK062972
  ref <309>: DATABASE ENTRY DATE: 2001-12-06
gtagcagcagaagaactgaagaagagtgatctagctagctcgctcgcctgagttctttgcttcaattcgatcctcgctaagcttcctccagctcgatcgatctctctctgcgttttagttggttaatttttgtgtttgagttatttgcaatggcggccgctaccatggcgctgagcagctccttcgccgtcgccgccgctgctgctggtggcgcgccatggcgtggtgtcgtctccgctggccgcgccgcgcctcgccggcgtgtcgcgctcgtcgtcagggcccagtccgagccggaggtggagccgacgaaggaggagacggccacgtcgtcgtcgtccccgtctccggcgacgaccccgactccgagccccgcggcggcggcgcccaaggcgaagccggcggcgagcacgaagctgtgggacgtgctggcgttcagcgggccggcgccggagcggatcaacgggcggctggcgatggtggggttcgtgtcggcgctggccgtggaggcgtcgcgcggcggcgggctcctggaccaggccggcagctggagcgggctggcgtggttcgccgccaccgccgccgtgctctccgcggcgtcgctggtgccgctgctccgcggcgagaccgcggaggcgaggagcggcggcgtgatgagcgccgacgccgagctctggaacgggcggttcgccatgctcggcctcgtcgcgctcgccttcaccgagttcctcaccggctcgccgctcgtcaacgtctaatttaattaattaattaattaagctgtacgtacaatacgtgcatgtacgtatgcgtgtactgggtagatagctagggatgtgtatgtatgcactgtagccaatagcaagcttgatagtgcttggtgtactaccttggaatttgaaaaaggaattcaaattttgaaactcgcaaaatattcgtggg

SEQ ID NO: 5808 - DNA, 562 bp, Oryza sativa
  ref <308>: DATABASE ACCESSION NUMBER: AK062973
  ref <309>: DATABASE ENTRY DATE: 2001-12-06
acaactcattcttctcttctgtcagtagagagagagagagagagagagagatcaagaactagagagagaaaggtaggtagctagagagagagtaggcgatcgatggcggattgggggccggtgttcatagggctggtgctgttcatcctgctgtcgccggggctgctgttccagatcccggggaaggggaggatcgtggagttcggcaacttccagaccagcggcctctccatcctcgtccactccatcatctacttcgcgctcatcgccatcttcctcctcgccgtcaacgtccacatgtacctcggctagctagctagctagctaggaggtaccatgctggctctggcatgtgaaatgttcatcgatcagctaaattaattactagcatttatgcaagaatggtattatatatatatatgattttcttaatttgggctagctagcaatttgattactactgttctctgagttttagtttatataatgtaaacttacttgagcttgtagcttaagatggttaattactcatgataagttcatatgaaaaatgtggttaatt

SEQ ID NO: 5809 - DNA, 716 bp, Oryza sativa
  ref <308>: DATABASE ACCESSION NUMBER: AK062974
  ref <309>: DATABASE ENTRY DATE: 2001-12-06
accgcgattcctcgcattcgtccccactccccagcggcaccgcatccgagccagcgcgacctcctcctcgagccagtggtcgcccgcccgcccgccgtcgctacctcctcctcgagccagcggctggcatagatccggttgtcgatgtggttgcagatcacggacgacgtcggccaccaggtggatgaggtcgagggaggcctggcggcgctgagcaacgatgtccaggtatggtgcttcttctccacctctctccctcatctcaggatgcgtcagatggtgctctccgggccgggatccttctctctcgcgcctcggtgtcgtcgacggcagcgtgaggaggccacggggcacaggatggagcacgcatgggctagcgagaccgcgaggtcgtcttaggtcgtcgtccccgtctcccccgagctgccccgttgtcgcttcttcctgtgagctctgttctttgacccaacaactatttggggtttagtctgtggcaagtgttctgctccaaatcactcgagagattggtgtcgatctgtaggtatgattgactgatttatgccctggattgagagagtaatatgtaattaggtgctttcttggtcattttttcctggggatttaactggcatccgtagatttcttggatttgggattgatttactgcttgattcgaagctctgtttcgttaatataatggcgagaacttgaactcc

SEQ ID NO: 5810 - DNA, 1018 bp, Oryza sativa
  ref <308>: DATABASE ACCESSION NUMBER: AK062975
  ref <309>: DATABASE ENTRY DATE: 2001-12-06
tgcttggttgcggatggcttctaggagaaggatcgacacagtggtggaagggtgatgtggcgcgcgtccataggttggacggcggcggcgcgggcccgggtgtcgtcatcgacacagtggaggggaggtgcgaggctggcggcgtgaacgcagctcacgcggacgctcgtctgcggccgatggagagcgaggatgcaaggcgtggacgaggagtagcgacgctcacgcgggcgacgtcctgggaggcggcgaagtgaccatcggtcacaaggcttccccgaagcacgtgtcggcggcggatgggatggacggcgataatgtgggccccgagtgtcgacatcgctacaggaaggaggcttacaagataagcttcgctgtgaactagctctccaattcggtgtggactcagttttctcgttcggtgtgaaccactcacactgtgttcttggtgtttggggaagagatttgggaggtgcttggtgggctaagagcacggtgcaggagggaggccgtcgtgcggggccctcggcttgaaggccgtcatccacccacggctgggttggtaggggcacggtcagtgcacggcgcggcactgagcgcggtgcggtgcggctcggtgcaggagcgcggtgcggcgcacgcaaggaggagcggcgcggcacggcacggtggctcggtgacccggtgcgccagcctcgcccgactcggcattttgccgagcacgtggcgggcggcgtgtcagcctgctggctgaggcaaggaaggagggggagtagacttggctgcaagagagagggagagctggtgagggagcaaagacatacttgtgctggggggtgagttgggctggctggaaaagaaggcccaacagaatggggactctctgtatttgtaaggattggaattgggaagaattttgtatttggaatttgtagatgaactgtatattggtaactggactgagaatttgtaataggactatataattggacatttgatttggctctggattgtcact

SEQ ID NO: 5811 - DNA, 650 bp, Oryza sativa
  ref <308>: DATABASE ACCESSION NUMBER: AK062976
  ref <309>: DATABASE ENTRY DATE: 2001-12-06
aagtcccgatgcttttttttttatcgatttcactttccccatcttcatctctcacctctgtctctctctccacgcatctctcaatcactgcaaagcaggagcgccgattcagtggcttcaaccataaatttttgctgccaataacagcaataagctccctgatattacccaggtttgcttcccatcatttttgtcaattaatttggctcctgttgctagcagcaatcagtcctggaagcattggcaacagtacgcagctatggttgctgtaatcagagaagtcaagcacgcatgcatgagcagaaaatggaagagacgaagctagagggtttgggactgattccagaatcatcggccaattcaatttcagtagcttgtgctttagaaatcttccgttgtgaagacattagatgacttgtctctggtagttggagcatgtggttgtgttcaatagataaatcatgcaaggtgtaaagaccagaatccctatctaaggtaattcccattcgggcatcacaacctgttcttgtctcagctcggggaagttttgtcaagtgatctctcttgtcctgtgctcggtagccctgattggaacatacaaatctacatgatgtaactaccttgtcaattttacttgtgttctcatactt

SEQ ID NO: 5812 - DNA, 1200 bp, Oryza sativa
  ref <308>: DATABASE ACCESSION NUMBER: AK062977
  ref <309>: DATABASE ENTRY DATE: 2001-12-06
tatgatgacttggtcatttgttcctcgattcttgaaactgatgattcagctatcatcgcagacaaatgaactctatcagttggcttctgttgctttctgcttgctgctagcctggtgtagtgattatcttggattgagtcttgaactaggctcatttcttgctggcgttatgatctcaaccacagattttgctcatcatactttggagcaggtggagccaattcgtaacttatttgcagcactcttccttgcaagcatcggcatgctcatacatgtcaagttcttgtggaatcatgttgacatattgcttgcagctgttatactggttataatagttaagagcgtagtcgtaacagttgtggtgaaagcatttggatacagcatcagaacagcttttgttgttgggctatcattagcacagataggagagtttgcatttgtgcttcttagccgtgcttcgcatcttcatcttgttgggggaaaaatgtatctattattactgggaacaactgcacttagcttggttacaactcctctcattttcaaactaattcctgtggtaatgcaccttggtattcttatgcgctggttcccctcggaaagcagtatgcagaatgaggataaagcaaccatgcttgaagcctacaacagatcactctaacattacaaagccacagacattcattcatttgactgacaatgatttattcgtgcattaactctttgcacatgccgtggaacattggacagacaattccatcatttctttttgcggcaatacgtctacacaagcgatgactaaagacacagtttgacaggccggggatctgttggtataccatttaagttgaaaaattgagttgtacatactgtacatgttgtcagcgtagcatattctttagactgtaaggccccaagccttggttttgtatcatccctgccaactcaacctaggagttaggtaggatttttggtgtaatgctatcagatataccgagagaaccgatatgtgctgattccccatcagaagaccatgggaaagctctatgttagtatatattgtccatttgtcctatgtatgagctgccaggtgacttgttctgttcttgtcgtatggataaacattttgtcacaacattctcttgtcctagtatgagctaccattggaaagtagcagcattttattctcccgtgaaggtt

SEQ ID NO: 5813 - DNA, 595 bp, Oryza sativa
  ref <308>: DATABASE ACCESSION NUMBER: AK062978
  ref <309>: DATABASE ENTRY DATE: 2001-12-06
aaatcttcagcggtctccgccttcagatacacctttgatccgcagcgatgaacgggggaagcccggtgatgacggagagagagcggcgcgcgtaccggtacgggcaggcgtcgtcgccgacggcgcgggcggtcgggcagctggggtgcatcaggaagtcgtggtccaacgactcgctctcgagctacggcggcggcgggagggccggcggcggcggcgcccaggcgtgcgtgtgcgcgcccaccacgcacccgggctccttccggtgcaagcaccaccgccaaaacgcctccaacctcggcgccgccgccgcggcgccggcccaggtggtcgacgttgacgcggacgccaagcaccaggaggcccaggagcaggaggagaaggcgacgtgagggcgaccatggtttgatcgatctgtcgcacttgtgcgtgtttaataaatttcatagttgtacgaacaaaagtgtgggaaatttttgtttcctctctctatatagtttcgagattttcgtacgagggtgcttttttcttcttgaaatcatgtaaaataaacttgcgtgtaaataatggaaaaaagtgccttgtgtttttaacg

SEQ ID NO: 5814 - DNA, 592 bp, Oryza sativa
  ref <308>: DATABASE ACCESSION NUMBER: AK062979
  ref <309>: DATABASE ENTRY DATE: 2001-12-06
aaaaaaaaagtttcccttttcatgatcagctcgaggtcgtcgtcaagccatcgatgaacctcttccttcggacctctttgggcgatgttggtggtggtcttcgctactattgttattctccaacaagacctaaaggtgagcttaaataagaggcttgttagctcaaacaaggcatatgggaatgagtcagttcaactcctgcgtcagccacctgttccttctccggcgaccctcctgctctagcgacggtcttcttcctcgactacgacgatggtttaaaagggcaactgaagtgtatctctacttgtctaggttgctttaacctccatccttcggaggtcccatttgggttcgcaactgggtttcatcttttgccgcttgccatggtttttctgctcctatcgttgttatctgagttctggctgttgcagttgcaagagatgcaaagtcaaggacctgattgctttttcttctcgttgttgaatcctttgcatttttcagaacttatgtgtaatttgctcattctcaagggacctctctgtaaaactggatgtattcccactttgcttatatactatatgctgatttgctg

SEQ ID NO: 5815 - DNA, 400 bp, Oryza sativa
  ref <308>: DATABASE ACCESSION NUMBER: AK062980
  ref <309>: DATABASE ENTRY DATE: 2001-12-06
tcgcacaaacaaaaaaacgcaaacaatgccactcgaagcaggtaacgcaaagaacggtgaaaagattttcaaggcaagatgcactcaatgccacaccatcaacgctggtggttcacacaaggttggtccaaatcttcacggtatgtggaacagacaatccggtaaggcaaagggttacgactactctgcagcaaaccttgaaagaggtgtaacttggaacgacgaaaccctctttgaatacctcgaaaatccaaagaagtacattccaggtactaagatgatcttcgctggcttgaagaaggataaggaaagatccgacttgattgcttacatgaagcaagcaagccaagaataaacgcttttataaaactaataaaacagttaaacgcgttcggcaatc

SEQ ID NO: 5816 - DNA, 583 bp, Oryza sativa
  ref <308>: DATABASE ACCESSION NUMBER: AK062981
  ref <309>: DATABASE ENTRY DATE: 2001-12-06
agagaggagatcaggaggaggggaagaggaagtagggatgggtttcgtgatggagttcgcggagaacctgatcctgcggatgatggaggacccggggaagcgggacgcggcgcagcgggagcacgtgtaccggatgaaggagcggtgcgagcgcaccaaggcggcgtggagcctcccgctccgcccctacggcttctggaccttcgaccgcttcaactcccagctctcctgggatccccagatcagccacgcccccggccgccgcgacccctacgacgacgtcctccaccgccactccaacccacccccctcctcctcctgatcccccgattcgatccggaatagatgccgttcgtgaggaagtgtggtcgcaataagaaacccgtttccatccaaatgacgtctttgaaaattttatccttgaactaccgtgctttggtcatatgctttctgtttggttaaaagctcagatccagaaggtcttagagaggccgttctgtatttccgttcttgattttactgttctgtatggctgtaccacagaaggttttaataatcgcactgaggaattgcttgcgtcatt

SEQ ID NO: 5817 - DNA, 390 bp, Oryza sativa
  ref <308>: DATABASE ACCESSION NUMBER: AK062982
  ref <309>: DATABASE ENTRY DATE: 2001-12-06
aaaaaggtctgagagagaataagcgccatgtccggaacgatcgcgcgcaaggccgcgggcaacgtcttccaggtgctcacgcccacgcgcaactacgggctcggcaagaaggtcacgcgcggcatctgggaccgcttcccggagccgtccttttgggaagtcacgcgcgtccggccgtcccacgatctcaagcacggcaaggtctacggtcgcctcaccttccgcggcaagacggatcctgtcgagaagcgcatcaacggcccgctcaagagggactggcgaatggccgagtaaacgcaggcgccggcagtgataggattttgtggccacgaagcctgctccgttcggagaaagaagtctgcgaaaatagagcgacttatcgtttgtatc

SEQ ID NO: 5818 - DNA, 1460 bp, Oryza sativa
  ref <308>: DATABASE ACCESSION NUMBER: AK062983
  ref <309>: DATABASE ENTRY DATE: 2001-12-06
agcacatccctgtagccatacccacctgctgccgatccccacctgctaccgatccgccgccgccgccaatggccgggctgccagctctcaccgacgacgtcctcgccgagatcctcgtccgcgtgccctcgtcgtgcgacctcgcgcgggcctccgcggcgtgcagctccttctgccgcatcgccacctccccgcggttcctccgccgcttccgctcgctccacgcgccgctgccgctcggcgtcctgtgccccgacggcgccgccgccttccaccccgccatgcccccgcacccgtcggcccccgccgcccgcgccctcgccctcgccgcggacttcgccttctccttcctccctccgcccgcccgcgcctggctcctccgcgaccaccgcgacggccggttcctcctcgaccgcgcgctcgccggcggctccaccgccttcaccgatgtcgctgtctgcgaccccctcttccggcggtacgttctgctcccgcccatacccgacgaccttgccgcctccgtccaaaatccatacctccagtgcggcggcgatggtggtctgcaatcccgcagtagcgagatcttcctggcatcttgcggcagtgacgcaggaggcgaggagccattgttcgctgtgatctggatggcgtgctgccgagggaagctggtcgcgttcttcttttcatctgaatcccaacagtggcgtgctctttcacctcccgaacactatgctttgagtacgaggagagtcatgggcgttcgactcggacagcgcaaccatgctcatgggtgcttctactggatgataaccctcacccataggtggcttgtattagacactcgccgaatggagttcttggttgtggatatctctcctgtcctttcaggccgcgcaatgatgttcagtaatcagattatcactctggaatcaatggatggatggactatcgttgttgtcgcagatgttttccggtcagataaacgatgtgtcctgtatttttataagttcatgtatttcagtgaccggtggcaactgcagagcaaaattaacttgcctgaggaatggggctatcgatttagaggcatcataggtgcatctgaatgttacttatttataaagcttgatcaccccaagcagaacttgggagatccagttcagcagaatgctatgtatttcatgtttgatatcaagaccatgcagcttgggaggttctctgagatatgttctggtactgtcagcgaagcctatctttacactggttttccaccatcacagtcgctacccagtgtttgatgcagtaagcttgttctttttgcttgcagctatcaatttacatcgttctattatttcatgttactttttgattatcttgtttaggggaatattttattgtaatatccgctacttcttgtattttatttgaataaatatgcagataacacatgtagacggttttat

SEQ ID NO: 5819 - DNA, 743 bp, Oryza sativa
  ref <308>: DATABASE ACCESSION NUMBER: AK062984
  ref <309>: DATABASE ENTRY DATE: 2001-12-06
ggccaaaaaaaggaaaaaaatccgcacacagcaaaagcctctccactacctctccctccacctgtcgcctaaaccctagctcgcatctcgaggcatctcgcttcacctcgtcgtcgcggtcgccggagctggagccggaggcggcggaggagatgggcaccggaggcggcgagggggacaagtcggccgtgctgccgctggaggcgctgctggcgctggggctcgaccagcgcacggcggagaacgctctggtcaacagcaaggtcaccgccaacctcgccgccgtcatagccgaggctggtataagtggatgtgataagacggttgggaacctcctgtacacggttgccactaaatacccaaccaatgcgcttgtccatcgtcctgtactcattgactatattgtgtcaacgaagataaagaatcctgcacaactagatgctgctctgtcattccttactaatactggccctgactctttagatactgggaagtttgaagaagcctgtggtgtaggtgtggttgtttcaattgaagagattaaatcaacagtcaatgaggtattaaagcataatatggaggctatattggagcagcgatatcatattaatgttggtaacctatgcggacaggttaggaagaggcacccctggggtgatgctaaggcgaccaaggatgaaattgacaagaagcttgcagagatattaggtccaaagacagatgctgacaatgtaaaaccagtg

SEQ ID NO: 5820 - DNA, 742 bp, Oryza sativa
  ref <308>: DATABASE ACCESSION NUMBER: AK062985
  ref <309>: DATABASE ENTRY DATE: 2001-12-06
gcgccgccctctcaccaacccgtcccagcgagcgctcgcgcggcggagatcggctgccaccgcgggcgggatatcgccggccaggaagcagttccctgaaaagaagattgtgcaacagtccaggaactcgaagatgaacaagggtaaaatttttaagttagcaaaaggattcaggggaagggcaaaaaactgcataaggattgctagggagagggtggagaaagcattgcaatactcatacagggatcggcgcaacaagaagagggacatgcggtctctttggattgagcgcatcaatgctggtacacgaatccatggggtgaactatggcaatttcatgcatggattgatgaaggagaatatccaactcaacaggaaggtactttcagagctgtcgatgcatgagccatacagcttcaaagctcttgtcgacgtctctcgcactgcattccctggaaataggcctgttaagaaggaggggctagcgagtattctttaaaacaaacctccccaagtcttgttacaatcacgtctgaatgaaactggtattgttgccttcagcctgcagccgtacaggaaactcaatggcagatattgcatttgtaatactatgtaattctgtttggaaagctgtggaagagaaacacctagttacatgtgttcttcttacctgttattgttggttttttttggataatgtgctctgtttaccttgataaatataacagaatggatgattatc

SEQ ID NO: 5821 - DNA, 698 bp, Oryza sativa
  ref <308>: DATABASE ACCESSION NUMBER: AK062986
  ref <309>: DATABASE ENTRY DATE: 2001-12-06
aaaagcgcaagagactcgcaacgcaggtcagagcggaaggggagaagaaggaggtgctcctctcgagtttggagaaaatttcccccgcagaggcctccgcttgctcgcggagatggcgatgaccgtcgaagtgctcgctggacttgcatttatgttctcaacaagtattcttttgcaaatactggcttgtgctctgtacaataattggtggcctatgttagcagctcttatgtatgtccttgtaccgatgccatgcctattcttcggtggtggatctacccagttcttgactagcagagatggtggagggtggttcaatgctgcaaaattcctgactggtgcatctgccatgggaagcattgcaatcccagcaattctgaggcacgctggcctaattgagactggagccatgttcatcgagttcacgtccttcttcatccttgtatgcacagtgatgtgcttccatagagctacgctggatgaagattggtaaaaggctcgaggcacatggacacaagaaggtaaatctgtttcatggtttgcttctcagcacgtacaagagaaattccttagtggacactaacatggacatgtgtacaaagaagcaaatatttgagttggcgtgactgtccgtataaatgctcaaagatttgctgatctagcgacaatgccaatgttctatgtgcacttttcatgtg

SEQ ID NO: 5822 - DNA, 546 bp, Oryza sativa
  ref <308>: DATABASE ACCESSION NUMBER: AK062987
  ref <309>: DATABASE ENTRY DATE: 2001-12-06
aaaaacaaaaaaggagcatcgttccttcatcctctttcctcgtcctcatcgccactcgtcattcctctcagctcgccgccccgattcatttgcttgccgccggatctgacgcctttggactcgtggccaacgaatcccgcggcgggaggaaggagagtgtgctgaatcccgttggattcggccgcctagaggccggcggacactggatccaaccgccttgaagccaaaggccgcccgatccacagcgcagcagtggcggcggcgacggcctcagcctagagctagcagtggtggtggtgacggcctcatcctccgacgagcagcggcggcctcccccttctccttgatggccgcatggtaggtgtggatcgaaggtgaccacggctgagagggagattgatgatggtgttggcggtgagtcagtttggttctcctgttattttgttgaatgtctaatatggcagaagaattttgatccgtgatttggttctgctgttgttgatgacgttgacggataattgaatcaatgtaaatttcctcttcttg

SEQ ID NO: 5823 - DNA, 741 bp, Oryza sativa
  ref <308>: DATABASE ACCESSION NUMBER: AK062988
  ref <309>: DATABASE ENTRY DATE: 2001-12-06
aacaattacttattattactattattctccccaagcactaatccaatccagagatgaacacaagagcaacaagaagaagaagaagaagaagaattctggacaaaaggcctaaagagctagagcagcaagcagacagaaacagaggaacaagtgagacgacttacatggccttcttttgggtcaggtaaatttcttttgttcatttcttggcacagcatttgcagctgtacatgtgattgacgccaactatgactcgtgcagcagacaagcaagcaagcaagcacgccttcttttctttgtcttgtttcttggagcagcatagcacaccgatgcaacgaaatgaggaaggaaatcacaaatgaatttagagatgtccacactgactgactagaaatcacacgcacgagagagcagttcccctgattactgcaaagcaagcaaggcaaggcaagaaaaggaagaagagtttgtttttcatcttgttgatggtggtggtggagtcacggtgcacagcaggggatggatggatggatggatggatggatgagagaagcagagacctaacctaatcagcggctaaagctcctatgtcaacccaactgggaagaagcaaagagcacagagcacagggctgaaatttgcactaaaaccaaccatgtctgatggctcaattttgctgagcactgtaattgttgctcctgctccatcatcaattcggtcgaaccctagaaatcgaaggag

SEQ ID NO: 5824 - DNA, 860 bp, Oryza sativa
  ref <308>: DATABASE ACCESSION NUMBER: AK062989
  ref <309>: DATABASE ENTRY DATE: 2001-12-06
acgaccacctcctcccctggtgccaccttctcctgttggcttcatcaccacagctcagcagcatcatcgccttcgccttcgcctccctcccttctccccgtctccatttcttttgtctctctctcgctcttcaaatccagctgctgccgtacgaacgcgcattgcctcagcagttcttggctcctcgcctcgcctccggttcgcctccggttcgcccccatctcggggttggaggtgagcttggagctccctgttcttggaggagccgctggttcagctggtggtgttcttcgatggggaggggcagccatggctgctccgttcttgggtcgtcgctgctgctgctgttctgtctgggctccgccgccgcgcagaaggcctcgacttggaagacactgagcggcaatcctccagcaatcatcgccaagggcgggttttcaggcctttttcctgattccagtgattttgcttatggctttgttgcggcggccagctctccggatacagccctgtggtgtgatgttcaattaaccaaggatggtgcaggcatctgccttccggacatacgaatggataattgcacaaacatagctaatgtttatccaaaggggaagaagacttacagtgtcaatggtgtatctacgcctgggtggttttccgtggactatgacagcactgggttgagtaaagtaaactgtaagtgaaactcacaattttgtaattctaatattcttttatccttttcttttatcaagtgaactgtagactagtaatctcctgtttcttgtgtgttgggagaagaaaaatgctcaaatatatgcgcgttgtttcttgaaacaccataaaagagatacaaaacc

SEQ ID NO: 5825 - DNA, 489 bp, Oryza sativa
  ref <308>: DATABASE ACCESSION NUMBER: AK062990
  ref <309>: DATABASE ENTRY DATE: 2001-12-06
agccacgcccccatcgccaccacaaagtcatcgtgttcgtcgtcgtcgtctcttctgctgcatctggagaggagaggagagaagcttgggcgagcgagcgagcatgtgctaccaggtgaagtgcgggacgtgcggcaagtccacgtgggccgggtgcggccgccacgtggcgtccgtgcacagccagatcgccgacggccagcactgcgcctgccgcgcctggccgggcgtcgccgacaaggccgccgccgccgccaccgacgccgccggcgaggccccgtcgtccagcctctgcgccatcatgtgactttcgccgccaccgaataaacatccgctcgccgtcgtcgtcgtctgcgatttgtgcttgtgtagtagtatcgggtttcaattaatggaaaaatcttttgttcgtttaaccacttgcgtgattagtccctgtgaattgtatgctccattctattccgttataaatggatttcaggagtactc

SEQ ID NO: 5826 - DNA, 592 bp, Oryza sativa
  ref <308>: DATABASE ACCESSION NUMBER: AK062991
  ref <309>: DATABASE ENTRY DATE: 2001-12-06
actttcatttttgccaacagcgaaaacgaacaccacggcagttgagccggctgtcgtggtgttctcgctgactccgcgatttgttgcggccaccagagaagactgccatggtcattgtggctagcgagcacgacgaccatggccggctgtgatcagcagcgtccagtgggtgactaccgtggcgaccttactggactgcaagccactcgactctgaactcgctccgaagctctcatctcgccgcaaagagtctcgcctcaccgggcaagaccaggagccaatgctgccgtttgcttttgcgatgaggcctgggcggagaacagggcgtggcgtgcagtcgatgcctccccatccactcaacacaacgaagggcatctccccgtgagaccaggcgcctgaaggtggccgtcgttcgtttacgagtgggcgtggacggagaacacgtcgacggtacttccacccgactcaatacaacgcaagggacctcccccttgtggggctagaccaggcaccgaatggtgaccgtttgtcgtttgcgagtggactgggtgcttcctcttaaagtttgaacatgatcaacctttgccgtacc

SEQ ID NO: 5827 - DNA, 1117 bp, Oryza sativa
  ref <308>: DATABASE ACCESSION NUMBER: AK062992
  ref <309>: DATABASE ENTRY DATE: 2001-12-06
atatctatagtaaacaatattccaagagtatactgagcgacctggttgcgcacgaatggcgactgatcataatccgaagtgtgttgattgtcaaacgatggctgaattagtagcgcatcaacgacatgctcatgggctatgcgacggttttcctacgattttatactatgcacgagaaatgaagaatttagctgaagaaattcgatcttgcagcaaagaacatttgattgaattgggtgcaattgattggcaagaatttcctgatcgttggccaaatatatttattcgaaattccgaacagattcgtaatagccatgttttatttcttgcatctcttcacaatcctcagacaatcttcgaacaaatctccctcctctaccatattccgaaatacctctgtcgatcattgaaagttctcttaccttattttccaactggtactatggaacgtattcaaattcaaggtgaaatcgcaacagcttattctcttgcccaaatgctttccgcgatcccattgacacgcacaggtccatgcgaagttgttatattggacgtacatgctttacagaatcaattctatttttccccaaatatcattgtccgtttggagtcaacagtagatttactcttggatcaattaaaggcgcgagccgatcaaaatgaaaagtacgctattgtttttcctgatgatggtgcacataaacgattcggacaaatgttcgatgacaagatctttccgaaattgatctgcagtaaaattcgagaaggcgatgagcgaaaaacaacgatcaaagacggtaacccggaaggttatcattgcatgattgtcgatgatttagtgcagtcaggtggaacaattattgaatgtgcccacgcacttctacaaaaaggtgctgtcaatgtttctgcttttgttggccatggaatatttccaaatgacagctggaaaaagttcgttcatgcggaaaatcccaaagttcgctttcatacgttttatgtcaccaatacatatccaaatacggaagttttaatcgacaaaccaccatttaaagttttatctattgcccaacttttatgtaatatctctcttacttaaataaaatcagtttttaaatcg

SEQ ID NO: 5828 - DNA, 559 bp, Oryza sativa
  ref <308>: DATABASE ACCESSION NUMBER: AK062993
  ref <309>: DATABASE ENTRY DATE: 2001-12-06
gaaaaaaattcagtataattaggacggtttgcttacagtgagtttcaggagtcggcgcacgagcgcatgctgccggtggccgccggcgccacggcggcggagcccatggcctgccggtcggcggcgcgcctccggacacaccggtacgagcacgtggcgacccagaacgcccacgggagcgcgacgagcgccagcccgacggcggggagccagtgcggcgcctcgtgcgacggcagcaccacgtagccggcgaggcacccgccgccggcgagcacggagaggagtagcagcgtcgtcaccatccacacgcacgcgctcccgcccggccgctcctccccctcctgcatcggcggcgccatcggcggcggcggcgaaagaggatcacggcactaggcggcgacggcggcctcggcggcggcgcgggtcaagaacaaggacgaggcggcgtgcatggcaatggtggcgccaatcgcctctctctctggatttgtgttcttgttcttgttcttgttcttggattttgattgattgaaaaaaaatgtgccaaaaaagttttgat

SEQ ID NO: 5829 - DNA, 742 bp, Oryza sativa
  ref <308>: DATABASE ACCESSION NUMBER: AK062994
  ref <309>: DATABASE ENTRY DATE: 2001-12-06
aagtgcaacatacattgctctcatgtgattgttgaatgtttggtaagcattactgctgaaataatacatagctggattccaaaatttgcactgtttgattatcttggcctgcatattttttttagcagaatttgtagagtagcgtgtgttgcgttcactagctccatgtctcggcctcatgggggaagttttcaatagatttgctctgccaagttcagagtagaactgtagaagattgtcttgtgcgatggagcagagaaaacaatcattgaaagtagttcataagtgtgagggcattagggcaaagtggcgaaggaatttggcttttgtgatcacatgaggctgctcttataatctgcaaacctgtcaatctaatatgcaaatgcagtttaattagtgacagactgttcatccttttgcagctccattgtcacagggaatctcgaaggcttgtcaagaatgctggtcctcatccccttcagaactgaagatataatggaggaggctcaaatacatatgacgatcacgacaacattcttttctgcatttcttttcattttttggccggagccaatgtaattctcttttctttcgttgcccttgtaatttgcttcaaatactaaactatagcgaggctgctcctccattatgtacctgccgatagagtttgcagatatgtatagaaagtgccattgttttcatctgataaacgagatcaatatatcatgtggtgttccgtttt

SEQ ID NO: 5830 - DNA, 526 bp, Oryza sativa
  ref <308>: DATABASE ACCESSION NUMBER: AK062995
  ref <309>: DATABASE ENTRY DATE: 2001-12-06
aaagccccgcaacgctgagcagagagaggaagaggaagaggaagaaggcatcatggcgacggcgaaggcagccacggcgccccccacccaccgcgcgtcgtcgccggcggcggcgtccccgccgtaccccagcgccgccaggatcgccgactccgactgcttcccccagtacaccgcctccctcaagtgtttggaggccaaccaagacaagagcaagtgccagcagcagttcgacgactataaggagtgcaaaaagagagagagggaggctcggcttgaacgaaacaagggtcggtcattatttggttgagcagtacagaggaccgatgtgcgataagatgttagtctgaagcacgtgaacggatgacttttatttcctgatgttcctttagcttgtgaagttagaaacagtagagaattctctgcctctccgggttcagtgtgaaatgtaaggtttgagacgataatttactgtttggtcgtgaccaaatttcccaaataaatggtatttccagaacgattgcat

SEQ ID NO: 5831 - DNA, 517 bp, Oryza sativa
  ref <308>: DATABASE ACCESSION NUMBER: AK062996
  ref <309>: DATABASE ENTRY DATE: 2001-12-06
aaggaggaaagcctcgagcatcatcatcagtaggaagaagaagaagaagaagaagaagaagagcaacaggaagaagcaagcaagaagaggaagaagaagaaagcaaggagaagaagatgcaggactggggtccggtgctgatatcttgggtgctgttcatcctgctgtcgccggggcttctgttccagataccaggcaagtgcaggttgatcgagttcggcaagttccagaccagcgtcgtctccatcctcgtccacaccatcctcttcttcgccctcgacgccatcttcctcgtcgccatcggcgtccagatcaaccttggctcctctccctgattctctctctttgtttcttctaggtaatctcaattgcatatgtatagcagtatatatgcacctccatccatcatctctactcaccttagctcgttaatttgtactactatttgtgtgttccttccaattcttggcataatattgtgactcaaaggaattgatttcagagttactcattactt

SEQ ID NO: 5832 - DNA, 897 bp, Oryza sativa
  ref <308>: DATABASE ACCESSION NUMBER: AK062997
  ref <309>: DATABASE ENTRY DATE: 2001-12-06
gtgctcgccaaaagagaaggggaaggaaagccatggcggccacgagctccacctccacggcgctcttctcgctggccatcccttcctcccgcgtcgtctccacccgaggccaccgcaaggctagctctggcagtggccccttccgggcggcccgcatcaggtgctccaacgccgcctcgccgaacgcgtccgccggagccgcctccgcggaggaggcagcgccgccgcccaagccccaaatcgacctcgagttcgtcggaccgaaggcggatgccgatgggtcgttcccggtggaccgggcggcggcgggcagcggcgagaagctcctccgggacgtcatggtcgagaacaagatcgagctctacgcggcatatgggaaggtgatgaactgcggcggcggcggcagctgcggcacttgcatcgtcgagatagttgatggcaaggagctcctgaatgaaagaacaaacactgagaaccggtatctgaagaagaaaccggagtcatggaggcttgcttgtcagactattgttggaaacaaagaaaattccggcaagtacaagactacaagtataccacaagaacgaagggtcttttcgctcatgcttatcacccaaaatttggcccacgaaaatgcatttattcaccatgatttcagtgagatttaaacggttttattattattatttattttcgcaggttgtcgtccaacgtctgccccagtggaaaaaatgattgtagtgcacacgtgatgcactaactgcatgtgatcagcgatcaagttgtactacctgctatgcactgttgaacacggaagcatgcaatgatttttctcctggaatttattggcaatatgtaaaaattataccatatcattgaaatttacatttacttcggtag

SEQ ID NO: 5833 - DNA, 555 bp, Oryza sativa
  ref <308>: DATABASE ACCESSION NUMBER: AK062998
  ref <309>: DATABASE ENTRY DATE: 2001-12-06
gtcccccgcaccacacgcgccccgtaccccgcacatccacctcctctctctcctccctccgcgccgcgcgcccccaaaccctagaactccacgcacgcgacgcgagctccaatcccacccggtgttccccccctccccctgattcgcctgcaaccaccactcccctctccaatctaatcctcttccggctgtgccgtcctcctgctccgcttcccttttttccgcgagattttgttctgtttgggggagaaactttttttgggtgcttttttttttctttggttgtgttgtttcaggagcgcgcgtggcctcggaggattcgcggcggctgggttttggcgcttccgtgaagggtcgtgcccctcccgtctccgacgtccgatctctgtgcgccggggttgtcagctacaatgtcatcataccctgtgctaaacaacagacctattgatcaatggagagttactgatctgaaggatgaacttcgtaagaggaggctccctgttaaaggcttgaaagatgaacttgtaaggcgactcttcgagtcaattcagagtg

SEQ ID NO: 5834 - DNA, 547 bp, Oryza sativa
  ref <308>: DATABASE ACCESSION NUMBER: AK062999
  ref <309>: DATABASE ENTRY DATE: 2001-12-06
atgcgctcgcccgtcggccatcggtggagctcaggggatgctgctgaagcacgcggcggcggccagcccgtcgagctcgccagccgggcctccacctccttgtcggcataacatcgcagcaagtcgctacgcggtagcggaagtactcccgcacggcggagctcgggcggcggcggcaagcccgtcaagctcgccggccgggcgtcctcctcctcgtcggcacagcagcacgttgtcggccgaagcactcctgcatgcgctcgcctggcggccaacggtggaactcgggcgaaagaggatgcaacgacggcggagccggagctcgcgcgcaggcagtgacgagcccgctgccgctgtcgtgctttctcacactttgtcagccacgcccggaaaatcctaacaacctacttctagctgccaacaaacactcagaagattggatcaaatcagtacacggaggaagacgagattttggtgccgcgtactgctgctgctacttttctggtttgttatcaacataaataggaaaactacatgcagactcgcc

SEQ ID NO: 5835 - DNA, 912 bp, Oryza sativa
  ref <308>: DATABASE ACCESSION NUMBER: AK104949
  ref <309>: DATABASE ENTRY DATE: 2002-08-28
agaattcttcctctccgcttctctgctcatctgctggtggtggctgcagattgcgctccgatggcgcaagcggtgcggccgtgcaatgccacccttctcgcgcggctccgtgacggcgaggcgaggttcgagctcctcgaggactccgcggccgcggccgcggcctcgcccgctcctgctccagtttggcccggcctcagctgcttttctagggttgctacctccctgaggggcgggtggtcgggggcgctgaacaaggtggagcactacggggtccagagggtcacgggtgatggccggtgcatgtttcgggcgttggtgaaaggaatggcaaagaacaaggggattccattgacctcaagggaggaggtacaagatgcagatgatttacggatggcagtaaaagaagttatctgcgatgatgagactgaacgacaaaaatatgaagaggcagttatagcaattactgtggatgaatcattgaggcgctactgccatagaataaggcgatctgatttctggggtggagagtcagaactcttggttttgtctaaattgtgtcggcagccaatcattatttatattccagagcgtgagtaccatgggcgtggaaatggttttattcctatagcagagtatggactggaattctccaaggactcaaaacagtggaagaaaaaggtgccagtaagactgttatacagtgggaggaatcattatgatttgctagtataacatggttgcaccgaacgttatcagtaccctgaaggtctgaactatttatgacaactgattttgattccatcattccattgttattctttgatcccacgtagttttttgcttgcgtctctgcagacagcttcgatgctactccatccattccaaattgatctaatatagttttttttg

SEQ ID NO: 5836 - DNA, 658 bp, Oryza sativa
  ref <308>: DATABASE ACCESSION NUMBER: AK063000
  ref <309>: DATABASE ENTRY DATE: 2001-12-06
agtcctcaaattcctttcaaatacgcactcgacaccctccccctttcccgactacttcaatccaaggaccatgaagactgcacttcccattctcgtggcactcggggcagttgctggcttcgtcgccgccgacaatgttccgacaggcgtgaacgtaactgtcggcagttcggcacaaaaggaatccagcaacgacatcgaagcctttcagtgctggacgaaacccgacggtctcggcgcctggtactacgactcgaagtccaacggcccgtaccggtgcacactcaagaactcccaagacgactggtccatgctcaatgcgtatcgctcgggcggcaccgagggcgtccactggaagtacacggaaaacccaaacgacggcgaatgcctcaataactggaagatctattcgtcggatggccagacagtgaccgcgacagtatccggtcgcacgaccactcagggcggctggcgctggtgcgccttgccagtgtaccgccctggtggggtggtgggaaagcaatgggactactgcacctgcaagtggcagaccaatccgcctcatccttgagcgtaacaggcgggaatgcttttgtgggcatcgtgattaagactctatgagcagtattttttaaataaaaatacactacgtcaggag

SEQ ID NO: 5837 - DNA, 556 bp, Oryza sativa
  ref <308>: DATABASE ACCESSION NUMBER: AK063001
  ref <309>: DATABASE ENTRY DATE: 2001-12-06
tactttgtctggaatttgcttgcgttaaccctagcttctcttctagatctggaaactgccttttgtcacattttatttcccccaaaatgtgggggttcaagttcagctgaaccccatgctcagcgagtcgcgaggcgattgcaacatcggccatttcatctccgctagcggtggctgatgatggcattcgctccaaaaaaccgcggctcgtttgaagagttgcaaatagtttacacccctggatctaaacacaccctgaattccccgcggcgatgaggaatgaggccggtttagctccggcgcctctcctgatcggtggcggccgcctcggatttccgcttttcgggggccaatccccagccgcgtcgcgcacgccgtgcggcattggtctggaggccactgctttggcagctgccgatgtcgcggcgcctgcggcggtggaggatggggaccgtgcgtggcggtatccgcgttggcttcctgcccagggttggccgagcaacgcaaaatctgagccgcaattgttggactatttatacattttcagaataaactc

SEQ ID NO: 5838 - DNA, 537 bp, Oryza sativa
  ref <308>: DATABASE ACCESSION NUMBER: AK063002
  ref <309>: DATABASE ENTRY DATE: 2001-12-06
atcacaggctagcaagctcgactgatcatctgaaatggctcgcaagaatctccttctgcttggtgtcttcctatctgctctgcttttcttcttcctggatgtagctcacgcaagagagctcgctgaagccagtgaatctgaggggaagaatgtgaagccaacaggtaggtcaggggtcgaggatcagaagtggggcggtgctcatggaggaggatatggatatggcggcgggtatggtggaggaggatatggtcatcctggttatggtggaggatacggtggtgggggtggctacggtggtggtggaggttatggaggaggacatggtggtggttggccttaataggtattcgagtcatctaagtacaactgttaaataagtcaattatgacaaacttgtttgagtatgcatgctgctagtaggaacattgtatagtagcaagaaactagaagagcatcatgtttggtctcttcttatatatgtatgttccttccaacatgtattctggctttaagcataataatatggtatatctg

SEQ ID NO: 5839 - DNA, 503 bp, Oryza sativa
  ref <308>: DATABASE ACCESSION NUMBER: AK063003
  ref <309>: DATABASE ENTRY DATE: 2001-12-06
gatgccgggtaacggggaacggccggacgccacaggcgtggccgtgcggcggcggtgctgcaggcgcggtcggcggtcgggcgccaatgctgtcggcgccggggcgacggccgatggcgcaccctcttttttttttcatttttcttttcttgttcttcttcctttctttgttcttcgtgcgtggtggtcggcccggtgacaagcacgcggcgcggcagggcatcatctccgtggtggcacgacgcagtgcggcggatgcgcggaacggcgcatcgtgcgtgcgcacggcgcggccccggcctcggcttaggcgtggtggacagcgcgggtgcggccgcggcactgagatgaatttgctttcattcatgtgaagctcaaatttgcagaaaatcttagacaagcccattggatggctcagctcgatgtgggcggtgccccctaggatccttgactattcatgtttgcagtccaacaataaagcaaaacttgaaagctgctgcttg

SEQ ID NO: 5840 - DNA, 599 bp, Oryza sativa
  ref <308>: DATABASE ACCESSION NUMBER: AK063004
  ref <309>: DATABASE ENTRY DATE: 2001-12-06
agcggtgtggcagccggcaggagagccacggttgggagagacccgaggcaggtgggcggggagggaatcgatgacttcttcccctcccacacgcatcccgtcgtctcccctgctcccctcttgcacggatcctccaccggtgactggatcccgtcctctctctggccgctagcggcggccgtggccttccccaccgtgagcggccacggcagctccctccactacttccgatgggtggatccggcggtggcggtggcggcggcggtggcggtggccaagggcggatccggcggcagtcggtggtggtggcatcggtgacggccaccgcctctcttctgccttcggtggcggtagtggcgtcgggtggatccggcggcagcggtggcagtggtggcagcggcgagtggatccggcggcagtggcggcggccgagggcgatccggcggcagtcggcgacggccgcgggtggatccggcggcagccgagggtggatccggtcgccttttttttcgcccgagtttgtttctttttcgtggaatcagacattaggatcaagttcatgagctctactcggattaaaattgctcttttatgttgtt

SEQ ID NO: 5841 - DNA, 704 bp, Oryza sativa
  ref <308>: DATABASE ACCESSION NUMBER: AK063005
  ref <309>: DATABASE ENTRY DATE: 2001-12-06
tgctacaagggcacaccatgcatctcggtgatggatcggttgacagctgtttaactgcatgtgatggttcccagaaggatcaagatatcctatcaattagcctttcagcccaaaaaggaaaagagattggttgcatgtcatttgatatgcatgtgaaagaaagaggaagtgaggatttgtttctcgacaagctaaacagaaggccttcaaatcatccagaaaggtgtgagaggagaggtggctttagtatgtcatgccagacagcaaacttggatctgaacatgaacgacacttatgacgggcctaaacactgcaagaaatttgatttaaacgggttcagctgggcctaggaaatgagcactaacaattgccatgtcctttagcactatcagtgagaacaagtgaaaacagattttttcttccgatgatcaatggtattgccatgccttcgattgaaagatcaacgccacttcacaatttgaccatctctgctgttataaaatggtaattcactgaaataagtgatggaattagcgataagatgcttcttgtgcaccacacaagttaccaatttggccatgtagatcccattcccggagtcggtagcatttgagaacttggcactctccattattctgccttaccgtgattgtagtttgtaccatagaaatataacaaattttgttaaaaattccatttgagct

SEQ ID NO: 5842 - DNA, 622 bp, Oryza sativa
  ref <308>: DATABASE ACCESSION NUMBER: AK063006
  ref <309>: DATABASE ENTRY DATE: 2001-12-06
atatatatatactcccacctcacgaagcaaaggtaatttcccctctttttttttttttacatctcctgtgtgtataaaagaagccttgaaggtcacagcccaaaggaagaagggaagaaacatatcgtcatcagattaatctcaatctccagctagcgtctccatgggttccaagaaggatgcccaaacctgggcagaccagtggggctcatctggtggcgacggaagcttcaagaaaggaggaggaggaggaggcagcagcgggaacagcgagaagaagacggtggccggcaacgtgaaggccgcggcgtcggagggcctcgtgaaggcgaaggcggcggcgctggtcggagcgcacaaggtgaagtccgggacgagcagtggcatcaagtgggtcaagggccagtaccagaagaggactggaaagtgattggatttctgatgcgtttgcctggttgctatgccatcgtctcactagctgttgctcctttagcttgaagcattgaagaaagtatcgaccagagacgggaggttatgtctttggcgctattcatttggatgatcttgtgagcaattaattaaactgttgctgattttaatacaagagagtgtcttttggtgc

SEQ ID NO: 5843 - DNA, 479 bp, Oryza sativa
  ref <308>: DATABASE ACCESSION NUMBER: AK063007
  ref <309>: DATABASE ENTRY DATE: 2001-12-06
gtacccggctgcgcacattccgaacgccacggccttctacacggagttctttgcgacggccatgctgttggcgtgtatcttcatgctcggcgaccagcagaaccagccagcgcgtggtgatgcctcgccggttcacttgatgttcttgattctgggtattggtgctgcgttcggctccaactccggctacgcgttgaacccggcgcgtgacttcggtcctcgcttggcgacggcaatttgcggctggggctcgaaggttttcacgctgcgtgactcgtactggtggattccgatcgttgctcctgtgttgggcggcgtgttcggtggctactgctacaagatcttcatcgagtaccaccacccgcgcaagtaatcgtgtcgagagtgtccgaacagcctgggggtcgtgtatgatgagtgctgctatggctgctgcggccgtggtttaacccccattcgtaacatgtaacatctactgg

SEQ ID NO: 5844 - DNA, 599 bp, Oryza sativa
  ref <308>: DATABASE ACCESSION NUMBER: AK063008
  ref <309>: DATABASE ENTRY DATE: 2001-12-06
attgctcatttcgcacgaaggaaccatggctaccccgatcgaatccgtccaggtctttggccgcaagaagaacgccacggctgtcgcttactgcaagcgcggcaacggtctcatcaagatcaacggcacgccgattgagctcgtcgagcccgagatcctccgtgtcaagacctacgagccggtgctcctcctcggccagcagcgcttcgcgaacgtcgacatccgtatccgtgtgcgtggtggtggtcacaccgcccagatctacgcgatccgccaggccatcgccaagtcgctcgtcgcctactaccagaagtacgtcgatgaggcctcgaagaaggagatcaaggacatcctcctcgcctacgaccgtacgcttctcgtcgccgacccgcgtcgctgcgaggccaagaagttcggtggtccgagcgcgcgtgctcgtttccagaagtcgtaccgttaaactggtcgactctgtttattgcttcttgcgacggctacgtgggggccgcttggccacttggctctgttgttaccggtagtcacgtggtctggctaaccgtgtctcaataaacaaatcggaaagagcatttctctcgtgc

SEQ ID NO: 5845 - DNA, 1347 bp, Oryza sativa
  ref <308>: DATABASE ACCESSION NUMBER: AK104950
  ref <309>: DATABASE ENTRY DATE: 2002-08-28
agcagcagcagctaccagcaacaagcattctcttctagccttagcctagctagctagctttgttgtctagctctgatcgaggttggtggtgatcatggcgtcgtcgagggtgatcctagcgctgctgctcgcggcggcggcggtgatggcgtcgtcggcgcagctggacgagaagttctacagcaattcgtgccccagcgtggaggccgtcgtccggaaggagatggtgcgcgcgctcggcgccgcgcccagcctcgccggcccgctcctcaggatgcacttccacgactgcttcgtcaggggttgcgacggctcggtgctgctcgactcggccgggaacagcacggcggagaaggacgcgacgccgaaccagacgctgcgcgggttcggcttcgtcgagagggtgaaggccgccgtggagaaggcatgcccgggcaccgtctcctgcgccgacgtgctcgcgctcatggccagggacgccgtgtggctgagcaagggcccgttctgggcggtgcctctcggccgccgcgacggcagggtgtccatcgccaacgagaccgaccagctgccgcctcccaccgccaacttcaccgagctcacccagatgttcgccgccaagaacctcgacctcaaggacctcgtcgtcctctccgctgggcacacgatcgggacgtcgcactgcttctccttcactgacaggctgtacaacttcaccggcctggacaacgcccacgacatcgacccgacgctggagctgcagtacatggcgaggctgaggagcaagtgcacgagcctccaagacaacacgacgctggtggagatggacccggggagcttcaagacgttcgacctggggtacttcaagaacgtggccaagcggcgggggctcttccactccgacggcgagctgctcaccaacggcttcacccgcgcctacgtgcagcgccacgccggcggcggctacaaggacgagttcttcgccgacttcgccgcctccatggtcaagatgggcggcgtcgaagtgctcaccggcagccagggcgagatcaggaagaagtgcaacgtggttaactaatcatctctcttaattatcgtcatatatcatcagctgctcgccgagactgtgattatggatttcagcttttgattccggccgtgaccatcttataattaatttccatgtagatcattatcgtaagatttacctgtcccttctttttttttcttgatttcaatcacttcattaattaattgttttgtttatatagcgagccatgcatgtatgtaacaaagttttctccaagtacgtgctcatcatgatcatatgaataaacttcattttttttc

SEQ ID NO: 5846 - DNA, 445 bp, Oryza sativa
  ref <308>: DATABASE ACCESSION NUMBER: AK063009
  ref <309>: DATABASE ENTRY DATE: 2001-12-06
catgcttggctcttccgctgcacgaagcagacctagctgttacatggctggcggcctaacgcagtggaccgtacatgtgaatgcccgtagtgcaggtcgagcatctaggattagtttggcaggtccactaactggttggtcccacgcgtcatccacactaatttgtttgttttcattcagttcgccaattggaaattggaactgcggctgagccgtggtttagtataagaagagcagatgaaaaaaatgaagctccttccccggtcctcaccttgagcccagcgcaaccatctcatctttcccgtattctatcctcttcgactcttcttcccttcccatctcctgttttcttcctcctccgctcgtctccttcgtgctggacggcgcttctcctgccgctacagctgagctgccgccgggaatagcactggccaccaggagaggt

SEQ ID NO: 5847 - DNA, 689 bp, Oryza sativa
  ref <308>: DATABASE ACCESSION NUMBER: AK063010
  ref <309>: DATABASE ENTRY DATE: 2001-12-06
gcgaaaataaatccaaatccgacgagcagattaagcttgatccccttcttgccgccgccgccgccggaggcggtgatgggcggcgcggcgccgttgctgccgtcgtggagggcggcggcggcggcgtgggtggcgctgtgcctggtccccgtggtgctgtcgctggcggtgctctggctgccgctgctctgctgcgcggtggccgtcttcaggttccggcgggtgaggatgatgaggtcgtcggcggcgacgggtggtcgccgccggtgcggcggagggggaggaggacggtggccggagaagggggagggggaggattccggcggcgatcgggggatgctgctgcagaagtatctcgaggatcagatggagctcgtcggagagttcgccgccgatccaccaccggtagaatcgtagccagaaagggaaaaaaaatctctctctttttctttttttggggttctttttgggaaatctgtagcttgtaaatggtgataggaagagatctgagcttgcaggaacatgagaaattaatttaaaaagcaattaaattagaaattaggagtccaattcgagcaaattttgttgctgatttgcggtttcttgctcttgttgatttgtaattaattaattgtacatgaaactgaactgcttgtatgatgagtgattgtagcagattaattgattgc

SEQ ID NO: 5848 - DNA, 595 bp, Oryza sativa
  ref <308>: DATABASE ACCESSION NUMBER: AK063011
  ref <309>: DATABASE ENTRY DATE: 2001-12-06
attggtagaagtagctccgtgttgtagtgttgtgtagcagtagtccaccgctgagaagctagcaaagccagccatccattcagcgcagtactctcgggagagctagaagcgatctattctagccacaaggaggagagataaacgtatcgaaatggagcacatcgcgaggttcttctttggagtttccggtgagtgtgccgccatggctagctgcagcttgttcttaatttcctatctgtctatatgtgcatgtagtatttgtttctcccatcttcgaacactcgaagaaatgaaggtgtatgggtgctcctagagctacctactttgctggttaatttttggtgaagttttacactactgtgaattcgttctaagttttttgttggctccgttttccaggcaatgtcatcgctctcttcctgttcctttcgccagtgtaagtttctgattccttgctgcctagccttatcgtcaatcttatcccaatttgtgaggtcttgtaacgtgtgagcagaggtgggaagaaggaaaaaaaaacaagtgaaaagggaagaagaaacaaaagatacctgtaactcatagtctctgtgtctgg

SEQ ID NO: 5849 - DNA, 618 bp, Oryza sativa
  ref <308>: DATABASE ACCESSION NUMBER: AK063012
  ref <309>: DATABASE ENTRY DATE: 2001-12-06
gatggaacacggttgcactggagccatttgtacacatgtcgaccaggagattgagtgaacctaaagatcgcctttcttaagcgtcttgttagttcttaccgtcgtttgagccgacacgacgactaatctgtagcgcgcaacggtccgcaagagtttctatagataaattctctctgacggaaaggaaggcacttacaaccaactatcgatggagtaggcggatgctggccccgggaaacaccgtcgtggcgccgccgtcgtcggggatggcaatcgaaggttcggagatggcagccgaacgaaccaggctgccagtgataagaagcaggatcatcagaaacatgggcattgaactagcaccatatgtctgtggtttggggcctcggcgaggagaaatatatacacctataaattcactgcagcctatatatatactagatggtacgctgcaagttgttgcgagagaattatgtgataatatagtagatatgagttctaaaattttctttcttacctactatacgatttttttcacgtgtttatatatttttgtacttttatcaattatccaaaaaaatagttatgcttgggttgtatagtatgtctttttaccctgtc

SEQ ID NO: 5850 - DNA, 948 bp, Oryza sativa
  ref <308>: DATABASE ACCESSION NUMBER: AK063013
  ref <309>: DATABASE ENTRY DATE: 2001-12-06
atcaactatagctatacaagaatcatcgaccactacttgtacacaagcaaaagttccatcaacttaacatggcctcctccaacttctttcttcccacagctctcatcgctttggtcgctactcaggccatggcttttgatcccagtcctcttcaggacttctgcgttgccgacaggaactctccagtacgtgtcaatgggttcccctgcaaggatgctaaggatgtgaatgttgatgacttcttcctagaagctaacctcgacaagccgatggacacaaccaagagcaaggctggatccaatgttacattgatcaacgtgatgaaactcacaggtctcaacacccttggcatctccatggcaaggatcgactatgctcctaaagggcaaaacccaccacacacgcatccccgtgctaccgagatcctaacggtttttgagggtacactctatgttggttttgttacatcgaaccaagcaaacggagaaaacaagctattcaccaagacacttaacaagggtgatgtcttcgtgttcccacaaggtctcattcacttccagttcaatccaagctatgataagccagcagttgccatcgctgcacttagcagccagaatcctggagcgattaccattgctaatgcagtatttggatcaaatccaccaatctcggatgatgttcttgctaaggcatttcaagtggataagaaggccgtggattggctccaagctcaattctgggagaacaaccacaactaaattattgatgcttgataaggctcaaaattagtgattgctagtaaaaatgttttgttgattgttgttagctaaatattgtatactgtataacactacgcatcaataatgtataacactacgcacatatatatgttacaagatgtatgatctatggaattactttaatatatttgatttcttggtacttttt

SEQ ID NO: 5851 - DNA, 722 bp, Oryza sativa
  ref <308>: DATABASE ACCESSION NUMBER: AK063014
  ref <309>: DATABASE ENTRY DATE: 2001-12-06
atgcctacctgaattcttgagctcatcctctcccggcatcatcatcatcatcatcaccaccaccatgcgcctcgagatgtcacccgacaacctcctcttcttctgctccgtcgcggcgtcggcggccgctggattctgcctcttctcgctgtaccggcggctcgcgcggcggtgccaccaccaccacgcggcgcctgccggaggatcggaagaggaggaggaggagcgccggcggctgaccgcggtggcctccggcctcccggcgttcatgtacgaccggctggtccggcacagcggcaagggcgcgagctggacggagtgcgccgtctgcctcggcgtcatccatgtcggcgccatggtgaagctgctgccggcgtgcgcccacatctaccacgtcgactgcatcgacctgtggctgtcttcccacccgacgtgccccctctgccggtgcagggttgatcatcctgggcaggggcaggagacggccaggcagcttgcccagctttccccagcatagatagaattcaccacgtctgcaagaaatgtattagttaggagttaggattctattggacttttttcaagaaaaaatgtgcatatgccgtgtatcaattgatggatgtgaatgtagtacctgactggaaatgtggatacagtcatcagggtttcatgaatttcttcagattgttaatagacttcattgcaagatgagcttttaccag

SEQ ID NO: 5852 - DNA, 912 bp, Oryza sativa
  ref <308>: DATABASE ACCESSION NUMBER: AK063015
  ref <309>: DATABASE ENTRY DATE: 2001-12-06
attttctaggtttccctccttgccgccgccgccgccgccaccgccgccgcagcctcctctcgctccgcctcaccgccgctcgacgccatgggccgcatgcacagcagcgggaaggggatgtcctgctcggtgctcccctacaggcgcgccgctcccgcctgggtcaagacgtccgcgtcggaggtggaggagatgatcgtgcgcgtcgccaagaagggccagctgccgtcgcagatcggggcgatcctccgcgacgcccacgccgtcccgctcgcccagggcgtcaccggcggcaagatcctccgcgtgctcaagtcccgcggcctcgcgcccgaggtgcccgaggacctctacttcctcatcaagaaggccgtcgcgatgaggaagcacctcgagaggaacaggaaggacaaggacaccaagttccgcctcatcctcgtcgagagcagggtgcaccgcctcacccgctactaccgcctcgccaagaagatccccgccttcttcaagtacgactccaccaccgcgagcactctcgtggcctgaagtggaactgaaggtttcgttcgttttcagcttcttttttgggcgacttgaattctcttgacagccatggagttttgtttaatcttaagtaagtaggaatgcttttgttggtgtaatgtgttaaatctacctcctgcacctgaagagaagttgcttactgagactcgatctaggaatgcttttgttggtgtaatgtgttaaatctacctcctgcacctgaagagaagttgcttactgagactcggatcagattttattttcctgaaagaaaggttattcgcaatgatatgaagttcaatttacaccttgactttgggtagttctttctaaagatgtgtgataatagaaaatgcagtatttgagtgatgt

SEQ ID NO: 5853 - DNA, 590 bp, Oryza sativa
  ref <308>: DATABASE ACCESSION NUMBER: AK063016
  ref <309>: DATABASE ENTRY DATE: 2001-12-06
atttctccaatctaccaacaaacaaacacctcctctcaagtcacctccaccaagccactatgaagttcgccgccgtcctcgtcgccgctgtcgccaccttcaccgccacggccagcgccgccgaatgcccatccaccgaagtgcttcgcctgctcgcgctcgccaatgagccatccattgacaagtgcgagagcgactccaagttcaacttcttgccgcctccgggtatccctacggcggcgcagcttgaccgcatgtgcgcgagcgctgcatgcacgaccacgctcgcggcactcaaggcgatcggccctgccgactgcgagattacgttctcgaacggcgtcacgctcaacgtcaagaccgtcctggacacgtacttgtccacgtgcggtcgccgcaacctccgcaactaagtattcgggcctgatacactcggatgtctctatatccgccccacaaggttggctagtaagtagaggtccgagtattgtgtgtattgcttccagcgtcagatactttcgcgtggtcggagacgacctggttctgccaccagcgaacacgaatggcaatctgaattttgatttctctgt

SEQ ID NO: 5854 - DNA, 862 bp, Oryza sativa
  ref <308>: DATABASE ACCESSION NUMBER: AK063017
  ref <309>: DATABASE ENTRY DATE: 2001-12-06
aatagttgaaatccccaatttctatcttctctccaaaagtgacatggtatcagagcaagggagcaaaccctagccgtcgatccgagtccacgccggcacgccggcggcggctcgccgccggcgagcccaactaacccgtccacatcctcattgagtagtagtaagtgcaacagcaccgtcgtcagctcagtcccattcatccctcgtcaagcagcaagcgaagcagaagaagcaaaagcagcagcaaaggttctagcagcagcaccacttcctcgttctcctgtcatcaagtccatcgacagcccatcgcggcggaagtcgcggtcatcgccgccggtcgcggcgccatccgtcccgcccagatctgggccgccgcccgccgcatcaaaggcagtcgtcatcgctgattgttgctttctcgtcttcaagcggcagcagcagcgagcttgtcgttctccagttcatctccaatgagcaaacaaacaggagcagcaatcagccaatcagtgcccccgtcgcgggtgctcgtcctccgccggccaggccctcgtcgtccattgcggcaagccgctgccgtccacccatcgagccggccagccgccgatgctcgtcgtcatcatcttctcatcgtcccaggctattcctgaacttcagatccacatcaacccctctctccgtctttgttttttctgttgcgtgtaagctcatggtcaagcagcaacaggatagataggagcagatttgaggctcttggactctttggttatgcagctgggttacagctaattagtgattgaagaatgggttcctgctactgtcattgttctttttgcagccgctactatcgataagccttcaaatc

SEQ ID NO: 5855 - DNA, 1009 bp, Oryza sativa
  ref <308>: DATABASE ACCESSION NUMBER: AK063018
  ref <309>: DATABASE ENTRY DATE: 2001-12-06
aaattctgaaaattctccggtcacgccggctctctcccctcctctctccgccagcgccggctcccctcctccctccaccggcgacggctctcctctcctccggcgaaggacggcgacgaacttggagaagcggggcagagcgcggggcgggagatggcgacaagttcggtggcggcggcgcgagatctcaccggcccctccacttctggccagtgacgagggcgcggagggctgcggcggcgcgagggctcaccgggcccctccacccccggcagtgtctcgacgacggatctggcgtcgggcgagcggcatcctcggggcctagcgaacaaacggcggcggcgcgtcctcgccccgccctcctcaccagcggcggcgccctccttagcctccaccggagctcgacggcgccgcccgaaccttgccaggcgtggatctggcctagagcttgacggcgccgctcggacctcgcccggcgcggggtggcgccgccggacatggagctctggcggcggcggaagaatccgagctcggcatggcatcctcctcccccggctttgtttcaactttttcagaatccgagctctgcacatgtgtttgtttcagctttttgaagcgtttgtttcagccttttcaagcgagttccttgcatccttgttaagggacgaaagcctcagcgaaggaacgagggcccacatcctctctcctcaacaacatcacacaacctatgtgtaggggtgaagcaacccgccacggtggtgcactgtgaagggtagagtggagctgttgcatgctccgctcttagaaattagattacgactttacgagtataaagctccgcatcatcctcaaagcaggcgccgggaggtataccaaacaggtcttaatcattcgttttagttggaactggaagtgcatggtttggaccatgctaatgtctctggcaatattgctctgcaacaattaaccaatgatgatgttcatctttgtactgaactcctcctatcct

SEQ ID NO: 5856 - DNA, 727 bp, Oryza sativa
  ref <308>: DATABASE ACCESSION NUMBER: AK063019
  ref <309>: DATABASE ENTRY DATE: 2001-12-06
ggtgctcctcgagctcactccgcaccgcagccatggcgaccgccacctccacgctcttctccctctcctccctctccgcctctctcccttcccccgcgcagccagccccggcgtctctctccctccgcgccgtctccccgcgggcccgcctgtccgcctcctacgccgccttccccatcggtgggatcggggcatgggcggcggcgacgccggcgtcgtcggggaggtggaggaggaggggactggaggtggtgtgcgaggcggccaagaccggcaccgcgaccgggaggcgcccggactcggtcaagaagagggagcggcagaacgaccggcaccgcatccgcaaccatgcacgcaaggccgagatgcgcaccaggatgaagaaggttttgaaagcccttgaaaagctgagaaagaaagctgatgccacacctgaagatatcattcaaatagagaaatggatttctgaggcatacaaagccattgacaagacagtgaaggttggcgccatgcacaggaatactggtaaccatcgcaagtcccttcttgcgaggaggaagaaggccatcgagatactccgtggttggtatgttccaaacgctgaacctgctgctaccagctagtctattgacaaatcgtcttcaggaattcgcagcagattcattgtcaacacgtcttgccaattttggacatgcatatgttgtttaaggaattaaatagctttgtt

SEQ ID NO: 5857 - DNA, 1022 bp, Oryza sativa
  ref <308>: DATABASE ACCESSION NUMBER: AK063020
  ref <309>: DATABASE ENTRY DATE: 2001-12-06
atccaccgcatccatcgcatccgccgccgtcgccttcgatcctccccgccatcgccgtcctccccacctcgtcgccgacccagtgccgccatcgccttcctcccccaccgcgtcaatcatcgccgtcctcccccaccgcgtcgccgacccagcgccgccatcgccgtcctcccccaccgcgtcgccgacctagctcctcgcctcatccctcctacaccagctccctcccccactgctgtcctcgccaccgccatcgccgtcctcccccaccacgtcgccgacccagcgctcctctccgtcgatctccaccacggtccctttcgcgccacaccggaagctgcccgccagtcctccggtcgtcgctggttgctgtcggcaggtggatgcagtactctggtcgcccgtctcccctccatcaccgagtgacattcccatctacaaaagcgtgctagggagcgatatgctgctcttagcgctgacgacaagaaattaatcttagtgctgacgacaaggaagctaggcttcaaaagatgcgagactcactcttcttcaggacgtcaggttccttcatcacccgggtactcttccctactgtgaaagaggatgatatgcttcctactcaaatcgctattcagttgactaatgagtgaatgcaaagttcaattcagtgcagtgaagaacctgccaacagatcaagggcgagggcaggggaagggtgctgcagcgcttcaacacattagcgcttccagatatgctgtgttctgaccagtaaattgatgtcaaaagatcgaaggctctagatcactctagcgtgtggccttggtgtactagccacttgccaggaaaaggagtgtgggagtgggagcttatggcacgagctggagacatggagagagattagcaggttcattagaagtgaaattgtagcagagatttcttgatggaaatttgacattgatcagaactatttgtatgcaaattatgtggcagcatttttctcagtttacatataagcttttgtt

SEQ ID NO: 5858 - DNA, 577 bp, Oryza sativa
  ref <308>: DATABASE ACCESSION NUMBER: AK063021
  ref <309>: DATABASE ENTRY DATE: 2001-12-06
agcccgcaacgccgccgctgccgccgcctcatcctgccgttcccatccgcggaacagctcgtgctgcatctcgccatatccacacactcactttcgtcactcgcttgcttactgctttgcatccatctcgctcatcatcatcagaagggaaatctgcatcttcttctcagaatattttttgttcttacttatggaacaatctctccttttctttttgttgtgtgtgcttgtttggtcgcctcttctttcggctgcaagagaacgaatccactcttgacggccttgttctgggggcgtagagtgattttgccatggggggctcgagttgtgggtgatcccggctgccgtctttcgcggcggcctcgggttctcctcctctccccgtggcttacacgactacgatttgtgccggtttctgcttccgtttatgttttttcggttatcttcacaagtttaccgattgttaaagatctgaatatctgatgcatttgtgcccgtaaagatcgtgaggtcgacgtgcaaagatagcttgatataaaacgagaactggatcttaagaaaataattaagttttgag

SEQ ID NO: 5859 - DNA, 748 bp, Oryza sativa
  ref <308>: DATABASE ACCESSION NUMBER: AK063022
  ref <309>: DATABASE ENTRY DATE: 2001-12-06
ctctttcgcttcgctgaccccccaaaaccctagctcgagcgctcccttcttccccccacctctgcggcggcggcgggcggcgagatggcgaagtcgctgcggtcgaagcgggagaagcggctgcgcacgctgcggcgggagatcgcgcagcccttctacgacaagaaggaggcggccaaactcgccgcgcaggccgccgcgctcgaggcgcccgcgctgccggtccgcgcgcctccgccgccgtccaaggattccggcggctcccgcgccgcctccagctcggcatcggccatggacgttgagatggcggatgaaggaaataacaagtccaagtccttcttgaagccaattggtagcattagcaagaagaaggtacaacttcacttgaagatcaagaaagataaaagaaaagctaggaagaaggggaggtttagtaaaaagtaggtgtcaaagcttactctgttatgagaaccatcaattttggttagtttgaacaatgcatgtaatggtaatctcttgtgttgttgtgcacctaagtgttaaccatccattctgggtggataccgtattgaaatcagcgaaagcagtgagccagtgacaccctattcaggagcttcatccgtattactgatatgatctttttttaagcatctgtgatgagctatatatattcatttcctggtgagtctttgcatctgctctttccgaactattcttagtgataacaaaagggcatgatgttaatttc

SEQ ID NO: 5860 - DNA, 667 bp, Oryza sativa
  ref <308>: DATABASE ACCESSION NUMBER: AK063023
  ref <309>: DATABASE ENTRY DATE: 2001-12-06
aaatatgaggatcaaaggcagtaccaccatttgaatttcactgcgaaggtgaaaagagctgatgggtgtggtgtggagaacctattctttgctgaaatatcacatatgcaaggagaatatgaatgggtggtcagctgttgctgcataattaaacctagtgctaacggtcattgctatggctgtaggaataatggttatgttggcatgaagcaccctaacaatgatgcatacagtggtggtcatttggatggatatttaccttttggggtcaattcctatgcgcgcaataatgatgaggaactcagtgtcaaggatgaggaagatatgctaagacgtatgtacaagggcctagataagccaggcggattcaagagacccatccctaaatttgcaacacgaattgtgtggaaaactgaggaggaagctggtgtggaagctggttgaagctggaaccttgcatttttctactagatgtgttaggcaaatgtgctatcgtatacattcatgtaacacaagttaaacttatcaccatcgaacttgtccaccagtgccccagcagtagaagcgcatcttatcacaattggtggtaaatttagtggaatggatgaaatccacgctaatggttgctgaaagctgaaatgacaatttgcataacatttcagtattt

SEQ ID NO: 5861 - DNA, 686 bp, Oryza sativa
  ref <308>: DATABASE ACCESSION NUMBER: AK063024
  ref <309>: DATABASE ENTRY DATE: 2001-12-06
atctccctcccatctcctctctccgggcgtgacgcccgacaggcggtggaaaggagctagcagggagaagggcgacgcctggcgaagataagggcaacgtggagaggtgcggcattgcatcacatcggcatcagcgaaaaaattagcagtaaggtcgtcgccccctctccttccctgatctcctccgcctccgcctccttctcttcccgtccgttcatccagatggacaccgcggccgactttggcacggcgagcgccagccaaatagtgcgggttgcggaggtggcagtggccccgctcgtgcgctcgctcgaaccggccgctccactcccaacggctgtcgtgcctctcctctcccgccctagcgccgaaggagacggggagctgggtaccggtgggggcggcggagatgacctcaacggcgtcctcgccatgggcgacgctcccgccatgtcccctcacatctcctctgtccttttggtgtgtcgtcatccacaacggtggtgcccgacgaagagctcgagaagatagagtgaggtggaggaagtggggcccactggaaatgataaaatgacaaaattatcccattgtaattaaaggaaaatgaggggctttgattaccaatgtgaagcgaaccctataagctacttcagtttcttacagtttgaggcaaatagtgtttccac

SEQ ID NO: 5862 - DNA, 622 bp, Oryza sativa
  ref <308>: DATABASE ACCESSION NUMBER: AK063025
  ref <309>: DATABASE ENTRY DATE: 2001-12-06
ctgatcttgcaaacctggatcactctcgccaatttgggctacacaatcacggcacggcactattcggatcgatcgatcggttgatcatttcttccgatttcggaggcaaagatcacgcgttcttgcataaggttttgatgcttcgtgtctgatgcaaatgccgatcgatgtgtctcttgcaggaggaccagccgtgctcgacgtcgcagccgagcttgtgccggtacgcgtcctcggctcaccatggcggtggtggccggagcgacgaggccacctcctcccggaacggcggtggcgtcggcggccgattccttgcctcccggcataggaagagatcgccctcggatttccgccggtcggggttggcgcagtcggtgagcggcgtgcaggggaggaattgctccaatgcggtcgttggtcgaaatgagtgagttcacaatcctactattcccaagaattcctaagcttagcaaccataatttcataaaagcaagagaaaaaaaaattcaacttatcgaacaatggcacgatgatgtagtgttcttgcaagcatgatgtgaaaatatcaagattttttttatggaccagtgcaagcatgatgtgaaaatatcaagaagtgagc

SEQ ID NO: 5863 - DNA, 776 bp, Oryza sativa
  ref <308>: DATABASE ACCESSION NUMBER: AK063026
  ref <309>: DATABASE ENTRY DATE: 2001-12-06
tagtggctcatctgtgatgaggagtgccataattagctgcagtagtactagtgaagatcagcaagctgctgctgctgctcaagctcagccggaggagagcacctggaccgactactttgtggatttcatgatgtccgaggaggagaagaagagtcaagaagatcatggtgcttcttcatactgctcccatggcggagatggcgtctatggcgattgcagtgatcagaaggagctggaggaggaggaaggagaggaagattctatgatctccgacgccgcgtcttgcgctcccgcggctgcggcgttgcctgataggtacaaggagttgaagaagctcaagaagaaggtcttcaaggccctggatcatgatgattccctggaggataccgcaagctctccagtaaatagccctaaggtcagtgctttgacacagctggaattgagccctaaaaggaggtgcaataccagggacctaaccaaggaagttgggattggagatgatcgtggaagagaggggatggactatgcagatgcaatggtagagggggtgaggtttgttgatcaaagtcagaagagtgtaactccatgtggagagctaaaggataaggggctttgtttgtttcctttgtccatgttgctacactaccatggatgaaaatttgagaacttcaatgtagagcacgtgtagggtttatgccttacatgaatgtgtgtgggataaatgaccaaaaaatatagtgtgctgagattactgtggatatattttttgggtgaac

SEQ ID NO: 5864 - DNA, 1027 bp, Oryza sativa
  ref <308>: DATABASE ACCESSION NUMBER: AK063027
  ref <309>: DATABASE ENTRY DATE: 2001-12-06
ttcctcctctccactctccaccatcgtcttcgtcgtcgtcttcctcagctcggagcgatggggaggtcgccgtgctgcgagaaggcgcacacgaacaagggcgcgtggaccaaggaggaggaccagcgcctcatcgcccacatcaaccagcacggcgagggctgctggaggtcgctccccaaggccgccgggttgctgcgttgcgggaagagctgccgcctccggtggatcaactacctccgccccgacctcaagcgcggcaacttcaccgacgaggaagacgagctcatcatcaagctccacgagctcctcggcaacaagtggtcgctgatcgccgggaggctgccggggaggacggacaacgagatcaagaactactggaacacccacatcaagcgcaagctcctcgcccgcggcctcgacccgctcacgcaccgcccgctcaatgccgccgccgccgtcgccggccaccaccacctcgccgccggcggctccagctgctcgcccgacgcaacaagcggccacagcagctgcagcgacggcgacgagtaccgcggcggcatcgacctcaacctgtccataagcccgccgtcgtcgtcgtcccagccgtcttccccgccgccgccgccgcacgaagcagaggcgagacgcgccggagcgacggcgagctacacctaccaccaccactactcggagacgagggagaagatatgcctgtgcttgaaccacctcgggctgcacggcggcgacgagtgcagctgcggcggctcgtcggcctcttcctcctcctcgccgccgccggcgacggcgagctcgcgagcgttcacattcgccaatgcatcgtcgtcaacagtgtaaaacacagagaaattcagcgattttcagactaagagaattaatgagaggtagagcacatgcatgctgaattaattgaattaactcaatccaagcttgagctaggcatctagctaactttgtgatttgatcatgatcagctagcaaaatcatcataatcatcatcatcatc

SEQ ID NO: 5865 - DNA, 614 bp, Oryza sativa
  ref <308>: DATABASE ACCESSION NUMBER: AK063028
  ref <309>: DATABASE ENTRY DATE: 2001-12-06
aacagccaaaacgaactgttccaggaaaaccaaaggcaaaaacgagagaaaaatagccaccacgaacccttcctcccccactgtctcccactttttcacgttttccggcgagcgcggcggctagccatggatggcgtcggcggcggcggcggcggcatcctgtcgtacgagaagctggaggggtacgcgatctgggtcggggccagcgtggcgtcggccttcttcgcgtccatggagagctgctcctgcatccacgtccacaccgccgacgacgagggcgacgactacgaccccgaggaggccaaggaccgccccctcatgctctcccgcccccaggccctccccgagtactactacgaccgatccgcctcctccgcctccttcgccaagatgtgatctcatctgctgctcccttctctgatccgcttcttgattagtttctgcgtgttcgtgtgatctgtggatgcgtgtggttcaattggcgttctttcggtggggggcattcaagaaaccatcgtccctgcattgtgcggtgtgtttgtgttcataaagtgtgtgactcgaatagcttatggatttgtgattgtaattctcttgagttttttttttggttc

SEQ ID NO: 5866 - DNA, 528 bp, Oryza sativa
  ref <308>: DATABASE ACCESSION NUMBER: AK063029
  ref <309>: DATABASE ENTRY DATE: 2001-12-06
aattcgcctccccatccatcccgacagttgcgcaggcgtgcggctggcggcgcgccgccgagcaggcggggcttgtggcgccggcccggccgcgcgactcgtgccctcgtgctcgtggtcgtgggatgtggggcgccgcgccgggcgcagggcggtaggcggctgcgccactgagggctgccggcacctggcctggccggctgaccggctcagccgcgcagggcaggaccgcagaagcaggagcaggacagcaacagcaagccgcgcaggacaggagcagcacaacagtgacaacacagtgagtgactaaatctgtacatgcacaaaatttgaataaatgtagtgaagattttaggattgggagctgcaattcactgatttagtgagtacacaaatttgaataaatgtagtgaaaattttaggattgggagctgcaattcactgatttagtgagaatgtacttgcttgcttagtttgtagtggtctagtggacactggacggtagttcatagttcataccatattatc

SEQ ID NO: 5867 - DNA, 803 bp, Oryza sativa
  ref <308>: DATABASE ACCESSION NUMBER: AK063030
  ref <309>: DATABASE ENTRY DATE: 2001-12-06
acaatgtgggcaatatagtatatatcgaggtgccacaaataaatggaaggtatccatgcagggacggtgacgatggcctgcagctggcttgttctcacggccgccatggctgtgctagcctcttggttgatccgtttggtttcactaaaatggaacagcagccacccatgcaaagctgatgaaggcagcaggctgccgccagggtcgaggggccttcctcttctcggcgagtcgctcgagttcttcacttcgagcacctctcttgagctgcccgtcttctttaagcgccgtcttaataggtaaataatatgtgttctctccattaatctaaaatataagcatttctgactatatatacatgatggatggagtttcaacgtcgtctagacaggtaaatatacatcttcttcctccattcctaaaccaatatcttcttcctccattccaaaacctcagcgaaaaatgtttaattatattttaaaacagagaaagtttaataatgcacgtaagcatacatcacgacatcacgtacagctccgccagtttgtttccttggttgaatgcaaaactgtgctaacatgatcagaacgtcaatatcttgagcgcccatcgacgcgagaaagttgcatcacaatatcaacatcaacatgagaagatgaaattattacgtagctaaaaattcgtccacttttaaatgatatatccttaacatggcattcaaagagagcatgtactgctaccgaattgatttttctggacgacactttttaggacgcaagtggaccaaaactgttcctctcagt

SEQ ID NO: 5868 - DNA, 659 bp, Oryza sativa
  ref <308>: DATABASE ACCESSION NUMBER: AK063031
  ref <309>: DATABASE ENTRY DATE: 2001-12-06
aagaggaacagccacctgaagctctgttacaacctccgcaatcgcaatgtcttcgtccccaacaccaacaagccacagctaggccccctccacaccaacaagccacagctaggctccctccagtacaagaaagggaaggaacatgtgtatgatgtgtcagggcagaccccaacatgcgcaaaggttgctctcgaacactataacagatcatatgaggatgagtatgagatggttaaagcactggacagcgtttcttccttcttcaatggtgtgtgggtgcatgtaaatttccttgctaaactcaaaggggccacccaatgtcctgaccttgttcccaagttcttctttgctgaggaagtccagaggcaacaccaattcgtggttgtgggatttgtctgaataatgcgatctattatcctgctgctggagggcaccgaggcgacaggaagaattcgtttcatgcatttggttccctttggtttatgttatgcactatggagactgttgtttcacgcagtggatttatgtgtggttaaatttcatggtgtgtgaaacatgcaatgagaacatcagtttggctatggatgtttgtttcgtgcaatggatatatgtatcgttagagttaagacgttaaatttgatggtctggtcattgtgtgc

SEQ ID NO: 5869 - DNA, 524 bp, Oryza sativa
  ref <308>: DATABASE ACCESSION NUMBER: AK063032
  ref <309>: DATABASE ENTRY DATE: 2001-12-06
ctttttcggtgcccgctcgtcggtgagtccttggcctattctccgtatttactttcacccgatatatacattcagaacactgccgttcaatgctcggacctaccgactaccccgtaccaaaatttgcaaccctaaaccaaatgtggccttgaggctttgacctgaggaggaagtacctgttgtgataatccatggcgccatctcccgttttctgctccaagttatcagtcaagcgcgtggttccggttttgctggggatcatggcgtgtgtatcgctccgacgcatgctgcgttcatgcgggagccctttccgttttcttagggagtgcgtgcgctttgcgtgtttccgatcgtgggatggcgcggtctactcgggaggcatggcgaagtggcgggagggtaggaacgcatggcggcaacttcggtcgtgggatgacgtgatccagtagagagttgtggacatgtaatttgctatttaaagtttcctaatgcaactaaaaacgctgcaagttttttcgcagcac

SEQ ID NO: 5870 - DNA, 668 bp, Oryza sativa
  ref <308>: DATABASE ACCESSION NUMBER: AK063033
  ref <309>: DATABASE ENTRY DATE: 2001-12-06
agcctcgccctcgtccgcgtacaccggcgcagcctgagacggactcaacttcgcctcgccctcaggtcagcgtacgccggcgcttcacctcgccctcgtccggccgccgccgcgagccagctgggaggtgcgccgccgcgaccggagatgtgccaggccgccctgccctttcgccgtgaccgggggcacgtggaggcggccggccgccgggcctgacggcgcggtggtgcaggcgggcggccgcacagcccgagctcagcccgtggaggaggccgcgctgctcctgccgcgccgcacgtcccgatttcggcggcctcgactccacaatggatttcagcgtccgagcccgcatccagagcccgcactggtcagccgcccacttcatcgccggcgagaggtgacaccgtcgcccagcttcgtccagtgtaggagtcactggtggtagattttttggagaacgccacaccttttcctgtgcccgtgaggtgtttgtgtaaatgccctgccgtctgggatgatgctgagtcctaattgaaagtgaattgttattgtttggctttgtgagattggaagcaaattgattatgtaatcttgattgagattgatttggttatatgactcatatatgctgtaatttgaatgaatgaatgaatcagtaacttctgatg

SEQ ID NO: 5871 - DNA, 638 bp, Oryza sativa
  ref <308>: DATABASE ACCESSION NUMBER: AK063034
  ref <309>: DATABASE ENTRY DATE: 2001-12-06
atcaccaacaatctctcatcaaaccatttgcaacacaataccaaaccaaaacttctttgtgtgagccacatatccaatggcatcacaaatcgagagccaccgctctggtgcggagatcgtcaatggagatgccatctgcaggaagaagtccattgagctgctggaagaacttggtctccccaagggcctcctgccattggaggacatcgaggagttcgggtacaacagggggactgggttcatgtggttggtgcagaagaagaagaaaattgagcacacgttcaagaagatcaagcagaccgtctcctatgccaacgaggtcacggcattcactgagaaagggaagctgaagaagatcaccggagtgaagaccaaggagctgctgctctggctcagcgttgttgaggtctacatcaccgatgcctcgccggataaggtcaccttcaagacaggaaccgggctctctgataccttcgatgctgccgcttttgctcttggtgagtaaggcttaaggagtcagtcagctactgtaagctagagatggtgcaaatctgtaatcttaattatgtaaaaggcttaaagccactatcttacatcaccatgtactgttatataaatcttttgtattgtaatttgct

SEQ ID NO: 5872 - DNA, 869 bp, Oryza sativa
  ref <308>: DATABASE ACCESSION NUMBER: AK063035
  ref <309>: DATABASE ENTRY DATE: 2001-12-06
gtgacgtaaaagaaagaaaatctcccgtctcctgccgccaagacgagtcgcggctgaacaggggaggggcggcgatctccatctggcgagcagagcaggggagaggattatggatagagaagccaagaaagaggcgttcagaaagtacctcgagtccagtggtgtgcttgatactctcacgaaagttcttgttgcattatatgaggagaatgacaagccttcatctgcggtcgagtttgttcagcagaagctgggtggtccatcaatatccgactatgaaaagctcaaagctgagaagttggatttgcaattgaagtataatgagcttttagagacacacaaggaaacatgcagacagctggatgagcttaagaattcgaagaacgggagcggaaataacacgtgttgatattgtgaatgtgttgtcaagcatacttatgcatctgcatccatcatcaagtcgtatgaaatcgaaacaattgctggtttgaaccttgccatttgccaggttcacatccaccctccaatgtatcatatttttgctcgtcgcccttggcataccagagcacccatgagtctttcccatattcgtccagaagatcaaactccacactacctttcatgagcaaaagatgatcccacgcaacacgatttgaagagttgatcgacttgtggaaaacctgttgtgtggtaaatcaatagtatcatgtaaaatttgtcttatctcttcttttcttgtaacaacgaggttgtaatttcttctcttatttaatatagtataatctaccctgtctcagagaaaaaaaatatcatgccaattttgtggcctaataaaacaattggtttactgtggaagcattttcatgcag

SEQ ID NO: 5873 - DNA, 832 bp, Oryza sativa
  ref <308>: DATABASE ACCESSION NUMBER: AK063036
  ref <309>: DATABASE ENTRY DATE: 2001-12-06
actcacttcactcactcgaagcagcgcaacgaaggcgacgagctcacttggttgcagttgcagtagtagctcttgctgtgcagtgcagtgcagtgagcgtttgaggagaggtagcagtagtagctgtagttcagcttgtggcagctcccatggccagctacgcggcgcagctcaaggacatgttcttcggcctcgtcgagcgcgtcaccggctacggacgcggcgaggacaaggacgtcgctgcaggtaagcaaagcttgccgctctgaaaaactgaactgaaaaccccatgctgataaagggagtagagcgactgaaggcaataaatctctgaagaaactcaagaacctgatattttcagataaaaggattgaggctgcatatgtgaatcgacctgtgaagatttactgatgctgcatgaatgctaatgacgtgaaggttttgtttgctgtttctgcaggtgtagatgagcccagcaagttggcatctgaagaggttgcagtaagcagcgaagaggttgtgattgtacagcgcaatgagatcagatcaagaggcgtagatccctccgtgtcaggcgggaaacagccagggatcaatgcggccggtatctagaggggatgatttgatgaactgaacaactgtgtccccttgagttctcaagtactactagtagtttatatgattgtgagcgtgctgtgttactactattgtttgcttgtgtatctcaacctcactgagttcctctctgttccagtgtgtttctctgatgtacttgtcatcatgcatggttcatgattaccagtagtaatttgatgaacctcttcttcatgct

SEQ ID NO: 5874 - DNA, 1003 bp, Oryza sativa
  ref <308>: DATABASE ACCESSION NUMBER: AK104951
  ref <309>: DATABASE ENTRY DATE: 2002-08-28
gtgccatcgtgtgacgacgtctcgtctcgtctccctctcccgacccgacacccgagtcttcttcccttccccaatctcgcccttcctcctcctccgatcgatccagcccccgcccctccccgcccctcgccgcgcgcgcgaaggagagagagagagagagggagagagggagggagatcgcctcgccgccgcggcgtgggatccggaggtggtgtagcgaggatgtcgtctgattcgtcgtcgtgggcgcgcgcgctcgtgcagatctcgccctacaccttctccgccatcggcatagccgtctccatcggcgtctccgtcctcggcgccgcctgggggatcttcatcacggggagcagcctcatcggggccgccatcaaggcccccaggatcacctccaagaacctcatcagtgtcatcttctgtgaggctgttgcaatttatggtgttatcgtggcaatcatcctccaaactaagcttgaaagtgtaccaactgctctagtgcatcatccagagtctctccgggctggctatgcaatctttgcgtctggtcttattgttggctttgctaatcttgtttgcggggtttgtgtgggaataattggaagcagctgtgcattgtctgatgctcagaattcatcactctttgtaaagatcttggtgattgagatcttcggcagcgccttgggtctgtttggagtgattgtgggcataatcatgtcatctcaagcaacatggcctgcaaaagcctagttctattcatatggcaatctgtaaattatttcggggagacctatcagaagaatatctggtccagttgtttttatttctttttttttgtttgtgcatttttggcaaatcacgtatattgatgcttgatgcatctgacggtagagatactgttcctactgtaaagactacataactgctgcgtatcttgtaggtgctattgcttttgcagagtgtggtctgcgtattgaataaaaccattgaactcaggaat

SEQ ID NO: 5875 - DNA, 498 bp, Oryza sativa
  ref <308>: DATABASE ACCESSION NUMBER: AK063037
  ref <309>: DATABASE ENTRY DATE: 2001-12-06
taactcgacggatcgcacggccctcgtgccggcgacgcatcattcaaatttctgccctatcaactttcgatggtaggataggggcctaccatggtggtgacgggtgacggaataagtgcccgatcgacgcgctgaagctgggcgtgtgcgccaacgtgctcaacctgctcaagctcaaggccaacgtcctcggcatcaacatcaacgtccccgtcgacctcgtcctcctcctcaactactgccacaagacctgcccttccgacttctcctgcccactcatctgattcttaatcttcattaccaccacaaccctagctacctaattaaggcttaagctttgcatggcttagtctgtgtgttgcagttgtgtcatacatatatacttatctcgatctatcagtgtgattattgatgatcagatcgatcatctaatatatgtatcttgttattttaatgcgtactgtcaaataaaagtttcctccagtgtacgtacgttct

SEQ ID NO: 5876 - DNA, 463 bp, Oryza sativa
  ref <308>: DATABASE ACCESSION NUMBER: AK063038
  ref <309>: DATABASE ENTRY DATE: 2001-12-06
actaggagagccgaataggaccaatctgttggatctcggcatggaatcctgcaatggctcacccagcgagcaactcgaaggccacacagctccacacgccgtctgtgtcctcattgtagtcgcctccatcctcctcaagggcctcctccaccacctcggccagtaggagttcagagaaagaggagcataggggccatggccgacaatgcaaccaaaaggcacgcaggattggtgaggtgacattgcgtgctgtacatgatttctttgtatttgggcttttttttcccgtgatgggatgtgggctctgggctctggtcacgcgaaccagtggacttccttttctcatgtggtgtgttgcgggctatgggctatgtgaacttagtgggctttttgttgtatttttgtgtacaaattgtgatgggccttttgtttcttcacaaaaagaggtgggctatggcccaac

SEQ ID NO: 5877 - DNA, 599 bp, Oryza sativa
  ref <308>: DATABASE ACCESSION NUMBER: AK063039
  ref <309>: DATABASE ENTRY DATE: 2001-12-06
acctatgtactcgctctacagtgctagtgcacaccgggattgccccctaaacaacgtgcaccacgaaattgccgctgtcatcgtcgtcgtcgtcgtcccacctgccagactccgagctcctccgccggctccccttcttcgcctccagcagcggagcggcgccgtcgacatagtccagctggcacgcctcgggtccctgggccgacatccggtcgcaccggatgaggtggtgcaggacctccttcatggacggcctcgccggcgggttctcccccgtgcagatcacgccgagcgtgaacaccgacatgatgtccggcagactggcctgctcccggatgtcggcgtcgatgacgtcatcgaacggagggcctttctggtaccgccgccacgcccactcggccaggcagaagtcggctgcggcgtcgttcgcgaccttgccggtcgtcagctccagcaacacgacgccgaagctgtagacgtccaccttctcattcaccctcttgctgtacccatactctgcaaaatgtgaattttgttttcctccaattagtcattcaatttcaatctatgaatgaacaagaaatttgaggttcttggtt

SEQ ID NO: 5878 - DNA, 613 bp, Oryza sativa
  ref <308>: DATABASE ACCESSION NUMBER: AK063040
  ref <309>: DATABASE ENTRY DATE: 2001-12-06
aactaacgctaaaaaagtaacagtttctgtactttattggatctcgcttttgcccagcatggttgctgccaagggtgcccgcaagatcaacgtcggcaagcgaaagggcgcgaccctccgcgatgtgtccgccaacaagtggatccgcgccatggctcagcacctcaagcagtctggcaagctcttcgtgccgtcgtgcactgagctcgtcaagcagtcccacggcaaccagcgcgccccccagaaccccgactggtacttctaccgctgcgccgccgtcctccgccgcatctacgtgcgccccggcaccggttatggcggtctgtccaaggccttcgccatcaagaagaacaacggctcccgccccgagaagaccgtgcgcgcctcgactggcctgctccactgggcctgccgctcccttgagggcctcaagctcatcggcaagggcaaggagtccggccgcatcctgaccaaggatggtcgccgcaagtgcgatgccatcgccttcaacgtgaagagcggccgcaaggctgttggcactggcgccggcaagaagactgccaagaagtaagatccgaaagaccctctcccccgtcctctctgatgatccttt

SEQ ID NO: 5879 - DNA, 869 bp, Oryza sativa
  ref <308>: DATABASE ACCESSION NUMBER: AK063041
  ref <309>: DATABASE ENTRY DATE: 2001-12-06
attcaatcatccatcgatttctagcttagcttctactgccaattgcttggagattgatcgaccatcatctccatcgatcctcgaagtcgatatatagctaattggaccatattccatggcgatcatggcagccagagctctactcgtcgtcgccatggcagcagcggtgctcggaacggcgctcggcgccacctacaccgtcggagctccgagcggctcatgggacttgaggactaactatgaccagtgggtttccaacatcaactttcgtgccggagatcagatagtgttcaagtattctccagcggcgcatgatgtggtggaggtgaacaaggccgactacgactcatgctccagctccagccctatcgccaccttcaactccggcgatgacaccatccctctcaccgctaccggcacccgctacttcatatgtggcttcaatggccattgcaccggagggatgaaggtcgctgtcaaggttgaggccgccaccggcagcaacccggccccatcaccgatgacccctcgtccacgcacaccgacagcaatggcaccgaacgcaatgccgccaacggctggtggccggcccgtgcctccatctaactcagcaagccagcccgctggtgttgcatctctagttggtcttagtttgggtgccatagttgttggtctcatggccttctaaattagagtaagaagatactttgtgtatctcttcgaaggcgatcgattgattgtgttcgtatatattgattgctttgagtattttctctggtagagtccggctcatattgttatttatatgtaatatattttttgttatatgtaattcatcagctcattaattatgatttgattctattgtt

SEQ ID NO: 5880 - DNA, 904 bp, Oryza sativa
  ref <308>: DATABASE ACCESSION NUMBER: AK063042
  ref <309>: DATABASE ENTRY DATE: 2001-12-06
agcaattctcctccccctcttgcaatccattctgaattctctgatcttgaattcttcatcttctctctctgcaagaatctcgagatttcaagatcgaggagaacttaaaagtttttacgccatgattccgagagctccgagcctcttccatatcgaggatggagctgtgggtgtcgcggcgtcgacgaagaagccaatgccggctgactccggcgagctcgtcgggctccggctgatcatacagcagtcgccgaggcaacggccgccgctgtccgtgctcaggcggtcggcggtgaggccgtcgccggcggcgacggcggcggcgagtcaggatgaggctggtgctcctgcaggccgggggttcatggggttggggttcttgaactgctgctactgctgccacaagaagctctacgccgacatggatgtgttcgtctacaaaggggagcacgcgttctgcagcgcggaatgccggagccagcagatggcgagggaggagaggcgagagatcgagatgctggtgaggcggcgccgcgacgcgttccaccgccggcgagcttcgccgccggccaagatcggtggacacgcgaggctgcagatcgctgcttcatgatttatatatacatatgacagacttatcgagatcgaggttcatctccgctagtttctgaacaatttttcaggagaaattagggaggacaatacaacggagacgtacggctactcattctgtcacagattttgttgtcctcgtctacttcacatgtataaattgtaattgtatttttcgatctcttcttttcgtctataaccagcggtagtagtgtagttgctgcagggtgtagatgctgcaaattaagttaagagtgtacaagaaagtagatgaaactgatggacatttgac

SEQ ID NO: 5881 - DNA, 602 bp, Oryza sativa
  ref <308>: DATABASE ACCESSION NUMBER: AK063043
  ref <309>: DATABASE ENTRY DATE: 2001-12-06
gtgtattccccatctccagcacggcctagcgagtggcggtggcggcgcaacagcagggtgggcgcggcaacggcgaccactggccggcatgcaggaggtgcggcggcgaccgcgggtcgacgcggctcaaccgcgggccagcacggcggcggcgaccgttggccagcacgcaggaggcgcggcaacagccgtgggtccgcgcggctctaccgcgggccagcgcgacagcgacaaccattggccggtgcgcagggaggtgcggcggcagcgcgaagaagaggcgcgaccttggtcaggaggcccgttggcaactgcgggcctgcacggtccggcgcgacggggagctcaggactgggtgagtacggctggggaagggaaggcgtgaaggggaaggttggcgcaggggctgttaggggccagcggtgctggaggaggcatagatgcagcagggcaaacggtgctggaggagatgcaagggcggttggctggcgctactggactttgtaatgtttgctatagctgaaattgtgttgaaattcagtgatatctccatgaaagtatgttgaaattttgtgaaatgaaatcttgtctaattattgctg

SEQ ID NO: 5882 - DNA, 508 bp, Oryza sativa
  ref <308>: DATABASE ACCESSION NUMBER: AK063044
  ref <309>: DATABASE ENTRY DATE: 2001-12-06
aaagaacaacaggtcgagcaagcggcgaagggaaaagaagcggagatcgtcccctccccgccgccgactggacgcatatgcgccacggctgccggtgagcttccccgccggcgacgagtggacctcgccccacgcccggctagatccggtgccacccccgccaccacgaggaatgttcttctggccgttcctagagggtcttttgattcttgcaaatgcattggcgatactaaatgaagaccgctttcttgcacccagaggatggagcatgtctgaagtctcaggaaatggacgatcaaagtcattgaagggtcagattgtaggactcatatatgccacacagttctttaggatgccgttgatagcacttaatgttcttatcattgttgtgaagttggtgtcaggctgatactatgaaggtttcagttgttgggcttgattgatttcaatttcaatgtgatgtaaaagtattcacgctaaatatttctgcagctatattaatttgtct

SEQ ID NO: 5883 - DNA, 706 bp, Oryza sativa
  ref <308>: DATABASE ACCESSION NUMBER: AK063045
  ref <309>: DATABASE ENTRY DATE: 2001-12-06
aactaacgctaaaaaagtaacagtttctgtactttattgtttaggttacatcacacatggtgtcctacgtcaaggttggccgcctcgcccgcgtgctccgtggcccccgtgagggcaaggtcgcgttcatcaccgccatcatcgacggtaaccgcgtcctgatggagaaccccgccgacgagaagatgtggcgccacgtgcagtccctgcagaacatcgagcccacccgcttcgccatcgacatcgcccccaacgcgactgccaaggacatcaaggccgccctcgccaagaaggacgtgctcgccgcgtacaccaagaccggtgtcgccaagaaggtcgcctccctcaaggccctcgccgagtcgactgacttcgagcgctaccagctccgcgttgccaagcgctcccgcgctcactggtcccgcaagctcttcgccgccgccgatgccaagaagcccacctcgttccaggccaagctcgccgccaagattgagaagtcgacgaagaagttcggcgacaagaagctcaaggcccgccacgagcgcatcaagaagcacttcgccgcccgcaaggcgaagaaggccgccaagggcaagaagaccggcaagaagtaagtaacgcgacttcctaccctgtcaggcaacccttcccgtgatgtgtttccgagaacaacccaagccctccctcacacacgcatttcaaaaag

SEQ ID NO: 5884 - DNA, 829 bp, Oryza sativa
  ref <308>: DATABASE ACCESSION NUMBER: AK063046
  ref <309>: DATABASE ENTRY DATE: 2001-12-06
aaggcgaggcgagcacacatggccatgggggatgactactccaaggcgaggcaagccctggcggtgagcgcccacgagtgctcgctggtggacgcggtctcctccgcggccacgccgccgaccgcggacgacggggaggggcacgcggcgggcttcttcgagggcttcgtgctgggcgggatccgcgtggacagcgtccgcccgggcctcgtcgactgctccttcaccgtcccctccaggctcaccgatcggagcgggtgcctggccgcgggcgcggtggtgtcgctggtggacgaggtggggtcggcggcctccatcgccgacgggcgccccgtcaaggtctccaccgacatgtccgtctccttcgtctccctcgcgcaggcccgccccggcgaccgcctgcggatcacggccagggcgctcggccacaagggggcgtactccgccacccacgtcctcatctccaacgccgccaccggcgaggtcgtcgccgagggcaggcactccctcttcggcaggatgaaggtcgtctccacctccaccgccaccgccaccagcaagctgtgaccatggattccaccctgctgccatggttaattaaagtgtgagtattatggcccttctaagtagcgtaataaggaggttttgattttgatcacaaatgtcttcagtatctgattgagcatacgacacacctgaacctgattataccatttttcttttttgctttactagctgtaaattcagttatcgaattacctgccccagtacagtgttaataacattgtcaactttcattatctgggtcgccaagtttgggcgttcattc

SEQ ID NO: 5885 - DNA, 1405 bp, Oryza sativa
  ref <308>: DATABASE ACCESSION NUMBER: AK104952
  ref <309>: DATABASE ENTRY DATE: 2002-08-28
atcccattcccgccatctctgcatcttcttcttcttcctcttccttctgatcacctctcctccaagaagctttcgtttctctcatctgtcaatcatgtcggcctactgcggcaagtacaaggatgagttgatcaggaacgcggcgtacattgggacgccggggaagggcatcctcgccgccgacgagtcgacgggcacgatcgggaagcggctggcgagcatcggcgtggagaatgtcgaggagaaccgccgcgcgctccgggagctcctgttcacggcgcccggcgcgctggactgcctcagcggcgtcatcctgttcgaggagacgctctaccagagcacccgcgacgggacgccgttcgtcgacgtgctcgccgccgccggcgttctggccgggatcaaggtcgacaagggcaccgtcgagctcgccggcaccgaccgcgagacgacgacacaggggcacgacggcctcggcgagcgctgcaggcggtactacgccgccggcgcgcggttcgccaagtggcgcgccgtgctcagcatcggcagggcgtcgtccaggccgtcgcagctcgccgtcgacgccaacgcgcagggcctcgcgcggtacgccatcatctgccaggagaacgggctggtccccatcgtcgagccggagatcctcgtcgacggcgagcacggcatcgaggcttgcgccgaggtgacggagcgcgtcctcgccgcgtgctacaaggcgctgagcgaccaccacgtcctcctcgagggcaccctcctcaagcccaacatggtgacgccgggctccgacgccgccagggcgccgccggaggtggtcgccgagcacaccgtccgcgcgctcctccgcaccgtgccgccggcggtgccggccatcgtgttcctgtccggcgggcagagcgaggaggaggcgacgaggaacctgaacgccatgaaccaggtggcgagcaggggcaagaagccatggtcgctgaccttctccttcggccgcgcgctgcagcagagcacgctcaaggcgtgggccggcaaggcggagaacgtcggcaaggcgcaggcggcgctgctcgccgctgcagggccaactcccaggcgacgctcggcgcgtacgccggcgacgccgccgccggcgagggcgtctccgagaacctccacgtcaaggactacaagtactgaggctttatgacgaattgatatttttgttttataatgtagtgtaacaataagctgcgattgcttctatgctctcgcaatgtcgcgtatttgattttgatttttgcttggtcttgtttagcgagtgttttgttttggttctgaattttgaaatgaattcaaagtgattttgtctgctgtttaacagtgaattaaaaagtggagtactacctgatgattccaggac

SEQ ID NO: 5886 - DNA, 839 bp, Oryza sativa
  ref <308>: DATABASE ACCESSION NUMBER: AK063047
  ref <309>: DATABASE ENTRY DATE: 2001-12-06
gagatgcaatgacataattctgttaaacaacaaacagcaagctttccctcagtcttattccttaccacaatgctcacacacaattttagatatgatcctaaattcttgccggttttcctagacatggctcctgctcaaacttatttcatactagcctttcatttcaaactatattattttattctttctgcaactagttctgtggtacgattgaagcagggatttcatttacctttgcatcttgtatcctgacagctttttgctggagtgggtgatggtagtacagtacggcttcttcatgcgtgaagaactcctgtgaaggactgaaactctgcaaaggacgaggcttagtggaggggggttggatcggaggcgtgcgactgatgccagaaattctgatcgagtcagatgatcatattactagtatagctggctaaacagacgaacagtacagtgttttcgcgtccatgatctttgatcgatgagagcaatagcatcatcgtgttcttcgccggcacgtggtaatgggcagaatctcctgaaaaagttgccatgctcatgcacaggtaagaataggattgaaaggaattcacagtggaaaagagtgtttttgagccatgtgatgtgtttgttctcccctttccagcttggtttacacctgtggtgaatgaatgttcgatagcagtattaccatcatgcaagttccattgaaagaaatcacccaagaacccggacagaacattcataatgctcaagaacagccctggtgcctgaattcttgattcatacgcctatttgaagtttttcggattctcgtagaatttaagttgtttgctttg

SEQ ID NO: 5887 - DNA, 783 bp, Oryza sativa
  ref <308>: DATABASE ACCESSION NUMBER: AK063048
  ref <309>: DATABASE ENTRY DATE: 2001-12-06
tcgatggaaatctcttacatcaaccagctgataaattggatcaatattatttattggtgccggctaatgtcaaggacgcctatctcttccatctactatcgttatatcacggtagcaatgatgacgaagacgaggaaggaagaagtaaaacaaagaaattcagtaaatcaacaatagtttttaccaatacatgtcgagactgtcagatcctctcgatgatgtgtcgaaaatttcatatgccatccgtagaaattcattcgctaatgaaacaacgacaacgaatagcgtcattggcaaaatttaagtcacttcaagttccgatcttgttcgctacggatgtcgcgtcacgaggtttggatattcccagtgtcgatctaattattaatcacaacgtaccatttgtaccaaaagaatatgtacatcgagtaggacgaacagctcgtgcaggacgttgcggtactgcaataacgctcgtaacacagtatgacgtgaaattgatgcataaaatcgaagatcgtgttggtaaacaattaagtgaatatcgcgtgaaagagaaagacgtgctgaaattgctcgttgaagtctccatgactcgaagtcaagtggaaattcaacttgatgaagaagattttggcgaagcagaaaagatcaacaagcgaaaacaccgtttactccaacaagaacttttagctgaaagtagttcagctattactgaggagaaatcgaagaaaaaacgaaaaaaatctgaaaaataaatgcttgcgttttctttgttgttttcag

SEQ ID NO: 5888 - DNA, 526 bp, Oryza sativa
  ref <308>: DATABASE ACCESSION NUMBER: AK063049
  ref <309>: DATABASE ENTRY DATE: 2001-12-06
tgattatgttgatcatttcttagtgtgtcagattgattattgtgttatgtgcaagttccgttgtgtcatttgagatgttgaaatacggttcagttgctcatgtttcatgcctcttatggcaaagaagattctgatttgtgtatgttttttgtgttattgttttcagcatcactcgaagaataagaagtgctttgtctgcaacaaaccaacactcggcatcttcaacgcggcacaggagatccgcaagaagatggcacaagacaagaagcaatagtgcccactgacagttgaagaatgtgacttgtacgttagagagttgaagaatctaaatgatgtggaattttagatgacaaagaaaactaccaattagttttgcattctgtttatgtaacaatatctgctagcctactctcacttgctcggttcagctcagccttttgtatggcaaatgtattgcttctgtgaggatgtgaattgtgcagagcccaaatagatgaggcaaacataaaaggttcttgatttcctt

SEQ ID NO: 5889 - DNA, 456 bp, Oryza sativa
  ref <308>: DATABASE ACCESSION NUMBER: AK063050
  ref <309>: DATABASE ENTRY DATE: 2001-12-06
agttgttttaatctgggggagggccagaccacggcagctcacatgaccggtaaggtgttcgacgaaatgtttatctccatgccatttcagtttcctttcctcatcttttgcccttcgttgaatcgcatccatcaactgcaaaatactagattatagcaccttgccccaacttctcctttcttcttcttcctcccttttatttctctctcgcaggcaaaggtcgcacgcagctgcgggaggccagcactgattgggccgcgtgcggcggttgggcggtggtctccggtcgcgctgatgaaatatgcagtttgaccaagggcaaaagatgatggaggcaaagtcccaaagttttcaactatatgatttaatttgttaaatgttatatattataaaaaaacaaccaagattccatgccatatcaacatttgcaaacagctagtaacattttctttttgc

SEQ ID NO: 5890 - DNA, 440 bp, Oryza sativa
  ref <308>: DATABASE ACCESSION NUMBER: AK063051
  ref <309>: DATABASE ENTRY DATE: 2001-12-06
gcttcctccctgttcccttttcgattcgattggattggattgttttgctggctcgctctctctctctcgtggtgtggtgtggacaagaaaggaaggaaagatggagggcggcgtagggggggaggtggaccacctcgccggcgagagggccaccgcgcagttcgacgttgaacacatgaaggttgcctgggctggctcccgccacgccgtcgatgtcgccgaccgcatggcgcgcctcgtcgcttccgaccccgtaacaataactttctccctctttctttctttctttgcacagatagatagatagattatcaacttcggctccccggatctctgattaaattacctgtatgatgctcttcttctcttcccccaatccttctttccttgttcttcaacaaccacaccacgccggcccgattttaccccacgataataat

SEQ ID NO: 5891 - DNA, 640 bp, Oryza sativa
  ref <308>: DATABASE ACCESSION NUMBER: AK063052
  ref <309>: DATABASE ENTRY DATE: 2001-12-06
gcttgctgccaatttgagggctcaaagtagtgctccatccaactaaaggtatcatcaaaggttttggaggtaatcagattcagagcaaagggaagaacagctaaatagaacagaagaaatggctaggaggaagagcaatccccacaaaggaagaggagatgaggagtaccccatggtggcatatgcttgctgcccctgctatgtgctcagctctgtcatcagagggattgggaggtgcctctttgtggcctgctaccctgccatacaatgctgtggccttgatgagtgcaggcaccaccacaccaccacccagctcagccacttcagatgaccacagcaataattccatccattaagtatggcatctcaatcatcaccaattctttcttctcttctttctcacacactggggttcagtaatcatatggagttcttgattaaagagagctgtccatatttgatttcatacatgatgaaagtccttttgctggttttgctgtaatttttccagtagaaagaaaggcgtgttgccctaaaccaataggagttagaagagtaaatgagaagaattacatgttctaataagctattttgtctcttacaagttattcagaaagtggttctacggttggtggctcgt

SEQ ID NO: 5892 - DNA, 569 bp, Oryza sativa
  ref <308>: DATABASE ACCESSION NUMBER: AK063053
  ref <309>: DATABASE ENTRY DATE: 2001-12-06
atccaaccatcacacacagttagcatatcagtagtcgttcacagttagcatatcagtgcatcataaacttgaccttggctcgatcgtacaatccatcacaactaaagatagtggaaatggggcaccaccacaagaacgacgacaaggccgcggcggcggccggcggcgaccaccgcaaggaggagaagcaccacaagcacatggagcagcttgccaagctcggcgccgtcgccgccggagcatacgccatgcacgagaagcacaaggcgaagaaggaaccggagaatgcgcggtcgcacagggtgaaggaggagatcgccgccaccatcgccgccggcagcgtcggcctcgccatccacgagcatcacaagaagaaggaagctaagaagcatggccatcaccattagctacctaccctatcactacttactggactagtgtgtctatttatttgattattaccatgcatgtactcttagctagcatatcggctgtatttttgtcgacggatacatgtacatcatctatctatttttcttaataataatgtgattgattgtgttacagtt

SEQ ID NO: 5893 - DNA, 726 bp, Oryza sativa
  ref <308>: DATABASE ACCESSION NUMBER: AK063054
  ref <309>: DATABASE ENTRY DATE: 2001-12-06
aaaagccctaaaaactccagaaccaaccaaaaggcgcgcgaacacacgagtcggcggcggcgcggcgatggggagcaacacggaggtggagaagaagaaggccccaacggcgctcgcgcccatcgcgaagcctctcgccggcaagaagctctgcaagcgaaccctcaagctcgtccggcgagcatcggaggccaagtgcctgaagcggggagtcaaggaggtggtcaagagcatccgtcgtgggaacaaagggttgtgtgtaattgctgggaatatttctcctatcgatgtgattacacatgttccaatactttgtgaggaagctaatattccttacatatatgtgccatcaaaagaggatcttgctactgccgggactactaagaggcctacctgttgcgtcctggttatgaccaagcctgccaagggggagatcaatgaagaggtgaaggagaaactgaagtcagactacgaccatgttgtagctgaagttgcagaggttacatcttcaatgttctgagtacaacgcccagccccagggccatagtaaattagtgatagaaacccaggcaccatggctgctcacatctttctatatgtattatgtgaacatgaaggttgctctactagtttacccctgtcggatcatgctgtttctctgttgattagcataagctagtcaattgtaatgaaacctggtgagctgatcatttactctccagtaag

SEQ ID NO: 5894 - DNA, 564 bp, Oryza sativa
  ref <308>: DATABASE ACCESSION NUMBER: AK063055
  ref <309>: DATABASE ENTRY DATE: 2001-12-06
ctctcatttccctctggctacctcccctcccctcccagatctggcggaggggaggggcgtcggcagtggcgcaggaagagggggcggtggcggtagcgtcggcgttggcgcggccggatgggagattgacccgcacgtccacatctcatcaatattttggacctgcactggagtaagcagatcaaccaggccgttgtgttcgtcgacttagtccgtgccaacacaaatctggtaccatcggccgagcacggattttgcgtcaatagtttttgaagatttggggtacagcaataaagtgtgtgttctactaaattcaaccaagttgagttttccatttttagacctagtatcaatttcatcaacgatcaatgagcagtacggggcctaaactcgtcacaaatgtcaaggatacatcattgctatagatatttccagtgtaaaacgttatcggtcaaaaatgatagtggaagtcttgtacttcccgatttcgtacgaatttgaggcaaacatatgtgttgactaatataatggaatggacttccattgtcgaggaagttaccacgt

SEQ ID NO: 5895 - DNA, 791 bp, Oryza sativa
  ref <308>: DATABASE ACCESSION NUMBER: AK063056
  ref <309>: DATABASE ENTRY DATE: 2001-12-06
cttgactatgtgttccgttgctcgttggtgtctgtggtttgttcattcgtttttttttattattattttgtttgtgtgttggatgcagtggccgaagcagctgaacgcgccgctggaggaggtggatcccgagatcgccgacatcatcgagcacgagaaggcccgccaatggaaggtaaccagcaaccaccaaaaaaaaagtgcgtggattgttcagtgtttggtccaccgacgcattgctgaattgtggcaatctgtttggtgcagggtctggagctcatcccgtcggagaacttcacctcggtgtcagtgatgcaggcggtgggatccgtcatgaccaacaagtacagcgaggggtaccccggcgcgagatactacggtggaaacgagtacggttgattgcgttctatcggttgcctttgttcagattatttgggtgttaaaaatgtttaatctgaaagagaaatcagtgcctgatgggagtgaatgatgtgaatttctggtggctctgggttttccttgcgtgcagatacattgatatggccgagtcattgtgccagaaacgtgctttggaggccttccgcttggacccagcgaaatggggaggtaaatcattttcactctttatcttgccttgtcatgtttttatatgaactccagctttcatgcgcatcaatagcctttagtcctcttttgtttcctgctttgggcgatgtaaatgaaaaaaaaaaaggataggggcaaaaaggttcctttggataagacacagtttttatggttccatagttcac

SEQ ID NO: 5896 - DNA, 582 bp, Oryza sativa
  ref <308>: DATABASE ACCESSION NUMBER: AK063057
  ref <309>: DATABASE ENTRY DATE: 2001-12-06
atgcgcgacctgcaccgtcccaggtacacgtactgtccacagctacgtacatgcatcggaagggctcgacgacaacgatcgaattgaacggcacgcggctgtgtaatggtcaggtactgggtgttcatgggggcgagctggatggggttcgcgagctcgatggtgatgacgctgagcctgctggtgcggatgcccgtggactcgcgcaacgtccggtggtcgttcgcggtggcgtactccacgctggtgctcacgttcatcgtgtcgcagcccaggacgcacctgtcgctggacatcctcgtctgggtcgccgtcctcgccttcctctggttcaccatcagcctccgcccggagcgccgcgcgaaaatcgcccaggcgatctgctgcggccacaacagctgaagaaaccgcgcgcacggcgcaccaccactgattccttcattagcctgttgcgattttctctctcactaatcgacgattcgtgaacgctcctgtgcttacttgatggagatggttggcaaattggatgaattgatgtctctcgtccctcgattcccgttcctgtgcaaattacaagtttac

SEQ ID NO: 5897 - DNA, 604 bp, Oryza sativa
  ref <308>: DATABASE ACCESSION NUMBER: AK063058
  ref <309>: DATABASE ENTRY DATE: 2001-12-06
ctcgcttccaagttacgcccgccgttaaaccctagctccttccccggcggcggcggcggcgggagggggcaggaagcccggagatgccaccggcgtcgtcggttgcgtcggcggtggagaagctgcaggcggcggcgcaggacgcggcgaactcctcgtcgcgctcggcggccgccttctccgagcaggcgcaccaggtcctcgtgcccagggccgcaggtcgtgttgtctctctatcaacttgtacgaagatcagcgccgtcagctttgcagtcggtgttgtggtgggcttcacattgaagagaagactacgccggtgggctgctaggctgctgaaaagaattaaggacgatgactagtgaaatcttttcatgccatgttgttctcaagttctgttgagtgttgagaactatgtttggttgtgcatcgcccgcaaattggaatcctttttacagttagataaaatcgcaagcaagacaaacttatggtttctaagctgtattacacatattttgtaggtccgtaagccttagaattgctactcagaatgtttgttttctgatgggtgatttacaaattctatttatcccccttttgatagagt

SEQ ID NO: 5898 - DNA, 567 bp, Oryza sativa
  ref <308>: DATABASE ACCESSION NUMBER: AK063059
  ref <309>: DATABASE ENTRY DATE: 2001-12-06
attggagaaccagccatgtccaccgctcccgcctcttcttccgccactgctcctgctgcgccagcggcgaccccaacactcgtggcgcctgcggtcccgcgcatcgaagcgacggagctaggtgcgctgctcgcgtcggcggacgccaagccgctcgtggtggacgtgcgtgaccccgcgacgtccggcggcttcatcaagggagccatcaacgtgcccaaagtcttgtttgatacggacgagtttgtcgacgactttgtggacaagcacgcgacacccggcgccgtgatggtcttccactgcctcaacagcaacggccgtggtccgaccgccgctggtcgcgtctacgaccgcatccaagcaaagtttgccgacgacgacaagaacaagccgcaggtgcacgtgctcaggggcggcttccgcgtcttctccgagacgtacggcttggacagtccgcttgtggacccgtcggatctccactaaacacgctgcagaaaccattgcagtctcagctatcgatgccggacgatctaacgccgcctcactaatacattctgaggttttaat

SEQ ID NO: 5899 - DNA, 664 bp, Oryza sativa
  ref <308>: DATABASE ACCESSION NUMBER: AK063060
  ref <309>: DATABASE ENTRY DATE: 2001-12-06
atacatactcgctcgatctcgtagtagacatcgcctacacacatatacatatattaataactaatcgtccgaccgatcgatcgagatggcgaggagagcgaccgcgcgcggggctgggctgccggcgccgttcgtcgtcatcgtctctgtactgctgctgctgctgctgggatcgctgccgctccacgaggtcgcggcggcggaagacgaagatcagattggtggcggtgggctggaacatggtgcaagtgcgttaaaaccagaccgcggccccctttggcgggggtgctgcaaccagtataaagagggaggtagctacacagggagggggaggtttggaccttgcattcctacgcagccatgccccaaaccaataccatagatgccatcatcatcaccaccagtggtgagtatagtgcgggtgacactgatcacgataagcacacgtactatacgtatatacggttatatataaatacataggcacatctgcgaataaatgtactcgatcgctctccctctcctggataatactccctctatcccagaatatagcaacctaagccatcctaggttgctatattctaggacggagggagtatatccctccgttaagttgtccttccatcattgttaatggcaatattatataatattacattgt

SEQ ID NO: 5900 - DNA, 1071 bp, Oryza sativa
  ref <308>: DATABASE ACCESSION NUMBER: AK063061
  ref <309>: DATABASE ENTRY DATE: 2001-12-06
acgtacgtagggagagctagctaagctggcggcggcgatggcggcgcttcggcttgcggcgaggaagatcgccggcggtggtggacgccgcgcttcgatgaatattggaggcggctcaccggtggtggctgctgaggcggaggggcagcggcggcggctgttgcaaggccttatctacggcggcggcggcggcggctcgcctgtgtcgtcgtcgtcgtcctcgtatggaactacttttcggcggttgatgagctccgatgctgctgccgatcacccaccatcaacaccaaaggttcgcatcgtccaaatccccctcgattgcatgcttcccctacttaattttctcatctgaaaattattacattcaaataccctcctcgtctaaattattacagactttagttgttctgtcaatttcaatcttattatttggtgcataatcatttgcatcaagacaagcacatctgtgcccacaagaaacaagtggatagcattcatggcggtgtcatgtagagcctcctccgaatgctcttgagacagctgaggtggaggcccttaagctggaggtcaagcagaagaaggaagagctgttctacaagcttgctacgttgaattggcaatacaagaaacgtagcaaggaggcacagattgatgcagagctcctctgcaaactcatcggccacgtcaagcccaacccagatgacctcctctggtgcaagtattactatgcaagaaaactcaatatcttcttgctatgtgtgctctctacatttgctgccgtggagttggtggcattctacaagtacaccgttggtcgaatcgatcgcacactagaaacttaggcatcttctcctaggtgcaatcctgtctttcaaaagaggcctagatttttcttttaccagtttaaactgtttagctgtatactagttacataatgtgatgctgattccagcttggctacaagaatgtgatgatagcaacgtagccgaccgagcggagacccaaaccggatgcgttgtatccggttttacagttgagggatgattttataattcgatgacaaattgagag

SEQ ID NO: 5901 - DNA, 1055 bp, Oryza sativa
  ref <308>: DATABASE ACCESSION NUMBER: AK063062
  ref <309>: DATABASE ENTRY DATE: 2001-12-06
actcgcgcatatcacagtcacagctgcagccatggcgaagcccactcctgctcctcgcgccacaccattcctcctcgccgccgtgctctccatcgtcgtcgtcgcggcctccggcgcggaggcgcggtggtacggcggcggcggcggcggcgggtacagccccagccccagcccggtgtcgtcgatcgtcagcgagcagctgtacgcctccctgttcctgcacaaggacgacgcggcctgcccggcgagggggttctacacctacgcgtccttcgtcagggccgcgacgaggttcccccggttcgccgccacgggctgcgccgacgcccgcaagcgcgaggtcgccgccttcctcgcgcagatctcccacgagaccaccggcggctgggccaccgcgcccgacggcccctacgcctggggcctctgctacaaggaggagatcaacccgcagagcagctactgcgacgccaccgacaagcagtggccgtgctaccccggcaagtcctaccatggccgaggccccatccaaatctcatggaacttcaactacgggccggcgggccaggccctgggcttcgatggtctgcgcaacccggagatcgtggccaactgctcggacatagcgttccagacggcgctgtggttctggatgacgccgagggacaccaagccgtcgtgccaccaggtgatggtcggggagtaccggcccggcccggccgacgtggcggctaaccgcacggcgggcttcgggctggtcaccaacatcgtcaacggcgggctcgagtgcaaccgggcaggcgacgcccgggtgaacaaccgcatcggcttctaccggcgctactgccaggtgctcggcgtcgacgtcgggcccaacctcgactgcgagcaccagcagcccttctagcttgctataaaaattcatgtcgtttctcatgtcgctgcttgcgattagctgtaagatttaattttaagtgttgttgcgtgaactgtgtacacgccgtcttgttttgtctcattcattggaaattggaatcaaggaaaactgcaattgtgct

SEQ ID NO: 5902 - DNA, 673 bp, Oryza sativa
  ref <308>: DATABASE ACCESSION NUMBER: AK063063
  ref <309>: DATABASE ENTRY DATE: 2001-12-06
atcgcggcggcatcagcagcagcaagagtcctcaacgtactcatcgtccacgcgtacgcacgcacgtactctagcagcctagcaggcagaagccacgagcagccagagcttagccagccatggaagaggacgagatgaggatgagagagaagctggccacgatggacgagaggcaggcgatggcgatgcggctcacctggatctctgagctcgtcgccagcaacaagaagtcgatcgccggcaacaaggcctacatcctggccctgatcgacgccatcgacaacgaccggtgcccgtacaccgccgccgagctctccgacaagatccgcgagctccgggaggacagggtgaccgtcatcaagacgatgatcgactcggtgcgagcagctacgcccgccgccggcggcgatggtggtactcgtcgtcgtggcgccgacgacaactccggtgccattggctgtggcccaactcaccagtcgcggacgatcagccggtagagtatgtaattaggatatatgtaacccatcgctgtcgatttaatttagccaggagtagtttcttttttcaattacatactctaccatgcaatgaagggtgtgtttagttcacaccaatatcgaaattttggttgaaattgaaatgatgtgatggaaagctgaaagtttacgtgtgt

SEQ ID NO: 5903 - DNA, 582 bp, Oryza sativa
  ref <308>: DATABASE ACCESSION NUMBER: AK063064
  ref <309>: DATABASE ENTRY DATE: 2001-12-06
ctctccccaccatcggctcatcgctggtgaaggttaggatagggactaggttccctgctcctctagtacttgtagtagcaatagtcgggttatcccgttggttcaggttcttctcgtggttttaattttcccttttgattctcatggtgattgttggcgtcggttggcctcgtccttgtgtctaggagcgctgtcgggcttctccacggagacgaatcactccctgttgggcttcttctcccagctgctacctaggatgcctccagatctgtgcaaagagaggtaacgtctgtctacatcgacatctccggcgaggtctttccaaggaaggcggcctcatgcttgatccttggcgacaaatcttcactaggtggctggagttttcaagttgcatcaaagatgtctcaacctcccactcgtggaggaccgaatctgtatgcctcttggcttcttatgtagctcaccgcgtttcttttgctttcttcaccaacaaaatacatctagttgttgtctttggagtagctatggtctttgtactaatttctctcaagaacaatagtagaaatctcaagtggtgttgct

SEQ ID NO: 5904 - DNA, 759 bp, Oryza sativa
  ref <308>: DATABASE ACCESSION NUMBER: AK063065
  ref <309>: DATABASE ENTRY DATE: 2001-12-06
tgctttaccatctggatctcccgcaagctttggaagatgagtatgctggatggttaagccctagaattgtggaggattttactgcttatgcggatgtgtgcttcagggaatttggtgatagagtttcgcactggactattttggctgaacctaatgtcgctgcacttggaggttatgacacaggagaattcgctccaggacgttgctctgatccttttggagtgaccaaatgtacagtggggaattccagtgtggaaccatatgtagcagctcacaatatgatactaacacatgcagctgttgttagactgtacagagaaaaatatcaaactctgcaaaaggggattgttggtataaacgttctttccttgtggagttatccattaacagactccactgcggatctgcaagcagctcaaagatacaaggatttcacgtacggatggatactgcacccattggtatttggagattacccacaagtaatgaagaaagctatcggttctcgtcttccatccttcagcaaagtccaaactgaactagtcaagggtactctagatttcattggagtaaatcactacttttctctctatgtgagcgatctccctttggcaaaaggagttcgagacttcattgctgatcgatcagtaagctgcagaggttggccagttttctatttaattatgcacataaatttgtagcctaggagtgtgtagcttgattcctttatagggacggcccatgaagatgaaggtagac

SEQ ID NO: 5905 - DNA, 827 bp, Oryza sativa
  ref <308>: DATABASE ACCESSION NUMBER: AK063066
  ref <309>: DATABASE ENTRY DATE: 2001-12-06
agatcagccatcgtcgccgggccgaaagttagccgagtttagcttcggaaaagataataagttgagcttgagcataactattttgtaccctccgcagtttcaccgacggacggatcgatatccgagcggaggatgtggaggctgaaggtcgcggagggcggggcgcccgggctgcggtcatgcaacggctttcttggtagagctgtgtgggaattcgacccaaacgccggcacgccggaggagcgcgccgaggtagagaggatgcgccgtgagtttactctgcgccgcttcgagaggagggaagcccaggatctgctcatgcgtatgcagatcaatttggaatggagggagtacactataaacatgggacaagcatcttgcaataaacatatgctcatgactctaccggttcccaccactgaaatactccatccgttctataatataagagcaagtacaataatcctcatgagccagcgatacggactccacgtagattccagagggagctggagggataaagggaagagaaagatagcaggttggcgactaatttgcagcccggctgtacactactcccaatgttccgttgcttcaattacagcattcaattgaagattagaaaaatcaaagctagctatgggaagtgtgtagagatgtatatacagtccattattgtcatgattagcttttgtaattggctgtagtaggatgatgtggttattttgcagccaacagcgagctgtactgttagccttgctctaaggtacaactactttttttaatgttccataatataagatatgcatacatgcatacaattaact

SEQ ID NO: 5906 - DNA, 799 bp, Oryza sativa
  ref <308>: DATABASE ACCESSION NUMBER: AK063067
  ref <309>: DATABASE ENTRY DATE: 2001-12-06
agggcctgtaatctagtggttacaagagcctcagtagcaccttagatcctgggtttgactcctcatgagagagcgatttttttaggatttaacggctttgtgtttttagtggtagaagtgtttgtgggtcatgagagcgatttttttaggatttaacggctttgtgttttcagtggtatgcgtgtttgtgagtgtctgcgttcagtggcgaatccaggatgtaaattgagggggtgctagtgtaaaaatataatgtgattaaaacaaataaagatatatcaactaaagtattttccaatgaataccaaaagcgcatatgatcaaaacaattttctctattttgatttgtgtctatcttaaaatattcataaaaatctgtgaatatattgttttgtatactcagagtagattctatttgggaaaatttgaaccatgccacacaaattttccaaaatttgtgatatgacaccctgacccacatgtcattgactcatgtgggttctacatgtcattgagatacgggtggcatatctcaaattttgcaaaattagggtggtatggttccaacaaacccattctattttaccagtttggacagtagaagcagtgaggaagcctgcatctttgccgtctgggaattttcttcactaatgactaactagacttgttaatgattaattaggggtagggattagagctagggctggcgcaccaaccagtcccaacagtggatccgccactatctgcgttgtactgtataattcttaaaaaaaaagttacgttgtactgtgtaattctc

SEQ ID NO: 5907 - DNA, 747 bp, Oryza sativa
  ref <308>: DATABASE ACCESSION NUMBER: AK063068
  ref <309>: DATABASE ENTRY DATE: 2001-12-06
gtttgaaaaaaattgcataacatggtcatccaagcaaacattaacaagaagaaacactttgttcaccaaggtctcttgtacgctgaattgaacgaattcttgaagagagaattggccgaagatggttactctggtgttgaagtcagagctactgttgccagaactgaaatcatcatccgtgctactcgtccacaaaccgtcgtcggtgaaaacggtagaagaatgaaggaattgacttctgttattcaaaagagattcggtttcgaagatggtaagattgaattgtacgctgaaaacgtcaagaataagggtttgtctgctattgctcaagctgaatcacttaagcaaaagttgatggaaggtgttgccgtcagaaaggcctgttatggtgtcttgagattcgtcatggactctggtgctaagggtggtgctgttattgtctctggtaagctcagagctcaaagagctaagtctatgaagttcgctgaaggatacatgatcagaactggtcaacctgttaaggactacgttgatattgctgttcgtcacgtatacatgaagcaaggtgtcttgggtatcaaggttaaggtcatgcttccatgggttgtcggtactcaagccggttcccaccaaaagccacaaccagacgttgtttccgtccacgaaccaaaggaagatctctcagtcccaactgttgcccatgattaaattttcacccaataaaatataaaaaaaaaataattattc

SEQ ID NO: 5908 - DNA, 436 bp, Oryza sativa
  ref <308>: DATABASE ACCESSION NUMBER: AK063069
  ref <309>: DATABASE ENTRY DATE: 2001-12-06
cgatgatgagtggtggtgatggctttgctgacattgttgggagaaggtatggctccgcgaagctgccattcaatgagaacaagagctggataggaagcatctcaatgttcatttctggcttccttctatctgcactgatgctgttctacttctcttgccttggttacttcactgtctgctgggatctggcacttggtaaactggctcttgttgcattagcagctactgtagtggagtgtattcctgtcaatgatgttgtggatgacaatatctccgttcctttggccaccatgttggcagcctatctgttatttggctacagttcatgttgttgagactataaaatttctcccttttgcttttcatgtcctgaatttggtactgccaaacatcatagattggatctctttctgttgaatcaaaaggtattttgctc

SEQ ID NO: 5909 - DNA, 681 bp, Oryza sativa
  ref <308>: DATABASE ACCESSION NUMBER: AK063070
  ref <309>: DATABASE ENTRY DATE: 2001-12-06
agctaaagcttttgaagggaagatttcaggccacacaacttgagcagaggaaggatggaagcggcggcggctgcctccaccggcgaacttttgacaggcaaaagttcagcgcctctaccccacaagaggcgatcgcgagacactacgctctgctgctgcgcgcatcgccagcagaaaatcgcagcatttgcaggctctcgcatcattttcagtcgccacgtgatccaggtggtggtcgtctgcgcggctcggcggaggagggcggacatccagtcggagacgtacgtgctgatggagccaggggaggaggaggagttcgtgagcaaggaggagctggagggcaggctgagggggtggctggagcggtggcccggcggcgagctgccgccggacctcgcgaggttcgacaccgtcgacgacgccgtgtcgtacctcgtccggtccgtctgcgagctggagatcgacggcgaggtcggctccgtgcagtggtaccaggttcagctggagtagagtggttcttgtgtggaatggaatgaacgcgcgatcgacgtggagtgatagtttatacacgtacgtagtaatcttcaacgcgacaccatttatctttttcagatttagaattctacggaaccgatactctactctgaaaagtaagaattttacagagactaaaattcaacc

SEQ ID NO: 5910 - DNA, 987 bp, Oryza sativa
  ref <308>: DATABASE ACCESSION NUMBER: AK063071
  ref <309>: DATABASE ENTRY DATE: 2001-12-06
acaaagaccaatataaataatccatcgacgccacagcgcagctagcgcccccacaatgcacactaaagctagatcacctgtagcactcgtgcttctcgtcgtcgccatggcggcgtcgccggcgttggtggcggcggcggcgcagcagcagcagctggtgccgtgcatgtacatcttcggcgactcgctggtggacagcggcaacaacaacaacatcctgagcctggcgcgcgccaactaccagccctacgggatcgacttctccggcgcggcgccgccggggcgcttcaccaacggcctcaccgtggtggacatgctcgccgacatgctcggcctccgcccgccgctcatcccggcgtacgccatggcgcagcccggcgacttcgcccgcggcctcaacttcgcctccggggccgccgggatcaggcccgagaccggcaacaacctgggtcggcactacccattctcggagcaggtggagcacttccgggcggcggtgcggcagatggggccgaacgccggctcgccggagcggctcgggcggtgcatcttctacgtcgggatgggcagcaacgactacctcaacaactacttcatgcccaactactacaccaccgcgcagtcctacgacccggccgcctacgccgccgacctcctccaggagtactcccgccagctcgccgccctccacgccctcggcgcccgcaagttcgtcctcgccgccgtcggcgacatcggctgcatcccctacgagctcgcccgcatcagcaacaaccaagacgacgatgacgctgctcctagtagcgattccggcaccggcattagcatctctctcggcggcgtcggtctgaccgccggcgacgcttaccccatcaacgtcagccagctcgccgccatatgaatccaatgattaatctcgctgacatatgatcgatcattgatcaatgcatgcacttacttacggcaagagcagtgtatctcggttgg

SEQ ID NO: 5911 - DNA, 920 bp, Oryza sativa
  ref <308>: DATABASE ACCESSION NUMBER: AK063072
  ref <309>: DATABASE ENTRY DATE: 2001-12-06
ctcctcaccccgcgcaccccctccacctcgccgccgccgccgactcgccggggctcgccgccaccggtggtgggggggagctcgacctcctcgccccacgcgcgcatccggacgccgtcgttctgggcgcgggagagatccgtccgtcgccccccgctgggcttgcgccatcctctcgccgggtgatttgagacaatcaagatggctttttcatcagttttcaggagaggaaatgtcaaagaattgatctcaaatgtttcggtctacactagcgcagcagagtcatctggaggattgagcttgatttttaagcgttgggccaccaaaaagacagctggatcaacaaaaaatggccgtgactctaaccctaagtatttgggtgttaaaaagtttggcggagagaaagtggagccaggaaacatcatcatccgccaaagaggaacccgcttccatcctgggaactacgttggcatggggaaggaccatactctcttctgtctgaaagaaggacatgtgcgattcgagcgcaacaagctgactggcaggaaatgggttcatgttgatcctgttgctgggcatgtgctccaccctgtctacgccagtgattcgacccctgcagctgaaatggagccattgtaatggctttacatggaatgaagtaacatatgttgctgacagctttcgtccttgccttgagagtgacttctctaaagaaacttattgcgattaagaggcttctgggttgaatttgcttgcaataaggaacctaaccatcatgtttagaacccttttgtttttggttcttgctgtggcttaaagttgtttgttttaagtatcctttgtgatttgtggcatgaaggttgacaaacctacatgatttatgaacacacagaaattctaaaaatgttgcttgggccggg

SEQ ID NO: 5912 - DNA, 692 bp, Oryza sativa
  ref <308>: DATABASE ACCESSION NUMBER: AK063073
  ref <309>: DATABASE ENTRY DATE: 2001-12-06
aacgcaagaaaaaaaaaagagctcaagcaatggcagcgaggcttgtcttctccctcctcctcaccgtggcgtgctcccacgcggcgctcgccgccgccgcctcctcctccgccgtggaggacacctgcgcgaaggcgacggcgagcggcagccgcaaggaccttgccccgttctgcgtgtcgaccctgcaggccgcgccggggagcgccggcgccgacgcgcgcggcctcgccgtgattgccaccaacctgacgctggccaactacacggccgcgtacgccaccatcaaggcgctgcagcggcgcggcggctggtcggagcgcgagcgggccgcgctcgccacgtgccggcagctgtacatcgaggcgctcaacgtcgtgcacagcgccatccacgcgctgaacaccgggcagacgcaggcgtacgtcgcggacatgggcgtcgtccggcgcgccgccaccggctgcgaggacgcgttcggcttcggcggcggcggcggcggcggcggcgtaggcaaccagctggccacggagtcgccgctgcacaaggtggacgacgacgccatcaacctgaccaccgtcgccacgctgatcgtcctcatcctgtaaccgaattcgctgcaaattccttggatcttggttgagtgtgtcattgttcagactcaagaaacgaataaaagttcatcaaaattc

SEQ ID NO: 5913 - DNA, 631 bp, Oryza sativa
  ref <308>: DATABASE ACCESSION NUMBER: AK104953
  ref <309>: DATABASE ENTRY DATE: 2002-08-28
cagctaatgatgttccagagagggatccaatggactgggttcttgaagggagcactgatggaggctccacctggaatacaatagacgcccggagttctgtaattttcgacagtcgtttctataggaaaacatttactgtggacaagagatataaagcaaatgcttttcggtttcggtttctgcgagtgagagaatctaatggcaatccaaggtttcagataggttcaattgacctctacgggaaaagcacatgagctttcttgaaagtgtgttacctcgaatagaaagccttttaaaccttctcgaagctaaactatacgtggctgtgaccatggctattatttgcaaccaacgcagttgcattatttattggaagattgtaaaatgtgaaattcaactatggaaggagtgattatcccttcaattcttgagaagactctttatatgcccccattgccttaagtctctagttgtttcctacaactcaagagtactgcagaataaggaagcacagaggagctatctaagtgttgtgtgatatatagacatgtatatgtcagtttgtaccagtatctaattgtttaattaaaagccttaccaaatgttcatttggtagtgtttttgagagtgg

SEQ ID NO: 5914 - DNA, 503 bp, Oryza sativa
  ref <308>: DATABASE ACCESSION NUMBER: AK063074
  ref <309>: DATABASE ENTRY DATE: 2001-12-06
aatgagaagaagaccaaagcaaatgctgatggccatgtgaataactacgtccaggtctccagggatggtaccagcgatgaagagagagaattaagggagcgtttgactggtcaaaatcccgatcttacgaaggaggaaaggctgatgattagagagtacttggaacagtacgttgagcgatagagggaagacctgctgatgatcaacaacagatcatggagcttcccgatgaacagagtagacggagcttccaaatgttatcatcttgggtcgccatgtcaatactattaattaattagttcaaatcaaccctgtaaatggtttactcatgagtaatcacgagtcgtcgctgtaaacaaacgatgcataagacgagcaatatgcgtttgctcatagtaacactgtggccgtataacaaggtagaattaataaggctgttagactgtaataagggctgttaattaacataacaggttacaaagttgtgtaacatatatgttatt

SEQ ID NO: 5915 - DNA, 667 bp, Oryza sativa
  ref <308>: DATABASE ACCESSION NUMBER: AK063075
  ref <309>: DATABASE ENTRY DATE: 2001-12-06
accgccgccgccgtcgcggagaccggctgttccgtccaaatccgtcgcctggaggcgacagaccacgagaagggattcgtggccctcctctcgcagctctccgcctgcccggacctcaccgcgtccgagttcgccgcgtgcttcgccgacctcgcggccctcggcgacgaccacgtcatcctcgtggccgaggaccccgccgccccggagagtcggatcctcgccacggggtgcctcttcgtggagcgcaagttcctgcgcggcggcgggaaggtggggcacgtggaggacgtcgtggtcgacgccgccgcgcgcggccgcgggctcgggctccgcgtcgtgcgtcgcctcgtggagatcgccaaggaggccggatgctacaaggtcatcctcgactgcacgcccgagctacgcgcgtactatgccaagtgcggattcgtggagaagggggttcagatggcaatctacttctgaattctgatccataggtatatgtaattgtgcatttcaatgtttcatcttgtcatgacattacgctgtagttattatgattaaattttggagtacttgatttcattattttgtacttgtttccgattgagagttctacttgtagaacgacaactttggtgatatgttgcgtgattagctgtgattttgccatgtt

SEQ ID NO: 5916 - DNA, 852 bp, Oryza sativa
  ref <308>: DATABASE ACCESSION NUMBER: AK063076
  ref <309>: DATABASE ENTRY DATE: 2001-12-06
gatgcgccggcggggaacgagcggcggcggcgcgacaccacgtgaggtcggcggcgggaggaggcggagcagcggcgtgacctcggtgccgccacgcggtgcctggaggtggcgctggccccgctgcccgccgcgtcgctcctcccgctcaccgaggcccgggtgcggctgcgtctcgcggccctgctgctgcgttcccgctccaagggcttgccaccaccaagtcccacctcgagcgtgccttgctgctcccctcctcccagagctctggcgtggatatccggcgggcggagcgatggatccagcgacgacggagcagcttcagggcggccagatccagccgagcggcgatggagcggggcggagcagcggtgagggcgccgggcgaagcagcggtgagggcactgagcggagcagctgcgggcgatggcggctcgccggatctccttctctcttcagctcgcctgcgccaaatccctctcccctctcctcgtcggcgcctgctgttctgggcaacgacaactagcagcggggttgcggttgtgcggatgcctgacgaatcctggctattccctgacgaagaacgtgtgtcccattttggctccccgttcctcgcttggtcacggtagcgtctgacatggaggggaatcttggctgaggctgggtgaggctgaataccacctatgcgcactgtgaacgccctgagtcaccggcagcaggagcctccaacccaatgttggctttcctttttgtttgtgatgaagtagtagtatatggatgtactgtcaaccttgtactaatattttcgctgcagcttttgttaaagcaaaagccaagattttcccattatcg

SEQ ID NO: 5917 - DNA, 474 bp, Oryza sativa
  ref <308>: DATABASE ACCESSION NUMBER: AK063077
  ref <309>: DATABASE ENTRY DATE: 2001-12-06
gtggcttcgtattttccctcttgttcttctcttccctccgccaattccaggcagttctagcaaaaaggtgcctcggatgaatcgggggctccagtagggagaggagatgatcactcgagcgaagctggtggagcagctgagagagcaccagatccggtcggcgcagtcctactccgccgccctcgccgtcttctcgcccagccctcacatcgcctccaggcgggatctcaaggttgctctcttctatgctatcttgttttgttttgtcatggtgtcctgctatgttgccctttacttgagatggttcagactttcagccatctttgtagttttcggaattctccttccagtaggtctcaaaatatctaggcatagaaggctgaagaggaaaagagaaaggagattgttgttacctttgtccatgtgaatatatttttgatatcttgtaacattgtagtaaaaccgcgcaactgc

SEQ ID NO: 5918 - DNA, 693 bp, Oryza sativa
  ref <308>: DATABASE ACCESSION NUMBER: AK063078
  ref <309>: DATABASE ENTRY DATE: 2001-12-06
aggtcggggtcgtgggctccgaacgccgcgacctcagggggagaaggccccgccgccgtccttgcggccgtgcggtttccggcagccgctcagccggcagcgaggcggaaggagggcgatgggggtggtgtggcggaagctgctgggtcgcctcccgtgtcgcccctgccctgggagtgacgcggaagggaaaacggtgtatctgggtctgcgcttggtcttcctcggttgcctgtgtgtgttcttgcccttgtaagtgtttctcttgtgtgtctctgcttcagtgtgtcttgtgctctactgcccaggctgcagctaggcagggcgcagcgcctggcgacggcagcggcagcatgaacgaacaggctcctggccaagactgcatctcgaccatatcgaggacatcaccttcccggtgttcaccggactggaggtgctgcctccggctccggctccggcgaccggcaatggcggcggatcaggcgatcatcgatcggaaggaagggctccgaatgatcaagcacaagtcgaggcgttacgccgagctcgacgacggcggcactagaagcgtcaaatccgtgctctaaacctcatctagcttaatttgttcatgagatataacgacattgtttatgatctacatttaatttaagtacttccaaactccagttataaatatttaacgtttgtgat

SEQ ID NO: 5919 - DNA, 906 bp, Oryza sativa
  ref <308>: DATABASE ACCESSION NUMBER: AK063079
  ref <309>: DATABASE ENTRY DATE: 2001-12-06
gctgccctttcacaactgacaagctctctctctctctctcttctctctttgggggtggttcttggtgcagagccgatctgcggcggcggcgggtgtggggggctcgaggagccgctggtcgggaagaggaggaggaggaagaacggccgccctgacacaatggcagatgtcttaggatgttacactataaagtcccatggaaccaaagtggcgagacttcacatgtacgactggataatacttctactccttgctgttatagatggactgttgaacataattgaaccttttcaccgtttcgtcgggagggacatgatgactgacttgagatatccattgaagggcaatactgttcccttctgggctgttccgctcattggaattgtattgccttgtgccatctttggtggaatttacttcaaaaagaagaatttctatgatttgcaccatggcatactggggatcctatactctgtgcttataactgcggtaatcacagatgcaattaaggatggtgtgggtcgtccacgcccagattttttctggcgctgtttcccagatggaaaggatgtttatgataatgtcactactggtgtcatatgccatggagagaagagtgtcatcaaagaaggtcacaagagctttccaagcgggcactcttcatggtcttttgctggtctaggcttccttgcatggtacttagctgggaagatcacagtttttgatcgtagaggtcatgttgcaaagctatgcatagtatttctgcctcttcttactgctgcacttgtggctgtttctcgagtggatgactactggcatcactggcaggatgtatttgcaggctctctgataggtttgcaatttcaataatataacaattatatgcaagaggtcctagcactatct

SEQ ID NO: 5920 - DNA, 736 bp, Oryza sativa
  ref <308>: DATABASE ACCESSION NUMBER: AK063080
  ref <309>: DATABASE ENTRY DATE: 2001-12-06
aagcagattagcaaagtcatgggaaattgcgtgaaggccattgcatgtgggggtcgccacagtgctgtagtaacagattcaggagcactacttacatttggatggggactgtacggacagtgtggacaaggaaacacagatgatgttttaagtccaacgtgtgtatcgtctatcctgggagtcaagatgcaagacattggtgcagggctgtggcacactgtatgcacatctgtagatggcgatgtctattccttcggaggaaaccagtttgggcagctgggcactggttctgatcaagctgagactgtaccaaaactggtagatgcctcaagcttggagaataagaatgcacgagctgtttcttgtggagctcgtcatagtgcaataataactgatgaaggcgaggtcttctgctggggatggaacaagtacggacagctcggtctcggcgattccatggacagaaacgtgccttgcagtgttcctgtcgacgcataccacccactgaatgtgtcgtgcggttggtggcacaccttggtgctcgcggagtcccctacttaaaacctgacggcgaacaaacttccctagttgacaattttgttaggagtttggtaggctttcatcaaggtgcggccgtgttgcatttcgtgtatatacatggcagtgcatgcagatatggtgtattcattctttccggtgcgctcttcaacgggcaacgtacacaagcttgtatcgc

SEQ ID NO: 5921 - DNA, 407 bp, Oryza sativa
  ref <308>: DATABASE ACCESSION NUMBER: AK063081
  ref <309>: DATABASE ENTRY DATE: 2001-12-06
aaatgcaacatatactaactcaaatcgaggtgataacagaccagcagtagtgtcaatataatggcatcctcggcaacatctggccgtgtccttgcgatcatgctactcatggccattatcgccgctctgatgatcatcaacagtcccgtcgcagaatgtagggttgctccggatcaggttggggtggatccgaatggccattgctatttcgatccttctagttgtcgttcgccgggtgctccctgagagtgtgcctgccagcatcatttccagcctctcctctgttgatcggtccaatcaatggggaaagcagcagccagggtttacattaccagttgatccccatcggtatcacggtttcgataaatttcgatcggtttttgataaatttggactgaattttgacc

SEQ ID NO: 5922 - DNA, 892 bp, Oryza sativa
  ref <308>: DATABASE ACCESSION NUMBER: AK063082
  ref <309>: DATABASE ENTRY DATE: 2001-12-06
tgcaacctataactctttcccctgaagagtttttccctcagtggaaagcattgaatgttcaaaatctaaaagttcaagaagtggttaaaggtgtgaaaccattacctcttcctgagatagctagtcttttcatgagccttcacttggcggttgctcctggacttgataataacccgaacaatctggttgcatgcactacattcttttctgaaacaacccgtgccatgctttgtctggtcagaatcgaaactgatccacaagatagaacgcaactccggctcacagtggcatcaggagatcagtatttgacattcgagttgaaagagtacatcaaggaacatttaattgatatcccaagggtacaaacagcctcacctcccgttccggtgcagccacagttgcctccggcggcagtacctgccacatacaatgaccctggtgcaatgctagctgggttgctataaaaagttgaaacaaatagcatcttggtgtacatgacagttgtttaatgtgaggatctaacatcaccacaagcatcttgctgctgccaagacgacgtgtggatgaaggtcaatgaagagagggctggcggagtagtcccctcagctcagattcttctccgggaaagcactagattttttgggcccttgtaaggccccttcatcgccatagtgtgtaaggttcgttttgctccgtcatttccaccaccctgccatcttgtatacccgcgttgccctaggtgtggtggtgaacattgagtagtttttgtgtgtttatataagttgctaggtttttccaccaaaccgattgtaaagttgccatgtatgcgcattgcattactacgatttgtactactgtaccaataatgttggaataggcaaaagaaattcat

SEQ ID NO: 5923 - DNA, 750 bp, Oryza sativa
  ref <308>: DATABASE ACCESSION NUMBER: AK063083
  ref <309>: DATABASE ENTRY DATE: 2001-12-06
aatcagtatagacagtagtgagaacagttcagagaggaagcatgtgacacttccctctgtccctctctctctctctagcctccaaccatcgcttcaccaagaagccatcacctcctcctctctatcaagttctctcccctctcttgctgtctctgcttgctgctgctgctgctcgattcggccggcggccatggcgtccagcgcgtcgcggttcatcaagtgcgtcacggtcggggacggcgccgtcggcaagacctgcatgctcatctgctacaccagcaacaagttccccactgattacgtacccactgtttttgacaatttcagtgcaaacgtggtggtcgacggcaccacggtgaatttgggtctctgggatactgcagggcaggaagattacaacagattgaggccgctaagctaccgtggcgccgatgtctttgtgcttgccttctccctagtgagccgagctagctatgagaatgtcatgaagaaggttcagaaaaaaaaaatctcttgcaattaatctgttaaacccataatgtggatgcattcagagagattcagtatttcagttaggtttaccttgtgctttttgtccccttgaagtggttaccagagcttcagcattatgcaccaggggtgccaattgtgttggttgggaccaaattgggtgagttgtgtgacagtgaaagcacaatttccattttattgcatatccccttggctgtgataatagaactggtgtgctgt

SEQ ID NO: 5924 - DNA, 398 bp, Oryza sativa
  ref <308>: DATABASE ACCESSION NUMBER: AK063084
  ref <309>: DATABASE ENTRY DATE: 2001-12-06
gctcgggtcggccggatctaggaggagcagaggcttcaccgtgggcttggtagggataccgtccagcacgacctcggccaagaaggcagcaggtctacgccaccttcttcccgtgctgatgccgtgtctgagccctacctcaccacaagtactgctccatttctctttttgaatcaccaccggttcttgatttctttgtgatctaaatattaaagatgtttattccattgattaaagatgcttgccattaggaaatatatatatattagctgcacgttgtgtagaactcaagaatgcttagaggcactccatgcatgggttgttttagctgcacatgtactgtccggctgttcaaatttgagctattttccagttaattatttaattaactcttaatt

SEQ ID NO: 5925 - DNA, 884 bp, Oryza sativa
  ref <308>: DATABASE ACCESSION NUMBER: AK063085
  ref <309>: DATABASE ENTRY DATE: 2001-12-06
cgatgactcttatctgttcaatgagcaaaaacctgaagatgtttatggcgaacaggcttaccaaagggatgcgatggaattgttgtccagcgaccagatatgcactgggcaggaaaacctagatatgattggaaatcgatattcatcggaaaatgccatggaacagcctgaagatcagaagttttctatagcttcaggttctcaactaagctcttctcagaatttattgaaccaaaagaaccacttggattcaacttcaccaagtaacataacttctgagtcctatccagaaagaaattgccagatcattccatctggggcttcctttgcagagagaaacttgaaggtgcagaagaaagtggccagttcggcatcaggacaacttatcagtgataatgtgactggacatcctggtcatcaaacattgacaagaagggcttcatatccttgtgagaatcatgaaattggaaagaggtccttaggaaaaagaggtttgggtcattctgatgttgcaatgggcacctcaatggtagttgatgggtccttcgtatcgtctatttcttctgataactcagttgaagagaacagctttcggcagcttcaggatgcagttagtcagttggatgtgaaaacaaaaatgtgcattcgagatgggttataccgcctggcaagaagtgcgcagaataggcaagtcttcccaaatacaatgaacaacaatggagatagccacaatgtaaaggacatgcaaaatgcagaaacttcgggaaagtatgttgatttctcagaaaacatgctctttgtacctctctaattgttaaaaatatttatgagttctattactggcattttccagtgaaatacatttctcatatcgtttgacctgc

SEQ ID NO: 5926 - DNA, 456 bp, Oryza sativa
  ref <308>: DATABASE ACCESSION NUMBER: AK063086
  ref <309>: DATABASE ENTRY DATE: 2001-12-06
aaacacccaaacacccaactaccaccgcgcacacagcacagcatgccggcgtggtcaccaggggcgccctcctgcggtccggcgccgctctcttcgcgctcggcttcgtcgacgccgggtacagcggcgactggtcacgcatcggcgccatctccaaggacaccgaggaggcgctcaagctggccgcctacgccgtcgtgcctctctgcctcgccgtcgtgttctcgccatcgtcggaagacggcagtaacaacacctgaatcctaggaagaagagccatgctgcagatcatgtagtcgtcgtgataccatcatgcttacgtgttgtatacttcgatcgtgatcgcaacgggcatttcttttgcctaaggggtgtgttatcagcagtgaaaagctttggcgtgtcacatcggatatacggacataaatttaaagtattaaaatgtagtttgatagc

SEQ ID NO: 5927 - DNA, 703 bp, Oryza sativa
  ref <308>: DATABASE ACCESSION NUMBER: AK063087
  ref <309>: DATABASE ENTRY DATE: 2001-12-06
agattatctaacctgatacagttcgttccggagcgtcaaccttagccactgtgacgacggtgccaagttgccagctgccgcgacgtcccttgccattcgcgacggggaaccgcatcgctgccgctgggaagttgcaccgctcgccatagagggcctcgcgcgcccgtcttctccaggttcgtcggcgccttccggtttcgtctagcaccgcgcggtcgcggaagcgcagggttggatcgaggtgaagaggaggcgcggggggctattcattgttcagcatccatgtttgagctcgtgatatcgatcccggcgatcctcctggttctcgtcatcgcgctggggtgctacctgctcggccggaaccgtggccgcgcggaggccgcatcgccgcagcagtttgcaccgcccgcgccgccgcagcagttcgcaccgcccaccccgcccaagtaggcaagtaacagggtgcgtcgtgttgttttggtttgtttcacactgttgaaacttccaatttctcctttgtttgtactactttagtaggaggattgttcctttttttttccccatgattgtcagtggtgaattgtgttgaactactcgttgttttgccataatctttctgttgaatcttcccctatttttttccttttacagatgaatgatgtcttagtgcaaaccgaatcaaaatccagacttacatttactc

SEQ ID NO: 5928 - DNA, 401 bp, Oryza sativa
  ref <308>: DATABASE ACCESSION NUMBER: AK063088
  ref <309>: DATABASE ENTRY DATE: 2001-12-06
agaatagcaacctcgtccgaaaagaatcaagatggtcgagccgcgcaacccgacgctgccgcgcttccccgtgatcgtgcagcacccgacgtacgcggactcgcgcgccaacttcaatggctccgactacctgcgatgggccggtctgactgcgctttcgttcccgctgggctacgtctttggcgtcaaggtgcacaagcgcgtggccgtgccgtcgatggtcgtgacgggtgtcctcggctcgtttggtggctttttgttggcgtaccagagctcgtcgttccggctccaggggcgccttgagaacgacggcgaagtgcggaagtacatcccggcgcaggaataaactcgctgctcctgcttctccagcatgcacaaaaatatcaaaagcgtttctcccc

SEQ ID NO: 5929 - DNA, 985 bp, Oryza sativa
  ref <308>: DATABASE ACCESSION NUMBER: AK063089
  ref <309>: DATABASE ENTRY DATE: 2001-12-06
agccgggctatccgagagcaccaacgcggagaggacgacgagacgaactcaccggtggtgacggtgacgagaatcgatgacggaaaacggccggcgaccgtaggtgacgatgggagcaacggaggtgtggacgggcttcgtcttggcgctgtgatgccgaggaaggcaacggcgaagcttggcgttgacggaaacaacggtggtgttcggccggaggcggagtagatcggattcaaagtgacgaagggcttccggcgagtttcggcgcaaggtaaccagcggccgggatggagatcagcctttcggagccgagggaagtggcagcgcagaagggcgtcggctggaacggctgccggtggcggagacagaaggcgaccgcgggtagggcgctacaggcaacagcgatggctgggacttgaggcaaacgaaagaggagaggaaggggactctatttatagccacgggagagagagatcgggcttggaacgcaaggaatcacgccgggaaaacctagggtttggcggagagataaactcgaaaacgaatccaaattcgcgtcgtattcaaggggataaaatcggattttagaggcaagtgcaacgcctgctgcaagcagctcggcttcctggcggcaagtgcaacctcctccgcggcatgctctgcctctgctgccacgaggacgacgaccagccgccgccctcctcctccactcacctccccgtcgccgccatcgatcacgatcacgctgccgacatgccatgatcatctcgtccatctatatatattgcattattactcatttgctcgcgtccatgagccaccggatgtgatgtgagcaattaataataataatcatggattactgatgctttttttctgctctgctgcaaatgattttttttttctgctctgctgcaaatatgatttttgagatacaatgaacaacacatcaggcaggcgtgcaatgagatggaactagttgaat

SEQ ID NO: 5930 - DNA, 627 bp, Oryza sativa
  ref <308>: DATABASE ACCESSION NUMBER: AK063090
  ref <309>: DATABASE ENTRY DATE: 2001-12-06
acacagcaagcagcagcagcaagctcgagctaaccagctacaagctacaagaagcagcctagcaaattaagctcgatcgatagcaatggcggcgaaggcggcgcttgttctggcggtgagcctcctcgccgtggccgtggcggcgagcgcctgcggcaccgactgcccgccggcaccgaggccgaggccgagcaccgggtcgtgcccgcgcgacgcgttgaagctgcgggtgtgcgccaacgtgctggggctcgtcaaggccaaggtcggcgcggtggcgccgtacgagccctgctgctcgctgctcgacggcctcgtcgacctcgacgccgccgtctgcctctgcaccgccgtcaaggccaacgtgctcggcatcaagctcgacctccccgtcgacctcagcctcatcctcaacaactgcggcaagatctgcccatccgacttcaagtgcgtgcactagagctggttgttgcacttgtttctccatgaccatggctgcgagcttgagagtactactgtatcttgatgttgtttggagtactttagttcttgatctatctcttggttccatgtgttgtttgattcccatgaatgattcgccaataaaatgaagctctacttttcatc

SEQ ID NO: 5931 - DNA, 571 bp, Oryza sativa
  ref <308>: DATABASE ACCESSION NUMBER: AK063091
  ref <309>: DATABASE ENTRY DATE: 2001-12-06
accaaactccctcgagtctctccctcctccctcggtccctctgattccctcctctttctatctctctcccactcttctccctcctcccttctctctccaccgtcgccagttgttgtcgcctccaacaccgctggttgcagtcgcctccactgctgcccagtaccgctgtcacatcggccaacggggaggcctaggcctccagatctagcgaccccatccttcccgctagtggaactagctagatagagcgggccgagtacaagcgacgacgatgagggagagggtggctgcgcggggaaggggccggcgcggcgcagggaaggaggtggtgccgacgagccttgggtgagtggatctggcgccaccgagcctcaggagcagagcggggaagggggtgacggcggcacttggcggcagcgacagagggagcaaatctggcaccgaccattcacacccttcctcgggagcacaaatccttccttacctcgtgtttcgtgatgtgatgtgaattttttgtgcttgatctgtgatgtggaatttatgctctgtgatatgaatttgatcttgatcg

SEQ ID NO: 5932 - DNA, 476 bp, Oryza sativa
  ref <308>: DATABASE ACCESSION NUMBER: AK063092
  ref <309>: DATABASE ENTRY DATE: 2001-12-06
atctctcctctcttcgtctctctcctctgctctctccaggcgacggagaggtagcggcacgtggcggccagcggccggcgggagaggaggaagcggtgcgcagcggcggaggcagggctctggcggttgtgggcggaagaggaatcggcgacgggaggtggctctggctgcggcggtcgcggtcgctgcacgtgctcgaccccttcgcggccgctgccgcggccgccgctgccgaggctctgtccggggaggccgccatcgccgcggtcggagcggcggcggaggaggcaaccccgacgctgatcgacgactcccctcagcaagctcaacaaccaccttgataagatgctgaagtaagatttcttatgttatggcaaaaactgaaaattgattccacaacgcttgatgcattcctaaaaaaatgtattttctgttgttgaaatcgatcatatttttaataaatttttggttctggt

SEQ ID NO: 5933 - DNA, 686 bp, Oryza sativa
  ref <308>: DATABASE ACCESSION NUMBER: AK063093
  ref <309>: DATABASE ENTRY DATE: 2001-12-06
gaagaagccgaccagcgcgcagctttgccgcggaagagttggagggagccgccgctcgccggagatcatggactcgttctcgtcgccgtcgtcggcggggtcgactgcgtccacggagcatctcatggaacagatcaaggcccagctcgcgcaggcctacgcgcaggagttcctcgagactgttggaaacaaatgctttgcaaagtgtgtcactaaaccaggaacaagcttgagtggaagtgagagtagctgcatatcacggtgtgttgatcggtacattgaggcaactggtattgtcagccgtgctttgttcagttcacagcgctaggaagcattcaggaatttgatggctctcaatggtttcttaggatgatgaaagtgaacctatcagaatatggcatccatcttttattttttctgccatttgtcttctaagaaagtgctatgcttttctgcatactaatttagaaaaggcacatggtgataaaccataaatgtgcaatatttttgtatttaagttcatgcaattgttcatggtctcttttcatcctttgatggagaaatgcaccaatggatttgtgtgcaggctatcatatgccatcgcggtttgcagcactaagttccctgtagaccttgcttgaaatttgggttaacaatggcacagcttccctgaagctggtctagac

SEQ ID NO: 5934 - DNA, 444 bp, Oryza sativa
  ref <308>: DATABASE ACCESSION NUMBER: AK063094
  ref <309>: DATABASE ENTRY DATE: 2001-12-06
gtgcgtccggaaagcttcggtaggacgcttagcttggccgtcatcattaaccttcccaacctcccccacgcggccgccatcaccaccaccacctcctcccccccacctcccctcctcctgccgccgccccatcgtcctcgacgacccctcgccgcccaagcgctgccgcaagtgcgaggccatagtcctcgaggccgtcgtcgccgcctcctcctcctcctcctcctccgccgccaccgccaccggcagcggcggaggcggcggcggtggcggtggccgattcttgccgtagtgtagggaggatggttgtgtccctgacgggtggggcccaggtcggtgtgggtagttgagctgctcctttccacccatggcccacatgtcagtagagagagagctcttgaaaaagttttcttcagaaaaagaaatggaaaggagaataattag

SEQ ID NO: 5935 - DNA, 597 bp, Oryza sativa
  ref <308>: DATABASE ACCESSION NUMBER: AK063095
  ref <309>: DATABASE ENTRY DATE: 2001-12-06
atcagttcatcttctctccatctccatttccagtagttagttgtcaccagtcatcagcacaaccatggttattgatcagaagctactctgcttagtgtttgtctcaggagtactcgtcctagcaaatcttgcagatgtctcttctgctgctgcttcttcactgagcaggcagcaagatcaagtggctcgagttcttggtcgcagaggcagagaactgataggagaaggcttgtcaggacaccaataccggcatgaaggcaagcacaaggagcaacatgaggtagtggctatggaggcgacgacgaaggagactgcagagacgaaggcaggttgggtggatgatgatgagggcgcaagagaagggctgatcgacagcgctgattacagcggggtggcgatgcactctccgtctccacccaaacgcaagcacccaaagaaaccataggctgtcagcttctctgtttgtccgtgtataatcttcttgtctagcttagttagtaggagtactactagtactaagtactctcttggactgttaatttcgtcatgaaattacatgtacccttcttcgcaagagatcgatcgatgttctgctgc

SEQ ID NO: 5936 - DNA, 818 bp, Oryza sativa
  ref <308>: DATABASE ACCESSION NUMBER: AK063096
  ref <309>: DATABASE ENTRY DATE: 2001-12-06
gaaatgcagcggcactagcctaaattacatctctgctcaactacaacgatcaccttctcccgaattaactcagcaatatggcagtattgctccatccctctccaagaagtgtctgcttggcctttgcaattgcagtgtgtcttttgctcccatgctgctttggtagcaaagctgccgtggaaatgttcgagaaggcttgccattgcttcgacgatcacaacgtgtacagcgagtgcaaggaggagcttcggctgggggtggagggggcgttccatgtggggaaggagagcgtggacgagtactgcggtgggccgtgcctgatggagacgaagatggcgctgcagtgcgtggaggaggtcgcccacgacggcttcaggttctacagcggcgcctcgctgcccgcggtcaaggccgcgctcgacaccggctgcagctacactcctgacagagggacgtttgagattagggagcgtaagcagtgcggcgacgagtactaccactacagccaccacgagcagacgacggagcagcaatacggtgggtactatggcagcgaggagggcgaatacccaactacgactagtacgcttcctgcttcagactactgctacggcgccggcgccagcagcctaggccttcgctacagcctgctgcagatgctcatgctcttctccgcttctatggtgcttctgctgcttgtaatataaggaatacaatactccgatacagttcatcgttttatatctatactttttactattttttagaatatgtaaaaggattacgcacttttgtattaagaggtataaaatttatac

SEQ ID NO: 5937 - DNA, 427 bp, Oryza sativa
  ref <308>: DATABASE ACCESSION NUMBER: AK063097
  ref <309>: DATABASE ENTRY DATE: 2001-12-06
atttattttgccatttgaaccaattttctccatttccacccaatttcgcacccgggctgaccaaaatgccccttcgagctgcttcgttctccacctgccgtaacacctcctccggctgcgttgccgccgactgcgcggatgacctcgcggcgcccagcggcgctggcacggaccagtactctgccgtgatgcccgagaactcctccgtcacgttcggcgacgacgaggccgacaacgggtcgcaccgcagcgaaggcgacgagcccgaagccaagcgctagtgatattgattcatggcaggagtgttgtgttcaaaaagacatgtggattggggatcatatactagtgtgaagcgtggactgaatgtagcaaattgaaatttccatcctccatatagtgtaaaagctcaacatggattctcccccac

SEQ ID NO: 5938 - DNA, 1072 bp, Oryza sativa
  ref <308>: DATABASE ACCESSION NUMBER: AK063098
  ref <309>: DATABASE ENTRY DATE: 2001-12-06
gcttattacaacttaccaagagattttttttttcatacagtattttctcttcgaatcagtctgattctctattcgtactctctcaataaataattcaattatgtttgaagctcgtcttttacacggttcaattttcgcaaaagttatcgaaggtcttcgagagttggtcaatgaagcaacatgggaatgcagtggcaatggaattacattacaagctatggatagttcccacgtggcattagtttctcttgtcatgcgctcggaaggtttcgaatcatatcgatgtgatcgaaatatgagtctcggtattagtcttgtcagtatgtcaaaagtattgaaaacaatgggcaaagatgattcattgacaatccgtgtcaacgatgattcggattcgattattatcgcaatggaatcacaaaatcaagataaattcgctgattatgaattgcgtttaatggatctcgacagcgaacatttgggtatccccgatacagattattcatgtacaattaaaatgccaagcagcgaattttcacgcatttgtcgtgatatgagtatcatgggtgattccgttcttgtttgtacaacaaaagaaggtgttaagttctccgccaaaggcgatcttggacaaggtagcattcgtcttgttcaaacaacaaacatcgaaaaagaagaagaagcagttattatcgaaatgaaagaagctgtcgcacttacatttgctgttcgatatttgagcatgttttgcaaagcggcaccactctcaccacaagtcggattgagcttatccgaagatacaccattaatgtgcgaattcaaaattgctgagatgggtcatgttcgtttctacttggcaccgaaaattgaagatgctgaaaactaaaacaggatattcattaccaatagacttgtcagatggatactatttttctttgtctctatttttttgttgttactatgtaattgtaaaaaagaaagaacgtgtcttttggatgtagtagaatatttttcttatggaattcctccacttaacggatataacggttgtcttgattctctttcgtgttttcag

SEQ ID NO: 5939 - DNA, 958 bp, Oryza sativa
  ref <308>: DATABASE ACCESSION NUMBER: AK063099
  ref <309>: DATABASE ENTRY DATE: 2001-12-06
accatcaccaccaccgccgcttcctcctccgcctccgcctccactccacaactccgccgccgccgcaatgctggaggccgtgatcccggcggtgtggagcgccgtccacgggtggttcacccccgcggtgctcttcctcgtcctcaacatcgtcatcggcaccatcgcggttacttccaaggtcaccgcctcctcctcgacggcgggcggcggcggcgagggggttgggtatggagcgtgggcgggtggtggtggtggtggtggaggggagcagaggaggttctcccgcgtgccgtccatggcgctcgaccggctccggtcgtttaatctctccggccggttctccgcagccgcctctgcccctgctgctcccgaggcggccgcggtggtgggcggggtgctggatctgggcgcccgcgatgaggcgacgacggcggcggtggtgaaggatgtggggggcgggagagagcgcgaggaggaggtggaggatgagcaggagcgcgcgcaggcggcgcatgtggtggagaggagcaagtcggaggcgacggcggcggcggcggacctcccgcggctgccggcgcggctgcgcaagtcggccagcgaccagtcggcgttcgcgcacttcgaggccgccgccgcggtgggcagcgacttgtgagacgcgtgtgatttccagcaatccgagggggctagccgcaaaactgctgataaaaaaaagaagaagagaaatacagggagaggaggaagaactcgagagagaaaaaaatggtagtttctttctttctccccatctcttctgttttggtttattttctttttttttctcctttcaaaatgcttagtagtagtataatattatcgtagcatccgactttttggatagaatcttgtgtaatgcagcaccatatcatgtgaaaatttcatcctcataagagatttggataaggattaatctggc

SEQ ID NO: 5940 - DNA, 438 bp, Oryza sativa
  ref <308>: DATABASE ACCESSION NUMBER: AK063100
  ref <309>: DATABASE ENTRY DATE: 2001-12-06
ggccaagcaagagcatggactggagggccatgggcgccgtcaccggcgtcaaggaccaaggctcgtgcggtacgaactccggcgaacacgaacaaactaatgattacttgatcttgcatgcgtcaactggtaattacgtaattgaatcgaataatcacctgataaaatttgcaattaattaactgggcgtgcgtgcatggcatggcatgacacgtacccgcggtcaaacggaaaggtaaaaatggtcaatccaagtaaacagaagattctaccgagccagtctacagaacagtctacgcatgcacttttagtcaactcgagagtcaaacatagctaaaactgtttgactaatatgtgctactaatcacaaagaagaagctgtattagtgagctgatggattgactaattaatcaatatatgcatgggcatgcaggttg

SEQ ID NO: 5941 - DNA, 722 bp, Oryza sativa
  ref <308>: DATABASE ACCESSION NUMBER: AK063101
  ref <309>: DATABASE ENTRY DATE: 2001-12-06
ccgccgcgatggcaactgcggccgccggtggtgaccagtgaggtcgccgccggctgaagtgtggttccattcgagggcagtggcctgtagcgccggccgcatatgtcagctctccgcttatgccatggagccatcaagtcgccgtgcgctcggaagcttgctgctgctgctgcgccctgcgctcggaggggaatcccggcaccccaccaaaagaagcaagcgaccttctgcttgatgcgagcttctccttccttccgcacaaattctaggcagatgcaatggtccattgaggctatgaccgatgatagtgctgaccaatcaggcgacaataacactcgcctgtttagtgcaattcagtcgtttttgagcaagttatatggcaagctcaagaaactaaggaaagggctgccgctgaagatcctcttttttctcatcggattttattgtgctacggcatttgctactgtcatcgggcaaacaggtgactgggacatattgtctgctggacttgctgttgccattgtggagggtatcggggctctgatgtatagggcttcgtttgcgtttcttggtaggataaggaagatgattaccatattcaattactggaaagctggccttacacttggattgttcctggattcttttaagtatgaagtggatgaatttcttgaatcctgtaatccattcaacattgatatcaatatatttagtctttggtg

SEQ ID NO: 5942 - DNA, 838 bp, Oryza sativa
  ref <308>: DATABASE ACCESSION NUMBER: AK063102
  ref <309>: DATABASE ENTRY DATE: 2001-12-06
gagttgcccccacccaccatgccctcctcctcctcgccgcccccgccgccgccgccggcgaccaccgcaactccacgccggcgccgccgccggcggctcctcccgtcgtcggcaggcggcggaggctcctcctcctccttctcctccaccaattcgtcgtcgtcgtcgccattcgtctccttcctcccgccgcccacgtcgccgtcgccgttccaccgcttcctcccctccccgctccgcgcctcctccgtcccattctcgtgggagcaccgccccggcatccccaagacgccggcgaggtcatcccgctcctcctccaagcagccgccgcccggcgtcgtcggcggcgggaagcactacccctccgcgccgccgctcccgctcccgccctcgctcctctccagggcggcctccgacccctacgcctccgccgtcgtccccgccgagtacgccgcctccggcgcaatgccgccgcatccgccgccgggctactactaccccgccggggcgaaggccgcccgccgtctccggctccggcgccgccggccgcggctcgccgacgccctcgccgagtggctctccgtgctcagcctctaccgctcctgcaagcgcgtcgccgcctgcttcgccgccaaggccaagccgccgccgccggcgccggcgccatgagagctcgcgcgcgtgccatctctctctactactcgtgtacgttttactattattagtttatatgattattattgtgggtttggatttgtgttttggtgtaattaatcaattcgtgtgattaactaagatgggagtatcatacatgaacaacaagattcttagtttgatt

SEQ ID NO: 5943 - DNA, 594 bp, Oryza sativa
  ref <308>: DATABASE ACCESSION NUMBER: AK063103
  ref <309>: DATABASE ENTRY DATE: 2001-12-06
aacaaagcgaggtgcagtttcagtgagggaggaaaaaaagagtgagaagaaagtcgagatcatgtccctttggaaggtgctcctgatggtaatcgcgctcatctgcgccctgcatactacttcagggagacctcccgtcgtgggatatcctgctcctcgtcccaacggtagctcgggcacacgatgctacgaaggctgcaaccctccaggtagagatggcaacagggatccataacagagaccctctgctaccctccaggtagagatggcaacagagatccataaccagagactctataggtttttattttattaggagtcatatatgatctaattcttgtatctatggatttatcaacagaaaaaaaatccttacatgttggatagatgggtattagttctttagccactcgtaccccttacctatgggtaaaaaatacctatatgcttagcgtgatagtttacttactttgaacgttcatgtatggtttaatactagtatggtttatttacttgttatatatggtttaattcttgcatgatttgtttacttgtatttgaatgctaatactaaaaccaaggttacttaatatg

SEQ ID NO: 5944 - DNA, 881 bp, Oryza sativa
  ref <308>: DATABASE ACCESSION NUMBER: AK063104
  ref <309>: DATABASE ENTRY DATE: 2001-12-06
agcttcagtctgctcactgaactcgagtaaaccagcagcttctgtttcttggccacatcgagtaaaaatgtcctcgtcgtcgacgagcggttcagccgagcccgcggcggcggtgcgcgtgctcggcagttggacgagcccgttcgtgatgcgcgtcgtggtagcgctgaagctgaagggcgtggaggagtacgagctgttgcaggagacgagggggaagaagagcgagctgctgctccggtccaacccggtccacaagaagatccccgtgctgctccaccacggcaagcccctcgccgagtctctcatcatcgtcgagtacatcgacgaggtctggccggcctccgatggcgccccggccatactgccccgtgacccatactgccgcgccgtcgagcggttctgggcacagtacatcgacgacaagtttcctcgggggactcgcgtgttgagaggaaccgtggccggagaggaaccgtggttgaaatgtccaccgctctgaagcatctggaggaggcatttgtcaagtgcagccaagggaagaaatacttcggcggcgacaaaatcggctacctggacatcgctcttgggtcgttcctcggatggattaaggcggtggagaagttcgccggcgtcgagctccttgacgaggcgaaggttccaaacctggctgcttgggcggatcgcttctgcgcgcatccggccgtggtggacgccatgcctgacgccgataaattggtcgagttcgccgttaagcatgccgcttcgatgaaggctttggatgctcccaagtgatcagcgaattaagcattctcctttgtgttgcatgtactgcattacatcatcggatctggttccataatttttagtgcttaagtagg

SEQ ID NO: 5945 - DNA, 834 bp, Oryza sativa
  ref <308>: DATABASE ACCESSION NUMBER: AK063105
  ref <309>: DATABASE ENTRY DATE: 2001-12-06
gggtggcagcgattcaaacaaagtgtattattgtcatacaatctgatggcaaccggcaagacaagaccaacaacggttactgaatactgaacatgcccaaaccaaaagcagtttgttttttttttaatcaaagtgttgttcttgctaggcaaatcgactcacgatgagatgcagtgaagaacgaagtgatggcggaaaggagaatggatgaattagggcggggtagttcgtggttggttagtacctgggtggagcggaccttggccttgtccaaggagcggcggtcgaggtcgggcacccagcggaagcggcggcggcggttcttgacgatggtgccaacggcttgccgccatcgccgctgcgcctcctccgacgggttcttggccggcacatcgaagtgctcctgcaggtacctgtcaagcttctccatccccggccggtgagcacgctcacgctcacgcacacgaagcgcagtccaccactccactactagtactcttttctgcccggccggagaggaaggggagagagggagaggagtttttttttcccttcaaagtccaaaagctttcaacttggcctaaaacaaggagacaactggctctgcgcctgtatggtctggggataaagaatatggaaacggcaggcgatcggatctccattttcctaacttaaaattttcctctccagtgtgtatgcctatggcctcgaacactagtttgtaggttgaaattttcttttgtttttgacgagagatcgatgtggtattgaccaggagattgctacaactttccgttcactttttcgtgtggtatgggcagctgattttgcttg

SEQ ID NO: 5946 - DNA, 661 bp, Oryza sativa
  ref <308>: DATABASE ACCESSION NUMBER: AK063106
  ref <309>: DATABASE ENTRY DATE: 2001-12-06
atagccagattgaattccccgacgagaaatccgccacagccgccgcgttgcgccggcggcgatggatcgcggcggccgcccggggtggctgccgtcgctggggttcgcgttcctgagcttcaactgcggcatggcgatctaccgctccagcagcgacccctccgcggtggccttcgtcgtcgtcgcctacctcgcgctcatcgcgctcttccgctgcctccacctgctggagcgcgcccccgcgggggggcaggcccgggcgtcgatgaaggcggcggtgtgggggctctccacgctcctcacgctcatgttctcctacaaggtcgccgccatcatgccgctctggggcgccgcgggcgtctgggtgatggggctcggcaccatcgtcgccggcttctacgccttcttcgtgcaccgcgaggccccctagatgatgatggcgatggcgaacttctgtgagatcgatgggcctggaatgcgatgcacccgtagatgatgaagcaaactgttcctcttgttaaaatccttagtaaaccttattgtggtttttaaagtttgcctttccatccatgtaaatttgggcttgaaagtttgatgataaccacaacgatgtactgcaccggagcacatttggtatgatgcatgatggagctatgtatgc

SEQ ID NO: 5947 - DNA, 541 bp, Oryza sativa
  ref <308>: DATABASE ACCESSION NUMBER: AK063107
  ref <309>: DATABASE ENTRY DATE: 2001-12-06
ctcttgtgtgattcttctggtaatcgccgtgacgatctgtgttcttgattttgcttgctaattttgaggattctcggcgtgggagcagaggaattggtggcgggagagggaaatcggtgcggcgggagtgggttttgggagggcaaatcggggatttcgcgctacggtttcgacgcgagggcgaggctacgccgcccacagcgcgcgcgacccgggtcttctcctcgctgcgcgccctggatttcgcgaggttttgcgtcgctcacctaggggacgaggaacctagtttaggtgcgggtccaagtgacacggcggcaaaaatccaacgtggcgcgacgaggtcccggtccagctcaccgcactgtgagagacctgagagcgagtggcgtcggcttcactcaactataaccaatgaccggtgggtaccaagtgggccccacatgtcacatagatacgaataaaggttgcagagcaaccgcaccgcctgccccttttcttagcatggaagtcgtacaggtcaagtccaacgaagcacagcgtc

SEQ ID NO: 5948 - DNA, 625 bp, Oryza sativa
  ref <308>: DATABASE ACCESSION NUMBER: AK063108
  ref <309>: DATABASE ENTRY DATE: 2001-12-06
cggatctccgccccgccccttccatctccggcgccggcgagaatggagctgctctgcatcgggacggcggacaccaagctggacgagctgctcttcctcgccgcccgcctccgctccaccctcgccgccacctcctccgcgcaggttcaagtaagccttgtggatgtctccacaactaagaaggtgacatcacaagattttaagggcaccacatttatctcaagagatgcagttctttcgtgtcatttaggtgtcgatcaacatgaacttcctagtgacagaggtgaagcaatcacactcatgtcagaggctctccagagctttctaaaaagaagatatgaaagtggtactctgctaggtgctgttggattaggaggcagtggaggaactgccctaattgctcctgctctaagatccctgccactcggagtgcctaagcttattgtatctactgttgctagtggccaaacggcaccatatgttggaacatcggacttggtgttgtttccttcagttgttgacatatgtggcataaacagtgtcagccgtgttatattatctaatgctgctgcagctgttgctggaatggtgcacggaatattaatggaatccaatgaatctgatg

SEQ ID NO: 5949 - DNA, 707 bp, Oryza sativa
  ref <308>: DATABASE ACCESSION NUMBER: AK063109
  ref <309>: DATABASE ENTRY DATE: 2001-12-06
gtaaagcttgatttccgccttcaggggtttctgaacgagagagagacagacggcggcgggcggcggcggcggcggcgagggagccgaagcctgagaggatggtgtttggccggagcaagtcgtcctcgtcgacggcgtctcctccccctgctgcggcggcttcctcggcggccgcggcggcgtgctcggagctgcgtgcggcgtaccacgagtgcttcaaccgctggtacgcggagaagttcgccaaggggcaatggcacaaggacgactgcgtcggcgagtggcacaagtaccgcgcctgcctcgaggaacatctggaagacaagaatctcaggcaaatcctattggaatcagaaacatctgcctactatgcccagtttgatgctgattcttcttctcgaaaaggtggcacctcgacgaagtgacaacctagggctaaccacatatgatcaagtttcgcttgactcaacctggattaggagaccctcatagatgaacgaaaaaggtgtttgtattttacatattagatgcatgttcatgctgttgcatcgcgctgcagttcagcagctgagatgtaagcttttccaagatcatattgaactcaaacctacaactttgatgtaccctgaaatttgcagcagtttctcttcctgaatctgggagaacagcttcagctatatgtaaacttaaaaaatattctccaaccc

SEQ ID NO: 5950 - DNA, 951 bp, Oryza sativa
  ref <308>: DATABASE ACCESSION NUMBER: AK063110
  ref <309>: DATABASE ENTRY DATE: 2001-12-06
aagaaccttactaccagtggtctttccccgtgaagaggaggaaggtgaggtcgccgggcgcccaccattgccgtcgcgtggcgaggcatgaagatcctagtggcggtgaagcgggtggtggactacgccgtcaaggtgcgggtgaggcccgaccggacgggcgtcgagacggcgagcgtcaagatgtccatgaacccattctgcgagatcgccgtcgaggaggcgctccgcctccgcgagtccggcgccgccaccgaggtcgtcgccgccaccgtcggcccctcccagtccgccgacaccctccgcaccgcgctcgccatgggcgccgaccgcgccgtccacgtcctccacgaccccgacccctcccgccccctcctccccctcgccgtcgccaagatcctccgcgccctcgcgctccaggagaaccccggcctcgtcatcctcggcaagcaggcaattgatgatgattgcaaccaaacaggacaaatgctagctgggttgcttaattggccacaaggaacctttgcctcaaaggttatattgaacaaggaaaaggctactgtggagagagaggtcgatggcggaatcgagaccattagcttggatttgcctgcagttatcaccacggatttgagactgaaccaaccaaggtatgcaacattgccaaacataatgaaggcaaaatcaaaagtcatcaagaaagtcacccccgaagatctggatgtagatatcagatcagacatggaagtagttgaggtcactgaaccacctaagagaaaagccggtgtcattctttcatccgtcgatgagctcgttgacaggttgaaaaatgaagcccgtgttttataacattctttgtactaatgctcatgagctaaggaatgtggcatatgcaaataaagtgtagttataaatggtcatcgtatgcaaataaaaatgtggcgttcccgt

SEQ ID NO: 5951 - DNA, 470 bp, Oryza sativa
  ref <308>: DATABASE ACCESSION NUMBER: AK063111
  ref <309>: DATABASE ENTRY DATE: 2001-12-06
agttgccaagaaggctgtttcacatccattttttttggccgggagagagagcatctagctagggagagaaaggaagagacgagaggagagagatggccactgcttatgctcccatggcgagccagctgatgaagagcagcttggtgtgctccaagccgagggggctgtctggtgcttcgctgacaaggaggccccgcttcacagtcaaggccatccagtctgagaaggtcagtagagctagctagactgctaaagagcattgagagatttcccatttcgcttcatcaaagctagtgtaaaacttgcatgtttctcaagaacaagctctgttaattaaaatcagatggtagatttcagacataatcgtttttcattttgttgtatttttattgctctgttcactagtttatttcctcaattagcaatataatattgaattgttgtaatccctctgtagattagacgcatcg

SEQ ID NO: 5952 - DNA, 847 bp, Oryza sativa
  ref <308>: DATABASE ACCESSION NUMBER: AK063112
  ref <309>: DATABASE ENTRY DATE: 2001-12-06
gtgcttgacagtgtacagtgcagaccatgggtggcgacggcaagcacaccaagttaccatggctgggcgtggcgaggtacgcggtgaccgcggtgctcgcggcgacggtggcggcgacggtggtgctggccatcaggatggtgctccggccggtggagctggacctgtcggtggccaacggcgcggtgtccgtggagcggccggagtcgccgtcggcggcgtcgctggtcaagtacaaggtgacgctccgcgcctacaacccgagcggccgcgccgtggtccacttcggcggcgacaacctcgtccgcctcatctacggcgccgcggcgcagacggagctcgccgcgttcacgctccccgcgttcgtcgtgccgcagcaggagtcgcacttcgtcaccaagtccgcgttcctgaacgcctccgcgctgccggcgtcgctcgccgcgaggctctacgacggcgagaccgaccaggtggtggtgcaggccgtggcgtcgctcagcttcaccatcggcggcgcgcgcggcgtgagcgccggcaggcgcggccacaacttcaccttccactgctggccggtgtccatctccagctactacgaggtgtccggcggcgaggcgtcgtgcagccaggacaccaccgaggcggcggtcgccggcctcacccacgaccgctgcatcggcggcccttgcccggagccgtacaagaactccggtaactgctccgggaataatagcaccggcatcaaggggtgatcgatcagctaatttcatttcgcggggtgtaatttgatttccagatgctactgtaattaactaatttattacaaattgaagaaataattgtattg

SEQ ID NO: 5953 - DNA, 696 bp, Oryza sativa
  ref <308>: DATABASE ACCESSION NUMBER: AK063113
  ref <309>: DATABASE ENTRY DATE: 2001-12-06
ctagttgatttgattaagcaattaaagttccttaagtgggaatgctttgagcatcatcttttatataattattaggacggctaagccaaagcagaggagataagctggatatatgtgtatatatatataatctgtgataaggatgtgatgctgaccatgtgaccccacctgcaggcacccattctccatcacgtcggccccacaggacgactacgtcagcgtccacatcaggacgctcggtgactggacacgggagcttaagaacgtcttctcaagggtactccgctagtcccatctcaccatctatttgtcacaaatctcacaatcttatccaaccttaagcccctacaaatctcctcctcatcatcattattattatcatcgctgtcacggttactatcactaatattttagcttaacaaatgacttgtacatttttttgcaaagtaaaaaagaattaatcatgacaatattatgtttttcaggtctgccggccaccgacggaagggaagagcgggttgctccgggcggagtacgaccgcgacggcgccatgaccaacccaaggtgagaacacaaccccgaacgcaaaacaatccccccttcttcttcttccccgctacgaaaattccccgcatttccctcaaatgtcaaccacattttccccctttttttcaaaaaaccacataaaagagacc

SEQ ID NO: 5954 - DNA, 414 bp, Oryza sativa
  ref <308>: DATABASE ACCESSION NUMBER: AK063114
  ref <309>: DATABASE ENTRY DATE: 2001-12-06
aaactcgttgtcgtcgtcccgtgcggtgcggcccccgctacccgccgcgcgatgccccctcttctccgcccgcctgatctagggttttactggagccgccgcgcgcagcgaccagccgaccacggacgaggacgaggggatcagatatgcaattgggggcagcaagctagaggtggcaactgcataatttgcaagaaattgttggctgaagatcataccgatgatattcttgcaagttatgcagttgctgcctcaagcttgctgcctcctgttgccaaagctagtaaaatgaaaacattaaattagtatagctggacggtttttcttgcagccttatgttcttctcttcagctcatgaatttctatttatcataggtagaaagtggcaacaacattagtatgagctttccagtc

SEQ ID NO: 5955 - DNA, 683 bp, Oryza sativa
  ref <308>: DATABASE ACCESSION NUMBER: AK063115
  ref <309>: DATABASE ENTRY DATE: 2001-12-06
aaaaaaagcggaaaatcctagaaacagaaagaaatcgcactcatggcgaagccgcagcttcttctggtcgtcgccgccgccgcactgctactcgtcgttgcagcctccgccaagaaatccggcgacgtgacggagctccagatcggcgtcaagcacaagccagaatcctgcagcattcaagctcacaaaggcgacagagttaaagttcactaccgtggaaaacttactgatggaacagattttgattctagctatgaaagaggtgacccaatcgaatttgagttgggcactggccaagtgatcaaagggtgggatcagggcattctgggcatgtgcgttggcgagaagaggaagctgaagatcccttcaaagctcggttatggtgctcaagggtcaccgccgaccatccctggtggagcgactctcattttcgataccgagcttgttgctgtcaatggcgagccagccagcaaatccgatgaggacgatgatgacagcgagctttagatagccaggatggttcacatcttacgcgccaaaacaaagtctagttgtcgaatcaaatagtgagtagtgaaatgcaatgcatttcaaattcaggaccccatagagaaatcaactctctttttttttcaccatgaccttatctgctattttataacataagcttctatttaactttt

SEQ ID NO: 5956 - DNA, 583 bp, Oryza sativa
  ref <308>: DATABASE ACCESSION NUMBER: AK063116
  ref <309>: DATABASE ENTRY DATE: 2001-12-06
ctcttcggccgttgggcgccatggcggccatcttcccccacctcgcctcgactcttccgcttctccgggctgtccgaacccctcgccggcttccgcctgctgtctccgccgtccctccccgagccgcccgcgtcgtcctccgtggattcaggcttcctgatccagctgcaagaaaatttctctgtttcgaggattcaataggcttgcagacggagcaccagaagccagattctactagcactggtgcaaaacagaacagctcaagtgatgataactcaagctcaacagatggcccacccgtcctaactattttggctggtatcattgtgttccttctagtcttgtgggttatcggatcgctcttcacctggattgctggtttggtctttggcgctgcaaaatcttagaagttcaaattttaggataattctgcacctttttagttgtacatacttcggtccaattgtatgccaatcttggataaattgcacttgatggtttcattcttaagtgttgaacaactgcttcatggtgttgtaccattgtttccagctgtgccttgggtattgccttttcatatgtc

SEQ ID NO: 5957 - DNA, 485 bp, Oryza sativa
  ref <308>: DATABASE ACCESSION NUMBER: AK063117
  ref <309>: DATABASE ENTRY DATE: 2001-12-06
acaccacatcgatcacattcgatcacattcggctagtaaccaagcggcggttcttgcgctagctagctcgagcaatggcgaagtgggcggctgcgatggagatgcttctgctggtggtggtgaccccgggctgctgtcgccatgcgcggccccgatcttcttcgggacggcgccgtcggcgtcgtgctgctctagcctgaaagcacagcaggggtgcttctgccagtacgcgaaagacccgacgtacgcgtcctacatcaacagcaccaacgcacgcaagatgatcgccgcctgcggcatcccctttcccaactgcagctaggctccgtcgccgccgttcaccggtgcgggccatgatgtgtggcaacatatataaatatatggtgtactgcgtgcttgaataaaataaaggacaatgtgtggaaacatatataaatatatggtgtactgtgtatttgaataatataaaggatgtgtgtttgaat

SEQ ID NO: 5958 - DNA, 586 bp, Oryza sativa
  ref <308>: DATABASE ACCESSION NUMBER: AK063118
  ref <309>: DATABASE ENTRY DATE: 2001-12-06
accaaacgccacacacgacgccgtaaccgccactttggattccccactatggacgccggcggcggaggccacggcggcgccatggcggtgtcggcggcggcggcggggatggacgaggcggacgccgccttcttctcccgccgcgggaaccggtgctgctgcttctgggggccgtgggcgtcgtcgtcgtactcccgcgccggtggccctgcggcggcggcggaggaggagtggtggcaccgcgtcgggggagggggaggggagaggcggcggtggtggcggcgggaggaagctcaactacgacccgctcagctacgcgctcaatttcgacgagggccacggcggcgcgtgcagcccggagggcgactacgccggcgcaccgaccgaatctttttgttattgctgggcggcggaggcgataagggtggacgtcattttctctcatttgctgctggtcgatggtgtccatagaagatgcgcttgtttttgtttgtattttttttgttgcctttttaaaattttgttcactgtaaataaaaaaatagaactctatctatatatatgtatggatcaaatctgttacaac

SEQ ID NO: 5959 - DNA, 816 bp, Oryza sativa
  ref <308>: DATABASE ACCESSION NUMBER: AK063119
  ref <309>: DATABASE ENTRY DATE: 2001-12-06
aagtcttctttatctacatcttcttctgcttcttccttccagcttgcaaaactggcttaattgattccatatttccattccacacgtcttgagagctaatcttttggaagaggaaacacgtcttagcttgagttaataattccatcgatcgtctcctctccattgactttaattgaaacgcccccttttcttcgctctgcggctacctatctcttgtatttatatcccggatagctacctgtgcttcaattcctctgcaaatccatccatattagcttccaacacaaggagatcacaacaatggccacattgctattgtcaagcaacaagaagccctgcagctcgtcgtcgtcgttgctgctgcttgtgctgctcctcctgctcgtcttcttcgcacaccacggcagttgcagcaggcctctgcctcttccgtcgccgacgccgatgcagccacagctgaagcacgaatcggagacagcatcagcagatacgacgacgacgactgaagaacaagtgatgcagcagcagctgtcttggttgagaagcatgaagcccagagggaggccacagccatccagccccagcaagcgcacaaactagcttagctagctactcgtatttgccctcttcctctccctcctctgtaggctttctatcttagttgtgtatgtatgagtgtatgacacacgctacttgtttttcttgtttcattctttttgttgatttgttcgatatacagaaactatgtacatatatacacatgagatcgatttgctagttagttcgcaacaattaatggaacgttattctttggtt

SEQ ID NO: 5960 - DNA, 520 bp, Oryza sativa
  ref <308>: DATABASE ACCESSION NUMBER: AK063120
  ref <309>: DATABASE ENTRY DATE: 2001-12-06
gagcagagcagggaaagcgggcgtggttggatcggcgacgaggagcgatgggggcgatggggaagctgagggtcttcgtggtgcaggagccggtcgtcgccgcctcctgcctcatcgccggcttcggtctttttcttccagctgttgttaggcccatactggattcatttgagactgccaaacaagctcccccaaccaactctcagtgatattatcgaacatcagtatctatctcaatgctttttaattctccttgtggggcacctataaagatgagtggattactgatgtcagtgtcgatacgtggcaaccttgggtgaataggctgctacttttgtccgtttggagcttgaattgttgaatactttgtgcttctcccagcgtggaatgttgaaaaatgaaaacacacatagccctcgtggcgatttgatcagtgtctgatgtcgcagaccttaaagacgttgatcgttgagcttacgctgcgatgacatatgctcaaaattaatcagatggaatgttg

SEQ ID NO: 5961 - DNA, 573 bp, Oryza sativa
  ref <308>: DATABASE ACCESSION NUMBER: AK063121
  ref <309>: DATABASE ENTRY DATE: 2001-12-06
atttcattgacaatcgttccgaggactcccacacagaagcaggaaagaatcatgtcggccgaggaagttgtcgctgacgtcccgaaggagcttggcgagatggacgccctcaaggaggtgctcaagaaggcgctcgtccacgacggcctcaagcgtggtctccacgaggccgccaaggcgctcgactcgcgccgcgcgcgcctctgctgcctcgcccaggactgcgacgagcccagctacagcaagctcgtgcgcgcgctctgcgaggagcacggcgtgaacctcatcctcgtgccgtcgggcaagcagctcggcgagtggtgcggtctctgcaagatcgacgcgacgggcgaggcccgcaaggtcgtctcgacctcgtgcgctgtcatcactgacttcggtgaggagtcgcacgcgctcaacgtgctgctcgagtacctcaagcgccagggcgagaactaagcagtctctcaagccaaacgcactcgaagcacgtatcgcggcgggcggtgttagtaggaacagaagacgcgttctaaaatccaaatcgctggaaggcttccctcggggctc

SEQ ID NO: 5962 - DNA, 792 bp, Oryza sativa
  ref <308>: DATABASE ACCESSION NUMBER: AK063122
  ref <309>: DATABASE ENTRY DATE: 2001-12-06
gcacgtcgtggtggaaaaatctggatacgtatatttcccgacaaaccggttacaataagaccgaccgaaacacgtatgggttcgggaaagggatcccccgaatattgggtagccgttgttaaaccaggtcgaatactttatgaaatgggcggagtatccgaaactgtagctagagcagctatttccatagctgccagcaaaatgcccatacgaagtcaatttcttcggttagaaatataaccccccaaaaaaagtagtattgaaaataaaaaaccaggttcttctttctggaaagacaatatttctttcatccttttgcattgaaataacaaattgaaatcaaaataatatgattcaacctcagacccttttaaatgtagcagataacagtggagctcgaaaattgatgtgtattcgagtcataggagctgctagtaatcagcgatatgctcgtattggtgatgttattgttgctgtaatcaaagacgcagtgctccaaatgcctctagaaagatccgaagtaattcgagctgtaattgtacgtacatgtaaagagttcaaatgcgaagacggtataataatacgctatgacgacaatgcagcggttatcattgatcaaaaaggaaatccaaaaggaactcgcgtttttggcgcgatcgccgaggaattgagagaattgaattttactaaaatagtttcattagctcctgaagtattataaatactagtagacaagatatagatcaaataaaaaattagtagattgtgtttcacgtatatgctttagaatcc

SEQ ID NO: 5963 - DNA, 619 bp, Oryza sativa
  ref <308>: DATABASE ACCESSION NUMBER: AK063123
  ref <309>: DATABASE ENTRY DATE: 2001-12-06
atggccagttatcatagcgaggcatcttccgcttcttcccgtcgcacatcagcctcgcccatcccgcatcgcatggggccaatggagtatcaacctacggtgctgtgcagatgcagagcgaaggcggcacgatggatctcgtggagccgtgacaacccggggcgacgatactacaaatgtcgcaatgctcgaggccaacgagcagttttatcagagatctgttgaatgatttgcgcgatgcggtgtggtcactaaggagggagaaggatgaactttttgttgctgttagggaagggcaagccatggctcgtgatgtagatacagctaggagggagttggcagcgttgaagaagcatgttgttgagaccgatgcaaaattggttctgttgaaagaacaaaaccgtaggctagagaaggataggtgcgtgctttttttttgttttactggcaatctgtggtctgtttgtcatggtttgggtgatgaactgagtagtatcagtgaatgttattatgatggaaggtactaagaatgtcagctgagatgtatgagtgaatgttgatgtaaggtagcaagaatggcttgtaatatgtttgaatgaatggaattatcttttgtagt

SEQ ID NO: 5964 - DNA, 633 bp, Oryza sativa
  ref <308>: DATABASE ACCESSION NUMBER: AK063124
  ref <309>: DATABASE ENTRY DATE: 2001-12-06
aaccacagcgagaacttgtagattcagtctccggccacaagcggttaaatcgattgaactcctgttcctttccaccgaaaccaccaatttaccatcacaatgaagcacctcgctgcgtacctcctcctcggccttggtggtaacacctcgccttccgccgaagatgtcaagtctgtcctcagcgccgttggtatcgaggctgatgacgagcgcctcaacaagctgatctccgagcttgagggcaaggacattaacgagctcatcgcctctggatccgagaagctcgcttccgttccctctggtggctccggtggtggcgctgctgccgccgctggtggtgctgccgctggcggtgccgccgccgccgaggaggctcccgccgccaaggaggaggagaaggaggagtccgacgaggacatgggtttcggtctcttcgactaagcgtgtcgccaatccatctctgtttacgatgtatgatccggccaatttctcaaaaatcacgagaatcatgcgcaacgagtccgagcatttggggcgtgtcgagcgcgcgatggatgggatatggagaaagattgtgcggcaatgctttcatagctgtctgctgagatacccataatgaagccatgcaccctc

SEQ ID NO: 5965 - DNA, 505 bp, Oryza sativa
  ref <308>: DATABASE ACCESSION NUMBER: AK063125
  ref <309>: DATABASE ENTRY DATE: 2001-12-06
gatatcaagaaattcatttacacagtatataaacatgaacactaaacttgtgactctttgcgtactattacttgttgtcagcggagctgttgctcgacaatgctatcagtgtgctgcatgtccaaaaccgttcaaaggaaatgaagcaggtgtgaccaaagtcgacgttggcgatgatgattattgcttcaaatcggtactacctatcgtcggtacaatagtaaaaggtagcgctggtcgaaattgcgatcctgtcggctcgacatacttctgttgcaaaggtgacttatgcaacggatcaacgtcaactatgttcaatgttaaacttttgacgggaatggtagcagcattttttgcaattcgatttttttattgatcaaatttttgtaacgatgcttttcttagacatgtttttttaatgaaaatagctcgggctaagatttacaataatgaaaatatcttttacaaaatcatcgaataaatataaacgaagttctatacattg

SEQ ID NO: 5966 - DNA, 494 bp, Oryza sativa
  ref <308>: DATABASE ACCESSION NUMBER: AK063126
  ref <309>: DATABASE ENTRY DATE: 2001-12-06
cttcatctactcatacaacccgggcggcatggacatcagcttcgcgctgttcacggcgagcggcgcggtggtgcaggacggggagtacgggtaccagaaccagttcgacgcgacggtggacgcgctgtacacggcggtggcgaagctcgggggagagaacgtgagggtggtggtgtctgagaccgggtggccgacggcgggcggcgtgggcgcgtcggtggagaacgccatgacattcaaccagaacctggtgaggcacgtccggaatggcacgccgcggcatcccgggaagaagacggagacgtacgtgttcgccatgttcaacgagaacctcaaggaggccggcgtggagcagaattggggcctcttctaccccagcaccgatagggtctaccccattagcttccatgcccgtatttgacacggacacggatcctctgcagtgctgttggtacagtagcaattacgagcggcagccagtagtttgatcctat

SEQ ID NO: 5967 - DNA, 396 bp, Oryza sativa
  ref <308>: DATABASE ACCESSION NUMBER: AK063127
  ref <309>: DATABASE ENTRY DATE: 2001-12-06
ttttgctttcggattggatttcggggcggcgggggctcctccggccagccttccctcgcatctaaccgcaggtaacgattgattgattgatggattggatgtcccccatgatttgatctggggacaagcggcctccgccggtgcatgtcctcgtccccgcaccacggcctcagcaccatgatccgtccgccgctgccgccgtcaccgccgcgtcgccagccgccgtcgccggccgccgaacttccccgtcccgtggcgcctggagagagaggagaagggatgaagaagggtagggagaggatgacatgtggggcccacgtgggcccaccattttctaattattattttgtgtaactgacatgtgggtcccacgggttttattatttttcttggatg

SEQ ID NO: 5968 - DNA, 546 bp, Oryza sativa
  ref <308>: DATABASE ACCESSION NUMBER: AK063128
  ref <309>: DATABASE ENTRY DATE: 2001-12-06
gtcgagcacgccaccgctggccgccgtctcgtcgcccttcctctctcgctcattttcgccgccgccaccaccgacgatgacgccgacgacgccggccactggccacaccgccgacgccggccacaacaccacactgccgacgccggccacagccacacgaccgacgacgccggccactagccacaccgccgacgccgccgacgcctcgccttgcaggcagcagcagccagtagcccagtggcagcaggtgttcctgcttctgcttatattatgttctgttaattttgtagaagagaactgtattattaatatgttctattgccattcaccaagcactccaataaagacagactgctagtatgtccagctaaagacagacggtgttcttgagcctaaaccgttgatttgatttcttttatcgtacagatttgtgatttgaactttgttttgtgatgactgatgaactatgtactaatggagtgatgtgttatgagattgaactaagtactgaaatattgatgaaattatatgaagttatagaagact

SEQ ID NO: 5969 - DNA, 582 bp, Oryza sativa
  ref <308>: DATABASE ACCESSION NUMBER: AK063129
  ref <309>: DATABASE ENTRY DATE: 2001-12-06
tgctgaatacatcttcttcccgttgatatagagaccaagcaatctgatatggtctgcatgttgagtgcggcaaaaactagaagcccatatgaacagtgggagtaaggtaacgaacatgccatccatgggaagactctgataactctctctcgcccgggctgtaaagggtaagcactgttgtgcatatatatgaaaggaaggtgataaagcagggatgctaaattgctactgggatccttaaaggcttatagtggtcaccagtggaatgtgccttaataatttggttacctagcagagcaagtttttgcaggttattaggtaatatctttgagggaatgaacttagatttcattgttttaaggtctggtcacacaacgggtagtagttctggagcggcaaaagacgaccttgttttacactaccaagggaggttaactctagttttcatgtgaccacttaccttgagagttgagaccatggaatcacttgtcgactcctcggcttgtatatttctagtgtcagcatttgcattctcctccacacttgtacttgaagagttgaagacaacttttttgtttgtgt

SEQ ID NO: 5970 - DNA, 632 bp, Oryza sativa
  ref <308>: DATABASE ACCESSION NUMBER: AK063130
  ref <309>: DATABASE ENTRY DATE: 2001-12-06
atttacatctaggtgcagagagaaacctccctccctccactctctctctctctctctctaacccacacgcttgtgctttgtgcaagtagcaccagttcattgggacatatgaagaaggaagaggaggatgccaatgccaccatctccttcaacctgccttcccttcctcaccatgcttccctgctcctcctcgtctccgggaggccattccggtgacctcgtcgtcgccgccgccgccgccgccgccgtcgtcttctctcagtagttcttctgcagagccaaggcatggaggccgccatgcgagcttagctcaacaaaatggaggagatcgagttttggtgaagaagaaaccgttccatggtactgatcatatgatggtatgcaggaaggccaggcattttttctctctctgaattaattcaaatcctctcttttttctttctttttcttttctgctttcctctccttggcacctgttgccgttcttgctgctttaattagcttgctgagactgtcttttagctcgtttgattatgatgtaaggccattggtcttatcaccagaaattgagatggtcctgaagatttcatatatatgactatatatatgtataaagtcaccttttaattggt

SEQ ID NO: 5971 - DNA, 700 bp, Oryza sativa
  ref <308>: DATABASE ACCESSION NUMBER: AK063131
  ref <309>: DATABASE ENTRY DATE: 2001-12-06
tgttttcactctgtggagtttgtgttcttgggagtaatggtggtggattgggggataggacaggcgagctcgtcgtcgttgatctcgtctcgccgccggggattgatgggacctttttgaggtggattaaagcagagctataggattttgttgtgtctcctgggcagatctgtaggatttaccgataggatgatagtttgatatgctccatttccgcatgcttctgtagttgtgtaccttatctccatcgctatgccattacaactcattgtaggaacttttgccaaaccttttagctattcccgttaatcttgtgattaaagctgctacctttacccaccaaagctgcctcctttggctgcatgcttccatcatggcctctggcccctccatgttgggattcgtctttcaacgcctcaggacgaaatggccgattactcttcttcttttttttttctgaaactcagcgctatgggcacgagtcacgacgctgacaaaccgacgaccttacacacggacaacatttcaagaaaagaaaaagtttgattcttgtgcggtcgtcgtttctggcattaaaaaaaaatctctctctctttttttttcgcctatggaacctagccggcggcagggcacggcatatgcttctcgtgctcccggtggtgtggttggaaatgccactgattttgtagaaaagaaagcg

SEQ ID NO: 5972 - DNA, 741 bp, Oryza sativa
  ref <308>: DATABASE ACCESSION NUMBER: AK063132
  ref <309>: DATABASE ENTRY DATE: 2001-12-06
aagtcagcttcagttcgctgcatctctcctgcaagaattaatatatctttcagactcccagagattacacctgatcgatcgaattgatcgcgatgacgacgatggctaaggtgatcacttcggttgtcattgcagccgtggtagcgcttgcaatggtgtcgctggtcgctgcggactctggcactgcgaccttctacacgcccccttacactccgtcggcgtgctacgggttcgaggaccaggggacgatgatcgcggcggcgagcgacgtgttctggaacggcggggcggcgtgcgggcagcagtacgtggtgacgtgcacgggcccgaccaaccagggcgtgccgcagccgtgcaccgggcagagcgtcaccgtgaagatcgtcgaccactgcccctccggctgcgcgggcaccatcgacctctcgcaggaggccttcgccatcatcgccaaccccgacgccggcaaggtcttcatcgactaccaacaggtgtaataattctacggttgaggtgatgaagaccgcacgtgtgtcactatatataataaagtgcatctccaaattaaaataagggcaagctagcttggattggagcgaacttgtgtgttccataattatggttaattaattaattagtacgtaccaaaaataacagattgtaactgggagagagtgaaaaaatgtctctcctgatctataaagttaccttgtggttgagaaagaaacatactccttaccc

SEQ ID NO: 5973 - DNA, 794 bp, Oryza sativa
  ref <308>: DATABASE ACCESSION NUMBER: AK063133
  ref <309>: DATABASE ENTRY DATE: 2001-12-06
aacctccaggcagagccgagccagccgtcccgtgcacagttgccgtcgatttcccctccaaatccggtctcctctctcgtgttatttcaaaattagttgaggggaaatattcctttatatctcctctacttttcccccaagaatcgaactttatcccgaagaaatcaacgcggaatcgagctcggttcgtgtttatctctccacctaaccctcggattttccggctcaaatcctttcgtttggagtccgatctccctcacccatgcctatataaaggatcccctagctgccctcttccgtttgcgtcgagtccaagccgcagccgtcgcccgtagcgccgccaccgcgtagccctagtcgtcgccgtcgttgtcgtcgcttcagccgcgccgcgccgctgctgtggtcgtcgccgccgccttacgtcgccaccgtcgggttcgtgaggaggaggagcaccccgtccgcccctttgcagccgccgaagaccgccggagcgccgccgtcgacgttgagccgaaccgtgccgccttgggacctcgtcgccggccgtcgtttgtcgtcgtccgtcgtttttctttgcaccggtgagctcgcgtcgtcgtcctctttgtgttggtgtcttcagatagcccaaccgagctctctatcgccggcggagttgtggtccagtgccatcgctgcgatgatgtcatcgcgacatcataaatctttttttagtttttctgtattagataaaatctgattaaacttcggaaattcataattaaatcatcataactcggatttgagtc

SEQ ID NO: 5974 - DNA, 432 bp, Oryza sativa
  ref <308>: DATABASE ACCESSION NUMBER: AK063134
  ref <309>: DATABASE ENTRY DATE: 2001-12-06
agccataagccattaggcaaggcaatcctcctcctcctccttgctcacagtcacagatgggaagagaggaattgagcaactcgtcaactcaagaattggagggttgagctagaattattaggaagtagagctagaattagagaagagcagagcagcaagagattattagtacaggaacaggagagcagagcagagtgcgatcgagcaagggcagggcggcggtaggctaggcatggaggaggagataaagggccgcgtcgtcgtcctcggcgccgatgccgccgccgacccggagctcgaggccttccatctcccctccgccgaccagcccccgcactcgcacctcctccaccaccaccattctccacaatcccatcctcaacctgctgctgctagatgttctaagaatgaattaatgaaatgaattactat

SEQ ID NO: 5975 - DNA, 544 bp, Oryza sativa
  ref <308>: DATABASE ACCESSION NUMBER: AK063135
  ref <309>: DATABASE ENTRY DATE: 2001-12-06
aaactgttcgtttgcagctggtagcttaattttccttcgcatttcacactttaatcccctgcgaatcctcacgtacactcgcttagccgtggatatattcacatacagatattgcactgttgatcatttctctgtcgaccccctgctcctgttcttgcctagcttgctcttatatatggccggttcatgggtgcgcaccatcacgtcgccgttccgcaaggtgttcggcgcgcagccgcacaaggacggcggcaagcggccgcagcagccaaactccgggatgatggtgcagcacgtcgtggtggacgccgagagatcgaagctgcacggcgaggtgatggcgtgcgcgtacgaggacgttcaggtgatgtgggatatgctggacaaggccaggatccgtgagttcaatagcagctagctgttaatgccttgatggatggtcgttggtcaccgatcaaaattatgcttctgtttgatcaaatttcaagaggatacatcgagcatgaaaccggtgtatatatagcaagatcgatggtaatctctt

SEQ ID NO: 5976 - DNA, 705 bp, Oryza sativa
  ref <308>: DATABASE ACCESSION NUMBER: AK063136
  ref <309>: DATABASE ENTRY DATE: 2001-12-06
aattaacaatgcgggagtacaaacactgcaagaaaaccagcaggtcaacagcatccaaattcctagataacaagacgcattaccaagtagccaacaccacgcctcgatcgatcggaacacacacaccatgtcaaccactgcgccgagggccgtcgctgagcggtggagggagctccacggcgaggaccactggaagggcctcctcgaccctctcgacgccgacctccggcgcagcgtcatcggctacggcgagctggcgcaggccaccaacgacgcgttcatccgcgaggcgtggtcgccgcacgccggcgcgtgccggtacagccgcgacaggttcttggagaaggcgcagggcaagcgcggcgggttcaagctggaggtcgaccgggacgtggagctggtgaacaagaatgtggacgcgctcaaggaggagtaccacgtcccgccgtcgtggagcgtgcagagggacaagggcatggtgaggggcgccgatggccactggaagttgatggattacgagggagaagaaagtagccaggacaaatgacgctgtgatcaatgtgaaatgtgaagctaactagcttgtccctatgtttcgtcatatgctgtttttgcttccgattgtgtgcaatctgtgacatgcgcgtaaattttctgtacctgtagcctgtagtgaaataaatcagtgaaccgtggtaagtttgc

SEQ ID NO: 5977 - DNA, 634 bp, Oryza sativa
  ref <308>: DATABASE ACCESSION NUMBER: AK063137
  ref <309>: DATABASE ENTRY DATE: 2001-12-06
ctgctggtcatttggaacctgacctttgctggtcctgttcctttcaaactgtatgaaggtaacatgggcagtaagtagttgctgttatcttaactgagagacctgtggctcgaatgcgagattgtttcggaaaagataaggtgagattgcgacggtgaggttgacatgggaaagatgtctttgctgttgctatcatctgggtcaatatccttgcccccaaaaaactacttttgtggtcttttactactagtactgctacttttcaccctgcgttctgtgattggatgaccgtttgatggttactaaccatcttttttgtgccttttttttaacaccatctcttatgtgccttgtattactatgttatcactatgctttatgtagtattgatcagtcaaatgttttttcatggttgtgtacaagtgtacctattttttaacacactctcttatgtgccttgtattactatgttattactatgttttatattgatcagtcatattttttcgaggttgtgtaaatgtgtgcctagtattatgttattgttatgctttgtaaagaaaaaaccaatttctatctataaagctggatataaatctggatataggctatgttcagatttatcattatcatc

SEQ ID NO: 5978 - DNA, 699 bp, Oryza sativa
  ref <308>: DATABASE ACCESSION NUMBER: AK063138
  ref <309>: DATABASE ENTRY DATE: 2001-12-06
gttgcttctctaatccaggcacaccaccatcctcccattctctatccatttgtttgaagaagggttatggccaatgcttgccccacatctaccacaagctccttgcccctcttcttcctcttctgtttcctgctcttcagtcatgctcgttgcaatcaagggcaccatggcagcatctcaggtacagactatggagaacaatatcctcaccaaacattacctgaagaacatatacatttgcaggagaacatcaaggttctaaacaaggagaggctgcccaaatatgcaaggagaatgttgattggttcgactgctccaatatgcacatacaacgagtgcagagggtgtcgattcaagtgtactgccgagcaggtcccagtggatgcaaatgaccccatgaatagtgcttaccactacaaatgtgtttgccacaggtgatcattaataattaagaggagcttctgttatgagtagtagtttgcatccattttattctctttttcccccttctacccttctaggctcaaaaggttcattttttccccttttgttttaacaagtggccagctagtagaggattagagggcattttgtattttaagatgttcaggttgtggactggtaattttggaagtaaatgttaaaaaatttgaaaaacagcttatttatactattgtgcagacaaaatgttccttgctt

SEQ ID NO: 5979 - DNA, 552 bp, Oryza sativa
  ref <308>: DATABASE ACCESSION NUMBER: AK063139
  ref <309>: DATABASE ENTRY DATE: 2001-12-06
ctctcaaatccggatgggggaggggaggcggcggcggcgacaacagaggctgcggcgcgggatgggaggaggatgccggtgctggtgcgggatgggcggaggctagataggtacgagtccagatccgccctctcctctcccaaatccgccatctccccccagatctgtggtggcggagaccggggagggggctcggcggcggcggcacggggtaggggctcggcagtggcaaggggacggcgctcagcggtgacgacgctcggcggcagcggatggcgcgtggtgggtctcggtggtgacgacgcgtgctggcagcggtgacggcgcgcggctctctcctctctgtgcctccaacctcccacctcccttcgcctttctccggctctccggctcgacagcgaccgcagcgacaggacggcgaccgcctctctccagatcgatttgcttcctgtaaaggatttgttgatgcatgctgactgctgtgaaatcgatttgcttcctgtgaaggatttgtttatgttaatttttttatgtgagtctgctgatttgttg

SEQ ID NO: 5980 - DNA, 810 bp, Oryza sativa
  ref <308>: DATABASE ACCESSION NUMBER: AK063140
  ref <309>: DATABASE ENTRY DATE: 2001-12-06
gaggtgctgagggagctgcgctggcagagctgcgcgtgtacgcggcgcaggagcgcgtggagctccaggtgaggagggaaacgctggtgctggagctcccggcgaggacgcagcggcgtcaacggcggcaggcagagccaacggcggccgcgcgcggagggagctgctggttgtgaggacggcactgctggtgctggtgtgaggatttggtgagctgctattgctgttctgttgctgaggcagagaagatcgagctgaggatttggtagtgtgctgttgctgctgaaaggaaaaggggaacacaaatttggtaagtgtgttgttgctgttgctgttgagcgagcagaggaattgtttgccggttgtgctattggtgtggcttgtgtgtgctgcggcaaggaggtgagcttgtgagtattgtactgctgtgtgtggttgagaaaggaagaaaaagaagggagtattgctgctggatctgttggtggtgtcgtgtgtgctgaagattacaggtgcagagagcaatagcaggtgaggaaagctgtagctagcttcatctagaagggaagaagcggctttggtgttggaaattaattattgtcaagaagtaaggcaacaggttgtgcaaggtgaatgtgaagttagtgcttcagattggcaggcaaccaaccaaaattcgtgtgtgcgagaacacagtccaagcctcggcagtcacagagagggagaggggtgctgctgtgtcgagttccctgatcaggaggaaagaaaaccaggggacgttgtcttcaaggtgttagaatagagtgagtttgt

SEQ ID NO: 5981 - DNA, 978 bp, Oryza sativa
  ref <308>: DATABASE ACCESSION NUMBER: AK063141
  ref <309>: DATABASE ENTRY DATE: 2001-12-06
ccatgccctcgccctacacccgctcccagctctccgagaagctccgccgcctcaagaacaagttccgcggcatgtccgcccgcgtcgcacggggcctcgaccccgcccgcctcgcgccgcacgaccgcgacgtgctccacctctgctcccgcctctgggaccccgccaacgccgccacctcgcccttcgccgccgccggtgacgcctcctcggggaacaagcgccgccgcgccgccccgcgcgccgggccgctcatgcccccggatccctcaggggacagcaattcccatgattacaacggcggtattagcgccggtacgcccggcgcatttggggatgggcacggtggtgaggaaatgatgtatcttgagcaggaaagtgggcactttggttatcatggagatgtcgcgattgcggctgacggaagccttgatgggattgtgaaggtgcagcctgagactcttcctgccctccccagtatcggggacattgcggttcacagtgagaatggcaacggcaaggccgtggtgccacgtagcaatgagcatcacatggcaaatgccgtgctggatatatttgaggagtgcttgcgagaggtgaaggccaatggcattacctacggtgctaatgtgaatgggggcagtgaatttgcaaggcgatggagagcacagaggattgatgagcttgatgtgttgagccggaggctaaggttgcttgttgaggatgctgcagcggctggtcgctaagcggacatactggtggttttggtgacgtgcttccgcccttcaccccatgtgtataaaatattaaaatctagattattatgctatatgcttttgtagttcctcactcagcttgggccttgccttagtcagcctaatatgcctattatttatgcctatgtacatcgtctacggatattgccttttagtttaattatttcatcagcataatatatatggttccagcattgttatc

SEQ ID NO: 5982 - DNA, 666 bp, Oryza sativa
  ref <308>: DATABASE ACCESSION NUMBER: AK063142
  ref <309>: DATABASE ENTRY DATE: 2001-12-06
ctctcaaactcctctgcccctctcctccctcctccctccctgcggtgggctctgccaacggcggcggcggcggcgacgatgggcaagggcgacaacgacagcttcctcctctcctcccctctcctccctcccaacggcagtggagcgctcaggcagtgcaagaggacggaggaggtgtgccatgacttcctcttcttctcccctctcctcttccttccaacggtggtggagggctcaggcaatggtggagagcagaggaggcgcgcaacggcggcggcgtttgccgcccgcgtggatccgacagcggtcaccctcccccttcacggcagtggcggatccggtggtggggaggcgcagcggtggcggatccggtgatagggaggtgcggtggtggtccggggggggggaggcatgagtcacccagccgcctgcgaaaaccggatttgatcatatgggaaaatgcatttcgtagccgtgtaaatttatatatatacttctaataccagtatgtttcctttattttgcgtgaattcatatctcgagtttgaaccatccccatcgaagcatggagaatcggatacaacgagacagagaattgactttgcaattttgatgtgaattgtatccagctgggaattaatgtactctatcacaatcattttttgt

SEQ ID NO: 5983 - DNA, 1138 bp, Oryza sativa
  ref <308>: DATABASE ACCESSION NUMBER: AK063143
  ref <309>: DATABASE ENTRY DATE: 2001-12-06
tggaaactggtttggaaaaagcaagaggggattgattgggcatttggaatgcacacacttctgtcggcaacatatctggttcactgctggctgcatttctgctgaagtttgggtggggctggtcatttgccatccccagcttaatcatggttgctgtcgggttgttggtgtttgtcttcttaccggttagcccagaggtgatggagatagacattgatgatggggagataagctctgttaaggatactaccaaggagcccctcttggaaccaggacaagaagtgaaacacaatgcagtaggtttcttagaggcttggaagatacctggagttgcgccctttgctctgtgcctcttcttctccaaattggttgcttacaccttcttgtattggctaccgttctacatcagtcatacacctattggcggtgagtacctctcagatgctttggctggcagcctatcaacaatctttgatgttggaggcgtgttgggtggagtccttgctggtcacatctcggatcgcttaaatgcacgagcggttacagctgccagcttcatgtactgcgcgatacctgccctcttcctataccgcacatacggcagcatgtcgataatgtggaacatttgcctcatgttcatcaccgggatgttcgtcaatggtccttatgccctaatcacaactgcagtgtcagctgaccttggcactcacagctcattgaatggaaattcccgggcattggctactgtgacagccatcattgacgggaccgggtctgttggcgccgccattgggccattgctgacaggctacatctcgtcgagtagttggagcgctgtgttcacgatgcttatggcagcagctctccttgctgggctcctcttgacacaacttgtgtgcagtgaactaaaaggaaaggcgacctccaatgcgagcaaggatgtcgccgatgctcaaggtacctactcagatgaggtgtaagactgtaagtaagatctagtcgcaccccaagacacgatacatggattagattctcgtagctccaaagcactgcttggcaagaagttgcattttattgcttcctgcacatgtcttgatcacctctggtttgaggctgaaataaccaaagagatgtggtt

SEQ ID NO: 5984 - DNA, 405 bp, Oryza sativa
  ref <308>: DATABASE ACCESSION NUMBER: AK063144
  ref <309>: DATABASE ENTRY DATE: 2001-12-06
gtcgggttgtttgggaatgcagcccaaatcgggcggtaaactccgtccaaggctaaatacaggcgagagaccgatagcgaacaagtaccgcgagggaaagatgaaaaggactttgaaaagagagtcaaagagtgcttgaaattgccgggagggaagcggatgggggccggcgatgcgccccggcctgagaacttgttaagattattgtctcctatgtctgaattaccccccaatctgtttttattttgcttggcgactgagtgagctgctgtacttttctccatcgtatgatggctcagaatcttgcatgatgcgtgcctgcctttttgatactcctaatcttttacaagttactataaacttcctgggatcttttacaagttactgaaaacttttctgcgagct

SEQ ID NO: 5985 - DNA, 812 bp, Oryza sativa
  ref <308>: DATABASE ACCESSION NUMBER: AK063145
  ref <309>: DATABASE ENTRY DATE: 2001-12-06
gtctcctacgcaattttcttcacactcacgccggcgcccctcatctccttccccaattccctctccggcgacaaggtcagggcggcgccgatcggcgagcttcgcactagggcgggcatggcgcgccgcgccgcttcccgcgcccttcgctcggagggctcgatccaagggcgagggggccgcgcggggggcggtggcggtggcgccgaggacgcacgccacgtgttcgacgaattgctccggcgtggaaggggcgcctcgatctacggcttgaaccgctccctcgccgacgtcgcgcgtggcagccccgcggccgccgtgtcccgctacaaccgcatggcccgagccggcgccgacgaggtaactcccgacttgtgcacctacggcattctcatcggttgctgctgccgcgcgggccgcttggacctcggtttcgcggccttgggcaatgtcattaagaagggatttagagtggaagccatcaccttcacacctctgctcaagggcctctgtgccgacaagaggacgagcgacgcaatggacatagtgctccgcagaatgaccgagctcggctgcatacctcctgagatgaaacaacaattaacctttcttcataagcatttttgccaacttctttaacctgaacgcaagcacctgtctgcaattaaaatattggatgcaggttcaaattgaatgaacaggttttataaaatttagaagcgcagaaatgcagcatgccacacaccacacaacttttattcaggaacaagattggattgtataaaatggtttcgatctgattatcttatctc

SEQ ID NO: 5986 - DNA, 515 bp, Oryza sativa
  ref <308>: DATABASE ACCESSION NUMBER: AK063146
  ref <309>: DATABASE ENTRY DATE: 2001-12-06
aactaacgctaaaaaagtaacagtttctgtactttattgatccttccactcaagatgatgcgccgtgcctgcacccgcgccacctcgcgcgctctggtcgcccccgtcgccaccgtggccctccgcccggcgtcgaccgtcgccatctccgtccaaggtctccacttcgtcggcactggcctcgctgccatcgccctcgctggcgtcggcctcggcatcggcaccatcttcggtaacctgttggtcgcctgcgcccgtcagcccaacctgacgcgcatgctgttcaactacgctattctgggcttcgccctgacggaggccatcggcctgttcgccctgatgcttgccttcctcatgctcttctcttagagcgcttggatgtcagtcactcgcatcaactgtcgagcagtgcccaccaccaccaccaccactatcggaagtgttctttcatcgttccgaaggaagttgaaaggaggggatcgtgagcacgaagagtaagggagtcacaaaaaccg

SEQ ID NO: 5987 - DNA, 770 bp, Oryza sativa
  ref <308>: DATABASE ACCESSION NUMBER: AK063147
  ref <309>: DATABASE ENTRY DATE: 2001-12-06
agcacaaaccttgagagcaatccactctttcttctactcctaatacacacacacaaagagagacaggaatggagagatcacctgaagtggtgcaacacaaggcagcaaaccgagctgccgaggatgatcacaccacctcgattccatggctaaagctgggtgtcgtcgatgcactgacagcagaagcaggtaagcttcccgagtcgaatccgaagccggccgtggcggcgccgcatagaaccttctcctgcaactactgcatgaggaagttcttcagctcgcaggcgctgggtgggcaccagaacgcccacaagagggagaggtgcgcgccgaggaagtcgcacggcttccagcagcagcatctcatggttgggctctccccgactgcaccgtcgtcgtttcttcaccacatgagggttaaccctcacgccacgatcctgaaggtgaaccgtggctattcttctgctgatggtgttgtcgtggcgaaattccatggaggccagatgagtagcagctgggtgccttttgcggttgaacatggtagagggtcagtctggcctgggagcttcaaagcaagctctcaggagcagaagaagcgcacggaggaagatcttgacttgagcctgcggttataagtttgtagtgtacagatagttcattatatatatttaagtatgcattttggcaaatatgatcttcagtttttttgtcatatgttttctatggtgaggtaatttcagaagcgaacaaactcatgcatgttgaagagg

SEQ ID NO: 5988 - DNA, 756 bp, Oryza sativa
  ref <308>: DATABASE ACCESSION NUMBER: AK063148
  ref <309>: DATABASE ENTRY DATE: 2001-12-06
acctcctccctcctcctcatcttgctcagctccggccatggcggcgtcaccggctttcctcgttcttgccgtgcttctgtgcgcggcggcggcggtggcgcgggcggcggacgacggcgcggcggggatgaccaagttcaaggtgtacttccacgacgtggtgggcgggacgaagccgacggcgatcagggtggcgcaggcggcgtcgacgaacggctcctccaccttcttcggcgccgtggtggccatcgacgacccgctgacgaccgacgcggcgtcgtcgtcgtcggaggtggggcgcgcccaggggagctacacgttcgccgaccagaagacgttcggcctcctcatgaacatgaacttcgtgttcaccgccggcgaccacaaggggagcaccctcgccatcgtcggccggaacgaggtgctctcggcggtgagggagatgagcatcgtcggcggctccggcaagttccgcatggcgaggggctacgtcgaggcccgcaccgtcgactccggcgccaactccggcgagaccatcgtcgagtacaccgtcttcgtcaaggcgtagagaagagagatctacctgcaaattaaaacgctactggcaattattgagcgccgtgtttgtacgtgcttaattaattgattagtcttttcattccgagtgcattaaatattgtttatcatcatctttggttgattttctgattgggtttcagttgatctaattggagggcgaatcgattttgtttgaat

SEQ ID NO: 5989 - DNA, 1024 bp, Oryza sativa
  ref <308>: DATABASE ACCESSION NUMBER: AK063149
  ref <309>: DATABASE ENTRY DATE: 2001-12-06
acacaccacaaacacgatcgattcatggcggaacccgagcccaagaaacccaaagccaaagatcatgtcgacctcgtctttgacgccgccaaggtgaaggccaaggccaaggccaaagccatcgacggcgatgctgacgtcgagatcgctaagccggcggagcagcacggccacggcagccggctgctgcggcgcgcgtgctgcgccctgggcgtggtcgccgcggtggccgccgtggcgatgctggtcctgtcgctcaccgtgctcaaggtgagggatcccaccctgtccatggactccgtcacggtggagcgcttccatgtggggttcggcacggaggcctcccggccgctgcggatcaacgtgacgctcgtcgcgggcatcgtgatcaagaaccccaactacgagtccatgaggttcggcacgagcaccacggagttctacgtcgacggcgtgccggagtacgtcgggctggggagcgcgccgccgggggaggtggcggcgcggggcacgagccgggtgcgggtcggcatggacgtgttcgtcgacagggtgggcgcggccgtggtcggggaggtgctgttcggccgcggcgaggtgcggctggcgagccacaccgccgtggacggcagggtgagcgtgctgggcggcctgtacgggcggcgcgcggtgcgcgtggcgatgaggtgccgcgtcgtgctgcgcgtctcggccgcggtcgtcgtggccggctcgccgtcgtgcgtcgcggacttcagcagccactgatctcgcaacggtgcaaggcgcgacgcgatcgagagcgatccgccatagttttcaagtttttctttaccttactggagacgaacggatcggactagtgaaccgttcgctaattactctcctctctagtctctcccttgtcaaattatttctgttgatcatatcttctttttgtttaattactttcgttttgtaccataagatgtaccacgttcatcctaactttgaaagctgagtaaagtacgccgagatttttcgt

SEQ ID NO: 5990 - DNA, 577 bp, Oryza sativa
  ref <308>: DATABASE ACCESSION NUMBER: AK063150
  ref <309>: DATABASE ENTRY DATE: 2001-12-06
agctcaagcagatgctgcggaggtgctcgtccagcctcgggataaagggcgccggcggcgacgacgatgggctgcctggggacgtgccgaggggccacttcgccgtgtacgtcggcatcagccggagacgctacatcgtgccggtggcgtgccttgcggcgccagagttccaggagcttctcaggaaggccgaggaggagtttggcttcgaccacgacatgggtatcaccctgccctgcgatgaggccaccttccacggcgtcctcgcctccgcctctgccacctccatcagatgagatgaggcaggcgcgcttgcattgcgatttgttgcattgcttgctagggtagaaattgaggcatgatcgtgcatggatgttggcacattcttatttttttcctctcctctctagctagcttcaattcctattgtaagttcggctgtgctgtgatcgatcgagttgtgaaaattctcagagcgtgctgccatttggctgccctgtgagaacgatattccaacttccatagatcgatcgctcaagtaaaaatattgtgttccagcccaacgaaaaataacatc

SEQ ID NO: 5991 - DNA, 515 bp, Oryza sativa
  ref <308>: DATABASE ACCESSION NUMBER: AK063151
  ref <309>: DATABASE ENTRY DATE: 2001-12-06
aaaaactttgctatagcatcctgataataattagatcgatcgagctagccatggacgagtacctgccccagcagaagaaggtcgacgaggagcaggcggcggcggtggacaccggcaagacgaacgggaaagaggcggcgaagcagcacggccacatccgcatagacgacgacttggtggagtacgtcaactttggcgccgtcgctcaggctggaacggcctatttcgaaaagaagtacgaggcggcaaccggggagaaggcggcggacaaggtggtgaggttgatcggcaaggaggagaccaaggatcgggaccaggaggagaagaacaagggcgtcgtctaccagttctgatagatatcaatcaatcatgcatgtataacatatagctaccgcacgccacatgtgttcatgtgtgtgcttggttgtactcccgatctcttatctaaggcaagtactatatgttttgaataagtggcatgcagtggtaattaatactccattcgtttttttact

SEQ ID NO: 5992 - DNA, 935 bp, Oryza sativa
  ref <308>: DATABASE ACCESSION NUMBER: AK063152
  ref <309>: DATABASE ENTRY DATE: 2001-12-06
tattcgctggccagcctcgtgcatggctggcacgtgggcccactctcctcaaaaggaataattgatgcagtaaaaaatttactaggagtagtacgtaggtttttttactagtttgagggtggtggatttactgtgggggttggatgggtgtagatttgttgcgaaatttggctggaaatgggaatccgaggtgaaatttattggatttttgccgtgtagagggcaggcagcatgcatggcttgcatgtgaatccaaagctagcaaaacatcattcaaagcctcactgctgcagttttaggttggggcagaaaaaacggtagcaataaagaaggtaatcttttttgcactgtatatagagagagagaataaaaagggagctgctttttttaggtgaaaagactcgaaaagagtggtgagtttaggttgttctagatgatggtggtgttcctgcactgcagtgctctttgtgtggatttatttttagctaagggaatgattgggaaattttgctgtgtttttttgtgtagtggtaaagagaaaaggactagcatatcataaagtgagagagagaaaaaaataaagcttagtgcaggatggattatgtgtgtagctaggggggagagggggtcaggcttgcactaagaaagcaatgaataaaatgggaggggtacattttagtactacgaaatcacagttgcggtgcacttagataataatcacagtatattaaggtcgacaaaagtacacatcttgatatacaaaactagttacagaaagatggaaaattttttactctagtgaattattgttagcactcatgagaaacacttgcactagtttaggaggagaaggttccaaatcctttcttctttttggaaccaatacaactagaacaatctttttctcccattgatagacagatagagaaagtggc

SEQ ID NO: 5993 - DNA, 859 bp, Oryza sativa
  ref <308>: DATABASE ACCESSION NUMBER: AK063153
  ref <309>: DATABASE ENTRY DATE: 2001-12-06
atattgctagagagcgcgggccgatggttgagccgtccaagagcggcggcggcgcggcgctccggcgagcggcggccggagtcgctctcccggttggcgttgtgtatgtgatagaaggccaggaacccgcgccattgctcttctcaacaggagcaggtgagatctctgacctgtcaacggcaaggtcgtcttcctcgtcatggaccttctctccctcccatggcgtcgcccacctccgaggtctgtacactccataaaccaacctctcctcctcccataacgcagcgttgccggatctacgccctccagagtctgaacccctccgaatcctctccgttgcgtgtctctggggtaaagtaggctatggaggagcaacttgctttctatttacttcggatgctaagattgttcatctcaaattgctaatacatttcgcataaagaaattgctaatacatgcctccagatgccttttttttctcaagtcatcctactgagttggcgactagtaggtgttaattgctgctagttttcctactgaacatacctaacaatactgttatgggtgaatttttgtaggctcagattttcttactgaagaaataacagaagcaatcgatggaataactcaacaacatctcaggtgtgctccgaacctcactgccaaagcaaaattctattgttttcactagtaagcaagtgttacctataaatcacacatgccaactcgttgattcagaacatcactagtatgtaatgtaaactctgtatatcagtatatgatgtgtgcatcctactggcttgtgtaactctaaagtaaataaatataacaccattatcacccatacttacagtgattc

SEQ ID NO: 5994 - DNA, 586 bp, Oryza sativa
  ref <308>: DATABASE ACCESSION NUMBER: AK063154
  ref <309>: DATABASE ENTRY DATE: 2001-12-06
acacacctgttcgatctgcctctgcatgatgtgcaaatctgcatcatcccatccaccgggctagcagccatggctctggtcaagctctctctctctgcctccctggcctggcctcctgcttttctagtggtccgccattgcttgctgcagaaaggtccaatcatcacaaaacttttcttattctacctttctatttttttttcttttaatttctttgtcaatgcatttccttcaatcctccctatgaatgagcaagttaacaaaaccagtcggttttcgtgaaactgttggttgtcaattcgtggaaatcgattagttttagctggtttcgtgcaatgttaatagaaagtcatcgttttttacctgtttttagttggttttgataaaccggaagggagcggttttcactttggaaactgaaaggtaaaccctggataggagtactaacttgttgtataatcagcattttgtggacacgcgccttttcttcaagtacaccaacaattgagagtgtttcctaggctttatcctcagtttgaattatttttatatgctgtttgtagtaatattattgcatttgttgaac

SEQ ID NO: 5995 - DNA, 657 bp, Oryza sativa
  ref <308>: DATABASE ACCESSION NUMBER: AK063155
  ref <309>: DATABASE ENTRY DATE: 2001-12-06
taaggtagtagctgtgaatagccatcgactacccggaaagggtagaagaatgggccctattctaggacatacaatgcattacagacgtatgatcattacccttcaaccgggttattctattccacttctagatagagaaaaaaactaaaggagaatacttaataatatggcgaaacatttatacaaaacacctatcccgagcacacgcaagggaaccatagataggcaagtgaaatccaatccacgaaataatttgatccatggacggcaccgttgtggtaaaggtcgtaattccagaggaatcattaccgcaaggcatagagggggaggtcataagcgcctataccgtaaaatcgattttcgacggaatcaaaaagacatatctggtagaatcgtaaccatagaatacgaccctaatcgaaatgcgtacatttgtctcatacactatggggatggtgagaagggatatattttacatcccagaggggctataattggagatactattgtttctggtacaaaagttcctatatcaatgggaaatgccctacctttgaccgatatgcccttaggcacggccatacataacatagaaatcacacgtggaaggggtgggcaattagctagagcagcaggtgctgtagcgaaactgattgc

SEQ ID NO: 5996 - DNA, 815 bp, Oryza sativa
  ref <308>: DATABASE ACCESSION NUMBER: AK063156
  ref <309>: DATABASE ENTRY DATE: 2001-12-06
ctgctctgccctctcttcttcttcctcctctctctcactctgcttatcttagcttcttcttcttcttcaattcaatggatatgcacgctgccgacgcgaggcggccggcgcacgaggcggcgctcagggcggtgcagaagccgccggccaagccgtggcgagcctctccgtcggcggcgccaggccccgcgccgcccaaggtgtaccgcgtcgagcccagggagttcagggacctcgtgcagaggctcacgggcgcccccgcgccgccgccgccaaggcagcccgtggcgccggcgcagcccgtgcccgtgcgccccgccgtcgacgaggcccagctgtacgcgccatggttcggcttccccatgcccatggccgcctccctcgacgccgcccacggcgccctcatctgaaccgcccgccacggctgccatggcctaagctacatagctcgccggcgcaaagggaaaaaaaattagtttagttttgctgttcaatatcgatcgatcgggacaagttagtgtaatcaagtgtaagatggtgatgcatggcttgattgttcgtgttcagtagcctatacaaatgtataatttcatacaggatagcagtacagtcaggttagtaccactagttgttcttcctgtaattgcaataataacaattgtagatcgaagaagcaccaacactttactgattttctagctgcctgagcaagcaacgaacacactcgctgtcagagtgtttgtggctttgtgcttatgatgaacactgaacatatattggtctgcattagtaatgaataaaactgtagcatgtct

SEQ ID NO: 5997 - DNA, 931 bp, Oryza sativa
  ref <308>: DATABASE ACCESSION NUMBER: AK063157
  ref <309>: DATABASE ENTRY DATE: 2001-12-06
gatgtttgtcattcatcaaataatgatcctcaaagtacagaccctcttacctttgaagtctccacatcagatggagttggttccaagtctgagatgcccacaactgatgaactgatcagagtacttgaggctgttaagttaggctatatattgcctcgtttcaatggtttggattctatgcatgattgggccagcgttctctctctgggggagcaacagcgtcttgcatttgctcggttgttacttgcaaaaccaactttagtcctccttgatgagtccacaagtgcactagatgatatgaatgagcgtcatctatacagtcagattgaggctgcagggattacttacataagcattggtcaccggaaaacactgcacaagttccacaacaaggtcttgtacatttcaaattccgattcaacggatagcaacccacgtaattggtacctaaagcccacagaacagatgtcgattgaagagtcatcctcatttgcttcataagaatttcatgatttgagcaacatttgcccctgagcagttttgtcgcaagatttcacccatacgtgaagtgtatggtgcccagccaagtacccaaaatatgtcatgctgattgttctaaagatgtgatgcttgagtagttgagttgtatgaccaaaattgctagtatgctacaaaccaactcgaggcgtggcacagattttagcacctaaaggttgaaagggaagctcatctgttcttggatcgttataccacgaagttcagaatgaacatcatatgtagatatgcagtcctctgatctttttgagtttcttttagaaatgacgacggaatatctgaaactgtctctttgttattacgtgtgtggtgtgtccttgtaactatactgggaattacagctcttatatacatgcagtgtgtgcagactccgacc

SEQ ID NO: 5998 - DNA, 1695 bp, Oryza sativa
  ref <308>: DATABASE ACCESSION NUMBER: AK063158
  ref <309>: DATABASE ENTRY DATE: 2001-12-06
tctcgctcgctccgctcttcttgacaaggaagcaaaagccgccgccgccgacgccgacgagagaggagagagagatcgccgccgacgtcgcaggagggggagggggagatggcggcggagggggaggacgcggcggccgcgcgacgccgcgcggcggccaccgactacaggaagaagctcctcacctgcagggagctcgaggcgcgcgcccgcacggcaagggacaacctgaaaaatgcaaagaaagattttgggaaaaccgaggatgacttgaagtcattgcaaagtgtaggccaaataattggtgaagtacttcgaccattggatagtgaacgattcatcgtcaaagccagcagtgggccccgctatgttgttggctgccgaagtaaagttgacaaagaaaagttgattgctggaacgagggttgttcttgacatgacaacccttaccatcatgcgcacactgccacgagaggttgatccagtggtatataacatgctacatgaagaccctggcaacgtcagttactcagctgtgggtggattgtcggatcaaataagggaacttagggagtccattgaacttcccctgatgaatccaaaattgtttcttcgtgtagggattaaaccgccaaagggtgttctgctctatggtccacctggaactgggaagacactacttgctagagctattgccagtaacattgatgcaaactttttaaagattgtgtcaagtgctatcattgacaagtacataggtgaaagtgcacgtctcataagagagatgttttcctatgcacgggagcatcaaccatgcatcattttcatggatgaaattgatgccatcggtggccgaaggttcagtgaaggaaccagtgctgaccgggaaattcagagaacactaatggagctcttaaaccagttagatggatttgatgagcttggaaaggtaaaaatgatcatggcgactaatcgtcctgatgttttggaccctgcactccttcgtcctgggcggttggacaggaagattgaaattccactgccaaatgagcagtcgaggatggaagtcctcaaaattcacgcagctggtattgctaaacatggtgaaatcgattatgaagctgtcgtgaagctagctgaaggcttcaatggtgccgatctgcgcaatgtctgcactgaggctggcatggctgctattcgagcagagcgcgactatgtcattcatgaagatttcatgaaggcggtgcgcaagctgaacgacgccaagaagctcgagtctagtgcgcactacagcgcggactttggcaaggaatgaggctgatttggtgatgtgctgacttctttttttttctccatgggggaggaactgtcatgctgatcctactcctcacttgcaaaaatcctgcgatgatgatgatatacacgccaaattgaattagaaactgatccctctgaggtcaacctgacaaggagttgtgatcctgtcttctatttattgtacttcttgtaactttgggcatactcctatatgggatgattaattcgatttcatttattcccacaagcggctctgttcttcacgaatgattggacagattatggacgattgcttatcataaacctacaaataggttaaaacaaagttctaagcaatattgatgttgaatttattttcaagaaagttaagtcgtatctg

SEQ ID NO: 5999 - DNA, 1551 bp, Oryza sativa
  ref <308>: DATABASE ACCESSION NUMBER: AK063159
  ref <309>: DATABASE ENTRY DATE: 2001-12-06
cgcaattgttgaatatgtcttcagtggccaccgtttcaaactaacaattcctaaggagacttgcagcattgccttctctttctctggtgttagatgccctggtaaagatgagccctactcgaacgaagctattgctttgatgaggaggagaattctacagcgagatgtggagatagaggttgaagcagttgatagaactgggacattcttaggttccttatgggagtccaaaaccaacatggcttctgttcttctggaggctggtctggccaagcttagttcatttggcttggataggattccggatgcaaatgttctaatgagggctgaacagtctgcaaagcagcagaaactcaagatctgggagaattatgtagagggtgaagaagtttccaatggatctgcatctgaatccaaacaaaaggaaattctcaaggttgttgtaactgaagtccttggtggtggaaagttctatgtccaaacagttggtgaccatagagtggcttccattcaacaacagcttgcatctttaaaacttaaagatgcacctgttattggtgcttttaatcctgtgaagggggaaatagttcttgctcagtttagtgctgacaactcctggaatagagcaatgattgtgaatggacctcgaggagctgtatcatctcaagacgacaagtttgaagtattctacattgactatggcaaccaagaagtcgttccttacagtcgcatacggcctgctgacccatcaatttcctcttcgcctgctcttgctcagttgtgcagccttgccttcataaaagtgcccaacctagaagatgattttggccatgaagcagcagtctatctgaatgattgcttgctcaacagccaaaaacaatacagggcaatgattgaagagcgtgatacttctggtggaaagtccaagggacaaggcactggaactattctgattgttacactggttgacgcagagacagaaaccagcatcaatgctaccatgcttgaggaagggcttgctcggcttgaaagaagcaagagatgggatactagggagagaaaggctgctctccagaatctggaacagttccaggagaaagcaaagaaggaaaggctgcagatctggcagtatggtgatgttgaatctgacgaggaagagcaagctccagcggctaggagaactggagggcgtcggtagatgagagaaggctgctcaagacagcaatggcgtcggtaagctatcatcaagttttggacaccgggtcagactctaccgggagctttagatgaaaaacatagagaaagaaaatgaggattaccttatttatgcagttagaacagaacttagcgaggcgaaacttccttagtttgagcactgttgcttgatgctgaactattattccgttttacaccgtaatgttgaggttaagatacattgtttttcccctaaacttaataatgtcgtgtacttggtgcactgcagttctttgtagacacaacataataccgagagcgcagtcaattaaaattcaggattgaacttaaagaggt

SEQ ID NO: 6000 - DNA, 1879 bp, Oryza sativa
  ref <308>: DATABASE ACCESSION NUMBER: AK063160
  ref <309>: DATABASE ENTRY DATE: 2001-12-06
aagcgcaacgcatccgcctctgcctcatcctctcctccacttgctggtcgctgccattgcctgcgcctccactccacttctcgcggctcgagaggctgacggcggggcgcctcgaatttcgccctctccgacgagcggaggcggaggagggagcccaggaagaggatgcgaaagcagtgaagagaggaggagaagaggggggaacggaaatctcagctgctgcgtcagtctcgcagatctgctccgttgagctgctgtttcacggaatcaccatgggtggaaatcatcgccatgggtggtaggattggttgggtgtcgccgatcttctcgcttcacgccaactaatcgagtgaattgtgggaagaagaagaagaagaagaagccgagtagacgacggcaatggcgtcgtgggagaacctcggggatgtggcgaccgtcgtgcagctgacggggctcgacgcggtgcggctcatctccatgatcgtgaaggcggcgtcgacggcgcggctgcacaagcgcaactgccgccggttcgcgcagcatctgaagctcatcggcggcctgctggagcagctgcgggtgtcggagctcaagaagtacccggagacgcgggagccgctggagcagctcgaggacgcgctccgccgcgcctacctgctcgtccactcctgccaggaccgctcctacctctacctcctcgccatgggctggaacatcgtgtaccagttccgcaaggcgcagaacgagatcgacaactacctccgcctcgtcccgctcatcaccctcgtcgacaacgcccgcgtcagggagcggatggaatacattgaaagggatcaatgtgaatattcttttgatgatgaagacaaggaggttcaagatgctctgttaaaccctgatccaagtacaaatcctacggtagtgctcaagaagactctgtcatgctcttatccaaacttgccatttaacgaagcgcttcgaaaggaaagtgagaagctccaagtagaacttcaaagatcacaaagcaacatggatatgggccaatgtgaggttattcaacacctcctaggagtgactaaaactgtggcaagttcgattccagagaaatgtgccactcctaaggtttctgaaaaagctgactctaatcacacaaaagtcagtgaagatagtgcaaaaacatatcatgatgactctccaaagaagcaaaaggatgcctgcactgcaccacgaagttctccgccatcttcttatggccatgatctggtctcaagcagaggatcatacagcgacgagtggcatgcagatttgcttggttgctgttcagagccatctttgtgtttgagaacattctttttcccctgtggaacattctcaaagattgcttcaattgcgaagaacaggcccatgtcatcgtcggaagcatgcaatgatattatggcatattccctgatattatcctgctgttgttacacttgctgtgtgaggagaaagcttcgtcaaaagctaaatattgcgggaggttgcattgatgatttcctatcacatttgatgtgttgttgctgtgcgcttgttcaagaatggcggaaagttgagattcgtggagcttatggagagaggactaagattagcccaccctcatttcagtacatggaacactaagcagcgatgcaaggcttgagcttctgtgaagataatgacctaaaggctagagcaacccggtatcgtactacaatagtaatgatgacacagctacaacattgttgtatttatgcttaccctgcattgtttgtgttggtactctgtttatagtaacatcagttggtgttgggcacagtatgttgtatgtagtactttgtaagaaaaaacacaagttacatgccct

SEQ ID NO: 6001 - DNA, 786 bp, Oryza sativa
  ref <308>: DATABASE ACCESSION NUMBER: AK104954
  ref <309>: DATABASE ENTRY DATE: 2002-08-28
ctagccccccaagcagccgcaccctcactccctcctctctcctctcctcccccccacggcggcggcggcggcggcggcggcaggatggcggattcgacggcgaggacggtgaaggacgtgaaccctcatgagttcgtcaaggcctactccgcccacctcaagcgctccggcaagatggagctccctgagtgggttgacatcgtgaagactgcgaggttcaaggagctccctccttatgatccggactggtactacacgagggctgcctcgattgcaaggaagatctacctgaggcagggtattggtgtaggtggcttccagaagatctatggtggccgccagaggaatggctcacgtcccccgcacttctgcaagagcagcggcgctatctcacgcaacatccttcagcagctgcagaagatgggcatcatcgatgtcgaccccaagggcggaagactcatcacctcccagggaaggcgtgatctggaccaagtggccggaagagttgatgttaccatcgcctgaacagatccatggatcttcaacccttactgcctctcatatgtttggtggttgagtcggctacagtttgtttgcagttttgaattagaacatgccctatctttggttgagtcggctatagtttgtttgcagttttgaattagaacatgccctatctttgctggctcagagaattggaagttggatgcatctaggtatgatactgcagtatgtgttttgtcttttcctgaatgaactcctaatgcactgtcactagttccggac

SEQ ID NO: 6002 - DNA, 1434 bp, Oryza sativa
  ref <308>: DATABASE ACCESSION NUMBER: AK063161
  ref <309>: DATABASE ENTRY DATE: 2001-12-06
atcggtggatacgaatttccgcggctttgtgttagagtttttggtgatacaagaaacgtgttcttggccatggaggtgaggtcggagcaagggctaatggcggggagggatctgttcggcatgccgaagagcccgccggcggcggccgcggcgccgccgcagagcgtgcgcatggcgtacacctcggacggcaccccggtgttcgccccggtgagcgccgcggtctcggcgccgccgggttaccagccgggtggcgccgccggtggcaatggcgcggcggcgctggcggactccggcggggagcccgtggccaagaagaagcgcgggcggccgaggaagtacggccccgacgggtccatgtcgctggggttggtgacctcgccgacggccgccgcgtcgacgccggtggcgcagggcgtcccagggccgttctcgccgacgcagccgaagccgccggcgagcttcttgtcgtcggggtggccggacggggtgaagaagcgtggccggcccaagggttctaccaacaagccgcgcatcgacgccgtcggatcggcgggagttggatttacaccacacgttattacagttctagctggagaggatgtgtctgcaaagattatgtcgtttgctcagcatggaaatcgtgcggtttgtgttctttcagcaaatggtgccacatcaaatgtaacacttcgccaaactgctacttcaggtggaacagtgacatatgagggccgattcgagatactatcgctgtctggctctttccttctaaccgaccatggaggccagcgtagtcgaactgggggactcagtgtttcactggctggtcctgatggtcgtctgttgggaggcggtgttgccggacttctcatagcagctactccagtccagattgtggttggaagcttcaattctgaagggaaaaaggagccaaagcagcatgctcattcagaacccgcatccgcgccatcgaaagccgtgccgacggccgggatgggacccaacagcccaccttcaagaggcacattgagtgaatcctcaggtggagctggaagcccattgcatccaggcattgctcctcccagcagcaacagccagccgccattcttgtctagcatgccatggaaatgaaatgagaccttttcatccttcaccaaacctggactctgaatctctgatagactttgtcgatgaactgcatcttctgccagaaagtagtagcaaccgttgccacacgttttctctaactagctcctatgatgtagtgtaaatctgaagtttaattaggggagaatttgtagctggtaagtgtagctgtcgtgtaggtttcaccctggatttattatgtattaggtaggtagtgatatcttgagagacgtatgatcatgttatcctaatgtcctatatgcaatgttatcaaagattattgtt

SEQ ID NO: 6003 - DNA, 1334 bp, Oryza sativa
  ref <308>: DATABASE ACCESSION NUMBER: AK104955
  ref <309>: DATABASE ENTRY DATE: 2002-08-28
attcccggccattccaatccactcccaccaccaagcgcgagctcgattatttttttaatcgattttctccgatttaatccgtagaaaattccccactcctcctcctcctccaccgccgccgccgacgccgcactcctcactccgcagaagcaacaccaacgccgcactccaacgccaaccgcctccgcgcgcggcccgtcgccatcgtcgagcaccttcacgcttcctcctcccccgcacggaacggagacccctagcgccgctataagagggagagaggtgggcgggactcatggcgcccgcggcagcgtcgctcacggcccccaacgcactcgcggcgacgtcgttgcccttcttgcacggaaggaagagcggcggcggcggcgtgtccgtgcacgccggggcgccttcgccttcgcgggcggtggcggtggtggcgcggaggttgtgggggagcgctagcagtagcaggaggatggtggtggcggcggcgacggcggcggagatggcgcccgcggcgagcggggaggaagggaagccgttcgtggaggagatgagggcggtggccatgcggctgcacaccaaggaccaggccaaggaaggggagaaggagccgcaggcgccgccggtggccaggtgggagccctccgtggacggctacctccgcttcctcgtcgacagcaagctcgtcttcgagacgctcgagaccatcgtcgaccgcgccgccgtcccctggtatgctgagttcaggaatactgggttggagagatcagaacaactgaagaaggatctggaatggttcaaggaacagggtcacacaattccagaaccatctgctcccggcactacatatgcttcctatctggaagagctggctgaaaaggactcccaagcttttatctgccatttctataatgtgtattttgctcatacggctggaggccgaatgattgggaagaaggtctctgagaatattctgaacaagaaggagctggagttctacaaatgggagggcaatctgtcccagctgctgcagaatgtccgcaacaagcttaacgaagtcgcctctagctggacccgggaggagaaggaccattgcctggatgaaacggagaagtcgttctcgtattctggagatctcctccgtcacatattcacctaagcttaattgatcacggtgtctgctatcaagtcttgataaacgctgtaaatactaaagttcacgtcagtcagacagactgttactggacactgggcagaggtcatttacttactcaaccagttggccttgcctcccatcaaattgccaaattctaataatccttcggtgtgcc

SEQ ID NO: 6004 - DNA, 878 bp, Oryza sativa
  ref <308>: DATABASE ACCESSION NUMBER: AK063162
  ref <309>: DATABASE ENTRY DATE: 2001-12-06
gtgctctattgttgtgaagagttctgctctcctgtcaatatggatctttgttattcctgtgttgattggactcctgtttgagttactggtcattgtacccatgagggtgcctattgacgagagtccggttttcctgttgtatcaggattgggctcttggattaatattcttaaaaatatggactaggctggttatgttggatcaaatggcacctttggttgatgaaagctggaggacgaagtttgagagggttagagaggatggcttctcccgtttgagaggtctatgggtcctgcatgaaatcataatgcctattgtcaccaagctccttacagctctctgcgttccatatgttcttgcaaggggtgtcttcccagtgcttggttacccactcattgtgaactcagcggtctaccgtttcgcgtggcttggctgcctgatattcagcgcgctgttcttctgtggcaagagattccatgtttggttcaccaatctccacaattccattagggatgaccgttatctgattgggcggaggctgcacaactttggtgaggactcactccattcaagtgaacctggaacaactacagcgtctgacgatgatgaacacgagcaagcactcattcctcgcgatcaggaaggagagttggggctgaggttcaggcgccatatcatgcgtggaaaccaaccgagaatggctgcataagcagggacgagtttttggacaaagcaaggggcatatgcacgatctgacttctgccctggagcttctgcttgtgattagtaatccgcattgtagagtgaaatgagtccgtcagttagtgataggaaaagtaaggattgttgtacaacaaagtccaagggaagaacagctc

SEQ ID NO: 6005 - DNA, 2669 bp, Oryza sativa
  ref <308>: DATABASE ACCESSION NUMBER: AK063163
  ref <309>: DATABASE ENTRY DATE: 2001-12-06
taggagggcgcggcggccgccgcaaaacccggggcgcgagcccgggcggagcggccgtcggtgcagatcttggtggtagtagcaaatattcaaatgagaactttgaaggccgaagaggagaaaggttccatgtgaacggcacttgcacatgggtaagccgatcctaagggacggggtaaccccggcagagagcgcgaccacgcgcgtgccccgaaagggaatcgggttaagatttcccgagccgggacgtggcggttgacggcgacgttaggaagtccggagacgccggcgggggcctcgggaagagttatcttttctgcttaacggcccgccaaccctggaaacggttcagccggaggtagggtccagcggccggaagagcaccgcacgtcgcgcggtgtccggtgcgcccccggcggcccttgaaaatccggaggaccgagtaccgtccacgcccggtcgtactcataaccgcatcaggtctccaaggtgaacagcctctggccaatggaacaatgtaggcaagggaagtcggcaaaacggatccgtaacttcgggaaaaggattggctctgagggctgggctcgggggtcccggccccgaacccgtcggctgccggcggactgctcgagctgctcgcgcggcgagagcgggccgccgcgtgccggccgggggacggaccgggaacggccccctcgggggccttccccgggcgtcgaacagccgactcagaactggtacggacaaggggaatccgactgtttaattaaaacaaagcattgcgatggtcctcgcggatgctgacgcaatgtgatttctgcccagtgctctgaatgtcaaagtgaagaaattcaaccaagcgcgggtaaacggcgggagtaactatgactctcttaaggtagccaaatgcctcgtcatctaattagtgacgcgcatgaatggattaacgagattcccactgtccctgtctactatccagcgaaaccacagccaagggaacgggcttggcggaatcagcggggaaagaagaccctgttgagcttgactctagtccgactttgtgaaatgacttgagaggtgtaggataagtgggagccctcgggcgcaagtgaaataccactacttttaacgttattttacttattccgtgagtcggaagcggggcctggcccctccttttggctctaaggcccgagtccctcgggccgatccgggcggaagacattgtcaggtggggtgtttggctggggcggcacatctgttaaaagataacgcaggtgtcctaagatgagctcaacgagaacagaaatctcgtgtggaacaaaagggtaaaagctcgtttgattctgatttccagtacgaatacgaaccgtgaaagcgtggcctatcgatcctttagaccttcggagtttgaagctagaggtgtcagaaaagttaccacagggataactggcttgtggcagccaagcgttcatagcgacgttgctttttgatccttcgatgtcggctcttcctatcattgtgaagcagaattcaccaagtgttggattgttcacccaccaatagggaacgtgagctgggattagaccgtcgtgagacaggttagttttaccctactgatgaccgtgccgcgatagtaattcaacctagtacgagaggaaccgttgattcacacaattggtcatcgcgcttggttgaaaagccagtggcgcgaagttaccgtgtgccggattatgactgaacgcctctaagtcagaatccaagctagcaagcggcgcctgcgcccgccgcccgccccgacccgcagccgttccaggacggcgtgtacaacaactcgcaacacccgcgcccgccgcacaggaggcacgcctccgagctcggcgccggcgccggcgcgccccgcgagcccctggtgtccctggcgccccaacgcggccagtacagggacccgccctacaggagggaccccgcggcctacagagacatcaacgccggcgcggcgcaacggcggcagccggacggcgccggcgcgagaccgtacgagagctcggaccacgtccacccgccgtacgctcggatcgtgtcggcgctggaacgcagcaacgagcacatcgcgcggcacgaggaggtgcgcaggatcggcaccggcgagcgggtgctccaggagagggtgtacggcgccggcggcgcgccggggcgcgcgccgctgaaccaggagcaggggaggctcaactcggtgcgcacccgaagatgaggtggtgtcttccggtcgttggttttggcgcggcgcagcgcattggtcagtcagctcaactgttgaattccggtgcaggagaactgggggccgttgcttttttgctggcaaaccggaggttcgtcgcgcgggatccctggagatacagggaaagggatcccctggcttaacagctgtgcagttgagtcatgtcagtgactcaactgcatgtgcagttaaattagaggatctgctttcgagatacagatatgatattctgcctctgggaaatcaaatgtgtataattaaaatggattgcgctagaaacgaaagagaatgtacaaattacagaggtgatatattccctttttttttgttgtcctgtacaaaggagttgtaatcaccgttttgcgaaaggagacgggttaactgagtc

SEQ ID NO: 6006 - DNA, 1274 bp, Oryza sativa
  ref <308>: DATABASE ACCESSION NUMBER: AK063164
  ref <309>: DATABASE ENTRY DATE: 2001-12-06
atccacacattttctccaccgcgaaaaaaaatgccttgggcgacgccgctcttgcgacggcggcggaggacccgaccccctcgggcgaggcggcgctggacggcggctcagcaatacgtggcggcggcggtggtgcggaggcgaagcggcgaggtggtgcggcggcgcgtggcggcgacggctcagcggtgcgtggcagcggcggcggcggtgcggaggtgaagcggcgaggtggtgcggcggcgcgtggctgcgagcggcggcggcagtacccccatcctcctcccccttctttctcccctcctctcccttctcttatttctcaatccggtttttcttgaagtggcagcggcgtggagttctcaacggcgcgcggcggtgctgcggtgcggcggctcgacgcagcggtgaggaggcgaggaggaggtgaacggcggcgccgcggcctccatccccgaccgccgggggccacctccatcccccaactgacgggtgccacctccgaccgcctggcgctagatccatcctccacaaggtcaggggacgcggatccggccaccggggcgtcgtctcctccgtccgccggctgcgtccccaactgacgagtgcagaactgcagattcccccgtcggctgcttccgggtgcagaaggcgaagagggcggcgtcgaggagcagtaatagggacgaggtcatccgcaaggaggaggagcaaggtcgcctccaggccgagctcaagaaggtctagcgcgccaaggagttcaagcccaccgtggtatgaagaagccctgcccggcaaaacccacaaccatttattcccttcgtttttgttgctcgtcaggtgattgacgaattgcttgcttgccatggctgttttatgtgtgatgaaatgttcgtgaagacttttctgtgtgatgaaatgttgtgtgtgatgaatgcgatggcaactacccagaagcactttttttttgttttttttttatcaaaatctacatcagtgacggatgttgagctgtggttgtggctcttttttccttttttttttgggtgatttttctcatctgtgacgggtcacatgatacaacccgtcaaaggtgtctgtcacctctgacggagctacacccgtcaaaggtgagttaagtcatcagtgaccattgatctgtgacgagggggtctatccgtcacagaagagggtttgagcccgtcactgctagcttgttctgctgtagtgacaacttctgcttgaaatgtttccataggttgattcaaaatggt

SEQ ID NO: 6007 - DNA, 1234 bp, Oryza sativa
  ref <308>: DATABASE ACCESSION NUMBER: AK063165
  ref <309>: DATABASE ENTRY DATE: 2001-12-06
ttgcatttcatttcatgcagagctagctagccatgcatgtattatttgacttgaacgaaattcgatcaaataataataaatcacaattcatcgaggagatcatcatcaccggcggcggcggatttgtctttggagcagaccctggcctccttgaaaagcttccccgggcggcagaagtagccgagctccggcgcgcagtgggagtcgtcggagcagacgcagaggccttcaatggcgcagcgcttgtcgacgatgttggggctcccgctgatgcccagcacctggtcgctccactcgctggagaagatgccgtcggggtcgtatctctccttcaccttgatgaactcgccggagttggggtacttggcggcggcgccgtcgaaggcgaagttacggttcttcccccagtgcgggacggcgccgtacttgcgcagcgccatctgctccagctcgtcgaacacgtcggagtgcgggcgcggctcgccgtcgtcgtagctccggtagtaggtgacgtcgaagtcgacgcagtcctccggcttgccgaggtaggcggagctcgccttgacgtagcgcatgaggatgccgagcttggcgtcgatgtcgcagaaggcccgcgggttgaggtcgcgcagccgcatcatgtcggcgacgaacgccgccgccctgggcagcgcgatgctgaagccggagttgtacaagaagggcccccggatccgtgggtcccaggtgcaggaggagaggaggccgtcctccggcgagctgatgcacgtccccgacgcctggatccggtgctggaacccgaccaccggccagccggtgaagaagacgccgtcgttggtgaagccgtaggcctggagctcgaacagcgacggcggcagccgcgccgcgaggcagcgggcgatgtcggtgccgttcctctccagccgctcctcggcggccctggcggtgatgaggcccagcgtcggctgcgcgcggaagccgaggtagtcgttgaggccgttccccggcgtggccacgtcgacgcggtcgtcctcccggtagatcaccttcccctgccgcggcagccacgccatgtcgccgaactcgtgcgcgccgccccacaccgccaccttctccgcgaagtccgagtcgtcccgcgtcacgaacctcaccgacctcttgaactgcggctgcaactcgaatgtcacctgcaaaatcacatcaaatgaatttcatgtcaaattgatcatgttct

SEQ ID NO: 6008 - DNA, 1044 bp, Oryza sativa
  ref <308>: DATABASE ACCESSION NUMBER: AK063166
  ref <309>: DATABASE ENTRY DATE: 2001-12-06
acagtgcgctccacaggccggcgaggtcggggaggtgggtgcacagtgccctgcgagatggcggcgaccgcgctgctgcggcgcgcccggtgggcgctggtcgaccaccccgccgtcgcctccttccggtgggagcccggccgcacgcccgcctcgaccccgtccttcgccgccgccgtcatctgcgcctacctcgccacggtgttcctcctccaccgccgcgtggtcccgctcccgtcgccgcacccgcgcgcgctccgtgcggtctccgcgctccacagcgcggtcctcctggcgctctccgccgccatggccgccgggtgcgtgctctccgtggccgccacggcgccctccgcgtggtgggccttctgcttccctcccggcggcgccacggcggcgtcgggcccggtcttcttctgggcgcacgtgttctacctctccaaggtgtacgagctcggcgacacgctgctcatcctcctcggccgccgcccgctgacgctgctccacgtctaccaccacgccgccgtcatcgccatgtgctacctctggctcgccacgaggcagtcgctgatgcccatcgcgctcgccaccaacgccgccgtgcacgtcgccatgtacggctactacctctgctgcagcctcggcctccggtggccgccgcggtggaagcgcgccgtcacggagctgcagatcgcgcagttcctcttcagcttcgcggcgtcggcggtgatgctgtggcggcacttcgccgccggcgggtgcgaggggatggccgggtgggcgttcaacgccgtcttcaacgcgtcgctgctcgcgctcttcctcgacttccacggcgccgcctacgccgccgccaagggcaagaagagcagaagcgaggtggttaaagaagagtaatgaggtgattaataatcagaatgcaagaaatgtgataatctgtgggtctccgttttcctctaatttattggtttcctttttttttacatcatgatttcattgtgttaccaaacaagacgttattgtgcgataatcttgcttgtcatc

SEQ ID NO: 6009 - DNA, 958 bp, Oryza sativa
  ref <308>: DATABASE ACCESSION NUMBER: AK063167
  ref <309>: DATABASE ENTRY DATE: 2001-12-06
ttgctggatggtttggacgatcggtttaccatattaagcattttaactggtgccaacgtggtgatggaatctgccatgtatgatgttcctaattaatcaataccggcaaaatggcaaaatcaaaccgaaccaagcacttgttgtattcttaactacaatctgtgcatattctgatgaaaaaagtgagattgaggaactctccatggttgcgctatctggatgcatttggttgcaggcttttgttgtgacactggacacaaactcattcacttatccgcaaatcattctcatatggggaaactttatcgccttctacatgatcaacttaatagtcagtgcggtaccaacactccaaatgtatactataatgttccgcctgtgtagccaaccttcgtactggataaccatgggtctgattgttgcggtaggaatgggcccggtgctggctttgagatacttcaggaacatgtttcgacctaatgccatcaacatacttcagcaaatcgagcaatccaatggacatacccataccaccagaaatatggagtcacggatcatatctgctggcagttatctcacccatttactagccgattcgcgtcgcaacaggggcgctacctatcagcctcttctttcagattctgtagcatctgacggatgatctgctgcacctatcagcatcagaccttggcagcttgcgttaactgtatctcttaccagtgcaatatgctagcatgcacacccatagtctctaacagcaataggatttactgatcacacaaaattctgagagtcaaagcacagaagaaagtttcgcaggttcattgcaaaaatgctgcaatgcctggaattcaggaaaaaaaatacatgtgttccaaattatcccagatgtatagttttgctgttaaaacagaagtatatatggctgttttggtttgatggcaattattgccctacc

SEQ ID NO: 6010 - DNA, 1273 bp, Oryza sativa
  ref <308>: DATABASE ACCESSION NUMBER: AK063168
  ref <309>: DATABASE ENTRY DATE: 2001-12-06
ctctccgcgcaagatttctgcacctgctcctccaaatcctcgggcctgatggggagcagaggtggaagtggcggcgatggcgcagaaagccatggctatgccgcggacatccactccatcagggaggcgcaggctcgcatcgcaccatacgtgcacaagacgcccgttctgtcatcaacatcgatcgatgccatagtggggaagcagctgttcttcaagtgcgagtgcttccagaaggcaggggcgttcaagatccgaggcgcttccaattcgatatttgcgcttgatgatgatgaggcatccaagggcgttgtgacgcatagcagtgggaaccatgctgctgcagtggctcttgctgcaaagctacgcggaatacctgcttacattgtcattccaagaaatgcaccggcatgtaaggttgacaatgttaagcggtacggtggccatattatctggagtgatgtctccattgaatcaagagaatctgttgctaaaagagttcaggaggaaactggtgctattcttgttcacccattcaataataaaaacactatcagtggtcaaggtacagtgtctctcgaacttttggaggaagtccctgaaattgacacaataattgttccaatcagtggtggtggtttaatttctggtgtggcactggctgccaaggccataaacccttcaatacgtattctggcagcagaaccaaagggtgctgatgattctgcccagtccaaggctgctggaaagatcataacattgccttcaaccaacaccattgctgatggacttcgagcttttcttggtgacctgacatggccggtggtgcgcgacttggtggatgatatcattgttgtggatgacaatgccattgtggacgccatgaaaatgtgctacgagatgctgaaggtggctgttgagccgagtggagcaataggcctcgcagccgccctctctgacgagtttaagcaaagctctgcttggcatgagagcagtaagatagggatcattgtttctggaggcaatgttgacctcggtgtcctctgggagtctctctataaacgttgattggacagtccagtttgtaccactgatgaaatctgtacctgaatttgaatagacggggctagtagctgtaaaacctgtaaatccattggttccttacaggaaattgccttggctgctgaattactcgatgcaggaaattgcattgccattgacttcaatacttcagtctagagtgctgattgctgaactgctggacatctggacc

SEQ ID NO: 6011 - DNA, 1003 bp, Oryza sativa
  ref <308>: DATABASE ACCESSION NUMBER: AK063169
  ref <309>: DATABASE ENTRY DATE: 2001-12-06
aaaaaactcgtcgatcgatcgatcggagtgagccggtgaaacgggagaagaacacgagatgagccggaggagcggcgtggcgacgagccgccggaccaggcgggccgccgagcaggaggtgcagccgccgccgctgtttgccgcgaacccgatcttcctgtgcgaggacgacggctcggcggggcggctgatcaaaccgggcggcggcgtacgcggctacgggccgggctcgctgcacgcgctcgtgcgaggccgcggccgcggccgcgacgtggcggcggacgacgacgacgacgacggtggcaacaagatgctgccgttgccgctgccaccgtgcagggcccaccgcgaggggcgtggtgggacccgggttcccacggcgtggcacgttgggcccacgatcgtggtgggcccgcatggcgcggtggtgaggatccgtgcgccgccgccgcctcagcagcatgacccgttcctggccgcctacgtggcgtgcaccaagggccgcgccggcgccggcaacaagaagaagaagaagaaagccaaggcggccgcgcgcggcgggtgcggcatgtggaacgggtgggcgtcgggcgcgaggtacgcacgggtgatgtcgtgcaggcacggcggtgccgtaaccgtgctgcagggcgccactcctcttcccgccgtcgccggctatgccgagtcgccggcgcaccccacgctggacctgtcccgcctgccggcggtgctgccggggaggagacgggtgcacaactgaggacagatcgtgtactcgtacgtggccggtgcatgtgtacattgatactactgccatgacgtcgtgtgcaaagaattaagaaagtagtagtccatatttgcccaaatattgtcagtccaaaaatataatgggccgtatcagccctaaaagtaaaattttagcccaaacagtagtatgggccgggtcacaattgtcaaagctttacaacgcaataaaatctggatgtcaatgtcatatcat

SEQ ID NO: 6012 - DNA, 1347 bp, Oryza sativa
  ref <308>: DATABASE ACCESSION NUMBER: AK063170
  ref <309>: DATABASE ENTRY DATE: 2001-12-06
agcagctcatctcaacacgcgcgcacggggcggcatggcggtcgtcagcggcgggaagcgcgcgctcctcgtcggcgtgagctacaagggcgacaccagcagagagctgacgggcgcggccgaagacgtcaagaacatgaacagcctcctcaaaaaattcctcttccccgaggaatccatccacatgctcaccgaggagttgggcgccaaggacccgttgaaggcgccgacgagggagaacattatgaaggagatgcggtggctggtggaggggtgccgcgccggcgactcgctggtgttccacttctccggccacggccggcagaggaaggacgacaacggcgacgaggtggacggccgagacgaggagctctgcccagtggactacaaggtgagcggcaacatcttggacgacgacatcaacgatgccatcgtcaagccgctcacccaaggcgtgaagctgcacgccatcatcgacacctgccacagcggcaccatgctcgacctcccctacctctgccgctttaacagaatgggtctatgttcaagatacaagtgggttggccaaacgcgttggcgactatccccaaagaaagagtgggcgatggtccccgtaggcggccacgccatctccatcagcggctgcaaggactaccagaattctctagagccagacaacaccgccggcggcggcgtcatgacatggagcttcctggaggcagtgggatcgcggaggacgatgacgtatggggagctgctggactcgatgcgggcgaaggtacaccataggttgcagcaaagcagctccggcaagtgcctcgtaacgggctgcctcggctcgctcgccgccaagtgtctcccctgctgcttcctcagcgtgcaggagccgcagctctgttcgtcgaaggagttcaacgtctacgaggagcagtttatcctgtgaccgaccgcattgtcccgggcacaagctccattcagatgaaaacctctgctcctccagctccattctaattgcggatgctggatatcatacacgtaggctcgctttcttaaaataaaatttaaatattattgttcgtagaaaagagtatgatagtgtgatatcaaaatgtggacgaggaaaaaaaccgtgttctaagtatcgtgtattagcgaaggatatatgttgctctgttgctgcggccatggccatgcatgtgtgttcttacaaaaactcaagcgtgtgatcatatttataataaggtagcgcagagcgacggattggaactgaaattgtgtaattgagcgtgtactttgtattgtccaaatctgtttttataatttgtaagtttgttaagcttcggtcac

SEQ ID NO: 6013 - DNA, 773 bp, Oryza sativa
  ref <308>: DATABASE ACCESSION NUMBER: AK063171
  ref <309>: DATABASE ENTRY DATE: 2001-12-06
atactttgccactttgagtagttttgagactaaaatacccctactatggagagagaggaagggagagacgaacgacgtcggtcgtgctcgtcgccggtgggcagcgagcgtgcgggggtgggcggcgagaaggggaggaggactgcgccgccagggggacgacagtgccggctccatcgggggagggcgccgaagtggggaaggatgacggggggaggaggatggcgcggcgacggggacgacggtctgaggctccatcgccgtcgtctcttcctccaccctgtactcctcccccctgtcgtccccgccggctgccgccgccgctgtccgcgcgaggcatccggcgccgccagcccggccctccccagcgctcctccccctgcgtcgcctcctcatcctccccctacccccgccgctgccgcctcctggcgaacgcgcgggtaggctcgccgcgttcccgcgtcgtcgcctccaccgccgtcgcctcttcatccccccaccggccgccgccctatcctcctcccagccggccgctgccgccaccgcccggagaggcctccacgccgcccggccggccctcccctctccctctgttccctctctctctctaggggcattttgggcacaaaaatctctaaagtggcatttcatccggtaggcaacgtattgagtggcattttatccggtgcattgtattgagtggcattttatcccacccatcttatagagtggcatattgttcgttttctcaactaagttgtggcgttttgtgt

SEQ ID NO: 6014 - DNA, 600 bp, Oryza sativa
  ref <308>: DATABASE ACCESSION NUMBER: AK063172
  ref <309>: DATABASE ENTRY DATE: 2001-12-06
cttctggaaaagaggcaaaaaccgatcatttggattctattcagcatgttcttcgtgaaaatgtgaaaaataagaggatcttgataatacttgatgatgtatgggatgatgccttaaaggaaaatgggcagtgttggaagaagttttgttcacctttagcaaatgtatgccagggaagcatgatgttaattaccactagatcttccaaggtttctaatgcactcgggacattggaacccttcacagtgaattgtttgcagaatgatatcttttgggatttcttcaaattatgtgcatttgggtctgacagttcaaacaatgatcctgagttagagtgcattggcagaagcatacttcctaagttaaagggttcacctctagctgcgaaaactcttggacgcttgttaagaatggaccatcacacgacgcattggaaaaatgtacaaaagagtgaactgtgggagttgaaacaagaggagactgacattttgccagctcttcagttgagctacatgtacttacccttacatttgaagagatgcttctcattttgtgctgtgtacccaaaggattataattttgaaaaagatagtttatgtg

SEQ ID NO: 6015 - DNA, 546 bp, Oryza sativa
  ref <308>: DATABASE ACCESSION NUMBER: AK063173
  ref <309>: DATABASE ENTRY DATE: 2001-12-06
attctccaatttgcctcccacaagcacaacaagaaccacctcctctcctccaccatgaagttcgctgccgtcttcgttgccatcgctgcctacgtcgccaccaccgaggccgtcgcttgcgacgccggcgagaccctcaagctcgctggtctcgtgttcgagccgagccgcgcgcagtgcgagaaggactctggtttcacgttcatcccgccgccgggcccgcccacgtcggctcaggttgacaagatgtgcgcgagtgcggcttgccccaagacgatcgcggctctgcagaagctgaacccttcggactgcgacttgacgttctcgaacggcgtgacgctcaacgtgaagaagcttttggacacgctcacgcctgcgtgcggccgccgccagtaagcgtttgtggcgcttgcactgcgactcctgacacctccgcggtgtcgcaatttttaacgtatcgacgagctctactggggattagttggtgtttccgtcgtgaatgcgacgcgcggacaaatctctcaatacagtctgtttcttcctatt

SEQ ID NO: 6016 - DNA, 589 bp, Oryza sativa
  ref <308>: DATABASE ACCESSION NUMBER: AK063174
  ref <309>: DATABASE ENTRY DATE: 2001-12-06
aactagagtactagacttgctgataaaaaagcatacacctagtacgaatcatcagagtccataggcttaccttttgtgaccatttgctcgtcaagctccgtgctgatggagtgatggacggcgagatgatggagagagaagctcctcagttatcggttagacatttcgtcgaacgtattgtgcgcgcgccgtggcgtgcgttgaggccttccgccaccgcgcgcataggcaagcagaggggtgcgtggccgccgccggagatggagctcggagatgcgcgccgcctcttcggcggcccccggcggcgggcaggcatgaggcatcgcatcgagggacgagggcttgcgcagggtgagacggaggattttctacacgtggaggcgagccagcttgtgctgccatgcccacccatatgctggttggagacttggacgactaaatggcagacaatcatagcagaacactgacggaaaggccaaacccgttggttataaaccaattattaattgtgccaatttgaatgtcacgggtatttcgctgtgtcagttataaagcatattttaactatcgtccaatttaaaaggacacc

SEQ ID NO: 6017 - DNA, 490 bp, Oryza sativa
  ref <308>: DATABASE ACCESSION NUMBER: AK063175
  ref <309>: DATABASE ENTRY DATE: 2001-12-06
agtagcattaggccattagcatcgcaagctgccccctctccgtctccggtgcgatcgatggcgacgagagctcggccgccattggtgctattgctgtgtctctgcttggcttcttgcttgagctcggccattggtggcgtttcagctgccggcaatggctaccggaccacggcattcctggtggatgaggaagggaggcggctcagagccgagctcgccgcagtcgccggcgccggcggcgggtccacggcggcgtacggcgacgacgtgcagaggctagacgtgtatgccaggtgcgcgcagctccattttagcattttttaccgcaattgttcgatgagctagctagctttaattttagcttttctttccgagaattgctaagatcaattaattcttgagctctactcctagagggcagcagggagtaccagctaatcaccgttattttttttttataaaatatgatttctagaagagccaaaatgcc

SEQ ID NO: 6018 - DNA, 727 bp, Oryza sativa
  ref <308>: DATABASE ACCESSION NUMBER: AK063176
  ref <309>: DATABASE ENTRY DATE: 2001-12-06
tcttaaactgcagccttatgtgcaatcttcggtggcaaaaagagccaatcacaagctctccttccgttattttggtccttatcaaatcttgtccaaagtgggatcggtggcttataaattgcagttaccagcagatagcatggttcacccggtttttcatgtctcgcaattgaaaggaactcagaactttaagcactccattcagtctcaattgcccaacattacagatcatattcagtatcctgttcagatcttggatacaaggatacagaagaaaggtaacaaagttgtccgtcaaattcttgtttgctggtctaatttgcctgcagtggaagccacctgggaagatgaagaagagctcaagcagcgtttcccttctgcactgccttgggggcaagtcagtcttcaaggggtggggtttgtcagcagcaatactgcttccagggagttgccgttgtctgacgaagcacaggagaacacaattactaggccgctgaagcgagctactagaattaagaagtctaatgttcgtctgagtgggcctgaatgggcttgtaagtaatagctggctatggctctgtcgacagcctggctgggacccagcaaccagtgagagagagtgtgttgaatataaacaaaacttgtaagaacagaaaggtatctttggagatcaatcgaatggcggcgttggcggcggaggcgatgcgatctcgttgatcgtatcgat

SEQ ID NO: 6019 - DNA, 472 bp, Oryza sativa
  ref <308>: DATABASE ACCESSION NUMBER: AK063177
  ref <309>: DATABASE ENTRY DATE: 2001-12-06
gcttattacaacttaccaagagaatagaattacttcgtcggaacaatgacgaagggtactcaatcgttcggcaaacgtaattgcaaaactcatacattatgtcgtcgttgtggacgttcatcttaccatttacaacgtcagcgatgtgcagcatgcggttatccatcagctaaaacacgtaaatatcaatggagtgaaaaagctcgtcgtcgaaaaacaacaggcaccggtcgaatgagacatttgaaagttgtgtttcgtcgatttcgaaatggttttcgtgaaggtacattagcaaaatcacgtaaatcccaacgacaagcaacagcaactgcaacaacaactgcaccagctacgactaaatagagatgaagagaaaaatcattgattgtttttgttgtaaaccgtttggtaatacagctgaaaagaagaaaaaattccaataaaaaaaaaagcgagaaacaaaaaacag

SEQ ID NO: 6020 - DNA, 853 bp, Oryza sativa
  ref <308>: DATABASE ACCESSION NUMBER: AK063178
  ref <309>: DATABASE ENTRY DATE: 2001-12-06
aggcaacgagatacggcaccaataccaatctctgactcctccggcctccggcggccggcgagagagatcccaccctcaccgacgacggcgagcgaccaccatgtcctcctccaccttcagcggcgatgagaccgcccctttcttcggcttcctcggcgccgcctccgccctcgtattctcctgcatgggcgccgcctacggcaccgccaagagcggcgtgggcgtggcgtccatgggggtgatgcgcccggaactggtgatgaagtccatcgtccccgtcgtcatggccggagtgctcggtatctacggcctcatcatcgccgtcatcatctccaccggcatcaaccccaaggccaagccctacttcctcttcgacggttacgcccacctctcctccggtctcgcctgcggcctcgccggtctcgccgccggcatggccatcggcatcgtcggcgacgccggagtcagggccaatgcgcagcagccaaagttgttcgtgggcatgatcctcatccttatctttgcagaagctcttgctctgtatggcctgattgttggtatcatcctctcgtctcgtgcgggccaatctcgagcggattagagggttttggaagaacaagacacggttcaccattgtattctattccaagtgttaatttcttcttatagactgcttggtcttgtctgtgtttatactcattgtctgtattcaagctattgtgggttgttgtatttattatttgaatttttgaagtaataatcggtaccaggccgtccgagatgtgattaataatgaatgaataaataaataagcaaacaaacaagctagacttagttttaagtctgttctgat

SEQ ID NO: 6021 - DNA, 820 bp, Oryza sativa
  ref <308>: DATABASE ACCESSION NUMBER: AK063179
  ref <309>: DATABASE ENTRY DATE: 2001-12-06
tgatgttgcaaaatctcttaggtacatcagcacaacttggaagaacaaaactttcaaacctggggagcacagacctgtagtctatccagaagtacttctgtgtgtggaagtttatgagaagagatatggctctgtgaaaagccaggaatttctagtgttgggaagccagctccttacagatcttagagacaatatttactgtttcaaagacaagctgatgaatgtggcaaagcaacacgttcattctggttattttcttattgaggacacattctataatgacacaaggcgttctactgttgattatagtaaacctatacttgactggattaaaaattccagaaatgaggcggaagagaagtgggatgccattacttctggtgtgctgaagaaacgacaaaaggatttactgatgggtttgaatgtttcaaatgttcctgattttaaatctgcaaaaatggaaaagactcgcttttctgatctgaacttccgtctcggtgctgggtacctctactgtcatcagggaaactgcaaacacatgattgtgatcagggacatgaggttgatccacccggaggacacacagaaccaagcggaataccctctcatgacattccagatgcagaggcggctacagaagtgttcggtgtgccagatcttccatgccacgaagatgacggtggacgacaagtggactctgaacaatccctgttatttctgcgacaaatgctactacctcctccactacaaagaggacaactcactactttatcaccatactgtatatgattacctccaggagtaaagtactcttcgatgc

SEQ ID NO: 6022 - DNA, 957 bp, Oryza sativa
  ref <308>: DATABASE ACCESSION NUMBER: AK063180
  ref <309>: DATABASE ENTRY DATE: 2001-12-06
acccaagcctaccctcctcaaagaccaaatcctcctctcgaacaaccgccggagccaaccaccgccgccgcgccaccgcgcgccggagaatatggagctcctcgacatggtgcccgcggacgccatcgcgctccgcctctactccctcccggcggcggcggcggccgtcggctcgctctgggcgtggctcgtcgccgccctcgccgccgccgtcggcctgtggcgcatccgcgccgccgccggtgtccgtagcgccctcgtggacgacgacgactacaagcagcgcaaggcgaagcagccgcgcggtgctctgcggcctgccggcgtcggcgaggcacggccggctcgcgccgaggcggcggagtcggaggcgacgacgccgacctccccgagcgagccgagcacgccttccaaggtccggttcacggcgtactacggcggcgagggggacggcgccgacgagggagtcgtggacagcgtcaggagatgcgtggacaacgacggcgacggcgagggggagacgccgacggcgccggtgaggcggacggcgtcggggaggaggaggtggtcgacgacgacgacgacgacgacggcgccattcatggcgacgccgtgggaggagagggagatggccgtgaggaggaggggagacctggggtggtaccgccacctcgacatggcggcgctcgacggaagcgtcgtccggctgtgggacggcgaggtcacggcggcgtcgccggggcggcgcggccggagggcattatcggaattgcacctctcattgtagagacatggctcagtgtgtatattgtggtgtaggactattggatggttattaccatggttggtgtatatgacaattttgcccctgggcttgtcataccctagcagtatggctgaggggtaatggcccctcgtatgaggacataaatggaaatttggcaaatgccactggtt

SEQ ID NO: 6023 - DNA, 1086 bp, Oryza sativa
  ref <308>: DATABASE ACCESSION NUMBER: AK063181
  ref <309>: DATABASE ENTRY DATE: 2001-12-06
aactttaatttagctaagctagctagctctacctaatattgtaacatacaaggccactatctgtccctgtatgtgcaccagcagtgccaaatttcgctgcatgcttagctaagctaagcttatatagcaggagcactcgaggtgagcagagagagaggattgaagaagaaggagaagagcaccaagctagtagcctgatctctctctctctctctaactgtctatctatataagctaacaaggcaggacggttgttgcttgcgagatcatccctgcctgcctgtccctttcctgcatccatccatccatcttgatcttctcctagctcgattccacacatgtgaacgtacgtacgtttcagttaattgttcgatcgatcgatcgatcagctgctgctgctgctgctgcaacgaggaagaagaagaagaagaagatggtgaagttctcgagggagtacgaggcgagcatcataccggagtggaaggctgcgttcgtcgactacaagcggctcaagaagctcatcaagaggatcaaggtcacccgccgccattgaaatcgattcgatttccctcctcctttcctcctctcgtgtattttccgtccaccgtaaaccctatctcttccaaaaaatccccaaatcggcgccggctcatcggtctacgggaggtcgccggctgctaggtctaccggagggcgccgacggctgggtctacgggagggcgaggcctgctggggaccttgcctgccgcatcggcaggggcaaccggccggcggtaggtggcagcggcagggcagcatgccgcagcagcagcagggcatggctgtcgcggggcagaccctcttgttgcatgctatggctttggctctggctctagctatgtcacagcgtgaacaggccctataccgaagttgccgatggaagaaagcaatgtcatagctgcagcacaacaggggtactttttttttgagaatttcagaacattccaaatagaaaggtttaaatttattattgaatttgcagttgtgtaattgtttgtggagttttgagtagtctaaaataacaccgctaatactatagtatgttgc

SEQ ID NO: 6024 - DNA, 396 bp, Oryza sativa
  ref <308>: DATABASE ACCESSION NUMBER: AK063182
  ref <309>: DATABASE ENTRY DATE: 2001-12-06
attgacgccactctttcccccctcccgagcacagagcagagagagagagagagagagagagcgctgcggaggagaccgatgccgccgccgccgccggagccggagccggagccggtggtgatccacgcgtggtcggcgccgcgctccctcagcaccagcctcatgtactccttcgcccagagggatgacatggaggtgctcgacgagccgctctacgctaatttcctgcgcgtcaccggcgtcgacaggccgtatcgcgaggagcttctgtctaacatggatcctgatggtaacaaagttatcagtgaagtcatttttgggccagggaagagaaaatatcgttactgcaagcacattgcaaagcagcgcctccctaacctgtcaagtgacctgatg

SEQ ID NO: 6025 - DNA, 386 bp, Oryza sativa
  ref <308>: DATABASE ACCESSION NUMBER: AK063183
  ref <309>: DATABASE ENTRY DATE: 2001-12-06
cccttttgctcctctcgccgttttggtcggggttttagcgagcgcgtgggaggccggaggcgacgacgacgaccgcgccgccgtcggagaagaaggccgcggaagcaccagtaccagcacccgtatatgtcttctagccccttctccgatctggtggtagtcgtgctcctcgtctgcgccgtcgtcgccgcagccgtcctcctccccctcgtctgcgcccgccgatctatgcaccagaggctccacggctggaacaagtccacgtcgatgctcagggacgggttcggggtcaagtattccgggttcctccacataaggccgtgtggtttctgtcgaggagattgacggattcgatcgattcgtgttcgtctccgtcaaatttttgc

SEQ ID NO: 6026 - DNA, 703 bp, Oryza sativa
  ref <308>: DATABASE ACCESSION NUMBER: AK063184
  ref <309>: DATABASE ENTRY DATE: 2001-12-06
tgtttagaatgtatgtcacctaggaattatttgagggacaatattttgtcaagcttaaagattgcaagggctatggtgctttaaggtgctgagatattgcacaccccatgataatttgcctcgacttccatgaacaccgggagtgtgtctgtgtcatgcaaggccatgttggcgctagcttggtactgtttttttttctgcaaaccatttgagaataaattgtttgaaatgatcttattccaaaggatccaaggtggcattagagaagcatcctttttaatttccatgctgagaatttttcttttcatcacaattgatacatattaccttgcaaaataacattttatcttgcactttaaggttggtgagaatatggcaaatcttttcacttatagctattttcactcaattgccagctaccagctaccagagcatcaccaacctccaagtgaagaatagacaaattacatggcaattgttccactttgttaaatattagtgacacatgttgcaagatcttaagttattttatttattgaacctcctaggtgttaccacaatatatattgatgtattttcattaagaacaatgtaaagatattgttcatctaatgtaaagatattgatgtggttctgctcagtgaatttctgatttttacattaatttttattttgtatggaaataaaaatgaggtttcactgc

SEQ ID NO: 6027 - DNA, 799 bp, Oryza sativa
  ref <308>: DATABASE ACCESSION NUMBER: AK063185
  ref <309>: DATABASE ENTRY DATE: 2001-12-06
gagaggatgccgacaaggggagggggggtgccagcaggatagtggggagaggatgccggccgcgtcggtgggagagggggagagaggcgaccggcgtgacatcgttggcggtgagaaagcgcagggaatgagccataaggaggtggcaacagcggcggtggctggagggggcaaggcagcgggtgcggagggatcttcatctgcaggcgacagcggcggagctccgccgccgcaagcaccctgtcgaggccgacggttacccacaaccatcctccgatctgctccgtcttcatcgtcgatgccgcccccacgcgccaccctggatctgcctcgcccggtccgcccaaggaccttcaccacttcctccgtcgcttccgtcttggactcctcccgatgcgccggccttggctctccaccgatggctgctccgcccctcagccctcctctttctcctctcccgtcggcgcggtcggccgcctctcccctcgctagctactccgcacgccgccgctaccacaacccaggagtacaaaaccatggtggatgtccgcgcggggcggcggcgggcgagcgtggtagcgggcagtgggaaagggggcagagagatggccgcagtggcatgtgcgcgttggtgcggcgacagagctcgaccggctgcctcgccccaatttgccactgacaacctccttgaagaggagaaaataagaaaaaagaaagagatgtgggccccatatctttcttctcacttcacttacatgtgggacccacattgtttttagttttatttgccacatcagtg

SEQ ID NO: 6028 - DNA, 549 bp, Oryza sativa
  ref <308>: DATABASE ACCESSION NUMBER: AK063186
  ref <309>: DATABASE ENTRY DATE: 2001-12-06
acatccgtgccctctccttctctctctgtgtctctaccgcatcccctccctctctcggcgagccgaatccatggagttctacgtggacgacaagtggaagttctcgaagaagagccggaacaatggcagcaggcgcatccccggcggcagcggcgcgggcggcgacccgttcctcaagaggtcggccagctccagggaccaggtgatcggccggggccgcgtgggcagcggcggaggcggcggggcggccgcggcgccgtcgtcgttctcgagccggtgcgcggggctggtgaaggagcagcgggcgcgcttctacatcatgcgccgctgcgtcaccatgctcgtctgctggaaggactgctcgtagccgtggcgtggcctcccccctccctccctccctctcgccccccgccgccggccggtaccgaagatctctcgtcctcgccgccgctcctcctccagaagaatgagacgtggcatcgagaagatggccaattaggtgaagtatgtatagatcagagagtttgattattaggagccctttccttc

SEQ ID NO: 6029 - DNA, 489 bp, Oryza sativa
  ref <308>: DATABASE ACCESSION NUMBER: AK063187
  ref <309>: DATABASE ENTRY DATE: 2001-12-06
aagaatcgagtgtggcgatacaagatcagaccatttgaggactggtgactgtcgacgaggccggcgttcgagaagcaattaagaaaagcttttgattcgctgtgttttatgttaagctgtctagtttggaaggagaggagatgctagaattttcgaccaacgagtgaaatctaccttgcagctgcttggggaagtcaaagaggagatcatgctctggagagaagctggagtgttcatgaatccttaggagtagtttgcagccctagcgagtaccagctgctgctggcatgtttctcatcaggtctcggcagaggctcgttgcttttcttgtatctaactttgtaacattatgtatacatcttatttcaacttagtacaattggttggccgcttttttaattcggccaacccagccaaaatgtgtccgatgcatacatatattctgtattgagatcccaaaagacagaaatatcacacggttatgatgcc

SEQ ID NO: 6030 - DNA, 388 bp, Oryza sativa
  ref <308>: DATABASE ACCESSION NUMBER: AK104956
  ref <309>: DATABASE ENTRY DATE: 2002-08-28
tgcacgaccgctcggcacggcggcacgcccaaaggcatctttaacgcgacatcgggcgccacggcgttgctacggccgccgacggcgacgttgcaatggcagcagctcatcatactggtgccatctacgctggctgctctactcttgagcctttgagagaacatggcagaaacaccaagcatcaccaccgcatcctttccccccaaattttgctgtacatagattgcatctgcctcccagaaacagattagatcccgctttacattgtacatcaaacattcgcaagagttttggatacctgattggttgggtctacattgtaatcgatcaagaatttgtttgtactcattgtacgcaagacatgcaagctccgatgaatgagcacatc

SEQ ID NO: 6031 - DNA, 385 bp, Oryza sativa
  ref <308>: DATABASE ACCESSION NUMBER: AK063188
  ref <309>: DATABASE ENTRY DATE: 2001-12-06
aatcacacgaggagggagcattcttctctatatcccagatccagatcgatacaccgggagggagcagcgaccagctgaccaccacagcgccggcgccgcgtcccatcctcctcctagccgctgcgtcgccgcatccacgtcggggtaccacagcgcgccgccgtcgccacctactccaggccgccgtcgtcgactccaagcagcggcgccatcgctgactccatgccgctgccatcatcgactccaagaaaattagttgccgctgttgctcctaagtttgatgtgctcgtatgcatcagtgctttcccatgtattgttgctcgatactgatgattaaatggttaatcattgttggtgcatgtcaaaattgatgtattccttctgc

SEQ ID NO: 6032 - DNA, 393 bp, Oryza sativa
  ref <308>: DATABASE ACCESSION NUMBER: AK063189
  ref <309>: DATABASE ENTRY DATE: 2001-12-06
acattactcgcctccgccgttttggattcttccctgattttttcccctcctctcgatcgcttggtgtttgtgcttgttgttgcgttgcgtttgcttatagtggtccagtgagctccagcgagcaaaaacagacgccatgagcgccagagagagattttggtgccaatagacacacactgatttcatcatcatctaggcccaaaaacctctactcttccgcgtcttggaaaattcttctcagattgcatcaccagtaggaggattgtcagattgctgctgctgctcttgtactagttgtattcaggattcagaatttgggcggacgacgacgaggataaatcggatcttttcttcctccttgattaattcctgaggcgtgtgtgtgattagttc

SEQ ID NO: 6033 - DNA, 600 bp, Oryza sativa
  ref <308>: DATABASE ACCESSION NUMBER: AK063190
  ref <309>: DATABASE ENTRY DATE: 2001-12-06
agattaacccaaacatctgtgacaaatcagttaagtagcttaattagttagtaaggatcatcggaggatcggcgatggcggcggcgctcagggccaccggtggccggcggcggctggcggcgctgctcgtcctgatgctattcgtcatggcggcggcgctgcaggaggcgccggtgatggcctccgccgcgagggtgttgcttcaaagtggactgcttccgactccgtatccgacctgcaatccaggccaatattcatgcccaccgcctactactgtgccatgattataagctgtacgccgttggttattagtttacttttaatcaaccaacagcatataatgaaatagttatcgttcctacagagtttcttctctacaacttaagatatatttcaaataaaatatttatttgcatgtgatgtttgagagcgatgcaaatatgtaatacctcgatctgcgtgtactacagcctgacctacgaccagtggaagctgcaatgaggcaataatgttttttatatttctatgtattaattgctcttccatatatcatactatatatgtacaaaaggaaattttctatattatctttttttcctc

SEQ ID NO: 6034 - DNA, 1618 bp, Oryza sativa
  ref <308>: DATABASE ACCESSION NUMBER: AK063191
  ref <309>: DATABASE ENTRY DATE: 2001-12-06
gtcaacgagtcatccttccacaattggctctgtgagagccgaatgaagattggggagcggcatcgtcgaggcttcgacactgtcatgatactggtggcttggacaatttggaagaaacggaacaaccgaatcttcaatcaacaacaaaggtcttggaccgaagtggtgaaagcaatggcggaggaggccatgctttgaaagtcggctaatcacgggatccccgctgtttggcctttatgaggtcgtggtagccaaatttagcgcgagatattcctatagttttccatagcgtcctgtattggtcccttacttgttttccttttatccttgtaaataacttttatttctcttaatagaaaaaaatgcgctccttgcgtattcccgaaaactgtgcatggcatgcgatgtgagctccagatttagaatatgtgttgtccatggaagcaccttctgatcatgtcaaaagaaacatctatgatgtaaataactaggtaagacgatatttattcagtctgcaactctgcatatctgaactgaagtactgaaactgaacagtgcctggtgatccagatatccagtgatatgaactaaataaacaaccatggtgccattcctgtgctccactggaagtaagccgagttgaaacacttcatcaactagtgttgattatatacaattcactttcagtttagtggaatcacagataacacatggccaagtgccgctattttttacgctttacgaaagaggggagagcggttctgaagattatcaacagcacctgacatttgaggcatgtggtcttgacaattgacactgtctgaaacactgaacgcaacagaccaacaaacaaaccagaactgaactgctatcgacgcaattatttcctcccagtctgatgattcctctgcaaattgatttacttcgcactcttttttagggaactctgcttcgcaaacttggtaccatgttaaacaacgtctgtgatccggaggacgataacagttgaagcacctacgaaactcgagccgccgccgccggatcgtcggcggagctccggcgagcggcagccgcggccgcggattctcgagcaggagacagagaggccccgttcttgccatctcgccgacaagtgggacccatcgaccccgcaccagagagggggcaaacggtaatacgtatacgcagtaatccgccacctctcctttgttcaatctgcaccgcacaagatggatcggacggttcatttgcaccgcacaatctccgactctctcaggtaggaaagtgacggttccgtactggttgggctgcaacgggattgcactatacttgcggcccatactatttgggccaaatggggattatgttgtatgtgcggcccatattagttgggcctaaacgggcttacggtgtaacgtgctgcatatggaaattgggcctcgtaacgggctggtggtgtacgtgcggcccgtattggttgggccagcatccttccgccgcctctgccgccaccgcccttcccgtcgtcttcgtcgtcgccgccgccggcgctctgatcttttcccggtgatggcgcctcttttctcttactgccatgactgtatatggtcttgtgatg

SEQ ID NO: 6035 - DNA, 484 bp, Oryza sativa
  ref <308>: DATABASE ACCESSION NUMBER: AK063192
  ref <309>: DATABASE ENTRY DATE: 2001-12-06
caaaaggagctttttatgacatctgatcaagcttctacacagaaccaacgtcttccgaaggggtatgcatatgttcctcgtgactctctttctaaagacaagttgcggaatcgaaatacacaggcccatgaaccacaagagcctggtggataggagcagctgagatcaagatggttaatcttgtctcaagaaaggccagaagacgtttgtttccttggtcttcacagccagaaagtacaagcgtcaagtggggctggccagtcttttgctgctacaaagggttccaagcaaacgatgatccaattgggctgaagttgtagaacggtgcaaactgagttaatgtgaacgagagaacgaaacagatgaatgtatggtgtgggatctttaccagaaatcttgctccgcctcaggtcgctcgggtgaacggcaacatgggtggatttacctgtttgaggatatacaaagatgcctttctcgcctgtac

SEQ ID NO: 6036 - DNA, 505 bp, Oryza sativa
  ref <308>: DATABASE ACCESSION NUMBER: AK063193
  ref <309>: DATABASE ENTRY DATE: 2001-12-06
cagcaacacagcgagagagtgcaataatttcttcagacctaccgacagaaaaaaaaaagagaaagatgatgaggaagcaaagcagcagctccacctctcgtgctactgctgctgtagtgtcgctttgtaaggtccttctgatggtcatagggctcatctgcgccctgcacactgccaccgtagaaggaggaagagcgctagcggcagcggcagttggtggtactggtgtggacttgccaccaactgcaccaagctactccagcaagtgcagatatccctacaaatgcccccctgcaggctcaccatgacaacctgcatatgcctctgctctagcgcgctaggccgcccatggccatgcggtacactttcatgcatggcttgtctacatatatattatagtgtacgatcgatgtatgatatatatacttgtcgtcgtaaataaagggaggccaaatatgtatttgtaagcttaattttttgaacgaatataccatgctatttcact

SEQ ID NO: 6037 - DNA, 695 bp, Oryza sativa
  ref <308>: DATABASE ACCESSION NUMBER: AK063194
  ref <309>: DATABASE ENTRY DATE: 2001-12-06
agccggcagccacccaaaatttccccatcctttcggcttctcctcacccaccggccaccgatgacgacgccgccggcagctcacgctcgtggatccgtgatggcggtggtgctcgcggctggtggcccgcggatccaacagccgtggaggcgctcatcggaggaggatgcgtcggcgcagcgctcgcggacgacgaaggtggcaagtcacgagcggatccgcgatggtggcggcggcggcggcggcggcattcacgggagcggatccaaggaggcgctcgtgtacggcgccggtggagctcgcgctcgcggatccgcagcggccctctcggacggcgtctgtggcgctcgcggttggcttcggcgacagatctccggttgtggcggtggggcctgcgggcgaaatccggcggcggtagggcttgcagcacaactccacacagctgctcgactgctcaatacttcccctccccgggccttcttcctctttgtttcgtttccatggcggcaatcaacagaaccggagagagaactaattttttttaatccttgtggccggtccttagccataaggacggctcatccaaaagcctcctagaaggatcacctccacaatgtataaatgcttctcaaggggcttaagaccctccttatttctacattgtgcatgacctaaaaaaaaaaaaaaaaaaaaac

SEQ ID NO: 6038 - DNA, 477 bp, Oryza sativa
  ref <308>: DATABASE ACCESSION NUMBER: AK063195
  ref <309>: DATABASE ENTRY DATE: 2001-12-06
aaaaccagatcgatgcgatacgacgatgcctgcaaccgcaaaaccggatgagaccgataacaaccgcaagccacccgaactcgacatcactctgttgctcttgctcctaccctccctacctcccgtcgaagcggcgcgccgcgagaggggatgggaatccccggcggcgcgggacttggaacgaccgcggtgagggagtagagataagcatggtgttaagtactccacaaaggttgcagattgggccggtacggcatcccaccaaaagcttttggcccaagggagttcaggtggaggaacaagagttgtagttccaggagtttatcgtacaaaaacatcttcctcttctacatcttcattccctaacatgtagtaacttctagaacgtgtatcctcctttttctcaagctcccctcaaacatctgattgtgttgaaacactattgctccattgtgaactgtgaagtgattggcgtcc

SEQ ID NO: 6039 - DNA, 503 bp, Oryza sativa
  ref <308>: DATABASE ACCESSION NUMBER: AK063196
  ref <309>: DATABASE ENTRY DATE: 2001-12-06
agcagccagcagccaactgcatcgatatcgatcgatcactcgaccgaccatctcacaagcaaagcaaaagctcgtggcaacaatggcgaagtgggcggcgatcatggcggtgctgctgctggcggcggcgtgggcgccggcgccggcgacggcgcagtgcaacgccgggcagctggcgatctgcgcgggcgcgatcatcggcgggtcgacgccgtcggcgtcgtgctgctccaacctgcgcgcgcagagggggtgcttctgccagtacgcgcgcaacccggcgtacgcctcctacatcaacagcgccaacgcccgcaagaccctcacctcctgcggcatcgccatcccccgctgctaggcacgctcgatctcccgccgccgcgcgccgccgctcgccggcgccggcgccggccatggtgcgtggcaaatatatatatatatatatatatatactgtgtgtacgtgcgcttgaataaaggacgtgagttaatttgatcggtgtc

SEQ ID NO: 6040 - DNA, 755 bp, Oryza sativa
  ref <308>: DATABASE ACCESSION NUMBER: AK063197
  ref <309>: DATABASE ENTRY DATE: 2001-12-06
gtgcttgtacttgctgttttttttttccagtatgtagtccacaacaatttgaatgagccatttcggattttcctttttatgaaaaccttctttgtttagttcattacttccaaattctaccaagagttgccctgcagagcttacaggcggtcaggtagttgcttcttatgttccttccaacagtattggccccctggtgtataaagttctactgtactttctgtgagcactgaagatcacttaaaattcactcttctattgaaccggtgatgatggagggctccggcactctactgaggtaagcagttgaaatctccagagggcagagatcactggtctgcactaacatatttgtgtctgttaagcaccattgacactcaaatgtctgagcaatcgttaagcatcttagattggtatttcagccacgttttggattaagaggctgcatatgaagaattgattgtcgagctaagaaaattgcatatatggcaacacaactctggttactttgattgtagtaatgtcagtttaattactcgctgttctggcattcagcaacggctgacaggctgagtaggtgctgtaatttaaattcatttaatcatttcttcaattgctcaaagaaaagagaagaagccacaatatagctattaatattaggattgaaacagcaggatggtattattaacctattagcagttgacataaaaatgtatcctatgattcgatgcagcaagttacttctatttctgtcg

SEQ ID NO: 6041 - DNA, 749 bp, Oryza sativa
  ref <308>: DATABASE ACCESSION NUMBER: AK063198
  ref <309>: DATABASE ENTRY DATE: 2001-12-06
ctctcttcggtatcctccacacctcgtcgccgatctcccaccccgcgcggcgccggcgcccgtccgtcctctcctctcctgcctccgccgcatcctcgcctcgcctcgccgaacacacaagattttgaggatgccgagggccacgagcgatgcgaagcttctaattcagtccctgggcaaggcttatgctgccacaccaacaaatctcaagatcattgacctctatgtggtctttgcagtcgccactgcccttattcaggttgtttacatgggaatagtggggtcatttcctttcaactctttcctttctggcgtcctctcatgcataggaactgcagtcctcgctgtttgccttcgtattcaagttaacaaagataacaaggaattcaaggatcttcctcctgaaagggcgtttgcagatttcgttctgtgcaatctggtgctccacttggtgatcatgaacttccttggttgatgtcctgcccctacaactgatcaaggttttgtagccccagtttatggtcactggtcagaacaccctgattttgggagtgtcatagtatgagatattcatatgatctttcacacttcaccgatgtaattcgacaatttttcgagaaactataagttctctacctgccgttcgctgcggcttatctttatatctgtgtatttagtgtttaacaatcttagaacatgtgatcctgttttcttcaagtgaccgaaggttggcaacatgctattcgacc

SEQ ID NO: 6042 - DNA, 834 bp, Oryza sativa
  ref <308>: DATABASE ACCESSION NUMBER: AK063199
  ref <309>: DATABASE ENTRY DATE: 2001-12-06
aatttttctgcggtttcttcttcttcttcctcctcctcgcgctcccccgattcgaagcgtgaagagaggaacggcgcttgcgagaggagagagatggcccgtaccaagcagaccgctcgtaagtccacaggaggaaaggctcccaggaagcagcttgccaccaaggctgctcgtaagtctgctcccaccactggaggagttaagaagccccaccgttaccgccctggaactgttgccctccgtgagattcgcaagtaccagaagagtactgagcttttgatcaggaagctgcccttccagaggcttgttagggaaattgcacaggacttcaagaccgatctgcgtttccagagccatgctgtccttgccctccaggaggctgcggaggcataccttgttggtctcttcgaggacaccaacctgtgcgccattcatgccaagcgtgtgaccatcatgcctaaggacattcagctggctaggaggattcgtggtgagagggcttaaattcccctcggcgattcctttgacaaatgaagcatgcgtcgtagtgttagtagtgggttttaatcttttgcttataagaacaatctgagtagggtgtattttgtggaacaatatgtttctcatgatggtgctgtattcgtcttattggtggatctgtcaaaaatactcagcatattgtcagtgtgtctggtgactcttattttgttagtctgattcgtttgcgtcttattctagcggtgctgcctctttggcactgtgcatggctagatacaattacattgtaattcacctgtctctaatccgtgttaatgtaagtgttccgttgctgtc

SEQ ID NO: 6043 - DNA, 1059 bp, Oryza sativa
  ref <308>: DATABASE ACCESSION NUMBER: AK063200
  ref <309>: DATABASE ENTRY DATE: 2001-12-06
tattgcttctctctgtgtgtgtgtgcgtgtgtggaactagtggagggtgtagaaagttttagcgactgcataaatattaaaatagaaacacatgtgcaactatcttcgtagtatatataaaaatatgagattatatttgcaggagaggggtttatatttggatgatgactttgaccatgatgaagagataaaatattcagcggtgcgcagagatacagacaataccaaatttaagtcatctacaaatgtcttgagcaatacaaatcaagttgattcactcaccagggcaggcaacactaatcccaaggctttgttatcaactgcggtaagagagcggagtggccttatctgtactattctccatctctaaataggtgctgcttgagctgttggtcgtccccaatatatgagttataccattagttttgagagcaatatttagtagaattacttaccactccgtccaaaaaaaaacacaaatcattggttgtgacataacctagtataatgaatctggacttgtccagattcattgtactaggttacgtcacatccaattcttggtttggtttttttgggacggagggagtatctcagcttttctttctattaacaaatatattttcttactactatatgcaatatttttaagcatgaaatcttgtttaaaactttgctaatcttcttggcacgcaggatgaagaatcatcttcccatttatttggcactgatttgcctgtcactaacaatgttagccagttagtatctcagtcccagctgaataaacttttgcccattgatgaaagcaggtatatatacttctctccacatttgctgcaaatttcatctatctaatccatacacataaatttgcatgttacatctgctttatacattgcaagctgcgatatggttctaacataaaatcgtgctattcgctggacatatgagttttgtgtactttttaatgctgaatcactcggaagttgtgttgtatcattaatctttttccaggtgtggttgtgctttttctctgttctttactccatctagggttac

SEQ ID NO: 6044 - DNA, 662 bp, Oryza sativa
  ref <308>: DATABASE ACCESSION NUMBER: AK063201
  ref <309>: DATABASE ENTRY DATE: 2001-12-06
aaaaaatcagttcattgcaggagaagagagaacaccaccatggtgagcagaagcaagcaggcgctggcgacgccgctgtctctcttcctcctccacctgctgcttgctgctctcgcccttcgtctcgtcgccgtagcatcagccagcgtcgtcatcagcgtggcggaggaggccgagaacaacgcgacggcgccgtgggcgacagaagaaaggttagtggtggtggtcgagctcgggtcggcggcggcacgtcagctgcagctgggcggaggaggagtggagcttcatcaccggcggcgcgagctggccgggaagatcccgtttggtccgttgcgtcctgacgggagcgcctgcaggccgcactgccccgcgaagtcaggcctgccgtacaccagggactgcaaggtgatctacctgtgtggcaggggtcgctaagctagctagctatacgaccccggccgcttctcttgctgtactccacgtcgtatacactatcaatttggcagatgcatgtttgctgctgctttcggtgtacgggtatatatgcctcgagcaatatctgcattcccgtgtgacctcggaaatgtctggttttttttttcttctctcttttggtgtttttcattatattctgggaaagtatcaaatgtctattcagtttc

SEQ ID NO: 6045 - DNA, 656 bp, Oryza sativa
  ref <308>: DATABASE ACCESSION NUMBER: AK063202
  ref <309>: DATABASE ENTRY DATE: 2001-12-06
ctcatcaccaccatagtagtgagctagcttagcttgttcaccacgagagagagagagagagagagagagatggtctcccgggagcagaagagagcgagtttgcatgagaagctgcagattctccgaactcttacccattctcatgcggtaaataaaatgtctataatctctgatgcatcaacatacatcaaagatctgaagcagaagattgccgcactgaacaaagaattagggtgtgcaaagaacatgaatatttgcgaagaaccctcacctgtggtgagagttcaagttctagacaagggtttcctcatcaatgtgttcatggacaaaagcagccctgggctactatcctccattctgcaagccttcgatgagttaggactcactgtgattgaggctagggcttcatgctccaattcatttcgactcgaagcagtaggaggagagcacgaggaagccgatggagggatcgatgcaaatgcagtggagctagcggtgatgcaagccatcaagagcactccaggaaaatagagaacattcatgtatatatatgtgtgtgtatatgcatgcttgatcgagctggagcaaggaagagccaaaaatgaccatctaaatctctaattaagattactgctctaatgctattattctacttt

SEQ ID NO: 6046 - DNA, 503 bp, Oryza sativa
  ref <308>: DATABASE ACCESSION NUMBER: AK063203
  ref <309>: DATABASE ENTRY DATE: 2001-12-06
cccggtctccccacatcgtctttgccgtcgccatcgtcgggtgcagcaccgccgtctgcgcagccgcagcgcctccttcgccggcgggcactgcgcctccagccccaccgtcccgcggtgcaaccggcgcatatcctcctccgccgccgacgtcaggggctaggggctgctggccgccgtccccagaacaacgcctccgcgcgcagccgtctatgcggtccgcggccagcaacagagtagcgcctccacctccgaggagcaggcacaagaccaccaactcaccaagcagagcagcaggcacaagaccactaagcagtttttcctttgttcccctgtgaggctgtgagtaaatcactgcatgtttgtgtttgggtgtcggttgaactaccataagtgaaatccggtggttggttggtggcttagtgctggcgtgctgctacttgtgtagttgatttatcagtttataaccaacatgataataaacttgtatgtggtgatttttc

SEQ ID NO: 6047 - DNA, 424 bp, Oryza sativa
  ref <308>: DATABASE ACCESSION NUMBER: AK063204
  ref <309>: DATABASE ENTRY DATE: 2001-12-06
catcatcgagcagagctgactcgatccggttcgagttcttggccataacatgcgtgctcgtggaaagctcaagagatcaagcttcagagatcgatggaacatggcagaaaaatctatgtacattagctaagaacgcatgtacatatatgtatagctagtttcaacttccaagtgcattctgagagggctgtgaacttctctggtttgtgcttccttttgacttgaacaaaaagatcatgcaagcagttgccttgcttggactctgaagctttgctttggcgtctaaattaaatcaagatcctacctgaatggacagtgctgaacagatagataagtagtagtacttagcatttagcattgaactagttcttgtcaacgataagtaatccaatccaagcgtgagctcacgcgtgcactttgagtg

SEQ ID NO: 6048 - DNA, 966 bp, Oryza sativa
  ref <308>: DATABASE ACCESSION NUMBER: AK063205
  ref <309>: DATABASE ENTRY DATE: 2001-12-06
aaagacccccttccccgacgccgactccgccgccgccgtcgccgcgccgcctcgccgccatgcccgccgtcaagtggctgatgcactggcacccgaaccagggggcgacgctgaacagccagatcctggcggaggcgtgcgcctgcgcggagtccctggggggatccaaggacgggaggtggaagacctccatcatcttctaccgcgcgatggcgcgggacggcgcgtccgccgccgccgcggggggcgggggccccccgcagcagcaccccgacgtgccccgggagctcctcggcgtcgcgctgcacgagcgcccggggctctacttctccatcctccgcgcgcaccggctcgtcctccaggccgactccgcgtttccccaggtcatggagaagctccagtcctacaaggcccgcgtcaccctcaacttcgagggatttcagtatcaactgggtgacttttgcctgaggattggaaaatgtgttcctaataattcggaaacactgaggggaatcatgatggaggtagagtattatcccctatcttccattgaaaaatccagggcagtaatggaagacttctttgacatatggcaggaaacagttgctaagaagtcattacctggtcatttcatccacgtagaatctaacttttcagagtatggtctttcagatcactattctttccagcacactgccgttcagtacgcaacttgtttgcaacaacttatggctgccgtgaggccccaatgacatccacaaggtgtgtctcatgcggtgaaatgttattggtcttcaaggactgaggtagtgataattctgaacaattgagtagctatgacctgtattatcacgagttcttattgtcagtagatccttaattttgtcgatgtggactaactcaccaaactaggcatggtaagcaaatattgctaccctaacagcaatggtgtggcaagtttatttg

SEQ ID NO: 6049 - DNA, 727 bp, Oryza sativa
  ref <308>: DATABASE ACCESSION NUMBER: AK063206
  ref <309>: DATABASE ENTRY DATE: 2001-12-06
caccaacaactcatcgcctcgcttcttcttcccactagccaaaagcacaaaccaccgagaaaacgcttctcagataaacatcatcaccatggcggcgtctcttgcctgcgctttcttcttcgacgccgagccggtgggcgagcagggcaggcacgcgctggacgcctgcgcgctctgcaccaagcagctcacgagggacagcgacatcttcatgtacaagggggacacgcccttctgcagcgaggagtgccgctacgagcagatgcagctcgacgcggtgtacgcgaggtcggccggacggaggcagcagcagcagtactccgggagggcggattcgcggcgcgggcaccgggagaccaggaaggtgtccgtggcgagctaatcaagctgcgtcgataatataatgatcagctgagaagaattggcgttgaatccagacgagatttcaagagctaagccacgcatcaacatgcggcgacgaaggagattgatttctccaaggccgcgatgcccgacggcgccggagaagagtctgaggaagttcatcggcaagatgagatctttgccatgtgggtcgctcgggtcgaccttgtcttggctctcagattggcgcccttttgcgggtcgtgtcgcgtttgtgcgccagcgtgcgcgttagagcctgagtgtatcatcactttgtaaatccaaagcagttgggaaggctttaaagtttccaagttcctac

SEQ ID NO: 6050 - DNA, 647 bp, Oryza sativa
  ref <308>: DATABASE ACCESSION NUMBER: AK063207
  ref <309>: DATABASE ENTRY DATE: 2001-12-06
cttgtttcttggagaatttttgctcttgctttgatgatatttttgcagattctaccagggcttcgggttttgagaggatcggtggccggagacaaggaccaaaccgcaggtgaaatgtccacgactctacagcgtctggaggaagcatttgtcaagtgcagccaagggaaggaatacttcggcggcgacagcatcggctacctggatatcgctctgggttcgttcctcggatggatcaaggcggtggagaagatcgccggcgtcgagctcctcaacgaaaccaagcttccgatcctggctgtttgggcggatcgcttctgcgcgcacccagccgtggtggacgtcgtgcctgacgctgataaattggttgagttcaccgttcaatatggttctgtgctgaatactgtgaatgttcttcccaagtgatggatggtatgctgctttgtgcctgacgataaattggtttgagttcaccgtgcaacgtgcttcgtgttgccatttagtatggtcactagtgaaagatgatggtcatttacgttgttttgtttcgtttcttcggaactgtagtttccctttccgtctgagtctgtaattttgcttgtaagacttctctctgagtcttttattactacttctctcagtctttt

SEQ ID NO: 6051 - DNA, 557 bp, Oryza sativa
  ref <308>: DATABASE ACCESSION NUMBER: AK063208
  ref <309>: DATABASE ENTRY DATE: 2001-12-06
agcattagcattagcataagggagggagggagggagggatcattagaggaggagcacagcacatggctgccgcggccgccaccgtgacggcggtgcagccagcggcgtcgagctgcggcaagcgcgacggcgacaatgcgtgcgtcgtcgacatgcccaggaaggcgaagaaggggaggtcgccgccggaggaggaggtggaggccttcctcgccgcggcggagagcagcgtggcgcggcgcttcgcggccaagtacaactatgacatcgtcaaggacgctccgatggatggccggtacgagtgggtccgggtacgcccgtaaagaggatatgtggcaacagccagtcaaaatgtcaggaggatgcacagaccaatcctgtcctaatgaatcttttctttacccatgtatatgtagttactcggttactccatgtcatgtgtttagctgtaatttatttaagctcacgagatgactaatcatgtaaaagctcaccttgtacgttagcagtagatgcttcgcctgtaacgcatatgcttaacttgtcgttatccgtgg

SEQ ID NO: 6052 - DNA, 663 bp, Oryza sativa
  ref <308>: DATABASE ACCESSION NUMBER: AK063209
  ref <309>: DATABASE ENTRY DATE: 2001-12-06
acataatagcttcttgttgatcagtccatctcaagatgaagaaaagctctcttgctgtcttcctcctcctactcacccttgcttcccagggcacatggtgtgctgctgagagaagccacaggattaatggagctcatctgagacctcatgtccaggtggaagaatcgcatatcactgaaggcaagaagctcctggagattcaggtccccaggaagcttggccatgaggtgaagtttcccaagagaatggccatagctcacaagggtggcagcacgggcggcggctcgacaggcggcaccacaggcggcgccagcaatgtcaacagtggaccggccgacacgcggccgaggaaaaacgcggcggcgatgccagctccggcgacgacgacgtccatcctggcactggccttctccttcgccattgctgtctcagctttcagcttctgaagctgtgtgagtggtggtgttcttgcaagaaaggtattagtatgtgtgttagtggtgtggtaatctctgaatgactgaatttgtgtatccagtttatcagtagtgcacactgaaattgtttcatcttcctgtatcttatattcaatattcttgatttatcgtctgcacaatgatgtcccagacattgttcttgcagttccaggttcttgtggttctc

SEQ ID NO: 6053 - DNA, 738 bp, Oryza sativa
  ref <308>: DATABASE ACCESSION NUMBER: AK063210
  ref <309>: DATABASE ENTRY DATE: 2001-12-06
tttttttcccatttgttctcttcttttggggtttctttacacctttgtgggggctctccctgcttggccctattgatctttgccatcatggcaatggcagcctctgcactgccagtctgtgaggaagtgaaaatatgaaggtgaggagggaagacagagagacagataaaaatttgtgttttttttttttggtgctatactctgtgggtcttcagtcttcacctccccaatgcaaaaaattgcagagattgcattgattaccttggtgtgtgaagccatggaggagaaagaaaagtaaaaggagagcaatgcaatggcacattgcattgcattgcaggcagtgagatggtgggggttaaatgaggtggtcaagcaaagggtcagatctcctgtcaaaggtgtaggccttctccctgccaagttctgttcatattcatgagggggaaatttgtttgtttccgagtggtttgtttgtattttgttgatgttactactgaagatgaagagagagagaatgagagagggggcatggtgtactgggaggcacatgcatgccctagtgtgatgctctggagtgaaatatttgtccatcttcgggctaacagtgtccaagcatgaggcttttgggggcccttgctatttgttccaatttgtaccctttttttccttgcataaataaacatgttgccattttaattggcctgaaaaaagatatatcatgaggagagagttcatgtg

SEQ ID NO: 6054 - DNA, 629 bp, Oryza sativa
  ref <308>: DATABASE ACCESSION NUMBER: AK063211
  ref <309>: DATABASE ENTRY DATE: 2001-12-06
aagagatggagagaaaggccacaatagcctgctgccttcttctccttgcagtcgacgtcgctgccacaggagcagttccggcggctgcgtggatggaggacgacaccgtcgggatcgacctccagcttcaggtggcgccgctggcgatggtgcttgcggcggcggcaggcggcggagtggacgatgaccatgagctacaccggcgcgtcctgcaggcgcgaggtggttacgtcgacccgtcgctggtggccgaccggcagaggtgcatcggcagctgctcgcgcccaggcagaccctacaccgggaggggcaacctttgcatcttccagaaccgatcgtgttgagtacgtacgtcgtcttgatgaaatgttgttgaatgaaactgaattttgggtctgtaccagtcgtattacctttttctttttttacaaaaaaaaatgtctttcttcttcctccctgttgatgttacgtatcaattgattgattaccgcgatgatgagcatgttatcagtcttagtgagatggcgatgataattaaaccaaatatatatctgtggcctatggggggcgcctgaaattttttgtggttctttgttttttctttctgatggaaaatttccatgttgttg

SEQ ID NO: 6055 - DNA, 762 bp, Oryza sativa
  ref <308>: DATABASE ACCESSION NUMBER: AK063212
  ref <309>: DATABASE ENTRY DATE: 2001-12-06
attctcactcataattcctccatctcctctttcctctctctcatccttttcgccttcctccctttctcccggccttatcttgttcttgtactctttgctctctacacatacatttcatcagtgtttcactacacaaactgcaggatttgtgttcagctaagctagatatcgatcgatcgatcgatcgcagtgaagtggtagagagagagagagatgcaggactgggcgccggtggtggtgggagtggtgctgttcgtggtgctgtcgccggggctgctgatcgagctgccggggacgcaccggtgggtcgacttcggcagcctccgcgtcaccggcaagtccgccgtcgtccacaccatcgtcttcttcgtcctcttcgccatcgtcgtcgtcgcgtgcaagctccacatctacaccggcgcgtagcgcggccccagccaggccatgccaagattgctttgggcagctcactcgcattcgtctctacgccgaccttgttcgttagtctctctgctgattcggttggatcttattgtcgatggaatacttggtgtgcaatgctcggcacgtttagttgatacgtgtgctgcaggttatttagagttttagctataagtgatttggtcgatcgtgtctatggaacatatcgtcttaagttcggcatctcattttcgtcctgtctataactgtctatgaaacataccgtgttctctagtagttttcttttctactatgcatacgttttctactatgcatagtttc

SEQ ID NO: 6056 - DNA, 443 bp, Oryza sativa
  ref <308>: DATABASE ACCESSION NUMBER: AK063213
  ref <309>: DATABASE ENTRY DATE: 2001-12-06
gcgttcgcttccttcccttttcacgagaggaaaacattgctggggaagagcagcgagagatggcggcaagaggcaggggcagcgagagattgcaggacggcgaggacctcgatgtgcgacggcagcggcgcggcgggctcgacgggcgacggcctcgatgtgcgacggcggcggcgcggcggcctggatgcgcctcgatgtgcgacggcagcggcatggcggcctcgatgcgcgacggcagcggcagcggcggcctctcttttcctcctttctgctatgaattttgttgacggcggtggcaacgacggcctgtctcttcctcctttctgctgtgaattttgttgttggatttgctgaaccaaatgtaaatggctaaatggttgattaccagcttactcttgaattgcaagtttcgtattgatgaataaaaaaacaaggttcag

SEQ ID NO: 6057 - DNA, 737 bp, Oryza sativa
  ref <308>: DATABASE ACCESSION NUMBER: AK063214
  ref <309>: DATABASE ENTRY DATE: 2001-12-06
atggaacagccgctccccaccgccgcggcggaggcggccgccgccggcggcgacggcgaggcctaccggatccggccgctggagctcgccgacatctccagggggtttctgggcctcctcaaccagctctccccctcgccgcccctcacggaggaggccttccgcgcgcggttcgaggagctcgcggcgctgggcgccgaccacctcgtcctcgtcgcggaggacgccgccacgggccgcctcgccgccgcgggggccgtgctcgtggagcgcaagttcatacggcggtgcggccgggtggggcacgtcgaggacgtcgtggtggacgccgccgcgcgcggccgcgggctcggggagcgcgtcgtgcgccgcctcgtggagcacgcgagggggaggggttgctacaaggtcatcatcaactgcaccccggagctgacggggttctacgccaagtgcgggttcgtggagaagaacgtccagatggggctctacttctgaattctgatctaggtttcgtcttcttggatctctctgcctactacttgttgtacttagttaataaggaattttatgtcagttattgctccttgtatggatggatggatcactgatcaatgtggctaattccatttgcattgccaagatgtgcaagtttatttaattgaatggattgttctctgcatttatgtgcaaatctcattcttgcaaatgatttcaatgagtaaaagtaccataat

SEQ ID NO: 6058 - DNA, 669 bp, Oryza sativa
  ref <308>: DATABASE ACCESSION NUMBER: AK063215
  ref <309>: DATABASE ENTRY DATE: 2001-12-06
aaagcaaaagcttcacagagtccaggggcgcacctacagcaccaagtgtaaccagagcttacacaaaaaaaaggcaccacctttgctcggtgctcgtgggggagagagagagagagagacagatggcgacgcggatggctgcggcggtggcggccatggtggcggctgtggcgatctcgctggcggcgggcggggcggcgcagtcgtcgccgagcacgccgagctgcgcgtcgaagctggtgccgtgcgcgcagtacatgaacgggacggacacgccgccggcggcgtgctgcgacccgctcaaggaggcggtgaagaacgagctcaagtgcctctgcgacctctacgcctcgccggagatcttcaaggccttcaacatcaacatctccgacgccctccgcctctccacgcggtgcggcatcagccagaccaccagcatgtgccccggtaaccaacttattttaccctcctcctcctccttctatcccttgttcttttaacagcaaaagagagagagagagagagagaatatgttgtttttgatagaaattatcaccgtggcatcgatcatgagttgttaatttttgtaatattggtatccaaaaactcacccaaatagcatgatttgactgttcctacactgaataaatatgaggccttgttcttgct

SEQ ID NO: 6059 - DNA, 862 bp, Oryza sativa
  ref <308>: DATABASE ACCESSION NUMBER: AK063216
  ref <309>: DATABASE ENTRY DATE: 2001-12-06
atctcttttctcagccttcccggcttaccaccttttccccaccttcttccctgcttcccctcctctccaccgtcaacagcgggcgtcggtggcggccccgtgggtgcgcctccacgccacccgcagcacccaggatgaggaggtcaaggtcgacgccaccatgttcgacggcgccgccgtcccgcccccagacgcgcccctcttccgccgcgtcgagtcgctcgaccacgtcccgcgcctccacctcggcctcatcatcgaggcctctaccgcgacatgttgcaccagcaccagaaatcatgttcaagctggaggctagggagagggagtacgtgaggaaattcttgcaggagagggcggcggcggcagcggcggccgggcgaggcggcgctcccacgggagattcacgacgagatcggcctagagttcctcggcaacgtcaccggcaagccatacacgctccacgccaacatcttcgccaacggcgtcggcagccgcgagcagcagtcgtcgcatctcctcctggtcgtggtcctcatcgtgcacatcgtcgctcggctcccttgacgacgatgccgtcgttgcgtgcgtcgtcaaggcggcggcgagcgggcgagcgggcggcggccattttcactttttttttgttttttttccgtgcgagcggtataatatgaccgcatcgggataatcgattatcccgtgcggtccattatcccatacggttgggccgtccgtacgcgaaaatattgattttttcagacatttgggtatagacgggcaaatcctccgcacagaaaaatcattttgaccgcaaggaaaaatggttttcgcagtaacgagagaccgaagaagattgtac

SEQ ID NO: 6060 - DNA, 463 bp, Oryza sativa
  ref <308>: DATABASE ACCESSION NUMBER: AK063217
  ref <309>: DATABASE ENTRY DATE: 2001-12-06
acagatcaacaccggcaaccgactaactctgtctgaaggaagctaagattattaatcagtgagtagctagccatggctgaggagaagaagcaccaccacctgttccaccacaagaaggacggggaggaggagagctccggcgtggtggactacgacaaggagaagaagcaccacaagcaccaggcgctgggcgccgcggggttcgccttccacgagcaccacgagaagaaggacgccaagaagcacgccgccgaccaatactagatcgatcccgatcgaatgaacgcaagaacgaacggtttatatgcttaattactttctccccataattacatgtatgcatgtggttgatggcttaatttgcttcttcttgttcgtcgtcatacgtcgtcgcttttacttcgtgttcatgtacattaattctgtatccgcactgagtattaaataagtgcgtttgtgctgc

SEQ ID NO: 6061 - DNA, 636 bp, Oryza sativa
  ref <308>: DATABASE ACCESSION NUMBER: AK063218
  ref <309>: DATABASE ENTRY DATE: 2001-12-06
acatcacaccacactagctgattagcttaagcttagctgagattgatcaaggcgagaggattaatttggtttaatttcttgcaaatgaggccggctggagcggctgacatggcgatgggcgggatcggcggcgcggcggcgtcgacgtcgtcggtgccggcgatgccggcggcggtggcgccgccgccgttctggtcgacgccgacgccgtacctgttcatcgggttcggggtggtgatggcgctcatcgcggtggcgctcgccgtgctgctgtgcacgcggcggaaggacggggggcgcggcgtcggcggcgaggagcgcggcgacgtcgtcgtcccgccggggatgatgtcggtgcgcgtgctggcgccgctggacagggaggcgccgcccagggtggtggtcgtgatggccggcgacgactcgccgtcgttcctcgccagcgccaccccgctcgccttcgccgccgccgccgccaccggcgtgccactcgcgccagcaccaaaggtggtggccccgccgcagccgtaatacgtacgccggcgtcaagaacggcgccgccgtgtagtggctcgccggcgccgccatgcgtggatgtttcaagctacatgtgatcaaggagctaacgattttgtc

SEQ ID NO: 6062 - DNA, 625 bp, Oryza sativa
  ref <308>: DATABASE ACCESSION NUMBER: AK063219
  ref <309>: DATABASE ENTRY DATE: 2001-12-06
ctctttcccacaccctccatatcctctctgtctctataccaccgccacccgcagcccctcctactcccctctccaccgctgcggcatcgtggcatcctccccctcaacggtggtgactccggcgggctgctctgctagctgggacaacgatggctcccatgggcagatctgtcggtggcgacggcggagactgtgcagatccataggctgcggcggcggtggctcccgcgctcggatttgtcagttgcaacgacgatggctcccgtggccggatccattggttcagatgacgacaagcatgggctcccatgagcggatccggcgatgtctcccgcagatggatccagtggcgtcgatggctctcgcacatggaggcagcaatggcaacctcggcgccccaatgagcgatggcggcaggcggagttctcgtctgcagggatgttgttgttagatggattgatgggtgatttgtgttttgtgatttggaggatgttgttggataaatcgatggtggtatgggggtgatagggagcaacttaatttaagccgatgcatcgagccagcgttttttttttccgcattcgtggaacctcaaaggtgctagtttctaaactgaactttggtt

SEQ ID NO: 6063 - DNA, 719 bp, Oryza sativa
  ref <308>: DATABASE ACCESSION NUMBER: AK063220
  ref <309>: DATABASE ENTRY DATE: 2001-12-06
aagtctgttttgccctctttgctggaacaatcatgggtcttgcatttagtgccttcggcctgccagggtggagcagtataccaaccggacaagtttatgatcagtatttcaaggacaagaaaaccgacagctttgaagcttttcatgttgcctatgttgagttctgcaaagatttcaacaccgtgctacctggtcaagattttgataccccatcactcgaaaaaattcagaaattctatgatgatacttggaaactgatcaacgaagaccaagaaaagaagaaagcgttcatggattacatccgcgacaacgtcaaggaggcggcggtcgacgacagcctcttcatcatggccgggctggcggcgccggcgggagccatcgtcctcaagaggacagggcagagcatcccgcagctgaagaggctggacctcctccccaacgtcctcttcgtcccgctcttcactctcgctgccatcatgggagcaactgcagtccagatgaagcagaggagcagacacacctgatctcctcatcataatcatctacattgcgtcggcagttataatttacaaataataacatggatgaatgtcgatcaaatctgcactgcaatgtcagcgtcaaatatatacacacgttttcttttgtaatcttctttattgttactgtccatactgataataatatcacacaccgggatacgcctttgccaagctgcc

SEQ ID NO: 6064 - DNA, 424 bp, Oryza sativa
  ref <308>: DATABASE ACCESSION NUMBER: AK063221
  ref <309>: DATABASE ENTRY DATE: 2001-12-06
gacttggagtcgccggtgaataccgattgtcggagttccaccaccggcagtctgccgcgccatgccatggccgctgcacgacgtcggaccgcatcaaccacaccctaaacgacggctgtgcctcgcacagcacctccgtgagccaccgccggacgcgccccgcacggcgtcaaccacggcgccactcggccaccaccgcgcatcacccgtgcacgccgcgcccgtacacgccggcctgccgcgccactcctcgcatggccgacgcacgccacccgtgcgtgccgcaccctgcacggccctaacaccacacacgcggaggcagtcgcattcgcgttggccgccgcgctcctcgcatggccgtgctgcgccgacgccacgggccacgggccgcgaccgctgcacccgccgattgccgtgcaagaag

SEQ ID NO: 6065 - DNA, 601 bp, Oryza sativa
  ref <308>: DATABASE ACCESSION NUMBER: AK063222
  ref <309>: DATABASE ENTRY DATE: 2001-12-06
aagggggggcatggcgcggcggcggcgggcggccggaacgggtggatgacggtgccggcgttcggggactgggacatgaagaacggcgcgctgccggactactccatggatttctccaagatccgcgagatgcggaagcagaacaagaaggagctctcccgcaccagcctcggcggcgacgacgacctcctcgcccagcagaagcagcagcagccgcagccgcagcagaagcccgccaaggccaacctcggccggccggccgacgaccaccgccaccggcaactccatggccgccacggctcgccgacgggaaggaggacgtttctgagctacttccagtgctgtattaaggcctgaagaaggactgtcaactactgctattggctgtactgttgtgtcacagtgcaaactactcagcttatttttagattaggcttcttgggctttgtcaagcctagcaagatgtgtaatatattcgtcgtgatgcttaatcttttggtcattcagagaacaaaactatttatgagtggcacagattgcttgcgaattgaggtgcaaagctgtaatatattgaaggataaatggcatcttgtgtttttgt

SEQ ID NO: 6066 - DNA, 901 bp, Oryza sativa
  ref <308>: DATABASE ACCESSION NUMBER: AK063223
  ref <309>: DATABASE ENTRY DATE: 2001-12-06
agcaaaatttggtgatttggtcgagcacggcgacgcatccacgcgagcccgcctccctctccatcccctccaccgtcgtcgagttagaccaaaccgccaagcgaagccacgacggatcgagccgccgccgccgccgccgtgcacgcccatatctagggtttcgatggagcccgcctcctcctcgtcgccggcgccggcgccggaagccgcggctgcggggaggagggtgccggaggcggcagagctgaagctgcggcggaggacgctggagacggtgctggagcagtgccagcgcgcgctcgagatgatgcgggaggctgatctgggcatcgccgtgtctgaggaggaggaggaggaggagggcgccgacgccgtggcggcgaatccggaggtggggggcagcgacgggtgtgatgaggagggtgcgccgccgccgtctccgccgtcggaggccgactacgagacggacgaggtgaggaggggggagagagctgtgcctctcaattttgtgatccggggggtttgtaggtgattcggtaatccaggtaacgtcgatggctcgattgattgatgatcggtaattcatgacatttaggcgtttgtgaatgtcatatgctccaaatgttcgcggattagctggattagaattggtagcctactggaattagctgaaatttacacggaattagccttgtatgaatgacatgatggcgccataatttggctctcccttgttgctatgatgtttctctggtgtcgtaacgtgtcgtgtgttgagtccactatttagctaagctaattatggctgcttgctgtatataattgcggtaaaatgtgattgtggaagaagaaaagtgtgttttgtattggccaatcaaaacgtgcagctatgttgtttagc

SEQ ID NO: 6067 - DNA, 548 bp, Oryza sativa
  ref <308>: DATABASE ACCESSION NUMBER: AK063224
  ref <309>: DATABASE ENTRY DATE: 2001-12-06
ctctctctttctcacccaaccccaactctacacgcacgcggcgacagcgagagagatgagcaccggcggcggcgcggacaagtccggcggcggcggcggaggggcggtgaagacgccctcggacttcctcaagtcgatcaggggacgccccgtcgtcgtcaagctcaactccggcgtcgactaccgaggtattttggcttgcctggatgggtatatgaacattgcaatggagcaaacggaagagtatgtgaatggccaactcaagaacaagtatggtgatgccttcataagaggcaacaatgttctatacatcagcacttcgaagaggacccttacggatgacgcatagatcgagtggaacagagtcgactctttttaacttcaaaatcgttaagctgattggttgtgatctctctctgacccatgctcgtacctgctgttttgaggtgggaaaatgtattgcatattgctagacttatcagaaacttctttaatgtaactgtatcagctttgcaaagaacttccggccaagatctccagttgcattt

SEQ ID NO: 6068 - DNA, 472 bp, Oryza sativa
  ref <308>: DATABASE ACCESSION NUMBER: AK063225
  ref <309>: DATABASE ENTRY DATE: 2001-12-06
atcgcgtcgccattgtccccttcgtcagcctccccctcgccatccatccgccccccaggtcccctcaaccctaaccgcgctgcctcaaccggtcgccgccgccgcctcaccctgtgccctcgccagatcgattccgcgatgccctgcctccttgccttgctcgccttggagcatctcgcgctggatcccgcaggaaattttgtggaatgctaatgaccaccgcaatcagcaaggaggcaatcgcccagtgcttctttgtggattccttcctttaatctgaacaaaaaggactcagagctgctatgttgagttcatcagagatcagtgcagtacaatccaacttttgattattgatacgtagtcttcagttttcaactgatcaatacaagaaccttaattctaataatcgccattgatctcagctaaacaccccttatataattgtttagcggctatttatctagaatgtaag

SEQ ID NO: 6069 - DNA, 610 bp, Oryza sativa
  ref <308>: DATABASE ACCESSION NUMBER: AK063226
  ref <309>: DATABASE ENTRY DATE: 2001-12-06
acattctcttctctttctctcccggcggtagaggcagcgtgcggcagcgtcggcacaaggagtggcagccacccagaggcgcccacccttcgccagatccggcgggaggaagggcggcggtggcggcactggcctggcaggggtgggagttgcggcggtgccgtccctccgccaaatccagcgggaagggaggcgcggaggtggtggatggcgtggaggctgtggcccatacagcgtaggtgcgacggcccctacttcccggtggcccgactgtgggaggggtgccgtggaagcccagtgacggcggcagcggtggcggatctggtagacgctgacggtgagcagcggtgatgtctgtgatttctttgatctttatttcaatgtttgttgtgtgatgtctgtgattgatgttggttgattcgggagttcatagtctataatttttgtgattgatgttggttgattcgggagttcattatctgtaattgatgttttggatttgagattatggggcaatgcagggtggatgcactcgatgcatcggctcgattcgagccggtatatcgagcccttatttttggggctcgtgaacgccagatttgttcccgcc

SEQ ID NO: 6070 - DNA, 789 bp, Oryza sativa
  ref <308>: DATABASE ACCESSION NUMBER: AK063227
  ref <309>: DATABASE ENTRY DATE: 2001-12-06
atcaatggtgcggcggcctatccgtcctcttgctcaactgaggcccagccggagccggccgcggcggagcaaatggagggatggcagcttgtgcacgggactgaggagcgcagtggcagagctcgagcgtggaggtggagaagaaatggagaggagccgagctgctgctgtctttggtggggttcatataggtttgctggctgcctgtgtatgggaggcaatgtgagggtaggcggggagcagctctgaatgtcgacatcgccacagtaccaggtatgcatggccccttgcacttggctctgccattttcggtgtgaacttggtgttgtggatcttcctcattgtgttgtttgtattttgggaatgaattttgtgaaccgggagcatgggtgcatggtttgctgtgtggaagggacccatgttattgaatggccgcatattttggtgcaaaatcctgttgtgagccggcaatagttggtgctaaaccctgttgcggcttgtaggcaattcatcgaacagcttctgtgcaggcagctggttcggctggggagggaaaacagactttggctgagaaggttgcttggtggctgtagctctgaggttagggaggcaaaacagactttctgtgagatgagctgggctgacagggaagggaggtggcctggttgcaataggaacttttgcatattgcagggattgaattggaatgacatatgtattaatggaacttgtaatttggactgtatttatattttggaatgtataatctggacatttatttggctctgt

SEQ ID NO: 6071 - DNA, 613 bp, Oryza sativa
  ref <308>: DATABASE ACCESSION NUMBER: AK063228
  ref <309>: DATABASE ENTRY DATE: 2001-12-06
actctcgagtatcgatcgcgtcgcgtttgatcgatcgagacgatggtggtggtggtgagccatgtcatggcgctcctgtcgtcggcgctgtccgggaagaaggcggcggcggaaggtgacggcgacgacgacggagggcagtgccggtgctggcgggacggcgacggcgtcggcggcgggcaggcggcggcggcggggtgctgcgtgtgcatatcggggttcagggacggggaggaggtgcggcggctgccgtgcgggcacgcgttccaccgggactgcgtcgaccggtggctggcgctctactgccggcggcggacgtgcccgctctgccgcctccacgtcggcggcgccgtggtggccgccgccgtggccgggctcgacgagctccagctcggcgacgacctcgtcatctggttctcctccctcttcgtcgccggtttctagcttggttaatcagaatccatcctagctgttgcctgcatgagcaatttgctcttttttttaaaaaaaaaggaaaaaaaactttgttgttttctccctttctgcttccagcttatgagatgaaatggccaatctctacctgtcctggtggtagagcaaaacggcatggcag

SEQ ID NO: 6072 - DNA, 707 bp, Oryza sativa
  ref <308>: DATABASE ACCESSION NUMBER: AK063229
  ref <309>: DATABASE ENTRY DATE: 2001-12-06
cgtatcattggatggaaaagcatggtgatccactgtttcttcgtcacgtggctattgtggagatttggggactactggcccttcgattagcagatgaccctgtgctgccttttgattatcaaacatacgcttcccagttgcaggagcatgcaaatgcattctctagtatgatggaaaatagcaaatgggttcatttgctgaatagatccattgaagatctttctgatgcaggcttagaatttctgaaagaggcaaagaaattacaggaccaaaatatatccgatgggtactctctgatgaggcggcgattgttgaacgaccgtcttctacttgctgaaagaagctttctgcaagctgatggacttcagggaagaggatggttcaagcatctgatgtactcgcctccggaggactacgaaagcaagctctcgtttttccctggggtggcggacgccatctcccggtcgagcaatcgaagcgcgaaagaacagcaggcggcggtgcggcatgagcaactgccggtgcaggagcgcgggcgggcggcggcgcaccgtcgacgcagcaggctacgacgtctgccgcgtggcagctggaagacttcgcatctgaattctcgtttccttgattggcttcacaacacgtcgactgatgagcgatgagacagaaatctgtaacatcttcatgtaataaaactgcatttcattctc

SEQ ID NO: 6073 - DNA, 641 bp, Oryza sativa
  ref <308>: DATABASE ACCESSION NUMBER: AK063230
  ref <309>: DATABASE ENTRY DATE: 2001-12-06
atgtttgttaagtccagggacgaaaggttgcgaagcgtaccaaggcgttttgggatcgcaccgccgatcgcgttgaagctgaggttgaggtatcggagcccggcaacatcggctgcggatgcgaggccaccggagaggccattgttggggaggtggattctcgtgagggacgagaggttggagatgcagggtgggatttctccgctgaggccctgtgcctccatgtccaaggccacgaccaaacgaggctttgggagctcgctggagcatgtcacgccgcgccaggtgcacatgtcgagcgaggtattgttccatgtggtgagggcgcctccctctgggcttgagaggtgtgatttgatgcagagcagagcttcccgttggttattgtcggattcgtcagctattgctaatgctgtaagggagacgagcattgctacgactgcaatgtgtatagctgcacataccatctttgctggtgtgtattttggacaatatggtttcagtttttagatgcttttgattcttatagtggactaggacatttatattaataggcgtttatacatcttttacccatgttgattgttggatggtgccatattcttggtcgaatagtcaatgcattcctgttgaacatgact

SEQ ID NO: 6074 - DNA, 786 bp, Oryza sativa
  ref <308>: DATABASE ACCESSION NUMBER: AK063231
  ref <309>: DATABASE ENTRY DATE: 2001-12-06
atttcctcttccccatctctctctcactcaaaacaacgtcggcggcagcgcctctccccaaccttcctcccaccagcgccgccgctccccctccccctccctccaccggtgaccggcgccaccgctccatctccccctcttcctcctgtctcaccggcacggcgcggcgactgggaggggacccaccagcagcgccgcttcccctcggccactccccccttcctccaccggcggcgctctccttccggcacgaatccggcggcggcggcggctccctcaaccccttgtcacctccctcccgcggtatatccggcggcggtggcggtggcggtggcggcgtcggcgggaggaggtggatccggcagtggcggcggtggctccctccgccccctctcgcctccctcctgcggcagatctagcggcggtggcggcctcgcggcggccatgggtggatccagtggtggtggcggctgcggaggacagatccggcgacagcggcggcggctccctctgccccctctcgcttccctccctcggctgaaacgacggtggtggcgggcgtcggcagcgcagctcggcaagccactgccggcggccactccgcgccccttcaccggttttggccatgggaggcggtggcagcagaggcggctatggaaaaatctgctcgatttctgttcgatttgtttttttttatctccgtttgctgttcttctattcttatatttgggatctaacataaactggattaaaactttgtgtgttatttgatgcgcactctggatg

SEQ ID NO: 6075 - DNA, 751 bp, Oryza sativa
  ref <308>: DATABASE ACCESSION NUMBER: AK063232
  ref <309>: DATABASE ENTRY DATE: 2001-12-06
agggccaacacacacccagacgcaaaatcgccctcctcgtcgcctgccggcgagatggcttcgtcggcggcggcctacctcgacgccgacgagaacctcgaggccatcatctcccgcatcgagcagaagtcccgcaagatcgagaccctcctcaagcagtcgaagccggtggaggccctcaagacggcgctcgaggggacgcccctcaagacccgcgacgagcgatgcaagtcggcgaactggatcgtggtgcaccgcgcgatgatggcgatcagggacgtcgacggcatgttcaactcgctggatcccgagtactacgacatcctgatgaagtacctgtacagaggtttgtcaacaggggatcggccaacatgtgaccagtgcctcaaaattcatgaaaaactcaccgagaaagcaggcttaggatgtatattgcgctcacttgctgataccgtaaacaccgtgtgagtttcatctctgtggagggtgggcaacacaaggttttttctcccagctgccccatgatatgaaaatatctcattagggccaattagttgtatggaaaattgttgtctagatgatgttgattgttatcctcttccctttccatttggcagctagcttctgatagagagcttccttgtactctagtactagagttgctgaactgctgtactactagtatatatatattgttgtttccaacacgttatgtggcatgaactatgataatgaaaatgttgtggttttc

SEQ ID NO: 6076 - DNA, 556 bp, Oryza sativa
  ref <308>: DATABASE ACCESSION NUMBER: AK063233
  ref <309>: DATABASE ENTRY DATE: 2001-12-06
gcttattacaacttaccaagagatcatgtcgtcagacgcgaaatccgttgcatctgctaagcaaagcagcaaagctccatcgagcactggacgaccattattgaaaaatttaactcgtgcacgtgttccgcgcgctggtttgtttggcataagtcttgctataacaggcgctcttctttggaagattaatgtctcggaccgtcataaacgcaatatttcgtccttctacaaagattttgatccggaacgtgattacgctcgaatgaaagcttctggtgtattcaaaagtcttgaaggccaagaacgaccagcatggcttcatgaatatgaagccgaacttgataaggctatcgcttctctacgtacatccgtcacccgtaaatgatccgtgagaatttttgatcaaccacaaatttctcagctaaaatttttaacctacaattgcctgaatagtcatagaatgaacaaacaaaagactctcctttttcttttgtatgtctcaatgcctctagtctcatgaaccccgttcttttgtctaataaatcatctgactttg

SEQ ID NO: 6077 - DNA, 730 bp, Oryza sativa
  ref <308>: DATABASE ACCESSION NUMBER: AK063234
  ref <309>: DATABASE ENTRY DATE: 2001-12-06
atttcactagcatctagcaagtgcacaacacatctataaatcgtagtaaccaccttaggtgagatgatggtcatggcgatgatgagaagggtggtgatggtggtggcggtgctgtgtgcggtagcaactatggccatggcacaagaggcgtccaacgtgcgtgccacgtaccactactaccgtccggcggaaaacaattgggatttgggggccccggccgttagcgcgtactgtgccacgtgggatgctgacaagccgcttgaatggcgccagaagtatggatggaccgccttctgtgggcccgttggtcccactggtcaggatgcatgtggcaaatgtctctcggtgacgaacacggcgacaggggatcagatcacggcgaggatcgtggaccagtgcgccaatggggggctggatttagactgggacaccgtcttctccaagatcgacagcgacggtcaaggctaccagaatggccacctcatcgtcgactaccagttcgtcgactgcggcgataactagcagctaattaaccactcttataaacttccctacatatatatacacatttcggacagaggagtaattaatatatctctgcctgatgaatgaataaagtggctggtgaataattgtgatgctaggctgctgtagatcgatccgtttacacatgctcgaagtatcaataaaattgtgtggaaatgtgatggatttctgtggctaaaagcct

SEQ ID NO: 6078 - DNA, 614 bp, Oryza sativa
  ref <308>: DATABASE ACCESSION NUMBER: AK063235
  ref <309>: DATABASE ENTRY DATE: 2001-12-06
ttttgtgctttctggtcagcaattgacccaagtactaggcatcggatgtctagagaaaagactgatgtcatattaaaagtattagtgaagcatttttttgtggagaaagaggttacttcaacattagtgatggattctctgtatacgggcctgaaggtgcttgaataccagagcaagggcaagaaagggagaacgatagctgatttggatgaactgcctgcacccatgatccatgttgacatggacatgtttgttttggccagtgatgttatagatttgcttgagagagcagccttagaaccactgccttgtcaacctgtgtctccaaaggatgacaaatgttcccagagtcgcatgaaggatggtgcttctggtgaggttaacaaaatttccatggagcgcgaggaaagacgcctaactgagcttggtcggaagatacttgaaacatttgtgctatctcatatattcagtggaattgaagttgcgtaccaagaagctgttgctttgaagagacaagaagagttaattcgagaggaggaggaagaggcatggcttcttggaaatgagatgaaggggaagcgtgggggtggtgctaatgaaaaagataagcgtgc

SEQ ID NO: 6079 - DNA, 1008 bp, Oryza sativa
  ref <308>: DATABASE ACCESSION NUMBER: AK063236
  ref <309>: DATABASE ENTRY DATE: 2001-12-06
agacaacggcgaccatggacgccgccgcggccgatctcgaggcgcggcagctgcggatcctccgccgcgtcgcggacctcgagctcgccgcgcagcagcaccgcctgggggcgctatctatctccgcggcgccctcggggggcgaggcggagacgggcgccacggaggcgcggctctcctccatcctgaccgcgcgcggcgtgctcgacttcaccttccggcgcgtgcccgccgactactacgaccgccctctcgaggagcgccgcgacctcctccgcgcagattcagtcaatcaactctgcaagagcatcgtcatggtgaatacacaagctgctgcagatgttgttgactgcagcaatccaaagaattcaaaatattatgtcgttgttgttcagtatatggcacggcttaatgcagacagcatcaagaacttcatctattccctaaacgagaagcagatacccaagaagagatttaacatgaggctggcaccagaagaggagtcactcaagcttacagggtttgttcacaatgctgttacatgcattggaatggaaacagacataccggttatcattgatgaagctattaccaagttagataaggatttcttctggctgggtggtggagaagttgacctcaagcttggggtgcggacctcacagttcctaaatgcattcaaaccatttgtggtgaagtgtagttagtgataactgtacaacggaagagaaactttgaatccatgtggttttaccatcttgatgaacacatgagacatcgccagggatgtaaaccaataggtttttgcttggatctggggttgggatgtctgtcttttttagagcaggcgtttctgttccagttgcacttctcgcattagttacactattttggtaagattgatgcagcaaagggggcattcttgggagaattgagataattggcacaagtgggcatgtactaaaaacctttgtagttcgtgccttcaatatactaggatttactctc

SEQ ID NO: 6080 - DNA, 780 bp, Oryza sativa
  ref <308>: DATABASE ACCESSION NUMBER: AK063237
  ref <309>: DATABASE ENTRY DATE: 2001-12-06
ctctctcgcgtgagacttctcctctcctcgagtactactcttctcctctcacgccgggaggcgacggcgctagcagttgccgcctcgttgtcgtggtggcggcgccgccgccttgcctccttcccctccctctctatccctcgccgcacctccttctcctccctcaccgcgacgccgacgggaagccgcggcgaggaggcgtccccggcggcggcggctggcgcggtggcggaggctcgaccgggggacgcctccaccgcggcgacctcgccgagggagacctcgagcagccgccgttgccgcgaggaggagcgagtgggctgggccggcggcggatctggcggacgcggcgctcgtcggcgtgaggagcggcgagtgattcgagacagcggcgaggaggagtccccgagaaggcaccggcgcaacggttcccctccctaagaagaggcatggcggaagcggtgtggtagaagaggcggcgcggcctcctcctcccacgccgcggcggcacggcctcctccccgtcgaccgtgccgctgatcctgaccccaccggcgccgccgcggtcagctccgtcatcgatcgacgcggcggcggacggatccgcctttcccgacggcgggggcggcgagggcggcgggaacagacggcagcgagggcgaagcgggtacgggaacagtggactcttgtgtgattcctctctgtgttcttgtgtgattcctctcctctttgtgttcttgggtgattcatcttgtgtgatttctcttgtgttcttgtgtg

SEQ ID NO: 6081 - DNA, 1343 bp, Oryza sativa
  ref <308>: DATABASE ACCESSION NUMBER: AK063238
  ref <309>: DATABASE ENTRY DATE: 2001-12-06
accatccatggcggtgtccgtgtcgtggtcgtgggcgccgcggttcttggcctgcgtcgcggtggcggtgttgcttgttacgtcgggtttgggcggtgcggccgccggcggcggcgggcgacgccatgggcacacgaaggggttgcggccggggaaggcggcggcgaagccgtactatccggtgaacgcgacggcggtggaggcgatcgagcggcagttcacgcggtgggtgcggtccatggtcgggcgacgccacagcacgttccagcgcgcgctctaccgcgggctgctgcccacgcgcaccctcgtcgtcgacaagaaccccgccgccggcaacttcacgtccatccaggccgccgtcgactcgatcccgctcatcaacctcgcccgcgtcgtcatcaaggtcaatgccggcacatacactgagaaggtgaccatctcgccgctccgcgcgttcgtgaccatcgagggcgccggcgcggacaagacggtggtgcagtggggcgacacggccgacacggtcggcccgctcgggcgccccttcggcaccttcgcctccgccacgttcgccgtcaacgcgcagttcttcgtcgccaagaacatcaccttcaagaacacggcgccggtgccgaggccgggggcgctggggaagcagggtgtggcgctgcggatatcggcggacaacgcggcgttcttggggtgcaacttcctcggcgcgcaggacacgctgtacgaccacctcggccgccattactacagagactgctacatcgagggctccgtcgacttcatattcggcaacgccctctctctctacgagggatgtcacgtgcacgcgatcgcgcggaactacggagccctgacggctcagaaccggatgagcatcctggaggacacgggtttctcgttcgtcaactgccgcgtgacgggctccggcgccctctacctcggccgcgcctggggcaccttctcccgcgtcgtcttcgcctacacctacatggacaacatcatcatcccccgcggctggtacaactggggcgatcccacccgcgagatgacggtgttctacgggcagtacaagtgcacggggccgggttcgaactacgccgggagggtggcgtggtcgagggagctcacggaccaggaggccaagccgttcatctccctcagcttcatcgacgggttggagtgggtcaagttgtagcaccacgtaggagagaaacacagctcactcgactattagttaacttgtgaagagaaaagaatagaacagaagaagtggcagataaacactctgatttgattcgattgcagatttcaactttgcagttgcattgtgagac

SEQ ID NO: 6082 - DNA, 1293 bp, Oryza sativa
  ref <308>: DATABASE ACCESSION NUMBER: AK063239
  ref <309>: DATABASE ENTRY DATE: 2001-12-06
gtgcaaacacacgctgatcgatcagctcgccggtgaggagaggagagaagaaagcgaaggagctagagagcatggagggcgcggcggcggcggcggcggtcattaggcaccggacggtggaggcgaacggcatctcgatccacgtcgcggaggccggcggcgagggcggcgatggcgcggcggtgctgttcctgcacggattcccggagctctggtactcgtggcggcaccagatggagcacctcgccggccggggattccgctgcctcgcccccgacctccgcgggtacggcgacaccgacgcgccgcccgagatcgagtcctactccgccttccacgtcgtcggcgacctcgtcgcgctcctcgacgccctcggcctcgccaaggtgttcgtggtggggcacgactggggcgcgataatcgcgtggtacatgtgcctgttccggccggatcgcgtgacggcgctcgtcaacaccagcgtcgccttcatgcgccacgtcttcatccgctccggcgccgacgccatcaagaccaccgatcacttccacaaggcctacggccccacctactacatctgccgcttccaggagcctggcgttgcggaggaggagttcgcgccggcgcacgcgaggcacatcataaggcggacactgtgcaaccgcttcaccgtccacaaggccggcaagccggagagcgaggagtcgccgccgccgccgccgctgccgctgccggcctggctaacggaggaggacatcgactacttcgccgccgcgttcgagaggacgggcttcaccggcggcatcaactactaccgcaacatggacaggaactgggagatggcggcgccatgggcggacgccaaggtgcaggtgccgaccaagttcatcgtcggggacggcgacctgacgtaccactacgccggcatccaggactacctgcacaagggcgggctcaaggccgaggtgccgctgctcgaggacgtcgtcgtcatccccggcgccggccacttcatccagcaggagagggctgaggaggtcagcgaccttatctacaacttcctcacctcccccaagcccaaccaggacgacgacttctaaatgactcctgttgcatcagatcagctgcctgtacacggattcaagaatggggaagcgttgggatcttgtatttaggggtgaaaacgggcgggtattttccgcacccgcctgacccgacggttgcgggaatgatacgatagtggaaaatatattgtatgagttctatttgaatccgtgaataaatatgagttagaat

SEQ ID NO: 6083 - DNA, 415 bp, Oryza sativa
  ref <308>: DATABASE ACCESSION NUMBER: AK063240
  ref <309>: DATABASE ENTRY DATE: 2001-12-06
tatttggttcttcccttctctcgtagccgacatgatccttccgcgctttgtgttgttcttgtttacttgatctgatgatgattaatgtggcccgatctgcgtatctgcctgcttgctgctggcgatagatgatgattgctgcgtctcgcagcagctcgctgtggttgtgctgttgtaatatagcaacattttacttgcttccttcctgtgaggaagcagacagctaaagtaacttattttcaatctttagctacatgtgctcatcttgttcttaccctttatactcttttagtttttctttctttttggaattgggaagcttgaaacatcccacctatttactagaatagtcagaaggcttgtagcaaacaggaagcttaaatgccagaaatatacagctgaaattcgttctgtt

SEQ ID NO: 6084 - DNA, 945 bp, Oryza sativa
  ref <308>: DATABASE ACCESSION NUMBER: AK063241
  ref <309>: DATABASE ENTRY DATE: 2001-12-06
gaagaagcaatgttcagctttccatccacactagccgcggcaaccccctagcctccgccgccgccgcgcccaccttcttccccgacgcctaggacgacgacgacgacagcgccacgtccaaggccgcctccggtggttccccggccatcccgcctccgacaacggcgccacgctttccgccgccgagggctacgacggcgaggaccgcgtcagcgcactccccgacgacctcctcgtcgcccgcctcccgtcaaggacgcgactcgcaccgccgcgctcgccttccgctggcggcgcgtctggagctccacgccgctcgtcctccgcggcaagccccttgtgcgccggcgtggagggccctaggggcggcgaggtcgacgatggccgccgcccacggcgaggtccccgtggaggcggtggtggccagcgcgtggaggaagcgcggcggcggcggcgctggtcgccgatctcctcctctccgccgccgaggccgtgggcgttgcagccgtcggccgcgccctcgccggtcacccagaccccttccgcgtcgtgcaccggtccgagctcgccgggtcctcaaccatctgcttgcctgcaagcctcgcgctcgcgctcaacaggcagagagagagagagaggaggaaccgaggagcagctgacgtggcattctgacatatgggacccacgttggttccatgctgactcagccgtcacatagaccaaaaccggggtcaaaaccaccgaagaatctcgggtgaccggttttgtatagttaagggaccctatatatctgtttttgcggttcgatgacgtttttttatctcactgacaagttgagggaccttgggtgtacctgttcctttgtgttataaacatatcacaaaactacagacttagtcataaataaatttataaaaaaggactacatattttagagttcatacc

SEQ ID NO: 6085 - DNA, 1003 bp, Oryza sativa
  ref <308>: DATABASE ACCESSION NUMBER: AK063242
  ref <309>: DATABASE ENTRY DATE: 2001-12-06
cctcgagtgcatttcatcgaacaccttgcgatcactctctcaccactgctagagatcaccattgcgaggctctctggccggagctggaggttggaggaagtggaggcggagctgcgctgccgccgtcgccattggggaggttggacgccaaggaacgccgacgaacaccttcgggcgccatcaacgccgtctgcctctgttccgcgacatggaacttcgtcgttcctcctttcctcggacaaaggctcagaccccagttgagtgttgcctatggagtggagctgaagccccgctaggatcgcctttttccgctgctgctgttttcgtttcgatgcgaggactaagtgcctcttctctaagtatttatgctttatttacgttgggaactgtatattacttgttattttgtgtacccttgcagatttctggatagggatttaatacacaaaatggtctggaaatttgggctaaatttctggttcaaggatttcttaacacaaactgagttccaactggaacatgaatcagagaagattatgtgtacaattaagcaattgaactgatcctaatggctgccagtggtggtgtcgctgccggactattgtcctgttgtcttcttcgaccagggctgggaatgcacgaactgaccatcagcaacactgagttagaccacctgttcgatggaatgcaacagaaagaggacactttcagccagattgcattagcaccaacactgcttggtggacgtgagtactacactatccacatgcatttgcttggtgctatcaagagatgcaattttattcaacacaccgtcacaaccattcgtctgaatcttgttctgcatgatggtgcatttgccaatctgaatttatgaatagttatgaaggatcagagatctagactgaccaattgaaattggcaaatatatgccaatataggaattaatttacaaaagttcgtcacgcgaatcacatagtaatttttttgccgaagacgcacc

SEQ ID NO: 6086 - DNA, 534 bp, Oryza sativa
  ref <308>: DATABASE ACCESSION NUMBER: AK063243
  ref <309>: DATABASE ENTRY DATE: 2001-12-06
tgtttgttaatttcttccccgtttgattaattctaattaactaatcgttcgacacattctttaacgggtttaattcgattcgtgcattggttgtgcggtgcacgaacacggatgcgcgagctgtgcctcggtttgactcgctcaaattcgatttcggctgctcgatttcttggtgatcatcgggttgatcctgttcgatcgattcgtcattgatcgcctcgtgacaacgataggtgtggttgtaattggcggattgatgagaaacagcacggtgtgtccgcgtgtggaggaaatgaaagcattcaagatgggggggtcgccggctgatggatatgataactcaaagtttgtatccatcttcttcatacgattagggttgatgcaagtggtccgcagggtgaagctgtagtagacttgtagcctccaaagtggaatgtgcttgctctgcttgttattagctctgtaatttgcttgtactcctcttgcaaaacgtaatttgtcaaggctgtatatttcagatagctttgccatatc

SEQ ID NO: 6087 - DNA, 540 bp, Oryza sativa
  ref <308>: DATABASE ACCESSION NUMBER: AK063244
  ref <309>: DATABASE ENTRY DATE: 2001-12-06
aagcaccaaccaaaaccaaagcagagaagaggcaagaacaactagctgcatggcaatggcgggagagagtaggaggaggaggagggcggcggcggaggcggtggcgtggtgcttggcgctgggcgtggtggcgctgctgctggtggggtcggtggagaaggaggaggaggtggtggtggtgcgcggggcgcggctggcggcggcgcggccgtgcgaggagatatacgtggtggaggaaggggagacgctgcacagcatcagcgacaggtgcggcgacccgtacatcctggagcagaacccgcacgtccacgaccccgacgacgtcttccccggcctcgtcatcaagatcacgccgcgccccggccgccgcaactgaactgaacttgctgatcgatcaacgcgttgatctatctctgatcgatcgagagatcgatcaacctgtacagtggacaccgatcgacgcgaatgtatggcggaatgcagagatggttcttgtttgtttgtgttttttcttgctttgaagtttgaaagattctgacc

SEQ ID NO: 6088 - DNA, 627 bp, Oryza sativa
  ref <308>: DATABASE ACCESSION NUMBER: AK063245
  ref <309>: DATABASE ENTRY DATE: 2001-12-06
aaagtgctgctcgcactggccaaatttggccagccaaaaaggcctagccattcgtgggcccacgcacgtgtactactcccacctatcctctcttccacagatcgcgtttttcccttcccccagatccagcgcgcgcatctctccgccggtgccgcccctgtgcgccacccctccgccggcgtcctctcggccaggggcgcccctctgccgttgtgttttgttgccaagacgccgtcgaccaccgccgttgtcttttgccgccagcgccgcccctctgcgccacccctccgtcgtcgtcttctgctaccagggccgcccctccgccgtcgtcttttcacttttgttgccgaagccgccattgactgctgccgataggacctgctgaggccgccgccgtccctgctgagaccaccctgccgatgcccatagcaaagcaggtaaaacccccatccaccactcctttcccctctgtattggctctgtagatcgaaaatcccctctgtatttgctctgtagatcgaaagatcgaaagaaatatgtgtgcaactgtaatgtgtatttgctctgtaatgtgtgcaactctgaagatcgaaagaaatatgtgtgcatcaaatgtaccttgttgtt

SEQ ID NO: 6089 - DNA, 928 bp, Oryza sativa
  ref <308>: DATABASE ACCESSION NUMBER: AK063246
  ref <309>: DATABASE ENTRY DATE: 2001-12-06
atttttccagcccaaagccaagcgcctcggctcgctctcgccgcctcgccgcgcgccgcgcgctcgccatggagatcggtggcgtgctcgtgtcgctgctcttcgccgccttctccctcccctgcctcctcctcctcctcgtcctcgccgaggccggcctccgcctcgcctccctcgcgctccgcggcggccgctacgcctggcccacccgctccgacttcctcggctaccgcatcgcccgccgccgccgcgccgccgtctccggcggcgccggcggggcggacggcgaggaggaggcgcagccgacggcggagtgctgcgaccgccttgccgtggcgatgtaccggcgcgggcgcgacgcggctcccgtggactgcgtgttctgcctgtcgcgggtggacgacggcgaggaggtccgcgagctccggtgccgccacgtcttccaccgcgcctgcctcgacgcctggctcgtcctcccgcgcgccacctgcccgctctgccgcgactgcctcctcccgccgccgtgcgagccgccgcgcagcttcccgctcgactactacgacgacgacgacgacgtccacttcggcttcaacgacttctccatcacctcctccaccaccaccaccacctccgccgccgccgccgtcgcctacccacacggcgtcgcgctctggcccatgtaataaatgtaataatcgccattgctgccgctgccggctgccgccatgcgagaagccgaggagcagagtgttctctctgtttttcttcttctttttttttggtttctttttgcatagttttttttagtaattagttgctaattaatttgggactgattgcttgattaatctaatgtaatctaagatgatctggctaggtggcccatgtaaagtaatgtaataatctccaattctccattgttgctgcc

SEQ ID NO: 6090 - DNA, 771 bp, Oryza sativa
  ref <308>: DATABASE ACCESSION NUMBER: AK063247
  ref <309>: DATABASE ENTRY DATE: 2001-12-06
ggccatctccaccacgaactctccaagctcttcttcctcctgagcactctagcttcactgcattgctttgcagcagcaacagaaacagagagagaaatacactagctgattgatccagtggaatttggtagctgtgatggcgaagaagatcgcgccggcggccaacctgaagcagatcctgaggaggtgctcgagccttgggaggaggcagcagcagcagggcgcggtgccgaggggccacttcccggtgtacgtcggcgagagccggtgccggtacgtggtgcccatcgcctgcctggagcacccggacttcctgctgctgcttcggaaggccgaggaggagttcggcttcgagcacgacgccgccatcacgcttccctgccacgaggccgactttgaagccctcctcgccgccctgactgcctgagtgaccgttcaatcgatgaggcgatcgaccacttacccggccgtcgtcgttggtggctgccgcttccggcgcacggtgctgcagcagctgcccggtcgctcggccggggcaccagagatgcacgcacacgcagtggcagtacggctggcattggttggagcttggttgtgtagtgtagaccggaaatgcaaacatgggagttccggccggaaaccgatcaatcaccgggcgggtagactctgcttcagctgcccggtggccggtgggggttccgggcttcttgctcgtgggattctttcacgaattcttgccggttcatgcagcaaaatttgctgcttttagct

SEQ ID NO: 6091 - DNA, 856 bp, Oryza sativa
  ref <308>: DATABASE ACCESSION NUMBER: AK063248
  ref <309>: DATABASE ENTRY DATE: 2001-12-06
atcacctctactagctagctatagctctagttctactctaattgcgcagtcgatcgaacgtacactgccaatcaaatcaactgcgagcttgcaatggagagaggagcgagctttgcagtggtgatggcggccatggcggtggttctggccaccacatcgacggcgcaggcccagaccacggcgaccgacatcgtcaacatccacaacgccgcccggagcgccgtcggcgtcccggcgctgtcgtgggacgacaacctggcggcgtacgcgcagggctacgcgaaccagcgcgccggcgactgcgcgctgcggcactccgatcgcaacaactatcagtacggcgagaacctgtcgtggaacccctccgtgcaggcgtggacggcggcgagctccgtcgaccagtgggtggcggagaagggctcctacgactacgccagcaacagctgcgtcggcggcgccatgtgcggccactacacgcaggtcgtgtggcgcgacaccaccgccgtcggatgcgccgccgtcgcctgcaacgccaaccgaggcgtcttcttcatctgcacctacttccccgccggcaacgtccaaaaccagaggccgtactagctaccgtatacgtatacgtacgtaacgtattacgtatatgctatggtatatatattttgctactatacttatatattgtttgtacgtaatcgatctatagatatatatgcgcatatatgtgcgaactatattatatatgtatgttcgtatgtatgtatgcatatctgcatgcgtatataagtgtgtgtcggatggaataagtacatcatgatgcaagcgtattgagtatatctatacagatacaaatatatgt

SEQ ID NO: 6092 - DNA, 697 bp, Oryza sativa
  ref <308>: DATABASE ACCESSION NUMBER: AK063249
  ref <309>: DATABASE ENTRY DATE: 2001-12-06
atcatcaaacaccattactcatctctagttcagacactaattattaacatacacacattaattagtgtgttcttcatcatcgccggcgatcgagcgaaggcgacgatgttttgcttgctgcatcggctgttcccgttcctggttggcacggccgtcggcgtgtacgcggcgcagaattacaaggtccccaacctccggggactcgccgaccgcggcgtcgacgccgccaagcaatacgaggaggcctaccgcaagaagccctcctccggcgccggcgccggcggcgggagcaagaagaggatgaacaaggccgtggagatcgacgacgatgaagagtaactaagttactgatagctagagatgcaagcaggtcgacctacgatgaaccgaacccacttataggtcaaataaataacccgtggattttcgggtcgtggctcggcttgtcacatctatagatgcaagtgaattagtggataatccgcatagttttgcttataaacaggttcgtgggttggtccacttgcattcctactgatgctggctcctaccccatccaagctgcaaggagtatatatgctctacaaaaacgagcaactagtgtataagttaaattgtttagcgtatgtatgtacaaactaactgctatattcgtctcaaaatataacaacgtgagactgtccaaattcgtggtact

SEQ ID NO: 6093 - DNA, 724 bp, Oryza sativa
  ref <308>: DATABASE ACCESSION NUMBER: AK063250
  ref <309>: DATABASE ENTRY DATE: 2001-12-06
agaggaaaggacgacgcccccttcaccgcgtgcttgccagcgagggcttgatggcggtggccaccgacgacgatgaagatgttgaagagatgcagggctaccggatcggaaggattggtagcgcctcatgcaaggaagacagactagaccagatgggatctgcagctggaacacgtaggttgtgcacttctgcaaacaatgctgcagtgtcccttcctccggggtggggaaggtcacgatcgatcgcgttcggcgggcggcagcgacggactgcaggcccggcgaccggcacgggccgcgcctctcaggtcttcgttgatggggatggaggccttcgacacagctgcagcatccccttcgtccatgttcggccggccggcactgttcccgtcctcggggaagctcatggagtcatatggtgtcgcaagtcgcaactgtgtgcagcggctcatcgccgtcgaccttgagactaacatttggccttcactgaacttcgcgccgttgtcgatacctcctgcctggctgcctcatagcagtgacaagcaagacatcggcaggagtcaaaatgctagcaatagctgccgtttagtttttttatgcactatatggatggaccaacagctgccctgtaaattttttactactagtagcacatttatgttgtgataaaaaattactgtaccttttttttactatataccagcagcgatctcgcttgatgcac

SEQ ID NO: 6094 - DNA, 577 bp, Oryza sativa
  ref <308>: DATABASE ACCESSION NUMBER: AK063251
  ref <309>: DATABASE ENTRY DATE: 2001-12-06
gagagcgagcaactagcgctagctactactcgaaggcaaaatggacgtgatggagaagtctcggcgagctcacttcttgttcgacgacgacgaccaaacgccgccgaagcagaacggcccccagaacgacgaccagcacaacaacgacgacggcagcggctgcctctgcgtgtcgtgctacggcggcgtcgcaaaaccaaaggcgcccaagtcgtcgtcgccggcgaaggacgtcgtcgccggcggccgtcctgctgcaggctccaactgtacctgatcttactctaaccatatatagcttgctagcgatcgagctcgatctcatctcgcacctagcttgatcatgtcgagcaaccatgtacgtgttgatcgacatgatcactctagctagctagctagctacttcatatggatgttgaataagggatcatatcggaggaagacatgcatgagtgcttatgcaactatgcaagcatgcccgtctccaattactggtacagactacagagtgatgtatgttacgagaaatgtactctttacaaataccatgaacatatattatgatcaattacatgac

SEQ ID NO: 6095 - DNA, 715 bp, Oryza sativa
  ref <308>: DATABASE ACCESSION NUMBER: AK063252
  ref <309>: DATABASE ENTRY DATE: 2001-12-06
gtcggcctcccctgacgcccgtctcctcgtcgccgccgccgccgccgccgagcgccgccgcctaatcctcgccgcagatctggcatcccccatgcccgacgtcatctccgcccccgatgctgaaaccaccggcggcggcggctcgtcgccgcacgtggagaagctgaggaagatgctgttccggaggatgctggtgggggtgaacgacgggcgctacttcctcgggctgttccactgcgtcgacaagcaggggaacatcctcctccaggacgccgtggagtacaggaccagcgcgcggcggcggtcgccgtcttcgccgtcgtcttcacccgcggagcagcgcggcctcggcctcatcctcatcccggccgcctgccgctcctcctgccatgtcgactgcgccgtcgaggagagcatgtcgctcctctctctcgacaggtgaagatgaatgagatatacatatgcttctctagctttttttttttactctttttttctgattgcaatagctaataaactagcttttcagccttggatgaacttatgtatgaaaatatttttgctgtggattaatttgctatcatttctgtcatatgggttgctgttcatctttcactcctgtagtctgtagaacagaacagatcagtgatatactgctactggttgcatctcactacggtcagtttactggccgagagttcttcagtgggatttt

SEQ ID NO: 6096 - DNA, 545 bp, Oryza sativa
  ref <308>: DATABASE ACCESSION NUMBER: AK063253
  ref <309>: DATABASE ENTRY DATE: 2001-12-06
aattaacaaatttacaaaaaacataacccaatctacaactccaacccatgaaagctatcctttcctttgttgccctcttccttctcatcgctcaagcccaaatggctggtggctacactgatcaaagcgtttccactgttgagactgaccaaggcacccagacagcattcaatttcggtaaggctcagttcatcaaggctgcctatgccgctaatgagatctcctccactaacttctcttctgagaaggttgttagcgtcgctactcaagttgttgctggtttgaactacaagttcactgttgagttcactgatagtgaaggcaagaatacttatggaactttcgtggtgttctctcaaccatggactagcaccctcgaaatgacttcctactctgtgagtgctactcctcagttctaagaggtgactatctcgatagtttgggcgtaagttatatatataagactatatttggaagtagcatgacttaactaattcgtatttattatgcctaacttattgtattcatgaaacttgaaacataag

SEQ ID NO: 6097 - DNA, 1234 bp, Oryza sativa
  ref <308>: DATABASE ACCESSION NUMBER: AK063254
  ref <309>: DATABASE ENTRY DATE: 2001-12-06
tttatcctttctcaatcgacttttcaacacattaagttggactatgaccgagtcctctatgtccatccgtgagatgcaagagaagcgccaggttgcagatttgcagcaaagaaagtgcagtgttatttttgacatatcatgtagtcttgcaaggattttggaattcttcaccagagagattcctcatgcattcctgatggggccagatatgaatctgcggaggttggctgaattagttgtctttattctgaaccacatcatattagcagccgatgcagagttctttgacatgactctaagacggccagggcaacatcaagaaaaaacaaattgcactatgatcttggctcctcttgttggcattatcctcaatcttatggaaagcagcagtacttcaggccatagggagttaaatgatgtgattacagtgttcacaagcatggattgccctgccacaatccattttgggttgcagtacctactgagctacaattggagcaatgttctccgaggtgacgcttcccttgcaaagctagctcagcttgaagaattctcccattactttatgcacatcactatgtcagcggatggcaatgaagagcaaggtttcagcactgccagtaatgaagagaacaactgctgcatatgctacaattccgattcggataccacattcgagccatgccatcacaggtcctgctacggctgcataaccaggcacctcctcaacagccaaaggtgcttcttctgcaatgcagtggtgacttcagttaccaggatagctgattcgcgcatcgaatctcggtcacctttggcaccgtaaacccgaagagaagaaagatggatcatgccggatgtcttatccatttttgctcgatttggaggcgcagacagctcggagcctcggagttcttcccttctgctttcctggaagactgcatcgccatggtggtgaagtcagaaaggttaatcttttcccttgtgtaaagatcaggtaatagttaaaacaaaaaaagattcaataacaggattgcagaaggaggcttctgcacaaggtgggaagccagtaccacccaaagaaggattcacagaatcgtgaaatttttgtaggttgtagggaaaaattccattgtaaatacgagatatgaaacagaaaggaggtgtcagatctacatcaaccttttgtaattatgtagttaaaataaagaaatactagatggtttatattggaggg

SEQ ID NO: 6098 - DNA, 742 bp, Oryza sativa
  ref <308>: DATABASE ACCESSION NUMBER: AK063255
  ref <309>: DATABASE ENTRY DATE: 2001-12-06
ctcagctgcgcaatcccacggccgccgccgccgccgccgcctgtccgccatggcagggaagcttattgcaaacttgattgtcatgggctctgggattataggaagagctatgctccaagcataccggaaagcacttgataatgcaaataaaactggtgtggcccatgaaacaattaataacattcgtagagccagcaaaacaatgactgagcaagaagctaggcagatactcggtgtatctgagcagtcaacttgggaagagattgcacagcgctatgataatttatttgaaagaaatgcaaaatctgggagcttttatcttcagtcgaaggtccaccgagcaaaggaatgcctagagaatgtgtaccaaaagaataagcaagatggaacaccaccttgaaatttgcagtccttgaaaaatcatcttttcagatatattctttcccactcataagagaagtgtacataccagaattggtcgctgctgttgtatcattacacgtagtggaatcaataagaatcaaagtgcagcgagactttggaattgtggaaaactgttttatgaggtttcaataaactctagcatgaagtacgattttgttcttttgatttgaccttaggaaacaatgcaaattttgtcatcttggtggctgctagttaggtttaaacatttgaacatgtactgtccctcatcaaagtttggcattgcagttaggctgccagatggaccaatgttgaaaac

SEQ ID NO: 6099 - DNA, 1664 bp, Oryza sativa
  ref <308>: DATABASE ACCESSION NUMBER: AK063256
  ref <309>: DATABASE ENTRY DATE: 2001-12-06
aacaatagttctaacagtccctccttgccaccgcgggccggtcggcctgcctccaccgacggccgacggcatgatctggttcggggaattcaagccgcgtgaatcgattccaatctcgtgttgttcgtcttggtggatcagattggcaagcgagggcttttgatcactcgagatgtcgtcgtcgtcgtcgtcacctcgggcgccgggggacaggaagcgctgccgacgcgcctcgggccctgtgcctcgctgggcgtcgctgcccgaagatctggtggacctggtggcgtcgcgcttgcttgccggcggcgacctgctggactacgtccgcttccgagccgtctgcaccagctggcggtcgggcaccgcctccccgcgcggccgcggcgtcgccgaccggcgcttccacccgcgccgctggatgatgctcccggagggccacggcctctacccgggccacccgagcctgcgtgggtacgcccgattcctcaacctcgacacggggaccctggtccgcgcccggatcccgctcctccgcgatggctacgtcgccatcgactccgtcgacggcctcctcctgctgctgctggaccccgacccgaaccaggagggcgccgttcgcctcctccaccctttcaccggcgacaccgccgagctcccgccgctcgggacggtcctcccgcatctcggctcacggctgctggattgccccgcgccgtacaggatcaggagcctcgcaagggtcgtctgcgcttctgtctcctgcagcgccactggagctggagctggagccatcaccgtcttgcttgcactctccgtggtgtctcgtgtagccttcgctacttccctggaccggcaatggagcctgtcgacctacgaatgcgtgatactctcttcaccgatcgcatcccatggcaagatatacctgatgcacacagacagatcatgtggcgagaagatgcaccagattctccggattgatcacccacctgcagcagcgcaggatgggtcgggctcgggcgcaggtcgtgctctacaagagccaaagctggttgccacaatccctgcacgcaaactcgaccattttcaaggtctggtagaatgtggttcagagatcctggtgcttggttacaagaactggtctacgtcgcggatttcagttttcaaacttgcggaccttgtgctgcaaaggtttatgccaataaaaagcatcgggggccataccctgttcattggagaaaggaacataagtgtctcttctaagatactgcctacagtcaagggtgacaatcttgtctaccttaattcaggacttgtgaaataccacctcagtagtggcagcttgtcactggcaattgataattgcagcctgtatggccgtgcaccgggacctagtagcctcgtccactatatctacagctgctgcattcgtaatcggtggtattgactttattttcttactgctttatttctccctactgtcgattgtttttgtcctgggctagctattaatatttgcattatgtacttgtaggagcagaggactaatatgcagaaaggatgcaccagagtggttagtgcaagattgaagactagttcaataatgaggctagtccttcctcccttgttttctgtaccaatacgtgatgcaccggtcttgagct

SEQ ID NO: 6100 - DNA, 1533 bp, Oryza sativa
  ref <308>: DATABASE ACCESSION NUMBER: AK063257
  ref <309>: DATABASE ENTRY DATE: 2001-12-06
tatgtgaaatgtgctgtagaagatatgaactgaagttgccaattgggtgtgatcctaaacagtacattgttgacttgattctagagttggaaggtactttggaggctctgggtgattattgtttcctgtgtcagggagtatggtctgaattcatagttggcaataatttagattttttgaagcagctagaattaacatctgataagctggtgcaagtaacctcgaatctagtaagaacatgttatatgcagaagttaggaactggagaggaacacatactcaaattcaaatatgcttgtaatggatggcccacaaggaagttcagaaagatgccaaagaatgattgtaatggacactggaagatgtctagattgtttgtgaacctacattacttctcctttggcttatcgactgctaaaacagttcaaaagggcagctgctatctaaggggctctgacaaggtgttgttaactaagttggaaatgcagagttgtgtgaacctgggcgatgataatgtttcttgtcacacgatggctcctagtgaaggaatggatttttgtgagttaaaagtgcttgaggtaacaagtgatggatgcccaatattctggattttggttctagcagctactgaatggaaggttggaaattatacaattctaactgaagggacttataccaagatggctgtttgttcagagcagaaattacaatgtgatgcattaaaaagaaaccagacaggggcaaagcatgttatccagaggaacacatttgttgctcctgggaatttagcctactcagtaaccaacaactatctaccagaaggcaacaaacatagaactatggccacaagggtgaatgtttttggacatggtatccactcaacagaaaaccaaggattttattcagaagggattcaggtgcattcgagtgtccagaaaattcctgctcttgtactgaaccgtgaattaagtatggattttagcaaagatattgcagctccaatgaaatatgctctacaagtttctgaatcttttgagctcaacaggagcaaaaaggtacatgatctattccatttcgacgatggtttactgtctagcagccaagaattggagcacccatgggatccaggaggtttgcttcatcggcttggggacaagacgattttcaaggagaggggattgttaggaccggatgggctatggttggaccgttacaacaatcctccaatccagcccaagaaggcccagttggagaggcaacaaaagcagcagcagcaggaaggttgggggcatcgattgatcacttggacttggtggagctgaagctctcgacggcggcggcgacctgggcagccggtgggcacccttgtcgatctctctcccctacctctcctcctacttacagccttctctctcagctctagaagcttccagaatttgtattacttagtttcttcttctcttttcatcccaaaacaattgttccttgtatggtggatgcttgctattaagttgaaagaagtgggttgttaac

SEQ ID NO: 6101 - DNA, 1976 bp, Oryza sativa
  ref <308>: DATABASE ACCESSION NUMBER: AK063258
  ref <309>: DATABASE ENTRY DATE: 2001-12-06
acaactactctccctcccgccgccgccaccgtagtctaccctactcccgcaccgcagccatggtgtccgacgccagcaagaagaaggcggctcagaagaaggccgccgccgccgccaagaggggcgccaaggcctcctcctcctcctcctcttcctcctccgccgccgataaagcggccaacggtatcgccgcgcttaagctttccgatcgcacctgcaccggagtcctcgcctcccatccgctctcccgcgatatccacatagagtccctctcattaacatttcatggccatgaccttattgttgattctgagttggagctcaactatgggaggcgttacggtttgctcggcctaaatggctgtggcaaatctactctgctcacagccataggctgcagggaactccctatccctgaacacatggatatttaccatctctccagtgagattgaggcttcagatatgtctgcgctacaggctgttatctgttgtgacgaagagaggatgaagttggaaaaggaagctgaaattttgtctgctcaggatgatggtggcggtgatgctttggatcgtatatatgagcggttagaagcacttgatgcatctactgctgaaaagcgtgctgctgagatattgtttggtttgggctttaataaacaaatgcaggcaaagaaaactcaggatttttctggtggttggcgtatgaggattgctttggcaagagctttgtttatgaatccaaccatccttttgcttgatgagccaacaaaccatcttgatcttgaggcttgtgtctggctggaagagacactaaagaagtttgatcgtatacttgttgtcatatcacactcacaagatttcctaaatggagtttgcactaacatcatccatatgcagagcaagaagctcaagttatattctggtaactatgaccagtacgttcaaactcgttctgagcttgaagagaatcaaatgaagcagtacaaatgggagcaggaacagattgcttcaatgaaggagtacattgcacgttttggccatggatctgcaaagcttgctcgtcaagctcagagcaaagagaaaactcttgctaagatggaacgaggtgggctcactgagaaggttgtcagggacaaggtactggtgttccgctttacagatgttggcaaacttccaccaccagtgctgcagtttgttgaagtctcattcgggtataccccagataacctcatctacaagaatctcgactttggtgttgatcttgactctagaatcgcactggttggccccaatggtgcgggcaagagtactcttctgaagctcatgacaggtgacctagctccattagatggtatggtcaggcgccacaaccaccttcgaattgcgcagtatcatcagcatctcgcagagaagctggacctggacatgccggccctacagtacatgatgagggaataccctgggaatgaggaggagaagatgagggctgcaattggtaagtttggcctgtctgggaaggcgcaggtgatgccaatgaggaatctctctgatgggcagaggagccgcgtcatctttgcgtggctggcttacaggcagcctcaactgctgctgcttgacgagccgacgaaccatctggacattgagaccatcgattctctggctgaggcactgaacgagtgggacggtggtttggtcctggtgagtcatgacttcaggcttatcaaccaggttgctcaagagatttgggtgtgcgagaagcaggcggtgaccaggtgggaaggtgatatcatggacttcaaggagcacttgaggagcagggctggtctctctgactagttctatctgcccttcgtttttatcttcctctcttgacagctcctcggaggtttattataatagccaaaccaagttttgtcttgtatcttggagtctaatttatttgtagtagcctgctatcttaattatcactattgc

SEQ ID NO: 6102 - DNA, 1160 bp, Oryza sativa
  ref <308>: DATABASE ACCESSION NUMBER: AK063259
  ref <309>: DATABASE ENTRY DATE: 2001-12-06
atggcggccgtgcgcattgccccacgcctccgctctctcccgctcctgctccccggaccagacgccgccgccaccgccgccgccgtccaccgcagctgctcctcctgtggcggtagcttggccgcgttggcgcctgcccgcctgcgcgccatgtcgtcgtcgtcctcctcctcctccgtctccccctccccgtacacgacgctcgtgggtcgcgtgagctgcgagcgcgagatcaagaagagcaagttcatcgccatcgccgcccccgtccccgacgagcgcgccgccatgtccttcctcaacgaggtcagtgatccccgtgcaacccataattgctgggcgtataagctgggagagcaattccgttacaatgatgatggtgaaccttcaagcaccgctggaaagccaatatactctgccattatttcatctggcattgatatggtcatggtggtggtaatcagatactttggaggcataaaattaggaactggtgggctggtgagagcttatggtggggttgcttctgaatgcctaaaagatgctcctacttgtcttgtaaaaccaaaggctcgtgtgggtatggaggtaccatttgatctcttgggaacagtctatcatcagttgcaacattaccaagctgaagatatcaaacaggactatgacactgggaaagatggtactgttatggtcatgttcaaattggaatatgaaaaaattgagaatcttgggaatgcagtaaattcagcctgcagcaggaaaatagaactactcctataagtggaatcatagggttaagtgtgaccatgcagattcaatgttcaggttgtgcctactgcagcctctgttaaccagtgcactactactacccctgaaatattcagcctttgactcgacgatagttcttagcagcaacttcagattggagttccccaatgtaaacggcagaatcatgttctactgagattattgatcctccaaacatacatatatattagtttctcatcctgtctaccatctattgtaagttaccaataataacgtcttagtattatactcttgtagcattgatatgttgaaagagatgttatgataacttctccatgatctttatgaccaaattgacattaatttggctgatcttttgattcagctgtgtt

SEQ ID NO: 6103 - DNA, 1701 bp, Oryza sativa
  ref <308>: DATABASE ACCESSION NUMBER: AK063260
  ref <309>: DATABASE ENTRY DATE: 2001-12-06
atcgatgcacatccgtcgccattaatggccgatggatggggtgcctgatgcccaacatcaccatcaatgataaaacaacaaaactacttcaaccacccctacgcattcaactccattctactctctctaccccctccttccttccttccttcctaggggagcatcagcagcagcagaagcaatggggatatgctgcagcaaggggaaggaggagcttgaggaggagggatttccatggaagcacgacgccttcttccacgaccagctttggagcgctggcgtctccatgcacaccaagcaaggctggaagggcgccaaccaggacgccatgactacctgccaggactttgcggggcacaagggccagatattttgtggagtttttgatgggcatggccctctcggaagggaagttgctcgccatgtccgcgacgtccttccagtgaaactatcctcctctttggcactgaagactgaacaagatccatccagcaacacagataaggaaaccttggaaaagtcagattgcacctcattgagcgatacaagcaatgagaagcaattgttatccacctggaagaacatatttgtcaagacatttgaggatgttgatgaggatctgaggcaacattctggaattgactgcatttgtagtggcacaactgctgtcactgtcgttaggcagggtgatcacctgatcattgcaaatttgggcgattcacgtgcggttctttgcacccgagacagcaaggaccgcccaatttcagtccaactaaccactgacctgaaaccaaatcttccaagcgaagctgagagaatcctgaattccaaggggcgggttttcgccatggacgatgagccggacgtgcctaggatgtggctaccagaccaagacgcgccgggcctcgccatggcaagggcatttggagatttctgcttgaagagtcatggactaatctgtacaccagaagtctactacaggaagctatctgcaaaagatgacttcttggtacttgctactgacgggatatgggacgtgctgtcgaacaaggaggtgatcaagatcgtatcgtcggctactgaccattccaaggccgccaagcagctcgtcgagcgggcggtgcgcacgtggcggcgcaagttcccgacgtcgatggtcgacgactgcgccgtggtgtgcctcttcttgaagccttcaccgtcgtcgtcggagagcacccccggggacgcgaaacctcctcaggccgtgtcgttcacgggcagcttccgaaaggtcctgggcggcggcggcggcgaggcggaggaggggacgaatgtatggagagctctggagggggtggctcgggtgaactcggtggtgaggctgccgcggatgggcgccgtgctgagctggcggcggcggtcgacgtcgctggaggaagacgacgaggcgaggattgattgattgattgataacagtcgctttcgttgccggaaaacgtaatccagagggtttgattacatgctttaaatggcaaaaattagggagacgctttagaagttgattgacgtaaacgtatgtcgcattcaggttgttgagttgacggaatagggaccgatactgctgctgctatcctccctctcttgtagtagctgaaaatgattgcctagctgttggatgtggtggcctttgtttgatttatttattgtgattcttccttc

SEQ ID NO: 6104 - DNA, 750 bp, Oryza sativa
  ref <308>: DATABASE ACCESSION NUMBER: AK063261
  ref <309>: DATABASE ENTRY DATE: 2001-12-06
gagaggttggcacaggtgatcactgaagattaactgaaggcagctatcatgaggttattaccagcttcagggattgtgaggctggttgcgttggtgttcttgctgatcttcagctcatcacttcagcagcaggcaggtgtcggtgccatcaggctgcatgacagaaagcagcacggggagcagtgggaggaggagaggacgcagatgaggtcgttcatgaccatggactatagctcagtgaggaggcggaggccgatacacaactgattcagctaaaccagccctgattagagatagcatgagaaaccatgagactttcagctctgcttacatctccatgtcccagcagcagcagcagcagcaaacaacatctactgaagcgtgatgctaggagaagctgatcgatccatcatgtgttctctttttctttttcgttgacttctgtgattctgtccttgtacctatgtctccagcagcgtgcacggacgtgtgcaagcaaattttgcccccctgaccaaatgttattatttggatatatatatacgcagcaatactagtagtagcaagaagtagtgctaatgcttagttttcgtcacatttttgtaagaagttgtgaagaacttgtagtttatctgcttcttctgtaactgaaatggcagcatctgatagcagcctgaagtttcaggcatggaaattcatatgtattgagcttgtcaaccataatggaagaagtatactgaaggatcattt

SEQ ID NO: 6105 - DNA, 1602 bp, Oryza sativa
  ref <308>: DATABASE ACCESSION NUMBER: AK063262
  ref <309>: DATABASE ENTRY DATE: 2001-12-06
aaccaacgctcgatcttttacttaccctatctcccgacgatcgatcgatcgatcgatggaggggagcagtaatagcccggataggcagtcgtcgggcggcagcccgccggaggagcgcggcggcgggggaagcggtggaggaagagggcggagcgccgccggcgagccggtgcggtcgcggtggacgcccaagccggagcagatactgatcctggagtccatcttcaacagcggcatggtcaacccgcccaaggacgagaccgtccgcatccgcaagctgctcgagaggttcggcgccgtcggcgacgccaacgtcttctactggttccagaaccgccgctcgcgctcgcgccgccgccagcgccagatgcaggcggccgccgccgccgccgcagcggcggcctcttcctcttccccatccgccaacacctctcccgcagccgcgagcgccgccaccgtgcaggtgggcctcccgcccggcgccgtcgtccacaccatggccatgggtgggagcgcgtgccagtacgagcagcaggcgagctcgtcgtcgtcgtccggcagcacgggaggttcgtcgctggggctgttcgcgcacggcgcgggggcctccggcgccggcgggtacctgcaggcgtcgtgcggcgcgtccgcgtcggcgtcgtcggcgctggcgcccgggctgatgggggatgtggtggacagcgggggaagcgacgatctcttcgccatctcgaggcagatggggtttgtggggagccctcgctgctcgccggccagctcgccggcgacgccgagctccgcggccaccgccgcgcagcagcagttctactcatgccaattacctgcagcgacgatcacggtgttcatcaacggagtcccaatggagatgccgaggggtccaatagacttgcgagccatgttcggccaggatgtgatgctcgtccactctactggggccctcctcccagtcaacgactatggaatcctaatgcagagcctccaaatcggagagagctactttctggtcgctaggccaccttaaaaacgagttctcgatctatccttgcagtagatagtcagatatatatctctactcgatactcattggatcagatgcatgagccggccggggtgcagctagttctcagttaatcatcaatcaagaatgctgtcttggattcaagaccttggagtatgtctaaatcgatcaatcgtctatcgagaacaagactatatatattagctaggtacgagaagcaaattaatgcatgcattgcagcatatcgatcggcaaaagtacaactacgtacttatatatatgccccttaattaaaaacctatgaaagcgtgggcggtcgagtttgttgtccttagaatacagattacaatatggtcgcgtctcttctcatcattttcacaattccattacaatatgcatgtatgcatgcctgcccttggcagtcgagctatatatattctttaatttgtgctagctatagatgcacgtttgtattgtttttttttaccgtgtgatgtaatgctatatgtgtcagccaaacgcgcctggaatgttggtgcttgattcaaggccggttggaattt

SEQ ID NO: 6106 - DNA, 1090 bp, Oryza sativa
  ref <308>: DATABASE ACCESSION NUMBER: AK063263
  ref <309>: DATABASE ENTRY DATE: 2001-12-06
gtcgcgtaggcgtatccaagatccggtggtgcggagctttgcttgcggggcctcggcggctggcgggctcaagaggagcaagtcggtggcgccgcgtccggaggagacgacgccggtgacggcgcccgctccgtccgcggtcaccgcggacagcccgaggaagaagagcttctggtccttcctctactcctcgtcctcgtcgtcgagcggcggccaccagggctcggcgtcgatggccaacggtggcggcggcggcggcgcgtcggtgaggaggaagtcggtgtcggtggcctcggcgtcgtcggcgtcgctgggacggaggctggaggcgatagtggagccggacagccccggccgccgtagcgagggctcgtcgtcgtcgtcgttcgggaggaaggtggcgcggtcgcgctccgtggggtgcggcagccgcagcttctcgggggacttcctggagcgcctctccaccggcttcggcgactgcgcgctccgccgcgtggagtcccaccgcgagcccaagcccaagtcgtccgccggcgcgctcgcccacctgggcggcaaccactccgccgccggcaacggcgacgacgacgagtacgagtccacccagcagcaccgcatcaagtgcgccgggttcttcggcggtctcggcgccgcgccgccgcccacgtcgtcctcctactggctgtccgctgccgacggcgccaccgccgccgcccccagcgcaagaacccacggcgcgcgtagccaccggagctgggcgtgggcgctggcgagcccgatgcgagcgctgaggccgacgagctcctcctccagcaaatccatcatggccgcgccccacaaccgcggcggcgtctccggcaacggcggcatggcgatggccgcggtggcgacgagctagccatccaacatgcaacaaacaccaccgcacacaagtcacatccggcatggtcggtcgatggccacccgaactacactcctccataatttctttatttatttcgcgcgtgttgttatgtgatgtccatggttaaaccctgctatgatatgaaatcaatcgatctccagatgaacttgaccttgatttgtt

SEQ ID NO: 6107 - DNA, 785 bp, Oryza sativa
  ref <308>: DATABASE ACCESSION NUMBER: AK063264
  ref <309>: DATABASE ENTRY DATE: 2001-12-06
gaaacagagcaaaggccaagaagccctagcctagccatggtcggtggaggccgccggcgacagtgaccggcgagggcgaggcggtgccggcggtggtggggagagagatgtcggtgaggataaaggcggtggtggacaggttcgtgaaggagctgaaggaggcgctggacgcggacatccaggaccgcatcatgaaggagcgggagatgcagagctacatcgaggagcgcgagcgcgaggtcgccgagcgggaggccgcgtggaaggccgagctatcccgccgcgaggcagaaattgcgcgacaagaagcaaggctgaaaattgaaagggagaacttggagaaagaaaagagtgtcctcatgggaactgcttcaagccaggataaccaagacggggccctggaaatcacagtcagtggtgagaaatacaggtgccttcgcttctccaaggcaaagaagtgagatatgggctacagaagttgacaagaataatcgtggatggtacaccaatagtagcattttttagccttagatgtgattcaagcttgggtgcttcatgaaatcctgcagtgtccaaaaatgaggaaagatactcctctctttttatggtgtaaggtagctaccaggcagtgtagtctctgcagccatctgattcctcttaatcgaatcattgagcatcaaaggtgatctgagcctgccatttgcgtgtcttggcatgtagtaacatggacttatattagatctagcttatgccacaaatggcttcatggcaacttcttcagtatc

SEQ ID NO: 6108 - DNA, 1465 bp, Oryza sativa
  ref <308>: DATABASE ACCESSION NUMBER: AK063265
  ref <309>: DATABASE ENTRY DATE: 2001-12-06
atcctcgattctcgcgccgcgatcttatcttaaatgtgaagtgaaggtacgcggcgcgcggtgaactcgcgataatggcggtggcggcggcggacggcatcgccgcactcgtcgactggtccgaccttctgccggtgatcctcgaggacatctcccagcgcgtccatggcgacgaccgcgccgtgtttgccgccgtctgcaagtcgtggcggcgcgcggcgagcgcggcgggccctcgcctcagccgccactccctccaccttgtggcgctctgctccggcgccaacgccgtcgacttctcctcccgccacggcgacgtcgtcaagacggcgtacctcggcagcggcggcgcgcgcccccaccgcatcatcggctgctcccacggctggctcgtcgtcgtggacgaggcgtgccgcgcctccctcctcgagcccttcaccgacggcgcgcaggtacccctgccgcccgtcacgtcgttcgactgcgagtacttcgtcacggccgtcggtggcgacggcgacggcgtcccggaatacttcgcggtggacaatcacgcctatcaccaccatctccaaggccatcgcaagatcgagtggaagcctcccaaattggtgccggtccagtcgatgcgcgatgagttcttccagaaggcggccatcgccccggggagccaccggaaggagagctacgccgccgtgatggtaagccacagcggcggctccgggctggcattcgcgaggtccggcgacgaccgctggacgtcgctgcccacccaggcattgacgcggtacgcggacgtcatctggcacaacggcgcgttctacacgctcacccgcggcgacggcgccgtggaggcgtgggagccggacggccgcgccctgaagccacggctcgtgacggggccggtcatgaggtgggagttcaagcggctggtggaattccacagcgacacgttccaccagccggcgttctacgagggcgcgaggtacctggccaagcaggcggacggcggcggggggctactggtggtgagcaccgtggccatcctcgacgacagcaacgcgctgcgggcgcggcggttcaaggtgttcgacgtggacgaggacaagggcgagtggcgctcccgggacgacgtcggcgacgccgcagtgctggtggggatcaaccacggcgagtgcgtgtcgacgcgggagtacccgtgcctgaagcccaactgcgtgtactacgtggtcaagtcgttcgcggcggatttcgaggaggaggagaagggatgctcgcggtacaagagcggcgtgtgcgatgtcaagacgggggtggcgtccaggatgtcggtgtttcggcgcgccgccggcggccatcctgtttggtttgtgccctccgctgtttctcgcaggtgaagtgatgacaaatttgaaaaccgtgtacttaaatttcagaaatttcaagggattttagttacccagag

SEQ ID NO: 6109 - DNA, 2262 bp, Oryza sativa
  ref <308>: DATABASE ACCESSION NUMBER: AK063266
  ref <309>: DATABASE ENTRY DATE: 2001-12-06
aaaaaaccccactctccttgctccgcccccgccgcgtcgccgtcgccattgcgccgccgccgccgccgccgccgacgccgtgcgtcgcgaagtgctaccaggaatgctgggatgaattcatattgtgataagaaagaggttactgtagcttttagcaaaactaaaaggcaagaggaggatgaagtgatttggagaatggtagaacaaggcgctacagatgatgaagagtgtggtggtaccaactgttcggctggcgaaaatagggatcctggttggcctggaacgagtgtcttcaggatgctgattcctgcaactaaagttggcgcagtaattggtcacagtggagaaaggcttagaagactgtgtgaggaaacaaaagcctgcgtccgagtaataggtggccactttgctgctgcagagcgagctgtaatcatttttgcaaaggaacaacctgatgagccaaaacctccagctattgatgcactactaagagtatatgagtgtataatcaatgatgatggtttagatgtgagatataacaatatagttgtggcacggattcttacaccaagtgaacaggcagcaagccttattggcgatcagggttcagtgattaattatatcaagaaagcttctaaaaccaacatccatgttattgacggtgacttgccacctgttgcacttgaagatgatatgattattgaaatttggggactgcctgcaagagtgcatcaagcattggaacttgttgcttgtcatttgagaaagtacctggttcatcgaagtgtcatcccactgtttgacccccatgtgtctattccaatctcacctgtggatatgcccccattccactacagtgaccatcatgagggccttctgcacgaagctagtccaggctattactccctatatgctgaagcttttcaacttgaacacccatggactgatactagttattcaaggtatccaatggaaaactttacacatgctgacatatttgaatacagacaagaagcaccagtattttttgggagatatcggtcagtcacacctccacattatgggcatgaagcagaagcatatttatcatctccaatggaattatgtttgcataacaacctgaatacatatggatggcaagcaactccaccaattggtcgatcagatactgttgaaagaatacgctcccttatatctgtgtatggaaaacaggcacatccacatccgctgaggcagacatatcaatcaactaaaatggaaaaacatccacactcggggatatctttgtacagaagggatgatcatccaacaagggtatctccatcacctgctactgaactacccccatctcctgctgtttctgcatataaatggcaagtatctccatccttaaagatgtatccttcaactaatgtcgaaaaccttcaacactgccgtgtttctgcatgcgctccagaagaactgccaaatgtggttgtgccttcgttaactagtcaatctcctgcagtcacttctcaggttataatgaagatgcaagttccaattttctatgctgaagcggtaattggcccaactggtgcacgaattgattacattcgccaagccagcggatcaagcgtcgtgataaaggatcttgatgacagtgcaatgtctattgagatcactggaagtgctgcaacagatgttcaaattgcagagcagttgataaagaacttcatggctgaagctgctgccgcttcccctgatcacagttatgacttcattccatcacatttgccagcaccgagatctccagagccagatattccaactacttcactcactcgcagagcaagctgttttacagaacctcgcctgcaagcgacctactgagttcccaagagttctctttctgcacatagtccctacaccggcaatacaggaaatccgcgagagtacattcccagaaagttttgatatccatcctcagatgattaatatgcgccccctttttgaacccccaagacttgtatctaatattttctttttctttggcttttagccatagactttgatccatgagttagaaattgactctgatccatgagttagaaatagaccttgatccatgggttagaagtctgagattatggtataggacaacaattttttggtggattcagggtaagtgatgtacaagatatgtgccctcagatgtttgagagacagtttgtattacatgacaacatgcattatgttatctacaaactaaaattcactttt

SEQ ID NO: 6110 - DNA, 1582 bp, Oryza sativa
  ref <308>: DATABASE ACCESSION NUMBER: AK063267
  ref <309>: DATABASE ENTRY DATE: 2001-12-06
ttggaactcagcagactcgctgatgactgtcatgatgaagctgggatggtcttcgccagaggaaatggcacagcttgccgtgtctctcggggctacttgtattcttgctccctggatgggctgctcgccggaaaacccaacatgatcgctggggcaggaggccacaaggatgaggacgggaggaaagtcaagcttccagctaatgtagccgtgggcaagagcgttttccggcgaagacgagcagccggagagatgtacaccggcgccggccccagcgcagcagtctgcttctgcaatttctctctcgtcatgatggctggagcaggggatggctctcacgcctggacgatcgtcgctagaagtcggagacgaggaggagaaggagcagtagcaggaggaatgatgtgaagcgccagcgggagcttcctctgcgccatccttgccgtgaacccggtccatcgcatcaggtgtttcttggtcaagttcttggcttcttgaattcaccggccggggaatcgtcacaaggttcgccggcgggagacgagcagcaacaatacctcaacgccggtggcgcccgcctcaccctcgtgccctttcttggttccggaggtgggatcctggccctgggaggcgacgaggcggaggttgacgggaagatgcaggcgggggcaagaactcaacgccggtggcgcgatgggctggaacggaggtgcctgcttcaccgtcgtgttctttctcgattgccgaggtggggatcctccgatcctgggaggtgacgagacgaggcggaggttgacgggaagatggagaaaacagagacgaggaggaaggggcggaaggaggaagaagaagaagaggagggaaacaagcagctttaaacagggttgggatgcttggagattcgtgagaagaagtgcttccccaccgtttgattatgttccttgattcgtgtatacatctcgacctacgacttacatccaggactgcgtctctgcgtcggcggctggcttcgatccaggtgttggaacttggagttggaggctccgatcgagatgggaatccgccgcatggcttcccgcgaccaccagcacagcctcaaggaaacgacggcgaagcgtggccgccgacgaggatcagctagctagcacttgatcgatgatcatcgctgcgtgcgtcgctccggggtcagcgtgttcctccacgtctgcctctgccgagcaagaggatcagctagcttgaggtgcagcggctaggctacccgtcgaggcgtcgaccattgggaggacgcacacgccggccgggctcaccgccatacgcaccagcaattgagccagagggggacggatggcgagttcaggcatccctttatctggcatctgcgccgccgcccgacacacgtgagcggctgcaagattcatgtaggggttctgtactctactaattcatcattggtgcaattcatttgtactgtattatatccagtgttctaaatctccggagatttagagcattgattatatcaaaacacgtataacgaatcatatatatttttcgatatacactacctgattagcaatcgccc

SEQ ID NO: 6111 - DNA, 1742 bp, Oryza sativa
  ref <308>: DATABASE ACCESSION NUMBER: AK063268
  ref <309>: DATABASE ENTRY DATE: 2001-12-06
taaataggtaggacggcgcggctgctccggtgagccgcgccacggaatcgggagctccaagtgggccatttttggtaagcagaactggcgatgcgggatgaaccggaagcctggttacggtgccgaactgcgcgctaacctagaacccacaaagggtgttggtcgattaagacagcaggacggtggtcatggaagtcgaaatccgctaaggagtgtgtaacaactcacctgccgaatcaactagccccgaaaatggatggcgctgaagcgcgcgacccacaccaggccatctgggcgagcgccatgccccgatgagtaggagggcgcggcggccgccgcaaaacccggggcgcgagcccgggcggagcggccgtcggtgcagatcttggtggtagtagcaaatattcaaatgagaactttgaaggccgaagaggagaaaggttccatgtgaacggcacttgcacatgggtaagccgatcctaagggacggggtaaccccggcagagagcgcgaccacgcgcgtgccccgaaagggaatcgggttaagatttcccgagccgggacgtggcggttgacggcgacgttaggaagtccggagacgccggcgggggcctcgggaagagttatcttttctgcttaacggcccgccaaccctggaaacggttcagccggaggtagggtccagcggccggaagagcaccgcacgtcgcgcggtgtccggtgcgcccccggcggcccttgaaaatccggaggaccgagtaccgtccacgcccggtcgtactcataaccgcatcaggtctccaaggtgaacagcctctggccaatggaacaatgtaggcaagggaagtcggcaaaacggatccgtaacttcgggaaaaggattggctctgagggctgggctcgggggtcccggccccgaacccgtcggctgccggcggactgctcgagctgctcgcgcggcgagagcgggccgccgcgtgccggccgggggacggaccgggaacggccccctcgggggccttccccgggcgtcgaacagccgactcagaactggtacggacaaggggaatccgactgtttaattaaaacaaagcattgcgatggtcctcgcggatgctgacgcaatgtgatttctgcccagtgctctgaatgtcaaagtgaagaaattcaaccaagcgcgggtaaacggcgggagtaactatgactctcttaaggtagccaaatgcctcgtcatctaattagtgacgcgcatgaatggattaacgagattcccactgtccctgtctacaagcctaagaagctttcactagaggatgagctgaaggctttgcagcaaaaggaggacataaacaactatgactacaagaggattcccagacccaatgagaaataattgaagtaaagcatcatttaccaccctgagaagcaaagtaaaagtctcatcattttttccttcgtgacatctgtttaatgctgactgcccaaatgagatgaggaaattccagcattgtagccggcaacaacctccagtattatcatgagaactctatgttctttctgccaccattgtagagaattaaggtgatgattcttgaactgtacgaatcagcgtttgtaacgacggcactaggcatgataaacttggctgtagctttgtatgtctactcttgtgagatttttttggtgttggaatactgccccaggaatgggtgaataaattgcaagactactcttgacatgtg

SEQ ID NO: 6112 - DNA, 2582 bp, Oryza sativa
  ref <308>: DATABASE ACCESSION NUMBER: AK063269
  ref <309>: DATABASE ENTRY DATE: 2001-12-06
aagatccaaaccggttcaaatccccaagccaccgtctcttcccatctccccatcatcccacccccccgaatcgacacccgccgccgctccgaaccatcaaatcaaccccctcgccgccatggatttgcccaagcgagttcttccgcatggttccccgcgaggaagtcccatggcgacgaggcgaagggacgcggaggcggacgagaacgtgagggcgtggagcgagaatccggggcgtctcggtgccgtggcggagtggaccgcgtctctggagaggaagaaggtgctgggtgagaggaacggcggaggcgacgggagcggggaggccgcgtcgccgccgcagttcttctcccaggcgaagcccgcgacgagcccgccgtcgctctcctgccgcggcgaggggccgtacgacccgaagacgaactacaccacgccgcggccggagttcctgcgctacaaccccgagaagcgccgcgagatcctcctccggctggagcgcgaggcggaggacgagtcgtccagtgccacctcggccacccccacccccaccccctcggagtgcgtgtcctccgggtcgtcggtgagaggcggcgaagccgaactcgaccgcgccgacgccaaggaggaggagattgagattccgtctcctcgtggtctcgaccgcgccgacgccgaggaggaggagattgagattccgtctcctcgtggtgggtgggcacggcggctgcttcttctgctcgtcgccgcggcctgctcttgctgctacatctattgtatgagctcctctccctttcctacctcacaaatggggctcgattttgctggaacaactgggagcgtgcatgatgctagcgctcatcaagtaggttctctggagttgcgagcaccaactgagatgatgggttcacatcatgtgtttgaagaagctacagatcaaactgtgcccaacggcagtgaaaatgcagcccaactgtatggccccatgggtggttctcgtaaaaacttcatggcgattgctgcgatgggtttggcagattcatgcccaaatgttccattcggagaatttacatgccaaattggggacagagccgtggaggatgtgcagaattccaaggaagattttcaactgagtgaattgatagttgcaacctctgagaatgccgagcaattgggtgaagttgtaagcctgaatgaaaatgtcactgcagattccattttcaacctacaccgctgatatggtggagggagagtcagggttagttcatcaggaggaggcaggggaggatcactcgcaacactcccagcagttggcctccatggagaagacaatagaacaagaaaacaacgaggtagggtatgatggagagggcctggaaaatgacagattggatcaggcaaccgagctattggagtatgagaatccagctgcagctgcaaaggcaatagtagctatggtaaaatcactgtggccttcaataaaacttcacttgatggagatcttggcgtgcttttctgttgcagcatttgcaattgcagctgctatgctcaagtgtttccagaggtctcctaagggtgcatcagtgtcaacacgtaggcttgaacaatcccctttagctccaaatccaagattgccagtgctcccttcaccacaatctgtgctacaacctgtgcaactgacagttcccaaagtagaaccgcctgtcaatttgaagatccctacactatcacctttgcacaagcctgacctatttgccagcttcagggaacaggtgccattgccagagcccataccagtgtcatctgtcaacctcaataatgctgtgcaatttccactgcccaagcagattgattccgggaatcgtcctcagaaagttcaccaagatgatgctggcagtgctaggattccagacagctattctgttggccgtagagacattgacagctcgagacctccagtggtggcattgcttggggagttctcacttgtggatgcaagtagctcaagaggaagctcccggaaaggatcaaatgaacatgctggggatgttgcagttcaggaaccatcagtaactctgagaaaagatgtggtgaagatgcagaaggaaactacagcaattaaaagccctagtgctcgaaaaacgaaaaaggaggaaaatgctgcaaaggtggagaagaaggatgttaccacgccaactccattgagacgctcaaatcgtctccttaaccgggtgacttctccttgagccagaatgacacattaacactgtcaacagatgctgatccttactgtggagtggagagagtttcgggactacaactcctggctgttacccaagcaagttagcttttcttctgtagcacttcgcaagttagttgacgtacaagactgcagtaataactcatttagtcctcttctctcaaagtacccgcggaatctcattcgctatattcatgatgctttgatgttcatgtactactcattttctactcctgacggtaaaaacctgtaactgatggatgtattggatatatggttgtgtcctggtttacctaattgagtcaatcaatatgcttctgaatct

SEQ ID NO: 6113 - DNA, 1474 bp, Oryza sativa
  ref <308>: DATABASE ACCESSION NUMBER: AK063270
  ref <309>: DATABASE ENTRY DATE: 2001-12-06
agctcgttcaatgcgcccggtgtctcctcctcccaactacacacccccgcaatctcgctcgctagctcgctgatcgatcaagctcaagctcaagctagcttcggtcgtcggcaatggcggcgcaggcgtctcctccaacgaagaaggtgttggtgccgatcgtcgccggcacggagccggtggaggcggcggtgcccatcgacgtcctccgccgcgccggcgcggacgtcaccgtggcttccgccgatgatggcgagctggtcgtcgaggtcatgtacggcgtcaggatcgtcgcggacgcgctcgtcgccggcggcgactgcgccgccgctcacttcgacctcatcgtcctcccgggaggggttccaggcgcggcgaacctcggcggctgcgcggcgctggaagccatggtgaggaggcacgcggcgaccggaggtctctacgccgccatctgcgccgcgccgccgctggcgctggcgtcctggggcatgctcaacggcctcaaggcaactgctcatccgctgttcgtggacaagttcccaccggaggtggccgccgtggatgcgagcgtggtggtggacgcgagcgccgtcacgagccgtggcccggcgacgtcgacggagttcgctctcgctctggtagagcaactctacagcaagaacaaggccgagcagatcgcaaaagaaatgcttgtcagatacgatgctgggtataccatcgatgaagtcaactcggttcaatggaaatgtaacggcacgcccaaggtccttgttccagtagccaatggcaccgaggagatggagctgataacaatcatcgacgtcctgcgcagagccgacgcggacgtcgtcgttgcgtcggcggaaaacgccggcgtcgagatcgtcgcgcgccacgggatgaggatcgtggctgacacgacgctggacgaggcggctgccgatgatcagacgagcagcttcgacctgatcatcctaccgggtggcacgcctggcgcgaagacgatgagcagcaacgagaagcttgtcactctactgaagaagcaggcggcggcgagcaagccctacggcgccattggcgccgcgacggctcatgtgctcgagccccacggtctgctcgagggcaagaaagcggcggatcaggatggcggcgacgagtgcgagagcagagtggtggttgatgggaacgtgatcacgagcggaggcaccggcaccgccatggagttcgccgtggccgccgtcgagaagctgctcggccgcgacgtggcgcagagggttgcggaaggcttgctttttgcctgatcgatcttctgttggttttaggtgatcaaaccaatgaaagttttcataatgcagatgtgtgatctgtgaaagagataattttccttccaagaaaaagacataaagagttgtcatttgtcaaaccatcaacatttgttctcccataaacttataagggtgttttcttaatttat

SEQ ID NO: 6114 - DNA, 1543 bp, Oryza sativa
  ref <308>: DATABASE ACCESSION NUMBER: AK063271
  ref <309>: DATABASE ENTRY DATE: 2001-12-06
atctgatatcgcttccaaaaaccaaaactacccccaagcatcgatttcccatccgacggccaggatcggcgatcgtcaccacccttcagaaatcagaaaccgcccttcttcgggtccgactccgacgccatcgccgccgccgccgccgccgaaaccacgaaccctaccccccggcggcgccgcagccgccgcgccggagatggcggcgtacctgagcatgggagaggcgcaccgccgcatcgccgactacctctcccgcgtggcggactccgtctcctcgtcggacggcgccgcgctcgcctccctcctcgccgtctcctccgcgcaggcccccgccccgctctccgacgcgctctccgccttcccggacttcccgcgcctcgccgccgaccgctacccgcacctctccgacctcctccccccgctcctccgcgccatccactcccactccctccgccgcttcgccgacgcctactcctccttcgagaaggccgccaacgcgttcttgcaggagttccggaactgggagacgccgtgggcgatggaggcgatgcacacggtggcgcttgagatcaggctgctggctgagaaggcagatagggagcttgcaacgagtgggaagaaccctgacaagctgcagtctgctgggtccttcctgatgaaggttttcggtgcactcgcggttaaagggcctaaacgcattggagcactctatgttacctgccagctatttaaaatttacttcagacttggaacagttcacctttgtcgcagtgtcataagaagtattgaaactgccaggaattttgattttgaagattttccagtgaaagataaggtcacttatatgtattataccggcagattagaggtgtttaatgagaactttcttgttgcagatcagaagctaacttatgctttggtgcactgtaatcctcagtatgagtcaaatttgaggagaattttgaagtttcttatcccagtaaagctttcaataggtgttttgccaagaataacactactggagaggtacaatctgcttgagtatgcagatgttgtgacctcacttaagagaggagatctcaggcttcttaggcaagcactcgaaaggcatgaagaccaattcttaaaatctggtgtctaccttgtattggagaagcttgaacttcaagtctatcagagattagttaagaaaatccatatcattcagaggcagaaggagccagccaaggcacatcaaattaagctagaagtcgttgtaaaagctttgaaatggcttgaaattgacatggacgtggatgaggtggagtgcatcatggcgtgcctaatatacaagaatctcattaaaggatactttgctcataagagcaaagttcttgtcctcagcaaacaagatcctttcccaaagttgaatgggaagcctgtctagttcatagtcgcccctgaaaagaattaactatctcctattctgttgtattcggcacatgtttttgtaaaacgttgaaaaactattgcctgacagtaacatttgtattattgtaac

SEQ ID NO: 6115 - DNA, 2271 bp, Oryza sativa
  ref <308>: DATABASE ACCESSION NUMBER: AK063272
  ref <309>: DATABASE ENTRY DATE: 2001-12-06
ataggtttgctcggcccgctaaaaggaagaagagaaggagaggcgaaggatcagataggggaaggccggagcccggaagggcattgccgccgcgccgcgccgtagcgagctccagccggcggcgctgcggcgccgcggcgcccacaccgttcgaatccgccggcggcggcggcggcggtggaaggttcgcggggttcgctcccgagttttagcccagataagtagctcaactgtacccttcgcactttccattttttctgttgacaaagggtatctgaggacaatctggcagcaatctgtgcccaggttttctttgcccctcgctcttagccaccaccaggcactgtattagttctaaaatgcaaaggaatcttctgaaaaattcactgctaacataagtatataactgatgcggtcaatcatcttcaccaatttgggcgttcacgcggttgctccatctgtagcgcataaaaaagcagatagtcagaatgttgaccttgccatcagtctttttttttttggaagagccatcagtctaattgagtgattgtatacatgttcaatgttcatggtgagccatcattttagttcgtggtgtactgcaaagagccatttatattatgatgcagaccagttgacactgcaactggttctggttgtgcttgcacgaacagctgacggcattaaactgagccaaatcatttgcagaattatttatctggcataaacaaatccattgattgtgcccccatgttcctttctctgttttgcttctttttttttttaaagcgaggaagtataaatagacatacagaccaccacacaatcacacatgcacatccattcaactttttgatcctttttgtttcctgccaagagagagcaacaacaagccctcctgttcttaacaaatggctactactgctgcattggtttttgcagggaagtcagttgcaacgccggccatttcattcattgtgaacaaagcattcagctatctcagtgagtggcaccaggctgagggtatgaaggttgtcaaagattaggctgttacaaatgctcaaccagatccaagcagtgtatgatgctgttgatcatcagcagatcaatgagcagagtcatgcactggataagtggctgtggcagttccgggatgctgttgagggggctgaggatgtacttgatgagatagactactacaagcttgaggaagaggctggagtccacaacctagaacttgaggtgtgtaattcagtcgcaaaaaatttcaaacaaaatgttgttcgtaaaaaatttcaaacttgaggttgctaagtatacttctgaggggaacatggtaaagaatcttaggttggctctcacgaggttggatgaaactgctgctggtgttggtacattccttcatctaacaagccgttttggtagtgctctcttgccagatcatgctgaaaagattaatcaagagactagctccactttggtggccactgagatctttggccgtgacacagagaagaacgaggttatgaggtggttggttgacaatatagagggagattcgaacactcctggaatcaaccgagtccctgtttctgcaataattggaatggggggtataggaaagactactcttgctcagattgtgtgcgaagaatttaagagatttaacatactttgattgtattgtgtgggtatatgtgtctgataattctttcaatgcagcaaggataacaaaaaacatcttggaggcacttacaaaacagaagcctaatgctaatactttggaagcattgcaacacattctcaaagagaatctcgaatcaaagaagtttttgctcatattggatgatgtttgggaagacagcaattggggtgaatggcaaaaattaatggctcctttccagaacagaccccataacggaagtagaatcctgttgacaactcgaatgacatctgtagcagatatggttacaagtgtgatgcgaagtaataatgattatatgaacctaaatggattagacgaatatcacaattttatgatgttcaagaagtatgccttttatggtatgaaaactgaagattatgaacatctcctgccacttgctgaaaacatagcaaagaagtttcaagggtgtcccttggtgacaaagattgcaagcgagcatctcaggagcaatgtaagtcatcatcattggaataatttatacaggcagttggaaaacttagaaggaaaaacgagtgccattatcacaccagttcttcagttgcgtc

SEQ ID NO: 6116 - DNA, 1854 bp, Oryza sativa
  ref <308>: DATABASE ACCESSION NUMBER: AK063273
  ref <309>: DATABASE ENTRY DATE: 2001-12-06
atatacagataacagattggtaatgaccaaaattccatccaccgctgggtttcagctcaaatacctcaccactagttcttgagcccctattctggatttggatccatcctgtaccaaacattcccttgtcaattggtacaaaatcttgatagaatataatggtgtctatggccaaggctatttctcgtgtcactctcttcttgacgtacacagcctttgccattctcattggaggagtgcatctgcagaatgtgcgtgtcgagcagcagaatggagaagcagcagcatcagctctatgcctctacgtgtggcaacgcttgtgcgtaacggcacgaggcgttggacccaaggcaccaaatccccttatccctcgtcgtgccgaggccgttgcacccgccgccgaccgcgacgtccagcccgacgcgaccgaccttgccgacgaggcgacgacgccgtaaatccaaatgacgcatctgcccctgccagagcgttcgggatttgcaggcaggggcagttccgtcctctcacagacgtttcaaaaaatccttattacgagccgatcatccccgcgcctgctccaaatcactgcaattgcagagctcaaaggcttgcttccgagatgccaggcctaaggcccgagtctccggcaatcccatcgccagagctccgccgtgtccggacgtcgttcaccggagcttcttcctgggtagccacgactgccatgggtaaggtggtacgatcagccaatgcgccggtcgagccgaaggcgaaggtagaggatgtggagaagcagaggaggaggggtaagggaggttgcaatgggaccgtctcgtcggcgaggtgtaggagcccaccgccgtctcctgtcagcccggagctggggaagacgaggtgttcatggatcacagtcaactctgaacccctttatgttgctttccatgatgaagaatggggagttccagttcatgatgaccagaagctgtttgagctgcttaccttatcacaagccttagctgaaatcacctggcctatcattctgaacaagagggacgaattcagggagatgtttgatggtttcaactatgcatcagtgtctgagttcacggacaagaagataaaccttttgtcgaaatcaaatggaaacatgctactttcggagcaaaagatacgggctgttgtaacaaatgccaagcaaatgcataaggtaatccaggatttcggatcgttcagcaactactgttggagcttcgtaaaacacaaacccgtcaaaagcaacttccgctatgctcgccaagtacctatcaagacgcccaaatctgaggccataagcaagggcctgatgcgacgaggcttccaatgcgttggccctacgacaatctactccttcatgcaggtttctggcatcgttaacgaccatctgtcatgctgcttcaggtttcaggattgcagagatatcaaaaggaacctgagagctgagccaggattgatagaaagaaggttgaactcaccgccttcctcagaagactctgaaactagcagggaggcgtgactggtgctcactactgaacttattaacctgaattacatcggtattcaagaacgtaactatatgattctttgctggtttgtcctcattgggtgattattttgtgttgtatgttgtagccatgacagtttgagctatgcattttatgttgtcactccttgagcaatgtatattgtataggttgttgtacagatcgtttgacgaaacagtgcggtatagtttgtttggggacttgacttgtaacatacctgtatattatataaactagcattggatggttttgatgtatcactgagtggttttctact

SEQ ID NO: 6117 - DNA, 1461 bp, Oryza sativa
  ref <308>: DATABASE ACCESSION NUMBER: AK063274
  ref <309>: DATABASE ENTRY DATE: 2001-12-06
ctaccgggggtaaaaagatttgagagccagcggaagaacctccaaaaggatccatttttgacacctcgcgtgcaggatttcgccgcaatctcccagcgctgattgttaccgcgccgcacaaaataggagataaaaacgcaataaaaacggaagaaaaaaagaataaaaaggcaaaatcacatcttttcggttcccccatcttgttttcctctccattgctagcagctaatccttcccccaatccaatccgccgccgccgccatcgccatggaggcgttgacgaacgcggagaaatgcttctcccctgccagggcgatgtccccgctgccgctggtgaggccgccgccatcaccgggcgctgccggtcagtacctggcagagttgctgcaggaacagcagaagattggtccctttgtgcaggtgctcccaatctgcggcaggctgttgaatcaagagataatgagaatgtctgctattgtttcgcaccttggagtaagggaacatgataggctgcccattgcaagtccaaaccagatgcatccgttgccgcaggtgcctaatttttgcgggaatggattcaatccatggactgggacgctcccagagaaaaatggctttcctcggggaactatgggttgggaaggtgcagcacatgacccatcttacattgtgaagaagatcgtgcggctggaagttccaacagatgcttatcctcatttcaattttattggccgtctgcttgggccaaggggaaactcactgaagagagttgaagcctcaacaggttgccgggttttcatcagagggaagggctccataaaagatcccatcaaggaggaacaattgaagggaaggcctggctatgaacatttgagtgatccgacacatatcttgattgaagctgaattacctgctgatgtcattgacacaagactagcacaagctcaagaaatactagaggacttgttgaaaccagtggaggagtcacaagactttctcaagaggcaacagcttagagagcttgctgtgctgaactccacatatcgagaggatagcccccatcaaaatggcagtgcctctcccttcagcaatggtagcacaaaactcgggaagcaatgactttgtgattccaacccccttgatccctccaaaggcgctctaatcaacttgctttcatgacatagaatcctgctttacattgcatagatttgatgatgatgatgaagcttctgtgagactatgatgttggaattttgctattgctagctgctgaattttgatactcccccttgatgacattagctcgtggctgaggtgactagttgaatctccatggctgtaaaatgagaatgttcatttgtttctttaccatcgactgttagttctgatgactatggtgacagtgcactgagttgccaaagttttacctaaggtagtagaagaataccagaattttcaacc

SEQ ID NO: 6118 - DNA, 1312 bp, Oryza sativa
  ref <308>: DATABASE ACCESSION NUMBER: AK063275
  ref <309>: DATABASE ENTRY DATE: 2001-12-06
aggatgactcgcggagctcaccaacgtcgccacgccctctcgccgacctcctcctcctcctcctcctcttgcctcctccgctgaggcagccagtgcgtgcgccgcgcgggcagcgtcggcattagaggggtggtggcgggcggcgcgccgacggagacgccagatattcagcagaaggcacttcctctgtttgatttgcaaaaatggcttgctgctttatgtttgggaatgatacaaaacaaactagtgaaggtgaacaaggagaaaaagcggtcaggattttttcttacaatgagctgagaagagctacacatgattttagtggggcgaacaagattggtgagggcggcttcggttctgtgttcaggggaaggctcagagatgggacaatagttgcagtaaaggtgctctctgctacttcaaggcaaggcgtccgtgagttcattaatgaactgacagcaatttccgatgtgatgcatgaaaacctaattacgttagtcggctgctgtgctgaagggtctcataggatccttgtatacaattatcttgagaacaacagccttcaacatacactactagggtcaggccgtagcaacatccaattcaattggagagctcgtgtcaaaatcactgtaggtgttgcccgtgggcttgcatttcttcacgaagaagttcgtcctcacataatacaccgggacataaaggcaagcaatattcttctcgacaaggatatgacccccaaaatatctgattttgggttggccaggctcctcccaccaaatgcgactcatgtgagcacccgagttgcaggaacaatagggtacctagctcctgaatatgcactcagaggacaagtgactaagaagtcagatatctacagtttcggtgttttgatcttggaaattgtcagcggcagatgcaactataattctaggttgccttatgaagaacaatttctgcttgagaggacatggacatgttatgagcaagggcatttagaggagatcatagatgcagatatagaagatgatgtggatgtcgaggaggcatgccggttcttgaaggttggactactatgcactcaagatgcgatgaaactccgtcccaacatgatcaacatcgtccagatgctgaccggagagaaggatgtcaacacagaaaggatcaccaagccctctgttgttggtgacctgggagacctgagaggtagcagccagcagagaccaattgatccacagtctctcctgatgagatcctttgccaccactgacccatccacatcatcagacacgactacacgatcatcgctatg

SEQ ID NO: 6119 - DNA, 1813 bp, Oryza sativa
  ref <308>: DATABASE ACCESSION NUMBER: AK063276
  ref <309>: DATABASE ENTRY DATE: 2001-12-06
gatccgctcatctcgtcgtcgtcttcgccgccgccgacgccgcacccaaaaccctcgcaaaaccgcagcgaaaatgcgcgccctcctgccgcggctgccgcggcggcagcggcggccggggccggagctgcgcgtcccggcgagggggctcctggaggcgcgggtgccgtgggtgcgggaccgggcgctggaccacgtggtggagcgggagcgccacctggtgccgttcctgctcgccaaggacgcgctcctctcggcggcgccgccgccgcacgccgtgccgctccactcgctgccgtccaccatcccgttcccgttccgcccgctccgcttcctccggctctacacgtccgccttcgcgctctcgccgcaccccgtcgccgtctccccgacgccccgcctcgcggggatccactccgcggaggcgcaggtgctcgactccacccgcgccgacgccgccgaccacctcctgcgcctcctcatgctggccccggcccgcgcgctcccgctccacctcgtcgcccgcctccgcctcgacctcggcctcgcccccgacttcccccggtcgctcctccccaactacccggactacttcgcgctctcccgcgacggcgccctcctcgagctcgtctgctaccggaaggaccttgccgtgtcggcaatgcagtcctacgcgcagcgcaccggcgggtacaaggtcggcgacgcggtccccttcccgctctcgttcccgcgagggttcgagctcgacaagaaggtgcgcaagtggctcgacgactggcagaggctgccatacatctcgccgtacgaggacggctcacacctgacaccgaggagcgacatcacggagaagaggaccgcggcggtgctgcacgaggtgctgagcctcaccgtggggaagaagatggagaaggaggtgctggtgaagctcggcgaggccctgcggctgccgccggggttcaggaaggtgttggcgaggcacccggggatcttctacttatctcacaagctgaggacgcagacggtggtgctccgggagtcattccggcggcatatgctggtcgacaagcacccgatgatggggataaggtatcagtacctgcatttgatgcatatggggcaggaggaggccgggaagcgcaagggcaagggtcggaagacagttcgcggcgagcagatgataggggaggagtttggtgcggagggcgagaatgacgatgaagaagacgaagagtatgatgatgaggaggaagacatggaagctggtgttgcttctggagatgaggacagcgatgatgatgatgatgatgaggaaggtgagaaggaagatatggaagctggtgttgcttctagagatgaggacagtgatgatgaggatgcggatgataccgatcacgccgcaaagggatagaggtaccaagcacaggtcgaagttggcgcttgcattcgaattggtcatcaagatgattttggtggcagtctatcaactccatgaataatcacaggttgaaattggagcttgtgttgcaaatgggcttcaagatgatttcgctgacagtctgtcgctccatgaacacacagggaacagtgagcaacagaatgtacaatcaagtaatcaactaccatggtaggcagaaatcctgtttaagaggattgaatgtttgactgcactatcaagcagttgatagttgagtgcaaacattcttgtattacctggattcacttcagttttgtttttccatacatgccttagtttgttaagtattgtaatcttataatagcctgaatacatgaagctggctcatttattttc

SEQ ID NO: 6120 - DNA, 1378 bp, Oryza sativa
  ref <308>: DATABASE ACCESSION NUMBER: AK063277
  ref <309>: DATABASE ENTRY DATE: 2001-12-06
tatccaaatcattcataggacacccctctcaagttattcccccatgacaactcttattctttaatttgcttggcagattcttcccgttcgcctagaagttatcctggaacacatccacattgtgcagagagttagaacttagaaggcattggtttttcctgttctttttgttcattctttagtgaagatagatttctttaatacgcttgtaatgccagtatttaaggtgaggtagacctttgaaggaagggatgacttccataccagcatgagatgatagtgagagagatgaagaaattttagctgttcttctcctgtctttgttagcttaggaccatcatttgctgtttcagttggctcttttcctgtcgaagaggttcacctctgctgcttgatctttcctttgtgttgttttctgttgagaggagactaaattgactagcatcaatgctactgtttggaagaaaaagacttctcgctgtgttgggaagttgttgtacgattctttcgcttctcactccaactcagtgtgcttcaagcagccctgatagtttaaatcagagttacaagattgtccagcctttggagctcacacccaaactctcccttcaactcaagctccatgccttcctgctctggtcttcggttggtttcttgatgccaataggagtactgctaatcagagtcacaagcaatgtgaaaagcaccaggagcatcaggattcttttctactgccatgttgcttcacagattgttgctgtcattcttgcaactgccggagcagtgctgtcgataagcaacttcgagaacgccttcaacaacacacaccagagaataggattggcactgtatggtttcatttggcttcaaccactcatcggattcttgagaccagacagaggtgtgaggttcaggagcatctggtacttgacccactggcttcttggcatcgcgatctgcgtggtgggcgtcgccaacgtctacatcggcatgcacacctaccatgagaggaccgggaggagcgtgaggccgtggacggtgctcctcaccgtggaggtgtcggccatggcgttcgtctacctcttccaggacaggtggaaccacgtcgtgcggcagcagcagcagcaagaagccgccgcacttggagacgacgacgacgacgacgacgagcagtcggaggagcacgtgtaccctgccaatgatcacaaggaggtcgccgtggtgccgtagtgaaattacagtagaaattgatacagaatcaatggcggatttgcgccaaatgctttgatttgagagagagagagagagagagcttgtgttgaggagctcacatctgtacagtacaagaagctctcagatacatttgccttgctcgatc

SEQ ID NO: 6121 - DNA, 1495 bp, Oryza sativa
  ref <308>: DATABASE ACCESSION NUMBER: AK063278
  ref <309>: DATABASE ENTRY DATE: 2001-12-06
agctcttgcagaagctcaccactcgagctctgtctgaactctgaagatggaggagcactacaccatgaagaagccgaggttgcttcttctttccttggaggtgatactgattgctcttcttcttcctctccgtggtgcacattgtgagagctctactcaaggtgaaggcggcggtggcggcgccggcgccggcgcggcgaacctgacggtgaccggcacggtgttctgcgacgcctgctcctccagctccttctccaaccacagctacttcttgccaggtgtcaaagtgagaatcgactgcatgatcagcgtgaaatcggcgtccaaggaggagatcaagatcaccgccgagaaggtgaccaacaccttcggcgcgtaccagctcgacatcccggcgatcgacggcttcgagtgcgccacctccgccgccgccgccgccgactccttctgccgcgccgccgtcatcgacaacccctcgccgctctgcaacgtgccggcggtcaccaccaccgtcggccacatctcctcctcctcctccggccacgaccacgaccagcccaacgcctgcctctacaacctcaactccctctactaccgccccggcggcgccaagaacggcggccagtgcggcggcaccggcggcggaggcgacgtgccccccgccgcgctgaacacgtcgctgttctactgcccgccgtggccgtggccgccgatcccgttctgcacgccgcgcccgtggttcccgcccatcccgttcctcacgccgccgccgccgccgttcctcccgttcccgctcccgccgatcccgttcctcacgccgccgtcgccgccgccgccggcgttcccgttcccgctcccgccatggccgtgggcgccgccgccggcgttcccgttcccgcacctcccgccaatcttctcgccgccgtcaccgcccccgccgccgccaccggcgttcccgttcccgttcccgcagctgccgcctctcccgcacttcccaccgctgccatcattctacccatcgccacctccgcctccgccgccgccgccgccaccgccgccatcgttcccgtggccgttcccgccattggcgccgcttttcccgccatatccatctcctccaccgtcgatgtattctcgcaaagatccgagcacttggtcgtcgtcttccaaacagcagccatgagtaaaaaatacattttgcttgtgctggaaattgtattgtgtactatgtatatgagcttttttttatggattgtttagtgtaagagtgcatttggctatttgcactctgtatacaaatatttgtagattttaggtttaaaagaatgaagattaggttaatcctactttgtgactatgaaagggtaaaataatcgcggcttgtgctctctctgtcttcgactgtttggtagtgtggaaatttggcatacaggttaatatcaaacagtgagtctcaacttatgttttgaactttttgtggaaatatatattgtat

SEQ ID NO: 6122 - DNA, 1532 bp, Oryza sativa
  ref <308>: DATABASE ACCESSION NUMBER: AK063279
  ref <309>: DATABASE ENTRY DATE: 2001-12-06
gatgataactgctagtgggcccccgtgccgctccaggggcaggggcgacacgggcggcgaccaccgccgccttcctccctcctccacctcgccgccgcccgagcagaccgccggaaaccgcgtggctgcgaggaaggcggcggcggggccttccttctccctcgagggcgcgggtcggtgcccacgaccccgaccagttgggggcggcgacggtgcggcggcatcggcgtcggcgtcagggcgttgggctgggcgcgcggaggcgacagggtgcggaacagctgggcggaggcggcttggtgcggaacggcggcggcggcgccggatttggcgtccctcgccagatccggcggtccggtctcctcccgggacgatggtggcacccaaggaggcggggaagggagatgcaggcggcgggaaaggtggagcagcggcaacgcgcgtcgcctctccagatccgggctgggggagtggtcggcgccgaggaggtgcggagaccggcaggcagaggcagcgtcacggtggtcaggcgacaacagcggcggctcgctcccgccgtggtcgcggcgccgccgtcggtgtctgtcaagcgttggtgttggcttcggtaatgctgcggcggcgcgctctagctggtcatcccctgtacctggctggatctggccgtccgcggccggatccatcgcctccacgccgaatggcagctggtcggcgggacggctgcgtgtggacggcaagcgcggcggcggctcgctggcggccagcctcctgctcggcagggggcttctgccggtggtgggtcttgtcgttgttgatgggcggcgatgtgcggatgtggaaatggcaggacgacggcttgtgctggcgtgaagcaggaatggggcttgatgtccgtgacggtgacttcctcattgtcggccgagtgttctccctctcttcggtttccccccttggccggacccttttctagtcatggggaatgctagggggagggcggaggctccggcttgctgtagaagtttgtggcggatagatggcgtttcgagggtggccaagggcccgtcttgccattggttacaatcaaggtatgattgcttctaagacgtcatgaactattctgcggccatcgatgtgggggtgcttgtatgggtgatgtgaagatgctggcgaaagccttgccgtgcttttggcgggttcgacaacgacggcgcccgtgggtgtcgtttccctccttggaggcgttgtcatggcactctttcatatcctcacaaatctctccaggtgaaaaccttgttccgattttcggacgagtggcggcggcgtcacgcgtcgtatcctccttgggggcgtcgcttcggagaagttccaatgcatcgatgactattgatggtccttttcggttcaatagctttcatattttgtgttcggcgaggcttcgccttcttgggtccgcttctttcttgtggtgggcgacacgctcttcggttgtttctgctgatgaagtcgaagttgctcactgatggggtgcggcg

SEQ ID NO: 6123 - DNA, 1770 bp, Oryza sativa
  ref <308>: DATABASE ACCESSION NUMBER: AK063280
  ref <309>: DATABASE ENTRY DATE: 2001-12-06
agcagctgtctgaagcttaaccaaagcttaaacccaaagcaaaccagaggcagatcagatcagagctagtagcagcaagctcgcgatctcccccaccttctagaaccttctagaaccgccgaatgccgctccaccaccaccgccaccaccaccactccgccgccgtcgccgtcgccgtagccgacgacgacgacgaggccaagccgcgccgcccctactccaccttcgcctccccgcgcgcgcccacctccgccttctccgccgccttctcaacccaccgcctcctcgtcctcttctccgtcgcctgcctcctcgtcgccgcggcctccctcgccttcgccttctccgcccgcgccgcgaccctgcagccgccgcccctcgccgccgtggccgaagccaccgccaaggtcgccttccgctgcggccgcgccgaggacaccctccgcgccttcctcgcctcctcctcggggaactactcctccgcggcggaggggagggagagggagaaggtgctcgccgtcgtcggggtgcacacggagatcggatccgccgcccgccgcgccgcgctccgggccacctggttcccgcccaagcccgaaggcatcgtaagtttggaacatggaactggtttatcttttaggtttgttgttggacgaaccaaagataaagaaaaaatggcagatcttcagaaagaggtagacatgtatcatgatttcttgtttgttgatgctgaagaagatacaaagcccccacagaaaatgttagcgtttttcaaagcagcttatgacatgttcgacgcagatttctatgtcaaagctgatgatgctatctatctgcgcccagatagactcgctgctcttcttgcaaaggacaggcttcatcagcggacatacattggttgcatgaaaaagggtccagttgtcaatgacccaaatatgaagtggtatgaaagttcgtgggaattattaggcaatgagtacttcagtcatgcatctggtttactatatgctctttcttcggaggtggttggatctctagctgctacaaataatgatagtttaaggatgtttgattacgaagatgttactattggatcatggatgcttgccatgaatgtaaagcatgaagacaaccgtgcaatgtgcgattcggcatgcactcccacctccattgctgtatgggacagcaagaaatgttcaaattcatgtaacacaactgagatagtaaaggcgcttcacaacactaccttgtgctcaaagagccctacattgccacctgaggtggaggatgagtagaaccttagtgttattttttttcccgtcaacagatgccagcttcttgttgctgagagttctccgagaagtgtaccatcgcgagaatgatgtaggatttgtgtgcacactcccgatattgggataagcgaacaagacaatatgtaggttcaggcaaaatgtatactcccgactgatagaagtgggaacatttgttgtcttatgtgccatagccgattctggccatcgattctttcactggctatgttgttcattgatgtgtatataaccatatatataccccagtctgcattgttgatcatgaacttcatttcatgatcatggataactccagcttatttggattgatgtgttctcatagaaccagaacccagcttatgtccggtcggagtaataatgaccaattcatgttgctgattacactcctgagatatgattatctgaagtaaggaccaatttatgttgctgattacactcc

SEQ ID NO: 6124 - DNA, 2266 bp, Oryza sativa
  ref <308>: DATABASE ACCESSION NUMBER: AK063281
  ref <309>: DATABASE ENTRY DATE: 2001-12-06
tggacagagtgactatggtcaacgccaactaggcttggacaatgaaagaagaaatggtacagtagataaatcaagagtggatgcccacatagatgacaaattgggcagcgggagggacagaaactggactggcaaaacacaggagcctgaaggatctgtggactatttgaggagttgtaaatcgcaagattctaaagaggcaagtgactcggaatggaagaatgcacaggaaagacaggatggtgggggtttccatgggcgagttggttaccggcgagattttaggggtagatctgaaagtactagaggttcttcaacctatggaagtcggtatgacacttctgattcgatagagattcgaccaaataatagtcttgattttggacgagagggctctgtttctggaagatatgacgtgggagtgggagctcatcgagatgtaacatatggaacaaacggtgataaagtcaccaattctgaaccagatcaaagtggcagtgccagcatgatttctcaatttcctcaacatggtcataaaggtgatagaccctccagaggaggaaggggtagaccaaatggcagggattctcaaagagttggagtcacattaccaattatgccccctccttttggtcctcttggtctgccaccgggaccaatgcaacatattgggccaaatattccccactctccaggccatcctcttctacctggtgtttttgtgccgccatttcctgggggccctcttttgtggcctggggctcgaggtgttgatgtgaatatgctttctgttccacccaaccttcccatccctcctccagttgctggtgaacatagtttcactccaggtatgggagctggacctaatattcacttaaaccaatttggctccggaataggtgctccaacaaatatgtctggattgagtttccatcaattgggcactcaaagccgtgaaatggtacatggcaaacctcccgttggtggtggttggacaccaaatagaaacagtggaccaaccagaaaagctccttcaagaggtgaacagaatgattactcacagaactttgtggacactggcatgcggcctcaaaatttcattagagaattggatcttacaagcgtagcagaggactatccaaaactgagagaactcatacagaggaaagatgaaattgttgccaagtctgcttcaccaccaatgtattataagtgtgatctgcggcaacatgttctttctccagaattttttggtacgaagtttgatgttattcttgtggatcccccatgggaggaatatgttcaccgggcaccaggaatcacagatcacatagagtactggaacggtgaggagattatgaatttaaagattgaggctatagcagacactccatcgtttgtcttcctctgggtcggtgatggtgtaggtcttgaacagggccgtcagtgtttaaagaagtggggatttcgaagatgtgaggatgtttgctgggtgaaaaccaacaagaaaagtgcaacacccagtctgcggcatgactctcatacaatactgcaacactcaaaggagcattgcttgatgggtataaaaggaacagtgcgacgtagcactgatggacatgtcatccatgcgaatattgacacagatataataatagccgatgaaccaaccgatggctcaactaaaaagcctgaagacatgtacaggataattgagcattttgctcttggaaagaggcgccttgaactctttggagaggatcataatattcgtccgggttggcttactcttgggaaaggtttatcgtattccaacttcaacaaggaggcatatgttaagaactttgcagacaaggatggtaaagtatggcagggtggaagaaatcctcctcctgaggctcctcacctagttgtgacaacacctgagattgaaggcctcaggccgaagtcacccccacataagtaagggcagagccaatgggctaagacaagtgacctgatagagaatccccaaagagatcagttaccgtgattggttcgaagggtgcaatgctggctaatttttttgcaactttagatttaatgcctcacgttgcctcttgtttaaccgaggtcgtgtagattttcagtctcgcagaatgaatgctttgccgtggtacggctcgaacaagatggttcagcttacagcaatttgacagctctatttcaaagaaaatcattcagtatttgccttgttggtacatcggtcacatataaagtcacttttatc

SEQ ID NO: 6125 - DNA, 1660 bp, Oryza sativa
  ref <308>: DATABASE ACCESSION NUMBER: AK063282
  ref <309>: DATABASE ENTRY DATE: 2001-12-06
gtgcgcaccaccaccacccaaccccaagtccatccacggtttcgatcacgcttgacaccatggaccgaatcatgagacaatggcgatctctgctgctgctgctgctctgcgtcgtcggctcgagctcgctgctgctggtgagctcgcagacgtcgtcgtcgtcgtcggactcgtgcaccgccgcgctcgccgtcggcgacctcatccccttcaacaccaccggcctcaactgcttccaggcatggagctcgcaggacttcatcctcaggttcgggcaggacgcgtcggcggggagcaacgtgtggaacttcgtgctgtcggcgccggacgccggcgggtacatctccgtagggttctcgccgaacggggggatggtggggagcagcgccgtggccgggtgggtggcgtcgggcggcgtgggcacggcgaggcagtactacctcggcgggacgagctcccggtcgtgcccgccggggcaggggaagctgtcgctgtcgaccggcgccgccgcgccgaccatcgtgtcccagggctcgaggctctacctcgccttccagttctccggccagccgcgcacggacctcgtctacgccgtcggccccgccggcagcttgcccgggaccaatggcttcctcgcgcagcaccagtacatgacgagtggcaccatcaccctgcccaccggcaccagcggcggcggcggcggaggcagcacatctaccggcggcggcggcggcggtggtgacagcgacgacggcaacgagggtggcggcggcgaagggaagggcaagcacaagcactcaggaggagacggcgacggcgacgaggggaaaggcgggaggcgcacgtcaccgtcctcgtcgtccagcgcgacggcgagcggcgccgccggggggctcagctcgaagcgccgccacggcgtgctcgcggtggtcagctggggcgcgatgatccccgccggcgtggcgatggcgcggttcatgaagcggttcgagccgttctggttctacgcgcacgccggcgtccaggggctcgggttcgtggtcggcgcggtggccatcgtcgccgggttcaggctcgacggcgaggacgacgtcggcgcacacaaggcggtcggcgtcgccgtcctcgtctgcgcgtgcctgcaggtgatggccgtgctggcgaggccgatcaaggaggcgaaggcgcgcaagtactggaactggtaccaccactacgtcggccgcgccgccgtcgtcctcggcgtcggcaacgtcttctacgggatgtcgctggccaaggaaggggacgagtggagctacgtgtacggcatcttcgtcggcgtctgcgccgtcgcgtacctcgtcctcgaggagtggaggcgcaggcattgagccgccgccggccggcgagccggcagcgccgccgccggcgtggcgccgaccgggtcgatgtgcagttttgctttgctgctggtcgccgtcgtgcccgttattgttttgtactatgtgattaggcactgacgtgtgtcattactacgccattagtagctcgttttctaggtatacgattacgatgagcgtattgttttatgatgtgttattcatttcattggtgtagttatgtatattatcatattttacatgagatttacatacggaatcgctagaattgtgtcgac

SEQ ID NO: 6126 - DNA, 1750 bp, Oryza sativa
  ref <308>: DATABASE ACCESSION NUMBER: AK063283
  ref <309>: DATABASE ENTRY DATE: 2001-12-06
aaaaaatccgcctccgcactgcattccttccagttcgtttcgttgccgttcgctcagcgctcgcttccacggttcccccacccaccacgcgcattcgcattcgcattcgcagcagctgagacttgggatatggttatgaattccaagacccttgttgctctcgattccccccctttctttcctcactctccctgagctggtgggtggcggcggcggcggcggccatgagctggaggagaggggacgggggcgtggcgaggagatgggtcctgctgctctgcaccgggagcttcttcctcggcctgctcttcaccgacaggatgtggacactgcctgaggttactgaagttgccaggccaaatggaaggagagagaaggaggatgagcttactgctggagactgtaattctgctaaggttaatgtaaaacgagattacagggagatcctacaaacccaagatacccatcatgctgtatggactttggataagacaatagcaaaactggagacagaactttccgctgcgagaactctgcaggaatcatttctcaatggttctccggtttcagaagggcataagggttcggactctacaggaaggcagaaatatcttatggtgataggcattaatactgcttttagcagtcgacagagaagggattctatccgtaacacatggatgcctcaaggaataaagagaagaaaactagaagaagagaaggggatcgtaatccgttttgttattggtcacagtgctatttcaggtggcattgtggagagagcaatcaaggcagaggaaagaaaacatggagatttcatgagaatagaccatgttgaaggataccttgaattgtctggcaaaaccaagacatactttgctacagctgtttctttatgggatgctgacttctatgtgaaggttgacgatgatgtgcatgttaatatagcaacactcggacagattttatcgaatcatgttaagaagcccagagtatatattggatgcatgaagtccggtcccgtcttatctgacaaagatgtgaggtactatgaacctgagcattggaaatttggtgaccagtatttccggcatgcaactggtcaattgtatgctatttcaaaagatttggcaacttacatatcaataaacaaacgtgttttgcataagtacatcaatgaggatgtgtctttgggagcctggttcataggattagatgttgagcatattgatgagcgccgactttgttgtggtactccacctgattgcgaatggaaagctcaggcagggaatacatgcgcagtgtcatttgattggaaatgcagtggcatatgtgactctgtggagaacatgcagtgggtgcacaatagatgtggagaaagcgagaaatctctctggatttcttctttctaagcagggccaccggaagatctgacatgactagctgaatgctacattgtataacagatcagaacatgttgtacattgtgcagaaaatgtattagattcatcttgtagcaatagtagctaagctaggctcaattttgtgattggggctcaccatacaccgatacaccaactatgcagaccgtggtttcactgagactgccggtgacggttgagggtacataggctgatctactttttctcatgttttaggttgccatttttgttgtaacttgtaaggatctaatgtattctgtgcattgttaccaagatatatacatatatgcagagccttttcactcttc

SEQ ID NO: 6127 - DNA, 519 bp, Oryza sativa
  ref <308>: DATABASE ACCESSION NUMBER: AK063284
  ref <309>: DATABASE ENTRY DATE: 2001-12-06
tggcaagtcctcactgcttatccaaccaagcatgctattcctaatagctgtttcgttgatgaaacaattgagagcagaaagcagtcagagaagcttatcgcggccgtggacccggcgcgccatgccaagaggaagctgcgcatcgctgccaagcaccgggagcacaagagacggaagataatgaccatgaaaatggggaggtggttgaggtaattttggtatcatgtgctatgtagaatcaatttgtacagcgctcatttccgcactgcaagttcttcgcgtagaaggcctgcacgaaattttggcatctctgcagaattttcccatagtccaatgtgttggtagatctgcttaatgtaaacttcgctctcacagcagagtgaactactagtagacagacatacaccaccatatgacaaaggaaagagttgcttattagacgtgtatactgttaggtacagacgtgctcgtgttttttgaccttagtctatagtacaagcgcattgagatacggagatc

SEQ ID NO: 6128 - DNA, 1995 bp, Oryza sativa
  ref <308>: DATABASE ACCESSION NUMBER: AK063285
  ref <309>: DATABASE ENTRY DATE: 2001-12-06
aaccaaaagccctagagaaaccccaactgagagagagatggcgccgccgccgccgcccaccgccttctcccgcctccgccgcctcttctccaccgccgccgccaccgccaccgccccgaccccggaatccgtcctctactccctccgcaccctctccaaggacccctccgtcgcgctcgccttcttccgccgctcccaggccggcggccacccgctgggatccgccgcctacaacctcatgctccgcaccctcgcctcccaccccacctccgcgcactcccacttctggcccttcctccgcgacatgaacgacgccggccactccatcgaccagggcacctacctcgccgccctcgcctccttcaagaaggccagcctcaccgccgactacgcctccctcaccgcccactacgccaaggcccaggaggacgccaagggtgggacccccacctccgccgccgccgacgccgtccgtgccctcgaggatggctcggattcggatgctagcgcggagctcgacgagaagctggagggcgtcgacctgccgctaacggagaccgccgtggccagggtgctccgggaggtgagggaccatccgatcaaggctctagccttcttcaggtgggcggggcgtcagattgggtacaagcacggttcggtgtcttacaatgccatggtgagggtgctcgggcgagaggagtccatgcgggagttctgggacctcatccaagagatgaaggccgacgggattcatgtcgatatcgacacctatgtgaagctctcgaggcagttccagaagcgccacatgctcacggaggccgtggagctctatgagctcatgatggatggtccttacaagccatcgaagcaggatggtccggtgctcatcaggcgcattgctctggggccttcgccggaccttgagctggtctatcgtgtggttaggaagttcgaggcggtgtgggagttcaagactaaggatgtttttgatggcatccatagggcgctgacgagtaatgggaggtttgatgaggctgccgagatcgtgaagaggatgaaaggcgaaggtcatcagccagacaatattacgtatagccaactgatctttgggctctgcaaggcaaacaggtttgatgaagctcgcaaagcgcttgatgaaatggaggctgaagggtgtgtccccgacttaaagacttggaccatgttgatccaaggtcactgtgcggctggggaggtggaaaaggccctgcagtacttcacggaaatggttgagaagaatttggaggcagatgcggctttgttggatgtaatggtgaaaggtctctgtagcgatgataagattgatgcgtcgtatgctttctttgttgagatggtagacaaggccaacttgagcccttggcaaggcacttacaagcatataattggtgaattgctgagggtaaagaaacttgaggaggctctgggtctcctgagatcaatgaaagcacgcaagttcccaccttttgcagacccattccctactcacatcgccaagtacgggacatttgatgatgcaaggcagtttctcaaggccttgacggtgaataacaagtacccatcacccactgcctatctgcatgttttcaagtcatttttcacagagggaagatattcagaagctcaggatttactgtataaatgccctttccatatccgcaagcatcctgatgtcaccgagttgtttgaatcaataaaagttgaaagtgagagtgcggcttgatgaagtgcaagaaattattggtgagattacggcaagcacctacctttttatactcactagatgttgtttagtaatcatggtgtgatagttgccacatctaaaggatatttttgctgaattaactttcctgtgccacacttgtttcttttactgttgacagtatcattgcagctacatagatggcctttcctaaagttaccattcaaattaaagcacatctgcacatttttttggtg

SEQ ID NO: 6129 - DNA, 2306 bp, Oryza sativa
  ref <308>: DATABASE ACCESSION NUMBER: AK063286
  ref <309>: DATABASE ENTRY DATE: 2001-12-06
agtagcaatgcttttattaatcatgtgattggaagatctgctgggaaaaccaaaatttctgtgtcaattacttgtgatttcttgatgactggcagttctgggtccatagcttacagtgcatccaagacaattcttgttgtgccagatcctcctctcgcacttggacttcctataacatggttattcccacccttttatactactacggaccttttacctagatcagttgacccagactcagatgacctggagagtactattggatattctctgctaaggaacattggtaaaagtgatcttgttttgcaaaatgctaacattattgatggaagtaaaattaggactggagaaagcaatgcgattgattgcattcaggcaaaggatcactcaactggtagaacagaaattgcatcgtgcctacgagttgctgaggttgcacaagcacagatagcagctgcagaatcatcaatccatatagcctatctttctgtacatgataaagttgagttggatataaaatacagtgatgaattaggttataccttcagtgaagcacttggaatagtccctgtaaagattgagacgaatcatcctgatgtcgtgtcaattcttatgccaaaagaaggcaatggtacacatggtacccatgaacgttttgtgttacaggcaagaagtcatggaactgctcttgtaaggttgcaaatcagccatattcccaagaaagccgatttcataatggtatctgttggtgcacagatgtatcccagggatgtggtccttcgttctgggcagcaactgaacttcaccattattggagaccggatggatgtgcgtggatccagtcagtggttaagtagcaatgaaaaagttgtgcatattaatagaataacaggtgaagcacaagcacgtggtgaaggtatagcagaagtaatattcaaaggtccaaatacaaaactgcacacaactgtcaccgtgctgaaggtgaaccagatagtagttaatgctcctgcggagacgctgacaaatgctgctggaccacctggtggatacaagttctctgtaaaattaagtgattcaactggacacagcgcagactcctctatcaatcacattaacgtcccatttgactgcaaggttgaaccttcttttgttgggtttgttgagccgtggagtgatgatgctgctaaaaaatcttactgcttatttcatccatattcacctgcgcaactgttgcctgttaagttaaacctgaaggaaggatttttacacattgttgttcatgcaaatctaaaagaagatccaaaggtgacaggatctgctcacgccctctttgtcaaagggttctacattaaagaacctaggaagttaaatctgactccaagctgcaaccatagcatcatcactattggtgggaatactgatgttgagttattctggaatgctaaagatttactgtcagccagtcgtgttgatacaaatggaagaggtgttccaagtcaaattagttatcaggttgaagcacttaaaaggcaatcattctatgacaagatcactataattcttccagccaccggccagactgaagaaatagaagttatctatgacactggagaaagaagagagccatcgacatcaggcttgacaacattggctgcaatcgtgacatgcattgttgttccaatcgctacgattgcgctcttcatgaagttgctggagaagaaaccgatcagagaggcaccaccaagacacgcgactcctgcgcctgcgtcagcaccagcagccgcgatggctgacccagcgtccccagctactggtgagttgtcacctcgtacgcctcagccgttcatggagtacgtgaggaggaccatcgacgacacgccctactacaagcgcgacgccaggaggcgattcaacccccagaacacgtactgatcaaagcgcatgcagcctgggtaatctgtggcttttgtgcctgcattttgcccaaatggtagatatggttagacggtagtacgtagctggcagagagactatagtaatgtgcttggacgtgcatgccggaagatctaccgatgagctttatgctgtcatttttctgatgtcgacagcatcatgtatctctctgtatcatcaattggtgatctgccgatcccatttcctgttaaaaaggaatcgtagggaactcgtgttgtacagttctcctaggtacattgcctgtgttaggcttgtaattggggcagaccgaacgaacaattgagtgagtgatactgatggatgccaaatgtaggaggatgtttaaacccagc

SEQ ID NO: 6130 - DNA, 1740 bp, Oryza sativa
  ref <308>: DATABASE ACCESSION NUMBER: AK063287
  ref <309>: DATABASE ENTRY DATE: 2001-12-06
gcaaaacgaagaataacacactaacttcaccatgcaaggttcagtaggagtccatggcatcctcctcctcgccgccgccgccgtgttgacgcagtgtctcctcgccgccgccgttaatactccggtggtccagtgcgcgtcggggacgacgaaatgcaccgtgaccaacgcgttcggcgcgttcccggacgggtcaacctgccacgtggccgccgcggcgttcccggcgacggaggaggagctcgtccgtgttgtcgccggcgcggcggcgtcggggaccaagatgaaggtggccacgcggctcggccacaacttcatgaagctctcctgccccggcggcgacggcctcgtgatcagcacgaacgcgctgaaccgcgtggtgggtgtgaacgcggcgaggatggagatcacggtggagagcggcgtgacactgtctgagctcatcgacgccgcggcgcacgccggcctcgctctgccgcacgcgccctactggctcgacctcaccgtcggcggcctcctctccaccggcgcccacggcagctcggtctccggaaagggcggcgccgtgcacgagtacgtcaccggcatgagggtcgtcacgccggcgccggcgagcgaggggtacgcgaaagtccgcgtggtcaacgccggcgacccggatcttgacgcggtcaaggtctccctcggcgtcctcggtgtcatctcccaggtgacactcgcgttgcagccgttgttcaataggtcggtctcgttccgccgccgcggcgacggcgacctcgccgaacgcgccgtggcgttcgccggcgagcacgagttcggcgacgtcgtctggtacccagcccgcggcgaggccgtgttccggatcgacgaccgcgtcgccaccaccaaaaccaacacgatctcctccggcgatttccagaacgtcatccagtcgtcacggtcaacggagcagcagcagcacggagacgtgttgccgttccaggccggcatcagcgtgccgctgtcgagggcatcggcgttcatccgcgacgcgcagcggctgctcgacatgaaccccggcgcgctctgcggcggcgagaacggcggcatcctgatccgctacgtcaaggcgtcgacggcctacctcggcaagacggaggacagcgtcgagttcgacacgaccagctgccgccatgacggcgacgcggcgatgccggaggagatggagcagatggcgctgcgcaagtacggcggcgtgccgcactgggggaagaaccggaacgtggcgttcgacggcgccattgccaaattccccaaagccggcgagtttatgaaggtgaaggacgcgtacgatcccgatgggctcttctccagtgagtggagtgaccaggtgctcggcgtcgccggcgccggtggtgtgaacgtggcgaggaacgggtgtggaatggaggggctgtgtgtttgttcggaggacgagcattgctcgccggagaagggatacctctgccgtccgggaatggtgtaccgtgacgcccgtgtgtgccgccgtgtcgccggcgacgcctacgccgatgcatgatcgaactcgatcgtcagaacatgacacgtacgacggcttgtatgtacgtgtagtgtgtgtggccatgctatgcaggccgcgtgaataatgtagtagtactggcagttaaatctgcacgaatgtactgctacatgactgcaatttctagttttcaaataaaacatgtttgctcagatcaaaac

SEQ ID NO: 6131 - DNA, 1634 bp, Oryza sativa
  ref <308>: DATABASE ACCESSION NUMBER: AK063288
  ref <309>: DATABASE ENTRY DATE: 2001-12-06
agtgaaatgtcttcatgcagagcttgctcatgtcttcactctaactcgagctgcctggaattgaaaacgaagaaagaaaattttaaaaaagaactagtcgatgtccttttcgagcatgcgagttgcaatcgagaagaatcatgaccggtggagtgtgcaggggcaagaacagcgggcggcgggcccagcagtaagcgagacaaaattagcacggcaactgaattccatccggaattccggatgcatcatgaagtggttagagcaggtacagagaggagataaaagagaagagtgaaaaacagcgggctatagatttatagccagctgcaatacggactcctagatacatgtgtatatgatatgtgggactaagtataattgtgtagtatatgtttataggtatctatagtatgaattggctataaaattgactataaatggtttgaagctggtagttagcgatactattaagcttgctcttatacggattgcagagcatgtctagtttgcagttgtaaaaaaaaaagcatgtctagtaggagtactccgtcttcgctaagagcaagtttaatagtatagctaactactagctccaaatcatctctagccaattcatataatagttacttactattctattaatacctagtcccatctgtcatacacacattatgtcttgaagtccgcgctgcagctggctacatatctgtagcccattgctcttctcaaactttctttattttttttaaaatatatttatagttggcttatagtctactattgaatctgctctaatgatttgctctctaaagagaagtttttacagagtgtagctaagcatccaagcaactagtaatagagtagagtacttttatgtgggcaacgtggagtactagcgttgtgcgaagaagagagaagctgatatgacgaataccgaggcatcgtatttcgagggtcaaaagcttgatactccagagaaaaggtcatatctggccctagatctagtccatatctgagtcagtgcgatggtgagaactttctcaactgtcatcaaccgccgaggacacaggtctcaactgccgccgaatttcggttggagcccatgaaattgcagccgatgtcgtgcaccaaaatgctgtccaaaaagccagtccatcgaaaattcaagggcatcatcttttcacttatatttatatttatctgtcaaaatttaaatttttaactttaaatttgaagcagattttgagatttttttatcaaagtttatttttcagccttttcttttactccatctatcctataatataagtgattttgattggatgtgtcacatcctactactatacgaatttgttcatactcttcgtttagattcgtagtaataagatatttcacatccacctgacagcgggagtaattgctaagaatacgtatataaaaattttattcacaaattatttttcgtttgtaaatatatcgtttcgtttatttcgtagataagcgaaacgatggctccgcaaaaatctactccgtaggttagtagtagtagtacgtagcgtcagccatggacggcggctcgccgacggcgccgtccatcgcgcggcgaggctgacgaagcgacgagactttaaagc

SEQ ID NO: 6132 - DNA, 2185 bp, Oryza sativa
  ref <308>: DATABASE ACCESSION NUMBER: AK063289
  ref <309>: DATABASE ENTRY DATE: 2001-12-06
ctttctcctccccctcccgccgccgccattcgcctcccgcgaaaaccctagccgccgccgccgccgccgctgcccaaaatgtccacgccaccgccggccgccgccgcctccccggccaccgaccaaggcaagaccaagtcgaagaagaagagcaagaagcatcaggaggacacctcctcctccctggccgtcgccgcggcgtcggtggatgaggcggcggaggccaaggccgacggctacctgatcaagccgcagtcggtggcgccgccgctggacacgtcggcgtggccgctcctcctcaagaactacgaccgcctcaacgtccgcaccggccactacaccccgctccccgccggccactccccgctcaagcggcccatcgccgagtacctccgctacggcgtcatcaacctcgacaagccgtcgaacccttcctcgcacgaggtcgtcgcctggatcaagcgcctcctccgcgtcgagaagaccggccacagcggcacccttgaccccaaggtcaccggcaacctcatcgtctgcgtcgaccgcgccacccgcctcgtcaagtcccagcagggcgccggcaaggagtacgtctgcgtcgcgcgcttccacgccgccgtgcccgacaccgcccgcgtcgcgcgcgcgctcgaggcgctcacgggcgccgtcttccagcggcccccgctcatctccgccgtcaagcggcagctccgggtccgcaccatctacgagagcaagctcctcgagcacgacgccgaccgccacctcgccgtgttctggatctcctgcgaggccggcacctacgtgcggacgctctgcgttcacctcggcctgctgctcggcgtcggcgcgcatatgcaggagctccgccgtgtccggtcggggatcctcggcgagaccgacaacatggtgacgatgcacgatgtcatggacgcgaggtgggcgatggacaacttcaacgatgagtcctacctgcggcgcatcgtcatgccgctggaggtcctgctcactagctacaagaggcttgttgtgaaggattctgctgtgaatgctatatgctatggtgcgaagctcatgatccctgggttgcttcgattcgagaatgagattgaagtaggggaggaggtggttctcatgacaaccaagggggaagcgattgcgatcggcattgcggagatgaccacggctgttatggcgacttgtgaccatggagcggttgccaagattaagagggtggtgatggatagggacacatacccgaggaagtgggggcttgggcctgtggcgcttaagaagaaaaagatggttgctgaagggcttcttgacaagcatgggaagccaaatgaaaagacaccaagtgagtggcttcgcaatgccgtgcttccagctggtggtgatgcaatgattgccggcattgctgcagcacctgagccagagaagccaaaggtgaaagaggaggcagatgtggctgaagagaccaaggagaagaaaaagaagaagcataaggactgggcaggtgacaatgctgatgaggggaggaagaggaaggttggagatgatgatctctctgcttctgtgagtgcgaagaagattaaggttgaggaagaggctgatgcagtggaaggggaaaagagtgagaagaagaagaagaaaaagaaggacaaggctgaatcggcatatgccgatggagaggtgaaggctgagttgtctgatggggagaagggtggcagtgagaagaagaaaaagaagaagaagagcaaggaaggagaagctggggatgatgaagctgagaaaagtgagaagaaaaaggagaagaaaaagaagaatcgggatgcagaggtgacacaatagttggagagtgtaattttagccagatcgttgacattgtaggttgcagattggaggtgtctacactgacctctggcttgttgttcacttgcaaacaataatcattctagaggcctagtttagcatttttatatcactatccgtttactgctttggacatgaaatgcaaattaactaggccagcctttttatattgccccactcatgatggcctatttgtgttgctgttccagttatcacttagatgtgatgaattttgctccattgaagttattggtcttttgatttggtacatgctgctgcctcatttatgaaattacttgccttggtgatg

SEQ ID NO: 6133 - DNA, 1444 bp, Oryza sativa
  ref <308>: DATABASE ACCESSION NUMBER: AK063290
  ref <309>: DATABASE ENTRY DATE: 2001-12-06
catacgtagcatgattccaggcggtggcggcggcggcggcggcggcggaattagcccttacttggtgcagagccagcatgggcatggtggcggcgtcgacggcatggagatggaggagggcggcggcttcatgggcgagcagccacagtgccacccgctgctctacaacctgtccgtgctcaaggacagggtgcagcagctgcacccgctcgttggcctcgccgtcgcccacaacgcccacgcccacggccccctcgacgtctccgccgccgacgccatcatccaggaaatcgtcgccgccgcctcctccatgatgtacgccttccagctgctctgcgacctcggcacggcgccaaccaccgcgccatcacaggagaccgccgccgcctccgccgttgttgtcaagaacaacgaccatgccgccgatgccggtcagatggaggacgaccatctcatgcagcagcagtggcagcagaacggcagccgccagcacgattacagcagccatgcccatgcgccgccggtgttccacagcgaaacggcggcaccggcaggcgcgacgtcggcgacggacacgatcatcgagctggacgcggcggagctgcttgccaagtacacgcactactgccaggtgtgcggcaaggggttcaagcgcgacgccaacctgcggatgcacatgcgcgcgcacggcgacgagtacaagagcaaggcggcgctgtccaatccgaccaagctgctcgccaagggaggcgacgagacgatggcggcggcggcgaggaagtactcgtgcccgcaggagggttgccggtggaacaggaggcacgccaagttccagccgctcaagtcggtgatctgcgcaaagaaccactacaagcgcagccattgccccaagatgtacgtgtgcaaccgctgcggccgcaagcacttctccgtcctctccgacctccgcacccacgagaagcactgcggcgaccaccgctggctctgctcctgcggcacctccttctcccgcaaggacaagcttatcggccatgtctccctcttcgccggccaccagccggtcatgccgctcgacgccccccgcgccggcaagaggcagcgatcgtcctcggcgtccgtcgccgggaacattgacgacaccaccggcattggcatgggcgccgcctgacgaccttactaactaactgtgattgtattgttgccatcacctgctgcatatatatgtccatgaaagattcaatccagtactgcatggctagttaaattagcatgacaatgctaattggaacacacatgttaatttggaaatcgatcagggcagcaatttcaggcagtttatcagttagttctatacattagcttatgagatgtgtgatgaatatatactgtattagctaactagctaggggctttagctttacaatataatactaaggtttattac

SEQ ID NO: 6134 - DNA, 1842 bp, Oryza sativa
  ref <308>: DATABASE ACCESSION NUMBER: AK063291
  ref <309>: DATABASE ENTRY DATE: 2001-12-06
aatcccaacaagcaaaccgtctcatcttcttcttcctcctcctctgatcttctcctccttgtcatgcgatcgagctttgctctgctctggcaatggcgatgaacaagctagtcggcgccgcggtgaggcggcctgggtgggccgacctcccgcgggacctcctcgagtccgtgctcggccgcctccccgtgccggaccgcctccgcttccccggcgtgtgcacggcgtggcagtcggctgatgcggcctccgccaccgcacggtttcgcgccgcgcagccgccgtggctcatgctcccgttcaacccgacggcgcgcaggcagagcccgagcggcggcggcggtggggatggtaggttcttggaggcgaggttcttgagcctctccgatggcagggcgtacgccatcccgcagccggcgccgccggtgtctgagcggctatgtgttggctcgtccgacgggtggctcgtcaccgccgacgccgcctccgagctccacctcctgaacccgctcaccggcgcgcaggtccagctaccctcggtcaccacgctgcccttcgtcgacgccagccgcgacgccgacggccgtgtcgcgagctacgacctccgctgctgcttcggcgatggagacaacgacggcgacgaggtgctcgtcccgccggagtcgttcgcgccggacaggctcaggtacgagctctacgagaaggccatcctcgttgcaccgccgcggaggcagacgacgccgccggggtcttggggcggctacgccgtgctgctcatctgccagccactgtaccgtctcgccattgccagagcaggggacacgaagtggactctcctcgacatgccatcacgatgctgggtcgacgccgtgcgcgccgcctccgcccccgccgccgacgggcaccaagcggtgtacacgctggactccgtgggtcgcgtcgaggcatgggacatggacgtcacggcggcgggcacgacgccgccgccgcccagggagatcgcgccgccgtgctgctgctccggccgcgcgtgctccatgtcgatcccctgcagcaaatacctcgtcgagctctcgccgggacacctgctccaggtgcaccggctcagggacaaggcgcacgcgcggtccaagtgggagccccggcaagaacgcgtcgagtacaccaccgtcaaggccgagctcttcgagtggaacgccgccggcggcggccatggcgagtgggcgcgggtggacggcgccggcgccggcatcctcgccgggcgcgcgctgttcttgggcaagagcgtgtcgctgtgcgtcccggcggattgctgcccggaggtgaagggcaactgcgtctacttcaccgacgacgggccatggtcgcacgagaggtgccacgaggtggttcccgacgtcggcgtgctcgacctcgccgacgggagctacaaggtgccacgcggcgccgtgcgcgacctgctctggaagtggccgccgccggtgtgggtcttcccttcctgcaccaactgacgaacgccaatccgtcagtctgaattctgaaatgttcagagttttttcctttttttcagacaaagttcagatatcttcatttcttcagcatctgcagctcaactttttgttgacctgcttgctgcttgtaaaaagtttttttagcttccgaatgcgtgggtgaggtcaacgtcttgttgacctgtttgcaataagttgtaaaaatggatgtgcttgtcagtgtgagaacgaggtcaatctctggttgacctcttgtaacaacaaattgctagttgtggccaagacaggttgccctgtcaggatcacaatgtactaatctggttcattattc

SEQ ID NO: 6135 - DNA, 1951 bp, Oryza sativa
  ref <308>: DATABASE ACCESSION NUMBER: AK063292
  ref <309>: DATABASE ENTRY DATE: 2001-12-06
atttcttgatgtatcattggcttctgaaacctgtgaagagctcttcactgcaaatgcccctcgcattgacctagcgttgaatggtgttgaggtttttgtgaatgcaagtggaagccatcatcagttaaggaagctcagtcttaggattgattcgatgagaaatgcaacccttgcatgtggtggtgtttacatgtatgctaatcaacagggttgtgatggtggacgcctttattatgatggttgctgctgcatcgctgtcaatggagacgttgttgcacagggatctcaattctcgttaaaagacgttgaagtattggatgctctggtagatcttgatgcagtatcaagttatcgagcatctgtttctagttttagagagcaagcaagtcaccgaaccaaagtaccttttgttaaggtaccatataagctttgtaagccatttcagagtggaatggttccaactggtcctgttgaggttatgtatcatcgtcctgaagaggagattgcatttggacctagttgttggttatgggattatctgcggagaagtcgagcatcaggatttttgctgccactgtctggtggtgcggatagttcatctgttgcagcaatagttggttgcatgtgccagcttgtcgtaaaagatatagagaatggagatgagcaagttaaggcagatgctatgcggattggccagtacaaggatggagagttccctaaagatagcagagagctcgcaaaacgtttattttacactgtttacatggggactgaaaatagttctgaaggtactcgatcacgagcgaaaatgcttgctgaagagatcggttcattccacttggatgtaccaattgatagtatagtatctgcattgctttctttgtttgaaagattgactgggaaacgcccacggtacaaggttgatgggggttccaatactgagaatctgggattgcaaaatattcaagctcgaatcaggatggtactagcctttatgatggcgtcacttatgccatgggttcataacaaatccgggttctatcttgttctgggaagttcaaatgtggatgaaggattgcgtggttatttgacgaaatatgactgcagctcggcagatataaatcccattggaagtgtaagtaagcaggacctccgggctttcctgcgatgggcagcagttcatcttcactattcttcccttgctgaggttgaagcggcgccacctactgcagagcttgagccgatccgtgcggactataatcagttggatgaggtggacatgggaatgacatacgaggagttgtcaatatatggaaggttaaggaaaattttccgttgtggtcctgtttcaatgtttcagaacctgtgccacaggtggtgtgggacactatccccctccgaagtggctgacaaagtgaagcacttcttcaagtactacgcgataaaccggcataagatgactgtcctgacaccatcctatcatgcggagagctattcgcccgaggataaccggttcgatcttcggcaatttctgtacaacgcaagatggccttatcaattccggaagatcgatgagcttgtgcaagacatggataaagatggcaaatgggtgaactctacagaaggggagctgagaagacgcaagggcgttagatccgcggaaggaggcggaatgggtgtcgtcgccgtgggatctgccaatccaagtgctggatcgtgagaaagcaaccgctttgcaggatgtttggttttctcaagtcacatcgaagtttctctaattcacacttttattcaataatttcttttttttttgataaaatccctgtgtgtggacggggattgaggttgtctcatccaaccaatgtaagtgtccataactaatcaaacaggaagcgtccataaaccacacacagccacacaggcgtgagtatgctaagatatcaaaatttct

SEQ ID NO: 6136 - DNA, 2398 bp, Oryza sativa
  ref <308>: DATABASE ACCESSION NUMBER: AK063293
  ref <309>: DATABASE ENTRY DATE: 2001-12-06
gcaaacagtgtacgcattgactcgatcaatcaacggggagggaacacaacacggcggccatcgatggccggcgttttgcagatcacatcgtcgacgaccaccacgaggtacaatattgtcggcctcatcttcttcttctccgtcttctgcgacgatctctactcgccggctccagtcgccttggccttgaccttcaaccacaccaacttcggcccggacgagcagacgaacatcaggctggaaggcgacgccgccttcagcgccgacttctccttcagcggcgacggcggcgggtgggtcgacatcagcgccaacaggcacggcagcatcgaagacagccgtggcagggtgtcgtacgcccttccggtccctctctgggacgccgccaccggcgaggttgccagcttcaccaccggcttctccttcgtcatcaacccgcccaaacaggacggcggcatcgacaacaagggcgccggcatggccttcttcctcgccggcttcccgtcgaggctccccggctcctacccctacaacctcggcctcaccaaccagaccgccgaccaggtggccgccggcgacgaccggttcgtcgccgtggagttcgacaccttcaacgacaccatcgtgcacgaccccgacgccacctacgaccacctcggcgtcgacgtcaactccgtcgtgtccaagacgaccttgaccttgcccagcttcaccctcgtcgggaacatgaccgccgtcgtcgagtacgacaacgtctccagcatcctggccatgaggctgcacctcggctatgggcttagtggcccccgtcaccggccggattacaaccttagctacaaggttgacctcaagagcgtgttgccggagcaggtcgccgtcggcttctccgccgcgacgtccacatccgtcgagctgcatcagctgcgttcatggtacttcagctcgtcgctggaacccaaggccgcaccgccaccggtggcgccgccgtcaccgtcaccaccgcctacctccggttcaggaagtggcggggttgtagcgggagccaccgtcggcgcagcactgttcgtcgtgctcctcttggccatggtagcagtcgtcgtactcgtacgacgacgacatcagaggaagaagatgagggaggcggaggaggcgaacgacgacgacgatgacacggaaggcgatcccatcatggagatcgagaacgggacggggccgaggcggttcgcgtaccatgtgctcgtcaacgcaaccaagagcttcgcggcggaggagaagcttggccagggcggattcggcgcagtgtaccggggctatctaagagagcagggcctcgccgtcgccattaagaggttcatcaaagattcctccaaccaagggaggagggagtacaagtcagagatcaaggtcataagccgtctgcgccaccgcaatctcgtgcagctcatcggctggtgccatggccacgacgagctccttcttgtttacgagctcgtccccaaccgtagcctcgacatccatctccacggcaatggcaccttcctcacatggccaatgagggtcaagattattcttgggctcggatcagccctattctaccttcatgaggagtgggagcaatgtgtcgtacaccgtgacatcaagccaagcaatgtcatgttggatgagtccttcaatgccaaactaggtgacttcggacttgcaaggttcattgatcacatcgtggggatgcagacaatgactgcagtctctgggacaccgggctatgttgatcctgaatgcgtgatcaccggcagagcaagcgcagaatccgacgtttatagcttcggcattgtcctactggaggtggcgtgcgggaggaggccgatgagcttactagacagccagaagaatggtatcttccggttggtcgagtgggcttgggatttgtacggcaagggagacattctcatggccgctgatgagcggctcaacggcgactacgacgcggcggagatggagcgtgtcattgtcatcgggctctggtgcgcacaccctgatccgaacgcgcgtccgtctatcagaaataccatggctatgctccaatccggtgggcaactgccagtgttgccggctaagatgcccgtgccgatgtacattcctccagtggtctctgtagatgagctcttcacgtcgcctgcagggatgtcatcctcaagtgcgacgcagtcatcaacaacaacgtagttgatgcttggatgggatgttcagctcgtcagcgcccgttgatttgatctttagacttttgcttaattgccggtgtgagtaatctggtatttacgccatgctttgaacttttacagtcattttaagtttgtctacaaatatgtatgtataaatgtataatgccacatttctattc

SEQ ID NO: 6137 - DNA, 1987 bp, Oryza sativa
  ref <308>: DATABASE ACCESSION NUMBER: AK063294
  ref <309>: DATABASE ENTRY DATE: 2001-12-06
taaacttggtcatgattcagattcagatcatgatgataacaagaagaagaagaagaattctcgctatggttcagaagatgattctgaggctaaatatgatgaaaagaagcacagtaaacacttgaagaattctcgccatgatacagatgatgattctgagagtgaccataagaatgcaaagtgtaaaaagagttctcgccatgattcagagtctgattctgagagtgatcataagaatgcaaggcgtggaaagagctctcgccatgattcagagtctgattcagatggtgattatggcaagaagacaacaaaacatggcaagaacgatcgtgatgagagaaagaaaaggcctgccacgatctctcgccgacatgactcagaagatgaaaagcctagaaagggtaagcgcatggatgattcagatactgactcggagggtgatggttcgttcagtgagtcggacagcgactatgatcggaagaagaagaaatctacaaatagttctcgcaatgaatctaaagatgataagccccgaagaaaggctcctaaggacaagtattctgatggcccagaaagtggctcagacagtgatcatggtggaaaatcaaagtattcaaagatttctcgccgtgattctgaacttcagtcccgaaaggatgctgataaacaggaccagtaccgtgataaattgaagagtgagtttgctagcgatggctatggagagaagaaatctgttaagatcccatacaatgacttgaaagatgacaagccaagcagcaaggttgttcggaaggaccggtacagtgatgaatcagagactgattcagaaacttatgttaagaaaaagaagaatcttccgaagtcctatcaccatagtgataaaccagcacaaagaggtaaagaaaaggaagagaactctggaaagaatgttgataagcgcaagaggcatgatactgattctgattcagatagccatgctcgtgaaaggaaaagacaccttgatgcacgggcgagtttggctgcccaaaagaaaagaagtgtgactagctcaagtgagagttcagagagttcagattacagcagtagcagtgatagtgaatcagatgtgagttctgacagccgcgaggataggaaatcagcaagacagttgaagcatgatgagttagagagaaagaaaaggagtcaagacgagaagagaaaggagctagagaagcaaaagcaggaggaagagagaaaagagctggacaggcagaagcagagggaggaagagagaaaggctaaagagcttgagaagcagaagcagagggaggaagagagaaaggcattggagaagcagaagcagggggagagggacggagatagatatgagcgtgaccatgaggggaggaaaggcgaaaatgatgttgaaagagactacaaaagaaaagttggagaagataggtatgatccaagcaggaggcaggatgaggataggtatgatccaaacaggagacatgatgaagatatgtatgatccaaataggaggcatgaagaacatggtcgacgaagaaatagagattttgatagccgtgatccgaaaaggtctagacatgatgattcttatcatcattctcgaagggactatgaacagcgttattctagagatgaatatagagacaggaggcatcgttgaatgcaagtcatgtccatctctggtttcttcaagcagaagagggatgcatctttacatgaaccgagcagatgatcgatgtcctgctccctcaagtttttcagagtcctaccagaagaagacttgatgcagcagtaaatctctcctagcagtagagaaccttttgcctcaggaatgtacgtttgcttatgtttgtatgaactttcatacttgttgttttgttgtgtgaatgatcaatatgtattctggtggatataattaccttgtgtctgcaagaaatatatgatttaacactgtgcccatgtggtttagtggctt

SEQ ID NO: 6138 - DNA, 1574 bp, Oryza sativa
  ref <308>: DATABASE ACCESSION NUMBER: AK063295
  ref <309>: DATABASE ENTRY DATE: 2001-12-06
agaggttgaggagagatgccggagctgccggaggtggaggtggcgcgacgggcgctggaggagcactgcgtcgggaagaggatcgtgcggtgctcggctgcagatgacaccaaggtcatcgacggcgtcgccccgccgcggctggaggcagcgcttgtcgggaggaccatctccgctgctcgccgcaagggcaagaatctgtggcttgcgcttgattctccgcccttcccttccttccagttcggaatggctggagctatttacatcaagggtgtggaactgagcaaatacaaaaggtctgcagtgagcccgactgaggaatggcctttgaagtattccaagctgcttgttgtaatggatgatggtttggagttttccttcactgataagaggcgttttgcaaaaattcgctttcttgacaatccagaagctgtcccaccaatttctgagcttggaccagatgccttatttgaacctcttcatcttgatgattttgtagagtcactaagtaggaaaaaagctccaataaaagcccttttgcttgatcagagctttatatcaggaattggcaattggattgcagatgaagtgctttatcaggcaaggattcatccaatgcaaacagcatcgatgatttctaaggagaaatgcaaggcactccatcagtgcattatagaggtgattgaaaagtccttagaagttggttgcaacagcagtcagtatccagaaaactggatatttcactccagggagaagaaacccgggaagaaaattgacttcattacagttggtggcaggacttcagcatatgtgccagagttgcagaagctggacgggattgatgcaacagcaagcagagcgaaaataagcaaagaacagagcaaatcaaataaagctgctcgtgaagtggacgatgatgaggaagaggctaaacctgccaagaggggaaggaagcaattagtgaaggcaacccatgagatccaagaggatgaggaagatacaaaagaatcaaagagaggaaggaagcaaccagcaaagacatcgaagggctcgtggaagaaagctcatcattcttctgagggtagtggtgacgacgacagtgatgatgaagcagttgataaggtggtcgcggaacaagggaagaggagggatccaaagcaaccagcagaggcgaaaagctcgtcagacaaaggaggaagtgctgccccagcaaagaggccacagaggaagaagcggcaattatagacccttacggcgggtggtgaactgtctgaagtaccttagggtggtgtttggttcggaagtggtaacgtaaactctcatggtattgccaccggccgtaacagctaccattgtatccgattacacggttagtttggttgcagacggtaacatcatttgtttacattacggcgtttggttgagggttgcagccaaggaacgggaggccgatccacaggacacgattcgaaatttggaacagaaacttttgggaagatcatttgcttggagaactgcttgcttccagacaactattgatcaaataactgattaaatgaagctggtatacaagt

SEQ ID NO: 6139 - DNA, 1462 bp, Oryza sativa
  ref <308>: DATABASE ACCESSION NUMBER: AK063296
  ref <309>: DATABASE ENTRY DATE: 2001-12-06
agctttccatgggaaggtcacggaggagctacgcgcggcttcttctcctagggttcctactgctacggttcagctggtgcttggcggtggctgatgacggcggaggcgcggaggaagggggagggatttttccggtggtggtgagcacctggcctttccgggaggcggtcagggcggcctgggaggtggtgtcagccagtggcggcgcaggttgttcggccgtggatgccgtcgtcgccggctgctccgcctgcgaggtgctccgctgtgatggcacagttggcccaggtggaagcccagatgagaatggtgaaactacattagatgctctcatcatggatgggaccacaatggaaatcggagctgtcgctgccatgagatatgtaaaggatggaatcagagcggcaaagttggttatggaccatactgaacatactcttcttgttggagagaaggcaacatcctttgcgatttcaatgggacttgtggggccagctgatctgagctcaccggagtctatcggaaaatggacaatttggagacagaaccattgtcaacctaacttctggaaaaatgttgttcctgctggtagctgtggcccgtacaatgctattgatgtaccatcaggggagtctaaggcctctgccaaacgtgtgctagagcggactcagggggacatttgtcaaggattatttgaacctaataatttactggagccaatgaactcccgtctaaaaatcgttaatcgccacaaccatgatacaatctctatggctgtgattgacaagatgggtcgcatagcggctggcacatcgaccaatggtgctacattcaaaattccaggaagggtaggtgatggaccaataccaggatcttctgcatatgctgatgatgaagttggtgcatgtggagcaactggtgatggtgatattatgatgcgcttccttccgtgttatcaggtagtagagagcatgcgacgagggatggagcctcgggatgctgccatggatgctatattaagaattgcccgcaagtacccggactttgttggtgctgtatttgcaattaacaagaaaggagtgcatgctggggcatgccacggatggacattccagtattctgtcaggaattctagcatgcaggatgtggaggtcatcactgtatcaccttaacatgggcagatcgtaacagcatatggtgcgtcaccaatatggcatttttcgaactggggataccccatttccattcaccagcaggtcatgtttctcatgatctagaattttcatcattcagtcccctgtcaatgcagcaatgttatttggggattgtactggcttattattggattgcactcctcctggaagttcagacggccttgtaagcagattggatgcactcaattcattcttaataacctcgtctgagtgttgtctaaaagatagtaatagaactacatgtgatc

SEQ ID NO: 6140 - DNA, 1843 bp, Oryza sativa
  ref <308>: DATABASE ACCESSION NUMBER: AK063297
  ref <309>: DATABASE ENTRY DATE: 2001-12-06
aaaccctaactctgcaagacgcgcgtccgccgccgcaactagcaatgcccaagcggcgtcgcggggttcgcccccctcctcccgatccttccccggctccggcgacaatcgactatagccttacttataaggagatagccgccagtggggctccaggtgagcccgtcccgtcgatatatctatctatttgtcatccgctctcgatctctcaatttcacacgcctttaggtaggagcgatgacaatggaacttgaaaccctacactacaccagatgcacacacatacatacatacatacatgccgtgggggaacacactgtgactgtagatcttggcgaggcgaattgatttcatttccaccttacaagtgttagggttcgtggattcgatttgggggtgcagggtggtgtgtgcacatgtgtgggttagaatattgttatgtttgtggtggttttcgcggatctggactggagaaggggagggcctttatttcgattttgctatatctcactcgaaagattttttttgttatctctcacacgattctcactcaaatttacagggtattttcttgtaagttacagtgtaatttatgaaatttacattgtaacttttgtaagttacagtgtaatttttgaatctttgtatgtaagttttgaaatttatattggatttggtttttttttaagatatggcaatttagtgtccattatggtgtttttagttgctttttaccttttactgtgtctattctgtgtgatatgatcataaaaatctttcgaaagatgcatatttactcccccgtacttttcccttggtaatccagtttgcttactcaattttgctccacttctgtgtcgttcacagtgtctattctgtgtgatatgatcataaaaatcttcgaaagatgcatatttactccctcgtacttttcccttggtaatccagcttgcttactcaattttgctccacttctgtgtcgttcacaggtgctgtggactttgtgaagaatcatggcttgtacttgctgctgcttgagacaccctctggcttctcaattttctctctttgtggggtctacatccacttaccagatgcgatacaagtaggagtacttctatcttccttctttcctttttggttaaataatataatatatgtgctagcttactcctgtcgttgtgttcctttatattatccagaatatttgggcgatgttcggtacttacaggtcttcacatgacgtgagtggcccttctttcgtttccttcccattgttttgttgccaaatcaattagtagcaatgttgcatcatttgtgattgatgcattctttttcttttttctgtttgtgtcgagggagcgtaaacacaatcttctggtttattatcatgctcaaaaacatttccaaactccccccccccccaaatttctccatgtaaatcatatgccctaaaattgcttacctgctactctctctgtttcatattgtaagtcgttttgactttttttcctagttaatattttaagtttgaccaagtttttagacatataataacattttcaacacaaaacaaacatattataaaaatatattcaacgatacatttaatggaactaatttagtgtagtagatattgctattttttcttataaacttggtcaaacgtaaaaaagtttgatttaaaataaagtcaaaatgacttgtaatatgagacggagtgagtaattgctagtagcttggaatgattgagaaagtcactgtattcgagcgagtgaggcaacacaacatgagatggataacacgtgattaagggagaatatcacaaggaaattggcaagat

SEQ ID NO: 6141 - DNA, 2616 bp, Oryza sativa
  ref <308>: DATABASE ACCESSION NUMBER: AK063298
  ref <309>: DATABASE ENTRY DATE: 2001-12-06
accaaccagcaatgcgtcgcgccctcgactggacacctcccctccccgcctcgctcctcaccaccacccctcgccgccttctcgaaccttctagtaccttccccctccccctcctccgcccctctcctcctccacctcctccgatttctccgcctcctccgccgccgcccgcagccgcggagctccccgccgccgacatggacgacgcctgcgccgtctgcgcggagccgctcgagtgggtggcctacggcgcctgcgcccaccgcgaggtctgctccacctgcgtcgcccgcctccgcttcgtcctccgcgacctccgctgctgcctctgcatcaccccctgccccgccgtcttcgtcaccaaggcaatgggggaccggacgaaggtgatccccgatttctcggcgctccgcggcgccggcggcgaggggaaggccggggagtactggcaccacgaggccacgcagacgtggttcgacgacgccgaccagtacaggatgatcagtgccatgtgtcggctctcttgtagcgtctgtgatagcaacaaggaggaggaggaggagcgtactggtaaagcggccaaggcgaagcgtaagagcaagatccggagcgttgatcagctcaaggggcatctcctcgatcgccatggcttgtacatgtgtgacctttgcttggaaggcagaaaggtatttatttgtgagcagaagctttatacaatgtctcaattaaatcagcacataaaatctggtgattcggaggtggatggctcagaggttgagcgccgtggctttggagggcatccaatgtgtgagttttgcaaaagcccattttatggtgataatgaattatacacccatatgacaagagaacatttttcctgccatatatgtcaaaggcaacattctggacaatatgactactttaggaactatgatgacttagagatgcatttccagagagaccattttctctgtgaggataaagggtgcttggagaagaagtttgttgtctttgaaagtgaagcagagctcaagaggcataatggtgtggaacacgggaagcacatgcctggtgctgttgacagtagctcgtcgtccatgcaaaatggcattgcagctgtaggccatgggttgggaggtcaaagtgattcatctcgggtgccattgcaatcattaagcatttcttctagttctgggcaatcatcagaaacaagacaaagctttgcgagaaatcgggtacttcagcaagcatgtgttcctcctctttcccgtcaggaggtccatgatgctagagtaggttctgtccttcaagaagcttcattcccttccctaccagcacaatcaaggaaggcaccagcacatagtcagagctcaaggactgcagcaaggattggggaccagcagtttcgtcctttatcagttactagtaacaggaatgttgctttagcacagcagggtacaagaacattacctgaaaacacccatgtatctgggcttgcacaatacagcaagagaactgagaacatgcaccaagctgttcagcctcagttcctaaaaaataattctttgatcccttctggctcaacaagccgccctgtgcatgtccccagttctgctggaaatgaaaggcaagacacattcagcaacagccaggtgttatccagtgtggaggacattcttgcagcaaataaagccctggttgagaaaatgcgggctgcattaggaatggatcaggatatgttcaacgcatttaaagagatcgctggggaatatcggcaaggtgttatcaattcttcagagtacctttcatatgtaaagcagtttggtctcttgcaccttgttcctgaaatggccaggttattgcctgatgctcagaagcagaaggagcttgcagatgcctactatgccaatttgcgccttacaagcctccaagaaaatggtgggggtggaaccgataactcgaaacaaggcaatcagaataagaaggggaaggggggagttcctgacgccataggaaccagtaatgctgcaacagatccgctgaaagataagttgctgaatactgccatcaagttccagtcaaattacatgccccaggaagggtgttgtggcgtgcagcgaaaagaagggagaacaacagatggatcttctcagggtctgcctttgaagggtgcttggcaaagccgtgggggccagagactcttcatgagcaaagcaaagaagtgacgaattggttttgcaggtcaagttagttagacctgccatttgagccgctacgaaatgtcaaggtttgtgtctatctggtgtgtgtctgatagttgagtacatgagtgcagcaatcatgtgtgatgcgtttgcattttgatttttttttcttttttgtctatcatgtgtggtgcgtttgcattttgatttttttttctttttgtctattttttgtgtggtgcgtgcgtttggtagaccatggaacttgagactagaacggtccacaccatactgcatagtggagttttgcaacttcacatgagtgaatttgggctatagacggttctgttgctgtcaactcaaaactccttttaatacgaagttatggtcaaaatcgtaccttgatagagat

SEQ ID NO: 6142 - DNA, 1763 bp, Oryza sativa
  ref <308>: DATABASE ACCESSION NUMBER: AK063299
  ref <309>: DATABASE ENTRY DATE: 2001-12-06
atatcttccatcctgtgtgctgcttcgattcgagacatcaagcagcagggaagctagctagcctgtacatttatattcgcttctgctgcagcaaagtcaccatctgcctagctagcagctagctcctcctgcagctgcagctgctgcgcgtatagcttagcttagtcagctgcaggaaggtagagtagagtagtagccactagcacagccattgctagtgcggcaacgcaagctcgccggcgacaagatcatattaaccggaagagaaagctagctgagcttgcttgcttgcgcgtgtatctatcaatcaagggttggtagctagctacaaatcgatagcgtacagcggattacacaagagaatgcagcagcggcggggcggcggcggcgtgccgcggctggccatggcggtggcggtgctcgtgctcgccgcgtcgtcggcggggcgatgccgagcgcagctggcgagcggctactacgccggcaagtgcgtgaacggcggcggcggcaactcgagcgtggcggtggacgtggagagcatcatccacgacgccgtccaggcacgcctcgcctgggacaagcggatggtcgccggcctcctccacctcatcttccacgactgcttcgtcgccgggtgtgacgcgtcgatactgctggatgggccaaacacggagaagacggcgccgcagaacaacggcatcttcggctacgacctcatcgacgacatcaaggacacgctcgagaaggcctgccccggcgtcgtctcctgcgccgacatcatcgtcgccgcgaccagggacgccgtcggcatgtgtggagggcctcggtacgaggtgcagctggggaggctggacgggacggtgtcgcaggcgtggatggcggcggacctgccgggccccgacgtcgacatccccaccgccatcgacatgttcgccaagaagggcctcaacagcttcgacatggccatcctcatgggggctcacacggtgggggtgacacactgctcggtgataaaggaccggctgtacaacttcaacggcaccggcgaggcggacccgtcgatggacccgatatacgtgtggatcctgacgacgttcgcgtgcccaaagagccaggccttcgacaacatcgtctacctggacgacccctccagcatcctcaccgtcgacaagagctactactcccagatcctccaccgccgcggcgtcctcgccgtcgaccagaagctcggcgaccacgccgccaccgcctggatggtcaacttcctcggcaccaccgacttcttctcctccatgttcccctacgccctcaacaagctcgccgccgtcgacgtcaagaccggcgccgccggcgagatcagggctaactgccggaggaccaattaactagctaggagcatgatgcccaagtgctatagttaattaattagaacatccatcaaagaaacaaacagatttaaagagagagagatcgtagtatatgagcacatccagccagagcatatatgcacattcattcttttcttttgccctcctgatcttgtcaatgattgcatccatgattctactatacattagtagttgatttcagtaaagattttagcaaattaatttactggagcttagctagtagcactttagtaatttagtagtgttttccttctctacttcactagaagtaccttgtgagttgtacttgatcactgccttgagattctttttgttttgtacgtggctcgtataaaaataaagacactccatgat

SEQ ID NO: 6143 - DNA, 1437 bp, Oryza sativa
  ref <308>: DATABASE ACCESSION NUMBER: AK063300
  ref <309>: DATABASE ENTRY DATE: 2001-12-06
aattgtgctgtggccagtaataaccaatttgaggaatcttttctcccacaagaaggccattcagaatttaaaggaacccacttcagtttttcttttgatgatgaagcattttctgctgataatacaaagttttctgtgacatgttattttgcaaggcagtttgctgctcttagaaagaaatgctgcccaggtgatattgattacatacgctcactaagtcgttgtaagagatggagtgcacaaggtggaaaaagcaatgtatactttgcaaagacaatggatgagagattcataattaaacaggtcaccaagacagagctggactcttttataggatttgctcctcactatttcaggcacttggcagaatcactaacttctaggagcccgacttgtttggctaaaataatgggactttatcaggttaatattaagggcttgaaaggagggcgtgaggtaaagatggatcttatggtgatggagaacattttcttccaacgaacaatatctagggtctatgacctaaagggttccgtgcggtcacgctataattctgatacatccggccacaataaagtacttttagattctaatctcatagaggcacagcatacaaatcctatatttttggggagcaaggcaaaacaaagaatggaaagagctgtctggaacgatacatcattccttgcgtcattggacgtcatggactactcgcttctggtcggcgtagacgagaggaagaacgagctcgtgatcggcatcatcgacttcctccggcagtacacctgggacaagcagctggagacgtgggtgaaggcctccggcatcctgggcggctccaagaacgaggcccccaccgtcatatcgccggtccagtacaagaagaggttcaggaaggccatgtcgaggtacttcctcgccgtccccgacgactggtcctcatcataacagggcttttcctgcctccctcttccaccctaccctacgttgaagcagaatcgtcaccgtttcatccccgctgtaatttttttttgagcaaaatgggggtgaaacgagacaggtagccatttagccaaccattctttaattggttcggtcacttactaacattgttgtagccttagaatgatagaaatcatagaatagaaacagaggatcaggccaccttgtcgtgtgtgggctggacaccaagcatgccaattgcagtgtctttctccccgtgatctcaaggcggaaaaaggcttggtccctgtagaatgtgcatttgctgctagcgaaggcggattattcgacgccgtgctgtgcctcatttcttctgatttgattacctctggtatccatatagaattgtacaagatagagggcaggtcaataaaggtgtaacatctcgattacttgtgtaatttgtaacagctcagttacttgtgttaaagatgt

SEQ ID NO: 6144 - DNA, 2687 bp, Oryza sativa
  ref <308>: DATABASE ACCESSION NUMBER: AK063301
  ref <309>: DATABASE ENTRY DATE: 2001-12-06
atatatgataatatgtctttatatatatacattatgttactataatacaattcatgttttattttttcaaacgtcattgtatattgttataatatatgaatattattttcatgcacaatatgggtaccgttgtagttagacgatttgcatatctctgcttaattcaagctttttctaaaaattgatttaggtaacgatacctaataattatatactatctaatcatacataataaaacaaaacgcacaccttaaacaataatttgagttgtattcagaaaacatggtgttatgcacaaaataatataacagtgctatgtgtgactatgaggtggagcaaagggatgtgattgaataactaataaatgattgaattagatgaataggtagtttcttgatccaatggttgttatctttgtagacttgtagtaatgtattctgatggcttaaaattgttgatgatgtggcttcttgcttgtcttgctttataggagtaaatgctccttagtgagtactaactatatagtactccctccgtcccaaaatacagcagtctcatgtccagattcgttggcttaggatgggtctcatccaatactaagttgctatattttgggatggatggagtatgataggatatgaaacatttatacgattataattacccgataagattcttttgaagaaaaaatgaatgttaattagagtacaatgttgttttttttcctgaatatgatctacccaaaaaactcttcttctgcacataatttgtatttgatgcactaaccaagtcgagttgtctatgaaagaatgatcggctacatgtagggttaagattggtttcagcaatggatcatggatgtttttttttaatttactagaaaaatgctcgtgcgttgcaacaggtaaatgctattttaattttattattgttatatggtttagctaagaaaaaattcattctgcgaattcccttggataattttttcataaaatcataagctgctattatgagtgtatttcatctcaagttagcatgcgagttttttttaaagagatttcttatacgattcctcttgtatttccaaaagaaaatgagcttaaaatctaactcaaagatggatatatatttttaaaagtgaacgaatttaaaaccgactcaaatatggatgacgtatcaaaataccaataaaaacatcttcgatttttataatagtaaagatttcattcaatatgttgatgtgaccatcaagtatatgcatacaaccaagcatgagaaatataaaatattgccaaagaatacatcggataaatggaggatctacaggatattaaagtccaatgagttttggaatccagttcggcctccggagacagcactgatttcaaacggacctagcgccttcatgccaactccgatttgggtgatcttggacttcgtggaaagcttatctcgctacctttcaaatgcatccagtctcacgtccaaattcatctcgagtctacgggaatcgccaaaacaagacagtactgttgctgaaaccgaacttaggccttagaccttgtaatagactaggcccatctcggaagtgtctccctccacctccacgaattagcacttaaccctagctttattttccgctataaatagctttgtacattctcaaaaacatttgggttttgtttagttgaattttgccaagtgccattcaccttgtctctagtcctcgctcgattagtcggcgactattgattcagagcccccaatagttggtgtgttgatttgccgggtcgattagatctaccacttcaatcgcaactatttctttgtgcttaatcacctattcgcaatatttagattgcatcttatcttgttcttgcagtgttctctcgtttgcattgcaggaatcatcaaccgcgcgtcacggttggtacgacatcgtttgtggtgtagcgattgcacggcgttctggacttgttctggttggtagccacgtcgcaaacgtcgcactcgatcaaagtgagagttatcccctcaccagaagatcgggccacgagagagagcatcatcagttggtatcagagcttcagttgcctggtgaggattttagttttgtaattttttcccatcatccactatacagccgcaccactttttcctttaccaaacattagttttgagccttgtaattttcattcaattttgctttattgagttttggtccgctgtcgtgtcagtgctggtttttgttctagcttcgtctggtttgagttttgcatcttggttgctcactgcctgtacgttcggttgaaggagaagaaaacattagatctgatctttttttcatcctcctgtgttagtgcatgcatgccgtggaattctggtacgttaccaagtaaatagcgcgtgaaattaggaagctaatcgtgtttcaatatatccgaagtgcatgtgccaaaaaaatagcaattcccagtttttcttccttttgagctgccacgcgcaaatagaaagtatataaatcaagatcggttcccatattccttgcgccacaaaaataggaggtatccatcgttttctcttgtgaccgaggtatgcatgcaacacaatcgtgcatatgtgcttgagttaattacttgaaaaagaaaaaaagaggaagaaatacaaaaaaaaaaggcagacggtgc

SEQ ID NO: 6145 - DNA, 3264 bp, Oryza sativa
  ref <308>: DATABASE ACCESSION NUMBER: AK063302
  ref <309>: DATABASE ENTRY DATE: 2001-12-06
aatcatcgatttcttccccaaacctagcctcctccactgctcccaacctgccttccgtcgccgccgcctaccctcgactactgatctacctttctccgtcggcggccgcgggtgcccagcgcaaccgcaccctctcctctccagcagcggcgacccctcgcctcataccctttcctgggcaaggccgggaggggatcaatctagggtttccgccgccgccggttccccggacgttgctgcatgacgatggaagatggaagctgtccttcaccagtcacccccagcgaagccgaagctggagccgaagattacgaatcttggacactgaagcagaagattgaggatctcgtcaactgtgatcctatccatggtatcgtgccaaaaaatcctaaatataaagcatatttcgaggaaaagttccaggagaagttaagtaagtacgtccgtgttgtattgccgaaacttcgtccagcaattcagaaggatagcgtcaagcaattctttcaagtctacaattgttggtcaggtttcatgggacggggaaacttccttttacctgatatcctcaccaacatggccaacgagaacgctctgcgttgtgccagggtcgcactccagggcacctctcctctgttgcgtcgccgccgcgctgaccccaacacccgccaccgctatggcttcgcccccctacacatggctgccgagaacttcagcgtcgacatggtcaaactcctcttccgttacggcgcatcggcgaacatctgcaccaagggcgagtatgtcattgagggcctcctccctctccatgttgctgtcgagaatgccagcatgcacaagtacattgaggatcattgggctcatggggaccatatcatcaacctcatcttcctcctttgtcttcctgagatgaaaatgttcttggacacgactagattaattgccaaacagacagataacattgtcgacgaggtatggaattacattcgtgaagaaaagcatgtccaggcagcaattttgctgctggctgctcaaaagcagctccgtggccgccttaacaacagcagtggcaaagcctctctgaacgggtttgatattgttaaaagccacattgatgatgctcttaacaccatacatcttgaggggttaaatatggttaaggagggaaagaatggcagggcactaaagagattgaaagacaagaaggaagcccttcttacagcacttgtactagttggcattgttcacaaagccggtgaagctcttgagggatacattcaaactcattcacaggtgcgccatgacgaaattgttgaacatgtttcatcaattctaaaaagcaatggcattgctcattctggggaaagcattgacactggaaaacttgaatgctaccaacatggtggggggatgtcgattggcaagtcagattcacaaagagtgggctatggggaaactattgaagcggacaagtcatcttctgatataggcgaagttagtaaaatgatcctgggaaagcaaccacctaaaggatcagccatacgcgaagtgagagatatgttcttcccatactggaaatcggtgttgtctcgacggttgcagctaaagatagttccatcctgtcaactaagcaggaaggacttgctaagtgctgaagcgagcacgaaggggaccaagagtatggaccacccgtgtaacccaatcaaatcaatgggaaatcttggttcgatgggctggcccccattgtcaagtgagtccagaaggatgctttatactgttgcttcaatgtcccggaaggtgtttaagcgcacttgactacagaaaatctttggcgcttcatctattcttgttgccgatttttggtcatgttcctccaattttgaaggttttggattggcaaccatgtggacatgtttgttttcctcgaactctgaaggttttaagctggccacgaacgaattggaagcatttgagccggccacgaatggattggaagcagtagcggacatattgcgcttgccgtgggaacattgcggactcttcgcgatccggacgtacacggggaagaagggaatctgacaaaaatacatgcacgggaacaaaagctagacgacgggcaaaaaaaattcctggaagctttaagtattttttatgcaggttgctttcacatcttgggatcaacttacaatcagttagaccttccagttcatgatgagagataatcacggaggggagattttcaataaaggatgtcgctgctggtggagctcctcttctggaatcgttgtcctcagcaaattgctcaaggagcatctcaaactgccttgcatcaacatagtcatctggattcccgacaaaagttgtcctcatttctggctcttccatgtcatctagcaagttggtcacatttgctctttgacgtacactcacactccaattccatacaccatcttcagattcgtcctcactcaatccacttagctgaatatcatgtgattgctgctggtgctgggtcatggtgttgactatttcatcaaaaccagactcttccacatcttcctggtcatctgaatcccactgatccagtctagcattcatgggatcaatatcagtatctgtgttcatgtagctgtcattgtcaagttgaatggaaatcctcctccttgtcatcacgctatgttcctctatggaggtatctgaatctccaccatagtcaccaagactgatggcagattcaatttcaccaaacacagaatcaacataattaaggccatcgctctcatcatctgaagcatgccatctttgagattggcttggtgttgaattaaacgatgcatgttgcggcgcgaccgacgaagaatcaatatccgtttcacgaccttgtcttcttgctaagtcgatcagctgagaaaactcctgcaagaatgcgtcctccaggaaatcaatgcttgcagtcctggatatctgcctcctccgtgtgttctgccgataagtgctggttatttcatctctttcatcatcattgagtactgtcatcttgcagtccctgcatatggctaaagcttcaaaggtatcggtcacctgagcatccaaagtaaacggccttgtgcaaactaggcactgaacatctggttggctggcaactggatgacagtcgctcgcgtgtgttcgatggtcagacatggatatcctgatgaactgaacagggcacactgaatttggtcagcagttcgctattggacaaagtagacctgcggaacaaaacat

SEQ ID NO: 6146 - DNA, 1623 bp, Oryza sativa
  ref <308>: DATABASE ACCESSION NUMBER: AK063303
  ref <309>: DATABASE ENTRY DATE: 2001-12-06
gaaaatacagaactaaaggccaacttgagcacacatgtagctctgatagcatctttgtctgatcatgtcaatgagctggaagaaaacactctttctctgtcaaagccctatagcacagaaagcaaaaaggaagatgcagaggtaccttttatgcaagagcgcaaccatgggccagaatctcaccccttgccggaaggaactccagagctacagcggttaattgcaagaatgggagcacttcaagttgctattcgaaatgccaaagatcttcatgatcaggagtcaaccaagtctgctgctacgttggcagcagcacacagagatattcaagagcttaaagcaagaggcgggtcgctgatggaggcaagggaaatatactccgacaatgagaagctgaacaacgtcgagggctccaaagggaagcaggtacagatgatgaaggatatcgaacttgatcaaatatccacatgtccaccatatggcactggagctgcgctctacccacttaagaatggcgcgaatgctgggatggatgacgagatgctgcagctgtgggaagctgccgagaggagctgcaaaaaccaaacatccaaatcatcatcagctgagcacgacatagaagcggttgaggaggtgaagagtgagtacccttcctctgagctagcaaggggaagagaccttggaatcaataagcttgaggtgtcgacatcatctgtagagcctcatgagcaatggagcaacaatgtactggagaagctctcttctgatgctcagaggttgcagagcatccaagtgagcatcaaggagctgaagcggaaaatggggagcccatcaaacgggaaatcgcccatgaactccgaatacaacaccgtcagcactcagctactcgataccgagggatgtgtcttggaacagatcaattacaacaacaaattgacaaagcgggttgagaactatcctgcgctatcagatagcatgaacgcggagcaagaagggtaccccagtaggaggaaaatatccggacaggtccagaaaggatcggaaaacgtggggagattggaactggaacttcaaaagatacagtatgtcctgctaaagcttgaagaggagcatgagtacaggaggctcaaggtctccgataagcgcactcgggttcttctgagggattatctgtatggaaggaaggagaagcgcggcggtgcgcagaagaaaaagaagagggcacctttctgtggctgtgtgcaatcaagaactgagacttgaaccattttgttctggcgggaaactagctataaaatgaaaagggaagatgagagatgtcagctccaagaggctgtagcactgctttgagcaggccatgttcttgggttcatccccattgtaattgagttagtattttagtgctcaaaacaaagcatatgtatctaaaattttggctttcctgtctaaatgaggccatctaagcttagttcaatatgttatagttttctttccatagcaaatatgatataggtataatatagcaaggcattttatttcaaactatgctgcatttgggtggcttctgcaattcatttttttccatcaaggtctcaggctacaaaaacaggtagttcgtctgag

SEQ ID NO: 6147 - DNA, 2814 bp, Oryza sativa
  ref <308>: DATABASE ACCESSION NUMBER: AK063304
  ref <309>: DATABASE ENTRY DATE: 2001-12-06
ctttcctaattttctttccctgctttgttcttgtgccttctccatctacttccaagtctggtggtctcttttgccatggcatccaagctgagtttcaagcgaatggacagcattgccgagacaatgccagatgccctacgacaaagccggtaccagatgaagagatgcttccaaaggtacgtatcaaagggtaagaggctcttgaagaaccagcagctcatggaagagctggaaaagtcactagatgacaaagttgagaaggagaagcttgtcgaaggctttctcggttacatcatttgttcgacacaggaagcagtagtactcccaccgtttgtggcattcgctgtcagaatgaatcctggtatctgggagtacgtcaaagttcactctgatgatctttctgtcgaaggaatcacaccgtcggagtatctcaagttcaaggagaccttatacgatgaaaaatgggccaaggatgacaactcactggaagttgatttcggtgcccttgacctctcaacaccccatttgacactgccctcgtcaatagggaatgggcttcagtttgtctccaaattcatgtcctcaaagctgggtggcaaacctgaaagcatgaagcctctgttggactatttacttaccttgaattaccgtggcgagaagttgatgattaatgacaccatcgacactgtgagcaagcttcagacagcactgctacttgcagaggttttcgttagtgggctgccaaaatacacgccttacttgaagtttgaacaaagatttcaggagtgggggttagagaggggatggggtgacactgcggagaggtgcaaagaaacactaaattgtctgtctgaagtgctacaggcaccagatcctacaaacatggagaagttcttcagcagggttccatccatattcaacattgtcatcttctctattcatggttacttcggccaagaaaaggttcttggattgccggataccggtggtcaggttgtctacatattggatcaagtcagagccatggaagaggagctgcttcaaagaatcaagcagcagggtctgcacgtaacaccgaaaattcttgtgcttacaagactgataccagatgccaaaggcacaaaatgcaatgtggagcttgaaccagttgaaaatacaaaatactcacatatactacgtgtgccattcaagactgaagatggcaaggatttgcgccagtgggtgtcccggtttgacatctatccttatctagagagatatgcgcaggactcttgtgccaaaattctcgacattttggagggcaaaccggacttgataattggcaactacaccgatggcaacttggtggcatccctcttgtctaacaaactatgtgtcactcagggaacaattgcacacgctctggagaagacaaagtacgaggattcagatgttaagtggagagagatggaccagaagtaccatttctcttgccaatttaccgccgatatgatttccatgaacaccagcgacttcatcatcactagcacttaccaagaaattgctgggagcaaagagaagcctggccaatatgagcaccactacgcattcacaatgccgggactatgccgctacgccacaggcattaatgtattcgacccaaagttcaacattgctgcacctggtgcagaccagtccatctacttccccttcacgcagaagcagaagcggctgacagatttacacccacagatagacgaactgctgtacagcaaggatgacactgatgaacacatagggtatctggcagacaggaacaaaccaatcatcttctcgatggcaaggcttgataaggtaaaaaacaagaagctgagggacctcgtcaatctcgtcgtcgtcgcggggctcctggatgcttcgcagtccaaggatcgagaggagatcgaggagataaacaagatgcacaacctgatggacaggtaccagctcaaaggacagatccgctggatcaaggcacagactgaccgtgtccgcaacggtgagctgtaccgttgcattgcagatacaaagggtgcatttgttcagcctgcactgtatgaagcattcgggctaacggtcatcgaggcgatgaactgcgggttgccaaccttcgcaacgaaccagggcggaccagctgagataatcatcgacggtgtctctggtttccacgtaaaccccatcaacgacagggaggcaggaatcaagattgcagatttcttccagaaatgcaaggaagacccaagttactggaacaaggtgtccactgctgggcttcagcggatctgcgagtgctacacatggaagatttatgcaactagagtgctaaacatgggatctacatattccttctggaagacactaaacaaggaggaaagacaagccaaacaacgttacctgcagatattctacaatgttcagtataggaacctggcaaaggctatggcaagagcaggggatcaacaggctcggcaaaccacaacaggcgtggcgcctagtgagatcgtagttagacccaaagaaagaaagccgcagactcggatgcaaaggatcttaaccaggttagccgggcagaagcctccagtttctgagtagagagcatcttccgaccaagacaacaccgaaaccagcccacatcgcagctcaatttattccattgataccgatgtatgaaatactaactactacttgcgtgagatttgtgtacaatgtgtaatcatatatatggtgtgtttattattgattggcaatatgtacatacgattgtttattgatttacaatgcaacatcctttcaagc

SEQ ID NO: 6148 - DNA, 2022 bp, Oryza sativa
  ref <308>: DATABASE ACCESSION NUMBER: AK063305
  ref <309>: DATABASE ENTRY DATE: 2001-12-06
aaagcctccctcgttgaggcgaccacgagctcccccccaagaccacggcgcccccgcaggcggcgtccaccaccaccaccacctcgatccgcgccgccgccgctggtggggaaggcagctagccggcgaacgcgcgcggaggagaggtggaggggaaatgcgggttcgtctcggcgccgcggggcggagccggaggtgattctgttttcttggcgaggcggaggcggaggtggaggcgatgggttgcttcccgtgcttcgattcgaggatgggggaggaggaggaggaggagctgtactacgggaaggggggagcgcgcggcggaggcaatgggggtggcgctttgtcggctgctgctgcggcggcgtcgtcgtcctccggcgtcggcggcggtgggtgggaggggacgtctacggcggcgccgcgcgtcgagaagatctccgcaggggctagggggagaggcaatgccaccgtgaagaaggagctctcggctctcaaggatgccaatggcaatgtcatctccgcgcagacgttcaccttccgccagctcgccgcggcgacgaggaacttcagggaggagtgcttcattggggaaggagggtttgggcgcgtttacaagggccggttggacggcactggccagattgttgctataaaacagctcaatagggatggtactcaaggaaacaaagaatttctagtggaggttctcatgcttagtttgctgcatcatcaaaaccttgttaatttggttggttattgcgccgatggagatcaacgccttcttgtgtacgagtacatgcccctcggatcattggaagatcatttgcatgatctccctcctgataaggttcccttggattggaacactaggatgaaaatcgcagcaggtgcggctaaaggtctggagtaccttcatgacaaggctcaaccaccagttatatatagggacttcaagtcatcaaatattctattgggcgaggatttccatccaaagctttcagactttggtcttgctaaattgggtcccgttggtgacaagtctcacgtctctacacgtgtgatgggaacatatggatattgtgctccggaatatgctatgacgggacagcttacagttaaatcggatgtttatagcttcggagtagtcctgcttgagttgattactggccggaaggccattgacagtaccagaccacatgtagaacaaaaccttgtctcatgggcgcgacctcttttcaacgacaggcggaagctcccaaagatggctgacccggggctggagggacgatatccgatgcgcgggctctaccaagcgctcgcggtggcatcaatgtgcatccagtcggaggccgcgtcccgacctctcatcgccgatgttgtgaccgcgctctcctacctggcgtcccagaagtacgatcccaacacgacgccgtcctcaaagaaggccggcggtggcgaggccgggagggcgctgtccaggaacgacgaggcgggcagctccggccacaagtcgccgtcgagcaaggactccccccgggagcagcagctcccggggatcctcaacgacagggagaggatggtggcggaggcgaagatgtggggggagaactggcgggagaagaggcgcgccgccgccaccacctccagcaatgcccaggtgagcctggattcgcctaccgaaaccggttaagctggctacccccgccattggtgaaggtctctgggcaatgggcatgcgttgctgcttgagctcatcttgtgatcttactagactgggtgtttttttgctttcagttggcaggggtcagctgaaaacgaattgggtggtgatttttcctttcttttttttttttactgtttggtgttagaatgtacatttgtagtggtgaaacaacaagaactgaaaaggcgagagagtgggaggggagaagaatttgggtgctttgtactgtggatgtcatggtgcctgtaaattctcggaaaattttgcatcaacgaggaacaaatttgtcggacctc

SEQ ID NO: 6149 - DNA, 1164 bp, Oryza sativa
  ref <308>: DATABASE ACCESSION NUMBER: AK063306
  ref <309>: DATABASE ENTRY DATE: 2001-12-06
acacaacccagctatagccacctacatctgctgatcgacatcgatcgatctctactactccagtagctagcaagaattgaatctaggtgaagtgagagtgtgagagtacataattggcgccatccatggcggcattaagccagctggtactggtcgccgtcgtctcattggttgccttgctcccactgggcatggcggcgacgacgtatgatcccatcggcagcttctgctcggagacgtggatgaactacggcgatctcaacagcagcgaggccgtcaccaggcggcgcgccgtcaacttcgtcgtctccgacctcgtcgccaaggcgcgcaccggcggcggattcgccacctccaaggccggcaggggctccgaggtcttctacggcctcgcgcagtgccgcggcgacgtctccggcggcgactgcgacgcctgcctcgcccaagccgccaagcagatggtctccaactgcaactacacatcagactccagaatttggtacgagtactgcttcatgcggtactacagcagctacaacttcatcggggatgtggacacgagggaggacgcaagcgtgaccttgaggagatggccggacatggacaacccaaaggcgttccagaaggtggtggggaaggcgatggtaaaagcaacaacacaggctgtctcggtgggtggcaacggtctgggcagggcgaaggagcagtacacgccgttcgtgagcgtctacgcgctggcccagtgcacacgagaccttgcaccgcctgcgtgtgctcagtgcctatcttcgacagtgtccaagtttgacaaggcttgtggcgctgcgcaggggtgccaaatcgactatagcagctgttgggcacgctacgaaatctaccccttctatttcccactcgaagccaacggccgtgccactattgatatgaacaagtacactaaagttaccatgcactgaataaatctagcatacatatgctacgcatatagtacggtaagcatgcgtacatacatcgcgtagcactttaatttcacgaatatgcactagctgcagtttgtttggaatgaataaagatgtgtactgagtatgttgtacacttaagtgaatcgaatatctctttatcattattttgccacaatatattaattggccaagttcgtcaacc

SEQ ID NO: 6150 - DNA, 1689 bp, Oryza sativa
  ref <308>: DATABASE ACCESSION NUMBER: AK063307
  ref <309>: DATABASE ENTRY DATE: 2001-12-06
atcctgagatgcttcaatccttgtaagatctcaattgctgaatgaatccgtcgatgtacctctcatggcaggccatgtccgcgacgatctcctgcagcttcttggctttggcttgaaacactttgctgctttcttcctccaccgcgactgcacgaatcgccgccgcgacgccttctcggtcgaacgatccatcgccgtcgtttcttgccacctgcaatccggcgttcttcgcctcgattagccgcgcgttcggtccctggtcgccgaagatcggcagcatgataagcgggtggccgaacatgagcccctcgatggtcgagttccagccgcagtgggtcaggaacgcgcccacggcggcgtgcgccagtatgctcatctgaggaacccatctcgtcgccacgacgccgcggccgcgcgtgcgctcctcgaagccggcggggaggaggtcggcgtcggagacgccagtgggcttcctaagagcccagaggaagcgcgtcccggcgagctccagcccgagcgcgagctcgtggaccttctccactcccagtggcacctcgctgcctagcgcgacgtacacgacggacttggccggctgcgcgtcgagccagcggacggtggcatcctcgccgtcctcgcggcggccttcatgcaacggcggcataaggccaaggaaggtaataggcttaccgcggagcgtcgacaggagcgggacggtctccggctcgaactccacgcagctccgcccgacgacgaggctgctcctcgagagcgtcaaggagaagcgctcggcgagggacattcccgatgagcctttggttcgtatcaacttcatcctcgccacctcgaacgttggcgccgccgctgggcgtccctgcccggcagccgcaggcgactctgtctccgcgcgctcgagccgtctgtctgctatggaagcgatcatatgtgcagagcccaacaacatcattgcacatggcacctaaggcgaataacgtagcatcaatgatggaattatgtaattaaggttagtgcaaagattgagctattagtaggacttggtgcaaccttgtgctcgagagcggcggctgcggcccagtggtggaagacgtcgacgatgacccagtcggcgcacgcggtgcccaagaactccgagaagggcgcggcgagcccgtcgaaggccctccggtggagctcgaccatgtccggcctgtcgtgggggacgtcgttggtggactcggcgccgtcggggagcccctcgacgcgcgggagcggcagcgccacgaaggcgacgagcggcgcgagcgcggggcgcaccggcgggaggcgggatatgttccgcggcgtggagacgaacgacacgcggtggccccgcgacgcgaggcgctgggcgaggtcgaggcacgggagcaggtggccgaaggcgagccacgggcagatcacgacgtgcatcccggcggcggcggcgtaggaggaggagtagccggagtccatgacggaagaagggggccggtgcgcgcgtggagcggccgagcgggcgggtttagcgtgcggcggcgtgggcgtcgatgtgcgggcgcgaccgatgaataccgcccggacgcctgatgatgcgatgggcagtaccgcccgtgggtttggactttgtatactttggaggtttaccaagcttgctccgatcgggctgattgcttc

SEQ ID NO: 6151 - DNA, 1275 bp, Oryza sativa
  ref <308>: DATABASE ACCESSION NUMBER: AK063308
  ref <309>: DATABASE ENTRY DATE: 2001-12-06
actttacacttcgccgtcagctcaggtcagatcgtcaggccgttctgctgccttgtttggaatagatatcggcatggcttacttgggcctccttgttcttcttctcgccttctgcggtggagcagagcaccacggagcagaagcagccggtgatgcgtcagcccgtggcgcgagcgcgcgcaggggcctggccaccgtctccgtggcgaagccgtcgtaccccacggtgaccacgcccatgtccgcctccacctccccgagcacgatgccgatgagcagctcgccctccgcgttcccatccctggcgaccgcaggcggcggcggcggtggcggcggtggaggatcgtggtgcgtggcgagccagagcgcgagcccgacggcgctgcaggtcgcgctggactacgcctgcggctacggcgcggactgctcggcgatccagcccggcgggagctgcttcaacccggacaccgtccacgaccacgcctcctacgccttcaacagctactaccagaagaaccccgtcgccaccagctgcgacttcggcggcacggccaccatcaccaacaccgatccgagttcagggtcgtgccagtattcagcctcgagcggtggtggtcagaacatgctgcccccgccgtccccgaccaccctgccgccgccaaccccgatgacgccgaccaccccgatgacaccaacaccgaccacgccggacaccgggacgccgatctacggtggatccacgacccctcctgactacggctcaatgtcccctcccggcggcttcgggtcaaactcccctcctgattacggcgacgtcggcgccgcaccggcgacgatggccagcggcagggcggcggtggcgctcgccggcgtcctgatcgcgacggtgtctctgatgagcatgtcaacatgatcgcctacacttcagggtggcgaaaatttctctacagccgttgcagttcaagaattagttgagagaggggtgcgccgcggtgcgttgggtgctgagacatgcacgcaaagatttaaattcgcgacgaacacctcgatcgatggatcccctgccgcgctatgcaacacgctagctagctatagctcggcaaaaggctgaggtgccccatctgtttttagtgttcgtcagaaaactcagaagcacggtgatgcagcttcgtacgtcccagttctagcggcaggcaggatatgtttatattacagttacagattccactgttgtacttagaaaacctattaaaagaatttatttccttattattc

SEQ ID NO: 6152 - DNA, 1850 bp, Oryza sativa
  ref <308>: DATABASE ACCESSION NUMBER: AK063309
  ref <309>: DATABASE ENTRY DATE: 2001-12-06
aagcaaagaaacaaagaagaagaagaaagaagaagcagcagcaaaaaagttgatcagttaattagcaagtgtgttcttctttcttttggtgagagagagagagagagagagagagagagagagagagagagagagagatctcagaatggtgaatccaggaagaacagctagggcactctgcctcctatgccttgctctcctcctgctaggtcaagatacccattccaggaagctcctgttgcaggagaagcacagccatggcgtcggcaacggcacaaccaccacccaggtcagcagattagttcagtatcgtttcttcagcttattaaccgtggccaaatttgaattctataacttaattttagagttgatgtggatgtgttattaatcatagattatttctcaacattgggttttatgccgctaataacacatatgtaaaacctttacaaacaaattatttttcggtcgctaataagcgttacggcttataattttcctagtgaacagtgcatgcattttgcaaacttcttgttggctctggttgcaacttgcaagcacgcatatgcattgagagaagagttcatacacacactgtattatatatatgtacatttgggctataagatactaaaatgaaacaggagcatcgtgttctgaaatggcgtggcgttcttgtttattttcagcttgtgtaattgctggagggcaatagcatgggaaaacactctaatctgaatctgtgacacctggaacagtagcaccattcttgatggcataatacatgtacttaaccacatgtttatcgttggaatcctggtacaatgctccgagctgcatcgatccatccatgcgtgttacctccatgtgttcgaagatgctatatatttgcatacgacaggcacagcttcatgaatgttacttcgcactgtcttaacaaactccctcagtttcatattataagtcatttgattttttttcctagtcaagtatgaccaagcttatagaaaaaattagaaacatctaaaataacaaactagtttcagaaaatctaacattgaatatattttgataatatgtttgttttgggttgaaaatactaatatatttttcaataaacttggtccaacttaactagaaaaaaaatcaaacgacttataatatgaaacggagggagaactttccaaagaacgacattatcttaattttaagacatcgttattgtttttaaaataataataggatcactagtttctattacaatatatttgtaaaacacaataatatgacaatattatagaggtagtactactttttgagatttccatacatccaatctataaattgatcaaagtttctgcttccactctgtttcgttcgttcttgaaagttttcttctaacagtatgatgatcttgatcaatcaggaaccaagcagagagaatggaggaagtacaggttccaataacaatgggcagctgcagtttgattcagccaaatgggaagaattccacacggattatatctacacccaagatgtcaaaaagccataatggctgttcatttatgatttgaactagtactagtagcttataccttctgcgcgtcttttgttcgtttggagaggggattttcttgggatttagcatatgaactaattaaattaaatcccaggcaaatcccactcagcccattttgtgcagaagttgtcagtgttgcactgtataattatttagtcatacacaactactcctggtaactactcctatcttcgatgaattttctggttttgccagacgtgacaatagtccagtagcatgcagtaccctctcagaatccctgtaatttagc

SEQ ID NO: 6153 - DNA, 718 bp, Oryza sativa
  ref <308>: DATABASE ACCESSION NUMBER: AK063310
  ref <309>: DATABASE ENTRY DATE: 2001-12-06
cacacacgctcgccgcgcgcccgcacgctcgccgtcgccggccgccgcctcgtcgtcgtcgtcggagaaggaggaggaggaggccgtctctctgcgttctggctgctcgcctgcgtggtggtgatgatggtgggcaagagggggaggggagggagcaagaataacccgatgaggcggacgacgagcagcacatgacgcaggaggagtggcaggacaagtgcggggtgacgtccatgaagaaggaggcgccggcgccgcccaacggccgccgccgctccagcaagaccaccaccagcggcggcacggtggcggcggcatgatcgatcgatagccaccacagcctctagctacctagcaagaacgccgagctcatcagcatcacacacctaagtatactacaagctacaaccaccatgcacacggctcaattacgacgacgacgacgacgacgaagaaagcaaagcaagaatcgattattaatccaccattattgtatggttcgatcgatcgatccatcgatctgcctttagagagataccattagttttgatcaatccatgtatgtatcacctgatcagtacttggatcgatcgagatgttaattagttgcagagttcttgccgatcagtgatgatgggttgataaattgattaattgatcgatcatatataatgttgtggggaatctatggcctcctggaacagaggaatttcatatg

SEQ ID NO: 6154 - DNA, 2690 bp, Oryza sativa
  ref <308>: DATABASE ACCESSION NUMBER: AK063311
  ref <309>: DATABASE ENTRY DATE: 2001-12-06
aaaggctccccgcaaacagcatcaagtttctctgcacagttctagtagtccaaatttgaacaagggaactgtttctttggcagaacctgcaaagaaagcttctttggattctgtcatggctgttgaaagcagaatcattgaccctgctgaatcatctgttgcactaaagggtgataaagcttccatgacacccatagggcaacctttggtcaacgcagaatctcatacaaactactacgcaaagaagcctatcaatagccagccatcctcagatgcggtcaattcaggaaagctcgtgacaagcctatctgaagaaaacaataaaacgatgcccattagcactccatttaacataggcacctgggataattcacaattaaaccagcaggttatgccattaactcaaactcaacttgaagaagctatgaaaccagggaagtttgaacaagctggttctggcttttctttggagcccaacaatgctctgtctcccacactaggttctgaaaaaacattcccttcatctgctagccctattaattcccttcttgccggggagaagattcagtttggagcagttacctcaccaactgtactgcctccagtcagccgaactattacaagtgggcttggtcctccaggttcatctaggcctgatatgaagattcatcgcaacttgcctggtgatagcaatagtactgccattttgtttgataaggagacgtctacaacaaaggaaccatcaccaaactccgatgatgttgaagctgaagctgaggctgaagcagctgcctctgctgtagctgttgcagctattagtagtgatgagatagttggatctggagctgatgcaacggcagcttctgcttcagacaacaaaagtttcggcaataagaatcttgctggattagcatcaggaggtcaatcatccacagatgaaccactcagcgtcgctcttccagcagacttgtcagttgatactccaccaatgtccctgtggcaccctctgccaagtccacaggcatcaggaccgatgctttctcaatttcctggtgcacagccatcccacttttcctgctttgagatgaacacaatgttaggagggcagatttttgcatttggaccaagtgatgaatgtgctggttctcaggttcagcagcctcaaagaagcaatgctttaccttcagcaccattgggagcttggccacaatgccactctggggttgagtcattttatcgtcctcccactgggtttgctggtcctttcattagccctggagggataccaggcgtacaaggtcctccacatatggtggtctacaatcactttgctcctgtagggcagtttagtcaaatgggacttggtttcatgggaaccacttatatttctggtgacaagcagcctgactggaagcaaaaccaaggacctccggttgttggtgttagccagagtgatccaaacaaccaaaatatggtacctggtcaagtaagctcgcccagtgttcctactccagtacagcatctacgcccaacctccatcatgccaattccatctccactgaccatgtttgatattgctccattccagtcatctacagatatacagatgcagccttgttggccacatatgcctgtagcaccactacacaccgtcccattatcagtgccactacagcagcatccaatggacggcacagctgcagcgcagtttgttcataacatccaagtggacaacaaagcgagttcgaataaccggttccaggagccctctgcttctgttgttccagcagataacagcaagaacattccaaatgcatctgctactcagtttacagatgatttaggccttgttgaacagccagcctccacaagttcaaatgctcaaactgttcagccttcgtttgcccgggtaggcatgatcagcaatgaagtcccaaacagtgccaaagttatgggtaggtcgtcgaacacaccaaatgttaaccctgggattgctacaggggtcagcaactcaaatggaagtcaggttgccagcatgccttccaagccccaccaatcttcatcatcatcgggtcaacagtaccaacatcaagttaataatcaagatcgtcggtctcgggtgacccaaaagactggagctgtcaatgaatggcaacgccgttcaggataccagggaaggaatcaaaattccggttctgacaagaacttgggcactggtaggatgaagcagatctatgttgcaaaatcatcatcagcaagtggccatgccccatctggttagaagcacaaatgctcttttgcaaagcctgcgtcaatcaggaggccgcaacagctcgactcgagcatatttgcaccagacacatgcgaaatgtgttgtcactccatgtctgtctatcctttttgttttctttggcgattatagcctgtgctgatcatttatctatttttggttcattgtcttgcatagagaaaagaaaaaggtagtgtggttgcagtgtcaaaactttatagtgatatcgtgacatgcctggataaaatttgcaaccttcaaaatatgctgttgtgtaagtcgatggtgtgccgtctgaattgttaatactattatcattatcattattatttttccggactctggaggtttaaacagcctcggagattgctataatagggatgaaaacatgccccttgtg

SEQ ID NO: 6155 - DNA, 1446 bp, Oryza sativa
  ref <308>: DATABASE ACCESSION NUMBER: AK063312
  ref <309>: DATABASE ENTRY DATE: 2001-12-06
gtctcgcacagtcgcagctgctgcggctgtttgcccatcaatcaagaaatggcgaacaaggctgtcaccattggcgatctgatccaccgcgtcgccacctcctgcctctccaaccgcctccccggcagctacgcggtcagcgactccgccgtacgaggccgcgctcgacgacctccgccgccagctccaagccaagcaggccgaggtcgatggcctcaaggagaagctcgccgtcgcgagcaaccgccgcaactcacgccaccacccctccaagcacaatgcctccggcggcggcggcggcgccccgaccgcggagctgttcgccgcctgcgccgagcaggcccgcgccgcgatccgggcgttcgcggggcacctcctccagctgatgcgcgcggcggggcttgacctcgcggcggcgacccggtccctcaccaagatcccggtgtcctcgccgcagctggccaagcacgcgctcgaggcgcacgtcacccgcgtcctcctcgtcggcttcgagcacgaatccttctacctcgacggctccctctcctcgctgctcgaccccgccgcgttccggcgggagcggtacacgcagttccgcgacatgcggggcatggagcccgccgagctcctgggcctcctcccgacctgccccttcggccgctacgccgcgagcaagttcgcggcgctcctcccgccgcgcgtggagcaggccgtcctcggcgacggcgagcaccggagggcggtggagggcggcgcgcacccgcggacgccattctacggggagttcctgcgcgccgcgaaggcggtgtggatgctgcacctgctggcgttcgcgctcgagacgccgcccagccacttcgaggccggccgcggcgccgagttccacccggattacatggagagcgtcgccggcgggcgcggcggcggcgccgccggcatggtcgtcgggttcgccgtggcgcccggcttccggctgggcaatggcgccgtggtgcgagcccgggtctacctcgtgccgcgcggtggccgaccgtgacaggatacgcaatgcacggatcgcctcttccttagctggagtagttgattggtggaagcaagtgttgtagtagtagctgcttaattacatgtgtaatagacttggattactccagaaatgaaggatgaaccatttagtctacttactgttctatttagcattttagcaacctcttatctgaagtaatccatgggtaagagaattgggtgtatgatcatgttgtactattactattatttagtcaaagtaggggttggtactggagtattagctgggtcatgtgtactatcagtatgatcatcgcaagatgtgggcttgagtatgatggataattaagaaggcactctatcattcagaagatgtggtagtagttgtcacatgacatcaaagaagtactatccttaattggc

SEQ ID NO: 6156 - DNA, 2050 bp, Oryza sativa
  ref <308>: DATABASE ACCESSION NUMBER: AK063313
  ref <309>: DATABASE ENTRY DATE: 2001-12-06
caagcccccagcaaacacaaacaagcgtactacgtacgattcctcctccgacgagagagagctcgcgccatggcagcagcatccgccgtcgcctcgtcgtcgtcgtcaccggcgctggagccccaccccgacctctccccggtattctcgtcgccgtccgcggcttcctcctcctcgtcctcgtcgcgcgacgagggagcgcgcggggtctcgtgcgaggggggcggcggtgatgacgtgttcgacctggacgccccgtgggtggcggcggccgaggcggagtcgaggctggaggaggccgtgacggcggcggccgcggcgcgggttggtctctgctgcaccgaggagaaggggaaggggaagggggagaaggaggaagatgagatacgaaacaaccggcagcggcaggaggacgagctgatggctttggaggcaatatatagtgatgatctggctgtattcggaaagaaaggggggctccactatttcgagatttacatacattacgatttgaatgatggcgctgaagtgtgtgctaagctttcttcagctaatgagaaaaatccaaaagatggaagatgttgcgttggaatagaagggcatggtgacgaaccagaagatttttcttacacttgtaattttgagtacttgcctcctttggtcttgacatgcttgcttccactgtcctatcctagcaaagaacccccatattttacagtcactgttaagtggatggatgggcctaatgtttcgcagctctgtaagatgcttgacaccatttgggcagagttaccagggcaggaagtggtataccggtgggttgagtcgctaagaaattcttctcggtcatatctctggtttgatggaaaaataacgttaggtccagatactccaatgcagaaaggagataatcgtgcaatctcaagaagtctctccttggagtctgtaattccatccatgctcagttacagtagtaagaagcgctatcaagcatttcttgaggatctccacatgtgcatgatatgcctcagccagagcaaaggttcaaacttcatcaggcttccatgccaacacctcttttgtgtgaagtgcttggggacgttatgcaggatgcatgtcaaggaaggtagtgtgtttcagttggtatgccctgataccaagtgcaatgcttcaattccaccctatgtgttgaagagacttcttacagaagatgaatttgaacgttgggataggcttactcttgagaaagcactggactccatgtcagatgtggtttactgtccaagatgcgtgatcggttgcttggaagatgaggataataatgcacaatgtccaaaatgctcctttttcttctgctcgttttgtaaggagccatgccatcctaggaggcagtgcttgactccagaggaaaagctccagcgccggcaggcgtcagggaggatgtctgagagagaggtggcacaggaaatactgaacatcaaagcattatataatgatgtccgattatgtccaaagtgccgaatggccatcagcaaaactgcagggtgcaacaaaatggtgtgcggcaactgcggtcagttcttctgcttccgctgtggcaaggccataaagggttatgatcatttcagcgaatgtaagctctttgcgcctagagacatatcagcgtgggagagacaaatggaagagcagtatggaaatcatgtacggctttcactgcgccctgtaggcggtacaatcaggtgtccaaaatgccgtgaaagaaatttcaaggatgatgagaaatatatcttctgctgggcatgccgagccaactactgcacaatgtgcagacgtgaagtccaggacaagagggggcactttgggtcaccggaatgcgtggggcttgaagatttctagcatctgatctgtgtactcctatggtcacatttttacagtttacgaagttagctgttatgtcaaatgctcaatctgacgtcgtgtgtaatcgattgatgagaaccatatactcctatctaaaagctgcaacaagagttgttgtcacctttacctt

SEQ ID NO: 6157 - DNA, 1487 bp, Oryza sativa
  ref <308>: DATABASE ACCESSION NUMBER: AK063314
  ref <309>: DATABASE ENTRY DATE: 2001-12-06
gatttcacccttaagcaaccataaccccttctagtatagttagcttagtgcagtgactaacttagcttgagatgggagggtaccaggcagtactggatccagacaaccagaagccatccagcaaaaatccaggctacttcctgtccaaacacacctgcgcttggctcgccagcggcttcgtcttgttggctctcctccacctcctctgctgcgccccggccggcactcgaccagcggcggccttctctcctctgctccagtacatcaacaacacttactccttcgtctcaacagtgccgggagtagggaagagctgcaactactcggatgggaaatgggtgtgggcgccggggcacgtgctgcggtacaacgccacaaggtgcaacgtgaaggcgacccacgactgcatccgcaacggccgccccgacaccggctacctcgactggcggtggcagccggcggcggcgggctgcacgcttccggcgttcgacgccgggtcgttcctcgcggcggtgcgcggcaagcacgtcgccttcatcggcgactccatggctcgcaaccaggcccagtccctcatctgcctcctcgccgccgccttcccctaccgcctccagtaccgcgccaccggcgaccccggcaagtacaacctgtggcgctacgcgttcccgtcgcacgccgtgacggtgtcctactactgggcgccgttcctcgtcagggcggagggcaagtcggtggacgacagcgtcccccacaactacgtccacctcgacgagcccggcgagcggtggtccgccgacgccgccaccatcgacgtggcggtgctcgccgcgggccactggctgatgaacggcgcgatctactacaacggcagcgaggtgttcggcgtgcacaacgcgcccgaggagttcgccaaccgcaccaaggtcggctacgcgtggccgctccggctggcgtaccggacggcgatggagcggctggtgggcgcgtcgcgggggacgccgcgcgacatgttactcgtcacgttctcgccgtcgcacttcgaggggaggcccgtgcagagccccacggcgtgcacgaggatggagccgtacagggagggggagaaggagctggagtgggtgttcagggagatcagggacgtcgtctacgacgtggcggcagaggcgaggcgcggcggtggtggcggcgaaacgacggtgaggatcgaggtgctggacgtgacgaagctagcgtcgatgaggccggacgggcaccccggcgtgtacatgaaccgtgacccgttcgcgaacggcgtggatgagaacatgttctccgattgcctccatttttgcctgcctggcccggtagataccttcaacgagatactcgtgcaactcctcaagtaacggcggtgagaacatgtggcagctcgatcgatctcaccatgttagatcgtgtttttgtttgtggaaaattaattaccgtaggaaaggcttcctacaaatgtt

SEQ ID NO: 6158 - DNA, 742 bp, Oryza sativa
  ref <308>: DATABASE ACCESSION NUMBER: AK063315
  ref <309>: DATABASE ENTRY DATE: 2001-12-06
aggctttctcctccacgggtctagggttccggccaccgccgccgccgccgcacgggggagagagagtgagaggatgagcgggagcgcgttcaacgcgttcaagtcgcgggtggcggtggcgtggagccccaagctgtacatcacgctggtgcggggcctcccggggacgcgccgcctccaccgccgcacgctcgaggccatgcgcctccgccgctgccaccgcaccgtcgagcaccgcaccaccccttccctcctcggcatgctcacccaggtcaagcgcctcgtcgtcgtcgagacccaggagatgtacgccgcgcggaggcaggccgaggacgaccgccgcgcgcccaggccacccctcgtcgtctcccaccgcccgcccgccgctgccacgcccacgcccacgcccactgcgggccactagactcaccagtgggcaccagaagccattcttcaataaagactggctactatatgcttgagactatctttgctctcaatgatgatttcattgaacctgttctggtaactcattatttaccaaagtggtctcatcaagcttgtacctttgaagaccgtaatgtcttggcctttgtagtcagttaaatgaataaagcctttttgatatgttggtgccactgtccaatcttgtcagttactgcttcctctatcatcgaaattattgctgcaaaattcacattccatttatggtttatcacttcatttcaactaggtagtgatg

SEQ ID NO: 6159 - DNA, 1699 bp, Oryza sativa
  ref <308>: DATABASE ACCESSION NUMBER: AK063316
  ref <309>: DATABASE ENTRY DATE: 2001-12-06
gtgctctcctcctcttcctcttcttctccttccttcctgccattcctgtgaccccgagccgaggcggcgagagagagagagagagagtattagtagtagtaggagagggaagcgagtctcctcttcctcctcctcctcatcgccgttagctgctgctttcgccgaaggattgttgctgggccgcgtcgtgaccatggatggtgagacgagctgttcttcctgggacagcgacgatgagtaccagaagttcatccaaaagatgaaccctccaagggttgtgattgacaacacatcatgtaagaatgcaacagttgtgcatgtagacagtgccaacaagtatgggatactgttagaggtagtgcaggtcctcaccgagctgcaactcatagtgaaaaaagcctacatatcatcagatggtggatggttcatggatgtgttcaatgtgactgatcaaaatgggcagaagataatggatgaatcggtactggatgagatagtaaagtatattcataagtgtcttggggctgattcttgctttcttccttcgcggaggagatctgttggagtggaaccttcctctgactacactttgatagagctaactggaactgataggcccggtctgctctcagaagtgagcgctgtgctcacaaacctggaatgcaatgtggtgaatgcagaggtgtggactcataacaaacgagcagcagcggtcatgcaagtcatggataggaaaacggggctggcaatctcagacacacaacggcttgctagaataaaggagcgacttagctatgtgttcaaagggagcaacaggagtcaagacaccaagacaacggtgacaatggggataacccacacagagcggaggcttcaccagctgatgctggaggatcgggattatgaaaggtatgataaggataggacgaacgtcaaccccacaccggtggtttcggttgttaattggctcgacaaggattattccgtggtgaatattcggtgcaaggatcggccaaagcttctcttcgacacagtttgcaccctgacagatatgcaatatgtggttttccatgggagtgtggattctgagggccctgaagcttaccaggagtattacattaggcatattgatggctcacctgtcaactctgaggcggagcgacagcgagtcatccagtgtcttgaagctgctatagaaaggagagtatccgaggggctgaagctagagttgtcgacaggtgatagagtgggactgctatccgatgtcacacgcatcttccgtgagaatggcttgacggttacgagagctgaagtttctactaggggtgacaaggctgtcaacactttctatgtccgcgatgcagcagggagctccgccgtcgatctgaagactcttgaagctatacgccaagagataggccagacagtgcttcaagtaaaagggcaccctgatcaccgcaaatcacctccgcaagagtcgccatctaggtttctcttcagcagtctgttcagaccaagatcgctgtacagcctagggctgatcaggtcctgagttcttgggtgcctgctcaatccgcggatcgacaaatcatagcatgccatgtcaacaaatacatcgcggtgtatactctccgcagtctcagtcccaggacaaggctgatgatgcatttgactcaggtggcgtaccatcattcatcag

SEQ ID NO: 6160 - DNA, 579 bp, Oryza sativa
  ref <308>: DATABASE ACCESSION NUMBER: AK063317
  ref <309>: DATABASE ENTRY DATE: 2001-12-06
aaacaaatccaaccccccaccaccgcggccgatgtccaccctctccccggacggcgactccgactacggcggcggcggcggcggcggcgaagcagccggagcagtgatggccgacgtcctctccaagggccgggaagcctgctacaaggcccgggacgccttctacacgtgcgtggagaagcacgcggacaagaagcccaccgagatcgccaccatggggctcctctaccccgccgactgcaagaagtcccgcgccaacttcgtcaacagctgccgcccctcctgggtgaagcacttcgaccggcagtactccgccaagaagcgggtgcagcggctgctcgacggcggcgacgaccgccggggccccatctcgctcccccagccgtacacgttcaagcaataggtagctagctctgctgctggttccgtccctcggtaccgagctgaattacatctttgcgtcggagactggatgcggcagtatttgtttcagatttggtggtgttaagatggaaggcatatgcctctgctttctagtacgttggtatgaattgtgaatggatgagaaagaacttgcct

SEQ ID NO: 6161 - DNA, 1720 bp, Oryza sativa
  ref <308>: DATABASE ACCESSION NUMBER: AK063318
  ref <309>: DATABASE ENTRY DATE: 2001-12-06
atatgatgaaatgaaggttgatgtgccacaagaggaggaagataacgaaatgaaggtcgatgcaccacaagagaaaaaggataatgaagtgacggctgatgtgccagaagagaagggaaatgatgaaatgagggttgatgcatcagagtcaatagaaagcatagagccagtcagcagatctaccttggacaataaaaaagaagatcagggtcagatgaacaacgttgaagagaaagcagcatcagactcaaaagatgaaaatgaaaagacagcaaatgatgaatcaggccaggacaaagtacttaagaagccagataagattctcccttgccctcggtgcaacagtatggacacaaagttttgttattacaacaactacaatgttaatcaacccaggcacttctgtaagaactgccaaaggtattggactgccgggggaaccatgagaaatgtacctgttggtgctgggaggcgcaaaagcaagagctcatcgttgcactaccgtcacttactgatggcccctgattgcatgatggggtctagagtgaaaatatccaagtcaatgaaccctgaagctttcgcatctgcgcattcgacccctatacaaccaattggcagaaacgaaacagttctcaaatttgggcctgaggtgccactctgtgaatcgatggcatcagtgctgaacattcaggagcagaatggaaccaatgctgcagcagtaccaacgggtgaaaatcaggaagataactcttgcatctcttcaatcacatcacacaacgtgttacctgaaaatgcagcccaagttgacaagaacagcacgccggtgtattgcaacggagtcggcccagtgccgcagtactaccttggagctccttacatgtacccatggaacataggatggaacaacgttcctatgatggtgccaggtacaagcatgccagagtctgcttcccaatctgagagctgcagcaccagttcagctccatggatgaacatgaactcccccatgatgccggttgcctcgaggctttctgcaccaccatttccataccctctagtgccacctgcactatggggttgcttatccagctggccggccacggcatggaacataccgtggatcagaacgaatggcggctgcatgtctccatcgtcgtcgagcaacagcagctgttcaggcaatggctcccctctggggaagcattccagggactcctctctcccactgaaggaggacaaggaggagaaatcactgtgggttcccaagacgctccgcatcgacgatcccgacgaggcggcgaagagctccatctggcatcttcaagccgttccagtccaaaggtgagagcaaaggccaagcagcatcagagactcgtcctgctcgtgctcttaaggcaaacccagctgcattgtcgcggtcgcagtcgttccaggagacttcttgactctttacctgttgaatttcctatagtttttgtcagcacagtgtgtgtactgtaaaatgtgtatagcagtagaggttttgcggtattcagaaggatcaggagagagctttttgtgcagccactaacttgaggtggataggagttgcaaagggctttcatgagaaactacatcgagatgtatatgtattgtaaatacttgacaaactggttgtgtacatctaggttaagtcaggaaaatacactcacctggtttagctctcctagtatattatact

SEQ ID NO: 6162 - DNA, 1621 bp, Oryza sativa
  ref <308>: DATABASE ACCESSION NUMBER: AK063319
  ref <309>: DATABASE ENTRY DATE: 2001-12-06
agcagctgtctgaagcttaaccaaagcttaaacccaaagcaaaccagaggcagatcagatcagagctagtagcagcaagctcgcgatctcccccaccttctagaaccttctagaaccgccgaatgccgctccaccaccaccgccaccaccaccactccgccgccgtcgccgtcgccgtagccgacgacgacgacgaggccaagccgcgccgcccctactccaccttcgcctccccgcgcgcgcccacctccgccttctccgccgccttctcaacccaccgcctcctcgtcctcttctccgtcgcctgcctcctcgtcgccgcggcctccctcgccttcgccttctccgcccgcgccgcgaccctgcagccgccgcccctcgccgccgtggccgaagccaccgccaaggtcgccttccgctgcggccgcgccgaggacaccctccgcgccttcctcgcctcctcctcggggaactactcctccgcggcggaggggagggagagggagaaggtgctcgccgtcgtcggggtgcacacggagatcggatccgccgcccgccgcgccgcgctccgggccacctggttcccgcccaagcccgaaggcatcgtaagtttggaacatggaactggtttatcttttaggtttgttgttggacgaaccaaagataaagaaaaaatggcagatcttcagaaagaggtagacatgtatcatgatttcttgtttgttgatgctgaagaagatacaaagcccccacagaaaatgttagcgtttttcaaagcagcttatgacatgttcgacgcagatttctatgtcaaagctgatgatgctatctatctgcgcccagatagactcgctgctcttcttgcaaaggacaggcttcatcagcggacatacattggttgcatgaaaaagggtccagttgtcaatgacccaaatatgaagtggtatgaaagttcgtgggaattattaggcaatgagtacttcagtcatgcatctggtttactatatgctctttcttcggaggtggttggatctctagctgctacaaataatgatagtttaaggatgtttgattacgaagatgttactattggatcatggatgcttgccatgaatgtaaagcatgaagacaaccgtgcaatgtgcgattcggcatgcactcccacctccattgctgtatgggacagcaagaaatgttcaaattcatgtaacacaactgagatagtaaaggcgcttcacaacactaccttgtgctcaaagagccctacattgccacctgaggtggaggatgagtagaaccttagtgttattttttttcccgtcaacagatgccaggtattgcctgtcgtaacatctgatttctagttaaatgtatttccataccgttgtattcattggtgaactcatctgagagccatactgttgcagcttcttgttgctgagagttctccgagaagtgtaccatcgcgagaatgatgtaggatttgtgtgcacactcccgatattgggataagcgaacaagacaatatgtaggttcaggcaaaatgtatactcccgactgatagaagtgggaacatttgttgtcttatgtgccatagccgattctggccatcgattctttc

SEQ ID NO: 6163 - DNA, 546 bp, Oryza sativa
  ref <308>: DATABASE ACCESSION NUMBER: AK063320
  ref <309>: DATABASE ENTRY DATE: 2001-12-06
agggaggccgagtagatcgctcgcttcgtggctcgaatcgaatcggtgacggcgagaggagggaggaggaggaggcgacgggaggaggaagaagaagaagatgaaggttcgcgcgtcggtgaagcggctgtgcgcgtactgcaaggtggtgaagcgcaggggcatcgtgttcatccagtgcaaggccaacgccaagcacaagcagcgccagggcttctccacgctcgccgaggccgccgccgcctgccaccccccacctccgccgctgctcaccaacacatccccggctgtcgccgccgccgttgcggaggcctcgaaggttgctaagcaagagccgtctatgaagtttaattggcctctgggtttagctgctctgctcaagaacagcgataaataatgtatctgctatttctgcatgaatcctagcttcttgatattttggtactatgtgtaagattttagttaaagaaccaacaaagtttgtgtatctgcagtcatcagctgaactgatcttgtgatggaataacacatacctacacttttact

SEQ ID NO: 6164 - DNA, 2221 bp, Oryza sativa
  ref <308>: DATABASE ACCESSION NUMBER: AK063321
  ref <309>: DATABASE ENTRY DATE: 2001-12-06
gcgtagccggaaatcgaatcaggccgcagggctgagagaaaaaaataatcagaagcaaaggggggagagagagagaaaaaaaaaagtcgaggaggcggcagcaggcggcggcgagcgagcgagcggaggaggaggaggagcagagaatgtcggcgctgcagagctggcgcaaggcgtacggcgcgctcaaggacaccaccaccgtcagcctcgccaatctcaactccgacttcaaggatctggatgtggcgattgtgaaggccacgaaccacgtcgagtgcccgcccaaggagcgccacctgcgaaagattgcagcggcgacgtccatcggtaggcctcgggcggatgtcgcctactgcatccatgctcttgctcgtcgcctcgccaagacccggaattggattgttgcactgaagacacttgtggtgatccacaggcttctccgggatggtgatcctacattccgtgaagagtttcttactttcacacaaagagtgcggattttgcaattatcaaacttcaaggatgactccacccctgttgcttgggactattcttcatgggttcgtacatacggtttgtttttggaggaaagactggaatgcttcagggtcttaaagtacgatattgaagctgagcgtttgtcgaagcagggtcaagggcctgaaaagggccacagtagaaccagagaattagattctccggacttgctggagcaattaccagcactgcagcagttactctatcgacttattggatgtcggccagaaggagctgcaaatagcaattatttggtgcagtatgctctagctctggttcttaaagaaagcttcaaaatctattgtgcaataaacgatggaattatcaaccttgttgacaagttttttgagatgccaaggcacgaagcactcaaagcccttgaaatttacaggagagctggacagcaggctggaagcctatcggacttctatgaaaactgtcggggattagaacttgcaagaaatttccagtttcctactctgagggagccaccacaatcattcctttcgaccatggaggagtatgtgagagaggctccacgcatggttccaattaaggaacctttggagtttcctgagagactcctcctgacatacaaaccagaagaatcagaagagattcctgagcctgtttctgctgaggaggaaaaaccacaaattgaagaacctgctgttgcagtgccatctactgaagtagttccaccaccacctcctaaacctgaggtcgtagacaccggtgatttattgggattaagcgatccaacccctagtgtatcagcaatagaggaaagcaatgctttggccttggctattattcctacaggtggtgagacgtcaacaagtggcacagctacactgcaagataaaggatttgaccctacaggatgggaacttgctcttgttactaccccgagcaccaacacaaactcaatggccatggacagtaatttgggtggtggatttgacaaactcattctggacagcctatacgacgagggaacctacaggcagcagatgcagcagcagcagctgtatggttcagctgcccccaaccctttcatggcgagtgatcctttcgctatgtcgaatcaagtagctcccccaccatcagttcaaatggctagcatgactcagcagccccagcagatgcctatgatgatgcagccaaatcccttcgggccaccactacagccgcagcatgcaggcattgctcaggcacccaaccccttcctcgatgctgggttcggccctttcccagcatcaaatgggatgcacccgcaagccaacccgtttggaaccgcccaacttttgtagggtcacagttaacacacgagatgggcacttgggcagtgcaaattcaagtctattgagttgcatattgcatattcagaagtgagatttgcagatgtcgcaatggtatacatactttgtattggcttctcttgggctgtgtggccgcttggcgatcttgattttttgtagttcaagcctgtaaacctcctgtgcagtagtatttgtttttttttttcaccatttgtgacggcggctggtctgggacgattctccttgtaaagaaatttattttctctgattcatagttacatgtcaaaaaaaaaaggtcgtaaaactggtgatagctaccagagtatatatacttttgtaactaaagatattttcagttt

SEQ ID NO: 6165 - DNA, 1614 bp, Oryza sativa
  ref <308>: DATABASE ACCESSION NUMBER: AK063322
  ref <309>: DATABASE ENTRY DATE: 2001-12-06
gtgatgaggaggccgctggagaaggccggggcggcggggctggtcgcgatgctggccgccgccgccgcgctgctcctgctcgtgtgcgccgcctcgctccgctgctcggccgccgtcggctcggcgctggcggcgcccaagaagctcctcagcggcggggtctccatcgaggagccccgcggcggcggcgccggcggaggcggcggaggcgaggagtgcgacctgttcgacggggagtgggtgtgggacgacggctacccgctctacgcctccagggattgccccttcctcgacgtcggcttccgctgctccgagaacggccgccccgacgactcctacaccaagtggcgatggcgcccctcccgctgcgatctccccagatttaatgccagaaatatgctagagaaactcagaaacagaagagttgtatttgttggggattcgattgcaagaaaccaatgggagtctctgctttgtatgctcgctgctgctgttcctgacaagagctccatctttgaagttaatgggaatcctattacaaaacacatgggtttcttaattttcaagtttagagagtacaattgcactgtggagtattacaggtctcctttcatagtccttcaaggtcgtgcaccagctggagcccctgcagtcgtaaaatatacaattagagtagatgccatggattggatgtctggccggggtaagtggaaggatgctgatcttttgatctttaacacggggcactggtggaaccatgagaaaacaatcaaaggtggcgcctatttccaagaaggcaacgaggtcaaaatggagatgactgttagagatgcttaccaaagatccatgcagacattgtttcattggcttcgcaatgaagttaacacaaacaagacccagatcatcttccgtacatatgctcctgtgcatttcagaggtggtgactggaagactggagggacctgccacttggaaactctaccagatgtaactccaattaaatcgctggaaccgtgggctgacctgcttgaacccataaatcatgtactggggaacagcatcacgaccaagcttgtcgggctggatatactgaatgtgactcagatgacagctctgcgtaaagacgggcacctctcggtgtacctgagtccttcagggcctgcatctcatcacaggcaggattgcagccactggtgcctgcctggtgtccctgatgcatggaatgaactcctctatgccttgttcttgagaagaaagatggtgatgccccacaatgtttcaagtgtgggagctaaaagactcaacactgggtgataaaagccaaaggagtactgctggatggccatgtcctctcttactgaagcaaagctttcataactcataagctaggtagctgagctggggaggacacatttttggtagtacattagtacagtttggttggcaagaagttaagctgcaccactgtgctgtgattttcaattgcggaggttagcgaaaagagctgggcaaaggtaacagtagctcttttttttttttccgatagtgaaaatcattgcaacctctacatccaagtgtatatccggtcatggtaacaatagcttagcctgtatt

SEQ ID NO: 6166 - DNA, 1561 bp, Oryza sativa
  ref <308>: DATABASE ACCESSION NUMBER: AK063323
  ref <309>: DATABASE ENTRY DATE: 2001-12-06
gcaaaacgaagaataacacactaacttcaccatgcaaggttcagtaggagtccatggcatcctcctcctcgccgccgccgccgtgttgacgcagtgtctcctcgccgccgccgttaatactccggtggtccagtgcgcgtcggggacgacgaaatgcaccgtgaccaacgcgttcggcgcgttcccggacgggtcaacctgccacgtggccgccgcggcgttcccggcgacggaggaggagctcgtccgtgttgtcgccggcgcggcggcgtcggggaccaagatgaaggtggccacgcggctcggccacaacttcatgaagctctcctgccccggcggcgacggcctcgtgatcagcacgaacgcgctgaaccgcgtggtgggtgtgaacgcggcgaggatggagatcacggtggagagcggcgtgacactgtctgagctcatcgacgccgcggcgcacgccggcctcgctctgccgcacgcgccctactggctcgacctcaccgtcggcggcctcctctccaccggcgcccacggcagctcggtctccggaaagggcggcgccgtgcacgagtacgtcaccggcatgagggtcgtcacgccggcgccggcgagcgaggggtacgcgaaagtccgcgtggtcaacgccggcgacccggatcttgacgcggtcaaggtctccctcggcgtcctcggtgtcatctcccaggtgacactcgcgttgcagccgttgttcaataggtcggtctcgttccgccgccgcggcgacggcgacctcgccgaacgcgccgtggcgttcgccggcgagcacgagttcggcgacgtcgtctggtacccagcccgcggcgaggccgtgttccggatcgacgaccgcgtcgccaccaccaaaaccaacacgatctcctccggcgatttccagaacgtcatccagtcgtcacggtcaacggagcagcagcagcacggagacgtgttgccgttccaggccggcatcagcgtgccgctgtcgagggcatcggcgttcatccgcgacgcgcagcggctgctcgacatgaaccccggcgcgctctgcggcggcgagaacggcggcatcctgatccgctacgtcaaggcgtcgacggcctacctcggcaagacggaggacagcgtcgagttcgacacgaccagctgccgccatgacggcgacgcggcgatgccggaggagatggagcagatggcgctgcgcaagtacggcggcgtgccgcactgggggaagaaccggaacgtggcgttcgacggcgccattgccaaattccccaaagccggcgagtttatgaaggtgaaggacgcgtacgatcccgatgggctcttctccagtgagtggagcgacgcctacgccgatgcatgatcgaactcgatcgtcagaacatgacacgtacgacggcttgtatgtacgtgtagtgtgtgtggccatgctatgcaggccgcgtgaataatgtagtagtactggcagttaaatctgcacgaatgtactgctacatgactgcaatttctagttttcaaataaaacatgtttgctcagatc

SEQ ID NO: 6167 - DNA, 1808 bp, Oryza sativa
  ref <308>: DATABASE ACCESSION NUMBER: AK063324
  ref <309>: DATABASE ENTRY DATE: 2001-12-06
ctgttcccatgtgcgactccccctcgtcctcgtcgtgttcgtcgttgtcgttggcgttggccatgggagagaggatgaggagggcggcgcacgcgatgctgttcccgttcccgtgctcggggcacatcaacccgacgctgaagctggccgagctgctgcactcgcgcggggtgcacgtcacgttcgtcaacacggagcacaaccacgagcgcctgctgcggcggcgcagcggcggcggggcgctgcgcgggcgggaggggttccggttcgaggcggtgcccgacgggctgcgcgacgacgagcgcgccgcgccggacagcacggtgaggctgtacctgtcgctgcggaggagctgcggcgcgccgctggtggaggtcgcgaggagggtggcgagcggcggcggcgtgccgcccgtgacctgcgtcgtgctcagtggcctcgtcagcttcgcgctcgacgtcgcggaggagctcggcgtgccggcgttcgtgctctggggcaccagcgcctgcggcttcgcgtgcacgctccggcttcgccagctccggcagagagggtacacgccgctcaaagacgagagctacctgacgaacggttacctggacacgccgatcgactggatcgccggcgtgccgacggtgcgtctcggcgacgtctccagcttcgtccgcacgctcgacccgaccagcttcgcgctgcgcgtggaggaggacgaggcgaacagctgtgccagggcgcagggcctcatcctcaacacgttcgacgacctcgagtccgacgtgctcgacgcgctcagggacgagttcccgcgcgtgtacaccgtcgggcccctcgccgccgaccgcgcgaacggcggactgagcctgtgggaggaggacgcggcgtgcatggcgtggctcgatgcgcagccggccgggtcggtgctgtacgtcagcttcgggagcctgaccgtgatgtcgccggaggagctcgccgagctcgcgtggggcctcgccgacacccgccgcaccttcctctgggtcatccgcccaggcctcatcgccggcgccggcgccggcgaccacgacgtcgtgaccaacgcgttgccagatgggttcgtcgcggagacgaagggccggtgcttcatcgccgagtggtgcgcgcaggaggaggtgctccggcaccgcgccgtcggcgggttcctcacgcacagcgggtggaactcgacgacggagagcatctgcgccggcgtgccgatgatctgctggccggggttcgccgaccagtacatcaactcgcggtacgtgcgcgacgagtggggcatcgggctccgcctcgacgaggagctccgccgcgagcaggtcgccgcccacgtcgagaagctcatgggaggcggcggcggcggcggcgacaggggcaaggaaatgaggcgcaacgccgccaggtggaaggcggcggcggaggcggcgacggcgaagggcggctcgtcgtacggcggcctcgacaagctggtcgagcagctgcggctgggtcagtgacgacatggcacacacgcgtacacgtcatcgtcgtgacaagttcggcagttcggctggctggctcactcatcggacgcatgtgcaaaatgcactttggatgtttctccttttcttttttttttcttcttcttttcatttcttgcagttgcagagtcgcagttgttcagttcttatctggttcttggatatgatttttagcgacaggagtgatagcggtacaacgttttcttaatgcagtggtttgtttagttaaaactgtatgctgattgaagagagagtagtattactagt

SEQ ID NO: 6168 - DNA, 1962 bp, Oryza sativa
  ref <308>: DATABASE ACCESSION NUMBER: AK063325
  ref <309>: DATABASE ENTRY DATE: 2001-12-06
acacagtttttcaggcttctgaacttgctcagctagccactctgctccaacgcacgcagcttagctcggagtgacaacggaatggctaccatggatgagcagcagccactgcacatcctcttcctcccgttcctcgtgcccggccacctcatcccgatcgccgacatggccgcgctcttcgcggcacgcggcgtcaggtgcaccatcctcaccacccccgtcaatgccgccgtcgtccgccctgccgtggaccgcgccaacgacgacgctctccgtggcgatgccggcggcgcaccggcgatcgacatcgccgtcgtgccattcccggacgtcgggctcccgccgggcgtcgagagcggcacggcgcttgcttccgaggaggaccgtggcaagttcgtccatgccatccagcggctgcgcgagccgttcgaccggttcatggcggagcaccaccccgacgccgtcgtggccgacggcttcttcacttggtccgtggacgccgccgccgagcacggcgtcccgcggctggtgttcctcggcaccggcgtgttcgcgcggtcatgccaggagagcatggtgcgccacaacccggtggaggcctgccccgacgacgaccccgacgccgccgtgtccctgccggggctgccgcaccgcgtcgagatgaggcggagccaaatgatcgacccaaagaaacggccggaccactgggcctacttcaagatgatgaacgacgccgaccagaggagctatggcgaggtgttcaacagcttccacgagctggagacggactacgtcgagcactaccgcacggctctcggccgccgcgcgtggctcgtcgggccggcggcgttcgcgagcaaggacttcgcggcgagaggcgccgccgagctctcgcccgacgcggacggctgcctgcggtggctcgacgcgaagccacacggctccgtggcgtacgtctccttcggcacgctgtccagcttctcgccggcggagatgcgcgagctcgcccgaggcctcgacctctccggcatgaacttcgtgtgggtcatcaacggcgccgcggacgacaccgacgcgtcgggtcagtggatgcccgaaggcttccccgagctgatctcgccgcacggcgatcgcggcctcaccatccgtgggtgggcgccgcagatgctcatcctgaaccaccccgccgtcggcgggttcgtgacgcactgcgggtggaactcgacgctggaggccgtgagcgccggcgtcccaatggtgacctggccgcggtacgccgaccagttcttcaacgagaagctcatcgtggaggttctcaaggtcggggtcagcgtggggtccaaggacttcgcatcgaatctggagaaccaccaggtgatcggcggcgaggtgatcgccggagctgtcaggagggtgatgggtgacggtgaagagggcgccgaggcgatacggaagaaggcagcggagctaggcgttaaggcgaggggcgccctggagaagggcggttcgtcgcacgacgacgttggacggctgatggacgcgttgatggcacgccggacctctgttgacgtatgaggtggcggttgacgtgaggaacgccgtcggatggtgaccggacagcacacgcgttgtaaaattctggttatacatatacatgagtataacgttgagcggcccccgcaattgcgcagctagcattaatttaaaattatctattttttatatatgattttatttaaaattatcatttccgtgattctaataattttatagtttttaaaagctatgccaatcgttaccctttactcctttgtatcctttttatttgcttacttgatctaccactatttatattcatcatctttagaactttaaaaattaggccttatagttttcagagttcattttcttgatggatttcttattcataatttttggaagtatcatcaaacatcgccaatt

SEQ ID NO: 6169 - DNA, 1793 bp, Oryza sativa
  ref <308>: DATABASE ACCESSION NUMBER: AK063326
  ref <309>: DATABASE ENTRY DATE: 2001-12-06
cctgccagtagtcatatgcttgtctcaaagattaagccatgcatgtgcaagtatgaactaattcgaactgtgaaactgcgaatggctcattaaatcagttatagtttgtttgatggtacgtgctactcggataaccgtagtaattctagagctaatacgtgcaacaaaccccgacttccgggaggggcgcatttattagataaaaggctgacgcgggctccgcccgctgatccgatgattcatgataactcgacggatcgcacggccctcgtgccggcgacgcatcattcaaatttctgccctatcaactttcgatggtaggataggggcctaccatggtggtgacgggtgacggagaattagggttcgattccggagagggagcctgagaaacggctaccacatccaaggaaggcagcaggcgcgcaaattacccaatcctgacacggggaggtagtgacaataaataaagcctccctcactttcccctccctcctgcaaaatctttcacttgctcccatggcctccggctcagagcctatagagtgtcaggttcttgtgctgagggtgtccattcattgtgaaggatgcaagaagaaagtgaagaaagtgcttcaacatgttcctggagtgttcagatgcgacgtcgatgcccggagcaacaaggtcatagtcacggcctcaagaaatatggacgccaacatcctcgttgcgaagctgcgcaagtccggcaagcaagctgagccatggccagaggagccaaagcagcagcagccaccgccaccgcctgcagagagccaaagccaagagactaagaaccaaagcgacgaatccagcaagccgagtgatcaaccagccgaaaagcccggtcccgacaaagctgaaggcagcgcagcggagccaaacaaccctcagccatcgccagagccgacgaagagcaccgatgagaccccaaagccaaatcaagaaatccaggagccatccaacgccaaggccaacaccgatgccaacgccagtggcaatgcaagtgacgagaccaaggaagcagcagcaacaggagagcaatccagtgagccaaaagggaaagtaaagcaacaccgggagaggccgatcgatgcgagggtgacaatggaatacggcggaggcagccacgtgaactacatgccgcaaccgcagccggtgcccgtcatgagctacaatgtggcacggccgacggcgagcgcggcctactacgccgccccaccggcaccggcgccgatgtcaatgccgatgcccatggcaaggcctggaccatcatcacaaggctacattgacgaggagtactcgccttcctactacaaccgttcatcgccatatgagccttactactatcctcaaccttcgccataccgctaccagcattatcagcaatcttcagctgacgactactactatggagcaccccagcagaggagcgccttctcgccgccacgggatgcttacggtgaaatgttcaatgatgagaattctaattcttgcagtgtgatgtgaagcaatgcagtaatttagctagttttatgctccttaactagtgactatatgttagatatatagtagatttagtaccggtaaccgatgtattagtagtactcaggtttcatgcatgctactagaataaaatgagctgagcttgatgcatgagagggagaatttgaggggttaatgaacacttctgatgtttatcagaacaattttgtaacacttgataacatggttatctcggagatgattctaaaatataagttggtattatg

SEQ ID NO: 6170 - DNA, 536 bp, Oryza sativa
  ref <308>: DATABASE ACCESSION NUMBER: AK063327
  ref <309>: DATABASE ENTRY DATE: 2001-12-06
aagtttgatcagatcgtttgcatccaagctgcctggcgatcgactccaggccaccgcaggcatgagaccagccaccgttcttcctccacatcgttgtcggagaagaagccgcatcgccggggcatcgccggatgcttcgaacaagacctctccgcctcctccgccgcctccctcgcgccgctgacgagctgcctctcctcgacgtcgacgccgatgacgattgctcgcagcagcagcaggagggaagccattggctactactggctcgtcagctcccaatggcggtttggaatgatgctcaaggaggagctacttatagtgagcttttaagttgtttgtttagaggtttcaggtaaatctggatttcttgcaaggaatttgcactgttcttgcaaggatatttttgctggtgggtcacagaaaggttgtgacaagggtttggttgttctggggctctgctagtgtggactctaggtgaacagaatcattaggcgaatgctgtaaatcgaaatatctgctagttcttcagtttgttc

SEQ ID NO: 6171 - DNA, 805 bp, Oryza sativa
  ref <308>: DATABASE ACCESSION NUMBER: AK063328
  ref <309>: DATABASE ENTRY DATE: 2001-12-06
atcccatccatccttggcttacttatctagatcaatcacaatggctaagcttgtggctcttaccttcgttgtcttggtgagcattggactagccaatgctggaagggtggctagatatgctagtgcaggcggtggcggcggtggagggggaggtggcggtgggtcaaacggtggatctggatggggatccggttctggctctgggtatggccaggcaagtggcggtggagcatatgctagtggaggcggaggaggaggaggtggtggaggtggacagaatggcggatccggatacggttccggttctgggtctggttatggacaagctggtgggtatggaccatatggtggaggatatgctcaaggagggggtggcggacaaggtggcggtggtggacaaaatggtggatccggatctgggtatggctctggctctgggtatggtcaagctggagggtatgggccgtacggtggtggatatgctcaggccggtggccaaggtggcggtggcggtggtggacagagcggtcctggtggcagcgggtatggtagtggatcaggaagcggatctggaagtgcgtatggtggacacccataaaaacatgtagaatctaaataaactagcaccacaggccatgtgtgctgattgcatgtttgagagatgtgttatttacgtaaataatgggtaataaagggcctccgttgaatacactgtaataacaaaatgtactggtcattgtacaccacaattctacacagcccaccggtgtaactagatgtttgatcaatacatagtagtgttgac

SEQ ID NO: 6172 - DNA, 1253 bp, Oryza sativa
  ref <308>: DATABASE ACCESSION NUMBER: AK063329
  ref <309>: DATABASE ENTRY DATE: 2001-12-06
acatgcaccactccctctctttctctaagatctttttacctcactcgatcaggtacgacagctaagctagccatctatcgttcatggctggtggtggtgtgggagcatcggcggcggcggcggcgacgataccagaggcggcgctgaggtccggcaagccgatgccgctcgtcggcatgggcaccgcgtcgttcccgttggacgcgccccagctgccggccaccgtcagggacgccgtcctgcgagcgatcgacgccggctaccgccacttcgacacggcggcggcgtacggcaccgaggcacccctgggggaggccgtgttggaggccgtgcgcgccggcatggtcgcgtcccgggacgacctctacatcacctctaagctctggatctccgacacccaccccggccgtgtcttgccggcgctcaggaggacgctccggaacctgcagatggtttacatcgacctatacctgattcactggccaataagactgagagtggaacaagaaacgccttcgccggtgtacgacaatgactttgtgatgatggacatggagggagtttggaaggacatggaggagtgccagaggctaggtctcaccaaagccattggtgtcagcaatttcacctgcaagaagcttaacaccctgctctcatttgcaaccatccctcctgcagcaaatcaggttgagataaacccctattgccggcagaacaaactaagggagttttgtaaggagaaagaaatccagctctgtgcctactctcctttaggagcaagtggcactatatggggcagcaatgccgtcttggactgccctgttctcaaacatatcgccgtacagaagggcaaaacggttgcccaggtatgcctgaggtggctgcatgagcaaggcgattgcataatcgtcaagagcttcaatgagagaagaatgagagagaacctcgaaatttttgattgggagctcaccgatgctgatcgccaggagataagcgccctcccggaattcaggggaaaccgtgatttctatgtccacgaatctggcccatacaaaaccactgatgagttttgggatggcgagattactgggccacaactaaaaacctgttaatgggctgctcaagagcaatgaattgtgttattggtccaatataccactgagttgtcttgcttatatatattgtgtaacagctgaaagactagaatgtactctcatttttttcaaatgcaaatctaccagttttttgttcct

SEQ ID NO: 6173 - DNA, 1686 bp, Oryza sativa
  ref <308>: DATABASE ACCESSION NUMBER: AK063330
  ref <309>: DATABASE ENTRY DATE: 2001-12-06
aatcgccaccgcacacacctctccctctccctcctcccccgcgcgccccgcggcctccgccacccgcgccctcgccgtcgccgccccgtcccgtgcctcctgctccctccgccgccgcgcgcgcggcgcgtcgcaggctggtaaaatggataagctcaatggttctgcgcgtctcatgattgtttcagatcttgaccatacaatggttgatcatcatgacgaggagaacctgtcattgcttagatttggtgccctgtgggagtctgtttactgccaggattctttacttgtattttcgactggaagatcacctaccctgtatatggaattgaggaaagagaaacctatgctaactccagacatcactatcatgtctgtgggcactgagataacatatggtgaggaaatggttcctgatgatggctgggtggaatatctgaataataagtgggacaggaatattgttgttgaggagacagcaaatgtttccgagctgaaacttcaggtagagtcggaacagcgtccacataaggtcagcttctatgttgacaaaaagagtgctcaggaagtgataaagtctctctctgagaagttggagaaacgtgggctagatgttaaaataatctatagcggtggccaggaccttgatgtattacctcaaggtgctggaaagggtcaggcacttgcatatttgctcaagaagttaagctcatgtggaaaaccacccaataatactcttgcttgcggtgactctggcaacgatgcagaattattcagcatccctggtgtacatggtgtcatggtcagcaatgcccaagaggaactacttcagtggtattcagaaaatgcgaaggataatcctaagataattcatgcaactgagaggtgtgctgctggaatcatacaagccattggacacttcaaactaggacctaatgtttctccccgagacgtggatttcccttatgtcaaggagaacccggtaaagcctacggatgctgttgtaaagttttatgttctctacgagaagtggcgtagggctgaggttccaaagtctgattcggttacacagtatttcaaaaatataactcatgcaaatggagttattattcatcctgctgggcttgagtgttctcttcatgcatcaattgatgcattggggtcatgttacggtgacaaacaagggaagaaatacagagcatgggtggacagactggttgtctcacaatgtggttcagagggttggctggtgagatttaacttgtgggagttggaaggtgatgtgtggtcgtgttgtctgacaagtcttgcactgaatgcgaagcctgaaacccccgagggcttcgtggtaacacacatccacaaaacatggctcaaagggtactcatcagcggatgagcaatcgtccaagctttagaaccttttctgcacctccgtgtgcacatggaaggaatttactcgaggataaataatgaatcttctcttgagattacttccttttcttgtctatattgtcaattttgttcaaaatactatgctggaggattcccagagccccaaattaagtttgacacatccttgtttgatgtgtaagataaatcataaatgttactgtatatctcatgattatcatgagcgcataaagcaaaactacttcacttgaatatatgttactagtgttcttcc

SEQ ID NO: 6174 - DNA, 1579 bp, Oryza sativa
  ref <308>: DATABASE ACCESSION NUMBER: AK063331
  ref <309>: DATABASE ENTRY DATE: 2001-12-06
acggctattccccctaacccccgccgccgcccagatgcgaattctccgccgctttccgcgtctgctccgacgctctaacgccgccgcccgatctcctgccccgatgcaccgcctcatctcttctccctctctcatggcatctgcagcggctagctggtgctggtggtcaccattgcttgctcgaggaggacctgtcgtccgtcgtgtttcccgatttccttgggaacctcggaacatgaccaccatcagtcgagtaaaaggcgacgagtcatacaggcgacttccatcccaggaaaagaagcatactgcgatcactcaaggtatgaaaaccattgacaccaggggcacaatcttggaggctagagctggagatgagaaaagtaatagagatgcggcgtcctcagaggtttcatacatcaaatacgatgtactggggcaaagtgcgaagcaggatggctgtgatgaggatgatcgaaggagtgaaacggaggaacatgttgaggaggacgaagttcttgatcctgaagaatatactgtgaacaacatacttccaaaaagtagacaccgtgatggctctatatatagggacatcatggacacaccgtggaaaagggagtttcatattgcagaccgtaatgagagtaagctatcttttctctatctttatttgctatattattttttattagagataatttgtttccttgaacataacgaatctctttccatatctataaatattttattgcgatcctagagatcattgtatatgtggtgctatgcagcactgccataattttacccgccttacactcttttcagctatgagataattgtactggaggtccttaaacgtggatgagagtaacacttccaccccaagccttgtactttacttttactggcccttcagcttagcaccatttgcatacatagcaatctgcgccacagcctgatgggagggactgaggttgcatgcagagttctgatgacatggactaggaccttattccatgccatttaattacataaatgtccaaagtactttatccctgaactttgcaacacggtgatcacacagcctttgagcatgtatttcaatagcagaatacacaagaaaatgacaactataagtgcaaataataatctaaatatggcatccacactgttgtaattgccattaggtttaaattctccatacatgcagccacaaactgtcagtaatagtacaagttttccaagcatgcagggagcaacaacaagcaataatagaaagtactcaggcagttcacatactatatataacctaaaggactactaggtgttcaaggggccaaccaaacattcaaatgcccctgtttaatatgaggagcgggttgccagtttccaaaatatagaccacttcccaaaacacgtggttttctgtagaggtaaaaggctggtacaggaaagaatatacctggctttctgaagaggtagtctgcccttgagttttttttttcttgtagttgatactaggatagatgttgctctcctagtaaaaagaacataggttgtttctactttgtagatgaaaagg

SEQ ID NO: 6175 - DNA, 1349 bp, Oryza sativa
  ref <308>: DATABASE ACCESSION NUMBER: AK063332
  ref <309>: DATABASE ENTRY DATE: 2001-12-06
acattatctagctcatcagcttgccggccatggccaagctcgtcggagcaactctctacctctacctcttcctcttcctcctgctgctgcatctccattgccaccaatgcaaacctgctgctgctgcgagcttcgtcgtccatggcggcggcggagcaacggcaagggcggcggcggtgagggcggtgttcgtgttcgggagctcgttggtggacaacggcaacaacaaccacctgaacggctccggcgccgtgcgcgccgactacgcgccctacggcgtcgacttcccgctgggcgccaccggccgcttctccaacggccgcaacgtcatcgacgccctcggggagctcctccgcctccccgccgccggcctcctcccgcctttcgccgaccccgccacccgcggccgcgccgccctccacggcgtcaacttcgcctccggcggctccggcatcctcgacctcaccggcaagaacaagggagaggtcttgagcctaaagcagcagatcaccaactttgaggcagtgacactccctgacctgcgggcccacctgcagggagcaaccacagccaccaccaccaccggacacaagatgaagggccaggatttctttgaccagtgttacctgcccaagagcctgtttatcattgggacaggtggcaatgactacttgctcaactacttcaacgctggtagtgggcccacaagggcccccttgtcagagttcacaagctcactcctcaccaagctctcaaaccacctgcagagattgtatgatctaggggcaaggaagtttgtgctattctccatccaacccctgggttgcacccctgtggtgaggaccttcctcaacgctaccagtgatgcttgcattgagccgatgaaccatgcggcgctcctcttcaactctgggctaagatctatcgttaaaaatcacaatggtggcgtgaggtcacacatgcccgccgcgagcttcgtctacgtcaattcctacaagatcattagcgatataatacagcacccggcaaaatatggcatcaggaaaacgagtcgagcttgctgtgaggtgtcgaggggaggcgtgctgtgtcagaaggggggggccatctgcagtgacaggaccaagtacgccttcttcgatgggctccacccgacagacgtggtgaatgccaggctggcacgcaaggcgtacggctccaactcgccggacaaagtctaccctatcaatgttaagaagttggcaatgctgtagcagtagtaataattaatcatctctaattgtaattaagtcatacttaattagtattactagctagtagttgtgaaatggataattagctctagtgac

SEQ ID NO: 6176 - DNA, 1539 bp, Oryza sativa
  ref <308>: DATABASE ACCESSION NUMBER: AK063333
  ref <309>: DATABASE ENTRY DATE: 2001-12-06
aaaaaccccaagaaaccccccatcgatccccttccatcatcaacctccggcgattcgcctgccatggcctcgccgtcgccgtcgccgtcgccatcgagcgccagcaatcagcgccgctccctgccgccctcaccagcggcggcctcctcggtgggatcctcgcccgcattcccaccccgcaagaggcgccggtcggggcgcccgcctcccttcctcgggttggcctgctacgacggcttctacccggccacggagccccacccttccgccgagcgcgccatcgccctcgctcgcaaggccgatttcgagtacggcttcgtgccgtgggtgccggaggaggaggcctggggctggttccccctcgacgcctgcgacggccgcgtcctcatccagtccaagtacttccccgatgaccccgacggcggcgacttcccccgcccccgcttcatgaactacgccgtgtgcgatcccctgttcaagagatacgtgatgctcccacccgtacccgacgacctaaccgccaatgaggggagccttgttgatttcgggctctgccttgccccctcccaagaggatgaggcggatacatcgttcagggtgatatgcgtggcacggtacaacaccaatctggtcgcgttcgtcttctcttccgtcactaggcaatggggaatcggttcgtcttccacctggagttctttgggcacagaagagccccctaaccgccatggcctgagttgcttcgactgtgttgatggctgcttctactggacagtgccttcggcggacaagattcttgtgcttgatgccatcaagatggagttctctgttatcaactatgctcatcgtgtggaggacggctttcgggcttgcattgcagttgatacagaaggaacccctgggatgctgactgttggtgaatacttggggaatagagagtttcgcttctctcgcatcgcgaaacaaagtgaccgtgaatctcccaatgaacgcctgtcggagaatattatacaattgcccagcaactgcaataagtacttcaccttaggtgcagctgagggatttattttccttagaggcattccagaagaagagaaagtagaagactcttcatcagaggatctttacatggatcctgaagaaatagaatattattcgctcaatgtcaagactgttgaatttgagatggtctgcgcgatggacatggacaagtgctactttcatgtttgcccgtacttccgcttttcaccaccatcggcaaaaccatgtgtttgaagtgggatgaagccgtgcttttgagcccatactcgtgccatgcatccgtactgcttggaagtgcaggaggttcaaaatggtgctgccattctgttgacccggatgttcttgagccttgggttatatttatcacaaagtagtcactaatgtagtttaatagaccgtattaagttaatgtaagcaagacttgctgctggcaaccttattctcgaacagtaatctgttagtggcttagtgccgtactgttattctgtgctggacttcatc

SEQ ID NO: 6177 - DNA, 1404 bp, Oryza sativa
  ref <308>: DATABASE ACCESSION NUMBER: AK063334
  ref <309>: DATABASE ENTRY DATE: 2001-12-06
attctctctctcgttgctcctgagatcgtctcgtctcgtggtggtggtggtggccattgccggagcttccaaggtgtttgatgtcgatggcggaggtgtgctgtgattctgcggtggtggtcggggcggaggcggaggcgagggcgagggcgcgcgccgggaggcggcggcgggcgggagttgagggggcagggaggtggaacgccacggcgacggctgcgggtgtggcggcggaggaggccgcgacgaggaagcggagggcgagtggtggtgaggccgggttggtggtggtggcgaagcggcacggggcggcgtcggtcgccgggaggaggagggagatggaggacgccgtgtcgctgcgcgaggcgttcgccgcgccggcgaacggggaggttgcggcggcgaggtgtgacttctacggggtgttcgacgggcacggctgctcgcacgtggcggacgcgtgcagggagcggatgcacgagctcgtcgcggaggagatgggcgccgggtcaccggcggcggcggcgcgcgagccggcgtcttggacggagacgatggagcggagcttcgcgaggatggacgccgaggtgatcgccggctgccgagccgagagcggcagctgccggtgcgaggggcagaagtgcgaccacgtggggtccaccgcggtggtggccgtcgtggaggagagccgcgtcgtcgtcgccaactgcggcgactcccgcgccgtgctctgccgcggcggcgcgcccgtgcagctatcctccgaccacaagcccgaccgccccgacgagctggagcggatcgaggcggccggcggccgcgtcatcttctgggagggcgcccgtgtcctcggcgtcctcgccatgtcgcgctccatcggcgacgcctacctgaagccctacgtcaccgccgtgccggaggtgacggtgaccggcaggtcggacttcgacgagtgcctcatcctcgccagcgacggcctctgggacgtcgtcagcaacgaggccgcgtgcgaggtggcgcagtcgtgcctccgccgcggcaggcagcggtggtgcgccgaggcggcggcggtgctgaccaagctggccctcgctcgccgcagctccgacaacatctctgtcgtcgtcgatctccggcgaggcaacgccttgtagagagagtgtcacccagctgatgctgtagcatcagtactagtattgcagatattagctaagctaatggttctactaatctttttttttcatttcccttgtgttaaaaatcattttttttctcttctaattttctccctgaattaaccaagttcagtggagcacatagatcaggtgatggggttgtgcaactgctagttggtgtaaccagaatttcatctggataccaactgaaatgaaatgaatattaagc

SEQ ID NO: 6178 - DNA, 2524 bp, Oryza sativa
  ref <308>: DATABASE ACCESSION NUMBER: AK063335
  ref <309>: DATABASE ENTRY DATE: 2001-12-06
ttagctagtaccattactggaatggctcaagattttgttggcagcaataacataaacctcttgcagcccaatggtcaatttggcaccagagatcagggaggcaaagatgctgctagtgctaggtacatcttcaccctgttgtcgcctatcactcgttcaattttccctaaggatgacgatattcttcttaactacttggatgaagatggacagtcaattgaacccacctggtatgtgccaatcctgcccatggttttggtaaatggaagtgaaggcattggcactggatggagcacctttatcccaaactataatccaagagatattgttgctaatctaagacggttgctaaatgatgagcctgttgaaccaatggacccatggtatagggggttcaagggctctattcagaagacaggcacaaaagcgggtggtgtcagctatactgtcactggtattattgaggttgttgatgacactacgctgagaattactgagctaccaatccgtcgctggtctcaggattacaaagagtttttaatatctattggtggaaccgacaagagcaaggacaaagacaaggataagggcaagggcaagggtaaggtcaaggagaaggaaaagaaggagaaggacatagaaccttttatcgaggcattcgatacttatagtgatgacaagaatgtggaatttctgattaccctgagtaaagaaaacatggctatagctctgcaagaagggctggagaagaagttcaagttgacaactacgattggtacaacaaatatgcacttatttgactctaatggaaaaattcggaagtacgatactccagaggacatacttaaagagttctttggactgaggctcgagttctacgagaaaagaaagcgagtattattggaaaatattgaactggagttaaagaagctttctaacaaagttagatttattcttgctgttgtcgaaggagatatcatagtgaataacaggaagagggcagagctgtttgtggagcttaagcagaagggatttgatcctttcccaaggaaaaaacagagggctgggccatccgctgttggagctattgaagaggatgaagagaatgaggagagccctgaagctgcaaatgttggttcaagtgattatgaatatctcctctcaatggcaattggtacattgactctggagagggtacaacagctcattgcagagaagggcagaatggagaatgaagtagctgaactgaagagaacaaggccaaaatcactttggatgagagaccttgatgcattcgagaaggaactggatgcgcttgatgagaaggacagcatggatgctgaggagagaagagctacgaggaatgctggaggtggcgctgcacctaataaagcagcgcccaagagacgacctagaaagacagcgactaatactcaggcggcagaaagctctgacgggaatgccgctgctccggcggttccaaaacctgcggcaccacgtaagaaaccagctggaaaggcaagtttggctgatagcgaggatgaagattatatagcagcaatcccgaaacctgccgcacagaagaagcagccagctaagaaggcaagcacccagttgagtgatgacgaggacgacgaagttcttgctctaaaagaccgattggctgcttacaatcttgatgaccattccgaagatactgctatggaaactgagactacagaagaacaggcaaaagggaagaaagggaggaaggaaccaagcaaaagaggagcagcaaagaaggccatatcatccctagctgtgatatctgatgacgaggaagacgaaacagtgcccatcgatgaggacgacgaggatgatttcgccatggaagaagtgccggtcaagaaaggtagaggaaagaagcccgccgctgagaagccgaaggctgcaaccaggaagagggcgccagctcaggggaagtccatgaggcagaaagtgatggaagaaatgttcaagcctacagaggacagcagcaccagcgctccatctcctgagaagaaggtgcgcaagatgagggcctctcccttccacaagaagagcggctctgtcttgcagagggcctcaacagcttccacgagcactgaagaaaccgagtcatcctccccatcaggtagctctgccgagccagtcgcagcgaggccgaaacggcaaacacgggggaacaagaagagttaccaggaggtgcaggagctgagcgatgatgacactgaggacgaagtgcaggatatcagcgatgattccgacttcgccggctctgactttggcgaggacgacgactgaatgtcccctgaatttaactactggaacaatgtaggatcaactccgtagcgagcggtgtgactgtctgcctgtttgctgagtcgttagattgattgacctgtctgttacattggtgatgcttgctgagatgcatctcttgtgcgtcgtgtgctctattcagttcatcagttgctgagacattgatccgtgtaacttacttgac

SEQ ID NO: 6179 - DNA, 1961 bp, Oryza sativa
  ref <308>: DATABASE ACCESSION NUMBER: AK063336
  ref <309>: DATABASE ENTRY DATE: 2001-12-06
acagccgagtgatctaccagcttcagatttcagagagcgattgatcaagtgtagtagagcgagctccatctgcggccatgggagcagctcgtcggcttcgcttcgggctacgagcgccagcggcgtcggccatgtcggtcctactactgctgctgccgtcgtcgctttcgctcgcgctctcgccgccgccgccgccgcccttcttccctccgcagtgggcgccgccggtggccggcggcggtggccctttcgctggtgaggacgcacgccggtggaacatttcctctgatttgtactctggtttcagatgaagttattggtttttaacattactaatagaagtttaaaatggtatattagattattttattgtctttcatttatattttactatagaaatatgggacatttatttatgaaaaggataaacttgaaataaaaggtaaaatagtgtatagacgttctgaaactacttgcaatgcatttcggataagaggaaatagtcatatatgaacatatgctgcctattgggtaaaggaaaaaaataatatattaatactcaaaacaaaaccatgtttaaaaatttactgcataaatttatttaaagatgttgattttgtaaaaggtggaggtggatatggaagtggagccggaggtggtggacccggcggggttcacgagcctccaatctcttacgtgtacaacaacccgtacatacctataggcaagtgtatttcacttgaaaatttagctacttgtagaaaaaatagtttatcaatctagaaaaatatgtaagagttttctttaaaatatgagacaattttatttttgaaagtagtagcattttggaaagggtaataaacatggaatggaaatagaaaaggtgtataaaagctgtaaaactactcaactgtactgcatattagaaccagaggaaatatctacatataacatcggttagctattagttaaggaaaaatataacatattctaatacacgaaattcaacttggtttaaaatttacataattgctttgtagaacatggagatggatatggtagtggtcccaacggggctcacaatcctccaatctcgtccgtgcatggcaaccaatacatgccgacaggcaagtgtattccaccagaaaatgtagttacatgtagaaaaaagaagagccttttaaccatctttcttttcaagtacgacactttaaccatcttgggtgcacaagatataatcctatatacatataactaataagatgtatcgaacttatttgtctaaatattaatcatagaacttttcctaggttataaatagtaccatgacttggtactatttttaaagttgataattaagaatcctcgaaaaaacatggtaggaaaatcgtccgtttgtacccataaaagtatatgtaaatattccttcacttttcccctctaaatttatagcagcattattataaactgaattgcttttgcttccgtaggtcgacgtggaatgtatcgttggccaggccccaggacatagcaagccaatctaagggtttatttgggggagctttaaattttgagaagcagctgtttggtagccagcttctgagaatctggaaaagctctgaaacctagcttttatatcttctggctttttagttcatttttcagaatcttagactgtttggggcagcttctagcagaagcagcttttaggaaaagctgcagctgggacaaactctcccaaacagggcctaagtagcacatagatcacatctattttaaattcttctgaaacttgttgatgtgtgtccattgccaaagactggagatataatctattttcattattaaaaaaatagcacatagctagaaattcatgcccaaaagtttgtattcgagtctatgtaaatttgctccaaacgtatctgaaactgttgaataaagatgaactatctgctcatacg

SEQ ID NO: 6180 - DNA, 2173 bp, Oryza sativa
  ref <308>: DATABASE ACCESSION NUMBER: AK063337
  ref <309>: DATABASE ENTRY DATE: 2001-12-06
attttccctatatatctttaccaatctctcccagcttgcaaggcatcaatcttgaaagctcctctctctttcttcctctctcgtcgtcgtgtcgtcgccgccgtcgccggagatgatgaagcacttggtggagtcggagaaggcggcggagaatgccgggccgacgtaccggaacgtgctggccaaggacgccgggcttctgcggccgccgccgggggtcgagagctgctgggacgtcttccgcaattcggtggagaagtacccggacagcccgatgctcggtcgccggagagtcgtcgacgacggcaaggcaggtgaatatgtttggatgacttacaaggaggtttatgacgttgtgatgaaacttgctgcctccattagcaagtcaggaatcagcaagggtgaaagctgtggcatctacggcgcaaactgccctgaatggatcatcagcatggaggcttgcaatgcacttggggtttcatgcgtgcctctctatgatagtcttggtgctggtgcagtggagtttatcgtgtgccatgctgaaatccagattgcttttgtggaagagagaaaaatcgcagagctcttgaaaacttgtcatgccacatcaaagtatttgaagacaatcatcagctttggaggtgtgacaaatgaccaaaaagaggaggctaaaaatcatgggatgtccatattctcatgggaggaattcctgatcatgggaggtgatcatcattttgatcttcctgattgcgtgaccaggtctattggcgaaccttttgatcatgatgatgtttatatatcgtatcttccactggctcatatctttgatagaatctttgaagaattattcatttcacacggatcaaaaattggattttggcgtggggacgtcaagctgttggtcgatgacattgcagctctaaaaccaacagtattctgtgcagttccacgagtacttgatagaatatactcaggtcttacaggaaagatctcgtctggtggcatactgaagaaagctttattcaatattgcttacaagctgaaactggacagcatgaggaaaggaattaaacacgagaaagcagctccattttttgacaaattagttttcagcaaggtgaaagaaagactgggtggaaaactacgttttatcgtgtctggtggtgcccctttatctgtagcagtggaagaatttttgagggttgtgacatgtgcaagtgttgttcaaggctatgggctcacggaaactggtgcggcgtcatttgttgcaataccaaatgatttttccatggttgggactgttggtccaccagttgagcatttggatgcacgtcttgagtcagttccagagatgggctatgacgctttgtcgagcattcctcgtggagaggtatgtgtaaaaggaagtgttctattctcaggatactacaaaagggaggatcttacacaggaagtcatgattgatggatggttccacacaggggatgttggcgagtggcaaccaaatgggtccttgaaaatcattgacaggaagaaaaatatattcaagctttcacagggagaatatgttgcagtagaaaatctcgagaatgtgtacggggttctccaagagatagattcgatatggatttacggaaatagttttgaatctttccttgttgctgtcataaatcccaaccaacaagttcttgagcattgggctgaacaaaatggtatctctggaagtttatctgaattatgtgaaaattcaagagctaaagaatatattctttcagaactcacgaagattgcaaaggaaaagaagctgaaaggctatgagttcataagagctgtacatcttgacccattaccatttgatatggagcgtgatcttataaccccaacatacaagaagaaacgaccacagttgcttaagcactatcagggaaccattgacgcactctacaagatggcaaagtaaacgagcaatgctacagacaattgaagaaaggcttcacccattcatgtaatctcaccatgttggtatatatataaatccaattcacatgtcatgtacctaaccactcataaaagactggaaacagatcatagccttgtctttcttgtgctgaaatgattactgtcagaaacggtgtgacagggactgtcttttgttagatcattctgttaagtc

SEQ ID NO: 6181 - DNA, 2293 bp, Oryza sativa
  ref <308>: DATABASE ACCESSION NUMBER: AK063338
  ref <309>: DATABASE ENTRY DATE: 2001-12-06
agaaaccctcgccgccggggccatcccaatcctcgcggcgagcggcggcggcggcggcggcggcggagggcaaccgattgtggccggtctatcctcgtcggctcgccattccttctcgccgcgccaggttcgatctgaccaattccccaagaatcgttcgacctgaatcgatcgacgccgcgtgttcctgccatttcggcgtgcttgattccctcaaaatggttttggtctagggatcgtgcttagctattggtggcggtgctcctctagcggcgggttctcgacggcagaatagtgcgttgtgagggagcctcggtttagttggttctggggatggaggacggcgccgcggggggcgatgtgtccgccgaccgtgtcatcgctgagttgctcgacatggggttcgagttcgacgagatcagccgagcgatcggtgcagtcggcacgcgctgcgccgatgtgctggagtttatgctgggtggttcaggcaatgggaaaatgaaaaaggcgagtagggaaacacgaagccgtagttgtgtctcatctaatgcagaagcacgcccgagtgatgatgggaacaaattggttaatcctaggaaaagattaaagcaatcgagcattaccgatcatcttgcatcgaataccggctgcagaaggggatcttgtggtgagaaagctagcacgtcatatccctgtttagcggcttccgatgatcctagagcgccagtggcagtcagtgctgatgtgtgttctgcattgaagcctgaatctcaatttttgcttgctaattcaagaagtgagtctgacctcggacacaaaattagtgctgttctgcggaaacactttggattttcctgtgtgaaaggattccaaaaggaagctttggatgcttggtttgctcacaaggattctcttgttctagcagcaacaggctcaggaaaatccctttgttttcagatcccggctcttctgactgcaaaggttgtggtagtgatttcaccattgattagtctaatgcacgatcaatgtctaaaacttgcaaagcatgggatatctgcatgctttcttggttcagggcaacctgatagccgtgttgagggcaaagcaatgtctggcatgtataagattatttatgtttgccctgagacagtattaaggcttatggaaccattgaagaaacttgcagaaaagccagggattgcactttttgctatcgatgaggttcactgtgtttctaaatggggtcatgattttcgaccggactataggagattatctgtgcttcgagaaaatttcagtgcaagcaaattgaagttcttggagcatgatattcctttgatggcattgactgctactgctaccatccccgtaagagcagacattatcaagtcgctgaaaatgtcagaagatacagtggtcgtcttgacatcttttttccggcctaatctcagattcagagtaaagcacagtaggacctcagtctcagcttacaaaaaggacttcagagaacttgtagtaacatataatgattcaaggaattttagggggaagggacagaaagctcttagtgagatcaaccctgattctgaaagcagttcatatgagtctccggatgatgctatgtcagatgatgaagatgcaaatgttgattccatgagccatgaagataatagttttggaaaaactaaagtcggcatgcccttgataaatgaaaatgctgaaattcctcgtgttttaatccagtatcctgaggtgacagaggccggactgaactttttgagtatgcaatcagaagaggaaggtttatatgaataccttaatgctgctatgctattggtaatgaatgacccaaaacctatttctacatcttccgagtggggcaggggttgggcagatcctgcgatacgccgccagcgtctagcaggcaagaaaatggggagaagaaaaggaaagaggcattctcggagccactctacaggtttcaccactgcaagacagagattagctgaaatactctcaaaacgcagaagataatacagaaactattgagatgctgggatagcgggatgaaaattattcatctaagcctgttactacttgtttggttttagcttgatttacacagcttctgtggttatttgctgcaatttcctttgtggcgtatgaattttttttctcaagggaacaatatgaagtaaaaaaatgatggggattattgtatagcactgttttggctacccatctgaacattgacactccatctgaacaagaatttcctgatgtgattttaagg

SEQ ID NO: 6182 - DNA, 1190 bp, Oryza sativa
  ref <308>: DATABASE ACCESSION NUMBER: AK063339
  ref <309>: DATABASE ENTRY DATE: 2001-12-06
acaatagaatcggctgagagcgcgaccgccgccacttcaatagaaaccgccgagagcaccaccgccgcccgcgacgtgtcccctcccgccgccgtctccgccgcgcgcgacgtttcccctcctcctgccgccgcccgcgacgtttcccctccctcagccgccgcctccgccgcccgcgacgtttcccctccctcggccgccgcccccgccgctgcgcgcgacgttccccctcctcctgccgtcgtccccgctgctgcgctcgacgttccccctcccgccgtcgtccccatggcggcggagatggaagtcgacgacgtcgacgtgcatgaggtccccgaatgcatagcgtcgatgatcgaccgcggcagcgtggagagccaccgcctgttcctggcgcgccgcacggcaatggagatgctccgcgaccgcgggtacagcgtgccggaggccgagatcgcccgcaccctccctgagttccgcgcatggtgggctgagaagcctgggatcgaacgcctcgccttcaccaccaccctcgtctccgacccctccaagaaggtacaacttgtattctgtccaccagagcctgtcaaaatcgcaactatccgagagatatatctccaaacaaaagaagagaacttgtccaggcttgttctgatactgcagagcaaaatattatctagagctagagaggctatcaaggagatctttaaatttaaagtggacatattccaggccacagatttactggtaaacattactaagcatgtcctgaaacccaagcatgaagtgttgagtgcagatcaaaaggccaagctcctcaaggaatacaatgtggaagactcacagttgccacgcatgctagagactgatgctgttgctcgctactatggctttgacaagggaaccgtggttaaagttacatatgacggcgaacttactgggaagcgtgtggcataccgatgcgtcttctgagggatccatgtgttcctatggatgaaggttgtagtaagttattagctactagttgttgatctatcatctatgtgactcctctttgcgtgatttacctgaatgtagttgggaaacttgccctgttgcccatgaaagttgggaaatttacctgaatgtagttgggaaacttgcccatttaagttgggaactttacctgaatgcagttgggaaacttgccc

SEQ ID NO: 6183 - DNA, 1645 bp, Oryza sativa
  ref <308>: DATABASE ACCESSION NUMBER: AK063340
  ref <309>: DATABASE ENTRY DATE: 2001-12-06
agacacatcccggcgagagacgagagacggcgccaccaccgccgccgccgccgccgtgctggactccggctggccaccgcgctccgctcgaggcgtccgcgatggcgtccccagagccgtgcgccgccgccgccgcaccgggaagcgggttcggagccgtggacggcgtcctgcccccggagctgctgctcgaggtcctgctgcgcctccccgccaagccgatctgccgcctccgcgccgtctgccgctcgtggctgtccttcaccacggaccggctcttcctcgccgcctacgccgccgtccaccctcacccgctcctcgccgtcttggttgacagcttccccagtcgatgctgcgttgatctcgtggacctgtccggcaacgtcgtcgaggagatcctcggcgtgggcggcgagtgcagggtgctgacggcgagctacgaccgtgtcctcgtcgccggggagcaccaccgcgtcagcgtgctcgaccccgccacaggatccgtctccgccttgcccttcggcattgcagaggatatggtgcgtcgcaacgggatgaggccagcctggtttgcatttggtcagacgaattccacaggagagtacaaactactccggattctagaggacttggaggatggatatgaggctgatccagtgtgtgaggttttcgcaatcggcgacatgaatggacggtggaggaagatggagagtccaccggggtatcttgatccgagctgcaccaatggagttgtcttcgaaggggctgcttacttcttcttggatcactggcaaatggatccctcctactattttgctacgggctgcataccttccttcgaccttgcgacggagcagtggagcacggctctccaagggccagtaaacagaattcttgaggaagcgaatggcacactcaactatgctgaccttaccgatcgtcttatgttagcccaacttgaaggaactttgtgtacagcacatttcaatgatcaaatttctgcggtggacttatggtttctagttgattttgagaatggtatgtggtccaaagaatataggataaatgttgaatttgcttttgatggttttggagatggtgtgcaacctttgcttgtgacggatgagggaaatgtggtactttgggtgcagataggatcaaaagggatggtctggatttataatccagtaaccaacacttcctcagagatagttcagacaaaggctagtatctttactggagtaggtgtatatactggaaatcaattatgtccacagagtatgtgacaagaaatggaagaagtgccaaaagaagaggagcaaaaccgatgtcaggactggtgtgattgcatactggagaatttgaggccgctcctgaaaactataacactcttggacaggctactgtcgtgcaagctactggggtgttatttttcttggttctgcagatggttcagttatgcagctagtgaatagtttttggacctgtgggttgttccatggtattttctacctaaaactggaatccacagtatgctgcttttaattattgtttgtgaatctctaaagaaatccctgtccccgtgttggctttctttcaaagacggatcataatgatatcggttccaaaaaaatgttttcggttc

SEQ ID NO: 6184 - DNA, 1533 bp, Oryza sativa
  ref <308>: DATABASE ACCESSION NUMBER: AK063341
  ref <309>: DATABASE ENTRY DATE: 2001-12-06
gacgcgacccagtgaccaacccaaatcaaagccgacgcgctcgaagccgctagaagaagaagcagccatccgagtcgtcatcggcggcggcggcggcggcggcgaggcgatgggggtggtgggggcgttgctgggaccggaggcggaggcgctggtgaggctgcgggcggcggcgtggcggctgcggagggaggtcgccgccgccaccgacgacgacgagcactgggccttcgcctactccatgctgcaccgcgtctcccgcagcttcgccatcgtcatccagcagctcggccccgacctccgcaatgccgtgtgcgtcttctacctcgtgcttcgggcgctcgacaccgtcgaagatgatactagcatccctactgagattaaggtgcccattcttcaggaattccaccgtcatatctataaccgggattggcatttctcatgtggaacaaaggactgcaagattctgatggataaattccactatgttttgacagctttcttggagcttggttcaggataccaagaggcaattgaagaaattaccaggagaatgggtgcaggaatggcaaagtttatatgcaaggaggttgaaactgttgatgattatgatgagtactgtcactatgtggcagggctagtcggcattggactttcaaggctctttcatgctgctgggttagaagatcttgctcccgaatcgctttctaattcaatgggtttatttttgcagaaagtcaatattactcgggattacctggaggacataaatgagataccaaaatcacgcatgttctggccacgagaaatatggagtaaatatgttgacaaacttgaggatctcaaatacgaaaataattcagtgaaggcagtaaaatgcttgaatgagatggtgactaatggtttaatacatactgaagattgccttcggtatatgtctgctctaaaggatattactattctccgtttttgtgcaataccccaggtaatggcacttgcaacctatgctctgtgctataacaatgtgaatgtatttcgaggagttgtgaagttgaggcgtgggctgactgcacgaataatcaatgaaacaaattctatggctgatgtgtacactgctttctatgaattctcttcactgcttgcagaaaagattgatgataatgatccaaatgcgtcgcttacacggaaacgtgtgaatgcaataaaggagacctgcaaatcatccggtttgctgaagataaggggatatgacttggataggccaaaaaggaaccctgctatgatcatgatgctactgctgctcttggtagctattttcttgggagctctgtataggaggtgatcgatcctctgtaatgaccacctacgtacctttctattcaacaatcttataacctatattgtttcagcccatgagaccaccataaacatatttttgtatcagtactgttgtataagtggaagactaacgttagatgttgtgctggttgctaatggtcaatttagcacgtcaagctatatctctgatagttc

SEQ ID NO: 6185 - DNA, 1418 bp, Oryza sativa
  ref <308>: DATABASE ACCESSION NUMBER: AK063342
  ref <309>: DATABASE ENTRY DATE: 2001-12-06
atgatgcagctcgccgacgccctcctggagcacggctacgccgtcgccgtcgcgctcatccacgtcaccatggacgaagacgccaccttcgccgccgcgcgcgcgcggcgagcttcgaggagctcggggacgcccctctcatcgtccccggcgtcccgcccatgccggcgtcgcacctcatgcccgagttgctcgaggacccggagagcgagacgtacagggcgacggtgagcatgctccgcgcgacgctggacgccgacggcatactggtgaacacgttcgcttcgctcgagcctcgggcggttggtgctctcggtgacccgctgtttctccccgccaccggcggcggcgagcccaggaggagggtgcctccggtgtactgcgtcgggccattggtcgtgggacacgacgacgacgacgagagaaaagaaaacactaggcacgagtgcttggcgtggctcgacgagcagccagatcgcagcgtggtgttcctctgcttcggcggcaccggggcggtcacccactcggcggagcagatgagggagatcgccgccgggctggagaactccggccaccggttcatgtgggtggtacgagcccctcgcggcggcggcgacgacctggacgcgctcctgccggacgggttcttggagcggaccaggaccagcggccacggcctcgtcgtcgagcggtgggcgccgcaggcggacgtgctccgccacaggtccacgggcgcgttcgtgacgcactgcgggtggaactcggcgtcggaggggatcacggcgcgcgtgccgatgctctgctggccgctctacgccgagcagaggatgaacaaggtgttcatggtggaggagatgggggtcggcgtcgaggtggccggatggcattggcagcgcggggagctggtcatggcggaggagatcgaggggaagatcaggctggtgatggagtccgaggaaggggagcggctcaggtcgtcggtggcggctcacggcgaggccgccgccgtggcctggaggaaggacggcggcgccggcgccggctcgtcgcgcgcggcgctgcggcgattcttgtcggacgtgggcggccgcgagcttcgatccgttgagactttactactttgggccttccacgagattgtcgtggcacgcattgggctaccactggactaatatgggcccaatatggcccagtttatttttggcattctcccgctcgagcgccccgttgggcgggaaaccaattttgatgggggaccactttgcgtgtataatttgtatactgtattattattaaccgataatttggataagctagattgcattgcggagtaatgtaatttgtaaagaacactatggtaggctgcagatataactcttttcctcttaaaaaaatatacgtttatacgattgcacttc

SEQ ID NO: 6186 - DNA, 1701 bp, Oryza sativa
  ref <308>: DATABASE ACCESSION NUMBER: AK063343
  ref <309>: DATABASE ENTRY DATE: 2001-12-06
gttcctccgccacaaaccaaacgccaattaatggcttgaccaaccaccgcgcgcgccgccgtctttcgccgacgccgaggaggccggccatggcggcgccgcccaggcccataccctccatccaccggcaaccgcccaagccaaccaccacccacgtcgcccgctgcttccgcgacccgcccaaagcccccgacaccaacagcaacaccaacccgctcctctccctcctctccgccgtgcccgactgggccgacgccgtctccgagcgccgcatccgcgaccgccgcccgctctacacccacgccgactggcgggagcaccgcagctcccgccgccacctgcgccacctcctctcctccctcacctcccgcgtcatcctctccctcgcgccccccgtctccgccttcaccgccttcgccgccgccattgccacctacaacaccctcctccccgcctacgccctcaccgcctcctccctcccctaccagctcaccgcccccgccctcgccctcctcctcgtcttccgcaccgaggcctcctacgcccgcttcgacgagggacgcaaggcatggatgcgcgtcatcgccgccgccgccgacctcgccgggatggccatgcgccaccacaacccccctgccacgcgcgccctcctcaactacattctcgccttcccgctcgcgctcaagtgtcatataatctgccattcggacataaaaagggaccttcagggtttgctctcagaagatgacttgaatgttgttctcagatcaaaacatcgtcctcgctgtattattgagttcatttcacagagcctctatatgttggatttcgatgaaaataagcggaatatcatggagtctaaactatcttgttttcttgaaggaattagtgtttgtgagcagctcattgggattcctattcctctctcatacactagactcacttccagatttcttgttctgtggcatctcacgcttccagtgatactctgggatgaatgtaaatggatagtcgttccagctacttttatcagtgctgcctctctattctgcattgaggaagttggtgttcttattgaggagccattccccatgctagctctagacgagctgtgcaagcagctccatgacagcacgcaggatgtgatgtcggtgcaaaatttggttcacaatcgactagccgccaagacaaaggaccaagacagtggcagcatgcgatgttcagacaacgggtggcctagctccaaaagcgaacaagcaaaaattgattgagcaaaggtgcggaattatgaaggctatactagtacatgtcattgcaaagcaataaaggccttgttggttcaatatcaagcaaggtataaatcgatggtgtgcatatgtaccctggctgcatatttgccatcccattcgcaggtccattttggtacatggatgtactccagtacgagagctaggatttcatcatccaatgtaaaattgattaagcgatcagatgcggtgaccttacgtagcctagtttgctggaggaagcatgcgtgttacggatgtagagagatatggtgaatagttcctagatgtgtgtatatatgtagaaaagattttgacgagccgtatcagcccgtatgtaaagatttgacattacgtactgttatgttgttattgccaaacagaatacagtagctggtggaagggctttgacatg

SEQ ID NO: 6187 - DNA, 1414 bp, Oryza sativa
  ref <308>: DATABASE ACCESSION NUMBER: AK063344
  ref <309>: DATABASE ENTRY DATE: 2001-12-06
gtatattcttccccgcccgcacgggccacggatccatccacccccttccttctctccgacgttgacgagcgcctcctcgatcggcggcaccggcgcgccgcccccctctcccgccttccctttccttctccgctaatcaaccggtggtgcgagagcgagagcgacgggcggaggggatcgacgatggggagcaacggcggcggcggaggtggcgggaagcaggtgctgtgggagttccacgcgacggggccccgcaacatctccaaccccagctggagggacctcatccgctcgagctggacagatcccaactaccgaagaattgcggtttcatgcttcgtgcaggctgcgtatctactggagctagacaggcaggagaagagaaacggtgaaagcgcccttgctcctaactggtggaagccattcaagtacaagctggtgcgtcctctaattgattctagagatggatccatatatggtgtgctgctagaatgggaccagcttgctgccctatcagacttgatagtgttgagacctaatggcgccccgaaggttgtcctcgcgataaggggaacagtacttaagcagtcgacagttgtgagagacctcgaagacgacttccggttcttcaccatggagagcttgaggggctctgtcaggttcaccggtgctctcgaggcgctcaagtcggcgatcgacaagcgtggcagcaacaatgtgtgcattgctgggcattccctgggggcaggctttgctctgcaggttggcaagactttggctcaagatgggatctttgtagaatgccatctgttcaatccaccatcagtctcacttggcatggggctgaggaaacttcaggagaaagccggcaaggtcttgaagagatatgtcagtggaagttcttcaaatgctacagaactttctcacccaacagaggatggaggagcagcttctgaaattggagaagaaaagctgatcaaggaggtaaagagatgggtgccaaacctgtacataaacagctgtgactacatttgctgcttttatgctgatcgcagcggtgtcgccactgttactgccgagaagcatgatggccattctgggactcattccaagctgtttgtgattgccaaaggaccaaagaagttccttgaagctcatgggttgcagcaatggtggtcagatgattatgaactccagttggccgttcatgatagcaagctcatgtataggcaccttaagtcgctgtatgtgaatgaatcataggaaactgaattttgtaaatgcatcgtgttcttttgcttctctagccaagaaaatgtgaatttttcttttgaatggcgcatggcacaagcctcgtacattctttttttttttttgacctggaaaaacaatcccagtgagatcgctggtcacc

SEQ ID NO: 6188 - DNA, 1489 bp, Oryza sativa
  ref <308>: DATABASE ACCESSION NUMBER: AK104957
  ref <309>: DATABASE ENTRY DATE: 2002-08-28
gtgttcaaagagttcaacaccggaggaggtggggcctgcaactgcatcaccgggcttgcctcgcctgaccacgacaacgactacttctccggcgacgacgccgcccacgcctcgccgccggtcaccgccggcgacctcttcaccttcggcggcagcggccttctcaccatcggcacgctaggcatcgccgccgtcgccattcccagcggcggcgacgacgacgactacgacatcgacttcgaggtggacgccaccagcgacgacgacggcggcttcaccgtcgaggacgacgacgccgacgtcggcggcgccgtcacgcccaccttcaccttccccgcggcgacggcggcggaggcggtcgtcgccaccgtggagaaggcagtggccgcggtggaggcgatcgcggagaaggacgacgacaccaccacggaggacgacctgatggtggtgagcgccgagctggagaaggtgctcggcggcgtcgacgtggcgtcggcgcgggtgagcttcgccatgggcggtggcgtcgactgcccgctccagggcttcctgttcggctccccggtgagcgacgtcgagtcgcgcccggagtacctgcaggcgccgcgggactcgtccggctcctgcggcggcggcgggcggcgcacctcgctcggcgagctgttcatgcgcacccgcttcgccgacgagaaggtggcgctcgtcgccgtcgccgagggcgaggacggcgtcgccggcgacgacggcgctgctgctgccggcgtcggcggagacagagcggggaaaggcggcggctacaagacgatgaagaagaggaaggtgaaggacgagaaaggcggcggcggcgccgccggcggtggaatgccggcgacggtgacgaagggcaagtttcagaagatccttcaaatcttccacaggaaagtctaccccgagaacacactcctcacaaggaatctgaccaagaagagccgcaaccgcggcgccaccgataatggcggtggcgccgtggccaccggagaccccgacgggcctctggcctcgccggtgctccggtgccggaaggaccatcccatgaggggcttcggctgctgcaccaatggcgccttcggtgcatcgtcaccgggaggcaacgccgagatgaacggcaacaagagcggccactggatcaagactgatgccgactacttggtgctggaattataatggggaaaagaagaggagctatttgtttcatcaagaattaaagcttgaatagtgagcatctcatatatatgaatatgtgcttgctgttacaatataatctctatctgtttggtatagaagggcttgaatgtgctgtatatgtcactatatattgggggggagaggattactatgagatcaactcataagtgtgtggtgtttatatacattgctctgtgaatgtatgacagagatcagaacttaatgtattgtatgctttcttgatgtgattggtgtttatgagcct

SEQ ID NO: 6189 - DNA, 1586 bp, Oryza sativa
  ref <308>: DATABASE ACCESSION NUMBER: AK063345
  ref <309>: DATABASE ENTRY DATE: 2001-12-06
gcaggagggctccaagctaaacaaacggccattccaaccgcgcctcctccccggcccacccgctcctcgcgttccgcctcctcctgctcatgctctcccccgcctcgcccctcccgccgcccgaccacctctccttccccttcgcgctctccgccgccgccgccgtctccccgtcccccgggacccagctccacgcgctcctcgtgaagaacggcctcttcccctccgaccactacgtcgccaccgcgctgctgcagctgcacgcggcccggccggacgacgcgcgaagggtgtttgacgaattgcccaggcgggaggctatacattacgacctggtgatcggcgcgtacgcgcgcgcggggatggcagcggaggggctgggggtgttcagggcgatgttcatggacggggtggcgccagacgccgtcgtgctcacgacggccatcacggcgtgcgcgcaggccggcgcgctggagtgcggggagtgggtgcaccggtacgtggagaggagcgcgccggagctgctcggggacgcgttcgtcgggtcggcgctggtgagcatgtacgccaagtgcggctgcctggagcaggcggtgcgggtgttcgacggaatgccggagcggaacgactacgtctggggaaccatggtcggcgcgttcgcggtgcatggcagggcggaggaggccgtgtcgtgcctggacaggatggcgagggaggacggcgtgcggccggacggcgtggcggtgctcggagcgctctccgcgtgcgcgcacgctggcaaggtcgacgacgggctcaggctgctcagagagatgagccgccggtacggcgtcgcgccggggcacgagcactacgcctgcacggtggacatgctctgccgtgtcgaccggctggaggacgccgtggcgctgatcgagacaatgccaatggccccgctcgcctccgtctggggctgtggagctggcggaggtggccgccgccgagctcggcaagctcggcgccggccccgacgagggcgtgtacgtgcagctctccaacatctacctcgacgccaaccggaaggacgacgcgcggagggtcaggaagctgatcggtagccgcggcatcaggaaggtccccgcatacagcgaggtggaggtcgacggcgtggtgagctcgttcgtcgccgacgaccaggcgcacccgcagcgcgtggagatttgggaggtgctccggctgctcgctgaccagatgggaggggagctcgacgagggggagaccatggccgagctctcgtgacagaaggaagccgaactgatttttccctcgaggttctatcaaacacaaactgcacaagcgctgagagcctgagattgaagctggtattcattggggaaaggaatctattaggagatgaggtttatcaacacattgatctcaagccattagagaagaatgaagataataattggcctcgatgatgtaatgtatgaatagttccctaacatcagaatttagagagggaacgagaatttttttgcaagaacgaacacttttttgtttgcatgccttagcttcagttttgcactaaatgccatatgtttaac

SEQ ID NO: 6190 - DNA, 1679 bp, Oryza sativa
  ref <308>: DATABASE ACCESSION NUMBER: AK063346
  ref <309>: DATABASE ENTRY DATE: 2001-12-06
atcgtggccattcattcgccaattcgtcgccgccgcccaacacgctacgcccgctgctcgctcggcgaaatgtcgctaaggcgcttcgacctcgagatcgcctcccgggagcttgtccgggcgtcgcgcccgccgccaggcttcccgcccgtcctcgccgtctccaaccttgacctcatcctcggccccttccccatctacctcgtctccgtctacgctcccccgccgggcggcgtcgccgccgtggtgtccgccgtccgcgccgcgctcccggcgtacctctcccacttcttccccttcgccggccgcgtcgtgcgggacccggcgacgaacatccccgaggtcgcctgcaacaacgccggtgccgagctcgtcgtggccgacgccgccgtgcccctcgcggccgttgacttcgcgcaggtcgaccgctcgatcgggctgatgcgcgtggcgttcgacgcgagcctcccgctgtcgctgcagctggtcaggttcgcgtgcggcgggttctcgctgacggtggcgacgaatcacctcctcgccgacgggagggcgttcatcgtgttgctcaacgccttgggggagatggtcagagaggggaggctcaccagcgagccgctgctcgatcgatccctgctcatgccgcggtcgccgccgcggttcagcccgtcgctggacgaggagttctcgaggttcacgccggccaccatgatcaatcccctcatggcggcggccatccagcggcgcctgtaccgcatcgaggccgccgacctcgagcgtctccgggaggaggcgtcggccggcggcggcggcggccggcgcgccacccgcttcgtggcgctctgcgcgcacgtgtggaagctcctcgcccgtgccgtcggcgactccgacacccactgccggatggcgtggatcatcgacggccggaagcggctcgagccgccgtcggtgggcggcggcgagggcggcgcgctggaccggtacatggggaacgtggtgacctacacctcccgcgaggcgagcgtggaggaggtgctcggcgcgccgctgcacgccgtggcgggcatggtgcgcgcggcgatcacggcggcgatgaccagggacaggttccagcagctggtggactggatggagacgaagaaggcggcggcgttcaaggacggcgggaagtggacggaggcggtgaacctcggcctcgggagcccggcgatggtgatctccggcctgctcccgttcgccatcgacggcgacatggggttcggcaagccgaggctggtcatgccgtggctgcagcacggcaggctggggtcggcatcggcgacggtggtgcccagcccggccggcgacgggtcgtggttcttcgccggcacgaggttgtggccgcggctgctggaggtggtggaggccgccggcccggattgcttgctgaagccggcgacggcggcgagcctggggctcgcttaccccgccggcgcccatggttccagattgtgatgagctcgcagtttagcagttttttgcttgtaatttaggtgaatcttggaaaataattcggaaattttgaaccatttgtatatgcattgtgggatttttttttatttttttgaaccttttttattttaaattttaaaaatgtcacatcctaaaaatcctaaatatataaattgttgtttaattgg

SEQ ID NO: 6191 - DNA, 2310 bp, Oryza sativa
  ref <308>: DATABASE ACCESSION NUMBER: AK063347
  ref <309>: DATABASE ENTRY DATE: 2001-12-06
tatgactctcttaaggtagccaaatgcctcgtcatctaattagtgacgcgcatgaatggattaacgagattcccactgtccctgtctactatccagcgaaaccacagccaagggaacgggcttggcggaatcagcggggaaagaagaccctgttgagcttgactctagtccgactttgtgaaatgacttgagaggtgtaggataagtgggagccctcgggcgcaagtgaaataccactacttttaacgttattttacttattccgtgagtcggaagcggggcctggcccctccttttggctctaaggcccgagtccctcgggccgatccgggcggaagacattgtcaggtggggagtttggctggggcggcacatctgttaaaagataacgcaggtgtcctaagatgagctcaacgagaacagaaatctcgtgtggaacaaaagggtaaaagctcgtttgattctgatttccagtacgaatacgaaccgtgaaagcgtggcctatcgatcctttagaccttcggagtttgaagctagaggtgtcagaaaagttaccacagggataactggcttgtggcagccaagcgttcatagcgacgttgctttttgatccttcgatgtcggctcttcctatcattgtgaagcagaattcaccaagtgttggattgttcacccaccaatagggaacgtgagctgggttacatctgagccgccccgattccaatccaaacccaacctgcttgctctcaccgccatggccgccaccggcgattccgccgccgccgccggcgaggtccggcgcctcctcgcccacctcgactcccaccagcagctcctcgcctcctgccacgacgcctggtcgcgcgcgctccggtggatgtgcggccgcatggacgccgacttcttggccgcggaggatggtgcaggtgaggaccagttctgggtgctcggcatactgctgcgctcgttgtttgattccgatggccggaagccgccggagatagaagatacgctggttgagagggcggccggagttgccaagaattggtcagagaaatttgggatcaagatggaattgtatgcaccggataacaatgaggtggagatgacagaagcgcctttggtggagaacgcaacagcgacagagaagaaagaagagcatgtagatgaggaagaagaggaggaagaggaggacccagaggaaatggtgcccgcgtcggaggaagaggcagatgcagaggaggtagagaaggaagaagaggacccagaggaagtagagaaggaaggaggagaggcggaagccaaggtggccaatgcggcgaagacaggggaagtagagaagaggaaagtcgaggaagataagaaggcgtcgggaagagaggtgaaggagggagagaagggtggacaggcagaggtgcagatattcctgcagatggttgctgcatttggactaaaagataggtatgatgtagatttcttgaggcggctattagttgataatggacggaggagggaacttgccagaatcgcttgcgtccttggtttcgaggatagcctcagagatgttattgaggaattcataaagtcaggaaatgagatagaagctattcatatcgcccatgaggctggtttgcttgagcgatttccacctgtaccgcttcttaagtcttatataaagagaataactaacaagactcaggttgcactgagaggtggaagacattcaaattctgttgtggaagaggcaaacaactcggagtgcaacgcctacaagtccatcatcaggtgtgtcgagacatgccagctaacatcagcatttaacctcgatggcataaggaagaaggtcgcaaggatggagaaagagaaggctgacaggaggaagccgagtggcatgaacagattccagaacaacaagcgagctcggggagcatccgggcctcagtccttccctccctccaagtactcaaggggctcgaactcgaactacgggtcatcttttcggaacccggcctcccactctttcccctacaccgatcgtgccggttttgtcggaccggcaccaggtgctcggccgcacttcgcaccgggaagctccatgggcacgcgccgtgctggggtgctgtacggtggacctggagcgacatttggagccggccatggctatggtgctggtgctgggcatcaatcttaccatcactaaagatggtttagactttggactggatgttgatgttactgaatgctcactgttttcctgggtaatacaatggtttatatatgaagtcatggactggtgaatttttaggacat

SEQ ID NO: 6192 - DNA, 1165 bp, Oryza sativa
  ref <308>: DATABASE ACCESSION NUMBER: AK063348
  ref <309>: DATABASE ENTRY DATE: 2001-12-06
cactactctgagtacgagcacgagcacccccacaagctttgtagctctgctctgctcagtaggcaaacagatctcagcaagatggccgaggtgctggcgagtggtgctaccgggttgatcacatcactcctgggcaagctcgccagcctgctcgatgacgagtacaccctgctccgcgaggtgcgcggcgacgtggagttcctccaggccgagctgagcggcatggacgacttgctggtacggcttgtggagatggagaagaatggacacggcaccaagaagtggagggtgaagctgcgcgagctcgcctacgaagtcgaggacggcatcgattccttcacacaccgccttggctctgcccgtgacagggcagggttcgtgcggggtttcatgaagcagctgaatctgatggtgcgccaccaggtcgccaggcagatccaagaactcagggaccaaatcgaagtcgagtgcgcacggcagatgaggtacacccagcttggtggtggtggctcatcatccattgacgccgccgtagctgaccaaatcgactgccgcgtgaaggcgctgtatgtggatccggaccatcagcttgtggggatggatggtccggtggcgagcatcgtcgagctgctgaccatggaagaagacgagtcgtcggcaaggcagctccggatcgtgtccatctttggccctggaggtctaggcaagactactcttgccaatcaggtgcaccgcaaaatcaaaggccaatttgactatgctgctctggtgtctgtgtctcaaaggccaatcagggacattttgaccaagattgctccttcagtcatcccaactgacagcagcagcagtttagatacatgccaactcatcgaaatcgtcaaagattttcttcaagacaagaggtacgcacacatcttcaattcgatttttttttttggattagcacaaaatctgcacctagtacatagaacagagacaggttagttagcagaagcacaagatgcataatagaatttatcattgatctgagcaaaacttacacactgaaaaagacctacacctggaaaatgttcagaaatgttccatctagtgctattccaggcacacacagttgtctgacagatataatgctgcatgtgcaagataatatggttgttgctcattt

SEQ ID NO: 6193 - DNA, 468 bp, Oryza sativa
  ref <308>: DATABASE ACCESSION NUMBER: AK063349
  ref <309>: DATABASE ENTRY DATE: 2001-12-06
gtctcggcctcacgacacaaaagtttgtcaacagcagccgcccgctgcttctagatacttcttcctccatttctttcctccttgccaccgtctcgtcccccacgctcttgcgacctcttataatttcaccgctatgactcgcggcgaccagagggagcgggacaggcagagggcgcaggcgcggaagccggttgtgaaggggcgcgacgacgggctcacgccggagcagcgccgcgagagggacgccaaggcgctgcaggagaaggcggccaggaaggcggcgcaggccaccgggcagggcggcatatgccggcatttgatctgttctcacctcacgtctggttgcgtgtgacaacaccgttctttcgatcgtcatctgctcctgatcctgcccatgttggcagatctgtactgctatttcttggatctttggaaattgcattacaaatttatgtagattgtgaaagc

SEQ ID NO: 6194 - DNA, 1702 bp, Oryza sativa
  ref <308>: DATABASE ACCESSION NUMBER: AK063350
  ref <309>: DATABASE ENTRY DATE: 2001-12-06
agcaaaaggtcgtggaattggattggcacagcaaagtaaccctccaaagaaagcttcactaaaacctttgcattgggtaaaagttacacgagcaatgcaaggcagtctctgggaggatgcgcaaaaacaaggaaatcaggctagggctcctgatattgatttatcagaattggagagcttgttctccactgcggttgcaaccaatgcaagtgaaaaaggaggaacaaagcgcggttcagctattagcaagccagaaatcgttcatctggttgatatgagaagagcaaacaattgcgagatcatgcttactaaaattaaaatgcctcttcctgatatgattaatgcaatattggctttggatacgtctgttcttgataatgaccaagtggaaaatctcattaagttttgccctacaaaggaggaaattgagatgttgaagaactacaatggcaataaagaaatgcttgggaaatgcgaacagttttttctggagctaatgaaagtacctcgcgtggagtccaaactgagagtgtttgcttttaggattacattttcaacacaggtagaagagctgagaactaacctaaccaccataaatgatgcaacaaaagaggtgaaagagtctctgaagttaaggcagataatgcagaccattcttacattagggaatgcattgaaccaaggaacagctcgaggatctgcggttggcttcagattagacagtcttcttaaattatcagatactcgagctagaaacaacaagatgacactaatgcattatttatgcaagcttctttctgagaaattgcctgagcttcttgattttgacaaagatttaattcatttggaagctgcttctaagatccagctaaagttgcttgcggaagaaatgcaagcaataaacaaaggtctagagaaggttgagcaagaattagctgcttcagtgaatgacggtgcaatttctgttggtttccgtgaggcattgaaaagctttcttgatgcagcagaggctgaggttaggtccctaatttccttgtactcggaagtgggaagaaacgctgattcactagctcagtattttggcgaggatccagcacgatgcccttttgagcaagtgacatcaattctggttatatttgtgaatatgttcaaaaaatcacgtgatgaaaatgctcgaactgcggaacttgagaaaaagaaattagaaaaggacaaggaaaaggcaactttgtctgcaaagaaagtcttggaatgatactactgctacactgaagttccatctttgcgaagtagagccatgatccagcaccagccatggcggagatgccaaattgtgtattgtaaacgagaacctgcttctgcttttagtggacatgcagggctgtaatgcctggaagctgccttgttggatgggtgcgatccacgaaatgggtgtcatttggattgcaaccttggaaagttctgtgattaccaataggcggcattggcgatatggctgagcgaagtgcagcgagaagtgctgctgctgacagttttggtgtaaatacagtagttactaggatatagttgtattacctgtacatagaatatgcagcccaagtgggaggaaagcaattaagcaaacaacagtagtgttgtataatcaagaacaatcatgtttcccttcgtcacaggtgttaattcgtggctcgccaatttctct

SEQ ID NO: 6195 - DNA, 1675 bp, Oryza sativa
  ref <308>: DATABASE ACCESSION NUMBER: AK063351
  ref <309>: DATABASE ENTRY DATE: 2001-12-06
acttcccaccacctctcgccgcttcgggcatcgtctctcccagcgccggccggaccgatggcggcggagccagcagcggccgaagccatggatgtcgaggcgccggcgcgaccaaccaccaccaccagcactgtatccacctcgaagggcaagtccccccacgacctcctcgcggagacccgcgcctccgtggaggaggtcgccgcccggatcctcgccatcaagaaggacgacgcccccagaaccgagctccgggagctcgtcgcccagatgtccctcctcctcatcacgcttcgccaggcgaacagggagatactgatggaggaggacagggtgaaggcggagacggaggcggcgaaggcgcccgtggactccacgacgctgcagctgcacaaccttctgtacgagaagaaccactacgtgaaggccattagggcgtgcctcgacttccagaccaagtacccgggcatagagctcgtgccgacggaggagttccaccgcgccgcgccggcggacatccgcgataagacgctcgctgctgacgcgtcccacgacctcatgctcaagcgcctcaatttcgagctagtccagcggaaagagctatgcaagctacatgagaaattggagcagcggaagagcagtttgttggacacaattgcaaatcagaaaaagttcctttcgagcctcccaacccatttgaaatcactgaagaaagcatcattgccagtgcagcagcagctggggatgcaacataccaagaaactaaagcagcatcatgcagctgaactgcttccaactcctctatatatagtttacacgcagtttttaggacagaaagaagcattcggagagaatattgaagtggagatcactggaagcacaaaggatgctcagatgtttgctcaacagcaagctaagcaggaaaatgctggcactttgtcaaatggtgataatagagtggatgacgatgcaattgatgatgaagaagatgctcaaagaagaaggtcaaggtcaagaaaaagtgttgtgaaggaagctagtaattcagtagtggcatatcaacttcatccccttaaagttattctccatgtatacgacactgaagagtctggagcaaagcgtcgtaagctcatggtcctgagattcgactacttggcaaagttgaacgttgtttgtgttggaattgaagattcaaaggggctggaccatgatatcctatgcaacttatttccagatgacactggtttagagttgcctcatcagatggctaaactttatgctggggaggttccgaacttcagtgaaaaggattcaaggccatacaagtgggcacaacatctagctggtatagatttcttgccagaagtgcctctatctgttggtgatgattctaacagagcatcgagaagtgcggacttgtcatctgggcttgctttataccgtcagcagaatcgtgcacagactattttgcagagaatccgctcacggaaggttgcacagatggctcttacgtgagtcactgcttcacaatcttgtagtttgggatgtaacaaaatttggatggtagatccttatagatggaggaaatgtactttggctgatgagtttttgcttcattgcacatgtcattctgtgacgtgctacattattagttgatgaaaaatatttgatgagc

SEQ ID NO: 6196 - DNA, 1749 bp, Oryza sativa
  ref <308>: DATABASE ACCESSION NUMBER: AK063352
  ref <309>: DATABASE ENTRY DATE: 2001-12-06
ttcgatggtaggataggggcctaccatggtggtgacgggtgacggagaattagggttcgattccggagagggagcctgagaaacggctaccacatccaaggaaggcagcgactcttttgcccccctcccctcccctcccctccggatccatccacgaaaatctcctccccctccgattccaccgcgccgcaccgatggcacgaaccccacgcaagcgccgccgccgccgcggcggagggggccacgactacctctccggcctccccgacgacgtcatcctcgccatcctctcccgcctcacgacccgccaggccgtcacgctctccgccctctcccgccgcttccgcgtcctcccgtcccagttcggccgcgtcgactccgcgctcgtcgccgacccggccctgccgctcccgtcgctccccgcgcggccgtccttcatccgccgcctctccttcgccccccagacccgccggttctcctcctccgcgttcggccgcctcctcgacgccgccgccgaccgcggcctctccgagctcgccgtccgcctgccccgcagcgcgttccttccccagaacctcctctccatccgctccctcaccgtggtctccctcgactcctgcgcgctcccgcgatggtgccccgccgcgtgccctggcctccgcacgctcaagctccaccacgttgccatcccgcagcggatgatcagcgtcatcctcaaggccgcgcccgtgctcgagacgctggagatggtgtactgcatgggattcgccggcagctgcagtatggagtcctccacggtgaggaacctcctgtttaagtcggctctggagcagcgtgaggtcacggtgaaaatggcgggtctgaggacgatcacgctgtacacgcgccccaaggtgcagtcggttcggctggatcctgcaccggaaatcaggaaggcatacctgcacatcgccaggccgcgcgtcaaactgcagttcaggatacggccgttcttggatgctggcacggggttgacctgcctcacgctcaggggcatggccatcaagttgttgtcatctgaatataaagacactccaaacttggctgtacaatttgaagacttgagaatactgtcagtgagcttggatttctcaaatgaaagagaactcatcttccttctgaagctgcttgagagttgccccaacctgcaacagttgactctttcggctgttgatgcaaaagacgacactgcattgccaaattttgctgatcatgaggagaggctttcaaagttatcatgcctaactaagagtttggagcagctcaagtttcttggattcaggcctcaacggtaccagaaggaactctttatctttctgctaactcaagcaacgaacctgaagaagatggcggtggagttcccgaaagaccaagaagctgctgtgaggagaattttgtcagtgaggaaagcccccactcagaagaaaactaccaagtacaaacaatactacttggagttagagtatcctgtggagcccaactgctcatagggctctcaagtcgctacatgactggtctctcttggacatacattcactccctagactttaacccttaggttgcaattctctttacagagatcacacgccggaaaagttcttattcattggcttcaggatgtaacaaaacatttgagatgctttattgcttcgtgcgttatgtaattttcaattttttgtgttacaatgttatacagggaagtatgagaat

SEQ ID NO: 6197 - DNA, 2154 bp, Oryza sativa
  ref <308>: DATABASE ACCESSION NUMBER: AK063353
  ref <309>: DATABASE ENTRY DATE: 2001-12-06
attcgctctagccttcctcatcgttgacagtgcgtggcagtgtactcttggttatcatgtcgtcgccgttctccgtgccatctctgatcatggaggaggaagggcggttcgaggcggaggtggcggaggtggaggcgtggtggggaacggacaggttccggctcaccaagcgcccctacacggcgcgcgacgtcgcgctcctccgcggcacgctccggcagagctacgcctccggcgacatggccaagaagctgtggcgcacgctcagggcgcaccaggccaacggcacggcgtcgcgcaccttcggcgcgctcgaccccgtccaggtcgccatgatggcgaagcacctcgacaccgtctacgtctccggatggcagtgctcgtcgacgcacacctcgacgaacgagccgggccccgacctcgccgactacccctacgacaccgtccccaacaaggtcgagcacctcttcttcgcccagctctaccacgaccgcaagcagcgggaggcgcgcatgtcgatgtccagggcggagcgcgcgcacgagccgtacgtggattatcttaagcccatcatcgccgacggcgacaccgggttcggcggcgccacggccaccgtcaagctgtgcaagctgttcgtcgagcgcggggcggccggggttcacctcgaggaccagtcgtcggtgaccaagaagtgcgggcacatggcggggaaggtgctcatcgccgtctccgagcatgtcaaccgcctcgtcgccgcgcggctccagttcgacatcatgggcgtcgagaccgtcctcgtcgcgcgcaccgacgccgtcgccgccacgctgatccagaccaacgtcgacgcgcgcgaccaccagttcatcctcggcgcgaccaacccgcgcctcaggaaccggagcctcgccgccgtcctctccgacgccatgtcggcgggcaagaacggcagggagctccaggccatcgaggacgagtggctcgccacggcgcagctcaagaccttctctgactgcgtcagggacgccatcgcgagcctcaacgccaccgacgccgacaagcagcgcaagctccaggagtggagcgccgccaccagccacgacaagtgcgtgcccctcgagcaggcgcgcgacatcgccgcgggcctcggcgtcacatccctgttctgggactgggacctgccgagaacacgggaggggttctaccgcttccgcggctccgtcgcggcggccgtcgtccgcggccgcgcgttcgcgccgcacgccgacgtgctctggatggagacgtcgagccccaacatcgccgagtgcacggcgttcgccgagggcgtgagggcggcgagcccgggcgcgatgctggcgtacaacctctcgccgtccttcaactgggacgcctccggcatgacggacgccgacatgtcggagttcatcccgcgcgtggcgaggctggggtacgtgtggcagttcatcacgctcgccgggttccacgccgacgcgctcgtcacggacacgttcgcccgcgacttcgcgcggcgcggcatgctggcgtacgtggagaggatccagagggaggagaggagcaacggcgtggagacgctgcagcaccagaagtggtcgggcgccaacttctacgacagggtgctcaagaccgtgcagggtggcatctcctctaccgccgccatgggcaaaggagttactgaagagcagttcaagggctcatggacagggcctggaagtgagagcagcagccatgttcttgccaaatccaggatgtgatgaggattattcagaggaaaattttaaacagttgaaatttatgtaataaaagccactctggacttcagccaaggagccttgatactttacagactgaactacagcacgcacggatcaactaattacatatagttacagtatatatgaatgattgagttatgactcaaaatggaacaatcagtttggggtaaaatgtaattgatctgtgagtttatcacagaaagtattttttgcacctagatgcaaaaattgggcacatacagtactgttatgcatttacagagaattctcaagttcataaaagaagtgtttgcaaatgaattatttagtaaaaactttttttctctttcttgataatgtatattgcccaaatttatct

SEQ ID NO: 6198 - DNA, 2422 bp, Oryza sativa
  ref <308>: DATABASE ACCESSION NUMBER: AK063354
  ref <309>: DATABASE ENTRY DATE: 2001-12-06
gtaatagtgggcgggtctcatgggatttcatctatgccggccgtcggaatcaaacgagggtcgaaggaccattcgattcattaagggggacggcccatttgtaaggcgggggccctgatggacgacatcccccggcctcgattcttttgcatagtctgggggccggccgcagcagagctgcggggcatagcggcaccctcgctctgcccagccagggcatagatcactctctgtttactcctacttctgtgaagaacagaggcatccaaaaagagacgagaagaagcccgcgcctttgcctgcttccttagctacgtcagaaggtagggcctgattgacagacggctccgaagtagcaggggcctgtttgacagaaggaagggcctgaatgaagagcggaccagactcttctttgtttcagctgctcccacgcacgcagaccggaagatcccagttgtcctggactagacaagtacgtagagatcttcgtggaaccggggagggagtctcaatcgatcttttctaggattccaactcacgccacgcacgaagatttttctattgatagagttaagggctcggctcccccgactctaaaaggttaggttactaccagcttgcctctacggaagaggtgtactttgtattgtctgggggtcatatagatcggaacccggagcgagttgaacgaaaaccttacccacagctacaactactggcgcttcaaagggcttagattctaaggtaggggtggaagccgtgaaagcctttggtactttagtcaggcgagcagcccttaaacaaaatcaaaggcgcgaccatccccccttcccctattttttgcatttcattctctatttggcccgcctcatgaaaaatgataggcctattgattcgaagtaaatacgaaagggtcggtcaatagcatagctatttttttttctcctttcgaaggaaaggccttcgcattcttaatctggtagggccggacggctttgtttgccctagcttggcgaatccgcgcccctgaccgttctcgcgaagtctttgcaacggctgggaaaccagtctacgaagcgaagcctattgccacgccgaccatcaaatacgagattgggccccttctcaaagatggaatggcccagcccaataaaggaaggttaacgtacgcgatgccttccatttgtacgaatgcgaacatacccgaccggacgtagagccaaaattcactggcagaccgagtcgggcgcaggtgccagatccttaaagtaaagtctctatcagcctagtgtaccaaccacgtggtacgacgggcactcaaagacctggcgaatgagggcccaccccacccaagagcgcttatgtcatatgggaactcttggctggaaacaatccttatgattttgatatccggttagaataataagaaagaatctaagtccaggttggttggtgagcctagtgataggagactatctagcttggttcggagagcacttgttgggtttaagattagttttttgctaaatgttacggcctaaatgctgaactattgactctacttgttcggatgggtgtttaccccaaagtgttcttggattgcatgcatacatccgtaagtaacttagtgcaacatggcaaatttcattgagaggaattagcaaagaaaagaaatcttctttctccgggccggagtaaatagatctggtttcaagtaaagctgtaggtagatagagttcaagaacttccaaataaaagttatgtattattcagcaaatcataattacaatgttatcctgagagtgcttgatataaatactatcaaaattgactttttcaatcactaactcaatgaattgtatctcaaaaaggcaaacttagaacaaattcagttcataagttctgtttttctttttcctctccattacttctgtctccggacgcatagctttatttagtctccagccttcttgctatagagcagaaacctgtcctcatctgcgtatcacatctgccttttgtcctatttgattctcatagggctagccaatgaatggtccaagaaaagaaagaaggaaacttcttatatagagagaacgggtcaataaataggtgcatggcccgcccatcaagaagaacttcctccacattctctttgtctgatagcggcggcaagaattgacatagaaaagccagccgaggacggcgagttcatttttctattatagctctttctcacctctctggtactgatgcactttttccaacatattcctgattcgcttttcacacggcttagttaattcttgactttaccgttgctaaaccatattctataggcctcactcagttctgtatagattaagtgcaattcaattcgttaatgacctcgctttgctttctgtctatccactcctgccct

SEQ ID NO: 6199 - DNA, 1842 bp, Oryza sativa
  ref <308>: DATABASE ACCESSION NUMBER: AK063355
  ref <309>: DATABASE ENTRY DATE: 2001-12-06
agagactctctccggcgagggagttgtactgcgccgccgctgcaccgcacctcgtcagtcgactccgggaaactgctcccgagccccagcgccaaggcctaccggagcgcctccggtgaggtcgtgacgagctcagggttcgtttggtggtaagctctgtgctcccggggcgcgcggggctggatctggagcggggtttcgcagcgcagcggggaggagccagtacgggtgggggatggggaggctgaccgtcgccgcggcagtggccgcatgggcgatcccatgatcaccacccctcctggcctgtactacatttcactagcatatgttgcttccttgtttcctggtgcatgggtgactagaatagcagaggcatttgatgccctttgcactacagcacttctgagatccactaatgttatcatggcgatgatctgtggtgttctagtccatgacctgcttttgtgcatcaggccaaaaattggcaagaggaaggcaactgcatttgctattttagtagctttgtaccctattcattggttctttactttcctttattatactgatgttgcatcattagcggcagttcttgcgatgtaccttttctgcttgaagaaacaattttgggtcagtgcagcgtttggtgctttttctatacttctccggcagactaatgtaatatggatgatattttttgctgccaatggagccatcgctcatgcacaatatctttatgtcaaggacaatgtttgttacgagaacagtgaactaacagataagtcaaacaaagaggcatctcacatggataataaaaccactgctccaggtttgagaaggcggcgaaacaataatcccataaacaagagagaagttgtttctgaatcaaacattatgtattccagttttacagaggaaatatgggatgccatcttcaagttatggaattcaaagtgtgaagttttaattgcttttataccatttgcaatggttcttttggtgtttgtggcattcatagtctggaatggtggcatagtgctaggtgctaaggaagctcatgttgtttcaccacactttgcacagtttttgtactttggtctagtgtcagctgctgccctcctgccatggcattttactcctacccgagcatcagacctattccactggtgcagaaagaacaaaacatatagttcttttgcaattttggtggctcttggtttaagccttgttgctgtacatttattcagcattgctcatccatatcttcttgctgacaatagacactacaccttttatatttggaggaaggttatccaagttcactggatgatgaaatacattttgactccagtttatgtgtactcatggttttcaattgttaatatcttagggaagtcacagacaagactttgggtgctgtcctttgttctatcagttgcccttgctctcatccctgccccattggttgaatttagatactatacaattccattggtcatactggttcttcattctccagtgatcagcaatgttaaattgcttgctttggggtttctttatgccgctgttgacttcttcactctggcaatgtttctgttcagacctttccagtggcaacatgagcctgggacacaaaggtttatttggtagtttaggatacagaattagagaggaggcaaattccggtgtacaaattccctagagcatgaaccgctagcagggtttatatatatgagggtgaatccctcggagaaattttagacttgagagctttgtctgtacactaggatgtcttgcgaagctttatgcaattgaacgtttaagccagatggttccttgtaagtt

SEQ ID NO: 6200 - DNA, 1372 bp, Oryza sativa
  ref <308>: DATABASE ACCESSION NUMBER: AK063356
  ref <309>: DATABASE ENTRY DATE: 2001-12-06
gatcaaagccattgaggccaccaccgattcagcgagaatgacgtcgttacgctgcagcagcgcacgtgtgctcccatggctcggactctcgcttctgctcgcgtcactgccacctccgaccgcaatggcggccaccgatcgccgccgcccgacgccgtccaagcccatcgtggcgcgcctcggcaaggatgccgccgctcgtcgtcgacctcgccggcccgctgctctggtcgacgtgcccgcccgcgcaccgcacggtcccatgcagctccagcgtgtgcaaggtggcgaactggtaccggtctccggccagctgcccgtactccgacggcggccggccgggctccggcgacagggggtgcgcctgcgccgcgtacccgtacaacccggtgagtgggcagtgcggacgcggggacgtcgccgccgtgccgctcgccgcgaacgccacggacggcaagaacccgctgttcccggtgtcgttctcggcgttcgcgtcgtgcgcgcccagcgggctcctggcgtcgctcccgtcgggtgtcgccggcgtcgcggggatgtcgaggctgccgctgtcgctgccgtcccaggtggcgtcgtcgctgaaggtggagaggcagttcgcgctgtgccttccggccagcggcggcggcggcgacggcgcggccatcttcggcggcgggccgttccagctcctagcggcgccgcccatggagatcgccgaaggtctccgccgcaaccccgtgcccctcctcaagaaccccaagaatggcgcctactacctccgcgtcaccggcatcgccgtcaacctcgaggcggtgcccatcccgccccgcgcgctcgacctcgacgtccgccgtggcacgggcggcgtcacgctgagcaccgtcgcgccgtacaccacgctccggcccgacgtctaccgcgcgctgctcggggcgttcgacgcggccacgtcgggtatcccacgcgcggcggcggtgaggccgttcgagacgtgctaccgggcgtccgcgctcggcacgacgcggctcggcttcgccgtggcgaacatcgacctggtgctgggcggcggccggaactggacgctccccggcggcagctcgctggtgcaggtggacgaacagacggtgtgcttcgcgttcctcgagatgatggggacctcgccggcggcggccgactcgccggcgattgtcatcggaggtttccagatggagaacaatctgctgctgtttgatctggagaaggggacgctggggatcagatgaactgattttgtacttccattttagtagtacttcagaagtccagatgtgtgtaactcacgtactgttggtgggttagcgatcggaataaacgaccaaacggtaagatc

SEQ ID NO: 6201 - DNA, 2181 bp, Oryza sativa
  ref <308>: DATABASE ACCESSION NUMBER: AK063357
  ref <309>: DATABASE ENTRY DATE: 2001-12-06
gagatgtaaaaaaagatcaataatgccgctccttctccctcctcctcccacacccacaccaccatgcgcttcccgcgacccgctccacgctgcccctcgccggagccgcagcccgagcacgagccgaccaccaagccggcaccggcgcaccgcctccgcgcggtccaccctgccagccgccgcccgggacctcctcgccgacgaccccacgccccgcgccttctccgcgctcctcaaggccgcctcctcgtccgcctccccgcctcgacggccctcctccctgggcctgggcgcgcagctccacgcgcaggccgtcgtgcgcggcttcctcggcggcgacgacagcaccatcctggcgaccgccgtgctcagcttctacgcgtcgtgccgggagcccgacctcgcgcggaaggtgttcgacggaatgccgcgcaggaacgccgtcacctggaacgcgctcatcaaggggtacgcgcaggcggggcgcagggaggaggccattctgctgttccgagacatgaagagggagggcagccatgttgctccggacaggtatacgttcccggcgttgctttctggcatcggccgagagggtggctctggccgcacgctggtttccttgtatgcggctagaaggacattggaggatgcaaaggtcgcctttgatcaagtgggttcttccgatccaatcgtctggtcatccatgatctctgcgtatgtgaactgcgaggaggaagagggtgctctgttgattttcttcaatatgttgtgccaagacattaagccaactcagtttgtctactcgaccgtgttttctgtctgtggaagaatgggaatactggagatgggcaagcaagttcatgcccacagcctgaagagcaatactgaaaaggatgccgcaatgtttaacgcgcttttgaccatgtactcggattgcggatgcattaatgacgcacagaaagtattctcttcaaatgattgcgtgaatgtaatttcttacaattcaatgatttcagctcttggacagcacggatatccgaaagaagcacttgagcatttcaggcagatgaagtttgctggtcttatgcctgacgaggtaaccttgttaaatctgatctcttctttcaaccatgctggtcttgttcatgaaggcctgcagatgttcaattccatggtggatattgaaggcataaaaccaatgtatcaacattatgcctgtgttgttgacatgctggctcgatcaggagagattggcaaagccatgaaaacaatcaatgaaatgccctttgaagctgaagcaccgttatggaggattgttcttggtgcatgcagcaagcaccgtgacattgaaactggcaagcgcattgcagagatgctgtttgagatggaaccctatgaagccacaaattatatacttcttggtaatatttatgcaaggttaggaaggtggacagaagcagaaaaggttagaagtctgatgggtgagagaggtgtttataaggatgatgcatttagctggattgagatgggtcagagaacatatagatttggtgttgatgaccgatcacaccccatctccagagagatatataggaatttagatagattaataagtactatcaaggttgcaggctatgtgcctgatatcagttttgctgcacacaatatacaaagggatagaaaggaagaatcattgtattatcactgtgaaaaattggcatttgcttttggggacttggctgctccttctggaggcactctccgcatcatgaagaaccttcgtgtttgtggtgattgtcattgtgcgtacaaatacttctcccttgttacaggaagagaaataatattgagagacaatcaaaggtttcaccatttcaacagtggtttttgttcctgtggtgattactggtaatggatcaataagctattctgcaatttcgcatcctagcaatgatttaagagctctaatgacaccatatttgtttaggtatgtgttgagctttcacgcaaaacaaaatttccattcattacataggagcacaatatacctttttttttaccatgttcaatgcatgtcacataaaaatattaatgagtagagttgtaaatgatattcatgttgttttgctactttcattcgacatgtatgttccaaatttaggaaataacaaatcagtatat

SEQ ID NO: 6202 - DNA, 1492 bp, Oryza sativa
  ref <308>: DATABASE ACCESSION NUMBER: AK063358
  ref <309>: DATABASE ENTRY DATE: 2001-12-06
actacattctacatcccgttcaaggtagtagggtagtagtagcatttgctgccgtgatacgctctctgctgctccagagaatggcaagcatggcggtgttcttgctcgtcttgctggcagcgcttgtttccgtggatgtcgccgcggcgcattccggtggcggcttcggcttcaaggcgacgcttacccacgtcgacgcgaacgccgggtacacgaaggcgcagctgctgtcccgcgccgtcgcgcggagcagagcccgcgtggcggcgctgcagtcgctggcgacggcggcggacgcgatcaccgcggcacgcatcctgctgcggttcagcgagggggagtacctgatggacgtgggcatcggctcgccgccgcggtacttctcggccatgatcgacaccggcagcgacctcatctggacgcagtgcgcgccgtgcctgctctgcgtggagcagccgacgccctacttcgagccggcgaagtcgacgtcgtacgcgtcgctgccgtgctcgtccgcgatgtgcaacgcgctctactccccgctctgcttccagaacgcgtgcgtctaccaggcgttctacggcgacagcgcgtcgtccgcgggcgtcctcgccaacgagacgttcacgttcggcaccaactcaacgcgtgtcgccgtgccgagggtctcgttcggctgcggcaacatgaacgccggcacgctcttcaacggctccggcatggtcggctttggccggggcgcgctgtcgctggtgagccagctcgggtcgcccaggttctcctactgcctcacctccttcatgtcgccggcgacgagccggctctacttcggcgcgtacgccacgctcaacagcaccaacacgagcagcagcgggccggtgcagtccacgccgttcatcgtcaacccagcgctgccgaccatgtacttcctgaacatgaccggcatcagcgtcgccggcgacctgctgccgatcgacccgtcggtgttcgccatcaacgagaccgacggcacgggcggggtcatcatcgactccggcacgaccgtcacgttcctggcgcagccggcgtacgcgatggtgcagggggcgttcgtggcgtgggtcgggctgcccagggcgaacgccacgccgtcggacaccttcgacacgtgcttcaagtggccgccgccgccgcgccggatggtgacgctgccggagatggtgctccacttcgacggggcggacatggagctgccgctggagaactacatggtgatggacggcggcaccggcaacctgtgcctggcgatgctgccgtcggacgacggctccatcatcgggagcttccagcaccagaacttccacatgctctacgacctcgagaacagcctcctctccttcgtccctgcgccgtgcaacctcagctagctagtctcaaatttctttgtgtcgatttggttcatgatctgtgtgtatcatgtaatggagggtttggtttattaggatgttaattt

SEQ ID NO: 6203 - DNA, 529 bp, Oryza sativa
  ref <308>: DATABASE ACCESSION NUMBER: AK063359
  ref <309>: DATABASE ENTRY DATE: 2001-12-06
aaaaaaaatccataccctatccccatccccatcccccgtgcaggtgctgcagagacgacgccggtggagctcccgcagcccgacggcgacggtggagctaccgcaggccgccctgtgcaccgccgccgccctatgcgccgccgccgccgccatgtgcgccgcctccgccgcctccgcccagcaccggcgccctccgcctctgcctccagcgccggcgtcggcacctccttggcgtcgcctccgtctgcactcttcagtggctatgaaaaaaattcgacatgcgtgcctgggcatggtggcatggaggatggatggaattttgacgtgctctgcggaatcaatggcttgatgtgtcagcgcccgtgacacagcactggagtacgcggcagagcttgctgagcttatttgtgcttgattgatcggccaatggcttgggcattaaccttttttttcagagatcagaaggaagggagtaaccatcagtctgttccaagcttccaactcactgcacaacgcagatattccatcc

SEQ ID NO: 6204 - DNA, 608 bp, Oryza sativa
  ref <308>: DATABASE ACCESSION NUMBER: AK063360
  ref <309>: DATABASE ENTRY DATE: 2001-12-06
ctcttcctgattcggcgtccggcgagcgagcgagcgaatcggcagcgatgttgtgacggcggtccggcgaggcagcgcgcgcgtgcggcagcgagcgccgtagcggctccacctcggctggctggggggcgcacccaagggcggcgccaagccgtgtgctacggcgtcggcggtccggcgaggcggcgcactagcgacggcaagcgtctatgcggccggacctcgtcagcgggggtgcggagcccgaaggcagccgccaagccgacgcttcccgtccccggtgagggacggtggagagacaagctccaaggcggcgcgcgcacggcggtcaaccggcgcggccccgaggagaccggagagctccggcaagcttagggggtctaaatccggtaattaacccgaactcaaacctaattttgacttgaatttggatttaattctggtatttgtgacttagggttcttccccccaaaaattagggttcctcatttggggattttaggccgattggatccggcttattggggattccgggaaatttcaatcttgtttattcccttttgcttaacagtggggaatttcaatctagtttatcccctgttttcccc

SEQ ID NO: 6205 - DNA, 2139 bp, Oryza sativa
  ref <308>: DATABASE ACCESSION NUMBER: AK063361
  ref <309>: DATABASE ENTRY DATE: 2001-12-06
gcgtcaaaacgtcgaacaccttgcgcgcgccaccgccaccgcaaccgccgccgcaatgtccgtcaccgccggggtcgccctcgccgtcgccgacgcggtgtgggcggagatcaggtccgcgggccaagcctccgacgagcacctatccatgtgagtaaaaccaagcgcccgccgcctcgctccctcctcttccttgacctcggttgcttcgaaacagcctcgaggccttgttcggcaagaacatggtgcgcgcctgcaagatcctcgacgagggcggcgtccgccgcgtcaccggcgcgcccagcggccgctcgctcttccttgtcagctcccccatctctcgattcctcctgttcttcttcgtgtcacagccaaaagtgagtgagtgaggatttgcctgacctagggttttgcgtctcggcgattcaggtgatgggggagtcgaggaggaaggaggagtacatctgcttcccagagcacctctgcacctgctactccttcttctacgacatcgtcggccgcggcgagcagctctgcgtaagtgtggcattctgacctgctgctgttactgcatctgaatccgtacatctttcaatcaggcacactgaatttcatggacacaagaaacggataacctataaacacaaaagaaacatggcaccattgcaattgcaattatcagctactactgaagtactgagtactgaaatgcttttttttttactgttttattttgactggttactgaaatgcttgttgatctcttttgcatagtaattgctttaattttgtttcttcatggcgctattacaattgcaactatcagcccgcggctactgaatattgagatgcttgttgatctctttttcatggactagttgcttttgtttcttcatatggtgctatcgcagttgcaattatcagctcgtgactactgagtactggaatgcttgttgatctctcttttcatggagtaattgcttttgtttcttcatcgcgctattgcaattgcaattatcggctcgtgactactgagtattgagatgttcgttgatctctttttcatggactaattgctttttttttcttcagtgcaagcaccagttagcagcccgacttgcggaggccgtcagtaagcaccaggacattgaggtaaccgatgaggagttggcccacatgcttgctaaactctgaaagtttcagaatttcggtacttcagcaatgcacatgaagtttgggacgaattgatttttaagaaggattctaacactagtaccgttgtgcaaaatgactgatctcagtgcaaagaactgaatgatgcttgctatataatatcagctagatgagttatcctcgaatattaggcgttctcatgtagctgacaggtataatgtgaggcgtcatggttttatcattttgttgttatgcttgttgttgtattgaatgttaattagcttcaagaatgaggggaaatgtgtgatattcttcattcttgtgaagagatttataaatttgttcctttgttactgagttaccctgttgccctcctttttagttactatcttatcttattttagacaaattgttccttctctctagtattgctttagtaacaggggaaatatgaaaaggtattacacaatgccgcgtgattatgaacttttagttttttctaacaatattacacgtattgagaattctgactgtatggatcttcatgaatagatatcataataacaacatacgtagtacaaagatatgaatgctaaatcaggagatcctaattgtccaagtcttaggccacaggtttcacagtacttaagcaagtacgttgtactagttagtttcagaattgaacatttcatgcaaacaacatttacgactagcttaagaataaatactgatgataataaatactagtacaaagtataaataacattttgatggccgtctatgattttataaatcctggatacaatagcgctgcaatccgcagctcttttatatttgctactaattgattagcttcgatacaatttaaaaaccatataatatccaagcatctaaactagatagctttaaagagtatgtgacatattttggtctgtttattcttatgcctttcttttttaaaaaaag

SEQ ID NO: 6206 - DNA, 2092 bp, Oryza sativa
  ref <308>: DATABASE ACCESSION NUMBER: AK063362
  ref <309>: DATABASE ENTRY DATE: 2001-12-06
acgctctcatcctacaaggctccaaccccaaggcaagcatgccaaacgcgcttcttccataaacccccgcaatcccaacaccctctccaaaccctctccgaccgatcgatcccccaccacctcctccgcctcccatggcggccgccgcggcggcggtcggcgtcgtcgccttgctgttgttgctgccgctcgccgcgtcggcgtacggcgacgggctgggccgagcggccgtgggggtcaactggggcacgatgacgtcccaccccatactcccgtgcgaggtggtgcggatgctggcggccaacggcgtcgcccgggtgaagatgttcgacgccgacccctggacggccgcgccgctcgcccacaccggcatccaggtcatgctcgccgtccccaacgaccagctcgcgcgcctcgccggcgacccgcgccgcgcctaccgctgggccgagcagaacgtctccgcctacctcgaggccggcgtcgacgtcaggtatgtggctgttggcaatgagccttttctaaagagctacaatggcagcctaatcaatgtaacctttcctgcgctcaagaacatgcaaagagctctagacaaacttggtttaggtgatcatgtaaaggcagttgtcccactcaatgctgatgtctacaactcccctgagaataaaccagtgccatcagctgggagcttccgcaaggatatcaatgccctcatggttgacattgtcaatttcctcaatatgaataatgcaccctttgttgttaacatctacccatttctcagcctataccagaatccaaacttcccactcaatttttccttctttgatggtggtagcaagccagtttatgacaaaggtgtggtctacaccaatgtgtttgatgccaactttgacacccttgtttggtcactaaggaaggctggtgtgcctgacatgaaaatcattgttggtgaggttggttggccaactgatggtgataaacacgcaaatgtgagatatgcacagaagttctatgatggttttctgaagaagatggtcagaaacattgggacacctctcagacctggttggatggaagtttacctatttgcactgattgatgagaaccagaagagtgtactgcctgggcgctttgaacgtcactggggactactcacatatgatggaaaaccaaagttctctatggatctcagtggagatggcctagacaatctggttggagttgaagtggaatatttgccagcacagtggtgtgttttcaacaaggatgcaaaggataagttcaaagacttgccagccgctgtaaactacgcatgctcaaatgcagattgtacaccactgggctatggatcctcctgcaataatcttagccatgacggcaacatatcatatgcattcaacatctatttccaaacaatggaccaggatgttagggcatgctcttttgaaggcctcgcaaagatcacaacgataaacgcatcgcagggaggatgtttatttccagtgcagattctaagtgcttcagaaagggttgtgccactgagatttttgcctacatccttcttgattctcctaatggttgtgtccattcttacatagagtcagagacaatggaggaccggtaagtgctgataccttggggttgttggagcatgacacagtaaagaacataggaactgataccttgggttgttgaagagttgaagctgcagtaacataggtttgtaaagcatttttcccctcgtattttgataggcaaaacaaggtggaaacagagctgtatgccttcaccaccgtgccagcggtaatttgcatggatgagaaatatgagacaggatagactagcccttctttatacctctgttttcagcttgcgatcttgcagttcatttttttttattttctaaacgaccttgcagttcaattgtcaagctgaatgctggtattttacagcagcatgccttccaaatactgatgctacctacctgtaactgtaaggctgtaaaccaatgtattggcggtacagagtcatatgtgaatgaacgctctgcaattttagctgctcttgaattgcaaattttgtttcgtcc

SEQ ID NO: 6207 - DNA, 1865 bp, Oryza sativa
  ref <308>: DATABASE ACCESSION NUMBER: AK063363
  ref <309>: DATABASE ENTRY DATE: 2001-12-06
aaccccaaccccaaatcccccaactccggcaccggaaatgcggcgcggcggcggcggagggggcaggcgcctcccgaagtcctccctggcgccctcggcggcgtcggatcgcaccccgctgctggatccccacgtcctccacccgcgcaacctcgacctcgccttctcccgccgcgactccgacgccgccagcctctgcagcagccggccgtcctccatcggcacgggcccttcgttcgccgcccccgtcaccaacttctccgacagggcctcccaggcggccgccctccgcgtcgtcaacgcctacctcgcccccgccgtcagcctccgcccgcctctcccctccgccaaggacatcgtcgccgccttccgctgccccttcaagctcacccgctccgccctcaaggcccccggcaccccgcactcctggccgccgctcctctccgtcctctactggctcaccctcctcgtcaactccagtgagagcggcgccggcggcgacgactctcctgccgcctcaaatgacctcatgctctacattaccaacagctactcgctgttcatctctggggacgatgattcggtcgcgtctctcgacgaggagtactcctccaaagcccgtgcacatgcgcaggcagccgtcgaggcctcacaggcgctggagaaggaggcactggatctggagtccaagaggactaagctcacctcaggaccctcgcggctggaggcactgcaggcagagaaggaggccctcactgccgacgtggagaaatttgaagcggttgtgaagagttggacagtgaagatacaggagaaggaagagtcatctgtacatttggagaaggaattggaggccaagctgatggatcaacagcggatagcagctgaaaacgaggagctgatgaagaaggtggacgcacaggttgtgaatgtgagagatgtcgatcggatgcagagggagatccagtcagtggagcgtgacaatgtcaagttggagaatgggaatgcgacattggaggagaagggttgggagctcgaagctgcggtggttgggaagcttgaggagattgagggacttgtggagcagtgcaaccaggccctcagaaaattgaaacctggtattgatttccagtacatgctaaacacaaaagcgtcctccccggttgaactgctaggaaccagttacaaaactattatgaaacctgcactcaattctcttgctgacgaggctagaaggatatccatcttaaagcatgatgagtcagttgagctagaaaaacagtcacaacgaaatgctaaaattctgtctgagaaaaagaaccatatttcagtttgtcagaccaaaactgatgagatggttgctcgattggattcactggatgttgaaattgggaatcatgtttcaagatgtaaggctgatgctagactaatgaaagatgagctggagaaaaaggatcaccacctgagtactgttgagaaggagtcagaagaatttttaaagatctccgaaaagaagcttgaagatgcaaaaagggaaactgatgaagaaattcagatgtgcgccagagaactgctgaaacttattgattcggttacagagtacaaagagttcatggaaacatcaatatctgggatgaggaaagacctttatgaaaccgtcgacgacatctcttctttggcatccaaggcagcatctacccgccaaacttctgctcagtttgtaatgtgattatgtgaagaaagctcttcacggaagtgttagctcccaagtgatctcttccttcctacgcctgagatatttatacctcttggagctcttgtacgcatgtgccatcctgttaatataaactaggtgagtattcctt

SEQ ID NO: 6208 - DNA, 1350 bp, Oryza sativa
  ref <308>: DATABASE ACCESSION NUMBER: AK063364
  ref <309>: DATABASE ENTRY DATE: 2001-12-06
gcaggttgcaaactaagcaaaggaggatgtttcagtcattttctgtgtctcccatcctctcgctgaagctggccttcgccgtcgccttcgccgtctccttctccgtctcctgctgcgcctgcgcgcctgcctccggttcctctccccggtcctccccctccccgccgccgcagcgatctccgaggggagggccgccaggaaggttcttgtggagcgcggcggcgcggacgaggcggatgggatggtgatgtggccgccggcgccggtcatggagctcgcgcgcctcgccgtcgactccggcggcgaccccggtgccatccaccgcgcgctcgaccccaccatgctcccggtgcctgatgttcagagggcgaagaggaacaaatgccaactcacaagaacaccatatgggaggcgtttcgctaacaaggacatcaattcatacctggcgtttttgttcgaattgattgcggcacgaggaccatcagtggggttaaatgtatcacttagtcgatacgatttcttccacggacacctcttccttgcttctgggacaggaaggcttggaattctattccatgctaaagaatatccagcatttgataaggaattgttcccttacagtttgggattttgtcaggcaggatctaatgtagtgtacgatgattctatgaatttacgcaacatcctttggttagcaccattgccatctaatgaaacaaaagcttggctatcaccaggtgttttagttgtcctggatgcacatcctgatgggattatctatcaggatatgatacgtgattatgttcgggatgtacggacaatatatgaagatgattttggagaggtttccgttgatgtcaactatctgaatgttgccaactccgctcctgcgaatagagttttcatttgctgaaatttaaccagacaattagctatcttccccgggtgtgattttatcattgtgggaagtagacaccatgtatcattcttcaagtcatatagccaggaaagcaatggtttgcttagcaaatttgcctcttgacggcatttgcatcctctgtgatgtttaggtgtttatttgattttctggaggatgcttattttgagagagaacgaagcaacttatatgggccgcacgcaggccgcaatcccgtccagaccttcacgcgggccagaatcccgttccggacaacctgttttgggccgtacggaggccggagtccaagttcatgcctcgtcggctaaacctgtttctggttttgtagtttccgcaccgagtagaagtaacgtgtgtttggttatatacaatagaaaatatcaaacttatccaagttagaaacaattagccac

SEQ ID NO: 6209 - DNA, 1866 bp, Oryza sativa
  ref <308>: DATABASE ACCESSION NUMBER: AK063365
  ref <309>: DATABASE ENTRY DATE: 2001-12-06
acacgctcagtgaggcgatcgaggatgcagggcggcggcggcgcggcgtcggcggcggcggcggcggcggcggcggcgacgcagcagcaccgggagctgctcgagcggtacgagctggtgcgggtgcgggggcgcggtagcttcgcgcaggtgtgggaggctcgccaccgccgcaccggcctcagcgtcgccgtcaagatcctcaacctcgccggacttctcgccagcggcatccccatccgcaaagtggagagggagatcgcggtgatgaggctgctgaaccacccgcacatcgtgcggttccacgaggcgatcgccggcggcgacggcggcggccacgtgtacatcgtgatggagctcgcgacgcaggggcagctctacgattacgtcacccagctcggccgcctccgcgaggatgacgctcgcaggatcttccagcagattatatcaggcgccgaatactgccaccacaacatggtcgtccaccgtgacctgaaactggagaacatcctgatggattcagagatgaacgtcaagatcgtcgacttcggtttcagcaagttcttcaggcacaacaaggtgctcagcgcgtcatgcggaagccgagaatatgccgctcccgagctactcgcgggtagaaaatatgttggtccacctgtggatgtttggagctgtggagtaatcctttacatcctcttctgtggacgcttgccctttgacagcgccgatgtatcagagctgcacaggatcatcaagagaggagagttcagtatcccaccgtacgtgcctgacgacgcgagggatctcatctccagcatgctgatcgtgagacctgacaagcgcctcaccatcaccgaggtcaggacgcaccgttggctgcagcactccatccctcgctacctcgcaatgcctcctctcaacgctcgcacacagatcaccaggattgatgctgagactgtcgacaaggtagtcggccatggctttgaaaggaggtacttggttgaatcacttgagaacagagtcgaaaacgaggcgacggtcgcctacaacctgatcctcaataagaagttcgatgccccaacacgttatgtttggacaattgacgtctatcaagaagctggacaaagtaacaccacgggagcagcagaagcaactggcagcagtgctgccggagagccgccggtcgccgtcgccggagaagacgacggacgcaacaacggatgggcgctgggaggggtggagttccacgagtgcccccgcgaggcgatgcgcgccatcgcggcggcgctgcgcgagaccggcgtcgtctacgcgcacgacgacgacgaccgcggccgctacggcaagctgctctgcgcacgcttcgccggcgccgccggcgtccgccgcatcatccgcagctacctcgccgccaccgacgacgcgccctcctcttcctcctccgccggtggtggcagtggcagaggtgaggctggccatggcggtggagctcccgtcgatgatgctgtcctcgagagcttgtctgcggctgtgttctttgaaattcagctgtacaagtcagaaggggaagggaattacctgatggatctgaagaggctttctggcccacagcttcaatacctcaacatatgctcagagttaagctccaagttgagagcaattaactgaggcggtagaaattaacagtctcctccaaggaagaaataatctgaggaaatattaggttatccctcttttccttttgtttttagtgaaaggaaaagctagcatgtatgagagggaaaaattaaagaaaaatacatataacactatgagatgaacttatacaaatatatactaattaaatccgtcaggatttatcaattt

SEQ ID NO: 6210 - DNA, 2327 bp, Oryza sativa
  ref <308>: DATABASE ACCESSION NUMBER: AK063366
  ref <309>: DATABASE ENTRY DATE: 2001-12-06
caagatttgaggatcaggatgagtattgtaagtttatggctatgaaattcagtagtgaggatgaaggttttgctttctataaccagtatgcgaaagagaaaggttttagtgtaaggaaggattatagtaggcgtgatcgttttagtggattgatatttcataagcgcttcacatgctcaagggaaggatttaggaaggaggtgtatatggattattctggcagaactagggaacccagagcactaactcattgtggatgcaatgctcattttgagattaaactcgatgagataaaaggccattggtatgtaacaaggtttgtggcagatcataatcatcctttgtgtaaagctgatgaagtggcatttctccgttcacatcgtagaattactccagcacaacaggcaaaattggtggaattgagagatttaggtttacatcagcaccaagtgatggatgtaatagagagagaccatggtggttttgaaggtgcaggatttgttacaagggatttgtacaatttttttgtgaaaatgaagaagaaacggattgatggtggagatgctgaccgtgttattaagtacatgcaagctcgtcagaaagatgatatggatttctattatgagtatgagaccgacgaagcaggatgcttgaagaggttattttgggcagatccacaatcaagaatagattatgatgcatttggtgatgttgtcgtgtttgacagcacctatcgagtgaacaaatacaatctccctttcattccttttgttggggtgaaccaccatgggtcgactgtgatttttggttgtgctgtagtttccgatgagagggttggtacttatgaatgggtacttaagcagtttttaagttgcatgtgtcagaaacatcccaagtctgttatcacagatggagacaatgcaatgcgtagagctatcttacttgtgtttccaaattctgaccatcggttgtgcacatggcatattgagcagaatatggcacgtaaccttagtccaactatgctttcagattttagggtccttgtgcatgctccacttgaagaagatgagtttgagagaaaatgggttgagttcaaggttaagcataaagtatcagatgagaacaggtggttgaataggatgtataatctaaggaaaaagtgggcagcagcatacactaaagggagggtttttcttggcatgaagagcaatcaaagaagtgaaagtcttaactcaaaactgcataggttgttggacagaaaaatgagccttgtcattttgattgagcactatgaacattgcttgtcacgtatgcgtcatcaagaggcagagttggatgcaaaagcatctcagtcagtaccatttacaagcaatgactctactctaatagagaaggatgcagctcgtgtttttacacctaaaattttcaagaaggttaaggtggagttatacatgggcatgaattgggaggtaatagatactatagaggaggacaattgtgtcaggtatgtattgcaaatgattggcaaggatggtgttgtcattttgaccggcatgtttgaggaagcattgttggttagcatctgctgcccttgtagaaaaatggagtgcgaatacattccatgcaatcatttatttgcagttctgaaattatttaaagttagacaccattccgaccttctgcatagcacgtagatggactatgaaagcaaagaatgcatttccttctgataggtatggttcaatttacacttggtcagaccaaatggaacgctatcggctgttgcgttgtttgggtagtgaagcttttttcaaatcatccatgacagaagagagcacggtgaaagtaatgaagatgttagagaatctaatgcttgaagaggatagtagtgaaaattatgaaaattttgacattgagtttggttatgtggttgggcaaagtagccggaatgatattgaaagtggtgacatggtgcttgatccgacacaaattgtccctaaaggagctccgacaaagagaatgaggggtttcttggagaaacgtaagagaagatgtggtttttgccgcatcccagggcacagtattcgatcgtgccctatatacctaaggaaagtgaacgaagatgtgtgattttgctgtcccagagggtggagtacaggatggctgtggtgaacatggatgtttgtatggtccaacatgaagtatattgatgttgtgtgcgtacagtttatattgtttgaacatgttccaaaattgtaatggacctgaagtacttttttatatttgggttggatgattagcatcttaatatgttttgcaattgagtc

SEQ ID NO: 6211 - DNA, 1949 bp, Oryza sativa
  ref <308>: DATABASE ACCESSION NUMBER: AK063367
  ref <309>: DATABASE ENTRY DATE: 2001-12-06
actgctactgctccatggaaaccactgtgtctttgctgccgcacctgctcgtcaagccttcctcctccttcagctgttgcttcacaatgggcattggtcgtcgatatggaagaatcaaggtgtatgcagtgctcggtgatgatgaagctcaacatgccaagaacaacatgaggggggccttgttccatgtcgataaccccgggccaatggctcccattgcaaaaggcaacttcttggatgttaaccaggcccttgaggtggtccgattcggcatccagtactgcgattggagggcgcggcaggacctcctcaccatcatggttctgcacaacaaggtggtagaggttctcaaatctttagcaatagagttcaagtcaaatggaaccttgaggaaagagcttgcagagttgcaggaagaattggccaaagctcacaatcaggttcatttatcagaaactagagcatcatctgcacttgataagttagcacaagcggataacctggtgaatgacagactgttgcaagacggaggctctagtgcatctatagacaactatgtttctcttgcttcaagaacgtcatcagcgtcccgttttgtgaacaagaaaactctgcgtccgagtctggacgtgtctggtccagtgcagccatacaatcccaatctgaaaaacttctggtacccagttgtcttctccggtgacctgaaagatgatacaatggtaccaatagattgttttgaggagcagtgggtaattttccgaggaaaggatgggagacctggatgtgttcagaacacatgtgctcacagagcctgccctcttcatcttggctcagttagtgagggtagaatccaatgccctttccatgggtgggagtattcaactgatggaaaatgtgagaaaatgccagccacgaagttgctcaatgtgcgcatccggtcattgccatgctttgagcaagaaggcatggtttggatctggcctggtgatggcacaccggagtcgactatcccttctctgcagcccccttcaggatttacaattcatgcagagatggtgatggagctaccggtggagcatggacttctgctggacaatctattagatattgctcatgctccttttgctcatacgtccacctttgccaagggttggagtgttccaagcttggtgaagttcttgacacctgcatctgggctccaagggtactgggatccttaccccatcgacatggagtttcgaccgccatgcatggtcttgtcaaccactggcatctcaaagcctggaaaactagagggaaagagcatcaagcaatgttccacacatctccaccaactccatatctgcttgccctcctccaggaataaaaccaggatgctgtaccagatgtccctcaactttgctccctggctcaagcacatccctttcatgcacatactatggtcacattttggtgagaaggtcttgaatgaggacctacggcttgtgcttgggcagcaagagcggatgataaatggcgcgaacgtatggaactggccagtgtcatatgacaagcttggtatccggtatcggttatggagagacgccattgagaggggagcaaacaggttgccattcaataaccaaagtgagagtggatcatagtagctgcaatgctgcactgacagtagcctctttcaactcttgtcgcatttcttggcgagatgaagatgactatggccagaactatagtcacttagtcagaatatgtatatgcgcagtttgtttaggcgtgctgcgttcatccctgcgtggttcatccgcctgagcttctggagaggaaagctaatggaaggaagggttgatagactgataggcgacaattgttatgtgtaattttaagtgtactagtgagcgtgcatatggaatccatgtgtgtaatttcaagtgtactaatcagtgtgcacgtgg

SEQ ID NO: 6212 - DNA, 2234 bp, Oryza sativa
  ref <308>: DATABASE ACCESSION NUMBER: AK063368
  ref <309>: DATABASE ENTRY DATE: 2001-12-06
cacaaaccaagctccataccgctgcctacatctctggttagtagccaccaaggtccaaggagtaacacgctccgtgagagaccgaaatccagggagcacaaattgcacatttgcaccaagcacactcgctgcagctgcagtgacatgccggaagcaccgaccgccaagacagcaccggcctacggctacgcccccggggcgcacgccgaggcgctcgagttcatcgagcacgtcacggcgaacgccgggcaggtgcagcggcgcgtgctcggcgagatcctggcgcagaacgcgccggccgagtacctgcgccggtacggaatccccgggtcccccgacgttgtcgacgccttccgccgcctcgtcccgctcgtcacatacgagggcctccagccagacatcctccgcatcgccaacggcgacacctcgccgatcttctccgggaagcctatctccgaattcctcacgagctcgggcacgtcgggaggggagaggaagctcatgccgaccatcgccgacgagatgaacaggcggtcgctgctgtacagcctgctgatgccggtgatgagccagtcggtgtccgggctcgacaaaggcaaggcgatgtacctgctcttcgtgaaggcggagtcgcgcacgccgggcgggctcgcggcgcggccggtgctcacaagctactaccggagccggcagttcctcgaccgtccgcgcgacccctacacatcttacacgagccccgacgaggccatcctgtgcgtggactcctaccagagcatgtacgcgcagctgctctgcggcctcgtccaccgcgccgacgtgctgcgcgtgggcgccgtgttcgcctccggcttcctccgcgccatccatttcctcgagaagcactgggcgcgcctctgccacgacatccgcaccggcgagctcgacccggagatcaccgaccgcgtggtgcgcgacgccgtcgggcgggtgctccgcgccgacccggcgctcgccgacgcgatcgaggacgagtgcgctagggcgtcgtgggagggcatcatccggcgcctgtggccacgcaccaagtacatcgacgtgatcgtgaccggcaccatgtcgcagtacatcccgacgctcgagttctacggcggcggcctgccgctgacgtgcaccatgtacgcctcttcggagtgctacttcggcctcaacctgaatcccatgtgcaagcccagcgacgtcgcctacacgctcatccccaccatgtgctactacgagttcctccccgtcaattgcaacaatgccactgccgaggcgagccaccgcgacctcgtcgacctggtcgacgtaaagctcgggcacgagtacgagctcgtggtcaccacgtattccgggttgtatcgttatcgcgtgggcgacgtgctgagggtggcggggttcaagaacaaggccccgatgttcagcttcgtgcggcggcagaacgtggcgctgagcgtcgactcggacaagacggacgagacggagctgcacgcggcggtgagcggcgcggtgcagcacctggcgccgttcggcgcgtcgctggtggagtacacgagctacgcggacgcggccaccatcccgggccactacgtgctgttctgggagctgcgcgccggcagcacggcggtgccggcgtccgtgttcgaggagtgctgcctgtccgtggaggaggcactgaacagcgtctaccggcagggccgcgcgtgcgacaggtccatcggcccgctcgagatacgcgtcgtggcggagggcaccttcgacaagctcatggactacgcgatcagccggggcgcgtccatcaaccagtacaaggcgccgcggtgcgtgcgccctggcccggtcgtcgagctgctcgacgcgagggtgcagggcaagtacttcagtcccaagtgccccaagtggagccccgggaacaagcaatggaacaaaagcaaggatctggtcggcaagggagacgcctaatattgaagctagagggtgatgatctgatcgagtatttgtgtgagctggtaattaattaacggtacatgcatatggtcattggtcgatatgtttctttagggatatgataattcatgtttgaattatctctgatgctgcgagaggatcgaatagttatgagatgacgacttagcctatatgatcatttgctttactctttctctgctgtaacgcagtatatgttatttcctccgtctcaaaatataagcatttttagt

SEQ ID NO: 6213 - DNA, 1248 bp, Oryza sativa
  ref <308>: DATABASE ACCESSION NUMBER: AK063369
  ref <309>: DATABASE ENTRY DATE: 2001-12-06
agaacaccaggttgtcagatcccttcgcctctgaaccctgagtcgccgatcgaaacaatccgatggagtccgaagctgacaaggccgccgcgccggcgccggcagcggcggcgtcggtagcggagacgagcgacgacgcgattcaagaggagtcaccggcaccggctcccagcgggaagcctggatcggaggcggcggccaagccggaggtcgaggtgcagctgttccggcgtgggcgggggccggtggccgtgttccggtcgccgctgggcgggtacacgcaggaccagctggaggtgggggacatcctggagcagcacggcctcaagtccgtcttcgtcttccaccccgcctcccgcacccgcggcgtcgccatccgcttccacccccgcaacggccgctccctcctcacctacgtcgctggttccaccatcttcctcgacggcgagcccaaggattctttgctgaagcccgtcacgaaggtgatgattggtgtggcagctatgacagcagttgctgcagtattgctgaaggagggcaagatgcccgagtggcttaaggaatccaagctcggcaatctgaacttcccaccatgggtactggcttgcatggtcattgtgttcatgaggctccggaagagaaccaaggatgccatgaaaaagtttggctggtcttcatgaggttcgtaatgacaaatgtgtgtttttggctgctgcttcaaatttgttgccaatactggagatgtaccaagcgggtgacacgctaagtgaagaactattacacaaaaaacactagttttaccctttatttgcatactcgatgccggaaactcgatagatttttacttgtacttatgttcatgaataaaaaatagcaaaacaatccttatcatatctcttcctgctcgctaattggtttatccatttttctggaaggcttcccaggtactccctccgtcccataaaaaaccaacctagatgtgacacatcctagtactacaaatctggacattctagattcattatactagaatatgtcaaatccagtactagattcgtttttttttttggacggagggagtattccttatatgctggtagattcatagttcatatcctgtagcaaacatggagtttcagtttacaaaacaatgatccttgatatatgctattgatgatttttgcatctgtgcattggcacacttcgatgtgcccatcttgcttcgcccttaataaagagctattggat

SEQ ID NO: 6214 - DNA, 2062 bp, Oryza sativa
  ref <308>: DATABASE ACCESSION NUMBER: AK063370
  ref <309>: DATABASE ENTRY DATE: 2001-12-06
acgctgtcacaaaatcagctaaacttgatgcctatcgcacaatgccaaacccaaaaaataaaaatatcaaattttggattgcctcgagcccctgcattttgtgcggatcaatgcatcggcctgtagtagctgtaggtgccgtagaaggtctgcgtcatggtgagcagcagcaacaagacaccggcgaccaccgagacgatcgcccatgggttgctgaagtagttgtgcttgaggctggcgatccaggtgctccacttgtggtcgtagtacctgttcacctggtccgagagccccgagaggtagctgtcgttgatgtcgaacaccacctcctggcacagccggttgaagaggtcggccacctcggcgtcgctgcccagccagtgctcgatgatgccgcggtcgtggaggtacttgacgtcgtcggcggagttgatgaggttgtccatgaagatggcgtaggaggtgatgttgttgccgcccggggtggcgatgtccatgtggcattgctcgaacgcgatcaggttgaggaagagggacttggtgccgtcgtggatgaggatgcgcgggatctggagcacgccgtcgtggaacctgatgtcccagaagcggtccgtgttccgccgccggcaccggatgccggcctcccggagctccgacacgcagtggacgaactgctgccgccgcttgtccgccacgcgccggagccccgaccacttcttgagccacagccgcgcggggggcggcggggtgggctgcagccccgcgcggaggaggctgcgccggaacacgtcgaggcaatggagcatcgggccggacagcgggtcgaactcgaacgccgccgccgccggtgaggcgccgatggaggactccagcttggaccggtccttgcggagcagcggctcgtcggtcggcatgagcgggtcgaagaagcgcacagcgaggccggcgacggcgccggtctgctccgggttgccgagctggaggccgagcaggaggtcgagcacgaacaggggtatctggttctcgagcaggatcatgtcgttgcggatggcgtgcatcgcgccgcgcatggcgaagatggggtcgtgccgcgagtaccccaggtcgtcgccgaaccccttcccgccgtcctgcgcgccgcggaagagctccagcacgaaggtcccgtccagcaccaggcactcgacgagctcgttcccctgcatcccggcgacgcggccgtcgtagcaggcgcgcgcccgctcctccatcggccgcagcgcgtcgaggtaggcggtgacgtcgtgccccgtgcgcttcaggacgtggtgcagcgcgcgccacttgtgccgctccatctcccgcagccgccgccggccgcggtggagcgggccgatggacaccacctgcggcatgtacgcgcgctcgtcgccgtcgcggagcgacttgggcacgcggtacacggacagccgcgcccacgggcacgctgcctcctcggcgcgcgcctgcgccagcttcccgcggatggccaccacccattccgggtcctgcggcttcgggctgtgcgccggcgactgcacctggaccttcacctcccgctcccgctcctggcgcggcggcagcgcgtcgcctcccgctccggcggcctcgccgttggtgagcagcggcaggttgcggttcagcgcctgccacagcggcagcgcgccgggcggcggcgcggacttgttgaggttggcatcgacggtctccttgagcttgaccgtgatcaggtaccagctcaggacgtccttgttgaagacggcgaccatcgagatggaggctggcagtggcaggtgcagcggcttcgccggcggcgtggggctcgccgcagtagcgtctcgtggttgccaagatcagtggccccgggacagagagagcaagccaactcgagagggaggcgaggcaagcaatgtacctatgaatatcttagaacgataattttatcagctgatgatgattgatagtggaatttttgggattgcttgcttgttgtaaaatattgtgtggtctttgacaaaattaaataaagtttcctcttgcgatc

SEQ ID NO: 6215 - DNA, 1315 bp, Oryza sativa
  ref <308>: DATABASE ACCESSION NUMBER: AK063371
  ref <309>: DATABASE ENTRY DATE: 2001-12-06
atcacgtctctcgtcttcctctccccttcacgccgtgacccagcgatcgaccggccggaatggatgcggcggcggcggcggcggcggcgggaggaggaggagggggaggcggtagcgtcgcggcgcggagcagcccggcgtccgtgcaggccaccaacgacgacgccgcggccagcaagctgtcatgtgttaataaaggatacatgaaggatgattatgtgcacttctttgtcagacgaacaacaaaaagggctccaataataaatcgagggtactatgcacgttggtctgttcttaggaagcttctgcatcagttcctcggtgctggaaatggcagtaatgatcaaaaccggaaacaaatattatctcttggtgctggctttgacacgacattcttccagttgcaggacgaaggcattgctccatacctttatgttgagttggatttcaaggaggtaaccagcaaaaaggctgccatcattaaccactatagtcaaatgaaggaaaagttaggaccagaagcttcgatatcaattgaaaaaggtgaagtgagaagtgcgcattacaagctcttttctgctgatattcgtgacataccaaaacttgattcagttattcagatggctgaaatggaccctaccttgccgacctttataattgcagagtgtgtgctaatttacttagacccagcttcaaccagttctattgttatttgggcatctgataagttctccactgccatatttttcttatatgagcagatccatccagatgatgcatttggagagcaaatgattataaaccttgagagtagaggatgccctctccttggtataaatgctacaccaaccctaagtcacaaggaaaatctttttcttgatcacggatggcagagagctgttgcatgggatatgctaaaaatatacaatgatttcattgacagtgaagaaagacgcaggattgaacgattggaattgtttgatgagttcgaagagtggcatatgatgcaggaacactattgtgtggcttatggaataaatgatgccaagggcctgtttgatgattttgggtttaaggactagcactcgtcgtgctctttttgatatcgaactgagacaaattcaactgggaattcctactgtttcctatgcagagaaacgtacttgaagtgtgtgaaatgtttggcagaatatgagagatgatggctataacaacattgtacatattctgtttgcagatacttggttgtatcgattgtcatgttgttatgtatgttgcttttctgccttagctgaatggtttttctgacgtttcc

SEQ ID NO: 6216 - DNA, 1529 bp, Oryza sativa
  ref <308>: DATABASE ACCESSION NUMBER: AK063372
  ref <309>: DATABASE ENTRY DATE: 2001-12-06
aaaaggactttgaaaagagagtcaaagagtgcttgaaattgccgggagggaagcggatgggggccggcgatgcgccccggccgtatgcggaacggcttcggctggtccgccgatcggctcggggcgtggactgttgtcggccgcgccggcggccaaagcccgggggctccgcgcccccggcagccgtcgtcggcgcagccggtcaccgcgcgcctctggcgcgcccctcggggcgctgcgccgcaacggcctgcgggctccccatccgacccgtcttgaaacacggaccaaggagtctgacatgcgtgcgagtcgacgggttctgaaacctgggatgcgcaaggaagctgacgagcgggaggccctcacgggccgcaccgctggccgaccctgatcttctgtgaagggttcgagttggagcacgcctgtcgggacccgaaagatggtgaactatgcctgagcggggcgaagccagaggaaactctggtggaggctcgaagcgatactggcgtgcaaatcgttcgtctgacttgggtataggggcgaaagactaatcgaaccatctagtagctggttccctccgaagtttccctcaggatagctggagcccattacgagttctatcgggtaaagccaatgattagaggcatcgggggcgcaacgccctcgacctattctcaaactttaaataggtaggacggcgcggctgctccggtgagccgcgccacggaatcgggagctccaagtgggccatttttggtaagcagaactggcgatgcgggatgaaccggaagcctggttacggtgccgaactgcgcgctaacctagaacccacaaagggtgttggtcgattaagacagcaggacggtggtcatggaagtcgaaatccgctaaggagtgtgtaacaactcacctgccgaatcaactagccccgaaaatggatggcgctgaagcgcgcgacccacaccaggccatctgggcgagcgccatgccccgatgagtagtttcctttctctctacctcgcggatttgctcctcgtctttctccgctctctcgccggctagccgctacccggtcgccggcggcggccgccggcggagatggatgctgcgggcggcggcggctctagccgtcgttcaccgggagccatccagtccgcttgtcccccttcagccaacggcgagcgacgatggcggcgaagtatttcaggcggcctgctctgctcccctgttggaagtttcagttctgttttatgaagattagaaatttcagtttttgatctaggaaaaggaaatccagccatgtgagtatgtgacttcaattataaatttagcttatatttattcgaaatagctgagggcatgctcaccagtcactatttcacttcatgttgttgtgaacatcagtagtatcagtctaccagatatgtaagatcagagatttttttgcttctctctactttgctacgtcagaatgattaggacatgtcaaaattaattttgatgaaacaaagggatggttcactttt

SEQ ID NO: 6217 - DNA, 1921 bp, Oryza sativa
  ref <308>: DATABASE ACCESSION NUMBER: AK063373
  ref <309>: DATABASE ENTRY DATE: 2001-12-06
tttagtgcgtggaatgcttctccagtttcccaagggaatgaacgttcagatgcaaagcaatctgattcttgggatggctggaagtctgctggagttgacaaagcaattaacaaagacaaggaatccttgggcaatgtgcctgcatctccatcatttagtgcgtggaatgctgctccagtttcccaagggaatgaacgtttagatgcaaagcaatctgattcttgggatggctggaagtctgctggagttgatgattcagttaaagacaaggaatcctggggtaatgtgcctgcatccccatcagatagtgcgtggaatgctgctccagtttcccaagggaatgaaagttcagatgcaaagcaatctgattcttgggatggttggaagtctgctggagttgatgcttcaactaacaaagacaaggaatcctggggcaatgtgcctgcatctccatcagatagtgcatggaatgctgctccagtttcccaaggggatgatgtctggaattctgctgaagccaatgagtcacgtaataaggactggaaatcagatggatggggtgccagaggtggcaattggaggggccaaagaaacaatcctggtaggcccccaaggaaacctgatggcaggggtctgcctaggagacctgatgagagggggccaccaaggcgacactttgacctaacagctgaggaggaaaagattctaggagaaattgaacccactgtgctgagcatcagaaagattttccgtgaatcaattgatagcataaaactttctccggaagacgaaaaattcatcaaagagaatgttcttgaacaccaccctgagaaacaatcaaaggtgtctggtgaaatcgatcacataatggttgacaagcaccaagtgttccaggatagtcggtgcttgtttgtggtgtcttcagatggaactcggtcagatttctcctatttaaaatgcatggagaattttgtgaggaagacctaccctgagcatggggactcattctgcaagaagtatttcaagaggcgccgtgaccaaccaccagcagctgatggaggcacagcaccaggcactccagctggggctacacagtctactgcagttgatacccaggagggcacttcacagcagacccaaccagatatcgcaaccgctccagctgcaactcaacaagagactcttcaagacactccagctcctccagcagacgatggattgctcgggaagggacctagcccgtctgactgatgctcagggtgcgcttagagctgccaacatcctgcttgtgctctaatcctgccactctttttttcctacttggcctgacattgcctagtgactagacagatggtgactttgtgtagtagagaagggttagcagtctttaggtctcactcttccagacgaactctgtaaattctggatgttagtgagctgcatcccgtagcttaaactcgtttttaccctctcttttttttttatcttttttgtctttccagtatggttatttggttagtccaatgcaagccgattctgcgaggccgtgccgaatctgatgattttgttgttctgcaaggcacagagctctcgctggtgctgtttcattttggatgctgttacagggttttgtaaagacactgaaactaccatgcgaatcagcaaaagatggattccctgctgtgaacaagcaggtggccttgcatgaattcattcatcaaacatgaggtcttgctggtgacgccacaaatttggtttgatgtgtttgcactgagctggaccaatctgttcttgaaatttcttcaggttggtacagaaaataggtaatattgtattctgtcatttcattaccaagaccagtggtgtgaacaagctggaggcattgcttaaatgcatccgtcaaccgtatgattgtttcagc

SEQ ID NO: 6218 - DNA, 1960 bp, Oryza sativa
  ref <308>: DATABASE ACCESSION NUMBER: AK063374
  ref <309>: DATABASE ENTRY DATE: 2001-12-06
aaatcctctcggagcccgaggtcgcttggagtcggcgcggcggcgcacgcaatgcccgccctgcagcctccaccggcgtcgtctccggggcgggagcgggagcggggcgacgcggctgcttcctccgccggtgggcgccgccgctctcgctcgccgccttggagccctcgcgcgcggtccccgtccctctcgcggtcgccgccctcgtcgtcgtcgtcgtcctccgaggatgaacgtgagaattgcgagacccaaactgaaactgcatggatggaattgggattctcaaattcagggcctcgaggtgtaactgagatcacttatcttctgaggtcccacgagctcaagatcagtgagttggagtcaaaagagcagatttactgcaacagcctggttcaactcgaagagagaatcgcatcactagaatattacaaggagaaattgcttacaagactttcatggacagaagaggccaattcgactttgagatctgacaattccaaattgaagaatttggcatacagtcttaaggaaagggtggacgagttagaaaaagacaacttcatgctagggctgaagatgaatgagtttgctcaagagatggaacgatttcagatgcaggtaggatcaaccaacacacagatgcaggataatcttgatgatatggccaaagcttttgaatctaaagaaagacatgtcaccttcacacaacaaaaactagcggattcgatcaaccatcacgaagaaagaatcacaacactagaacaggatataagccaatgtactcaacatgttcaatcacttcaggtcaaggtaaaatcaaacaccagtcaactggaaaccaataataatgatcatcattcgcttgagaataggattcaagttttggaatcaacagaaaggcagaacgcttctagattggtgaaaatggaggagtctattatccatcagcatgaaagaaccataggagtagagcaagacttgagtgcaaatataactcaacatggtcagcaaattcaaacgctccagaacaaagtacaactgcaaaccaataataatgaagctcatttgcttgagaataggattcaagttttggaatcagcagaaaggcagaacgcttctagattggtgaaaatggaagattctattatccatcagcatgaaagaatcataggagtagagcaagacatgagtgcaaatataactcaacatggtcagcaagttcaaacgctccagaacaaagaaaatgatgttcttatgaagtcttttcagtcgctgctcacttgtatggtaccatttattgttgcgtttctgctatcaatgcttagcagccaatctgatttcggtgaatatgagaaggatcttgtgattcaagtttcgttggtgtgtggattacctggcgtaatggctatggtctttgctcacttagcaagtggaccattttggacttctatcgtagcaagcttgacattatactttgtcatttatagcatcacattagtgtattatgcattcataagacttctaccatggagtccatggacaagattgcagttttatgctactgtcattcttcttgcaatattcctgatcgtggtccttaccatgctgattgtttgggggagttttgttaaaaaaccaaagttcacgcgttggattgcaagttacttttcatgttgtccagggcctgaatgatagatgtctattacaggaggtaaacaagtgactactctggtgccttgcaaagtttatcattgaagacaagttgccaatgaagattcagaagcttgattgtgtcacatttgttgtacagatgttactactatgtctagaagttttacatacttaggataacgttgaagaacttttgctcatagctaatagaaagcgagagatatgctaacttggataaagtctagatatttctactgccttcaattccttttttttaatcaaccgt

SEQ ID NO: 6219 - DNA, 2698 bp, Oryza sativa
  ref <308>: DATABASE ACCESSION NUMBER: AK063375
  ref <309>: DATABASE ENTRY DATE: 2001-12-06
catggacactgtcctcttgtccgtaagtgtctacatcaacagctcaatgtttcatggccaaaagcaatcgacacccaaggctgctcgggctgctaccgaggattccacgtttcatccgctgcctgcacttttcaagttaactggtctttccccctttaagaaggcagcatttactccagaagatctctattccagaaagcgtccgcttgaaacaaagagcagtgcacctgccacaaagttgactactgagaagttgagattatcgtctgatggaaacgaagatgatcatgctgaaagaattgtttcagattcagaattggatgatataattggaatctcagacagttctgctttggaggaaagggacccccctgatgctctgcagtgtgatttacgcccttatcagaagcaggcattttattggatgatgcagcttgagaaaggcagttcttctcaggatgcagctacaacgctgcacccttgttgggaggcatataaactcgaggacaagagggagcttgttttatacttgaatgtattttcaggcgatgccaccactgaatttcctagtacactgcaacttgcaagaggagggattctggcagatgcaatgggactggggaagactattatgacaatagctcttcttcttgccgactctagcaaaggatgcatcactactcagcattctactcacatatgtgaagaagctagtggactgggtgaattgccagttcagcctcatgatgatgtgaagaagctagctatccctttctcttttagtaagcttaggaaacctaaaaccccgcttattgcaggcggcaatctaattgtctgcccaatgacactacttggtcagtggaaggcagaaattgaagctcatgctacaccaggttctgtaagtatatatgttcattatgggcaaaacagaccaaaagaagcaaaccttattggtcagagtgatattgtcctgactacatatggtgttctgtcatcggaattttcaaacgagaattcaacagaaagtgggggtctgtactctatacattggtttagagttgtgctggatgaagcacacatgataaaatctcccaaaagtttaatatccctcgctgctgctgctcttacggctgatcggcgttggtgtcttactggtacacctattcagaacaacttggaggatatatacagccttttccggtttttgagggttgaaccgtggaggaactggtctttgtggcataaacttgtgcaaaaaccatatgaagaaggcgatgaaagaggtttaaagctagtacagtccattttgaagccaataatgttgagaaggaataaaaacagcacagacaaggaaggaagaccaatccttattttacccccagcaaatatcgaagtcaaatactgtgatttgtcagagactgagaaggatttctatgatgctctgtttcgacgatctaaggtgaaatttgatcaattcgtggaacaaggaagggtcttgcacaattatgcttcaattttggagttgcttttgcgccttcggcagtgttgtgaccacccatttcttgttcttagtcgtggagatacacaggagtttgctgacctaaacaaacttgcaaagcgtttcttgcatggtggtaatggtgctgtgaatggtgactcttctcttccctccagagcttacattgaggaagttgtccaggaactgcagaaaggtgaaggggagtgtcccatatgcctggaagcctttgaggatgctgtattgactccctgtgctcaccgtttatgccgagaatgtctcttgtctagttggcggagtgcatcagcaggcctttgtcctgtctgtagaaagtctatgagcaagcaggatcttattactgctccaactgacaatcgttttcaaattgatgtcgagaagaactgggttgagtcttccaagatttctttccttctacaggagctagaagttcttcgcacttctggtgcaaagagcatcatttttagccagtggactgcatttctggatctcttacaaattccactttccagacataatttctcatttgctagactggatggaaccttgaatcttcagcagagagagaaagtaatcaaggagttttctgaggacaaaagcattttggttctgcttatgtccctgaaagctggtggtgttggaataaacctaactgctgcatctaatgcatttgtcatggatccttggtggaatcctgctgttgaagaacaagctatcatgcggatccatcgaattggtcaaacaaagagtgtttccatcaaaagattcatcgtcaagggcactgtcgaggaacgaatggaggctgtgcaggctcgtaagcagcgaatgatttctggagctttgacagatcaggaagtacgcagcgcacgtatagaagaactgaagatgcttttctcctgacaaaccaagagtcgccattcgtttactgaaagccaagaataggaaggtaaaacgaggggtaagaattccaaatgttgcaaaaactcgaaattcagatatcatacgccttctggcattttgctgttgttgtatacctttcttgtgtatactaatatgtatgaatagtggcgtggaagaaagattgagagctgacagaagaggtaattcattgcatatgtatgtacaacatgggcttaattaatggtacccgtaacgtaaccgacc

SEQ ID NO: 6220 - DNA, 1817 bp, Oryza sativa
  ref <308>: DATABASE ACCESSION NUMBER: AK063376
  ref <309>: DATABASE ENTRY DATE: 2001-12-06
aaaaattatgatctctatggagatgaaaagggtaacccaggatttggtggtggaaattttggaaatcgtgagggctacacatacttcactggtggtggcgccaagactagccatttctcatctggtgatggatggcaaacgatgggcggccagggaaatacaaaaacattttccttttcatttggtggtggtaaccctggtgccggtggaggaaacccatttaactttgattttggtgatgttttttccaacatattttctggtggatcaatgggaggtagtcagcatactggatctgctggcaaagccagacgtggtacaaaatcttctggtcatgattctagttctgtcaacattcaggaggtcacgatgcaaattttcaataaagaaacagctgatcaaggaatcacttggcttttgttattctatacaccaaacacaaaaggtcaatttgtgctagaaagtgtcgtggaggatgtagctcgttcactggatggtgcactgagggctggtaaggtaaactgcgaccatgaaaaggcactttgcaagaaggctggtgtctcaataggaaaatcagctcgtctcttcatttattcatacacaactacagaaaaagggtctttgcatgagtactcaggagattatgattctaagagcctgaagacattttgtcaagaacacctgccaagattttccaaaagggtagacatcaaccaattcagcttcccctcaaatatcataccaaaccttcctcaagtgctcctactgtcagctaagaaggacacaccagcaatgtggcgtgctgttagtgggatgttccgcagtcgattaattttctatgatgcagaggtccaggatgtttctcatccactcctcaaaagccttggtgtgaagaatattccagctctaattggtaggtccgttaatggtgaggaacaacttctgaaggatggcatttcagtgaaagatctcagatctggtatcaaagaattgaagaatctgctcgaaaattttgagaagaagaataagaagcttgcatcaaaccaagctaagaaacctgctcacacagatcaaccaaaagaaaacaaaattcctctcctcactgcttccaactttgaggagatttgtggtgagaagacatcagtatgtatccttggcattttcaaatcaagcaaagctaaggaaaatcttgaagccgtcctgtctgagatatctcagaagactctgataagggggcagaactacaactctgggaacgcagttgcttatgctttgttggacgggaacaaacagtccgccttcctgtccacgtttgacaaatcagcattcaagtcgtctgataaacttctccttgcctacaagccccgacggggtagatatgctgtgtatgacaatgaggtgactatggaagaggctgaaaggttcgtggtttctgttttgaatggagatgttcaattgtctgcagccggacgaaaaccagttcttaggtagagccgtagaggctatctctgcaattgcaaaccttgttttcttgggaacgattgcaagtaaagtgtatatatatagttcttatagtgtagtacctccttaaggaggtaacttgggaacgttttctgcttgtacatagctgaatctgattggaatgaagagagtaaaatattctgcagtcggcacttttgttgtgtcatgaactggaataccctgacatggggcagtcggcacttttgttgtgtcatgaactggaataccctgacatgggagagatcactccccctgtaacatgagctgttttgatgtcaaagaactcaaatctggat

SEQ ID NO: 6221 - DNA, 684 bp, Oryza sativa
  ref <308>: DATABASE ACCESSION NUMBER: AK063377
  ref <309>: DATABASE ENTRY DATE: 2001-12-06
atctctttcaggtggcacgcaggggagggagggagcggtggtggtggcggcggcgcgggtagagagggagcggcggcggtgcaccgaggaagggagcagcggcgctaggtgttgcgcggagggcggaacggtggcggtggctgctcactgccgctgggcacggaggggggcgcatggagcaggagctcggcggcgcaggtcgaagagggtggtgcagctcgccgctgggcgcggcacagcgcaggagctcgacggcatgggaactcgccatcgctcggtgcaaagggaggggcatggccagcgatgcggtgaggaggcgcatggagagaagacctcgacgactcgacgcaaagcacttgggcgctgctcacggcgcaagaaagggggtggcgtcctccttctccctttgcggcggtggagtagagagggggcggaggtggtcccgcgacgctgtagatctgaccatcggcgtggtggatggaggcggcgagccgtcggtcgtggttgcaggcgatatgcacaccaacgacaacaccatatggggattcgaggagatgtagatgtacttctgcttgtgttgaacatgtattggtgcttttgtttgacatgttttttttgtggacacaaatttgtaccatgtatatttttttgggcaatttaatattcactaattggtttaaattc

SEQ ID NO: 6222 - DNA, 1894 bp, Oryza sativa
  ref <308>: DATABASE ACCESSION NUMBER: AK063378
  ref <309>: DATABASE ENTRY DATE: 2001-12-06
tggagatccagaagattttgacaatcagaactcatatgagtgtacactgatattgcccaccaagtaccacgctgatctgcttgcgaagcaacttattatccggatggaccgagaaggccataccaaggcagacgatcaagttgcgcttagcacccctcctggtaacctcagtgcattatcaggaattttaccagacaacacggtaaatgatgtgaaacaagaaggtggtattagccatcagctaaatgctgcagctcatgcaaatatgacacctggaacccctttacaacaacaccctgccaataggatgcttccatctgtgaataaccaagcgttaatgcagcaaggatacatgcagggggcaaacatgcctccgaggagtcaacagcttgaccagaatttgattcagcagcagcaacagcagccgccgcagctgcagcaaaatgcacaagcacaactgcagcaaccagcatctcttcctctcaaccagatgcagagacctcaacttctaccaacgaacccattatctcagatgctggggaatactggctccaatcttccgatggcctcaagccacatgggtaacaaggtcgctcctaattctgtgcagcttcagatgatgcagcagcagcaacagtcgaggaaaatgatgatgggcctcggctcgcctgccaacatgggtaatatggttaacaatgttgttggcctcaacaatattggaaatgttatgggaatgggcaatgtgcggccaatgtcgtccccaatgggaaacatgtcaggcttagggaacaaccccaatcagatgagccttggaatggtatccagtctctctgcacctgggattcgtccaggtatgacacatgctgctattgccaagatgcgaatggggttgatacagcagcaaagagcagcaggcatttacccccagactagcatggtcggaatgcctgggagcagttctccgattcttcctggttctgccaatttgtccatgatgaatcagctaaacagaagcaacattaaccctttgcagcgggccatgatgggtccaccaaagatgccaggcagtaattacccgttgactccgcaacagcaaatgcaactccagcaacagttccaacagaacccgctgcagcagcagcaactgcagcaactccaacaacagcagcagcaacaacaacaacagcaaatccagcagcagcagcagcaacagcaacagcagcagcagcagcagcaaattcagcagcagcaacaacaaatgggctctccgttacagcaggcggcacaggtaggctcacctgctggttcgcagcagtcattggtgatgtcgcagcatcagcaaataagcccacagcaaatggccgcgatgagtccacagctgagctcaggcaccatgcagcaagtgaataacaatgttatcaaccacgtagccacaccaggccctcctcctagcccgcagctcagctcacagacccatgggtcggtcaacagcatcgcaaactccccaatggagcagttgcaaggtgccaataaaggaggtccagggagcatgtagtgacggcaaataattgtttctgtgatggacatacaaaataatgcaaggtataaatatcggcagtgatcagcactttttcttatttgttgtggtaaatgatgttaaagttaggtgtcctgtaagttatagccaatagatgaagatattatggaggatcagccttacgcagggatttctgatgttgtagattttagataatgaaattagtacctttaggggattggtactgatgaaagttttgttcaatgggactactttcttgtttaaattaattatcaagtttgtgtaatagctatgtaaccgtggtgcttattaataagtatcttcatttgattgtgg

SEQ ID NO: 6223 - DNA, 1158 bp, Oryza sativa
  ref <308>: DATABASE ACCESSION NUMBER: AK063379
  ref <309>: DATABASE ENTRY DATE: 2001-12-06
accgcttcactccccgtcggcgaccagccgactttccccaatgccggcgccgcccgccgcttcctggcgccggcacgctgctgccgccgccgcctcctcctccacgcgcaaaaccctcctcctcctcctccccgtcttcctcctcctcctcctcttcgtcctctccagggctcctgatctcaccctctcccccgcggccgcctcctcccgccacctctccgccggggttcgcccgttcgattgctacgcgtcgcagcaggcctcgccggtcttcgccagcctggtggagggcgtgccccaccccttcttctactccctcgccgacatgggggctcttcccgaccacccccacaagaacatcgctcgcatcctcaagggcaagcgcttccgcaagcccgacatctccgagacaatccagcagctgctcggggggaaggtggggatcggatcccgtggtgtggtggtcgacgtgggtgccaatgttgggatggcgtcgttcgccgcggccgtgatggggttccgggtggtggccttcgagcccgtcttggagaatctgcagaggatttgcgatggggtgtatctcaacagggtgcaggaccaggttgtggtgtaccatgccgcggcttctgatcgagttgggaacatcacaatgcataaggtgattggacgactcgacaacagtgctatatctgcaaccggtgcaaaattggcttttaaagcaaatgaagaaattgctgttgaggttgctacaataccactggatgaagtcattctagatgcagagcgagtggttttgatcaaaattgatgttcaggggtgggaataccatgttctgagaggtgcatcaaagttgctttcaaggaggaaaggtgatgctccctaccttatatatgaagaagatgaacgcctactgcaggcaagcaacagtagtgcacgagagataagggcatttcttagtagtgttggttacaatcactgtacacgtcatggcacagatgctcactgcacgaaaaactaggcatgtgctttttattcatgtaagttgatgatcatctatgaacagagaaacattcatatatgatgtgctgatctgtagaaaagcattttccctctcaggcagcactttcatgaataaaaatagttagtcaacttttaatt

SEQ ID NO: 6224 - DNA, 1836 bp, Oryza sativa
  ref <308>: DATABASE ACCESSION NUMBER: AK104958
  ref <309>: DATABASE ENTRY DATE: 2002-08-28
tttttttcttcctcgtctcctcctccttttcacacgcgcaagctgctcgagcgagcgcgcacacactatcacagggaggggagcaggagagggaggagatgccggtgccggggagccagaacgggcggccgaggccggcgaaggcggagaccatccacggcctcgcccgcgccggcgacctcgccggcgtccagaggaagctgcaggagaatcccgccctcatcaacgaccggaaccccgtcatgtcccaaacaccgcttcatgtcgcagctggctacaataacactggcatagtcaaattcttgcttgatttccaaggcacggataaagttgagctggaagcaaagaacatgtatggagagacacccctgcacatggctgtgaaaaacagttcttgtgaatcagcaaaattgctacttgaacgtggtgcacatatagaagccaaagcaaataatggcatggcaccattgcatttagctgtctggcatgcacttcaatctggagattgtagcaccgtaagcgtgttgctaagctacaatgcggattgctatgcaaaagacgatgaaggcaaaatcccttcgaatcatattcctggaggagctggtaatgagaagctgcagaaactcctcactcgccatatggaagagcaaagaaaacggaaagccctcatgtcatgccgtgaaggaaaagcaatggcggagtttgaagaagcaatatcacaaattgtaggattacaggacctcaaaatgcaattgcgtagatgggccaggggaatgctttttgatgagaaacgacgagctatgggcttagggattgctagcagaagggctccccatatggcatttcttggcaatccaggaacaggtaaaacaatggttgctcggattcttggaaagcttcttcatatggttggggttctccctaccgacaaagttactgaagtacagcgaactgatcttgttggagaatttgtggggcacactggaccaaaaactaggcgaaagatacaggatgctgagggtggaattctgtttgtggatgaagcttacaggttgataccgatgcaaaaatctgatgataaggattacggtgtggaggccttggaggagataatgtctgtaatggacaatggcaagatagttgtgatatttgctggatactgtgagccaatgaagcgcgtcatcgcctccaacgacggcttctgtaggagggtcacaaagttcttttattttgacgatttcaccacaacagaattagcagagatcttacatctgaagatgaataacccaactgagagcagtttgctgtatgggttcaagctggacccaagctgcagcatcgaggtcgttggagagctgattgccagggagacaactgaacagcggcgtaaacagatgaatggtggccttgtagacacgctgctcatcaatgcccgtgagaatctagatctacgtcttgatttcaactgcgacgatgcgaatactatgatcacaatcacattggaagacctggaagctggccttaagcagatctccaaacagcggcagttgcagtgacaccaaccaatttggagacaaatttttggttataattggaagctcatcgacatcagacaaagtttcagtcaggttcaaggattttgatggaatcaaatagtgtgatttggtccaatttttttgctggctattctttctgttgtatctattcacattggtaggtaagatttatgcccttctacaatagcactaatacgcatgtagttctttattattcccattgaggtatataagcctttgtaaatacatttcttgcattacgaagcatcttttagaggtg

SEQ ID NO: 6225 - DNA, 1626 bp, Oryza sativa
  ref <308>: DATABASE ACCESSION NUMBER: AK063380
  ref <309>: DATABASE ENTRY DATE: 2001-12-06
actaccataactaccccacccaacaccatcatctgatccatttccacaaagcttctgaaagccaacacatacctcactgcctttgccttcttctcagcttcaagaagccttttgagcttgtgatttctacatcatccatccatttcatcaccatgatccaagaactccttggagggacaaccatggaccagctcaagggcgccagcgctctgaaccacgcctccctgccggtggtgctgcagcctatcgtgtccaacccgtcgcccacgtcgtcgtcgtcgacgtcgtcgcgctcgtcggcgcaggcgacgcagcagaggtcgtcgtcggcgacctcgtcgccgcacgggcaggggcagggtggcggcgcggcggagcaggcgccgctgcggtgcccgcggtgcaactcgtcgaacaccaagttctgctactacaacaactacaacctcacccagccgcgccacttctgcaagacgtgccgccggtactggaccaagggcggcgcgctccgcaacgtccccatcggcggcgggtgccgcaagccgcgccccatgccggcgccggtcgccaagccgcccatgtcttgcaaggccgcgccgccgctcggcctcggcggcgggccagtgtcctgggcctccgggcagcaggccgccaccgcgcacctcatggcgctgctcaacagcgccaggggagtgcagggccacggcggcagcaatgtccaccggcttcttgggctggacaccatgggtcacctccagatcctgccaggcgctcccaatggcgccggcgccggcacggcggcgtcgctctggccacagtccgcgccgcggccggtcactccaccgccgccgcacatggactcccagctcggcatggggacgctgggccaccacgacgtgctgtcgagcctcggcctcaagctgccctcgtcggcgtcgtcctcgccggcggcgagctactacagcgaccagctgcacgcggtggtgagcaacgcggggcgcccccaggcgccgtacgacgtcgccaccgcgtccctcccttgcaccaccgcggtgacctcactcccgtcggcgctgtcgagcgtctccgccgccgcgccgaccagcaacacggtcgggatggacctgccacccgtgtcgctcgccgcgccggagatgcagtactggaatggcccggcggcgatgtcggtgccgtggccggacttgcccactcccaacggcgcgttcccatgagatagacgacggcgacgacgtcgtctcatgcaagcatgacattactagctagtgtagctctcgatcggtttagctttaatcatcatcgatcttgtgtggtttcggttaatcagtgtgaggactctgaggggtttaatcaagggtgttttagttactggtgtttttgttaatcagtggggatcgatcaagtaaccttttttactgtttacttattattaggtttttacctagggtttggtggtaactgggtatagtgtttaagtcgtgatcaatgcatagatggggttgtactatgagatgtgtacgtgtgttgtcggtttcgttcaggttgatccatgtatggatgtaaggtttacattccctgcaagctcgtggacgtacttatctcagctgc

SEQ ID NO: 6226 - DNA, 2098 bp, Oryza sativa
  ref <308>: DATABASE ACCESSION NUMBER: AK063381
  ref <309>: DATABASE ENTRY DATE: 2001-12-06
catcatcaggttacaaatgtgcagtggattttgatggagcaaaagatggagacattgctattgtgaacggtggagcagctaagaagacattcaagtttgacagagtctacatgccgacagacaatcaagctgatgtgtatgccgatgcatctccactggttacttcggtcttggatggctacaatgtgtgcatatttgcgtacggacaaacaggaacagggaagacttttaccatggaaggaactgagaggaacaggggagtaaattatagaactctggaggagttgttcaaaatcgcagaagagagaaaagagactgtcacatacagcatttctgtcagcgtgcttgaggtctacaatgagcaaatcagagacctgcttgcatcatccccttcgtctaagaagttggaaatcaaacaggcaagtgaagggtcccatcatgtccctggcattgtggaggccaaagttgagaacatcaaggaggtttgggatgtcttgcaagctggaagcaatgcaagggctgtaggatcaaacaatgtgaatgagcacagcagtcgctcccactgtatgctttgcatcatggtgagagcggagaacctgatgaatggagaatgtacaagaagtaagctttggcttgtagatttggctggaagtgaacgattagctaagaccgatgtgcaaggtgaaaggcttaaggaagcacaaaacattaacagatcactttctgctttgggtgatgtgatttcagctcttgcaacgaaaaattcccacattccctacaggaattcaaagttgacgcacttgctgcaagattctctaggaggggactcaaaagctttaatgtttgtgcaaattagcccatccaacaacgatgtgtcagaaactttgagctcattgaactttgcaagtcgtgttcgtcgtatagaattgggtccagcaaagaagcaggttgacactgcagaacttcaaaaggtcaaacagatgcttgaaagggctaaacaggatatcagacttaaggatgattccttgagaaagctggaagataactgccaaaatctagagaacaaagccaaagggaaagaacaattctacaaaaatttacaagaaaaggtaaaagagcttgaaagccagctggattctaagatgcattctcaaattacatcagagaaacagcagaatgagctttttgggaaactcaaggagaaagaagaaatgtgtactacccttcagcagaagatagcggaggaatcagagcataaacttagactccagcagcaatcagaatctgagataaaggagctggagctcaagttgaaggaacaagaacaccatcgatcagttgcagaatctaaggcaatggaaataggacaggagctcctggaaacacagagaacagaggctatgcttcagatcaagccaagagatcttgagaataacttgcaagaaaggacaacacttcaggacacaaacatgatacttgactcgaccaactgtatgagagttgctagtactcctggagaggcaaaggcgcacctcttgacaagagaggaagcaatgagcgagaaggagcagcacattctgagaagctcagattctatgaacaagaaagtcaccaacaattcttccattgttggggctccagaagttgtcaatgagaagaagaggaaaggagatgcaaggaattcatcgattggtggggaattggagaaccagcctgttggaagccagaatgcttcaaggaagaggagcctgcaaggtgagccaaggctgaagagaaaatcgaccgagccgctgaagaacccaggacgggtgacggcaacttcaaagacggccgctgccacacacaagacgggtcctgttaccagagccacaaggcagcaaccagccgtgaacaagacgagaggttgggtcaggtaggcagctgcttctgaacctgacattgccattgcacccaatatggcttgtagtatggtagaggctcaaacttttagctgagtcgcgctgcgtccttcgcagtggatagtagagcacgcattgtaacgtggagtgctgcgctcctgtgtaatctattattgactactatactatcttgcagattc

SEQ ID NO: 6227 - DNA, 2250 bp, Oryza sativa
  ref <308>: DATABASE ACCESSION NUMBER: AK063382
  ref <309>: DATABASE ENTRY DATE: 2001-12-06
atcgatctctccaacccacccgcccgccgcactatctccagctcttccatggcgatggcttgtcggtggttggtggtggttagctaacacgcggcatcttctcctccgtccattcgtccgtgtcagcgtgtgtgttgccggtgatggcgacggcggcggcggcgggagagggagggagtgggcggcggtactggcggtggagtaaggcggacttcttcccggagccgtcgttcgcgagctggcggtcctacggcggcgcgctcgcggccaccgtgccgcggctggttgaccgcgtggggagccgctcgtcggaggcggcggaggccggcacgctgcgcgccgtgagcgagaacccgctgcggcggtgcctgtcgtggctggacctcgcgttcctcgggttcggctccgtcgtcggctccggggtgttcgtgctcaccggccaggaggcgcgcttcgacgccggcccggcgatcccgctcgcgtacgccgcggcggggttctccgcgctgctgtcgtccttctgctacgccgagctcgccacggagatcccctccgcggggggctcgttctcgtacctccgcgtcgagctcggcgacatcgcggcgttcctcgccgccgggaacatactgctggaggccgtcgtcggggcggccgggcttgggaggtcgtggacgtcgtacctcgccgtgctcctcggccgcgacaccgactcgctccgcatccacgtcccggcgctcgccgaggggttcaatctgctcgaccccatcgccgtcgtggtgctcgtcagcacctccgcggtggccatgtccggggcgcgcctcacgtccacgctcaactcgctggcgtcggtggtcggcatcgccatcatcgcgttcgtgctggccgcggggttctcccacttcgacgccggcaacctcgcgccgtccttcttccccttcggcgccgcgggcgtgttccgcgcggcgggggtggtgtactggtcgtacaccgggttcgacatggtggccaccatggcggaggagaccaagaaccccggccgcgacgtgcccctggggctcatctcgtccatgtcctccatcaccgtcgtgtactgcctcatgtcgctggcgctggtcgggatgcagcggtacaccgagatcgacgccaacgccgcctactcggtggcgttcgccgcggccgggatgaggtgggcgcgctacgtggtggctctcggcgcgctcaaggggatgacgagcggcctcctcgtcggcgcgctggggcaggcgaggtacacgacgcagatcgcgcggacgcacatgatcccgccgtacttcgcgctcgtccacccgacgaccggcacgcccatctacgccaccgtcgccgtcacgctcggcgccgcctgcgtcgcgctcttctccagcctcgacgtgctcgcctccgtctcctccatcagcacgctcttcatcttcgcgctcgtcgccgtggcgctcctcgtccgccgctaccacgtcgcgggggcgacgacgccggggcagctgcgcaccttcctcgcgttcctcgcgctcgtcgtgctctcctccatcggcgtctcggcctactacaactcccggtacgcgcggcggtggccagggtacgcggcgttcggctgcgggtgggcggcgggggcggcggggctggcggcgtgcgcggagaagcagcgggcgccgcgggtgtacggcgcgccgctggtgccgtggctgccggccatgtccatcgccaccaacctcttcctgatggggtcgctgggcaccgcggcgtacgcccgcttcggcatctgcacggccgccatgctcgtctactacgtgctcttcggcgtgcacgccacctacgacgtcgcgcacgcggacgacgcggctgccgacaacctcgagcacggcaagatcgcggcggcgcccgcgcccacgacgccggcgtgacacaaggtgaacgtgttgattatagttgatggttagtcaaggagatggtcacattagtcattaattagtacgttctttgaattatcaggatacatttcacatttattaagtggccgatctagattttttttttcagagcattagcaagcacaattagaggggtcgaaaattgaaaccattaaaatggtgtgatccgccttatccacccatgcatttagttggaactctatgagcagaggtttttctttttccaattacatttagaaatgaaatgttttgtataaattaccgtgaaatttgttctgaaatctgtatt

SEQ ID NO: 6228 - DNA, 1673 bp, Oryza sativa
  ref <308>: DATABASE ACCESSION NUMBER: AK063383
  ref <309>: DATABASE ENTRY DATE: 2001-12-06
atcgatcgatagatcagctaatccctcgcataaatcctcgatccggccggccggcggcttaattcctaggttttcctcctcttcagttcttcctcatctagtccgtccgtccgttgtcttcttccaagatcccagacgatgcaagcctcatcggcggcggcggcggcggcgtgctcggctatcaagccggcggcgcatcagcacaccgtgcaagtccaggaagataagaggggatcggaattcagggctcggtttggaacgaggaaactgtcctggggaggtaaattgtcggtggaaaattctgctctacaccagtgtcaaagtctcacaagaagcataaggaggcaaaaaagacaacattctccagtcctccaagtgagatgctatgccattgctggtgatcagcacgaatccatcgccactgagtttgaagaaatttgcaaagaagttccccagaaactgggagctttttatcggttttgccgaccccacacaatttttggcactgaatcacttcagtttctctcctgccaatgaggagcctagatgattttactatgaaagcattatggggatttcttgaggctttatcctcttctttatgtatgaatatctatgttgtaggcctgaatcaactatatgacatccagattgataaggtcaataagcccagccttccgttggcgtcaggagaattttcagtggcaactggagcagtgttagtactcacgtccttgatcatgagcattgccattggaatcagatccaaatcagctcctttgttatgtgctttgtttatcagtttctttcttggaagtgcatactctgttgatgctccgttactccggtggaaaaggaacgcgtttctcgctgcatcttgtatactatttgtaagagctgtcttagttcagctagctttctttgcacatatgcagcaacatgttctgaagaggcccttggcaccaacaaagtcggtggttttcgcaacattattcatgtgttgcttttcttcagttatagctttattcaaggatattccagatattgatggtgacagacattttggcgtcgaatccctgagcgtacgtttgggtccagaaagagtgtattggctctgcataaacatactattaacagcatatggggctgccattttggctggagcatcatctacaaatctatgtcaaatgattatcaccgttttcggccatggcctgcttgcctttgcactttggcagagagcacagcactgtgacgttgaaaacaaggcgtggatcacatcattttacatgttcatttggaagttgttctacgctgagtatttccttataccatttgtgcagtgagcactatatacacaagggcaagaaatttttgaccatgcacatgagcaattatatgaaacttgctactgtgatggcagtctgtatccaatgctttggagtgtgctgcaatatatgcaaatgtggataaaggcaattaggagcatacagtttagagcatatactgtacctatgtagctgctgacctttgagtaactgttgtttggagaagccatctcgtatcattgggttttttttctttgttgggctatctggctggtgagctgcatgtcaaagaggaagaaatactgacggtgggtgatttgaaatgcttcccagtattcatgtgtc

SEQ ID NO: 6229 - DNA, 2501 bp, Oryza sativa
  ref <308>: DATABASE ACCESSION NUMBER: AK063384
  ref <309>: DATABASE ENTRY DATE: 2001-12-06
ggactctttctctctcattccacttcttgctcgccgccgccgccgccgccgccgccggcgaaggggatcgatcggatggggacgtcggtgcaggtgactccgttgagtggcgcgtacggtgagggacccctctgctacctgctcgccgtcgatggcttccgcttcctcctcgactgcggctggaccgacctctgcgacccctcccacctccaacccctcgccaaggttgcaccaacaatagatgcagttcttttgtctcatgccgataccatgcatctaggagctttgccatatgctatgaaacatctcggactatctgcaccagtatatgccacagaacctgtatttagacttggcattttaaccttgtatgattactttatatcacgacggcaagtttcagattttgacttgtttactttggacgatattgatgctgcattccaaaatgttgttagattgaagtactcacagaaccaccttttgaatgataaaggtgaaggaatagttattgctccacatgttgctgggcatgatttgggtggcacggtatggaagataacaaaagatggggaggatgttgtttatgctgttgacttcaaccatcgtaaagagaggcatttgaatggtactgctcttggatcatttgtacggccagctgttctgataactgatgcatacaatgccttgaacaaccatgtctacaaaaggcagcaggatcaagatttcattgatgcattagtgaaagttctaactggtggtggtagtgtgttactgccgattgatacagctggtagagttcttgaaattcttttgatattggagcagtactgggctcaacggcatttgatctaccctatctactttctgacaaatgtttctacgagtactgttgattatgtcaagagttttcttgaatggatgaatgattcaatctcaaagtcttttgaacacactagagacaatgccttcctattaaaatgtgttacacagataataaacaaagatgagcttgaaaagctgggagatgcaccaaaggtggttctagcatccatggcaagcttggaggttggcttttctcatgacatatttgttgatatggcaaatgaagcaaagaatctagtactttttactgagaagggacagtttgggacactagctcgcatgctccaagtagatccacctccaaaagctgtaaaggtcactatgagcaagcgaattcctttagttggtgatgagctgaaagcttacgaagaagaacaagaacggataaaaaaggaggaagcgctaaaggccagtctaaacaaagaggaggaaaagaaggcgtctcttggatcaaacgcaaaggcttctgatcccatggttattgatgccagcacatctcgcaaaccatccaacgctggttcaaagtttggcgggaatatggatattctcattgatggatttgtccctccatcatcaagtgttgctccaatgtttcctttctttgaaaatacttctgaatgggatgacttcggtgaggttatcaaccctgaagactatctgatgaagcaagaagaaatggataatactttgatgcccggtgctggggatggtatggatagtatgcttgatgagggctcagcacgcctactccttgattctacaccctcaaaagttatttccaacgagatgactgtgcaagtcaagtgttcattagcatatatggactttgaaggtcggtctgatgggcgctctgtaaaatctgttattgctcatgtggccccattaaaacttgttttggttcatggatcagcagaagctactgagcatttaaaaatgcattgttcgaagaactcagacttgcatgtttatgctcctcagatagaagaaactattgatgtgacatcagatttatgtgcttacaaggtacaactttcggagaagttaatgagtaatgttatttctaagaagttgggtgagcatgaaattgcatgggtagatgcagaggttggaaaaacagatgacaagcttactttgttgcccccgtcgtcaactccagcagcccacaagtcagttcttgtgggtgatttgaaattggctgattttaagcaattcctggcaaataaaggtttgcaggttgaatttgctggtggtgctttacggtgtggtgaatacatcacactgcgcaagattggtgatgctggccaaaagggcagcacaggttcccagcagattgtgatcgaagggcccctgtgtgaggactattacaagattcgtgagcttctttactctcagttctacttgttgtaaaatgtaatggaccggaccatggcatctctttcctttcgtgttgatgttgttgtacacggaggaaccgttaatccatttggatctgagcgccagaatatgctgtttgttgctctcccgagatccctttttagttttagttagcttattttagagagtagtagacccaagaggtgtgttgatgagacaatttcaatatatatgctttttgt

SEQ ID NO: 6230 - DNA, 1577 bp, Oryza sativa
  ref <308>: DATABASE ACCESSION NUMBER: AK063385
  ref <309>: DATABASE ENTRY DATE: 2001-12-06
gagtcgagccgcggcgaggcgacgaactcatcacctccactctctgctgcaacacgagtgaatcggaggcggcacgatgcgcaagtgggcgctctcctccgcgctcctcctcctcctcctcctcctcaccacactccccgatccagctaagaagctccaagtcaatgctgatgacagcactgatgagttagttgatccgccgaaggtagaggagaagattggtggtgttccccatggcctgtccacggactctgaggttgttcagagggaggctgagtcaatctcgaggaagaccctcaggagctcagcggagaaatttgagttccaggctgaggtgtccagactcatggacatcatcatcaactcactctacagcaacaaggacattttcctgagggagctcatctccaatgcttctgatgctttggacaagattaggttcctggctctcactgataaggaggttttgggcgaaggtgacactgctaagcttgaaatccagattaagctggataaggagaagaagattctctccattcgggataggggtattggtatgaccaaggaagatctcattaagaaccttgggaccattgccaaatctggaacttcagcttttgtggaaaagatgcagactgggggtgacctcaatctcattgggcaattcggtgttggtttctattcagtatacttggttgctgactatgttgaagtgatcagcaagcacaatgacgacaaacagcatgtctgggagtccaaagctgatggatcattcgctatctctgaggatacatggaatgaacccctgggccgtggaactgaaataagactgcacctccgagatgaagccaaggagtacgtggaagaagacaagctaaaggatttggtgaagaagtactctgagttcatcaatttccccatttacttgtgggcaaccaaggaggttgatgtggaagtgccagctgatgaggatgagtcaagtgaatcaagtgaagaagaggaatcatcccctgagtctacagaggaagaagagacagaagagaatgaagagaagaagcccaagacaaagacagtaaaggaaaccactactgagtgggagcttctgaatgatgtgaaggctatatggcttcgtagccctaaggaggttactgaagaagaatacacaaagttttaccactcacttgctaaggactttggtgatgacaagcccttgtcttggagccacttcactgctgagggagatgttgagttcaaagctttgctctttgttcctcccaaggctccacatgatctctatgagagttactacaactctaacaagtcaaaccttaagttgtatgttagaagggttttcatctctgatgaatttgatgagcttcttccgaagtatctcagctttttgaagggtctcgtcgactcggacacattgcctctcaatgtatcacgagaaatgctccaacaacatagcagcctgaagaccatcaagaagaaactaatccgcaaagctcttgacatgattagaaaacttgctgaggaagatcctgatgagtacagcaacaaagataagacagatgaag

SEQ ID NO: 6231 - DNA, 2760 bp, Oryza sativa
  ref <308>: DATABASE ACCESSION NUMBER: AK063386
  ref <309>: DATABASE ENTRY DATE: 2001-12-06
taattgctggaggggaaagagagagagagagtttgcgtcgatgcggatggcagcgggagggaggtgctgcttccggagaggggctcccgcggcggtgctcgtgctgccgctgctgctgctgatcgccgcggcggcattgccccggcgggcgctcgcggccaccgtcgccgccgatgttgctgctataaatggactgtatgttgcacttggatcaccggctcttcctaaatggactgcgaatggtggtgacccctgtggtgatggttggcagggcgttgtatgtattggctcaaatatagattcaataattttcaatgctgcaaatttggaaggacagttaggcagcctggggaacttcacttcaataaccactataaatcttagcaacaacaatattggtggaactataccagaagatctacctgttacactgcagcatttttttatgtctgataaccagctcactggaagcattccgacgtcactatcaatgcttcagagtttaacagacatgtctctaaatgataatcatctcgacggaaaactgccagatgcttttggttcccttactggccttgtaaattttgatatttcatccaataacttcagtggttcattaccaccttctctgggaagcctgtcatcattgactacattgcacatgcaagacaaccaactatccggaacccttgatgtcttgcaggatctccccctcaaagatttaaatatagagaataatttgttttctggaccggttcctccaaagttgctgaatgtgccaaacttcaaaaaggatgggaacccatttaataccagcatagctccttctgcatcaccctcttcaacacctacaggctctacaccaacacaaacaccatcgtcaccttcatcttctggaactccttcgccatctagttcgccctctaattcttctggtggatctactgctcgagacagcagctctccatcatctaggaaacataagtcttcaaccctcaggattgttggatatgttcttctagctattgtcctgtttatagttacagtgctgctggtaatattttgcctgtccaagtaccaagagagacagtcaagacgtgattatacaacaagtcaggtggggagggttcatcagagggttgaagagccgaaagttaagcaagcttcagtgcagtcaaggaatgatgccaaaaaaggatcaacagaggttcctgaacggaggcaggttcgtgaaataaatttggcggtaccagctgctctcgagaagcctcctgaaaagagaaaagaacatgtaattaacttgcagcgatcagaaacagaaatttttgcttctacacctccgccgccgccgcctccaccaccaccacctcctcctcctcctccgacaccaccaccgccaccgccgcggccgccgccgccgccgccaccaccaccacctgttgaaaaagtgattgtaaatcccattgttaagccagagaaaagagttagtactccacctaggacaggtccctcgacatctgcaacatccttttctgttgcatcacttcagcaatatacaaatagttttgaagagggaaatttgataagagagagtaggttgggaaaagtatatctggcagaacttcctgaaggcaggttcttggaagttatgaagattgataacgccaatgatagaataccggtagatgaatttctagaactggttgcaagtgtatcagatattaggcatcccaacatcctcgagcttgttggatactgtgcagaatatggtcagaggttacttgtttataatcatttcagtagaaaaacactgcatgatgtactacatgaaggggaggaattggatggtgcactatcatggaatgctcgcctccaagttgctcttggtgcagcaaaggccttagactatctacatgagagctgtgaacctccagtagtgcaccagaattttgagccagccaatgtgctccttggtaatggattctcagtacgtgtcgctgaatgtggactggcagaattgacgctgtcaggttctgttacacagttgtcaggtcgcatgagggcactgctgaattatgaagctcctgaaatccatgaagctgggacttttacctaccgaagtgatgtttacagttttggcgtggtaatgctagaacttctcactggccgtaaaccatatgacagttctcgtcctcgtgctgaacaacatcttgttagatgggctgattctcaatttcatgacattgagtccatatcaaagatggttgatccttctattcaaggagagtgttctgagaaagtactgtcacgttttgcagacatcatcagccgttgtattcggccggaaccagaattcagaccatcaatgtcagagattgtccaagacctagctaggattataagtgttaccagtgaggaatcagagtaacgaagagatcaaggtggggccgtacatctaggaagccagctctcgcagctatcaaaaatattcagaggaaacacaatcatttctgtggagcatcctttcagtatttataatggacagcattgtcctttagtgtacatgttgattctggagccgcatttacctgttgaaaggtggtagtggtacagccaggggaacatgggccttctcattatgggccaagtagattcctgtacttcctagacattatcaaattgcatgtatatcttataatccattctaattttgattattttattacattaaaattagcgatgttcatatggtgttagcat

SEQ ID NO: 6232 - DNA, 2477 bp, Oryza sativa
  ref <308>: DATABASE ACCESSION NUMBER: AK063387
  ref <309>: DATABASE ENTRY DATE: 2001-12-06
atgaggtcctctcgaacccagccgacgaacgagcttgtgcgccttggctcctaacgccgccggctggccggccgccggcggcggcggcggaggagaagcccaggctgttgacgacggcgcgacgacggcgccggcgcagatccacgtcggtcatgtcgcagacaaccgcacccatgtcccgccgccgtctctcctccatcctcgccagcaccgccaccgcctcctccacggcggcgtcgaccaccaccgcggcgacggcatcgccggcacgcccatcccctcccgcccacgccgcgttccgggagcgtctgcggtcgggaacgctcggtcccgacgacgcgcgccacctgttcgacgaattgctgcttcgccgcgacgcccccgcccccgcgcgaggcctcaacgagctcctctccgcgctcgcccgcgcgccgccctccgccgcctgcagggacgtcccagccctcgccgtcgagctgttcaaacggatggaccggtgcgcctgccccgaggccgctcccaccatctacacctacaacatcctcatcaactgctaccgccgcgcgcgccgccccgacctcgggctccccgtcttcggccgcttgctcaggacgggcctggggccggatgtgttctcgtacaacgcgctcatcgacggattctctaaggagggcgaggtggacaaagctcacgacctgttctacaagatggaagaacagggcatcatgccaaatgtggtgacttacagctcgctgatcaatgggctgtgcaagacgaaagaaatggacaaggccgagagggttctacgacagatggtcggcgctggtgttcggcctaataatatgacttacaactgcttgatccatggatactccacttcaggaatgtggaaggagtcggtcagagtgttcaaagagatgtcgagctcccttctcgtaccggatgtcggcaattgtaactccttcatgactgctctttgcaagcatggtagaatcaaagaagcaagagatattttcgattcgatggttctgaagggccccaaacctgatgttatctcctatggtgctctgcttcatggttatgctactgcgggatgcatagctggaatggataatctctttaatgtgatggtatgtgaaggcgtcgtacctgaccgtcatgttttcaacacactgattaatgcatatgctagattggggatgatggataagtccctgctcatgtttgaagatatgacgaagcaaggcgtgaaccctgatataatcacattttcaactgtgatatccgctttttgcagactgggtaggttggatgatgctatggaaaaattcaatcacatgattgatactggtgtacctccggacacagctgtttacagttgtctgattcagggtcaatgtaatcgtcgtgatttggtgaaagccaaggaattgatttctgatatgttgagcaagggcattcctcctccttgcatcaagttcttcacctcgattataaacaacctatgtaaggaaggaagggtagcggaagggaaagatgtcgtggacttgattatacataccggtcagaggcctaatcttattacgttcaattcactggtagatggatattgcttagttggcaatatgaaggaagctgttggattacttgattctatggagtcggttggtgttgaacctgacatttatacatataacacacttgttgatggttattgtaaacatggaaggattgacgacgcgttgactctattcagagatatgttgcacaagagagtgacacttacaagtgtttcatacaacatcattctccatgggttatttcaagctaggaggacaattgttgcaaaggaaatgttccatgagatgattgaaagtggaatggccgtgagcattcacacatatgctactgttcttggaggactttgtagaaataactgcaccgatgaagctaacatgctgttggagaaattgttttctatgaatgttaagtttgatatccttactttcaatattgtgattagagcaatgttcaaagttggcagaaggcaagaagctaaggaattgtttgctgctatctctacctatgggttggtgcctactatacttacctatagggtgatgataacaaatcttataaaagaggaatcattcgaagatgctgacaatcttttttcatcaatggagaagagtagctgtactcctgactctcgcatattaaatgagatcattagaatgttactcaataaaggtgaggttgccaaggctggaaattatttgtctaaaattgataagaagggtatcttgcctgaagctacaaccacttccttgttaatttatctattttcagtgaatgggaaatatcgagaatacataaaattgctccctgaaaagtatcgttttctaagggagcaagctgcagttgataattgtatctgaatttaaatcctcagaaggtaaacttgaattgtcttttct

SEQ ID NO: 6233 - DNA, 1823 bp, Oryza sativa
  ref <308>: DATABASE ACCESSION NUMBER: AK063388
  ref <309>: DATABASE ENTRY DATE: 2001-12-06
atccatcccgcgagcgggcatgggcgccgtcgttcgtcctgctgcttccgcggcatcctggtgggcacatcctctgcctccaccgccgtctgcgccgatccccatccatcccgcgagcgagcaggggcgctgttgttcgtcctgctgcttccgccgcatcctggtgagcacatcctcggccgccgccgccgcctgcgccgatccccatccatcccgcgagcgagcagggacgccgtcgttcgccctgctgctgcttccgccgcatcctgatcaccgatttgaaaatcgccgctgatggaagggatgctgccatctgatcctccgggcagtgatgatgatggaaatggaacgaacatgtggacaggacagaaggacaagctggccctagacccttgtgtttccggtgacaccaatgagaatgcacatgcctgcacctcattgacagctgtgcatcaggttcttgaagaatctaccaacaatactgtgcatgctatggacatgggcgtagttacaaggcaagatgatccgctgaaagcctcagaagaagatatcaatcaacacaaagatgaacaagagctttggggcccaaacgtgcaaactagccaggacgactactttgattacgtcaagcagttgtctcccaacagtcgtcgcatagacaaatggtccttgctgagtcatgacgaaatgattgaggttaaggagcggcatgcacgctatcgcatcagattttgcaagatgctaaacaaagaatttgaggatacgatgaaggatccagcagagtactctcgaggcgaactgttgaaggagaattactttttgcgatatgagcgggatgaaactcttggttggtacttccatcctgtccacacctggcttgcaggcttgaatgactaccagaagctcgtcctcgtaaatcatgatgatagcactgaattccttgccagggatgactaccactcatgttttaatacatatgaagttgatgaggattatgtcaaatattgtgaagaactaccaaagaaaatcaagtggattggagactatgtagatttggatcggtcttctcaggagtggtcaaaaatggacaacactacgtttttccaagcgttaaagattgcaacaaacttttgccatatgactgttggtttagcccaatttgcatacatggagtatgtatgggacctgcgtgaaattagtcgccttaaggaatggccttatttcttacatgagatttggaagctagttgctaagcaaaagatgaatttcaatgatgctttgaaggtagtctatgaaatggatatgtttcatagtttcaaatttgcagtggaggctgaactaaatggggacaaattgtttggattggaatataggttctctatgtgctctaaggatatttctggtgatgttgaagagggtaaagctctagatttgattacaaaggcagtttacagagaatttcatcacactcagaccatgtgtgggtatgcggcgaagaagatggatatggcgaaaaagattggtttggtctagctggtatgttattctcaatttcttataaagttaatgctactagcgtgggacgcgcgctgcacccgtggcattaaaaatggcagtctgtgattagttttgactaatatgattgggagaatttgctattgtaattattttttttagtgtagtgaggaaagaagtgttctgttgtgatgtatataagtcaatagttctgcaaggtatgaggggccaatttacatcatgaaatgaagtagtatgaaaaataaaaagcgttataagcgggaataaagattccaagtttctaggcc

SEQ ID NO: 6234 - DNA, 1771 bp, Oryza sativa
  ref <308>: DATABASE ACCESSION NUMBER: AK063389
  ref <309>: DATABASE ENTRY DATE: 2001-12-06
ttaagagcagtacaacgcgcatatatataccttgttcttggcaactcttgagcccactagatggttataataattacttaacaagatatcaatttattaactactaacagggagtcagggatgcaggggaggggcagggagtaaaacagagcagtagaggaaggagtttagtagatgaaatgtagaggagagagaggaaagaccacaacatagtactctctccgtccctaaatatttgacgccgttgactttttgaaatatgtttgacagttagtcttattcaaaaaatttaagtaattattaattcttttcctatcattgattcattgttaaatatactactactactcaagtttttgaataatattcacaaaagtttttgaataagacgaatggtcaaacatgtttaaaaaagtcaacggcgtcaaatatttagggacaaagggagtggcaaaagagggagaagagtacataggatgtagaagaggggggaggaaacaccaaaacagagcagcagaggaaggataagagcagagcagaggaaggtgcaaagcaggatcacgtagagcagagaaagaaacagaggaaagtagagggtggagggaagagaaagaagagcatgcccgcttagtttttgtgtcaatggaggaccaggatgatggcgcaggtgccgaggaccaggatgatggcgcaggcacaggataggcacatgtgacagctgggattgccgctagggatggagaagtcaccagggatggatcgccatcgccacagcctcaggctccagcgaccctctttctgttgttttctccctgatttggtgggatttggtgcgtggggaccttttcacccctaagattggcgcttctgttagttctgtttcgtgcccagggccgcaccaatttttttgggcccttcaaccaatcgcggcaaaaactgcgccttcaacttcctctggcgtcgcctttaaccgttgtagcacctaaggacgtgatatcgacgtcatagcgacgccttgggcataaggcggacgccataaacaatatggtaaggcgggctagacgcagtgactcctggcactggcagcgccttacctccatagcgacgctatggcgacgccttgacacttaattttggattttttttaactgtagtacaaaatacaagttattataaaatcccaactaaattgattgagttaaattgggttttggttgacttacgaagttatggtcatccattggattgttgccaggtagtcagctgattgtgtatatgactcaactatacattttgtttgttggtatcagtatatgatactatcacttattgtgtcctttagatgtcaatctgcatttttactctgtccgttgcagcacacttacttttctttctttatttgtatatactcatctctattgaatccttgctagatggtatttgctataggcctggacctcattattctattttccaggatttttcatggacccgggaaaacacaatggaatgagtctgaaggacagaagagaattagtatatgaagtttcacaatggccacaaggtgcctctgagattttacaatgttggactcgcagagatcttcttgagcttatctgtgctgagttgggcaaggagaggaaatacactaatgttccaaaatctaaaatgattgcttatctgttaaaattagttttacgaaagaatggacagccaaaggatgataatgcaaatgcttcaattttggggcagaataacaaagatgacacag

SEQ ID NO: 6235 - DNA, 1576 bp, Oryza sativa
  ref <308>: DATABASE ACCESSION NUMBER: AK063390
  ref <309>: DATABASE ENTRY DATE: 2001-12-06
actgcaagtctgcgaccaatctgacacccatgccgttgtgctgctgctgctactcgtggctcaggtagccggcgacgaaggtcagctccttggcggacttggggctcgagggcttgtcgaggaagtagacgtgcacctcgccggcggtctcgtactcctccacctcgccgccccacccgctgtcgcggagcgccgccgcgtacgccttcccgcgctccttgaagtcgtcgaggtcggacaccgtcacggccacgcgcgagcacgccagcttccgccactccggcgccggcatggacagcgggtccaccagcgggtcgtcgatgccgtacttgccgtcgcagatgaacgaccacgtcgcctcgtactggcgccgcctcgccgggtccgtggtctccgcgcccacggggttcttgccccagaagtaggggtcgaggaggaggatgccggtgatggccacgccgccctcaagctgccccccgtccttcccggcgcgcatcgccatgttgtgcgcgatgttggcgccggcgctgtcgccggcgaggaacaggcgggacatgttcccgcggtcccgcagccacggctccggcccggacctgccgttcttggccacccagttcagcgcctgccacgagtcgtcgtacgccgtcggcaccgggtgctccggcgcgaggcggtagtccacggacaccgccacgacgcgcgccttcgccgtgaccttgttcaggtagtcgtggtacttggccgtgaacgccgactcgatgacgaacgcgccgccgtggaagaacacaagaacgggcagcgcgccggcaaggtccttcttccccgcacctttcgccggcggtaggtacatccgggcgccgacgccggtgctccggtcgatgacgacgtccttggacgtcaccccggtggcctcgtcgacgccggcggggacgcggtccgtcccatccatccggtggacgcgcccactcttgtacagtataaggaacggcgagaaatcaaacgccacgatgttgtcggggtcggaggcgttcaccggcggcgaccccggcggcaacggcctccgatggtgacgcgggagcaagaacaccaacagcaagatagcagcaagaagcagcagcagcgcgagcagaagcaaaccaagcttagcgaggagtgagaggccgccgatctgtcgcttgatcttggcgaccatgatcgatggcaactgctccaataaccacactgacaacgatcagattggaagctggagaggaagaaaacagccacaattctgcgagtttggtggctgattagctcaatctgaataaatagcgcctggtagggagaacagatagaaaattgcgaggtttgaggttgaggacgacgctttttggtggggagatgccacaaggaggacctaggaatgtgagcatgacggagacccttgctttgctttggtttggtggtccgtggtgttgtggtggatcacggcatcccgacggggactcggggaagacaccagctcgtgctgggtactgatttgtctagcgtttctgcgttgacaaatattgggatgaatgaattgcttctttcatgt

SEQ ID NO: 6236 - DNA, 2272 bp, Oryza sativa
  ref <308>: DATABASE ACCESSION NUMBER: AK063391
  ref <309>: DATABASE ENTRY DATE: 2001-12-06
gcgtgtcgacgtgtcctactcatccacgccacgtaaccaattccatctccggccgccgccgatggcctcgcgctcccggtggtcggcgctggcggcgagcgcgctcatccagtgcttcgcggggagctcctactgcttcgccgtctactccccggcgctcaaggcctcccagtcctacgaccagtccgccctcgacaaggtcgccttcttcaaggacgtcggcgccaacgccggcatcctctccggcctcctcgccgcatgggcccccgccggccgccgccgcccctggctcgtcctcctcgccggcgccgccctctgcgccgtcggctacctccccatctggctcgccgtcacgggggtcgccccggcgccgctccctctcctctgcctctacatgctgctcgccgcgcaggcgcagaccttcctcaacaccgccgatgtcgtcaccgccgtcgagaatttccccgatcgacgaggcaccgtcatcggcatcatgaagggctttctgggattaagtggagcaatactggtccaagtataccgcaccatccacattgctcccagcactttcatactgatgttggcgatattgcccactgccatcaccctgctgcttatgtattttgtcgatgtccaccgttctgatcatcaacggtacaacaagaagttcatggatgctttctccctcattgccattactgttgctggttatctaatgatcatcataatctgtgaccaagtattgaagataataagttcagctgtgcagactgtttgctttgtgatactcctactgttggtcctgtctccagtggctattgctgtgaaggcccagaagacagaatcaatgaagcaagaagaagaaaccagggatcaagctgaaagaatcggactactccaagagcaaattagtacaaatgccagctccagtagcgatgagcgatgtcaagaactgtcgacaggcaaagaaaacatgaatctggtgcaggcaatgtgcaagctgaacttctggctgctgttcctagcaatgtcctgtgggatgggatcagggcttgcaacggtgaacaacatcagccagatcggcggctccctcgggtactcgaccaaggagacgagcacactggtgtcactctggagcatctggaacttctcagggaggtttggtgccggctacatatccgaccacttcctccgttcgcggggagtcggtcgccctttcttcatcggcgtcacgctcctggtcatgagcttgggccacgccatcatcgcctccggcatcctggcgtcgctctacgtcgggtcggtgctcgtcggtctttgctatgggtgtcagtgggcactgatgccgagcatcacgtcggagatattcgggctgaaccatttcggcaccatcttcaacgtggtggcggtggcgagccccgtgggatcttacatcctctcggtgagggtggtgggttacatctacgacatggagtcgccgccgggagctcgtgcctgctccggtaaccattgcttcgttttgtcgttcgtcatcatggcgtgtgtctgcgtggttggctctgctgtcgccttcatgctcttcgtcaggacgaggaggttttataaacgggttgtgtacgccaggttgcaatcttttctatagagagagaaacgaaccgattcttttctagcaaatgcttacctatcttttacaagcaacaggatttgatctgtacctgtacgtcagagaatggtagaaagcagaggcacactactttctgctgccatttttttcttgttgaaaagacatcattggactggtcactggtgttatatactactagtacttgtatgtatgcgtagaagtaaaaggaaaataaaacaatgtacagggaagaagctacagaaaacaaacagcatttgcttcgtcagaaaattatagcagagctgacttaacacaaagaaatcagttcgtgcaaccagctggctggggtaattttttcaagggaataggcttggagagctctgccttttatgctgattcagaaagtagagaatagttcagttctaagcacatgaaagctacattgttacagagtggatttgtcagctgacaactgtatataccagctgctttgcccctcgccggatgcggtacaggaggaaaaggcccaggccacagcgagagaaaaggcccagctacaagtatgcaggtccaaaatgggctctgtaatatgggccaaggccgggaaagtgaattcatctaaatagtcatgtcacctaaatagtcatc

SEQ ID NO: 6237 - DNA, 2592 bp, Oryza sativa
  ref <308>: DATABASE ACCESSION NUMBER: AK063392
  ref <309>: DATABASE ENTRY DATE: 2001-12-06
ttatgcaagataaccatgaattgctttgctgtttgcgaaaaaaattggatgaggaggacagggggacaaatcctcctaacatgcaagatgatgcagtgactcctacagttactgattccatttttggtggtcagctgtcttctcacatatcgtgtaaatgttgctcatttagttcagtttcacatgttgcattccatgatctctcggtgccccttccaccaactcaatccaaaagtattgcatctccaccgaggactaaaggatataaatctcaacagaagatccatgctgaactagaagttgacaagcgtaacccagaaaagattcatactattgctgaagacagtgattctcaaagtccttcagaattggaagatgtggtattggtgaaaacttctgagcctttgaaagttggtaagtttatgtgctcctgtgcctaatgaaaggaaaggaaaacaatgttcaacattcctgcaacattttttttaacagtgcctgcaacatgttgggtgtctcagaacatggaatttttcttgagtgaatgcagaaaactctgatattaccacaattatttgttagtttttgctcaatataagaaaaagggcatttttcggaaagagttaatggcttgactgttaaatatactacagaaatattagaacctgcaggatgtttctgcaattatagcatgtcatagctgtatgttacagtgcagtagttattcttgccactggaagatagctctaggtttttgagttctccttgtcttcatataataaattttgctccaaattgttggttaacttaaagtacacagaaatccttgaagaaaagaagtttcaaataatcaaatatagaggataaagactgtatttcagaccatgtagagaatgatggttgctgatttcatgaagatactgatgaggacaaaaaaaattatatgcttgattctgcagattctactaaagttgaacagatctttcatagcaaggatgctgtatgtcgccctttgcagactcagaaggataaggtccaaggggagactgttgatttccttcctcaaaacatgttacctgatgtcaaagttgaggaaatggatttgacaaaaacagatgcccatgttccagaagatatagggccttcactaaggaaagagaatgcatggatagaatcaggaagtgatgtagggaaaaatgtcagtgctgttcttgatgatgtgttcagtgagccagaagttagttcagaagccaagactgacactttctcagtagaagttaggaaaagtcggagtagtgacatttcttgcgataacgcgcagggtatcaactctcttgcatcaatagacaagtatttggaattgcattttgaagcagagatggtagaatggacttgtgagagttgctccaaggttgctcagaagccaggcatcaatctaggtaaatacagtaatcctatgatgtcaagtaccaatgaggacataacagttgatggagaccagagtgaactgtcagagaagataacatgccgaagcgagcaatccaacggaagacctgaatgccatgaaggtgttcaagaagctgaacctagttgcattccagctgagaaacaggccaacctgttgagcggccaggatcaaaatgccagcatactaagtgaggaaaggggggagcaagtaaagcttcatcatggtgcacaccaagtggaagaaaaccaaaatgagcagaaagattggaataaaggtggaattaaaaaacattttattagcaagctgccacctgtattagtcattcatctgatgagatctttgttgggacctcataaggtgataggacatgtgagatttaaggagatccttgatatgggtctgtttatggaccccagttcagaagacaaagataatctcagctatcgtctagttggtgttgttgagcaccgcggccttggcaacgatgcagggcacttccttgcttatgtgagagcaagtcctcggcaggagaccagtggctcctcctcatggtttcgtgcaagtgatgacagcatcagagaagtctctttagaagaagttctcaagtgcgaggcttatcttcttttctatgagaggatggaaaactgagatgtccagaattcaactaatcagaatagcaatcacaaaggaagcaggtgtgccagattgtcaagcgttctttggacgaccaagaatccaattctaatcaggttaatttggctgagtcatttcagggcttcaatttgatcgcgacatgggcatgctaagggatttcagttgttcttgaccatctgatctgcttacatgcatgcatatccatcctttttatgttatgaatgcgttaggattccatttgaaaacagaaattagtatagttggacatatagcgttagagaattgaacaaggttactatataggcacaggtaacagttacacccctggtacagtttttgtggatgttgctgttatttgcaattactttacagtactatagagaaatggaacatttactttgaaatttgcctcaatatttttgtgatggcaagatacatcatatgcaagatgatacaaacttgaaccttgaaat

SEQ ID NO: 6238 - DNA, 1312 bp, Oryza sativa
  ref <308>: DATABASE ACCESSION NUMBER: AK063393
  ref <309>: DATABASE ENTRY DATE: 2001-12-06
gttttctcgatctctccacaactccccccccccctccagctctctccaaagtccaagtctctctcggtgctcacgccgccgccggccaccgccgccccccgtccgtacaccgcgtggcccgcccccgcgcaggtgagggagctagcggccttcgtctgccggcgccggaggcggagccagattgttgggaaacgagttttccgcccgcttctctggtttctcggcggtgtcttttactcctggggcggcgatcccgacgcggggatgcggcgggctgtggcgtgatgtgtggatcggagcatggacttgatcgcgtcgcacggtaggagctgcagcggtcggggtgggagcaggggtcgcgcggcggggtgcggccatgacgatttacatagcgcgggaggcttccaaggtatggaggaaggtgaccacggagacgtcggtggagctctcgctgctgcgcgagaagtggggattgctcctcgccggaattgtgtttcagtatattcatgggctggctgctcgaggagtgcattacttgcatcgacctggtccacttctgcaggaccttggatttatggcccttccagagtttgggcaagacaaaggttatctaagtgagagcatatttgcttccatcttcgcttcctttgttttatggacttttcatctcacatgatttttactcttgtttttgttcgaacataccacaaatatggttcaaaaaggtttgttaagcttcttgcttggttcatggccatagttcagagtcttcttataattgcttctcgcaaacactactctgtggatgttgttgttgcttggtataccgttaatttagtcgtattcttcgtggacaacaaactcccagaaatgccggatcgtacaaatggagtacctttgcttccattgagtaccagggaaaaggatggcaggttgaaggaggagaaagacagcagactgaaggaagagttccataagctattaaacggaaaccatggggatcctactgatcgggtattgtagaagtcttctccctatatactccctgaacaagcctagcttagtacagtcagcctgtctattagatgaacttgcctatactttatactatgctggatcctactttctccgtcccaaaataaacaaacatattatgagatgcgataacctgctcagatcattatactagaatacgtcacatctcatgatttgtttattgagacggagcgagtactactaaatttgtttacaacccttgctagtttaattactccctccatcctaataatatactacctccgtcccaaaatgt

SEQ ID NO: 6239 - DNA, 2476 bp, Oryza sativa
  ref <308>: DATABASE ACCESSION NUMBER: AK063394
  ref <309>: DATABASE ENTRY DATE: 2001-12-06
gtcgatgcagaacaggcggcgatctcgtccggtggtacctactccgatggctcgcgtccgccaccgccatctcctcttgctcgtcgccgccgtcgccgccgccgcctccgcgctcctcccgtgcgcctccgcggtccgcccgttcgtgctcgtcctctcccgtgacgacttcctcaaggacaccgccggcgcgcatccctccctcccatcagccgacgccgactccgacgagtgggacgacttcgacgacgagtcccccgccaccgaccccctcctctccccgtcctcctgggtccccctcctcgaccccgccagcgcctccccttcgggcgacgagccggactcgccgtccgatgcgctcttcgtcgctggcgtgcgggcgatgctctccgcggcctcggcgggggatgacgcggcgttcgccaccgcagcggcgcagatcgaggccgcagctacgggggggcaccccggcgcgcagtccgctctcgcgttcctctccggcgcagggatgacgcgcccggcgtcccgctcgcgcgccttcctgcttcacaaattcgccgccgacgcaggagacctccagtctaagatggctctcgcctactccttcttccgccaggagatgtatgaagaagcagtcacactttatgctgaacttgcagaggctgcgcttacaagctccttgatctcgaaggagcctccagtgattgaaccagtcaggttacacagtgggaccgaagaaaacaaggaagccttgaggaagtctcgaggcgaggatgatgaagattttcaaatcacagagtaccaggcacaacgaggcaatactgttgcaatgcacaaattagggcttctgtattactatggcctacgaggagttagacgtgattatgggaaagcatatcattggttttcaaaggctgtggagaaaggcgatacacgggcaatggagcttctcggagagatctatgctagaggtgctggagttgaaaggaactacactgaagcatacaagtggttgacacttgcagcaaagcagcaacaatactcagcttacaatggactgggttatctctatgtcaaaggttatggggttgagaagaaaaacttgacaaaagcaaaggaattttttgaaattgcagctgagcataaggaacatgggggttattataaccttggcgtcttgtatctcaagggtattggagtaaagagggatgtgatgacagcatgcaatttctttcttcgagcagttaatgctgggcaaccaaaagctatttatcaagtggcaaagttgttccagaaaggtgttggtcttaagaggaatctccaaatggcggcagtgatgtacaaatctgttgctgagaggggcccctggagctcactttctagatgggctctggaatcttatttgaaaggtgacatagggaaagcattactcctgtattctagaatggcggatcttggatatgaggttgcacaaagcaatgctgcctggattcttgataggtatggcgatgaaagtatttgcatgggagaatctggcttctgtacagatatggaaagacatctccgtgcacatgctctgtggtggcaagcatccgagcagggtaacgaacatgctgccttgttaattggtgacgcctactactatggccggggtgttggcagggattacgagcgtgcagccgaggcatatatgcatgcgcaatcacaatctaatgctcaggccatgtttaaccttggttatatgcatgagcatggccatggacttccccttgacttgcacctggcaaaaagatattatgatcaggctgttgaggtggatccagcagctaagctccctgtcatgcttgcactaacaagtttatggataaggaagaactatgatggaagctttttggttcattttattgattcactgccggaggtatatcctgtagttgaggaatgggtggaggatgttcttatggatgaggggaacgcaacaatatttactctcttcgcttgccttgtaactgtcctatatttgcgagagcgtcagaggcgtcaagctgcggccgccaaccctcaacagcctgatggtgcacccatctaatttcaacctttgcatcatgatgctgggattgaagtggacgttaagcttgaggtacatagtcatttattctcagccatatcataccatcaaagttttgtttgatgtctgaagtgttaatggaatgacaacgtccatactgtcatactggaaaagcgggtccttcaactgcaaaatgctgatggctttctgaggttaaaaatcggggtttaaaatgatagctctccttgacatctatgtacactaaaattgactaggataagaactgatcatgactgttggatattgagatcatgttgtgggttctaacagagtagtgcttgtaagtaacgacggttgttcaagaaaacgtatactccctccgtcccataatataagggattttatttt

SEQ ID NO: 6240 - DNA, 2208 bp, Oryza sativa
  ref <308>: DATABASE ACCESSION NUMBER: AK063395
  ref <309>: DATABASE ENTRY DATE: 2001-12-06
gatgtagtattttgtgttttgaggattgatttgtgcatctgagtgtttggaaatcggggttacggcgcaccggcctcgcgcagttgccggcgctggggatgatatgctagagaggggatatgttgcatgagaaagaattcaagcatttgttgggagaatctgttgagctgctttgctggggattcagttttgtgattgatcttccaggaggggcacaatgtccaggtgtttcccattcccgccgcctgggtatgaggcgaagcctaggagtgagcataatgatctgctaaagaaggtgcatatgattttgtgcctttcaaatcacttgcagaaatggccctgttcttgcccaaactaaatgctgctagtacatggtagagtaactaggcagtgtatgagttccctttaaacaagaaaatagggaatatagggcctatttggttctctaccctaccaattaattggtagtaccaaaatctaggcaaattttggcactaccaattttttgtagggcaaagttagctaatctatgtttggtttagggccgttttggtttgataccaaaatgttgccataccaatgttttggtagtttaaatagtaaatgtgatgatttggtttaaagccaaatatttggtaatgcctatactcaatttggcacaattctagaatgttcttcaccataatttgaaatttggctctcaattggcatcaatccaaagacactcatttacaattctaccctaccaaaatattggtagtgccaaagcttgcctagagtttggcactaccaatatattggtagggtactaaaccaaacaagcccttaataccaatataaagccaaaatttagtatgagagtgaagaagattctaaaatgtagccaaattgagcgtgggcactaccaattgtttggcttcaatctaaactagcatgtttactattaaagttaccaaaattttggtagggtcacgttttggcttcaatccaaaacgacccatattctccatctgttggagccatagattacctgttaaatagatttgccatttttatgaacattgctttgacaaatgtttgcatctatgagtagttagcatttctagatttagtcaatttttattctttgctcatatgaaaaggttccactgtaaagccacttactgggtacttagggcctatttggttctctaccctaccaattaattggtaccaaaatctaggcaaattttggcactaccaattttttggtagggcaaagttagctaatctatgtttggtttaataccaatataaagccaaaatttagtatgagagtgaagaagattctagaatgtagccaaattgagcgtgggcgctaccaattgtttggcttcaatccaaactagcatgtttactgttaaagttaccaaaattttggtagggtcacgttttggcttcaatccaaaacgacccattattaacttgttactaagcattagaactgtttttcaaaaagaaaacgtaatattgcaatttaaattcagcagaaaagtagcatctccccagtttcaccagaggctaaaataatagttgaagtgtactcacagctatgcttcttttaatatcacaaaccaacaggagcaaaatacctgtgccacctttgtttccagtgatgattctctcatggatgtttccttatatatcatttgttttcacagctttctgtcgatatgttggctagtatatactatgataaaccttttaccatgttgtttttacctcagatatgcttctgtatttacaatgttcttattgtcgtatttgaaaaaaacatgtttgtgctaccattgcctttttttagtttctcacttaactgggtaggcttttactaaagtgtgtatattttctctgaaatgcattctacttggagtaagttccctctgtggatcttggtttagatattaaattctgttttatatttatgtattgccatatcatccaccaccaaacctggtatactatgtgcattccgatttaggttccttcattaatgataaaaattatgattaactggttactaggaaaatggtttgcggtaaacatgtgaatttcatgtttatttcttctgctatatgtcaatcaatgttgaatatgcaccacgttttttccagggaaaacacaaggagaagaagcacaaaaaggaaagtaaggaaaggagaggacgag

SEQ ID NO: 6241 - DNA, 1450 bp, Oryza sativa
  ref <308>: DATABASE ACCESSION NUMBER: AK063396
  ref <309>: DATABASE ENTRY DATE: 2001-12-06
ggggccatggcagcttcccatcagcagcttctcacggctgccgcagtggtggttctcgcctctctgcgtgcggtggcgcagcccgccggcgacggctatggcaacgccaccttctccctctgctccggcgtcgacaacacccaggcggcgggccgttctacttggtccggcagactactgcctccgaagccgtcaaggcggccaccgctgcgacggcggacaggtcctcgagcgtggttagcgacggggagtactacgcgctcgcgcagtgccgcgccgacgtgcccgcgggggactgctcgcggtgcctcgccgcctgcctcggagtcatcggcgggagcggagacgacttgtgcgagaaagccgcggtgcgctacgacgaccgctgcctcctccgcttcgccaagggcgacgacttcaccggcttcgacgtcgacgagtacacggcgaccgtgttcgacggcgggcgcagcggcctcaccgtcgccgaggaggtgcccacccgcctgctcgccacggtggcggccgccgccccggcgagcaggtcgaggaccgccgccgggatagcgtcctacggcggcggcggcagcctgtacgggctggcgcagtgcaccacccagatcccggcgccggactgcgccaggtgcctccgcggcgcgctgtcccgcctctcggaggacttcaactccaccgccgccgggatgcaactgcttcgctccagctgcatgctgcgccacgggagctccctcttcttcaaccagtcgtcgccgctcctccccgtcgcccacctcgccatcgccccggccggtggaggcgccggcccgcccgcagccgctccaccatcaccaggccaccgtcctgctcgagctcgaacgatcgccatttccgctgggcagcctgggtttgccgctctcgcggcgctcgcgttggcccttctaatttcatggcacattcgatcaattccattgccatccctataataattaagcagcactcctagtagttaaccacggtgaaatttcatcatcagtgagcggtaattacagttaccagactctggtgaactcgacaggtaaattcgcagagcgaaataagcttggatctggtggctgtggcacagtctacaagagaaaaagtacttctcaagatttatatgtgcggcaccttctataactgggcggaattggatggacccatagggaggagtattttacaacggataacttcaagttctttttgttgcacaaattacgcacaggggatattgcataacaatgaagaaatagccgtgaagaaactcaccagaaaagatttgagagaagtggaaagggaggtttccctggtggcgcagcttcagcacaagactacagtagtaatgttctttgaaatacttggctgttacaccgtgctctttgaaatcattgaaggttttgcacgaagttgctactcc

SEQ ID NO: 6242 - DNA, 1082 bp, Oryza sativa
  ref <308>: DATABASE ACCESSION NUMBER: AK063397
  ref <309>: DATABASE ENTRY DATE: 2001-12-06
gcagccaccgccaccgccgcgctccgactccgagccgccttcctctcccctcctcctcctcccgccgccgccgccgcctccgcagccgcagcttcgaggctcctccctcgccggcccaccgcctccatcctcctcctccccctgcgccgcctctgctccgtccctccccacgcggtaggcgacgccggcaccggaagcagctcccagccgtcgccggtgatggacgcgcagttcgagtccttccgcgcgcagctcgacgagtcctccacgctccgcgaccgcatccgcgccgtcgtctccgaggtcgagtccgcctcccgcgtcgcctccgccgcgctcctcctcgtgcaccagcccgtccccctcgcagatgtgctcgggaaggcgaaggcgcaggtggaggtgatcaaggggctctactcgcggctcgccgagatcctcaaggagtgcccgggccagtactacaggtaccacggcgattggaggagcgagacgcaggcggtggtgtcgatgctcgccttcatgcactggcttgagaccggcggcctcctcatgcacgccgaggcccaggagaagctaggattgagctccggggagtttggcctggatgttgaagattaccttactggattgtgcttcatgtccaacgatttcccgagatatgtagtgaaccgtgtcactgctggagactatgactgtccaagaaaggtgttgtcatttctgacagaccttcatgcttcatttaggatgctgaacctgcgcaatgactttctacgtaagaagtttgatgggatgaagtatgatttgaggagggtagaggaggtgtattatgatgtgaagattcgaggacttgtaccaggggagtccaaacaagaggcagcttagcaaagactgtcgttcctcaccgagttgtttggatccgtcacgcgtttagcaagatccgtcacttgtctaaactgtgctagttcctgttggagtcatttggattcctctaatatcgactgggctggcctatgctgccaaatttacccgaacccttctagagtaggcatgtggcaaatatattcagatctgttctaatg

SEQ ID NO: 6243 - DNA, 1730 bp, Oryza sativa
  ref <308>: DATABASE ACCESSION NUMBER: AK063398
  ref <309>: DATABASE ENTRY DATE: 2001-12-06
acatgccccatttccacccctcctatttcctctctttcacgcatctcgactccatctcactctcccccctccctcctctctcgctcgctgcgatctgcactgctactccggtaggtctcctcccccccccccttcctcgcgcggccgcggccaccgccggcgagaagcccgccgcggcggcgctgaccccctccgcctcttcccgcgcgcggccccgccagccggccaccgtctcgggtcaaatcgaatcgaatcgaatccaaagaggaaaatctggggttcagttgaaccctaatgcccccaggttaggtcagcctcgctgggtatcgcggctgctgaggttacttggagaggggtagggtggaatcctcgggggctgatttggtgtaattgagagcgccgattcatgattcaggcaatggcttcgcatgctggaggtagtggcggcggcggcggtggaagtggccgggatgctggctcggcgcagcgcgggccgatgcaggggttggcgaggcaagggtcgctgtatgggcttacactcaatgaggttcagagccagttgggggagccgttgcttagtatgaaccttgatgagctgcttaaaagcgtgtttcctgatggcgcggaccttgacggtggcggtggcggtggcggcatcgcgggccagtctcagccggccctggggctgcagcgccaggggagcatcacgatgcctccggagctgagcaagaagacggtggatgaggtgtggaagggcatccaggatgtgccgaagaggggtgctgaggagggtggccggtggaggcgggagaggcagccgaccctgggggagatgacgcttgaggatttcctggtcaaagctggggttgtcacggatccgaacgatttgccaggaaacatggatgtggtagggggcgctgctgcggctgcagctggtacgtctgatttgaatgccggagcacagtggctacagcagtatcaccagcaggctttggagccccagcatccaagcataggtgctccttacatggcaactcacctggcacctcagccattagctgttgctacaggtgctgttttggatccaatttactccgatggccagatcacttcgccaatgctcggggctctttctgatcctcagacacctgggcgcaaacgctgtgccacaggggagattgcagataagctagtagaaagaaggcagaagaggatgataaaaaacagggaatcagctgccaggtcaagagcgaggaagcaggcttacactaatgagcttgaaaacaaagttcttcgtctagaagaggagaatgagaggctaaagaagcagaaggagttggatgagatactgaactccgcgcctcccccggaacccaagtatcaactcaggcgaacaagctcggccgccttctgatggtgacgatgtccatagtaaattttgtagattatatggggtctgcccacatatttcgcatcctttggcggtaggaacaatcgatatagcttgagattccatcttccccctccagccggtggtggtttagagcttgtaaacaccagcaccagcagagccctagccatgtcgccccagctgctgatctcttcggaggctttgtcacttgtcagtatgtaaattctccaaggcacgtgtcgctgttaagttctcagagctccttggttatacatgattgggccctttgcctgtttcttgtggttggttgatacttagt

SEQ ID NO: 6244 - DNA, 1868 bp, Oryza sativa
  ref <308>: DATABASE ACCESSION NUMBER: AK063399
  ref <309>: DATABASE ENTRY DATE: 2001-12-06
attccaaaactttcgaaagcttccattagcgactaatccagccttcgttaagggtgattagaatttgattaatttcaaggcctcagatcggagattgaatggagtgcggtggtgcgctgcagctgccgccggggttcaggttccacccgacggacgacgagctggtgatgtactacctgtgccgcaagtgcggcggcctccccctcgccgccccggtgatcgccgaggtggacctctacaagttcaacccatgggatctccccgagagggcgatgggaggggagaaggagtggtacttcttctcgccgcgggaccggaagtacccgaacgggcagcggccgaacagggcggcggggacggggtactggaaggcgacgggggcggacaagccggtggggtcgccgcgggcggtggcgatcaagaaggcgctcgtcttctacgccgggaagccgcccaagggcgtcaagaccaactggatcatgcacgagtaccgcctcgccgacgtcgaccgctccgccgccgcccgcaagctctccaagtcctcccacaacgccctcaggttggatgattgggtgttgtgccgaatctacaacaagaagggagtgatcgagaggtacgacacggtggacgccggcgaggacgtgaagccggcggcggcggcggcggcgaagggtggtcgcatcggcggcggcggcggcgcggcggcgatgaaggtggagctctccgactatgggttctacgaccaggagccggagtcggagatgctgtgcttcgaccggtcggggtcggcggaccgcgactcgatgccgcggctgcacaccgactccagcgggtcggagcacgtgctgtcgccgtcgccgtcgccggacgacttccccggcggcggcgaccacgactacgccgagagccagcccagcggcggatgcggcgggtggcccggcgtcgactgggccgccgtcggcgacgatggcttcgtcatcgacagctccctcttcgagctgccctcgccggcggcgttctcccgcgccgccggcgacggcgccgccttcggcgacatgttcacgtacctgcagaagccgttctaattaacggaacgtgacgcctctgcaaacgctaattagctcactaaccactgtcaggtcgatcgtgtaattcttttaccagtctagggtacagccaaaaaaccaaaaattaaccgtgctcgatcgatcgatcgatccatggatcgatgatcgcctccaccggcagatcaaaatcgaagcaaaaaatcagggagaattcttggtacttccagtacctctcgtcgacaccacgtgtcgggttttctgcaccgcggatcctcgctggccgcatcgtaacggcgagcgaggttaaaaatagtggagaattcaagaacacatccctgatttttgtttctgccggatggggagtaccgtgagcatggtagaaatgactggtaaaattttcgttgatgataggtagccagagtcgatgtaaccagtcgatttttttttttttttggttttagttgacatgccttcctgatagattcagaacaaacaatagagaagagaggagaaaaaaacacagaggagaaattcagagaccaaagttcaaagttttggaattttcaggggcgccagcagctgatggtattgtcagtcgtgtctaggttcgtagaggaaattaaaatgtagaagaacgggtacttcagttcacttcaggttcgttcgtgccaaacaggtctctgacactttagttaggttttgatttttttttctctttttttctggttttttgtcgtttggtaatgtaatgtaagggtgattgcgacatggtatttatgtgattagagtcgctttcagttg

SEQ ID NO: 6245 - DNA, 1245 bp, Oryza sativa
  ref <308>: DATABASE ACCESSION NUMBER: AK063400
  ref <309>: DATABASE ENTRY DATE: 2001-12-06
ctccgagacactcgcaggcagcggagagccgagccagttcactctctcacactccacactctgccactgccactctccagctgcagcgcagcagtgcgtgtctcctccccccgatggcctcgcggatcttgctccccatcctcctcttcctcctctgctcgcgtggcggcagcggggcgccggcggcgaggcggggaatgcgcgtgccgccgttgggtggggacccggtcaagttcgacttctccccgttcttgatcgagtacaagagcggcagggtgaagcggctcatgggcaccgacgtggtggcggcgtcggcggacgtgctcaccggcgtgtcgtccagggacgtcgccattgatccggccaacgatgtccgcgcgcggctctacctccccagcttccgcgccaccgccaaggtcccggttctgctttacttccacggcggcgcgttcgtcgtcgagtcggcgttcacgcccatctaccacgcctacctcaacacgctcgcggccaaggcgggcgtcctggccgtgtcggtgaactaccgcctcgcgccggagcacccgctcccggcagcgtacgacgactcgtgggcggcgctcaagtgggtgctggcgaacgcggcgcccgggacggaccagtgggtctcccagtacggcgacctgtcccgcctcttcctcgccggtgacagcgccggcggaaacatcgcgcacaacctcgcattgcgcgccggcgaggagggcctcgacggcggggccaggatcaagggcgtggcgctgctcgacccgtacttccagggtcggagtccgatgggcgccgacgccatggacccggcctacctccagtcggcggcgcgcacctggagcttcatctgcgccggcaagtacccgatcgaccacccgtacgcgaacccgctcgcgctcccggcgtcgtcgtggcagcgcctcggctgctcccgcgtgctggtcaccgtgtcggagcaggaccgcctgagcccatggcagcgcgcctactacgccacgctccggagcagcggctggccggggcaggccgagctctacgagacccccggcgagggccacgtctacttcctcaccaagctcagcacgccgcaggcgcaagccgagatggccacgctcgtcgccttcatcaaccgcaactagcacgcacgcacgcacgcagtaactcgaattctaccgtactattacagtgagtaattagccactagtgaggattgatgaggtgatt

SEQ ID NO: 6246 - DNA, 1792 bp, Oryza sativa
  ref <308>: DATABASE ACCESSION NUMBER: AK063401
  ref <309>: DATABASE ENTRY DATE: 2001-12-06
aactcaactcgactcaaccaagccaggttgaggcggcgcggcgaccaaacccccacacccgcaaccacccaccacccgccgccgatgcccggcgggccctcccgcgccgccgatgcggacgacgacgacgacgacgagctctcgcgcctcctctccctggccgaggccgacctcgaggccggccgcctccgcgccgcgcacaagcacgcccgccgcgccgcccgcctcgacccggactccacccgcgcctcgctcctcctcaccgccgtctccgtcctcgccgccgacgactcctcccaccgcgccaccctcctcctccccgactccccccactcccaggcctcgcccctctcaccctccgccctccgccgccactacaaatccctctccgaatccctccgctccgccccgccctcctcttcccccgccgtctcctccgccgtcaaggaggcgctccgccgcgccgccgacgcctacgccgcgctcgccaaccaggccgccgcccccgtcccgcccaccttctggacggcctgcgccggctgccgcctcctccatgagttcgaccgcaagtacgtcggattccgcctcatgtgcccctcctgccgccgcaccttcctcgcctccgaagtgccccctccgccggaggctgaggcggaggcggagccagacccgctgccgccggctaagaagaagcccaaaacccagaagcgtgagatgacgctcgccgagatgtagctccagctctccaagaaaagagcaaccaacaactcatccagactcgacgaggatgacgacgatgacaatgacgatgacgatgacgatgatgagggagaggagcagcagcagaacaacgactctgagatgatggatgtggaggactcagacttctacaacttcgacgccgaccgctgcgagaagtgcttcaagagaggccaggtgtgggcattgtacggtgatgatgacggtatgcctcgtcactatgcgctggtggagatgattacaccagggggccgattccgtgcacagataaggtggcttgatctccagccagatggaggggaggggacgccatgtggggagttcaaggtcgggagaacggttaccgtgcattcagtgaacatcttctcgcatcaggtcgcctatgagagggtggcgagggaggtgtaccggatttaccccaagaagggctcggtttgggcgctccatggcggaaaggatgccgattcggggaggccaaagtatgagtttgtggtgttcctcagtgggtacagtgacctttatggtgccagcttcggctacctggagaaggtggaaggtttcaggagcatctttacccgccaggatgtcggtcgcgatgctgtccagacccttcacaagggagatatggggaaactctcgcatcagattccggcgaggagagcgcccaagggtgaaggctcaaccctgcctcctactgattgctgggagcttgaccctgcatcattgccttctgagttgctgcatgacaatcagcagaaatagccgatgtggtaacttcgagaaagtatcttagctgataggattgttcatactgtagaatttgtcggaggtcataggtctgtggtggtctgcctagtgaaatgatccggtgatgcatttgcttcacctgctttggatgtatgttcctccatgcttatggctcctcgtcaaggtagagatttagatagcgggatacttgtacctgatgctgtgttcaattccaccatcaacaactttcagtgcatgaaatgaatcatcttttggtattgatggt

SEQ ID NO: 6247 - DNA, 1415 bp, Oryza sativa
  ref <308>: DATABASE ACCESSION NUMBER: AK063402
  ref <309>: DATABASE ENTRY DATE: 2001-12-06
aacaaaatatcataacactcgaaatttctgcaaaaactactacataggtgcgcaagcgtgatgtggtgctcaagctggggcggcgaacgggcggcacggcgatccgcgtggtgcaggtggagaacagcttccccatcggcgcgtgcatcaacaagacggcgatccagaacccggcgttcgtggacttcttcaccaagcacttcgactgggcggtgctcgagaacgagctcaagtggtactacaccgaggcggtgcaggggcaggtcagctactccgacgccgacgagctcatcgccttctgcgaccgccacggcaagcccgtgcgcggccactgcatcttctgggccgtcgagaacgtcgtgcagccgtgggtccgcgcgctcaacggcgatcagctccgcgccgccgtggagggccgcctccgcagcctcgtgacgcggtacggcggcaggttcccgcactacgaggtgaacaacgagatgctccacggcgccttcttccagcagaggctgggcgacgacatcaacgcgcgcatgttccgggagacggcgcagatggacccgtcgccggcgctgttcgtcaacgactacaacgtggagagcgccaacgacccgaacgcgacgccggagcggtacgtggagctggtcaccgacctgcagaagcgcggcgcggcggtgggcggcatcggcgtgcagggccacgtgacgcacccggtgggcgacgtgatctgcgacgcgctggacaggctcgccgtcacgggtctccccgtgtggatcacggagctggacgtgtcggcggcggacgaggcggtgcgcgccgacgacctggagatcgtgctccgggaggcgttcgcgcacccggcggtggaggggatcatgctgtgggggttcatgcagggcaacatgtggcgctcccacgcgcacctcgtcgacgccgacgggaagctcaacgaggccggccaccgctacgtgggtctccggcaggagtggacgtcgcacgcgcgggggcaggtcgacggcagcggccacttcaagttcagggggttccacggcaagtacgtcgtgcagctcaccaccggcgccggcgagatgaagtaccagcagttcgacgtcggcaagggagatggcccactcgtgctcgacatggatctctagccagccaactccatcatcgggggggattcatacgttcatacgtgtagtacatagaacggttaagtgcattgcatatatacggattatattgggattgggattattttttagatcgatcagaagagatgtgatgttgttttatgttgtgattatagggccttggcgtgtccgtgtgtggtaatttaaaccgtaaaagagggtattggatttgtatttgctacctacagatttgcagtaaataaacgaccaatttaaagtacc

SEQ ID NO: 6248 - DNA, 2337 bp, Oryza sativa
  ref <308>: DATABASE ACCESSION NUMBER: AK063403
  ref <309>: DATABASE ENTRY DATE: 2001-12-06
atgtcaatgtaaccaatggcatgtatacttatgataagaaggcaaacaagagagctcgaaagaatgcggctgctgcagcagcggcagcagcagctgcagccgccgctgctgaggctactacacgtcctgcgggggttgatactttctggacgtcctgcaatcgctgccggatgcagtatgagtacttgagaatttatcttaaccataatcttctgtgtccaaactgccatcatgcattcttggcagtagagactggatttccttgcaacgggagcagttcttcattctcatggtcaaccaaacagcagccgcagaataacaattccaccaagcattcatatggctcgacaagcaggacttctagcattccggggacagggcatgggggttaccagcaagatggtacttatgattcctacaacaaccaaagcttccaatggaatcagtactccaagacaacacctgcagctggtacaaatgcatacggtacccaggccttggagaaaccgaaaaggaaacatgaagagagctacagttacaactattctgctactggcaattcatatggccatgagagaactaattcaaggcgtggccggttttcaaagaggagaaggcatagtaatgatggttacactactatggattttggtggagataacagagaaactgtagctgccagcacagaaacaactgctttcactgacgtggcagtggcacaagtcaatggcacttcaggggaaaagttgagatctgcagtgagtggaagaagagcaaacgttttgagagagatttctcagattgatacacgggctctacttattgagaaagccaaggctgccatccaggaaaaattacaggagtggaacatcacctcatcgtcacggcttgcagagagaggaaaatcgcaaggaaaggtatatcccagtgataacaacataaagcagaatgggggcctctctgacaaacatgtcaaagggctcaagcaatgcagctcaagaagtgttgatacccaagcacctacggttgatgaaaagaacccggaacagaggcgtgttccggtgtcaattgatgtcccagatcctgactttcatgattttgacaaggatcgcacagagcgtgcttttgatagtgatcaagtatgggctacatatgatagtgaggatggtatgcctcgtctgtatgcaatggttcagaaagttctttcaatgagacctttcagaatccgcatgagtttcctcaactccaagtccaacagtgaactggcaccaataagctgggttgcctctggttttcagaagacatgtggtgatttcagggttgggagataccagatttctgaaacagtcaacatattttcgcacaaagtcagctggactaaaggcccccgtgggattatcaggatcgttcctcagaaaggtgatacatgggctttataccgaaactggtctcctgactggaatgagttaacacctgatgatgtgatatacaagtatgagatagtagaaattattgatgatttcactgatgagcaagggctgacagtcatcccattgctgaaggttgctggtttcaaagctgtgttccataggcatatggatccgaaagaggccaggaggataccaaaggaagagcttttccgattctcacatcgggttccttctcgcctgctgactggggaagaaggcaacaatgccccaaaaggttgccacgagctggaccctgcagcaactccagtggaccttcttaaggtcattacagaagttacggaagatacagcaacacaacctgctaagtagaagagggcaactatgaacactgaagatagcttggatgtctcaactgtcaaatgcacttcactgaactcaacatttgttggtcacttaagttctagtatgtcatcttatttttggctgatgacttggacaactctaccagggcaagcagcttatgtcgcagaattctgacataattcttaggcattttctaacattttggttttactgcaatacggatatcttcctgagagtaaaagactatttggaggccagttttggcaattgacgaggcgaccaagtggtgcttgctgaggctattagtcaacggaagctaagaagcctcatgaatggctgaaggtgctacttgtttgtcactctttaaggtacggcgctctgcatccacagctgaatttgaggggagaaccactaggcttccccatgtacccgagtttgtgtactggtttacttattaagatgttgtacttcctttaatctatagtaattcatccctataatgttgaacgtgatgattcgaaattctagttaaattctgaggacc

SEQ ID NO: 6249 - DNA, 1736 bp, Oryza sativa
  ref <308>: DATABASE ACCESSION NUMBER: AK063404
  ref <309>: DATABASE ENTRY DATE: 2001-12-06
aaaaccctatgcagaggaggacgaagtgagccccggccaccgcccgccgccgccgccgccatggcgctccgccgcatcaacctccggaagaagccgctcctcctcttcccgcggcccttctcctcgtcctcctcacccaaccctcccttccctcctcccccgccaccgcccaacgaccgcgacgacgcctcaccaaagcccagcgagggggaggggcgcaacccggcggcctcgctcttccaggacttgcgcgaccggctcatgtccaccccctcgcatctgccgtcgcgccggatcccgaccgctccgccgccccgcccctcggggaacgccgagccggtggcctctatcgacgacatccgccgccagctcgagtcctaccgcggatccctcgccgcgaggggcgcccctcctggctcctcccccgacggcgccgccccctccttgctcgacctggtgaggagcacctcgtccccgacctcacctcagggccccaactccgggcacttctcatccctcgccgagagcttgcgcaatctcccctctggacggcagccgcaacagcggaggcagcctcgttcgacaaccccgtttttgtcccccactgcgcatcccatcttcgggagggagctcggggagaacgcgagaaaggcggaggggaaagaggagaattctgccattgagcttaagaaggaatacagctacgcagagctcgggaagaagctcggccaactgcgaccgtccggcgcagggaacgatggaaaggagtggttctcgcttgaggagctgcagggacggatcgccaagctcgcaaatttggacattgctgatgacatgcggttaggcgggcagtatgtggcactccggaagagcctcctgggaatccaagccgatcagaaaacaaaggatgatattaagaagacaagatccatgcagggattgtcatttttggcgaacattggtgggccggcaacgccgcaatacttgcagcatcctccacaggaggagttgctagagaggtatttccatccagaccacatgtcgtcggaagagaagatgaagttagagctccagagggtgagggacgagtttaagatgtctgaaaatgactgtggctctgcgcgagttcaaattgcccaattgaccgtgaaaatcaagcatctgtcaactgttctacacaaaaaggataaacattcgagaaaggggcttcaggatatggtccaaaggaggaagaagtacctcaagtacctgcgtagaactgactgggattcatattgtcttgtcctgtcgaagctgggtcttcgtgatgtaccggagtacaaagctcctgattacaagaacaaatccaccagtaaagccaaatctaagaagagcaagagcaagaaaagaaagatgaaagcataaatctgtaaccaagatcgtcttcacctctccctccctgcggccttgaactgcatggccagcaaggttgatgatcgaaaatacagacgctctgctcgaaatgggtttgatccattctctcagtgttgctcgaaatgggttcgatccagtctctcagtgctgtatcttttgtagtaataacaacggattgttaatccccttctcattttcctttttggtagcaatgtttcttatttttcatgagaaggtgcagccatcctgtaacagctacatgtgttttttttatagagttgagttctcccattctacttcctgggagaacgggattgatcatt

SEQ ID NO: 6250 - DNA, 2374 bp, Oryza sativa
  ref <308>: DATABASE ACCESSION NUMBER: AK063405
  ref <309>: DATABASE ENTRY DATE: 2001-12-06
aaccctctcttcctctctcgctctctcccctgcccttgcgacggcgccgccctgtgttctcctcgccgccaacggcctcaccgccgccgccgccgcctttgttcccttccctgcttctccttgccgacgacggcctccccctccccaatctggtgctagctagggatgggatcgaggagggaggcggcagggaacgtagcagcgagaggcgtcagtgggccgcgaggcttgcgccgcgagcccccatagccgggggagagaagggcgctaggaaggggagcaggcggcagggagagcgagggaggaggaagggtggcgtgggagcagtcctttcaaggcactcaagacagcgccagctatgtccggtgacggtgtgctctgtctcgacggccggggctcgaggtcggtggcgaggcagtccgatggatttgcatctcaggggtcaggatggatggatttattgcagaacggatccatcaatatatttgccgtcaccttcatgcattcctctgtgattaggaatggagatctgagagttgatactatttgttgcgtactaagctctatatggggaaattttgcaaattttttggtgcagaaaacatgagcagaaggagatattggatgactgacgaactcacttcgttgccgaagtaacattatttgatctcttcaggttctctcccctctatcattctaccatttattctttgctattttgttaggctatctagcagtaaaaatttgtgcccttttataatttcctcaaaatgctggaaactcctattctgattctctgctgtttcagtggcaataatagatctgggtttggcaaagttccattttctactatttgttggtgaaaaaatgaggctaccattctcctcctgcaaaataaatcagggtagcgatgcagtctatatataaataagtgtatgcttcccatattccaatccttgtgacctagataatgccaaacaaattcatcgtcattttctcatgcaatatattgccatcacctccgtgcagcatgtcgatttctatacaaaggcatgacacgagacattatttagtggcctctgtaaattcaaatgatgttaatttctgagttcagtaaaacatgtaacagttcatctcttatgctgaagaaagataccagttttactatgtcagctgttggtttgtttaggtgggtttgcacgcggtgtactcaatcctgaatgtttaggttactgatgagatgccatgtatattggtaattttgtgtcacaatttcagatttcagaaccgtgtcagtacaaaaatcagctaaaaatggtgagtaccatattagtgaaacaattcactgtcagttctttgtgttaagcaaatcaaataccgttattgccagaatgcaaattacaacagttctagcttccatctcaaaatatgggtgcttgcagagttgtttcattggtttacccttagtactattatcttggtgctcatatcttctatgcaacaaaaaattgttctaaactctatgtaattgtagatgtgatatataatcattttcatgtatttttttaaaattacgtagtttcttaatttatcaaatgatagggctccacgaagcacaaaaaaggtaaatactgaaagataagttctgtgcactttgagttttattttctttcttggaactcaggacttctgatgatgatagattgatagctctattttattcattcatgcatatttgcttcatattgttcttgattcagtagctaggctggttgagagggataattgataaattgtatttcctatcttctgagatttcttctaaccgtgcatgtcagctaaaactatggcataaaatccatattgcaagtatggagctggtgaggtgcttgactgatggggagacattgtgaggtgctcggcgctgtcggcaagcctttgctggtcattaggccaacaaggtgtattgcagtggcagagcaagccagcctgaaaattgcctccagatttgctgcagcggcagagcaagcctgaaaattgcctccaaatttgctctttacatggtgataaaattaggctataatggttgtattttttaggttgaactgcaaacatatcattgttggtatgactgcatggataattttgttaacggatgtgctatggttcacacgtgcagatgtctgtggcccttcttcctcggacattatttttattatcatcatctaggttaggatagagggcttttaaaagaaaatactctcttatttggtacgcaaaatcctacagatctgaatgctcttttatttcatatgtagtgcttcctgaatcgtttgtataattgtatttccatagagctagaccctttcgtctc

SEQ ID NO: 6251 - DNA, 1817 bp, Oryza sativa
  ref <308>: DATABASE ACCESSION NUMBER: AK063406
  ref <309>: DATABASE ENTRY DATE: 2001-12-06
aactagcttagctagacagcgtgtgttggtggtggtggtggtgtgtgtgtgtgtgaggagggtgatcgatcgatcgagcgatggagagcccggactcgtcgtccggctcggcgccaccgcgagtactacggcggcaacagcagcagccgggctcggcgccggagctgccgccggggttccggttccacccgacggacgaggagctggtggtgcactacctcaagaagaaggccgcctccgttccgctccccgtcaccatcatcgccgaggtcgatctctacaagttcgatccctgggatctccccgagaaggcgaacttcggggagcaggagtggtatttcttcagcccgagggaccacaagtacccgaacggggcgcggccgaaccgggcggcgacgtcggggtactggaaggccaccggcaccgacaagcccatcatgtcgtcggggagcacccgcgagaaggtcggcgtgaagaaggcgctcgtgttctaccggggcaagccacccaagggcgtcaagactaactggatcatgcacgagtaccgtctcacggacacgtctagctccgccgccgccgtcgctacgaccaggcggccgccgccgcccatcaccggcggtagcaagggcgccgtctctctcaggctggatgactgggtgctgtgccgcatatacaagaagacgaacaaggccggtgcggggcagaggagcatggagtgcgaggactccgtggaggacgcggtggccgcgtacgcgccgtcgtcgcagcagcatgccacggctgctgctggcatggccggttcggacggcgccggaggagttgctgcagcgcacggcggcgactacagttcactgctccatcacgacagccacgaggacaccttcctcgtaaacggcctgctcaccgcggaggacgccgccggcctctcgaccggcgccagctctctcagccagctcgccgcggcggcgagggcggcggcgacaccgtgcgacgccaccaagcagcttcttgctccgtctccaaccccattcaactggttcgaggcattccttccacgggccaaggagtttcctagtgggctaagcaggagtagcagagacatcggcgacatgtcgctgtcatcgacggtggacaggagcctgtctgaggctggcgccgtggccattgacaccggcgacgccgccaatggcgcaaacactatgcctgcatttatcaatcctctcggcgtgcagggtgcaacctaccaacaacaccaagccatcatgggtgcctcgttgccatcggagtcagcagcagcagcagccgcctgcaatttccagcatccgttccaactctccagggtgaattgggattcctgaataaaaggtgccggcattatgcatacacatatatgcacatgcatacatgcatggcttttcaagtagtagcacaacattactagtaattaatcacactaatgtgtgtggcagtcgcattcagtgagcactgatcgagtagttgcatgaacacaacactaatgcatgcactacatatatatggccgcattgctcctagggcacgtacctgtacgaactaggtaagtgacctaaccagctagatcatgttcagaataaggagaagaagccgcatgcaaacacgtagatcatatggctttgccttcacatgcgtttgcatcatatatatcgcattcagaaagtagtgctgcagctaacacatagatatggtgttagcttcatgcgtttgtaccatatatagcggatgcagaaagtagctagttgcactgttcatcattatcccatgagatatgaactttatat

SEQ ID NO: 6252 - DNA, 3118 bp, Oryza sativa
  ref <308>: DATABASE ACCESSION NUMBER: AK063407
  ref <309>: DATABASE ENTRY DATE: 2001-12-06
agatctctctccccgttcacttccccgaaacgtccccatgctgcgctccctcgccggcgccgccgagtcggggcgctcgtcggcggccgcggcgctccggcggtccctccacgcaggagggcgggaggaggtggagagcgtggcgtaccgcatgtccatgctccggcctccccctgtcgtgccgaggagggggctcccgaggaactcgtgcagcctcatcggccgcctcgacgggccggtgcgcccgtgcggtggcagctccgacgagcggcccatggcgtacactttcctgtcggtctcctcctcgccctcatccccgccctcctcgagtccgtccaacttccggtagcgaccccactcttctccctgaatcgcaattagtttggatccctgacagaaacggaaggcctttctttggtctatcttagtgctaattcttcttagtaatcttagttgtgtgcgctcatagtaagttcaatcttgtgatgcttgttgcggtcggttcgtgtgattggatgcccattctgtaataattgatttatggtgcttaattgctacatttaactgtgctatgggttggaataaccttttcatttatgttaggaattaccttttcattcatgttgtctgcaaaattcatctagtcctaagtctttcccctcatttgtactaggcatgttcagcttgcatttccaaattgttttgatgagaaggccattgtttaactttgggtacttatttttattattatgagttctagggccaatttgtgtttatacattgttttaacagattcattcttagtacatgctgtatatatctatcaaaaaagagaatattgattggagtaaaactgaatcagcttagcagagtctcattttctttcacaaacctgttaatcgtataggggatattcaaggtatgcatggtttaatgagggtttattttcttgtcctttttgtagagcatgaatgaaatgtatatagtcttgttcggctcatgattcctgtactttcgtgtaatggagtttatcaccatttttacaatgttattatgatcttgaacagtgtgacattgaatttgcaaggcgagctggcacatgtaagcctaaagcatttgaaacaaaatgaccttgtttatgtatctggccttctgaattcatatcataaagttgatccaagtggagagaagcatacgttctacaaggtttgtcaatgataacttcttttgaacactttttgatgttctttgtgaaatataaaaggagcgcacacctaggccctaggaccttgatgatttgtatgtcaccagattgtgccttctctaatatattttctattccacaaccttcgcttatatagattatacatcttcgtatgcagaacatttattaacatcagaactttagctcaaattaaaaatacaaagtttgctcagaatgtttgcttgttccgtgctgcttttgtgttgtgaacaccttttgtggtggatgtgcataattgtcaacaagggaagaaaagctacaggagtggcagttggaaacaggttcatagaaagagtttgatgtccacaaataacagcaccatgtccttgaggaaagtttgtgctagttggttagtagattttgcactaactagtatatagcaggttagtagtggattgacattggaatagcagataccacctgctatattagtggaataaaaaaactcaatttttttaagttaatcgtgcatacatcaagagttcacaactctcttaacacaataaaatggtgacatttataggtccgaaacactcataaaagatatagatagacgtacaactcactagtatatgcacgaaaagtggtagtaattaacaaggtagtcaaagtttagatctggattctcaagtagccaacatgacttaacactgcaactacaaaattaaactttaaaattcagacttcagactccagtgcatatagcagttgctattttgtaacccgctattttgcagctgtacctcatctcagtagcggtagtacccactactgctaatgcgagcactggctgctaccaccgctgctatttggaaccttgaaatttgtaatagtagttagatgcatcatttagttatatcagagatacatagtcaagagttgttgaagttgcaccaaaacatgttagtatgcttgataccttagaagaaataaaggaagttcctccatccagaagtactggttcctgctgtatttttctcttgactgtcttctctctccctgttcattctagattctgtttctccccattcaagccctccttcacctattgctgttcttcaaattgtccttacctgatttcctctgacaaatgtttagttagcaacgcattgtgatatttgtggccaagaaaatatgttttcagtgcaatatcccttccatgccattgtgattctaactccgtcttttttatagatacatgtcacagacctaaactatgttcttgatcaaaatcagaggcctcaaaatgatgagaattcttcagacaaatcatcaatgctgtctaccacagttagatgaaatacttacagaaaagaagtacatagatcggcttcgcttgtggcaggtcttcttcgctagcccttacgaatggtgggacaaccgacaatccaagccatactcctactatcctgatttcaagcacaaggacactggcgagaagctgtggcttcgtgcagatgatcctccttgggtaagaagacagcttgaattgcaagaccaacaactggcagagaatggacacagggatggtagtaggacactgaaaaaccacacatggaaatcacaagattttgactgctctccgtctcaagattttggctattctgatgacgaagaattgcttcattcatcaggtgcatgatatggggagatgtgagataatgctaactggtctcttgatctgcaattattatgcctagcttcactgtagaactcacttagttgtagaggatatagagtacttatgttagcgtagcaagttattaatggcttgaatggcgaatactggtaatgtgtgcggtaactcatgtacatgcataatgtggtggaaatgtaaaaaaagtacttataatc

SEQ ID NO: 6253 - DNA, 1853 bp, Oryza sativa
  ref <308>: DATABASE ACCESSION NUMBER: AK063408
  ref <309>: DATABASE ENTRY DATE: 2001-12-06
tgtagaaagaccattgtagccctgtaaaaaacacttaccagttaccaccacccagccatccaacccatcctcctctcccatcccaaacaggtggatgcatgcgacggaggtggcggcaccggagcaactcacgagcaggctacgacggcgcaagtggtagcgcttgccggcgtgagcagcggctgctcggtagagagggagtaggcggtgctgctcggtcaacacgcgagcaggtggtggctcagcgacgcaatagcaggggaaggggtggctcagcttggctcagagacgctgtagcttgctgcgaacatcgtttagagtaggagcagccacaaggacacacgacaagcaagctgtggagattatagataccctatacccacatggtatatatatccgactgggtataggggtactgtatgtagatagaatatctttaagagacttgggttaaattccaaacttgtgtatcaaggaaatacccggagtcttagtcgtttacgattgtattttatctttactcgcctattccgttaggaatatgggctgtaccttgtaatacggactccttcccctatataaggaggggtccgggtgcctcttggggcataacttttctcccagatcatacgatcaataatacactcgacggaccaatccatggacaggagtagggtattacttctcattgaaagggcctgaacctgtataaaattctgtgtctctaaacccatccacttctccagattgatagctacccctttttgtattgctgaaattttgtttcgacaggttgcgtgccaggtaggcgtagcgtcaagtttttcgccgactagtgcgatgggttttgtctccggcatcgacgacttcgtcttccctcccgggcaggcgttccagttcggcagcctcgacttcatcactaacgactttggcaatatttctctccttgactcggatccgaaccagtcagggagaggtcaggcctctgccccgttcggtctcccaaactcggccgagatctactccaagatcatctcatctgagtcggcttcaaactactcggaagagatccaatctacttcgacacgacctgatcaagacgatggggcctatccttcaatcctgatgaagctccccgatgacttggctgctatttttaccacaaggatgtctcctccccgtaggtctagacgggatctggtctctgctccaatccaatctagctccagggaagtcggcgtcatactccagcctctcgggacagtttcgacggaagaattggacggctacctcagcttccccggtgtcgactctcgaccgacggagatcctcgagtacgacaacttcggctaccactacgactacagcaacctcgacgacttcgacgaaggctacgaagacaactacatgcctctcttctttggcgttttcatggctaataacgagacggcataacagcgccaagcccgagaagcagaagaacaacgcacatgacaagaagctgagcgtcgccgactggaggaggagcgactagcacaagagcgagaccggctgcagcgtgagcaacaggaacgcgaacaggctgcgaaggaggctgaggaccggcaacagcgagccttggaggtcgggcgacgagcacgagaacttattggacagcaagatgttgaggggacagcggtttttcgcaccctgcaatagaacgcggtagcggcaatcaccctcctggacactctgcttcaggaagatgcacccaaccacgtcgtcaacatcttaaaccaaaccaagcccatgatcgcctcctcggtcccaattaactcctcaagcatccgtacgccgactggcagccgagttcc

SEQ ID NO: 6254 - DNA, 1259 bp, Oryza sativa
  ref <308>: DATABASE ACCESSION NUMBER: AK063409
  ref <309>: DATABASE ENTRY DATE: 2001-12-06
aaaaaatcccaccaatccactactattccactccacctcgtccagggcaagatccacaggatggcgtcctctgacgacggcgtcgtggccctctacggcggcggcaaggtctcctgcaagccccccgccgccaccttctccgtcaaggtgggccttgcccagatgctgcgcggcggcgtcatcatggatgtggtcacccccgagcaggcacgcctcgccgaggaggccggcgcctgcgcggtcatggcgctggagcgcgtccccgccgacatccgcgcccagggcggcgtcgcgcgcatgtccgacccggcgctcatccgcgacatcaagcgcgccgtcaccatcccggtcatggccaaggcccgcataggccacttcgtggaggcccagatcctggaggccatcggcgtggactacgtggacgagagcgaggtgctcacccccgccgacgacgcccaccacatcaacaagcacaacttccgcgtccccttcgtctgcggctgccgcgacctcggcgaggccctccgccgcatccgcgagggcgccgccatgatccgcaccaagggcgaggccggcacgggcaacgtcgtcgaggccgtccgccacgtgcgctccgtgatgggcgaaatccgcgcgctccgcaacatggacgacgacgaggtcttctcctacgccaagcgcatcgccgcgccctacgacctggtcatgcagaccaagcagctgggccgcctccccgtcgtgcagttcgcggccggcggcgtcgccacccccgccgacgccgccctcatgatgcagctcggctgcgacggcgtcttcgtcggctcgggcatcttcaagagcggcgaccccgcgcgccgcgcccgcgccatcgtgcaggccgtcacccactacagcgatccggagatcctcgccgacgtcagcgctggcctcggggacgccatgtcggcatcaacctcaacgaccaaaatgtcgagcgctacgccgcccgctcccactgagcagctcctgctcctgctcctgctccctctctcctcttctctctcagctccgcaccggtggatggtgaatgtgaatcaacaatcgtcttctctcactaattttctcctcacaatggactggagaatggatgattgttgctgccattattattagttgattagtttctcctcattgctactggagtactactaattggcaatagcacttctctactgccgccaccactcattaccatgccaaattgccttcaagttttgttg

SEQ ID NO: 6255 - DNA, 1378 bp, Oryza sativa
  ref <308>: DATABASE ACCESSION NUMBER: AK063410
  ref <309>: DATABASE ENTRY DATE: 2001-12-06
catcgccgaccacgagcaccgcaagaagctgccgcagacgctatcgggcttcttctacaagagcatcgactacgagcgctgcccgcacatggcgcgccatttcaccaacgccactgggagaggcatgcctctcgtctgcccgaccttctccttcctgccccagtgccaccacgtcgtcatcttggatagctgcaatggcctcctcctctgccgctgccacgtgtctcgtgagactttgcagttccagtatgctgtgtgcaatcctgcgaccggggaatgtgtgatgttgccggacgccaactgggctattgacgagaaccgcaccgcctgcttgtgtttcgatccagccatctcgtcgcatttccatgtgctcgagtatgtggaggatgaagagtatgtggaggatgaagatgaatacgacgcactggtcacaggggtggtgatctattcgtctaaaactgggttatggagtctccatgtaaatggatgggatgatgaagttatggttagccttccggtcgatcggacaagggttttccttaatggttttctgcattctgtcacgacttgcgatattgtggctgttgacatggaggggaagaaatggaggaagattcccatgccggatcctgatggtgatattgggataattcatcaaactcagggtcgcttgtgtgcttttaatgttgatccaaatgatatcctcgaactgtcaatttggtttcttgaagactatgatacagataattggatcttaaagcacaccgttagctcaattaatctgtttggacgaaagaaataccaattagattttgactaccaagtaattgcagttcatccagaatgcaatttgatcttctttgtttatggatggcacaatactttgatggcgtatgaaatggatcgcaaggaagtccgtgtcatacgcaaactcggacatgagtcatgcctgccatacctaccatatgttccaatgttctctgagtcattacctgatgggtggtgctaacatgcagaggtgcggctccacttatgttattgcaaaaccatctttgtaccgtaatgagaatcaggcttagggtcagcagccaatctctaatatgaattatgaatttctgttttatcgtacttgtgtgatggctcatttgtgttgttttgaagaatgttgtgaaatcatagatggcacgtaacttggcctttcggaaggtatgtcctgttctgaaggttatgtcttgtttttcactggtgtttaccctatgccctatgctagttaaaatttatgtcctgtgttaacaagacataccttttgattgtaccagcagtcagcttatggaacagtgacaaatgctttggaagttggatcatatgtacttctttt

SEQ ID NO: 6256 - DNA, 2147 bp, Oryza sativa
  ref <308>: DATABASE ACCESSION NUMBER: AK063411
  ref <309>: DATABASE ENTRY DATE: 2001-12-06
agtccccatccccacccccgccgcttcacttctcccctctcggtctctccgttcacggccggccgtgcgtccccggctaggccggcgagggtggcagcgcgtccccggtcgacgaggggtcgcatcccactccatctacgaggccctgtacgtccacgtccatccaggcatccactgcgctgaccagtacatcctcgtcaagctgtgcagcaaggctccccagtccccgatcaagaagcaactgagcagggtgaggaatatgcggcgcttgagcttaggcaatagggaggcttccaattgttcagatcaggcagtgagtggtgctaccttgcccagatgcagtacaaggtcctcatgttcccaacaacctaatcattctcctaatttggatgaggagattttggaggaggaagaaacatctgaggaaatctggtttcgtggtcctacacgtgtgccaccacaacctacccgagaggaggacaaacctgtgctgactccagtaggagacaggcaatggcgagcaaatgattatggaggcaacattagggtccccaatagcatcctgacattacttcttaaacaatggttccctggcattgtcacattgaagggtaaagaggagccagcatggagttggaaacattacaggatagcgccggatactccaagaagcaatcaaatacggctgccaagctgtctccatcgtgttgaggaagacttctggctttacttcaggtgggcagagggaaaagaacaagaagctagaaaggttgtccacaattgtgtcaagggccttgttgatcgcttgttttatgaaactcgcatcctagctgtgcttaattaccaaaggaaaatcctgaaggtgaacacttccagagaaatcgcatgcagaacttatcttacagagagcgagtacctaaaggtagaaccatggtggttcctgaattcagaaaatgcatggcgggagttgatacgattgcggtggtgtaatccaaaatggcaggctgtctcacgtgctcataggatacggagggagaaaatgaaagggccatctcaccgccaaggcagtgctaacttgagccgttaccaaaaaaatttggagaagaagaaaaagcggccagttgctccactagaggcctacacagaaggaaggagggaaaatcgagaggatggacaattcagctgtgacccgcgtgtagctgagaagcttgaggcctatgctgcagcttatgttcagttgcatgggccagaaaatgattggcgcacttctcccattgatcctgtcgctgtgcacatggctggtggtggaaagaaacatggccgtttcatgattggtgatggactcattgactcatcagcagtgtttggtgataattcgcgtgatgatcaacgccctcgcagaagattgaggacagatcatgacaacacaaaccaggttgaagaccttctgcggcaactacaagaggagcgcgaggcaagggagcgagagcgtgaagagagggagcgtgagaaggagagggagcggcaggagaaggagcaggagaaggagtgtgagcgtgaagagagggcgcgagagaaggagcaggagcgtaaggagagggaggaagagcgcaaggagagggagttggaaaagatagcctctcaacagaaatcagcattctttgaagctgctttaagggtgatacaaagtaagctgaacatagacttgtcagcttcaggcacacctcccttacctgtcatgttgactcacctagcttcgtctggacctgtggcttcgaatggaaactcaggccccaaccatgttggggttggtgctgcatctggtgcaattgtcaacttttagcatgacagcggactagttgtacattcctaaaactatggatatattttgtaactaaactgacctggatggtcatggccatgaacttggatagctgttggttgtggttgtctcactaagtagtcttttgttaattatgtaggtttacctgaactttaggccacatggaactctagtagatgttcgctgtgtctgttgccttaggttggctgcctgttgccttttggtcatatatgttgccatgttggcatgcgctggaacttgtgaactggaagttcggttcttttggtcatatatgttggcatgc

SEQ ID NO: 6257 - DNA, 1686 bp, Oryza sativa
  ref <308>: DATABASE ACCESSION NUMBER: AK063412
  ref <309>: DATABASE ENTRY DATE: 2001-12-06
aacaaagcattgcgatggtcctcgcggatgctgacgcaatgtgatttctgcccagtgctctgaatgtcaaagtgaagaaattcaaccaagcgcgggtaaacggcgggagtaactatgactctcttaaggtagccaaatgcctcgtcatctaattagtgacgcgcatgaatggattaacgagattcccactgtccctgtctactatccagcgaaaccacagccaagggaacgggcttggcggaatcagcggggaaagaagaccctgttgagcttgactctagtccgactttgtgaaatgacttgagaggtgtaggataagtgggagccctcgggcgcaagtgaaataccactacttttaacgttattttacttattccgtgagtcggaagcggggcctggcccctccttttggctctaaggcccgagtccctcgggccgatccgggcggaagacattgtcaggtggggagtttggctggggcggcacatctgttaaaagataacgcaggtgtcctaagatgagctcaacgagaacagaaatctcgtgtggaacaaaagggtaaaagctcgtttgattctgatttccagtacgaatacgaaccgtgaaagcgtggcctatcgatcctttagaccttcggagtttgaagctagaggtgtcagaaaagttaccacagggataactggcttgtggcagccaagcgttcatagcgacgttgctttttgatccttcgatgtcggctcttcctatcattgtgaagcagaattcaccaagtgttggattgttcacccaccaatagggaacgtgagctgggtttagaccgtcgtgagacaggttcacacatctcgggctcccgatggactccgcctcgccgccctccccgccgccggcgcaggcgtccgccgcagaagccagtggggcatccaatgccagcctgcggtggcgcatccttcgccgcgccctgctcgcgcgctccgcctccacctcccgcgcaccagaggaaacttctaacgatcagcaagataaaaatgatactaacaaaatttccagaaagacatcgcgtggctttgacctgattgagtgtcatatgctgcccatttcacagtcaactaaatcacatggggattcatcaagtagaaatgagaatattgtggaatgccataatgatgttcgtgtctgttacaagctaccttgtgaaggttcacctaaacttaacctagtatacagaagagaggattcccttgaactaaatgacattgtagcttctaacagatacaatattgacactactggacttgtgtgttgttggccgtcggaagaggtccttgcgtactactgtatcaaccattcggatatgttcaggtccaagaaggtgcttgagcttggatccggttatgggttagctggacttgctattgcagccagcacagatgctgatgaggtcgttatttctgatggaaatccacaagtagttggatgtatcctttagtttcatttacacataggcttctttgcagtattgactaatacggtgcacatgttgtttttgctaattttttgaaacactaggatgtaatggcaaatcagattagattggtccaaacatcacgcttctatggtctttgtaatccattaaccctcagatattcagcagaatatatccatcaatacagaaacttttggtcaaac

SEQ ID NO: 6258 - DNA, 1196 bp, Oryza sativa
  ref <308>: DATABASE ACCESSION NUMBER: AK063413
  ref <309>: DATABASE ENTRY DATE: 2001-12-06
aaaaagccccactgcccgacggcacccggccgccgccgccgccgcctcctcgactcctccgccccgccgcgtcgcacccgacgaccggaccgccgtctccgcctgccgcccgcacggccgcacccgcactgtgttgatttcgtttattggatccctcggattgcaaaatgcttgccaaagggaggaaagttgctggaaggggtggagacatgtctgcacactatgcatttgggctgcaggaagatgatgcgatcattaaacgtaggcttctgaccaggacaacaactaccaggggtgaaccaccactaaagaagcttcagaagaagttcatgtcctttgccactgaggttgagaaggatgctgacaacataagtgactgtgagaggttgtacaaggcctttttacaggaaattaatgcttttgtgttgcctcttcttaagagcaaggccgtggttgatgcaaaccttagggagaaggagagcttcaacgagctgcaagacgagattcagcgacaaatcttgcaagctcagactgatattgaggaactcaaaaagaaactggaacagagcagaattgagaggctgtacaaagaggagtgcgaagcgatcagaaaaatgatttctttgcagcctccacgatcggaaacagagaagctcatcgcgggtcttgagaaggagattgctaatttggaggccgagaatacagcatgtataaggactctggaactaaggaagaagcagctttctcttcttcttcatgtggtcgaggaattgcagatctcaatcgaagatgagcagaggagcatagcggatgagctgagagctggcgctgaagagcagcagaacatgagcacagatgaaggtagcggcgatgcttcagatgccatggctttagactgatcctagcagaaaagcgcgatgcctgcctagttccacaaaggcagatacgttttcttgtggctatatagcacttaattgccttggttagacttgtaggttgcttaattacaccctgacacatgatgactctcgtgtagttttttttttagagagaaggccagagtctctcgtgtagtttcagttgtaatttcagtcctaagttgtaatcgtgtgccctttgtctgaaggaacagaacatcatggtgtgacatatactcctccagattattccaacatgtatggttgttattatttgct

SEQ ID NO: 6259 - DNA, 3278 bp, Oryza sativa
  ref <308>: DATABASE ACCESSION NUMBER: AK063414
  ref <309>: DATABASE ENTRY DATE: 2001-12-06
aatccttttcttccctacccagccgtcacgcactcacgcttcctccggcggcggcaaggcgacggcatcggcggccaccgatctccggcgaccccccggccgccgccgccgccgtctccgccgccaccacccggagatcctcccgcgtgcctcccccctccccgccgcgtgctcccggcgcccactgccctggccccgaggtgggggctcccctgctccccgcaaaccctaaccctagccctagcccacccccggcgcgggggctgcctaggaaacaggttgcacattttgcggacttttgagaaggtcatgtccattgatgagtgatgacatggcaagctgagtagataatgcttgcagtgatgcctttgcatatcctgatcctgtgtggatactgagctgtgctctatgggaggaattgcagaatgtggtgtgaacattgatcagaaagcttcgccacgccgtgcggccatagagaaagctcaagaggagcttaggcaagaatatgatgtccgtgaagaacgaagaagggagcttgaatttttagagaagggaggtaaccccttggatttcaaacttggacatgtagcatcacttagtgtccagtccacttctgttgcagatcatataaccgaacaaaatgtgataagtgaagctaagggcagctttgcgtttgctgcctcaccccatggggattcagttgaaagtagtggcaagccaggaagttcatcatgccgtgatgccaacacagctgataatcttatgcttttggatggagataccagcaacacaggtggggagaaacttgtcaaatgtggtactaaacgaactaatgtatctcaacctgatgtgtccctgcgctgtgatggtcaaaacaatgtaaaagaggctgaagattctagtttgttccgccctggggcaaagaaccaggcgtatgctcgtcgcagatcgaaatcaagcagggagaatgccactgcgtctgttgggtctctaccagtttccccactatattctcaagggaaagatgcaaaagggataatacaagaaacaaaatcagaagatcatggtgcctcatctattggcaactcaaaaccagcaagtccagatcggaacaacacatcaaaggttgcttcattaggtgatcatgatgcgatggagatggacaacactaatgaaggaaaccaagcagcaactcatgaaacaacaaacttcaaagatggtgttgaaacaccggaaatctcaccaaacagtgtgaatggtaattcacagcttattggagatggtttggtagttactgcaactacttctgcagaatcccctgacacaagtccaaaagaagctgctttaatggcaacttcttcatttccatcttcatgcaatgaagtcttggaagaagcatgtgctgcggaagaagcaggtaatggatgctcagataaaaatttggttgttcatgcagatgatatggttagcaagagttctgttcctccctctgaggtagaaattgccagtttgaatgaaaatgaagcggatataccatgtgcagatgtgtctaagaccgttgatgaacatcctggaaaaagtgagaacttatcagggaaggtgtctgatgaagatttaggtgatgctataccttctgacaaggatggaaacaaagatggtcaaccagaaggtggtgacatgcccacagttgttgatggcgtttctaattctgttcaaccagaagtcagcaataccatttatgccaaagatgacgttgatgtccataacaagatggttgatgcacaaaaggatacagggaatcttgctacttctggtcttgacaaagtcgataaggaagcatgttctaatttgaaaaaaaataataaatgttctcctgattctaatattgctgataagttggattctgttaccgtggcgtctggtttgctcatgaaggacgtgcctagttctgtgtcattaatgaaccctgacaatgatgttaataaaactggtgaaaatattccaatgatggaaaagaaggaatgcgaagattctactgttgccaagaaggaacatgaagatactatccttagaagggcacgattaatagaggtcaatatcaagaaagctggtgaacgatctctctgcaatatttctttggagaagaagccaaagagtcactgggaatttgtcctggaggagatggcttggatggcaaatgaatttatgcaggagcgcctgtggaaaagtgcagcagcttcccagatgtgccactggattgccttaagtggtcgagcaacatttgaggaagcaaacattcaaaggaaacagaaatcaattgctagaatcctagccaagagtatcatgaagttttggtgttcagctgagactttacgagctaccagtggtgaaatgcgtaaagagaagcaagcagaggagtcaattgggattggggaaacaaagctggctggaatcaatgcagaaaaagaacagtgtaacgaacctctggaacaagagaagcttcagtctcctattcaaagttacgcactaaagtttctgaaggacaactgtaatatatctgagtgtctgtcgttagctgaagcaccagctactcctgacaggctgaatgattttggcattttgaaagtgccagaccagctttcagaagcaaacctattttatggcgtagcccctggtgcgatgcaggcatacagagagtttgtggagggtccttttgtggctaataagaaaaccaataactctcgacagaagaatgattatgagccatctacaacaggctctgttgcagatgcacataggggacatgcatatgaagatgatgatgtcgaggcatccacttatgtattgcatggtacatatgatgatggtttgccatcaaaatcgagtcacaaaaagaaacaccttatgcagcagaggatgaatggcacaaggcattacagtactggtgttgacatgccttatgatccatatgtggagagcaagccaggaaaccagccatttttatcaaatggaaaaagaccttcagatttctttaatattcctacaaaacgcatccggacagctgctagacaacgagttgtaagcccatatcctgctaatgcttctggagccactgcattcacaagtaaaacagatgcttctagtggagacacaaactcttgtcaagatgaccaaagttcattgcatggtggatcttttccaaggaagaatgtggatattgaatcgacagttgattttgatagacaattgtatgatggcagtgaggtatctactaagtc

SEQ ID NO: 6260 - DNA, 1551 bp, Oryza sativa
  ref <308>: DATABASE ACCESSION NUMBER: AK063415
  ref <309>: DATABASE ENTRY DATE: 2001-12-06
gagccggcgctggcgcagagtggtcacgacgttgccggcgatgatggcggcgaacatgtcgccgtcgcagtcaacaatgtggcagctgagacgcagagcacgccggatgacatctcgctgccgtcgacgaactcatcggctgcagctgttccaacaacaacaaacaaagctgaacaacaacaaacaggagcgaacaacatggaggagaaatgcgacatgtcgatggggaagtgggtgagggagcccaagggcccggtgtacaccaacacgacgtgcccgacgctgccggacttcaagaactgccagaagcacggcaaggatcccggccacctctactggcggtggcagccccacggctgcgacctcccgcgcttctcgccggaccgcttcctcgccgccgtccgtggcaagcgcctcgccttcatcggcgactcgctggctcgcaaccagatggactcccttctctgcctcctctctcaggccgagacgccgacggaggtgtaccgcgacgcgcacgacaagttccagacgtggcggttcgcggcgcacgagttcacgctgatggtgatgtggacggagttctacgtgcacgcggagccggtggtgggcgccgacggcaagccgacgccgtcgttcgacatccacctcgacaggctgagcgccaactggacgcgccgcctgccggagctcgactacgcggtcatctccggcggcaactggttcaaccgccccaactacctctgggagggcggccgccgcgtcggctgcgtcaagtgcggcggcgcagccaacctcaccgacgttggcgtcccctacgccgtccgccgcgtggtgcgcgccgctgtcgagggcatcgcgcggtgcaccggctgcaaggccggcctcgtcgcgttcctccggaccttctcgccggaccacttcgagcacggcgcgtggttcagcggcggctactgcaaccgcacgcggccgctggaggaggacgaggtgagcccggacagcgccgcgtgggagctgaggagggtgcagcgagaggaggtgatgcgggtgaaggagacggcggcggcggcggccgcggcgagcgggaacgcgaggaggttcgaggtgctcgacgtgacgaaggccatgatgctgcgcgccgacggccaccccggcgcggccatcgacaagaggtggcagaagaacatcgtcagcgactgcctccactggtgcatgccgggccccgtcgacatgtggaacgagatgctgctccagaggctcaccgagatctccacgctggaccaggatgcttccatctttgaggcaccttaactttgtcacttacatgtaggtccggatcattaatgtatcactgcatacaatcatacggggaacgatgcatgactggtgatgctataggggaggtcttcctatccattgagaggacgtgcatatctctcaaatggttataaattttttgaaaaacaatctagatcaatatatgatgtatcactttataaatatgtaaattaaaacaaaacgaacaacaaacaagagactaccaatccatcagtt

SEQ ID NO: 6261 - DNA, 1661 bp, Oryza sativa
  ref <308>: DATABASE ACCESSION NUMBER: AK063416
  ref <309>: DATABASE ENTRY DATE: 2001-12-06
gatttagggttccaggccgccgccctccgccagcagttccctgaccggcgccgcgacttctccgggccagtggaacgaagttgccgcatcggcgtcccctgcatcccaccgcatcgagaagggacagggttgctgagagcagcagcgccaccagcccaaccgtggtgatggcttcgtcgccggagaagaaggatcctcctagttgtggctctcgggattcccagcccatcccttgcacggacgatccccccttgtctgaatccccaacgacggacctaggctgccacgatccgcgcgacgaggacgccgaccacccggcaccacccatgggcaaaggtgacatcgacgaggatagtgatgatgatggttacgcagacgaggagacaacttgcccagggcagaacttcacgaaggagcaggcaaaggaaataattcgcaagtggctagaaacatacgacaagaggaatagagaattcatggtggcgtgcgaggagttccaaaagcagggaggggatgagacgagtgcttcttgtccagtatttcctttgaaaccgctcccggagacaacagatttctgtaccaccaagagtttgtgctatcaccgtgaatacaagaccaatgatacttctgagactgcatctactattgggtggcttgaacccaaggagatgctccagatcttctctttgaggttgtccagctccatgtcctatcctattagtgtttacggaatctttgcagtacgtgattacttggaccctttgaggaattatgtcttcaaccgtaccagagatgatcctgtcatagttgaacaggattccttcacattacctctttgcagcccttgtcgaggaatgtatgtagtagaatatgcattgtttgaggttgatctttgggtgaaaatggaaggtggagtatctaatgacaagcaattagtatccgcgtatgtcgagatttttgcccgtggcgtgtttaataaggagataagggggcggatattaagcgaccattgctatctggacatacactatatgtatctttcacagagtattgaagctgtcatacaagtatccacagagattgacagtaacgatcctcgtcatgtgagattcactgcattttgtagtggctttgaccgtgagattttgctgttcaatgggaaattctgcaaggacaagtctttccagcacattgtggcaatgaagtccaagggaaaactggttgttcacttggagtttgagggatccctgttttgctggacttttaacaatggtgagcttggagctgttaattctcccgatgattcagtcctgaagcaatttcatgtcagggtgttgttttctccaaaataatgtgtaccagcctataatagcttctttgggtgaaggagaggaagtaaatcagtataaaaagcttgatacaatgtagtgcttgtgttaagatgcttatctgggtaataaactagaccagtacttgcattcagatttgcaaattgcatccagggccgagattgttggaggcactgttcacaaggaggcttaatctttgaaacctggatgggatgtccatccatcattgtgctctagcctctaatccaaacattgatggattgtacacaatttgtgctttatgggcttaattttacctccattctctcgccc

SEQ ID NO: 6262 - DNA, 2307 bp, Oryza sativa
  ref <308>: DATABASE ACCESSION NUMBER: AK063417
  ref <309>: DATABASE ENTRY DATE: 2001-12-06
ttacaagaatcttcagaagtcaccagcattgataactcactggcaagacaaattaaatcattgattctagaagatctcgagggatcttctgaaactcaagctttcccaggggaccccggtactgctgggtcagaagctgaaacttatgggaggaaccttggtacaactgggttggaaactgaaagttatgggagggaaaagttcagttttgttgaagaatcattcatgcataatgcaaacaggaatgtaactgaatcacccgtagaaactccaatccctgaacaagtagagaatgttgagattgaagatagagttggttcatgtgcacattctgaagaatcaaccgtggataaagattccgagtgtcctgaagagggaagtgatattacttcacaaaacaacaatctgccagatcatgaagattcaactatgctaaatgtatttgaggtggccagcaaattgattaaaagagacctagatcaagaaaagcaagatacactacagcctggtgaagtagaaactagaactgtcttggatagtaatgacaaagatacaaaagaaaacccttcagaaaatagtaacacgataggtagtgaagaagtcttgagtcacggtaaccaggaggaccagaaggtgcctgaaatggataaaaccaaaggacgaagtgatgcaaatgcacaagttaaattaagtggtgtaaacttttatgaagatggagatgttacaagtgctgctaataatgttacaactagattgactacaaattcaaaaggccaggcgtcttcctcttcagaaatgctaactggcagacagcacttgcctcaagatgctggacctgctatttctcagacatctaacggaactttccctagtcttgaaaagaccgaagaagtttgcaaagaagctgggagagaattaccaacagataaatctgctgcatttgaagatgagaatagcagggcatgcaaatcaaaggcagagctaaagcagcaacaatttcattctgagaagagtagcagtttacctaaatctgcagaaggtcatatcccatcttctgctgatatatcaagaaaagaaacacctggggttcagagactcaaagagcagggaagtctaagaacagaaagggaaagagagaaggacaaagaggcttctcggagactggaagaaacaaaagaaagggataaaaaatttgagaaggaaagggaaattgctgaagagagggaaagaaaaaaactagaagaacaggaaagggagagggaacgggaaaaggatagacttgctgttgaaagagctacaagagaagcacatgagagagcatttgctgaggctcgtgaaagggcagaaaaaatagcattggaaagggttactgcagcacggcaacgggcttctgctgaggcccgagaaaaagaagagagagcgagtactgaagcagctgctgagagggctgctaggataaaagcagaacgtgcagcggttgaacgagcaactgcagaagctcgagagagggcaattgaaaaggctaaggctgaaaaggctgccgcagaggcaagagaacggagagaacggtacagatcctctttcaaggagagttttaagtccagcaatctggataatcgacaggacacacagtttcagagagcggtttccagtaacttaatgagaaacccagattcatatagcaaagggcttgaggttgaatcagctttaaggcataaagcaagattagagaggcatcaacgcacagctgagcgtgtgacaaaagcactagctgagaagaacatgcgtgacctgctggcgcaaagagagcaagcagagaaacataggttgtctgagtacctagatcctgagatcaagagatggtcaaacggaaaggaaggaaatctgcgagccttgttatccacattgcaatatattcttggagctgacagtggttggcagccagtgccacttacagagctaattacagctgctgctgtgaagaaagcctacaggaaggcaaccctttgtgtccatccagataaattacagcaaaggggtgctacaatcagacagaaatacatatgcgagaaggtttttgatcttcttaaggatgcttggaacaagttcacttcggaggagcgctaggatggatgctgaaacagccgatttattttcgagacaggaaattcgttagtaattatatagccatattgttagtttgttaattcaatattggtgtaaatatgcagttctagatatcttgctagatgatgatgacgctcgtcgctccttgaatcgattcaatagaagagcttcattgctcct

SEQ ID NO: 6263 - DNA, 1315 bp, Oryza sativa
  ref <308>: DATABASE ACCESSION NUMBER: AK063418
  ref <309>: DATABASE ENTRY DATE: 2001-12-06
acaaccagtcaaccacaaccatccgttcgattgatcgatccttccaaaccctagcttagtcgttgactcctgcgccgtccggtgagccagccatgtctcccgtacgcttcaacccgtggcgtgcggcggaggcggaggtgcaaggtgtgaagaggaaaggtgactcctgctacaacaaggggagctacgggaaggccatcaagcactacacccgcggcgccgaactcgaccccagcgacatctccttcttgatcaagcgagccaaagccctatcgggcctgggacagtaccaggagtgcgtgagggactgcaacgacgcgctgaggaggggcgaggagctcggctccggcagctccggcaacaagctgatctcggaggcgctgttgtggaaggcgtcggcgctggagcatctcgccgactgcgccgcggattacgagcaggtgatcctgctgctgcggcggtcgctggaaacgtgccacagcgaggaggcgcagattaggctgaagggggcgttgttcatgagggagcagtacgaggaactcaaaagccaaaaacttgaatgtggtgcttatccaacttacacgcagcatctttaccccgcaagacttgaagagcgcattaacatggataaaaccaggctcaacaccttgttgaagcatgcaacaaaagaactacaaaaaaatgaggacaaattatccgaggagcgctcaagacggaaggaatacgaagacatggtcatggcaattcaagcctcgattgaacaacttacaatgaatcacgatgcagaacttaagtcagtccgggaggataaagcgaatctagaatgtcaactcttacaatgcacagagaaacttgaacggctacaatccatcttaaaccgcgaaccgccattcacctgtcctatatttctgcatgtcatggaggatccttacattacagcggatggacacacctacgacggtgaggcgatcagggcatggctcgacgctgggcatgacacatctccagttaccaacttgcctcttgaacacatggaactcattcccaatcgcgcactccgttctgctattgtgtggtggcacgaacagcagaacgcggcacgcgaacaccgcgacatggcgtgaactacaactcggcgtttcatattgtaaaattcttaattgttgtctgtacttttgaacaattttttgctgtctgtagttacttgttagccatgtttataacacacaggttgaaattgtaggctgttagtatgccttgtacacacaggtcgatataattcatgccagaatgcaacataaacacagcattcagt

SEQ ID NO: 6264 - DNA, 1742 bp, Oryza sativa
  ref <308>: DATABASE ACCESSION NUMBER: AK104959
  ref <309>: DATABASE ENTRY DATE: 2002-08-28
accatctgccacagccgcgaggcttcacttccactactactacggtactaccccccgctgttccgcccgcgcatccaccgatccgtctcagctcaacaccccacgctgccacgctgccagcaacgcaacccccgagtgcatctctcgcgcgcgcgcgtacatggcaacagcgtagtacttcgccacttgctgcggagacgacgatggcggtggcggcgccggcgaggaggttgacgccgttgacgctgcgggacttcctggagcagtccagcagcgaaggcttccgcgcctacccgcgtttccccgttgccgacgagggagtggccggaggagacctcgcgccgccggtgcgcctcctcatcgaggccgggctacgccggagcccgtcgcggttgccctccttctacaacttcttccacaagagccccggcacgctcgccaagatctcgcgcctctccaggagcctctcgcggcggttcagggacggcctctggaggcgccgcggcgaggatgacggcgaggaagacgacgacattgccgtcgacgagagggactcgctcgggctgccgtcgccggtggtcagcagctgctcctcgtcggagtgtgagtacatggccgagtcagaggctgagctggctacgacggaggaggagaagtgcgcgtcggcgtcgtcggcgtcggagtacgaaaagacgtcgcagtcgagcacggggagcgtcgccttccatggcgctgccgacgccggaggagacgggcataaggaggatgtgggtgacgagcccgtggggcgcaagttggagatggaggacaagcaacagctgagccccgtgtccgttctggatttccccttcgatgacgacgacggcgaggaaggaagcgatgccggcatgtgctcgccgtccttccaacagtgcctcgccgagctccagagatcgaaggcggagctgctgcacaagatccgacggctggagggcctgacgcaggtggtcgtccccgtggatctcgaggcgcaattcaccgagtctgattcctccgagcgcacgcatctcaacgccaactcgactagctcttctgatgacaccgcgacgacggcgcccacgacgccacggcaatgcacggacgaccaagatgtcgttaatcacggcgaggaggaggaggaggagcacagcctgctcgcgcggctgctcgagtcggttgttgtcacggacgaggtctccgagtggctcctgctcgacttctttgccgagggagtggaccggctccggtcgtcggcgtccagctgccctctcaacgattgcgaggaggcggcgctgctgcgcgccgcgggggattgggcgcgcggcgcggggcagcggtggggcgtcggggacgtggtgttctccgggtgggcggcggtggcggacatggagcggagccggaggtggatgtgcgtcgccgaggaggagcgggacgtcggcgcggaggtggacgggctcgtgatggacgcgttggtggacgagctggtcgccgacttggcacttggtggtgcgaccacggtaggggtggaagtgtgtacgtgccgccgatgaagtttcgagcgtgtcagggtgtaacgttttgtgtggacgttaacttgagtgttaacgtgacagggtttacgccgaatcgttcaaaaacaggatgtgtatgatgcaagagcgggtgctttcagtcatgggctttatgactttctcaggatgaatcagtacatatagcagattaat

SEQ ID NO: 6265 - DNA, 1413 bp, Oryza sativa
  ref <308>: DATABASE ACCESSION NUMBER: AK063419
  ref <309>: DATABASE ENTRY DATE: 2001-12-06
agagatcagcgagcaacacaaccgccacacccagctaagcgccggtcgaccgatcgatcgatcgatatgggctcgctgagaggaggcggcggcggcggcggaggaggaagaggagattgcagtaagcaggaggagacggagagggtgatgaggagcgtggacgcggaggaggcgtgcgcgctgctgagctcggggaggcaccaatacctggacgtgaggatgtgggaggactttgacaagggccacgtcgccggcgcccgcaacgtgccctactacctctccgtgacgccgcgcgccaaggagaagaacccgcacttcgtccagcaggtggccgccctctaccacgcccacgaccacatcatcgtcggttgccgctccggcgtccggtccaagctcgccacggcagaccttgtcgccgcgggattcaagaacgtgaggatccttgaaggcggctacctctccttgctccgcgctgctaatcaacaataaccgcacccgagcctgattttttacctacagatcatgcccactaattatataatactacggaggagtactactttttcttcgggggtgattatatactaatactatacttgtcgctcgctacagattattgagatgtggcagcttgattattgctcaagacaagacgacgatcgaagcagaacatagttcaagatgtttccgatcgatccatccatcggttgaatgtatatgcgactatatatgttcggtcggtcaaaatatgtaaataagtcgaccttaattgcttgagagaattgatggagcactataccgactgttaaaattttcaatgaaaagctaggtaaaataactagcttgagatagaggtgttttggggatacaaaggtgaaatggaagcggagatcgggaatctccttcccaaattccatttctccaatcccaattccctaacttcttcttcccgatctctgcttcaatttcacccaatttgtatccataaaacacttttattctcaggttttttattacctcattgtccgctatcacggaaccttatattaatgctggtggctccgtacaaggctcgctactccttccacaaggttcactatttccgctgcgaaccattttgtggaagaagtgacaagcccgtacgggagtagcggtggcgactcccatcttctctcccggcgtggtggccatttggagctcagggaccacccctatctaaccgcacggagctcatgggccgtcaggtctagcggccatgctggatccggccaggtgcaagtgcgatggctactccaccatgccaatgacaagtaggaattgcaacgtgtgaggagttggtagaacgtctctgcataattctctttgcccttttacatcaaggaaaataataaaataacaataggatgcatgtgt

SEQ ID NO: 6266 - DNA, 1758 bp, Oryza sativa
  ref <308>: DATABASE ACCESSION NUMBER: AK063420
  ref <309>: DATABASE ENTRY DATE: 2001-12-06
atcggcggcttccctcccatcgccgacatgcctaggaaggagcgcgacagcgagagcagccgccgccggcggcggcggcggcagcgcagccggtcgccgtccgactcggaggaagcctccgactccagcggctcgccgcggcggagccggagccggaaccgccgcaagagccgccggagggacaccccttcgtccagcgacgcgagcgattcccaggcgtcggactccgggtcggactccggcggccgggtccggaggaggagcggaagccggaagaagggggaggtcaccgaagagcagatcgtggagtacatggctaagaaggcgcagaagaaggcagagaaggtagcgaagaagatgaaggcgaatgctgtgtcggggtactccaatgactcgaacccctttggcgatcccaacctgaccgagaaatttgtttggcgaaagaagattgagcgtgatgtatctcaagggcaaaaggtggacatttctgttaaaggtgaaaagaagaaacagagagaaagaatggctgaaatagagaaggttaagaaaagaagggaggaaagagcgatcgaaaaggcacagcatgaggaggaaatggcattgttagccagagaaagagcacgcgctgagtttcaggattgggagaagaaagaggaagagtttcattttgatcaaagcaaagttagatctgagatcaggttacgcgaggggcgcacaaaacctattgatgttctcctgaagaatctcaatttctcagaagaatttgatgttgagttaaacgagccctacttggtattcaagggattaacggtgaaggaaatggaagagctgcgcgatgacattaagatgcatcttgatctggacagggaaagccaaataaatgtcaaatactgggaggcactcatggtggtatgtgactgggagctaggtgaggctcggaaaagagatgccttggatcgggctagggtgcgtggtgaggaaccacctcctgatgttcttgcggaagagaggggcttacatgcaagtattgagggtgatgtaaaggatcttttggagggtaagacttccacagaactagaagagatgcaaagtcaaattgagtcccaaatgcgctctggaacagcaaaagttgttgaatactggatatgagtggaacaaatacaaccagactcactatgaccacgacaaccccccaccgaaaatcgtccagggctacaagttcaatatattttaccctgacctggtggataaatcaaaggcgccaacatacacgatagagaaagacgggagcaccggtgagacatgcctcataagattccatgcgggccctccatatgaggatatagctttccgtattgtcaacaaggagtgggaatactcacataagaagggcttcaagtgcacattcgaacgtgggattctccacctctatttcaacttcaagcgctaccgctacaggcgataaaatgccacgcaaggaagacgttttgatctccattgtgctgttagaagttggtcttgcttttcttacctgagagccctatgcaaataggtttgctcggataccaactctggagtcgactacacatgctcatccgagatcatatgtactaagtgagaacagggtagcatactagcatcccgtacttatgctgattaggctctttgttagcggtttgaaaatagcaacgaagtctcctgtgtacattgtaacttccttttttctgctttggaaattgagttcagatgtcaaaaatc

SEQ ID NO: 6267 - DNA, 2856 bp, Oryza sativa
  ref <308>: DATABASE ACCESSION NUMBER: AK063421
  ref <309>: DATABASE ENTRY DATE: 2001-12-06
agttgtccaggaggcgacggatggcgtccgtgcgtggccggccagccccaagcgagcgagattcaggctggcacccggtctacaatctacatccatgcctcccgaggccgcgggaggaaataagtttggtgtaaattgaaaatcactcacaatggttaagtttacggttgaagagatgcgcaggattatggacaagaagcataacatccgtaacatgtctgttgtcgctcatgtggaccatggaaaatctacccttactgattcccttgtggcagctgctggaattatagcccaggatgttgctggtgatgttcgaatgactgatagtcgttcagatgaagcagaacgtggtattacaataaaatctactggtatctctctttactatgagatgagtgatgagtcactcaaaagttacaagggtgacagagatggaaatgaatacctaatcaacctcattgactcacctggacatgtcgatttttcttcggaagtcacagccgcacttcgtataactgatggcgctttggttgtggttgactgtattgagggtgtctgcgttcaaactgaaactgtgcttcgccaagcccttggtgagaggattaggcctgtcctcactgtgaacaagatggatagatgttttcttgaacttcaagttggtggtgaggaagcttatcaaactttctcccgtgtcatagagaatgcaaatgttattatggcaacatacgaagatgcactccttggtgatgttcaagtctatccagaaaaagggactgttgctttctctgctggcttgcatggatgggctttcaccttgtctaactttgcaaagatgtatgcatccaagtttggagttgatgaatctaaaatgatggagaggctttggggtgagaactactttgaccctaccacaaagaagtggaccatcaaacacaccggttctgatacttgcaagagaggttttattcagttctgctatgagcccatcaggcaaattatcaacacctgcatgaatgatcagaaagataagttgttgcctatgctgcaaaagcttggtgttaccatgaaggacctaactggcaaggctctcatgaagcgtgttatgcaaacttggcttcctgcaagtaatgcacttcttgagatgatgatctatcaccttccctctccagcaaaggctcagaggtaccgtgtggaaaacttgtatgagggcccccttgatgatatatatgcatctgccattagaaactgtgatccagaaggtcctcttatgctgtatgtttcaaagatgattccagcatctgacaaggggaggttctacgcttttggtcgtgttttctcagggagagttgcaactggcatgaaggtccgtatcatgggccccaattatgcccctggccagaagaaagatctgtacgtaaagaatgtccagcgaactgtcatctggatgggcaagaagcaggagtcagtggaaggtgttccttgtggcaacactgttgctatggtgggtttggaccagttcatcacaaagaatgctaccctgacaaacgagaaagaagttgatgcctgtccaatcaaagccatgaaattttcagtgtcccctgttgtgcgtgttgctgttcagtgcaaggttgcctctgaccttcccaagcttgttgaaggtttgaagcgtctggccaagtcagatcctatggttctctgtactgttgaggaatctggcgagcatattattgctggagctggcgagcttcaccttgaaatttgtttgaaggatctgcaggaagacttcatgggtggtgctgaaattactgtctcccctcctgttgtctcattccgtgagactgttcttgagaaatcttgccggactgtcatgagcaaatccccgaacaagcacaaccgtctgtacatggaagcccgcccaatggaagagggtctgcctgaagccattgacgagggtcgtattggcccgcgtgacgatcctaaagtacgctccaaaattctatccgaggagtttggttgggacaaggacctcgcaaagaagatatggtgttttgggccagagaccacaggccctaacattgttgtggatatgtgcaagggagtgcagtatcttaacgaaataaaggattccgttgtggctggctttcagtgggcatcaaaagaaggtgcactggctgaagagaacatgcgtggccgtggcatttgctttgaggtttgtgatgttatcctccattctgatgctattcatagaggtggtggccagatcattccaacagccaggagggtcatttatgctgctcagctcactgccaagccaagactgcttgagcctgtttacttggtggagattcaggcccctgagaatgctcttggtggaatttacagtgttctgaaccagaagagaggacatgtgttcgaggagatgcagaggcctggtaccccactctacaacatcaaagcttacctccctgttatcgagtcatttgggttcacaagcacccttagggcagcaacctctggtcaggccttccccctctttgtatttgatcactgggaaatgctgtcagttgatcctttggagcctggcaccagacagctaaccttgtcctggatatccgcaagaggaagggtctgaaggagcaaatcacccctctgtctgaatacgaggacaaactctagatatttaatcatgttattatgcttatagtgttatatcgctttataattggtagtggccatctatgtgagcagtgagctgctatttcatgtataatattatgtcgaacggttgtacggtagcatgggatgatgatcaggcgatattgttataatttgttatggtatttaccatcatatcat

SEQ ID NO: 6268 - DNA, 1415 bp, Oryza sativa
  ref <308>: DATABASE ACCESSION NUMBER: AK063422
  ref <309>: DATABASE ENTRY DATE: 2001-12-06
ctcgatctctcccaccaccatggctgctgcacctgcacggctcgtcgtccttgtcctcgtggcggtcgtcgtcgtcgtcggcggcgacggcgacgccggcgtcatccggcaggtgacggacggcgggtactggccgccggggctgctcccggaggcccagttcgcggcgttcgtgcggcggcacgggcgggagtactccgggccggaggagtacgcgcggcggctgcgcgtgttcgccgccaacctcgcccgcgccgcggcgcaccaggcgctcgacccgaccgcgcgccacggcgtcaccccgttctccgacctcacccgggaggagttcgaggcgcgcttgacgggcctcgccgccgacgttggcgacgacgtccggaggcggccgatgccgtccgccgcgccggccacggaggaggaggtgtccggcctccccgccagcttcgactggcgtgacaggggcgccgtgaccgacgtcaagatgcagggcgcgtgcggctcctgctgggccttcagcaccaccggcgccgtcgagggcgccaacttcctcgccaccggcaacctcctcgacctcagcgagcagcagctcgtcgactgcgaccacacgtgcgacgcggagaagaagacggagtgcgacagcgggtgcggcggcgggctgatgacgaacgcctacgcctacctgatgagctcgggggggctgatggagcagagcgcgtacccatacacgggcgcgcaggggacgtgccggttcgacgccaaccgggtcgccgtccgcgtcgccaacttcaccgtcgtcgcgccgccgggcggcaacgacggcgacggcgacgcgcagatgcgggcggcgctggtgcggcacggcccgctagccgtgggtctgaacgcggcgtacatgcagacgtacgtgggcggggtgtcgtgcccgctggtgtgcccgcgcgcgtgggtgaaccacggcgtgctcctcgtcggctacggcgagcgtgggttcgcggcgctgcggctgggccaccgcccctactggatcatcaagaactcgtgggggaaggcgtggggggagcagggctactaccggctctgccgcggccgcaacgtctgcggcgtcgacaccatggtctccgccgtcgctgtcgccccgccgccgccgtgatcgattgatcgatatcgatcggccgccggcgatctcacgttaccgatgtgttatgtgaagtacggagtactactgtatactggatgtgcttgattaaagctttgcttggttagcggtgggagacgtggcggtagtaggtgcttagtactacgttttacaaatggttttacatagttgggttgtatgtcgatctactactagtgaatacagaataacaaaaagttatggacgtgtacattaagctagggtatattgaagtcatctt

SEQ ID NO: 6269 - DNA, 2562 bp, Oryza sativa
  ref <308>: DATABASE ACCESSION NUMBER: AK063423
  ref <309>: DATABASE ENTRY DATE: 2001-12-06
gacgcgactctctcgaacgaacccggaggagtcccgtaccccagcggcagcgaggggggaggctgaagcggatcggggccgcggcgtacgactacgagaacgactcgcggtgggcggggtactggtccaacgtcctcgtgccgcctcacctcgcctcccgccccgacgtcgtcgaccacttcaagcgcaagttctaccagcggtacatcgtaagccccccgcccgcccgcctccgcttcttccgtgcctgattggattggttacggctctcggctctcgtcttggtgatgtgcgaaaattatggatgcatctcggcatctcgtgctgcagttagttcgatctgtttgtctcggtgttggtaggcaggtactagtgtcggagaaaattaggtgtcgcgacgaaaaaggttgatgatggcttgtacttgatgatgctagaaagagctgcttagtttagactgtaaaattgtatctatggtgtcgaaatatcaaattgagtttatggggtgcacgaggtcgtcatcgtcatcgttgtcatcgtgctcggtatttcattgtctttggttccatggagttgataagatattgaattttactatttttgcactcttagatttggtgtagctgcagtttttataccgtattgcaatgattgtgtaaggaaattgagtgtgctttacttggtcatgtttatgtcttggtgctgtggatgaagatggttgttgtttgcgccagatcaatacatgtaaaagcagaaaacatatgatgaggttaaatttttagaccaaacattttttgttggctttcaattagggaatgtttgccaacgatacgaatcaataaccttgaagcaaaaatatagttattactagtgacatcaagaaaatttgtaaacaatcttgtgacttctaggatgtgctagcgatggtatatttcttctattggatagggcttcctttccgagccaatatttgtttcagacaagtttcttcagttagcttgtgttatggtagcatttgtttcagacaagtttcttcatttagcttgtgttatggtagcatgtagatgtgaaatgaaaacaaaaaagttgtgaatggtgaattggatcaaaggctgtggtgctttgacttcctcacacctcatcccatcactttcatcttgctgccgcacaaatacctggatttgttatatactagcccttctactaaacctgatttattatttgcttgatgttttccacttggttgatggtgaccttactgctgtgactttatgcacagtctgattatagtttattttattaatgtcacaactcacaaaaaaagaatgttgtttgcaattggccttctcaatttcgaaagtcagaggaaagtaaaagattcaagacagaacagtagtgaaattgttgttccttcacattccaggatcctgatttgattgttgagccaatgtcttccacaagttcaagtcaatccaccaaaccagcagcaaggtcttcagcaacaccatccaatgagaatgtcagagctcgtgactcaggatcaagtgcaagatcaactgctgcctcccaaccatcacaaacggaaaggactgcaaattctttatggttggatgggcggactatacatttctctatcaatgcctgggtactggtagttgctagtcttggaatattgccaattctaccaaaacatattgcaagcaaagcctatagactctcattactaggaacaatatgctcctcagcatattctctttatgtcacctatgggaaaccaagagcatggaacatggctgcaattcagccttggttgcaatctataattgtagccaaggactttgttcatttgatgttctcccttatgatgttcacatctaatgtgcactataaaattgctcttcttcctgtgctttgctgggcacttgatcatgttgctagattcctaaggcgtaactttgcacgctcctctttgtacaggaagtatttggaggagccttgtctgtgggtagaaacaaacaacacaacactcagcctcctttgttcaaatgctgaaattactctgggtttccttatgatcgtatctcttttctcgtggagacgcaacataattcagactttcatgtacttccatctattgaagctgatttaccatgcacccgtaacatctggctatcaccagagcgcatgggcgagaataggccgggccgtaaatccctacatccatcgctacgcaccgttcctcaacacacccatttcagctgttcaaagatggtggttgaggtagaaagcatgatgaatctttgcatagccctcctacagaaagaaaaggtccagagcttttccgttacaatttcgttagaagatactcagcacgtcacttgcattctattgttatgcacagccgtattcttcacttgcgtagcgttctattgttatgcacagctgtattctcatttcagccatagtgccagataagtttctgcaagctatatatagctcttgaatgcattaacggaattactgaggacagacgttataatcaataacagaacggtaaacaac

SEQ ID NO: 6270 - DNA, 2563 bp, Oryza sativa
  ref <308>: DATABASE ACCESSION NUMBER: AK063424
  ref <309>: DATABASE ENTRY DATE: 2001-12-06
catttgcactcagaaaacaaactgagcgaaagattccctattggacttgaagagcagatacataaatgggatcctgataagatccgcagatttcatgagcgttggtattaccctgctaatgctactttatatctggtaggagagatcgatgatattcccagagcaatacgagaaatagaggctgtgtttgaacatacacttccagaaggtgaagcagcccctatgtcaactgcaagtccatttggtgctatggcaagcctttttgcaccaaagctacctggtggcttggctgcaagcctaactggtgaaagatcacctgctgcggataaaataaagcctgtgaaaagggaaagacaggcaattaggccacctgtagaacataagtggtctcttcctggagttgcccaggatgccaagcctccagcaatttttcaacatgaattgatccagagtttctcaatcaacatgttctgtaagatacctgttaaccaagttcagacatataaagacctgcgaagtgtcctgatgaagcggatatttttatctgctctgcattttcgaatcaatacaagatataagagctcaaatcctccttttacatccgtcgagctggatcatagtgactctggaagggaaggttgcactgtcactactcttacagtaacagctgaaccccagaattggaggagtgccatcaaagttgccgttcatgaggttaggagactcaaagagtttggtgtcacaatgggggaaatgacccgctacatggatgcactgataaaagatagcgagcaactggctatgatgattgatagtgttccctcagttgacaacttggacttcattatggagagtgatgcacttcgccatactgttatggatcaattgcaggggcatgaaagtttgcttgctgttgctgaaaccgtcacccttgaggaggtcaacactgttggtgcagaagttctggaatttatttcagattatggaaagcctgatgcaccgcttcctgctgctattgtggcctgtgtacccaaaaaggtccacatggatggagtaggtgaaactgattttgagatacatccggaagaaataactgattccatcaaggcgggtcttgaggaacctatttacccagagcctgagctcgaggtgccaaaagaactgattactcggtctgagcttgaggacttgaaattgcaacgcaaaccatcatttgcttctctgagtaaagaggagaatgttgtgaaaatatttgacgatgaaactggtatagcacagcgccgcctttctaatggaatttccatcaattataagatcacacaaaatgaggcaagggttggtgttatgcgactgatagtaggtggtgggagggcaacagaagattctgaatctaagggatctgttattgttggtgttcgtactttgagtgaaggtggctgtgttggcaacttttcaagggaacaggttgaacttttctgtgtgaataatctcataaactgctcattagaatccaatgaggagttcatttttatggagttcagatttgctttaagagacaatggcatgcgcgctgctttccaactcctccatatggtccttgagcataatgtgtggctagaagatgcatttgatagagcaactcagctatacctgtcttactatcgctccattcccaaaagtttggagcgctctacagcccacaagcttatgttagccatgttgaaccatgatgaaaggtttgtagagccatcaccacattcattgcagaaattgactctccaatcagtcaaagatgctgttatgaaccagtttgttggtgacaacatggaggtcagtattgttggtgatttcactgaagaagaggtcgaatcttgtgttcttgactatcttgggactgtgagtgctccaaaatcttcaaaaacacaggagcatattgagaagatttccttcctgccgtttccttcggacttgcattttcagcaagtatacataaaggatactgatgagagagcttgtgcctacattgctggccctgcacctaatcgctgggggtttgcaactgaagggaatgatctattcaatgtcatccggagttctagtggagatgctcaagtttctgaatcagcaaacacagatcttacggagaggaaacataatgacgttcgcagccattctctgttctttggcatcactttgagtttgttggctgaaattattaattctaggctattcacaacagttcgagattccatgggattaacctacgatgtttcttttgaactaaacctttttgacaaattggaccttggttggtatgtgattgcagtaacatcaaccccgagcaaggttcataaagctgttgatgcatgcaaaggtgttctcagaggattacatagtaacaaaattgttgaaagggagctggaccgggcaaagaggacgttattgatgaaacatgaggctgagacaaagacaaatgcctattggcttggtttactagcccatctgcagtcttcatctgtgcctagaaaggtgaagcataaattgtttgtgtgtgcgctccacc

SEQ ID NO: 6271 - DNA, 1762 bp, Oryza sativa
  ref <308>: DATABASE ACCESSION NUMBER: AK104960
  ref <309>: DATABASE ENTRY DATE: 2002-08-28
ctctcccggtcgcgccgccatctcctctcccaatcgcgcgcatccgacctccttctttcccaatcgcgccgccttctccacccccggcgcgcgagcagccttctccacccccggccgcgccgccgcgttcccaactccatgtcccgtcttcttccctgaaccgcgccaccgccgtccctgccctcactccgtaccccgcctttgtctccaggctgcggcgacgcggccccaactcctggatgcagtgtctcacagctgatgatgtaatcaggaaaattactgaattttttcaatccactgggacccgacgatttgtcacacaacggcagtgagacaatcagtggagatggagcctgcaaatgcggaggacagtgtcgccaaagccctacggtaccgcgatcaattggtaagaaaccgaacccagtccagaggaatccatggcgtggttgaagaagatgaaggagatggccatcattgcttgcccgaactccatggcagcaattcgttccaagtggtggaggatgcatcctcggctgcacgtcgtgggcgccgcggcgggcatgatggtggacgtgggaagagacccaccacacaatcgattagcagtgcaccatcctcggcagcacgtggtggtcgaccgaggaaggcgccatacaagcagccacggccatcgagcagtggagctgctaccggggtaacggccagtgcagacaatctctgcgcagaaggatttgtcgacagtgagacatgtaatggaagtggaatgaaggagtttgacaaagcagaatggtctaccacaaacactaggatattttgtgaactatgcgtagaacaaatcgaagccggcaataggcctatcgggataatgactactagggggtaccagaacattgctgtcaagtacttgcagaaaacagggctacgacacagcaagatgcaattgaagaaccgatgggatatactaaaagccttgtatagcttttggcttggcctcctcaaagatacagggcttggatgggatagtacacaaggaacagtttcagcaagtgataaatactggaagcaagtcactaagggtcattctgaatggaagaagctacaacatggtcccccggattgtgaagatttattgagtcaaatgtttgctgaggttgctgttgatggttcttctgcttgtgcacctggagaggatgttggaggggctggtgtacaaagccttgatgacacaccagtggacatctcattgcatagatacacaacgaataacaaatcagtgaaacgagggtgtattaccactgaaaatagtccactgaagaaggttaagaaccccatggttaaggtgatgaagaatattcagtccactttggacaccaattgtagtattgccaacaaggtgatgcaaggtgaatttaggtacaactctattaaggaagtgatggacttggtagtggagtgtggggcagcagaaggaagtgccgagcatttcatggctacgcaattatttgtgaaatcttttcacatcgtgacgtgttcaagacttttaccaccaaggagggaaggctcagttggttgaagaggtggtgcatgaaggaaggcttggagtaggatagtgctaattatttatatgcatgaacttatcatctttgtttaaattttgtgagacaatatgtattagcaagacaacttctatttatatgcatgaactaatgaattgcccatgtaatatgacgctttaatttgaatgcatgaacttttatgtgcc

SEQ ID NO: 6272 - DNA, 2508 bp, Oryza sativa
  ref <308>: DATABASE ACCESSION NUMBER: AK063425
  ref <309>: DATABASE ENTRY DATE: 2001-12-06
caaactccacaatcccctgcacccccattcccaccctactcccccgtcctccgccctgctgccctccaatgacctcgccgggcgcctcctctttcgccgccgcgctcgtcgtcgaggacttcccgtgggtgaagagggaggaggagatggggatggacccggacaagtaccgcgaggtgttcgacctcgcgcagcgcggtgctcgcgccttccgcgacggccacttcgacgaggcagtttccttttactctaaagcacaaactttgagaccaggagatcccattatccttagcaaccgaagttctgctttctgtatgataagtcaagtgttgagggagagatcagcagctgactcagagtaccaaccattgaatggtcttgatcccacaacgcatgcggaggtagcgctcaaagatgcagagaaggtattagctatcggcagtaattctccaagaccatatcttctcaaggcatatgcgcttatcctggtaaaaccttcttaaattcagtattgttgtataatctagaatttagatagatccttgcttcagtatcatttgttagagccagtatagatagctccaatatcattttgtaggccaaagattttagtgtttattctcgaataggataattcaattgaccgtacaatgtttaactgactagtattaggcattgtgatttgcaaaagcttcactctgtgcaacactttcgccagttagcctcaactgagcacacactttaataattactactgttaagcgcttgaatgagtgtagggactgaaaaaaaagttggcagtaacacgcataccaagaaaatgaaagcaagggggggggggggtgttggcaggaatggactgatgaaaatgtgagggagtgaggctatttctggtttactctttgtgttgttgatttcaacaggtgggtcaactaaagatagtgttgcaactaaaatgctaaatgagaattccaatgactcgtctctagttaatgcttactgttggctgcttgttattgcctcctctaggtgctatgcatgacctgtacatgatattttctcccctcataagaaaactcatccttaagcagcacttcaggtagcaatgtgcagcacatggtgacctgtatttctgcgggttcaatattttcatgggactacctaaaaatcattcgccacaaaacagagccaaatgcagtcggtttttttctcagtcgctaatccatacctaacgactcagtggacatccaactatgtacacactttgatgattaattaggaactagtacatactttttcttaaaccatatgattataacactatataacattcaacacattagtaaaaaatacaaagtaaatataatgtaactatagtgtaagtgttatctaattacattataaccgtagtgtaagtgctatgtaattacattgtaactatagtgcaagtggtatgtaattagtgtaagtacttcgtaaatgaaaattcctgttttggcaatgaaatcaataccactaccatgctcagttggttaggaactaagtcacagggaacgcccgggaatttcgtcccggaacgaggaacgggaacgaagcgaacttcgttccaaaaacggagggatcatcgacccaatacgtggtccggcaatggaggaacgaggtacattgagcaaaagatgagaaggggaactcacccggatctacacgggtggaggacggggcaccgcttcaagcgacgagtggcgaggggtatcacttcaatcgacgagtggcactgtttctccttcgctgctcaccactgtcatgccaaggtacataaaccagcgcatgccgccgccgccgagcagggaaggttggagaaatagaggggtgccgctcgttgcagccgcttttctccctcctgcactggcgaggaagctgatggataagtctttgtggtccttggtcctgatttcttctttttgcttttgggtagtttcaccttttcaggacagcatctactcctttagcattttttcagttgctaggacagctgcggttagtaggacagcagcaattagcatctcctttatgcctcctttatgctttattcagtttggatgccctctaggacagcatcccattcaaatttcgaatttttagactaggagggtgcagcaataggcttgcagccagctatggttttatatatgtatccaacctcccttgggaaggtatggctttgtgttttgtgaatgaagaaaaccagaaaattgccccatctcgagtgccatcctcttctcaataagagtaaccattgaagttctaacagaagccatcacgcagcgccgccgtcgttgcatcgagctatctatggactggatgcggcggctggggatggggacgaatgatgaggacgaagtgatgggtgctagcctgctaggtttcactttcacgtactggtgatcggctgggttgcactcatggcccaaattcttttggctggtgatgagctgtcacatgaatagc

SEQ ID NO: 6273 - DNA, 2281 bp, Oryza sativa
  ref <308>: DATABASE ACCESSION NUMBER: AK063426
  ref <309>: DATABASE ENTRY DATE: 2001-12-06
ccctttacccccatctcacactccaccccccctctctctcgtttcctcctctccacccaacccaacccaactcggtcgtcgtcgtcgtcttcctctcgaatccacggttcaaaaattccctccactcgcgcccatttccccaaaccctagccggccccggctcgccgccgcccgccgcccgccggctgcctacctcggcctgccgggatccgtgcgcggaacatgcgggatcccggaccatggcgaccggacccgatctgaccccacccgccgccgccgcctccgccgaagcgccgtcggcgtcggcggccaagaaggaccgccacatcgtgagttggagcaccgaggaggatgatgtgcttcgtactcaaattgcgcttcatggaactgataactggacaattatagcggcacaattcaaggacaagacggccagacagtgcaggagaagatggtacaattatttgaactcggagtgcaagaaaggagggtggtccagagaagaggacttgctattgtgtgaggctcaaaaagttcttgggaacaaatggactgaaatagcaaaggttgtctcaggcagaactgataatgcagtgaagaatcggttttctactctatgcaaaaggcgggccaaggatgacgagctattcaaggaaaatggatcattatgttccagtacaagttcaaagagggcattggtacaaactgggtgtctcacatctggtgcaagtggctctgcaccacctattaagcagatgaggccatgtaattctgatttcaaagagaatatgacaccaaatatgagattagttggacaagacaagagcacacaagattctcgacagcctcttgcaattgtttatcaaaacaatcaagataatatgaatacaatggatacccaaaatcttgttgctaaaactgcagcaaaacaattatttgcgggggaacagaattgcgttaagcatgagggtaattttttgaacaaggatgatccaaaaattgctactttattgcagcgagccgacttgctttgctccctagcaacgaaaataaatactgaaaatacaagccaaagcatggacgaagcctggcagcaactacagcatcatttggataagaaagatgataatgacatgtcagagagcagtatgtcgggaatggcttcactcctagaggatcttgacgatttaattgtagacccctatgagaatgaagaggaagaagaccaggatttaagggagcagaccgaacagattgatgtggagaacaagcaaaattcttcacaaactagcatggaagttacatcacaaatggttcctgacaataaaatggaggactgcccaaatgataagagcacagaagacaataatatggaaccgtgccctggtgaagacataccaacatctgaaaacttgactgaggctgctatcgaagatagcttgcttcaatgtgtggaatacagctctcctgtacacacagttattcaagctaaaacagatgcagaaatagcagcatcggagaatcttagcgaggttctcgaacataacaggcttcagtgtattcaattagcctcccctgctcagacaactaccccagttgaagcaaatgcagaaacaccagcttctgagaagttacgcgaggttgtcaaatgtaacaatccttcatgtatcgaattcacttcgcctgctcatacagtcccaacattcctgccgtacgcagatgacatgccgactccaaaatttactgctagtgagaggaattttttgctgtctgtgcttgagttgacctcgccagggtcgaggccagacacttctcagcagccttcttgcaaaagggctctccttaatagcctatgaaactgttataagtatatttcagttttttttcctgcattattggtgtgcctgggatctaaacccaagcctgccatgcatgccccctcagcatgcctactattcagcgtgtgttaggaggttctttgacatactcctatttgcatcaagtttggatatctcatatccaagtttagctgtttgtatatgagatctcaattgttttaagagtctcatagtttgtttggttgtacatattgcattggcggtgttgtagtagcatcatacaggaattaaaaggggcgatggtgtaccaaagagtttacagcttgtatccaaaatatagaataagtactattctttgtgtaattaactcttgtaacctttctatgttgtacggaatatattggtttggtgtgtagtgtgatttaacagtttccttctgactg

SEQ ID NO: 6274 - DNA, 1806 bp, Oryza sativa
  ref <308>: DATABASE ACCESSION NUMBER: AK063427
  ref <309>: DATABASE ENTRY DATE: 2001-12-06
gcgctcctcccgattcttccattccacggtgatccctcgcctggttctcctccatccgcgcgatccgatcgcctcgaacccagcgagcgtcgccgccgttggtagcgggccgtgctgcgtctccctgctgctgctgctgctgtaactccggccggtggagacggtgccggcggcgaggcgaggcgagagcgctaacgcccgtggcctgttcgacgaaatgcctacggggaaggaggggatggaagagcctttgccgaccgacgccgaccacattggggctctcccggacacagtgctccaccacgttctctccttcctgccgtcgcaggatgccgtgaggacgtgcgtgctcgccaagcggtggctcgacctctggaagtctgtcacggcattgcgcattggtgaccgtgacaagaggaagctgtggaccgtgaagggtctccaggggttcgtggaccattttctgctgctccgtgaaagtgtgcctctccacacatgtgtgctcaggttcatcgtgttcagcgaagacctcaacgagacatcccggctaaacctctggattaagcatgctctgctgcgtatggttcagtttctccaggtctccatccggcagaatacagccttctatcaccagattaatctaggcatcctgccttttgtttcacggcacttgtcgatgcttgagcttcacggtgtacggatggtgggaagtttccttgatttctccagatgcccggctttgcaacatctagaatttgaccgctgtgagttgccatgtgacaagatcttatcagagtccctaaaacttctgcgcatcactcgctgcaaattcagtcaaacatcacgggttcgtatttgtgtcccaagtcttgtttcactgcggcttgatgatttttatcgccgtactccagtgcttgagaggatgccatcattagttgaggcatttgtcagagttgtccacaggacttatgattgttgtgggtatgattatattaactccggtgattgtggtaatgagcactgtaagtcatgtcatggcatcaaggacgacaacaattgtgttcttctggatggtttatcagaagctaagactttggcattgattgatggaaccatatcgtttattttcaatagggatttaaaatggtgccctacatttagcaagttaaagactttattactcaatgaatactggtgtgtgcctgatgagtttagtgcactagcctgcattcttgaacatgcaccagttctagagaatctcattcttcagctctattccgagggtcctaagcatacaatgaaaatcaaaggaaactgtcatccaatggatagatcagctgcaatatcaggacaccttgagacagttgaaatcagatgtgaagtggttgataagagagtactcaaagttttgaagtacctgtctacatttaacatacttttcagttttgagcaagtcaagatttctgaagaagatgacagtgatgacaatgaccaagaggatgaggaagatgatgatgacgacttttatggagaggaggaggaagaggaagaagaggatgacgaagatgaagatgattgatgcaccaccttttgattattcagaaggttgacaccacaaggatgataacatgatgtgtttttctccgtgagtagcctgaagggcagacttctggattcgtaactggttgctattagggatggcaatggtacctgtttgtcagtttacccataggtgaaaactctattggagttagatatgttcggagaatgctttgcattttagtgcctatgggttcttattggatc

SEQ ID NO: 6275 - DNA, 1734 bp, Oryza sativa
  ref <308>: DATABASE ACCESSION NUMBER: AK063428
  ref <309>: DATABASE ENTRY DATE: 2001-12-06
atcgtctcccgtgcttcacttgtagctatctactccatctatcaagcccccagctcaaagacgtacgtacgcggcgctagctatatatactaattagctacatcgatcactagctatagctagctcgatcgataacttatcatcgtacttcaaggcgatcatgcaatctgctgccgtggagacgacgccggcggcggcggcggcggcggagaacggcggccaagtggtcgtcgtcgtcggcggggggtgggtggatggatgctgggcgcgggtgcgagcggcggtggaggtggccgggaggtgggtgggcgggctggcgaggaaggtgggcgggatcgcggcggacgacccgaggagggtggcgcactcgctcaaggtcgggctggcgctgacgctggtgtccgtgctctactacgtgacgccgcttttcaaggggttcggggtctccacgctctgggccgtgctcaccgtcgtcgtcgtcatggagtacaccgtcggtggcacgctgagcaaagggttgaacagggccttcgcgacgctggtggctgggttcatcgccgtcggggcgcatcaggtggctaaccggtgcggcgcacagggagagcccatactcctcgccgtcttcgtcttcctactagcgtcggcggcgacgttctcgcggttcataccggagataaaggcgaggtacgactacggggtgaccatcttcatcctgaccttcagcctggtggccgtgtcgagctaccgggtagaggagctcatccagctcgcgcaccagcgcttctccaccatcgtcgtcggcgtcgccacctgcctctgcaccaccatcttcgtcatgcccgtctgggccggcgaggacctccacaagctcgccgccggcaacctcgacaagctggccgacttccttgaaggaatggaaaccgaatgctttggagaaagcgctacgagtgagagtttggagggcaaagcctttctccaagcgtacaagagcatacttaattcgaaggccactgaagactctctgtgcaactttgccagatgggagcctggtcatggaaaattcagtttcaaacacccatggagccaataccagaagattggagctctttctcgccagtgcgcttcttccatggaggctatggcttcctatgtcatcacactcacaaaatctcagtatcctgaagccaatcctgagctgtccttcaaagtacgaacagcatgcagtgagatgagctcacactctgctcaggcactcagagagctctcggcagcacttcgaacaatgaccgtaccatctacaacctccatgtctgcagccatcaaagctgccaaaacactcaggagcgagctatcagaggataaagctctgctgcaagtgatgcatgtggcagttactgcatcacttctttcagacttggttacacaagtaaagaaaattgcagaatctgtcgataacctggcacgacttgcctgcttcaaagtccctgaaaaatctcagaaagaagtggctatcaacatcatgagttgacaaactgactacgtcgagagcatcaacaccaaatgggacaaactagtacggcctgcaattttattgtgtaggagtattagcaagtgactaattcttcgatgctagaagtaattatgatgctgaactgtaaaaataaaacgttgcagccttccgtacaacaaagactacttataagcagctaaatataaatgaacagttttcttctt

SEQ ID NO: 6276 - DNA, 3204 bp, Oryza sativa
  ref <308>: DATABASE ACCESSION NUMBER: AK063429
  ref <309>: DATABASE ENTRY DATE: 2001-12-06
tatgctcagcaagacctgtggcaatacagacacccaataatcctagtgtgtctgatcaggatctacaacagcaacaactatggaactttgcacaaagaacaacagctttaccttttgggcgtggggcttttactttagctacaacttacacactgttaacagaggctctggttttcccaaagcttgttttggctggtcggttgcctgcacaacagaatgcaacagttaatcttgacctaagtactagaagcgtctcagaattcaaatcttgggctgagtttcacaatggtgtcgctgctgggctcaggcttgctccttttcaggagaaaatgttaagaacctggatacaatataatagaccttctgaaccaaattttactcatgctggtctgcttcttgcatttggtttgcatgaacatctacgagttttaactatgaccgacgcttaccgatatctctcccaggagcatgatataactagacttggtttgctacttggtttggctgcatctaatagggggacaatgcacccggcaatttcaaagatgctctattttcatgtcccttcccggcatccatcttctacgccagagttggaattacctactcttctgcagtcagcagcagtgatgggaattggacttctctatgaagggtcagcacatgcattaaccatgaaaattcttctgggtgagattggccgaagaagtggtggtgataatgtgctagaaagagaaggctatgctgttgctgcaggctctgcattaggacttgttgcattaggtcgtggaagcaatgctttcggattcatggacactttcctggaccggctttttgaatacattggcagtaaagaagtctaccatgaaaaacacttaaatgcagcaatagctgctgatgagcaaagtggcaacaccggacagatgatggaaggagcacaaataaatgttgatgttactgcacctggagcaataattgctctagccttgatatttctgaaagcagagtcagaagaaattgcagctagactcagtgttcccaatagtcactttgatctgcagtatgtgagacctgattttgtaatgcttcgcattgtagcacggaatttaatattgtggaacagaatacaacctaccaaagattgggttgagtctcaagttccttcatttgtcaactttggtgtttccaatacgagtcaagaggctatggacagtgatgaattggatagcgaagctctgtttcaagcttatgttaatattgtcactggagcatgcattgcacttggtctcaaatatgctggcagtagaaatagtgatgcccaagaactactctacgcttatgccgtccattttctcaatgagatcaaacacatatctattcagactgcaagcatattgccaaagggattgttgcagcatgttgatcgtggaactcttgagctctgcttgcatcttattgttctctctctatcactggtaatggcaggatctggacatttacaaactttccgcttactgcgttatctgaggggaagaagttctgcagaaggacaagtaaattatggactgcagatggctgtaagcttggctataggattcttattccttggaggtggtacacacacattctcaacttcaaatagtgcagttgccgcattactcatcaccctttacccacgtttgcctactggaccaaatgataatcgctgtcatctccaggcattcaggcatctgtatgtaatagctacagaacctcgatggattcagacagtagatgttgacacaggacttccggtgtattgtcctcttgaagtgacagttgctgaaacggagtattatgacgagactaattactgtgaagtgacaccttgtcttctgccagagcgctcagtgctgaagaacattcgagtttgtggacccagatattggtctcaggtgattacacttacacctgaagataagccatggtggaaatctggagacaggactgacccattcaatggtggagtactctatataaaacggaaagttggatcttgttcctactcagatgatccaattggatgccaatctttgctttctcgagcaatgcatgaggtttgtgatacaccatccacgagctgcagtaatcaggcaaacagtgctactcgtagttcacttagagtcgatcagttagtaagcacattttctgctaatccaagcttgatagcttttgcaaaactgtgttgtcagtcatggaaggacaggcgcaatggcagttttgaagagttctgctctcaaatactttatgaatgtatgagcaaggataggccagcactattgcaggtgtatataagtttttacacaataattgagacaatgtgggagcatctaaagattggacattttcctttctctgattctcttttcctttccagcttgaaggttgcatcagcctataatgaagcactgattgatggtagaattacaactggaggcattattcagtccacatttttggaatcacttatgaagcgcatagagtacatcttcgcagaattgccgaacctgcatgacagcttcatcaattacctgaacaaaggcaaatggcctgatgcacaaaacgaagcagtgctcctttcttggtatctccagtggtacagcatcccacctccccatattgtgtcatccgcaattgaaaaggtgaagcccagaactcggaccagcttgtccatgctcccgcttcttcggctcctgctgccaaccacacatctcgtggggctcatggagattgagaagcttcacatgactcatggtcacgagggcttgaccttgcactgaaaatgcaagaaacgtttagcaacgagtgagccgattgtgactggactgaatagtatcagggctcattgttcttatctactagtaaggatcatacctaagtgctggaatgccaaggctttgtgtggaggcctcaatcatgtgatcctaccttgcaatgctcatattgccatctgatattgtaccctatgatcctgttgcatttagatgtaagtgtccattttggctttagaataggaatgaccgaatgagtgagcctagtttgagcctttgataactgctacatttgggctcaatgcaacatgggttcccagtgtatgccgaccggtttcaataaactggtggttacgaattgagctataatagagcacattttgtttctcaggct

SEQ ID NO: 6277 - DNA, 2667 bp, Oryza sativa
  ref <308>: DATABASE ACCESSION NUMBER: AK063430
  ref <309>: DATABASE ENTRY DATE: 2001-12-06
aaaaaaaaaaatccgaacccgccgccacaatcccccgcccattcccggcttcccgctcctctctctctccctcccctccggtcgcgcgtcccgtctccggagcagcagccatggacgtcaacgaggaggcaatggcggcgcacaagcgcgcgttcctcgacttcctcgaccaggatgtcgggaagggggtgtacatgcaggccgtgcgcgacatggtgcagaacaagcgccaccggctcatcatcggcatggacgacctccggaaccacagcctcgatctcgcccgcagggtgatacggagccccgcggagtacatgcagccggcgtcggacgcggtgacggaggtggcgaggaacctggaccccaagttcttgaaggaagggcagcgcgtgctggtgggattctcggggcccttcggcttccacagggtcacgcccagggacctcatgtcgtccttcatcgggactatggtctgcgtcgagggcatcgtcacgaaatgttcactagtaaggccgaaagttgttaagagtgttcactattgccctgctactggaggtactctctcacgtgaatacagggacatcacatctttcgtaggcctacctactggttcggtttatccaacaagggatgaaaatggtaacttgttggtcactgagtacgggatgtgtgaatacaaggatcaccaaacactctccatgcaagaagtgcctgaaaattctgcccctggacagctcccaagaacagtggacattattgtagaagatgacctagtagattcttgcaagccaggtgaccgagtatcaattgttggtgtttacaaggctcttccagggaaaagcaagggcagtgttagtggtgtgttcaggactgtccttattgcaaacaatgtttcacttatgaacaaagaagcaaatgcacctgtctatactcgggaggatttgaagaggatgaaagaaatatcaaggagaaatgacacatttgacttactaggaaattcacttgctccatctatatatggccatctgtggataaagaaagcagtagttctattaatgcttggtggtgtagagaagaatctgaagaatggaactcacttgagaggagatataaacatgatgatggtaggagatccttcagttgccaagtcccagctcctaagagcggttatgaacattgcccctttggctatttcaactactggaaggggttcatctggtgttggtttgaccgctgctgtcacttctgatcaagagactggtgagagaaggctggaggctggtgccatggttcttgctgatcgtggtgttgtctgcattgatgagtttgataagatgaatgatcaggaccgagtggctattcatgaagttatggaacagcaaactgtgacgattgcaaaggcaggaattcatgcgtcactaaatgcgagatgtagtgtgattgctgcagcaaatccaatatatggaacttatgaccgttcattgacaccaaccaagaacattgggcttccagattcattactctcacgttttgatttgctttttattgttcttgatcaaatggatcctgagattgatcgtcaaatttctgaacatgttgcacggatgcatagatattgcactgatgatggaggagcaagatctcttgataaaacaggatatgctgaagaagatgatggtgatgttaatgcagccatatttgttaaatatgatagaatgctccatgggcaggacagaaggagaggcaagaaatccaaacaggacagactgactgtcaaattcctgaagaaatatattcattatgcaaagaaccttattcagccaagactaactgatgaggcatctgatcatattgcaacttcatatgctgagctcagggatggtggtgcaaatgcaaagtctggtggaggtacacttccgatcacagcgaggacactggaaaccataattcgtctatctactgctcatgccaagatgaaattgagacatgaggttctaaaaactgacgttgaagctgcactgcaagttctgaattttgcaatataccacaaagagttaactgagatggaagagcgtgaacagagagagatggaaatgaaacaacaagctgatcatgatgcaggtgcaagtggtggtaatgcagatgagcatagaagttctggaaacgacccaatggatgtggatgtaggaaatgcatcgaatgatcaggatgttcctgcggagagaattgaagcatttgaggcgattcttggtcagcatgtgttggcaaatcatctcgatcaaatatcaattgacgaaattgagcaaactgttaatagagaggcagctgcaccttacaatagacgtcaagtagaattcattttggagaggatgcaagatgcaaacaggataatgatacgagatggcatcgttcggataatctaacttcaaaaatcatgtcttgcattgtggacaagctgattactgtgcatcatccttgtctttttcatctgatacttagccagtttggcattgcagaatgtctgcatctgcaccggaggttgatgtacccgtgtatcttaatttttaacagcgagatttatgatgatcatctgtgtctttgtactttaaattcatgtaccgtaacgtaacaattctcctgatctagtgatatgtagtccctgatttt

SEQ ID NO: 6278 - DNA, 3125 bp, Oryza sativa
  ref <308>: DATABASE ACCESSION NUMBER: AK063431
  ref <309>: DATABASE ENTRY DATE: 2001-12-06
acctttcttcttcttcttcttcttcgcggcgacatggcgcgcgagggggaggggtggatccatgaccatgagtagcttacgaggattccccaagcccaccacccaccacccaccgccaccttttgttccgcaaccgcaatgatttcttcttcttgtaccacactgcttctgctgctgccgacgccgccgccgccgccgccaccagcaaaccccaatctcgcctgaccaccgttccccacctcgcctcgcctcgcctcgccgccgatacacgatgttcaagctgcaccgccaccgctcgtcggaccgcgtcggccagcgctttgacttccgcttctccaacttccgcgccgtccaggtcccggcagtatcagacaggctgttcctttcgattgtctcagtggatactggaaagacagttgccaagtccggtaaagcagctgcccgcagtggaatttgccaatggcccgacagcatattggaatcgatatggttttctcaagatgaagtgtcaaaagaatttgatgaatgccagtacaagattgttgtttctgtgggatctataaaaagtggtgttcttggggagatcttcctaaatctcactaactttctgaatttggtggacccaaccgctatctctttgccgttgaagagatgcaactctggaacagttttacagcttaaggttcaatatcttggcgccaagtctaagtcaagtggtgtgagatcctggaaggatttgtcccctcgtctcgatgaccgtagtccaaccaatgatgacattgacagcaagtcagatggctctgatagtgttgcaaataggagtgttcgctcttcatcaggaaatcctttaggtggcactactcaagatgaacttggaaacagggaaatgagtttctcagcatctgggtcccaccggagttctaattctggagatagtaccgcggatagaacaaacttatcccctagagacagctctaatgggggtatgcatgtgggaaggcaggattctgccagctcgtacgttagcgcaagtcgtggtgatgatggatttagatcaaacaattcatctttcagttcccgtgcatcaggtccaaatgtgttgcaaggaaatactccaaaatcatttggaaatgggtttggtcagttatcattagggacatctgattcatccaaagagcttcttgaagcggctgaagaaacaattgaggaactccgtgacgaggcgaaaatgtgggaacggcattctcgcaagttgaaggctgatctggagatgttgaagaaggaatgttccgagaaatccaagcaacagactgagctagaagctgagctgtctgctgcgcatgctgaacgggattcctataggcaagaaattgaagagttgaagtcatctatgaaagaggtaaccacgcgacaaaaggttggaggaacctccaaatatggggactggatagatctgcagaaggaacttgaagatgatgtgaaatttctgaaagaatcaaatgcaaacttatccatacaactgaaaaatactcaagaagcaaatatagagcttgtttctattcttcaggagttggaagagaccatagaagaacagaaagcagaaatatctaaaatttctaaggtcaagaatgtcactgacgctgatgccttaaaaaagggtccgttagtcaaacaggacacagaatgggctaagcaactgtcaattaaagaggatgaaatcacaatgttgagggagaaactaaatcatgtgctcaatattgaaaatttaggttctgatgctgtttatcttgaacttgagaaagaaaatgaacttttaagggttaaaatacaagagcttgagaaagattgttcagagctaacagatgaaaatttggagcttatatacaagctgaaagaagtgggtggtgctacaaaaggtcaaggcccttgtattccaaacgatagcaatttgcaaattgaagagcttaaatcacagatatgtcaactggaagaggagcttaggagcaaggaattgctgcacactggaagttttgctgatgcgtcaatatctagctcaaaagtattacaggaaaaatgtgctgaccttgagctgaagctgctgaattttaggtctcaaatctatgagctagaagagaagttccaaaaaagccaagaggaactagaacaaagaaatcttgagttatctgagctgaggcagaagcttgacagttcccattccatggcaggggaaggtgttcaaactagtggtgcaagaggataccaatttagaaatggtatggatagtgaacctgagacagatgtgttgaaggctaaaattcagctacagcagcaggaaaatgatgatttgcgatgttccaaagttgaaatggaaagcgttatttctaaaattcaggcagagaagagtcagttggaggaatgcctggaagcatcacgtaaagaaagcagcatttcttcaaaatgcttggatgaggtgcggcaagatatccttgtgctttcaagcagcatagattcccatgtttctgccaataaggttctggaaagaaaggtaactgaactggagagttgcaaagctgacctagagctacatatatcggacctggaacaggaaaacatagagctatcggaacgcatttctggactcgaagctcagttgacatacatgacaaatgaaaaggagtcaagcgagctgcagatacatgattctaaatcacttatcgtcaatctcaaagataaagtagagcgccagcaagcagagatggaaactcaaaggcttgagtttaagcaaaaacaacaggaagctcagagaaaattgtctgaagcacaagatgattcagaggttctgaggagatctaattctaaactgcaatccacagttgagagccttattgaagagtgcagttctctgcagaatcaaattgcagagctgaagaggcagaaattggagttgcatggccacctcactcagcaagagcaggaattggataactcaaaaaaacgaaaccttgatttttgcaaaacagtcgaattcctagaggcaaagctttcttcacttcagaaagacatttcttccaaagagcagtctttactatcagaactggagagtatattccaggagcacacggggc

SEQ ID NO: 6279 - DNA, 1900 bp, Oryza sativa
  ref <308>: DATABASE ACCESSION NUMBER: AK063432
  ref <309>: DATABASE ENTRY DATE: 2001-12-06
caactcatccatgtagatgtctttgcataataaacttgtaatttagagatgaaataacaggcttgttcggctgagatttatgctgcagcaacagcaccaccacacaagagaaagcatgaccgctgcagcggctgcgctgtacagctatgcggaacaaggccaacatagatacaatatgtaccaggactattttgtaatgtgaaagtacaccaagaagtagtaggtaaaaaaaggagtaggttgggtatcgtttcactgccaacaccattgtcttctttcaggagagtaaagtatatatatattctaaatgttctcacccttgacgtgcaaaagttcagctgtagtatattcagtggaatttcaatgtcatcattagctgcatatacctcataaagtaatctgttcttcaatgtttactatttgctcagggtctcctactctttgtttcatgaaccacaacataaacacgctttaggtaatatctgtgttgatatattctgcagatatctacttgcttaaattgtgatggcaaagggaaggtaattactgaaaattgcactagctgctgtgggtcaggcaaaatccaagttgaacgcaatatcagggtagacatacctggaggtattcatgatggttctgccattcgaattaccagaggaggtagcgttgataatcaaaggcgcgcaactggtgacctatacatatttgttcatgttaataaaaaagaaggcatccacagagaaggcctcgatctgttctcagatgtcacaatagattatactgatgcaattttaggaaccacagtgaaggtagcagcagaactctggctccagctttacctagaaagagtgtttcttatttcaggttgaaacaatagagggattcaaggatctttatattcctcctggcactcagcctggggagcggctgaaatttgctcaactgggagctccagacattaagaatcctaccattagaggagatcataattttgtgataaatgtgaagatcccgaagagtatcaggtttgagttgcgagtattgttgtactttgtgatgggttaatgctagccgtagtattgctttgtagtttttatgcggtaaacatccttggttacagattatactgttacaaggcgcatcaaattatgttatattactcttagcttttggtgctttgccttatcaatgcttatattcatcagcaaccaagaacgaacattagtacaagaaattgcagcactgaaggaaactgggtgtatttctgttccaggtgaagagactaaaaacagagaaaatttgggagagagaaactcccattcatccacagggaagagaagatccctctggcgatctatcaggaatttgttcaggggcgacgatggggatacgagatttgcttcaatcagcgcacaatctgttactccattatggactccgcgacgaggatctcatccagctgttctgttgctagaaggattcctgatgatcacagtgctcttattcgtgataagcagaactcgtataatcaggtcgactccaaagcggtatgatcgtcctactgaagctaaagaagccgatggagagacttaaaatttattatggtgatgttatttggacgttattgcacacagattttttctcttctttttcccataatattcctatggagtttatgtgcctagcagtctgagcggggaagaagcgctccggcttggtttgttattgtaggggaaaatgcagccaacatcgggtacagtggagcctaatagtaacagaagtgacatagaactaacacaatttttagcaggcagtcagaaaaaaggacttgtattcatcagttgaccatgctactactgcatactgtagtactatgagtaaccaaattttgaagctagtt

SEQ ID NO: 6280 - DNA, 2711 bp, Oryza sativa
  ref <308>: DATABASE ACCESSION NUMBER: AK063433
  ref <309>: DATABASE ENTRY DATE: 2001-12-06
atctgaaattgttattgctagcactagacaggagatagaagagcagtggaacttgtatgatggttttgaggttatacttgcaaggaagcttcgggcaagagttaagcgtggtgctaactgctatggccgttatatgcctcgtatggttataatacctcctggtgttgaatttggtcatatcattcacgattttgaaatggatggtgaagaagaaaatccatgtccagcctctgaggacccacccatttggtctcagataatgcgcttctttacaaatcctaggaagcctatgattctggctgttgctcgtccatatcctgaaaagaatattacatcacttgtaaaggcatttggtgaatgtcgccctctaagggagctagcaaatctgacactgataatgggtaaccgtgaggccatttctaagatgaacaacatgagtgctgctgtcttgacctcagtgcttacattgattgatgaatatgacttgtatggtcaagtggcttatcccaagcatcataagcactctgaagttccagacatttatcgtttagctgccaggacaaagggtgcttttgtgaatgtggcttattttgaacaatttggtgttaccctaatagaggctgctatgaatggtttgcctattattgcaacaaaaaatggagctcctgtagaaattaatcaggtgctgaacaatggtctccttgttgatccacatgatcagaatgccattgcagatgcactgtataagcttctttctgacaaacaactttggtcgagatgtagagagaatgggctaaaaaatattcaccagttctcatggcctgaacattgcaagaattacttgtcaaggatattgacacttggtccgagatcacctgctattggtggcaaacaggaacagaaggcacccatatcaggaaggaagcatatcattgttatatctgtagactctgttaacaaggaagatctagtccggataatcagaaacactattgaagtcacacgcacagaaaaaatgtctggttcaactggttttgtgctgtcaacttcacttacaatatcagagatacgctcgctgctagtgtctgcaggcatgttgcctactgtttttgatgctttcatctgcaatagtggaagtaatatctattatcctttgtattcgggagatacgccaagcagttcccaggttactcctgcaatagatcaaaatcaccaagcacatattgagtatcgatggggaggagaaggcctaagaaagtatctagtgaaatgggctacttcagtggtagaaagaaagggaagaatcgaaagacaaattatttttgaagaccctgaacactcttcaacctattgtcttgcatttagagtggtcaatccaaatcatctaccccctttaaaggagttgaggaaattgatgagaatccaatcactccgttgcaatgccttgtataaccacagtgccaccagactctctgtagttcccattcacgcatcacgttcccaggcactaaggtacttgtgtatacgctggggaatagagctgccaaatgttgcagtccttgttggtgaaagtggcgattcggattatgaagaactgctaggtggtctccacaggaccgtcatcctgaagggcgagttcaacatccccgcgaacagaatccatactgtcaggagatatccgttacaagatgtcgtcgccctggacagctcaaatatcattggcattgagggttacagtacagatgacatgaagtcagctctgcagcagattggtgtgctgacacaataacaccttctagcttgcataccacacaaagaaaacgaaaagggaaagtaaagaaccaaaccaagaaccactatttccatacttgatggaaatgccgattttgttttgtaggatgcagagtttgtgtgtgtgttccattcctgagctgtgaataactctccctccttttgtttgtgctaagttcttttttgaagtgaaccatgtggatacatcaaaaaccagacacaaagatggtttaaacatccatgattacgggaaaaaaaaccatacataaagaatagaatggttcagagcgagagagctctaaaatgcaagaaggccaacttaattacatggatggagggagacagacctctcgagagtgtgtgctcaatacgattttgttgtgttcaatctgttgaggccgccgccgccgccgccatggccggcgatcgcttgctcagacgggctcgagcgagcagaaaactcgccggagttggcagctcgccggccggtgcaaagcaggagagcacaccggcgtgcgtgcatggcccacacgtcaggtgataaggtgtcgaggtcgggaatcgagtgaaaagccacccgttgcctgctaaaacgggaatggataacgtcggacaaaaatccagaggatcgtttgcagccacgctccacgcaattgaagctggacaagtcgactttattcccccgttttgacgcgctgaaataggcaggtatccgtatcaagaataagttcgtgaagatcggaaaattcatagtagagtagtatatatctgaagctaactccccccctgtgcaaataatagtatactttttttaggggataatattttatatagattatacttgacagttggaagtagaaatacaattgtaccgaacagattattggagatgagtagaaaaaaaataaaacattgccacc

SEQ ID NO: 6281 - DNA, 1916 bp, Oryza sativa
  ref <308>: DATABASE ACCESSION NUMBER: AK063434
  ref <309>: DATABASE ENTRY DATE: 2001-12-06
aaactacattcactgaaacgaagagaaattgagacctctaggctccagccgtacatggccatggcgactaccagctctaaaaacgagaggtggagcctcgccggcgccaccgcgctcgtcaccggcggcagcaaaggcatcggccgcgccatcgtcgaggagctcgccagcttgggcgcgacggtgcacacctgcgcccggaccgaggcgccgctgaacagatgccgggaggagttgacggccaagggccttgccgtcaccgtctccgtctgtgacgtctcgttgcgtgccgacagggaggcgctcgccggcacggtgcgcgagctcttcggcggcaagctcagcatcctggtgaactgcgccgggatgtcgttcctgaagccggcggtggagctgacgccggacgattgctcgcaggtgatggggatgaacttcgagtcgtgcttccacttgagccagctggcgtaccctctcctcaaggcctctcagagaggttgtatcatcaacatctcgtccattgcttcggtggtcgcgttctgctctcttcccaacgccgtctactcagctgctaaaggagcaatgaaccaagtcacaaggaacctggctgctgagtgggcgaacgatgggatcagagttaactgtgttgcgccaggcttcattcgtactccgctcctatctgaattcgtggagggtaacgagttggggcgagcagagttcagccgtgttcccatgggccgtctcggtgaaccagaggacatcgcatcgctggtggcgtttctgtcaatgccagcgtcctcctatataaccggtcaggtcatatgcgccgacggcggtcgctgcctttcttgaagtggatggtcctgattcctgaaagatatactaattacctgctacgttgagagatatggaagaattaatggaatttgtctaccacgtgccaaccaggctaggattaatttatctgggaagagcacagattgctgggtgtgtcaaaatgatagaagttaccacatatattttaaataagtctgggaaattaggtagaatagtttgtcgggacgcgtctaatgtgggaattcccatggaacagaagatcgatctggtttctaagactaattaatcttataaaaatattgtgctggaacattaattaatcttttaaaaatagggcgtgacgatagcgtagggcacagcaataggtgttggaagcagagtttgggaatggtggcgtttccgctcgccgcactccgaaaagagcggctacagggcggtgtgtcgaggcggtgatagaggctttgggatggcaatggtggccagccaatcaacgttggctcagcgactgcaacttgggatgagagtggcatcgcaggcagtgccagcgacattctgagttgatggatccggcctggccagattgccctccaggtgacaaaaggatgcattgaaaacgcaagatgacggtaggcaggatatggcaatgctggcaatggatatgtcatgaagttggatctaggacgcaggtgccacgggatttgagatgtccatgcccgatctgaacgtgtaatcgcaaactacattaaaaggcttcttcttctctgcctccactgaatagcgtcggcaagcaatggcaccagggccaggatgttgacagatcagatcgattggctctagccaatggcaaggacaaggtggcaaaaggagctcatcacatatgatcagaacgtcgtgaggggtgcaagagttcataccgcatatcaagatcgacgcattgcggttttttgtttagcatgactcgttattaaataggagaaggccaagcaatagtcttgtagtcttttcattttcttttttgttttagttttcatgtaacctctggtagtgtgtggatatggagaccagattactatccattatcc

SEQ ID NO: 6282 - DNA, 1639 bp, Oryza sativa
  ref <308>: DATABASE ACCESSION NUMBER: AK063435
  ref <309>: DATABASE ENTRY DATE: 2001-12-06
gacccagcgtccacggcgagcgccccccgccggcgacggcgacggcgagagatgcgggcccgagccgccgaccacctcgaggcgctctccctggagatcgagcgcaagctgcagaaggctctcaactccaattcgcaacgtcttcagctgctgcagcagttgtttgctgacatcgcattgaaggtggatgaccgcgctcgagatgtgattttaagcacgaacgatgatggtattgctccagtagatgagcgagaagatacccggttgtgcttctatgagattcttgctaaccattttgttaaagtacctgaaagtgggaggcgtatacttgacttgatagtgcaactctggagccagtcttttgcagcgaacatatttgcacttcttttccacagatggttattcgaagtccctcttgatgggaaggaagtatcactgagatacagctctgctcttgtccaaggagctactaatgttttttggattgacatccaaaccaatacaagacactttctctcattatataattatctccttgaagaggttgctttagtcccagatcaactgagtaagatatcagtacaggctggtagaggtcttttcctcctcctctcgagatttatgctgttctatgatcaagatcacttgcttgcaagtttccttgagcattttcctacttttccaaattctttcttggttggtggccctgcagattactatgtaattgaactcactgatcagctccagaaactaaaagttgaacctgtgcttctgcattacctctcccgcttgaccatccttcaaggattggaattgaggatgagtacaagcactagactgaaggcttgcctttacagcttcacttctcctggaggtcctacctaccctacacgagcagtaaggcatgcagcctggaatacactggatctgctttttcctgttggccgatatccaaggcatgtgataagcctgttctttcggcttctctatccgtggtactggccttcctcttgctggaactttattatgacttgcgtcaagactgtctactactacatcctcaacctaattgtctcaagctgggagaacatgagacggcccaaccaccaaaggatgcatagggactgaagaaatggcagccaaatcaaaggctagcaatagcatcttgtgttgtttttgttttccttttcttttttgttttcaagggtagcctggtagctcttatgtttgttcaaataacatttgctgtataaatttgtctgtttgttatgctgtttacacgggggatggagtgagaaaaaaaaagtaatgcaagagaaaagaaagggaagcctgcaaatttcatcagacttttcagataggaaattacattgttcagatttagtatatgtcaataatcaatggccgagattttaggaagagtctccatagagtcccttttgcaatgcagtgcatggtctgttgaggtagttgagcagcaaatggctaatgtgcagtttgtaccttgtgttgtaatacaactaagggtccaggcaatgaattgcttaggacctctgcactgtagctgccatgagcaagagtgaactgtttatctgtagtctgtactgcacataaatagatgattgtctctgttttgttt

SEQ ID NO: 6283 - DNA, 1661 bp, Oryza sativa
  ref <308>: DATABASE ACCESSION NUMBER: AK063436
  ref <309>: DATABASE ENTRY DATE: 2001-12-06
atccattcatcccccgctgctctctctctctctcgttcttagcgctctctttccctcagctctgtcacctctctcgcgcgtcggcggcgcgcggtggcaggagggaaggtagcggcggcccggcaggaggggaggcggggtggcgggagggaaggcggcggcggcgcctcccctccaccagatctggccaagagcggcagcctggcaggaggggaggcgggggcggcggcggcgcctcccctccgccagatctggccgggagcagcggcctagcaggaggggaggcgggggcggcagtggtgggcggtggcggaagggaaggcgacggccccgcaggaggggactcggcgacggcccgacaggagtgttcattggaaaccagctgctgatgaacatacaaaaccaaaaaagcgccagcatactgtgctgtacataccaagaagaagaaggagaagaggtaatgggcaacaacgtgcgggcaggcatcacgctcgatagaattaattgtttgaaacgatgatatgataagaacaagagggagaccaactgaccttaatccattattcatggaagcgtgaaggttacgtacttccgttgacatgaaacttcatagtatatatgtcgacctttcatctgcaatcaccaactaaacaccccagttaattggctgtcatctccgtcgtctctcacagcgagcattgtgctgcctgcgcaagggacttcatccaaagttgttgaaataaaagggagatcattctctatcctttccataagatagatggcagcctgtgcagccagtactgcaaccatagattgggagctcctggaagcggccatatctggtgataccaggtcaatgaagatgaagtacatggattcacatgatcctacaattctgcttggaaaaaatccacaaggaaacacatgtcttcatatatcttccatgtgtggccatttggaattttgcaaagatgttctttcacttccacaggatccaaccgtgaagaagaaactactcactactgtgaatgtgatgaatgagacgccactgcttactgccataacaagtggccatgttactttagctgcttttctactcaaatactgccatgaacaaggattcagtgaggtaatcttgaaacaggacaagcacaaatgtaatgcactgcaccatgccatttgcaacggccacaaggacctggcactggagttgatagcgactcagcctgccttgtccaaagatgtcaacaaatacggcgagtctcccatgtacattgcgttgatgatgagggattctaagtttacagatatttttgagaaactgttgggaattgatggttcttctcattcaggaacctatggctacaatgctctccatgcagctattagaaatggaaatccaggtgagaactatggagttcaattgagatcacatggcaaactagcctagtatcatgaaactttatgctttgagctttttaagatccttggggacatgctttgtattgtccttgaggagatgccatactttttagtatttatatatgatacctctcggtacctcaataataggtaagtgcaaggaggcaccataaactaacgctagaaagtgtggtatctcatattaccttctcaggacaataaaaactttgataatcctc

SEQ ID NO: 6284 - DNA, 2663 bp, Oryza sativa
  ref <308>: DATABASE ACCESSION NUMBER: AK063437
  ref <309>: DATABASE ENTRY DATE: 2001-12-06
aatttagtagctttctttcatcagaaggaatattgcatcaaacttcttgtcctgatactcctccacaaaatggggtggctgagagaaaaaaccgtcatcttttggagacagctcgctcattgatgtatgctatgaatgtacctaaattcttatggagtgaggcagtaatgacagcaacttatcttatcaaccgcacgccatcaaggatacttggaatgcagacaccatgtgagatgatatttggaaagaatgaatttgttgttccaccaaaagtgtttggttgcacttgttttgttagagatcatagaccttccgttggaaaacttgatcctcgggctgtcaaatgcatctttataggctatccatctggccagaaggggtataagtgttggagtccatcagaacgacgaacctttgttagtatggatgttacttttagagaatctgtcccattctacggtgagaagacagatttaagttctttattcgttgatcttgataattcaactagtggtcatgatggtcaacagatggaaggtgaaatattgggtccaaagggagatgaacaatcaaagaaggaaaagtttgtggttggttcaattccatgtcctatgggtggtcctgttgcacaagagcaagaatggaggaagccacatgaagaggaaaatcttcaagtatacacaaggagaacaaggtgtccagtaatccaacaagttgaagaggataatcaggtagagaaagatgtaaatcatgagcaagggtctttggagtcagggggagaagaagaggaagttagagaagaatctgacttaccaattgctgtcagaaagagtgtgagaagcaatgcaggtaaacctccactaaggtatggttttgaagatcaagatgagggtgatgaagaaaataatatatccaactttgtttcctatgactccttgtcatccacatataaagcctttgtagcatcactagattcaatggaaatcccaaaggattggagagaagcaaagcaagatccaaggtggcatcaagctatgttagatgaactagaggctcttgaaaagaacaaaacatgggatcttgtaccatttcctgaaggaaagaaagttgtcaactgtaagtgggtttatacagtaaagcaaaatcctaatggaaaggtggaaagatacaaagcaaggctggtggctaagggatatagtcaaacatatggaattgattatgatgaaacttttgcaccagtagcaaagatgagcacggtaagaactctcatatcttgtgcagctaattttgattggccattgcatcagctagatgtcaagaatgcatttttacatggagatcttcaagaagaggtgtatatggatatcccaccgggatttgctacttcacaaactgaaggaaaggtgctgagattgaagaaatctttgtatggtcttaaacaatcaccaagagcatgatttgatcggtttaggcgtgcaatgtgtgctatggactataagcaatgtaatggagatcatacagttttttatcatcatagtggagatcatataaccatccttgctgtctatgttgatgatatgattatcactgggaatgattgcttggagataactaggttgaaacagaatctaagcaaagaatttgaagttaaggacctaggccagttgaaatattttctgggtattgaaattgcaagatctcctagagggatagttctgtcacaacggaaatatgcattggatttgctcagtgacacaggtatgcttggatgtcgcccagcctctacaccaattgatcaaaatcataaattatgtgcagagtctggaaatccagtgaataaggaaagataccaaagattggtgggaagactgatatatttgtgtcatacacgacctgacataacttatgctgtcagtatggtgagtcgatatatgcatgatccaaggagtggtcatatggatgcggtctataggatcttgagatatttgaagggaagcccaggtaaaggcctatggtttaagaaaaatggacacttggaggttgaaggctattgtgatgcagattgggcaagttgtcctgatgatagaagatcaacttcaggctattgtgtgtttgttggtggcaatttagtatcttggaggagcaagaagcaaccggtggtgtctcgctcaactgctgaggcagaatatcgggcaatgtcagtgagtttgagtgagttgttatggctaaggaatcttctttctgagttaaagttgtcggtggatactcccatgaaattgtggtgtgacaacaagtcagcaatcaacattgctaacaacccagttcagcatgatcgaacaaagcatgtggagttggatcgtttctttatcaaggaaaaactggatgagggagttttggaattagaatttgtaacgtctagtggacaagttgctgattgtttaacaaagggtttaggtgttaaagagtgtaatcgttcgtgtgacaagatgggtatgatagatatctatcacccatcttgagggggagtgttgggctgtaaatagaatagtgtgtgtgtgtgtgtgtttgtgtgctggcccatcagctagaggcccatctactcatgtatatgtaaataacgatagcaatactgaaggggtgaagcttccagagaaaaaattcac

SEQ ID NO: 6285 - DNA, 1595 bp, Oryza sativa
  ref <308>: DATABASE ACCESSION NUMBER: AK063438
  ref <309>: DATABASE ENTRY DATE: 2001-12-06
aacccaattcatccccaagtccaccaccacacacacacacacacgcacaccactcctctccccacaacccatccactcccacgccgccgccgccgcccggatcgccgcgagatggagcaggtgagcacccctcgacctccgcgatgacgatgccctttgctgtatccgatccatccgcgagcgtggaggaaatggtcgctgctgctgctgctgatgatgagtgtgtttgtgtgtggctggaggagcagtacgagaaggtggagaagatcggggaggggacgtacggggtggtgtacaagggcaagcaccggcataccaacgagacgatcgcgctcaagaagatccgcctggagcaggaggacgagggcgtcccctccaccgccatccgcgagatctcgctgctcaaggagatgcagcatcgcaacatcgtcaggtgacccacctcctccctccctgctagctccatctctctctgcggctgttggttgggtgggtgggtggattgatggattgcgtgatttgcgatttgtgaatgctttgggaatttggattgtgccgtgcaggctgcaggacgtcgtgcacaaggagaaatgcatatacctcgtcttcgagtacctcgaccttgacctcaagaagcacatggactcatccccggatttcaagaaccaccgcatagtcaaagtaagatgttgaaactaacatcctcttttcattgatgcaagtatcacgccatttagtgatagtaacttcgctgaaagtgtgggatgagctagccattgcttccattttgtgcatggtttatgttgaaacgggaaatgtgatgctgtcctttgcgcctgtgtgcagtcgttcctctaccagattctccggggcattgcgtactgccactcgcaccgtgttctccaccgagatttgaagccccagaacctgctgatagatcggcgtaccaactcattgaagctcgcggactttgggttggccagggcatttggcattcctgtccggacatttactcacgaggtacattttacagcccgacacgtttttcgtttggtacactgtgatttatagtccttgcacatcacactacagaagaggggaactgtctaatggtgaaaacgtgcagttaatttagatgagtacatcaaaaaattaactttgcctccttcactgcaatgcattttgtaggtgctctattaagtaggccacatgtgtactctttttgctacatgttgtgctactgtctgtttcattgaatatcacgcatgtattcacggagatatggtacaaattgtggactatgaccctatgtcatggctgccaactgaagattaatgtcacccattagtgctcactgtttttatggtacatcttaagactgcttgtatctctcttccctctactgccttttataactgttaagaatcaatggtagataattttccaagcctactgtcatagtgcttctttgtcagtttgaattttactctcatggcaatatctggtgaaacctataaaccagcacaaatacctggacctttttctgtactgtacaccatccatttctacctaactacctttacgacaactcctgc

SEQ ID NO: 6286 - DNA, 1808 bp, Oryza sativa
  ref <308>: DATABASE ACCESSION NUMBER: AK063439
  ref <309>: DATABASE ENTRY DATE: 2001-12-06
ctctttccctttcgaaaccaccgaaacccaccagcggcgaggggagcggacgccgaggcggcggcggggttcgtcgatgcgttcgaagatctggtagatcctaggagcaaaccatggcttctaagaaagccttggcaatgcagccaagcaagaaaatttgcatgaccttgttgccgcaagacattgttgaactgatacttctgaggcttccggtaagcactctgctgaggtgccgtggtgtctgcaagcaatgggatggcattattcgggatcctcagtttgccatggtgcacatccagcgtgcgccgcgtcgccccctatttttctttcaacgagagaatttagtccatctcctctaccctagtgaagcaatcctctttgatgaagcatggtcaccatcaaaatgggttgtacctgtgatcgagcctgatgattttttatgtgcttcatgcaatggacttatttgtttacactcggataaatcaacaatcaagatagccaaccttgcaactggtgaatgtatgcatctagtaaaacctgtcaggaactcaaagactgatcacttctcttattacagctttgggtttcacccagtgacaaaacaatacaaggtaatgcactttcttcgtgacgagcacctccatgttggtactagcttcagcataattcaagtttacacactcggtgatgagaaatggagagatgttagaactccacaggctttaagcttgagatgtgtggaaagatctggagttgtcaatgttggtggggcaatgtattggctgactgaagatgaggaaagtgtttggaaacatgcagttgtgacctttgatctcagtgaagaacttttccagtggttacagctcccagcagttgatcctgcaaactatgtgcttggtgatcctgaccagtggctgattacagaggttgatagcaatgtgtctgtaagctattacgagacagggaagctgcatatctggacaattgacagcaagatagagcaaagctggagtcagaagtacaacattcgcttatcaatgcttgaagttccaggaccacattggatctgcggtgataagattatcttgcatgattttaataagaacctatatttctatgagttgatggggaagaattctgagattgagtcgagcaagttagtgaagcaattgagattcagcccccgcaacaacatgcaatgctttatgtttgtgaagtcgcttgtacggttggatgcattcagaaaggctggtgttgtgcgtaggccaaagcgacaggagggttggaaattgaagaagtgggaagtgtggatggataggctccatcgactagagaatcattgcagaagtatccatgatatgaaacacaagatttatgaaaatgcagataaaatgggcatggagatcaaactagatttgcagcagacaccagatttggatagttccctgcggctgatcaactggttggagtataggcgggtactagagatattgtgtgttaatctcgacaacatgcatgaagtattaacggtcatgaacaacacaactggtgctgcccataataaggaaagccatgtggcagatcagggtacttcgagttcagctgttggcatatctggctcatgacaacgacgacaatgttaacctcatgatattttggtgatccttaagtttgtagcagcacaaaactgagctgacacttttagcttttgtctgttcaaccatggcatctgcctatcatctttgacgccattatgtctgtcatcttttcttaaaatgttactgctaatgtcagttattgtttaccgc

SEQ ID NO: 6287 - DNA, 1398 bp, Oryza sativa
  ref <308>: DATABASE ACCESSION NUMBER: AK063440
  ref <309>: DATABASE ENTRY DATE: 2001-12-06
aaaggaaagtgggcccaattctgctaggcccaatagccatccttcctcacctcgctcacccgcgttcgccggcgaccacgacgaaccaagccctagtccccgccacgccaccgtccgccggccgccggcgacgcccccaccgccggaggaggccaaccccatccatccatcgcccctccaccgacgcgcggccgcacgtccatgagatcacggcggctcccctgtgcggatgcggtgttccgaccccgcttcaccgatgaggacgcacgagcgtgcagcgattctcgtgggcatttcgcctcaggacgcgatccatccccgccgccgctgctgccggcacagtgtgaggatcatgtgggaggtacctctggtcttgcagatgtttcatccttaggggactttcctggtgctacaacattgaaagaatcaaccgcttccagtcccacttcctccctacaggcagtaccagatgacaccattgatgctccgcagtcagggcactgcctttcctcatcccttggctcaatcatttgggttcagaaacctcctcatggccgacctggcgtataccacattagaaaggatcgtttggggtctttccatacgtatcctgatctgggtggtccatttcagagcttgaatgaagctgaagatgttatcagtagccatattaacaagctgtatccaccagttaagttcgaggaacgagctggggaatcttacgtggacatgattataaggaaagcactttattggcctgatggcactaggaagaaatgttccaaagcagaagcatttcagaatgtcaataataatatgaatcaactggctaaggtgatattagacatgtataacgatgaccacaatcttttggaggatcttgcttttgagctcaaaggtgtcattaactatgaaccaattattgaaagtcgtaggtggtttgatcatattaatttcactgcgactactaaaggactaaatgggttggacagtgaccatctatttttcgctgaagcgatgtctttgaaaggagaaaaagattatgtggtcacttgctgctctttgataagttctgatgacaatggtaactgctatacctgcaagattgggaataaaagtatgaagcacccaagtgatgtcaattcatatgttggtggtcactgttatatcaaaggaatatatgacactatagtgtcgagtgactctgaagaggatgaggatgcagaggagcagaggctaagaaaaatgtatcagggtcttgatgatccaggtgtatgtgaagagctctttgattgagatcatgtcagttgcaactgtaacggatttataattagcatatgtcatgcaaccatgttgtggagctgtagttttatttagttatctttgatcttgattatg

SEQ ID NO: 6288 - DNA, 1642 bp, Oryza sativa
  ref <308>: DATABASE ACCESSION NUMBER: AK063441
  ref <309>: DATABASE ENTRY DATE: 2001-12-06
atcagctccacccccgaaaaatttctccccaatctcgcgaggctctcgtcgtcgaatcgaatcctctcgcgtcctcaagatgcagatctttgtgaagacattgaccggcaagactatcaccctcgaggtggagtcctctgacaccatcgataatgtcaaggctaagatccaagataaggaggaggaggaggaacaggaggtggtggtggtggtggagggaggagaggcggggaggacgggggtgaggtgagcctgcgggagtggctggaccggccagggcgggcggtggaggcgccggagtgcctgcacgtgttccgccaggtggcggagtcggtggccatcgcgcacgcgcagggggtggccgtcggcagcgcgcgcccttcctgcttcgtcgtgtcgccgcccttcgcccgcgtcgcgttcatcgagtccgcctccggctccgacgtctcgggctcctgctccggctccgacggctcggaggaggccgacccggaaccctcgcctcctcggcggcgacgggacggcgccagcggtggggaggaccgcggcgggaagacgttcccgctgaggagcgtgctggcgatggagctcacctggtacaccagccccgaggaggccgacgaccgcggcggcgctactttcgcctccgacgtgtataggttaggagtgctcttgttcgagttgttctgtacgttcgagacgatggaggagaagatgcgagcaatggcgaacctacggcaccgcgtcttgcctccacagctgctgctcaagtggcccaaggaagcatcattctgtcagttgttgatgcaccctgtgccggagacccgaccgaagatgagtgatgtgctacaaagtgagttccttaatcggtcaagaaatagtctggaggagcgtgaagcagcacttcggttacgcgaagagatagaagaacaagaattactgctggattttcttctccaactacagagaagaaagcaagatatagcagacaatttgcaggacacagttgcatttctctcttctgacatcaatgaagcgcaccagcagtcagctctggggcagtgtggaaacttctcatttgagttggataaagaggtgtgctctgaaacagttgaagatcagagtgattgtggatccagaaaacgtttccgacctgagctaccagctgttgatatggaggaacagaatcgtagtcttgaagaatgttcgggaacagttccatcatctgtgctgatccaggaaagtgtgttgtctaaaagctccagactgatgaagaacttcaaaaaacttgaaacagcatactttctcacaagatccaagttggcaaagcaagttgggaatcctgtaagcagttgccatcaagtcgtgaaaaggactactgggtcacctgttgtgactgagggaagttcaatagatgattttgctttggaagggcattatggtacaaggcaaagaggttggatgaactcttttcttgagggattgtgtagttacttatcgttcagtaagttgaaagttaaggcagaactgaagcaatgtgatctgctgaactcatcaaacttagtatgctctgtaggcttcgaccgggataaagagttctttgcaactgctggtgtaaataagaagataaaagtgtttg

SEQ ID NO: 6289 - DNA, 1661 bp, Oryza sativa
  ref <308>: DATABASE ACCESSION NUMBER: AK063442
  ref <309>: DATABASE ENTRY DATE: 2001-12-06
ggaggattcctgtccctgcccacgccgccgccttcgccgccgtccgccgcccccgccgctgccccagtggagatggcgcctggcaccaccctcgcccccaagcgccgcaaggcagaggcgtccccttccccttccccttcccctatgggggattcttccgacggcggctacagcgactccgacctccacgacgccgaggaaagcttctactccgcgaggagcggctccgaggacgaccgccaagtttcctccagcaacgacgacgacgatagcgaggaggaggagcaagaggagcgggagatggatgaggaggaggacgaagaggatgatgatgatgaggagatgaatgaggaggatgacgaggatgagggggaggagatgaacgagctcgagaaggagtaccgcacgctccagaccaatcaacaaaatattttggagacattgaaacagcacagagatgacgatgtttcgaagggccaggcggtcaaaaatcaaaaggtgttgtgggacaaggcactcgagatgagattcttgctgcaaaaggcattttccacttcaaacaagttgcccaaggaacccatcaggtcgatgttttgtgatcacaatcaggagatagagcaagcttatcttgatctgttgaattcatcgaagcagactcttggttccatgatggagcttcaggaggccttgctggagaggaatcgtgctacaaaggatgtaactgatactgataattcttcagagttgaatggagaggatgatgagtggtcagaagttcagaaattgcagaaaaggataactccgttcagaaatagtgagatagataaatggcagaggaaaacacaagtgacaaccggtgctgctgcattgaagggaaagttgcatgcttttaatcagaatataagtgaccaagttactagttacatgagagacccaagcaggatgattaacaggatgcacttgagaaaatctaccctcggtgtatttggggaggaagtgggagagcatgaaaacaataaggaggagaacaatacggaaggtgatcctgaacttgttgacgattctgaattttaccaacaacttctaaaggagtttcttgagtcatgtgatgcaggcgcatctgagtcagcattttatgctctaaagaagcagcagcataaaaagagaaaactggttgatcgtcgtgcttcgaagagcagaaagataagataccatgtccacgagaagattgcaaatttcatggccccagtacccatggttattcctccaatggctccaaaattgtttgagaatttgtttgggatgggaaaccaaaagtcgaccacagcgtgaatgcttgacgatgatactgcaatgttgacattaggacgtataaccctttcttgacttataaaggccagtcgtgtctcgtaaagattctgatttgatcaaattcgatggtatccgtgttggactggggaactgcatttcgatttatactcatatttgtttagcaatctggttcttaactgacgagtagttattaagagggatctctatgaaagaatttggaggataatttagattatcagaatttggaggataatttagattatcagttgaggtcgtttcatagtttgtatgtttttctcttaagaatagagcaccaattaattcttgtg

SEQ ID NO: 6290 - DNA, 2862 bp, Oryza sativa
  ref <308>: DATABASE ACCESSION NUMBER: AK063443
  ref <309>: DATABASE ENTRY DATE: 2001-12-06
ttagatgatgcatctggtttccaggcttcagcagaacaaaatgttgatgaaggccctgctgaggttgctgcaaagaatgaaggccttgtctctgttatagaagctagtacagagggcggaactcttgttttagatgatggatctggtttccaggcttcaacggaacaaaatgttgatgaaggtcctgctgaggttgctgcaaagaatgaaggccttgcctctgttacagaagctagtacagaggacggaactcttgttttagctgatgcatctggtatccaggcttcaacggaacaaaatgttgatgaaggtccttctgaggttgctgcaaagaatgaaggccttgtctctgttacagaagctagtaaagatagtgcaattgctactacagaagttagtcaggaagcagttgttgccgctgcagaggttagtccggaggctctagttgctgttacagaggtcagtgaggcccctctagttgatgtggccggaactaatgaaaattctctaggtgatgcagaagcaactaaagaaggtgatccagaatctgttccaagtgacagtaatgtggtgaaggaagtatgttcacatgctgaaattcattgtgaggtcattgcagagaagactccagacaatggcagcagcaagaaaatgactgttgatgacatatcatctgatgataccagtactaataccaagttggaggaatcatctgctaaaggtgaaccatgtgtcagtataggctgtgagattctagaacaggaaacgaaatcatcacatcttgatgttattttgtcacatgctgacgctgttgcaagtgcagaggaaatgattacagagagcctgattcttaagaaagattccaatgagaatgatttaatgtatgagaaggaccaaaaggattctgaccacataagcactgactgcaaacccgagcagtctggaccaaaggatcaggtatctgaagtcaaccaagatctagagtctcaaattaagtgtgtgtcaatttctcctgatgatatactagtcaataaaaacgacaatgtagaaggcaacatgaacgctgacaattttgatttaggactagagtctaagcaggatattgtcaagccatcatccagcaatccctcctccgttggtgatgatttgcagacaccagatgatgacaaagagatatctctgatcgacatgtctctgcaagatactgatatgagcttgaaaaagaaagaaggcagtcctgatagtatttatcctgaaaaactaaatttggataggagttcaggagatgaatcaatggaggaggatgcgatggaaactaagcacatggattccaaaacaatacctgattatctcgaaggaaagagtgaggtcaccttagagcatgtgagttcaggagatgaatcaatggaggaggatgtgatggaaactaagcacgtggattccaatacaaaagttgaacatgtgagttcaggagatgaatcaatggaggaggatgtgatggaaactaagcacgtggattcaaatacaaaacctgattatctcgaaggaaagaatgatgtcaccttagagcatgtggtaaaagaggtgatcctccttgatactgtcactgagggttcatctgtagatcaaaaggaagctataagtcaagagaagccagtaatgccgactgaaaagaggaaagctgaagatcaagaagttgttgcaaataatgagccaatcaaacgtcagcgcctatggaatgtggatgatgtcaaacctgagcaagcaacttccaaactaagtggttctgatgcttctaaagttgtacacccgcctgctcgaagacgttcttttggcaggtctgattcaacagcacgtggaaattctccgaaggagaggatgggtgaggtttctcttcctttttagtaaagtatatacttcaccattgttaccaaattcatctcttgcctattcatatttcagtaccaccgcctcagaaacctgcaacaacttccttgagaatcgatcgatttgtgcgcccgttcactttgaaagctgtgcaagagcttcttggtaaaactggatctgtttgtagcttttggatggatcctatcaagactcattgctatgtcacattctcttcggtggaggaagctctggctaccaggaatgctgtttacaatctccaatggcctccaaacaatggcagttccttagttgctgaattcgttgatccacatgaggtgaaggccaaacttgaaccccctcccccacctccagcacctatcaaccccacagcagctacagcaccttcccaccaatccaaggccaaccaaatcatgcctcctcatgctgctgatacatcaagggggctattacccacaccaccagcacttgctaggcttccaaccttcaacaacgcaccagcgagggagatgcttccgcccgctccaaagaacccagaaccacctgtggtggtgactcttgatgatctctttaggaagacacaggcctctccgaggatctactacatgcctgtttcagaagaggtggtatctgccaagcttgcagcacgcggcaaagggaagaaggcagcgtagggtggctcaaatttgctgctgctgctgctgccatgagtggtacaatttgacacttgaagaggcttttgcaagggttaggtcttgagagccgagaaggtcattttggttgtacatacaactaggtgtagttttctgcatctccgaaactgttagctgttgctcgcccatgccgatctggattgtatgttaattgtgcaccttttgatcgatggagacgatgcttaccttcaatgttgatgaactgggggaatgcatatgtgctaagtcgcagcatttcccccct

SEQ ID NO: 6291 - DNA, 1555 bp, Oryza sativa
  ref <308>: DATABASE ACCESSION NUMBER: AK063444
  ref <309>: DATABASE ENTRY DATE: 2001-12-06
aaacctctcgccgttctcttcccccatgtctccctccgcgccgccgtccgccctccgcctccgggggcttcccaaggcttcgctgccggcctcctcctctttcccgccctccgctcgcttcccccaccacctctccatgtccgcctcctcgtctcgccgccctccgcccctcgccgcaacggcggcggccgccgggaccgggagtggcgcctccccatccctcctcgcagccgacccgggccaccgcgacgccgtcctcctcgccgctcgcggcgccatggcgaactgcctcggcgagaccagcctccacctcgccgtccccgggctccggctcgcggccaagggcaaggtgagggacgtgtacgagagcggggagcatctggtgctggtcaccaccgaccggcagagcgcgttcgatcgcgtcctggcttccatccctttcaaggggcaggtgctcaacgaaacaagcctttggtggttcgataggacccgtcatatcactccaaatgcagtagtttcttctcctgataagaatgtgacaattgcaaaaaggtgctcagtttttccagttgaatttgttgtgaggggatatgttactggaagcactgatacatctttgtggactgtttataacaaaggtgcgaggaactattgtggaaatgttctacgtgatggaatggtaaagaatcagaagctatctgcaaatatacttacaccaacaactaaagctgcagatcatgatgttcctgtcactcctgaagagattatcaattcaggactaatgtcaaaggaagattttgatgaagcaagaagcaaagccttaagcttatttgcatatgggcaggaagtggccttagagaatggactgattctagttgacacaaagtatgagtttggaaaaacagctgatgggacaatcatgttgattgatgaggtacacactcctgactccagcagatattggattgctgattcttacgaagagagattcagttctggtcttgagcctgaaaatgttgacaaggagttcttaagactctggttcaagaacaattgcaatccatacgaagatgcggttctgcctgaagctccagaagaactagtttgtgaactagcttggcggtacattttcctgtttgagacaattacaaacacaaagttcgagatccccaaaactcaggagccgattcacgaaagaatatcaaggaatgttgcacaagccttgcagaacctttgattgtggataaggaagaggatttccagaacaaaaacttgcttgctgatgagaataagaggtgcacttctggacttctggtaccggcattactaataataatatcagcgtacgttcatgccgtctatcattcaaagtatacgtgtgctccgagatgtaatatggttggaaacaactatagccagaatcgcctggcaatactctctgcccttaatagtttccctgttgtgagggtcagtgagtgatagagcgccatacacggtatgcatgattgcgtgctaatatttttttcaccctgtgatgtaacattttctggggttc

SEQ ID NO: 6292 - DNA, 2418 bp, Oryza sativa
  ref <308>: DATABASE ACCESSION NUMBER: AK063445
  ref <309>: DATABASE ENTRY DATE: 2001-12-06
acctcgcggctcgcgctatcccgtctcctctcctggttccctctttctcccgctccgtccgcctccggtgagctgagctccggcgaggcgaggtcggagatcccaccgccgtgtcgccgccgcctccaagttctccttcctccctcgcctcttcgcgccggcgaggtcccaccttcgccttcccggatcggcgccggtgaggtccggcgacatatcgcgtccccgtgcatccatctactcggccggcgaccgcgcgccccttcgccgtcgtcttatgcgcttcccacggggccgcacgatccggacatgggcgcgtttgggcgaagacgccgcctattcgcggttcgcgcccccctcctctcccgcttcgtttctccccaatctccacctccaccttctgcgcgcgccgctgccattcacacgcatcgagtaagctcgatctcatcacctcccgagctgtagtctttgcccgcacttgaggtcgcgccggccgccggggcggcagagagagagagagagagagaggattcagagaggtgttgtttggccgcgcacgagaggtgttcgacgatttgcccacctggtctcctccaagccagagagaggttatgcgccggtgcggccgaatttttttccctccgtctctcaagttcgtgtctcatagcggcggcaggctctccgcgacacgcttctctaccaccgggttcgacctccccgactggttcaggaaccccaaggacgatggctcatgcgccggcttggatgacgaggaggacgacatttttgtgctcccgactgaacccaacgtctcggatgagcgaagaagccagagcagcacctccaggtcgctgtcgatccgccctggctttcctgcaactgcctcccatgaggatgctgagttcgaggccgacatcgatgaggtcagcaggatccttagtgctcgtttcgcgtctcctgaggccattatgatagccatggactgctgctctgtaagggtcactggctgccttgttgacaagatcctgacgaggttcagcaatgattgggtggcggcattcgggttcttcatgtgggttggcactcagggagggtactgccattgtgccgattcatatgacttgatggtagatatactggggaagttcaagcagtttgatctgatgtggggtttgatcaatcagatggttgaggttggaggcttgatgtcgctcatgacgatgacaaaggtgatgagaaggcttgctggggcaagtcgatggaccgaggccatcgacgccttccataagatggatcggtttggagttgtgaaggatacaaaggccatgaatgtgctcctggacacactgtgcaaggagaggagcgtgaagcgcgcaagaggcgtcttccaagagctgaggggaacaatacctccagacgagaacagcttcaatactctcgtgcatggttggtgtaaggcaaggatgctgaaggaagctctagacacaatggaggagatgaagcagcatggattcagtccttcagtggtgacttataccagcctggtagaagcatactgcatggagaaagattttcagactgtttacgctctcttggacgagatgcgcaagaggcggtgtcccccaaatgttgttacatataccattttgatgcatgcactggggaaggctgggagaacgcgagaagctttggatacctttgacaagttgaaggaagatggtgttgctccagatgcttccttctacaactccctgatctacatacttggcagagctgggaggttggaagatgcatactctgtggttgaagaaatgcgcacaactggaatcgcccctaacgtcactaccttcaacaccttgatttctgctgcttgtgaccactctcaggcagagaatgccctgaagcttctggttaagatggaggagcagtcatgcaatccagacataaagacatacacgccattgctgaagctgtgctgtaaaagacagtgggtaaagatacttctgttcctagtgtgccatatgtttagaaaggacattagccctgatttcagcacttacaccttgttggtaagctggctgtgcagaaatgggaaggttgcccagtcttgcctgttcttggaggaaatggtgtcaaagggttttgctccaaagcaggagacatttgatcttgtgatggagaagcttgagaagaggaatctgcagtcagtgtacaaaaagattcaagttctcaggacgcaggtaacaaatctgaagcatatggagtcctttcaatgagaggtcactgatggtggacaacattgtgctgtgttgtacaacacctgtggtcatgaatcttaatatactgctcattggaatgtttatgcaaacttaatatgtactgctcattggaatgtttatgcaaatgcgactgtgattcagt

SEQ ID NO: 6293 - DNA, 2647 bp, Oryza sativa
  ref <308>: DATABASE ACCESSION NUMBER: AK063446
  ref <309>: DATABASE ENTRY DATE: 2001-12-06
tcacgtgtagcatgcaagttatattgcgtgaaaaattatgaatttgtaggtagtgatgtgtaaccatgtataggaaggctagtaaaattgaaaatattttgccccgcgggctctcgtcccaaccgctcaccggcttcccgcggcggcggcggcggggctccatgctcacggtgaccctcctggacgcgcacctcgcgcggtgcagctcggcgcgccacctcctccagatccacgcccagttcgtcgcgtccggtctcctcgccgacgccttcgccgccagccgcctcatcctcttcaccacctccacccgcctcctcccgctcccgttccaccactcgctccgcctcctccacgtcgtccaccgccccaacgccttctcctgcaacatggtcctcaaggcggcccgcgagcatgggctgccgcacctgtgcctcccgctctacgcgtccatgtccgcggcccccgactgctacacccataccatcctcgccgccgcctgcgccaccaggagggccatcgaagaaggccgccaggtgcactgccacgccgtcaggcacgggttcgggcgcaacctgtacctcgcgaacgcgctgatgagtatgtactccgcgtgtgggtgcctcggcgacgcgcgcaaggtgttcgacgcgggtcctgtttgggacgccgtttcttggaacacgatcctggccgcgtacatgcaggctgaggatgtggaccaggcggttggggtgtttgcacggatgcctgaacggggtgctgcggcggtgagttcgatggtgtcgctgtttgggaggagaggaatggtggacgaggcgaggaaggtgtttgatgtggtggagcgcaaggatgttttcacgtggactgcgatgatttcttgctttcagcggaatggcaagtttgcagaggcgttggctttgttctcagatatgcgtggggaggggtggcctgtggatgaggcagtcatggtctgtgttgtcgctgcctgtgcacggttggaggtaactcggaatggggagatgtgtcatgggctggctttcagagctggccttggctcgaggttgaacgtccagaacgcattgatccacatgtactcaagttttctgaatgttgttgcggcacgaagattgtttgacagtggccagtgtttggaccagttctcttggaactcgatgatagctggctatcttaagaatggctctgtcaaggatgcaaaggaattgttcactgtaatgcctgacaaagataatgtttcttggactacaatgatatctggttgtgtgcaaaatgaccagtcctcagaggcactcactattttcaacaacatgcaagcccaaggaatcaagccagatgaggttacgcttgtaagcgtcatctctgcatgtactaatatgtcttctctcgagcaaggcaagtcaatgcatgagtacataagggaacaccaatataccatcacagtcatacttgggactagcctcattgacatgtacatgaagtgtgggtgcttagaatctgcattagaagtcttcgatacaatggaagaaagaggaacaccttgctggaatgctgtcattgtggggctggccatgaatggtctggtgatgaagtcccttgacatgttttcggagatggaatcatctagcactgccactccaaatgagataactttcactggagttttgagtgcttgcagacatgctggcctagttgaggagggccaacatttcttcaagttgatgcagcacaagtatcacattatcccaaacatcagacattatggatgcatggtggatcttcttggacgtgctggatatgtcaaagaggcagagaatctgattgagagcatgcccatgtcaccagatgttccagcatggggtgctttgcttggttcctgctggaaacatggtgataatgaggttggagaaagggtggggaggaagcttgtcaatctagatcctcaccatgacgggttccacactatgctatctaacatatatgcttcagaaggaatgtggcaacatgtaaaggacctaaggggctccatgaaactatggcatgtcccaaaaattcctggttctagtgtggttgaatcatcactacctttgtgagaatatatcatatgatggtacttgaaatcagaatacagtgcttagagtggtttgactcaagtttcataaggcatggagcacatgagagtgagggtggtctacttcaccaaattaaggagagtaactgtctgtttatatgaatatatcagggagcttggtgaagggaggagggaagaataaggaagcaaggatggcctgttatttatagttagcagatgacagattaacgcaggcagactacccaagctcctaaatggtacgatttttgcaaaaaactttcttcatcaacatttcttagataacttgtttaaatcaacttccaatatttaattatgccctcgaataattgtcatgaactctgtgtcatccatcacccatcatctatttagggtgggatcttaaggggtgcaataagcttgcaacctttattggtatgtttagctttgtcgttggaagttttgaagttgggacaacatgttatcacacttattgcactggaaaacaataaagagaagatctgtagatgtttttttttccat

SEQ ID NO: 6294 - DNA, 2121 bp, Oryza sativa
  ref <308>: DATABASE ACCESSION NUMBER: AK063447
  ref <309>: DATABASE ENTRY DATE: 2001-12-06
aaaattccaaaccgagctcaccagcgccggcgccggcgccggcaccgcggcacgccgtgcccttgctccccaatgtcccatctccagcacctcgccgccggcgaactcgtcaccgcactccgcggagcctcctgcccttcatcagccctccgtctctactccctcatccgcatccacgcccgcccctccgatcccgcccttttcgcctggcgccccgccgtcctcgcgctcaagcccctctcggcagccgcctccctccctctcctctcccacttccacgcccacctcatcaggtccaacctcctcgcctaccctcacgtcgcctcctccctcctacgcggttactcactcctctcacccgaacacgcccaccacctgttcgatcaaataccaccctccacctgcaacctggtcgtcgtcaacgtcatgctcgggtccctctgccgatcctccgatctagcttccgcgcgagccttctttgatggcatccctgacaaggacgtggtttcttggtcaaccatgcttgcctgttatttctcccacagtcgcgtagccgaaggccttgctttcttccgcacaatgacatttaccactcagcttgctgcagattatgtgatgctcgtcaccgttctcacgggttgtgcatcagctggcttgctgccagtgtcctgcagggccattcatggatatattgtccggcgcggaatcaccttcaccatgcaccttggcacggctttgattgattgctatgccaaggctggccgccttgattatgcatcccgtgtgttttgccgagtccctttgaggaatgtgatgcactggaccgcaatgatttgtgggtcggcagcgcatcttggcagcgaaaaggccatccagctgtttgaggagatgtgtcggagtggagtgcaaccaaatgagatgacattcacagctgttctcagtgcatgcgggcaagctggactggtggatcaagggaggaggttctttaaacttatggttgacacatatggctttgagccgactatacatcactatggctgcattgttgatctctatgcaaaggctgggaaactggaggatgcttatgaggttatcaagaccatgagaatggagccaaatatcatcatttggacttcattgttagcagcatgcaagaagttcaaaaatttttacattgcagtggagggaatagagaaagtcttgtcaatggagatatcagaagaaaatggtggattatatgcactgatttctgacctttatgctatgggtggacagtgggaagatgtgctaagggttaggagtttgatggaggaacgtaatgtgtggaagatcagagggtcaagctccatcaaggtgggcgaaccccaggactttacttttcctgcagtcagttgatttttcatatggtttccacaacctggaagttttgggacagaatggaaggacacagcctcttttgattggcttcactgctgaagtattcagaggataactttacatgctacttggtgaaatctgtttgggggcatcagtggaatgaatacaagtttttacccgatcttttttcactgctgcgttgagtatttgagataatcgatgatatttggatatggttgatcaggatgataaactggcatattagaagatcatctgtttgatgcatggagattactcaggtgcatatgaatatatgatcaattgatgcttcaaacaaactaatgagggataacaaaggatatctctgagtaatggttttcatgacttcttcctagctgatttggctttccagacacaaccgaagacagctcaacaattgagtttcagctccttactttcattaaaactctacagttgatcaattatccagtctgttttgtcgctaacagtttacaagtcctgcatcttcaataaattctgcaagcttgtatccaggtgacatttttcgtagattgcagtttttacatgttatacggcaaaaaaaatattcctgttgtgctcattggaaattcttttaggatcaatgtcctggagttgctgtacattgctatatcacttgtatttgagtggataaactgttggctaatgtaaaaaaaaaagccttctgtgaaaacaaattgatgg

SEQ ID NO: 6295 - DNA, 2016 bp, Oryza sativa
  ref <308>: DATABASE ACCESSION NUMBER: AK063448
  ref <309>: DATABASE ENTRY DATE: 2001-12-06
gaaagcctccgccacccgttaccggccgcaacccccgctccgctaccgcccatggcgaagccaccgccggcgcctcaccgcgccaaccgcgcgccgccgggcctctgcgccctgccggccatctcctacaactcccaccggggcctcgtcctgggcctcaccttcgtcgcctacgcgctctaccacgcctcccgcaagccgcccagcatcgtcaagcgcgcgctatccgaggcgtggccgcccttccacgacccggcgctcctcggcgagaccgacgtcgcgttcctcgccttctactccctcggcatgttcgtcgcgggccacctcggcgaccgcctcgacctccgcctcttcctcgccgtcggcatgatcgggagcggcaccgccgtcgcgctcttcggcgtcgggtacttcctctccctccactccctcgccttctacctcgccgcccaggtgatcgccggattgctccagtccaccggctggccctccgtcgtcgccatcgtcggcaactggttccgtgggcggaggcgcggcctcatcatggggatatggaacgcgcacacctccatcgggaacatcagcggctccctcatcgccgccgccgtgctccgctacgggtgggggtggtcgttcatcgtgccgggcctgctcatcgcgttcggtggcgttctcgtgttcttcttcctcgcgccttacccggaggaccttggcttctctccgacgacgctgcccaaggcagtgagtgaggcgagcaccgacgaggaggacagcagcagcagcgcgagcgccgccggtggcgccgggaaggaggagaggagggacgccgtggggatgtggaaggcgttcgcgattcctggcgtcatcaccttcgcgctctgcctcttcttcgcgaagctggtcgcctacacgttcttgtactggcttcctttctacctgagccagacggctattggaggcaaggaaatgtcagtcacgtctgctgggtatctctcagctttgtttgatgtaggtggaatcattggtggaattcttgctgggttcatatctgatcatctcaatgcaagggccaccacggcagcaatcttcatgtacttggctattccatctctttacgccttccatgcatatggcagtacttcagaagtggcaaacattggcttgatgatgatcagtggcttgtttgttaatggaccttatgctctcataacaactgcagtttctgccgatctgggaacccacaaatctcttaagggggattcccgtgcgttggccaccgtcacatcaattatagatggaacaggatcgcttggtgctgccttaggtccattcattacaggttttatttcaaaacgtggatgggattcagttttcacaatgcttatattttgtgcattagctgccggcgtcttattgtcacgtattgtgaagtctgaaattgttcatatcattcagaatcggagaaatcacacacttgacatgcataacagaactgcagattctggtgctcaaccacttttagaaggagacacttgaagtcgaggcagttcatatgagctggtggtgtggaatacagttttgcaatgctgccgtgattgggatatgcaacagttgattctagagaaaggcaaactagatcgagcttatgatctcagtttctacagcttggtgcttacgatcacagcaagcaacatgatcgcggtggcatttgtaggttttgtttcgtcagaggaaaatatagtcatcggttcattatccatggtgacattcttttagtatgcaaatgtgttgtagtaaccatgttcttttttcctcgtatcacggtttaggtgctagatgaacatagatatacaccaatatctgcctctcccaagtactggtcctgaaggctgtgtacataatgtttactgctattcgtatcgcggtcatcaacatcggtgaagagagatcctgatgtagcgcctctgcttatgtattaagtatttcaggttactcttttgaaaaatctctcaggtc

SEQ ID NO: 6296 - DNA, 2080 bp, Oryza sativa
  ref <308>: DATABASE ACCESSION NUMBER: AK063449
  ref <309>: DATABASE ENTRY DATE: 2001-12-06
atgcccgcaacgtcccgcccaaaaattccccaactcccgctcactccgtcgttcccctttgttccccgcgtcgccctcgcgcctcaactaggtttccgacgccctcctcgcgccgccggccgccgccgcctcgccgtcatccgccgccatgtcccagcccgtcacgcctcgccgcaccacccgctcctccgcgtccgcctccccctcgcccgcacccgcctcgccaacatctccgcccaaatccaggcccaaaccctcgcccagacgccagctcctcgccgccgccgccgcacccccgaaggaggatggttcctccgccgacgcgctcctcgccgagctccccggccgccgcgcgcaggcgatggatatcctccggctcctcgcgccggcgccggccctccccttgatgctccacggcggcgccgccaccggcaagacgcgcgccctcctcctggcgctgcggtacctccgccccagccagcgcctcgtctacgccgcactccgttccctcccttcccctcgcgccctcttcgcttctctcctctcccagctcagcgcaacgccattctccacttcctctcgccaccgcgtccccgacaagccctccgacttcgtcgccgcactccgcgacgccctcaatggtatcgtctcccagggcgaggtcgtatacctagtgttcgacaacttggaagttgtgaggagctgggataagggtggtcagcttctccctctccttctccgcctccacgacctcctccaattaccgcaggtcgtgctcgtgtatgtgagcagtgcaacgcctgatgcgtactactccatgactggctctgttgaaccaaattatgtttactttccggattacacagtggatgaagttcgcgacattctgatgcatgaccatcccaacccaaagctctactcatccttcctgagtgtggcactgaagccattatttcgcgtaacacgaagagtggatgagctttcggcggtgctggaaccgcttttcaggaggtactgtgagccactgggtgacttgaaggcagttcctgatgaaggcatgaagaggaggttgtttgaacatgttcagtcacatcttgcagttgcgttgaatgagacattcaatgtccccatgagagcttccatggatgaaatcaaggacggtggttctgctgggaagggcagtgctaaaaggcagtttgctggtaaagatggactctccagtgaactggagttccatatgtctgtgtcagccaagtaccttctgctgtctgctttcttggcttcaaggaaccctgctactcttgatgcagctttgtttgattcaactggaggcttagataaccgcaagcgcaagagaaagagctcccaggcttcaatgcatatgaaggataccatagttgaagagatgcttatgaaagggcctggtacatttcctcttgagaggctcttggctatatttcagtgcatcacatccgtgtcagaagatatacttgatgaaattgattgccctggcaatatggcaagtgaaagtggaacaactggtttgatgtcggatgttctactacagttgtcaacattgtgcaattctaatttcctctcgaaaagccggagctgcccattagagggctcagctaggtaccgttcaaacattgatgaagatttagctctcaaggtcgccaggagtgtgaattttcccctctcaaagtatatgtacagaagatagcctttcgatatttactataagcagcaaaaactactggtgatggttctccagttaccttgattgtagagtattgaggcaagtgctagatgtcccctttttccttttagtttcttctgttatttctccttcaaagattgagtactatagccaattttgaatttaatgttgactgagcaagctccagttaactgccttggaagtttcaatatgttggccatgtgacttaaccatcagtaaatcaaggtttcatactgaaacatttggctagaatgtaagcgtatgttcttcaaatctaaatgtaatggcaactatcgttgttgtgtaattcaatagttatgagctatgacttgataaacc

SEQ ID NO: 6297 - DNA, 1433 bp, Oryza sativa
  ref <308>: DATABASE ACCESSION NUMBER: AK063450
  ref <309>: DATABASE ENTRY DATE: 2001-12-06
ctctctccttcctccactcccgcaaaaaccctagctagggccgcctcctcgccgcccaccgcctccacgccgccgcctccctcctcccgacgagccggttttcttcaagcgcgagattattctccaagggaggtaaggtgtcgggtcggctggcgatgggggcggagctgcggcgcgacgacatggaggtggcggaggaggacatcagcgactcccaggcgttccggttcgtcgagcacgtgctccagtccgtgcggatggatccttttcaagttgatctaagggacaaagaagagtatgatagcttgctaagtattgtagactcttcaaagaaaaggagttacgatgacgaggctttgctagtgacaactttgaaagcactatcagaagcagtgtccaagatagatatcatgtaccatcatgctcttttgaacaatatatttacgatgtctatctggtacttgaacagcgatacaagggatgctcttttgtcattaatcaccagattggctgcagtggcagatcagttcttaagagagtgtttgcagatgcttgtgaacaacttcactccacctggatcacttactgctttcatcggccaaccgagatggcttgcaaggaagaaggaaatctattctcagttgcatgagagtttgagaatgatctctgatactgtacccttagcaccaaggatgttaaaggatataatagataggagtatgccgaagttatttgacaacaaagctaagatggtttcgtttgttgagtgcatgttgggtcttgataatgataggatgggcgacctcattggagcactattgctggcgaaagttgtggatctactgactgaattggatgttaacataacttgggaagatatactccaagatgaacataacaaaggtatatttgatatggagcttgaagatttgggtgaggatgaggacagccttggacaagaaggaacaaaggccctttttggaggaaatgcttgtgctgaaaagcttgatggtttaatggttgttttttgtgagcacctcaagtcatgtaaagaacatggtcgcttaccccaggagtttgacattctgaagactatctttcgagcatctgtgctaagggtgcacaaatccaaatttgcacagtttatcatgttttatgcctgctcactggatcctgaaatctgtggccttgaattcgctctcttcctctctgatatctttattaaaaaggaagaggattcaatttctagaatgtctgcagtttcatatgttggaagctatttgtctcgggcaaggttcatttctgctgatacggtggttggtatactcaaaaggttagtggactggtgtgttgactattgtgactatagactagcaggtagccctctggtatgtaaaagacaggcctgttttgatgtagaacgatttaccaat

SEQ ID NO: 6298 - DNA, 1568 bp, Oryza sativa
  ref <308>: DATABASE ACCESSION NUMBER: AK063451
  ref <309>: DATABASE ENTRY DATE: 2001-12-06
aatctgaaacattcaagacgcgctgccgccgtagcctccgccgccgcgaatggactggtcaggcctccccggcgacctcctccgcctcttctccggccgcctccacgacccactcgacttcctccgcttccgcgccgtctgccgcgcgtggcgcgccgccaccgccgccgcagcggcctcccctcctcccttcctcccatggctccttgcccgccccgcccccatcaaccccaccgccggccccggcccctccctctccttctactccctctcctccgccgccctccgctccgtcgccgccccctccgccacctgctccctcctcggccacacaaactcccacctcctcttctccgaccacggccccctcctcctcctcgtcaaccccctcaccggcgccgacctccccctcccgccttcccccttcgacgccttctcccccatcacccagggctactacctccccggtcccgactcgccggtggtgctctacgacaccaggaggatcttcttccaccaccccgccggcggcggcggcgggtggacgacggtgccggtggtggacctcgtcgccgagaacatgtaccacgccgggaaggtgttcgtctgcaacgaccgcggccacctcaccatcttcgacgccgccacgcttgccgtgctcggtgacgctgcgccgccgccaccaccgccggtgaccctgcacagggatgccttcaagtgctcatccttcgtcccgtccggcgatgatctcctgtgcgtgattcggtacttcaggcgcaagaacacagaacaagcaggagaattgctggaggattgccgtgcattggaggttcaccggctagagattgcgggggagaaatcgcggtgggttcagatgaggagcattggagacagaatgctgttcgttggtctctaccagggattctcgctccgcgccgcggatttcgcggggcttgaggggaattgtgtttacttcttcaagatggacagagccagcaggtctttcatctaccggttcagcatggaggatggtcaaatcgaagagttgcctggcccctcaatgcatgcttgcacttggtttgtgccaagtttgtcatagccctcattcgtggacttataagatagtgcctattcccgtccggcgatgatctcctgtgcgtgattcggtacttcaggagcattagagacagaatgctgttcgttggtctctaccagggattctcgctccgcgccgcggatttcgcggggcttgaggggaattgtgtttacttcttcaagatggacagagccagcaggtctttcatctaccggttcaggatggaggatggccaaatcgaagagttgcctggcccctcgatgcatgcttgcacttggtttgtgccaagtttgtcatagccgggctatgatagccctcgttcgtatagacttataaggtaatcttcagatagtttgggtcaggcgttcctcttttcggtttgaatgcattgctccaaaataattcatgaaaatgctgctttaagacatgcaattttcttgtgatatgttaatcgaatgaaatgttggctgat

SEQ ID NO: 6299 - DNA, 2367 bp, Oryza sativa
  ref <308>: DATABASE ACCESSION NUMBER: AK063452
  ref <309>: DATABASE ENTRY DATE: 2001-12-06
agatatttgactcgtgttgagccggcggtccaaccggttgagccattcaaaccgtgaaccgagggcttcaccggttccacgtccggtccggtcctaataactttgactggacgtgacatatcctagtactatgaatctggatatacctctgtccagattcattgtactagaatatatcacgtctagtcttaggttcgtttttttggacggagggagttgagaagatcaacccccccaccccaccccaccccaaacacacacactgtgttgcgctgctgccactctgcacctcgcagcgctgaacgggatgaatcggagaggggggaacgaattggcgaccagagagactacctagaccagacaccccgcgaccatagaccaatcagactaggttgtctattctccttttctagacaacataaaaacagagcaaagccccaattcgaaaacctgttgtgcagtagtagagcagcaggcagacgcgaccacgcaaggtgtgagagaaccgggtgttcgaggccgcctgcctccgttgaccggtccacggtgcccctagcagacatgccacggccatgcaacgccgtccaacgatagcgcgccgtgagctacggtggtctaagggtgtggttggttaaaaagatatccctagatatggttagtttttgggtttgtttggttggtgggtaagggacgataggatggaatattccatgattatgactatgttaatgataataacggaaacggatcgtctactgtacagttaatactgcacaggtgctgtagcgattaaatcaagccatcagattacattagatggctctgattttgctcaatctgcccaccacttacttgacagttacatggctaaggccatgaaagcttcagactctgtttatacatatgtgtgtgctgttcatctaacaatatgcctcccatttcacatcttctacaaatatcataagcagagcatcgcctcactgtgaagtctacacttattccaaagtgtaacactaaaaaagttgtgtaacactaaaaaagttgcatcgttcatttacaccctctacaaaatagtgctctgatgaaaaggtttcaggaagattaaacataatactctgatggaaacatgtacaaaggtaactgcatgtgtgccaatagttcagtactaaacgctgacagaaactgacagaagaatgcatagcataaattttctgtggcattgaaaaaaaatgaatggatgttctcaaaagtaaatgttcaatggcttgatttgttattgtcaatttgatacccaggtatctagctatctcccatcaaaatttgcactgaacccaaaattccaggtagtatcaaatatgttctgctccatgccatcaccctatacaatgaattagagtaattagaaaaataatattgatgctgctagacagtatgcactaaatatataagttttagtatatataagtggaataccctcagtagtcctgcatagctattgatccatccatattcttcagatcccttctcattcgttccattagtcttctccaccagaatttggttctgtgctatggaacaatccttcacttgctgctaagcaaaaccatccagataaaatattactctatatataatcagtacatatatagtctaattgaatagtacatatatagtctaattgaatagttcgtaagtaacataccgagatattttgtttgtcaggtacaacttgtaccttctttttggtgggatgctgcttatcaagccaatttttctttctccttgtgctacacttttgagtttcttttttcttcagacgtgcagtgtgcaaagagccgtttgcttcttcagatgcaacttcacctagttgactattaggtgttttttcatcaacttctttcctcaggctctctagaacactgtccactagtgtgctgcactctttagattcagcagctcgaatagctataccaagaaatttgtgaataagaaacttcaagaggcacctatcctccaatctgggatcttctacgacaatcttgccataacagtcctcaatagcaccaactcgtgcttctcgagtccatcgcttcaaaatatatctctttggcaaagacttaatattcatcacatcaaggactttcaaagcatgactgcacaatattccagtcctttcaaattgtccacaggtgcacaatgcctattgctctgcataattgcctacaactttgcactcctcttcaaatgttgacccttcaccaggagcctcaattgcaacaatgaattcattatgttctgatgacttgatgtatgtagccatggatctttcatattcattttgaaaatattcaaatatacaaggtgtgt

SEQ ID NO: 6300 - DNA, 1952 bp, Oryza sativa
  ref <308>: DATABASE ACCESSION NUMBER: AK063453
  ref <309>: DATABASE ENTRY DATE: 2001-12-06
atcagtcatcacttcttcccaagtaaaccccaagaagcggctattacttctctcccctgttcttcttcctccacattcccatttcctaaaaaaaaaatccccaaatctccacatgattcctccgtaattcggcgcgccctctcatggcgtccctcgccgaattccccctcccggtgatctctccgacttgctggagctatcggtagcgggaggaatcaatcaatcaatcccccacgctgggtggttcttgagcaagaacggctcgtcgccgtgccgatcgatcacgtcggccgccggggaaatcctctggggatttgtgggtggttttgggctaaagattccgtttctttcgagcccttttggtctcgggtggatccgcttagctttggttcttttgctggttggggggcatggcggcggagtcgtcggctgctgctgctgcgggcgggggcgagaggaggggcccgatggatctgaacctgtatctcggcctccctccgctgccgccgcctccgggaaggctggatgtcgccgccgattacccgtcgctgctgctgaactccgccgccacggtggcgaacgagcaaaggggctcggtggtggtggcggcaccgcctccggcggcggcggcgtactcgccgtcgaacgcgctgtcagcgccggagcaggtgctggtagatcctgttgcagcgtggcttgttgatcccggtgagcagcagccggtgccgccgctcgagacgccatcgtacatggccagggcctcgtcgacgctgccacagatttttgcttgtgcagcgttggaaatgcttgtgcagaccggtggagcaatcccacctactggtcttataaggggagcagagattgctgctgcaagccgccctatgacgccggagaatcggctgcggaggttgatccaggtgagcgatcaacacggcgtcgggaatgggagggcggggactgggccagtgagccgcagccgacgggcgaatagcccggaagccgataatctggcgcgggccatccagaggtctcataattctcttgaggcatcaaggaggcagatgcttgatggtgatggcagtgatgccaccaagaaggatgacggttgcggatgcaacggcagcttcgaatgcaatatctgctttgaatcagctaaagatcctgtggttaccccttgtggccacctcttctgctggccttgcatataccagtggcttcatggacattcagagcactctgattgccctgtctgcaagggcgaggtgctcgaagtaaacgtcacaccgatttatggaagaggaggtggcgaggagaactcctccagaaatgatatccaaatccctcccaggccgagtgcgcagaggaccgagagcttgaggcagcagctgcaaaggccagacacaagaggaggcattgcaaacatggtgaggcggttgatgcaaaaccaagatatagtggtaggccaggcggcttcatctgcaccccggccaaggggtaggggtcgaaggcaggcaagacaagatgcgccttctgcaccagcaacacagcagcaggtggtcaatgctgatgctgggagtggcaatcaggctcctttgccacctcctgatgctaatggtgctgcaccggctgctgctgtcgctccccaacagtcatcatctgtggagcaagcgtcgacttctagcaccgtgggtgttatagcgggagggccagcacaaggtaggaggtcaagagtttctgaatccacccctgcaaggaggacaaggaggaggcatcagtaggtaacttagagttgttactgtaatagaacatatacaccatgtttccttgtaaccttgatcatatttaggctcatcccaaaattatgtagaattgtggatgaaatcttttcttttatttaccttgtatccaccattttaccttaggcaaaggaataaagatttcgatttcaatat

SEQ ID NO: 6301 - DNA, 1127 bp, Oryza sativa
  ref <308>: DATABASE ACCESSION NUMBER: AK063454
  ref <309>: DATABASE ENTRY DATE: 2001-12-06
ccacaagggaagcaaacacaattacacgacgagctcgatcatcaagtggctctagctagctcgatcccacgagtgctccattttggccgtgcgatatcgcgatcaatggcttcgtttaggctaatgatagcggcggtgtctctgagcctcgtgcagctctccatggggagcaggaggttaatggagctgtacatacctccggcgagtgaccagctcacgtaccaccacggcagcgtgctcagtggcgacatcccggtgtccatcctctggtacggcaaattcacgccgacgcagatgtcgatcatcgccgacttcgtcgtctcgctcaccggcgcgccgaacgcggccacgccgtcggtcgggcagtggtggggcaccatcgaacagctctacctgtccaacgccgccacgaacagccagacctccacacgcgtgctcctcgatgagcaggtctcggacgagcagtgctccctcggcaagtctctcaccctggctcagatcgaccagctcgccgcgcgcgtcggcaccaagaggggaggcgtcgcgctcgtcttcaccgacgaggacgtcaccgtcgaaggcttctgcagcagccggtgcggcaagcacggctcggacgcgagcgccggcaccacccacatctgggtcggcaactctgcgaagcagtgcccggggcagtgcgcgtggccgttcgcgcagccggtgtacgggccacagggcacgccgctggtggcgcccaacaacgacgtcggcgcggacgggatggtgatgatcctcgcctcgatggtggccggcacggtgaccaacccgtacggcgatgggttctaccaggggccccaggacgcgccgctggaggcgtgctcggcgtgcccgggagtctacggcagcggcgcgtacccggggaacgccggtaaactcctcgtcgacgccaccaccggagccagctacaacgccaacggcgcgaacaggaggaagtacctgctcccggcgttgtacaatcccgcaacgtcctcctgcgacacgcttgtgtaatccatagtgccggacacgttacgtgttctgtacctgtacgcttgggaagttgtacatacgagttgggaaagtaatggaatcactttgttcgttct

SEQ ID NO: 6302 - DNA, 1653 bp, Oryza sativa
  ref <308>: DATABASE ACCESSION NUMBER: AK063455
  ref <309>: DATABASE ENTRY DATE: 2001-12-06
gttaatgagtgatgaaaatgttggcgtgtgtgtggtttgcagggtgccgtgcaggaagaagggaggggttcggttcacgataaacgggttcaggtacttcaacctggtgctgatcacgaacgtggccggggccggggacatcgtgagggcgagcgtgaaggggacgagcaccgggtggatgcccatgtcgcggaactggggccagaactggcagtccaactccgtcctcgtcggccaggcgctctcgttccgcgtcaccggcagcgaccgccgcacctccacatcctggaacgccgcacccgccggatggcacttcggccagaccttcgagggcaagaacttccgggtctgaattgaatgaagcaaaactgcaatataccctcttatttactcatctagtaattactgtcattatagcgagcaggtgtgttttttaccttggttaagtttgggttcttcttcggttggtggccttgtcaaagtgaggggccgggggaaaacaggtggtaaagactagtactagtgtcaattagggttaaactggtaaattgctagtactgctgttactcatcatcatcatcgctagtggtcactgctagtagtagttgtgctagtgcatgtatggttatggatactgcatcatgttggttggtgatggattttgtccatgttttgccaaggggtttggtttggagttgggggtgatggggaggatttgtgctcaaagagtggctgaagtggctgcaaagctgcagctgaatttgggggtggtgagtgtagcccgcagccgcttgtgccgtgtcatttgtctctatggcacttgatgtttatcatggacttgatttatcattatggtgattggagcttgtaagaagattaattgcctctgttcctctcgctctgtgtgtgtgttttatgtgatgttctggttgagcatttcagctttgtagtgctggaatgatgattcttgccggcttctttccgtgaatgcattctctgtgttctccgtgagttgctcgatgggggagtgccgaaattacgtgaaagggataaaggtgaaagcaaaagtgcgatgcgagtagaccgctttgggaatgattttgcctgttccgttgcctcagttcagatgcaagaatggttcatgattgcgatggcgtgatcggccattccattcctaagcacggcttgcagcatcatgcattcatgctggccttgcaattgccatcggagggctacttcaggattgggagttatcagtctgcatcatcatgggatggaagaaccaaatgcgcaacctctcttccttaaagtcaacatgctggatagccatcatcaggtgtgttggggccgaaatcaatggctttgacagggaggttagcatttgacagtgtggctatagcccatagctatttgataaattgttatccatctcgccggagatttcggcccaaaccacttcagcatgacaccatcagaccactgaacacaacagtagacaccactcagtatgatccaatgatgtgttgatgacaatgtacctatggtgcatgctgatcgatgagctaccaggaaagcttgaacccattgagacagccacgccagatttgtaacatgagctctactttaatgccatgagtttcgacatacaacagc

SEQ ID NO: 6303 - DNA, 2142 bp, Oryza sativa
  ref <308>: DATABASE ACCESSION NUMBER: AK063456
  ref <309>: DATABASE ENTRY DATE: 2001-12-06
acggcccgacgcggtaactgcgacgcgcaaatccccggtgcgatgactcctccgcctggtcgctccgcgcctctctccccgcccgcatcctcgctctgcgcctcctctcctcacgacggtccaccgccggaccagcgacctcgcctcctcgctccgcctcaatgtcggaccagcgccgaggcactaccgcactgctgcccatggccaggcacgggtccagtcgcctctgaccggcaccacagcgcctccgctgctcgcagggacgccgccgctacccgcccggctacctccgttgccaccgccaacacgcgagtctcctcctccctgatcgagatcgagtcgacacacatacaccaccaaccaccggccggccgccgcgcaccggcgagcaggatggggaggccgccgtgctgcgacaaggttgggtaaagaaggggccatggacgccggaggaggacctgatgctggcctcctacatccaggagcacggcgccggcaactggcgtgccgtgccgaccaacaccggggtgatgcgttgcagcaagagctgcccgctccggtggacgaactacctccagccggggatcaagcgggggaacttcactgagcaggaggagaagctcatcgtccacctccaggctctcctcggcaaccgttctctaccataatagtggtccacaacatagccgtgctttctgaatactttcaatggataatcaacgaagctctacactacaaatttctgcaataacatgagggatcatatggaggtgatttcaccaatgaaagatggaacatttattgattgggatattgttgacaatatatggaatcatgctttcaggtgagttgctttatctatttgatgcagatctgagtaattttgtgccaaaagtgcacgcccaaaaagctggccacacttgtggcaaaacttgtctgaaaaataaatctatgacatgagaggcactggagtaaccaggtttggcacactgcttatgtggttggccaaacacttgcccgttgccgcaaaaggccgaacgtgcctaacttgtttctggggaagtttgggatgaaccaaactctatctttaacatagtttctttagaatcagcaacaaagttaatcttctatgcctctatggaatcttttggatgtcagcatggttactgctttatgcccaccatcttttcaccttacatatttatttatgctcttcaaatatactgatagtgaaatcccttcttatgtgtacaaccggataaagttgattaaatagtaggatttcctttgtatggcatggagatgcaactactgaatttttttgctttattagcttttatgctgaggagcatcctatgttgatagttgaaccatctacaaacacagggcagcaaagagagaagtatgtccatatgttctgtatttaaattaattgtgttgcttatgtggtcctatatctaaatttaacaattctcaaaacctttttatctctttttgtatcgtgggttgtcaaaataagcaactatagtatttctacgtaaaacacccataaagggtatttcaatcgaaatcccaaaacaggatattggttctttcgcttgttcttgatgatactgtaatggaatggcaaacctatttcttcgcattttggctaacaaatctgaattattttgaagaatagaaggatagacaaaattccaatgaccattggacatgattcgatccggcgttgaataatcaagaatttcactatcttttttaacaaaagtatccattaaggtgttccttttatcatgccatttttgttatttatcagtttttttggaacaaaaacaatgtattttcttagttgatgctttatgcaggtatctattgactttaaagatcatgaaggcataatgcatatatcaaggcttagacatggtcttcgtgcaagaataaaatgccattttgtgtttgtcaacaagtgttatttatttttaatcaacaattgtttgtcttacttcaggttcactgatctaatgttttagtcttgcacctgtcacttgctaataatgttgtaaccttgctcctgtcacttgatagtatttcaaataatttccaatattatttgtggagattatataaggtcgctttaagatt

SEQ ID NO: 6304 - DNA, 2360 bp, Oryza sativa
  ref <308>: DATABASE ACCESSION NUMBER: AK063457
  ref <309>: DATABASE ENTRY DATE: 2001-12-06
atttttatctctctctcttcccctcgcggctcgcgctcccattcactgctctcccctctcccggccgttggagctctctcgattcgccaacgccgccgcactaactcctcctcctcctcctccgctccgatcgggttcgtcctcgagcagatatattggagaggcagcagcgttgagtatagtttatcagtggattcttcttctgctgaggctggccaggtgataaacaagaagggaagaaatggctgcagaggttgggcagagattctgcagtgggtggtcatactcggatgtgccttacaacgaccaccacgcacagacagatgcttcagttcagcaaatggtacttgatcatggctcggtatcattcggtaggtttgctgcagagtccttgtcatgggagaaaaggtcggtattcgaccataacagacgtcaagaggagctaagcaatctcacaatgcctggtttggttgcacaaaagaaggcattctttgaagaatattacaagagggccaggcttttgaaggctcaggaggaggtcaaccagactgaagccacatcggaagaggggactgatcactatgatgctaatggccataacatccatgaacataaattacctgcagttagttctgaagatccagtggctagcgctccaagctctagttttgaaccttccactggagtgagctcatcaggagaaaagaaatgccaagaccctcatgggctagggtacttgacatttaatcctttgttttctcagataacaggatcgcaaaatattcagctggagggtcctgtctctgatcaaatgcatcacgctgaaggagattttccatgtgccacacacacaaataccagagatgtactcaaccatgaacctttggagagaaaggttcttgcaccaaagcatattgtgtcaaatgataatggagaaaatgttgccgtgtcaaggattgccttgccaatagcaagtctgcaacgggaacatctgaaaattgatcttgagaggcaggaaccaaggaagaatgctctaatcagtagtatgccaacaaagagttccaaggaaccatcaacttctgttatccacatcccaaggattgattcaataagaaattcagagaacaggaactctttagagttgaaggatccattccacaaaagagtcgagatgaaattgcgtgctctatctgataggatgaatgctgataaagcaacagcatcttctagatcagtttttcatcagcatgctgaaagagctgtgacatcttctagatcttctatgacatcatgtagatcttctacatatcaaaatggtgatagagttgcgacatcttccagatctgcattgggtcagaatgctgatagagttcatgcgtcttctaaatcagcacaacaagcttctcgtcgatctcttagagaaccacatggtgcagtttcccttcctcgtgcagctgtcaacaaaggatcacatgtctctcatgttgctctcagcaatagtactactcagaagtttgttactagtcaccctaaacactcggtgatgcccaattcatctcaaagggcaagtaccttacatactactcaggtctcgttgaaaagatcagcaggtgttagctctgtaaacaacagaccgcagaataaaaggaaacagcttagcacaccgtcaacatgggatgaaaataagctgaacagaggatacgcacgcacatctgcaccctcaagtgcaagaagtagctccgttggcattcttccgtacaaaactgcgaaggcaccaaagatttcaaatgggaataatgttgtggtcaagcagactgaaatgatgcagaagtcaagaaatggaagccatcctgctggaggaaggaatgtccagccaaagaatgttgtaagctgcaatgagcaaaagagaaaggtaaccccatttcaggctagtagtctgtcatccagcacaaggaacaatcaggcaagcggtccatcgatgagtaagagcaagccaagacaggagaggccaagatggcgatgacgaaaacgaagacgatcttgtcggaacaatcagctcggtgcagaagtgcagatgcggatgattttctggatcagcttcggagctgcacttcttggatcagtttcactgtttcagactcttagacacacggccgttcttcttggctaatggctggtgcagggcaaacgaaagtttggaggcaacacgagcagggttagggaattcttttttaccggacatagttgctagtagttgctactgtattttgattggttctgtgacttctgtcaatgtcaaaacaacatccataattcaattatgatttataagtaagaagaagggggcggcttattgcact

SEQ ID NO: 6305 - DNA, 2206 bp, Oryza sativa
  ref <308>: DATABASE ACCESSION NUMBER: AK063458
  ref <309>: DATABASE ENTRY DATE: 2001-12-06
aagccaaccaaagtcctctgctcccctgctccttcactctgcttcactctcactcactcaccttcttggtacattgcaattttgcaatggccaagaatggtggtgctcacggtgcagccacattgtttggtctcttggcacttgcatcaatggtgaagctgggatttgttgctgggggtggccatgactatgccatggcattgaggaagagcatcctctacttccaggcgcagcggtccggcgttctccctcctaaccagagggtctcctggagagccagctctggcctctttgatggaaaggccaatggagttgatcttgttggaggttattatgatgcaggggacaatgtcaagtttgggttgccaatggcgttcacggtgaccatgatgtcgtggagcatattagagtacggcaagcagatggcggcggccggcgagctccggaacgccatggacgccgtcaagtggggcaccgactacttcatcaaggcgcacccggagcccgacgtgctctacggcgaggtcggcgacggcgacaccgaccacagctgctggcagcggccggaggacatgacgacgagccgccaggcgttccgcgtcgacccccagcaccccgggtcagacctcgccgccgagaccgccgccgccatggccgccgcgtccatcgtcttccgcggcacgtaccctggctacgccaacctcctccttgtgcactccaagcagctgttcgagttcgccgacaagtaccggggcaagtacgacgccagcatcacggtggcgcgaaactactacggctccttcagcggatacggggacgagctgctctgggcggcggcgtggctgttcgaggcgacggaggacaggtcctacctggagtacctcgccggcaacggcgaggcgctgggcgggacggggtggtccatcaaccagttcgagtgggacgtcaagtaccccggcgtgcaggtcctcgccgccaagttcctcctccagggccgcgccggcgaccacgccgccgcgctgcagaggtacaggcagaacgcggagttctttgtgtgctcctgcgtcggcaagggcgccgtcaacgtcgccaggacccccggcggcatgatgtaccaccagaggtggaacaacctccagttcgtcaccagcgcctccttcctcctcaccgtctacgccgacttcgccgccatctccggccgcggcgccgtccactgccccgccggcgccgcccaaccattcgacatcctcaaattcgtcaaatctcaggtgaattatattttgggtgataatccgagggggacgagctacatggtcgggtacggcgcgagctacccgcggcaggtgcaccaccgcggcgcgtccatcgtgtccatcaagagggacccgtcgttcgtgagctgccaggaggggtactcgtcgtggtacgggagggaagccggcaacccgaacctgctcgacggcgccgtcgtcggcgggcccgacgagtacgacgacttcgccgacgagcgcgacaactacgagcagacggaggccgccacctacaacaacgcgccgctgctcggcgtcctcgcccgcctcgccgcctcctgcggcggcctcaaggaggaggaatacgaacaagaaacggcgactccggtcgtgaaccggacgtcgtcgtcgtcgtcgctgccggcgacggcgacggcgatcgggatcgagcagaacgtgacggggacgtgggcgaggaggcggaggacgtactaccggtacgcggtgacggtgacgaacaggtcgcgggggaagacggtgagggagctgcacctgggcgtgtcggggctccgggggcggctgtgggggctggaggaggcgaggtacgggtacgtgccgccgaggtggctgccggcgctgcggccggggaggagcctcaggttcgtgtacgtgcagccggcgccggcgccggcgaacatctgggtcaccggctacaaactggtctgaaatgaactcaagtactcaactattctgaaatggtaatttgtggtagagagagagtagagtgtggttatttggaggaagtagagaagagtccaaggaacgcgagtacgtatactcatcctcttcctcctcgaatactatgattttaggggtttggagagatgagatttagttgttcatcgtcctccttttgccctatcaagtttaattaagtaactattaatatgcgactg

SEQ ID NO: 6306 - DNA, 2095 bp, Oryza sativa
  ref <308>: DATABASE ACCESSION NUMBER: AK063459
  ref <309>: DATABASE ENTRY DATE: 2001-12-06
gaaaaatcaaaccctagggtttacgggggggcccggcaatggccgacgccggtgagctggagggcttccggcgcctgtccggcctcgccttcgacgagctctcccggcgggacctctcctccgcctccggcccgccacccgccgacctccccacgctcctccgcctctgcctcctgtcgctgcctctctccgccgacgcggagctggcgttacgccgctgcacccgcctgctcgcctccctccgcggcatcctctgccgcgacctcgacccctcactgctccccgccctcgaggtgttcctggacaatcttgtatctagcaaccaactgatgacttgctttactgcggccaatgctgttatgccgagacgctcaagaatcacctctctgggttcggtgtgcagtggtggcaaccttttcgtcatggagctcatgtcgcatcacttcatttcatctgtgcaagacgaggaggggtttttgagcgcactatcatggtcagcgaaggctaagttggaagttccagaaattggcctttcaggagctctttccctgctccacaagagctgcttgctctctattccgcctgctgtccaggctcatttcttactgctggcgtgcagatgtgctgacaatggggatctgaacatgaatttgctggcgttcgagcatgccatggatgtctatttgagttacttacctgcattaggtgttttcagaagaactagtggtgtaaaaaggccgttgggttgttccatgaaaagaagacctttgagctcttgtttacaggctgcaactcatcagaagctagcctgtgatatcaataggctggttttgttttgcaacttgcactccaatgacgacttgcccatcaatgagagtgatatagtccgtttcattgaagagaaccagcaagtacttcatgaacaatctaggcaggacactattactgctgtgaaaagcatagtatcaaatgtccttcttttggcaaagcaggaagagatggatagattatatcctaatgtttcagaggagattatctgccttgctgcagcacttaggctaatgggctcctcttttatacgaattatgcattgcattaggcaaatgacagtgggagatggctgccagaccacacattgtttagaaccttgcaaggtgtttaacatcgtatcagaaaccatcagcttacttgggcactatgaacctaatgagcttcagagaaatgacttatttgataccattggtaagcctggggacggacaacagggagcagtgctaatgctatctcattttgctaccttatcagttcattgtttaagaatgaggtttaactttatgtggaaaggttgcattttcatgatgatgatggccaatctttgtgctactgaaatgtatcattttcttattgatggttcaaaagcatctaaagttcgttgtgctgatcaagatggtagtttgaaggcctctgttccgagaaaatcttctacagtgatagcattacggtttcagaacacacagcaagtttatattcaagataagcttggccctggctttggtgaggtctgcagttccgatagtcttcagaggtgtacatctagctatggaagggataatgttagaaccattctcaaaggacttacaggacgtggggaggattcttcagatctatacgattttattgaatgcaatccaagtttggattattcaaattggtggacacaacggaagaagtttaaaaagtttaaggaccacaaatggataagaagcaagagacattctatgagtagactgagaacctcaaaggtatggttaagataaaagtgcgccaatgtacatcaccgcccctgatgttacccattcagtgggtcttttgtatatagttccagtgggtggttcagccgctagatctcatgggcgttgggcagcccagtaccggtggaggtaacattatccctatcttcccctcttactcagtactgtagctcagttggtcagagtttattggataggactaggatgggtccttccctctctatataaggagagattgtattgtggtttggattaagcaatgaaaatcgattagtctaatctct

SEQ ID NO: 6307 - DNA, 1785 bp, Oryza sativa
  ref <308>: DATABASE ACCESSION NUMBER: AK063460
  ref <309>: DATABASE ENTRY DATE: 2001-12-06
attttgcatttcgatcctccttttgcctttcctctctcctctactccacacggcggcggacctccggcgaaccccgccgcgcgaggccggtccacgggaatcgatgcagccatgcagggttaacgagcgcactcttacctgctgcgcctcgcctgctcgtccgccggagaggcttccaggcgacgggggagcctccgcctgctgcgccggagtccgcggggcagctgggggatccgacggcggcgacaaaaaaaggtacagtggagtacaggtgcaacctaggattcagaatatccattcgaaattggtgttgcctgtgataatcatggttggttgattagcattctagagaattgaaatcgagaaggagcttttttatccaataattagaagaaattatgagtgtgtttagaattaaacacggaatcaccccccttaccgctacaatatcaagtgcatctcttctattgaactgatttacctttttgaaattcaggttacttgattggatctaggagcttttttttttttgtttgacatggtgaacaaggttcatgcagagatagaacacacaggcgagggctgaaatggtccatcgatcgaataatggtatcacaacatgcatttggccaaaatgacaccatggtgatcagcaacaaagggagcaactgataaactgaacccttacatccatccatacagcctgcatactactacacctttggaaaggaggaggatcacaatgttgataatgatgatgatgtacaaaagatggcagtcaaaatcaactcaagtatcactgctccaaggcaagcttcttgtgccggtcgagatcgttgaggtaacttgagcgagtataatcctctgaatcgccggagtcgaacatgaggggtttcatgagttttggtctttgcatttgcatcatttcgagtgattccctatcccccttcaagaaacggaccacctacaggcatcaaaccaacaggccgcgagcttgagctgtggtgaatgcacatggatgccactgctaggatgtgagccatttcttctggatcatatccaacatcaagagaaggatccactagttccttcatgttgttcgagtcgagcaatggttttgcctatgcacatgacaaacaacagcttgtgaattcaagggcttcagatcacaaagctcactgtagtcgaagcttctccatgatggcctccacttgctgatctcaggaaggatctcaggagcaatggcgccgcaatcgatctggttcttgccgctccgcatcctctccaggttcctccactgcgtattgtgattcgactccgctggctgctcaacggaggagctctcatcggagtcgacactaccggataccgagatgtctagcaccgcgcgaggagagctctgatcggtgcactcgctgctgtcatcgttaccggccttcgaatccatcttaggcgcctctttgctacctccatcagaatcagcagattggctgctactgtcaccaccactactactgtcactgggttcttcagtactgctcctgtcactgggttcttcagtgctgctcctgtcactgggttcttcgcttgatacgacggcttcggttactgacccgctattgctgcaatcctcatttttcgcttcgtcggaatctctgatggtgttttcttggtgctcccctggccctgaacacagcaaaggagatgtagacatagcatgggctattatcataggtttgttatgctacaaaactgaattttatcaagaagacaaattaactacct

SEQ ID NO: 6308 - DNA, 993 bp, Oryza sativa
  ref <308>: DATABASE ACCESSION NUMBER: AK063461
  ref <309>: DATABASE ENTRY DATE: 2001-12-06
gtatgcatttcatcgaacaccttgcgatcaccctctcaccaccgctacagatcaccattgtgaggctccccggccggagctggaggttggagggagtggaggaagagccgtgctgccgccgtcgccataggggaagccgggtagccgctggacatcaagaaaagccgtcaagcaccttacgtcgccgctgtctgcccctgtcctgcaccgtgtcgagctccactttgccgcgttttgccatctcgccgtctcgcggtacaccctcgtgcccgtagcgtcctccatacatctaattgctagcgccggctccaaaatcggcgattagcgcccatggccgtgccgccccggccgccgtttcgtcgccggcgagccctccgtgggtaggctatcccgggagctcccctctccatatagtttgtgaaatcgaatccccatacgccgtagatgctcccgcacccttcaattcggccggaggatgtccctagcaccgaagccccttgtagccgagctcgggcatggcgtcgcctgatggcgccgcgcgtccccgtctcctcgcgcgccggctgccatcggcgggagatcgtcggagctcctctgcgcctcaccccggccgtcgccgagccgcccgctgccgtcccggctcgggccggccacgccggctgcgccgagccgtgcctctgcctcgctcggtaacgggcgagaggaagaagaagatgaggagagagagaaaccgtgtgggacccacatgtgattagcgcacagtaatcctatccctaacggtgattatcccactcaatggcaggtggggtccctatagttaaaatctaagaaaacacaattatatattttgttcctatgacaggcgggacccaatggtaattaaacaagcaggtttgaccctaagtcaaccagggccggtcccacatgtcaaccacagtgggttttggataatgtttccgattaaaaataaatcatttatgaacagtgcatttt

SEQ ID NO: 6309 - DNA, 1606 bp, Oryza sativa
  ref <308>: DATABASE ACCESSION NUMBER: AK063462
  ref <309>: DATABASE ENTRY DATE: 2001-12-06
aaaaagtcaacgcacactccgttgcccccacagcacggaaatggcttcgtcggagaccccgccgccgccgtcgccgggcaccggcggcgcggtgccgctcgcgccggcgctcctcggcctcctccgcttcgtcctgtcctcccacctcgccgcgcctgacccggccctcccgctctccccttcctactgctcccgcctcctcctcgacgacgacgacgacgacctgctcgagaagctggcggccggtcttgcccggtgcgtcgaggaggggcggctcccggtggccgcggcggcggcggaggcggggatcccggcgggcgaggcgtggtcggaggagagggagagggagtgggaggcggtggtgctggagaaggggaacgagttgaagaggctggaaccaaaaaagttgaagggaggttggcagctggtaattacaaccggattgcagaaggttctttgcttcttttcaataagtgtctcttgcttaatgttcaggtaatcttatttttagtatcttaccattatcctcacataaggatgagatcattgtggcttctggtaaataaaataagtgttttttttttgcctcttcttcacatgagatgattttggtattttatcaagaatgattttcctttaatagacgcatgctaacatgcaagagaaaaatttcactattgggttgataatacatttcgattttatgagttgataatacattatgtcaaaataatccttctttatcaattatagttgaaagtttcgtttgcttaattttctttcaggcgattagaaaatatgcctcattttcagagatgctgcaggcagagatgatctcagaggttcttcctggtatttcatcaattgaacaaggagtgggagtatataggaaattctatacggaagaaaaggaaagcttttatggagtcttggcaatctctgtttcaaagccaactgctcaaccttacataatcatgacagagcttcttgctggcttgggttctgatggattgggtagactccttggtatggtgaaaactgcaggtacagttcaagatggactacctcctccaagatctgtactgatatcttcttgcatgaagctacatcaaccaaatgagtagcgatggatggtggggcagcttccacggaagtgatgtaaagaaaaaccaacttgcatccgaaatcattgaccacttgttacgtgaatgctgttggatgaatattcatcttactcaaccctatggtcctgtttatgaaatccgtgtgcatgaaggttatggtgccagatggtctcaagatggctcgaagtttattggattcttggagccgtatagtccagagggcttctcgagagggtggaaacactagaacaagaagacctgcatgttgtagagtggttcttttgcaacacttgtatatgcattgtctatgccaagttaaaaattttcttacagcagctgctatgtcaagcatttttgtacttgtatttttttttaaaaaaaaaaactttggtgtattatttttcctggaataacttagaactgcatcctgatgctggaagtctgttaataccagagcagttcatggacatgaagttattacc

SEQ ID NO: 6310 - DNA, 2561 bp, Oryza sativa
  ref <308>: DATABASE ACCESSION NUMBER: AK063463
  ref <309>: DATABASE ENTRY DATE: 2001-12-06
attcgatcggcatccaaacaaaggtgcatgtacggttcctaagggatacaattttgtcttaaatcatcgagaaagattaaataagttgatagcgcgatctcgtactaacacatactctctaaatattgaagaacttgcatgcggccttcaagccacaaccgcggtatgagttctttgtttgggggctgcttgccccttcgcgtcgacaaggaaactgtggacgacaatgggtttagaattagaatagaacgaagaccctatcgaacaaatagaggaaaggacagaaaggggaaaaagtaaagtctaagcgacatatggcacgaaaaggaaatccaatttcggtaagacttgatctgaatcgtagttcagattcaagttggtttagtgattattattatggtaaattattgtatcaagatgtcaatcttagatcttatttcagttcgatacgtccacctacgatactcacctttggctttcgtctcggtaggtgtattattctacattttcccaaaaggacattcattcatttctttcttccccgtcgaccactacgactaaaacgacgcgacaaatcaagacccggaaaggataagggccggtggtgggcatttgggaaagtcgggccgatcgggtgtcttcattcaagcgagggtacagaggaagaacgaaacgaagtgagaggccggggggcagggaaaagagtcgagtcgatcgaccgggagaagcaaaacgaaatcaggatttggccgaaaaagatgcaacgttatggataccatgaccgatcaccatcgagaaagaagaatttttctaaattacttcgggtgagcggggccttcaagcatccgaaatacgccggggttgtaaatgacatagccttcctgatagaaaatgacggcccgacgagtcatctactaaaaaggaccctccccgctgtgcgcccctccttgaattatttggtcatgcaatacttttttaatacaaagaacaaaatgcatttcgaccccgtcgtagttctcaatcatttcgtggcaccgggtgtggctgaaccatctacgatggggggagcgaagggaggaagcttagataagagaatacgctctcgcatcgctttttttgtagaaagcttgaccagcgagaaaaagtgtttggcccgagccaaaaagaggttgatccacttcattcgccaagcgaatgatcttcgcttcgcgggaacaacaaaaaccaccatctcgctctttcctttcttcggtgctacctttttttttctaagggatggggttggggtgtataataacccattttttgagtatgcccgggaacaactcctaggtcaattaaggatcaaatgtaggaacctcatgggtaaggataaggtaatggaattgatagagaaattcatctacctaggtaggataggcaaattgataaagggaatagagatgatgatagagatcatactgagaaagaggataattccgtacgggtacaactcttatttgaacgaagtgcaaaaaatgcgatctttttttgtctaatagaacaaacactaataccttaattgagtcggtaaagatcaaatctgtttatcaaagtgcttctctgattgctcaagacatctcttttcaactggggaacaatccaatctcatttcgttccatttttagtcaaatagtgaaggatattccattaataatgccaaaaggggtggaggggatacgtatttgttgttctggtcgattagggggtgcggaaatagctagaactgaatgcggaaagtatggaaaaacatcttgtaatgtatttaaccagaaaattgattatgcttttgcggaagtattcactcgtaacggaattttaggtgtcaaagtgtggatctcatatagtcaaaataagaagggacgtgctatatccgaaacgtatgaaatatagtaaatatagtaaatgcagatgtagtaggggttgcgaaccggatggtacacaacttggttttggaagatatggtattaaaagttgtagagctggtcgtctttcatatcgagccattgaagcagcgcgtcgggctataatcgggcaattccatcgtgctatgagcggacaattccgaagaaattgtaagatatgggtaagagttttcgcagatcttcctattacggggaaacccgcagaagttcgaatgggaagaggaaaaggaaatcctacgggttggattgctcgtgtgtccacgggacaaatcctatttgaaatggatggtgtgagtttgtcaaatgctcgacaagccgctagattagcggcgcataaactatgtttgtcaaccaagtttgttcagtggtcgtaacgtaattggttagtggggaaaaaccgggccgggactcaaaagaatttggcgaagtgtttgttcctgaacgagggaagtggaaagacaaagagggatagggagctcgcctccttctttttttgaatcgccgaaattgtacgacgacccttcttgttccaggcatacgactctgagacgtgacggtgtcacttttccggcccggtaaagtgacagttatataaat

SEQ ID NO: 6311 - DNA, 1868 bp, Oryza sativa
  ref <308>: DATABASE ACCESSION NUMBER: AK063464
  ref <309>: DATABASE ENTRY DATE: 2001-12-06
aattaattgtgctcattgcattattcttgttagacagtcgttgaccctaaatgaactaattctgcaatctgcattcatgacagattgcaactccatgggtttctaaaatattttgggcttagcttattttggagcttcttccaatggttctacacgggaggcaatgcctgtggatttgttcagttccctacttttggtctgaaagcctggaaacaatcattcttctttgattttagcctcacatatgttggtgcggggatgatttgctcacaccttgtgaacctctctaccctccttggtgcggtcatttcatggggaataatgtggccacttatcagcaaacataagggggactggtaccctgcaaacatacctgaaagcagcatgacaagtttgtatggttacaaggtctcatattttctcaatgcttaatgtaaaagcagatactacttacaaaaccatcagataacttatgtaaattgctccttttgcagtcgtttttatgcattgctctgattatgggggatggcctgtaccattttgttaaagttaccggtgtcactgctaagagtttacataatagatttaaccgaaaaagtgttagcaacacaggtgagaaaatgaaaccattgcaaattcaactacatggaaatggaatgcctctcacactcttccatcaccttaattttcacatactcataacactgttaatgatggctaaatgaaatgaattgcagcatcagaggagggtgatatggtttcattagatgatctacaacgtgatgaggtattcaagaggggtactgtcccttcttggatggcatacagtggttacttcttgctaagcatcattgcggtaatcaccataccgataatgtttcgacaagtgaagtggtactacgtgatcatagcctacgcgctcggcccggtgctaggattcgccaattcctacggagcagggctcacggacatcaacatggggtacaactacggcaagatcgctctcttcgtctttgcagcttgggctggcaaggacaatggcgtcatagccggccttgtggttggcaccctggtgaagcagctggtgctcgtctctgccgatctgatgcacgatctcaagacgggacatctcaccttgacatcgccgaggtccatgctcgtgggagagctcatcgggacaggcattggctgcttcatcgcgccactgacgttcatgctgttctacagggcgtttgacatcgggaaccccgatggctactggaaggcgccatacgcgctgatctaccgcaacatggcgatcctcgggatcgagggcatctcggcgctgcccaagcactgcctctcgctctccgtcgggttcttcgcgttcgccgtgctcacgaacgtggcgagggacgccctgccggcgaggtacaagaagctcgtgccgctgccgacggcgatggccgtgccgttcctcgtaggggcgagcttcgccatcgacatgtgcgtcgggagcctggtgctgtttgcttggaacaagatgaacaagaaggaggctgccttcatggtgcctgctgttgcgtctgggctcatgtgtggcgatggcatttggaccttcccttcttctatccttgctctcgctaagattaagccaccgatctgcatgaagtttacgcctggaagctaagaggtgtagtgtgtttaatttcatgggtggaggattgcagaaataaacagtgatgattaactgtaaatgtgtcttttggttgtagtgagctgctgtttgcctatgatccaagtcatgtttgtgttttaatttacctatcgaattagctgtgtttgtacacttgtacattttataacttgagaattgtttagtttggcat

SEQ ID NO: 6312 - DNA, 1999 bp, Oryza sativa
  ref <308>: DATABASE ACCESSION NUMBER: AK063465
  ref <309>: DATABASE ENTRY DATE: 2001-12-06
aagcaagacaccgaaagtacagtaacagtagtacagtacacagaagcgatcgagatttgtatctgaagggagacaatgaagtactcatcaggaaatgataaaatgacaattgacatcgaatctctggtaaaggatgtgacgatctgctggcagcgtgccgagggagcgaagagccgatcgggatgcaagattccgtcgcttgatcagagagacaggccggctgcgatgtgcatcggccctaaccaccacaatcccttctaccgccagatggaggaggagaagaaggcgatgctctacagcatattgacccaggtggacgagcaacacaaggctgcagtgctgaccagattaatggacgcgatcaaagccctcgaaaacgaagcaagggaccattacctcgaccgcgccgagagcatgagcagttcggagttcgtgcagatgctggtaatcgacgggtgctacatccttggcaagttcgtgctgcctcactcctgctgccccagcacttcagacgacggggcgcagaacgggagtgcgatgcagaacatggaattggtgcgcgacgtgttctaccgcctggataaccagatacccttctgtgtcctcgacgagatccacaaggtgctccatggtaagatcatccgctcgtgcacggcggtcgccgacgtgttggtaacccacgtcggggatctgctcgagaacctgagctactccagggtgcacgcactcgatgttcacgcgagcccctggcacttgcttcacttgctgcacacgcgcctccagcccaccgccgagtggggcagcgagaagcctaccaagggcgccgctgcgcatgtcgtcgtcagctgcgcatccacgcccggtttctaccgctggcgcccagcgacgcagtacgacgccgctggcgtgcggttcaggaagttcgatggctccagctgcatcctggacgtgaagctcgacggcgccacgctgcgcgtgccgtcgcttgtggtggacacgaacacgtacgccctcctgcgaaacctgatgatgctggagcagcacaacccagaccagctcggcagccacgtcacggcgtactgcgtcttcctctcgcagctcgccggaacgcccggcgacgtcgcgctgctcgcgaggaaggggatcatcgtgcacctcctgcccagcgacagcgacgtcgccgtgatgttcgccggcctctgcgtcggcatcaccatcggcatggacgagcccaaacacaactacctgcacaaggagaggaatgatctcgagcgaatctacaacagccgcctcatggtgcaacacactaggaactgcgtgacactgccgcatcgcaacccgatgctggtggtcgcgcttcttgccgccacgcttgggttagtctgccttcttctccaggccatctataccatgaagagctactattgtaagggacatacatcttgaccgagcgttcgatgcaagaccaaacgtcggatggtcatataattaaggaagcacaggatggcatcaccatcatcgccacgcccaccgagatgtgaagagggaggaggttgccggcggctacgcgggtggcgacggggcaacagaagaggaaggaggacgcccgacgccgatgacactgctggtgacggcgggggatgctgaggcgaaagggaggacaggatgaggtgctagcactctgccggcggtgttgatttatttcagctgtggcccaatgcaagccgattctctcggagctgatcgggaggacgaattagtctagcaggagtttgttagagatgcaaataagtcgcgaatcagttgatcgtgaccgagtcgagcgctgggagtggcgtgcgtgtgtgcgtggagttcagaaaaagcggatcgtgggatggcgcgattttagcctcggattccaaatttgtttgttgagtataagtagttgtcttagctctttatttcagttgtaaggtttacattcagttgaatgagaaaaaccccagaaaattgcccc

SEQ ID NO: 6313 - DNA, 2641 bp, Oryza sativa
  ref <308>: DATABASE ACCESSION NUMBER: AK063466
  ref <309>: DATABASE ENTRY DATE: 2001-12-06
tgtgcgttgcgacatataaaagaaattattttataatatttcctaaaataaataaaaatatattttccttaaaatgtgttatacatcttttttctatagggaatattcaccttgatttgattttatatgtcggtacccattaagatttggttgtttcttaatattaagaagttcaaggagtaatttgcaaaatttacaatgggagttggtggggtggcaaattcatggccaccaccactacctcattttaaatgagtatagatatagactatggaaattgctttagatgtccttcaatctacttcggattgaactaaacagcgctttgtcctaattagttctgttgcatacctcagggagaaagtcttttgactctgctatggatgtctccacaagaaccttaacagctacttcatcattattttccagtatgccatgataaacagtaccaaaacctccttttccaatgattgattggaaattgttagttatgagcttcagctctgcatatgtgaaccttctgatgtcgatatgtaggggagtctcctcttcatacatatcataatcttcttcttctgattttcttgacttccctgcaaattccagaagatgcatttttcatggaagtaaatgtttggaactgttgtctattgttttacacttattgcattggttaaacaggacttaaccaaaaagcactttcttttacctttccagcataacctccagaatatgaacagcaccactaggagagatgtcacaggaactaacacactgatgagcaaaatacgtgtgcgtgtgttcttcttatttccacagtagctagctctgactttggagcatatgggattgccttctagtctagtgattcatttacacagcagataaacatgaactaaatcagccaaagaaacacaaaagtaaaaacacagagataggttagaaatatctttaaaattattgcaatggacacctgcttttttctaacatgaccaacctccttatattacaattgtaatctaaaaaactaaatgtttctaaagcatatgcagttattaatattttcacatctgcccctcaagtagtttcggattcagaaggtttgctttctatgtgcagatgtcgtatttccatgtgatggttaacctttagttgattttgccttttgagcagttttttttttatcatcttttcttctattgataaggagccatgttcaaggagaagccaaaccttagctcaagcaaaccggctttgtatctttgaagaatagaatcagggatggatccattgagctggttattagacaagtcactgaaaaaacagcacttcaaatcattcattcatttaaattttatattaggcactaaagatcccatcaattgctgtagagacttacataacagtgagggaatttacttgatagtctggaatggtgcctgtcaggttgttgtgtgataaatccctgcatgtttttagatgtttaggattgcatcgatgtccacccaatttcatttagtttgtgaatggtagatagcacttacaatttcttcagtgatgacattttcatgaatgatatttctaactctccttgcagaccgctgccagatagatttctgcatagcaactcgttttaacatagtaataatatccaccatcattttttttttcaaaaccaaaatgttttgttcttacatttcaacaatccttgggttctggccaccattagggtaggtgcaagtcaaaccattccagtttttgattaccatgtacttctctttgattgttttcatggagtcaactaagcaaatggtacaaacaacacagaataggtgtcaatatatgatgcttcagtcagcttggtctcaggataatctacattagcattgatgtgtttactgtatgttatgcaacaggttccttacaaattggaatgagtaatagtgaagccaattgacgtaccatcacttgaagcagtggtgaagttctccacctggacacgggagtacacctcatatgcgttaataagaggtggtagctgtgagtctggggtcttgcgaagctgaaaatatgcccttctgcctttgcgcaagaaccagttgtggaacatggagctcaggaatgacggtgggctgaagttggagaacagtgcttgcggttcatcgacattgtagatgtcaaaaattctctttgaaccattattgccgagttcaacaaagtgaaagactggaagaagctctaggtctgttgcgagagagttactggcactaacgctgatgttgagccaagagaagtttccgtttatggttgaagcgcttcccagaatggctggaggaagcccaaaggtgtcaatattaggaagttcagccaccttgccgttgctactcttattaacccatggaaaggtgtgcatggtaaagacccagccctcccagaagcgatcatactgatccgttgggaatctgaccatgacagaggacaaaacaaagaaaagattatgccaacgtaaatataactggattcagcattgtcattgccgttgtttttgctaagctttaaggcttatggctattgatgtactcgctccggtcataaatatttgatatttggagtaaattttgatcatattttcaaagcttcg

SEQ ID NO: 6314 - DNA, 1884 bp, Oryza sativa
  ref <308>: DATABASE ACCESSION NUMBER: AK063467
  ref <309>: DATABASE ENTRY DATE: 2001-12-06
atctttgctttcttgctccgcctacctggatggatggatcccccctccctattaatacagcacgcttcttcctcttcctcctcacgattcaagccaaacgcagccggccgacctcctcccgtgccttcctcctcgatccccggagagagaaaaaaggctccatcttttttcctctttccgtttttgggcgcgaacgcctcgtcccccccggatcgatcttgctcgcgcgcggtccgtagtcgcgtgctctgttcgaaaggcgagtccctctttttttttcttctccggccgcgggcgctaattttcttggagggcgacgcgccacctttggcccggccatgaacgcgctcgccgccaccagccgtaacttccggcaggccgccaggctgctcggcctcgactccaagctcgagaagagcctcctgatcccgttccgcgagatcaaggtggaatgcaccatccccaaagacgatggaaccttggcgtccttcattgggttccgcgtgcagcacgacaatgcccgcgggccaatgaaaggtggcattcgctatcaccctgaggttgatccagatgaagtaaatgcacttgctcaactaatgacatggaagactgctgttgcagcaattccatatggtggagcaaagggtgggattggatgcgctcctggtgaattaagcacgagtgagctggagcgtttgacacgtgtatttacacagaaaattcatgatcttattggagctcatactgacgtgccagctcctgacatgggaactaattcacagaccatggcttggattttggatgagtactcgaaattccatggtcattcaccggcagttgtcactgggaagccaatagatcttggtggatcattaggtagagatgctgctacaggaagaggtgtgatgtacgctactgaggctcttttggctgaacatggaaagtccatttctggatcaacctttgttatccagggttttggtaatgttggttcatgggctgcacgaatcatccatgagaagggtggcaaggtgattgcacttggagatgtgacaggctcaatcagaaacaagaatgggttagacatacctgctctgatgaagcacagaaatgagggtggtgctttgaaagattttcatgatgcggaagtcatggattcttcagagctactagtgcatgaatgcgatgttctcatcccatgcgctttaggtggagtgctcaacagggaaaatgcacctgatgtgaaggccaaatttataattgaagctgctaatcatccaactgatccagaagctgacgagattcttgccaagaagggagtgaccatattacctgacatttacgccaactccggtggtgtgatcgttagctattttgagtgggttcagaacattcaagggttcatgtgggatgaggagaaggtgaacatggagctccacaagtacatgaacaattctttccagcacatcaaggccatgtgtaaatctcatgattgcaacctgaggatgggggcgttcaccctgggagtcaaccgggttgcacgtgccaccctcttgaggggatgggaggcatgaggccattaacaacactcatatccatgtccgaaaatgttggacgaccaatgtctgatctgataaattcatcagaagtggccggcttggaaggagctcacttgcaataatattcaagatagatcggcgtcggcgtccttccaccgttccggcgaaaaataataataaatatattaagggtacctaacaaaaatgtgatgtttcttctttcgtttttacaaaaggccgattcaatcgtgcgtgattatagtattgacaaaaaatggtgtaagctctagaggcaatttgaatttcacaaaggttgtattctgtc

SEQ ID NO: 6315 - DNA, 1943 bp, Oryza sativa
  ref <308>: DATABASE ACCESSION NUMBER: AK104961
  ref <309>: DATABASE ENTRY DATE: 2002-08-28
gtttagccaccccaactcacccgccgtgccgtccgccgtcgccgacgcaaatcgccgtcgctgtcgcttggctcggagttcaccatcgccgagcgtggaggtccacgccgctggtagccatcgcccgcccagatctggcggctgtcgctctccgcgggcggcggctgcgtccaccgcgaatcgagtccgcctgaactgaatccattccccaccgccggcagccaggatgagttcccggcggccgaggcggctgctgctgactctccccgacgaggtgctggaggagatcttcctccgcctcgacgccctccccgacctcgcccgcgcctccgccgcctgcgccacgttccgccgcctcatcaccgcccgcgccttcctccgccgcctccacagcctccacccgcgtcccctcctcggcttcttcaaacgggaaggcccatcgtgcgagttcttccccgccgcgccgccccactcctcctccgccgccgccagtgccgtcgcgcggggggcagccgacctcaccttctccttcctccccgccacgcccggcgggtggcggctccgcaacatccgccgcggcctcgccctcctatcaacccgcgacggcggcggcggatgcttcttccccgacgtcgtggtctgcgaccccttgcaccggcggtacgctcagattccccaaatccccgacgacctagcggcccccatccgccggagcggcagtttgcccaagggtttcgattacttgctcgctccagcccgcagggaggaagaggaggaggaggaggaggattcatcattcaaagtggtgtgcagacccaggttgacagaagagtgcgatatcaccgtcttcgtcttctcctccggcgccgggatctggcgcgccgccacattgggctcctccctcgcaacagctatctctgtcacctcccgcccccggtgcgtgcaccgctgcgtctactggctgaccagattcttggacagattgctcatcctggacaccgacgagatggaattgtccatgtttgataacttccccccatccacaggatttgtactgaatcacaccactgcggccattgcggaggcaggggaagacaggcttggggtgtttaaccttgatgttcacaatgtcaatctcctctctagggcgatcaggggcagcgccgacgaacagtggcggcatgacaagactatcccattgctccctggctacagtatttggagatttgtaaatcacgctgatgttgacggctacatactcctaggaggagttttgggcagcggtttgcagtctgatcccattactgatggattacagtatttctcactggacctcaagacatttcggcttgagaggctgtgtcccatgacaatctaccaagcaaggaactctccaactgagttatatacaagctttccgccaccattatcgctttcaagcatatgaaaacaggatgcaattggcacgggagttggacaggcccgccccactcatttctacaggctatagtgtccaacgggttggcgagttgaccaaccaagcaatgaagcaagtaacctaacaaacttcttagttgtacccataccaagacttgccaaggcccaaggggggacggagcagcttcggttgtgaagatttatctgataccatgcaagaccagctgctactggttgtaatggcatcgatttattgctactcttctttcttttttccccctcttatgctgcattttggaactaaagttgctagtagtttgcaaagcatagtattcaggctgccccgcccctgatgcatatgatgcatttcagtgtatgctcgttgttaattaagtttgttgttatccttaatctgatgtcaatttgagtacgggaggctctctttccttgctactagtttcagattggctacatctgcaccgtaaacagacagatttgtactatat

SEQ ID NO: 6316 - DNA, 1556 bp, Oryza sativa
  ref <308>: DATABASE ACCESSION NUMBER: AK063468
  ref <309>: DATABASE ENTRY DATE: 2001-12-06
ctagcgaggtcgctccaccagcggccgcaccagaagccgccggcgaccgactcgcccaaaaccctcgcgccggcggccgggccacggcgcggcgtgccgcccctacccccatcctatcgcggcctcgccgccgccaccggtgtggccgcgccatgttccccggcccctcctcctcatccgccgccgccggccccgggttcaccgagaagaacgggctccatgtcgatcccatggccgccgctgcctggagcggtgggcgcaccaacggcaaggaggatgcggagatggtgcttgccgaccaggaggagctcgccactccgagcgcatcggccggtgttggcggacgcgaagggaggcggcgacgcgagtggattgggggaggagggaggggaggagcaagtgggggagcggcgggggccagcgccggcgccggagccggagtcgatgcggaggggcgctagagccgatgccgaagacagagagagcaccaacggtcgttaaatcccctcctcgccggcgagactctcccttcaactcatcgatctctcgctctccacttcatctcgcactctctcagccaacgattcctcgcaaatccttgaagagatcgtgagaaagcttcttcttgcttgtgcttgcggcaatggcgggggtgcacacgcacagggcattcctgctctgcaactacctgcttcttggcgtttctggatcgattcgatctggtcaaagagataagagagaagggtattttggtcaggacaaaaaaataaaatagagtaaaatcatttctattaaaaaaagaccaaaatagcattttagtgaacacttttaggattgcattatccagcgaaaccattttacgacagtagaatcgcaattttctcgtctctagggttcctcttttcccaatccctttctcagtttctcgtgcactgcggcggccggcggtggtgccgtggtggcgactggcaatgggcgccgggcggcggccggcgggtcggcgattcggcatgggttctgtggcgctggcaggccagcccggcagcaacaaggcagctgctcagcttggtagctcctagtcctcagctcagtcgctcagcagtccatccagctgcaggcagtaggcacttaggcagaggtcaagttgaattaatttgtcagatataaaaaggaacaacagaaatatgggcatactttctttattgagcaaggtccctaattcagattctgcatctcctaggacagggcttcacatttctcatggggtaactataggaaggaagagtaactgaagaaactcgagaaaatgagactttgcaattggtgttgttttcttcttcttcaatcccaacagaggaatcaccacacgctcaggcttcaccaacaccaccaccagtacagccccaaaatgaagagcaagaagatataactgtaggtagtggtagagcatcaaattcaacttcaagagcatctaattcaattcggagtgaggagccccaaaatgaactaattgtactacatttggataatttaagatgtaactgtacttttgtgct

SEQ ID NO: 6317 - DNA, 1925 bp, Oryza sativa
  ref <308>: DATABASE ACCESSION NUMBER: AK063469
  ref <309>: DATABASE ENTRY DATE: 2001-12-06
aaaagagaaagaaagaaacgtgaataaaatacacgcgaagcgcacgccccgccttcgccgtcctcctgctcctctccctcttccaccttcctcccgccggaacttgacgaaatctgggaagcgagccaaggaggagggggaggagaaccccgccgccaccgcccgatctccccgtgcggcgccgggcgggggggtgcggagcgggagcctcgaccgcgccgatccggacaggggccaccagattcgccccgcgcgtgtgccggcgccgagcgcccaggcggcgttagatcccgccgcccggcccccccaccctcccccgtggcatgcaaagggatcagaggccacggctatagagtgatacatatatcttgctgctgtgcttttggggcctccggtcctgcttagttagaggagatgcagaggaacggagtgatggaatgcagtgtatgccactccaaggtggtggctccgagccccaggagtgtgtcgagggcatatgacaagcaccgcagcaagatatcgtccaagtaccgcgcgcttaacttccttcttgtgtcaggggactgcattttggttggcctccagcctattctagtatttatgtccaaggttgatgggaagtttcagttcagtcctatcagtgtcaactttttgacagaggttacaaaagttatatttgctattgtaatgctaataatccagtctagaaaacaaaaggttggggagaagccacttctgtcactttcaacctttgtacaggcagcacgtaataatgcactcttagctgttcctgctctcctatatgccatcaacaactacctaaagttcatcatgcagttatacttcagccctgcaactgtgaagatgctaagcaacctgaaggtactcgtcatagctatcctcctaaaattcataatgagaaggaaattctctataattcagtgggaagcccttgctctgttgcttattggaatcagtgtcaatcaactaagctccatacctgatggaaccaaatcttttggtcttgcagtcaccactattgcatacatatatacacttatatttgttactgtcccatcacttgcctcagtctacaatgagtatgctttgaaaagccagttcgacacaagcatctatcttcagaatttgtttctatatggttatggtgcaattttcaacttccttggcatcctggggactgtcatatttcaagggccacaatgtttctcatttgtaacaatgctgcacaaggcattctctcttcattcttctttaagtatgcagacacaattttgaagaagtattcatcaaccgtggccacaatatttaccggtctagcatctgctgcatttttgggacataccttgacagttaactttctcctaggcatctcaatagtgtttatttcgatgcaccagtttttctccccactggcaaaggtcaaagatgacaaaccagctggagcattagaaccggaagatgcacagaatcataggtcatccgactcttcttttgtaaatatgactgctggcgctgctgatgatgcaagccatcttactgcaaccgatgagagaaaaccattgttgcctatttagccttctgtttgaggtaggtatagaagaaattctttttgccatgaatcacacagaatttatgtagcatgatgagtaaaataaacagttgtaaactatagaatgaaacgaaatattcatagctccgtttcaggttatcctattttctcttctcttttttttaccccaacatttttggggcaaacattcggatggcaagacttccgaccctatacaaatacactcatactatacaaagttccctttgttcttttggcaaaatcgatgtatgttaacgggacacaattgtactgaacattcgtaccatttatactactgaactgtttttttcct

SEQ ID NO: 6318 - DNA, 1373 bp, Oryza sativa
  ref <308>: DATABASE ACCESSION NUMBER: AK063470
  ref <309>: DATABASE ENTRY DATE: 2001-12-06
gatggtgatggtggcggggttgccggtgaggatggggccgagaggtagtacgaggcgtgggacctctccgacaacgaggcggcgctgggctgatctggggggtggacctccgcggggaggcgttaaggaggtcagcggcgcggaggagctctctgccctcgagtcggcaaggggacggtgcagactttgttggcggcggcggagacgagcaaggtcggcggagctgccgccgtgcgggcggcattcggtggcccgtggccccccgcgcgccgcccgttagagctggcgcgtttacgcgcctccgagccgcgtcggtccccccccgcccccgcgggctgcaaatctgagtgagccggtggtgctggtgtggtcgacgtgctggtggcgggaccgtacgtgggcctcgcggttccgggtctccccatcccaacggcgagttgggcggcgagaggaggcggcttggtgcagtcccgtggcgacgtgggcagcgaagggagcaggtcacagtgatatccttcaattgccaattcccagctccgtagagcagtcatgaccattgccctttcaactactggaagggtttcgtctggtgttggtttgcctgctgctgtcacttctgatcgagagactggggaaagaagacagtctggtggcctggtggctggtgccatagttcttgctgatcgttgtgctgtctgcattgatgagtttgataagatgaatgaccaggacagagtagctatacatgcagttttggaacataaaaccgtgactattgcaggaatacatgcatcgctaaatgcaagatttttctgaacatgttgcatggatgcatcggtgttgcactgatgatggagtgttagcagggacatacatcgcaagattaaacacaagtattaaaccaaactgaaattcatgccacgaatttaatatcaagtcttgagccgctggcgagactgaacagatccaaatgattttttatcaagaagctacaaaaagttataggctatgttgaatgtttcctaatggagctgacaaatgaaagagaatggatgaatcctggtaaatgtgattgtgttcattggagaaatgtaatggttcaaagtagcaacttttcctccaagctatataaatataatcccgaactacggtcggattattgcacgtagacatagccaagatggtatatggatgtgcttgaccatgttttatatacatgaagggatgtgaacatcctgttagcgacaaattgaaggcaaatattcagtttgatagctcatgtcgatggtactttcttcctgtacccattcaatatttattaagcttacatgtacaaatattccgtttcatatatcgaatgcaatgtattggac

SEQ ID NO: 6319 - DNA, 1245 bp, Oryza sativa
  ref <308>: DATABASE ACCESSION NUMBER: AK104962
  ref <309>: DATABASE ENTRY DATE: 2002-08-28
attaattatcccccctctctgctccgtcagtcggtttggcggtcgatcgatcggtgacgccgtgacggtgtatgtaggccgactggtccacgtacgtgcggtgcgattgctgttgtgatcgaggaaccgcgaaatgggtcgcgggggcgacgtggacggcgcggcgggcgcgctgcggcggttcgtgcgggaagcgggagggtgcgcggtggtggacggcgggctggccacggagctggaggcgcacggcgcggacctgcatgacgagctctggagcgccagctgcctcgtctccgcccctcacctcatccgcaaggtgcatttggactacctcgacgccggcgccaacatcataacctcggcgtcttaccaggcgacgatacaggggttccaggcgagaggcctgtcgcgtgagcggagcgaggcgctgcttcgtcggagcgtccacatcgcgcaggaggcgcgcgccatcttcgccgagggctggtccaagggcccgtacgccaaccaccgctcctcgccgcgccggcccgtgctcgtggccgcctccatcggcagctacggcgcctatctcgccgacggctccgagtacaccggcgactacggcatatcggtgaccaaggagacgctcaagagcttccaccggaggaggctgcaggtgctcgccgacgcggggcccgatctcatcgcgttcgagacgatcccgaacaagctggaggcgcaggcgagcggcgaccccatcacggagtgcgccgccgtggccgacgcctgcgcgagggtcggcgccgtcggggtgaactgcaccgcccccaggctggtgcacggcctgatcctctccatcaggaaggtgacgagcaagccggtcgtcgtgtaccccaacagcggggagacctacgtggccgagaccaaagaatgggtggagtcggagggcggcgcgtcggagacggacttcgtgtcgtgcgtcggcaagtggaggcaggcgggcgccgccctcgtcgggggttgctgcaggacgagcccggccacggtgagggccatctcgtgggcgctgcgtgaatcggatgacgccgtgggtggtgacggcgatcgcgacgatttccctgcagtggccgtgctctagttgttcctgccttgtcgtcgatcatcgagtctcgtggttgtctggttgagcgcgcagttttgtgtgtgtatccatgcttccaatcaatggaaaatggaaataaaaatggttcggttcgtgcagtt

SEQ ID NO: 6320 - DNA, 1500 bp, Oryza sativa
  ref <308>: DATABASE ACCESSION NUMBER: AK063471
  ref <309>: DATABASE ENTRY DATE: 2001-12-06
gacgacgcggtcaatcgcgatctcccttctgttatccccctctcgtctcgatgtcatcgccgccgccgccgccgccgccgtgtcctgctgcggcgtgcgacgacgggtggctctccctgtccgtctcgacggtgtcgggagagagcaatcaaaagcgcctcaagcgaggaggcggaggaggtggtggaggggtcggcggcggagcggtcgaggatgatgggtgccccctccacgacgaggtcctcctcctcgtgttcgcggaatgttcgctggagacagacgatctcgtccggtgcgccgccaccacggttcatcccgttgccctcctactcctccaggttcgccggcggaggcgagctcgacaaggtgttcgacagcggcctcttgagcaactcccgcctcatcgcgtcgcgcaagggcctcctcgtcctcgagctccgccgctcctcgcgcgccgcggccgtcaggctcgtcgtgtgcaaccccatgaccggggacatggccaccctccccatcctcgccgggaaggacaggcccgggcactacgcgtgcgcgctaatcaccttcgacgaccacgagggcgcgccggatcggctcggcttcgtccatgaccccgccgcgttccgcctgctcctcgtctacaagcgccgcaacttcacggcgtgccgatcctactggtcggacaccaaggcctgggatgcggagggcaagctgtccggtgccaagatcggcggcaggcgcctcggcgagatgaccggcgcggtggccgtccgcggctccgtgttctggctgctaaagaacctgctgttcgtcgtccgcctcggcgcgctgaaggctaccaccgagaccttcccatcaaaatggtgcagcaagctctgcttctgctacggcagcccggtgcagaaccgccagctcgccgtcacgccggacggccggctctgcgccgtgcaggtggaccgacacgtgacgagcaacaacaccgtgaggatcaacgtcatctcccgccacgacggctacggcccgccgacatgggagtgcgacaatgcgcgcgacgtggagctcaaccgcgtgctgcccatggcgaacgtgaggagggtttgcctgaggggcgtgtgcgagaggagcggggtcgtcttcctcgccatcggcaccgacttgtacaaccagcagccggacctggcgctctacgcgctggacatggacaagaaggaggcacggaaggtggcggcgccgccgggccactgccgccggttgtcgtcgagcttcttcggctacgagatggaccgtgtggcctacctcgcctccctctccggcggggagtccattgctagctgattggaacacccgcaaagtgaggtaaggagaggaattttgctaagattttactgctgcaaagattttactgctgcaaacagttctgtagcttgtctggaaaaaagcaccaggcattacaaaacatagttgcatacaccatactttacagtttagtaagtttggatc

SEQ ID NO: 6321 - DNA, 1808 bp, Oryza sativa
  ref <308>: DATABASE ACCESSION NUMBER: AK063472
  ref <309>: DATABASE ENTRY DATE: 2001-12-06
cttgcaaatgcagttcaacatcgacaagatagcatgtggctagcttccctgcctcactgcacaccttcttccaatcacaacaccccaccatggacaccttcttttctgctgttcttggtgatcttctcagcaggtctgtatccttcctgatcaacagataccaccagcaacagaaggatgccgaggaggatcaacagcggttacaccgtgtgcttctgcggatcgaagccacagtcgaggaggccgaccggaggtgcatcacaaaccaggcgatgctgctgcagctcaggatgctgagagacgtgatgtacagaggctattacttcctcgatagcttcaggtaccgaaacatccaagcacatgctcaagatgaggttggtgatcactctcttggcctgtcccatttctgtccattaaagcgtttctgcatctccactagaacatggaaaattctgtcacaagttctggagaagaaagagctgcaagagatgcttgatcacctgcaaggcatagtttcagacatgcaggagtttgttgtgcttatgagcagctaccctcgtatgagtcgccagccttatggcagctacttgttgctggaaaactgcatgtttggccgccaaatagagaaggagaggatcatcaacttcttgctagaaccacatcgtcctgccggttcaaaaggcattgatgtgctcccaataattgggccttgcagagttgggaagaccactcttgttgagcatgtctgccatgatgaaatggttcgtaaatgcttctctaaaatacttatgtatggcgcagatagtattgagtgtggagaattggtgcctcttactgaaatcggtgtaatcaaacatcgaaatcctgcatcaactggacaatcacttcttatcattgaacttgtcaatgatatggataatgaaacatggacaagaatattgcacagactgagaggagaccactcaacacctgtgggtaagatcatcataacaagtcgatcaaacaaggtagcaacctttggaacaacggaagcacttcaactagattttctcccagaagaagagttttggtatttcttcaagacgatggtatttgggagcgcaaatcctgaagaagagccggagctagcagccatatgtatggagatcgctgccttgatgaatagatcattcatgggaacatacatcattggtgacatactcaggtctaatctcaatcctcaattttggtacaagtttctcgaatgctttaaatattatacagacattcatatccgtgagctaggcgaacatccaactgaaacatataaaaggataagtggacacacttgcgtttggacgcctgaaaatcggtgtgttactgaagcgacatatgcattgacatacactctttatcaagcaagttctgaagatctgaatgatcagcccatggtgctagcaagcgatgttcttgttggaaatgttcagcttcaagggaaagttgatgtcctgcaatggcgatcgaagataccaccttactactgctacatggcacatttcgaggtacttgcacggccgctgcatatgccgcctaaaaggaagcgatcccggtcactgtctggacagttagtttgatctgaaatcgttggggtcactagagtctagagttggttgatccatatggcacaggaaacagtatggatgccgtaacaacaactgatagtttagttcaacagagagtttgctcacatgtttcccccgttttgacattgtaaactaaactattagctatgtacatctctttgcatggatgtaatgccatcttccctt

SEQ ID NO: 6322 - DNA, 1544 bp, Oryza sativa
  ref <308>: DATABASE ACCESSION NUMBER: AK063473
  ref <309>: DATABASE ENTRY DATE: 2001-12-06
aaaaaaaatctcaaaagaaacaggagcctttgctatttcctcggccccgaccaacaaacaaacaaacagcggatgagcggagagtagtcaagccgcgtcgtcgcgcgtggtcgtcgatcgcatcgcgctctctcgcggttgtcgtccaaacgcgttgaaattaaccaccgatcgatcgagatggccgtgcgtgtaaagccctacgagtgatcgccccggccggcgctctctcttccctcgtcatggggagggaggcgtcctcgccaccgcccccgccgccgccgccggcggtggtgcatggagccggctcgtcgttgtccggacagaagaggaaggccgccatggacgatggcagcggcgaggacgacaacgtgccaccatggctgaaactgtctctcggtccggtggcctacggggtcgccacgggcgtcgtcgacgacgactcctcttcttgcgctccggcagtgacgacgtcgatcgaggtgcggccgccggtggccactggtgtggtctccggatcggcggcccaaccatcgattgaacatgttcctgccgatgatgcggtggtcacgccgtcttttgtggcctcggcagccggtgtgctgttcaccggctgcgcgagtggtttgatccccaatggtgcagtctcggtatttccatgctttaattttcttggaccttcaatgtcatcatcaatcctatcgcacctccatcaacaattctcctcgactcgacgtcaaagcaacgcgtccatggcaagatctagccgcacctgtggcggggacgacgacatggcacttagcaacatcgctgcgccgaacgtcacaaacggtggcggcaacaacaacaacgacggtaatgctcttcctgatccaccgtatccttgggctaccaatgaaccggccaaacaccactccctcgccgagctcgctcgccgcgacatcaccaccatccaaggcgacgctcggtgcaggcgctgtgatgcacgcaaggcgcggtggatgaaccctgtcgtgccgaactgtgacgactgcggccatgagaaatgcttgcgtccggtgatcgctgccgagaaggagcgcatcaactggttgttcctactgcttggggagacactgggtttgtgcacacttgatcagctcaagtatttctgcgcgcacaccaaccggcatcgcaccggtgccaaggatagggtgctcttctccacctacgaagagctatgcaaccaacttgttcctgggctaatcacaagacgtgaccagttgaggatgcgttagttattaattttttcggttgttaatttagacttttcaagatgcaaccatgcgtgcctacgtggttgttacattaggttcatctagagtctctgtcttggagtctcgtctctataagtctgtgagtgtttgagatagttcgcgatatattatttctctcttttatttgtaagttgtgcaactggatttgaatgtgggtgtgtattgtttgttttaatatactatttatgtcctttcagctttgaatgataggcgcaatttggtgtggtt

SEQ ID NO: 6323 - DNA, 2337 bp, Oryza sativa
  ref <308>: DATABASE ACCESSION NUMBER: AK063474
  ref <309>: DATABASE ENTRY DATE: 2001-12-06
aagagaggaggagatcaacgaaatggcaggtctcgtaatttttctttttttgcttccgccgcggcgccacccccgtccgcccgtcccttcgccggaagcggcgacttccaacggcgtcctctcctcctcggcgccgcggccatggcctcctcgcccgtctcgctctcgcgccgccaccacctcaccccgcgccccgccgcctccacctccacctcccttcgccgctcgcgcctcccggtcgggtgcgccgcggctggcctgcgccgacatggacgacgacggggtctacatccgctggtgcgtggagctggcgcgcaaggcggccggccacaccagcccgaatcccatggtgggctgcgttgttgtccgcggcggccgcgtcgtcggcgaggggttccaccccgaagccggccagccccacgccgaggtatttgctctgagagatgctagggatttagcagagaatgcgacggcttatgtgagcttggagccctgcaaccattacgggaggacacctccctgcaccgaagcactcatcaatgccaaacttaaggatgtcgtggttgggatgactgatccaaatcctattgtggcatccaaggggattgaaaggctccaaagtgctgggattgatgtcagggtgtgtatggaggaagaagcgttatgccgcaacctaaatgaggcttatatccattgcatgcttactgggaaggcctttgcaactttgagaactacgctctctgtgaatggagtcgtcgtaaatcaaattgggactggagctgatcaacccggagggtattactcacagttactgaaagaatatgatggagtcataatttcaggcatttcggtcaatatgactaccttgcctacatcccatgaagctggtgcaaagcagcctctttatatcatcatagcacagggaggaaattcccaattaaatattcagtttctcagagaagaatgcgcatctgaggcagtagttctgactgacagtcctgtcaccgtgaagccaccaggagttgaagttttagtccttgatcggatgagcttggagttcattcttgaaattctcgcccagcgagggctatgtagtgtgttggtggattttagggaggctggaggagactttgcatatcttctgaaaaactttcaggaggagaagctggtacagaaggttgttgtggagctcctgcctatctggacagtgaccaaagcctcaaagggcagaagttagaaaaaagactgggaacatggatgggtaacctatcccatgctggaagagctattcaaattaatgcctgcttatcttcaattccttcatatgctatgggcttttattccctccctgagggtgttcaccacaaatttgattcggttagagggagatattattgggctggaaacaaaataaatgggaaataccatatggtgaaatgggaggatatggctttcccaaaagactttggaggtttgggctttactgaaactagagctatgaacattgctttgttggcaaaatggattttcaaactagaatctccggatcaaagtctgtgtacttccctcctaaggaacaaataccttcaagagggtggagtgttccagtgcagagctgaggagggctcccaattctggaagggagtgctaagcactagagattgggtgaaactgggaacagaatggctagtgggagatggtagacacattttattttggaaggatgtctgggttcacccttgtcctttaaaaacatctttccccttactttttgagatttgcaatcaacaatctatactagtggctgaaatcaaacaggctgggatagaggggctgtcttttaggagatcttttggcccaagagagatggatgaatgggaagagctgagagtcataattgagaacattagcactagccagacttatgatactttgagatgggctctaaaagataataaaaccttcactacccagtccctttacagagttttaactttcagggggatgatagacacccaattacaacagctttggagtgctccttgccctctaaagattaaacacttcatctggttaggtttgagagatagaattcaagcctcagctaatttagcaaaaaagggttggagtggttcagtcctgtgtttactctgtggggagccagagacaacaaaacatatcattttcagatgccctatggctacttttgtttggtgtttgtgtagagatgtgctgggttgggaccggatacctgtcaacttcgatgattttttctgtttagctcagctcagaactgttttcaaacacatgaatgttaaattggcgctgcttgctgct

SEQ ID NO: 6324 - DNA, 1211 bp, Oryza sativa
  ref <308>: DATABASE ACCESSION NUMBER: AK063475
  ref <309>: DATABASE ENTRY DATE: 2001-12-06
acaagaacacgcgccacatttgtcattcagacattcagtttgtgctggctgggcacttactgcatcgatcgatctcctcttcagaacaagaagagatcagctttggagctagctagcttagctagccggctgagctaatttcgccttgctttggtttttgtttttagtttatctgaaggagagggatttgtaagtgcaaggaactaaagcggcatctataacagatggaggatttggcaaagttcttgtttggagtttctggcaatgtcatcgcgctcttcctcttcttatccccagtgcctactttctggaggatcattcggaggaaatcaacagaggatttctctggggtgccatacaacatgacactcatcaactgcctcctctctgcatggtacgggctgccgttcgtgtccccaaacaacatcctggtgtcgacgatcaacggcgccggcgcggtgatcgagacggcgtacgtggtggtgttcctcgtgttcgcctccacccacaagacgcggctgcgcacgctcggcctcgccgcggccgtcgcgtcggtgttcgcggcggtggcgctcgtctccctcctcgccctccacggccagcaccgcaagctcctctgcggcgtcgccgccaccgtctgctccatctgcatgtacgcctcccccctctccatcatgaggctggtgatcaagacgaagagcgtggagtacatgccgttcctgatgtcgctggccgtgttcctgtgcggcacgtcgtggttcatctacggcttgctcggccgcgaccccttcgtcacgattccgaacgggtgcgggagctttcttggcgccgtgcagctggtgctctacgccatctaccgcaacaacaagggcgccggcggcggcagcggcggcaagcaggccggcgacgacgacgtggagatggccgaggggaggaacaacaaggtcgccgacggcggcgccgccgacgacgactcgacggccggcggcaaggcgggcaccgaagtgtagctctggcgtgcgtctcgaatcggctaagatttcccgcgtgtgttctacttctacaagtagtaatattagctagacccttgctgctttgatctttactagaaaggagagcgcggcgccacgccgcgcgcgatggcaaatagttctacataaaatggttagatagtagatacatattttgataaatatagtctacatttgttt

SEQ ID NO: 6325 - DNA, 2067 bp, Oryza sativa
  ref <308>: DATABASE ACCESSION NUMBER: AK063476
  ref <309>: DATABASE ENTRY DATE: 2001-12-06
cccaatccccctggcctctgtcgggaagagcacccaaaccctcgcttccgccctcgcaaaccctagcgcccggaggaggaggaggtgggttgcggtggtagtttgccgtccgccgatgtcgagcaacctagcagcctcccgccgctcgtcgtcgtcgtcctcggtggcggcggcggcggcggcgaagcgacccgcggtgggggagggaggaggaggaggagggaaggcggcagcgggcgccgccgcggcaaagaagcgcgtggcgcttagcaacatcagcaacgtcgccgctggtggtggcgccccagggaaggccggcaatgcgaagttgaatttagctgcctcagctgcaccagtgaagaagggatctttggccagtggccgcaatgtgggcacgaatcgggcctcggcggtgaaatcggcttccgccaagccggctccggccatatcccgccatgagagcgccacacagaaggagtctgttcttcctcctaaagtgcctagcattgtgccgactgctgcactggcacctgtcactgtaccctgcagcagcttcgtctcccctatgcattcaggagattcagtttcggttgacgagacgatgtcgacgtgtgactcaatgaaaagcccagaatttgagtacattgataatggggattcctcctcagttctaggttccttgcagcgaagagcaaacgaaaacctgcgtatctcagaggatagagatgtcgaagaaactaagtggaagaaggatgctccttccccaatggaaatcgaccaaatttgtgatgttgacaataactacgaggatccgcagttgtgtgctactcttgcttctgatatctacatgcacttgcgcgaggctgagaccaggaaacgtccatcaactgattttatggaaacaatccaaaaggatgtaaacccaagcatgagagcgatcctgatagactggcttgtggaagtcgctgaagaatatcgtcttgttcctgatacattatacctgacagttaactacattgatcgttatctttctggcaatgagatcaatcgtcaaagactgcaattacttggagttgcttgtatgcttattgctgcaaaatacgaggagatatgtgcacctcaagtagaagaattctgctatataactgacaacacatacttcagagatgaggttttggaaatggaagcttctgtcctgaattacctgaagtttgaagtgactgcacctacagcaaaatgctttttgaggagatttgtccgtgttgcacaagtatcggatgaggatccagcattgcatcttgagttcctagccaattatgttgctgagctatcactgctggagtacaatctactttcttaccctccttcactagtagcggcatcggctattttcttggccaaattcatactgcagccaacaaagcacccttggaattccacccttgctcactacacacaatacaagtcgtcagagttaagcgactgtgtaaaggcattgcaccgcctttttagcgttggtcccgggagtaaccttcctgcaatcagggagaagtatacccaacataagtacaaatttgtggcgaagaagccctgcccaccctcaataccgaccgaattctttcgcgacgcaacatgctgaactagaaaaataaaccaaggattagttacagttgctgactgaattcttcctccagaggcacctatgccaggttgtgccgtagaccgttcagataaccttgatgcaaggcatgctgcttgccccccccccccccctggttctttcaggcggtttggctgagtgtagatagatcgatgcttctgctgtgtgtggtaacttttatggtactgatgtgctttcttctatcttcttttccctgtacctagatgatccatggttttcagtactttgtacatcggagtcctgcagcaaagctttaaacatcttgtttgatattagctgccaacctgggcgtctcctaggttgatgtatgatagagtctctgttcgtgttgcttttgtgaaattctcaataagagcaccacattttcaacagtgctcattctgaat

SEQ ID NO: 6326 - DNA, 2160 bp, Oryza sativa
  ref <308>: DATABASE ACCESSION NUMBER: AK063477
  ref <309>: DATABASE ENTRY DATE: 2001-12-06
aaaatcccaaaaccgaagggaaacatagcagccggctaaggtttctcccccctgccgcgccgcgccgcctccctccaacgccatggatgcgcagcgagctctcctcgacgagctcatgggcacagcccgcgacctgacggaggaggagaggaaggcgcacaaggaggtgaggtgggacgacccggacgtgtgcgccgccttcatggcccgcttctgcccccacgacctcttcgtcaacaccaagagcaacctcgggccgtgcatgaagatccatgatctgaagcttaaggagagctttgagagttctcccaggcgtgaaactcacatgcgaaggtttgaggcggaacttgctcaacaatgtgagaaactggttatagatttggatagaaaaataaggcgtggtcgagaaaggttggctcaagatgttgctgtgccacctcccgtcatagggaaaacatctgagcagctttcaattatagaagaaaaggtcaagaagctgttggagcaaattgaggagcttggtgaagctggtaaagtagatgaagctgaggcacttatgaggaaggttgaacttctaaatgctgagaagacagctttaacgaatcaagcagataataaagtggctatgcttccacaagagaagaagatggaactttgtgaaatatgtggatcattcttagttgcagatgatgttcttgagaggacacaatcccatgtgactgggaaacaacatattggctatggtttggtcagagattttctagctgaacacaaggctgcaaaagagaaggcaagagacgaagagaggattgcaagggagaagaaagcagaagaacgtaggaaacagagggaaaaagagtatgatgttggaggcagggacggtggttctagaagagagaagtctggggatcgtgactatgaccgtgatcgttactatgaccgcaatcgtggaagagaaaggtctcatgatcacagagatagaggatcagaatatagaagcagttcctacagaaatggtagggattctgaaagagacagacaccgatataggagtgatgacatgagaaaggacaggagtagagtgaggagcaggtctcgttctccaagcaggcatggcccagatcagtgaacatatagatagttttattccgagttaaaactcatgagctctgttgggaccctacagtcttccttttagaggggaaaaaatatcaggtaggtattgtttacctttcctagtattttgagttacctatattaacatacagtgaggttttgtttcaacatttgaaactgaaaattagtctaataaagctgaaagcgtacaacaacgctagtattggactgcaaatctggatatgcagacacgttcaggttcagccctattaaaggtaactgatcattagtgtgctatgtcatgtgttgcatgttacctatcttgccatattcccctttatgaaaattacacgaacattttggatatggttatgtttagttgccttcatgctaggttcgatttttgccctaatttccaagtcattcgctaggtttcattcaatttcttgcgacatttatgcaacattttgagttaaaaactgcaggacttaagaaccagcgtcttctttcctaaagattcagtgctcatggacagtttattctctctcgaatcacagtgctttcgttatgactgatgatagatctgccgaatgtttggcttcagttgccttgcttggtttcatcatgtcaacataaggtcaactgatgttattatgatcgtttcacattacaattcaatcatgtactgcttgatctgttttgcgtagcttgcatgtatgtcatctggtgcgagggtggggatctcatagcaaatgatgatttcttcaagaaagcatttccgaaacatgctttgcaggatacacccaaaaaaaatcgttgttcttgaacggtaacctctgccttcctctcataataactgttatgttaagagaacaaaggaacaattagtttctgttgagacttgaaatcatagaacaatgacctgtgcatctgtagaattaggaatgaggataattgtatggtatgaggagaaaggaacacttaatttctattgagacttgaaatcatagaatggatctgttgaacgaggaaaaaaaaaaaaac

SEQ ID NO: 6327 - DNA, 1215 bp, Oryza sativa
  ref <308>: DATABASE ACCESSION NUMBER: AK063478
  ref <309>: DATABASE ENTRY DATE: 2001-12-06
gatgccatccaccgccgccgccgccgccgccgagatggagccggagcccgaccacaccaaaccctccacctccgccgccgccgccggccaccgcaagcacctggccatgctggagcgcctctccaagcgcgctgccgcccccgccccgtcccaggactcccccgtcgcggccttcctctcccgcttcgccgccgccaagctcgccgccgagtccgccctctccgcctgccgctcctcccccgacgacgcgcagccctcgctctccgccgccgccgcggccatcgacgacctcgaccgcctcgtcgccgaggcctcccactccctcccaccctacgagctccgctccgccctcgccgccgcctccgacctccgcgccgcccacaggctcgccgcctccgatctccgccccaagaagtccttctccttcaggaacaagagcaaagcccccaagaacccaccgcaagatcctcctcccaccttgccgccgcctccagaccagccaaaccccagcgtcgaggcgatcctgccaggactcgggttccggggccggagggacgccacattggtgaaggatctgagggtctccgacgagaaggatggggatttcaccctcgctgatctcgtctcctgtcaggtttacctcaagggcaaatgccgggcgctgcacgttcacaagctgaaggattgccgcgtgttcgtgggcgccgtgttcggctcggtgctcatagaggacgtcgagcgctgcgcattcgtgatggcggcgcaccagatcaggatccacgaggcgacagcgacggatttctacctgagggtgaggagcaggccgatcattgaggattgctgcggcgtgaggttcgcgccgcatgctctcaagtatgaagggattggggaggatttgagggatgcggggctcgaggaggagaccggtaattgggcgaatgttgatgactttaagtggctcagggcagtgcagtcgccaaattggtgtttggttccggaggaagagcggttgcagaccattgacatttcagatgttcaggaacgagagtatgataattaagatgcttgggatggtttgctttcggctcttattatggattattgttctggattggttaattcttcttgatgtttacttggattaagttttggtttattatgagtttatagctttcattgtacctacatattgatgcattaaggattagaagtgtg

SEQ ID NO: 6328 - DNA, 1991 bp, Oryza sativa
  ref <308>: DATABASE ACCESSION NUMBER: AK063479
  ref <309>: DATABASE ENTRY DATE: 2001-12-06
agcgtaaacaattacttcttatgctttctcagaatgaggcagacagacttgaagtgtgggcacaaccgataaatacaaaagatgcagcaacatttcgtggtaaaattagctcagataaatggattgatcatgccagaactgcttttgctgttgatcctcgaattgcattctcaatgattatgaggtttcccacaaactcggcattatcatcagaaattacacaattggtacagacacatatattggaactccgtacaattcctgaagcattaccctttttcatcactccaaaggcagtagatgaaaattcatcattgttacagcaacttccacattgggctccatgctctgttacacaagcattggagtttcttacccctccttataaaggacatccccgtgttatggcatatgttcttcgtgtcctggagacttacccacctgagactgttaccttctttatgccacagttggtacagtctctcagatatgatgatgataaattggttgaaggatacttgcttggagctgctcggagaagtaatatatttgctcatattttaatatggcatctgcagggagaatgtgttcccgatgaacctgggaaggaagcagctgcaccaaaggccactgcattccattccttgcttcctgccgttagggagaaaattgttgacggttttactccagaagctcgtgacatgtttgaaagagagttcgaattttttgacaaggtcacctcgatttctggtgttctttttcctcttcccaaagaagagcggcgagcgggtattaaaagggagctggagaagattactgtgccaggtgatgatctgtacctacctactgcaacaaacaagtttgtacggggcattcaagtagacagtggcattcctctccagtctgctgctaaagttccaataatgattactttcaatgtggttgatcgtgatggggacccaaacgatgtgaagccacaggcttgcatttttaaggttggtgatgattgtagacaggatgtgctggcactccaagttattgctcttctaagggacatatttcaagctgttggattaaacctttatctcttcccatatggtgttttacccactggaccagagcgaggcataattgaggtggtaccaaatactcggagtagaaatcaaatgggtgaaacaactgatggtggtttattagagatatttcagcaagactatggccctgtaggttcaccttctttcgaagctgctcgcgaaatgttcatgatcagtagtgctggatatgctgttgctagcttgcttcttcagccaaaggatcggcataatggcaatcttctctttgatagccacgggagactagtccatattgattttggatttattttggagatttcgcctggaggaaacatggggtttgaaagtgcacatttcaagttaagccatgagatgactcaattgcttgatccatctggaacaatgaagagtgacacttggaatcagtttctgagattgtgtgtcaaagggtacctagcaggaaggagacacatgaatgggattattactaccgttaatttgatggtggacagtggcctgccttgctttagcaggggagaacctatcgctaatctgcgaaaacgttttcatccagagatgaacgagcgtgaggctgctaattttatggtcagaacatgtgtggatgcctacaacaaatggactaccgcagggtacgacttgattcaatacttgcagcagggtattgagaaatagtctatttctccttttgtaaatggggggtcgtgtacatcaattgtatgtagccactaattcttttatgtagaattatgttgttgagcggttcattgtatggtaagaacggtgatttcaagcgactaacagagggtgtatcagtgtaagttaaacagtgcctattcatttttttgttccttttgtaagacagccgagctagtaattctattggatcgcgtcttacag

SEQ ID NO: 6329 - DNA, 1382 bp, Oryza sativa
  ref <308>: DATABASE ACCESSION NUMBER: AK063480
  ref <309>: DATABASE ENTRY DATE: 2001-12-06
tgggtataggggcgaaagactaatcgaaccatctagtagctggttccctccgaagtttccctcaggatagctggagcccattacgagttctatcgggtaaagccaatgattagaggcatcgggggcgcaacgccctcgacctattctcaaactttaaataggtaggacggcgcggctgctccggtgagccgcgccacggaatcgggagctccaagtgggccatttttggtaagcagaactggcgatgcgggatgaaccggaagcctggttacggtgccgaactgcgcgctaacctagaacccacaaagggtgttggtcgattaagacagcaggacggtggtcatggaagtcgaaatccgctaaggagtgtgtaacaactcacctgccgaatcaactagccccgaaaatggatggcgctgaagcgcgcgacccacaccaggccatctgggcgagcgccatgccccgatgagtaggagggcgcggcggccgccgcaaaacccggggcgcgagcccgggcggagcggccgtcggtgcagatcttggtgtgtaagactaagatcttgctcgattttctacctgatgatgcacctcttatgacttctttcgtcaagaaggcctttgtcaaatcacattggagtcaagcatcagattgccaagttttcctaatttggtcctatatatacatgttgttctctatattatggtacattaaatttgaaagaaactaaaggaacttagtagcaagggcagatccagaataagactataggggggacttatcttctaagaactagcttgggatttcatggttgctgaagctagtctcttttcttttactagaaaaaatgcccatgcgttgcaatgggtaaaaatattttttatcgcctatacattatactccttatttggttttggaccgaaagcccattattttcttccttttcagccctatcgtcttcaacctccggaagtgcatgtacgataccggagccgatcctcccatcaaattcggtcgaatctttcacgatgggttagttgagggtttttatccactcgatctcctcttttcctttttaaaaaatggagcaatccacaaaactcagaataaaaatagtgattgagattaaatccggtgaattaaagacgaattttaaggagaaatcaaggggaaaatgatgagggagttgtggggaatcaatttttgcaatcaattagaggaggaaacgcatagagggatagatcaacgtggcggctgagctagggttcagcccgacgacagaagaaaacctagttgataaaaaaacgaatccttaccgcatgcgaaaaaacgtaatgtaaaaaaattgggatgaaaaaaaagcgtgccaaaaagaccgcgatgt

SEQ ID NO: 6330 - DNA, 1471 bp, Oryza sativa
  ref <308>: DATABASE ACCESSION NUMBER: AK063481
  ref <309>: DATABASE ENTRY DATE: 2001-12-06
cagatcgtgttaccttaccatcctcaacctcaagacaatagccactttctgccaaaaatgcaactgtaaacacaatcatcccttgcaaaatctcaaagcacggtaaggccttcatactccatgacccttcaaacctttgcgaaatctcaaagcatggtaagaccttcatactccatggcccttcaaaccttgtcacccactcgatagtctcagtgggttcagttgacgttgcacctgatcaaaaactatggggacagttgtcaccttcggttagtatcaaccatacttttgccgaagaggtatataaacatttcactcatatatgaaatgcttttttttgtcatgcaaaggttatattcttgggtatccagaatctttgaattcttcagtgatgagagagcacaagtagtatgaagtataaacatgattgcaagtacaagtagcctcaacagcattatttttagggaaagtatcaaacaagtactaggtcacatatgcccacttcttacaagtagcagagcacaatactagaagtacactagcacaacgacagcaaaagccaccattaaggtgagcatgttgtattacaagctaccaagccaacattcacctctacatagtaaaacactcttccatgtactgttgcgacttccattagcgtgatctgtcgaggccaagccttgagctgagccatttgccgacatcgtccatctcttcagggatggtatagtggcctagcctgcatcatcatataacttgttaatactgctataattttgggagagtaaaaaaggtgttttgtaatgtgttatgtatgcatatgcatttgtacccattgtaggatttgaaattcagatacaagaaccccgagttacgcagagtgtcgactgatctctcagcattcctgtaggatacaacctcatccactgcaagaacatacagaatttagaacagactgatgcattgactaggagtaataattaactagtaaattatactgtttctggagggaaggcttttcatggatcaacagcttaatgtgttacctcttccatgacttagtaagataggcaaggaggaagctcttcttgcagccatgtgtgagctctccgtcttgctcctcagggtcctagaacaaacattggagtcatgaaaaagtagagacaacgtgtttggattaatatttctgcattattggatatcaaagtggcacctggagcaagggagccagccactcaagctgatgaccgcactgagtgtgattggatatggcatgctattcgcgaatttgccgtgagcgtagcacgctgcggagtggagggcagcagctgcacccatgctgaaaccgccgatcccaagcttcactgcactcgcaaaatatgaaaatcaatggaaggaatgatcaccagcttctgtatctgaagaacattatcttacttggtgctaattcggtacaaataaggatcacttt

SEQ ID NO: 6331 - DNA, 2694 bp, Oryza sativa
  ref <308>: DATABASE ACCESSION NUMBER: AK063482
  ref <309>: DATABASE ENTRY DATE: 2001-12-06
gcgcatcttcccccttttggaatcgcccggtccccatctccacttcgaaccaaacccggaggcgcgccgcgcgcctccccgccgccgccgtcgagcgggaggggatcggagcgcgcggccgccgccgtcgccgagtccgtccgacctccgtcccccgcgccaacgcagcagcagagcagcagtgtgggaaggaagaagggaagccgctgccgcgagcggcgagcgggagtgggggtttctccattgttaccatttcaggccagccgccgtcgacgccgaggcggggtgggccccacctgtcactggccatgttcgcctctatatatatacaccgcgccgccccccttccgccgccaacctgagccgagcggggagacgcgtcttcctcctcctcctcctccattgctgctccccctcccccttcctcctacaggggcatgcgattttggaagcggagttgatacttgatcgagatggttaaagtagaagatgatgtggagggcagtggcatcaacgcttctgttggtgatctcagggatgctgctgtcaatccacagcctgccctgctgcgtgctactgttaaggaggaggaaggacagccaagctcttcctccagtcatgtaagatcacaatttattggcatggggttttcaccaatgttggttgacagggtgcttcagaaacacggtgacagagattcagatactatactggaggctcttttgtcacagtctgctcttcaaaaatctgggtctgaatcaggttcattgggagatctctttgattctgataatgaagaaaatagttctcattttgcgcctaggaaagaagttatccaagacattaaggttgaagctgattcatcctcagaaaagagatcatatctactgagtacaatgaacttctcgcagcgagaagttgatttggcactcaaccagctaggtgaggaagcatcattggaacagcttgtagatttcattgttactggtcaagtgtcaggttgctctggaggaaacgaaaatggagatgcttcaaatgaggtaaaggatgaatcactgtttggagtaatggataaaacactacatttactccagatgggttttacggaggaagaagtgtcatctgtcattgacaaagctggtccagaagcaacagttttggagctggctgacaccatttttgcacgtagaattgccagtagcattgagcagaaagaggtgaaagttgagcctgactttctagatgagacagaaaccagctattcagcataccatccctcaaattctggtctaaggtactatgatgacgaccatgacaacataaggattaaaagggctaagcatatgtttatagatgacagtgcgggttccagtagtcgtgctggaaatcaacctaacttagatccatggcttaaggatcaccgtgccacaactagtgatgggtctgtcaaggaagaatttgatgcaatgacaccaggcatccgtagaaatgttcgcagtgatgtcgccaatcccccatatttcttatatggaaatgttgtagaaattcccaaagctacatggcgtcagctgtcagagttcttatataatgtggagccagagtttgtaaatagccagtttttctcggctctctcacgaaaggagggttacattcataaccttccaacagagggaaggcgtaacctggttcctaggtcaccaatgactatcgaagaagcattcccattcacaaggcagtgctggccatcgtgggacacaagaaaacaacttaacagtgttgctacagaagttgcaggaatagagcagctgtgtgagagactgggaaagatggtaagagactcaggaggttatctttcacaagaaaagaaaacgcacatcatgcaccagtgcaagctggctaacctcatctgggttggcccagataggttaagtcctttggatccacaacaagtggaacggatacttggctacccacggaaacacacaaacctgtttggcctgaatccacaagatagaatagaagccatgaggtacagtttccagactgacacactcggctatcttttgtcagtcctgaaggacctgtatccagatgggctaagggtgctatcaatctacagtggaattggaggtgcagcaattgccctccatcgcctagggataccactacagtgtgtagtatctgttgaccaatctgatacgaacaggaaaattttgagaaggtggtggagtaatactgaacaaaaggggcaactgaggcagataaataccatttggaagctgaagattaatgtacttgaggacctggtgaaagaatttggtggttttgacataattattggtggaaacttcagttcctgtaaaggtggtacaacagtaaactcatccatgggcatggattccaaccagttttttgagtatgttcgtgttgttcaaagagtgaagcatataatgggtcggctccaggtgagggcgcatgaatctgctcgacatcgacatcgctctccatcaaattgacttgtctggccttgtaggatggtgtagcattagcatagcatcatgtggatctgtaggtgatgtgtcatggagcagttgctctcagacaactttaaatgttatgttgatctccgcagaaacattgcgatggctgttagcattcgttacattgcattaattaccctttcatgttcctggt

SEQ ID NO: 6332 - DNA, 1269 bp, Oryza sativa
  ref <308>: DATABASE ACCESSION NUMBER: AK063483
  ref <309>: DATABASE ENTRY DATE: 2001-12-06
atctccatttccatttcagagagagagagagagaaggccaatcttactaccccaattccatccccctttgcatattctcactcactctcaagtctcaactcaactcatcaagatatcatcatcatcagagaggttgtagaagctacctagctagctagctagccaaaagagatatctttcagaagaaaggaaggaagaagaagaagaagcaatgagcagtggtggtggctcctctccaacatcatccccttctgtctgctccagatcatggtctataagtgaggattcgttgaagaggtacgtgagctacgcgagcgagagctgcatccaggagctcctcgccgcgtcggactccggcggcggcggcggcggcggcgacgatgggtggaaggtgctcgcgtactgcaacggcgtggagatatcgaagcggcgggccggggcggcgcacgtcttccggagccggtggctgctgcacgccgtctcgccggggaagttcatggccgtcgccaacgccgtcgacgccgccaagcagtgggagtcggacctggtggacgcccggtacatcagggagctgggcgacgacctgagcatcgtccacctcaagctcggcgccgacgcctccaagcgcaccgccggcctcttccgccgccgcgacgtcgtcgtctacgagcgccgccagaccatggacgacggcacgctggtggtcgccgtggcgtcgctgcccaaggagatcgccgcgggcctcctgccccccggctcctcctccggcgcccgcggcgccggcctgctgctccagtccggctgggtcgtcgagaagctcgacgccggcgacggcggcgacggcccgccctgctgcgtcgtcacctacgtcgtgcagctcgaccccgccgccgggtggctgccccggtgcttcgtcagccggctcaacagcaagctcgtcatcatgatcgtcgccaagctcaagaagatggccctcgccaccatgcactccgccgccgccgacgacggcgaggtgatgccatgagtttagttaggaaggagagagatcatctggattaattaattccggcgatcgatcgatgtggcactgtggctacaagctcgccgtcgtcgtcgtcttcgtacgtgagtaaatacgattttgtagaagagtgtggtgttgcgtgtgtggaggtgttatttgtgacatgcgtcgcttgcatgacatgcgtttcagcatctctctatatataaatatgaactttgagagtgagaattgttaccgtgtgt

SEQ ID NO: 6333 - DNA, 1986 bp, Oryza sativa
  ref <308>: DATABASE ACCESSION NUMBER: AK063484
  ref <309>: DATABASE ENTRY DATE: 2001-12-06
aagcgagttgctggctccttcttccgccgcacgctacccctcctccccgaccccgccgccccgatgagcggccgcgacaaccaccaatggccgccgccgcaccgaggctacgacccccgggaccccgccgccgcgtggcagggcgacgcctcgacctccgccgccgccgcggcggcggccgcgggggtaaacccctacatctacgtccccaacccccagtacgcccccaaccctctcaatctcgtcctcaatcatgtgctccacaaccccgccgccctcgccgcctaccatcaccagcagcagcaacagtaccaccaccaccagcaactcctccattcatctgcgtaccaccaaaaccctacccataatctccagcaccgcgctgccgtccctgcaccagcagcaccggcggccgcccctagcatccagcaccgccctgtcgcccccgcgacagccgcggccgcgccggggcagcctcagccgaagaagaagaagaaacagaaggagccggctccgcaggcgcatcccccgccacccctgcccccaccgcagcagcagcagcagcagccaaagccgcagcagcagccgggggctcttgagagggcgcaggcggcggcgaggaaggtgcgggacgagatcattaaggctggtgagggcgttacagggtggaagatagcgcaggcggtgctggtggcgctcaaagtggattcctggggctctcttggtgtccagctccatgaagtacccctcctgcgcgacctcttcctcgtcgagggcaaggtgaatacattcatccattgctatgttgcagcaaggaaaattgtttcagtttatgatttagagtctgagatatgcaaaaatgagagcattggacagtttgaagagttggggttggggccttttcttcagcatccacttgttgcacattatttttcagtacctgccgatttgtccttggtacctaagcttagtagtgacgagattataaattggcttcagaagtttatggacaactctaaaaagaaaattacagtggaaaacttcttggattatcttgcggagcaaaagtcagtctctggaaaggaaaaccttggtgtacgaatacaaagcttgaggttgcatatttcctttctccggcaggccaggagaactgaagtgtctgctgttaaagttcaaggcaacaccagtggctcaggtgatggtagttgtgagaaggatttggtgaaaaatagaaaatttcatttgagcaaacaggcattggatgagaggttcagtgctataactagtcgtataaagaaattaccaggtatcaataagcacatccattttgattcaaccgatgatgaaactgatggtgattctagttctgagggtgatgcagttgataacagtgagagtaaaactggttctgctgctattgataacaaggatgttgataagcgtgttagtagctgtccatatccttcaaaaacagaagaaatggagcgtcttggcttaaagtctgaaacgagtaaaaaaccacctttggatagtagcaaggtaaaagagagtagtaaaaagggttatacgagagaaaaaaggaaatctgaagagaatgggagccccacctcttcatgcaaacggcccaagaagaagcaaaaggttcaaatgcaaaagcatgagttatcacctaattgtttcttgagtataggtaagttggagaaattcataacgacctggaaggaagcatgccgtgaacatccagttcaacaggttttagagttgctagcaaattactatgcggaaacaccaaaggagaagaagaaaataataaagtttttctccgagtaccctggcattggcttcctaaatgttgccgttagagcgatgggatgtggtctgctggatagtctttatgatgcgatcaatgtctttaatgagaataaatcatcatcaaatattcctgataccaccactgagcttatggaagtggagccaccaccaagt

SEQ ID NO: 6334 - DNA, 2337 bp, Oryza sativa
  ref <308>: DATABASE ACCESSION NUMBER: AK063485
  ref <309>: DATABASE ENTRY DATE: 2001-12-06
aatcctcctcttctccggcgagccagaggggcgagagcggcggcggggtcgtaggcggcggtgtgtggcgatccggcgaagggaatctcgcacggcggcgcggctgctgagggggaacaccctaatccccttctctccccgacccctctcccggcgacgcgagtgagtggctggcggcaagcgccgagcggctccagcttcactggctggggggcgcacccgaagacggcgccaagccatcggcggtccggcaaagcaccgagccgacgggggagggggggaggtgccaaaagtggcagcccaagccgatgcttcccgtctccggtgaggcggcgacggtggggaagctccaagacggcgcgagcggtggtgaaccggcgcgaccccgaggacgccggagagcttcaagtctggtaagtttcagaaacccgaagctcaaatttcttgattcgggttttggggcttattagggttctccagccgaattagggttcttcaatttgggaatttattcgaattagggtttctgaggtgtggatttttggaatttcaatcttgtttatcccaatctcctttttttctgagttgaacagattggggaaaattttggaaagttcaatctagtattttgttggggggtggggggttggggcataccacctagtactaggtaggaactgtaacatatgtttcagcctggtttgccagacagaacaacaaaaacttatattaggaaatcaatagttgtagtgtacaaaaaaaaagttataactcaagttgcattgcacaaatttataattgaagttgcacatgattttaaaatggcaactacaacaattagggaatgcaactttgctatatatgaggcaactattagtcccatactttaaaaatcacaaaataataaggattgcttttgggctgcagggtgcaaatagctgaaacgcacaagaaagaatcccatttgttggaatggattaggtaatgtgaaaaactaagaaaaacccgatcaccgctacacaaatagaaaaacaaagatgtgtgtttttattatgctagctctagattttcaatgtttacatcacaagcaatcccgtactgagccaatactgcaactaacatataaatgcacttaatcgaaaagaaaaacatgttctctgaaccgcacagaattcaacgcatactgagggttagatcgcatacacagaatcacagatacacatggactttccttatcaatttgtctagtcctagcatttttttcaggcacacggcctagtaacacttgctacatactcacgtatcataattttccagtacaagccatttcatgccattgcaaatcggatggaagcaacagcaagagaggcaaagtgataaaaaaaataatagtgtcctactcttccaaattcataaaagcatggtctatataagcatataaatacatctagattgattgagttaaataaaaaacaaagtaacaataagttgcactttccatatgatgcaagtataggtggctaacagtaaaaaaaaaaggatacattcaacaaaacctttattatctttttgtacacatgtttgttgtcccttcttcctttttatggacttcctgatatgaagaattggaaaggaaaattaccattgttctgaatccgcaaagagaagttcagaaccaacagatccatcatcctacaaatgcaaattcaaatacaaatgctgtattagcttagatgggtgagatcacatacttatcatagtaaacctattctttctcctgtcaagacgtggcttcttccttgctgctacagggcaacagcaaatcattacgttcgttcccatccatctgctgagtggcgtctcctcatatatccgggccatccgtttgtttattaatatgtccagtactaacttcttttaggcaagcataataaaacctactagcacttgcaatatatcaccagcttgattcccagtattagttggttcatgccattgcatattggataaaagctgcatatacagaagaaaatcgagataaatagtgttcaactcttccagaatcacaaaaatagtctccaacttttatgtacaaaaaggtgttcattcccagtaaaaattgctagtatatgtacagtctaccaaacacaactttatccccgtcaaaacaactttgtattcatctcatagcataacaaaaaaagtgcacgcacacagagatttcaaaagcactggactgtgttagagatacagagcgcttaaagttcagactgataggtttcaaaaccgtgcacaacttcacagagtacagactaattcacacagacttaaaagtcc

SEQ ID NO: 6335 - DNA, 2003 bp, Oryza sativa
  ref <308>: DATABASE ACCESSION NUMBER: AK063486
  ref <309>: DATABASE ENTRY DATE: 2001-12-06
ctctcgatcaatctctcctccattcccgcatcctctctctctctccctcctcaccctcacctcatcgtcgcgacaccgaggggaaaaaaaaaagcgatcgccccaatcagattcccccccccccctcctccccacttccctcgtcgcctccgaaaagccaagccgctccccgccgcgccgatcgcgccgccgcagccccagagtgatggactaacattttgggcgagtttgatctgtagaaaggcattcaaactattttatgggaaagaagcaaatcttatgcactatttgcagaattgcagtgagggaagtttgatctgaggcagttgcaaaacaagtatttctggagagatgtcatcctccttgcctattctaccgaaatctttgaaagatatcccaagatcccataatacccagaatattctgatgccagggcaactgccaaatgattctatgcctttgcaccagagtgcaactcaatcttctatttcgcacccaagagccagtgttgtcagatcatcatattcagcaatgttaggatatgctgctaacccaattgattctgtgtctagccatgaggggcattttatggctgctccctttatttctcagtcgtcgaatgctgaaatgctccagtatttatgtaataataatacccatgggggacacactgtgccaacctttttcccagctcctgcctgtggcgcgccagattacatggatactataactgtccctgataatcacacccagagcggctcctctactgttacatctgatgctgctaaacaaaatgaatggtgggcagatataatgaatgatgactggaaagatattctagatgcaacagctactgattctcagtcaaagtccatggcccaaccttccaattctgctgcatcacagcctgctttcaatcagtcaacttcatcccatagtggcgatatttgtcctgtcacaagtcctcctcccaacaacagcaatgcctctgcaagtaaacaacggatgagatggaccccggaattgcatgaatcttttgtccatgctgtaaataagcttggtggtagtgaaaaagctactccaaaaggtgtgctcaagcttatgaaagttgatggtttgacaatctatcatgttaagagtcatctgcagaagtaccgcacagctcgctacaagccagacctatcagaaggtaaaacacaagaagggaaaactaccgatgagttgtctttggacctgaaagcgagcatggatcttactgaagcactgcgccttcagatggaagttcagaagcgccttcatgaacaactcgagattcagaggaaattgcagcttcgaattgaagaacaagggaaatatctgcagaagatgtttgaaaagcaatgtaaatccagcacacagagtgtgcaggatccatcgtctggagatacagcaactccatctgagccaagcaattctgtagacaaggacagtgaggctgccttggacccaaacagaataggagacaaccaccctaaaaattctaccaatgtaggtgccaacctgaaaactgcagcaaccgagtcccctgattccccagtaattgcaactgatggatcggagctcccccaagagaagcgtcgtagagtgcatgaatcttgacagttaactcatctgaatgtagagtgcattcagattatagctgttctgcccatgtacttggtaaaagaaaaatggttccatctatattggctgaaattctagtgctgatccaagtctattgagctgaactatttaaaaggaacataaaaaagcctaatagagaaggggaactgtttggtgtccgcttgtattataattcagtagcaataactcaaatttatctccggtactatgaaataaggagaatttgagatctagccatcttcctgggtacaatttttatttcagggagtcagttgtaaaaggctacggaactccctcttcctccttgcagctcagaagatattgagctaaaaaaaaaaaac

SEQ ID NO: 6336 - DNA, 1674 bp, Oryza sativa
  ref <308>: DATABASE ACCESSION NUMBER: AK063487
  ref <309>: DATABASE ENTRY DATE: 2001-12-06
ctcacttccttcctccctcgctcgtccggggcggcgccgccgcggccggtggccggcggcgccgacgatctctccttctgcgggttcgcgcgtcctcttcctcggcgttcggagacgcattgcctcttccctcccctagtgatgatccattctcaaggaaacctatactcgtgtttacgatgatccagaggaagaagagggaacgacacttgatgaagctgggaatttcaatgataacttagaaaataatatcgaagagctctgcagaagattggaaggccgttatctccaagaaaaagagcaggaaaccttacttctgcaatgaacatgatatcagacatatgctcctgatgaaatgtttcaattgaaaaaccagggaaagagaaatcccttaggaagaaggaaatacttgatctgatgaactcgaatcagaacttagtgctgctgcatagggagcaggtgatctgctagggaggaagactgatgctgaaaagagaaagctgtctaccatgcagcagtccttgcaaaaggaagaagaggcatacaaagcattgaaaaatacaaccgaagttgaagaaaactagttcttgggtgaagactacgaagatctgcagaaatcactggagcaagcaggaagagactgcagattctggtcctcttgctgtagcaatactagctactgccagcaaagaccaagagctgcaggaggtccacacaaaataactgaggtgggagagtttgtgtggggcctacaaatgaagtttgtgatctcagagacatgcgcgccagaagcaagagatgtttttatggatgaacacagtaacggtttccttcaggtcatctagcaaaaggacatgacaagttagcagtgatcaaagaggaaactaacattgaagacctgataaaagatgaaaaggcagaagatgttgaactgaatatgattgtagatgaagttgttctagttggcaatgatttggctggtgctttgcagttctgtatgaagtgctcagtgagggctcagattggggggcacaaccacaaacaataatatatttgcatagaaagaactgatgaatttgatcaagtggtgactgacggaggcatttgtcaccaagtaagatgcagcagacaagatgcctgaatgtaaaccaaggaaatgatatcctctcactcgctttcaatgtctgcaaaaaaagatgagagctcaagctctcagcaaaacaccataccttgttaagtcaagtggcaatgcaaaatgaaggctagcaagtgacgccaacgccagtggcctctctgtggtggagaaagagcatcctaggagtctgacgcccatgctatgggccaaaaaggtcgagcacttttccgaacatcaaacgaagcgcccatgctgggagcaatgcctccgccaccttcaaagggaccgaagaactgaacctgcagtggacttaactgtgagtaagaattcagtggtagtagtagctttctagcgcatctgctgctgcaggtttggagcagatttcgagccctcaccgacagcaacgacagggccaggtaccaacggcacatgacatgtaaaaaaacctgagaaaaaattcactccaagctgatcaactgacacaggtggtgaaaacttcagtgaccagcggtacttgcccatgcatatgctctcccacg

SEQ ID NO: 6337 - DNA, 1421 bp, Oryza sativa
  ref <308>: DATABASE ACCESSION NUMBER: AK063488
  ref <309>: DATABASE ENTRY DATE: 2001-12-06
gggttaagttaaaccattctcaagctaaggctaagcctcgccatggcgtccactctctcgtctccgtcgccgccgtctgccgatcccgtcaccggatcctccgacgccgcctcgtccttcctcccgtctctcctcatcatcgctgctcttcttgccttcgttctactagcgtcggtctcgatccacctacttctcagacttctgtccaggtcgtcgccgccgccgccgccgccgccgccgctcccacggacgcgccgtgaggtgcacaacgtcgaggcggcggacgcttctccggtgcggcgtaatggggtttgtgaggggaagaaggaggtggtgggcgacgagaagcagcggctgatcgagtcgctgccgctgttcacgatggcgtcgtcgctggcggcgctccccaagagctcaccggactgcgccgtctgcctgtcgccgttcacgctggacgccgagctgcggctgctcccggcgtgccgccacgcgttccacgccgcctgcgtcgacgcgtggctccgcaccaccccgtcctgcccgctctgccgcgccaccgtcacgctcccgcacccctcgatctccgccatcctcgccgccgagcagccgccgccgccggagccgaggagcagggaccgttccaggagcttccgcgtcgagatgggcagcgtcagcaaccgcagcgcgtcgacggccaccggcggcaacgcccgccccacctactcgctcggcacgttcgactaccacatcgacgaggaggtcgaggccgtcgtctcccgcgccgcgcccatgacaaccaggagcgccgccgcagtcaaggaagacaagccagcagccgagcagtctccaccgcctcccggcgaggcggtggccgaagcggcgggcgcgacgcgcggctggctgcgggagtacgtggaacggctggccacctccgcgtcatccctatcgtccttctccgggcggtggagctcccggtggagccagagctaccagagccaccatagccacagccaggaggagccatggctgtgggacgcggaggcggtgaggatgtcgccgccggggacggaggaggaggagacggcgttcatggtgctgtaccggtggatcgcaggggtataaacgtaattaccataaaaaggcacaggaaggctttcgtgtcaaattgtcatcttcagatagatagccttcatcaggtactcaggtgaatggtgaatccaatgttttggatgcttctgtgttgactcgatcgggtacaaactggtaggcgtaagcagtttgcaggcctctctttgcacatagttatcctcggagttcggattttggaaaccgaggagagcataattagcagccagggtaggaaggaatcatgcatgcaaaatattgttcttttccgtggacgagtttgatgcatcttgttt

SEQ ID NO: 6338 - DNA, 1397 bp, Oryza sativa
  ref <308>: DATABASE ACCESSION NUMBER: AK063489
  ref <309>: DATABASE ENTRY DATE: 2001-12-06
atcaatccacccacctccgaagtgtatctgcagcatgcaggtaccgatcgaacacaatggtggcgaacaaacacttcttgtccctttccgtgctcatcgtcctcctcggcctctcctccaacttggcagccgggcaagtcctgtttcagggtttcaactgggagtcgtggaaggagaatggcgggtggtacaacctgcttatgggcaagctaggtggacgacatcgccgccgccggcatcacccacgtctggctccctccgccgtcccactctgtcggcgagcaaggctacatgctggggcggctgtacgatctggacgcgtccaatcatcgaggcgttccatggcaagggcgtccaggtgatcgccgacatcgtcatcaaccaccgcacggcggagcacaaggacagccggggcatctactgccgactcccgcctcgactggggcccgcacatgatctgccgcgacgacccctacggcgacggcaccggaaacccggacaccggcgccggacatcgaccacctcaacaagcgcgtccagcgggagctcatcggctggctcgactggctcaagatggacatcggcttcgacgcgtggcgcctcgacttcgccaagggctactccgccgacatggcaaagatctacatcgatgccaccgagccgagcttcgccgtggccgagatatggacgtcgatggcgaacggcggggacggcaagccgaactacgaccagaacgcgcaccggcaggagctggtcaactgggtcaatcgtgtcggcggcgccaacagcaatgccacggcgttcgacttcaccaccaagggcatcctcaacgtcgccgtggagagcgatcgagctgtggcgcctccgcggcgaggacggcaaggcgcccggcatgatcgggtggtggccggccaaggcgacgaccttcgtcgacaaccacgacaccggcaacccatgcatcttctacgaccatttcttcgactggggtctcaaggatgagatcgagcgcctcgtgtcaatcagaaaccggcaggggatccacccggcgcgggggcgctgttgctggctcttgccgagttgaaaagggtagatgctgccagagatggaagccacgagagggacatttacgaatgtgcccatggcccggggtatttaaggccagcttgtttactccagtaaaagaaaagtatcaccgatcacgacatatcgtttagaaagtgtgtgagttaggcatgggcgaaccacatcctttacgactaggtctctcgatctgctagacgagagatcaaccaacaaaagctacgatacatgatatacaccgtggcatgatacaaatccttacaaatagcaacaattattgttcaatagccatatcagttgtctaggcttaccaatat

SEQ ID NO: 6339 - DNA, 1931 bp, Oryza sativa
  ref <308>: DATABASE ACCESSION NUMBER: AK063490
  ref <309>: DATABASE ENTRY DATE: 2001-12-06
gactgctcagatgcagacgtgttcttgtctcacccttcacctgcatgatcctctctttttcaatccctcgatccactcatctctcctggctaagaatcaatctcttcttcacatcaatatcggagtgatcgatcagtctcgtcgcggttcgatcgattggcctctgatccgtacatcttcttgtgtgatcgatcaagaatcattcaagattgcaaggtgagtaagtatggcgagtgatggccacctcgcggcgccgctcctcgacggcggcggcggggtggacgacgcggcgcttctccggcggctctacgtggggcacttcctggcgaggtggggcgcgaggatgtgggagttctcggtggggctctacatgatccgaatctggccgggctcgctgttgctcacggcggtgtacggcgtcgtggaggcctccgccgtggcggcgctgggccccatcgtcggcgccgtcgtcgacaggctcgcatacctgcaggtgctcaggctgtggctgctgctgcagggcgcgtctttcgtcgccgccggcgtctccgtcacggcgctgctcgtctacggcgcccggctcgccgccgcggggttcccggcgttcgtggcgctcgtcgtcgtcaccaacgtctccggcgcgctcgccgcgctctccaccctcgctggcaccatactgatcgagagagaatgggtggtggtgatcgccggcgggcaaccggcggcggtgctgacggggatcaactcggtgatccggcggatcgacctgagctgcaagctgctggcgccggtgctgtccgggttcttcatcagcttcgtgtccatggaggcctccgcggcggcgctggcggcgtggaacctcgccgccgtgtgggtccagtactggctcttcgtctccgtctacgccggcttcccggcgctcagcgagaccagccagatctcaagacggcgcgccgacgatgacgaggcagcggcggcggcgcagccgcagaaggtggagcggctgtggatgacgatgctgccgtgctgggagtcgtgggcggtgtacgcgcggcaggaggtggtgctccccggcgtggcgctcgcgttcctctacttcaccgtgctgagcttcgggacgctgatgacggcgacgctggactgggaggggatcccggcatacgtgatcagcctcgcccgcggcgtcagcgccgccgtcggcatcgccgcgacgtgggtgtacccggcggcgcacgcccgcgtgtccacgctccgcgcgggcctctggtccatctgggcgcagtggtgctgcctcctcgtctgcgtcgcctccgtctgggccggcggcgccgcgccattggcgtcggcgtggatgctgatgggcggcgtggcggcgtcgcggctggggctgtggatgttcgacctagccgtgatgcagctgatgcaggacggcgtcccggagagcgaccggtgcgtcgtcggcggcgtgcagaactcgctgcagtccatgttcgacctgctcacctacgtcatgggcatcatcgtctccgaccccagggatttcggcgagctgatcgtgctgtccttctttctcgtgacctgcgcggcggcaatgtacacgatgcatgtgtaccgggtgaggaagcatctgttccatctcgacaggatcctgcccaagatgaactggatcaaagcttcttgatatggcatcccgtgatcgataatgatgattcatcagtgattttctccagcaaattagtactgatcaatgctggatactgtacaattatctgctttggtttacttcaattttagacctgttcactggaacttttgctcaaaagatttgtggcatctggagaaatgccacatgttccatccaactggggcttgaagaatctccatgtaattaaccttacaataatatataagtactcgcttgatcccatgat

SEQ ID NO: 6340 - DNA, 1540 bp, Oryza sativa
  ref <308>: DATABASE ACCESSION NUMBER: AK063491
  ref <309>: DATABASE ENTRY DATE: 2001-12-06
gaattaccaagctctctgcctctcgtcttcttctccaagaatcccgccgctgccgccaccgctgctgctgcgccgccaatgtcggtcgcgtgcgcggccgccctcccgaccgcctccgcgcgccgccgccaccgcggctccccgcagaccgccctcgaaggtaccgcatcttggttcattttttatttttttccatttttatttgtattttattttaccttgcgggcggctttttttgatttcttggtacgaggaggaggcaagctggtgatgatgcagaggagggacctcgtgaccaagggggtcaccctctccgtctgctgctctatgctctcctcctccaacagctctgcccaagcattggagaggttgccgttcaaggctgatggatacaacttctggacatggaggggtcgccggatacattacgtcgagcaaggcgctggccagcccatcgtgctcatccacggattcggcgcctccgcgttccattggaggtacaatataccagagctggccaagaagtacaaggtgtacgccattgacctgctcggattcggctggagcgagaaggcgctggtggagtacgaggccaccatctggatggagcaggtccgcgacttcctccgggacgtcgtcaaggacccggccgtcatcgtcggcaacagcctcggcggcttcacgacgctgttcgcggcgaccgaggtgccggagctggtccgtggcgtcgtgctgctcaactccgccggacagttcggcgaccccaaccgcccgcccgaggcggcggaggcggcggcgggggaggagagcgcggtgaccaggctcgtcgtgaggccgctcaaggaggcgttccagcgcgtcgtgctcgggttcctcttctggcaggccaagcagccggcgagggtcgagaaggtcctcaagagcgtgtacaaggatgcgaccaacgtcgacgaatacctgatcgggtccatcacggcgccgacggcggacccgaacgccggcgaggtgtactacaggctgatgtcgcggttcatggcgaaccagagccggtacacgctggacaggctgctgggcaagctgtcgtgcccgctgctgctgctgtggggggacctcgacccgtgggtcgggccggcgaaggcggcgcagatcaagaagttctaccaggacaccaccgtcgtcaacctccaggccggccattgcccccacgacgaggcgccggagcagttcaacggggcgctgctcgagtggctcgcctccctcgacgccggcaagccggcggatcagccggagcccgctctccaatccgtgtgatcaacaataaacctggaagagaaacaatgcgatgttcaagtgtactcctataagctagttaaaaatgataaataatttactagtagtgattttagtttatagtgatctatgtatagtgttggggtgtttgttacctagctgacgaactttttttttttttgagaaatccctcgttgccatgcgagatccgctcgaaattagacaaaattcaaaccggaagcttcaattc

SEQ ID NO: 6341 - DNA, 600 bp, Oryza sativa
  ref <308>: DATABASE ACCESSION NUMBER: AK063492
  ref <309>: DATABASE ENTRY DATE: 2001-12-06
atctcggaatcctctacgatggccgccgccgccgcgaggtcgctgctccgctcgtccgcctctctcctccgcgcggcgccggcgaggtccgcgtccgcgtcctcctccgccgcgcgcccgtctctccgtcgcgcgctggccgcgccccctcgcatcctcaggtcgcctgttgagctgagtgtatgcgtggagtccctgctgcctctgcacagcgccaccgccgccgcgcggatgacgtccatgctcgccgttcccgggcaaggcctcgggtggctcacggaagctgaaactgatggattatgctgaattactattcttggacaacagctgatactgatggagtatgacggcagcctgcttctggaaccaggagattagtagtccgtcaagttcatttgtgagcctgcagaattagttagaaaaggaagcactcttttctttttatttatgtgaactatgaagatggcttaataaactactttggatattgctcagaaccctttctccctcttcattgaccagatccttttgtaatggaaaccattggaggaccaatgtatgcgttgctagctactgtaaaatgttgcagaattttttttt

SEQ ID NO: 6342 - DNA, 547 bp, Oryza sativa
  ref <308>: DATABASE ACCESSION NUMBER: AK063493
  ref <309>: DATABASE ENTRY DATE: 2001-12-06
gaagacgacggcgaagatgaagggagcggctgcggtggcgatggtggtggtggccggctgcttgctggcggcggcggcggtgtccgtcgtcgacggcgcggtgacgtgcggcgacgtggacgcgagcctgctgccgtgcgtggcgtacctgaccggcaaggcggcggcgccctcgggggattgctgcgccggcgtgaggcacctccggacgctgcccgtcggcaccgccgagcggcggttcgcctgcgactgcgtgaagaaggcggcggcgcggttcaaggggctcaacggcgacgccatccgcgacctcccggccaagtgcgccgcgccgctgccgttcccgctcagcctcgacttcgactgcaacaccattccatgagcattctgaacttctggagatggagagttgagacaaagctagaataatgaagatggttcatttcaagtgaacctgttgctagtttgtacaacaagctgcatgcatgcatgcatgcctgccccttcttgttggagacagtcatgcttaatgttttttttatctacaatg

SEQ ID NO: 6343 - DNA, 2612 bp, Oryza sativa
  ref <308>: DATABASE ACCESSION NUMBER: AK063494
  ref <309>: DATABASE ENTRY DATE: 2001-12-06
attaaacacaaggggggcatgggcctctatggcgagctgatgtatccgatcgaaagagcttggaaagagcagggggggattcgagcaaaatcaaaggtgccttgcagcttcggtggtggaagaagaaaccagttgttgatgctggtaggtctggtggtttcaagctagcagttacatggcgatgctgaggccggcggccatggatttgttcctgtcggcgacgtccatcgtctccaacgccaacgaatggttcgagttcctcggcacggccttctccgccgcgtcgttgctgctatcccggtggaggcgtcggcggcaaggggacgaggcggagaggaggcagctgcagtggaaagggcaggacgcgaagatgaagcagctccactactgcatgctccagctcccggatctgatccaccatgccgagtggctcagcttcgtcaaggacgacaaggaggtggccaagctcctccccgagctcaaggccagggtgcacgacgcctacgacctcctcgaggagttcaatcaccaccaccatcaccagcagcagctccaactggatctgggtcaggacgccgccgcggagaaggccggggacgatttcttgcagagcatcgccggtggcaacacggtgagggagatcctggatgatctcaactgcctgaggaacacgcttgagggtgtcattgaccgccatgctcgctccgagccgcatcagattggcaagctgctgaggccggccatgacctctttctatgacaaatccaagttccgcagccttgaggatgaggtgaatgagctgctcgagttactcggggtgaagatctgctcggcacggccacacaagcggcgaatcaaaggcgaaaccgcttcggctagcaagaggaccaagcggaacagcggtgtcccttctgcatccaccaggacatcatgcagcaatcaggaaattgcatctgacaatgtaactgtcttagcgatatctggcattggtggtgttgggaaaactactttggctcggcaagtttacaatgatgagagggtcaaggggtattttgatgtcaggatctggatttctgtctcggatgatttcaatgtcaagagattaactaaggagttcatagagttcgctcttgcgaattggatgcagtctgataatctgtgtaacctccagcagagtctcactgaaagcattgtcaagtttaggttcttgcttgttcttgatgatgtgtgggacgatgtatatgctaatcaagacaacagatggcagaatttccttgagccattgaagtctgcccaacaagggagtgcgattctgttgacgacaaggtctcaaagggttgcggatctagtgaatgaaaacaggcacttccgactggaaggtctgccgcctaccattttcgatgaattttttgaggcgtgtgcatttggctcagatcgctgcggtgttaatccagaactgaaccccattgggaaaaggataattccacagctgaagaggtgtcctttagctgctgaaactcttggacgtttactgaagcctatgctggatagagagcactggaatcagattgcaggaagtgagttgtgggagctgaaacaggagaaatatgacattttgccagtccttcgcttgagctatctgtatctaccttcctatctgagaaactgttttttgttttgctccatgtatcctaaaaaccatcagtttgacaaagatactctggtgaacagttggatagcagctgggttagttgagtcctgcaagggtggcaagctagaaagcaatggataccaatattttgaggatctactgcatagatcccttcttcagaaggaatcaaacagcccaacggattccaagtatgttatgcataagctgatccatgatatggcacaactgatttctgagcacgagtgcttcattgtaaaaggcgaaactgatctgacaaaaatccctcaaggcgttcgccatctttcaataattggcagtagtagtctcagtgaaaccaacctaataatggtatgcaagtacaaaacgctgcgctccattgtgtgccatggtgttgagacttacatacttactgctgtagcgaagtactggtttgaagaacttaccaaaatacgaatgctgggtttcctgtcctgtgaggtgaactctttgcctgagaacattgacaacctgaagcttctccggtacctgaatatcagcgattgtactttcgaagagcttcctcaatctttttggcgacttcagaatttacaaattgtagatgctcagaaatgccgtgtccaacaaattcctgatgacttcaatcgattgggtaatttgcagagatttaagttgaggggtagaattatcaaacaacccggcacttatgaactttaacttacaagatatcccgtgagattgatgaattacatctacgagcttattgtacagtgtaagtgatgatccaattgtaccgtaaaagtcctcttcaaaataggtggacatgtataactgcaacatcagtggtcacctgtgaactctgtaatattgttatttgacgaaagtaggatatatggacagttgctccggttgatcttagacatgtgtgacgaaagttattacc

SEQ ID NO: 6344 - DNA, 1999 bp, Oryza sativa
  ref <308>: DATABASE ACCESSION NUMBER: AK063495
  ref <309>: DATABASE ENTRY DATE: 2001-12-06
atctcgtcatcgatgcgctcccctagaatgagagaaacctaggactagtactgcgtcaccatagaaggcgaatcactactctgccccggatcgaccacccacgccgccgtgattgggagaggagacggacgcgcatgccgccgcagcagggggagtgctgccgccacggctggctcggcgtgggggaggccgcggtgggcggcggcggggaggaggccatccgcaaggggcaccggagctacagcctcatgctcaacctgcagcttggcataagctattcggtggggaagtcgtcggcgctgccgttccagaagctcgccgcgtcggacttcgacccgcgggagaaggtatggacacggttcccgccggaggggtccaagttcacgccgccgcatcactcggtggatttccggtggaaggactactgccctgccgtcttcaggcacctgaggaagctgttcggggtggaccctgcggagtacatgctcgccatctgcggcaacgacacgctccgggagctggcgtccccgggcaagagcgggagctgcttcttcatcacgcaggacgatcggttcatgattaaaaccgtgaaaaagtccgaagtgaaggttcttatccggatgttgcggagttactacgaacatgttcgtcagtataagtccactttactaacaaggttttatggcacacattgcattaagcaagctggctgccccaaggtccggttcattataatgggcaatttttgctgttcggaatataagatccataggcgttttgatctgaaaggttcctcacatggtcggactatcgacaaaacagagcgcaagattgatgaaaccactactctcaaggacctcgaccttcagtatgcatttcggttgcagagattttggtacgaggagcttatgaagcaaattcagatggactgcacattcttggagacacagggcattatggactatagcctattgttaggagttcactttcgtaatgattactcagtgtctaaaataggcatatctcagcacatagctttcccaaaatctactggcaaaagaaaatcatttgaaggtggaagcagtttttgtgagctctgctttgtggaatcaggttgcaaagacagagatttgatagactctcggaagccattcatccagttgggaattaacatgcctgcccaggcagagcgcagctcaaaaaaaatattagataattttctcctaaatgaaagacacttgttcataaccccaccaagtggaggatcatgtgatgtctacctcttctttgggataatcgacattcttcaggactatgatataacgaagaaattggaacatgcctacaagtccttccaggtcaaccctgactacatttctgctgtagacccaaagctatactcgagaaggtttcaggatttcatccgcagggtgttcataaaagagcagtaagaaaaagtcattgggttcaatggtaactatcccactgacttcttacatcatgagatccattggtgaagtttaggctatgatcgtattgccaatcccgagcatgcctgaaacagtgaaaaccgcaaatgatggttggttttaccatacgcacagtattctgaataattggggtcaacgagctccgccgacacgcatgctaatatcggatggatgggagctaaaactatgtatagctcggccttttggaagacctgtaaaccgtaagtgtcgaactccatgattgcaaagctagttagttcttccataccactttttttcatttcctttttgtgttctttctttggcatctccccaagaatctgaagtttttatttgcttcttggggtgctgtgctgaatagcatgatcttccaatggagtgacccgatggaaatcagctatttgtacatgtacatatttgtcgtgtatcagacaaattattactatttacaaactggtgcatcctgtcaaaatctaaaaaagaacgaggatgtccatcttgccttcgat

SEQ ID NO: 6345 - DNA, 2396 bp, Oryza sativa
  ref <308>: DATABASE ACCESSION NUMBER: AK063496
  ref <309>: DATABASE ENTRY DATE: 2001-12-06
atcaaatccacgagctttctctctctctctctctctctctctctctctcctcctcctcctctccttctccttcccatcgccaccagcttctccggccgtccgccatcgctgctgaccgcagcatccgcagccacagcttctccgacgccggcgacggccgtttcccccccggagaatacgaatacggaagagtgtgaatcatgagcggaggcgtcgagccggagaccccgccgggtagcagcagcggcggaagcacgccggtgggcggcaagccgccgcgccaccacctcacgtccatccgccactgcgccagcagcgctcgcatcgccgccgcaaccgcagaattcgacctgggtgcggggacgctgagcttgatctcgcccacggacattcgccctggcttcctgccggtgttccgttccgggagctgcgccgatatcggtaccaaatcgtacatggaggacgagcatgtgtgcgtcgataacctcatcgagcacctgggagtgcgtacacctgtgatccctgcaccgggtgccttctacggggtgtttgatggtcatggtggtacggacgctgcttgttttgttcggaagaacttactgaggttcataattgaggatggtcacttccccagcagcatagagaaggcaatcaggagtgcatttgtgagggctgatcatgcaattgcggattcccattctcttgaccgcaattctgggactacagcattgacagcacttatttttggcaggtaaattctaacgccagtatctcaaatgtttattccagtggtacaatgcactattgagtcattaatcgatgctactttaatgcgaaaagtttctcaagtctgtactgaaattttccattcatgacatcattttgtaatccagtagcctctgctagttagtatccaaaccactagtggcagagaaatgagtattagcatttaaagtcaagctgactcaattatgaggtgtttctgcaacttcaattagttattagatactattttagctgatttgtgaatggaaataattttttatccatcggctatttcacatttttttagagaacaaatcatatattaacccggctttgcattaaagcccaacataacaaggttcgacatttttagctgatttgtgaatggaaataactcctttctcatttttcatccatcggctagttcacttttttttagagaacagatcatatattgacccagctttgcaagaaagctaacataacaaacagaccatatattgacctggctttgcaagaaagccaacataacaaggtttaaaaaaaagcgatatcgcccaccgtggggcttgaacccacaaccacaaggttaagagccttgcgctctaccgactgagctagacgggcttttggctgtttcacatttattgcttcattgtccaatatcacaacaaagcgcaaagttctttcctgctccttaataagttggttgtgttgccttagttgcttgacaatctttagatcaattatatcattttgcatattatggtgaatatacctcatttgaatggcaggacattgctcgttgcaaatgcaggagactgtcgagcggtattagggaagagaggccgagctgttgagttgtcaagagaccataaacccagctgcagaagcgaaaagatcagaatcgagaaccttggtggtactgtctttgatggctatctcaatggtcagctgtctgtagcaagggcgattggtgattggcacgtgaaaggttccaaagggtccataagccctctcactgcagagccagagtttcaggaggttagactcaccgaagaagatgagttcttaataatcggctgtgacgggctttgggatgtgatgaccagccagtgcgctgtcacaatggtaaggaaagagctgatgacacacaacgatccggaaagatgctcgcaagagctagttcaagaggctctgcgacggaactcatgcgacaacctaactgtagtggttgtgtgcttctcatcagacccaccacctcagatcgaggtcccaagatttcgagtacgaagaagcatttcgatggaaggattgcatatgttaaagggagctcttgacagtaatgcctgagttctcaaaacctgccttctctggtaactttggttgtatgatcttgtttttctgttgggtccttgaaagttttgctctgttctttcagctataggttcgaaataagttgtgtagaattactgaaattttgttgaggtgtaggctaatcattttgtgaggcgatgatttatctgtaccggcgccagcatttggttgttcacaatgtaattgaccaataccagcattcatattctggtacaagtgccagttataatagttgatcagttttgttctacttc

SEQ ID NO: 6346 - DNA, 1439 bp, Oryza sativa
  ref <308>: DATABASE ACCESSION NUMBER: AK063497
  ref <309>: DATABASE ENTRY DATE: 2001-12-06
gaatgcatttcatcgagcaccttatgtgcgtgcctccatagccattgcttgaagctggagccggtgctgacgaccgcgggagctgtggcttcgggatgcctctgctgctgctgctaccttggatcaactccgggtgccgttgtgacctgaggacctgcagtcaaacacctgcgcgctcgccgtcgtcgtccacctctgcttcagtgccgtctccccaccacagcatcgaacatcgccgtttcgccgcctctcgtcaccgatccatccgaacaaagaaagggggaagaagaagctgtcgcataggtactatagcgaggtttcaggaggggagatcgttgatcgaggaagatggcgaaggctctcctcgccgtcgtcgtcgtcgccgtggcggcggtgctcgagctggggctcgtcggagccaacttccaggatcagtgtgacatcacgtgggagccacagaacgccaagatgacggagggaggagaccacctcacgctctcccttgtcagcaactcctctggttgtatgctccggaccaagaagcagttcatctacggcagcgtgtcgactcgcatccagcttgtgaagggcaactcggccggcaccgtcaccacctactacacatcgtccatcggcgacaaacacgacgagatcgacttcgagttcctgggcaactccagcggcctcccctacaccttccacaccaacgtcttcgccgacggcgtcggcagccgcgagatgcagttccgcccctggttcgaccccaccgacggctaccacaactacaccatcttctggaacccctgcatgatcgtgtggttcgtggacagcatcccaatcagggtgttccggaaccacgagaaggaaggggtgccgttcccgacaaagcggccgatgtacgccttctccagcatctgggcggcggaggattgggccacgcagggtggccgcgtcaagacggactggaccaaggcccctttcgtcgccgagtaccgtgacatcggcctcaacatctgtgagtgccccggctcaggctctggctccagctccagcttcagctccagctccagctctacctccggcgatgccgaggacccagcgtgcgcgcagcggtgcgcgacgtcggaccactggtacgcggcggaggggctgtgccagctgagcgacaagcagctgcggcagatgaaggcggtgcagctgggctacaccatctacgactactgcgccgacgcccaggccaagggacgccccgtgccgccggagtgcagcatgccgcagtactgatcatgcatgcgcatgtctagtttcacttgatttttcatggcatgtttgattaatggcttcttggaagaagtaaatctctgttgttttattttggattatatattatatatgaacatgattatttgatttgttcgtgtaaaaaaaaaaaaaaaaac

SEQ ID NO: 6347 - DNA, 903 bp, Oryza sativa
  ref <308>: DATABASE ACCESSION NUMBER: AK063498
  ref <309>: DATABASE ENTRY DATE: 2001-12-06
aagccaaagccaaagcgaagaaagagcgcgtccgcgtcgtcgtcgtcgtccgcctgcctgcctgcctacccacgtcgcgctcgcgtgcgcgctgccgcttagtcgcgccaaaaaggcggggggaggggaggcgcgtgcctgcccccgatcgcatatcgcattctccactcgcttgcgtttgccgttgcgtttgcgttttgcgtagcaagggaagggagagagctcgtgcttttggattggccgcgatgagctgcgggggcgccgggcaagccgccgagggccgacaaggtctccatcctgagcgacgccgcccgtctcctgagccagctgcgcgccgaggcccagaagctcaagagctcgaacgagtcgctccaggactccatcaagagcctcaaggccgagaagtcggagctgcgtgacgagaagacgaggctcaaggccgagagggagaggctggagcaaatgctcaagggcgtcggcgccgccacaccggcggctccagcgccgttcgtcccgcaccacgccgcggcggtggcggccgcaccggcgtaccatccggcggcgttcgcgcaggccggcggcaagtacgtgccgtacgccaccagctacgcgccgccggccgcgttctggcagtggataccgccgacgtccctcgacacgtccaaggaccccgtgatgtggccgccggttgcatgatcagctgctgctgtcaccgaaaatgccgtagaaattgaccaaagagcacctgatgaaagcctcgggtgcagttatgtgattgtgttgtggataaatgatcaaggatcaagggatcaccagaagaaatttcctggtgatcattgctcgccggagcagtctatgtaacaacccaattgctaaagtaattaaggcaattattattacatc

SEQ ID NO: 6348 - DNA, 1653 bp, Oryza sativa
  ref <308>: DATABASE ACCESSION NUMBER: AK063499
  ref <309>: DATABASE ENTRY DATE: 2001-12-06
actccagtgccgaccaaaccgagagaacaagctctagctgctttcctcgccttcgatctcaccgccggctgtgatgaagacgacgctcgtcctcgcctacgagtcttcgccaaccctatctcttccacgttccatactcacctcaccatacggaaaatttctccttttgatttcatcctctctcgtgcagcggatcgacgggaacgccgacgtgccctcaagagctccagagcgcgctccaaacgtcgctgtggtggcatcgtcgccgtcgccaccgatctggaccaagccgggccatgccatcgcgccatcgtcttcgcctcgtactcctctccatttcccctcaagaaccacgaagaatggtgctacgagtgtggagatcggccaccgtcttcttcacctccggttgccgtcgccattgtcgtttccgcctcctccggtgagccattgctcgattactcgcgcacacaccatctctctggcctcactaacctcatggacacatttgcacgatagttcttggtgccgattgagccgtcgccgttcacccgggaggttcttgccgtcgccaagccgttctgcaagccaccgctgccgccaagaccacggcaaccttcgctagactcatggcgagcattcttgaggctttagtgtcgcattcatgcactttattcatctagatccagcccctaaagtcacatgcaccaccacccgaaaccatctttcgctcggacccgccgccggcgctactccgatgtccactaatcgagaaaagtagaggaatggaatcgtgagagagttctcttcattttatatttttacctcaaccccaaacgagccaccaatcgcctccggtgaacctgagatcgagctcagccatggctgctctgcctctgtagaagacgaggacctcattttgagaatttaaacaactataaggtttattgtacaatctttccactcaatgacatatatatgggcctaggactgcggattgattcttaaaaactgtaagggtctttctgcatattcgcaaatcactgacagtggaccccctggagataaaatctgagactatacaagagagaaacctagaacttgtaaaatccatataaaatcaaataaagcttattttgagatgattcaaatttctttgaactcactagattatgaactttaaagttatgaaataaaaacttgcactcacagtacaaatttagcctctaaaattcatctaagataaatcatacataaagcatatacaaatttataaaatgcatacaaaatacatttcaactcattttagagcaaacttagtttctaaagatccaccaacatgttctctaaaaacaaagtgaaataaaacatatacacactttacatcaaatgcctctaaaactattacctttaaaatgactagttttagattagctgaactttagaagtttatataaaattcatctcagatcctttttgagtaaacacaagttctatagcatcatagagctatgcacttcaatgttatgtatattaatataaaaagtacgagttcatccataattctgcaatccttcgcgtgggacccacctggtcatctggcccaaagaaacagcaccatatctcgcgcacgaaaaaaaggaaactactcatacg

SEQ ID NO: 6349 - DNA, 1587 bp, Oryza sativa
  ref <308>: DATABASE ACCESSION NUMBER: AK063500
  ref <309>: DATABASE ENTRY DATE: 2001-12-06
cttctgcactcgccgccgcctccgcaacgaaaatggcagcgctcgcctccctcctcctactccgccgccgcggcgggagccacgccgccgacgctctcctccgcgcgctcactaccgccgctggagagcagccactcacggcgtcggcggccaagacccgcctccgccgggagcacgaccccgaccgcgtcgtctccctcttcgaggccatcgacgacgcctccctctcggcctcctccacccgccacgcgctctccctcgccgcacgcaggctctcccgctcccgccgcttcgccgacgccgaggccctcctctcctcccacatcccggcctcccccaccgagccgcagctcgccgctgtcctctgctcctacgccgccgcgtccctccccgagaaggctctcgccgccttccgctccgccgcgccgtccctcccgtccccgatctccccgctccccttcaacgccgtcctctccgtgttcctccggtgccgccgccaccgccgcgtcccggtcctcttcgacgagctctccaaggagttctccatcacacctgacgcctcctcctacggcatcctggtcaaggcatactgcatgctgagcaaagacgccaaggcacacgaggtgttagatcaaatgcgtgggcagggtttcacgccgaccaatagtatctacaccacaatgatcgattccatgtataagcagaagaagatggagcaggcagagcgcttgtggaagcagatgttggagagcggacgcaagcctgaccaagctgtatataatacaaagatcatgcaccatagccttcacggcaagacggaagatgtgcttgaggtgatagcagaaatggaggaagctggagtgaagccggataccatcacttacaatttcctcatgactagctactgcaagcatggtaagatggagactgccaaggagctgtacagatcactaggcgagaaggggtgctcagcaaacgctgccacgtacaagcatatgatggcacagctgtgtgcccatggagatttggacggtgcattggtgatcttcaaggaaagctataggagcaacaaggtgccagattttaggacaatgagtggattggttgagggattgacaaaggctggcagggtggctgaggcaaagaatattgttgccaagatgaagaagaagttcccagagcaattgctgtcagggtggatgaaactcgagaaggagcttgggttgaactcagatagcggagatgcaggtactcgggcagaatgtatatctgaagaaactccttctgaggccgaggctgctatgccaaagacacttgagctggaagatccttcttctgatgaaacagaatgtatggcagaggcgtccactagtgaggaaatgccacgggattctgcttaatcagatgttatttatgtatttcaagtttaatttggttaggatgtttttacattgtgcattctctacaaaggaagaatttctaatgctcccaagtacagaggtaaacattagtttctagatgtggactcctgagccactaagagttatattgggctgacaatgcttataatttcgttgttatggattt

SEQ ID NO: 6350 - DNA, 1512 bp, Oryza sativa
  ref <308>: DATABASE ACCESSION NUMBER: AK063501
  ref <309>: DATABASE ENTRY DATE: 2001-12-06
agaaagggaacgctcccttttgtgctccagcgcgccgccgccttctcccgccggagccgctcgactcctcctagagcgcgccagcccgctgccgccgcctcccgctggagctgctcgcctcctcctcgcgcgcacccgccggagccgcctcaccctacccgccgctgcctgcttccctgctcgcgccgcgccgcgccgcgatggagaggaaagagaggcgggttctgcacttctgctccccctaccccgctgactcctcgcgcgcgccggcgcgcgggccggacatccgggtgccgcctgccggaaaggggatatgaggtggcggagagtcttgctaggaggagagggggccattggaggagggctggaggtcgctgcgcatggcccgtcagcatcggcgaggttgactgggcaagaggcgagcgccaacagaggtgccggggaggagcaggccgccggcgcggtcataggagagggtgccgaccggaggcagagccgacgacccctaggaccgccacctgtgccaccactgctgtcatcatcaacatcctgtatgatttttcattgttgttgttatcagggatgcgctggaacgagggcacaggactagggccgttggacatcattcatgctagcagataaggacaccagcaacaccagcaacaggtagaaaacaagatttctactgaacttcgtcgatttaagcaaagcttttgaacatatggtcatccattgaggctcccgcaattccagtttgcaaagcttttgaacatatggtcatccattgaggctcccgcaattccagtttgcatgttctgccatcattttggatcatattttccatgcttatggaaggacaaaatgaactgtagtttttgttggcagtgatctccattggatgtcccgtctcttagctggccgtcaatgatacaaccaggtcacgcatgaggtagcagtcccctccaacccagttgctgaagacttgtctcatctggtttcattgatgcgtgcgagtgaggcacatgctgtccaggtcaaggtacagtaaaacatcagcttatgagatctgaaagcaacaaaagggtaccaactttacacccatgtaaaatacagtgatttcagtccgttctatgtagctattttgatttcttcaccttcacactcttatgagagctgaaagctataagcagggtaccaacttaatacctatcagaaatccacagatttatgtcctttgttttatcaacttagactttgtttcaatagaggacatcaagtttgtgctagaaatgataaacaccaactggatggccatgtgggacatcaagaacatcatacaagcacctcaccagcacatggctatgatcaagaggggtttgctacagacctagagtaaatccattgaactttgttgaactttaatttttaatccgcgtgtactggctctataaacagtgaagatggatttgttgggcatgatcctattacacggtttgagtttttcttgctcct

SEQ ID NO: 6351 - DNA, 2090 bp, Oryza sativa
  ref <308>: DATABASE ACCESSION NUMBER: AK063502
  ref <309>: DATABASE ENTRY DATE: 2001-12-06
acccgtcggggcgtcacgagcgcgagtacgacaccaccgatctcttcttcggcgagaattggctctacgacgaccacctcttccacaccaattcggacggcgacgagggcaatggagaggacaagttcatcgttggcgctgactctaccgcccagtggagcgaaacgcgtgagctcgacgattgcggcggccgccaccaagtgcacacgaaatccaaggccgacgctgaagcctgcgcggaagtgtatacctgctcttcagcgccctgcagctgctgctacggagggaggaagaatgatgatgggttgacgagggattcttgctctgctgtctatgggaggtacctgatcatggatgaccagacagaggtgctggatgagtgtggtgcagatgcattcctgttcacacgggatggagatgccatgctcaaaagtgaacagccaattgattccaaaggcggagatatcgagttgctggacatgagtacggtggagaaggagcttcagatgctcagtccgtatttggctgaggcagatgctcttgagaaggctgagcttgaacacgatttcagcggcaatggggaactagatattaacgttgttacaaacgagaaaactgccgatgacaaagaacttctaaaaaatagttacagcatacattctttacctgagataggtgatcctctagatgtttatgagatggaggactttggacgaacagatacaagtgttcaaaattctacagccaataaaatcgctgaagatgcgagaacagatattgatcttgcactttctagatttcatgaggaatatgaggtatttgagctgagaattttccaccggaagaacaggactggttttgaggaaaacaaagagttccctattgtcatgaattcagttgtaggtggaagatatcgcatcactgagtatcttggctcagctgcattcagcaaggttgtacgggcacaggatctttggacgggaatggatgtctgcctgaaaataataaaaaatgacaaggatttctttgaccagagcttggacgagataaagctccttaaatttgtaaacaaatacgatcctgatgatgaacatcatatattgcgcctttacgattttttctactatcaggaacatcttttcattgtcactgaattgctacgggcgaatctgtatgaatttcaaaaatataaccaagagtctggtgatgaagtgtacttctcattgcgcagaatacaggctatagctcgacaatgcttagaagctctggtgtatttgcatcatttaaatatcgttcactgtgaccttaaaccagagaatatcctcatgaagagttacagcagatgtgaaattaaggttattgatcttggaagtagttgcttcttgacagacaacttaagcttatatgtccagtcacgttcttacagagctcctgaagtcattctaggtcttccatatgatcagaagattgacatttggtctctcggatgcatcttggctgaactgtacactggtgaagtgctctttccaaatgaatcagtacaaataattcttgctcggatgatagggacaattggtccaattgacatggaaatgcttgcactgggacaagatacccagaagtactttacagaagactacgacctgttccacaagaatgaggagacggatcagttggagtacttgatcccagagaagatttccttgcggcgtcgcttgcagtgccccgacaccaaatttgttaaatttctttcctacctgttacaaatcaaccccagaaagagaccaacagccagtgaagcattgcagcatccgtggctctcatatgcctatcagtgagatgtcaaccaaatgtgtttatacgggatggatcgtttttctgaagttccatttgcaccaggatttggcttttccgtttttttcagggcagtccttggttagcatcgaaaccctgttttccgagatgaatgcaaacttgctcgtgcatgtaaatatgagaagaagaaaaggttccttgttgcatatatgtatagctgtcactttgatgtacttcacccaactcatcaatagaaatgtgtttcaagtttcaac

SEQ ID NO: 6352 - DNA, 1282 bp, Oryza sativa
  ref <308>: DATABASE ACCESSION NUMBER: AK063503
  ref <309>: DATABASE ENTRY DATE: 2001-12-06
aagccaattaagcgaattaagcacacatcaattgaccaaacctatctctctatctctctcgagctagcgagctctaggtgttcgacaccgaacaaggcagctagctagtggcgatggacggcggccacagcccggacaggcatgcggcggcggcggcgggggagccggtgaggtcgcggtggacgccgaagccggagcagatactcatcctggagtccatcttcaacagcggcatggtgaacccgcccaaggacgagaccgtccgcatccgcaagctgctcgagcgcttcggcgccgtcggcgacgccaacgtcttctactggttccagaaccgccgctcgcgctcccgccgccgccagcgccagctgcaggcgcaggcgcaggcggccgcggccgccgcctcgtcgggatctcctccgactgcttcgtccggtggcctcgcgcctggccacgccggctcgccggcttcgtcgctcgggatgttcgcgcacggcgccgccgggtacagctcctcgtcgtcctcatcgtggccgtcctcgccgccgtcggtggggatgatgatgggggacgtggactacgggggcggcggcgacgacctgttcgccatctcgaggcagatggggtacatggacggcggcggcggctcgtcgtcgtcggcggccgccggtcagcatcagcagcagcagctctactactcgtgtcaacctgcgacgatgacggtgttcatcaacggagtggcgacggaggtgccaaggggaccgatcgatctgagatcaatgtttgggcaggacgtgatgctggtgcattcaacgggtgctcttcttccagccaacgagtacggcatcctcctccattctctccagatgggcgagagctacttcctggtcacgaggtcgtcttgatcgagttgagcgattcgtcgattgattgatcgatggcaacgtacgtattgtgtcagcaagatttaggtaccccttgtccgttggatcagatcgatatgcaagcaacgcatgctttgcaggtgccggccggttaattacgcgatcgatcgagctagcagatgatgaatgctgcacgtacgcatggcaattgtcactgcgacgagcctgcatatatatgaacgatccattgatcgtcattctagcgaccaagcagcacgatagtacaagtatatactatacaatgcaattgcagcgacgaactagttaattataatacagataatgcatgtgtacttctgtggccatacatatatatatagagagagaggggattaattact

SEQ ID NO: 6353 - DNA, 648 bp, Oryza sativa
  ref <308>: DATABASE ACCESSION NUMBER: AK063504
  ref <309>: DATABASE ENTRY DATE: 2001-12-06
actgtacagggtagtagatctttcgtacgttggagccggccggatcgacgaccatggggtgcgacgacaagtgcgggtgcgccgtcccgtgccccggcggcacgggctgcaggtgcgcgtcttcggcgaggagcggcggcggcgaccacacgacgtgctcgtgcggcgaccactgcgggtgcaacccgtgcaggtgcggccgcgagtcgcagccgacggggagggagaaccggagggccggctgctcctgcggcgactcctgcacctgcgcctcctgcggctccaccaccaccaccgctcccgcggccaccacctgatccatccatccatgcgcccaaaaatgcccaacgagacgtgtttatacgtgtggttaagcgtgtgtacgtgcgccatgcttagtactcatagctgcttagctaaacagcacagctgataaataaaaagggcttgctgcttgagtcgagtcgtatcccgttgtctagtggctagactcgcgcatcacgcatgcaacggacatggtgatacgcgagggatggagagttcggagttgggagacactgtgtactacagtaccaggttgataagtgtgtctgtacttgtgtaaatatgttttacatgaataaaaaggttggtaactttgtcatgttt

SEQ ID NO: 6354 - DNA, 1613 bp, Oryza sativa
  ref <308>: DATABASE ACCESSION NUMBER: AK063505
  ref <309>: DATABASE ENTRY DATE: 2001-12-06
actacaataccaaccagaggaaaaacccatgggagagacattgtcaggaaggacacgaagccttgacaatcggtccaagcccacggcccatttccccacgacagccgcccgccgccgccgccaaccccaaaagggcgcgagcggcgaggcgtttcgtcgagcacatggagggcggcggcggaggcggtacggacatgaacgccgtgccggatggcgtcgtgcagcacgtcctgtcgatgctcagcaacgtccgcgacgtggcggcgtgcgcctgcgtgtgccgccgctggcgcgagtgcgtgccgtacctgccggcgctcttcttcccgaggaacgccttcgacacggccgcggcggcggggggcgccgcggacgacgccatcgggcggatggtgaggtccgtcgagcggctccgggagctggtcatctactgccccttctccatggcccgcctgcccgagtggctggccctgcggagcacctcgctcagggtgctcgagctgcggatggacgccgccgccgccgataaggcggaggacggcgggtacctggactgcattggcctggccaggggcctggaggagctcaggctctggggggtctcgctcacggccgcgccggcgtggggccggctggacaagctccgcgtgctggagatcgtcggcgccccgctagaggacagcgccgtgaaggacgccatctccgcgtgccccaacctcaccgacctgtcgctgcttggatgcgactgctcgggcgcggtgtccatcgaactcgcgctgctcgagcgatgccggcttgacttcctcggagccggcaactgctccctctcgctcgccgctccccgcgtcgagtcactcgaggtccagggcttcacctggattactctgcgcggtggtcacagcctccgccgcctctcaatcgccaaaagcacagggagggtgtacaaggtggacaccgggaagctcccagatctggagcacctctctctacgcggtgtccagtggagctgggctgcagtaagctctgtgctgcagtgtgcgagggatgtgaagcacctagtgatgaaaattgagttcagtggcgactttgacgcgctccagccattcccggaagtcgatttggtcgacttcttcaacagccacccgaatctccgcaagtttgatattcatggtgccatgtttgctgctctgtgccagaaaaacagcttgaagaatttagatgcaaggttctgcatcccttgcttggaagaggttttgatcacagtgcgctcaccactaaatgctgagcagaagctgaacaccctcgagtcgcttgtgaagtatagcgtgaggctgcgctctatggtcatcagaatctcgcagatgaagaattgccatgatgccgctgatgatttctttgaggagatatgtaagttcaaatacatgaacaacaagaaagtccgggttgaataaaacaagatgccgtgtgattctttcatcaaattgatttggttaagaactagtttttttctttcaatttaccgtcacttcaatagaggatgtgtgtcaatccttctcgagtaacttatattatgttgtttacctgattgagttcaaatgctggagcttgttggt

SEQ ID NO: 6355 - DNA, 1409 bp, Oryza sativa
  ref <308>: DATABASE ACCESSION NUMBER: AK063506
  ref <309>: DATABASE ENTRY DATE: 2001-12-06
gattcctgatatccaaatgggcatgctgaaaataggcaagaactgcagtgtttgcaaggagtggcaagaacactgctactggagccatatggccgatgactgtaagcacttcttgacgtatatggttggggacttcaccgagagcatgatcgtgcctagtagatttgccaacaatttcaacgggcacatttcagaggtcgtgaatctgaagtcacctagcggcaaaacatggagcattggagtagcctacagtgacaccggtgaactagttcttcggtcaggctggaaagagttcgtggatgctaatggcgtccaggaaaatgactgcctgctcttcaggtacagtggcgtctcctccttcgatgtgctcatctttgatccgtccggctgcgagaaggcgtcgccgcatttcgtcgagaaccgtggatttgggagagaagagaagtctgcaggagctgaaggaggaggcagagatggtgacaagaatggccatcaccaacaccagctggagatgacaccccacaagaacagcagcaggtgcaggagcatccccagtgcatgtaagcgcggattattcagtgatgagatagagcaagatcatcgcgaagagaagaaggaaggggacgatgaagacgaagatgaagatgaagacgaagacgttgacaaagatggagaggacaggtactacttctgcaggcacggcgggcgagtgaccgagtacaacctgagcaagggagacaaggaggagatctcgcgcgtccccgtgccggtggagcctggcaacccggtgttggtgaaggtcatccacgccagccacctcctctccagccgctacagcacagtaggcgtgtcgccggagttcgccggcaggtacctggggccggccatggcgagggaggtggtgatggagaggggaggaggaggaggaggaggggatcagtggcacgtccggttcgtgcgccgggagagcagccgcggcttccacggcaccgggtggcgtcggttcgcccgtgacaatggcctcctcgcccacgacgtctgcctcttcgagctcaggttggtggacggcgccggcgccggcgaccgcctgcgccgccggccgaggccgacgatggccgtgcacgtcctccggcgggtgcgcggccgcttcgtgctgattcgctgaccaaccatccatgtgcagctcaaactggtgaactgatctgagcccaacctggtcgcctctctgcttgctagctcttgcttgctgctggtcctggtgacaactagtgcatctgtaatatctggtcaggctgtgtctaattcgtagtaccaagttgtgttaaattcggtgctacgttacaataattttaggatgaaggaagtatgcacgtacgtacctggtgatgatcaagctttctggtctgatt

SEQ ID NO: 6356 - DNA, 3389 bp, Oryza sativa
  ref <308>: DATABASE ACCESSION NUMBER: AK063507
  ref <309>: DATABASE ENTRY DATE: 2001-12-06
ggaattaaacttaaccaacttatgctggcaccacaatctactggttttctttccatatcaccagattctataatgttaaatgctacaggcagacccgatgaaaatttttccatagaagtgaatgtgccattattttttggcacacacgaggccattcaagacggaaggctgttgtcaatattcctccaaaaggggcagctgagatctaatatctgctatcaccctgaaaatttgactagtttggaggttcgaaatttgccacttgatgagctggagtttgcttcattacgtgggtttgttcagaaggcagaactccagcttaatttccagaaaagaagaggtcatggtttgctgtcagttatccgcccaaaatttagtggcatgcttggggaatcacttgatatagctgctcgatggagtggtgatgttattactatggaaaaatcagtcctagagcaagctaatagcaagtatgaacttcaaggggagtatgtttttcctggaacacgtgatagattccctatggaaagtcagagtaatggtttcatagagaaagcgatgggagggcatcttggtagcatgatgtcttcgatgggcaggtggaggatgagattagaagtacctggtgctgaagtagctgaaatgcttccgttggcaagacttctatcacgaagtacagacccagctattcgttccagatcaaaggaactttttatgcaaactttgcattctgttggattcaatgctgaaagtcttcgtgaccagctaaaggcattagaaatgtatcctgattggttggatgatgatacaattgaggatataactcttcctggcttagctgaactgagaggttattggcgtggttctcttgatgccagtggtggagggaacggcgatactatggctgattttgatttcaatggtgaagattgggagtggggcacttacaagacacagcgtgttctggcatctggttcattcagcaataatgatggcctgcgtcttgataagttatttattcagaaggataatgccactcttcatgctgatggatcaattcttggcccattaacaaatcttcactttgctgtgcttaatttcccagttggtcttatacccgcattagttcaggctatagaatcatcaaccacagactcgattcattttctgaggcaatggttgacaccaatcaaaggcattctacatatggagggagatttgagaggtactctagcaaagcctgaatgtgatgttcaaataagacttcttgatggcaccattggaggcattgatctcggaagagctgaagtattagcttctgtaaccccaacaagccgttttgtttttgatgcaaacttcgaaccgaccatacaaagtgggcacgttaacattcaaggtagtgttcctgttacttatgtagacagcaactccattgaggaagacctggaagggggagatggtaaacaaggtataataagaatccctgtttgggcgaaagacagaggcttgacaaatgacatcagcgaaacaagaatcatgagagacaagcctgatgagggttgggagtttcaattagctgaaagcctaaagggtttaagctggaatatgctagaaccaggcgaagtgagaataaatgcagatataaaggatggaggtatgacactgataactgcactgagtccttactcaaactggcttcaaggctatgctgaagttcttctccaggttaaaggcactgttgatcaccctgttgttgatgggtctgcctcatttcaccgtgcaaccgtggcttctcctttccttcggacaccactgacaaatttcgctggcaatgttcatgttatatctaacagactatgtatcagttccatggaaagcagagttgggaggaaagggagattgtcaatgaaagggactctacctctccacaatattgagccatcagccaatgacaagattgaactgaaatgcgaagttctggacatacgagcaaaaaatattttgagtggccaagtagacagccagctgcaggttacaggctcaatattgcggccagatgtctctggaatgattcggctaagccatggtgaagcgtatttgcctcatgataaaggcaatggtgctgttgccaccaggctgtcttcaaataaatccatctctgttcctgctggttttgaccaaagaacagtctcacgagatgtctcccactttctaggatcactatcaactagtccagacggccaacaatcagaaactgaaaggactcctgaacatggaagttttaagccaaacattgatgcccgactcaatgatctgaagctcacatttggacctgaattaaggattgtttatcctttaattttgaattttgctgtgagtggcgaccttgagcttaatggcatggttcatccgaagtacataagacctaagggtgtcttaacttttgaaaatggtgaggtcaatttggttgctactcaggtaagacttaaaaatgatcatttgaatgtagcaaagtttgagccagatcttggtttggatcctattctggatcttgttcttgttggatctgagtggcaatttaagatccaaagtcgagcaagcatgtggcaagacaatcttgttgtaacctccacacgctctgtggaccaggatgttctttcacctagtgaggctgcaaaggtttttgagtcacagcttgcggagtcactattggaaggtgatggacagctcgcgttcaagaaactcgcaactgcaacactcgaaactttgatgccaaggattgaaggcaagggtgaatttggtcaagcacggtggcgactggtttatgcaccgcagattccgagtttactatctgtagatccaacggttgacccacttaaatcgctggcaaacaatatatcttttgctactgaggtcgaagtgcaacttggaaaacgccttcaggcctctgttgtcaggcagatgaaagattcagaaatggcaatgcagtggtcactcatatatcagctaaccagcaggctccgtgttctcttccaatctacgccgtccaatcgacttctcttcgagtactctgcaacatcccagggttgattcatttttgcccactacacagagcaggagctgtggaatggcagctggtctgtacaaagatgtggcgcaccgacaccgatcaattgttcttgtagataatggaagttttgataggcaggcagttgtacatgtagacttgctgatgtttttgctctttgttgtatctacattctttttctcggaaacaaagtttctgggtttgtacataggtagcaaattttagctcctttagctagttaacgtaagatgtaaagaactacctgcataaattatatgaaaatttccaatctcgtggagtc

SEQ ID NO: 6357 - DNA, 2394 bp, Oryza sativa
  ref <308>: DATABASE ACCESSION NUMBER: AK063508
  ref <309>: DATABASE ENTRY DATE: 2001-12-06
cttcttgcattggagtagcagcaaagcaagctgaacaagctgtccctcccgggaaaaacacacaggagctgaggtgcaagatgtctgcttgattgcctcctgcttcacttcactgcttctcttccttctccctctcctctctgcaatcttcttgtatttttctccctagctctcctgcatcagcatcagttcttgcctgtggctaaggatcttttgatcttcaaagggagagaaaaggatcttgcctgagcttcagtttcttgtgctgcctcctcctctgtgtttgtgtgatccaatttccaacttggaggagttcttggtttcctggcattgtgctttcttggacccagagcttgacaagattgggtcaatagtttgccaatctagagagagagagagaatacttggtttcttggcaagggggacaccagggcatagatctttgtagttaatagttgctcttgccctctggactgaggagtaaatagttgtgtgccagtggtctcttgcttcatcttggtcttgtggttctgattttctggtgattgttggagacttggaggagtaaagtaaagggtgaaaaaaagaagggaaataagaagaaaaaaaggtgacagattgaggttgttcttagtgtgtcaagatgaagtatatgaagcttggatcaaagccagatgtgtttcagacagagggaaacaatatcaggtgagatagtccttaactagttctgtccataattttttcaggttataaagatgatttttttttcacttcacaattagtaacttttgacttttgaattgatacacttgagctctagcttttattttgtggatcagtagtccatgaattgaagtgatcttaagtttcagataatggaataaaaattcacgccgctgcatctaactacgcaatgatcttaagaagggatgacctgatccattttgtggaatgtaggagtggatgcatgcctttttatgtgaatctcagttctctatctggccaaaggatctacttatcattgcatcatgagctaaaactaaattattgtagtcagtaggaggggccaaccgtatcgttagctggtcacatggaagcatggcctttagctatgtgggcgcaaagtgatgcctaactgtgcagttatgttagtgtagttaaataagtgaaggtactgaattcatgttgtttccctgtaatcttgagtagggaaatgcttgtgagcttttttaaatgatccactgaaagatagactgttgtatttgtctcccaagaaactatggttctggtttttgtttgggagggttttcacactatttatatcagagaaatttgaatgaatgtgaccttaattaaaagctagactataacaccctcttttgtagtttctggtgatggtatatctagtaactaggctgaatctaaaaaggaaaattgtagtgaagttcacattattttttcatttgacaatgattggcacccaaaagacctttgtgaaagtgagcacttgtggtgttaagcagtggttctcatgatagcttgcaaaaggctatctatacaattgatcatctttataggatgcatcatcgttgattctttgccaatggcatctcttcttgagcgatttgtgtgcttcggagcatgtgccattttcattgcatcttttccactagcctgtttaatgttcatctagcagacatagggtttggtaggtggagctgtggtccattttgaaaatgaaacttctacaattccctaaccttttgtacaatgaatttgttgtcatcattttccttggaccactgagcagtttgattagttatatctgtcatgcatagagttaatttctatgaatttgctgctttctttgctttatcattttgcccatggcactttttctaggctaacactctgtctctccttttgttacacttagcggtttcagtggggctggagatttgatttcatatgtcatttcatctttatcatgaagatgcattattagattgtttagattccagggaccttttgtttcaatgttcttttttttccaagacaaccttttcaccatccactgttgtgtgaccatttgcccctgcaatcattgtagtcagtcatataaataaaagcacacaatttatcagctattcactattatttcctccattgccatttctaatgtagttttgtgggagtcctcattgtgcaacatgattattagtctctcaattactccacaaaataatcaacagccatttctctctcaaaaatgatcttcaagatattcatatatagcaattaagcagctgtgagaccgcaaacatgcccctaaaaaacataacaaaacaatcttcagaaaatcggtgctttaactactgatcacttctttttttc

SEQ ID NO: 6358 - DNA, 2456 bp, Oryza sativa
  ref <308>: DATABASE ACCESSION NUMBER: AK063509
  ref <309>: DATABASE ENTRY DATE: 2001-12-06
ggatttatttaatggtcaggaaaaacgaccaaaaactagtatgtatattgtgctgcagtttctccctttcatttttatgtatgttggaattatttttgtttacacatatcatctatccacatggcctccttcctgttaggacttctgaagcactgccaaactaaaatcttcaggatggccataattgattgcttttgatgatttcacccttattttgctgcgcgtatacgtttgaattctttttttttttactgctgagatctgcatttaggctattactaaccatctcatcagtgtgttacgtagccacaaaattcaacttctttttcaaggagtataggtacactgaattgtgagagcggaactcatgcaatcagttagcagcatcgcaccgttgtaacttcctacaatcttaccatcgatgaaaaacagagaaaaagggtagagatggcctactgtctttttcataatttaatgacctagatttttcataaaggctaagcaccagtccctactttgtttagcagcttctggacatcaattgcttgtcaggttgggaatgtagcgtaatttacaacgggtgttcattccctttcaaagtaagtggctaataattatattcaggatcatgacaaattgcaacttgctgcacacagcgatggacaatgacagcacattacgcgcaccttttcttctaccagtggaggtccatcttgtactgattgattgggacgctgtccaagataaattgtggacagaccccattgaaccaccagttccctctccatttcattgatatttgtgtgtaagctctacaatgggtgaactggtgaccagcatggtgatcgggccactggtccacatggtgaaggagaaggcttccagctacctcctggagcagtacaaggtgatggaaggcatggaagtgcagcacaagatcctcaagcgcaagctgccggccatcttggacgtcatctctgacgctgagaagcaggcatctgaacacagggaaggagctaaggcctggcttgaggagctcaaggcagtggcctatgaggcgaatgaagtcttcgacgagttcaagtacgaggcgctacggcgtgaagccaagaagaacgggcactacaccaagctcggcatcgatgcggtaaaactctttcctactcacaaccgtgtcgtgttccgatacaagatgggcaggaagctctgccggatcgtgcagaatattgaagtgctagtcgcagagatgaatgcctttgggtttaaattcgaacctcagtctatagagtccaaggaatggaggctaaccgattctgacatctttgacccaatgaacattgctagcagatcgagagatgaagataagaagctgctcgttagcatattgctctcccaagcaagcaatgtaaaactcgccgtccttcctattgttggaatgggagggctaggcaaaactaccttagccaaactcatttacaatgagcctgaaattcagaaccatttccagttgatgatctgggtatgtgtgtctgacaactttgatgttgcgtctgttgctagaagtatagttgatgcagttcctaaaaaaggtgataaagtaaccatcaatgaaaatcaaacctcggcacttgacgagcttcagaaattagtgagcgggcagaggtatctccttgtattggacgatgtttggaatagggatgatgaaaaatggcgtaaactgaagaaatgcctcgaacatggtagcactggtagtgcagtgttagcaacaactcgtgaaggaggagttgctgaactaatgcacacaactgatgcatataatcttactgctctaaataacagtgtcattaaggaaatcattgacacagcagcttttagaccgaaaaaggagatcaagcccgctgagctagttcaaatggatgataagtcattattatctaaaaagaaggaaatgattgatcagtttgtggagagatgtgctgggttgccattggcagcaaaagcactaggttctgtactttataccaagaccagcctggaagaatgggaggcagtattaagaagcagcagtatctgcactaaggagactggaattttaccaatactgaagctcagctatgacaatttgccgtcacatatgaagcagtgctttgctttctgtgctatttttcctaaggattacgagattgataaggatcgcaaatggattaatcccagaaataaaagatatccgccttgaaaccactggagaaggtattttcaatgaattagcttctagatctttctttcaggagttgaagcgagtccgatttgacaaatatagaagcaaccatgggcattgttccagaatcatatgtaagatgcacgatcttatgcatgatgttgccacttcaattatgggaaaggaatgtatcgctataactaaatatcctactgaaagagggtcatattcaaatgct

SEQ ID NO: 6359 - DNA, 1918 bp, Oryza sativa
  ref <308>: DATABASE ACCESSION NUMBER: AK063510
  ref <309>: DATABASE ENTRY DATE: 2001-12-06
cttattcattttagctccgattcgagtgaaacttgaacctaaattcatctaaattcataagctttccaatggtatataactcattatttaataaaatatattaatatcaaatgattagattatggtcaacttaaaaatgtgctaataaataaaattgatattgtacagtagagtagatgtcaaataaatatatttaacatgttttgtcactgtagcaaccacataatctaagtataagtgatgtctcaaatgaatggatgtataggaaaatactagtgcttatttaatattcgatggccatataattaaattcatgacttaaaaattagttacataaagtttagcttcatattttgtaactaaaatattaatactcatagataaatctttaacttgtttatgagaaataataacagagctgggtgtgatgaaatcaatcgaatgatagatttaaccagtgcaatatcctatatagtagtatatttataatttggttgacacctattatttaacatattatttaacagaacaataaataactcatgttcggtaaataatccaattaacatattattggacttgcatgtacagtacatccatttaacacatacacagtaagtcaatcacctactgttgcacctattaaactatgaattgtttgataaacatcaaagttagataaaaacactaattataaatctagacctcgttacgaggccacgtagacaaataatctgtacctataacctcacagatctatatagagcatggatgattattaacccttttataatttataatgacaagtaaaatatgatcgtgattaaaataatgccccattggtaaaataataatataaatgattcactgtaattatttgattgatcctaaatctatccaacaacggaacctctagtatatgaccattttatttagatagatgcatgtgtagacataatccttccatagccattagctagactaaaccaccatgacatcagaaagactaagaaaccttagctcttagcttgattagaatccattagcaaacgcaagtagtatgagcaaccctaggttcgacctcaacaattatattttgtttgcgcacattggattgttgtttgaacattgatttttctcgcgtattatagtattggtgtatcgattagtcgtgaggcaacgtatgcagcttccaggaggtgaacgttgatcaatattatatcaagaataagaactatcctaagcaggcaagtcatcaccccattccctgagcatgttgatcccaattgtgaaattgttttgtttacaaataaaattgcatgcagtgatgaatatcctacttgttgttatgccatgcctttgattattgcttatctcattattcccctgtacccataattatgtatgagtccctagtcacttatgacaaatgcttagtaatgctaatttagattcatgcattctcatatttatcaaatgctttatgcttgggaaactaccttggggaggtagttgagatacggcatgtggagacatgagtgccacattgccatgacattgatgagatgatttgtgaaagaaaatgaaaactgaacaaatgttttcgactagggcggctggaggacttgggtggtgtccggaaaaggctagtgccgtccctggttagttaaggaccgagccatgaagctaagcatgaaacgacccccgtacaaccgtacttctcgtatgggtatagacctagcagagtaaatagccgagcggaggtagtatccctgcatagtggttttcttgatgtgtgtgaggcagggcgtacggtggggcagccattggtaggaccacgaggggcaggtgcctacagtggtgtcgccatcggtaggactgccatatgtaaacctaaacttaactataacttaatgcc

SEQ ID NO: 6360 - DNA, 1879 bp, Oryza sativa
  ref <308>: DATABASE ACCESSION NUMBER: AK063511
  ref <309>: DATABASE ENTRY DATE: 2001-12-06
atataaaccgccgtgtcgccgtgcacactcatcatcctcgcaatatctcattctcgggctcactttgttgatcatggaggtggaagcggcgacgacgcagcgacagccatgcaagaacgcgatcaccaccaagcagcagcagcagcagcagcagcagctgagcaccggtagactgttcaggagcccgctcctcgtcgtcaacttcgtcctcatggtggtcggctcggcgtgcgggccgctcctcctccgcgcctacttcctccgcggcggcaaccgcaagtggctctccagccttctccagaccgccggctggccgctgctgctcgcgccgctctgcttctcgtactcctcacgccgccgccggcgcgaggttgaggacgacggcgctggcgctggcgcggcggccacgccgctgttcctcatgacgccacgcctcctggtggcgtccgccgtcgtcgggctcatgaccggcgtcgacgacctcctctacgcctacggcctggcctacctcccggtgtccacctcctccatcctcatctccacgcagctggccttcacggcggcgttcgcgctgctgctcgtgcgccagcggttcacggcgttctcggtgaacgccgtcgtgctgctcagcgtcggcgcggcgatgctggggatgaacgccggcggggaccggccggcgggggtgtcgcgcgcgcagtactgcgccgggttcgccatgacgctcgccgccgcggcgctgtacgggctcgtgctccccgtcatggagctcagccaggcgcaccacgccgccgcgcgcggcgccgtcacgtacacgctcgtcatggagatgcagctcgtcatcggcttcgtcgccacggccttcagcgccgtcggcatgctcgtcaacaacgatttccacgtaagatttcaacctctactctcacagttcttcacagcacactgatcttagccgtattgcaccatccaaaaactcaacacatttttcatatactccctctattccataatataagacatgcacacatttcaaaattcaacttaaaaacatttgaccaacaattattataatataaattaattttttaactaaaattaatatcattggattgacatttaaatttactttaagatggttaaaattttgttatatatgagaaattataagtcaaaaattagttttgaacattgtgccaagtttgatcatgccttatattatgggatggaatagatattagctgtgttctgatagagttcttagcaatgacgtctacccttttctcagagttctgaactgtatagagtacttattaggctgacatggtaatgcacaggagtggagttaccttttgtcatgctaagtgatctgatcagtggactgctagtgaaaggcaatctacaggctactgagatattataaactatttaaccccactcagaaatgaatgtaactatgccaatagatcagagcacgttccaagcttttttgaaaagaaatttaactatatcagagcacgcttctgaaagattggcacacaatgacataatcaaatcttaatagacaataaaaaaagagagtgaattgtattttgtacctcctttttcttatcaaagttttactttgatccccttgtttattcttttcattttggaccctctttttctttctttttggatcaaatttggcctttgtacttacactgaagcccagcagcagcaagtcgtacttgtgggctatataggataggtagtggtagatcggtgcaagccaatcatttagcaagttgttcatgtttgcaataagatgtaactctttctcgaacaaggaaagctagttgtgttgacgagtctgtctaccgttagacctaacaaatgggtaatc

SEQ ID NO: 6361 - DNA, 1337 bp, Oryza sativa
  ref <308>: DATABASE ACCESSION NUMBER: AK063512
  ref <309>: DATABASE ENTRY DATE: 2001-12-06
aaaagcaaaaaaatttcccctttcctctccacgccaagaaacgcaaaacccccacgccgaccaaggcgagaagcgccgccgccgaatcgaaccgcgatcgcgcccttctcccgccgcccccgcgcgctcttctcctcctcgtcctcgacgccgctgtgccggagtttaggcggagatcgatccggagcggggtttctcttctacctggtaggcaaggttgaggaagaaaagcttgctgatttgtgatggctgccccaactgcaacagctgtttttcttgatgagaacctgcatatccatagggggcctgctggcaagagggctgatggattgaaggccaagccactgaagccattagcagcaaagcaagggcttcaagagaagaaggccctgagggatgtatccaacattggcaagcccccggtgtctacgcggaagcccctgcaggacgtgtccaacaccgccaagccccgagggcgcaacatttctgatggcactaccttgaagaagactgctcttcgcagccatgaggccaccaagaacccagtgaagaagactgtaatcttttctgatgagaccgcaaaatgtcatgaatgggctaaggatggggtggagggcacccacttcactgggaatgattctcagaagttggaaaaggacagtcaagacaaacgtgtcaagaagaaggtggagaaaataatgtcagcattgcacgactggccagacgcggtatttgatcatgtgctttttccatctgaggtggtagcagcgttttttgaagaagtaaaagagatggagctggaacctgagattcttccagagaacaataggcgtcgctcaagttcaggtgataaaatgaagctggctgaagatcctttcacggaagacgagcttgactactacccatttcttgagaacaatcccgttgagtttcagctgagagatgagctaccactcctggagcctggaatgaactgaagaatgctaatctgccccacttgaaaagacctcagaacagtgctattatcatcattatcctctttgcaaactctacttgctcaggagcagtttatttgtagtagtagtagtagtaactagtatcctagatgttctgctgtatgtggttggtgtgataatcattcacactttaggaagaacccaagtagcggaagcaactttagcttcctttatgttctgtgtcttggctgaaatacccatcattaagccattgtgtaaatggtagtagtagtaaactgtagtgtaaggattctgcagaagtacatgcgtgtgccacttcctctattacgaatgcgtgcacatgtgtttgatttcctgttt

SEQ ID NO: 6362 - DNA, 2576 bp, Oryza sativa
  ref <308>: DATABASE ACCESSION NUMBER: AK063513
  ref <309>: DATABASE ENTRY DATE: 2001-12-06
gcgggctgcggcggccttccctcccgaaggcgaaccctatgccgccctctccgccgctccgccacctcccctccttccgccgccgccccctcgccccgcgcttcctcctcctcccccgccgcttctccgcctccgcatccgcctcggcgctgcaggccgccaccccgcccccctcatcctcctccgccgctcgcctcgccgccgccgtgcacggttccgccgcgtccggggacttcgcgcacgccatccgtttgacgaaacacctcgtccgtgcctcctcctccccaagccatcgccccggcgccgccggcgccgccgccgccgcggcgctcgcctccacctccgcgtcgccggcccccgcgctcggcgtgctcgtcatcgcgctctcccagatggcgctccccgacgaggcgctctccgtcttcggccgcctccgagagctgccggcattgccggcctgcaacgcgatcctcgacggcctcgtgaaggcgcacatgctcgcccgcgtatgggagctgttcgacgaaatgcttggtcgggggatggtgccgagtgtggtgacttacaacacgctcatcaacgcgtgtcggcatcagggcgatgtggcgaaggcttgggaggtctgggatcagatggtagctagacggattgatccaaatgtggtcacatatacgacaatgatatgtgcactctgtgaggaggactgcattggtgacgctgaggggcttttccttgagatgaaggaagcagggatgcggcctaatctatacacatacaatgcattgatgagcagccacttcaagagagacaacatcaagcatgcgcttgtgttttattacgacttgctgaagtgtggtcttgttccaaatgatgtgatctttaccactctaattgacggtctctgtcaggcgaacaggataaccgaagcaaagaatatatttctggacatgcccaggtatgaggttgctccaactgtgcctgtgtacaacagtttgatccacggagcttttaggtctggatacgcacaagaagcattagcatttttccaggagattattcgcaaagggttgcgcccggatgagttcacctgcagcatagttataagaggcctctgtgatggtgggcaaatgcaggttgccaccaggtttcttgaagtaatgcaacaatctggtattgcactgaatgcggctgcttacaatgtgctgattgatgagtactgcaagagtggaaatttggatgaagctctcgtgacatgcacaagaatgagcgaggttggagtagagcccaatgtggtgacatactcctccttgatagatgggcactcgaagaatggggaaatggaaatagcaatggctatatacacagagatggtagctaaaggggtcgaacctaatgtcgtgacatacactgctctgattcatggccatgccaagaatggtgacatggatgctgctttttggttacagaaggagatggaagagaaaggcatttattcaaacgcaataactgtgtcagttcttgtagatggtctgtgccgagaaaatagggtacaagatgcagtcagattcatcatggaatactcagggcagaagaaatctgagaaaaacccttcaattgcaaacagtgtgacatatatgaccttgatatatggtctctatatagatggtcaatacaacgaagcctgtcacttcttctcttgtatgagagattctggtatggtgcctgatagattcacttacacactcgtgattcgtggactgtgcatgcttggctatgtcttgaatgcgatgatgctctatgctgatatggttaaggttggtgttaaacccacaaaatgcgccatggtctgccctgatatttggtcaagagaatcagttgaccaccgcatgacctgaaactccatcactaatgaaatccatatgggaaataaagtgtagataatattgaactcactgatgacagatcacagcctacagaaagtcaactcaattattagcttgagctagacatgcgttgtgtgagaagctgggagatgggaggagttgccgaacacgaacggttggtcggacaaacagtagattgtccctcctgctgagttttccaggaagtgcagatagccaagattttcccaactgcccatcagaaaagatatatcatggatggttcgcagatgatgcccttttcaggatgttgcatttggtgcagatcgaaatctgtgtatatgtattgtatctgtcagtatctgtccatacttggcctattgatcatgcaagtattgtctgtggcatgagttctggcctgttcaaaacttcaatatgtttctttggactatcagccaggctattaaaatatttgatatgctctcgctgtgatacactatcttctgcagaaggagtaagaactgatcccatagtctgctgctggcaggcgacaccttagggtttatatctgcaaaactgcaaatggctcatgtcttttcgaatgactctagccagatgtattccgtggcggcacctcagtttatatgtgcaaaattgcaaatggctcatgccacatgtattaccgtgtatttaacc

SEQ ID NO: 6363 - DNA, 1531 bp, Oryza sativa
  ref <308>: DATABASE ACCESSION NUMBER: AK063514
  ref <309>: DATABASE ENTRY DATE: 2001-12-06
aaaaaaaaaatctgcccctcctaaaacccttgcggccaggcggtgcgccgcacgcccatggcgcggccgccgtctccctcaccggtcgtccccgtcaagcgagagcccgacggagccaccgccgcggtctcggatgcctacacgccccgcccaccgctgcggaagaggcgccgcctcccgtccaccccgacccagcccctcctcctcacgccgcaggccatgagctcgacgcgcgactccttcgcgggggagcggagcggcctggctccggcgtccgtgcccacctccgtgaagcgcgaactcggcgccgacggtgacggcgatggcgacggcgaccgggacgcccgcgggaaggcggtcagcgtggcggagggcaacctccagccccggaaaaccgctctggcggagctccccaccctcttggccaaccgccgccgcctcgaccgcctcctccacgagctcgtccgctcgcaccgctggggcgacgcggccggcgtcatctccgcgctcgtctccggcacacggcaccccgaatccttcgatgagatgcgcagcgtgttcgcggtcgggatggagatccataggcggctcgctgagaacagcggcatccaacagaacaccaggagtcgctactacctcaggacgcaaaagttgtacgatgtttggatgcggaggctaatgtggttacccacttgtgaaagaaaatacatggttaaactcgagctagctcttttttatctttcacaaggttgtatcgacagcgcatacaacacaacaaaaactcttattgctaaggatggactaaagacaccaattgtaaatcttatacatggtctgatatcatatgataattggtattctggcctccctgaagatatgcaacttgaggagtttgatgtttactgtgaatcacacacagtttcaatggcaacacatcactgtgatgaaaatggtcagcaggatacttcagatgataattgcagcattgatgctgattccagttctcctggttgctcttcaaaaagttcaatcaataattggaacatagacaagcaaagaaagtttcccgagaaacctggttttgttcattctgcacgggaagatgattcagttggatcacaggtggacgagaaaatggttgatacagattttcgaagcgtgtttttcaataccgccaacagtcctacttgtggtgcaagcaaggctggctccatgatttcgtttcctaattattctcatatgaggctatgccaggtagctttgggacccacagctgtaagactggactttcgagtcgtgggcaccacagccaagctaattcagcaagtttcacaattctttaataaagtttttcagtttgtaattaagttgattagcaattttcttggtaaaagaattagttcaagccttttcgtatttgagtatgaggtttttattctttcaagataatgttttggatgcaaatagaggaactcgtaagttttcagtagaaagtttttataattgagtgcaaactatgttgtttcagttg

SEQ ID NO: 6364 - DNA, 2418 bp, Oryza sativa
  ref <308>: DATABASE ACCESSION NUMBER: AK063515
  ref <309>: DATABASE ENTRY DATE: 2001-12-06
atcagcaaccaaagcaagaagcaattcttgagctcaatcagcaacaacatctatctccttcttgcttagttaagtccttcgccctcccaagaagaagaagatgtcttgctgcggcggcaactgcggctgcggcagcggccaccaccaagaccttcgtcctcgctgccccgccgtcgccagtggtcaccgtcacctccacccgcaccgtcgccccagccgccgccaagtgcgtcctcgccacattcgacctcccctacatcaccttctactacaaccagaagctgctcctctaccgcctccccaacggcgcctccgacttccccgacgccgtcgcccgcatgtccgcctccctctccgacgccctcgcctacttctacccgctcgccggccgcatccgccaggacgaccacgacggctccctctccatccacggccaacacggcgccgaggtcatcgaggcctccgccgaccatgtctccgtcgaccaactcgccggagaggagtgctcggaggaggcggagaaggtgatgcagctcctcgtcccctacaccggcgtcatgaacctcgagggcctgaaccgcccgctgctcgccgtccaggtacctacattactatttattactaacatttctccaattttaattatttatatatccttttgatatgatgcctcaacataatgattatttagacatttttctcaggacttaattaattcacacataatttactttaatttccttctggaactaaactactttaatctagtacagtatgtaagtatatgtgttgtgtattttttttagtctctaggagaccgtaaacctgaacggtatgtatgcacgtacgtacttttgatgagtattagttgtatagtacatagtacactactagctgtagcagtacgtacatacggtggtacaatattgtattgatgagctgaaaattgaagggtggcatggaatggaatgggccttacctgcagtatctgtatgtgcaggctgattaattaaccagccaaccaccaacactgtccaaatttattactatacggagtactagtatatattacaaacaaatttaattaggtactctgatggaattgacgcggtgcatgcagttgacacgtctgcgggacggggtggcagtggggtgcgccttcaaccacgccgtcctcgacggcacctccacctggcacttcatgacgtcatgggcggagctctgccggggcggcggcgcgccgtcgctgctgccggtgcacaaccgcggcatggcgcgctccgtccgcgtcaacctcccgctcccggcgtccgccgaggcgcacgagaagaccgaccccaatgggcccaaggtgcccctcgtggcccgcgtcttctccttcccgccctccgccgtggcccgcgccaaggccgccgccaacgccgccctgccccccggcgccaagcccttctcctccttccagtcgctcgccgcccacatctggcgcgccgtctcccgcgcccgcgccctcggcccctccgacatcaccgtcttcgccgtcttcgccgactgccgcgcccgcctcagcccgcccctcccgcccgcctacttcggcaacctcatccaggccgtcttcaccggcgtgcccgcggggatgctcctcgctggcccgcccgagctcgccgcggggctgctgcagaaggccatcgacgaccacgacgccgccgccatcacccggaggctggaggagtacgaggcggcgcccaagctgttccactacagcgacgccggccccaactgcgtcgccgtcggcagctcgccgcgcttcagggtgtacgacgtcgacttcggcttcggccgcccggagcgggtgcgaagcggcgccaacaacaagttcgacgggatggtctacctctacccgggccgcggcggcgacggcggcatcgacgtcgagctctcgctgcagccggagccgatgcagaggttggacaaggaccaagacttcctccaaatgcgagccccttaattcttttttttttttcttttatactcctatatattatgatgattcatcagctgcatgttactccctagtagtcttgttcctcctaaattgcaacttctcctactactcctttatgtttagttggatgcatgcatggattccttgttgcttgctactatttatatatagtggagtactatgttgtgtactatgttgcttgcaagctacatttatatgtggatttgcatatattgaattggtccattacttaaataaggatcggatatggaattaattagcagctatacagtttgtgtgtacttaattattaagcccatgcatcatatctggcctgttgcttgattggaaatgtaacctattaatgtatttgtaatttttgtactccaatgattactggaattgcttacatgttt

SEQ ID NO: 6365 - DNA, 2565 bp, Oryza sativa
  ref <308>: DATABASE ACCESSION NUMBER: AK063516
  ref <309>: DATABASE ENTRY DATE: 2001-12-06
aaagcaaaaaggtggttaatcgagccaatgcgcggaggcggaacagcaacgcgagcccgagaagcctctcgaaccttctagattcccccaaaccctaagcttaaaccctagcgtcctctcccgattgttcgcccccgcggcatctcgatcgacggcgcccatggccgagaaggaggaggcggaggaggaggtggaggatgaggaggagtacgagagcgacctcgacgacgcgcccctaccggcggtgaggcgacgcgccgcggcgagcgacgacgaggagggcggcggcgcgtcgggttcatcggcgccgtggagcgtggcggggtcggacctcgactcctactccgactccgacgggcaggacgccgcggagatgtacgacgacgaggaggaggggtccgaggaacgcgatgagttggaggcgggaggtggtggtggtggtggtggtggtggtggtggtgttgggggaggagaggcacttgaggacgaggggaagtgcgccgacgaagaagcgcttgaggacgaggggaggtacggcgacgaggaagcggatggcgtggtcgcggcacttggggacgagggtaagtgcgacggtgaggaggcggaggtggaagccgcggtggaaggagcggaggtggtgaacaaggagggcgaggcccaggccgtaccaacgataggcgccttctacatgcacgatgaccgtttccgtgacccggagaatggcaggcacgggagccaaaggaaaaatttcggtggccaaaagttatggtatcctaaagatgataacgtatgggcgcatgataggttttatgagatgaattcccatcatgataggctttatgagacgaactcccataactctccaaatgacagtggaaggggaccaagaggctcttttagagcatggggtggggatagaacacatcgttatgatcatggctatcttgaaagaactttatcccaatcttactatcatgatgatagagaagagtacaagtatgtcccaaaggaaccacgtactttctttgctaccaccagggaccacattagctttctgaaagaatccaacaatatgtatggcagtgccaataactacaaaagagttccaagtaaatttcacacttactatgatcatggtgataccaagaattttgcctatgttcaaagagaatcacatacctattatggcaatgctaaagatttcaccagtgcacacgatggttacagggggggagtttctaacccgtatgtatctcattggaggagtgatccagagatatgttcaggacaatatattagatctcagaatgaagaggcttcttccaatgcagaagggggaaaagtatccctctcaaactctgggtttccaaactgaaaaaaactttcccatgaagcaaacttctccatcaaacttgaattcagcttcaccatccttttaccattctagatcatctcatcaggaacaaccttttattcagagagggaaagcgcgagctgtgatgtttagtaaactcttcacatcctctgtccgtatggctcataattctctgaagccacaatcgcgtcctgtttatagagtgaaggctgttgttccatctggtagagggaacactcttgattctcttagcacaaatgctatggaggaaattgataatcctggctcaaatttatctggatcagcatcagacaactacatccaatattcaaaatccagtgataaaggaacaggtttgacctttcttttagtgcacaaagagcatttcttgttcaacaaatggtcaagcaattggctcttatgcacagtcctataatgcagtttatcaggaaaggtcaattcatcgaccatttcaatccacatcaagggtgtctactctggtgttttgtccgaaacctctcagtaccacccaaattcaatctcatgtgacaagttcaaatgaagatattgagacaagtatgtcccctggtttagtcaattctttagtgtcatctgcagtgaagactgagctaaaagaggaggtggaggggccctcttttacttatgatgaaggtcatgttcatggtgttacaggagcaaggggccttacactcagtgacaaagctttgcagttcagtggacaacatcctaggggacctgatacccctttcattggcaggactctgcctagatttgtggttcgacaactagtcggtggcagttctgaaatgaatcaaatgacatggctgctagtatcgtctagttctactggggctccgggagcaacacataatccaccacattttggcagctattacccccaaccttctgaacttgtgccctcattggtatctccaaggtaaatataaagttttttgtacattacataattggattgcagattttataattcaaccctgatacgtatatatgttagattgttagggtacgatcatgtattcatatcagaaagctagcttgtatttggtgaaccagaatagtaattgcgtcagtgtctgccaagggtactgtatttctgattatgttttaaatatttagatagtattcaatgcagattttttaataataat

SEQ ID NO: 6366 - DNA, 872 bp, Oryza sativa
  ref <308>: DATABASE ACCESSION NUMBER: AK063517
  ref <309>: DATABASE ENTRY DATE: 2001-12-06
atcgatcgacggctttgacacaagtcatcttactgatagcaacaacactagctggaacacttgggtacacgagttcagggatctagccagagctaattaagcggagagttattagcttttaatttgcttgagaggatggacaactaccaggggcagcacggctacggcgccgaccgcgtcgacgtgtacggcaacccggtcggcgccggccagtacggcggcggcgccaccgcgcccggcggaggccacggagcgatggggatgggaggtcatgccggcgccggcgccggcggccagttccagccggcgagggaggaccacaagaccggcggcatcctccaccgctccggcagctcaagctccagctcgtcgtctgaggacgacgggatgggagggaggaggaagaagggaatcaaggagaagatcaaggagaagctgcccggcggcaacaagggcaacaaccaccagcagcagcagatgatggggaacactggcggcgcgtacgggcagcagggccacgccgggatgaccggcgccggcaccggcgtgcacggtgcggagtacggcaacgccggcgagaagaagggattcatggacaagatcaaggagaagctgcccggccagcactaaattaataagcttatataattgacagccggggcaacacgtcgtcatgtgtgtagtagtatctatcgttttaatctgcggaataaatgacgtgcactgcagtgtatagcgtcctcgaagagaatagtactactgtttgggcgttcgcacgtgttgggttgtacctatagcttgtgatgccattgcaagctttgtatggtgtgtgtgtacacaggtttttagtgaagtgtgtgactttgttttgg

SEQ ID NO: 6367 - DNA, 1563 bp, Oryza sativa
  ref <308>: DATABASE ACCESSION NUMBER: AK063518
  ref <309>: DATABASE ENTRY DATE: 2001-12-06
aaagcccattcctttcttccccccgcccgatacgccgctccgccaccgccgccgccgaccactctcctccgcgtccgcctcgtcgccggctagggttccacgggttcttgcccgccccgcccgccgcccgcctcgcgggctgcgcaggcaaaatgtctcggtatgttgaccctaatgaccgttacgaaccacgtggtcgtaacagcaggttgtatgtgggccatatttctctacgtacaagggcagaggatcttgagaacctgttcagcagatatgggagggtgcgatttgtggatctgaagaatgaatatggctttgttgagtttagtgatccccgggatgcaaatgatgcgaggcttgatcttgatggccgaaagtatgatgggagtgacatcattgttcagtttgcaagaggggtcgaacgtggtcttggaggttctcgtggatataaagccagacccgcacatggttctgaccactgcttcaactgtgggatggaggggcactggcaccgtaactgcactgctggtgactggacaaataggtgctatggctgtggagagaggggtcatatattaagggaatgcaagaacagccccaaggatctcaagcaagagagaggctactcaaggtcccgttcacctcgtcgcagaaggagcccaagctatggcaagagtggacccccttctcattggggtagccatggtgctgatcgtgaggaaaggcttcattcaagaagggatggccgcggttacagccgcagccctcggcgccatgattcgccttccaatcagagaaaccacagccctaggcgctatgctttaccctccaatgagagatatgatggcactaggcgctacgcctcgccttcttatgggagagaccgcagtcccgggggcaatgctttgccagccaatgggagaagccacaacctcacatcagatggcatgaacccttcaccaagggagagagatgatcagaatgggagccacaggagaggtgacaacgattacctgcccagtaagagagatgatcagaatgggagctacaggagaggtgacagcgattacctctccagggagagagatgattacctgtccagggggagagatgatcagaatgggagccacaggagaggtgacagcgattacctgtcccgcgaccgttgatgacaaacaatgccatggccttgaatctgcaacagtctttttggtgttgtgactcttggaacaaactctcctcctggatggtgaatatgtttgactgttgagacatgagatttcttggctggctaattttgaccgcactctgtagtatgtacactgtagtaccttcaccttgcctgcactccgcaaaccttttatgacctgatattggtgtgggattaacgaggattttatcagttagtcgctgtcagcgaaatcttcctttgtatgcttgtgctaaatcttggttggctgtaatcattaatgacgtgttacatcaaaatggacaggtttttaagaattgagaaagtgcgcaattcatcggcagaaactgcagccgtggaattggaattgattc

SEQ ID NO: 6368 - DNA, 2147 bp, Oryza sativa
  ref <308>: DATABASE ACCESSION NUMBER: AK063519
  ref <309>: DATABASE ENTRY DATE: 2001-12-06
aatccttcaatttaattgcacttgattaatagctagtgatagtggaaggaactggtaggcaatggctaccacgccggaggcggcggagtccctccgattccgatggccggcagcggaggaggagttcgacaacgacatggtcctcccctacatctcccgcctcctcatggaggacgacgtccacgaccacttcttctaccagtaccccgaccaccccgccctcctccgcgcccagcagccattcgcccagatcctcgcctcctccccctcctccgccgccggcgcctcgtcgtcgtcctcctcctccgatgccccgcccagccgccccttcttcgatgacgaggcggccaccgccaagactttccccactgctgcggtccacagcgttgaccaccagtactccggcggcctcgacatggtcaacatggcgttcctcaagggcatggaggaagccaacaagttcctgcccaccaacaccctcctcctctcgaccgactcttctactaccttgcagttgcaggttcagggtgaggtagtcgtcgacggacatggaatgctcgggggggtcgggggagcagctgcagctcatgctcatggtgcaatcaacagcaagaaagtcaactgcagggacgacgacttggaagctggcactggcagggccaccaaactgatggcgcccgagccggagctggaggaggaaggtgcacgccagatgttcgacgaaatgatgctccaggagcacgagatttgcatgaagggggtgaagcagctgagcctcaagtccaagagcagcagcagcaagaaggcgcgggggagacgcactgtgatccacaccgagccggtggacctgcacaacctgctgctccactgcgcgcaggcggtggccacggacgaccgccggagcgcgcacgagctgctgaggcagatcaagcagcactcgtcggcgtggggagacgccggacagaggctggcgcactgcttcgcgcaagggctggaggcccggctcgccggcacggggagccaggtgtaccagtcgctcatgtcgcagcgcacctccgtggtcgacttcctcaaggcgtaccggctgtacatggaagcctgctgctgcaagaaggtggccttcgtcttctccaacaagaccatctacgacgccgtcgccgggaggcgcaagctgcatatcgtcgactacggcctcagctacgggttccagtggcctgggttgctgcgcgagctcgcggcacggagaggcggcccaccggaggtgaggatcaccggcattgacctacctcagccgggattccgccctgaccaacacatcgaggagaccgggcggcggctgagcaggtacgccgacgagctcggcgtgccgttcaagttccacggcatcgcggcgacgaagaaggagagcgtgaggcgggaggagctgggcgaggcggaggaagacgaggtggtggtggtgatcagcctgtgccatttcaggaacgtgatggacgagagcctgcaggaggacagcagcaggagccccagggacgaggtgctggggaacatccgcaggatgcgccccgacgtgttcatccatggcatcatgaacggagcctacggcgcgacctacttcctgacacgcttccgggaggctctctactactacgcggcgcagttcgacctgctggacgcgacggtggggcgggagagccacgagcggatgctggtggagcgggacatcttcgggcgggcggctctgaacgtgatcgcctgcgagggcgcggagcgggtggagcggccggagatgtacaagcagtggcaggcgaggaaccagcgcgcggggctgaggcagctgccgctgaatccgcaggttgtgaggctggtgctggacaaggtgagggacaagtaccacaaggacttcgtggtggacgaggatcaacgctggttgctgcacaggtggaagggccgcgtgctctacgccttgtccacttgggttgcccaacactagctcttagcctcttaccaattatttataccaattttcagatatgcacatcataagtacaaccatgtctatgatcgatgtggaccatggttgagtaaaccctattgtatgtttcttgtatcacatttttgctcctccttggtcatggtgaccactgacc

SEQ ID NO: 6369 - DNA, 2462 bp, Oryza sativa
  ref <308>: DATABASE ACCESSION NUMBER: AK063520
  ref <309>: DATABASE ENTRY DATE: 2001-12-06
acacaacgaagaaaaatggaattccactattgtcagcaacgtttggcttcagtgctgctactttgcttttggatgctgttcatcagagcgcacggatcgcgcaagctctacataacgtatctaggtgacagaaagcatgcacacacagacgatgttgttgcttcccaccatgatacactctcaagcgttcttggaagtaaagaggaatccttatcttccatcatctataactacaagcatggattctcaggatttgctgcaatgctaacagaagagcaagcagaacaacttgcagagttaccagaagtaatcagtgtgcagcgaagcaggaggtacaagacaacgaccacacggagctgggatttcctggggctgaactaccaaaaccccagtgaattactccgaaggagcaactacggagaagacataatcatcggggttgttgacaccgggatatggccggagtcgagaagcttccgcgacgaagggtacgggccggtgccggcacggtggaagggcgtgtgtcaggtcggagaaggatggggcagcaacaactgcagccgcaagatcatcggcgcgcggttctaccacgccggggtggacgaggacgacctcaagatcgactacctctcgccccgtgacgtgaacggccacggcacgcacacggcgtccaccgcggcgggctccgtcgtggaggcggtcagcttccacgggctggccgcgggcaccgcccgcggcggcgcgccccgggcgcgcatcgcggtgtacaagtccgtctggggcaggggcggcgccgggtcagggaactccgccaccgtgcttgccgccatcgatgacgcgatccacgacggcgtggacgtgctgtcgctgtccctgggtaccctggagaactcgttcggcgcgctgcacgccgtccagaaggggatcaccgttgtgtacgcagccacgaactttgggcctgcgccgcaggtagtcaggaacactgctccctgggtcatcaccgtcgcggcaagcaagattgaccggtcgttcccgaccgtgatcactctgggggacaagcgccagattgtgggacagtccatgtactactacgaagggaataactcatcaggcagcagcttcagacttctagcatatggaggcctatgcaccaaggatgatctgaacggcacggatgtgaaggggagaattgtgctgtgcatctccatcgagatatcaccacttacactttttccactagcattgaaaaccgtcctgggtgccggggcttctggcctaatctttgctcagtacacgactgatctcctgggcatcacaacggcctgcaacggcactgcctgtgttctcgtggaccttgaaagtgcaaatctgatcggctcgtacatcagcgaagcaagctcaccaatggcaaagatcgaaccggcacgcactatcacaggagaaggagtattggcgccaaaagtagcagcattctcctcgagaggtccatcggttgattaccctgatattatcaagcctgacatagctgcaccaggatccaacattttagcagccatgaaagatcactaccaacttggcacaggaacatcaatggcaacgccacatgtagcaggtgttgtcgcgctgctgaaagccctccatccagactggtccccagcggcaataaaatcggccattgtcaccacggcatctgtaactgacgaacgaggcatgccaatactggcagaaggagtgcctcggaagattgctgatccatttgactatggaggtggaaacattaacccaaacagggcagctgatccaggcctcatttatgacatcgatccaagcgattataacaagttttttgggtgcatcatcaagacatctgtcagctgtaatgcaacaacgctacctgggtatcacctgaatctaccatcaatcgctcttcctgatctcaggaatccaaccacagtatctagaacagtgacaaatgtaggcgaggttaatgcagtttaccacgctgaaatccagagcccgcctggagttaaaatggttgttgagccatctgttcttgtctttgatgctgcaaacaaagttcataccttcaaggttagtttttcacctctatggaaattgcaaggggactatacatttggcagccttacttggcacaatgaaaagaagtcggtgagaattccaatagcagtccggattaccattcaagatttctatgcagatgttgcataacctgggtccagggtgaaacatgcaggaaataacacagcgctcatagaaacaatagagtctacaggagataccaatttccacagaactacagaagtattggttttgtgtatttctttattaccagaatacaaaaatgttcaggtctatgtttgccaacttttgaaatatcatgtacctgcccctcccacctaacgcagcatgacaatgactacagatagtttcagttttggttt

SEQ ID NO: 6370 - DNA, 2553 bp, Oryza sativa
  ref <308>: DATABASE ACCESSION NUMBER: AK063521
  ref <309>: DATABASE ENTRY DATE: 2001-12-06
attcgatttgttgtggattggatgatggaaaaaccagcaagcagcaagcgtaggctgtgttgccgtagcgcgccctacggagttgtacaaagtcagcaaccgttttggggcgcaagcataggcaacacaggactgatgacggggtggggcgcgcagtgaactggttttctaaaaagattggaagatccggccaaagaaggtgatagccctgttcattcgttcccatggttcgatccttcccagtaaaacgcggcgtgttcgaatgatgatcgcttttacgcgagaaagggggaccaccctctaagcctaagtattcctcaatgaccgatagcgtacaagtaccgtgagggaaaggtgaaaagaaccccaatcggggagtgcaatagagaacctgagatccgatgcgaacaatcagtcgaaggagcggagcgcgggcgcactcactctaacggcgtacctttcgcatgatgggtcagcgaggaaatgggaacagcggcttaagccattaggtgtaggcgctttccagaggtggaagatttacgttcttcctatttgacccgaaaccgatcgatctagccatgagcaggttgaagagagctctaacaggccttggaggaccgaacccacgtatgtggcaaaatacggggatgacttgtggctaggggtgaaaggccaaccaagatcggatatagctggttttccgcgaaatctatttcagtagagcgtatgatgtcgatggcccgaggtcgagcagtctcaatttcactacaggatttgcgaatgaatgctaggctgggccacctcaaatggcgtgagccgcatgcggggagacccgcacgtacggttttcagggggatccggccggccggcgcccacccgactagagggactgagaaattaatcgagtacaaaacttatcttcaagctttaccttattttgatcgttcagagggcgatcgcggagtcactgaatgaagtcctccctccctttctttcggaggtgctgacccgctgcaaggcagatatgactaagtgacatattgaatatggcgacgactacagcatgtcgtagaaggagataagaggtggagccaacgacccactaagactcacgtatctacaactacattcccgagcggcagtcaaacggaggcgtgaatgcaagatgccagcggaatgatcgaccggacagaggctagggcagctttcttcccaccgcgtccttccttgtgtgtcggagatacaaagcgagtgcaccggaaaagaaggggaactgagtcgatctattccatggcgaagcatccgaagcataactgcacactcacacgatctttgccgagagataggagcattcggtggaaccggtgaactacacttgcttcttgatagatgtgtgggacagagggctcgtggtacctgctgcccacccttcctccgctttgataaccgtgtgaacggagagtgggcagagcaaaagggaaggaggtcctcatacggagtcgcacacttgagcagtgcgggagactggagaatgggtcgagtaaactcccttagggccgattaaatcacagacgaggaacttttcttgatttttgctttttgatttgaagggtatgttctaaaaaaagaaaggcagaggtaaatacttcgaagaggcggctcggtagggatggaatggtcaatcgtcaagtcaaggatgacttctttgttggcgaaacgatgggggggagaaagcacgccagtgattctccgagccggtcttcatttccaacgcctcgggaaacaggtcgagatagatgacagcacctttttatcctcttccttaccgggaaggcgcacttctcttcttcttctggccttcacctcctgcccggcccggaaatagaacccctttctgatccattcatttctgcaagcaggcgggatccagagctaagccccctcctattcgaagccgggtgtggcctcgcccttttgctcttccttcggtttggctccacgaaggcgccgcctagactaggagccccactcatattcaaaaggcgcccagctttaaagacgatgataataagtagttaggctgccatttttccaatatcatggaatagcatggcccggggctaaggtaactccagtgggagagccgtgttatgggtgaccttattgcacggttcagagagcacttgtgtatgtgatgcaagtgaacgtgtacgaaaaagctgtcgtaaagtttcgttgttcgttccgtagttgaccctatctatgtttctacgatggcccaagaacacgctcattcttcagccgtagagagacttttgaattgtgaggtaccattacgagctcaatatatacgagtgttattctgtgaaataactcgaatttcaaatcattcacttgcttcaactactcatgctatggatgtgggagcatcaactccgttcctttgggcttttgaggagcgggagaaattgttggaattctatgaaagagtcccgggagccaggatgcatgccagtttcatacgacctggtggagtggcacaagatctgcctc

SEQ ID NO: 6371 - DNA, 2385 bp, Oryza sativa
  ref <308>: DATABASE ACCESSION NUMBER: AK063522
  ref <309>: DATABASE ENTRY DATE: 2001-12-06
atctctcttccgcctcatcttgttcacagtgcctgcttgccttcctcctcctccctagggcttcctacctagctagctagcgatgccaagaagagaccatcgcgaagaataatctcccacgcaagaacaagaaccaccaccacctcgctccctcccctcctcctcctgctccagggttgttgatttgccctgctgttctctgatggagcatacctctgatgaggatcctgagcttgaagcttatggcagtgacacttatgcgcttttggaagcaggagatataaaagtgatgaacgataagaatatgtaccagtgtcccttttgttcagataaaaagaatgactacaatgcacatggtttactgcagcatgccttggctgtaggatctgcggatgatcggccagcgaaagagaaggctaaccatcgagcccttgcattgcatttgaaagatgataccgcggaatcgtctaggccactgtcacagcctcctcaacatagcaagaacgatctgtttgtttggccctggatgggtatcatagtcaatatgcctgctgagtatgttggaaaaagtgcaaaccggctgaaggagcatttctcgtgttatcatccatcgaaggtgtattctgtatacagtaaaggtagaccttcgggcaacgctattattgagtttgggaaggactggagtagttttaggaatgcattgcaatttgaaagtgaatttgagaagaaggggtgtggtaaaaaggcttggctggattcagggcgtggagggccagagccttttggatggatcgcaagggctgatgattacaattcctcggggccaattggtgagcatctgaaaagaaatggtgacctgaaaacagtgagtgatgttgagaatgaaggaacagttaaaactgacaagcttatggccagtttagcttgtcaagttaaagagaaggaaatacacttggagaaacttcagagtgtgtatgatgagagatatctgtcgcttggcaaaatgatggagagcagggaaaatatgctcaagtcatgcaatacagaaatccagaagatgcaacaacttgcttatgaacaagcacaaaggacagttgatgagaaccagaagctacgtctgaatctccaatctatgatgcatgagcttgatgcaaattgcaaaagacttgaagagttgactgcacaggctgattctgacaaaagaaaccttgaggtgctgatgcaaaagaatgcaaagaaagctgatcatcttaggctggcagaattggagcagcagaaagctgatggcaatgtgctgaggcttgtggaagaacacaatagggagaaagaagctactttgaacagtaatatgaggttgcatgaacaattggacaggaagcagaaacttgaattagaaatagcccatctgaaaggcaaattgcaagtgacaaagcacacgcaaggcactgaagattcagatttagagaaaacgatagaggcgctgacaaatgagctggaagaaaagattgaagatatgaattatatggacaacatgaaccagactctaattctgaaggaaaaaaggagcaaggatgagctgcaggaagctcgaaaattggtgatagattctctacagagattgccttctgacataaggagccaagcacagataggcatcaagaggattggtgagcttgacttgaaagtattttcggatgcctgcaggcgaagattttcagaagattttgcagaagttgaaagttctgttctttgttcgaagtggcaaaatgaaatcaaagatccggaatggcatccttttaagtctgtttgggtcaatggaaaagagtcgaaagtaatcagggaggatgacgagaagctccaacaactgaaagaggagtacggtcaagaagtctatgatgcggtgacaaatgctctgttcgagctcgacatgcatagcattggtggcagggatccattcctggagctatggaactacgaggaggggcggaaggcgggcacgagggaggtgattcagcaagttatcaagctgtacaaggcgaccaagagaaggcgctgatggcttggccgccacttggttcttcatcaacctacctttgacctcaatggatatggtatggaacacacatatatatacatgaaccaaatgcagtactgcatatatatacatgaacctaatgcagtactacatatattttggagctagggctttgagacagtgaagtttgttactggatattagctggagatatattttgcagccctctgaacttatgactactagtattatgggcctctgtgcttttatgtccatttgactggttatgtgactgatagtctgtgtattctacttgccaaacttaatttatggccagtctgggctgacct

SEQ ID NO: 6372 - DNA, 1430 bp, Oryza sativa
  ref <308>: DATABASE ACCESSION NUMBER: AK063523
  ref <309>: DATABASE ENTRY DATE: 2001-12-06
ctccatttcacaccaataaccacctgtgcagctagctaagctgtgctgctgtgctctctctctctctcacacacacaagcaatcttagctaagctatagctgcagctgaagcaaagcaaagggaagaagagaggaaggagatggagctggatgagcaggcgttcttggaggagctcttctcgctgaggagggacgcgtgggagtacaatgccatgggggacttcttctcgccggcgtgcgccgccatggacggcttccaagaacggcaccagtccaccaccacggtcagcgtcctccccaccttcacggcctcctacgagcagccgccgccggcgccggcggccgggttcgactgcctcagcgaggtctacggcaacgccgccgccgcattcgggcccaatgccggcggcggcggcggcgagtacggcggcggcggcgacatggggtttcttgatgtggttgagcccaaggcgagtatggtggtggatggcggcgggctcggggtgtgcaaggtggagcccgggctgcaggcggagggcgggttcagcgcagcggcggcggcgccggcgtcgaagaagaagagggtggaagggatgccgtcgaagaacctgatggcggagcggcggcggcgcaagcggctgaacgaccgcctctccatgctccggtccgtggtgcccaagatcagcaaggtatatagagtacttagtgaatcattttgtgttgcgattgggattgcgagtgcgagagagatgagattagatgatgtatgtgtttgcgagtagatggacaggacatcgattcttggggacacgatcgactacatgaaggagttgctggagaggatcaggcagctgcaggaggagatcgaggagcagcagcagcaggagacgcccggggtgctcagcgtcttcagggagctcaaccccaacgagatgctggccaggaacacacccaagttcgatgtggagaggaaggaggggggcgacacgcgggtggagatctactgcgcggccaagccagggctgctcctgtccacggtgagcacgctggagacgctgggcctcgacatccagcagtgcgtcgtcagctgcttcaacgacttcggcatgcacgcctcctgctccgagatgcagagggagaggatgagcgcggacatgataaagcaggagctgttcaagaacgccggctatggaggaggatgcttgtagagagaggacaccgagagcagcagcaataaaagtagcagcagcaatggtaatagtggtggtagcagcagcagatcgagcagaaagaaagagagagggtttcagagttcagtgttgttgagtagtagggcaggagaggaaaaggcagattcgggaggcctttttgcaatccatctcccccatcgttcctcgtaaccatgcaacgcaatactactacattacatt

SEQ ID NO: 6373 - DNA, 1297 bp, Oryza sativa
  ref <308>: DATABASE ACCESSION NUMBER: AK063524
  ref <309>: DATABASE ENTRY DATE: 2001-12-06
atcctctttcccccttctcctcgcgtcgcctccacaacccaaccaaccatggcgaggccgccgcaggaggcgatcgacaccttcgtcagcatcaccggcgccgacgaggccctcgccgtccgcaagctcgaggaacatggtggcgaccttaacacggcaatcaatgcacatttcaatgaaggagacagtacagtgaacagagccagtcaaaacaatatacctgagagtcatgatgatatgatggacctggatggaccacttgataatgcatttagaagatctttgttccctgaaactttgcgtgacccttttgcactgatggacacaaactttcagcaaaattattttgacagagttggttccacagatactttcggtcatggcccacaggtttcacaccctagagaggtgcgagagatacctatcgaagttaaggatagcaacccgcaaacaggcccttctggtcaggcccctattatcgaggatgtcactgggcatgaatcttcatatggtcctgaagttcgtggggctattgtaattgatgatgatgatgatgagcagccatctgccccttctcttcatgctaatattgatagctcattgcagccgaacccttctattccaactgcacctccattggttcatgttactgactatgacaatgatatcgaagaggaaatgatccgggcagcaattgaagcttcaaaaagggatgctgaggcaatgacaattacagcagagcaaggaataacacagccgccagagggagtaaacattacagaacattcttttgatgaagaggactagggaactgcaagcggaacagctggaaggcaaggattagctacagaaaaggttggatcatctaggcagccaatagatgaagataccctccaagaggagactgaagatgtagaagaacagccattagttagacgtcgttctagacgcatcccttctggaaacactgagtcagcacaacctgtgtacacggtcgatagtcctccctcaagttctcagcctcaaggaaatttgaatgatcgccagaataatggagatgaatttccatcagagtggggtggcatttcttctgaggagcatgatgaagctgttatgcttgaggctgcaatgtttggtggaattccagaaggacccatgtatccgttctcaatgccatctcatagaagcccaagtctttatccccatgtagagcatgctccatcaccagcattaactgaacagcggttgttacgtgagcagcaggatgatgaataccttgcatcactccaagctgatc

SEQ ID NO: 6374 - DNA, 2223 bp, Oryza sativa
  ref <308>: DATABASE ACCESSION NUMBER: AK063525
  ref <309>: DATABASE ENTRY DATE: 2001-12-06
aagacaagtcgcgacctgacgacccgaccttcctcttctctcccgctgccctccgccgccgacccgcaggggatcgtggggacgatcgatcgaggaggagagacccaaaccctagccacccaggcgccactcccattgcccccttcgccagccagccatgtctgcggcgcacctcctccgccactcccgcaagctgcggactctacgtgatgctctagattatgatcggtctgctcttgtacgctacttctccgctgcttctgcatcctttcccacaaagggaggtgctgctgctggtgttgagaaaagaattggtggcgccagattccctcagtgcaagcagcctgggaaagagcttgagaccttcaaggtgtcactaggaggactaaatggaagatatgcttgtagaagagcacctaacaattgtatcccaaccactattaccggtctcaacggttcattgtcatgtggacaggtgtcttcagcaagatctttctcaagcagtgcagacctgccaccacatcaggaaattgggatgccatcactctctcctacaatgactgaggggaacattgcaaggtggctgaagaaggaaggagataaggtctcacctggtgaagttctctgtgaggtggagacggataaagccactgtagagatggagtgcatggaagagggctatctcgctaagatcattcatggagatggtgccaaagagatcaaagttggtgagatcattgctgtaactgtggaagaagagggtgaccttgagaagtttaaggattataaaccttcaacttcagctgcacctgcagccccttctgaaccgaaggctcagcctgagcctgcagagccaaaggtgaaggagacagagccttccaggactcctgagccgaaagccccaaagactgaagaagcttctcaaccagggggtcgaatattctccagccctcttgcaagaaaattggcagaagataacaatgttccactgtcaagcgtaatgggaactggtcctgatgggcgaattttgaaggcggacattgaagattacttggcttctgtagcaaagggtggcaaaagggaagctcttgcggctccagggttaagttacactgatgttcctaatactcagataagaaaggttactgcaaaccgcctgctaagctctaaacaaactattcctcattattacttgacagttgacgcccgtgttgataatcttatcaagttgcgaggggaactgaatccgttgcaagagtcatctggcggtaagaagatatctattaacgatcttgttataaaggctgcagctctggctcttcgaaaggtccctcagtgtaatagctcgtggatgagtgattttatccgccaataccacaacgtgaacatcaatgttgctgtacagactgagcatgggttgtttgttccagtaattagggatgcagacaagaagggacttggtacaattgctgaggaggtgaagcaggtggctcaaagagcaagggataacagcttaaaacctgaagattatgagggaggcacattcaccatatcaaacctaggaggtcctttcggaatcaaacaattctgtgccatcataaatcctcctcagtcagcaatcttggccattggtactgctgagaagagggtgatacctggcagcgtagacggccagtatgagtttggttccttcatgtcggcaacaatgagctgtgatcacagggttattgatggtgctatcggcgcagaatttctgaaagcattcaagggctatatcgagaatccaaactcaatgttactgtgaagttaaagatcagcaaaactattcttctcatgtgctcgaataacgcagagtggtgctatctcattttgtataataccggcacggtgttctgtcaaggaggacccgaaaaccaagagcacataaccatagacagaatgacctggtttttggattaaaagctttttctgtttatcttttttttttttgtttgtttgtttcgttccagttatagtgggaattaggaggatcaacttacaagcatttttagcacctttttgtgggtttaccctcggcaagtgtgataactggagagagtaaattcccgggaaacaatgcagtatagcctgtatacgatttgtcccttttctttttccccttcatagtgcaaaaccaagaggcgcagaaggatctttcggaataaattggcaatcttggggagt

SEQ ID NO: 6375 - DNA, 2118 bp, Oryza sativa
  ref <308>: DATABASE ACCESSION NUMBER: AK063526
  ref <309>: DATABASE ENTRY DATE: 2001-12-06
gggttcccttcccctttggtcgatctcccacagaggggcagccaggcgccagctcgggcagggtacgcacggcgcgcaccagcgacgagcagctcgtgcctcgacggctggcggcgagtcttccatccatggctggaaaattggcaatggaagggaatgcaatgtttacgtgcacagtgctccacgcctccacctccatggctgtcaagttgaatttctgggcatcaacaatattatttttgtgaaaatagagaaaagtacatcgaaacactgaacagagttacaacaacgagagaacacaaggatggacagggatctagcggccactaagaagccgcagaaagagaagggagcaaagccgaagtgaagatgttcctccaagcatcggtggagcttctggcggagtcgttgaggcggaaactccacattctccagaagcaaagaaggtagaagcatttgtactgctccgatggaatgcagctgggcggctggatgaggttgagagccttcatagagggaatgttggggtttgcatgagttaggtcccaaaaggcctttgccaccgagcagtgaaggaaaaggtgctccgcagtctctggagcaatcttgcaaatctcgcagacatcggagggagtgatgtttttctttttgagattcaccctcattggcagtctgtctttcgcgagtaaccaagcaaagaactgaacccggggaggggccttgtttttccaaacgaatttccaattcgaacagcaggttggtcttgagtttaggattccataaagctttgagcaggagaatgtattttgatttgtttggaaggtaagtgatctgctgtcttgttctgcgctcagctggaagttttgaagcagcgtagagagatgagccaaatcttgtgaagcagctgctgtgagcctaggctgccacaggtgatcatatgaactgagcatttcttttactgacacagaaggcttcaggcagtgggagaacagcgccggcattttagaagcaagaggaatgtcggagatccaagtgtcgaaccagaaagaagttttgtctccagatccaacgcagcattttgtgttaacttgatatagaggcaggagtttggttaggctacggacgtggggtcccaatttgaatcagggagcaacttgtcttgaggaatttcattccacagccagatggtccaaggagtagaagagacgtgaagcttgtgcaggttttcaacagtaaacaggagttttgtttagcaaggtccttaattcctaggccaccgaattttttgtcagtgcagacttcatcccaggataccaaacattttgaaccagagcacgaatcatcaccagtccaaaggaaggctcttcttcttttgtcaatcgccgcaaatactcctttcgggagctccatagccgccattgcgtaggtagggagagatgatagaattgcattaatgaggatgatcctgtctgcgtagttcagtaaggaggcctgccagcttgcaaggaacctgtccactcttgagatcacaggagcaaaggcatcgaagtttagcttggttgtggacagcagaagtcccagatatgtctgcgggaagttttcaagtctgcatcccagcacattggcaagctggacttgatcttcaggggggacatgaatgcacaccatggtactcttggagtagtttatctccagtccagttgcagaagaaaaatcatcaagaatccgcttgataagggcgacatcctgggaggaggctttgcagattattaatgtgtcgtccgcatattgaagtgtggagggagtcatctgcgggttgagaggatgtcgtagctggcttttccggatgagagtttggagcacatcagctacaatgataaacagataaggggatagaggatccccctggcgaagtccttgtttgcaggagatccaattacccggcacaccatttaggatgatagaggatctggcagaagcgaggagcattttgatacaagtgttccaagaatcattgaatcctctgcagtatagaattttgtgtaaactgtcccactggactgagtcaaaagctttggcgaagtctaattttaggatcaccgcaggggcttttctctt

SEQ ID NO: 6376 - DNA, 1911 bp, Oryza sativa
  ref <308>: DATABASE ACCESSION NUMBER: AK063527
  ref <309>: DATABASE ENTRY DATE: 2001-12-06
aaagaacgctgcaagtgggacccacctagggttttaagaggaggagattctcgtcggcggcggcggcgggcaaaggttagccatggagaaggcgaagctctcgtcggcgctcttcgccggcacgcacttcgaccgcaagcgcttcgccggcgacttcgcccggttccggcaaggcccgcctgccccagacgtggcctccgccgccgcgccgtcgccggagaagaagcggaagcgccagagcaaggccaaggcgaagaagagcaagaagaggcgggcggaaggcgccgactctgcttccgatgctgtggaagggttcagtgtgttcaagggattggcagcaaagaaggatgaggacgattcggagaagaaggtcgagactggtaagagtgaggactcggaggttgtaaggcggaggaaggaagtcgagagagaaatcgagagagcggcaatactacggaagaagtttgatattcacatttcaggacaaaatgttccagcaccgctagagaactttgaagaactggtttcaaggtatggttgcgactcatatttggttggaaacttgtcaaaacttggatttcaagaacctacacctatccaaaggcaggccattccaattcttctatccgggagagagtgctttgcctgtgcacctacaggttctggcaagactttggctttcttgttcccaatccttatgaaaatcaagccaggatctaaagagggtgttaaagctgtgattctttgcccaacaagggaattggcagcacaaaccacaagagagtgcaagaagttagcaaaaggaagaaagttttatattaaactaatgacaaaagatctatcaaaatctgggaatttcaaggatatgcattgtgacatcctgatctccaccccacttcgtctggaccacgctgtacaaaaaagagaccttgatttaagtagagtggaataccttgtcttggatgaatctgataaactttttgagcttggatttgttgaagtgattgattcagttgtcaaagcctgctcgaatccttcaataattcgatctctgtttagtgccacattgcctgattcaatagaaacgcttgcacgcacgataatgcacgatgctgttcgagtcatcgtgggaagaaagaattcagcctcttcactgattaagcaaaagttgattttcgctggaactgagaaggggaagttgctagctcttcgctaaagctttgcagaatctctcaatcctccagtattgatctttgttcaaagcaaagagagggcaaaagaactttacaaagaactggcatttgatgacgtaagagctgatgtaattcatgcggaccttgatgaggagcagcgtcaagatgctgttgacaacttgagagccggaaagacttgggtactgatagctaccgaagtcattgcccggggaatggatttcaaaggtgttaactgcgttatcaactatgattttccagagtcagcttctgcctatattcaccgaataggacgatctggaagagcaggtagatcaggggaggccatcacattcttcaccgaggaggataagccattcttgcggaacatcgcaaatgtgctgatatcttcaggctgcgaggttccttcttggataaaggcattgcctaaactcaagcgcaagaagcacagggtgaaccgggatcccatctccacattaccagacgaagattgagtttccctgtaacgtttctagatgaagattgagtttccctgtaacgtttctagatggcaccttggcttcagttttcctgtttgaatgccagaaactgctgcctctattagttttgttgactgaagcctgagatgagaatacacttgccttttgttatttacagttttgactgatcaattgaatagattatttctgaatttacaatt

SEQ ID NO: 6377 - DNA, 1732 bp, Oryza sativa
  ref <308>: DATABASE ACCESSION NUMBER: AK063528
  ref <309>: DATABASE ENTRY DATE: 2001-12-06
tgatgctggaattgaatcgagcgtgcgcgcatgcgtgggtttgatctctgaaggaacgagttgttgacgaagagggggcaatgagatcgatgtgaaagacaaggaggaaaaacaccatgtcgatgagctctacactatggcagtggcggaccacctcaaggttaggaagaattcggaagagagctcaacgcagtggaccaccggcattgctgaagttcagccgcctattaagtctgctggagagaaactatgctgcagccgcaacgaagaaggcacaccgcaagccctgaggcagctgggagatgaagctgtgtgcgttggccgccttggcggcggcgatcacctcctccgctgtggcgtcctccttcccgaacaggatgttctcccggatgctggtggcgaacagcgccggctcctggctcaccagccccatctgcgctcgcagccactttagccggagcctccggatgtccacgccgtcgaccatcacctcgccggccgacgggtcgtagaaccgctccagcagcgcgatcaccgtcgacttgccggacccgctaccgccgaccagcgccacggtgcgccccgccggcacgcggaggttgaagctgacgaagatggggctctccggccgtgacgggtagcagaacttcacgttccggaactccacctcgccggcgacgttgcccagctcctcgccggtgtcgctctcggagtcgatcttgggcacccgccggatcacctccaggatcctctccgccgccgagctcgcctccgagaggtacttcacgttcgacaacactgacccaagcgctctgcaatcccatgcaagtaaggcacatcaatggcgtcgccgtcgccaagaattatacatagtgcaggatattacgtacaggccgccctggataacggcgtaggagacgacgaagacggtgccacccttgtagccatgggacatgacgaggcggcttccgtaccagacgttgaaggccaagatggcgaaggtgatgccgttgctaccgatggcgacgcccttggcaagcccttgcttgagccccagtcgcaccgactcctcgagtgccgctgagaactgagccatggtcgtccgctccgccacaaacgagtacaccgtgcgcaccgacgacatggcctgctcggcgatggcgccggggcgggtgtactgctccctgatccggcgagcgaggtcgacgacgacgcggccgtacatgaatgtcgggatgatgagaagcaccaccgacggcagcgccactagcatgagctgcctcatcagcgcgaacccaaatgcgtagttaccgacgaacatggcggcgttcatgacgaagttgggcaccttctcgctcagcacgtcctgcaccacgaggctgtcgttggccacgctggtgatcacctccgccgtcgaccccttcttcaggtcgaagtactccacgtcttgccggagcaccgcctgaaggtaccgtgcccgcatccgcgacgcctgccgctccgccgtccgtgtccagcaatacccctctgtttgtacaacacacacatcgccggcgggagtcagctcgcctcgccatcgccggcaggcattggaattcaacaggtgaccctatgctcacctagaaacgtcatgacccactgaccggcggccaagaagaggaggttcctcgcgttctgatgaaatggagatcaacacttcaattttcaaaggcaaatccaattcgatcatttc

SEQ ID NO: 6378 - DNA, 1452 bp, Oryza sativa
  ref <308>: DATABASE ACCESSION NUMBER: AK063529
  ref <309>: DATABASE ENTRY DATE: 2001-12-06
aatatttttttttttcaaaacaatccttcagcggcaatcgccgactaactgtcccggtggtcgccggcggacgcgtccgatctccgatggcctccgccgccgccgccgccgcatcccccggcgacgcgcggccccggtgcactgcactccaaaacctacctcttactctgctagtcagtgacctcgctctcctccactgcgttcccctcctcccccctccgccgctgcgttctcccctcacgaggtcacctgacggccggagacggccgcggtggtgtcccccctccctgcgccggagtcgacgacgacgccgcctctgcggctgcctttgccacctggaaaatgtttccaagatagaatgtgcatgcatcttcagattcatcacgatggataagaatgtttggtgaggtgcacaagtcagattattggttgtctagtaaagccctataggaaacaagttcgtctggcaacctgcaagaatcccaattcaaaacaaactcccattaatcaatcaacatcgctccatcaattattgtagtgtgatgatgttaaaacaggagcatatacagttaacattggtggcaaaaacatggtacgattcttctttgtcagcacctatcagctgcacatagcatgcgtccagaacagatggcaaagaatcgaagccgcgagagaggcaccaacttattcataggataacttagaatgttcctgttatatacttttttcctatggttttgtggttgcctactcctcatccaatcttgcaagttgctgttaaacataatgtttactccaagaccagaggcctctggactctggagggtcaacaaatttgatatagatccacgcagaagtttctgaattctgattttgactatgcctctttgtgtacagggagaggagggaggattcagagatggatattatcaatatactccatggatgcaaatcctaacaagagcgcaccatgcatcggcgacgcatcagcatgcactaactttaattgccaaggccctagttgattgctgccaccatcacttgttggaattatttttgttaggtgaattcacaggtcgttgccttgcttgcttgctcctcacattgtgaaaagaaccacccctccaatgcaaaaatgaactgttcatctctttatatagatgcatacttaaagcaaaaatgagtgcttccgtgtgagagaaaaaaaatcaattaattaagacatactgattgcttagctctggcagttgtgaatttgtgacgcatctctccaaaagtagttatgtgcgtcagacaagtgtgttgtccgtttcttgattgtgagggagcaaaactttcatgaaggccagagcattacagcaaatattttgtgcttaaatacaatttgtttatctgaattttcattgagaacccctctcctttaggggaatgaaccaatgaattatttgtgcc

SEQ ID NO: 6379 - DNA, 2521 bp, Oryza sativa
  ref <308>: DATABASE ACCESSION NUMBER: AK063530
  ref <309>: DATABASE ENTRY DATE: 2001-12-06
atgttgtgtaaccactgtaacctttcgttggtctctctcttctgctctgctctccgttgtgggagaagaaatcagcaataatttgatcctttttccttgcatgtctccttttctgttgatcattttagtgttaagtcaaatgatcacctctttttttctgtttgaggcctgagcgatgtctgcatgtctgaatatatataggcagctcaattatgggagatagggaatgatcagaggaagcaaatggttcttgataccttggttgataatctcaagatgacattattcagcaaattagcaaatattgcatcttgtgtttcctctgcttcttgctttcatcgttggttcttttgagatcactttcagacatcagctagcaagcatggtggagctgataaaagtgccgaagatagagcaagaagagggcaatgctgacagccatggaaaagagaaagctgacgtcgtccatgaggagaaaaccgagaaggtgaagaggaggaggaagagggtcagtgaccctcagaggaagaaagcctgcgtggattgcacgaagagatgcatccgaattcatggcatggcttcttcctcctccgagaaggctaggccgaccccgacgctgccgtccttcttcaagatcatggtcggttacttctccgagaacatggatataccactcccatttgccaggacaatcactgacatgacaggctccaatgtatatcttgaagatgcatatggacttcgctggcgagtgcggctgtatctgcacgacgatgttctgtcatttggccatgggtggaagaactttgtgctcgatcacgacatcagcgtcggcgagttcctggtgttcaggcagatcgccaggtcagtcttcaccgtgcaaatattcgcaatttcagcttgcgaaaggatccatctctgtgaaaggaacaagaggcagagccggaagaggaagcccgggcgaaaaacaggctatcctgctaacaatcaaatggtgaaagtaagcagcaaagatgtggttaaacgtcgaaagaaacaacgcaccgatgaacagatatatgatctggaccccaggcaacatgacatgcctgttcgtgtctgcatcgactctggttctgagcaaagatgttcagaatcttcagtgaaagaactggatgctgctcctgataaatcacatgcagttgttcaggtccctgcaacagagtgcaatgctgatcccagttacaatgcagctggaatgaagacaataaaaaatttggaagctattggtgcatcttctagcacaaaagacgtgacatgggatgcaaataaatctgaagattacccaagttttagttatcctgaatcaagcaatgtgatgactgctgataaagaatcagaacgctcacaccaagataggccaatgcaactttactgcgagttagggctagaagacgggaatgctgaaactgagaactgcgagaactccaatgtgctagagaatgcagaattaagaacacctttggctatgatggatcttaatgaagtgggtatagatgacatatttctgtcagctgatatatacgaatttgatagtgatttttgtagtccagaagcattttctgttgacgtgaacaccgaagggctagtttccaatggccgaactccaggtgattgttttggagtgcctgagacatcaagatgtttggaaaataaacagatgactgatgtaccaagaacaagtacagatgatggcagcattgctgtacatggcatagacatcaacgcattgcccagtaacacttaccctgacattggacagggcaacacttaccctgacattgatgcagctccagacgattgcaagaaggataaagatgttttgcattctgagtgcaacaaagttgctcaaaaagcccattcttctgtgaagcaagatatcactaaagatggtccacggcagattgctgcagaaattatgtcaagcgatccaaagacttgtgaacttacttacgtcagaaaaaatagcgtgcaacctggtatttcttccgtttcacaatggaacaatagcaaaggacaggaaagtggaggcacaaagtcatgtgtagttcttgcagttgcagcaaatagcaagaaattttgcataaccatacctccaccagaccaaacatggcttgagcttccaagacgactgccagttcttccaagaacaaagaaacaagcgaggaagatattaatactcaaggatccatccatgagactctggcctgtgctgtaccaatgcaccccaaaattcaacggtttcatcgctggatgggctgacataagtagggagaacaacctgcgtgaaggcgacacctgcgagtttgaactttgcagtaactctgaactatcattccaggtgcttgtgcccaatttgcagtagccaccatttcacttgccctttgtttcatatccgtgtaacgatgtagaatcaaaatggtgtagacttattccttgtaaaaatggatctgagcaacgaatctcctgaattacccgagtt

SEQ ID NO: 6380 - DNA, 2661 bp, Oryza sativa
  ref <308>: DATABASE ACCESSION NUMBER: AK063531
  ref <309>: DATABASE ENTRY DATE: 2001-12-06
cagataagcttgctactcaaggcaagattgttaatgaccctgttgatcaacatatctcaagcaatatgctatcagagggtcctaatgtaatagaaaacccatgtggtgatgggaggcggaagaagaagaagacaaaacatcactcagagtcgtcaaaggatgttggtcctactcatgatgtgacaaaatcattgattacaaatgaaatctcaatacaaaacacaaatgtttctcccttagatccaaagcaaataacaccggccacaacaggagtaggaacaattggtcaccaaacaaagtttgacgtaagcctggatgtagcagcagcaaaagttattgatgaggtattggcagatttaagatgcactgataacacaagtaaggatttggatcaatgtcagttatcaaaacagaaacaccagggcagcgatgtacttggagtgcatggaaacactgtggataaaggtgcccttagtgcagtgttacctctgaaatatccagcggcaattcactctgatgctcccatcagctcacctagtcataataaggctagaggagaaaaattggaagtactgccaactgcacatgactcgtctcatttttcaggtggtgtacctgatgaaaatgcaaatgcagaactaagagaatctgtttctttgaggccttctgacaacacaagtgtttctaataatatttcaactgaaaatgttgtagtgcaagatgatgacaaaaacaaagccactaaacgtcagagaaagaagatttccctaaagcatgtccctacagataatgataaaactattcagtctttggatgagcaagttaaccaggttgctattgaggacttaaacggatcaaatgctaccaaagcagatttagttcaaggagggtctgtaattgatggtcctgcaggtactgttgaaaatgtacagaagaaaagcaggtctaccaagattcgtacacctaaagtccaaaaggcttacccttctgcacattttgaagatagtaaatccgccaaggacagccagggcaaatgtgtaagttacattggtgagagtgggacccatagtaatgacactgcagtaggagctccaacacaatcgtttgcagttcaggaagatgccacagctctcagaactttaacccctagtgctctaaagggaaggaagaaatcttccaagactggacttcagagtcagaatgcctctttggatcatggttctgatgtagatttgatgaactacaaggctgaacatattacagctagtcctaaaaaatctgctgttgctgttgaaccaaatgaaaaaatcaacttcctcgaccattttagccccaaagggactaatgatcaatatgtttctgcagaaaacaaagaaaacggcagagaggaaactgtaagagaagttgaggatgaaagtaacaaaagagaagtggatctgcagtctcagctcgctgataatgccaaaccaaatgatctgctacaatcgcatcatatagaaaaaactacatcaactaataattcacctggtgatgttggtgtgccatctgattcaacacaaaatgtggacatagcagatggaaatgtgaagaaaggtaagcagaagaagcgaaaaaagaaatcagatttgctcaattcagttccccagaaggtggatcctaacagtgatcatcgagacattgacaatggtgtacaagatttttcgttttctgttgcacaggaaggaagaatggagcatgacaggaaagagaataacaataatgtaatttggaacagtagtatgctgacacaggacccaaaagatgccacatgtgatagcagagtaaagaagctcaaccaaagcaagagtggttctgataaccagggtaatttgccaattgataaggatcatgcgcttatggacaaaggacaaagaaagtccagttctcagacaaagccccatgctgagagtaaaaattttgacaggtttagcaatggaaaggcagatccaaattctaagtctataagaaatcttgttaagagcttttccatgagcccaccagcatcaagtgacagcacacagggcacaccacaaaatagtcgatttcgactagcagctcggaaagttccaagaaaaaggtatgagcaaaccagtggcaaatccaaaaaagacaaaggaactggtacaattttcaatgatgccagcagtgatggctctgatgatgaattgggcatcggaagtgaaaaggctgccattgaaacttcttcagatgatgcatcctcatcagctgactcaggtatttcatctgcagcccatgatagtggcgagcctgatgacgatggcaatgcatcactatcacagaaatctcgcaaaggggggcttggctccatcctcagaggctcttgtagttacaagaaggcaaagcagaaacaagccgtgcaattggatgacaccgaggttcctgatagccagccaatggacattttctgagactgaacttgatacttgaaagaagaaacacggacagctttggttttccattattttcatccacctgattgcatgccctggagtttgagcattgcatattagtatcccaaccagccttgataccatgtagtggaaagaaaaatgcacttggctgattctcatgttaccacacggcttttctgctccttgaact

SEQ ID NO: 6381 - DNA, 1990 bp, Oryza sativa
  ref <308>: DATABASE ACCESSION NUMBER: AK063532
  ref <309>: DATABASE ENTRY DATE: 2001-12-06
gttggtgcccttgaaaaagctagatgtatccattccttcgtggagaatcatagcatgtgtaagatattacccatcggaaatgctcttattgatatgttctccaaatgtgggagtttaactcttgccttggatgtcttcaatgcaatgcctcaaaagaatgttgtcacctggacaagcataattactgcatctgctatgcatggtgatggaagatccgccttaaccctttttgagaacatgaaaagtgaagggattcaacccaatggagtgacatttcttgggttgctctatgcttgctgtcatgctggtttagttgaagaaggccgtttattgttcaaaattatggtccagcaatacaggattgagcccatgcatgagcactacggttgtatggtggatcttttgggaagagcaaaacttcttggacaagctgctgacctgatacagtccatgcacttaagaccaaatgtggtcatttggggatctttgttagcagcatgccggatgcatggtgatcttgagctcggcacgtttgctgcaaagaaaattttggagttggaccctaatcatggtggagcacaagtgctcttatcaaatatatatgcagaatatggaaactggaatgatgttaaggaggtaaggggagtaatggaagtccaggggacgtggaagaagaaaggttgcagttggatggagctgaatggcagtgttcatcagtttgcagttggaggtgaaaaaattttggaaatgaaaggatccttctgaagcttgatgagataactgcaaaataaaggatgactgagctaatttggagaagccttgtggaagcatatttgtaagtatcctgaagaacattgtatacttcatatttttacaactgcagggatagaagattgagaggtatggatgtgttctagctgccatctaattttactttgaattatgagagaccaaggccttctgtaccaacatacttattcagtcctgataatcatggcagggtctgtctaagaaggattatgagaagaaaaaggagcttgcggccagtgagataacaaaaaaagcttgaaaagaagcttagatgcaatctggaactgccagaagcgtcgaaagttgaaacttctcagcttaaaagctagactattcatcttccgcttgagattttggaaattgatacatccacatataggattcctcgagatctccgcagatttgagtaattttgagcagaagattgagttctctctgtacaaagttcgtctaaggaagcaacagctacgttatcagcagcttcttgagatgtgcaaccgggtacgacctaacaaaaggatacacttgttcagtattgtactatcctaccttactacactagtttaaactaccaagttatgatctctctctctccattccaaaaggagatgccaattccaggagacgagcaattatctgtgccaattccaactcggcacaaggatttatcctcaagtgaaattatgtcacggattctctatcgagtaacttgtttgtgcttgtcaaaagaacctgattggtgagcagacccaggcagcttcgatggtcaatccaaagccatttccattgtgggatgtgtgcagcagccagatgtactgtcaggatgccgagtcttccatgacagcactgcagctttcacctcagcttcatgagtagtacaaagcttcagccactgcagcccaacctgcaggaggccaacctacagggctacgttcttggttgtgattcctaaggacactatggagcctggatgcaactgagagcaactgattgaggataatgatcttctcagcctgaatctgccagaactcagtctaaccagctgaaaaataaactatacacttcctgtgttattgaactgcttgcttatgtcggatgtagtaaattaatgatgagcatggctttcttgtgtgttttcaagaactaatggtttctattaaggtgtataacggttatgtac

SEQ ID NO: 6382 - DNA, 2036 bp, Oryza sativa
  ref <308>: DATABASE ACCESSION NUMBER: AK063533
  ref <309>: DATABASE ENTRY DATE: 2001-12-06
ctacaagtccatttccggtagctgggccttggtcccggcagcctggctgatgctccttgtcggcgtggccaagtatacagagaagacgttggcgctccacggcgccaacctggccaatgtccggagatccttagagaggcagcagcaccgccatcacatgggaggtggcaaccaccattctcagcagctcgcgtttgcgacagatgacaatgatggcgcccttgtgatgaaggctcatgccctgttccacatctgcaagaactccttggtggactcgtcggtggatatagaatccacatctccttccaccgcgctgttcgatctcaggtggaaagagctgttcagggtgatggagatagagctctccctcatgtatgacttcctctacaccaaggccaccatcatccacacctggcatggctactgcatccgtgcgttgtcgccactggcgaccaccgtgtcactggttctggttgagctgagcaatgagggcggccgccgccacaagcaatcggacattgtcatcacccgtgtactgctggtggccaccttcctccttgagtcggcgtcgctgctcagggctctcagctcgacatggaccggcttcttgctgcatagcaagttgcaaccgggttggattcgccatgaagtcctgtgcatgagacggtggcatcgtttccatagcgtcatcatgtcccttggctggcccgccaaggtgcaagctcaccggcagtggttaggcaagatggggcagctcaacatgttgcagctggtcatcacccagaaggagctagagcgaccggcgccaaagggtggtcagttctgggacaaggaatatcagcgatgctcaaatgaaaccatgatcccagaaaatgtcaagaaactggtttctgagcttgtcagccgtcagttgaaggagttgagggattatgtgaaaaaggtggtggcgcaagaaggggcggatgcgttgtcacaggacgttaacttgctggagatggcagtgtacttgaggaagaagaggggtcagcaggcactagaaaagaacaatttgctctcggatctccgttggagcctcggcaatgagctccagctaggcatcctcacatggcacattgccaccaacatgttcctcttgttgtccggcaaagccgccaaggcgaagggtgacgaaggaccgaaggtgtgtgcaatcatgacactgtccaactacatgatgtaccttctcgctcttcgcccttacatgctgccgggcctggtcacccgcaagcttatcgaactgacctgcgaggaattggcccagatttggtccgaacatcaggcagcacctgccgccgtcgatgacctagagtcgtcgtcttctccgagcttctgcaatattagggtcttcatgcggggcaaattctcccagtggcacaatcgttggcgagtttctaccaggctcagtcacggcagggcggaggaggaggagcttgctaggatgctcatcgaaagggacaatgaaactgcccttaacaaatatctctctcgtggaatcgatgtcgcccagaaactgctcgacctagtagacttgcgcaaggagattgacatggtgcaggtgatcctggcggtgtgggtggaaatgctgttctatgcgagctaccagtgcagcaaggagtcccatgccaagcagctgagccaggggggcgagttgacgaccatcgtgtggctcatggcagaacacgccggcctgttccttgtcaacaaaaccagaaagggagctgaagaggctaactggaggaaaaggaaagctaataagaaaaaagaggccggaacgtctgatgctacagttaacaagctaagttaacctcctccgtcattaattaattgcatgtcctcctgtttgattgcatagagttcttgttatcattctcctatttgattgcatagagtggcaagttataactttgtacgtgccaaaatagtttccatggattgcaatttgtaaacaaactcttgctcataccctaaggtaatataattgctcactactgtctgct

SEQ ID NO: 6383 - DNA, 2252 bp, Oryza sativa
  ref <308>: DATABASE ACCESSION NUMBER: AK063534
  ref <309>: DATABASE ENTRY DATE: 2001-12-06
acctgcagcgacccaacccgacccaacccaactcgcgcgagccctgcggtttcgccggcgaaacgaggccgacctaaaccctccgccgccgccgccgccgtcgccggggaagaagagagatgggggtggggggaagcttctgggacctgctcaagccgtacgcgcggcacgagggcgcggggtacctccgcggccgccgcgtcgccgtcgacctctccttctgggtcgtctcccacagcgccgccatccgggcgcgctcgccgcacgcgcgcctcccccatctccgcaccctcttcttccgcaccctctccctcttctccaagatgggtgcttttcctgtgttcgtggtggacggccagccgtcgccgctcaagtcgcaggtgagggccgcgcgattcttcagaggatctggaatggacctcgctgcgctgccgagcacggaggcggaggccagtgcggatgcgctggttcaaccgaggaatgccaagttcacgcgatacgtggaggattgcgtggaactgcttgaatatcttggaatgcctgtgctgcgggcaaaaggtgaaggtgaagctctttgtgctcagttgaataatcaaggccatgtagatgcttgcatcacttcagacagtgacgctttcctctttggggctaagactgtcataaaggttctccgatcgaattgtaaggaaccttttgagtgctacaacatggcagacattgagtctggtcttggactaaagaggaaacaaatggtagcaatggcacttcttgttggcagtgaccatgacttgcatggtgtgcctggttttggtcctgagactgcacttcggtttgtgcagttatttgatgaagataatgttctagctaaattatatgaaattggtaaaggggtctatccatttataggagttagtgcgcccaatattgatgatctcccatcaccctccacaaagagtctaccgcgtgcgcgatcaccgcactgctcacattgtggtcaccctggcaacaagaaaaatcatatcaaggatgggtgcaacttttgcttggttgattcattagagaattgtgtggagaagccagctggattcatatgtgaatgtcctagttgtgacaaggcacgtgatctgaaggtgcagagaagaaatgaaaactggcaaatcaaggtctgtaaaaggatagctgctgagactaactttccaaatgaggagatcattaacttgtacttgaatgatgacaatttggataatgaaaatggtgttccattgcttacatggaataaacctgatatggagattttggttgacttcttatctttcaagcagaactgggagccagcgtatattcgtcagcggatgcttcctatgctatcaaccatatatttacgcgaaatggcttcatctcaatctaaatcatttcttctttatgatcaatataaatttcattcaatccaacggattaagataagatatggtcacccatattatttggtcaagtggaagagagtcactcgtagtatgatatccaatgatccacctagcaagcagacagaattggaggggaagaatgataaggtggaggtattggatggagatgatgaggtagtagatgaagaggaggaggagcctacaatgatttccgaaactactgaactgctagatgagccagatgttccacaagtactggatgatgataaagattgctttttattaactgatgaagacattgagctagtgaatgctgcatttcctgatgaagcacaaagatttcaggaagaacagaggctgaaagaagcaaagtcaatagcacggaaatccaagctcaacgtggcaggtttcgaaacaccaaaaggtccaaggcctagtggagttcagcttagcatcaaggagttctaccgctccaagaaagggctgagtggcgactcagggaaggacggctcaagaaaatcctccgatgtggacctcagcaagaacttgcccaagtctgtccgacgacgcctcctcttcgactgactgacaattggtctcccttctgtcttcccagtagtcctgctgctactgttgtacatgttccagtaacatttctttcggccaatggatgtacattgcgtggcccggtttttgtacagggaacatgcatgtcttgtagctgatgagaaacagtgttttgggggttgaatcttgtatctgctgcaaccatgtatatttcatgccatatcgcatcactgcttgcgtagcatggaagaattggacctg

SEQ ID NO: 6384 - DNA, 1161 bp, Oryza sativa
  ref <308>: DATABASE ACCESSION NUMBER: AK063535
  ref <309>: DATABASE ENTRY DATE: 2001-12-06
acagccttaaaccctagctccgcctcccacctcccttttcttttctagggttcttccgccgccgccgccgccgccgccgattccgatggagttctggggtcttgaagtcaagcctggacagactgtcaaatgtgagcctgaagatgaacgctttttgcacctttctcaggctgctcttggggaatcaaagaaaggatctgacaatgcagtaatgtatgttaaaactgatgatcaaaagctagtcattggaaccctctcagctgacaagttccctcaaatccagtttgatttggtctttgacaaagagtttgagctgtcacacacttcaaagactgctagtgtgttcttttctggctacaaagtttcccagccggctgaggaagatgaaatggattttgattctgaagaagttgaagatgaagaggaggaagaaaagatcattccagctcccagggcaaatggcaaagttgaagggaaggaaaatgagcagaaaaaacaaggcaagacagattcttcagcttcaaaatcaaaggctgcagtgaatgacgatgatgatgatgatgacagtgatgaggatgattctgaggacgaagatctttctcctgaggatgatgatgatgattcttctgaggatgattccagcgaagatgatgaggatgagagtgacgaggaagatactcccaagaagccagagactggaaagaggaaagtagctgaaattgtgttgaagacaccttcgtctgataagaaagcaaagattgctacaccgtcaggccagaagacaggtgacaagaagggtgtccatgtagcaactccacatccggcaaagcaggctagcaagacccccgtgaatgacaagtcaaaggagaagtccccaaaatccggcggcggagctcgagccggccgggcgggaggccggcaaggcggcggatgaacggcacctgatctctgcgatgtggtttttttctgatctgtgcgatgtgtgcggtcgatctatgcgatgtggatttctttttctgatatgtgcggccgatctgagcgatgtggatttcttattctgatatgtgtgatgtgtgatgtgtgaatgattttgtggatatgattttgtgattttgtgaatgatttgtgatgtatttggggatagaaaatgcagcttgatgt

SEQ ID NO: 6385 - DNA, 1950 bp, Oryza sativa
  ref <308>: DATABASE ACCESSION NUMBER: AK063536
  ref <309>: DATABASE ENTRY DATE: 2001-12-06
aacacaacaggtacaaaactgcaaacaatggattcaatcgattagttctttgtcatagtttgaagagttccttgctatatatatactgtagcaattcaagttggacagactgttgctttaatgaaccatttatgttgagctgataatgttgttggccatggtagaacatcaaggccgtgtttgatactgccatcaaggtggtccttcagcctcctcggagaaggggggagacgacgatggcaaggaagaagacaaggcgaagcaccggctgctcgttaaagtaagagcacacctcaaaagccttagaattacatggttggatcttgtgagttgtgatcatggactagctattataatgtttgtgcctagtaaacatgagtgcgcatcattttctactttgtgaatgaaatagtatgaattatgcaatggctgatgtaactgttttttttttttttactgcaggaacttgatgtgtggcagtgcatgtgttgtttaggacctgtctgaattcttgaaggtgtgtaagcgttgtgtaatggcaagtgaatttgctgactgttctgctgcttccatttactactactaagctctttcgtgtgtttgaattactacatctagaactagagcatcaggctcatagactgacttcatatcaggtgtttgtatcattaatattattatgtaagaaggttgtggtttgtggaacaactaaatacaacaatgcaggctatgttgtagtatgctctgctactggtgtatgttataaatataaaattctgctacatacttttgtgcatcgagtcgccttttcttcttgtttcttgcacaatggcagatatcatttttttggtcagtttaaaaacgagaaacgcttataacctttttcaaaacaaggccagaaactatgattgagattataatgacatcgtttgacacaccacagtgcccacaaggctgttcaaactacgagctgtttattctgtatttctggcaacactaatgaaaccagagaaaacgcttctggatttctgcatcagctatgcgatgaaaccctttgaaatcagagcacctgcttcattttgtaaacatgcttttgagcttctcgttggcggataccagttcggcagcaacaccaacctcgttagcggagtgtcctgcatctggaaccatctgtatacggtagaagagattaattattgactcaatcaagtacgcatgaacaatattgcagtcggcagtaagcacattctatctacacagaaatcattcgaaatgcattttatctagcgaagtcagtagatcagggtatataaatttaaggtatacggtaatttgccaaaataaccgttgctcattgccaaaaacaatgagcaggcaacctaaatgagcagattactgtactcctatttgacacagttattttggcaatcatttacatgaaaagaatcatttaccttaaattctgcttcaggccatgctttatgaagatcccaggcagacatcataggacagcaaacatcataccggccctgcaacataaaaacaccgatcactatcaggtactacaatagtatcatctcacctgtataactctttgcacaaaacttacaaaatactccactttacagtaggagtagtagctataaaaagcatcaaggcctaatttgccagtcgagggaacaattatgaataatgccactttacagttccattgtcattatgcattgcattacagcacacaaaatccatgtcttcttggcatcctacatctacatgctagatcaaacatttggacacgacaatcaacatcaaatcagaggagctacagctaatctccaacatgagaattcgatcatgtttgctacaatctattatattattaaaacagctttgaaagaaggcaccacgttcgctggaggctagaaattctcacattaatcagagaaaaag

SEQ ID NO: 6386 - DNA, 1936 bp, Oryza sativa
  ref <308>: DATABASE ACCESSION NUMBER: AK063537
  ref <309>: DATABASE ENTRY DATE: 2001-12-06
catttggaaatttgtcaaagaaagatgctacccgatttgttcgagcggttaaaaaatttggaaacccaagccaaattgggttaatcgtggatgatgttggtggtgcaatagcaaagtcttcggttgatcaacagcttgagctgtttactctactcattgagggttgtcaagatgctgttaaaaataatatggatgccaagggcacagtgttggatttttttggtgtagcagttaaggcgcatgagttgatagcccgtgtggaagagctacagttcctggcaaggcgcattgcacgttacaaagatccagttagacaataccggatccaggcaccttacaaaaagccacagtggtcagcaagctgtggttggactgaaactgatgatgcaagattgatggttggaattcattggtatggctatggaaattgggagaagatacgattagatccaaaacttagcttgacagcgaaaattgcaccagcaacccttggtgaacgagagacgtttttaccgcgtgcaccgaacttggataatcgtgctagtgctcttctacaaaaggaatttgccaatcttcgtggtaagagctcgaaagccaagggaggtcctcgtcaagcaattgataatgaaagcaatggtggagctcgttcattaagaggccggcaaaaagacacaaaaataaaagaagataataattcaattaaagatgactttaagaaacgcaaggtggtggaacctgaagcaagggaagaaggtgaaatttcagaatctgaagcagagactaaatatcgtcaggacaaggaagaaaagtggctggaatggtgttctgaagttttggatgacgagcaggagatattaaagcggctggataggcttcagaatactagtgtaaatctgccaaaggaaaaggttctttcaagaattcggaaatacctccagataattggtaataaaattggagagatcgttgatcaacatagtgaatcatataagcaatcacgtatggcaatgaggttgtggaactatgtggcaaacttttcaagtatgtccggggagcaattgcacgacctctatttaaaacttagtcaggaccaaatggaagctggagtaggtccgtcacatggtgggaattttgcatcagtccctcccaacagggggcctaaatcaaatcagctccatccttccagaaaccaaaggtcaacaaggtctgtccagtacgtctctgagtctttcaacaatggtgaaaacactgggaattctgaagcctggaagcgacggagaagatctgagcctgataatcaatttgataaccaacctttgtatcaggctcctccaatcatgacaaatggaaacaggttacaggaatctagcagttctgctggtattcttggttgggctccggttgaaatgagacgatacggcaatgaaagaccaaaaagaggtgttcatcccagtcgttttccacccgggcatgggcctttgctgtagttgttcaagtgaacaatgttgtcacttaaagcagcatcgctccaaggaaatatcagcttctagcatgccgcacatgtaaaaatgggggaagaccgttcaattgaaattctttttgaagaaaaaaaaataatgaagtgctggaacctgatgtggaccacagttttgaatccgagtctaaaagaaatgccaggggttgctgaggagatgctggcacctttagcagatgtacacacacaagattcttctgacattgaaaaaaaaacttgaggcaagaggaagagtctagaaaattttgtcggtcagttttgtgatctaatagaagaatatttcagttgggatgttttaagaaagttcatctcagcaatgatctatatagttcaacatcaatacatgtatgatctttttaagttgcaatataatgaattatggtttagttgcccatttttact

SEQ ID NO: 6387 - DNA, 1705 bp, Oryza sativa
  ref <308>: DATABASE ACCESSION NUMBER: AK063538
  ref <309>: DATABASE ENTRY DATE: 2001-12-06
acaaaccgagctctcttctctctctccatccatggccgatcgtcgacgccgtcggtcgatctccccatccgtagctccacctcccctgtcctcgcgccaccggcttcgcctccatccggcgagtccgtttttcccctttcccctcttcctccacctctaagtcaagccaccaccgccatcatccatgccggctcgaggtgaacccttgccgccgccgttccggctatatatctctccctctcggccagccacctacctccccgggtgcgcgtcgctcgggaacacgcgtggccaccgccgtcaaggccgttcatccaccggagcatcggcgcccctcctctcccttctctctgtttgctcggctggaagagaaaaagaagcagaagaaggaaggaaggaggaagaagaaagagaaaagaagaagaaaagacaaataactgacaggtcttgaggattcttctgacacactagataatatcagtcaatctcaggacatcgagcaaggttaatggcagaaaggcatgagcgagaacatattgagacggtaatttctatccataataatgactacactgataagctaatcaagttaatgacgaagctaaagataagtgaacaaccggaattctattctcatgcttatcggaaggagatcattgggaatatgatatgaccataaagatcaacccacctaaaggagaagatgatatatactatttccggatgcgtcataggcgagacacgctataaactgttttatatgatgcatctagggaggctttcctatgcctccaccatatttatcaagacaagtttctgcattctcgatatttatttcatcctatgcgagaaccaggcgaagactattgcaccctccagaatagaccgtcatcaacaaccagtgaaggaaaccatgtctgtatggatgaaagctgctgatgacatgtatgaggaagccctagaacacatggatatgcaacacaaacgtttggaagatgctaagcgacaagaagctattcttaagtacaaatatcatatattacaagaattgtatgatgtgaaggataagcgaattctatatttaatatttgtattacgggcgcgtcattccgtcttcaccaagtccctgggatagatagtgatgatgacgatgatgatgatatggacggacatatctcaccggtatgtggggatgagccacaagggccaaatcctcaagataatggtgagggaattctacaaggcttaccatcatcgccgccattatatcctatccattccgaggatgaagctgaagaaacgctctcaactatggacattaatgagcctagtcaggagcttgaagtagcaaggggaacccggatgtttcatattaatgacctaaatgttcccccaatctggactgaaactccagaagaagaagatgatccagaagaacaagtgttcgagatgcaagaacatatttctatgtatgctgatgattaaggagatgatgaagatccttacccatgctctgcccctaatactgctgcatcttctgcacctcatcttgaatttttttttacacttcgcacttgcatcgttattcactaaccccgcggaaggtagtggtgagtgatttgatgattaggagttgtagatagtgtgttaatagttagaggtcatataaataaataaacttgctagtataggttagcaaatgacc

SEQ ID NO: 6388 - DNA, 2491 bp, Oryza sativa
  ref <308>: DATABASE ACCESSION NUMBER: AK063539
  ref <309>: DATABASE ENTRY DATE: 2001-12-06
aagttcttgtaccaaacctcgacgcgaacgtcctcgagcgaagggaggttctgcatgcccagatcgcgcagcccaagcctaagcccaccaccaccgccgccatcgccggcggcggcgaagtcccatgccctgaggctgaacgagagccgccgaaccctcggcatggcgcctcgcgggaacatggacggcgccgtcacgaagtgcaggagcgcgcacgccgccgcgcaggggaacgcgccggcgcgcaccgcgaaccgctccaccgccgggcgcgcgtctatccggccggtggcccgcagccggagagactggagggccggcagctccccgacgacgccgatgtcgccccgcctcacccgatccacccacacgtcgaggaaggcgaggcgcggcagaggcgagcagcgcacccacgccggcagcgccgagaacgcgctcgtgggcccgttcgacacgaaccggcggaggcacgccggaggcacccagccgtcgccgacgttaccgacgccgccgccgccaccgccgtaagcgtaaatctcgatgctctggatcccctgcagctcgccgagagcccccaccacagctctgcccgcgccgtgctccatctctccccactggagccggagcaccctgagcttcttcagacagcgaagctctctgacgacgccgtctgcagaatcacggcgaactctgagcccggtcatctcctccagcgacgtcagggttgcgagcccaccatttcttggtagcctggtgtcccaatcgaggcgaaggcacatcaattgcctcagcccggtgatcgcgggcggcaactcccgtatgccatgagctcctctgatgtccagcgtctgcaaaaccttcagatttccgatctctgtagggagctcagcgatgtatgttcgtcttagcccaagtacacgaagaacctgaaacagtgacagggatggcatcgaattaacaccaggtctgaacaaagtgaaggatctcacttgtgacatgctgcttgctgtagcctcttctgccattcttcaagtgttttggatggctaacctgcgaatcttattatcattcttatgttgccaagatgttctgtgctcactgtcatctattatagtaataaaattttcttcttttgatagggaaaggataaaatcaagcatcatatcatgcacgcgacaagcttgagctctgccttcaaagtcgatgccgactggctcaaccatgcttctgtttataagctcattgaagtaactctctccgacctcaaattagttgtcccaattattttcacattggacaaaatcttcagctatccacctccatattaaccgatctctctcaatttcataatcttctggaaatatacttagatacagtaaacatgtcttcagatgaggaggtaaatcatagtagctaaatgataatatcttctgcatatcatccacaccttcacctactgtgagtccccggccaatagaattgagcaaattgtgccattgatccttagtttttatgggcctattattattaccggccaacagactagctatagtgatgattgctaatggtaccccgtcacatttcttcaaaatgtctgtagatacttgtttcaattcatgaggacagttgttctcatgggtaaatatccttgtgtataagagcttcttggaatcatcatccgaaagacgtttcatttcataaatcttgtcatcacccgaagagcaacaagctttagagacattgattttgcgtgttgttgtgattattcgactgctgagattgttctcatataaaacacacttgatgaatttccacacattttcatcccagaggtcatcaattacaatgaggtacctacatttgtaacaaggcattaattgggtaaatcagtgaaatgtaggcctggtttagttcccaaaatttttttcccaaaaatgtcacatcgaatctttggacacatgcatgaaacattaaatatagataaaaacaaaactaattgcacagtttgcacggaaatcgcgagacgaatcttttgagcctaattagttcatgattagccataagtgctacagtaccccacatgtgctaatgacggcttaattaggcccaaaagatccgtcttgcggtttctgggcgagttatgaaattagttttttctttcgtgtccgaaaacaccttccaacatccaatcaaacatccgatgtgacacccaaatttttttttcacgaaataaacaaggctgtaactgttttatgaaagaaagcaaaatgattgtcagcactcctacattaataactaggtgaaacccacacgttattgcaggaatttactatgataacaataagtcgaaataatgtgtaagatagcttaaccaacataagcttacataaatattacataaacataagttttcataagttgatatgatttaaattaaaatgatttgtagaatgatgttcaaatgtaaagtaaaatgatgtgattttatgag

SEQ ID NO: 6389 - DNA, 3013 bp, Oryza sativa
  ref <308>: DATABASE ACCESSION NUMBER: AK063540
  ref <309>: DATABASE ENTRY DATE: 2001-12-06
cagaaaagatttcaagttctatggcatcgctttggagatatttttctccttcctaagttctgtgataatctttcagataatgataccgatatcactatacatcaccatggagttagtcagagtggggcagtcatactttatgattggagatacacggatgtatgacagtagttcaggttcaagatttcaatgccggtccttgaatatcaatgaagatctcggtcaaatacgttacatattttctgataaaacgggtaccttgacacaaaacaagatggagtttcatcaagccagcatctacgggaagaactatgggagccccttgcaggtcactggtgactcatcttatgaaataagcacaacagagtcatcgagacagcaaggcagtaagtccaagtcaggagtcaatgttgatgcagaactcatagcacttctgagtcaaccattggttggagaggaaagactttctgcccatgatttttttcttactttagctgcatgcaatacagtcattccagtcagcacagaaaattctctcgatttggttaatgaaataaatgagataggcagaattgattaccagggtgaatcacctgatgagcaggccttagtaactgcagcttctgcttatggatatacgcttgtggaaaggacaactggccacattgttgttgatgttcagggggagaagataaggctggatgttcttggtctccatgaatttgacagcgtgagaaaaaggatgtctgtcgttgtacgatttccagacaacattgtgaaggttcttgttaagggtgctgatacttcaatgcttagcattttgaggagagaagatgatgatgaacttcacaattctttgcatgctaaaattagagaaactacagaaaaccacttgtcaggttactcatcagagggtttacgaactttagtaattggttcaaagaacctgactgatgcagaatttggtgagtggcaagaaaggtatgaagaagccagcacctccatgacagagagatcagcaaagctccgacaggcggcagctcttgttgagtgcaatctgactcttcttggtgcaactggaattgaagataagttgcaggatggtgttcctgaggccattgagtctctccggcaggctggaatcaaggtttgggttctcaccggagataagcaagaaactgctatatcgattggtctgtcatgtagactattgactcaaaatatgcatttgattgttataaatggatcctcagagtttgagtgcaggcgccttctagctgatgctaaagccaaatttggaataaagtcatctgattctgggagggattgtcaagatatcgaacatacgcacaatggtgacgtttctaagttgaggacctctaatggtcacatgtctgaaagtggcatacataacttcgagctgactggagttattgcaagtgacaagtcagaatactctgagaaagtggcaaattttgctgacactgatctagcattggtaattgatgggagctccctggtgtatattttagagaaggatcttgaatcagagttgtttgatctggcgacttcctgtaaagttgttatctgctgccgtgttgctccactacaaaaggctggaattgttgatttgattaaaagcagaacaagtgacatgaccctggcaattggtgatggggcaaatgatgtttcaatgatacagatggcagatgttggtgttggaatatgtggtcaagaaggtcgtcaagcagtgatggcatcagattttgccatgggacagttccgctttctgaagagattacttcttgtacatggacactggaattatcagcgtattgcatacatgatcctctacaatttttaccgaaatgctgtttttgtgctaatgttgttctggtatatcttgcatacagcatattctgcaactcttgcattaacagattggagtagtgttttctattcccttatctatacgtcaattcccacagtggtagttggcattctggacaaggacttgagtcataatactctacttcattatccgagactatatgaaacagggcttcagaatgagggctacaacttgacgctcttctggatcacaatgctagataccttgtggcaaagccttgtccttttctatgttcccttcttcacatacaatatcagtacaatggacatatggagtatgggaagcttgtggacgattgctgtggttatacttgtcaatattcatctggccatggatatccaacgttgggtgcttataacccatcttgctgtatggggctctatagctgcaacatttttgtgcatggtgttaatagattctattccaatattccctaactatgggacaatatacaatatggctgcttcaagaacttattggcttagtgtttgccttataatagtcctaggcttgcttcctcggtttctttgcaaagtaatctatcagaccttttggccatctgatattcaaatagcaagagaagctgagttattaaaaaagctaccccggcagttgggttcaaggcctgcaagtgatatcagctgacaacaatggttcggcgcagttgctctgtgatcccagtttgcgggttatgttgattcaattgttgagctgatttttgcccatttttttgaagaggctgaaagatgagatgaggcggctgtggaaaaaggtactgactgtgaatgggtaggcaccagacagcgtcgtccttcgggggccaagtaatcaagaaatgacaaatgtacagatatgggaaagggatacatacactctgtattttaaggtagattttgtggttaggaaataaataggtacatagatacaaaattctttttgccaatcttttgtattacttgattatatgttaaccatttttctttttcttccctcctcgtcaaggttttagatggagacttagtggtgtgtccaaatggaattttacgctttacacggtcacaagattgatctcctttcgtgacctatattcatactcttgct

SEQ ID NO: 6390 - DNA, 1210 bp, Oryza sativa
  ref <308>: DATABASE ACCESSION NUMBER: AK063541
  ref <309>: DATABASE ENTRY DATE: 2001-12-06
cgcgtctccaccgcgatgcaccgcttcgcctccgcctcctccctcccgccgccggcgccggcgacggcggcggccgcggcggcgcaggctgcggctctcaggttcggctccgccgccaccactcgtgtcccccgagcgctagccctgaccgcctccacttgcccatggcaccgccgacacctctgctcctcctcctcctcctcctcgtcggcggcggctgcggctgctacggcggcggcggtggaggaggcgcggcaggggcggaagcagctgggcgcgacgacgcagctctacgagtacctcctcgccaacgtccgcgagcacccggttctcaaggagcttcgtgaggagacggcggccatgagagggagccaaatgcaggtttcacctgcgcaggctcagcttctagcaatgcttgcgcaaattcttggggctcaacgatgcattgaagtcggagtctatacaggatattcgtcgttagctgtagcactagctcttcctgaatcaggtcgtttggttgcttgtgagagggatgaaagatgcctagaagttgccaagaaatactatcagcgctctggtgttgcacacaaggttgatgtcaaacatgctttagctgcggattccctaaagttactaattgatggtggtgaggttaacagttatgactttgcattcgttgatgcagacaagagaatgtatgaggagtattatgaacttctacttaagctagtaagagttggtggtttgattgtaatagacaatgtcctttggtatggtagagttgctgatccactagtgaatgatcgaaagacaattagtataaggaacttcaacaagaaacttctggaggataatcgtgtcagcatcagcatggtgccaatcggggacgggatgacaatttgtcggaagctagtagatacctgactgaacaacatactctttctagatatggattttgggcgtgtgcctttttggcttctcgcgacattatcttcaaagggtatctatagaaggatgcaggtaatgatgttcgtggccttttgtgattctgttaagtttgggatatggaggttctgtctcggaatgagggggcaacaatactagtggcttcattcaggcggtacttgttactaattctttaagtccggggttaaatccctaagtctgaccttaattggttgtacttggcaatggatttctttctttcttg

SEQ ID NO: 6391 - DNA, 2059 bp, Oryza sativa
  ref <308>: DATABASE ACCESSION NUMBER: AK063542
  ref <309>: DATABASE ENTRY DATE: 2001-12-06
atggatgcatactacctcgtccgcctccatctccctccaccactccagcttccacccaccctgcctctacctcgaggccgccatgaccgccgcgtcggtggcgccgtcgcgtgccgcgccaccgccggcccagtgggcagccaagagcggccgtgggagtcctacgaccgcggcattcagcaccacgcaggctccgacctcgcctcctccctccgcctgctcgccgacatgcaggccgccgggctgcgccccagcggcgcggcgtacgcgcgcctcatccgggcgctcgcccgcgccggccggacgctcgaggccgaggcgctcctcctcgagatgcgccgcctcgggctccgcccggacgccgcgcactacaacgccctcctcgaggggctcctctccacggcgcacctccgcctcgccgaccgcctcctcctccagatggccgacgacggcgtcgcgcggaaccggcgcacgtacatgctgctgctgaacgcgtacgcccgggccggccgcctcgaggactcgtggtgggttctcggcgagatgaagcgccggggtattcggcttgacaccgccgggtacagcacgctggtgcggctgtacagggacaatggcatgtggaagaaggccaccgacctcatcatggagatgcaggagctcggggtggagctcgatgtcaagatttacaacgggttgatcgatacattcggcaagtatgggcagttagcggatgcacgcaaggtgttcgacaaaatgtgcgcagaaggggtcaagcctgatattactacatggaattctttgattcggtggcattgtcgtgtggggaatacgaaacgtgctctgcgattcttcgctgcaatgcaggaggaaggaatgtatccggatcctaaaatctttgttacaatcatcagcaggttgggggaacaggggaagtgggacgaaattaagaagctgtttcatggcatgaggaatcgagggctcaaggagagtggtgcagtgtatgcagttttggttgacatttatggacaatacggccattttcgtgatgcccatgactgtgtagctgctctcaaagctgagaatctgcagctttcacctagcatcttttgtgtcttggccaatgcatatgctcaacagggtttgtgtgaacaaactgtaaatgttcttcaattgatggaggcagaaggaattgagccaaatcttgttatgctgaatttgctaataaatgcttttggtactgctggaaggcatttggaggcacttgctgtactccagcatatcaaggatagcggtatgagcccagatgttgtgacttacacaacacttatgaaggctttcatgagagcaaagaaatttgaaaaggtgtcagaagtatataaggagatggagggtgctggttgtactcctgatagaaaagctagagaaatgctgaatgacgcctctattgtactggaacaaaggggaatgttacatttgtagccacccttttgaattccagggatggatgctttggcgggttatcgaaattggaatacctacaattctgaagtggctcaagcttcaatttctataacttgaagaataccatatcccttttttgcttgccatgctgaatgtctgaaacagatacgatatatagtaaacacaggtgagttttggcttgctcaggaatatatagacacttctgcagttctttttctccctcagtattgtaagatgtcactcaataaaatttctccaagcctccaattatctttttaatttgtttactgcagagtgtgccaaaaaagacagaaagcaacattatttagaaagagaaggttaggctcctttcaagaaaaagagagagagaaagttaggtcacaactttatggaacatatcaacgtttgaaatcttgtatagtttatcctacaactgtaagatgacctcttgctttaaacattgcaatagctcggctcctctattcgcttcagatttacctattactaaatttcatgggagaaaacaatgaggcatcaagccctcaatttatcttaagcatagaaataaggttctcat

SEQ ID NO: 6392 - DNA, 723 bp, Oryza sativa
  ref <308>: DATABASE ACCESSION NUMBER: AK063543
  ref <309>: DATABASE ENTRY DATE: 2001-12-06
ccattcggtgggcagcggcctgcgtcacgaggcagcgggggaggggtggctcggcggcggtgcggggtggcggtgctcggccacagcggcgcgcggggtggcgtcatggtggaggaagaggatgacgcgggcggcggatccggtgacggggaggcatgagggcggcggatccggcgatggggaggcacgaggcagcggatccggaggagacgtcagggcggcggatccagcgacagggagtgcgcgaggtggcggatccagcgacggatgtggcggcggcaactccatccggcggcggatccaccgcagccaagtccccgctcctccctcctccccttcccctgccgtcaccaccccctctccctttctcagatctggcacgcggggagtggtggaggctgcggcggggctctgcaacggcagtggcgaggcggaggcggtggaggccggtggggctcggcagcagcggcgtcgaggcggaggcggtggaggccgacagggctcggctgcagcggcgttgaggcagatccggcggtggtggttctcatcggccacttcaaggatgacgacggcaacctcgagtcgagtgcgacaacgccggcgacgggttcgcttgggccaacggcggccggcggatttttgtgatgatgatgtcttgtgatgcttcagctgttaatgtgttgatatttgtgacgctggaatgctatgttaatgtccattttc

SEQ ID NO: 6393 - DNA, 1274 bp, Oryza sativa
  ref <308>: DATABASE ACCESSION NUMBER: AK063544
  ref <309>: DATABASE ENTRY DATE: 2001-12-06
gatcggttcttggcagccgtagtgcagttttgtgcagttttcttctctcttgttgttgaggatgaagtttgggaagagcctgagtagccagatcgtggagacgctcccggagtggcgggacaagttcttgtcgtacaaggatctcaagaagcggctcaagctgattggtgggggtgggggtggggaggagaggcaggcgaagcgggcacgcgttgcagcggatggcggcgaggaggaggccgccgccgcggcgatgacgcccgaggaggcgggcttcatgcggctcctggaggccgagctcgacaagttcaactccttcttcgtcgagaaggaggaggaatacatcatccgccagaaggagctgcaggacagggtggcgagggcggcggggagggagtcgaaggaggagctgatgcgggtgcgcaaggagatcgtcgacttccatggcgagatggtgctgctcgagaactacagcgccctcaactacaccggattagttaagattctcaagaagtatgacaagaggactggggctctgatccgtctgcctttcatccagaaagtgctacagcagcctttcttcaccactgacctcctgtacaagcttgtgaaacagtgtgaggccatgctggaccagcttctaccatcaaacgaactgtctgtatcgagtgaagatgggagaggcgatagcactaacgaggacaagccttcgaatcccagttcatctttggttaatggtggcactattccagagttagatgagatcgagtacatggaaagcatgtatatgaagggcacggtcgcggcgcttaggtctctgaaggagatccgaagcggaagctctactgttagtgcattctcattaccacctctccagggcgacagttcgccagaggagcagcaggaactgtggaataagattccggtgattgagcaggccgccaaatgacacgaccggcatttcactacatggttatgtacactgcatgaccttgatcttgacatttgctggagatagtaccggggatctcattcccctgtcatatattcagtaatttgtatgattccaggattcctaacagttgtaaaatggtggacatgttcagtatacattgtaaaatcatagaaacccatcataaccatcagacagaactgagatgttttgattcactattgtgagttaaatcctgtactttttgctgatctacatcctctttcatgaactctcggtacagaattagttaatgttgcagtataacaattctgattttgac

SEQ ID NO: 6394 - DNA, 1853 bp, Oryza sativa
  ref <308>: DATABASE ACCESSION NUMBER: AK063545
  ref <309>: DATABASE ENTRY DATE: 2001-12-06
aaaagaaaaagaaatctctcgttgtctccgctccttgcgccgccgccaagacgagtcgcggctgaacaggggagggccgggcggcgatctccatcgcagcggaggggaggggaggggatcctgaattgcaggcgtagtctggtcgtcgtggcggtgaggtgagggggtgacggcgatggccaacagcgagtacgagtacgtgaagagggagttcgagctcgacagcctcctcccgccctctaattggatcgttgtgcgcatcgacggctgccacttccaccgattctccaagatacatacctttgagaaaccaaatgatgagcgtgctttaagattgatgaacgcctgtgccacttctatgctcgaaaagttcccagacatagtcttcgcatatggcgtcagtgatgagtacagttttgtttttagagaggaaactgaattctatcaaagacgagaaagtaaaattctatctttatgtgtttcctacttcacttctgtgtacgtgatgaagtggaaagatttctttcctaataaggagttgaaggagcctccatattttgatggtcgagttgtatgctatccaaacttgaagactatccgtgattacctggcctggagacaagtggattgtcatataaacaatcaatataacacctgcttctggtcgttagtgaagtctgggaaaactgaaaaagaagctcaacaagcattgaaggggacattttcaaaggacaagaatgagttactttcacaacagttccaaatcaattatgatgatgaaccggctatattccgaaaagggtcttgcgtttaccgagacaaggtagaaacaatggtgaagactgatcgttgtggaaaccccataaaaaggacacgcttagttattacaaatgcaaatgtcgatatcataggacccgagttttgggaaaatcatccatatattcttcgagaagaaaaatgtaggtatgagaatgttaagaagtttgacatcaaccataggcttccaccttgtaattggactgtcgttcgcatcgacatttgtaaatttgagcaattctcgttgatccattcatttgacaagccaaatgatgaggcagctctaaggttgatgaatgcttctgcttctttgatgatggagtcattccctgacattgtctttggctatggttttagcaatgagtacagttttgtgttccaggataagactgaactataccagcgtcaggaaagcttaatcctttcatcatgtacctcacgtttcaccttgttttacatgatgaagtggaaagattttttccccaacaaggacttagtggagccaccgcactttgaggcagaacttctatgttacccaaaacaaaagatactttgtgattatttgtcatcgagacaagcagaatgccacaccaccaaccaatacagcacatgcttttggatgctagtgaaatctggcaaaagtgaaaacgaagctcgtgagatattaaagggaacattatcaaaggacaagaacgagttgcttttccagcaatttcatttgaattacaacaatgaaccagctgtgtttcggaagggttcatgtacttaccggcaaaaggtggaagaatctgcagacgcagagggtagagaaaataccacaagagaacggtgggatgtgattgtggcacacgcagacatggggacggaattttggagaaagcatccttatattttaagaaaattggatttactaggctgataaaattttctcatcaaccttttccacattatcttttcgttgttgtagtgttgtatatgcattgtccacactagtagaaaaatggctggcctctcttcattggccattcatctcgttc

SEQ ID NO: 6395 - DNA, 1730 bp, Oryza sativa
  ref <308>: DATABASE ACCESSION NUMBER: AK063546
  ref <309>: DATABASE ENTRY DATE: 2001-12-06
gaatgcgccactcagagcatccacggagaaccacttgccatccctcttgatctgcagaccctgaacatcgttcacctggagcagcagcgtcaggccaaccacatcggtgtgcggcgacaggccaattacctttgtcagattgccggcatggtgggtagtagttcatcctcattcctcgaggctgctcttcaaagatgcctaacagcgactctggctcagcacccacggccttagccaggaactcaaacaagcagagcgacaggcttttagtctccgatgagtattgatcaagggattgcctaattttcagagatctctggttaacaagtggcagaggatgcttatcagaaggtaagttgcacaacttttggtagatcacctgaaagatgcagggtgactggccaaaatctcaagtcccttgaatcggtaggatggacttgaaggtacaacatgtctccccagtctagtttctggtcctcagagaaaacaaaggtctgtccatagccttcaaggctgttgggcagctgtgagtactccttcttggcatccagtggcaggctgaagaactcaataatgttgctcctgaagttttcaatcacttcctctggcactccatggttgatgagctgtagttttgttccacaaatcaaaaccaagataaaattatgctctggagactggcatcagatgacagcagcaaactggtaaatgaagcatttgctcacctgaatgtggaaggctttgtaggccagaaatccattgctcctttcctcaactggccgtgtgacgaggaacagcaaatctgcccagtccagcttctgctcctttggaaagaaaaagtggtggccaaacccctgcaagccattgggtgggatcgccacggccttctcctgcagagggagtctgaagaattccgtgatgtcagccttgatctgttgcagcaaccctgcatccaccccatggttcacaagctgcaaaaattgcacatttctgaagatcacttgctgttgctgcagtcaaattgatgtggaaagtcctcgctattgcagagtaaaaacagttggtgccttctttttttacttgaactgaatcagttattatgtgagttcaattccattatagaaaaaaaaatgtatgtgagatcagagagaacacatacatggaagtatccccaatcctcacatgcagatccaagcttcgcgatctcctcctcagagaagtcaggatttttttttttgactaaatcaccgggggggagagcttccccacctgaattttgtcattacaagaaaggagtgaaaaggttcattacatcaggtttagagatcttaagggggaggtgaaaatgtttttccaagcagaaattacatgtctatcctctatttttaaattttctgcccagagggctgcttcattgatgcatctttgtaggcagcatcgaatcgatggagtttgccccctgaagacgacatcatgccgatgattccagatcgcccacatacagagcaagaagaagacatgatgatggagctccgggacattgggagaaggtttaagctggtgtagtagccacacatcctgaattgtcggattcaccctaatccgttcccagaaactctgcacaaaaggacatgtaaaacacatatgatctgccgtttcatccccttgttgacagacatcgcaaaccccattttgaactatctttttcttcagcaagttttgttttgttg

SEQ ID NO: 6396 - DNA, 1483 bp, Oryza sativa
  ref <308>: DATABASE ACCESSION NUMBER: AK063547
  ref <309>: DATABASE ENTRY DATE: 2001-12-06
aggcgaagccaaacccacataacgaacgcagcgctccctgcgaaagctgagaggagagctccggaggaaatggagcagcttgtgggagttcaccaccaccattcttcttcctcctccctctccccgcggactccatctccaacccacccactcccgcatctcctgcgcctcccttccagctccaaccggctccgcccaccggatcacccccactcctctcatcctgtctccaagctcctccgcgtcacccctcccttcttccttgtcctcctcgccgccgtctacctcctcgcctccttcactatcttctcctctcccgctgcctcgctccgccccaccaagaaccgccccaagctcctcctccccatgcccgccccctctccccctccccccgacctctttgagctccacggtggcaggatccgggcctggatcaccaatgtcggcgccaccgtcacctcgctcctggtcccagataacaatggggttcttggtgatgtggtgcttggattcgattccctggatccttatcaggagaaatgcagcacatttaatgatgcatgcctgaataacttgaagctggttactagtactagtaattacggttggagaatggcacttcaccttattttggctgcattgttgggcgagttgcaaataggatcaaggatgggaagtttactttaaatgataagcagtatagtctggctatcaacaaccctccaaacactcttcatggtggatttaaaggttttgacaaaatcatctgggaagttgctgaatatgtcaaaggggagaacccatcaatcaccttcaaatattacagtaaagatggagaggaaggtttcccaggagatgtttctgtcaccgctagatattctattctggcaagtacgacactgaagttggagatggaggctatacctttgaataaggccacacccatcagtttagcacagcacacctactggaacctggcaggccacaactcaggagatgtgcttgcacatactgttcagattttggggtctcagataacaccggtagatgaaacctcaatacccaccggtgagatgatgccagttagtggctcacccttcaatttcctgacagagaccacaattggcagcaggattgatcaagtccctggtggctatgatcacaactttgtgattgattgtggtgaagtgaagtcaggtttgtgccatgtggcgaaagtgacagacccttcaagctccagggtccttgacatttgggcagatgcacctggagtgcagttctacactggaaatttcctcaatggcattgtgggcaaaggaggcgcagtctatgggaagcacgccggcctgtgtcttgagacccaaggtttcccaaacgcagtgaaccaacctaattttccctcggtggtcgttcagcctggtgagaagtatagtcatacgatgttgtttgagttttcaacaaaatgatccagttcttgtaggcc

SEQ ID NO: 6397 - DNA, 1418 bp, Oryza sativa
  ref <308>: DATABASE ACCESSION NUMBER: AK063548
  ref <309>: DATABASE ENTRY DATE: 2001-12-06
tgggatgtgtgcagtgttgaggatgactagcgaccagcaacgatgccacatctccaaagctcccgatcacatccgaagcagcaacccggagcattacaagccactggccttccccgtcggcccttaccatgcccgctccggcgtgccggcgccggagaaggcccagaggctgaaggagcaatgcgtcgacgaggtcgtccagctgagcggcaggagccgccacgacttgctcgagcagatgaggagcgtgctggatcgagcaaaggagtactacgccgacgagatcggcatggacgacgaggcgctggcgcagatgctcctcctcgacggctgcttcgtcctcgtctcgctccgcgggacggagcggctcaagcagctgactccaggatggaaggcggaggagagtacggagagcttgttgtcggagaactcggacgatcgttgctccgattgctcggatcagcagggcgacgaggagaatcagccacccgccgccgaccacgtccaccatctgcttcacctcagccacatgtacctgagaccaaggacccggcgccagagctcgcgttggagcggcggcggcggcgcgaccgtgggccggctgcgccgcgcgacgcagctccgcgagctcatggtgcggctcaagaagctggagatcggaggcaaggcggctccggcgggcagcatcctggacgtggcgttccacggcggcgtgctggagatcccgcggctggagatcgacggcggcacgtggaggcagatggcgaacctcatcctgctggagcaagggagcccgcacgtggggctctacgtcacggcgtactgcgccttcatgtcgcagctcgccggcaccgccgaggacgtggcgctgctctgcgagtccggggtcatcgagcaccagctcggcggcgacggcgacgtcgccgacgggctcaggaggctctgcgacggcatcatcttcgacgccgacgacgacgcatacaactacctcaggccggtgtaccgggcggtcgaggagcactgccgcagccgcacgctgaggctgctctgctgggtgcgaggacacgccaactgccccaacccatggctgcttctcggcatcgttgccatcatcactctgctttgcttcatcgtgcagcagctgcagcacgccactctgaggaagaacgcaacttaggatgagaaataattaacggatccgccacgtttgttcaccgcgcgctagctacgagcacggtaagcagttcgctaatctcctaccattcgtactcctaatctcctatcagtgtttatggcatcctcaagattcctatcaagattcttatcaagagctttcggtgttttgttagtgtaacatgcagtacgtgtgatatgtgccatgttatatttgtgtttatgtaaaacagaataattgtctc

SEQ ID NO: 6398 - DNA, 1474 bp, Oryza sativa
  ref <308>: DATABASE ACCESSION NUMBER: AK063549
  ref <309>: DATABASE ENTRY DATE: 2001-12-06
ctctctcgatactcgattcgatagtgacaagaggaaaagcgcggctctctccgtctccggcggcggtgacgcgaggaggaggaggaggaggagcccgcgccgccgggccaagccatcatggacgaggagcagctgcgcgcgctgctccgcgacctggacgcgctcaagcagcgccccgaccccgccgccatcgatcggatgcgagagcgcgtggcgggaatggtgaccccggccgccgctgcacggtccaagatcaaggatatgagctcggaggtggtggacagcaatccctacagcaggctcatggcgctgcagcgtatggggatcgtggacaactacgagcgcatccgtgattactccatcgccatcgttggtataggtggcgttggtagtgttgctgctgagatgctcactagatgtggcattggtcgccttttgttgtatgactatgatacagttgaactggccaacatgaataggttgttctttcgcccagaccaggttggaatgaccaagacagatgctgctgtgcagacactatctggaataaatcctgatgttacgttggagagctattcattaaatattactacagtgaaaggatttgaaacatttttaggaagtctcaaagccagaagctctgatgggcgtaacactggagttgatcttgttttgagctgcgttgataactatgaagctcgtatggttgtaaaccaggcatgcaatgaacttggccagacatggatggagtctggtgtctcagaagatgctgtttctggtcatatacagttgctggttcctggtgaaacagcatgttttgcatgtgctcctccattggttgttgcatccggagtggatgagcgcacattaaagcgggaaggtgtttgtgctgcctctttaccaactacaatgggtgttgttgctggtctccttgtccagaatgctctgaaatatttgttgaagtttggacaagtttccccttacttgggatataattcacttaaggattatttcccaacaatggaaatgaaaccaaatccacagtgttcaaatccagcatgtgttcagagacagaaagaatatatgcagtcaaaacctgctagagatgcagcagcaaaagctaagatggaagctgaagcatcagcagcagatgaatgtccggtccatctagataatgattggaatattagattcagttgccatactaatggagctgacaagatagttgacttggatagaactttgtaccccatgctcaagcccacatcatttcttaagcaccctgcttgcaggattgcatgtgtttgaaaatgtttcatgctaaattttagctactcattattgtaggattcagaaactactaggctagggttgcactttggtgctaattgtaacttcattctctttttctgttgtactgcatcttgacatgcttgatgaataaaaatgtggcttttgtagaattgctaacttc

SEQ ID NO: 6399 - DNA, 1627 bp, Oryza sativa
  ref <308>: DATABASE ACCESSION NUMBER: AK063550
  ref <309>: DATABASE ENTRY DATE: 2001-12-06
atttcactatcatttccccaatctccacctcacctgagccgtcgccggagctccggcgaacccacggcggcgggcgggcgggcccgagcttcgcagatgagtggcgtgaggagggcagcggggcggcccaagatcggcgacctcgcgaccagcgacgtggtggtgcggctgcggacgccggagggccgcgacgagtggctctactgccactccggcgtgctcgccgccgggagcaggtacttcgccgaccgcctctccgacgactggcccacgtgccagatcctcggctcccgctactgcgtcgaggtccactgccaggagctggacctcagcccccacgtcaccgcgctccgcctcctctacgccgccgagccgtgctcccgcttcggcgtccgcggcgcgctcggcgtcctccaggccgccgcccacctcgcctgcccgcgcgtcgccgccgcctgcgtcgactacctggagtccgcgccgtgggacgaggccgacgaggaggagatcctcaggaccatcccttgcctcggcccccagtacgagtgcgtcctcgcgcggctccgcccgatcgatcccgcgccggtggccggcatcctcctctcggcgttccggcacgcgacgtcgacgcgctcgccgccgcaggagctcaagtccgcggctcaggagcagctggagtacatgctcaccgaagacgacgacgcgccattgttagccttcgatgatgacattgtcaggtctcaagtgaaggattgtgttgcagctttgctgagcaggttcagtgggttcacgagttcaatcctgatggaacagggagaggcgcctttaggccacggcgacgccgaggttcagcaggagctgcattctcttgtttcagatatctcctgggtctgtcagatcttgagcaagctggagatgatgaaatgtgttgttgtttactggattggggtttcatccgatgtcgttgaagctgtcgacaaagcttgtgggggaatcagctgcctgaagactagattgaaggtgattgaggtgtctgcaaaggtcctggaggcgattgcatttggcaacattgttctcccaaccgagaaacgttgtgatgctgtcaatgtttggattggctttgcaaggagaacaaagcctttggtcggacatcccgaacacgatgacgatgacggtgatgctgaagcacctaagatcaacctagacagtgaggtctggcagagcctggaatcagctattgtttcaattgtgctaacgctaccgtcgaacagtcaagctgacattttgtcagattggcttcagtcgaagcatgctaagtatccagacttgacggaggcgtttgaagtgtggtgttatagatcaaaggctgctaagagaagactctccttcttgagccatgccaatagggtatcttgattcttcacttgtccttcaaaatcaaacacaggggaaatgtcctggctgtttgtactcactacaggcagcacagagtgcctttgaccgacatcaaatatcatgaaattccaatttgtccttccttttatcactgttgtcatcggagttgcttgagtatatcactgttgtctaaaatgatagataaacaagatgccataacagtttggttgac

SEQ ID NO: 6400 - DNA, 1716 bp, Oryza sativa
  ref <308>: DATABASE ACCESSION NUMBER: AK063551
  ref <309>: DATABASE ENTRY DATE: 2001-12-06
aaaaggcaaatcccacccatcctcgtcttcttccaggccccgcttccgccacctcctccgttcccgccggctcgccgccgccgcctctcccagccgcttcccctcgccgccgcagcctcctatcctccctagtccatcaccgcgcctccttctccacctcctcctccagttgcgggggcttgcggcccgcctcgtcatccccgcgcgcagccactccccccttctccgccattctatggcgacgaacatggttctccttccttgccacgcccttcggataacaccttccggagcatccgcatttgcgtcgtcgccattatctgctcgtccaagaccaatatttgcttcttccctcggcggccgctgctccgcttgtcggactccgccgcccgccgccgccgccgcttgcagggttgctgctgcttcttgggccggtgacctcggaagagcggtgccatggaaggccgcggtctccagcgcgcttgccgtcgccttgtccttcacttgctaatctcgcacatgcagttgttggtatagttaatgcaaagactggggtcaacaaacccgaattgcttcccaaggaattcaccaccgtcattgatgttgctggttttctctccccaggaaaaccgtctgcgtcaagaaatagaagatcttgagaaagatacaggatacaagttgagagttcttgcacaaaattatcctgatacaccagggttggctatcaaagatttttggcaagttgatgaccagacaatcgtgtttgtcgccgatcccaccttcggaaacattataaatttcaatgttggtgcattagttgatttagacattcctcggagcttttggagtcgtgtttcagggaagtacggaaacatgttcttctggaaagaaaaggtaacattttgttattcaatctagcagttaacaataaattacatattcatagtgatgttttttttttgtcctcctgattctacaattagaagagcactaaaatatgatcattagcaatggaaacagcacaaacttttaaaaccatccaatagaaactatcctgcagttacctttcaaataacaaaattcctccgactgatcaggttctctctttttgtgcttcagattttccttccttgtctaagctggtttcaatgtctgaatattttgaacaacaatgtaaattgttagcaaaaatatagtaagctcaagttttttttggacaaaattttatgttttgccctgtgaaattgtggataaccatgccagtccctgcttggaaactctcttctagtttctatatatgttgtccacaccattgccttcttgaaacatggaacagggggaggatgcatcaattgaagctgctgtgatggccgtatcacgctgtctgagagagcccactggggcaaataactgctctgaggttctgtagatgtgaagacaagcaagtgcaacatatgtatagaagcgaaaaaaaaagtccaagagctatactaaatagtacgaggccaaggaccattcaggtttcttttttcagttgtacacataaactcatcattttgactaattctgattttttagcaaggatgaagtctctcttgttaatagatgcgaactactttgagatttagggcctgttcactttgatgccaaaaaaaaaaacctatgttgctaaaattttggcaagataattattttgaatgtgttcactttgttgct

SEQ ID NO: 6401 - DNA, 1941 bp, Oryza sativa
  ref <308>: DATABASE ACCESSION NUMBER: AK063552
  ref <309>: DATABASE ENTRY DATE: 2001-12-06
tggctgaccaaccctgtagtactccacgtctctatggcgtgtctctagttctataccctcctctgcggctgccacgtgggccccacaccacgagcggcgcgcctaggccgcctagctatactactactcctagtcctactacaaagcagagcactgagcacgccgtcgcggctcaagcttagctagtactactccagtagtaactgccgcttccctttccccgttcgccgcatggcaccggccgccggtgagcccagtgcagccgcgggcggcggggagggagacaccgaggcgcatgcggtgatcgacgtcagcagcagcgaaaccgactccgaccccgaccccggcttcggcggcgccgggaagaggccgcggcgtgtggtggcaacggctggcagtggccgggaggcggagaagagggctaggattctggccgccgccgttccaccgggattcctcgatccgctaccgcggccttctgcccctcctcctcctcctcctcctccgcgcgggaggaggagggtgacgaggcagttctggaatgccggggactacgacggcaagccggacctgctcggcggcgacccttcgctgcgatccgattcgggaatggaccacattcgcgtccatccaagatttctacactcaaatgcaacgagccacaagtgggcactgggggctttcgcggagcttcttgacaactctctggacgaagttgcgaatggagctacttatgtgaacattgacatgttggagaataagaaagatggaactcgaatggtgtctgtggaagatgatggtggtgggatggacccagataaaatgtggcattgtatgtctttgggttattcagcaaagagcaaggtgaaagataccattggacaatatggaaatggtttcaagacaagtacaatgcgactcggtgctgatgtattagtcttatcacgtagttgtggtaatggcggaagaaggcgcacacaaagtattggcatgctatcttacacattcctgagagagaccaggaaagatgatattattgttccaatgattgattatgaaaagggacaacaatattggaaaaggatgatgaggacaacatcgattgactggcagacaagcttagcaacgataatagaatggtccccttattccagtgaagcagaacttcttcaagaggtttatgttatgttatgttgtatttatattattttattttattggttctaaatgcggatatagctgtgttttgaatgtgttcggaatagcttgttcattgtttgcagaataaaggaaagggcacagctttgcaaacaaaaacatacattaccattgtagtaaaaccaagttactgttagattacgcgacacattgttgaacctggcatatcataaaaataaagtactgatcgttgttgctgatgtctcttcttttcttggcttagttccttaaatgattttttttctctgtactttgttaccgttgtcctcatcttcttttctgtgtgtctagtggctttataatagtacagtttagctcaatcaaggaacaagggactcggattattatatacaatctatgggagaatgaacagggagagttggagcttgattttgatactgatgtaaatgtgagtgccaactaataattaatgaagtcatttagccagcaacagaaaatgtggttaaatatgaaatttagtgatgtttgagatggcaggatattcaaattagaggtggtaaccgagatcagaaaaatatccagctggcaaagcagtttccaaactccagacatttttttacttatagacattcactgcaggtaggttccagttttactttgtctgtttgtgccaaagcaatgctctgaatgcttttttttttcttttttcctgaggaggcctctgcagttaatgtatcaaaagaaaaaggaaattttagtttc

SEQ ID NO: 6402 - DNA, 1403 bp, Oryza sativa
  ref <308>: DATABASE ACCESSION NUMBER: AK063553
  ref <309>: DATABASE ENTRY DATE: 2001-12-06
gttacgctttccccttcctccttccgcctcccacccacccaaaacctaaccccaaaaatcccccaatctctctcgcctgctcgatcccccaatccatggagttcgccgtccctgtcccccagcaggtctccagcctggcgctgccggtggtggtggcggaggcggaggcggccgccgccgccgctgctgctccggggaggaggggggcagcgggcggcgtgagctcgataccgaagggcgctggggctgccgcgaggaggaagacgctgtgcgacatcaccaacctgaggccgcggccggcggcggccgtggagcaggacggggcgacgtgtgccgcggacgcgggcggagtcgcgcaggcgcagcttgtcaaggagaactcggaacttgtgaggctcctcgaggagagggacaagatcatagagttgagtgggacagagttgcagaagttgcggctcgctaactggcagctcgcgcaggcaaattcccagatgctggcagagctcaaccttgggagagataggctaaaaaagctgcaacatcaactcgcttgctcgagagctgttatcgcaacaaaaacatcagaattggaggaggccaagaaggcgatgaagcgcaataggaacctgccactgccagagaaggctcctcctgcaagcgaaacggcgcagcagcagcagggttctgatagagcggcacagatcaaggatggagatgtcgtcaatccagagcccgccgcggcttcagacgcatcgcatgcggcaagcaccaagaaactcagcaacgccagcaggaaacggatgcaaagatctcgatctctaggaccagctgcaacgacgaaactagcagcgacaccaaaggagaaggagaatgtgcagagaaggaagtccatgagaacaccggtaccacagccgagcgagcatagggaggacctgttcgagatcgaggacctccagctcgcgatcggcggcggtggcggcggcggcgacagcaaggccgggaccagtgaccctcctgagcaagcggcggtggcggtggcggcggctcagttcccgcggaggtcgtcgctggggaggccgatcaggagggccacggagagggtggcctcctacaaggagatgcctgtcaacattaagctcaggaggtcctagcctagcatcctctcctaaggccagaatgtcttatagtctgatagagctgcgtgctgcaatgattctttgcagtttagttagttagtgtagcatgtcattttgtttgttggaatggttgttggattgaattcttgatgtaccatgtgtgtattctgagctgtgacacatttatttacggttaagagggggtgctgtgtgtgaagaattgctcgggatctgaccaatttggaaatgaaattatgattaagatgc

SEQ ID NO: 6403 - DNA, 2407 bp, Oryza sativa
  ref <308>: DATABASE ACCESSION NUMBER: AK063554
  ref <309>: DATABASE ENTRY DATE: 2001-12-06
atatatgatcagttatttagttgatcaccggccactcttcttcctgatctgcagagctgcagtctcagtctgtcctgccgtccatacagcaacagcaacgcaggactacaggagaggtcgtagcactctcggtttgtgccgattggatccagaaaattcaagatccaaatttaatccggaagcgagacaatgtcagtgagccatggcgaggagctcgagatatcgccgtgcgacccgaactccgaggatgaccggcggcggcgcgggatggggtcgtcgctgcggcggaaggccatccgcgcgctccggaagcgcggcgggcggcggcggcgccgccgcgtcgacttccggtacccggccgccatgtccatcgaggacgtccgcgacgccgaggaggagctcgccgtcgccgcgttccgcgaccgcctcgccgtgcacgccctcctccccgacaagcacgacgactaccacatgatgctcaggtttctgaaggcaagaaagtttgattcggagaaggcgatgcaaatgtgggcggagatgctgcgatggaggaaggagttcggagccgacacgatcttggaggagttcgagttcgatgagctcgacgacgtgctccggtactaccctcagggctaccatggcgtcgatcgggaaggccggccggtgtacatcgagaggctcggcaaggtgtatcccaacaagctgatgcagatcacctcggtggacaggtacatcaagtaccatgtgcaggagttcgagagggctttcagggagaggttccctgcctgcacattggcggccaagaggcacattgattccacaaccaccatactggatgtccatggcgtggggctgaagaatttctcaaagactgcaagggagcttgttcaccggatgcagaagatagatagtgattactatcctgagacattacatcagatgtatgtagtgaatgctggcagtggcttcaagctgatatggaacagtgtgaaagggtttcttgacccaaaaacttcttcaaagattcatgttcttggtacaaactaccagagtagacttcttgaagtaattgacaaaagtgaattgccagagtttcttggcggttcatgtacatgcagtgaaggtggttgccttggttctaacaaagggccgtggaatgatcatgtcattttgaagctgatacacagtatgaggagcaatagtagtatgagggaaatcaagcaagtttctgatagcgaagacaggagcggatcttccctaagggcagaaaaattgaaggggatgatgagtgatatatcaaatgctgaatcagagtcagatgttgatgagttcagtttatcagctgtcctgaggagtactgactacagtttccttactccagttagcgaagaagttaagggatcagattcttcaactttctgtagttgtgagtcttgtgacaggaagggtctcccagatgtaactcctgaatcttctcagtctgtacaacaatcttctgaaatggtgccaaaccaactggtctctcatgaacattcatccacaaccagatggatgaataatttagggaacatggcaattagttttcatggcactctgactggaaggactttgagcaatttcgttagagtagtaggcacactcatgatcaagatactagccgttttcagcctttttgtcagtagaagaggaaacatgctagagaatgttcatccttctaatgtagaagatgaacctcagcctcgaagtgcaacggaagataacatgagtgcttgtttacaacgtcttgaaaaacttgaatcattatgcaatcatctcatgagcaaacctccagatatgccaaaggagaaagagtgtctactgctacaatcgtttgatcggataaaaaccatcgaatcggatctagaaaggactaaaagagtattgcatatgaccctggtcaagcagatggagatgatggagaccttggaagctatgcaacatcactaccaatcttccagtgtcaggaggagattgtgctgttcataagtaaaagactgctcttgtctggctggccttgagcgaccatgaagactgaagctgtagcctgaaaaccttctgcaagtgccatttttgactcggagatcttcagccctgtgcagaggaaagatcatcgctcgctcagctctgtcgctggcttgctgcatcgcagcttgtgaatccgttttggtagctgttaatctcaacaataatcccttttttgcctccctgaacattaccaatagcaagatcagtgatgcatctgtcagctgctgtagctctctgctctgaattggaggattgaagggagaatctgttgttacattgtctgaatttttgtgatccatatgctgaaaggacgtttcatggcggctgtgcttcttcctttgct

SEQ ID NO: 6404 - DNA, 1597 bp, Oryza sativa
  ref <308>: DATABASE ACCESSION NUMBER: AK063555
  ref <309>: DATABASE ENTRY DATE: 2001-12-06
aactcgaaagcgagagcgccaaacaaatcgaacgcccatttccccaacgcctcgcgccacccgcgccgatccgttcgcctccgccgccgccgcggccgcctcgcgggctccccggcgacccccccgctcgttcccgtgccgtgccgtgccgtgtcggcgtgtgcccccgccctgcctgacctgtcgtcggttggatcggaggtccaatgcctcttttcaagaggaaacctttctccttacttgagccccccaaggacttggattctaaggagaaggttttccaaattcggttcacaagggagatattccgagattaccaagactacataaacaggttgaatctttatcggcaaagggtttggtcatgtaagatatccggaaaatcaaacttgacttttgaagaagctttggtctccgagcatcatgcagtgtcaaaggctcagaaattacccacagaactgatggctcctgttcttcggatgattcaatacagcactcttggattatatgagcttgttgagaagatatatgctagcctgcaggaagctgtatttgaaggattagaattatatgctaaacaggatggtttagaggctgcttgcaggattttgaagattttagggtctgatggcaccaagatgtatgaagttggttggcttcttagggacaagactatcatcagtacgtcagtgatcaaaggtgaagacttgattcaccggaggccacctgttagtaggaatacgctgaagatttttattagagatgcaacttctcaaaatgccccatgggttatacatgaaaatcttgccaaaagatatggcatacccattgagcccccgaatgacatgatgtttggtgaaggtttgcaaaagaaagggaggaaaagacgtgaggatggacctatgggagatcccaaaaaaaagatgaagaacgatgaggaacacataaatgttccaattaagtacccaatagatgatctcttagtacaaccttctgcagatgatcatgctttattgaagagacctcctctggctacagattttagagtaccaaaatattctgtgggcgatctccttatggtatgggacttctgcttgtccttcgggagggttctgaatctatccccattttcactggtagatttggagaatgcaatttgccacaaagaaagcaatgcacttcttgtggaaatacatacagctatattccacttgcttattaaggatgaaggtgactatttcactattctgcggaccaagaaacggaagctaaaggtgactttagtaacatgggctgaatatctctgtgatttcttggaaatgacaaaaactgaagaactcaccagaaacattgcaacagtaagaaagggttattatagtcttattgatactgatatcaaacttaagattctccgggaactagtagaagaagctattacaacttctcctgtaagagagaaactaagtgaacgggtggaccagcggcaagcgctcgctgcgactaaaagagagagtactagaaaggcaaaggatgagcagaactcaagcattgatggattgcaagatgacaatgagagtgttgatgagcagggtaaggg

SEQ ID NO: 6405 - DNA, 1502 bp, Oryza sativa
  ref <308>: DATABASE ACCESSION NUMBER: AK063556
  ref <309>: DATABASE ENTRY DATE: 2001-12-06
ttgcgttcctctcgagtagccatgggcatggaggaggagggggtggcgcgcggcggcggcggcaagaagctcgcgctcgccagcatcggcttcgcggacgtccgtgtcggcgccgtggctggcggcggcggcgccggcgccggcggcgggtacaaggaggacttgttagtcgtgggcctgcccaaggacgacgacttcgatgtcgccaaggtcgtcggggacgtggccgtcgggctcccggacgtcggcgccgccgtcaggaatttcctgaggaatagagaagttggagaattcgtgagtggggcattagctggtgctatgactaaagctgttcttgctcctctagaaactatcaggacaagaatggttgttggggtaggatcaaaacacatttttggtagttttgtggagatcgtcgaacaaaatggctggcaaggactctgggcaggtaatacaataaatatgcttcggattattccaactcaagcacttgagcttggcacatttgagtgtgtcaaaaggagcatgacagaagcacaagagaaatggaaggaagatgggtgcccaaatatacaaattggcaatttgaaaattgagctaccacttcacttgctctctccaattgctgttggtggtgcggctgctggaatagttagcaccttagtgtgccatcctcttgaggttcttaaggaccgcctgactgtcaaccgtgaggcttatccaagtatcggccttgccttcaacaagatataccaaactgatggtattggtggtctctatgctggcctctgcccaacactagttggcatgcttccttatagcacctgctactatttcatgtatgagacgatcaagacttcttattgccgtgcacataaaaagaagtccttgagccgtcctgagctactcattattggagctctttcaggtctaactgcaagtacaataagcttccctctggaagtggcgaggaagcggcttatggttggaaccctgcaagggaaatgcccgccccacatgatcgcggccttagctgaggtgttccaagaggagggcatcaagggactttaccgcggatgggccgcaagctccctgaaggtgatgccgacctccggcattacctggatgttctatgaggcatggaaggacattcttttggctccagagctgcacacctagcactagcagtctagcatgcctggaattgttcaacatggcaggcattgctacagaataaatttcttgtgctgtgaggcagtgtgggatttccttcttttttttttcttctttgaaatcccacacatgccagtcatctagctaagaggccattttgtgccaatgattagaagcattagttaattggctttattcaacctggattgtttaagccagtaattgttgacaaggggggcagacattccatgccatgtggcttgagttatgcattgcccccaaaattctgtgaaattccccaagtaatgaagaaaagggggttaattccc

SEQ ID NO: 6406 - DNA, 1359 bp, Oryza sativa
  ref <308>: DATABASE ACCESSION NUMBER: AK063557
  ref <309>: DATABASE ENTRY DATE: 2001-12-06
aagcaaaaaccatcaaagattaggcggcggcggcggcagatctctcctccggcggcaatggcggcgcagcgcgacgacgaggccgggtggtcggcggaggcggcgcggcgggtctggggcggcgccgtgccgctccaggtccacctccacgacgccgacgtcaccaccctccccccacctccgcccttcctgactttggggccaagaatcgggtatcttccactgttggtaccaattataaaggctcattttagcagcacactcccgcctggtattgacactgtttggtttgaatacaaagggctgcccttaaaatggtatatacccattggagttctttacgaccttctatgtgcagatccagaaagaccatggaatctaacagttcattttaggggatatccttctgaaattttaactctctgtgatggcgaagatagtgtaaagtggagctacatgaattccctgaaagaggctgccttcatcatcactggcaacagtaagaatgtgatgaatatgtctcaggctgatcaaggtgctttgtggcaatcagtaatgaaaggtaacttagatgggtatatgaatatctccaccaggcttaagcttggaccattcgaagaggattgcttagtacgaacttcctcagtagagggtcaacaaggttctgatgagcctgaatctcctggatctggcaaaccatgcagggttcctgttcgattatatgtgcgcagtgttcaagaagacctttatgatttagaagatgcactacctgttggtgattgggaaagcatatcctatattaaccgaccattcgaagtacggagggaggaaggtagaagctacatcaccctggaacatgcgttgaaaactttgctacctgagttcttcagctcgaaggcatcacgtatacccgacgattccgaaactgctcctcaggcaccagattcagcccctaatgatgattctgatgtcaccccaagaagttgtgagaagttagagtcgtctgcttcgtcgagcccgcaagaggcgaatgtggccaacaagggtaaaatagtgaagctagtaagggtgcaaggcattgaggtcgacatggacatacctttcctttgggttgccaacaacctgaagaaccctgaatgttacctccatatttgtgtgtatgtcggtacaagaaaacgagagcctaaggatggtagatgaaatgttagaaacacaatagggagagcgcattccaggaaaaatctggtcttggttctcatcttggatgactcctagacattaatattaattctttgtacagatgctgaaatcttaatacgttttgacgtgctgatcaattggtgtaagatattggattgg

SEQ ID NO: 6407 - DNA, 2646 bp, Oryza sativa
  ref <308>: DATABASE ACCESSION NUMBER: AK063558
  ref <309>: DATABASE ENTRY DATE: 2001-12-06
attcgccgcagggctcggctccacacgaacgcgacgcggcggccgccaccgattccatccggaggaaggagccgcgccgcctccttcctatatccctcctcctctcccgtcctaaaccctagccgcgaccgcgagttcggggtcctaatccggatcgactccgcctccccgagtcgctcggacgcgttcttcttccgggtttgactttgtgctgcccaagattgcatctccagcggaagaatcagagggattaaattaacgctgtctggctgcgccattaataaccttgggtggtggtggtggtggtggtggtggtggtgctccactggagtggaggctgtgagcaagctagtggagtgggggcgtttcttaggcaggtgctatggcgacagcaacaatggcaaccgcagctggcgcggctgcgcttctgtactacacgctgaaccgccggcttcaggtggagaagctgaatcaggaaggcgattgcggcaatgaaagagatgccgcgacgaggggggccctcagtaccaccagcaggagcagggtgtcaaggagggatgttcgtgcccctgccacatggctggagacaatttccactctgtcggagacactgcggttcacatactcagagacccttgggaagtggcccatcggtgacctcgcttttgggattagcttcctcctcaagaggcaggggaatgtacctgtagcaagcatatatgctggagatgatagtgtggagctcaatggagctccagtaattgctgacttaaagcatcatttaaatttgttgacactatgttggcatttctccaagaagccgttcccgttgtttttggaggcgactggctactcttcggaggatgttcttatgcaagagcctaaagcaggaattttgaagccagctttcaccattatacttgatagagacaagcaatgtatacttctattaattaggggaacccacagcatcagggacacactaacagcagccactggtgctgtggttccattccaccatactattgtacaggaaggtggtgttagcgatttagttttagggtacgcgcactttgggatggttgcagcagctagatggattgcaaagcttgcagccccttgtcttgctcaggcattgcatactcatccagattataaaataaagattgttggacattcacttggtggtggtacagcagctctgttgacatatgtcctgagggaacagcaggagtttgcatctactacttgtgtctcctttgctccagctgcttgtatgacatgggatctggcagaatcaggagtgcattttatcactacagtcatcaatggagctgatctggtgccaaccttttcagctgcatcagtagacgatcttcgttcagaggttactgcatctgcctggttaaacgatctgcgccaccaaatagagcaaaccagaattctgagcactttctatcgatctgcgtcagccttgggatcaagacttccttcaatagcaaatgccaaagcaagagtagctggtgctggtgctatcctaagacctgtatctaccgggacacaggttgtaatgaggagagctcgtagtgtagcacaagcagcttggacaagaccagcacttcagctatcctcatggacatgtattggcccaaggaggcgaactaatactgtatccacttcaacagtaacatcagaagaaataagagcaacaacaaatgatggctctgagtccacttctctgttgactgaaaccacagagatagttaaaactgaaaccatgcagtttgcttcatcagaagaggttcagagttcgagtgaggtgtcagatgctgttggaatgatggatgagaaggtagatagtgacggtgaggacatcattgatcaccatgtggatgaggacaggatgactgacgtagagctgtggcagcaacttgaaaatgagttgtaccgaaggagtgaagatgacgaaatagtggaggatatgactgaaagtgctattactgaagaggtgggtggcacagctgaagatgtgctcagtgagaccaatgacaaggaggtacatagattttatcctccaggaaaaatcatgcatatattaacttccaccatagaggaaacagtcagtgccgaagagtcgagcgtgcctcatgaagatgacacgaccggtgattcggacaccagaataggcatcttcttgaccccaaggtcattatatggcaaactgaggctttcaaaaatgatgattaacgatcattacatgcctatatatagaagaaatattgagcagttgatcgctgagcttgagaaggattcgtcattcccagtcagtgattgtcttgacagtgaagttccctagtttgacacatacatatatgtagttccagctgttgtaaacgctgatgcaatagaatgatagtttcgttaagtgtatctaacatcctctggaataattacagaattctcaggtccctaatcacaaggcaccacaaacgttgccctatttcttacaaactcaaggaccatttctgttacgcaaagaaatttctacctttttttcgtttagaggatgtgaaattatttaagggattagctatacaactttgaacggaaaatttccctaaaatctattaaatgtaattatagtat

SEQ ID NO: 6408 - DNA, 1563 bp, Oryza sativa
  ref <308>: DATABASE ACCESSION NUMBER: AK063559
  ref <309>: DATABASE ENTRY DATE: 2001-12-06
agaagctaccgccgccgatcaccgatggcgatcgccgccgcgcgccggcggctgtggcgcgggctgacgactgcggccgccgcctccgtaggggtggaagcggacaccagcgccttgctcgcgcgccttgtcgccgagcctgagtaccgcgtgaaggcgacgatggaggaggcgagcggcggctcctccgcggcggccgccttctgggagcccctcgccgccgccctcctccgcgcgtcgtccccgactaaggcaaacctcgtcttggaatggaagctagagaagctaatcaaggaagggatccgtgattgtgagccctactcagtgataatccgtttctgccgagagacaaagaatgcagaatttgcaatgaaagtctttgaattcgtggaggagcttggaattcagctgaacactggcattttcaatgcccttatcaatgctttcttgtcggtaggagatctccttgctgcaatgaccttatatgaggctatggaagacatagaggattgcaagcccaactccgctacatatgatgcattcatttctgcattttcacggcttgggagtggccatgcaatgatgagctggtacctggcatcaaaggatgcaggatttactcctagcattaaggcctttgaatatttgatcacaggttttgtgaagttggacaggctagatgatgctgaagtggtatttgaagaaatgatttgctttgaaattaagccaaactttgctatactggaggccaagcttgagctgctttcaagaaggaaagaccctaacagggtaaaagtatttttggaacttgtaagcgatgggaatcaagagttgagtgaagctacagttgagaggttaacaagattatgcctgtacgaagacaaaattggtgaactggaccagttactttccctagtacaaggcatgcacacgagttctttaactaagctgcactgtggaattatcagattctatgctaatgctgatcgcttgtctgatatggagcatgcaattttccagatgttggataatggcatggtttttgcccactcagaggatgttgaggctgttatctgttcttattttcgtcacaaggactttgataggttggatctattcttaaaccgaatacggagtttgtacaagctcacccggtctacttatgatatattgatttctggatatcagaggttgaatttacacggaaggctcgacttggccataaaagatatgagggaagctgggtttgcatgagttcctgcaaaacattcattgttctgtgacctcctaaaaacaaatttcctgtggattttggaaaagaagcaggctccatgtcagaaagcttcatgcaaagtttgagcttaaagcattgcctcctgttcattcatgaaaacaacgcctcgatgacaggaattaattaatacttccatgatgcttatgttccttgcaaaacaagctagtaaacctgtttgtatgttacttttcagaatctcaggtccagttttgtacaaaccatcaacttgttttcttctcctaataggaaaaaaaaaacgtaccagctgc

SEQ ID NO: 6409 - DNA, 1565 bp, Oryza sativa
  ref <308>: DATABASE ACCESSION NUMBER: AK063560
  ref <309>: DATABASE ENTRY DATE: 2001-12-06
attttccacccgcttcctctcctctccaaaaccctccccaaaaaccacgcccccgccttccagaaccttctggaaccgcgatggccccctccccttccgacgtcgccctgcaggccgcccaggacggcaacctccgcctcctcaggaagatggcgaagaagttggatttgcgaggagtcaaggacaagaatggcctaagcgcgcttcacttcgctgcaagccatgggcacctggattgctgcaagttccttgtggaggaatcgggccttgatgtcaactcggttggtcacaaaggtgaaacgccagtgttctatgccgcgatcgatgggaacgttcaggttttggggtaccttcttgatcatggtggtgacccggtgaaacccgaggagaggggctgcacgccgctgcacaatgcggcagagaatgggcatgatgaggctgtaagactattgctgtccaaaggagttcatgtggatcctctgaattatcgtggggccccactgcacttggctgcctcaaaggaccgggttcaagccatgaaggttctgcttgaacatggtgctgatcccaacagagttgtcaatcatatcttttcaccactcatgatggcatgctgcgggcactccttgaaatgcgtgaagctacttgttgaggctggcgctgatgtgaacggggctggagctgaccctaacattcctgacgaggaagggaggattcctatcatggtggcagcagctcgtggtcaacgagagcttgttgaaattctatttcctcggacaaaacctattccatgtctgccagattggaatgttgacgggataattagaactatgagaaccacacgtattgaacctcagtctgctattcctgtggaagaacaagtgtctgatgcaaagtcgaaaggaaaggaagcatttgcaaagggtgactaccttacagccatctacttctacaccctggcaatggataaatccccacttgatgccaccttgtttgccaaccggagcctttgctggctgcggcagcgagaaggggacagagctttactggatgcacagcagtgcaggatgctgcgccctggttggtccaaggcatggtaccgtgagggcgcagctctcagtttcatgaaggactacaaaggagcagtggacgcattcggggaggcactgaaacttgaccccatgagcgacgaggtcaagaacgcgttaagggaggcgatcgagtgtctgaagagagctgcttgatctgaagatccgaataacccttgagcagctactgcatcgtccttttggcctcacctcacctgtcagactgcttcacatctttccactgtaactaccaacgactaggttttgcaaaccatgctgactgtttagctatctctgctgtcagagtacgtatggcaggaacatgcactgtctttcggtcagaaaccatatggtttgctaggtcatcatcacccatacatatgcagttgcactttcttccattttgtgcgcaactcatgcaagtgcaaactggcagtaatagtatatgatatgtaaagttcgtcagtttctgaactc

SEQ ID NO: 6410 - DNA, 1343 bp, Oryza sativa
  ref <308>: DATABASE ACCESSION NUMBER: AK063561
  ref <309>: DATABASE ENTRY DATE: 2001-12-06
gagtgagggagcggcaataaaaagaagagagagagagagagagagagaggctaggcagctagcaggaggaggaagggaccgaccaccgcctgccgcaatggcgaccggcggcagcggcggcggcggcggaggtggaggtggtggtgacgatgtccacggccgccacaaggtgtgctacatgcacgccaaggagcccatcgtcgtcgtcgccggcctcgagcagcgcttctgccaacagtgcagcaggttccaccaattacctgaatttgatcaagaaaaaaaaagctgccgcagacgccttgcaggtcacaatgaacgccggaggaagccgacacctggacctctttcttctcgctatggccggcttgctgcatcctttcatgaagagccaggcaggtccagaagctttgtggtagatttctcatacccaagggttccaagcagtgtgagggatgcgtggcctgctattcagcccagcgatcgcatgtccggttcaatccagtggcaagggggccatgaactccatcctcaccgcagcgcagttgcgggatacagtgatcaccatgcgttcagcagccatggtggctcagcggctggggcaccaatgctccaccacccagcctttgagctcacctcaggtggatgtctcgcgggagtcgccaccgactccagctgtgctctctctcttctgtcaactcagccatgggatactacccaaagcaccagcagccacaaccggtccccgccaatgtcgtcaacggccagcgccttcggaggcggcaacaacccggtgtcgccctcggtcatggcaagcaactacatggcggcgagccccggctggaacagctccagccggggccatgacggcgccaggaacgtgcacctgccgccaccgcacggggttgtgctgaacgaggtccctccgggctctgtccaccacggccatttctccggcgagctcgagctcgcactgcagggaggtgccccgtccaaccggccggaagccgagcatggctccggcagcggcgccttcagccactccaccaatgccatgaactggtctctgtagagaccattgatcatcttcttccccaccgtcactgcgccttcatgccaagagacatggaacattgggcagcctagttttgtgctccttaacattgccatttaggttttcaggatggagagggaattcgtaactgattaggccagtaatttcctctcgttgagcctgatgtgtccatgaattcaaaacacccgaagagatccactacctgtagaactccataaactgggagaattgatgtgttttacttgacctattttaatctcggattcatctt

SEQ ID NO: 6411 - DNA, 1868 bp, Oryza sativa
  ref <308>: DATABASE ACCESSION NUMBER: AK063562
  ref <309>: DATABASE ENTRY DATE: 2001-12-06
aactctccagtctccacccacctcactccacagtccacaccactgcaccgcactctctctctctccaccgccattaacggttacttatctctctagtactcctactactgctagtgtgctagtggtaggagtagtctaccaggactagtactccactctccgagaaccaaacaaatcgacaggaggcggctggtgtgcgcatgtgacccggatcgatcgacagcggtcgcccgcaccgcattgccgctgctcccgtttagtccagccgccgcctcctcctcctcctccgccgccgccgcctgttcaggctccgatccaaggactgaagactactgccagtttcagggaggaattctactcagtggtagcttgtggttgtagctggtcttttgatgaatctgttggtctcaaaaacattgtagaatagtatttgttggttcgttgaacacaatgggttcttcgccatccaaagccactggtgaggatgccctagttctatgcaaggagcgaatgcgccatatcaggcgagctattgattcaagagatgcactgtcggcatcacacctatcatatactcagtccctccgtagtgtgggtactgcattgcggcggtatgcagagtctgagatctcaccagaatcatcactgtccatttcagaagcagataagtcaccatcacattcttctatggcttctccatcaccttctcgagcagtagagagcactggctccccagtacatcgaggtagtcagctgactcctccctcaacaaagatccattacatgaaagcagcaggaacaaaacctttgacgttcactattgatccatctgctgttgactttgtggggcaagaatccccggtatctacctttgtgccaccaccaccaccattgccccctgaattatgtacctcgtgggacttcttcgattccaattatacttctggtagtgccacctcaaataatgagaatggagtgacattaaattttagtagattgaagggcctgagagattcaagggaatctgaagcagtctcgctgagagaagaaacaacaaacaggtctgatcgaatgcacccagagcttcctggtgataatgcagcacctaagcaagaagcccaagcaaagaaaggtgggatgagtaagccaagtggatcggttgaggttacaactgaagctactacttctgggcaagttggagcaaaggtggaggaagatgacatggaaaaagaattgtgcacagaagcagaagacccttcagagttcatcactcatagagcaaaagattttgtgtcaagcatgaaagacattgaaactcggtttgtacgtgccgcagaagctgggaatgaggtttccagaatgcttgagacaaagaagatcagacttgatatatgtgctaagattccaggttctccaggcaagccacctactgcccgatttgtgtccgcacttcgagtctgctgcaatcgtgagaatattctcaaccaggaaactgcacagaatatctcaaaagttgtcacttggaagcgttctgtatcatctttgtcctcatcatctaagagtccacttacagcagcaatgattactgatgatgtgggtgatagtaacagtgattttgttgagcaattcgccatggtatctggaagccactcgtctaccttggataggttacatgcttgggagagaaaactacatgatgaaatcaaggctagtgaacatgttagaaagacttatgatgagaaatgtaaccttctccggcgccaatttgcacgaggtctaaatgctcaactgattgataagaccagagctgttgtgaaggatcttcattccagggtgtctgttgcgatccaggctgttgatgcaatatc

SEQ ID NO: 6412 - DNA, 1169 bp, Oryza sativa
  ref <308>: DATABASE ACCESSION NUMBER: AK063563
  ref <309>: DATABASE ENTRY DATE: 2001-12-06
ggagccagcagcaaaagcccattattaacgggacgcacgcgcgcgcgcgcaggggacaagtcgagggagagctagctagtttagcttgcttggttgctttggaggtgtggcttgccatggcgagagcgttccgcgcggcctcgccgctgccgctgccgtcctccagctccagggcggccgcggcgagcggtggcaccggcggaggcggaggcgggaacttcccgtggctgagcaggaagcggctgggcgccaagccgccgtcgccgcagcggcgaggtggacaggagagggagggaggtggagatgaggcggcggggatggggacgacgacgagggccgcgcggttctccgcgacgtcgtccgcggagcctgctgaggtgcagtcgtcgtcgtcgtcgaggaagcgcgcggacgcgctggcgaggctgcgggcggcgttcctggcggagatggccgcctactccaccggcgcgctcgtcagggagatgtcctccggcctcgtccgcctcgcgctcgagtgcgagaagcaaccaatcaacccaggcgagaagcggcgggcgctgctggaggagccgacgtggcgggcctactgcaacggccgaaagtgcggcttcgcggtgcgcagggagtgcggcgccgacgagtggagggttcttggcgccgtcgagccggtgtccgtcggcgccggcgttctccccgacgacgccgccgccgccgccgccgccgaggagggcgacctgatgtacatgcgcgcgaggttcgagcgggtggtcgggtcgagggactcggaggcgttctacatgatgaaccctgacggcagcggcggcccggagctcagcatctacctgctcagagtctgaccatggatcatactatcatggagcaaaatcgaaaagaaaaaatgagagaagaaatcatcttgatgtttgcaattaattgtacgtaatccatccatccatgcatgcatagtttggcttgtgttaattactttcttgggtttcatgtaatttgaagggtgtcaaggtgtgtacagtattactgatcacttggggggggcttaatatatcaatctggtaaacattggtgtgatgcactgatgctgctgtactatctgtttgtgagacatttcacgtctgtgtgcttcaggactaattcataatgtctttgct

SEQ ID NO: 6413 - DNA, 1513 bp, Oryza sativa
  ref <308>: DATABASE ACCESSION NUMBER: AK063564
  ref <309>: DATABASE ENTRY DATE: 2001-12-06
aagagaacttcccattcgagtccacaactgtttgtcatggacccgccgccggtgccaagcccattccgccgccgccgcctcggcgacgccggcgacgagccatcgccggtgtccatcctccccgacgacgtactggccgagatcctccacatcctcccgcctgacccctcctccctcccctgcctctccctggtctgcaagcgctggcgccgcctcgtctccgacccggccttccaccgccgcttccactcccacgcccgccgccgccgagctcccctcctcggcttcttccacaactccttcaacgtcccctgcttcgtccccaccgggcgagcccccgaccgcgtccccgccgaggccttctccctccgccgccaccccggccgctggctcttcctcggctgccgcggcgggcgcgcgctcctcgcctcgccgttctcggtgtgccgcctcctcatggtctgggacccactctccggcgagccttgctccgcggcgccgccttgctctgcgacgctggcgagtgccaccgccccaccccattccgcgtggtcttcgccttcatcgaccagcgccgccgcccctgcgcctgcgtctactcctcgctttccggcgaatggggcgaggtggtctgtgggaggacggtgatcccccacgatttggatttgggattagggcttagacatcttgatgaatccatctcgggggaaaagatttctgccattgacatgaagcctcctgttcttgttgggaatgttctctactggctgctcgtggagaactgcatccttgagttcaacatggatgccaagagcttggctgtgaatgtggtttctggcccagatcttatgtattttccggctccgaattggagtctgcagattatgctggctgagggtggtagcaagcttggcttcggcgcagtgaaatttttgtacctcaagctgtgggtgcgcaagagtgactcggatagcactgccagttgggtgatgaggaagagaattaaactgtgcatgttcattcctcctcctcatccaccattgcggcaattggaggcgctttttgatcgattgatagcgtggtctgggctacttggttttactgaggatggtagtgtggcatttctacagacgccaaatggcgtcatcatgctccagcttgatactatggagttcaagctggtgctccctatggagaggttgcattgggtttatccccattcaagcttctatttgacagatggttgcattatttgagaaaggccagcaagatgattggacttcaatattgaaacaaagagagtatttacatcttgctgtgtaatatgctgccatgacgaccattttctagtaacatttcagcctcttgccaataatagtcctgtcgggattggtagacatgttataagactgactctgagcatgtatatgaatgcttttgttaatcagttgtgtgctcctcaaatgcatgtatggtacttcaactgctggtttatatgatactcctatctgat

SEQ ID NO: 6414 - DNA, 778 bp, Oryza sativa
  ref <308>: DATABASE ACCESSION NUMBER: AK063565
  ref <309>: DATABASE ENTRY DATE: 2001-12-06
gagcatgccatcccttcgccgtcctcagtcctcgatgccgacctgaccctctccccgtgctctccgcctctgctcccgccgcccccgccgccgccgcctccgcctccgtttcttgatcacgaccggcccgccctccggaaggccaaagcaagaagcttcaacgattacggaagggtgggcttgcagaccgcagccggctgcggcggcggcggccacaatttccggtccaaatcagcgatccaagcgtcgaggagtactttcccgacatcgccattcgacgatcacgatttggaagagaaggttgcagcgtcagacatcagttcgttcagcagcgatgatgtggtcaccgacgacggcgaagatggtgacaaccaaactacgaggaggaggaaggtgacgtggatagattggacgacgacgatggctcatgcgacgaagagctcttcgagttggccacgaggctggcgccggaggaggaggaggtggtggaggacgaggtggacaggaaagccgacgagttcatagccaaatttagggagcagattaggatgcagagggtggtcgagccgggcaggagatgagcaaacacggagggagcgagcgaggcatgcatgcggtgcgccacgatacgtacctagcacgagtacgggggttcctcatgtgtacattttttttcttttttcttcttctttttgggtgttcttgtgtacgtaagtggaacatgaacagatggtgtaaatgtggagaggaatgggagtgtgagtatcactgttcgtgc

SEQ ID NO: 6415 - DNA, 1470 bp, Oryza sativa
  ref <308>: DATABASE ACCESSION NUMBER: AK063566
  ref <309>: DATABASE ENTRY DATE: 2001-12-06
acgccacacaagtctctcctcctcccatctccgcttcccttcttcttcttcttcgttgatccactcacccgccgcgcgcagaggaggccatggcggatcagctcaccgacgaccagatcgccgagttcaaggaggccttcagcctcttcgacaaggacggcgatggtaacaacaacaaccaccaccaccaccttgttctctctttctccatctctatctgttcgttggatcgatctctctcgtttgcacacgctggccgtctcgcgcctgtggcattgcctccaccgcgcgggtgcccttccttcctcgcgtcgtcgggtggcagatccgatccgggcacggatctggacggaaaccggtcgctgtcatcgtcctgtgtgtccagtggcgaattgtccgacatggacgcaacgcttatctgctgtgctgacttgaccatttcctgactgcgccacctccctcgacttcactatcgcaatcgtgtctcgctgcctgtttggttcgggaacacttactctacatcataataacttttcaacttatattaggccctgtttgattcagctagtttgcttagttactccctcatttttctttttcgtgcaaaaacttcggatatataattttctttttaaaaaattaattttcaagtttacagtagttaattaatcatgccgttaataagctcagcaaagaataatatactttcattacaatgatttttatgtacgaaaaggtttattacatagtcgaaaacagagaggagtgtatgtgttggatgtagcttagctatcaactgctccctttcgcatgcaactttggtcattttcttaggttagtgcatttggtagcttcaacctttttatggtgggctgtagttgtatcaataacttgatcgctactgaaagctgttcagtttaggtaattggattcctagcccttggaataccttctccgttagaaatttgtccacagggaaatcctgtataaatttcatgggggcacgttgaaaaaattatacagcaagtacatgcaaataattttgtggtttaccttggaccttgttaaagaccataaccctgcaattaccttggtggaaattgtcttcgactggtttctcgttaacctggtaatattttagctcactgattcactaagtacggctttaaggttgaacaacacccaccttgaaattttgagctgaaatgttcgtggaaattgtcttggactagttattgttgaacagctaacattttagctcactgattgattaagtatggctttaaagttgatcgatacccaccttgaaactttgtgctgaaatgttttgactgcagcaatcccttcttgatattactgtcagggtgaatcacccagttaaaagcatccaaatatgcaaatatcactcagccttgtaacttttaacggaatactctcagcatattcaaatagacataatcgtactatttc

SEQ ID NO: 6416 - DNA, 628 bp, Oryza sativa
  ref <308>: DATABASE ACCESSION NUMBER: AK063567
  ref <309>: DATABASE ENTRY DATE: 2001-12-06
gctcatgtcgacgacaacgcaactgaacaacctcgccggtgagcagctaaagctaagctgaggttagccatggcggcggcgatggggttggagaggaaggcgaaggtggcggaggtggcgctgcggtgcgcggtgtgcgccctggcggcgctggcggcggcgctggtgggcacgggaagccagacgaggaccttcttctcgctggagaagaaggccaggttcacggacatgaaggcactcgtcctcctcgtcgccgcccacggcgccgccgccgtgtacagcctgctccagctggcgcggtgcgccgcggccgcggcgtggaaaggcggcagcaatggcggcgcggcggtggtggcgtggtcggtgttctcgtgcgaccaggcggtggcgtacgcgctgatggcggccgcaagagcagcgccggcgccgtctccggcaatggcgcgaacacgtggtaggcaaggctagtttagctgcttcgatggagtttaatttctttgtagtttcagaattaaattaagcgagactggctcactgacacgtaattaagttcgttaaatcgttggtaataactgttatgggcttatggctgtggatgataataattaagtcagatttgccgacgacc

SEQ ID NO: 6417 - DNA, 879 bp, Oryza sativa
  ref <308>: DATABASE ACCESSION NUMBER: AK063568
  ref <309>: DATABASE ENTRY DATE: 2001-12-06
aatcgatccatctctgcacagctgcacttgcatttcagccagcgacaagaaagcaccaaatctctttgcattcaagcagcaggcaacattgttgaggagggatcaccgatcggatcggagcagtgaactgaaatggcggcggcgggggacgtgcagatggcggagaaggagacgttcgcgttccaggcagagatcaaccagctgctctccctcatcatcaacaccttctactccaacaaggagatcttcctccgcgagctcatctccaactcttctgatgcgcttgacaagatccgcttcgagagcctcaccgacaagagcaagctggacgcccagccggagctcttcatccgcctcgtcccctacaagccctccaagactctctccatcatcgacagcggcgtcggcatgaccaagtccgacctcgtgaacaatttgggcaccatcgcgcgctccggcaccaaggagttcatggaggcgctgcaggcgggcgccgacgtgagcatgatcgggcagttcggcgtcggcttctactccgcctacctcgtcgccgagaaggtggtggtcaccaccaagcacaacgacgacgagcagtacgtgtgggagtcgcaggccggcggctccttcaccgtcaccctcgacaccgccggcgagcgcctcggccgcggcaccaagatcaccctcttcctcaaggacgaccagctcgagtacctggaggagcgccgcctcaaggacctcgtcaagaagcactccgagttcatcagctaccccatctacctctggtccgagaagaccaccgagaaggagatcagcgacgacgaggacgacgacattgacgactccaaaggcaaggagaaggaaggcgacatcgaggaggtc

SEQ ID NO: 6418 - DNA, 1522 bp, Oryza sativa
  ref <308>: DATABASE ACCESSION NUMBER: AK063569
  ref <309>: DATABASE ENTRY DATE: 2001-12-06
gacggcaacggcgttccccgcctccttaaacagttaaacctacccaaatccccaaattccgccgccgcctcctcctcctcctctcgccgccggcgagaaccacggcgaggtgaccaaccaaccccaacccccatcgcgccccccgccactgcctcttctccccccgcccgcccgggattccgtccatggaccggccgaggaggccggggagcgaccgccggtaccctccgctgcggttcaggaagcggaagaggagcagcagcgacagtagaagcagcaagctcaacaacaagccagggtctgataagtgggaggatgtctgttcaatttgtgatgatggtggtgattttctttgctgtgagggcagatgtttgaggtctttccacgcaacagagaaacacattacagaaataaaccagtgcacaacccttgggctaactgaagaacaatggaagatctttaggcaaaatgatgaaaagagtgaaccgctatatatatgcaagaactgtaagtataatcagcatcagtgtttctcgtgtggattgctgggttcttcagacttgtcatcaggggctgaggtattccaatgtgaagatgaaaaatgtggacacttttaccatccgaagtgtctagctagactactctaccctgatagcagtatgcagcccttaaattttgaggaggaagttgcccgtggactgaaattcctttgtccggtgcataaatgccatgtatgcaagggaggagagaacaagaatgacatggaaaatcaatttgcagtatgcagacgctgtccaactgtataccacaggaagtgcttaccaagtgacatagtctttgaagatgatgaaagtaatggtatcgtgcaaagggcgtgggatgacgtacttcgtgatcaaattttgatctactgcatgaagcatgagattgatccagaactgggaactcccgcgaggaaccacattatctttcctgattgcaaaaaccttttaacacgtggtccttcgaagcccaaagggcaagaagacgcacccgcagtactagatatacctgaagaagacatgtcgcctgatcattcctccgaaccatcccagccgcctccacagccggcagctgaaactgatcaaactgaccaggatctttccaatggtttcaattcgtttgcgccgaaggccttgttcccacttccatatccaggctcctgtggttggcttgatgactgaccatccaacctcactcatctagataaatcctaacacatatatacgccagcagattggtgtaattcctgctagaacactttgttcggaaattgggaagttagaatgtgcaacgcaatctactctgttgaactgtcacgtgctaagccacttgtgtgtattgttatcattattatgttattattttaatggaagataacattgcggttgaccagtgtccagtagcctgcattatgtttctgatgtttttgtttccagagatgtccaagtgaagcaataagctggtgcatatctgtgctatt

SEQ ID NO: 6419 - DNA, 1023 bp, Oryza sativa
  ref <308>: DATABASE ACCESSION NUMBER: AK063570
  ref <309>: DATABASE ENTRY DATE: 2001-12-06
gataccactctggaagagctcggattctaaccttgtgtcagacccgcgggccaagggacagtctcaggtagacagtttctatggggcgtaggcctcccaaaaggtaacggaggcgtgcaaaggtttcctcgggccagacggacattggtcctcgagtgcaaaggcagaagggagcttgactgcaagactcacccgtcgagcagagacgaaagtcggccttagtgatccgacggtgccgagtggaagggccgtcgctcaacggataaaagttactctagggataacaggctgatcttccccaagagtccacatcgacgggaaggtttggcacctcgatgtcggctcttcgccacctggagctgtaggtggttccaagggttgggctgttcgcccattaatgcggtacgtgagctgggttcagaacgtcgtgagacagttcggtccatatccggtgtgggcgttagagcatttcgggaaacgtcaagaactgaagaacaaagtagaatttttgtgcagcgcaacctctgctgcttttctgttttcactctttattctcctccaccaaaacggagtttgttacatgcacaactgaacggaacgagcaacccggatcggctactgaccgcgccatcccacgatctgaaaccaggtcattcggcagctaaacaaaactgacaacatgcagaaggaaacagctattctaccgaccggccaaaacaaccttcagccagccactacgttcatgcaaaacagaaatataaaatgctcaagattacaaaatatccaacaatttctccccctaatcttgacgcatcacactggagacaaacccagctttcccctcagctccagaaatcggaccttgccaagaggctttatcaatatgtctgcaagttgttctgctgaacttgtgtactccacttcgacctcctttctttcaaccctctcacggatgaaatgatatcttgtatcaatgtgtttgcttctatcatgaagtacaggattcttgcagagattgattgc

SEQ ID NO: 6420 - DNA, 585 bp, Oryza sativa
  ref <308>: DATABASE ACCESSION NUMBER: AK063571
  ref <309>: DATABASE ENTRY DATE: 2001-12-06
accacccaccgtagccaagcaaccctagccgctttccccatctcctcctcccagaactagaatttcgccaccccgaatcccttccatggtaggacttccgtttgattccgggtcgaatccgtcgcctccgatgccggaacggtgaggttttccctccctttatatggacaacacgcgtttgttttttctgttgcgcaggtttcagatcttggatggacttgctcatccttcggcggccatggatctatcggcggaagctgctgctgctgctcgtcctcgcgttcggcgagtcagatctggagccgatctgacctcttagaggtccggttggggcatgctccgtacgagctggcgtggatgaagcggcggggcgagggaggaggctggtcgtcgcctggatcctctccatcggggcctcgcgcgatgatgtctctttgtattgataattattcgatgaactttcgataattattagatctaagagatgttgttcgagggagccgtgtgctgagatgaaggcggcaaggtaagagaacatgtaacaagcgaggtgcttgtgtctgagggtcaaaagaaaaagagacg

SEQ ID NO: 6421 - DNA, 1470 bp, Oryza sativa
  ref <308>: DATABASE ACCESSION NUMBER: AK063572
  ref <309>: DATABASE ENTRY DATE: 2001-12-06
aagctctcctgcctagttcttctgcacctcctccatctccatctcggtggaggtttcaggcaggcaatctcccgatatataatctctgaagaatcaaatggctgacggcgaggacatccagccccttgtctgcgacaatggcaccggcatggtcaaggccgggttcgcgggcgacgacgcgccgcgggcggtgttcccgagcatcgtgggtcgcccccggcacacgggggtgatggtggggatggggcagaaggacgcatacgtcggggacgaggcgcagtcgaagcgggggatcctgacgctcaagtacccgatcgagcacgggatcgtgagcaactgggacgacatggagaagatctggcaccacaccttctacaacgagctccgggtggcgcccgaggagaagatgacccagatcatgttcgagagcttcaatgtccccgccatgtatgtcgccatccaggccgtgctctccctctacgccagtggccgcaccacaggcatcgtgctggactccggcgacggtgtgagccacaccgtgccgatctacgaaggctacgccctcccgcacgccatcctccgcctcgacctcgccggccgcgacctctacgaaggctacgccctgatgaagatcctcaccgagcgaggctactccttcaccaccaccgccgagcgggagatcgtcagggacatcaaggagaagctcgcctacgtcgccctcgactacgaacaggagctcaacgccgccgccgccgccaagaacagcagctcggtcgagaagagctacgaactgcccgatggccaggtgatcaccatcggggccgagaggttcaggtgccccgaggtgctgttccaaccgtcgctcgtcggcatggaggcggccgggatccacgagacgacctacaactcgatcatgaagtgcgatgtggatatcaggaaggatctgtacggcaatgtcgtgctgagtggtggatcgaccatgttccccgggatcgcggaccggatgagcaaggagatcaccgcgctggcgccgagcagcatgaagatcaaggtggtggcgcctccggagaggaagtacagtgtctggattggtggatccatccttgcctcccttagcaccttccaacagatgtggatctccaaggctgaatatgacgaatcaggcccagcgattgtccaccggaagtgcttctaagttcttggtcttatttattctcaagttcttgccgggtttccaatgagatatattgttgagtttgtctgtttgagcagtgctgaatcatacatggccatattagagttcctgttgatgccaggtttgttgctagtattgaggaatttgaactatccaccactatcttttgtaatagtaattgcgtcacctgagccacattatcattcttctgtatattcataattcatctgcgtgagttgtaatttactgcatatatatagaacatttgtttcatg

SEQ ID NO: 6422 - DNA, 1420 bp, Oryza sativa
  ref <308>: DATABASE ACCESSION NUMBER: AK063573
  ref <309>: DATABASE ENTRY DATE: 2001-12-06
atccccccctcgccatggcagccgcttccttggctccgcccaccgcctccttctcgccggcgccggcgccggggagggttaaggcggcggcgcctttgctctccaggaggcctcccgggcggttccttctcagggtggctagcgaatcctcctcgatttctggtgacacgctgctgggattgtatgagaaagagaggttaagccactcgctatatgctaacgaagattacgacaaagagatgttctgggacaacttggatgcggatttgcgctactggaccagatccctgcgcccagtgcagtggtatcctggtcatattgcgaaaacggagaaggaactgaaagaacagctaaagcttatggatgttgtcatagaggtccgcgacgcaaggattcccttggcaaccagccatcctaagatggatgcctggctaggcaatcggaaaaggatcatagtcatgaatcgcgaagacatggtgtcaaatgaggacagaaatgcatgggcctcttactttgctaatcagggtaccaaagttgtttactcaaacgggcagctgggcatgggtacaatgaaattaggtaggatggcaaaatcactagcatctactgtgaacacaaagcgcagagagaaggggttacttcctcgtgcggttcgagctggaatagttggatatccaaatgttggcaaatcttccttaattaatcgcttgctaaaacgaagaatgtgtccagcagcgcctagaccaggtgttacaagagagctgaagtgggttcgttttggaagtgatttagagctattagattcacctggcattttgccaatgcgaataagtgaccagacagctgcaatcaaacttgctatatgtgatgatataggagaaaggtcgtatgactttgctgatgtggcagcgattctcgtacagttattagtgagacatccagctgtaggccctgaagcgtttcgaagacgctataggcttgacatggacagcgattgtggtaaaatgtttgtgacaaagctctctgttcacttgttcaatggagatgccagccaagcagccttccgcatcttgtctgactaccggaaaggcaaatttggctgcgtggccctggagagacccccaacatgagcaatggagatctcagatattcttagatgttaatagctgctctttgttcatagtaccacacacaacaattacagtgccctttgtagcaaccgtcacagcacgaactttcagatgtaggaggatgcaaaatgaattggcaatatggccccctctgtctagaggaaatgtagtgtggtagtaggtagttatttgaatgtaaatgaactgagctgatttgtaccaagatctttgtaggttgctacaatatcatgtgtggatctctagtttagagcgtccttgacatttcctgt

SEQ ID NO: 6423 - DNA, 1398 bp, Oryza sativa
  ref <308>: DATABASE ACCESSION NUMBER: AK063574
  ref <309>: DATABASE ENTRY DATE: 2001-12-06
gagataaaccaaaaaaaaactccactctcccctcctcaacccatttccaaacacccaaagaataccgcgatgcacacgcctttcgtggacaagagcccccaccgccgcctcgacggcttgggcgccggtggctggctgaagcagaggctggctcagatcctagtgcgatctacttgcaccaccaacaccaccaccacgacaacgaccacctcgtccacggccttcgtcagcctcgacaagaccaatgccgacacgcaccaagaaccgccgccgccgccctcgccgtacttctgcaccccctgcacctaccagaggcccaagcttgatgcccccggccgtccccgccgacgccgacgcagcgcgtcgctggtccacatctccatcgactgcaccggcggggccggggccacctccggccgccgctccgtccactccgacgcgcccctcctgccgtactcgtcgtcgttgccgacgaaggatggcaggaaacagagcagggcgaggagaaaggcgcgctcttcgccgtcgacatccaggcggcattgcccgtcgtcctcctggggccgcgcgcggctcccgaggggggcaccggggcagtacagctcctcgtcgtccacggtgaccgacgacgagctcgcgccgttcagcaccgacgaggagggcggcgaggaggccgacacgaggacgctcttctcgtccctcagcttctcctccgactccacctcggagttctaccacaccaacagcagcagcagcctcgccaggaagggccacaagaacgcgccggcgcgccgcccgccggcgcggcgcgcgtcggcgaggatcaccagcgacccggccgacgccttccggccggtggtatccgtggcggcgacgaagaagcagcacaacgacatgaagaagaaggaggagacggcgatcaagaggcagctgggcacggacgacgacaccgccgccggcgcgggcatggcggtggtgaagcggtcgagcaacccgtacgccgacttccggagctcgatggtggagatggtcgtggagcggcgcatctgcagcgtgccggagatggaggagctcctggggtcgtacctctcgctcaactcgccgcagcaccacccggccatcctcgccgccttcgaggacgtatgggaggccgtcttcggcgaggagtgagtgagcgatcactgatcagtgacagtggccaaccaaccgatcgaccaaagccttgtttgattagccaaccaagctataactcgttcgttgtgaggccagtagagcagaggtgtacgtagttaggagatgcagcgagcgatcggcattaatgcgtgttatcttggtttgcagttaagtctactttgtatttacatgaagaattggcatatcgatcgtgccatcaaatgc

SEQ ID NO: 6424 - DNA, 460 bp, Oryza sativa
  ref <308>: DATABASE ACCESSION NUMBER: AK063575
  ref <309>: DATABASE ENTRY DATE: 2001-12-06
gcacagttgcgccgcgccgacggtgccggacgagcagccgaccggccgtcgaccagtggctcccaccgagtccaggttcctcccgcggcgccacccaaaggcgcagccgcgcgaggtaccccgggcggcggctgcggcaagtgaggtgagcagtatgaaagcattgaaaaaaaaactcctttgctgggccggtggaaaaaagaacaagtatggagtcggaattctgacttgctctttggatcctatgaagattaagagtatttgttttgtatgccatcagtcatcagacacttccaagttccaactgaacgttgtaacctaagcctagattctcaactgtggaggactaatcatgcagttgcacttaaatgtcaaatactatatatttgatcaatgttagggcccttttgacactgtaaatcttcttgattgcctctaatattaatgcatattctttgcc

SEQ ID NO: 6425 - DNA, 1124 bp, Oryza sativa
  ref <308>: DATABASE ACCESSION NUMBER: AK063576
  ref <309>: DATABASE ENTRY DATE: 2001-12-06
acagaggtttcatctctccatacttcatcactgacccaaagacccaaaaatgcgaactcgaaaagccacttatcctcgtcactgactccaaactctcctccaacagccaaatcatcccagtcctccaaaacgctatctccaaacaccaaagaccactccttatcatcgctgaagatgttgactctgatgctttgaccactctcgtcctcaacagaatcagagctggcgcaaaggtctgtgcagtcaaggctccaggtttcggtgatcacagaaagaacaacctccaagatattgcaatcgtcactggtgcaaccctcgtcactgaagatctcggcctcaagctcgaagctcttgaatctgcatggttgggtaccgcagaaaaggtcagcgtctccaaggatgacactttgatcctccacggtggtggtgacaagcaaagcatcaacgaaagatgcgaacaaattcgtgaacacttgaagattgaaggtgtctccgaattcgaaaaggagaagtaccaagaaagacttgcaaagctctctggaggtgttgcagtccttaagatcggtggtgcttctgaagtcgaagtcggcgaaaagaaggaccgtgttactgacgctctcaacgcaaccaaggctgcagttgaagaaggtattgttgctggaggtggtactgcattgatcattgcatccctcaagctcgcccagttggaagcaaagaacttcgaccaaagaactggtattgacattgtcagaagagctgtcagaaagccactcaagaccatcgctaacaacgctggtgttgaaggagacgttgtcgtcgagaaggttatccaaatgaacaaccctaagatgggatacaacgcagctaccaacgaatacgtcaacatgttcgaagctggtgtcattgatccaaccaaggttgtcaagactgctttggtcgacgcagctagcgttgcttctctgatgaccaccactgaagcaattgtcactgacctgccaaagaaggaagaacactctcatgctggcggtgctggaggcatgggcggtggtgactacggattctaaaccccccaattttgcgacctcttgtaaaaactcctttttataaaactaaaacaaataacc

SEQ ID NO: 6426 - DNA, 757 bp, Oryza sativa
  ref <308>: DATABASE ACCESSION NUMBER: AK063577
  ref <309>: DATABASE ENTRY DATE: 2001-12-06
gtcgcctttcccatctccaaccaccactccactccacctcctcctcctccgccgctgccgccgcgcagatccgcgggcaaggggctacggtgcggcggcgccgccctgcacccccacgccgccctccgcaccgcgcgcgcatccagcagtcggaagagttggaggaggaggggatgaaggatgtggtggggagcccggggacatggagcgggatgtcgctgcgggtgtcgcaatgcgtcttcgccggcgcctccgtcgtcgccatggcctccgcctacggcttctccaactacaccgccttctgctacttgattgcttccatgggtctacagcttctttggagttttggacttgcttgtctggatatctattcattacaaactaaaagagatcttcataacccagtgcttgtaagcctgtttgttgttggtgattgggttacagcgattctttcgtttgcagcagcttctgcttctgctggtgtcactattctttttgagagagacgtgcacttctgtaggatgtacccgcagctttcgtgtggtcgttacgagctttcagttatcttggcattcatcacatggtcgttcatagctacatcagctgtttccatgttttggttactagcttcgctttgaatcgtatcattatcgctgtcatgttgtgctaaccatcaggattccatcaaatgtactctgcttgagacatttagattttagatttctgttaatgaggaagcatccaaatcattctgagt

SEQ ID NO: 6427 - DNA, 623 bp, Oryza sativa
  ref <308>: DATABASE ACCESSION NUMBER: AK063578
  ref <309>: DATABASE ENTRY DATE: 2001-12-06
cagcgagggcggcttcgacaagctctacaagcagacgttcgccggcgccggcgccgacgagcggctgaggaagacgttcgcctgctacctctcgacggcgacgggccccgtcgccggcacgctgtacctgaccgaccggagcgtcgcgttctgcagcgaccggccgctctccttcgcggcgccctcggggcagacggcgtggagctactacaaggtgatgatcccggtggccaaggtcgccgccgccgagccggtgacgatgaaggagagcccgccggagaagtacgtgcacgtcgtgacggtggactcgcatgacttctggttcatggggttcgttagctatgacaaggccgtgcaccacctcgtccaggccgtctcctcccagcaacgtggcggcgccgccgctgacacggccgccgccgtccccggagacggcaagtgatgatcggatcgaacgatgagctttgtctgtttggctttgtacagtgtggctgtgtttcattacttgtattttgatgtgttttgagtatatatgcatgctttggtgtcctcctcctagttgttggcatgtatggaggacatcatttgttatactatatatactactaaatattagtttgtcg

SEQ ID NO: 6428 - DNA, 915 bp, Oryza sativa
  ref <308>: DATABASE ACCESSION NUMBER: AK063579
  ref <309>: DATABASE ENTRY DATE: 2001-12-06
gaacccgagcagaacgaccgaccgtacttctggttccccgtccacctcctccccaccgcgcgatccatggcgttcgccggcatccgctccggcgtcctcagatcggtggcgggtgtggacggtctcgccgccgccgccgcggcgcgccccactcctctcctcccgcgcgtccacctcgccggcgacggcacggggcggatggcgaccaccatcgggttctgcccccgtctcagagccgcgccgccgtcctgcaagaaggcggaggcggacccggcgccgtctctccaggatgcggtggtggcggtggatgctgtgctgcgtgcccctccacctccccaagagcatggcggcaagatggcggcgattctggagtttctgaagaaacactcgctttcaagggagaggagaaggtgatcgttgcggtgactgacgaggagaaggcgattatcgcggtgaaagtgtgcgacaaggctaacaagatatacaacatcctctccaagatcgcgccgattgtggtggacttcatccgtatttttggacggtagctaactgccatcgaagatgtgaagagtactttggcccaggagtcgacattatgcagataataggaggttgaggttgatactatgcaggcaataggaagtttacctagataggttcagtggatttattagctagatatattcaggatttgatttgctgccctatgtcacacatataatccagtttgtttggatttattagctagatatattcaggatttgatttgctgccctatgtcacacatatatccagtttgtttttgatgggtagcaccgtgatgctcgaagggatatcgtcatatcgacacatgttggcacattttaagctggcccattttatatctgaaatatatgtgctttggttttttctgcg

SEQ ID NO: 6429 - DNA, 1981 bp, Oryza sativa
  ref <308>: DATABASE ACCESSION NUMBER: AK063580
  ref <309>: DATABASE ENTRY DATE: 2001-12-06
acttctctcttctcccacttcccccctcctctcctccggcgtgcggaaaattcgagaccccgaaattccggcaatttcaaacgcgccccctcgccgccggcgagccccagcgcgatcctgagccccggcggtccgtcgccggaggtgttagcctcgtgaggtggctctcgccgtcgccggcgagcggcgtaggcggaggcggcggcgatggggaactctctggggtgctccgcctccggggagaggctggtgtcggcggcgcgggacggggacgcggtggaggcgcggatgctgctggagctcagcccggcgctggcgcggtactccaccttcggcggcctcaactccccgctccacttcgccgccgctaagggccacctcgacattgtgacgctgttgctggagaagggcgcggatgtgaacgtacggaactactgcgggcagactgcgttgatgcacgcatgccggcatggccactgggaggtggttcagatgcttctgctcttcagatgcaatgttaccagggcggattacttgagtggccgaacagcattgcatttcgcagcacatgatggacttgttcggtgcgttcgtcttttactcgcggactttgtcccaagtgctcccttagaggatggtgcttcttcgacggtggatggtggtgaatgtcagacgaatagtgggagcagtccttgttcttctttgggactgaaatttaatgaatctgctcgtttgagatatatcaacaaacctgctgatggcggtgttacagcacttcatatggcagctttgaatggtcattttgattgcatgcaattgttgattgacttgggtgctaatgtgtcagctgtcacattcccgtatggcactacagcaaatttgataggagctggcagtactcctttgcattatgcagctggtggaggaaatgctgagtgttgccagctacttctgtcaaaaggcgctagcaagttgacactgaactgtaatgggtggcttcccattgatgttgctaggatgtttggacgccgtttcttggagccattactttctccaaactcaaactcgagtatccctgcatatcaaccatctaattatcttgccttgccattcatgagcatacttaatatagctaggttagtgcttaacaactcattgctcactaatcggttttcttctgatggaagtaaagtataaatataattcttgcttttgtggaaaacaatgagtgctggcttttgatatgtaaacctatgtttatacttttttagaaagcacataaggttgtgatgaaagcagcctcattatacactagcagatccggtacttatcaaaatctttcaggccagattatgtgctctgtagaattgcaataatttcagaaactgttaagttaggaaggtaactacagttttggcttcaatgattttaatcttcattggctcatgggtcatggcacagttaaccttttgttaccttatgaattatgtttggcttccaattacctgaaaccaagcatatttcaatttaacttacaattccaccttggataagaaatgttttttgtttctcttactatataacggtactaataatattatcttcctgtcaaaagattgataatgataaatatatacttattgccttattggaacctttatagattttctctgtgcatttgcagagaatttgggttgctgcacaccgtagcctctgtggatgatagtgatctttgtgcagtttgccttgaaaggtcttgttcagtagctgctgaaggttgttgtcatgagttctgcatcaaatgtgctctttatctttgctcaacgagcaatacccgtgttgagttcactggcccacctggatcgattccgtgccctctttgtcggaatggaataatgtcatttaccaagttgcccttcggctgttgtggaatgcgggtatttacattgctaattcctatgtctttattttggcttgtggc

SEQ ID NO: 6430 - DNA, 665 bp, Oryza sativa
  ref <308>: DATABASE ACCESSION NUMBER: AK063581
  ref <309>: DATABASE ENTRY DATE: 2001-12-06
ctgctcgaactcctcctcctcctcctcctcacgcaagcttcctctcgatcgtcttcgttttcttggtcgtcgtcgtcgtcgtcgtcgtcgcaggcgaaactatggcatcccggagcagcagcagccggagccgtgccgtcgccatgtggctcgtggcgctcatggtggtcttcctggtcgccggaccgcagccggcgtccgcggcgcggccgctccggccggccggctggaacgcgcctagcatcgacggggagggccactacgcgtccggcgtcgtcgacaagtacgcgccgcttctgctctccatgctgccgaggggccccgtgacgccgtccggccccagcggcggcaccaacggcgacggcaactgaggaatggaagccatggaaaagcgcccgattggagatcgaggtgcagagggagatctgctggttcaattcataaatcatagatgccacggataccagcctttttcttaatttctttctttattttttttttcgtgatgtacaaaatatatagaaaattggtagaatacacatactcatagtcatagggcagggtgtatatatacgatatatatactgttatacatattcttttgtttgtcaattgtcatagtatattttgctgtgacaccgttatataaaagagggtttacgttt

SEQ ID NO: 6431 - DNA, 604 bp, Oryza sativa
  ref <308>: DATABASE ACCESSION NUMBER: AK063582
  ref <309>: DATABASE ENTRY DATE: 2001-12-06
acagagcacaacactacagggacacccaaaaacggaaaaacccaatcagatcacttcacccacagcacacggcaaaatttctccatcgatcgatcgatcctttgcaattgcaagagcggcaggcatgtcgagcaccaataccacaagcaacgaccccaagacgaccaaggatgaattagctccgccggcaccgacggcagcggagcatggaggcggcaaggacgcggtgacgaagacggtgcagacggtggaggtgaaggagtcggtggggcaggagccggtgctcaagcccaccaaggtggtgcaccagatccccgccgaccaggccaaggacgcgcccaagcaggattaatccagtctgcatctactgcaactctactagtactagtacctttgcaccttgcagttgcagtcggtcttgcagatatgttcatggacacgccgagtttggtttagttagttttctgcgaatgcgtgatacccacccacctcttgttcttgaaaatgttttgtattacatctgcttagcacttacgtgccgcagctaagtgtctgtattgtttgttacatatcgattaactaatgtggcccccaataataatat

SEQ ID NO: 6432 - DNA, 696 bp, Oryza sativa
  ref <308>: DATABASE ACCESSION NUMBER: AK063583
  ref <309>: DATABASE ENTRY DATE: 2001-12-06
agagcactagctagctagctagcttttgctcctacatcttcacttcagtaccacaccggcttagcaaaagccagctgcaagctagtaggatcgatcgaccaccatggcgtcgtcgtccaaggccctgctcttgctcgctgtcctcctcgcatccgccgtcctcctcgccgccgccgccgaccaacctcatggcaaggagcagaagaagacggagagcggcggcggcgcgggcgtccaggactggcacgacgaccacggtgggggcggccatcacggaggtggcggcggcggctaccccggtgggcagtgccatcacggatgctgcggcggctacggataccacggcggctgccgccgttgctgcgcgaccgccgacgagaagccggaccccatgtaccgccccgaggcgcacaactaattaagtctcagacgatcgtccgacgtacgtacgtacggccggcgccggagctcgctagcaacgtacgcagcaactaaaccaagtgaatactgaataatgaaaatgtgtatgccagcacgtatatatgtgtacatataaaagtctgtgcacgtatatgtatatatggaccacgtacgtacgtatgtatctgcgtgcatacggcggcggggtttgtgccgatatatgttactatacatgagtatatgtcaataaaaactagtactagtacttctaatacc

SEQ ID NO: 6433 - DNA, 760 bp, Oryza sativa
  ref <308>: DATABASE ACCESSION NUMBER: AK063584
  ref <309>: DATABASE ENTRY DATE: 2001-12-06
gtctcgcttcctggtcaaattgttcgctaataagcatcgatcgaaggcgaggccagccagccagccggggcgccgggggagctggggaagatggtgcaggggacgctcgaggtgctgctcgtcggagccaagggcctcgagaacaccgactacctgtgcaacatggacccgtacgcggttctcaaatgccgctcgcaggagcagaagagcagcgttgcgtcaggtaaaggatctgaccctgaatggaacgaaacctttatgttcagcgtcactcacaacgctacagagctcatcatcaagttgatggacagtgacagtggcacggatgatgattttgttggagaagcaacgatttctttggaagcaatctatacagaaggaagcatacccccaactgtttataatgttgtgaaagaagaagaataccgtggagaaatcaaagtgggcctgacgttcactccagaggatgatcgcgatcggggtttatctgaggaagacattggtggatggaagcagtcatcttgaggaagaagcagatactttgatgtcgcactgcatcgctatggtaagtcgtgtgctggaagcctggaacaaagcctattgaaaagagcagtcttgtagaaatacttctcatgattttctaaaagttgtaataatagtgttcgccaatatgctctatatgtaaggaccttgctttgatgcccactaaactgtaataactatggcaagttatgatgcaacagaagtgctataatccttt

SEQ ID NO: 6434 - DNA, 800 bp, Oryza sativa
  ref <308>: DATABASE ACCESSION NUMBER: AK063585
  ref <309>: DATABASE ENTRY DATE: 2001-12-06
aagtgccactagctagctagctactcctagaacgcaggcatggtgatgacgacgacgcgccacacggtccgcttcggctccgccacgatcgacacgacggtcaccagcgacgtcgcggccgccgacgagtgggcgcgcggcgtccgcgccgcggcgaggggcggccgcggcctgatcgtcggcctcgactgcgagtggaagcccaaccacgtctcctggaagacctccaaggtggccgtcctccagctctgcgccggcgagcgcttctgcctcgtcctgcagctgttctacgccaaccgcgtcccgcccgccgtcgcggacctcctcggcgacccgtccgtgcggctcgtcggcatcggcgtcggcgaggacgcggcgaagctggaggccgactacggcgtctggtgcgccgcgccggtggacctggaggacgcctgcaaccgccggctcggcctcgtcgggaccgggaggaggctggggctgaagggctacgcgagggaggtgctcgggatggccatggagaagccgaggcgcgtaaccatgagcaactgggagaagcgggagctggacccggcgcaggtcgagtacgcctgcatcgacgcctacgtttcctacaagctgggcgagagggtccttgccaactgatcatgatgcagtgcaactatggaactatccatgcacaacagcacaagtggagtagtagttttctttgttgctttggtcacccctgtattcagtggtgctatatatgttagccaatcgttctaacctggaatgctattctagtttgttgtttcatc

SEQ ID NO: 6435 - DNA, 1392 bp, Oryza sativa
  ref <308>: DATABASE ACCESSION NUMBER: AK063586
  ref <309>: DATABASE ENTRY DATE: 2001-12-06
gcatcaactactaccccaaattttctatctccaatttcttcacccttctcagatcgatcaggaagcagcaagcaaatccatcatccatggcactccgcgcgctcgacaacacgctgccgatggcgtcggcggagcggcccaagaagttgcccaagctgtccgccgccgccgccgccgtcgtcccggcggcctcacccgaggggaagaggaagaagaacgacgagaactcggcgcccaaggccacaacggagcaggcggtggagtacgtccgctccgaggatctccagccggtgccccaccccaaggccaaggcggcggggttggtggcggagcttgactccaaggactggatccgggcgtgcgacgcgctcaacgacgcgcgccgcctcgcgatccaccacccctccctcctcaaccccatccttggcaaggtgatgctggcgatcgtgaagacgatgaagagcccgcgcagcgcggtgtgcaagacctccatcatggcgtgcaccgacgtgttcgactccttcggcaacctcctctcctccgcctccgacgacgccttcgacaagctgctgcttcagctgctgctgaaggcgtcgcaggacaagcggttcgtggcggaggaggcggagaaggcgatgcgggcgatggcggcgtcgatgcctccccttccgctcctcaggaagctcaaggcgtacgtccaccacgccaacctcagggtgagggccaaggccgccgtcgccatgtcgcagtgcgcgtcgaggatggacgtcgcgacgatgaaggagttcgggatgtcggcgatgctgcaggtggcggcggagctgctgagcgaccggctgccggaggcgagggaggcggcgcgcgggatggtgaactcgatgcacgccgccttctccaaggaggccgccgcggcgagggaggaggaggagggcgccgccgcggccgcggccgcgtcgtgggagagcctctgcgcgctcagcttgccgcccatctcggcgcaatccgtcgccaagatcgtctcgcagtcgcagtcgcagtagccatccgtcgccaagatcatctcgctgatggttgtagctttcgatttgatttgatggatggttcggcacgcacgccgaggcattcaactgctttggtttagtttagtttagcttcgtttgagttgcttaccgtgaggggggcgatttgtttttttatgtctttgtttattattaaagcatgctatctcgcatggttgtttgaatactagtagtatttttcatttaggaattgtttatgtttagactttggaataactcaagttgtatcgttttgattgggctattcctcaacgtggtctcaaaatcaaattctatgtgcgatggccccctttcttcggatttatcatcggat

SEQ ID NO: 6436 - DNA, 826 bp, Oryza sativa
  ref <308>: DATABASE ACCESSION NUMBER: AK063587
  ref <309>: DATABASE ENTRY DATE: 2001-12-06
atctcaaaatcaatctaaatccatccatcgatctctcaattaattaacctcaagagagaagtaattaattgagctagctagctagatagtgagataaatagtgatcaatagctaagctagctagcttcgatcgattgatcatgatgaggtcgccgtggatggtgtttgcatgggcggcggcgatggtggccgtggcggcggcgtcgccggtgccgacgaagctgaaggtggggttctacgagcacagttgcccgcaggcggaggagatcgtccgcaacgccgtccgccgcgccgtcgcccgtgaccccggcctcgccgccggcctcatccgcatgcatttccacgactgcttcgtcagagggtgtgacgggtcgatactgataaactcgacgccggcgagctttgacaaccagtactacaagaacgtgctcaagcacagggtggtgctcaactccgaccaggcgctgctcgacagcccgtggaccgccggcgtcgtcaagctccactccgccgtcgagaaggtgttccaggtcaagttcgccgccgccatgctgaagatgggcaacatcgacgtgctcacgggtgacgagggagagatcagagagaagtgcttcatggtcaacaaccactactagttgtcaatcaataattaagcttatattatagtatatatataatttcatctgcagctggtttatacatgtagaattagtaatattacacgcccaaatttcatcatgtggaaatttttttgttgttgttttgtgtggcaaattgtgattaagaaaagattctattgttaactcaaacaagagaagattttctt

SEQ ID NO: 6437 - DNA, 856 bp, Oryza sativa
  ref <308>: DATABASE ACCESSION NUMBER: AK063588
  ref <309>: DATABASE ENTRY DATE: 2001-12-06
atgcggcaatacgcggctgctaccgctgcctcctccagtttcagagcacgtccacgggcgcgcccctcctgcctcccagccgccgccctgcccttggcgccttgctgtggtgtggcgtggagccgtgctagctacaggcgagcctccgttcgtgccatgggtgccgcttcatcgtcttcgtcgtcgtcgtcgtcgtctccgtcgccgcagggtcaagcccaagcccaagcccaaggtaaaccgaactacagtacatctctgactgatgaggagtggaggaagcgcctgacaaaagatcagtattacattactcggcagaagggcacagaaagagcatttactggggaatactggaacaccaaaaccccgggcatctaccattgtgtctgctgtgacacccctctttttgagtcatcgaccaaatttgatagtggtactgggtggccgtcatattatcaacccattggagataatgtaaagtgcaagcttgatatgtccatcatattcatgcctcggactgaggtgctgtgtgctgtctgtgacgctcatctggggcacgtgtttgatgatgggccacgaccaacagggaaaagatactgtatcaatagcgcatctctcaagctgaagaagacccagtagacctgtgaagattatggttaccatgtacctacacggctacactatccgactagttataagggatagattatgtatatagaatatgtaaagaattaagacttgggtattatgtttacttgtgtatcaaggaaatgacgtgtagtcctagttcggtaagattgtaaagtagttgtaggagatttaaaccatattaacttaaatctctatcttataaacc

SEQ ID NO: 6438 - DNA, 980 bp, Oryza sativa
  ref <308>: DATABASE ACCESSION NUMBER: AK063589
  ref <309>: DATABASE ENTRY DATE: 2001-12-06
aaaaaaaacaacatctgaatacatactgaatcctgaatcagcaagagaaaacccacaaacgatgggttcgaggagcaagatcagcctgaagctgctggtggacagcaagtcgaagaaggtgctgttcgcggaggccggcaaggagttcgtcgacttcgtcttcagcctcctgacgctgccggtcggcgccgtcgtgaagctcatctcggcggggacgatgcagggcagcatcgggcggctgtaccagagcgtcgagcacatcaacgcctcctacctcctccccaacaaggaccgcgccgacctgctccagcccaaggtgctccacccggacgcccgcgagctcctgctgctgcagccggagagcggcggcgccgggggatcgccgctggccaggtttaagctgtacacctgcgcggggcactgcaccacggccgccatggaggccaaggcggcgtgcccgcagtgcaagcaggcgatggacaccgaggtggcgctcgtgctgccgtccgcgtcgtcgccggcgcagtcgtcggcggcggcgtcgggaggcgacggggagagcagcgggtacgtgaaggggctcgtgacgtacatggtgacggacgggctggaggtgacgcccatgtcggccatctccagcatcactctcatcaacaagttcagcgtcggcaaagacgtcgagcttgccgagaagtacgtcagcatcgccatggacgaggggctgggcattctgaaggcggcgctgcgctctgacacggtgctctccgacgtcttcctcgccaagaagaagtgaaacaaccagtgctttttatcgatgccgcatggacgttcttcgatttgcttgctgcccatttcgccttattttgctccatgtctgcttcagaattcagtgtgtctgcctcgcatcaatgtttagttgctctgtattagtactggacatgatctatctatctactaatattatattggctttattacct

SEQ ID NO: 6439 - DNA, 540 bp, Oryza sativa
  ref <308>: DATABASE ACCESSION NUMBER: AK063590
  ref <309>: DATABASE ENTRY DATE: 2001-12-06
ctctctctctctgcggcggcgggaggggcgtggatgggaggtgcggcgggggtggacggcgtggaggcggcaggtgggcctccgccagatccgatggcgtggaggcagctgtggcccggcgggggtgggaggggcggccggccgggcgcggcgccctcccgtctgccagatctggcggcgggaagggaggcggcgcgccccgacggcgggacgagaggcagcgacgccctccctccgtcagatctggagggggggcatgcggcggcggtccagcggcaggaggtggtggtggcccgacggcggcgctggtgactggtagtggtggcgccctccctccgtcggatctggaggtggtgcatgcggcagtggtccggcagcaggaggtggtggtgacccggcggcggcagtggtgaccggcagtggtggcgccctcctttgatttttcttgatttttgttattagtgaaagattgaagctgacgcatcgagccatcttttatgtagtttgtgaatgatttttgtgaaagattcaatgttagtg

SEQ ID NO: 6440 - DNA, 1550 bp, Oryza sativa
  ref <308>: DATABASE ACCESSION NUMBER: AK063591
  ref <309>: DATABASE ENTRY DATE: 2001-12-06
cacgccgacccgaccactgcaacagtagaaatagcagagcagcgtcgagctcgagcagagagcaccgccacctcgtcggagctagcagcagcgccgccgcccgtgagccctcctcgtcctcccttgctggcctacgcgagctttgcagcagctgaggcctcggcattgcggcttcaattccgtttcttggttcgtcgcagaagcctcaagctctgaagctccggcgatcaccggcggcaacggtgccgccatgatcaaggttcagggcccagtagtgctgtaccaggacggcgtgcatgaggcggcgaggaggaggcggtcgctgagggcgcggtacgcgtacgggctcatattcttcgccaccaacctgctggcctggttcgtcagggactacggcgccaagctgctccgcggcctgcaccatgtgccggtttgtggagcaggagactccaagtgcttccaatctggaggagtgcttcgagtgagcttaggttgctttatatttttctgggtgatgtttgccacaacatttggaactcgcaagctccatgaagttcgaaattcgtggcattctgggtgctggattctgaagtttcttgtgtatgccgtgtcaatcatcatcccgtttattgtccccaacatcttcatccagctgtatggtgaaattgctcgaatgggtgccgggatatttctcatcctccagctcataagcatgtcacacttcatctcgtggtgcaataagcgttggatgccagattctcaatcaaatcaatgcggcctgttcggattgttcttgtcgaccatctccttcatcgcctcgtttgccggcatcgccgtgctgtacgtcctgtacgtccccaactcatcgtgcgcgttcaacatcttcaccattacatggacggcgacgctggtagcggtaatgatggcggtgtcactgcactcaaaggtcaacgagggtctcctctcgtctggaatcatgggcttatatattgtgttcctttgttggtcggcgctccacagcgaaccacaaactggaaagtgccatactcggctgatatttgccaatgatggtgattgggctaccattgttagcttcattattgcaatttgtgccattgtgatggccacattttctactggaatcgacaccagatccttccaattccgaaatgacgaggaccaattggaggacgatgtcccctacagttacgagattttccacattgtatttgcaatgggagccatgtattttgcgatgctgttcatcaactgggaacttaaccatccaacgagaaagtggagcatagatgttggatgggttagtacatgggtaaagatcatcaatgaatggtttgcagctagcatatatgtttggagattgatctctccagttatattgaggaagcaagctgccaataatgaagagctggtgccacggaccctcatagtacagtgttcaagatagctaattcttccttcacacatttttcgattcaattattgtgaaatgcatatatccagctaagagtatatacagtctgattgctcac

SEQ ID NO: 6441 - DNA, 904 bp, Oryza sativa
  ref <308>: DATABASE ACCESSION NUMBER: AK063592
  ref <309>: DATABASE ENTRY DATE: 2001-12-06
ctcgatcgatctcttcttcgtcttctgcgtcgtcgtcgtcgtccagcggtgagctatcagggtagcagccatggccggagtcgggaggaacatgctggcgccgctcttggtgctcaacctcatcatgtacctcatcgtcatcggcttcgcgagctggaacctcaaccacttcatcaatggccagaccaactacccaggcgtggcgggcaacggcgcgacgttctacttcctggtgttcgccatcctggccggggtggtgggcgcggcgtccaagctggcgggcgtccaccacgtgcgcgcgtggcgccacgacagcctcgccaccaacgcggcctcctccctcatcgcgtgggccatcaccgcgctcgccttcggcctcgcctgcaaggagatccacatcggcggccaccgcgggtggcgcctccgcgtgctcgaggctttcgtcatcatcctcgccttcacgcagctgctctacgtgctcatgctccacacgggcctcttcggtggcggcgacggcgcctaccgggaccacgactacggcgttggcgccggtgctgccgccggcgagcccaaggggacagcgagggtctgatcgatgatctccccgacacggggtcacgcaagaataaacgataatacatacttgatggtcattttgtgtgtgtgacagtgtgactgtgaggctctgcctctgtgtgcagcagtgcagtgtaagctctgtgctctcgcctttaattacactactagttgtttagcgttgtgtgttgggtttgtgtagcttgtacatgtgtgtatgtgaccgtacctagtacgtactttgatcgtagtagctaggtgtgcacgtcatggcctgtattttgctcgcatggaagtgccgtcctcaattaattactccttgtcaccg

SEQ ID NO: 6442 - DNA, 849 bp, Oryza sativa
  ref <308>: DATABASE ACCESSION NUMBER: AK063593
  ref <309>: DATABASE ENTRY DATE: 2001-12-06
caagatgtgctcaattttcagaagaaaatcacaccctataggaactttgatcaaccattaaacgttggtggtcattcagttgttggcgatgactatatttcaagattacttttagatctagagggagatgaccagcagttggatttagcgctagaatcaagaaatcacgctgtggaaactatcaagcaaagccagcagcaattaatagtagtagcatcattggtagatcgcatccctaatcttgctggactgacaagaacatgcgagatattcaaagcagttggattggccgttgctgacaaaagtattatcgaggacaagcagtttcggttgatcagtgtgacggcggagaagtggttgcccatgatggaggttccagtgaatagcgtcaaagtgttcttggagaagaagaggctggaaggctattccgtgatagggttggagcagacggccaacagcaagccactggaccacttctcttttccgagcaaaacggtgcttgtgctgggacgggagaaggaaggcatcccggtggatatcatccatgtgttggacgcatgcgtggagatcccgcagctgggcatcgtcaggtcactcaatgttcatgtcagcggtgccattgccgtgtgggaatacacccgccagcaacgcatcgcaacttaatttctgtttgagcagaaatcaacttaattttctcaaagctgttccttgttactagtactcctactccatagtggagtctgtattatatgtattcatcaatcggttagaactagaaacaaatgagagatgatagtactccacttgtcttgcccgtacatacagcacaactctactgtcctgacctgc

SEQ ID NO: 6443 - DNA, 741 bp, Oryza sativa
  ref <308>: DATABASE ACCESSION NUMBER: AK063594
  ref <309>: DATABASE ENTRY DATE: 2001-12-06
caatatctatcagaagatgatgctttgatcagttccaagcaaaagaagaagaaggccaaacttgaagatgctccagtggaacagaaggataaattatctggaccaaaactgtggaatttaagggccctggtgttgaaatccttacacaaatgtttcctttacgacaatgaccagaagatccttgattcctccaatttccaggctcttttgaaacctattgtttctcagtttgttattgagccacctgaacattttgaatcagttccagaagctccatcagttgatgaagttgatgaaactcttgttttgtgcttggggcaaatggcagttactgcacggtcagatgttttgtggaagcctcttaaccacgaggtgctgatgaggacaaggagtgacaaagttcgccccaaaatgctcggtctgaaggttgtgaggcacatggtccaacagctaaaggaggaatacgtggttctcctcccggagaccattccattccttgctgaattactcgaggacgtggagctccctgttaagactctagcccaggagattgtgaaagagatggaaaccctcagcggcgagagcctccgtcagtacctgtgaggcatctgacgtctctgatctgcaacagtgaagtgaatatttatgcacttccgggtaaatcacttaagaaaaacatgggagttctatgcaaagttaacactaactggaacattctggaatatattcattttgctgtgt

SEQ ID NO: 6444 - DNA, 740 bp, Oryza sativa
  ref <308>: DATABASE ACCESSION NUMBER: AK063595
  ref <309>: DATABASE ENTRY DATE: 2001-12-06
aatcggaaaggagagtggtagctggtgtatcaatgttcacagaaccaattgctggtattccttctccagctactcagacggctcaggagagaaatactggcagggacaatgttgaaaccatgaagtcttctcgatcgacatgtactgaacatataattcttctgtcagatagtgaagaaaattcattgacagctgatgtgtctggtgaggatgttttgtcatcagttaaagatagtgatggatctggtacttcagatatgcagaaagaagtcgagcattctgaaccaaggatgcctactgaagatagacacgtgtcactaaaacaacagatttgcagcccggccagtgatattgtagcatcttctaaacctgtatcaaaagatagaagtataattgctgccaaagaaggattgggtagagcaaaaattccaactgttccagtgaatacaaatgatacttcccttttaccaaagaagattaaaccacccaccacaacaccatcagcagcagcagcagcagcatgatgcatgagagagtgagcgagtagaacaatgcagagaggatgatgcattagcattagctattaattagctctcctttagcttttcttctcctgtgtaattcttccaagactgcagtaaccctccctgttgttaagtttaactcatgcagcagcatcagttacttaggagagtagatgcattgttgccatgagaggtaattaaatctgatcttaggac

SEQ ID NO: 6445 - DNA, 1291 bp, Oryza sativa
  ref <308>: DATABASE ACCESSION NUMBER: AK063596
  ref <309>: DATABASE ENTRY DATE: 2001-12-06
aacacctcactcccctctctacagcaaccagcattccatttccatagcaatgactttcaaccctggctctcctggcttcggcttcccctttcccttctaccctcccaatcccaacccttatgctcccctaaaccccaatgctccgaagccaccggtgatgccaccgcgccctcaagccccgccacccccgcagcgtttcccgccaccacctgccccgcccatccgacccccgtcacctccaggccgcgctccaccaccacccggtcgtgcaccgccaccgccttctcaagccccaccgcccccacgccgtgctccccctccacccgccctgccaccgccacccccacgacgtgccccaccgccaccatcaatgcccccaccaccaccacctcgtcgtgctccacccccaccagcaacacctccgcccccgccacgccgtgctccacccccaccgtcaccgcccattcgaccaccgcctccaccaactcctcgcccctatgcaccaccaccgccgtctcacccactagcaccgcccccgccccacatcagcccaccagcacccgtgccgcctccgcctagcccaccaccccacatcgtcatcatcgtcgtcttcgtctcattcggcggcctcctgttgctagcatgcctcgccgccctcttctgctggcacaagaagaggagggagacggagaggaaggcggaggtgcacaacctgagtggccatgtccatgtccacaaggcgactgagtcaggccccagcggcgccaaggccaccgtgctgtccatcgacgaggacctcaaattccaggaggtcgccggcgagtcgtcgagcgccgccggagcagggagccatcataccccttggtcatggcacaggaggcagcaggaaggcaaagcagagaacaaggcagagctcatcaatgtcacggagcacatccatgtcgatgagaagattgtatcagggcctcaggggcaaaagatcgagatcctttcagaagatgaggacatcaggtttgaagaggaaggcaggaaggaaaagggagatcaaagatcaaagactcgcatcaccaagacctgacaagatgagtctgcatgcccaagtgttactacagctctaaagaaagctacttcagctgagacggtaaagttatccctacacttgtgtgatttgattattttgataagattgtatgttctttggtgtgaatgaaataagggagtctcagaccccatttggttgaatggaaagtgtaactattgctatcagcatttgaaatgaatgaaattcttt

SEQ ID NO: 6446 - DNA, 698 bp, Oryza sativa
  ref <308>: DATABASE ACCESSION NUMBER: AK063597
  ref <309>: DATABASE ENTRY DATE: 2001-12-06
gcttctcgaaaaaaaaaacagcacgtcttgctcagaagtctattaagatgccagcacaacaaccaaagaccaccaccaagccagcagctgctgccaccaccaagcaaactggtgctgcaaagatcaccaaggcaaagtccggcaacccaatgagacaaattaaaatcgcaaaactctgtctcaacatttcccctggtgaaactggtgagagacttcaaaaagcagctaaggttcttgaacaactcactggccaaactccagtcttctccaaggctcgtttgaccatcagaaccttcggtatcagaagaaacgaaaagattgctgtccacgcaaccgtcagaggcgagaaggcagctgaactcttgagaagaggtttgagagttaaggacttcgaattgagaaagcacaacttctccgaatccggtcaattcggttttggtatccaagaacacatcgacttgggcttgaagtacgatccaagcattggtatcttcggtatggacttcttcgtcgtccttgaaagaccaggatgcagagtctcccgtagaaaacgtgctgtcgctagtgtcggcaagcaacacaaggtcaccaagaaggaagcaatgaagttcttccaagagaaattcgacggtatccttttgggttaaatgctgcacttccccttgaactcctcccattaaattccaaaatgctgtaac

SEQ ID NO: 6447 - DNA, 1608 bp, Oryza sativa
  ref <308>: DATABASE ACCESSION NUMBER: AK063598
  ref <309>: DATABASE ENTRY DATE: 2001-12-06
ctgacttcgcccgccgactccgccgccgccgccgatccccatccatcccgcgagcagagcaggaggagcgcgagcgcgagcgccgccgttcatccgcccttctgcttccgccgcgtcgcatcccgattaatggccgacggtgaggatatccagccacttgtatgtgacaatggcactggaatggtcaaggctggttttgctggtgatgatgcccccagagcagtgttccctagtatagttggtcgccctcggcacactggtgtcatggttggaatgggccaaaaagatgcctatgtgggtgatgaggcacaatcaaaaagaggtatcttgaccttgaaataccctattgagcatggtattgtgaacaactgggacgacatggagaaaatctggcatcacaccttctacaatgagctgcgtgttgctcctgaggaacatccaattttgctgacagaagctcctctgaacccaaaggctaacagagagaaaatgacccaaatcatgtttgagacattcaatgcaccagcaatgtatgtggctattcaagctgttctttcactatatgccagtggtcgtacaacaggtattgtgcttgattctggtgatggtgtgactcacacagtgccaatctatgaaggatatgcacttcctcatgctattcttcggttggatcttgctggtcgtgatctgactgactgcctaatgaagatccttacagaaagaggttattcctttacaacaactgcagagcgggaaattgtgagagacataaaagagaagcttgcatatattgctcttgattatgagcaggagctggagactgccaagagcagctcctctgttgagaagagctatgagttgccagatggacaagtcatcacaattggcgcagagaggttcaggtgcccagaagtgctgttccagccctcgctgattgggatggaagctccggggatccatgagaccacctacaactctatcatgaagtgtgatgtagatatcaggaaggatctctatggtaacattgtgcttagtggaggaactaccatgttccctggcattgctgacaggatgagcaaggagattactgcccttgcaccaagcagcatgaagatcaaggtcgtggcacctcctgagagaaaatacagtgtctggattggaggttctatccttgcctccctcagcacattccaacagatgtggatatctaagggagagtatgatgaatccggcccttcaatcgtccacaggaaatgcttctaatccgagccttgctctgagtattttcggtgtgcctctctgttgtctgtactgtcagtcttgtgagctttgcatggttgggcgtgtgtcggtactttcgtcgtcagtatattttcaagtttctgagagcgtttttttgcatatatgctagtactactggatgaagaaaaggtagatccaagctcgtttgtttgagatatatcctgctttagtgatttcagatgccgtgtgttctagtgatatgttgatattagtgagtgagaattgtatcggtttggccgcctcggccgttctgtgactgcggaacattagctatgtatgtatatttgcctaagtattggctatatt

SEQ ID NO: 6448 - DNA, 716 bp, Oryza sativa
  ref <308>: DATABASE ACCESSION NUMBER: AK063599
  ref <309>: DATABASE ENTRY DATE: 2001-12-06
cacgcgcgagcgctgccatcctctcctcctagctaggtcgatcgacgtcgagaatggcagatcggcagcagcagcacgcgcacggcgagggccggacggcggcgcagcgcctcgggtacgcgcccgcggcgtcggcggactcgccgtcgacgacgctgctccggcgggtgcagacgcacgcgccgaactccacccaggtggtcggcttcctcacgctggccgtctccggcgccgtcctcctgctcctgaccgggctcacgctcaccggcgccgtcgtggcgctcatcttcctggggccgatcgcgctgctcaccagccccatctgggtgcccgtcgccgtcgcgctcttcgtgctcgccgcggccgcgctctccgcctgcgccttcgtcgtcgtcgccgtcgccgccggcacgtggatgtaccgctacttcacggggaggcaccccgtcggcgccgaccgggtggactacgcgcgcagccggatcgccgacacggctagccacgtcaaggactacgcgcgcgagtacggcggctacctgcatagccgggccaaggatgccgcgcccggcgcgtaagccgcccgcgcgcgccacatgtgtgtcggtgtgtggcatgcagcttagatgtgatcgttcttcttcggtgtgtttgtgttgtcgatttcctcacttcttctgtaggctactttaatttggtattttgatcttcttcttctc

SEQ ID NO: 6449 - DNA, 537 bp, Oryza sativa
  ref <308>: DATABASE ACCESSION NUMBER: AK063600
  ref <309>: DATABASE ENTRY DATE: 2001-12-06
gattggatattacagcagcccaactccgaccaacttaatttcctcccccgaccccgccgccgagcaggccatcttccgcaacaccgtcgccgccctgctcaccatgcaggaggtccgcagcggcagctccacctacggccacttctccctcccgccgatgaccccgctgcccgactccgactggctcatccagtccgtccagccgccgccgccgccgccgccgtcgtcgccgctcatcatccccacgtagtcatctcacggcaaatgccacatattgcgacgagctgcaacattgtcaaatttttttttcttcttttggcagcaaattgaaatcgaaatcgaaaagaacagacatgtaattacaaatctgtaatgttgtctttctctttttgtttttttggtgtgtgtttttatcatagtttctctaactaataggagtagtaaataatgtaacgaatgagatcaataccaatggttcttgatggccataactaagaaatactagtattagtactagattgcacatcacaggtgctc

SEQ ID NO: 6450 - DNA, 1263 bp, Oryza sativa
  ref <308>: DATABASE ACCESSION NUMBER: AK063601
  ref <309>: DATABASE ENTRY DATE: 2001-12-06
cccttcccatcaccgcggaggcgcagatacattcgccgccgtcgcgccaccaccggcggcggcggtatggcggccgcaccgccgccacggaggcttggcgcgctcgccagcgccggcctcctccacgggatcgacgcccagctccgacgcgtagctgattcactagatcgaatccctctaagctggagattcctggtatcaagctgggcgaggatgaagatgtcacagaagaagcggtgctgacctctttgaaaagggcgattcggcgttattctactcttcaggcacatgatggacactggcctggggattatgctggtcccatgttccttcttccaggcttggttatagtactgcatgtgactggtgcactaaatactgtgctatcaacagaacatcaaaaggagattcgccggtatctctataatcatcagaatgaagatggaggctgggggctgcacattgagggcacaagcaccatgttctgtactgtcttgacttatgttaccttgagattacttggagacgaatcagatggtggagatggagccatggtgatagctcgaaattggattttagatcatggaggagcaactttcacaacatcatggggaaaattttggctttcagtacttggtgtctttgactggtctggtaacaacccattgcttccagaattgtggatgctaccttatttcctcccatttcatccaggacaaggctcgtaaccaatgcgctaaggaggatctgtactaccgtcatccattagggcaagatatcctatgggccactctttacaaatttgttgaaccagttctatcgcattggcctggcagcaaattgagagagaaagctctgaagaatgccatgcagcatattcattacgaagatgagaatactcgatacatttgcagcggtgctgtacagaaggtattaaatatgctttcttgctggatagaaaatcctaactcagaggcattcagatttcatattccaagggttcatgattacttgtgggtcgctgaagatggcatgaagatgcaagtgcttatttcatatttgggactaatggctatcttttgaatccattttatttgctttcagttgaggtggttgtgtcaacagtaagcttatccacatatttgcttatcttaatcacattgcaaaattattttagcattttcagttgatacttacgtatttgcatcattctttttaactgactctatgcacaaaatctgtgtggtgtatggctcgatgttt

SEQ ID NO: 6451 - DNA, 804 bp, Oryza sativa
  ref <308>: DATABASE ACCESSION NUMBER: AK063602
  ref <309>: DATABASE ENTRY DATE: 2001-12-06
gctgcagtagcaagaaggagagcgagagagcaaagcccaagttggtagccatgacggagctgttcgacaccgccgtgaccagcctcctccacctgccggaggtgctcgaccggctcggcgccgccgccggggaccgccgctcggcgggcgaccacgcgcaccacgccgcgcatggacacggccagcaccgcatcagtggaatcggtggtggcgcgccagtggacatcatggagacccccggcgagtacgcgttcgtgctcgacgtccctggcctctccaagtccgacatccaggtgcgtacaaaatccgagccctgaatttcctcgattcgcgttcgaatcagcgagttagtttgggcgcgattctttcttgtctgcgcaggtgacgctggaggaggacagggtgctggtgatgaagagcagcaatggcgccgggaacgggaagcggaagcgggaggaggaggaaggggagtgcaagtacatccgcctcgagcgccgcgcgtcgccgagggcgttcgcgcgcaagttccgcctcccggaggacgcggacaccggcggcatctcggcgcgatgcgagaacggggtgctcacggtcaccgtcaagaagctggaaatggttgccgagaatggttggagcagtagaatgtgtttgtgctctgttcgtgtttcggtagtacaagttgtcgctgatctgctatgtataaacgctggtgtgaccgtgaagatgaagactacggaagtagctgttcttttgtgtaggatcaagcaaattatgtcaaatctcgttcgtgaacgattccaaatc

SEQ ID NO: 6452 - DNA, 614 bp, Oryza sativa
  ref <308>: DATABASE ACCESSION NUMBER: AK063603
  ref <309>: DATABASE ENTRY DATE: 2001-12-06
cattgagcagatgagggagaaacacgttgatattccacagcttacatatttccagatggatgttagggacatgagtttgtttggtgatggaacattcgattgtgtccttgataaaggtacattggacgctatgatgtgtggcgatgatgctcctcttggtgcttccaaaatgctagcagaagtggcaaggattcttaggcctggtgggatctacatgttgataacatatggttgtcctaaggaacgagtgcaacttttgtaccaatctggaagccacaaaaaaattgaactgtacattatgcccacacctggataccagttgaaatggagcaaaggtgtttcacttgcacaacctatcatggaggaagtttcattgacagtggatggtcaattaccacctgactatgttcttaaagatccagagtcacattttatttatatttgcaaaaagccagatgccgctaatgaagctaattctgtggttgctaatgaaggggaaaccataacttcaaaatgatcttttgtatccttaatttgcattttgttttgggttgctgacgagccttggatagtatgtgctcataataaattttgtcagatgttactgttggatg

SEQ ID NO: 6453 - DNA, 780 bp, Oryza sativa
  ref <308>: DATABASE ACCESSION NUMBER: AK063604
  ref <309>: DATABASE ENTRY DATE: 2001-12-06
catgaaaatggagccgggactgtgagtatatccagcaagaagtcgaagcatcgggttgacagtgaaaaaaaaccccatgttgacatctctggagtgattgattcagattcgcagaaatgtaattcagagcaaatccattcagctaatgggatagtatcccgggatgtcaaccatgatcacatagaaaactgcaaagttgaatcaaatgattttcccttgaatactatctctgaaacaagatatccaacagacaattggaacagttctcagtttgctctgagcaatgatggttcacctgttctcaataatcagagtactccacaaactggtcatggctatggagataatgatctaacctacattgattggcctgctattgataattttgaggacgtcgacaacttattcaggaggtgtgattccacgtacggtcagcagcaacttccgaacacggatgaactgtcatggattccttcttcagatgccatgtactcttctgatgttgctatgcaaccagggtttgaatcctcgtattctgattatggtatcctggatgacctctccgcattcaattgtacggaagataaatccctgacaacagctgatccttcaagtgctgtatgtgacgagcaattcgatgactcttatctgttcaatgagcaaaaacctgaagatgtttatggcgaacaggcttaccaaagggatgcgatggaattgttgtccagcgaccagtgctctgaatgaaaaaaaaatcaggaaatttaatcgcgaggaggagag

SEQ ID NO: 6454 - DNA, 1222 bp, Oryza sativa
  ref <308>: DATABASE ACCESSION NUMBER: AK063605
  ref <309>: DATABASE ENTRY DATE: 2001-12-06
acacaaagacacacgtacttgtatacacagctctcgcaccaagcaagcgtgcacaacaattgcactacgagatcatggcctcggatcgtagggtttgcaccgtccaccacatgagccacgcggcaatcgtgctggtttcagtactgctgctgtgctcggcacatccctccgcgggagccaggaggctcatggagctgtacaagccaccgcccagcgagcaactcacgtaccacaacggcaccgtgttgcggggcgacatccccgtgtcggtcgtctggtacggccgcttcacgccggcgcagaaggccgtcgtctccgacttcctcctcttgctcaccgtcgcctcgccggcgccgaccccgtccgtgtcgcagtggtggaacaccatcaaccagctgtacctgtccaaggcggcggcgcagggcaagaacggcggcggaggcggcaagatcaccacgcaggtgaggctcgccggccaactcaccgacgaccagtgctcgctcgggaagagcctcaagctgtcccagctgccggcgctggcggcgagggccaagcccaagaagggcgggatcgcgctggttctcaccgcgcaggacgtgtccgtggaggggttctgcatgagccggtgcggcacgcacgcgtcgaacgccaaggcccgcacggcctacgtctgggtcggcaactccgccacgcagtgccccggccagtgcgcgtggccgttccaccagccggtgtacgggcctcagacgccggcgctggtgccgcccagcggcgacgtcgggatggacggcatggtgatgaacatcgccagcatggtcgccggcgtcgtgaccaacccgttcggcgacgggttctaccagggccccaaggaggcgccgctggaggccgcgacggcgtgtccgggggtctacggcagcggtgcgtaccccggttatgccgggaacctggcggtggaccccgcgacgggagcgagctacaacgccaatggagcacacgggaggaaatacctgcttccggctttgttcgatcctgccacgtcaacctgttcaactttggtgtgagggactcaggacggaggaaatatggtgtaatgataaaccggtgtatatacggagcaaagagtggtcaagagtaaatactacttgtacttctttgaaaaaaaataatacccctagatatgattttttaagaagatcggtaaataaaatcgaaatagctatcc

SEQ ID NO: 6455 - DNA, 503 bp, Oryza sativa
  ref <308>: DATABASE ACCESSION NUMBER: AK063606
  ref <309>: DATABASE ENTRY DATE: 2001-12-06
acgggccacgtcctccccatcgccgcatccatgcccgaggcgtgagtcctccgctagctgtcgggttccgccgccgcatcgccaaccaagccgcagggtcccaaccagcccgcaatcgagctcgagcgcctcgcgcgtcgccgcccctgagcgcagctgcgcagggccaccgccggtcgcctcatctcctccaccgggtgcagcatctccactggccgccaagaccaacaccatcagtacgccaccaagctacttggttctttcccattgaagtctcgatctgcatttcttgcgtgtttccccatctcatcttagtgctaagtgttctctcctctcctaaatccaatgagttttggaagtggcagtgcatctctagcactcgtacgtactgctactgctagcgtggctatgcggctgcactttgcagattcattagtagtactagcgaccagacatgggagctctaaggtgagcctgtactaaaaaaatttggtgtattgatc

SEQ ID NO: 6456 - DNA, 1285 bp, Oryza sativa
  ref <308>: DATABASE ACCESSION NUMBER: AK063607
  ref <309>: DATABASE ENTRY DATE: 2001-12-06
tgtaaaagagaaataatgtcatgtttcagtattgcaggtgtgctgtaaggtgtaaagcttgattcttatatttttcatagaggttttagttactccttttcattacttgtctatgttactagttgaatttcagatatgtttcaattttgtcttgcttatttgcttggactactttgtttttgttttgcacattcaaattcgtgctgaaggcagatcaactattaacaacagaataggccaagcgatgattgggccattcgtcgtgtcactgaaatcagtatatcagaagttgaaacttcaggtgataaattggtgcatttttatgcatggtttactgatggaatgaatacagtaaacagactggttactctgaatgatatttctgagcacttggctgaagccatttgctcggggtttcctttatggacaaactaagcacattgaagtggattcatgatgtagtaattcactggaacaaaatgattcagataaataaggtccttcaattatcagtcctttctgatgaggaagtcatattactactaggtggaggctcatttctgaaaatatattcaagttctctaggtttgccatactgctaagggccatgttctgcacgtatcactaaccgttgcgtatttgaaatctgatctagatttaaacagtgggcagcttttttcctcatattgtgttttgtcatgcaacagaaaggtgtcttaggggaggaggcaatatgtaaggattgaggtatagagagttgagtatagagatggtatgcatgcttaattattcaggtcaaatcttggccacttctggcatatcattattgctgtttcatggaaaatgttatcagcaacagtgctccatggaatgatactattgctggagatcggaggcatagatcttacttggttaacatactgaagtttgactccggttcttgctgtgatattgatggcctttacctggaatgacagtgcctcatgacttgggaaaggaggctcaaatttctgccttgataacaccccccccccctctcttataagtaattatatgaagcatttgcatgtcaagtttcataatgcttatgcttggattccttttgctgctattatatagtatagtaattcgttgcaatccttaagtcaattaaatacatgtaagcaaagtgagtacatttaggcttaggaaatattcatgattcctgcagaatattgaactgttctctatgaaattatgtaaattcctgcgttccacacagaatatataaagttgttttccaaat

SEQ ID NO: 6457 - DNA, 696 bp, Oryza sativa
  ref <308>: DATABASE ACCESSION NUMBER: AK063608
  ref <309>: DATABASE ENTRY DATE: 2001-12-06
gacgctatagcttcagctacgtagccgttgttcatcactcactcaactcagctcagtagtcagtgcgtactagggaccgatcgatggagaagctggtgccgaacacgaagaaggcaatggaggacaaggaggagaagcccaaggtgccttcgagcgacccggacctcgtcgacctcgtcgccggcgagcagccgcagctgcagcgggagcaccagccgcccaacatctccgagatgaagccgctgacgcgggaggcgtacggcggcgggatgtacgccaacgaggggcggagggacccgacgcggccgcgcgccagcgccacgcagagcgccgacggcccggaggaggccgccgtcaggcccaagcacgcgccgccgccgtccaccggcgaccgcgacctcgacatcaccggccagtcctacatccagtagtttgttgtgtgtgtccgtgccgtgacggtgtatgcgtgtagtcaggcagtttggtccggaacaaagatgtgcataggtcgttccacgctgtaacgaataaatgtaagtttacttgctgtaatttggcccaataaggctaccggcctaccaaccggagatcgttagtcttggcctactaactcttatggaccttgccaatgggctaatctgaccaagtgcccatggatcataataaagtcacgaggaacctctcttatcagcccgc

SEQ ID NO: 6458 - DNA, 512 bp, Oryza sativa
  ref <308>: DATABASE ACCESSION NUMBER: AK063609
  ref <309>: DATABASE ENTRY DATE: 2001-12-06
aaaaaaaagcaacgacacctgcaggctagctagctaacaaccagctgagaggttaattaattatgatttgtatgagagatcgatcgagaagaggagtagcgagggagaggatggcggcggtgagcgtgggcggcggcgggaggaacatcggggtggcgatggacttctcggcgtgcagcaaggcggcgctgcggtgggcggcggcgagcctggcacgccccggcgaccggctggtgcttgtccacgtcaagccctcgttccagtacgagcagggcgtcgcccacctctgggagcagcaaggctcaccgatgatcccgctggtggagctggccgacccgcgggtgagcaggatctacggcgccgcagccaccgcagcccgtcgcaacggcggcgagctactactgatggctgatcagctgcgatttccccacgtatgtctcggtcagctgtaaagtcggttgctgtgtgactgggagtctgggactgtctctgcttgactgcttgtgcatagt

SEQ ID NO: 6459 - DNA, 988 bp, Oryza sativa
  ref <308>: DATABASE ACCESSION NUMBER: AK063610
  ref <309>: DATABASE ENTRY DATE: 2001-12-06
gcaagccacaacaaacatccatcactgcagcaaatcatcatcatcatcatcatcacatacactaatcgatcgatcagcagcagatagctaattaagcttgtttgattagtttcgccggagatcgatcgatatggagagggtggcgaagctgtcgacggagaaggcggtggtgatcttcacggcgagcaactgcccgatgtgccacacggtggtgagcctcttctccgacctcggcgtcggcgccgccgtccacgagctcgaccgcgacccgctccacggccgggacatggagcgcgacctcgcccgccgcctcggccgctccccgcccgtccccgccgtcttcatcgccggcaagctcgtcggctccaccgaccgcgtcatgtcgctccacctcgccggcaagctcgtccccatgctcaaggccgccggcgccatttggctctagatcgctcatcataattaagctcaattaattaattaacctttctaaacttcactgttttaatcgctactacattcgttttaaaatataaaaatatagaagattcttatattttaagatggagggggtatatttttactactaccgttatatatattatatatatgttatttacacatatgcaatgcacctttgtattgcatgcacgtgtgtaaaaaaaaggcacacatacgagtttaccacttacgcgagtgactgagaagtactatatatatcttatctaagagagattatctaagagagactatactcacctgaggactgccaatatttaattgttagtttgatatacataaagggtgagtgagttttgccgctagctagcattaactagtagcaattacatatgagggcgaggaatatatatagcgagtcttttacatgtaaaataggctttaatgttatccctctccagctcttttttccaatgagagctgtgttttgtaacctcgtgatcgggaatataatgaagcattttaattatac

SEQ ID NO: 6460 - DNA, 773 bp, Oryza sativa
  ref <308>: DATABASE ACCESSION NUMBER: AK063611
  ref <309>: DATABASE ENTRY DATE: 2001-12-06
gcaacgacacctgcaggctagctagctaacaaccagctgagaggttaattaattatgatttgtatgagagatcgatcgagaagaggagtagcgagggagaggatggcggcggtgagcgtgggcggcggcgggaggaacatcggggtggcgatggacttctcggcgtgcagcaaggcggcgctgcggtgggcggcggcgagcctggcacgccccggcgaccggctggtgcttgtccacgtcaagccctcgttccagtacgagcagggcgtcgcccacctctgggagcagcaaggctcaccgatgatcccgctggtggagctggccgacccgcgggtgagcaggatctacggcgtcgcgccggacgcggagacgatcggaatcctcaccagcgccgccaaccagaaaggggtggaggtggtggcgaaggtgtactggggcgagccggcgaagaagctgacggaggcggcgcaggggattcccctgcactggctcgtcgtcgggaacagaggcctcggcgccgtcaagagggttctgatggggagcgtgagcacgtacgtcgccaaccacgccacctgccccgtcaccgtcgtcagggagaacctgccgcctccgccgccgccgccgcagccaccgcagcccgtcgcaacggcggcgagctactactgatggctgatcagctgcgatttccccacgtatgtctcggtcagctgtaaagtcggttgctgtgtgactgggagtctgggactgtctctgcttgactgcttgtgcatagt

SEQ ID NO: 6461 - DNA, 1141 bp, Oryza sativa
  ref <308>: DATABASE ACCESSION NUMBER: AK063612
  ref <309>: DATABASE ENTRY DATE: 2001-12-06
ctctcagatccgctcgtctctcgctctcccagatccgctcctctctctctgaaccgcatccctcccctgccgccgtaacgttccctgccaccgccctcatccctccctgccgccgcgcccgcacctctacggctctaccttcgccgacacgaccctggatcaacgcctcaccaaccgtcgaccctgatggcctgaccttataaggacgccaacacgatcctgatggcctgaccgctgtccctgctcgccacccatctcactgccatctcatttcacggtaaaaggcttgctgttgctgcccactgcatgcccgctggccgtaggtagatactgagctaaatatataccaaagcaaaattctaccttccctatcagtgttgctctccatcaggatcgtcctactatccgctctctccaaggtgagtccaagaaaccttctcttgtgtcaattccatgaagttatatatctcatctctcaaatatatgtgaattgtgcttgattatgtccctctggtactgtttatttgtatttctgtggtgctagaaacatctgaattattgtgcacatgctcttatcctcactctaagtactttttacaacattttctggtttatttggttactgccaaactgagatcaactgatacatctattccagcagatgagaagtccacctaatcagatgggcagggttggcttggttcaatttaagaaatctgaatttggcaaatttaagaaattggttcaatttacgagcagcatcatattagaaatactgacatactcgactgcaaaactattttcaagactaaactgaattggagattgatgttcccaagtactgtgataagaattgagatagtgtgaagtgcaggaaaccaaatagcactactacggatccgggcttcagtgacgggtcatctgtgacgggccaacacaactcgtcaaagatgagtcatctctgacgggccgaaaaaatatcctcttcaatatattgctactagggaggacccatcacagatgtatcgtttactaataattagctcttcaacagaacctgttgctcatatatttgacatggttttgtacagtagataataatcaagattcagtaatgagagtatagaagataccttgctgc

SEQ ID NO: 6462 - DNA, 647 bp, Oryza sativa
  ref <308>: DATABASE ACCESSION NUMBER: AK063613
  ref <309>: DATABASE ENTRY DATE: 2001-12-06
gtatattctggtgacttgtctgctgattcttggattgagaaggaggttgaagctttggtggcagatggatgcccgaaagtctgggttgtaacatctgatgcattggagcaacaattggcacatggagaaggtgctcttatttggagctctaaaagattggtcaaagagataaaagaatcagaaaaggagcttgatgaagagctgaaggaaaccagatcaacatcgttgcaagggaagctttttcagcacaagctgaaacctaaagtagtgcatgcattgaaagatctccggaataagcttgaagaagaagagcggagaaagaggtgactacagtgtgactgtatgacctagaggcatgaacaaatggctaacaaccgcacctgggcatgaacaagtttgtaaaatggctgacaacctcacttgctgccttgcattggatccgtagggcattgacatgatgtaagataggatctggttttttgtaaagaccccgtttggacttcgtagagagaggcttcaagaggttaggcatgcttttgcatcagaacaattttgcaagctgcagagaagaaaggcatgaactgtacaacaatgtaaatatcagcagattcctctaaatcaagctcaactaacgagatcttggcagg

SEQ ID NO: 6463 - DNA, 1041 bp, Oryza sativa
  ref <308>: DATABASE ACCESSION NUMBER: AK063614
  ref <309>: DATABASE ENTRY DATE: 2001-12-06
ctcacacacagcagtacatcactcactcactcacttcacagtttacaccaccggccggaagccatggcgccggctagggcgcaccacctcctagcctgcctgttggcttctgcgctgctcgccgccgccacgccggtgaccggcggtgggctcatgacggaccagctcgaggtactgtttggccagacgcagctgctcaacgacagcaatggcgaccagacaattgcgctgacgctagaccgcgagatggggtcggcgttcaagtccaagacctcgtacctctttgcaaggatcgacatggacatcaagctcgtcgccgacgactccgccggcaccgtcaccacgatatacttgatatccgagaaggattggaacacccacgacgagatcgacctggagttcctgggcaacgtcaccgggcaaccgtacaccctgcataccaacatctttgccaacggcgaaggcggcagggaggtgcagtaccggctctggtttgatcctacccaggatttccacacctactccgtcatctggaacccagacgagatcctgatcctggttgacaacatgccgatccggcaattcaagaaccacttggactccggcgtgccgttcccgatctaccagccgatgaggctgtttggctgcctgtgggacgccgacgactgggcgacggagggtggccgcatcaagaccgactggtcgcaggcgcctttcgtggcatacttccggaactacaccgccgacggctgcgtgccgagctcttatgcgtgggtatgcggccagggcccggccagcagcagtgactggttcgaccgggggctggacgacgtcaagcagcagcagcagctgagggaggcccaggacaagtacatgatctacaactactgcaacgaccccgagaggttccccgatggttatccaaaagagtgtgggttgcagtaggatagaggtggctcggtatgcatgtgagaagtgcgtgaaatgtaccgaatcaatattccttttttgaagattttactggaatattgagattgtttc

SEQ ID NO: 6464 - DNA, 797 bp, Oryza sativa
  ref <308>: DATABASE ACCESSION NUMBER: AK063615
  ref <309>: DATABASE ENTRY DATE: 2001-12-06
catcattctagtgcactggttgggaattctgtttactggttgttccagggtgatggaatctccatccttcagttcgatttcgatacgcagggactagcccggatcgatgtgccaccggatgtgcatgcccatgtggttacctactaccagattcggatcatgccagcagaggatggtgggcttctcctccttgttctgccagaatttagcctcaatgtgtggaagtatcaaggccaattgtgatgggtgttgctggatggatgctggaaaaaacaattgaactggacaggcttctttccgtcgaaccagggcgtcatggagctgcaccaactattctgggctttgtggaggaacataatgaagtattgctgtgcacagatattggtgccttcatggtcaatctgcactcaatgcaattcaagaagctttcccaaaccatggaaccaggattttatcatccattcactagtttttatactaagaaaatgttgcccgaatgatggatgatcttaatagtatttgaccatgttggttgctggagaggtattccttgtgattttgctgaattttggatgactgattatctttgccaggtattaccaagtcaggtattttatatgtcagtccaagcagctgttgtctggccacgtgtgcctaatataacatggctcgttaaatagcgacaatgtaagcatgttcaggtgctgtaaggatatccctttgtctgtaattctgtacggtgacacattgagtccttttgtgtttgctgtgaacctatgactcgatgttctctatct

SEQ ID NO: 6465 - DNA, 749 bp, Oryza sativa
  ref <308>: DATABASE ACCESSION NUMBER: AK063616
  ref <309>: DATABASE ENTRY DATE: 2001-12-06
acgcttttggcttgaggggatcactgaagcttcgtgcaaagttctatgggccatttagaatcctgaaaagaattgggaaagtggcttaccatctgcagttaccggaggaagctggaatacatccagtgttccacgtaagccagctgaagaaacatgtgggaaatttggttgtaccacttcctaatcttccattggtggatgaagatggtaacatcaagactgaacctgtcgctgtactagcaagaagggtagttccaagaagaaatgagccggtcactcaatggcttgttcactgggaaaatctatctcctgaggatgctacttgggaggactctgcttttattcaagcaacgtttccacattttcgaccttgaggacaaggtcgtgctcaaggggattggattgttagagatggagatttcagagaagaaatggagaagagtttcagaagtttcagttaaaaattcagaagttcagagttagagtgggataccggttgggtgacgtcgtttaatgaagatgaacggtagagatgaggctattccaaattaccatggtgcatttacggctgtgatcgctttgttgtactatttaccgtttctgtttgtcgtcgcctgcgcgcgacgctgcttttactctgcttcctctgtctcactcgctgctctgtaaaaaaaacctgagatgcctgggggtatataacccggtgtgatgaatggaaaagctatcgaagatcattaaccctagtactt

SEQ ID NO: 6466 - DNA, 411 bp, Oryza sativa
  ref <308>: DATABASE ACCESSION NUMBER: AK063617
  ref <309>: DATABASE ENTRY DATE: 2001-12-06
gacaagggtgtttatccaaaagaaatccatcccgagatttgcttctcttgcgcgcacactggcaccgtccggatcgctgaatcttgctggtggtggtggtggtggtggtggtggtgcacggccatgtcgacggcggtggcggacgtgccaccggcggcggcctacgggttccccggatcggccaagagagggaagcctgactagatggtggtgctggaggtggtgcagaagcgggtggtgggtttggtggtggtgctggtgctggtacaggtttcggtggcggaggcggcgttggcgggaagctgtgagaagtaatgcatgcactttgacatgcatacgtactcggttgtatgatgcatatagatggttatacatacatatatatacagatatactatatgattggctaat

SEQ ID NO: 6467 - DNA, 995 bp, Oryza sativa
  ref <308>: DATABASE ACCESSION NUMBER: AK063618
  ref <309>: DATABASE ENTRY DATE: 2001-12-06
gcaattgaagcaagcaatcaagcgacgataattagagcactcgcgacctctccgacgatctccagctcactgcttttaggttctcaaactctgatttcctctctactctgtagtgcaatggctgctccattcgctctcgtcagccgtgtctcgccagcggcgcgcctccccatccgcgccgcctggaggagggcgaggccgacggtcgggctcccgtcctcggggagggcccgccagctcgccgtggcctccgcggcgcaggagaacagggacaacaccgccgtcgatgtccacgtcaaccaggacggcgggaaccagcaggggaacgccgtgcagcgccgcccgcgccgctcgtcggcgttggacggcatctccccgttcggcctcgtggacccgatgtcgccgatgcggacgatgcggcagatgctggacacgatggaccggattttcgacgacgtcgcgctggggttccccgccacgccgcggaggtcgctggcgacgggggaggtgcggatgccgtgggacgtcatggaggacgacaaggaggtgaggatgcggttcgacatgccgggcctgtcgcgggaggaggtgaaggtgatggtggaggacgacgcgctcgtcatccgcggggagcacaagaaggaggagggcgagggcgcggagggctccggcgacgggtggtggaaggagcgcagcgtgagctcctacgacatgcggctcgcgctccccgacgagtgcgacaagagcaaggtccgcgccgagctcaagaacggcgtgctgctcgtcaccgtgcccaagacggaggtggagcgcaaggtcatcgacgtgcaggtccagtagacgaatcgctgctactactactgaacgatcactctggaggatgtgagcctgtgagcgtgagggtttaagcagtgtgaggtttgaaaaagtcgtgtactagaggttgtaattactcagcgaacgagcgaatgaatggaataatgctagtatgagat

SEQ ID NO: 6468 - DNA, 1070 bp, Oryza sativa
  ref <308>: DATABASE ACCESSION NUMBER: AK063619
  ref <309>: DATABASE ENTRY DATE: 2001-12-06
acggtgctcacggcggaggccgccgtggcgatcgcgctgctgttcaagacgccggtgcggaagctggcgatgctcggcctcgaccgtctcaagcgcggccgcggacccgtcatggtgcgcaccgtcgccgccaccgtcctcgtcgtcctcgcctccagcgtccacagcatgaacaagatccgcggacgcgccgctggcgagctcgacggcgcgggggcggggacgctcacccccaccgaccaggtcctcctcgcccgccacctcctcgaggcctcgctcatgggatactccttattccttgctctggtcattgaccggctccataactatatcagagaagtacgagggctcaaaagaaatctggaggctgcgtcaaagctgaacaagacactagacgaagcaaagcttattggaagctctgatgagagcaagacataccagaaagacatagcttcattgaatgaggagattaagaagatgaaacgtcagctaaaagaaaaggcaaatgaggccaaggatgcagaggctaaagccctagctgcccaaaagcaatctgaaggtctaatgattgaatataaccacctagtggaggacaataagcatctccatgaccaactggagtcagcagacctcacggtgtcacgttctgatggcaagaagaatacttaaggatgacatgatctcaaggtaaacctactccatagcaaggagtccagttgatgatattctagcttacgccattgaatggtccacactccacaatgcagaagcttctggacgtctgaagtcagctgatgtttgatggacaagttggtaactgataaattctcatacaagtagtcccatctttagttgaatgttctgctatgagcctatgacataccagatcctcgaataaccaccgaacctcttacgaaggtacccatagattgatagatgtccatctgtaaagatctccaaaaaggaaaacgtacatgtccctgtgtagatatctgataccacacatggtcaaccaaatgttatttggatgataacatgagattgtttatgtgaaacataattagctgctc

SEQ ID NO: 6469 - DNA, 928 bp, Oryza sativa
  ref <308>: DATABASE ACCESSION NUMBER: AK063620
  ref <309>: DATABASE ENTRY DATE: 2001-12-06
gagccatcgaaaatcctcagcagctagcacgatcgaccagccaccagcatggccaccgcgcgagcagtacgcctcattgcctcaagaccaccatctaccaatctccgcagcctcgtcgtcgtaccagggcgacgccgcctcctgtccacctcgacggaagcgggtggcgcaggcgatccatccgtgcattccggcgacccgccgagtgacgactaccccgaccgtcctcccaagttctccggcgccgaggaggccaccggaggcggcgaccacggaaagaacccgtcgacggcggcagcaacgccgtcggaatccaccaaggagcgcgtcccgccgttcgctatgtctgacaagcttgggtcccaagagctcgccgacccggcgggaggctcgtcgttcacgcagaagcggcggcggtcgtcgtcgtcccggccagctgactcgcgcgaggaggcgacgccagggggcgaggaggcggcggggcggaaagtgagggaggaggacagggagtactaccagacgcacaagccgtcgcctctcgcggagctggagttcgcggacacgaggaagccgatcacgcgtgccacggacggcggcagtgccgcggacaggttgtcggacgtacccgggaaggtggcggaggacacggcggacgattcgctggcgcgcgctgaggccatgttccgcgaggtaaccccgagtggccgcactcgcgcgcgctcgcggagatgctggcgcggcgccgcggcgaaggagacgctgcggggagcaggagcagtgcgccttggggaagctagtcaggcgtcagctgatccgcgggaatgtagacgtgcagtagtagcatggggggtatgcaagaaaaaatgttactcctgctgcgtctactgatcctatgccaagaactaaagggtgcactcgatcttatgtt

SEQ ID NO: 6470 - DNA, 705 bp, Oryza sativa
  ref <308>: DATABASE ACCESSION NUMBER: AK063621
  ref <309>: DATABASE ENTRY DATE: 2001-12-06
acccagctgctgcaaaagcccctctcgcaaacaaactagggtttttaggcgtcagctcgccgagggcaggaaggagagcgcgcgaggtcgaggagaagcgaactccgccgccatggcgtccaccaaggtgcagaggattatgacccagcccatcaacctcatcttccgcttcctccagagtaaagcgcgcatccagatctggctcttcgagcagaaggacctccggattgagggcagaatcatcggctttgacgaatacatgaatttggtcttggatgaagctgaggagatcaacataaagaaggacactagaaaatctctgggccggattctcttaaaaggagacaacattacattaatgatgaacacgggaaagtgataacagctcgccgtgccctccattgcaagaattactgataacctatctatcccaaccttctatgaagttagaatttgagcctgtagtagtctttttttgtttgttcatctaaatcgattgtaatatacagtatcagcgagagatgatgagttctgtgaaagcaagtgtttaaccaggacatgagtttggttactatatcaggtctggttttgctctatagttgagcaaggtatcaatgttctgccgctgttctgtgactttaccctttcattgtcatgcacatgttggccaaatattcctcttttgggggactgatgatttattcc

SEQ ID NO: 6471 - DNA, 671 bp, Oryza sativa
  ref <308>: DATABASE ACCESSION NUMBER: AK063622
  ref <309>: DATABASE ENTRY DATE: 2001-12-06
aggtttagtttgatcagatatcatgccaccgtttcgtcaaacgccgccgccgcaagcccgagcgcgccggtggggatcagcttcatgccgccgctgcacccgacgacctccttggcccgctcgatctccgcctcgatctcgccgccgcactgctcgatctcccccgtcatccgtgagtgaatcatctgctctgcagcgtctaatttggaatcaagcaagataacgagttgcaataagctccactgcgcgcagccgccgctggggatccgccgccaccgctcacttcctccgcgagccgccgccgctcccttcctccgcgagccgccgcgccgcctacgctcccttcacggccggtcgccggcacggatcccgccgccaccgctccttaccttcacggctgggcgccgacgcggatcccaccgccgccgccctctacctccacgagcgggtgccggcggggagtcagctttacgctgccaccgccccctcagcgccaccgacggacccgcagacgccgccaccgtttcgtcaaacgccgccgccgccgcaccgcccgacgccgtcgttgcaagaacgagagagacagagagttgttcgaatggatagggtttggatggatagggttgtgagggtactttgggaattaagaataataatcacatttctttttt

SEQ ID NO: 6472 - DNA, 801 bp, Oryza sativa
  ref <308>: DATABASE ACCESSION NUMBER: AK063623
  ref <309>: DATABASE ENTRY DATE: 2001-12-06
acaaatcaggcgacggcgagtctttctcccacaaatccggcgagggcgacgacgattgtgggcttctgctgtggcgtggcgactgctatcgtcgagcattcctcatcccgtcccctcgagcgctccaaaatccggtaaatgcaatgacgatttggtggattccgcgatgccatcgacgacggcgtcggcgctcgaacaacctggtggtgctggagccggtggtggggttccaccggccgttgcggcacccggccgtgctctcctagcacatgaccatggcgcaggtcgccgacaccgtcgcgctccacccctggctcctcgacctcctcccgctcctcatcgtcctcctaatctccacccacgtcctcgtcctcgtacatacttctcctagccgagagagctcaaggcccccgagcggcagctcagtgttggtcccgtgcccgtccggagccccgtcagcgcagggccaagctttgagagagttactacatctagagaggaatcagggaaaactaagtgaatacaaaactaggatggttagactaaagccaaaggtacctaaacttatgtttggcaacattgataagggttaacaagtaatgaaacaatcaataccgcgctgcaactaacgagaaaaactgaaaaccggaagagagtagtacaacatggaagaagagagatttgagagaagattatgtagaagatgtagagcatccttgctcaaaaaagtgcaaaaatgttagaaaaggagatagcttactcaattgtaaacatccgaactaaaattcattttagggactc

SEQ ID NO: 6473 - DNA, 632 bp, Oryza sativa
  ref <308>: DATABASE ACCESSION NUMBER: AK063624
  ref <309>: DATABASE ENTRY DATE: 2001-12-06
gtcacgcacacagcagttgagctctttttccactacgcactagtagtagcactctggtattctcccatggcgactgcgaccgaggaggttgccgctgcggctgctgccgccggcgaggcgccgccgccgccgccgccagcggtggtagaggaggcgaaggaggctttggaggcaccgaagccggaggaggcgccgaaggctgaggagggggaggagaagaaggcggagggtgagaaggagaaggagaaggcgaagaaggagaggaaaccgagggcgaggaagccccgatcggcggggccacaccacccgccctacttcgaggtgaggggaaaatcaattgatcgatcgatgcagtgatcatgtattgggttgattcgagtttgtgagaattcataaactctaatcaactctctacgcacaagtaatcaatcaatcaatcaatcaatgttgcagttcttcttcgccccaggcgggaggaacccggagtcattcttgtcgagcttcagcaagggcgtgcagagagctgctttcaaggcacgtagtagcattaatccgatcaatctgtcacttaagtacttgattaacatattggttatacagcaaggataataagttaataactaattaagttg

SEQ ID NO: 6474 - DNA, 1150 bp, Oryza sativa
  ref <308>: DATABASE ACCESSION NUMBER: AK063625
  ref <309>: DATABASE ENTRY DATE: 2001-12-06
accgccgctacacgttgcaactgcgactagtcgatctcatcgatctctcaaaagactacgagctcttcacagggaatcgagtgtgtttcggtcgtttgggccgcgccaagcggaagcggagggatgcaggggacaacgacgaccaaggccgggcgcaacggcgaccgcgccggcaccgaagccccgggcgcgacgagggcgactgacggcaaggtcgggcgtggaggccaaggactcgctgaccatcgtcgcgctgcagtcgccggtcaccgtcgagcgccccgtccgcggcgacctcgaggaacacgtccccaagccatatcttgcgagagcgctggcggcgccggacatctaccacccagacggaaccacgacggacgatcacgagcaccaccacctcagcgtgctgcagcagcacgtcgccttcttcgaccgcgacgacaacggcatcatctacccatgggaaacctacgaagggtgccgtgcgcttgggttcaacatgatcatgtccttcctcattgctctggtcgtgaacgtgtccatgagctaccccacgctgcctggctggctgccgtccccgttcttcccgatctacatccacaacatccacaggagtaagcacgggagtgactctgggacctacgataacgagggccggttcatgccggtgaacttcgagaacatcttcagcaagtacgcgcgcacgtcccctgacaggctcacctacagggaggtgtggcagatgaccgaggggaaccgcgaagtgctcgatctcttcggatggttcgcggcgaagctggagtggacgatcctgtacgtgctggcgagggacgaggaagggtacctggcgagggaggccatccggcgcatgtacgacgggagcctgttcgagtacgtggcgatgcagcgggagcagcacgctaagatgtcctagattagcttagttagctactggatcggtctgtgggtgtgagatcgagcctgtgacgcaggggacatgcaacggtgctctgcctgccggcttaggtctggtgttctctctggactctgggtgataacaaaagaacacccagatgcgtgtcgtgtctgcttgtaattaactttgtatcttgatgcaagagaaataagaataacgtgtggaggatgcgat

SEQ ID NO: 6475 - DNA, 1365 bp, Oryza sativa
  ref <308>: DATABASE ACCESSION NUMBER: AK063626
  ref <309>: DATABASE ENTRY DATE: 2001-12-06
gatccgccgccggcatccctgctccgccccaccaccaccaccacctcgcgcggcggcgatgcttccggcggcgctgaggcctctccgccgcatccccctcgcgcgcctccggagccgcctcctctcctcctccgcctccggagagggcggccctcccgccgttgcctccaccgacgaagcggtgagggcggcgaagctgagggaggaggcgtacaagcaggtggctaacctcgactggtccagcaacgccgacttctggaaggccgtcgatattgtcaaaaccttgccacccaagcgcaaggaattcgggctggacttccacctggtgcaactcttctttgtgtgcctgccttctctagccgtttatttggttgctcagtatgcacggagtgagatcaaaaggatggaggcagaagcagaagagaaaaagaaaaaggatgaggaactggagaaagaaaaacagcttgaagcagattctgttaaggatgagactgattcaaagctgtcagcagttttagtccggttagatacactggagggagttgttaatgagattgtggatgacaaaaggaaaggttccgcccctggtttttccaacaaggaggaagccacaaagaaaggtggagacaaagcaattccactgatggccaggtagtgccagtcaagagtaaggacatcatcaatggtgctacaaacgcttcacccaattctacgcaacagagccctacagggaatggagacaaggcatcttctgaccccaagggttgatgaatctcgctggttttttacgcttggagtgatacttggaatgtgctgtatgcatcagttgagttttttgttgatcaagcatgagcatcggttccatagagtagatgcagtcataggttcagttgcatcgcaccattttccaacagtgtgggactctctccgggaatggttgactccctacggtagagtagatgcagtccatagagccttgcagtcttatggtcagttttgcaggagaaaagacgccaatggtggatgaacatcagggctccctgctcaactttggggacttgaaaccccaaattttgtgtctagacattgttgatagcagttctattccaccttacaaaaacttggcacattgaggcttgaggtctgttgatgttggatgtactaactcaggattcggtttataaattactgagaagggctaacttccagaaataatgaaaggtgcttgttctgggtacatgtgaattgtgatacgtgacactttcactttcctgagctggtctatttgacaagtgtatctccgctttgtaagtaaacactaacccatttgaaggttccaatttcaagaatgcagatattgtttcc

SEQ ID NO: 6476 - DNA, 707 bp, Oryza sativa
  ref <308>: DATABASE ACCESSION NUMBER: AK063627
  ref <309>: DATABASE ENTRY DATE: 2001-12-06
attcaccaacccagcaaagctcgatcgaccacgtgatcgagctcgatctgctcgccgccggcggtgaccatcagccatgggcaactgcctgcagagcggcggcggcggcgcggcggcgttgggagacgggaagatgagcatgaggaggagagtctgcggcggcggtggtggtggggaggaggaagacgaggctgcagggtcgtcgtcgtcgtcgtcggtgatgaaggtgaagatggtgctgacgaaagccgagctggagtggctcatggcgcagctcaaggccggcgaccgccgcctcgaggacgtgctccagcctggagagcatcgtcgagggccccgagatgagctccttcagcttcgactactgaactgatcgccagtgtgtcaaagagctagagccttgttaattacgttaattaccttgctaattacgtttagagcacggtaatttttcttgttagcagtgcatggccgtctttgcttgccatggatgaatcatgaatgggatgatcagggaaggataaatttaactcttgtcctaatggctagagttatgagttactacttggagttgtagctaggggtaattaatctaggtcggctccttgctgcttttgagttaatctttgcttaactttttttttcatttttgtatatacagtgtactatctctgagaagtagtagaaatactcttgtagtcttgtat

SEQ ID NO: 6477 - DNA, 739 bp, Oryza sativa
  ref <308>: DATABASE ACCESSION NUMBER: AK063628
  ref <309>: DATABASE ENTRY DATE: 2001-12-06
gtatggatcgtagaccgcaaggggggtggcagccggtgaagcggcgatttggggaagaggggaggggatttcgtgacctcaccgaaggggagttgagggagagattgcagagggaaagggcgagagaaggggagagagagggaagcagggagcgaggtggtgaacagcgcggacctcggtgttttggatcaccggtgggacgccgggaggggggcaggggagctggtcgcggcgacgagaactggcaaggaggtcgtccagatgtggcgcggcagggcggcggtggagatggtggctggcatgggggaagaggggatgggggcagacttggaggaggaagagcagaagttatcaaatgcttcaagtgtgctcaagagggacaccttcaaatcgactgcccgaaccctccaatctgctatacataaatggagtttgctacaaagtgaagagatgaagggcatcctgaaaacttggatagaagagatgagttggaaaatgaagctttggagacctgaagttcatctgccagaagatatctgataattttctaagaaatgccttagtactgtgtcactgttccccaaacgttttgtcatttccttttaggaactctatcaggggttttgcatggagcctgttccagcttgcaaaacttttttttttctcttgcttgcagtacttttgtcttgggctttctccaaaaagccggatcgttatctaatataatgatctttcctct

SEQ ID NO: 6478 - DNA, 561 bp, Oryza sativa
  ref <308>: DATABASE ACCESSION NUMBER: AK063629
  ref <309>: DATABASE ENTRY DATE: 2001-12-06
tgtcgagcaagaagacgatggagatcaacccggagaacgggatcatggaggagctccggaagcgcgccgacgctgacgccaacgacaagtccgtcagggacctcgtcctcctcctcttcgagacggcgctgctcacctccggcttcagcctcgacgacccaaacaccttcgccgccaggatccaccgcatgctcaagctcggcctcaacatcgacgacgacgacgccgccgcggccgacgacgacgctgacatgcccgcgctcgatgacgccgccgccgaggagagcaagatggaggaggtggactgaattaaataagtactcgctgccatgtcgaaatgcatcatggtgccatggttgggtgtgtctgcgctgcacttcaacagtgtgtggtcgtgtttgcgtcgtgtcgccagtgttagacatgagtcttacgtaagtatatgtcgccagtgttagtatgttgcatttgcgttactcatgcgtacatctttctaagccatcgttgagaaagtagtagtatcagtattaaaaaatgatcgaattcctatgtctgaaactg

SEQ ID NO: 6479 - DNA, 1223 bp, Oryza sativa
  ref <308>: DATABASE ACCESSION NUMBER: AK063630
  ref <309>: DATABASE ENTRY DATE: 2001-12-06
gctctccactaacctttgctctagtagttgttgccaaccagatccaccatgccaccacctgctgctccaagccgtcgttgctgctgctgttgatgccttctcttccccctagctgctgctggatttagcttcttagatgacgcatttccggattgggacggcttcactcctcctcgcctggatcctgtcgtctctccgccccactgttgcgcggatccgccgtcgccggcgacgggaggggcggatccaacgacctcttcctctccacggatcctgtggccggcttcactcctcctcatttggatcccatcgtttctccgcccctctgtcgtgcggatccgtcggcggcggcgacgggaggggcggatccggtgacctcttcccctctcgcatggttcccgttgtctctccgcccccctccctctcgcacggatccgccgccggcgacgacgggagggacggacccggcggcctctcctacggtgatgatggcgatggatttcaagaggtgtcgatgtccacaacaagaccgtctgcgtcttctggtctccatcaccgaagccactgacagcgccgagaagatctacatcactcttgagctgcccctaatccccacacacgcgtgccgccgctggtgatcgctggacgtcgcctccatcaccccctctgccagcgaccgacatccttgactcgccgtcactcccagcctttgccgcccaggtcacaaatctaggttcactaaacccaaaggcttttgtagcaatgggatggctggtgctagtggttacttgggcagctatgggggtgatggtgggtatggcagtacaccaggagcctaggaagaaaatacatggtcaataggtaagatatatggtaagttcaattcccacacccctctaatcgttatgcaattgctggttgtaaattgattggtttatgcctattcgttgcggagttcaattatgtttagtttgtgtttaatattgatattgatgtgtgagtgcttatgatttgttgtgtaaaccgtgtgaaatctatattgccagtgaggtttgttggcccaatttggtggtttggtctgaaaatgcttctagtctaaaccaagtctaaatcagtagtagactgtcactgttgttgatttgagagtatttatatttgctgttgatttccttttatgtaattaacttgaaattgaaattgcattcagggttgagttcattgat

SEQ ID NO: 6480 - DNA, 621 bp, Oryza sativa
  ref <308>: DATABASE ACCESSION NUMBER: AK063631
  ref <309>: DATABASE ENTRY DATE: 2001-12-06
acgattcggtgagtctgtgaagaggaaccgaccaagcaaaccctagccgccgccgccgccgcctccgcgtccgcctccagatccggccgtcggcatggcgatgcgcgctctggtctccaagctgagggtccccgcggctgcttcccgccgggctcttccgccgtttcgatccttctccgccgcctctcaggataaggttggcggaactactgcacgcgctgccgctaaagaagggactccaatttctgataatagcaggaaggtcgagaagttctacaggaagctgcgatggtatcaagcccttggcaacttccttgggttcaacacttcagtttatttattctatcgctaccactacacctaagctaaggaggagcaaacttagtactctgattgtcactctatttatgtatccatataccacctaagtactgaacactcaattgcatgtatgagtacgtacttagtactctgattgtcactctatttatgtatccatatgccaccaaagtactgcacacgtactctcaatggcatgtatgagtaatgtttgcatgtatgagtacgaatgttatccatgtggccttgagcagaaacatcttggaaagtcgcaggatttat

SEQ ID NO: 6481 - DNA, 909 bp, Oryza sativa
  ref <308>: DATABASE ACCESSION NUMBER: AK063632
  ref <309>: DATABASE ENTRY DATE: 2001-12-06
gaatgcatttcatcgagcaccttgtgtgcgtgcctccatagccattgcttgaagccggagccggtactgacgaccgcgggagctgtggcttcgggatgcctctactgttgctaccttggatcaactccgggtgccggtgtgacccgaggacctgcagtcgaacacctgcgcgctcgccgccatcgtccacctctgcttcactaccgtctccccaccacggcatcgaacatcgccgttttgccacctctcgagtgttgaagagaagcccttgtttgtacgcttgcgtacctaacaagatgatcggagtgcggttccattctaggtctcgttccctagtcgactgcttgtgggattggtactcataaacacagaagatttccgatttccaaaatcgtgggtcgacaaataggagcccagaagtcttcacccattaaaagcagctgacattggcgcccctcgtgtcaggcggcaagatttgacaggccccatcatcaagatgacgcgcgcttgcttcccaagtcaagagacaagacaggcatttaatgcaaaacacttctccaccggagctaggtttttgtgcccatgtggtaaccccttgaggtataaaaggaggtccagacctagtaaaaggggggagggatctgggatgatccatttgacgctctagagcagtctctagccccggatgatcaacaccacattttactccaacaaggagatcttgtaatccttcactcaaggagcatagcacaggagtagggtattacgcttcttagcagcccgaatttgtataaatcccttgtgtctcttttgtctcgaaaaactcggatctcatccgctgcccccggccgaactcacaaagggggatctcacaatctcccgctagagaggatcactcctcgagagtcc

SEQ ID NO: 6482 - DNA, 749 bp, Oryza sativa
  ref <308>: DATABASE ACCESSION NUMBER: AK063633
  ref <309>: DATABASE ENTRY DATE: 2001-12-06
aaaatccactcacctcctccaccgttcgtccccttctcgcgccaccaccgcctgccgccgagagctctctcagccgtcgccatggccaccgctaccaacggcaacgcctccgccgccgccgccgccgctgactccgccgtccaggagcccccgcacaagatcgccaaggttgctcccttgctcaaggtcaagaagctctccgagaacgccgtcctgccgtcccgcggctccgccctcgccgccggctacgacctgtcgagcgcggcggaggtcgtcgtgccggcgagggggaaggcgatggtgccgacggacctcagcatcgccatcccggagggcacctacgcgcgcgtcgcgccgaggtctgggctggcgttgaagcactcgatcgacgtaggcgccggggtgatcgacgccgactaccgtggcccggtaggggtcatcctcttcaaccactccgacaccgacttcgccgtgaagcccggcgaccggatcgcgcagatgatcatcgaggtgatcgtgacgccggaggtcgccgaggtggaggacctcgacgccaccgtcgttagctccaggaagttgggggagttcatttggtctgtgatggatggatgggtgatgtcgtgatgaaacacttgtatcctcttaatgcctcggatgcttttgtggtgtcgaatggaatcatctagcctaatgaatctaatgaaattcgtatgcttttgcggtgttgaatggaataatctagtctaatg

SEQ ID NO: 6483 - DNA, 582 bp, Oryza sativa
  ref <308>: DATABASE ACCESSION NUMBER: AK063634
  ref <309>: DATABASE ENTRY DATE: 2001-12-06
atccgcaatcccttgctcattcgatccatcaacacaggcattccaagcagaggcgctagtagagctcgtcgatcggcaagcaagcggcgaggcggaggacttcggtttcgtgcggcggcggcagcgaggagatggcttacgtgccggtgtgcgtgcagtgcgggacgcacagcaacccgtgcaggtgcaaggtgctcggcccgacgctgggtttcgtggcgttcgtggtggccggcgtcgtggagtggccgctcggcgcgttcgtgtacctgttccgccaccgcaagggtcgccgcatcatggggcacccggccaacgtcgtctacccgcggatcaccagcgcgatccccatctaatcgacccggcgtccgctgaaaaggtgggaaaaaaaatacttgaccggcgcgatcaatatataggcggccggtgggaatgtgccgtaattaaatgtgtgtttatgttttataaacgctttcgacatgttcaataaaaaccctggttcatgctgtaacttctaagcatcgacgtggatgtatgtatatgtacgtaatatttctcatcaatgtaaatggttattccagc

SEQ ID NO: 6484 - DNA, 1582 bp, Oryza sativa
  ref <308>: DATABASE ACCESSION NUMBER: AK063635
  ref <309>: DATABASE ENTRY DATE: 2001-12-06
aaacacaactgaacccaacccaacaaaccaccaccacgctgaccgccctcaccggcgagccagcgagcgacggaaggaggccgcatgcttccacaactacaacctcctcctcctcctcctcccgtctccaatgccctccgcctccactagatggccgccctcttcctcctcctcctcctccacgtatcagacgccgccatcaacccgggcgacctgtccgtgctccacgacctgcgccgctcgctgaccaacgccgacgccgtcctcggctggggcgaccccaacgccgccgacccgtgcgccgcatggccgcacatctcctgcgaccgcgccggccgcgtcaacaacatcgacctcaagaacgccggcctcgccgggacgctcccctccaccttcgccgcgctcgacgcgctccaggacctcagcctccagaacaacaacctctccggcgacctcccgtccttccgcggcatggcctccctccgccacgccttcctcaacaacaactccttccgctccatccccgccgacttcttcagcggcctcacctccctcctcgtcatctccctcgaccagaacccgctcaacgtctcctccggggggtggacgatccccgccgacgtcgccgccgcgcagcagctgcagagcctcagcctcaacggatgcaacctcaccggcgccatcccggacttcctcggcgccatgaacagcctccaggagctcaagctcgcctacaacgccctctccggacccatcccctccaccttcaacgcctccgggttgcagacgctctggctcaacaaccagcacggcgtccccaagctctccggcacgctcgacctcatcgccaccatgcccaacctcgaacaggcatggctccacggcaacgacttctccggccccatcccggactccatcgccgactgcaagcgcctctccgacctctgcctcaacagcaaccagctcgtcggcctcgtcccaccggcgctcgagtccatggccggcctcaagtccgttcagctcgacaacaacaatctcttgggccccgtcccggcgatcaaggcgcccaagtacacctactcacagaacgggttctgcgccgacaagccgggggtcgcctgctcgcctcaggtgatggcattgcttcacttcctcgccgaggtcgattaccccaagaggctggtagctagttggtccgggaacaattcctgcgtggattggctgggaattagctgcgttgcagggaatgtgacgatgctcaatttgccggagtatggactcaatggcacaatcagcgacagtcttgggaatctgagtgaactctcggacatcaacctcatcggaaataaccttactgggcatgtgccggatagcctcacaagcctcaggttgctgcagaagctggacctgtccgggaacgacctgaccgggccgctgcccaccttcagcccgagtgtgaaggtgaatgtgaccggcaatctcaacttcaatgggacggcaccaggatcagcgccatccaaggatactcctgggtcttcgtcgtccagggcgccaaccttgcctggccagggcgtccttccgg

SEQ ID NO: 6485 - DNA, 551 bp, Oryza sativa
  ref <308>: DATABASE ACCESSION NUMBER: AK063636
  ref <309>: DATABASE ENTRY DATE: 2001-12-06
atatagatgtgatgattccatgaatctctgaaaaggtaggggtcaaggaccttatgggactgcaatcgtgcctgccaattggggaaggacgcgggcctggcaaccgctcggctctagtaagggaaacaggtatgtctcacatcattgctcgaagactggaaaaactgcaagttagctcagttggtttaaaacggcatatgtgagtgacgcgaactagcattttgaattgagaaagccggtggccggggtggtctatgttgttatggtatctctctttaaaatcgagattgtgtgggtgttcagtctaccgctcatgttcgacgctattatggaccgagaagaggaatcaacgaaaaacccaggaaagagctgcgaaagaaaagcgtgacgagcaaagtcaagtctccacgactcgacatgttagaaggagctaaattaataggtgccggagctgctacaattgctttagcgggagctgctgtcggtattggaaacgtcttcagttctttgattcattccgtggcgcgaaatccttcattggctaaacaatt

SEQ ID NO: 6486 - DNA, 601 bp, Oryza sativa
  ref <308>: DATABASE ACCESSION NUMBER: AK063637
  ref <309>: DATABASE ENTRY DATE: 2001-12-06
gtgctctctttgaggtgggttggcttctcctccccctctttaccttttcctcctcggttcggttccgtggttcgtctagggtttagtgggttgagatggcggcgccggatgtcgagtaccgctgcttcgtcggcggcctcgcctgggccaccgacgaccgctccctcgaggccgccttctccacctacggcgagatcctcgactccaagatcatcaacgacagggagacggggaggtcacgtgggtttggcttcgtcaccttctcctccgagcagtcgatgcgcgacgccatcgagcagtgcgtgctggcgcccaacccgtcgtgctcccccaacgccaagtcctgcggcttcagcctctcctacgccgactcctcgctccaggccgcgctgtcgcaggacaccctcgccgtcgccggcgacgtcgtgaaggcctacaccttcggctgcttcaattctttgtagcttagtgagctagcttctcaggtgaagaatgtttcagtggtttatttagtctgggtttggttcgttgattagatcctgatgataagtgaagtgaaatgtgcacgtttgtgatgtttaattaggtgctggattaattc

SEQ ID NO: 6487 - DNA, 1326 bp, Oryza sativa
  ref <308>: DATABASE ACCESSION NUMBER: AK063638
  ref <309>: DATABASE ENTRY DATE: 2001-12-06
taatgcctccccgcggagttccacccccaagatctgcccagcaccgcctcattgtcggagaggtcccacgcctcgtactacccctcggccccatcctcatcggcagccctgccaccatcgccatcaccggaaaatcctccttctctttctccttctcggccttcatacgaacctgcagtggtgacggcgcacaggaagggggcggcggcgcagcacaatggagaggaggtgggaggcggcgcgcggaaggacggcgacaacacgcgagggagggggtagcggcgtagcacagcggggaggaggtgggaggcggccgggcggcggcgcgcggggagagggccgcggcgcagcacgggaggagttgggaggcggccgggcggcgatgcgcgaggaggggtggtggagctccacgtctttcgatctgcgtgaggtggggaggggtggcgaactcgcggtcgaaaccggcatcgccgccaagctcctgttgtggtcgccgctgtcgagttccgcaagctcctccacgctgacgatttcttgctccccggctccctgcttgccctgttcgcccgccgcggcttcctgatggggacggctggcgctcgcggctgggtcagccgccgccgcatgccccattgccggccggcggcgggataggggagagagcaagggggaggggcggcggcgaagcgtcgtggggaggggatgtgaggatagagtttgggggtgggagctgggaggggaggggataggtatgatatgtttttttttggaaaaaacctcttgttttttatgtttacatcgctaccccctaagagtagaactctatcttcttcgtgttgtatttctataaaatacgagggttgtttcgtataaaatggaacgtgatgttagtcggtgggaggcagtgcacgctattccgttcaaacacgaggatttttttgcataaatatcagcacgcgtcatttgctccaaggaggcaaaacgtgacgcacatgcagcgcgtgaccggcagaaccgatggggaacccgaagagagagaaaaggaaaggctccacagctcacccaatcgaggagctcctaacgaggagcaaaaaaaaataatatttcaaaaaaaagagagaatcggtagctttagggcttttattaattgataatttctttcggagttaattaccgagaaaagaatcatatgtacatgacaaacaattggctctctcctctccagtcctaccatacctcttgctctcaatttgtcttcccttcctgaatcaaaggtcatgtaaagattattatcaaaggtcatgtaaagatcattgatttgatgct

SEQ ID NO: 6488 - DNA, 832 bp, Oryza sativa
  ref <308>: DATABASE ACCESSION NUMBER: AK063639
  ref <309>: DATABASE ENTRY DATE: 2001-12-06
aatacaaccagctgcacgcccattcgtctcaaacacacattctttgattcttccttcaatttccccttttcaactctgtcatcaacttaattgttagaagcgacctaaagattttgcggccgatcaagcatggcgtccccttcggctctgatcgcaatgctcctcgtcatggtcgtcggctgcgccgccgtggcctcggcgatggagctgagtttcattgtcggagatgcgcagggttggaacaccggcgtcgactacaccgcttgggcgaagggcaaaaccttcgaggctaacgacacgcttgtattcagatacgccaggaagcagcacacggtgacagaggtgaccaagagcgactacgacgcctgcaccgtcagcggcaaaccgatcagtgatttcgaaggaggcgcgcttgtgacattcatagcgctcagccccggcgagcactacttcatctgcaaaatcggcaaccattgcgccagcggcatgaagctcgccgtcaccgtctccaactccagcgacaccccgaggccgcaaccttggattgggccttactccacgccagccagcgcgtccgcacacctgcacgccggtggcgccgtcgtcgcggcggccgttgggatcctcctcaatctcgccctcttctgagatcgcattgacgcgtcgagcggcatggacgttggcagggtggaggcaatgcatgattctttgtagcgtttctgatgaaatttgtttgattattttgtttacgttcgatcgtgtatacgtgcgtaataatgatttattggtcttgtgatttattttctccttatattcatttgtatatcctctg

SEQ ID NO: 6489 - DNA, 761 bp, Oryza sativa
  ref <308>: DATABASE ACCESSION NUMBER: AK063640
  ref <309>: DATABASE ENTRY DATE: 2001-12-06
gtcgaaagtgtaaacacaaaacacaaaactattccccaaatcaaaccttcttctctattttgacatttcctcctctgttcctcccgttcttactctgttcttccacttcctctagaattcgctggatagatcgtaacacgggcacggggacgtggtgctcggaggtgatttcagctgggacgaagacctcgacaggccgctccggctgaggcccgggtgggtggacgtacgacgtggcggcgaacccgatgctgaaggggtggctcaagccggagatcaggaagaggccggacaggttcttgtgcaggctgagggacttcaagctggacagcgtcgagatggtcggcgtggagccgatccccggcgtgacgcactgcgacgacaaggggggcatgctgccggtgctccccagccaccacttcggtttgctgctcaccatcgccccccaaatccacaagtgatcgatcagcttaaatcttcaccatggctgctaaaattctagaactggagatcttaagagttgatgtcgctgccggctgctctaatgtacctaaagtttaggtatctcgagattcttggaattagctttgtcatgtgtgtgtgtgtctccatgttgatcaattgtgtcgattatctttacttgctttgtcaaatctgttcttcgatccggtgttgaagggtaactcttggtgaagaactgaagatgataaggatctgccctgatggcatgatcaatgccttccagttaatttcttgcgtcc

SEQ ID NO: 6490 - DNA, 749 bp, Oryza sativa
  ref <308>: DATABASE ACCESSION NUMBER: AK063641
  ref <309>: DATABASE ENTRY DATE: 2001-12-06
gcttctccccgcaaatctccgatggccgccgccgccgccgcgccgctccgcaggctgctcctccgcctcggcaagccgccgccgctgcccattccgctgctgccccatatcacgccgcaaaccgcacaggccgccggggaccccgccgcgcctccttgcccaggcgcgatcccgagccaagccccggcgaggaatctccgtgacgtcatctcctccttccaccccgggctccagatttacccgtccctcgatccgagattcggggaggtggaggagggcgtggacggcgaggggggtggcgcggaggtgtgggcggacagcgtgaagaagaagcggaagcgcaagatgaacaagcacaagctccgcaagctacggaagcgcctccgccgccagacatagagcgggccgccgccgccgccgccgcacggtgaacaccctcctccgcctccgcctccgcctccgcttcgattgcgagtagcttctcaccatttcgtgtgttactgtgcttgcttgctgccatgactctagcggaaatgggggtggattgctccgtgtattgaattgttagacacttttctgtagctcattttgattcagtcttactatttcgttattattattagatgaaaatgctgtatcattatggtattaagttatgtctaggtctttggtctagattttcaggctctagtgctttgttgatgtatgctgtcacattactatggcagaaatgtagatgaataagtttg

SEQ ID NO: 6491 - DNA, 1305 bp, Oryza sativa
  ref <308>: DATABASE ACCESSION NUMBER: AK063642
  ref <309>: DATABASE ENTRY DATE: 2001-12-06
attcgactccactccactccccacctcacctcgcctttttagagagagaaagagaagagagcgagctcgacgaggagagagagagagagagagaggagtcacctcacctgcacctgagctagagagagagagagagagaagaggaggagggtggtggaggaggaggccgggagggggagatggagaggccggcgccggtgaggaagtcccacacgtcgacggccgacctgctgacgtggccggagggcgcggcccaggagctcgccgccggggccacgccgccgcccaaccgccggccgcaccagccgtcggaggcgatcagtaaggtggtgttcggcgggcaggtgaccgaggaggagttcgagagcctcaacaagaggaaaccatgctcagctcccaaatggaaggagatgacaggaagcggcatatttgcagcggaaggcgaggttgaggaagacgagtcagccaatgcttctgcaacgcccgtccgaacggtttctaagaattatcaggccattagcactataagtcatatctcattcgcggaggaagaaagtgtttctccaaaaaagccgacttcgatagctgaggtggcgaagcagcgcgagctaagtggcacgcttcagagcgaggatgagagtaagatgaagaggcagatatccaatgcgaaatcgaaggagctcagcggccatgacatctttgctcctccagaagatcccaggccacgcaactccgcgaacggctcgacctcacaaaccccgggcaaaaatgcacaagtgagcaccatcacgttcggagaggctgacaccgacagcgtggtgaaaacggcgaagaagatcccggagaagaagctgacggacctgacgggcaacgatatcttcaaaggcgatgctgccccggggacggcggagaagcacctgagcacggcgaagctgaaggagatgaccggcagcgacatcttcgcggacggcaaagcgccgtcgcgggactaccttggtgggatccgcaagccccccggcggcgagagcagcatcgcgctggtctaacaaacaaaacaaaaccccctgatggatggacatagcctactacgacattcttggactcgtcctccccgttgccgtcattaggagtgatttttttcttctaggagagcttctttgatgagactgatcgattgaactgctgctgcatggtttgtttccgtttctttttctcggcttcttttttttttgtttaatctgatcgatgatggtgtgggtgcggcaaagcaacggtgatggatatctaatttaacatttggtgtgc

SEQ ID NO: 6492 - DNA, 1591 bp, Oryza sativa
  ref <308>: DATABASE ACCESSION NUMBER: AK063643
  ref <309>: DATABASE ENTRY DATE: 2001-12-06
aagtgaaaaataaagaaaaattcattcttcttctccttctccttcttctcttcttggaggatatttcttccccctccgtctccggcgccgatctgcatccacccgccgagcagagaccagcgccgccgccgccgccgtccgttcctcctgtatcgcgtcctgaaatttctttttttctgggatgtccgacgttggagacgcccctgtgcagcgccgctcttgttcgaatccggccggtggtctgtaggattgggcggctgcggcggcggcgagatggacgacgacgccagcatgagcataagatgggggggattcttcgagtcgccggcgaggaacctcggcctgcagctcatgtcgtcggtgcctgctgagcgtgacaccaagcagctgctctctggtagccccttcctgcatcatcagcatcagcagcatgtcccgcaccaccaccatcagccccatcacccgcgtgactgcggcgccaatggcaatgccaatggtggtgctatgcctcctcctcctgccacggaggctcccccttcaatgccgatgaacttcgcgcgcagtgacatgtggatgcacccgcaacagcagcagcaacatcatcatccccgcgagcacaaggctcttcacaatctcactgttggccatggttcttcgcacattgcgcatcatgacccagtgggctatgggatgatccccggtacgcataccctgcagatgatgcagcagcaaacagagcctcaactgcaacccccaccaccgcctcagcagccaaaagaggaatgcatttcctcgccattgatcgaggaaaatgtacctgttattgatgagccaccacctcccaagaagcggcagcagggccgccaacccaaggtaccaagggctaagaagcccaagaagtctgctgctcctcgtgaggatggcgcaccacccaatgcaccagcaccacggagaaggggtcccaggaagaatatagggatggtaattaatggtattgatttggacctctcaaggataccaacgcccatttgttcttgcacgggcgcaccacagcagtgctatcggtggggtgcaggtggttggcaatctgcgtgctgcacaaccaccatctcaacgtacccactgccaatgagtacgaagcgccgtggtgcacgaatcgcaggcaggaagatgagccatggtgcgttcaagaaagtacttgagaagcttgctggtgaaggttataatcttaataatccgattgacctgaagaccttctgggcgaagcatggaacaaacaagtttgttaccataaggtaaaagacaatgaaattctaaaatttgttggctttgtaggttgctctgcagctgtttggtctgagtaattgtctgtatgtactctagattacaaactgcagaatccttttaggtgtaggttttaggcatgtcctgtccctttgcagtagtttacatgcctcatctgtgacctgggtgctgacctgtatggtggctatctgcatgtatctttgtcattatctttacaagtagcagtgtaatgcgacaatctctaatttaggtggcatgaaagttaatctgttcaacgtttctcatt

SEQ ID NO: 6493 - DNA, 1606 bp, Oryza sativa
  ref <308>: DATABASE ACCESSION NUMBER: AK063644
  ref <309>: DATABASE ENTRY DATE: 2001-12-06
ctcctctccctcctcctcctcctccgccaccctgcgccgccgcccgaatcccctcccactcgccgccgccggcgacagcaggcacggtgcgagcggccggacgtcctcctctcctcctccacgcgcgttcgctgccggcgagcaggggcagacgagcacgcgacgcggcgccggcctccttccaccgccacctacctgacgccgccgcctcggttcgaaccgaaccgaatcgaatcgaagatgaacgggataaaggagatgatgttggaggggctgtagttaagtagcacaagagaggtgaacagacgtcgggagcgtgttctctcgccatgtctcggtcgccgcacctccctccccgctgcccgccgctgggtcctcagatcacaaggagggacgacagcttgttcacgcagagctgcaggtttccgtcggaggatccattcgtcggtgagccgccgtgctggctcgatgatctcctcgcggactccgggaagagccacacccttcctcctctcaggagagcctgcagcgattctgatgctatcttggatgtgctgacgtcgttccagagcccaatctaccctatcgatgaaggggatccgcagccggttggcgaagctggggagtcgttcaatgctgcggctgaagggggtggaagtggtgctggcatcgaaggtagctgtgtttatggaccaaattcgccgagacagaagactaggctgaccagttcagagagttccatggttaacgctgtcttggagaatgtccctagcaacccattgcagtacctgatgattgatgccacaagtggtgtgaactgtaatgttggtgcagccaatggaactggagacacaggtgatgctgtatgccacgctgatcaagagaagtcacttaaaaggcgctcaggccaaagatcaagggtcagaaaacttcaatacattgctgatcttgagagaactgttgactcacttcagaacataggggctgatttggctgtgagggtggcatctcttttccagcttcgtaatgctctatcaatggaaaacaagcaactgaggaggcagatcactagtcttcagcaggcaaaactaattaaggatggccaaacgcagatgctgaagaaggaaaccgagaggctgaagcagctctcagtgcgccaccgcaggagcaggagcgtcacctcttgctttgaggccaactcatttggaggaggagacccatctgcgatcaactggcagatgctcgacatgtcaaagctcagcttgaacggcggcgctgttgttcctcctagaggcggctacggcatgtgaaaatttgacagcaacaaccaacattgcctgcactgatcttcacctgtgacagaattgcttgcaatatcattagtttgtggttaacagttcactaacctgaccaaccataggtttattattatgggtccatcttttaggagagggagattaagagagggagagagttgagagaacatcagtcgttatcgcggaagatttgctgaggttatcatgcaagttttatcttttttgtagaattctgcaatgacttccatcgaacacatatgagatgaagcaatctttgcattgcttaaatt

SEQ ID NO: 6494 - DNA, 745 bp, Oryza sativa
  ref <308>: DATABASE ACCESSION NUMBER: AK063645
  ref <309>: DATABASE ENTRY DATE: 2001-12-06
atctgaatacactggctagcaagcaaagctaggtagaggccaggccatagatcgagatcgatctgcaggtgcagtgcggtgggtgggcatggcgacgaaagctggggtgatcgccacgctcctggccctgaacctccacttcttcaccttctccgacgcgtgcggctgccagtgcggctcatgccctagtcccggcggaggaggcggtggcggtggcggtggcggtggcggtggtggagggcgtggaggtggtggcgggagcggcggaggttcaggtggagctgtcgttccagagcgtgggccgcggcggcgccaccctcgcggggcgcgtggacgtgcgcaacccctactcccactccatcccgatctgcgaggtgagctactcgctgaagagcgccgggagggaggtggcgtcggggacgatgcccgacccggggtcgctcaccgccggcgacaccacgcggctggacatcccggtgaaggtgccgtacgacttcctggtgagcctcgccagggacgccggcagggactgggacatcgactacgagatgagggtcggcctcaccgtcgacctccccatcctcggcaacttcaccctgccgctcaccaagtccggcgagctcaagctccccaccctctccgacgtcttctaaatcggcatcgtgcacacgtacgggccgagtgtacgagaacttgtgtatttccagacttctggagtaataataaagaacacgagtggttggtt

SEQ ID NO: 6495 - DNA, 1399 bp, Oryza sativa
  ref <308>: DATABASE ACCESSION NUMBER: AK063646
  ref <309>: DATABASE ENTRY DATE: 2001-12-06
atcgccatcgatgccgctcttctgcaagcacggcgccggctttcttgccgtcgccgtgtctacatccatcgtcttcctcctcctccttcacgccttctcgctgccggcctcggcgctctccttcgggctagcgcgccgccaccggaaagacgccgccgtgagctgcgacgtcttcagcggcagctgggtccgcgacgacggcggcggcggcgcggcggcgtacaccgggtacaactgcccggtcatcgacgcggagttcaactgccagctgtacggccggccggactccgactacctccggtaccggtggaagccggccggctgcgagctacccaggtttgatggcgcggacttcttgacgcggatgaaggggaagacggtgatgttcgtcggcgactcgctgggccggaaccagtgggagtcgctcatctgcctgctgcacgccgcggcgccgcagtcgccggcgcagctcgtctccgtcgaccctctctacacgtacaagttcctggagtacggtttggtggtatcgttctaccgcgcgccgtacctggtggacatcggcgtggctcaggggaagaaggtgctatggctggacgacatctccgggaacggcgaggcgtggcgcggcgccgacgtgctctccttcaactccggccactggtggacgcacaccggcacgctccaggggtgggattacatgggcgcggacgggcggtactacgaggacatggaccggatggtggcgttccagcgcgggatggcaacctgggccaactgggtggacgccaacgtcgatccagccaagacccgtgtcttctaccagtccatgtcccccacacactacagctcgaaggagtgggccaacccggtgtcgaagaactgctacggcgagacggccccggcggcggcggcggcggcggggctgaacgcgacgacggcgcaggcgacgtcggggcaggaccaggtgatacaggccacgctgcggtcgatgaagagccccgttcgcctcctcgacatctcggcgctgtcggcgctgcgcaaggacgcgcacccgtcggtgtacagcggcgacctctcgccggcgcagcgcgccaaccccggcggcggctcggcggactgcagccactggtgcctccccggcctgccggacacgtggaaccagctcttctatgcgcttctcttctaccaatagctgtagcctgtaggcagttaatttcgtttttttttatatcgctcggtgtaacaatcttcagagtgaaggtgaggaggcgtggtgacagtaggcacacatggatgagactctgagaagaatcaagaatgtacattgattgatcatgcgctgccaaattgcagttgcagtgtacacggttgtactatgatctgtctgtgatctgtcgct

SEQ ID NO: 6496 - DNA, 588 bp, Oryza sativa
  ref <308>: DATABASE ACCESSION NUMBER: AK063647
  ref <309>: DATABASE ENTRY DATE: 2001-12-06
acgccattactgctcctcaaacgagaccaagaaatcaatcgttccagcgaagaagaagaagaagaaggaggaatccatggcggcgaggacggtggcggtggcggcggcgctcgccgtgctgctgattttcgccgcctcgtcggcgaccgtggccatggccggccggccaacgcctacgacgtctctcgacgaggaagcggctcaggcggcggcgcagtcggagatcggcggcgggtgcaaggaaggggaaggagaggaggagtgcctcgcgaggaggacgctgacggcgcacaccgattacatctacacccagcagcatcacaactaattaatcttatcgatcaatcaataatcaatcaatcaatcagtcgcttcctcttcgatctaccaatactagtattggtatataattaaaactgcaaatccgtcatgcatgcatggtatgcccatcgatccatccatgattatctctagttagatgtagtaacaaactgcatgcgcgtgttgtgctcatcagtgttaattttggccgcccccctgttgataaacagttcttgatcgatgagagctagctttcgttttgttttg

SEQ ID NO: 6497 - DNA, 1442 bp, Oryza sativa
  ref <308>: DATABASE ACCESSION NUMBER: AK063648
  ref <309>: DATABASE ENTRY DATE: 2001-12-06
ctggcacgcgaaccaagaaaagtctctctctcctctcctctcttcttcatcaacacacactggttgaccaaccagctagctgatcgagttcgttgtttaccatcctattaataccccttcctctctctcttctcccctcctgaatttctctcttggtagaggtagaattgatctcctttcttgttcttcttcgagttcttcttaattggagttcttggagcagcatcggtagtcgtcgtcttcgtcgatccagcatctcaaggaattcgaggaggagggggtgggcatgagcgggatgaattcgctgagcatggtggaggcgaggctgccgccggggttcaggttccacccgcgagacgacgagctcgtgctggactacctggaaaggaagctcctcgacggcggcgtgggcggcgccgcggcggcggcggcggcggtcaccatctacggctgcccggtgatggtcgacgtcgatctcaacaagtgcgagccatgggaccttcctgagatcgcttgcgttggtggcaaggagtggtacttctatagccttagggataggaagtatgcaactggccaacgaacaaatagagcaaccgaatcgggctactggaaggccacaggaaaagatcgcccaataagccggaaaggattgctcgtcggtatgcgaaaaaccctggtgttctacaaaggtagagcccctaaggggaagaagaccgagtgggtcatgcatgaattccgcaaagaaggacaaggggatccgatgaagttgcctctcaaggaggactgggtcttgtgtagagtcttctacaagagtaggacaaccattgccaagctgccaacggagggtagctacaacaatattgacagtgtggccacaacttcactgcctcccctcactgacaactacattgcatttgatcagcctggttcaatgcaaaacctagagggttatgagcaagtgccctgcttctccaataatccctctcaacagccatcgtcgtcgatgaatgttccgttgacatcggccatggttgatcaagagcaaaacaatatgggtagggcgatcaaggatgtgctgagccaattcaccaagtttgaaggcaatgtgaagagggaggcccttcaaagtaatttttcccaggatggatttgattacttggctgagagtggcttcacacaaatgtggaactcactcagttgatttaatttcgaaggagatatatattgattgttgcgaattgaggaggaaactcttaaagtgtgcttatgtgctattgcatgtaattgtgatatagacgtatagtaccattctagttcacattatttgcaaaaaaaaaggggtgatcaaaagagatattatcatcatcaatgatgtaaatacattatttgtgtactagggtgtgataaaaaaaattagtgcatgatgctaaaattaatggtat

SEQ ID NO: 6498 - DNA, 1186 bp, Oryza sativa
  ref <308>: DATABASE ACCESSION NUMBER: AK063649
  ref <309>: DATABASE ENTRY DATE: 2001-12-06
agatttctcccgctaatttgctcatccgaccagccaaactgtcgcctcgcgatcagcatgtaccccaatccccgcataggctgcgtgctgggtagatctcttgccgtggaagtattgatcctgtcttgttcctgaccaactgaggattggagctttgtgattctgtgatcttcttgtggagatatgggcaagcctctgatctatgagatattggagaaaccagccagtagtagcgtgataggcatctgctccctgatctggttcttcatccagaagaggaacattgggtatggagatgttgggctgagctacgaggccgccatggaaggcgggcagtactggaggatcatcacctccgccttctcgcacatcagcgtggtgcatttggtgttcaacatgagtgcattgtggagccttggtgttgtcgagcagttggggcagattgggctcggtgttgagtactacctccattacacgcttgtgctcgtggtgctgtctggattgcttgttcttgggttctaccatgtgatgattcagaagttcaaggtggagtatttcaggagggtgaccgctgtcgggtactcgtgcgtcgtgtttgggtggatgacaattctggctacaaagcaaccgtcgtcgaagctgaatatcttcggggttctttcgctgcctatcagcttcgcgccgtttgaatcgctgatattcacatctatcatggttcctcaggcgagtttcattggccacttatcagggatcattgttggctactcaattgcctggggtttggttcatggaatgaataactattgggctatcaccatgtttggttggattgtgcttgtgtttgtcttgagcttgaagcgtacaggctcgatggatttgagatttattgagattgagccagttacggatccctcgctgccttctgttggcgtagttgcctcaagaaatggcaggactcttcagatggatgtgcttccgagaagaggagttgcagacattgtatgacttgcaaagtgggatgctcaatcgctgaaatgttttatagatagtcctaaacttctctgaaaattttcagacattgtattacttgcagagtggaatactcggccgctgaaatgttcgatagatagtattgttcaagccctgaattgtatcatgctgattcaatactatacttccagttttg

SEQ ID NO: 6499 - DNA, 625 bp, Oryza sativa
  ref <308>: DATABASE ACCESSION NUMBER: AK063650
  ref <309>: DATABASE ENTRY DATE: 2001-12-06
gaacactgcactgcacaacacaagcgtcgtcttcaggccgtacgtgacaaacctcagcaggcgagtgtcatggcctccgaaggcgccgtgagcccggcgttcgcctacaccgtcgtctacgtcaaggacgtcgccaagtcggccgccttctactccgccgcgttcggctacaccgtccgccgcctcgaccaatcccacaagtgggcggagctggagagcgggacgacgacgatcgcgttcacgccgctgcaccagagggagacggacgcgctgacgggcgcggtgcagctgccggactcggccggcgagcgggggcccgtggagatctgcttcgactacgcggacgtcgacgcggcgtaccggcgggccgtggacagcggcgccgtgccggtgagcccgccggagcagaagactggggccagaaggtcgggtacgtcagggacatcgacgggatcatcgtgcgcatgggcagccacgtccgcgcgtagcggccatgcgcctgctcggttgggggattttagccgtgtatgttcaataatgtgaactgttctccactgatctgttgatatatggaataaaactgtgatctcgttggttgtggtctgtactccaaagtccaaacgag

SEQ ID NO: 6500 - DNA, 812 bp, Oryza sativa
  ref <308>: DATABASE ACCESSION NUMBER: AK104963
  ref <309>: DATABASE ENTRY DATE: 2002-08-28
atccctcctccccttctccgtccaaactacccgcctccgctcccaatccggcgagatcaccaaacccctctcgccgcctccgccgccgccgccgcagcagcagcagtcactccgccggagcaccatgatgcacatgaccttctactgggggaaggacgtgacgatcctgtttgacggctggcggacggccacgtggaccgggtacctcctctccctcgtcgcgctcctcctcgcctccgccttctaccagtacctcgaggcgttccggatccgcgtcaagctcctcgcgggcgccaagccggcctccatcccgcccccggcgtcctccgacgccgcgcgggccccgctcctcctcccctcgtccgccgccggacgctggccggcgcggctggcgacggccgggctgttcggggtgaactccggcctgggctacctcctcatgctcgccgtcatgtcgttcaacggcggggtgttcgtcgccgtggtcgtcgggctcgcggcgggctacttggcgttccgcagcagcgacggcgaggacctcgtcgtggtcgacaacccctgcgcctgcgcctagggtttggctttgcggctgcccccaggtgtggctcctctgtttggtttcccgatcttgtatgacaagtagaaataaatctgtgtacaaattcaattgcgtgacagggggattccggtgtttctgtaatttggggggaaattgtagagtacaaaatgagaaagctgctacttttgtgtttccaaccaattgatgcattgatgcctttgtgaatgaggaatggataaagatgacttagatc

SEQ ID NO: 6501 - DNA, 980 bp, Oryza sativa
  ref <308>: DATABASE ACCESSION NUMBER: AK063651
  ref <309>: DATABASE ENTRY DATE: 2001-12-06
atacttctatccatatctcggtcgctacacgcgttacatccgtacgcttcatacatatactgctcctacctaagatcgatcgatcaatgcgcttctcaacaggtaatgggtgatcacgcaatggccaataatcacgagcacaaggtggaccacctcgaccagcccttctacggcccgcccgttctccctccggtcgagccgctgtccgccgccgccgcgcgccgccggtgcgtcgccgacccgtacgcgctctgctgcagggcgatccgcgtgctgacgatcgtggtcatcgccgtcggcgtggtggcgctggtgctctggctcgtgtccctgcccaacgccctcaaggcctacgtcgactccgccgagctcacccgcttcgagctcggcggcagcgacggcgccaagcggggccagctgctgcggtacaacctcaccgtggccgtgagcatccgcaacccgaaccgggaccaggccgtgctgtaccggcggctggaggcggtggtgctctacggcggcgagaggttcgggtacgtcgacttcccgcggacgcggcaggggcggaagagcacgatggtgatccggccgagcttcgtcgggcagggcgtcctcgccggcgcggcggcgttcggaagggagaaggaggaagggttcttcaacatcaacgtgaagctccacatgagggtgcgtctcaaggtgatggtcttcgtggacagcgtcgagtacaggccggacgtggactgctacatcagggtgcccgacccgagcaacgcgacggcggtggcgatggggttcacggcgacgcgctgccgtgtcgacgacttcatgtgatggactggaccctgaagggtgcagcattgcattgcacgtataggtgacttcagattgttcattgtgtatattatgatcttcgagacagcaaaaggaagtttttcttttcaaacgaattgaatcaaaaggaagtttgatcgtccatgacg

SEQ ID NO: 6502 - DNA, 770 bp, Oryza sativa
  ref <308>: DATABASE ACCESSION NUMBER: AK063652
  ref <309>: DATABASE ENTRY DATE: 2001-12-06
atctcaggcaaggcaaaccgctcaactctctccgctccaaacgactagctcgatcacttgctagctgcctagctcccaccatgatggcttcgcgagtctcctccctcctccgcgccgccgccgcggcggtgtccgtccccggccgctcccgctcactctccgccgcagcggcgacggcggcgaagaagccggcgggggactacgtgccggtgtacgtggcgatggggatgatcgcggtgtcggtgtcgctgggcctggcgacggcgaggcagcagctggcgcacgcgcccaacgtgcggctcgacaagaagaagcgggagacggtgcccgaggtggcggcgccggacatggcgctcgacgaggcggagcggttcgtcggcgggtcgctgttccgcaaggtggcgcacgtgcaggacgacgcctcgctccgcgccggcgtcgccgccgaccccgtcgccgagtacccggccaggaaggccgtcaccctcaaggacgccggcgtcgagccccccggcatcgagcagggcagggaggggatcctcgaggtgttggggaagaagaccaagcccgccgccgctgcttgaagctgaagcgtgtgatataattgcagttaattagtagtgggttaatctgggttctccttgctttaattagttttatttgcttaattactggttgctttgttttagtctttcaaaccggctgtacttttatgaagtcgatgtgtgtgttggggaactgcttgtacatatgtcaatccagctttgatg

SEQ ID NO: 6503 - DNA, 982 bp, Oryza sativa
  ref <308>: DATABASE ACCESSION NUMBER: AK063653
  ref <309>: DATABASE ENTRY DATE: 2001-12-06
acctctcgccgtgcgactggctgagctactggtggtagctgccaatggcgatggatcatcgtggtggtggtggtggtggtgggaggagcagcagccggctgcgggacaggctggcgaggatgttccggccgggcgcgctgctccggtcgacgtgcaacaaccacgccaccgcgtcgacgtcctcgtcatcgtcgtcggcggcggcggcggcgggtggggtggtgacggcgtccgcgtgctcgtccagcagggcgctgctcgccgcggacgcggcggcggcggtcgactactgcggcagggagtcgttcttggcgtcgtcccgccgcgactacagcgacgcggcggccaccgcgctcgtcggccgcaccgagtcgttctccaccgcgctggaccgcctccaccgccgcggcggcggcactccgctgccaccgtcgaggttctccgtcgacgcgccgcctcctcctcctccgacgacgaggcaccagataaggcgcaagcgccgcgcggcgagggcgagcagctgcgttgacacgtgcggcgtcagggacgggttccgccccgtggtgtcggcggcggaggagcaggtccggcgcgggttcgccgtggtgaagcggtcgcgggacccgtacgccgacttccggtcgtccatggtggagatggtcgtcgggcggcagctgttcggcgcggcggagctggagcggctgctccggtcgtacctctccctgaacgcgccgcgccaccaccccgtcatcctccaggccttctccgacatctgggtcgtcctccatggcggctagctactagctagcttattagccttaataaaaagagagaaaaaaatcaccgtgtttaattaattagctcagtcccaggatgattaatcactgagattagccagagtactactccatcttgcagtaatcatgtgtgttcattacttaatctttctcagagtttaattaatctcctcttgtgttgattt

SEQ ID NO: 6504 - DNA, 871 bp, Oryza sativa
  ref <308>: DATABASE ACCESSION NUMBER: AK063654
  ref <309>: DATABASE ENTRY DATE: 2001-12-06
gtgcgcgcgcgcgctaggtcgccatggcctcggaccaaaccctccccgtcccggtctcggtcgagctgccccccgccgcgcccaaccctcctgacccgaccgcacccctcctcccgcacgcggacgacccctccgcaccccccgccgccgcgccgccccgcgcgccgggccgctcatgcccccggatccctcaggggacagcaattcccatgattacaacggcggtattagcgccggtacgcccggcgcatttggggatgggcacggtggtgaggaaatgatgtatcttgagcaggaaagtgggcactttggttatcatggagatgtcgcgattgcggctgacggaagccttgatgggattgtgaaggtgcagcctgagactcttcctgccctccccagtatcggggacattgcggttcacagtgagaatggcaacggcaaggccgtggtgccacgtagcaatgagcatcacatggcaaatgccgtgctggatatatttgaggagtgcttgcgagaggtgaaggccaatggcattacctacggtgctaatgtgaatgggggcagtgaacttgcaaggcgatggagagcacagaggattgatgagcttgatgtgttgagccggacatactggtggttttggtgacgtgcttccgcccttcaccccatgtgtataaaatattaaaatctagattattatgctatatgcttttgtagttcctcactcagcttgggccttgccttagtcagcctaatatgcctattatttatgcctatgtacatcgtctacggatattgccttttagtttaattatttcatcagcataatatatatggttccagcattgttatctatacagctgcctgctgttgc

SEQ ID NO: 6505 - DNA, 1228 bp, Oryza sativa
  ref <308>: DATABASE ACCESSION NUMBER: AK063655
  ref <309>: DATABASE ENTRY DATE: 2001-12-06
aaccgaatcttaacgagctttttccccgtagagataacccgagattttagtttgcgactccggaatcgtctcgtcgtcgatagttgagcaaacaaaccatggcggatggatcgagcccgtcggccgccgccggttaccctttgctggtgcagcgaagcaatgccggctcgccggcgatggcctttagcctgtctgacgggaagacacacgacgacgtcagccttcccgagatgcactccagcacctacctccagacgccgcagggctgggtcctcgtcctgagctcctcgtcggcgccggagatgtcgacgttcctcctcgacccccgtgacgggaggaaggtcggcctgccgcctctcgacgagagcgagctcccgacggcgcgcaagtgcgtgctgtccgacaacgccccggacgccggcgccggcgtcgtcgtcctcagcctgcagggcccggccgtgtggttctgccgcgtcggcggcgagcggtggtcgacgcacacctacgacatgggctacttcagcctccccgtggagtaccgcgcccccaagaagcggcacctgttcgacgtcgccggcgtcggcgggaggttctacttctgcgaggacaaggacttcagcctcggcacgctcgacttcaccggcgacggcgaggtggcgctggtcgccgtgagcgtccccggcatcgacgacattttcccgtcccccgactcgagcggcatcgcggccacgtacctcgtcgagtcgcgcggcgacctgtacctcgccgccgtcgtcttcctcggcttccgagccgaagggccgccgcacaagttcagcgtctaccggatggacttctcggcggcggggccggcgtggcgcaggacggcggacatcggcggcgaccgggcgttcgtcctcggcggcggcggcggcggcaacttcggcgcgtcgtgctcggcgagcgggtgcggggtgcgggcgaactgcctctactggttcaactccttcagtccggatgactacaacctgcatgtgctcagcgtcggcgatggcggcgtcgagaccgtggcgccgccgccgttcgagcacgcctcttgtgtgcacaagccgttctggcttgttccaactactaataatactgcatgattaagattaggttaattatgttttgttccagtatcaattagtaccaagtactccgtactactttactttacctcatttataaatagttaatgaattcagtt

SEQ ID NO: 6506 - DNA, 744 bp, Oryza sativa
  ref <308>: DATABASE ACCESSION NUMBER: AK063656
  ref <309>: DATABASE ENTRY DATE: 2001-12-06
agacagaagaagagagaagttgagaatagagaggggaatgggatcggggatggaggcggcccggcgtgtgctggagcatccgactccgacggacgcgtcgtcggcggcggcgctgccctccgggttctacgacgccttcgtgctgaggggcatccgcgtggaggccgcggagcccggccgcctcctctgccgcttcaccgtcccctcccgactcctgaattcgggcggcttcctgcacggcggcgccacggcctcgctcattcacctcgtcgcctccgccgtcttccacaccaccggcaacagcagctctagctctagctctacctcgcccctggagatgaacatctcctacttggatgcagctttccccgatgaagagattgagatcgaagcaaaggttcttcgtgccggcaaggcagttggggtggcgctcgtggacctcaagaagaaatcgggcaaactcattgctcaagcccgctactccaactaccttgcaccatctagcaaactctagtaatcatctgtaataggagtataggaaaccaattcgccaaaccaagagtgagttcatcatccatccatccatctaggatcaggatagataactctactcctattcctatttatttatttatgttaaaagcatcctgatactgccgtgtagtgtttctatctatctctgtgtaacagtgtgtgtattacactactatatatactccatataagagagaatcgcaatcagtt

SEQ ID NO: 6507 - DNA, 1249 bp, Oryza sativa
  ref <308>: DATABASE ACCESSION NUMBER: AK063657
  ref <309>: DATABASE ENTRY DATE: 2001-12-06
aacctccgcttctaatctctctcctcctctccgcggcgccactctccttccgccgccgccgccgacgacgacgacgacctcctcctccgggtcgacgaaaccctagccgcggcgcggaggcctgctgcttccggctcccgctcctccctgccgagttcccgcgaacccttcgctgccggtgaaggaaggcgaggatggacggcggctacggctcggtcacaatcgtccacgacgcgcgctcccccgaggacgtcttccaggacttctgcggccgccgctccggcatcgtcaaggccctcaccatcgaggtggagaagttctacaagcagtgcgaccctgagaaggagaacttgtgcctctatggactgcctaatggaacctgggcagtgactctaccagctgatgaagttcctcctgaactaccagagccagccctcgggataaacttcgctcgtgatggaatgcaggaaaaagattggctgtccctgatagctgtccatagtgattcatggttactgtctgtggcattttactttggggctcgttttggatttgataaaaaggccagggaacggctcttcatgatgaccagtagtctccccactgtctttgaagttgtgtcaggaggtgtgaatacacaatcaaaaaccgccaacggcagtagcaaaaacaagtcaggctctaagccaccaaagcggcccaattctgacagcaagccacagaagcaggtccaggcaaagtatgaggaagagaacggcggcagaggaaatggaggtgatgaagatcaagctgaaaccatttgtggcgcctgtggtgaggcctacgcaaacggcgagttctggatttgctgtgacatttgtgagacctggttccatggcaaatgtgtccgaatcacccctgccaaggcggagcacatcaagcattacaagtgtcctggctgcagcaacaagaggaccagagaatgagcgtccattttttctttctaatgtgatcctgatagtagtggcaaaaaatagatagtagtttacccgtgaacttggggaacctcaattcctactgggtgaccgtcgttgcggcagccctggttgccccgctgtattagtagtagctacgttacttcttgtatcatactggacatagttggtagtgccacagtaatagtagtatcaataggccatcttctgcctccttggttggatggattggttaagtgtctaaactctctgattaatgatgtgattttttagtc

SEQ ID NO: 6508 - DNA, 496 bp, Oryza sativa
  ref <308>: DATABASE ACCESSION NUMBER: AK063658
  ref <309>: DATABASE ENTRY DATE: 2001-12-06
aagcctaccatgccctcgcggtcgcggacacgcggcggcgacggcgacggcgacggcgacggtttgccggcgggagatttgaagccgggtgtcatccggaacctgcccaccttttcccgcctgctaatcaacaaatggcctcctgtgttccgccaacgattttcttatccattcaggtgcttcaggacacactgcacagcggacttaggggtgagggagggcgccggctagccacagaaatcatgtgaatcagggctgacagtgggaatatcctgcaggcaggctgcagcttgcagcagcagaattgcttaggagagcgatacagtttagtcggtacacacaggggtagattggtgtaagatagctttctgaattctgaagccctctacttgatggaaatagtcattatctaaatgttggaaactttgaatggttctaaagtgtatttgagaagttggatgatatatttctgaaactagtatctttggatatcact

SEQ ID NO: 6509 - DNA, 495 bp, Oryza sativa
  ref <308>: DATABASE ACCESSION NUMBER: AK063659
  ref <309>: DATABASE ENTRY DATE: 2001-12-06
gagaccgcgagcggtggcagagcatcacgctccacccaccgccagcgccccgcgccacccctggtccgccgtcctcggctcctcgcgacctcgcccccaccatcttcgctgtctcgtaccgccgccatctcgcggcgctgtccagccgtttcgcggcgccgtctcgcggcggcagcgccgtcccgccgtttcgccgccgctaccaccactgacgacgacgccacagccacaccgacgagccgacgacgcctcgcctctgcgactcgacagcagccagcagcccagcggcagcagccaacagcccagcggcagcagccagcagcccagcgacgagccgacgagcctaaaccattgatttgatttcttttgtgctgcagatttatgatggaatcatcaaatgcaagtagctattttgtgattgaactaagtactgtactaatggactgatgtgtgttgctgttttgtgatgactaatgattgatgaactatgtactg

SEQ ID NO: 6510 - DNA, 687 bp, Oryza sativa
  ref <308>: DATABASE ACCESSION NUMBER: AK063660
  ref <309>: DATABASE ENTRY DATE: 2001-12-06
gtgcttgaaattgccgggagggaagcggatgggggccggcgatgcgccccggccgtatgcggaacggcttcggctggtccgccgatcggctcggggcgtggactgttgtcggccgcgccggcggccaaagcccgggggctccgcaacacaaattccatctcagcattttctccagtttttctcctactcttaactcgcttgatcagcgtcaaatctaacagacagatccatcgatggctgcttccgaattccgatccggccgtcgtgccgtcgcgctcgtcgtcgtgatctgcgccgtcctgctgctgtcctccgccgtggagcgggcggcggcgcaggtgccctgcagcaagtgcgaccacgcgtgcaagaagtcgtgcaagggctacggccgcgactcgtcgtgcagcctcccctgcggcgacccatccaacaaggccggctgcgagagctgcctggacgcctactacctgaagtgcctcaactactgtggccagtcctgccgtgtgacctgcaccagcggctgaaaaaaaccgttcacgcttcaattcgtctctgagctcacggcgccggccgccgtcgtgaagccttttgatgtgtcacgtaaatgtatgtactgtctcgatcatatgtagttctgttactttctccgtttcatgcatattgcaagttatttttgttttgtcc

SEQ ID NO: 6511 - DNA, 557 bp, Oryza sativa
  ref <308>: DATABASE ACCESSION NUMBER: AK063661
  ref <309>: DATABASE ENTRY DATE: 2001-12-06
actcctccatcttctctatccctctctctcttcttccagcagcacggcgccgctggaaaaccgccttcgccgcctcggcctcgagcgcgtcccgggcgtggtcctcctcgagctccgcgaggcgtgtggccggcaccggcggagcaaaggagtcattagggagctctcgcttgcctccgcgaagccctcgcctcgcgccgcggtggcggcggctgcgacggcatcgtcgttcgcgtactccgcttcgtcgctgcagcggcatcgtcgcccgcgtcctctgccccgtcgctgtgggggaggaggaggaggaggaggagggtgggggtggtgcgctccgccgtgcccgggatcgccgcggcggggctgcacaactacgtcgccggctgcgacgaccccaccaaactggagagcagcgaggtggaggccatcgtgagcgagtgttggatttgcagattgctcgtctgtacttgctgcatttggttgtgtgatttttgtttttactcatttacttctgaaactcccatttgctgttggaatgctagtaaaacttttgttct

SEQ ID NO: 6512 - DNA, 1244 bp, Oryza sativa
  ref <308>: DATABASE ACCESSION NUMBER: AK063662
  ref <309>: DATABASE ENTRY DATE: 2001-12-06
aacttctgattcgatgtcactagcatctcacgctgttcgatcaaccagagcatttgcctcttcatcaatcgcgtcggctagacttacttccctgaatagacagatcaacacaagtccgtttctgggattcagaaagatgtcgtctctaccaaagactatgaaggcggtatacattgagaagaccggcggcacagatgtcctgcaatacaagaccgatgtccccgtgcccgagcctcaagagggcgaggtgctcgtcaagaacgacttcatcggtatcaactatattgacacctacttccgctccggcgtctacaagcctcccaaattcccctacatcctgggccgcgaaggcgcgggaaccattgctgctgtcggtcccaacgtcccctcagatctcaccgtaggcacgcgcgtcggctacatgggccagtatgcgtacgcagagtacgtgcccgtcgccgcgacctacacgatcccgctgccggactcgatcgactccaagaccgcggcagcctccatcctgcaggcgctcacggccatcacgctcatccgcgacgcgtaccccgtccagaaaggcgactggatcctcgtcactgccgccgctggaggcgtcggtctgtggctttgtcaattgctccgcgcgatcggcgcccgtgtgattgccagcgccagcacggaggagaagcgtaaccttgccaaagagaatggcgccgaattcgttctgggttactacgaggaggatcgcgaccagtttgtcaagaaagtgcttgaaattaccggcggcgagggtgtgcatgcagtgttcgattcggtcggtaaagcgaccttcgatagcagtcttgcgacgatccgccgtaagggatcgatgattagctttggaaatgcgagcgggcctgtggagggctttgcgcttgcgagactgagcgcgaagaacctgaagttgatgaggacgacgctattcaacttcattgttacgcgtgaggagacactcaaggcggcggaagagttgtggaagctgattgagaaggacggcttaaatgtcaagatccacgaggtgtatcccttggaggatatcgtgcgcgccactcaggacatcgagggaaggaagaccaccggcaagctgcttctgaaaccatagtccttggtcatagaacataagtcgcgtgaacgggacaaaggcatagtatgagtcgtgaagtagccgtgattagacacaatgaaactaagacgctatgcttaaaatc

SEQ ID NO: 6513 - DNA, 686 bp, Oryza sativa
  ref <308>: DATABASE ACCESSION NUMBER: AK063663
  ref <309>: DATABASE ENTRY DATE: 2001-12-06
ctctcgtcgtcgtcgtcgccgccgcctcgccgtcccccgccattggagccatggatctggctcccggccgccgcgcgcgactgctggtggcgctggccctcgtcgtcctcgtggccctagccgcgcgatccggcgccgaggtcatcaccctcaccgaggagaccttctccgacaagataaaggagaaagacacggtatggtttgtgaagttctgcgttccatggtgcaaacactgtaagaaccttggaacactttgggaggacttgggaaaggttatggaaggtgcggatgaaatagagatagggcaagtggactgtggtgttagcaaaccagtatgctcaaaggtggatatccattcgtaccccacattcaaggtgttttatgaaggtgaagaggttgcaaaatataaaggcccaagaaatgtggagtcactgaagaattttgtttcggatgaagccgagaaagctggggaagccaagcttcaggacagttgaactggagctcaagtgttccatcctaccacagttaagcaacaatgtagtactgtttgacatgcttaaactttttgatatagtgagcttgtacttcctcctggcgtttagtagaatgttaaccactgcatgagtcgcatgaaactatgtaattttctgcttcatactgcattcaattacagcatgctatactat

SEQ ID NO: 6514 - DNA, 1502 bp, Oryza sativa
  ref <308>: DATABASE ACCESSION NUMBER: AK063664
  ref <309>: DATABASE ENTRY DATE: 2001-12-06
aactaacgctaaaaaagtaacagtttctgtactttattggatccatcccaacccttcctgttcggtccaacaacaacagcacgccatatctatcatgacgaccacgtttcgcgcctccgccctcgtgcgcaaggccactcagcctgtcgtgcccttcggcgacattcgcggcaaaacgggccccatcttcggctcgaagctgatcgaggtcgtgtaccaggtcggcgagggctggcgcgccccgctgctgcgtgactacggtgacctcgaagtccgccctcagatcgccgggcttcactatgggctgcaggtcttcgaccactgcgtgatcagcgccgacaaggccaccaagaagcccagaattttccgccaggagtgcttcctcagccgcctggccgaatcccgtgactacctgcacttcggcaagtacgaggacgccgagctgaccgcgctgatcaaggagtaccttgctgctgagcagttcaacatccccaccggccctgggcaggcgctcctcgtccgcacgtgcatcatcggcgacaataacagcctctccgctggcccagccgactcgttccgccttttcatcttcagcacccccttcgacaccttcgcggagacgaaaccactcaacgtcaaggccgaccccactgttcgtcgctcgtgggcgggtggcacgggcggcgtctcggtcggcggtaactacgcgaaccagatctaccacgaaacgctcgcacgcaaggaaggcttcgaccgaatcctttggctcgtcgacaacgagaacatcgccaccgccggcgacgccaacttcttcgccgtgtacaagaacgccagcggcgcgcacgagctcgtcacccccgagctcggccagaccagcatggctggtactgtccgcacgactatcctcgagcgcttcggcaagcaggcccgcgtctccgacgtgacggcgaaggagttcggtgcggccctccgtagcggcgctgcggttgaggctttcgcgaccagctccacgtgcatcacgcgcccgatcgcgtccatgtcgtacaacggcgaggccttcgcgatcccgacgccggccgatggtttcgctgcgcgcatcaagaaggaagtactcggtatctgggacggcagcatcgccgatccgtcgtcccagcttttgtaaccgaggaaaggcttccttcttcttcttctcaaccagcgaccacgttgcgcgacatcgcgagtgaactgattattgacccgacctctactctcccccctttccaactggctcgagtgcaagcgcggcggcggcacgatgggccactctcgcctccaccccactgcgctccacacgaggcatgctacacaccacacacacagagacagaagagagaccaaaacacggccgccacgcgaagacgatgaatgcgcgatgaagtatttttctgagtggcgagacgaccgaacgacgacgttattcctcacgtcacgacacaacgccgcgcgaattaacgttgccc

SEQ ID NO: 6515 - DNA, 1306 bp, Oryza sativa
  ref <308>: DATABASE ACCESSION NUMBER: AK063665
  ref <309>: DATABASE ENTRY DATE: 2001-12-06
ctctggccatacgcggcctcggcgtccggtctccatccggtcgtgctgctgccgggcgccacgtgcagccagctcgaggcccgcctcacggacgcctacttgccgccctcgccgcagtgcgccgccgccgcgccacgcggcgcgcgctggttccgcctgtggaagaactccaccgcgctggacgaccccaccgtcgcgccgtgcgtcgccgaccagctcagcgtggtgttcgaccgcgtcgccggcgactaccgtgacacgcgcggcgtcgagacgcgcctcctcgacttcggctccacccgtgggttcctcgccgacgaccccgccgaccgagacctgtgcatggggaggctcgtcgaggcgttggagagagtcggttaccgcgacggcgagacgctcttcggcgcgccgtacgacttccggcagccgccggcggcgccggggcagccgtgcaggtcgttctcgcggttccagcggcggctccgggcgctcgtcgagcgcgcgagcaggacgaacgggggcaggccggtcgtcgtcgtgtcgcacagccagggcggctacttcgcgctcgagttcctcaaccggagccccatggcgtggcggcggaggcacgtcaagcacttcgtcatggcgtccaccggcgccggcggcttcgtgggctcgatgcggttcctcgccaccagggacgactccccgctcggccgcgtcgggcggagctccgccatcaagttcacgccgctgccgtcgcccaaggtgttcgaccgccacacgccgctggtgatcacgcgccacaagaactacaccgcggaggacatgccggagttcatggcggcggtcgggctaccggcgtccgaggtggcgctgtacgagacgcgggctcttccggtggcgatgagcttccgagcgccggtggtgccgacgacgtgcgtcaacggcggcggcgtgccgacgacggagacgctggtgtactgggacggcgacttcggcaaggacccgcgagtcgtgtacggcgacggcgacggtgttgtgaactcggcgagcatactggcccttgacacggtgatcggcgacgatccgaagcaggtgtactacagatcggtcaaaatcgccggcgcgtctcacgtcggggtcgtctcggatgctgccgccttgcggcgtgtgatcgctgtgattcttcaagacaattttgtgtgaactcgagaagatggcgtcgctaaacactacaaattgtacttcggtagtccagagtaccggacacatcattaattaattaatagtaacaggaaacgtgttctacacctggacc

SEQ ID NO: 6516 - DNA, 444 bp, Oryza sativa
  ref <308>: DATABASE ACCESSION NUMBER: AK063666
  ref <309>: DATABASE ENTRY DATE: 2001-12-06
aggcgcccgtcgtccactcctcctcgccttcctcgccttcctcgcttttatcgccgccgccgccgccgccgcctccgccgccgccgaggagtaggagtagtaggaggaggaagccggtagccggaggaggagcggggagatggcggacgcgaagcagcagcagcagcagcagacggcggcggccgccacgggggtctggaagacggtgaagcccttcgtcaacggcggggcctccgggatgctcgccacctgcgtcatccagcccatcgacatggtcaaggtgaagatccagctgggagagggatctgcagctcaggtcacaaagaacatgcttgctaatgagggtattggttccttttacaagggtttgtcagctggtttactaaggcaggcgacatatactactgctcgtcttggatccttcagggttctgacaaacaaagc

SEQ ID NO: 6517 - DNA, 983 bp, Oryza sativa
  ref <308>: DATABASE ACCESSION NUMBER: AK063667
  ref <309>: DATABASE ENTRY DATE: 2001-12-06
acgacaactcgacggttcttcttccaggcttccaccgtcctcttcgaccccgccgccgtccgccgccgccgccgcgcctagtgccgctcccacttcgactcttctcctccatcgaattcctcagagactccccacctccggtcgcgccggatcgaggaacatggacgaggagcggacggcggcgtggtggggccggcgggcgtgggagctcctctcggcggtgcgggcgcgggcgccgcttgtgcactgcgtcaccaacctcgtctccatggacatcgccgccaacgcgcttctcgccgcgggggcgtcgccggccatggtccactccctccgcgaggtcccggagttcaccccgcgctgcgacgccgtgtgcgtcaacgtcggcacgctgtccgagggctggctcccctccatgcgcgccgccgcctccgcgggccgcccctgggtgctcgaccccgtcgccgccgccgcctccgagttccggatggaggcctgcctctccctcctcgccctccgccccgccgtcgtcagggggaacgcgtcggcacgctgtccgagggctggctcccctccatgcgcgccgccgcctccgcgggccgcccctgggtgctcgaccccgtcgcccttgctgtctttggcctggccggggagatcgggatggagtctggcgccaagggacccgcctctctcaggatgcatctcatcgatgctctctactgcctcgacgtgcagacggtgacctctcgagtcaagatctccctgcattcgtgataatgttcgctccatggcctgccgaatttcaggccaagttcagagtttggaataacggtgaaggtttgacataacactagaaatatgagcgcggcgccacgcctcgcacgctaacacctacgtggttagaactacacgtaattaaggttaatttgaccacatggagtggcatattatgtgcatattaatttgatttaacatcagattattat

SEQ ID NO: 6518 - DNA, 1215 bp, Oryza sativa
  ref <308>: DATABASE ACCESSION NUMBER: AK063668
  ref <309>: DATABASE ENTRY DATE: 2001-12-06
ctgccgtcgccggccgccttcgtcgacgcgccgccgggccgcgcgacgcctgaagccatcttcaccaggagcggccggcaggctccgtcgatgcgccgccagcctgcagccatcttcaatgggagccgtcgtcgccgtgccgccgggagtcgccgtcgccgcgccaatgggaactgccgtcgccgccgccatctgccgaccatggcttcggccttcagccacctcccccctaaagctacaatagcgacgatgcaagggatactttgatagccggccagcatttgatgctaaataaaggggctttccaagcacactttataagacctgataatttagcctatcggagaaactgtcccttcaatcaggagagttggataatgattttagggattccttcggattacataaatgagactcacattcataggattgtaaacgcttttgggaagtttatacattggcatcacaaaatagtgttcttggcagagttctgggaagttaatccattggcatcaaagagatagtattcttggcagagttctggcaaaatgtctttatacagaccctagtgaagtgcctagaagaattgttatggaaaatcctgttaatatgggaggtaatggagagtcatggactctgcacacttctgtgcttaattgagagttcactgatgttcttcctatggatgaggatttacccattttgtggtagcaaattgaggatttgcatatggagataccaaatatgcagcatgagaataatgtacttcttgaatttaggggaacaacatgctgaaaagaataatatgcagcatgagaataacgtacttcttcagaatttaggggaacaacatgctgaaaagaatgctcctggccaagtccaagaagaacatgctgaaaagaatgctcctggccaagtccaagaagaaatgcagtaatactatgtctccattgatgatttttccttggaagattcagattcagtccataacctggagtagtatgaattaatataaggaactggaccagttggagatagtgcctttcaagttatcactgtcttccttccctttcagcattcttcctcttaatgtttgctttaccattgcagaaaatgtgtttaaactattgatcactgctttcagccctccatggtcagttcacctgagattacgccaacctggtctttaatcaaagttgttcttctagatttggt

SEQ ID NO: 6519 - DNA, 1471 bp, Oryza sativa
  ref <308>: DATABASE ACCESSION NUMBER: AK063669
  ref <309>: DATABASE ENTRY DATE: 2001-12-06
gagctagggagctagctggcatggagctaatggacgacgacggctcgtcgtccctcctggaggagctcatggcgccgctccggagaggcacaccgacgacgacgccggaagatctgtggcttcaggcgtacccgatgatgatgagcccgatgtgcggcgacggcgtcatgctcggtgacctcctcgtcgggggcggcaacgcgaggaacacgcttgcctcgccgccgccgccgtcgttcccactgcctgtgcctctgacgacgacgactccttgtccgcctctgcacgaggtcagctttgagtttgattcaattgattgcttgggtgaagtgtgcaacccgtacaagagatcaggcggcgctgtccgtgccaccgccgccgctcaggtgatggtggccgccatggatccgagacgcgaagctgcgtcgtctgcggtggcggtggcggcggtggaggaggaggagagatgcaaggcgcgacgtggcgctggaggcggtggtgatagtggcgagctggcgcccatgttcgtgttcggcggcggcggcggcgcggcggcgagcgtccgcccaagaagctgcaggccgccgcaaccaggcgcgccgtccaagaacctgatggcggagcggcggcggcggaagcggctcaacgaccgcctctccatgctccgctccgtcgtgcctaggatcagcaagatggacaggacctcgattctcggcgacaccatcggctacgtgaaggagctgatggatcggatcaagaacctccaggtcgaggccgccaccggtgactcatcctcctcctccacggagaatctctccatgctgaagctgaacacgctcaagcctccgccgtcgtcgagctccggcgaagagacgccgcttatcagaaactcgacgaggttcgaggtggagaggagggagaacggaagcacgaggatcgagatggcatgcgcggcgatccccgagctgctgccgtcgacgctggccgcgctggaggcgctgggcgtggagatcgagcagtgcgtcatcagctgcttcgatgacttcgccatgcaggcctcctgcctacaggatgacaagaagagggagatgacaagagatactgaagagatcaagcagacattgttcaggagtgcaggctacggagatggctgtcttatataatggaccaacctcgatttgatccaaacaatgcaagcaaatatgagtagtaactacgttctaccagcactctcgattaggtcgtggtgccttattagttcatcttgcgtgcgatcaattctcactgcagtactgcacatctcactggaacagtaagaatatagtatagcatgatgagctgagcagtctgtggcataccatgtatttgatgatgcagttcgtgagatcattttctcattcctcttaattatatttatatatggatatcagcatgaacgctatatcttggatattatcaaattaatttctgt

SEQ ID NO: 6520 - DNA, 570 bp, Oryza sativa
  ref <308>: DATABASE ACCESSION NUMBER: AK063670
  ref <309>: DATABASE ENTRY DATE: 2001-12-06
ctggttcttttgagcggcgacggcggctgctttaacagcggcggcggtcggctagatgccatggcggggtgagcaggcggcaagcgagtagccgagcagggactccgccggcggcgtctctagttcccatggtattgcagtgatgccccggcgttgctcctgttattctttgtgagcttgtagcggtgctcccgtctcctgctcgagtcatcgtccccactgcgtgcacaaggaggcaacgctagatttggtactgtgctactgtgtatgtttggtatttggattcgtatacaatatgctaatctgtctttatagatcaaatttttactgtcacttccgtgcattcttatgaacagatggatgcattcagatttgacaaggtataataagccaataaggtgtattttgttaaatgattgccatttgacctgtagtacagatttagcacttgccagtgacttgtgaacttgagatttgagaaactatgaagtagtacgagactatgaactgtatgagtcacatgttgaatattatatggttatatgattaagctgagttagttatgagctt

SEQ ID NO: 6521 - DNA, 1718 bp, Oryza sativa
  ref <308>: DATABASE ACCESSION NUMBER: AK063671
  ref <309>: DATABASE ENTRY DATE: 2001-12-06
ctcttccccaggagacctctcctctgtctctcccctcctttttccactttccaagacaacgcaccaacaaaagcgtcgcccctcttcctcctcctcctccacctccattgctgcgccctctccctctccctctcgcctccctaggccactcactccccaaaacaccaccaacctcctttcctctctctctcttcttgagttcttgaatcaatgcgttcttgagttcttgaatcaataccagtatcacttgtgctaatagtactagaggaggaggtgttgtttcttgcgatcttgggttgattgatatgggtgttctttgcttcggcgcttccaacatcctcctctgcgcggaggacagcagcagcgtgcttggcctgggcggctttggcggcggcggcggcgaggtggcggcggagctggggtgcggcggcggtggcggctttgatttctttggcttcggtggtggtgctgtgttccccatcgactccgatgagttcgtggcgttgttggtggagaaggagatggatcatcagcctcagcgggggtatctggagaagctggagctcggtggattggagtgttcttggaggaaagatgccattgattggatttgcaaggtccattcctactacaactttggaccactcagcctttacctcgcagtgaactacctggataggttcctctcctcgtttaatctccctcatgacgaatcttggatgcaacagttgctgtcagttagttgtctatctcttgctacgaagatggaggagaccgtggtccctcttcccatggaccttcaggtttttgatgcggaatatgtgtttgaagcaaggcatattaagaggatggagcttattgtgatgaaaaccctgaaatggaggctgcaagctgtgaccccattctctttcatcggctacttcctggacaagttcaatgaagggaagccgccgagctacacgctggcatcatggtgctctgatctcacagtgggcactctgaaagactctaggttcttgtcattcagaccttctgagattgcggccgcagtggtgttagctgtgcttgctgagaatcagtttcttgtcttcaacagtgcccttggagaatctgaaatccctgtaaataaggagatggttatgagatgctatgagctgatggtagagaaggcattggtgaagaagataaggaacagcaatgcaagctcttcagttccacacagcccgatcaccgtgttggacgcggcgtgcttcagttttaggagtgatgacacaacactaggatcatcacagtcaaacagcaacaacaaagattacaacagccaggactctgctcctgcttccaagaggaggagattaaacacaacaccaatctgataactgtacatacataacttggcattgctttgcaattgttcattcagtgagcaactcatcagggtagcaagtagtggtgcatggcgagcatcatcataacaagcaaggatgaaagtgagcagtaataagctagtatcagcttcttgaactctggatgaagagagaaagggtgtgttttgaggagaggaggaagtcttcttcctcttgcagttttgttcccctttcctcctgcttctatttatctttttcttccccttctctgagcagagaaatctttgtggatatgagattggagatgtgaggatgtgagagaaaatcaacaaaaagaatttcgttttgttc

SEQ ID NO: 6522 - DNA, 1358 bp, Oryza sativa
  ref <308>: DATABASE ACCESSION NUMBER: AK063672
  ref <309>: DATABASE ENTRY DATE: 2001-12-06
acactacatagatagatatcgatatgatatgatggcttctttcaggcctttctccctctcgtcgccgatgacaacgacgatgctcctgctctttcttctcctctgcacgaattccgccaccgccgacgtcgccggcagcaatggcggctgcggcggcttcaagcgcatgttcagcttcggcgactccatcaccgacgccggcaacctcgcgaccatcagccctcccgacgcctccttcaacaggctcccctacggcgagaccttcttcggccaccccaccggccgcttctgcgacggcaggctcatcgtcgacttcctagcggatgatctggggctgccgttcctgacgccgttcctccgggcgaagtcgccggaggacttccggcagggggccaacttcgcggtggccggagcgacggcgctgagccaggacttcttcaagcagatggggctcaacctcaccatcatacctccattctcgctggacgtgcagctcgagtggttcaagagcgtgcttaattctcttggctctacagaccaagaacgcaaagaaattatgtctaaatccctatttctaatgggtgaggttggaggcaatgactataatcaccccttcttccagaaccgatcatttaccaatgagatcaagccattggtgccaaaagtcatagccaagattgaaaatgccatcaaggtcctgattgatctaggagccaagacgattgtggttcctggaaattttcctatagggtgtgttccaagttatcttactatgttccaaagtaagtcaagtccgcaagactatgatgccttcggatgcataaagtggttgaatgacttctcggtgtatcacaaccgtgcactaaaacgcatgttgcaccagatccgtcgtgatccaacagttaccgtactctatggtgattactacaacaccgctttagaaatcacccatcaccctgctgtccatgggttcaagaaggagactgtcttggttgcatgctgtggggatggtgggccctacaactccaactcattgttcagttgcggtggcccgtcaacaaatctttgcactaacccatcgacatacatctcgtgggatggagtgcatcttactgaagccgcttacaaatttgtggcccatcacatgttacatggcctatatgctcatcaaccttccttatctcccaaatgaagaaatgatctgcatgtacaataggcttttaaaaagaacatacaatagtgccaacaactttaaatggtgtatcgaaggtgtgtgcgtctaatatattgtaatttaaaatagtttttggtgtgtctacatgtctagttgtactctgaaaaataattatttttttgtc

SEQ ID NO: 6523 - DNA, 781 bp, Oryza sativa
  ref <308>: DATABASE ACCESSION NUMBER: AK063673
  ref <309>: DATABASE ENTRY DATE: 2001-12-06
atccgcccgcggccgctgcttcgccgcaatccccttctccgcctccgcagctaagctaagctcgccgccaccgccatggggatggctccggtcgcgacctacccgtcctcctcctcctcctccaccctcgcgcggcctccgtgtgcggctgcggggagggcggcggcggcgggccgggcacgcgtcgcggcggccgggatgtcctcgagggcgtcctccttcgtcacgggaggggcgggggggctcgccgtggcggtggccgcgcggacgagggcggggtcgggggcggggtcgcgtgggggaggcgcgatggggtgcaagtgcctgttcgggctcggcgtcccggagctggtcgtcatcgcgggcgtcgccgcgctggtgttcggccccaagcagctgcccgagatcggccgcagcatcggcaagaccgtcaagagcttccagcaggcagccaaggagttcgaaacggagctgaagaaagagtctgatgatggtggcgaccagcccccgcctccaaccgagacggcggttagcgacggtggcgaggagaaggagctcgaggcgtccagtagcaaggagagtacatgagggccagtggagaatggcgagttagaattgtgtatgtacaattgtatggatggtgtgttcctttgagtagcggcacatttctccctctctttttgatgacgatcttgcaggtgatgtagcgatgttatttgtacccgggaaaaagaagaactttatgtgaaaataccattattatttatgaggataattgtgt

SEQ ID NO: 6524 - DNA, 1232 bp, Oryza sativa
  ref <308>: DATABASE ACCESSION NUMBER: AK063674
  ref <309>: DATABASE ENTRY DATE: 2001-12-06
acgaattccaccgaaaaccgcagcgaacgcacctacctaccacccaaacggcaagcggcagtgccaatggagcagcaacaggcggcgcccatggcgaggaacaggaaggtggtgctgcgcgagtacatcgccggccggccgccgagggaggacgacatggtgctcgtcgacggcggcacggtggccctgcgcgtgccggaggccgccgcccccgccccggcggtcctcgtgaagaatctctacctctcctgcgacccctacatgcgcggccggatgcgggacttccacggatcctacatcccgccgttcaagcccggatccgttattgaagggcttggagtggcgagagtggtggattccacccatccgggattcagcgcgggcgacattgtctccgggatgactggttgggaggaatacagtctgatcgacaggcctgaacagctgagcaagattcagcaaagtgacatacccctctcttaccatttggggcttcttggcatgcctggttttacagcttatgctggtttctatgagatctgctcaccgaagaagggcgagtttgtttttgtttcggctgcatcaggagcagttgggcaaattgtaggacaactcgcaaagcttcatggatgctatgttgtgggaagtgctggaacaaatcagaaagttgagctcttgaagggcaagtttggatttgatgcagctttcaactataaagaggagcctgacttgactgcagccttgaaaaggtatttccctgaaggtattgacatctactttgagaacgtaggtggtccaatgcttgatgctgtactcctcaacatgaggacccatggtcgcattgccgtatgcgggatggtctctcagaatgcgctgactgatcctgtagggatccacaacatcttctgccttgtaccaaagaggataagaatgcaggggttcatccagagcgaccacctccatatgttcccacagtttgtcagtgacatggcaaagcattacagagatggcaagattgtgtatgtagaagacatgagcatagggttggagaatgcacctgctgcgttggttggtctattcagtggaaaaaatgttggcaagaaggttgtgtgtgtgtcacaggagttaagtcagtttacattctgatgagtatcagaaacctctctgaattgaggtgataagtaatagatgtttgtcttaacatgttcaaattatacctgggaaaaaagttc

SEQ ID NO: 6525 - DNA, 965 bp, Oryza sativa
  ref <308>: DATABASE ACCESSION NUMBER: AK063675
  ref <309>: DATABASE ENTRY DATE: 2001-12-06
tgcgattttgctgcttgggtggtggtggagcaatggaagggtttctgcatcgccggaaaccaaccacgacgatgacgacgacgaggaggaggaggaagatgccgttgcttccggcgagtctcccgagcagcggcggccgcctcggatctccgccatcccccccgccgagctgcgcctcgccggcgttggcacggaggccaccgcttcggcagccgcagatgccgcgggcgcatgcggcggcgggggatgggggaccccgtgcgtcggcttcctgctcgggggcttggcccgggcaacgaaatctgaccgccattgatggttttcccccaccatttggtcgccattttactgtacattgcctgcgccgatctccatccatcccgcgagcatcctcgctcgctggccagtatctgtactttgtctggaatttgcttgcgttaaccctagcttctcttctagatctggaaactgccttttgtcacattttatttcccccaaaatgtgggggttcaagttcagctgaaccccatgctcagcgagtcgcgaggcgattgcaacatcggccatttcatctccgctagcggtggctgatgatggcattcgctccaaaaaaccgcggctcgtttgaagagttgcaaatagtttacacccctggatctaaacacaccctgaattccccgcggcgatgaggaatgaggccggtttagctccggcgcctctcctgatcggtggcggccgcctcggatttccgcttttcgggggccaatccccagccgcgtcgcgcacgccgtgcggcattggtctggaggccactgctttggcagctgccgatgtcgcggcgcctgcggcggtggaggatggggaccgtgcgtggcggtatccgcgttggcttcctgcccagggttggccgagcaacgcaaaatctgagccgcaattgttggatttttcactagcccgtgcgttgc

SEQ ID NO: 6526 - DNA, 665 bp, Oryza sativa
  ref <308>: DATABASE ACCESSION NUMBER: AK063676
  ref <309>: DATABASE ENTRY DATE: 2001-12-06
gtgcaggtcgacatccaagtcactccaaaccccacacacgcgattcgtcgtcaaggctaagctcagtcacacagtgttcgcgatgatcctggtggccgtagtggcggagctgctcgaggagtacacggtgctggtggcccgggtgctggagcagctgttcaacgacgcgcccttccctcgccggatgcggttcctcatgctgcggagcctccccttcgtgccgccgccgctgccccctccgccgccgtcgcacgccctccgcgtcaccacccgcggctgatcgaccccacgactccctcgccggctcgtaggataggttaagccgagtgtgctctgcttttctcagttggtttagtcgattctgtcggctgctggttcttgtcggacaaagtccaggttcgcggatcaatttgtttctgtacatagtagtatttttttgggtgagaagaaacttgaaagacagtgaagttgtgctttctcgcattgtgatccttacgatgtgctcatgtgcaacctgcttgccttcatcgtcttccctggctcagtgtgtagctcagagaaatatctctggatctatctgggcatgtttgggacttttaggtgagccctgatatgaattgctggatcatgatatgacggatcagaactcaacctttttcggtgtt

SEQ ID NO: 6527 - DNA, 809 bp, Oryza sativa
  ref <308>: DATABASE ACCESSION NUMBER: AK063677
  ref <309>: DATABASE ENTRY DATE: 2001-12-06
agctcaagccgcagaagacatacacacacaaacacaagccacccttccgatttgttcatcgatcagttcgcagcgtacgtcaggctagctaactagtgtttggcaatggcgtccgggcagcagcagcagggcaggtcggagctggaccgcatggccagggagggccagaccgtcgtccccggcggcaccggcggcaagagcctcgaggcccaggagaacctcgccgaggggcgcagccgcggggggcagacgaggaaggagcagatgggggaggaagggtaccgcgagatggggcgcaagggcggcctcagcaccggcgacgagtccggcggcgagcgcgccgcccgcgagggcatcgacatcgacgagtccaagtacaagaccaagtcctagactacacacacttttgcatccgtgaatgccagtgtgtcgtagtcgtctcagttgtagtcatcgagtcagtcttagctagctagctctcttatcaataataatgtaggtcttgacggatgcacgcatttaggcgcccgtatgatttgctatgtttgtttcatatggtgatgcgtgcttagctttagctagctttggtagtttggtttaggtgctgatcgatcatggtcagtagctagggtatgtgttttagtttattgcaggatcggtcaggcaggggctgaatgctagctaggtgatgctttggcttttcatggccagcagctgctagcttcttgtttccaactgatgcctctgctgggtgtgtcctttgtaaccgtgcttgctttcagttaatctagctagctgttgttcatccg

SEQ ID NO: 6528 - DNA, 1280 bp, Oryza sativa
  ref <308>: DATABASE ACCESSION NUMBER: AK063678
  ref <309>: DATABASE ENTRY DATE: 2001-12-06
ccccttcgtctcctccgccgccgcgaacccgatctcgatcccctcccatggcggccgccctctcctcctcccggagggccctccacgccctccaccgccgcctcctcctccaccccctcccctcccgccacgctccccccatcccccgccaccacttcccctctcctccctcctcctcctcctcctcctcccgcttcttcaccaccacgcgccccgacgcgaggctactacagctgcatgcgcggcggctcgtggtgggcggggcaaggtcgttcgcggcgggcgtcggcggcggggggtcgtcgaagctggcgccgctggggcagggggtgaaggggctggggctggggcggccgctggacgcggccaagaacgcggcggcgaggtaccgggaggccgtggggctgcaggtggaggcgttctggaggcgcaactacatgctgctcgtcggcgccggggcggtcgtcgtctgcatcgcgctgtggagggtcatgttcggcatcgccagcaccttcgtcgggctctccgagggcatggccaagtacggcttcctcgccctcgccaccgccatggtggcgttcgccggcatgtacacacgctcaagattcaccataaatcctgataaggtttatagaatagcaatgacaaagctcaacacatctgctgcaatccttgaagtcatgggtgcacccttagccggtactgatgtcagagcatatgtcatgtctggaggggggcctaaactcaaggacttcaaatttaggcttggtggcaaaaggtgctttctgatcttccccattaaaggatcagaaagaaaaggccttgtaagtgttgaggtcaagaagaaaaagggacagtacgacatgaagctactcgctgttgacataccaatggcgtcaggacctgatcagcggttattccttgtcggtgacgagcaggagtacaaggtgggtgggggtttgatatctgagctgcgggaccctatagtaaaagctatggctgcagagaaggagtttgattatcttgatgaaagagaggatgcggaggatgaagcgagggagcgtgaggaggctgagcgaagacaacaggaagaggaagctgaagcattgaggcgtgaggaggaaagattacgtgaggagtacgaagaaaggaagcggcaagaagctgagaacctggagaaaaccacttgacacaattaaccgcatcgattttttcgtgttgtgcattttgttcttccccaacactccacactaagtagcaaccaacgtttcaacagcgac

SEQ ID NO: 6529 - DNA, 737 bp, Oryza sativa
  ref <308>: DATABASE ACCESSION NUMBER: AK063679
  ref <309>: DATABASE ENTRY DATE: 2001-12-06
cacgtccacctcgcgccccggcggcgcgcgccagtcgaagcagaagaggaggttggccagcagcagctccaccgccgccgccgcgaagtgcacgccggggcatctcctccgcccgatcccgaacggcaccagcgcgaacccgtcgtgctgctgcgcgcagccgtcggcgtcgtcgcggtggcgctcgggcacgaaccgctccgcgtccgggccccagacgccggggtccgtgtgtatcgccatcgcgttgacgacgacgcgcgtcctggccggtatctcgacgccgtgcgccgtgcggaacggctccgtcgtctcccgtggaaccagcagcggcgccgccgggtggagccgcagtgtctccttgatgaccaggcgaaggtagtggagctccgggaggtcggcttcccgcaccttgtcgccggcggcgacgacgcggcgcacctcgtgctgcgccttggcgagcacgtccaggttcctgacgagctccgtcatcgcccactgcaccgtcaccgccgacgtgtcgctcccggcgatgaacatgtcctgcaagaccacacatttcggtttcgatcgatcaaaatgtccaggaaaacggggaagcaccagcggtgtggtggttgagtcgtgagtacatgactccagtctatccactaaagtttaaattctgatgctcaaattttacacgcacacagagctttcgaccgaccgaaatttagtgagataagaaatgtgccgct

SEQ ID NO: 6530 - DNA, 773 bp, Oryza sativa
  ref <308>: DATABASE ACCESSION NUMBER: AK063680
  ref <309>: DATABASE ENTRY DATE: 2001-12-06
aaaaagcctccgccacctcctccccctctccacacactcttcttctccactcctccgccgctcgcctcgccgcgcgccgcttatatacccgcgtctctgcgctcatcgattcatcacccagatcgcaatccaaccaccgcaaccaattcgccggagaaagttgtgaataccgacctaccggcggcgaagatcgatgatgtacatgcgcgcgacgcaccgggacgaggaggggaagaaggtgacggagaaggtggcggtgccggagacgcggcacccggacacggccaggcacttcgagcggaagctggaccagcaggggctccaccgcatggagcgccacccggcgaacggctcccgcggcatcggcgcgccgccgcccaagtccggccgcggcggcaagttcacctgggagggccccgacagcatcgtcgacagccagctcgatcccctcccggccgccatcgaccgcaacgaccccaactacgaggaggaggaaggcgaccacgagcgcgaggccgacgtcgtcggcgaggtggaggtcgccaaggtcgccggcgacgccagggatggtgtcgccagggtcgacgtcgtcgcgccgccgcagctgcacgagaaactgcagctgcagccgcagtaggggcgcccagccgccatttgagtggtgttttcgaagtgtgtttgttactttgtttgagtgtttatttacggttttgtatgcgtgttatttatgcctctgtatgaataataatcgagcatcaaactgaacttggatg

SEQ ID NO: 6531 - DNA, 808 bp, Oryza sativa
  ref <308>: DATABASE ACCESSION NUMBER: AK063681
  ref <309>: DATABASE ENTRY DATE: 2001-12-06
atcggtcgccaaaaatcacacaaacctgcgtgcaaagccatcttgatccatcgagcaaaacaaaacaaacgttggaattaaaccgcgaaaccgagagcaacaaactaaccaagcagtaaccaacagcacaatgtcgctagtgcggagcggcaacgtgttggacccgatgtcggtggacttctgggcggacgccgacccgttcggcgccgtgcgctccctcgcggagcggtgccccgtgctcaccaacgtccgcgtcgactggaaggagacgccgacggcgcacgtcttcacggccgacctccccggcgtccggaaggatcaggccaaggtggaggtggaggacggcggcgtgctcgtcatcagcggcgagcgcgccagggaggaggacgtcgacgggaagaacgacgagcggtggcaccacgtggagcgcagcagcggcaagttccagaggcggttccgcctgccgcgcggcgcgcgggtggaccaggtgagcgcgtccatggacaatggggtgctcacggtcaccgtgcccaaggaggagaccaagaagccgcagctgaaggctatccccatctcgggctgatcatatcaccgtccgtgttcggctgtttgctgcgtgcatttggcatgatcacaaggatatgccaataataaactgtgtttcaagcaagggaaaataatataattgtcatatgtagcccgtacgtacgtgtcgctcgtgtgtatgcatgtgtgtactagtagtacgcactacgtgtgttacagtattgaactgtcttaatttgtcgttgatgatcagttcttcgtc

SEQ ID NO: 6532 - DNA, 715 bp, Oryza sativa
  ref <308>: DATABASE ACCESSION NUMBER: AK063682
  ref <309>: DATABASE ENTRY DATE: 2001-12-06
aaaataaaaacacgtcgcaagtcgaagcacaaaacgcaagcaacgaatctcaatccacaggctcacactgatacgcaacgcacgtagctactgtactgtaggagcaaaagaaaagaaaagatgcagacggcgaaggtgaaggtgcaggacatggtgagcggtgccaaggagaaggtgaaggaggggacggccaaggcgcacggcaaggccggccaggcgacggcggccacgcacggcgagaaggagatggccaagcaggaggagaaggccggcaaggcacaggccaaggccgacgagcaccaggagagggcggagcaccgcgccaacgccaccacgggccgccacggcacgcgcgtgccgcttacggccggcggcaaccgccaccaccacgctccggtcggcggccccgccgtcgaccctgcatacccggccgccggcaccggcaccggcaccggcacgtacgcggcgtccgacaaatcgtacatctagatttggggtagatggacatgggcgggcttgatcgatctggatcgctagtgtgttttttttcagtgtagcgagtgatctggtcccagcccggccgctgatcgtgttagcttgtgttcgtacgcacgcgtgtatgctgtgtgcacatgcgtgtgctggaataaaaagtgtcagatgtaaaattaacatgcttgatgtagttctgttcaatgaaagggctttcgttttc

SEQ ID NO: 6533 - DNA, 745 bp, Oryza sativa
  ref <308>: DATABASE ACCESSION NUMBER: AK063683
  ref <309>: DATABASE ENTRY DATE: 2001-12-06
actcacccacaccacactccactccactccactactgcgcttagctaattaagcagcaacttaacttgatcttcttgtgaccgatcgatggctcgcccggcgaataataactatgcggcggcggtgatggtggtggcgctgctggtggcggcgccggcggcgagcgcggtgacatgcgggcaggtggtgagcatgctggcaccgtgcatcatgtacgcgacggggagggtgtccgcccccaccggcggctgctgcgacggggtcaggaccctcaactccgccgccgccaccaccgccgaccgccagaccacctgcgcctgcctcaagcagcagaccagcgccatgggcggcctgaggcccgacctcgtcgccggcatcccctccaagtgcgacgtcaacatcccctacgccatcagcccttccaccgactgctccagggtgcactgatgagcggatcaacgtcgacaagtgatgcgacaataataaaggagagatcgatccatcgatctccagctctcatttcgcggttgctatgtgcatgcgccgtcgtcaatgatcgagctagaaatatatatgcatgttgctccttcgttgtgttacttcctgcttacctgctgcggtttgatagttagctagtgtgagagactgtgagggttgattttggggcagacgaatcatgaatctcagaggaccttgtaccactgcacgcttcaatatatatccatcaaatgcagggtcttttaat

SEQ ID NO: 6534 - DNA, 800 bp, Oryza sativa
  ref <308>: DATABASE ACCESSION NUMBER: AK063684
  ref <309>: DATABASE ENTRY DATE: 2001-12-06
cagctcatcacacttgcagttgcagtggtggtagactggtagtgcattctcagcttaatttgcttgagctagtagctgctcgtgagctgtgcaccaatggcgtcgtccagggcgtcggcttcctgtgccctcttcctcgccctcaacctcctcctcttcgccatcaccaccgcctgcccgtcctgcggcagcggcggcggcggcggccatggccattacggtggcggcggcagcagcggcggaggcggcggctacggaggaggcagcggcggctacggaggaggcggcagcagcggcggcggatacggcggcggcggggggtcgtcgacgagcgggtggtacgggaagtgcccgacggacgcgctgaagctgggggtgtgcgcgaacgtgctgggcatcaacctcaacctccccatccacctcagcctcatcctcaacttctgcggcaagggcgtccccaccggcttcatgtgctcttaatctctcttttcatccacatttcgcattaattaattaccatgcattttacctattacaatcttctaatttgggagtcatttagttaataagctagtgtcgtcgttgttgcgtgccaaggttttaggttagttgtgtgttgattgctagctaatgtcctactagcattgagttgtaggtaccagtttgattgctttcctttgatgcgtatttgttcgctcgctgggtaattgtcaccagtttgtgtgtgttgtaatgtcttgttttagtttcactgtttcggattcaaatttaagatggaacctgaacaatccaggtttttg

SEQ ID NO: 6535 - DNA, 918 bp, Oryza sativa
  ref <308>: DATABASE ACCESSION NUMBER: AK063685
  ref <309>: DATABASE ENTRY DATE: 2001-12-06
acactactgcgactgctagtgctctggtcttacattcgacgaactgatcgatattcgatacgacgtctcctcctacctggagcttgggaaaaatggagagcgactgccagttcttggtggcgccgccgcagccgcacatgtactacgacacggcggcggcggcggtggacgaggcgcagttcttgcggcagatggtggccgcggcggatcaccacgcggccgccgctgggagaggaggcggcgacggcgacggcggcggcggcggcggcggtggcggggagaggaagcggcggttcacggaggagcaggtgcggtcgctggagacgacgttccacgcgcggcgggccaagctggagccgcgggagaaggcggagctggcgcgggagctcgggctgcagccgcgccaggtggccatctggttccagaacaagcgcgcccggtggcgctccaagcagatcgagcacgactacgccgcgctccgcgcccagtacgacgccctccacgcccgcgtcgagtcgctcaggcaggagaagctcgccctcgcagaccaggtggatgagctgagggggaagctgaacgagcggcaagaccagagcggcagctgcgacggcggcggcgccgaaggggacgacgacgacaagaggaatagcgtgatgaacgcgagcagcagcggcctcgtggaggaggactacgtgagctgcctcgcggtgccggtggtggacgtctcggaggacggctcggcggcgtgcggcgggtcgtcgtacgagtacgaccatcacctagactacttgggcggcggccagctgcccgatccgttctgcggcatgccggatctgtgggagatatggccaatggtggaatggaacgcagtagcatgatcatgctaatcaatcagcgtagcatacagtatataaatat

SEQ ID NO: 6536 - DNA, 623 bp, Oryza sativa
  ref <308>: DATABASE ACCESSION NUMBER: AK063686
  ref <309>: DATABASE ENTRY DATE: 2001-12-06
ggggatggtgaggtagagcacgccgtccctcacctccgccgcgatccgctccacctccacgttctccggcagctccacccgcgtcctgtacctcccgaagctcgccgccggccacgcctccccctcgtcctcaccgtcagccgcctccacggcctccccatccttggccgccttctcggcgaccaccaccagcttccggtcctgcacgctcaccgtcacgtcctccctcgtcatgcccggcatgtcgtaccgcaccaggtacgccccggcgcgctccttgatctcccacggcgtccgcccacgcctgtaggcggctgtggcggcgccgttgtcgacggcgcgggcagctgccggcgccgccgtcaccgcggaggccggcacgacgagcatgcggtcgctgtcggcgtcgccgtccatgatgcgctccatggtccgcatcatctggtccagcgtcctcgcctccgggaagctgtcccataaccctgcccatgttcgcaaatggagtaattaattagccaagccaattcttttttacagttttaacactctttagaaatccgttatgtaaattcaattagtgaattataagtaatcgaaaaaacaagccaaaaatgatgatagct

SEQ ID NO: 6537 - DNA, 1682 bp, Oryza sativa
  ref <308>: DATABASE ACCESSION NUMBER: AK063687
  ref <309>: DATABASE ENTRY DATE: 2001-12-06
gagggagcagtgaacctttccccggagcgcgcgaggcgaatcgcgaattcgacatttcgagttcccacgcgctccacctgttcgacgaaacgcctgcccgagcggtttcgagtttctacgcgcgcgacctgttcgacgaaacgcctctgcgcgcgtgctcggccgccatggaggggtcgcctagcaagaggaggggggtcacggccccagcgcacactgacgacggggactggttcagcgacgtcccggacgacgtcatcctcaacatcatgtctttcctgaccacgcgccaggctgtgcagacgtgcgtgctgtcgcggcggtggctcaacctctggcgctccgtgccctgcatcaacgccgacgtcggcgagttccagcggagcgacactgagtgggaagagtatgatcaagagagggagtcggcattcaagatgttcatggatagggtgctggagctccgcaacccggccgccccgatacgcacgttccggttcaggtgctgcagattggacggattcgaaggcacctcggacgaggcagatatgaacagatggattacccacgctatgcagaagcagccctgggttctggatattctcgtgctgtatgacgcattgaagctcgatcactctgcgtttacctgccgctacctcacaagaatcaagttcatcaatgttcttatgatgccaggtttcttccagcaactcgagatgggttgtccagtattggaaaatctctttttagatgaatccatcgttgcggatgttgagatctcctccaggacactgaaggttttgaccatcaagagcactcagttctcctataagttcaggactactatttcgaccccgagtgttacttatctgaagttatggaggcctgtgaacggcatatatgtgttcaacgacatgccattactagtgacttcaattctagtactttatgatgtacaagactctagtgatttctgccaaaatctcaggagcctttctgctgctaaaagattggagttcgattattttgggaggaagctgacaatggaaaacaatttgcaattgtacccaaaattcaacaatcttgtcagcctgactcttggtcaatggtgtttggatgcgaacttctatggattggttgtcttccttcagaacgcaccaaaactggagaagctaactctggaacttgaaaagaatacgccggaaagaatcattggcaagcttgaagatagatcatttacatgtgagcaccttacccgcgtcgaagttgtatgctcggagggtgatcccctggtcaaagatgtggtcaacttctttgttaatagtggactgacctctgctcaggttcagatcatacgctggtgctagatcgagtatgcgtgacctgcaattttctggtctgaggagatatgaaacgtcaaaaaggatcaagcattctctgaacattccattcaaaaatcgctctcttgcagttacattcgttgattccagttgagtcagaaagcacatagacatgtttactgcttttgtttggtgctatgatgtcagtagaagcaatcatgtattggttcctgtacttgcatccttctgtgatgttctgttgtacagaagatactgcatgtctgcatgtacatgcttgggtactctatttggcctttatgttttactgacatgatgttacactcc

SEQ ID NO: 6538 - DNA, 529 bp, Oryza sativa
  ref <308>: DATABASE ACCESSION NUMBER: AK063688
  ref <309>: DATABASE ENTRY DATE: 2001-12-06
ctccttcggcctttctcgctcctcccagaaaccgcacgtgctgccgccctatccgatgcgccgccgcctcgttgccaaagccgccgcacaccgctgccttgcgccgccgcacaccaccaccgcctcccgccgccgtccagtgcctgcgccgacctgcgaggagccgtcgcgccgccggaccttggggagccgttggccccgcaagaggctgccgcaccgccttggagcgccgccgctgaagacctgcaccggttcctcgccgagaaccgctgcagccgccgccgcaagctcctgctcgagctccgacggacgccgccgagtaccacgccgccacgcaccgcctgcaaggatgcgcctccagccgcccgtgacctcaccgcccaaaccacctccgcctctgtgaaaatcgggtacgaatctcgccctctgctaggtgatttgtttcgattgcgttgttgcaatcccgtggtcctctgctgcttttatttgggaaaaatcgagtccgattcatgaacgaatcgtagtcctc

SEQ ID NO: 6539 - DNA, 1555 bp, Oryza sativa
  ref <308>: DATABASE ACCESSION NUMBER: AK063689
  ref <309>: DATABASE ENTRY DATE: 2001-12-06
gaaaaagatgtacccccggttggaggacaggaaataccatcaggggaccacatggaaccgttacatgatgaagctttatcagagaactccaatgagctgcaacagtgcacaactagtgagagatcaagtacaatgatttctcctgctgccgctgacaacagtatgattactatggctgcaacatctgttgaaagtagtgtgtcagctgataaagtcagcccagttgaaggtcaggtgacagaagctgcagttgagcatgctcctgtggaaaaagatcagtgtgaagaaccaaacactacaattgttgattcgggggactcatcagtatccttgaagaatgaagagctgcaggatcatgatcaagctccttcaggatcctctattatgtccaattcagccgagcagccagaagaagctagcgatgtgaacatgcagcaacaagttgaaaatgtggataccacacaagatgcaaccgaagaatctgatgctacaccagagattggtatggttgatgttacctatgcagacacagaaaattatgtgcagtctcccttgctgcaaacaacatcaaaattgcaatcaacaacaggacaaaatgtcctgaaggaaccagaagcagcaaagcaatctgacgtttctggtgaatatgagtcagtacttgttggtaagcaaaatgaatccgctaacaatctgacaggagattctgcgaaagaagagccccctcttgtgggactgggaatggaagctgatactcatgaaagtgctcctagagaattgaaggatgaacctattttgccagagacggagagaagtgaattatcatgtgaacatggtgacatcacaggacatgaggattccgaaatgtatgcgccaccggaatgcgaaaccgatgtgcagaaagagagttgctgcgttgataggcgtcgtgcggacatgcaggtgccaaaggaagttgaatgcgatgagctgggagatgataatccgaaggaagatgctagtgttcagacagagaacatggcatctgaagaagcttccttggcttctgcaactcctgatggtatgaaagatgagaacaaggttgctgaagaaactacttcagattatgcgactccttatagttcaaagagtgacaatgagaacaaacttgctgaagaaaaccagaagctgaaagagatgctgcaaaaccttcttgcatctggcagcgatcagatgggagttatcacggaactgagcgagaaggtcaagacgcttgagcgtaagctggcgcgcaagaagaggccaaaggtaagggtacacagaccaaccaggcaagcaacggccaaagtccactgaagatgatctctgaagttttgagtttgtgtttatggattccatgtagctgtttgtaaccatgcctgtatgaatgtactacttgtaatgtacacatgagtgttgtggtactatgcattggagaatgtaagatcatgcctgtgttgggtccttgtaatgctcatgtagcctagtttaacacggagtatcaatgtcataagggagttgaatattttccttgtgtgct

SEQ ID NO: 6540 - DNA, 524 bp, Oryza sativa
  ref <308>: DATABASE ACCESSION NUMBER: AK063690
  ref <309>: DATABASE ENTRY DATE: 2001-12-06
attcgaagcgtgctctgctcgctgctgctcctccacctctcccaattagggttttcgctggctgcggcggcggcggcggcggcggacggcggcgaagtcaggcggcctctccggcatccgctccgtcgagatgaaaagcaaatgcggtatggtcctgtgatttaagctggaagatccgatgctgtgttgtgaggcttggacacctttcacattctgagtctctcagggagcacgacttgagggatacgactttgacttggcaccagaggacgcattggagcaagggcagctacagggtgccgcttggcaggcctggtttatcgagcccattgagtgaaaagggggatgagaggattgtcgggtccattgggcacagcaagtagtagcagactagcagtagaagtaactggtatatatagtaataacagtctgaagtcaactaaatgacagtcacgactatccttggaagatgggcaatcgactttactgactaaaaaaacatctattctaatattccacaggac

SEQ ID NO: 6541 - DNA, 761 bp, Oryza sativa
  ref <308>: DATABASE ACCESSION NUMBER: AK063691
  ref <309>: DATABASE ENTRY DATE: 2001-12-06
aatccaatttcccatcagctcgatcgctcgtatcactcatggctcaaagagggtaaccgagttagaaactgaggaggcgccgcacccgcacgagagcgcggtgatgagcggcgcagccgccgctgccgtcgcaccaggaggcgaggcgtacacgcgcgacggcggcggcgtagttcccccggccggcgagaagacgttcgcctacgagggcacggtcagcgccgccggcgtcacgggcgcctccgggcagctccagcccaccaccagggaggaggggcacacgacgctcggcgagacgttgcgccgctccggcaaatccagctccagctccagctcgtcgtcggaggatgacgggcaaggtgggcggaggaagaagaagagcatcaaggagaagataaaggagaagcttcccggcagccacaagcaggaggagcagaagcaagctggccacacggctccggcggccgggacggggacggggacggggacgcatgcagcggggaagcacgagaagaagggcatcgtggagaagatcaaggagaagctccccggccacggccaccactgagcgagagctcgcgcgcacgcactttcatcggttgacgttcgtgcaactgtccatgcatgtatgtataataccagtcgtgtttcagttcgttaattttacggtcgatgtgtggtctcggtaaaactaggtggtgtacagtgcgtctatgcatgtacggtgtatccaataatccagagtcagatctcttttaatt

SEQ ID NO: 6542 - DNA, 1546 bp, Oryza sativa
  ref <308>: DATABASE ACCESSION NUMBER: AK063692
  ref <309>: DATABASE ENTRY DATE: 2001-12-06
gcgcaatcccggcggccatgacgccgctcgcccgccgcctgctgcacgcgagctcacccgccgccgccggaggcgagccgggggtgctggcctgccgcctcgcctcccgcgcggtggtccgcttcgcggggccagaggcgggccgcttcctccgctcgctcctcaccaacgacctcctcctctcgtcgtcgtcgcagcagaggtacgcgcccacgcccaacgcgcccgcgcgggcgccgccgccggcgtacgcggcgctgctgacgccgcaggggaggttcctctacgacctcttcctctaccgcccgcccccaccgtcgcagctgctcgaccgcacgggctccgcgccgctgaccggggagaggcccaaggggaaccaggaggatgagggggaggacgagcccggcgaggtgctcgcggacgtcgacgccgccgaggtcgacgagctactcgcttgcttcaagagatatcggttaagatccaaggttgagatagacaatgttagtaaggaattcctgtgttggcaaagatttggacgcaatgtggagcataccggaccttctactcaagaacctgaggcccaatccattggatgggggcaaggtgttgaccatgctgccgagtcagctgcacaaggtaatggccatggttgggagtggttcaaagacccgagattggattgccttggttacagaggaatctttccagctaatactataccaccgctagttgagtctgacaaagaagccgatgagcgccattacttgctctggcggatagagaatggagttgcagaaggctcaactgagatcccgaaaggtgaagcaattccgcttgagtacaattttgctggcttgaatgcaatttcatttgagaagggctgctatatcggacaggaacttattgcacgtacacaccatcgtggtgtcattaggaaacgcctaatgccattaatatttgaagatgaaaatgggcaagaactcaagcaggctgttgctccaggctcagaagtcgtggacaaggagtctggcaagaaaatcggtacagttaacactgctcttggcagccgtggtatgggcctgctgagacttgaagaagccctgaagcaaaattcaagccttgccatcaaggataatagggatgtgagagttaaggcgatcaaaccagactggtggccggttgagtggacacagatgcttgagcagcaaagtgctgttgcttgacatcataagttcagaatgttcagttcctcacttgaaatatccagtgaagttttggagagtttaaagccgaaaactaatacaggattccgttacggacctttcagaattcagaggcaatcagagcaatttcagtttagcagcttttgcttatgttctcagtttaacaattgacacagttacttgatcatgttgtctgatgtatgaaggcagagactgttttgttttctctgtcctctccacttgtatcgaccataaataagtgactgtacatgaccaaaccctgaaacactcatttcaataaattactcttgtcaacaaaaaac

SEQ ID NO: 6543 - DNA, 709 bp, Oryza sativa
  ref <308>: DATABASE ACCESSION NUMBER: AK063693
  ref <309>: DATABASE ENTRY DATE: 2001-12-06
cgcctcccgcttgctagggtttataccgccgccgccgccaccgccgcagtaacagcagccggcggcgtgaggaggagaagaggcgacctaggtcgaattcgaggtcgagggagatgaggctcctgacgcacaacatgctggcgtcgaacgcgcggggcgcggtgacgggctacccgctgaagctgcaggtggtgaagtggtcgaccaaggaggcggagcccaacccggagttcctccgcggcatgctccccaagatcgactggcccgcgctcgtcgccgccacccaggccctcggcctcccggagctcctccccgaggcgccccccaccgacgccgagctctccgccgagggcgccgccgccgacgagggcagcgcgctccgccgcctccaccgcgcgctcctcgagatccacatcgaggagggcgccctcgtctgccccgacaccgaccgctgcttccccatctccaggggcgtccccaacatgctcctccacgaggacgaggtgaggaactgactcgcgtgtgcctcaccttggtttctcctcgcatagtgttccatggctttacaactcttaaattggatgtatcaagtgtggaacgcggagattataatccgatagatacttaagatgtttggcttgtaatcgtactttaatgtcagtaatgggtgctccaatctcatgctatatattcttattgttggttgagt

SEQ ID NO: 6544 - DNA, 617 bp, Oryza sativa
  ref <308>: DATABASE ACCESSION NUMBER: AK063694
  ref <309>: DATABASE ENTRY DATE: 2001-12-06
aagtctcaagtcgtcttggtgctcatcggcggcgagcaaaagcgagcttggtggccatggcgagcttggtgttcgagccccacggcggcgcggcggtggtggtggccggagtcggcggcggcgacgtggtgttctgcgtcgtcatcctctgcctgtccgtgctgtccatgatcatcttcgccgcggcctcccccggcggggagcggcggcggcggcggcgctcctcctccggaccggtgttcgtcggtggcaggggctgcggctgcggcggccgcagctccggcgcctgcgtctgcggcacctacctctcctgatcatcgccgtcgacgtacggcgtcgagccagctaaagctagctgcggcgatcgctcgccgccggcgaactgtacatggagcttcgcggcggcggctttgctctgaaaatccgtacggctagctaattttcttcctttttttttcttcaaaaaaaatgagagaataattactgctcctactctgcttgtacctagtactacaattactacacggcatgaggaacaaattactaactgtaatgagatggagttactgtaaattgtaattaagtctaataataatcatcatcatctttggattctc

SEQ ID NO: 6545 - DNA, 1100 bp, Oryza sativa
  ref <308>: DATABASE ACCESSION NUMBER: AK063695
  ref <309>: DATABASE ENTRY DATE: 2001-12-06
aaaaaaccgagcgagctgcgctactaggcaatacacgcagtttccggcgatgtcggcggcggcggcggctactgatgggacgtactctccggcggcggccgcgggggaaaagcggagggagaggaaggaggagctgcggcgccacctcgccgaggacgccgactggccccgcgccgacggccgctccttccacgactgccgtcccgcatttatgcaaacaggaccaacaactgccgcatcaggatctgcttatgcagaatttgggaagacaaaggtcattgtgtcagtgtttggaccaagagaaagcaagaaagcaatgttgtacagtgataccggtagactcaattgcaatgtgagctacacaacatttgccacccctatacgtggacagggaatggacaacaaggagtactccgcaatgctccataaagccctggaaggcgcagtgatgctacacacttttccaaaaaccactgttgatgtctttgcgttggttcttgagtctggtggcagtgatcttcccatcattatttcttgtgctagtcttgcgttggctgatgccggaatcatgatatatgaccttgttacatcggtatctgtgtcctgtttcgggaagaacattatcatcgatccaacctctgacgaggaagcatggcaagacggcagcattatggtggcgtacatgccagcccgcaaggagatcactcagctaacacttactggagagtggtctgatggcaaaatcaccaatgcggtagagctctgcatggatgcttgtagtaagctctgtgacatactacgggagcgcttgaaagatgctgccagcttggctgagtgaataattgctttagcagcgagatgtccaagacttaaaacatatccttagctgtacaaattttgtaggcaagggaggaggctaaggcctgatgtttgcgagattacatgattatgctgattgtttacttcatggcaaagcagctaattgttctgagagaaagtagcatggtttgtatattgttttgtactcctgaccttcagacttgtaaacattgggatgatgcattgacgcggcactcctgtcgttattcgtttcatgtatt

SEQ ID NO: 6546 - DNA, 535 bp, Oryza sativa
  ref <308>: DATABASE ACCESSION NUMBER: AK063696
  ref <309>: DATABASE ENTRY DATE: 2001-12-06
atcgccacgccatgtctccctccctcttgcttacctctaggggtacccactcgccggcgccacggccgcaaacccgtcgagcatcacaactgctcgtctctttcccctcgcgctgcagccgcttcgtcggcctccgcctcgcgcgcgcagccgccgattcgcaggggcccaacggcgctgcccctggatctggatctggtggggacggagagggcaaggcagccaatggtgccgacaccaaattgccaaagaaccggagggacatactcctggaatacgttaaaaatgtccagccagagtttatggagctcttcataaaaagagctccgccacaggttgttgatgccatgcgccaaacggtgactaatatgattgggactctgccacctcaatttttcgctgtaactgtgacaacggttgctgaaaatctagctcagcttatgtacagtgttctgatgaccggatacatgttcaggaatgcgcagtatcgtctggaattgcaacagagtttggagcagattgcccttccagaacc

SEQ ID NO: 6547 - DNA, 628 bp, Oryza sativa
  ref <308>: DATABASE ACCESSION NUMBER: AK063697
  ref <309>: DATABASE ENTRY DATE: 2001-12-06
gctgctttgagctccatcaccagctgagctgcgaggaagagagagtgcgagagtgcgcggcagcggcagtgtagtgtcagtcactgggtgtgcgcttgcttgcttggattgaggatgacgtcatcgatgtcgccggcgccggcgccggcgtacgcgcaggtgatggaggacatggagaaggggaaggagctggcggcgcagctgcaggggctcctccgcgactcgccggaggccggccgcttcgtcgaccagattctccacaccttctcccgggcgatgcgggcgctcgacaaggcggcggtctccgccgccggaggagaagggtcggaggtgcagagcgaggtcacctgcgggggcggggccagcgccggcgggaagaggaaagcccccgccgccgaccggaaggccaactgccgcaggaggtgagaacgaaggccagagcatagctcatcacaaagcatagcatcatctgtgtgtaattagctgcgttctttcagggaagataggggggattgtccctcgttttccgcgcgcacgcttttcaaactactatacggtgcgtttttcgtataaattttctataggaaagttgctttaaaaaatcatattaatccatttttgaagtttc

SEQ ID NO: 6548 - DNA, 520 bp, Oryza sativa
  ref <308>: DATABASE ACCESSION NUMBER: AK063698
  ref <309>: DATABASE ENTRY DATE: 2001-12-06
ctgggcgtcacgcaaatccaatcgatccatctctgcacagctgcacttgcatttcagccaacgacaagtccgtcagggacctcgtcctcctcctcttcgagacggcgctgctcacctccggcttcagcctcgacgacccaaacaccttcgccgccaggatccaccgcatgctcaagctcggcctcaacatcgacgacgacgacgccgccgcggccgacgacgacgctgacatgcccgcgctcgatgacgccgccgccgaggagagcaagatggaggaggtggactgaattaaataagtactcgctgccatgtcgaaatgcatcatggtgccatggttgggtgtgtctgcgctgcacttcaacagtgtgtggtcgtgtttgcgtcgtgtcgccagtgttagacatgagtcttacgtaagtatatgtcgccagtgttagtatgttgcatttgcgttactcatgcgtacatctttctaagccatcgttgagaaagtagtagtatcagtattaaaaaatgatcg

SEQ ID NO: 6549 - DNA, 772 bp, Oryza sativa
  ref <308>: DATABASE ACCESSION NUMBER: AK063699
  ref <309>: DATABASE ENTRY DATE: 2001-12-06
ctcttctcttcctttctcttcgcaaatcgcaagccggccggcggctggggattggggaggaggccgccggggcgaggcgggagaggaggagggcggcgccgcgatggcggccgacggcagcggccgcagtggggaagcacggcggtagcccggtgaagctctgcggcggccaaagatgggtgagggggctcatgccagcgacggtggcgcacgcgcacgagcaaagtaagggtgtgggcgcgctcggcggcggcggcgtcgatgatggaggcgcgactgccgacggtccacttcggcgggctcggcgagcttaccaccaccaacaccgcagagccaagcgccgctgtccctctcgcttcacaggccggaggcggcgatgtcgctgctgatgtagcagcacaaccaccaccaccagccgtcgccggcggcgggcgcggcgtcgacatggcagctgcagcaaggcgcgtggcatctccgcggctaaaggttcctcctcccgacgcagcagctcttgcaggagttctgcagcctccccatgaagagcaccaccagcccatcgtcggcaagcaaggcacccaagcaggcgcaagaagacgccgtcggtggcggaggctcgtcgtcgtggaccgcgccgacgcagatccagtccatggacgggggcgagctgcagcggctcaagggcaagatttacatttaccccatgctcgaagaggttagcttgctcagccagctaattaaccacatcaccaccatggcaaggcctaatttaagc

SEQ ID NO: 6550 - DNA, 931 bp, Oryza sativa
  ref <308>: DATABASE ACCESSION NUMBER: AK063700
  ref <309>: DATABASE ENTRY DATE: 2001-12-06
aaccaaaaatcgcacagagcaaaacacgacgagaacgaacgcaacgcacacttacacatacacacacgctgctagtgctagctaagattccgacgagagaacgtccgtgatggcgtcgatgagaactgcggcggcggcggcgatgctggcctgcatcgccgtcgttctggcgagcacggcggcggacggcgcgctgctcccgtggttcggcggcggcggcgcgcgggacgaggcggtgccggagttggggctcctggcggcggccgacccgttccggatcctggagcacgtgccgttcgggttcgaccgcgacgacgtggcgatgctgtcgatggcgcgggtggactggcgggagaccggcgacgcgcacgaggtcgtggtggacgtgccggggatgaggaaggaggacctgcgggtggaggtggaggacaaccgggtgctgaggatcagcggcgagcggcggcgggaggagacgacggagcagaagggcggcggcgaccactggcaccgggaggagcggtcctacggcaggttctggcggcagctccgcctccccgacaacgccgacctcgactccatcgccgcctccctcgacaacggcgtgctcaccgtccggttccggaagctggcgcccgaccagatcaagggcccgcgcgtcgtcggcatcgcctccgccggcggtgacgacggtggcaagaagagcatcggcggcgccggcgaggggcagaaccagcaggccaagaaggtggagctctgagctgtgaaatttgtcgagtggaaactatggttgcgagtggtgtgttgtcacttgtttgcagagcacatgttccggtacataaaatgcgtgtggagagaaaatgtgaagatgtatcgcactttcatcgttgtgcagatcttaactgaggaataagaagcttcagttccccatctt

SEQ ID NO: 6551 - DNA, 499 bp, Oryza sativa
  ref <308>: DATABASE ACCESSION NUMBER: AK063701
  ref <309>: DATABASE ENTRY DATE: 2001-12-06
ctcggtcctctctctcgttttgctcttctgtttcgctcgctctcctctccctcggagcggcggagctaaggcggcaggcaacggcgcaagaggggaggtggctggcgacaggtggcggcggcgggtggagacggtgcagtccagcggtggcagcggtgggaggcggcatcgacggcgatggccgcgctctcccctccatggcagcgtcgtgcggcggcttctgcagcgtgcggcggccgcccggaggtgccgtccctccgccagatccagcgggaagaagggctccggagccgcgccaccaccaaatgcgccggtcgccttggtgctgtccctgccgccgccccgcgtcgagctcgtccacaagcccgacgaccgcgccaagcacttccgccgccgcacgttgcctgcaacccgacgtgcctcctactaccttttgtttgccagcaaattcatactccctccttctataaaatgtttgacactgttaacttttttaaat

SEQ ID NO: 6552 - DNA, 1307 bp, Oryza sativa
  ref <308>: DATABASE ACCESSION NUMBER: AK063702
  ref <309>: DATABASE ENTRY DATE: 2001-12-06
acaaacaggttgaaatattaaaacatattaataaaaaaccaatttttgttttaaaaacagacaatcaaaaatgagctatgcatttaacgccggttcactaggaggagccgctcaattcggaggagccgctgctttcgccggagctgctgctcacggaggtgctgctgccgctctcggaggagctggtggtgcttgcggaggacaaccatgccaagctcgtatctcgatccctgtgccaaccccagtgccagtgccagtccgtgtgccacagccagtgccacaaccatacaaagtgccacgatacgtcgatgttccagttccagtgccacaaccgtaccgagtggaggttaaagttccacaaccgtacccagtcccaaccccagttccagtgccacgaccggtcccagtcccacgaccaagaccagtcccaactccagttcaagttcaagtgccagtgccagtgccaaccccagtgagaactccagttccagtgccatgcccagtgccacaacagtgcccaatcccatacccagttccacaagtcaacaaggtcccacaaccaatcccataccaagtgccaaccccaactccagtgccaaccccagtccaggcgccatgcccagttaaagtgccagttccattccaatacatcgaggaggtaccaatcccagtcccagtgaaggtcccaatcccaactccagtgattgtcgatgagcacgtgccaattccatacccagtgccaaccccacaagctgtcccagtgccagtcccaacccgagtgccagtgccacgagagcaaccagtcccatacccattccaagtcccagtcccagttccacagccggtcccgagaccaagaccagtcccagtcccgactccatgcgctgttgctgctgccccagctgttgctgccgtcgctgctgccccagccccagctttcgctgctgctgctccagctctttcggctgcccaattcggtggtgctgctcaattcggcggtgctgctcttagcggtgctcaattcggtgctgctcaactcggcggagctcaattcggtggtgctgctcttagcggtgctcaattcggtgctgctcaactcggcggagctcaattcggtgctgctcaactcggaggagctcaattcggtgctgcccaattcggtggtgctgctgctggtggatgcggtggattctagatcagttaaatctatcccctcattctactatcaattggcttctcaatatttgatttattaaacaaaaattttgaacttaaacacacataatttgaaataaaattctgaaact

SEQ ID NO: 6553 - DNA, 1150 bp, Oryza sativa
  ref <308>: DATABASE ACCESSION NUMBER: AK063703
  ref <309>: DATABASE ENTRY DATE: 2001-12-06
atacgagcctttgctacccaccacgagagagacgcccaccgtacatcgatccatcgccggccggccgcacacggggtggattgagatcgatcgatcgatcgggcagcggcggacatgggagagctgcctccggggtaccggttctaccccactgaggaggagctggtgtgcttctacctccggcacaagctcgacggcggccgacgcgtccccgacatcgagcgcgtcatccccgtcgccgacgtctgctccctcgatccatggcagctcccagaggcgcaccagggcgcgtggaccggcgacggcgagccgtggttctacttctgcccgcggcaggagcgggaggcgcggggcgggcggccgagccgcacgacgccgtcggggtactggaaggccgcgggcacgccggggtgggtctactcctccgacggccgccccatcggcaccaagaagaccatggtgttctaccgcggccgcgcgccggcgggggccaagaccaagtggaagatgaacgagtacagggccttcgaggaagacgacgacaacgcagccgccgctgctccggcacagaaccattatctccagacgaggagtgacttcagcttgtgccggctgtacaccaggtcagggtgcccccggcagttcgatcgccggccgccgagctcctcggtggcaggcggcggcggcgagaaccgggcggcgccgtcatccaccgcggctgcgtttgccaacgaggatgctgctgaatcctccgggaagagtcagaagaggaaaaggagcgcgccagatgacagccttgacagcacctcatccagcgacgacaatggcggctgcgatggctctatgctgcagcaacagcagcagaggcagagaggaaccgatgaggagcttgtagagtgcagcatgacggactgggcagatcttttggactggttttgatgtaggaattcgattttacggtcggtcgtaaattcaagaaaacggcggtcgatctctaatttttgttgctaattttcattatttttttcgtgttgccaaaaaatattttagcagtcaaatggtaaattttgagaaagatctcagacagttggcagctcaaagacacaattttttaatgataacggaaactaataaaagcctgctgaaaatc

SEQ ID NO: 6554 - DNA, 665 bp, Oryza sativa
  ref <308>: DATABASE ACCESSION NUMBER: AK063704
  ref <309>: DATABASE ENTRY DATE: 2001-12-06
atccacaaccttcatcccatctgaccgaccatgtgaggagccagccgaccccgccgccgacacctccgatcccgccgtcgacgccgacccctccgaccccgccgtcgacccctccgaccccgccgtcgaccccgacgacgactcccccgccgacgaccacgccgacggtcctgaccccgccgtcgacacctcagaccccgccgtcgacgccgacccctccgaccccgccgaccccgccgacgacgccgacgactccgatccctcagatcccgccgtcgacgccgacccctccgaccccgccgacgacgccgatgactccgaccccgccgactgcgccgccgactccgacgtggcttcaacccctccgactgcccgacctcgcctacgcagccgactatggtgaacaacaggaaggttgttatccaagtcgacagtgacacggatgaagaggtaaaatccgacagtgacactgagacagaatccgagagtcatatggaagaggaagtagacccttcatcgttttttgctagtgtgcggcgcgaaactatcaagtgtgggccaaacggcctgcagtacgctggaggctttcatagtagatgctggtatgaaaacgatgtgtacttgacaagggcataccaaatgaatgttttttttgttttttttgt

SEQ ID NO: 6555 - DNA, 663 bp, Oryza sativa
  ref <308>: DATABASE ACCESSION NUMBER: AK063705
  ref <309>: DATABASE ENTRY DATE: 2001-12-06
cagatgcatatgtgggggcatgggtcgcagtacaggaaggggccggagtcgctgcgggggatacagccgacggcgatgctgcggctgccgtgctactgctgcgcggcgggctgccggaacaacatcgaccacccgcgggcgaagccgctcaaggacttcaggacgctgcagacgcactacaagcggaagcacgggctgaagccgttcctgtgccgcaagtgcggcaaggcgttcgccgtcaagggcgactggcgcacccacgagaagaactgcggcaagctctggtactgcctctgcggctccgagttcaagcacaagcggtccctcaaggaccacgcccgcgccttcggccacggccacggcgcgctcggcggcgccgccgccctcgacgacgacgacgacggcgccgtctccgacctcgaccacgactcctcctccaccgcccccgccgcccgatccctctaatcgcaaagacctgcttcggtccagcaaaaagtatctcgaagtactagtacctcacattactaaatcgtttctgatcgttggatttagctggataagatatgtattattggatccagcgattggaaacaatttggtaccataatgtatcggtaacctcgaggtatttttttattggaccagagtgaatctcttcattgt

SEQ ID NO: 6556 - DNA, 1425 bp, Oryza sativa
  ref <308>: DATABASE ACCESSION NUMBER: AK063706
  ref <309>: DATABASE ENTRY DATE: 2001-12-06
atcgacgtcgcctcctctcctcctcctcctcgtcgctgcattccggttgagtgagttggtgattatctgtagggggtgaaaatggcgcaggcggtggtgccggcgatgcagtgccaggtcggggccgtgcgggcgaggccggcggcggctgcggcggcggcgggggggagggtgtggggagtcaggaggaccgggcgcggcacgtcggggttcagggtgatggccgtgagcacggagaccaccggggtggtgacgcggatggagcagctgctcaacatggacaccacccccttcaccgacaagatcatcgccgagtacatctgggttggaggaactggaattgacctcagaagcaaatcaaggacaatatcaaaaccagtggaggacccctcggagctaccaaaatggaactacgatggatcaagcacagggcaagctccaggagaagatagtgaagtcatcttatacccacaggctatattcaaggacccatttcgaggtggcaacaacatattggttatgtgtgatacctacacaccagctggggaacccatccctactaacaaacgtaacagggctgcacaagtattcagtgatccaaaggttgtcagccaagtgccatggtttggaatagaacaggagtacactttgctccagagagacgtaaactggcctcttggctggcccgttggaggctaccctgggccccagggtccatactactgcgctgtaggatcggacaaatcgtttggccgtgacatatcagatgctcactacaaggcatgtctttatgctggaattaacattagtggaacaaatggagaggtcatgcctggtcagtgggagtaccaggttggacctagtgtcggtattgaagctggagaccacatatggatttcaagatatattcttgagagaataacggagcaggctggtgtagtgcttacccttgaccccaaaccaattcagggagactggaatggagctgggtgccacacaaactacaggtttcattatcttcttctgatgttaaagtatcctgcagcataagaacaaagcttagaacacttaacacagctttgctgacatttttcctttgagagaacaactttgttgaccgaactaatgcctattcagagacaaaaataaattccttgggaatttgataggaaagaaaacatatgtgtaagacctaaaataccaatccaaatacggaccgaatatcaagtgttcgtaggtgttaaatctattatatctataaagtaatagaaaaagaagcctccacgtttgctctcacggtctagaaaatcccccgttaatcgaaagaaaataagaaaaaaagaaaaatagaagggtattaggattaggttttgtgttaacggaaaaaaaaacaaagagtaaacggacaaaaaaagttggaaacgg

SEQ ID NO: 6557 - DNA, 1356 bp, Oryza sativa
  ref <308>: DATABASE ACCESSION NUMBER: AK063707
  ref <309>: DATABASE ENTRY DATE: 2001-12-06
atggacgcatctggaccaccgatttccaatccaacgaacactctcgctgccgcggccgccgcctcctcgccccatccagcactccacgcccctcgaatccatccgccgccgccgcgatgccgcctccgccgcacgccgctttcctcctccggtcccggggtctactgcctcctctcctccgacgaagccccagctccggcccgccgcctccgctcctccgcccgaccaggcagcgccgcggcctctccgtccgcgcctccgctgcggagctcgccgccggagttgcaggggtggaggatgcggtggtgggcttcgtcaccggcaagcggaaggccaccgagttagcccacgcggtgtggagaagtattgttcggaaaggggatactgtggttgatgccacatgcgggaacggcaatgatacattcgctatgcttaaatggtagctgatgaaagagtacaagggcgtgtatatgggttggacattcaggagtccgcgatagccagcacttcctcttttctgaaaatggccgtcaatagccatgagctcgaacttgtcaagttgtttacaatctgtcacagtagaatggaggaggtcgtcccaaaagatttccctgtcaggcttgtagcattcaacttgggctatcttccaggaggagataaaacaataatcactgtacctaagacgactgagctggctttgcaagctgccagtagcattgtcagttctgggggactcataagtgtccttgtctacattggacatccaggtggaagggatgaacttgatgttgttgaatcatttgcatcaagcttgcctattgatacctggatgagctgcaagtttgaaatgctcaatagaccagcggctccagtactcattctcctgtacaagaaatgatcacaccttctatgacctacttgtggggaatgacggagttagtgagcgaccacatgcttacttgcatgccaagtgccacaatgaccaaggattcaagatttgaagttacaaggcatttccataggattttactgggtggacagctgtgggtattgataacaacttttgagagcttctttttcgccaggccaacttttgagagcttcacaactatatatatgtttcaagcactgcagtttaaacgaagggcaattgctttgagccacactcgtgactttactcctttttagggttgtgttgatgttttgtattggcaacaataaaggggtagcacacgagacattaaagtggatggatgcaaggagacaagggtttagacatgtttaggcataccctactcttgtttcgtggattggatctgccggattgtattgatcatggtgttcttggttgtgttg

SEQ ID NO: 6558 - DNA, 743 bp, Oryza sativa
  ref <308>: DATABASE ACCESSION NUMBER: AK063708
  ref <309>: DATABASE ENTRY DATE: 2001-12-06
cttgcctccacccacgtcgtcgatctcgtccactccaattacatccatccatccgctctgcaaccttctccggttgctgcgagcgagagcgagagcgatcgctacagccgccggtggccagccatggctgaggagcagaggtggcaggagggctgccaccgcctgtgcgccaacaactgcggcttcttcggtagccccgccacgctcgacctctgctccaagtgctaccgcgaccgccaaggccgggagagtactgcacccgtcgtcgtcgccgccgcagcctcggcctgcccggctactcatccttcctcgccatcctcgtcgtcttgtccggcgttcttgccttcctccactgccgccgaggctggcgtcgtcgtcgcggcggtggcgaaggcgagcaggtgcgcgagctgtaggaagcgggtggggcttacggggttcgcgtgccggtgcggcggcacgttctgcggcgcacaccggtacccggagcggcacgcgtgcggcttcgacttcaaggccgccggccgcgacgccatcgcgcgcgccaacccgctcatcaagggcgacaagctcaaggacaagatctgatccctccccacctgccgtgctccccgtcgccgccggaagaacgcgcggttggattccaaattaaatacgcttattattatgtaagctacagccggccggcggtgaaatcgccagccagccatgcatgcatgcgactgaaatgaaaatgagttcat

SEQ ID NO: 6559 - DNA, 818 bp, Oryza sativa
  ref <308>: DATABASE ACCESSION NUMBER: AK063709
  ref <309>: DATABASE ENTRY DATE: 2001-12-06
agctgttgctgctgctgttgttgttatccctgtcgccgcctgaacaatggagtaaggtgagcttggcaaactcctcaatgattgcggttccttcctctagctccttaacggtgattgttccttcccccaccatccacatctgcaaagatgaaacggtgaagccaccaccaccatgggtcaagatgccgatgtccccggacgagcgctggcggccgtcggggaaagcagggaggcgcgtcagcgtaggggtgagggcagaggcggcggtgtagacgaagaactcctccgggtggtcgtagctgtagtacctggtcttgacggggacgacgacgcagaggaggaggtggtgggcgtccgcggcgaggagcgaggagaggccgtgcttgagggtgtggggcgccgccatcgggtgcaggtggacgtgggagatcgccggcggcgcggcgaggctcagcgacaccgagaaggggaacccggtggtggtcgtgcggtggctggcggcccccgtgcccgtcaccggctcgcgaatgatgagctgcgtatcgaatatggctccggccatcttcttcttcttcttctcctcctccggcgccgctgcagcatcagcactcgtatcgtcgacagggacggatccaacttgggacatggggcttttgggtgaacaaacaaactgttactggatgataccccgcgcgttgctgcggaaacttttagaactaccgtaagaataatagtttgtatgcaagtagaaatatttcaaagttaagtagcatttctgtgtaaatccattttttattgaacatgcaaaccggtttttt

SEQ ID NO: 6560 - DNA, 1620 bp, Oryza sativa
  ref <308>: DATABASE ACCESSION NUMBER: AK063710
  ref <309>: DATABASE ENTRY DATE: 2001-12-06
ccgagtacggcgaccaccgcttccgccgcagcgacttcttcctcgccgtcgaggcctacctcagccacgcctgcgcccgccgcgcccgcaggctcaaggccgacctcggcagggacgccaggagcgtccaggtctccgtcgacgaccaccaggaggtcaccgactccttccgcggcgccacgctctggtggtacccttcctccatgtccaacaagtccagcgtcatcagcttctaccccggcgaggatgagcgccgcctctaccgcctcgtcttccaccgccgccaccgcgacctcgtcctcgacggctacctcccccacgtcctcgccgagggccgcgccgtcaccgtccgcaaccgccagcgccgcctcttcaccaacaacgccagcaccagctggaacccctaccgccgcgggaagggcgtctggagccacgtgcccttcgagcacccggccagcttcgacacgctcgccatggaccccggcgacaaggacgccatcgtcgtcgacctcgtggcgttccgcgacggcaaggactactacgccaaggtgggcaagccatggaagcgcggatatctgctctacggcccgcccggcaccggcaagtccaccatgatcgccgccatggccaacttcctcgactacgacgtctatgacctcgagctcacggccgtcaagaacaacaccgagctgcgcaagctctacatcgagaccaccggcaagtccatcatcgtcatcgaggacatcgactgctccatcgacctcaccggcaagcgcaagaagtcctccggcgacaacaaggcgtccgacggcggcggcgagggcagcgacgacaaacccaagctgccgaccgaggcggacaaggacgacggcggcagcaaggtgacgctgtcggggctgctcaacttcatcgacgggctgtggtcggcgtgcggcggcgagcggatcatcatcttcacgacgaaccacaaggagaagctggacccggcgctgatccggcgggggaggatggacgtccacatcgagatgtcctactgcggcttcgaggcgttcaaagtgctggccagcaactacctcggcgtggagcagcacgagctgctaggcgacatacggcggctgctcgaggaggccgacatgtcgccggcggacgtcgccgagaacctgatgcccatgtccaagaggaagaagagggaccctgacgcgtgcctggcaggtctagtcgaggcgctgaacatggccaaggaggaagcacaagcaaacaaggcggcgaaagaggacgaggaggcaaaggcagcgaaagggatagaagagatgaaaaccaaagagcaggcaacgaccaacggtgaagacgaagggaaggacaaaaggacatcggaagagaacaaggccaacggcgacatatagatattactagcaagtgggatcatatcgggcagctgcagatccctggagttgcaagccatgtatcctagcagagtgctcatgaagattttcaacctttatttttacataacagtttgctaatagggcctgcgaaattgttagcatttccgtattatattaaggctgatagttgcttgtattttgtaagaatataataatgctatgcacgccttcaagc

SEQ ID NO: 6561 - DNA, 864 bp, Oryza sativa
  ref <308>: DATABASE ACCESSION NUMBER: AK063711
  ref <309>: DATABASE ENTRY DATE: 2001-12-06
acggtcacgccggctctctcccctcctctctccgccggcgctggctcccctcctctcctccgccggcgccggctctcctctcctccagcgaaggacggcgacgaactcgacgaagcgggttagagcgcggggcgggagacggcgacgcgggggcacaggagtgggagatggtgacgagttcggcggcggcggcgcgagatctcaccggcccctccacttctggccggcgatgagggcgcggagggctgcggcgacgcgagggctcaccgggcccctccacccccggcagtgtctcgacgacggatccggcgtcgggcgagcggcatcctcggggcttggcgtagaagcaacggtgggaagacggcggcgacagcgctccttcgaggtggtggcggcggcgtggatctgaagcggtgcgggagcttagcctccaccggagctcgacggcgccgcccgaaccttgtccggcgtggatccggcctagagctcgatggcgccgcccggacctcgcccggcgcggggtggcgccgccggacatggagctctagcggcggcggaagaatccgagctcggcatggcatccttctcccccggctttgtttcaaccttttcagaatcggagctcttcacatgtgtttattttagctttttgaagtgtttgtttcagctttttcaagcgagttcctcgcgtccttgttaagggacgaaagcctcagcgaaggaacgagggcccacaccctctctcctctacaacatcaaacagcctatgtggaggggtgaagcaacccgccatgttggtacactgtgaagggccttagagggacactactacataactctaattcagttctggttgtgaatctc

SEQ ID NO: 6562 - DNA, 609 bp, Oryza sativa
  ref <308>: DATABASE ACCESSION NUMBER: AK063712
  ref <309>: DATABASE ENTRY DATE: 2001-12-06
gggaagccagcccagccatcgccgccgccgccgcgctccccgccacagacatggctgctgctatcaacagcgaggcgtccatgagctcgaggcccaagctcgcgtgcctctgctcgccgaccaaccacccgggctccttccgctgcatccgccaccgcccgatcccacgcgcccgccacctctcctcttcttcttccccgccaccaccgccgccgtcgtcgtcgccgtcgtcaggcggcgtcgcgtcggccggcgccagggcgaagggggggcggtcggtccgcgcgcacctgcttcggatgatcagctgcagcaacggcggccgccgccgccgccgcggcgacttccagcctcgcccttccaggcttcgccagtgcgcctcctgacgatcaccgacgacctcttcggatcgagtgatagtacgccactatttcgcgcgtacgcatcgagtgacactagagctagggtaatcagaatcagaatcatccagggcttggctaggaagccatgtgtgatgtactctttgcttttctactactctactagtatctgtactcctttgtgtgtttttttcctcagaggaatgaatggatcagttcaattaaattc

SEQ ID NO: 6563 - DNA, 954 bp, Oryza sativa
  ref <308>: DATABASE ACCESSION NUMBER: AK104964
  ref <309>: DATABASE ENTRY DATE: 2002-08-28
ttgaaaatggagttgtcccaccacctgatttgttttcagaagaatcaagggaacaacctaaagaccttattgtgtatgacacatctctgtttcaaactaaagatgaaatgataaagaggatgaatgagcttgaatctacaacaaacgctgatttttgtcatggtccttcggtgccacatccccctggacatgaactccaaacaaaggctgttccttatcggattcctctggatcttaaacctatccaggggctgggtacctaccatccctcagattcccggaacagtactggtagttcacatatgtatgaaccatctgcacctccccaggaggatccactacaacttataaaacaaatgcctgttgcagcagctgctgttgcaaccgctgcagtggttgcatcctcaatggttgtcgctgcagctaaatctaacagtgatatcaaactcgacgtgcctgttgctgctgcggcgactgctgctgcagttgtggctacaactgctgctgttaacaagcagtacgaatacttggaacctggttgtcaattgcttagtttgccaagttcttcaggggcaaatgaattgatcccgaagggtagacatgacttctgggataatcagcttgaaattgatcatggacaaactagtgttcccgagaaagaaaaagatttggttgaagtacctcaggaagctgaaagagtctctgacaagtcggttgggactgaaagctcaagatctgatattgccctagatggtgttgcagagtttgaaatccaatgggaagagatcactctgggagaacgtgttgggctaggatcctttggagaggtgtacaaaggggaatggcatggaacagaagtcgcagtgaagaaattcttgcagcaagatatatcaagcgatgctctggatgaatttagaactgaggtaactgtctgcaatccaaatttatgactgc

SEQ ID NO: 6564 - DNA, 1580 bp, Oryza sativa
  ref <308>: DATABASE ACCESSION NUMBER: AK063713
  ref <309>: DATABASE ENTRY DATE: 2001-12-06
atcatcccagccatccagccacagcatcgtcgcccactctccaccgagagaagtccaaatcctggacgctccgcgaaaaccctaggaacagcacgcacgctgtccccaagcaccaccagcgcctccacgccacgcgcttgcctttgcctttgctccagctcgcgagacgccggggatggagcacgacgcgcacgccccgccgcctgccgcgcaggagctcggcgacgcctccgcctccgcctccgtcgtcgacgactgggcgcgcgacgaggacaccgagccgatggccgtggatccccaccacgccgccgccgccgccgccaccgccactgaggacggcgagggcgtggcggatgccgctcctcccgcggccccggctgaagatgttacagaaattcaatcatcactacagtccttggagttgaagacgaatgctgctgcacatgaggatgctcaagaggtagtagaggaggaaaaggaaacaaagcggcatttgaatgtggttttcattggtcatgttgatgctggaaaatcaactgccggagggcaaatacttttcttgagtggtcaagtcgatgacaggaccatccagaagtatgaaaaagaagcaaaagataaaagccgagaaagctggtacatggcttacattatggacacaaatgaggaagagcggctaaaggggaaaactgttgaagttggtagagcccactttgagacagaaactacaagattcactattttggatgcaccgggtcataaaagttatgttccaaatatgataagtggtgcatctcaagcagacatcggtgttctggttatatctgcccgaaaaggtgaatttgaaactggttacgaaaaaggaggacagactcgtgaacatgtactgcttgcaaaaactttaggtgttgctaagttgatagttgtcatcaataagatggatgaaccaactgtaaaatggtctaaagaaaggtatgatgaaattgagtcaaagatggttccttttctcagatcttcagggtacaatgtcaaaaaagatgttcactttttgccaatatctggtcttttgggaagcaatatgaagaccaggatggataaaagcatttgtagttggtgggatggtccatgtctttttgaagtcctggattgtattgaagttcctttgcgtgaccccaaaggtccagtcaggatgccaataattgataagtataaagatatgggcactgtagtgatgggaaaaatagaatctgggaccatcagagagggtgacagtttgttggtcatgccaaacaagactaacgtgaaagtcattggcataagtttggatgagcacaaggtacgccgtgctggacccgctgagaatgtccgtgtcaaattgtctgggattgaagacgaggatattatggctggttttgtgctctcaagcattggtaatcctgttggtgctgtcactgaatttaatgctcagttgcagattctagagttgcttgacaatgctattttcacagctggctacaaggcagtgttgcatatccactctgttgttgaagagtgtgagattgttgatcttatagaggaaattg

SEQ ID NO: 6565 - DNA, 839 bp, Oryza sativa
  ref <308>: DATABASE ACCESSION NUMBER: AK063714
  ref <309>: DATABASE ENTRY DATE: 2001-12-06
aagcagtggcattgcaaatctgtcaccgaagctgtcaatagctagagagagatagagagagagagagagagcagggtgcggcgccggagcggaggaagatgagcgggagcagcaacagcagcctggagacgcgcacgttcctggacgaggtgcgcggcctggagaagaactggatggtcgacctcggccacccgctcctcaaccgcgtcgccgagagcttcgtcaaggccgccggcatcggcgcagtccaggcggtcgcgcgggagtcttacttcatggccatggaaggggagggtgggggcacgggagccgtgtccgactccaccggcgccaggaagcgatcgttcccggatctcaacggagggaacagcagcaagtcagctgaggctatggtgaaaagcgtgagcaaagagtctctccagtgggggctcgcggccgggttgcactcggggctgacctacggcctgacggaggcgcgcgggacgcacgactggaagaacagcgtggtggcgggcgccctcaccggcgcggccgtcgcgctcacctcggaccgcgcgtcgcacgagcgggtggtgcagtgcgccatcgccggcgccgcgctgtccacggccgccaacgtgctctccggcatattgtgagccgctcagccggcaaattagctgtccggagttttaactacctgcatcttaacttctcaagtctgccattgttatgctagctgttggagcttggaagtcttcagtgtagcactcgttgtaattggcatcttgtatgcttgatttcctgtgctatcacggggtacaaataaatcgaaaaatcatgtcgaacctgttctaatg

SEQ ID NO: 6566 - DNA, 739 bp, Oryza sativa
  ref <308>: DATABASE ACCESSION NUMBER: AK063715
  ref <309>: DATABASE ENTRY DATE: 2001-12-06
aaagcttttccattcctctcttcttcctccctttctcctcctcgccacctaacgtcgtcgacgctcgccggcggcgaggtgtgatatctgtgcggtgatcatcgatggggcctcagcaagaccggtcggcggccaagccgtacgcgaacggcagcacggcggcggcggcggcggcggggaggaaggagaacaacaaggtggtgcggtacagggagtgccagcgcaaccacgccgccagcatcggcggccacgccgtcgacggctgccgcgagttcatggcgtcgggcgccgagggcaccgccgccgcgctcctctgcgccgcctgcggctgccaccggagcttccacaggcgagaggtggaggccgccgccgccgaatgcgactgctcctccgacacctcctccggcaccggccgccggtgatcgccgtggatttgattcggcctcgtcgtgcgagtagatcagcatcatcagcaggtaaggtggtattggcgatttggcattcaaaggattcggtggatgaatgaatctgattgtgtatgaaccgattaaaaagttctcttcctttttttctttcatattttgatttttggtgaattgatggtgtgtaatgtaacataatatatgttaaaaagcatacgcataagaagcgttcatgtaactgctgtgtccatgtacagattatattcagatgaacatcttaattatattctgtaaaataactgtgcttttccgtttag

SEQ ID NO: 6567 - DNA, 795 bp, Oryza sativa
  ref <308>: DATABASE ACCESSION NUMBER: AK063716
  ref <309>: DATABASE ENTRY DATE: 2001-12-06
gtcgatcgtcgccaaaccaacaattctctaccattgctcagttttaatttgcttaatttaatttgaaggctctcactctcagtgtcggatcaacgtgttcgatcgatcgccggtggcaaacttaattacgatcgagctgagttgactgaattggtaatggcttctgcggtggcggcgagccatcagccggcggcgagcgtgatggcgcgcgtggaccggctggacctggtggtggggcacctcgaggagatgcgccgcggcggcggcggcggaaggaggtcgtcatgcggtggctcgccgtcgacgacgacgacgaccgtgagtagtaatgagtccgggtcgtcgtcggtggcgagcacgccgagggggatgagctgccggccggcgaaggaggcgctggaggaggcgcgggccaagggcagcctcgtcgaccgcattgcctccctcgagaccagagtgctcaagatggaggaggagatggaggtgacgtcgtcggatgtgaggaacacgggcagcgatgagaagcagcagcggagtgcagctggcaataagaaggcggagaagaggaagaggttgaagagcttggtcaagtcctgcgtcaggggcaaactcaacaccaacgactgattgatccatctatctctcaccttttaattacttgcaggagagcgcgcttaattatatcatccgttgtcacgtatgctggcatatagcgcatatatgtatcatgtatataagtatatatgcacgtaaaagttgtgaatcatgtacttttgggatggtcgttcttggacc

SEQ ID NO: 6568 - DNA, 612 bp, Oryza sativa
  ref <308>: DATABASE ACCESSION NUMBER: AK063717
  ref <309>: DATABASE ENTRY DATE: 2001-12-06
atttgccaagccaatcgggagatcgagcagagctgcagagagcagagggagatcggagatcgagagcgcgcggggggagctagagctaggtagcgagggaggctgctgcagcagcgagaagcccaagcccctagggcgatggcggcggaggccgggagcggcggcgtggtgaagcacatcctgctggcgcggttcaaggaggacgtggcgccggagcggctggaccagctcatccgcggctatgccggcctcgtcgacctcgtcccttccatgaaggccttccactggggaactgacgtgagcatagagaacatgcaccaaggattcacacacgtatttgagtccacttttgaaagcacagaaggagtcaaggagtacattgaacacccagcacatgttgaatttgcaaacgagttcctgcctgtgttggagaagaccctcataatcgactacaagccaactatcgtaaataacagctgagctaataacagtttggatgcttctttcatcgttaattgcacttcagaatgtctgggagaattttatttttagttacccaaatttgaactttcatgctgaataaatttgccctatatattacctttcgagagc

SEQ ID NO: 6569 - DNA, 749 bp, Oryza sativa
  ref <308>: DATABASE ACCESSION NUMBER: AK063718
  ref <309>: DATABASE ENTRY DATE: 2001-12-06
gaaagagggcggagtgaaggcggcggcggaggcggaggcggaggcggagggggagatcgtggcggcgccggcggagaaggtggcgtgcttcaagaagacggcgggggaggaggcggacgcgacgttcatggagcgcgtcaaggactactataaccagctcaaggagagctccgccgagaagcactggatctgcatcaaggacaagttccgcgccgccggcgagtacgtctcacagaagagcagctcggtgttcggcaagaagaaggtcgagcccgtggtcaaggatgctgcagttccaggggaggcgagttcggtgacagtcgagtctcagtgagggggggctagcttctgatcagtaccaactttgatgagacaagtgtaaatcctcttaggtgctcaacggtggaacttgaattgtgaggtcttatcgatcagcgagtagtttttttgctatgtcatcttgttcgtagattctagtaggaagagtagtttggacatggttggctgagtggttactactgctgtgatctccggatgtttctacctgaaaaaatatgtgaaccttgaatctgcttggtagcatctatgatcaatctgcagtgcagctggttaaattcgtgccgctgctattctgatatagacatatagttatatgagttcttgtgttgagcatggggatgatatacccactggattcatcttggttttctgaatgcaagggtcaattagcactggttcattgtgaatgc

SEQ ID NO: 6570 - DNA, 564 bp, Oryza sativa
  ref <308>: DATABASE ACCESSION NUMBER: AK063719
  ref <309>: DATABASE ENTRY DATE: 2001-12-06
atcatcagcaattcccagttcattcctgcctccgtctccagtagcttgctttgctcgcagattgttccttttttctttttctccggcgactcgagatcgtggctagctagagcctagatggcctcttccatggcgggcgcggcgggggaggagaaggcggcggcgggggcggggcggcgggggatgatcgtgatcgaccggcaggccgtcgaccgggggatcgcctacgcgctcatggtcgtcgcgctcgtcgccacctacgcgctccactagctcgatcaatcggctcagggaggaggaggaggagaagaagaagtcgttccccttcccctaccaacctgcacttcgatcgatcgatgccaaaagtctataactatagaacctgattctttcttattcaattcttctttttagagaaggttaattaattgtgtgtgtgtgtgtgtgagagagagagagagagagagatcgatggataatttggatatgtacactataccaagtgggttaattaactggatgtactcttctgcatattttggtgttcattggtaacagtttggc

SEQ ID NO: 6571 - DNA, 597 bp, Oryza sativa
  ref <308>: DATABASE ACCESSION NUMBER: AK063720
  ref <309>: DATABASE ENTRY DATE: 2001-12-06
aactaacgctaaaaaagtaacagtttctgtactttattgcgaagggtttagaggatggtgaactcgaccgtgttgaacccttggctttgggtcacgcccaacttcgcccaggctgcccgcgtgtacgccagcacgatcccgcgcgacgcggacgctggcacgatcttcgccatcatcgtcgccatcgtgttctgcgccggcttcgcctctgtctttatgctttaccggcggcagttcaccgaggccgagacgaacagaaggcgccgcgcggaggcactggcctatgcggaggcccactccattcggggccctgcaaagtcgacgctcgacacgacaccaatcgcgtcgccgacgtcgcgcagcatcgatccgccaccagcgacgacgcccgccgctgggggcttccaccgtgagctagaaccgccgcgtgactatccggcgagcggtatcgcgttgtatcggcaggggtcgtacgtgccggcggatcctgccaaggtgcgagatatccttgccgacgccgacctctagagaagaggaagaacattcggtcgctctggaccccaccaccactgcatcgtgtcactgtcgtgttgtctc

SEQ ID NO: 6572 - DNA, 1115 bp, Oryza sativa
  ref <308>: DATABASE ACCESSION NUMBER: AK063721
  ref <309>: DATABASE ENTRY DATE: 2001-12-06
caactccggcgacaaggtggacagcgcgctcaaggacatggccgtcgtcatgaagcagcgtggctaccacgccgacgccatcgacgccatcaagtcgctccgccacctctgccccaagcagtctcaggactccctcgacaacatcctcctcgacctctacaaggcgagcgggaggacgaaggaggagatcgagctgctgaagcagaagctgcggaagatctacctgggcgaggcgttccacgggaagacgacgaagcgggcgaggtcgcacgggcggaagatccacgtctccgtgaagcaggagacgtcgcgggtgctgggcaacctcgcgtgggcgtacatgcagcaggggaatttcatggcggcggaggtggtgtaccgcaaggcgcagatggtcgacccggacgccaacaaggcctgcaacctcgcgctctgcctcatcgagcagcgccgccccgccgacgccgaggccgtcctcgccggcgtgctcgccgggaggtaccacgcccgcgacgacgaccacggcgccccgcacaccggcggcaagatcctcgccaaggtggaggagttgatggcccgcatcaccggcgaggtcgacggccggagcaacagcagcggcggcagcagcagcgacgacgacgaccgcgacgtcgaggacgagatggtggagctgctagacgtggtggtccggcagtgggcggcgccgtacaggaggagcaaccggaggctgccggtcttcgaggagatcactccggtctgcagggagcagatggcagcttgctagaagatggtaattaattaagagtagtagcaaattgttaattaaattagcaggtccatcatctagtgttgggtagatatatagaatttcatgcacctatccgacgtgtcaacggcttcaactttatagggagaactagctgcaggtgcatgaagctaagcatgcatggatgtttttttttcttgtgagtgtgtgtgtgtgaaattaatagtgtgagatagagaagtataatgtgtgtgtgaccagttgcatgttttgtactctggttgtgttgttgtgtacttatgtagagttgataagtgcatggcttggtgaaggatataaatgtgtacat

SEQ ID NO: 6573 - DNA, 846 bp, Oryza sativa
  ref <308>: DATABASE ACCESSION NUMBER: AK063722
  ref <309>: DATABASE ENTRY DATE: 2001-12-06
ccgagccgcagcgacgagccgagccgccgcgacgccgccggcgagcgcctgctccgccgccgcccgccgccgcagatgggggacgagcgcgtgaaggcggaggcgctgcagatcctggggctgttccaggcgctcccgcgcctcgtcgtcttcgacctcgactacaccctctggcccttctactgcgagtgccgctccaagagggagtcgccgagcctctaccggcacgccaagggcatcatgttcgccctcagggagaaggggatcgacatggcgattgcgtcccgctcccccaccccggacatagccaaggtgttcattgacaagctggagatcaagtccatgttcgttgcccaggaaatattctccagctggactcacaagacagagcatttccaaaagattcagaggaagactgggattccttacaaatccatgcttttctttgatgacgaggacagaaatattgaatcgatatcaaaaatgggagtgacgagcgtgctggtggagaacggggtgaatcttgacatgtttaagttgggtctgagtaactttgccacaaatgttgctgcctcgagcacaagtaaagatgaatagcctcattgaacgactagaaccaacagacaagaaaaacatataaatttaagttaagcatgcatttcttgtaatttatattgcccttgctcatgtacgagatggagtatttgagtacaggataacttctgagagcaagtctttgcttcatttatgtggatgttacgattcgatcgaatcagatgaatttgattcgatcggtgaattgagtcatactgaattaacttaaatgtatattcaatgtttggcttg

SEQ ID NO: 6574 - DNA, 699 bp, Oryza sativa
  ref <308>: DATABASE ACCESSION NUMBER: AK063723
  ref <309>: DATABASE ENTRY DATE: 2001-12-06
gcaccttgtcggagacaccgctctggcgtccggaggaatcgatgaggatgcgcgttgggtagttgtgttgccccatgccattgctctagcttgccaccaactcgagctcccgcgcgcattgccaccatggtcaaggtcaaggtcgtcgctgccgtgcggatccggcgagctcgaggctagtcagtgggggagaagaagagccaccgacgcctcattctgcgccgatgccggctattccaccatcccgaccggcaaatccgccgccgccacctccgcctcgatctgccaccgccgcctcgatcctccacccacgccgcctcgatctccatcccctccaccccgatccacgcgccgccgaggagacaggggtatggcggcgaggcgtgcccccgcgtcgttccacgccaccgttgcctcgatccgtcgccgccgcatcgatccccacctcctgcgcctccatccaccgccaccagggaggggagaggcggcgatgcctccagggaagagagctcgagctggagagagggaagagggcagatgagctcggcggagctcggctggtgaagtgggacggcatagggaggggatcggggtgtcggtggggaaatgagggagaagagattttatattaatttctggattttggggtgtttagtgtaaaatttgaacttctatataaattggaaaattgtgaggact

SEQ ID NO: 6575 - DNA, 1033 bp, Oryza sativa
  ref <308>: DATABASE ACCESSION NUMBER: AK063724
  ref <309>: DATABASE ENTRY DATE: 2001-12-06
gagagaggactggttggttcgagacatttgatccaatctaaagcagcgatgcgtgtgacgaccgtgtgtcatcatccatcgaccataccgcgcgtccgctcctccctcctgcgccactcggtcgtgccgcgcgcgtacgattcgttcgacgacatggccatcgtctccgtcacgactgccaccgccgcagctggcgttctcattctggttgtcgccgctggagcagcagcggccgccggagcacgtcgtcaccacgtcgtcggaggtgacccggggtgggcggtggcctccgacgtcctcgcctggtccgcggacaggctcttcaccgtcggagacaccctctggttcgcgtactcggcggaggacggcggcgtcgcggaggtcggcggcgaggaggagttcgagtcgtgcgacgccgggagccccgtcaggatgtacacggaggggctcagccgcgtcgacctcggcggcgaagggtcgaggtacttcgtcagcgccgacccggacaagtgcggcggcgggctgaagctgcgcgtcgacgtgcgggctccggtggctggtacgacgccaccgccagggtcgtcgaggaagggcgaccgagctgccgctccggcgcccgcgccgttggcgtccagcggcggccgcggagtcgccacgtcgcggacgtgcgttatgctgtgctgcctcctgttcctggccatatgaacatggagcagtggagcacggtgtgtttcgtctgatctgtcaattgtggtgttgtattctaccatgtatatcttcgcctagcctactttcgagaataaatttaccgactttctgatcttactagttcgtaggctcgtagcgagacagtcaggctggccgtaacaacggtagttaccttggccatcctatgggtgatatcttaggctcgtagcgagacagtcagaccggccgtaacaacgttagttaccttggctatcctatgggtgatgtctcatatggcgacatatatggtgtaatattgatgatataatatttgcaattgcacaac

SEQ ID NO: 6576 - DNA, 1356 bp, Oryza sativa
  ref <308>: DATABASE ACCESSION NUMBER: AK063725
  ref <309>: DATABASE ENTRY DATE: 2001-12-06
gagctccctccactccactcactggaactggaagcttacgagtgttcgtccaatgccacggcgtgccgctctcgccatgatgaacgtggtggccatcgggctcgtgctctccaccctggccgcggccggcgtgtggtcgccggcgccgacgccaccgccgtccacggccggcgagcacgtcgtccgggagggacgccgcgtggtcatcgtcgagtacgagcgggagcacccgctgtaccccggcgacgccgtgaaggagacgcacgtcctgccccctgactccctcgacggcggcgagggcaggctcacggacaaggccaggggcgcagtctccgacgcggccgacagggtggccgacgcggcggagggcggcaaggagaagatgtccgacgccaaggagagcgcgacggggaaggtgttcggcgcggtgaagcggtgcaaggacaggctctgcggcgcggccagggaggcggaggagggcgcgaaggacaaggcgtcggcaggcgagcatggtgcagagcaagctgttcccgatgtacttccgcgccgtggcgtacggcgtcggcctcgcgctcgcggcgcacctgctcggccgcgagcgcagctccctcgccgcgcgcgcccagagcgtcaacctcctcgccgcgctcgccctggtcctcgccaacatgctgctcctggagccaaaagccaccaaagtgatgttcgagaggatgaaggtggagaaggaggaaggcagggggagggacatggccgacatcgtcgacccgccaacggtcaccgtcgcggcgggcaacacggccaccaccaccaccgttcccacggcggcggcgcgcaagccggcaggcaacaacaatatggcggcgaagtcggcggcggcggcggcgccggtggacgagcagacgtccaagagccgggtggcgacgctgaaccagcggctcaagaagctgaacggctactcgtctctgtgcaacgtgctgtgcctgatggcgctgacgtggcacctcgtgcacctggcacgtcgcctccagatagccagcgtctgctaggctcaaaactcttcgtcgtccgtgtcgtttgctgtgaatctgacatgctgtagcttcttgtagtttttaccgttttagttcaggcagttgtcatggcgtctgatctgttcgtatgtatcaatgtacttgcttaggtatatttcgtcgacgtaaaaacagtagcatgtcgatctgctgttgtttgtagtttcctgcagtgttcttgcaggttgggatgtagctcaaaactgctgcatttcggacacgacgtccgttgttggcttgttttagctgggatgaatgtaactggaaacccctaatctgtttt

SEQ ID NO: 6577 - DNA, 522 bp, Oryza sativa
  ref <308>: DATABASE ACCESSION NUMBER: AK063726
  ref <309>: DATABASE ENTRY DATE: 2001-12-06
agcttacaccgatcgagcagatcagacagagttagctgcagagcagagtgtgttaaagactagttgggacttgggagaggatggcgaccatgaaagccaaggccgaggacgcggcatcctccgccaaggccggcgtccacaaggccaaggccaccgccggcgagaaggtggagaaggcgacgacgggggacccgatgaagaagcgggaggcggaggagcggaaggaggacaggaagctggaggcggagtccgacgagcgcgtcgagaaggagggccacgctgacgagaagtccggcaagcacacctttaccaccgccacggggtagctaagctactagctagcgaggcacgcgtgcgtgcgtgcgtgccatagtggctggcggccgcgcgcgctcatgaccggcttgaactagctgcacgcactagctacccgcatgacgccgcgcgctagctttgtaccagtaatcactagtatgtatgaactcacgtcgatcgcttgcaatgtgcatattgatgacgggt

SEQ ID NO: 6578 - DNA, 674 bp, Oryza sativa
  ref <308>: DATABASE ACCESSION NUMBER: AK063727
  ref <309>: DATABASE ENTRY DATE: 2001-12-06
acgtctccaaccaaattccatcgtcttcaacccaacccaacccaaacaccaccatgagcagggggaggagcaggctgagctggctgtggagggcgccggcgagggcgctggggagggcgcgggacatgtacgtgcgggggatgacggggtgcgcgcgctgcgtgccggcggacgccgcgttcggctacccggtgttcgtgccgtcctccgccgccgcctcgatgaggagcaacagcttcgggtcggactcgcggttcggcggcggcgccgacgacgacctccgggagctgatccgcgcggcgtcgcagaggcgcgccgcggagcaggagcgggaggcgcgggccgtggccaggagccagagcatggcgtcggggatctccatggcgcggatcgacgaggacgcgccgtgcgaggagttcggcgacgccggcgtgatgcactaccccaggagccagagctgcgtcggcggcgtcggcgggaggatcgctcactgtcacaggaaggtggcggccttggcctgagctgctgcccgccggtcgtgctcgcgacggtgttcatcgccattaatggtcttctctggaggtctagtagccattcaaactttgggattttgcgtttgtaaatatgatttttgttgagaattcgtgagtcgtaattgctatttttgctgctgc

SEQ ID NO: 6579 - DNA, 1250 bp, Oryza sativa
  ref <308>: DATABASE ACCESSION NUMBER: AK063728
  ref <309>: DATABASE ENTRY DATE: 2001-12-06
aatctctctcgcccacattaatcaccttcctcacgaggccaacgagcagaaatcccatttcatcatcattcataccaatcctctcggtttcttccgcgtccccggattcagtttcctcctcctctccccccctctcgatccctcctcctcttcccctcgttccagcgcgctcgccgtcgcccgccgccgtccgccgaccatggaagcagctggagtggaggtgaacggaggaggaggaggcgacgtcgtggtggtggtgccgcagcagcatgaggtggcggcgaagcaggcggcggcggcggcggcggcgaaggggaagtccgtcgaatccaagggggtccgcgtcgtcggcggccggatctatgatccggagaacggcaagacctgccaccagtgccgtcagaagacgatggacttcgccgcgtcatgccacaagatcaagaagaacaacaagcagtgcacgatccagtactgccgcaagtgtctctttaacaggtacggccaggaagccgagaaggtggccaatgacggcacctggacttgccccaagtgcaaggatatctgcaattgcagcttctgcatgaagaagaaggggctgccgcccaccggaatacttgcccatgctgctaaggcttcaggttgtgcttcggtccatcatttactgaaaaaggggaaagaagcggtggctgccgcgcagaggagcacccagaaagtgagatctacacctgtgaagaagagcccaaagagggccatacagccagatgctgctgctgatgaacctttggctgaaggggatgagaatgtatgcattgatttcaatgctgctccagtgaagaagcagaagagaagcaggaaggtgggtaatggtgtggctctgacgaaggatgaaagccctgatgctcccaaggaacaagttgttctgcccaagggcactccagtcactagtgttgccggtgcagagtgggagcctgaagatgttggtcttgcacttcagttcttcgaattctgccgcacatttgctgaggtagttacgaaagaaagatcaaggatatttaatagtatgattgcacatgccttgtcagagtaatatcttactagcatttgcaagagaataatagatcgagtttttttttttctatttacatgtctgatgcatgttatgttttggtatgaagtatgacaatgtaaaaaatgcttttactggtaagcaccgaagtgttgatattagagcttcctacaagtttggaatc

SEQ ID NO: 6580 - DNA, 540 bp, Oryza sativa
  ref <308>: DATABASE ACCESSION NUMBER: AK063729
  ref <309>: DATABASE ENTRY DATE: 2001-12-06
aaaaaaaaaaattcacagcaacagcacatctcgcagcttaatttcagcttactgatcagtgatcactgagctagctgagacaagtttttgagtatggcagcgaaggcatctgcagtgttcgtcctgctggtggtggtgctcgcggtggccgcggcgatgcggggagcggaggcggcgacgtgcacgccgacgcagctgacgccgtgcgcgccggcgatcgtggggaactcgccgccgacggcggcgtgctgcgggaagctgaaggcgcacccggcgagctgcttctgccagtacaagaaggacccgaacatgaagaagtacgtcaactcgcccaacggcaagaaggtcttcgccacctgcaaggttcccctgcccaaatgctaagcacctcgtatggtcacacacgcactggtcatcaatacagtagcacaccaatggcatatgcatggttttcaggctgccattatgccatatgggtgtcagtttaagtatactaataaaatgagtcactagacagtgttctgtttaaagtttcagaat

SEQ ID NO: 6581 - DNA, 634 bp, Oryza sativa
  ref <308>: DATABASE ACCESSION NUMBER: AK063730
  ref <309>: DATABASE ENTRY DATE: 2001-12-06
agcgccaccgcactgcgcacccgccccgacgcaatggccaccgccgccgccgcgagatcgttccttcgatcgggagtcgcctcctcctcgtccatccgcggcgccgccgcgagagccgcatcccgagccgggccggctccgctcccgaggaggctgcccgccgctgctccccgtctcatcttgaggtcgccggtggagatgagcagcgtctgcttggagacgctgatgcccatgcacagcgccacggcgtcggcgctcatgacgtcgctcctcgctgcccctgcgtgcaggagctttggctggctctccgaagctggcaatgatgacgtgtgacaaactctaggtggaatgtagcagattatagtcccgtcaactcaaatctacaggtctggcaaggttttaaggagcatccatgttagcatatattcatagtcatgttctattaattttcctgccatggtttgcacaaaaaatgaaagatgaagacgtatataaatctctgccagggtacttgtttctccttttaattaactaggaactacatgattatgtttgttctttgtgatcattcgggaccatgctattcgatgtccttggaccttacctaatgatgtatgcagtttatttgtcctgc

SEQ ID NO: 6582 - DNA, 1349 bp, Oryza sativa
  ref <308>: DATABASE ACCESSION NUMBER: AK063731
  ref <309>: DATABASE ENTRY DATE: 2001-12-06
cttcccaggtctcccctcccctcccgtcgccatgcctcacctcgtccgcgagcgcctcttcttcggcgacatcaacgacgccatcgccgcgctcaccaccaccgccgcggacaccggcggcttcacccacctcctctccgtcgtcagctccgcatccatctccttcatcaccgactgccgcccgggcctctccatccccaccgaggaggtccgccgcgtggtcgccggggaggagggcgcgccgccggtctccgccgtggcccccgggcggctgttgcgggtggtggagcgcgctggggtcgggctgcgggtcacgcggatggccgtgccgctgcgggacaccgaggaggagaacctgctcgatcacctcgagccgtgtcttgatttcatcgatgagggcaggaaggaggggaacgtccttgtccattgctttgctggggtctcaaggagtgctaccatcatcgttgcttatcttatgagaacagaacaaaaatctctggaagaagcactagagtctcttaaggaagtcaatgagtcagcctgcccaaatgacggttttcttgagcagttgaaactgtttgaagaaatgggcttcaaagttgatacttcaagtcctctatacaagcgtttccgtttaaaattgctaggccaatcctacaaaattggagagaaaataggaagctatgtatttgaagatgatcctggtctttctggacagcctaattcttctactcaggatttaccaaacaaacaaacccaacaaacagcataccgctgcaaaaaatgcaggagaattgttgctgtgcagggcaatgttgtgagccatactcctggtgagggtgaatcttgctttcagtggcaaaacaaaagaaagggagagcgatcatatagcaaagaacaagattgctcatcgttgtttgttgagcctctgaagtggatgactccagtggaagacggtgctttggaggggaagctatcgtgtatccactgcggagcacggctaggatatttcaactggtcaggaatccagtgcaactgtggcagctggatcaccccagccttccaaatttccaagagcaaagttgatattagtacgacttagatagttttttttttgtggggtgtacgacttagatagttgtcggaggctagcagattatttcaggaccatgtgagctggtgtaaataccgttttatcagaaggatttacgaactcgaaggatctcgaccgaagattttcagatccattgtgcactagatagatatcatgaagcattagcctcagaaacctccactgtattactacttggtgttagaagactatgccatcagttgcaattgttggttct

SEQ ID NO: 6583 - DNA, 869 bp, Oryza sativa
  ref <308>: DATABASE ACCESSION NUMBER: AK063732
  ref <309>: DATABASE ENTRY DATE: 2001-12-06
ggcgttcgtcgtcgtcggcgacggcgacggccacgtcgggctcggcgtcaagtgcgccaaggaggtcgcaacggcgatccgcggcgccatcatcctcgccaagctctccgtcgtgcccgtgaggagggggtactgggggaacaagatcgggaagccgcacaccgtgccgtgcaaggtcaccggcaagtgcggctccgtcaccgtgcgcatggtgccggcgcccagggggtccgggatcgtggcggcgcacgtgcccaagaaggtgctccagttcgccggcatcgaggacgtcttcacctcgtcgcgcggctccaccaagaccctcggcaacttcgtcaaggccaccttcgattgtctcatgaagacctatgggttcctgactcctgacttctggagagagaccaggtttatcaagacgccgttccaggagtacacggacctcttggctaggccaaaggggctcgtgatcgaggcacctgctgagaagatagaagcttagaaattttgcagcaaagagctgagaaagaattttgcattatggcagcaagaactgctgtcttatcctcaacctcaacttatgtcttaaaaaatccaaattttgaattagcgaaccttaatttatgtgctctggaatgtttaggtttctcttcaccgtgtttacaattctcatatccatatgaacgcgtacagcattggtgcattttgcgagttttactctctgttatgctgaattgtgttaccaatcctcattgaaggccgttagaacaaattattattctggttgtatatcattacaatctgaaaatgttgagcagcctatacgggaatatttataaagtattaatctgcatcgttgtaacttgtattat

SEQ ID NO: 6584 - DNA, 694 bp, Oryza sativa
  ref <308>: DATABASE ACCESSION NUMBER: AK063733
  ref <309>: DATABASE ENTRY DATE: 2001-12-06
gaggtgcagaaggtgacgctgatcccgcgggggcaggcgcgcgggctgacgtggttcctccccggcgaggaggacccggcgctggtgtcgaggcagcagatcttcgcggggatcgtgggcgggctgggcggccgcgccgccgaggaggtcgtcttcggcgagccggaggtgacgaccggcgcggcgggggacctgcagcaggtgacgcgggtggcgcggcggatggtgacggcgttcgggatgtcggagatcgggccgtgggcgctggcggagccggcggcgcagggcggcgacgtggtgctgcggatgctggcccggagctccatgtcggagaggctcgccgccgacatcgacgccgcggtgaggaccatcgtcgacgaggcgtacgaggtggccaaggcgcacgtgaggaggaaccgcgccgccatcgaccagctggtggacgtgctcatggaggaggagacgctcggcggcgacgagttcagggcgatcttgtcggagcacgtcgacatcggcaaggagcggcgggaaacggcggcgaggacacagcagctggccactgcttgagcagcagtagtggtagtacacagaagtgtagtgtgtagagatatttacatagagcaatgtaatgtactgtagtaacaaatgtaaggcagttgattgacaaacatatgaatgcatttagtttgttctc

SEQ ID NO: 6585 - DNA, 662 bp, Oryza sativa
  ref <308>: DATABASE ACCESSION NUMBER: AK063734
  ref <309>: DATABASE ENTRY DATE: 2001-12-06
ccccaaacccctcctcacccgcagcgccccaacccaaccctccccgaggtcgcagccttatcctctcctctcccctccgcgaggtcaggtgagctcaaaccctatcccctcctcctccacctccgccgctcctccccgccccggggcgctgggttctccctcttccggtggcgacgtggtggggtgtggtgtgttgacccccgcacgattcggttgccgcgtggttggaggattcggtggatagttctcgccgcgcgattcgtggggggcggagagctcgaggtcgcgccccccgcttggttttgaggggggccttttgatggttgctcgtgcgggctaattttgcgctagaactgttatatcagtggaaattgttggtttagttagcacggggactacagaatgtatcagtggaaattgttggtttagttagcacggggactacagaatgttgttggctccagcgttctgttcgtctggttgtgacttttggcatggggtgttctaattcagccaagtagagtggagtaggagggtgcatgcgatattctgtttggcagttggaatgctagtgttttcatgtatgctagtgatggccagccatttgaagctgacgtaactgttagggtggttgaatggcaaacatttaaatttgaaggtgt

SEQ ID NO: 6586 - DNA, 584 bp, Oryza sativa
  ref <308>: DATABASE ACCESSION NUMBER: AK063735
  ref <309>: DATABASE ENTRY DATE: 2001-12-06
aaaatccctcatttcctctccccttcctacgcgccgccgccgccgccaccgcgactcctcacattcgtccccaccacatccgagccagcggccgcccgcccgccgtcgctacctcctcctcgagccagcggccggcaccaccaccttcccatggagccagcgaccggcgctatgtcctcacggagccaggcgcagtgccatcttctcgcggagtcactggcccgcaccgccgctaccttctcctcatagagccagggatgtcgagaccatcgccgtctgtgtccgcttcttcgcacagctacgccagcttgcggccactactacactagggtctgacttgctcttcttgtgcatgcttgcttctataccttctacattgatcaattcgggtaacttatgttgcaaatatgtggttaagatttgggtgtgggtggagcaagtgtgccagccactacaccaccgtccactcccatgagaaagtcagctccatcaagatgatcgaacatccagccacttgcgcactcctccatttgctgccgtatgaggatgaggcaggcagctccagttaggtcactactctgctg

SEQ ID NO: 6587 - DNA, 535 bp, Oryza sativa
  ref <308>: DATABASE ACCESSION NUMBER: AK063736
  ref <309>: DATABASE ENTRY DATE: 2001-12-06
agctcaaaaccccgcaacaacccaaccctcgtgaccaacccatctccccaccaaccccggccgccgccatgaccggcgccgtctccaagctcgccgccgggcgggacgcagcgcaggagctcggcgccgcgggagctcgccgtcgcccgacgcagagggaggggcatgaccagcgacgcggtgagaaggaggccgtggagagaagaccttgacggctcgacgcaaagcactcgcccgctgctcgcggcgcaagaaaggggcggcgtccttcttctccctttgcggcggtggagtagagagggggcggaggtggtcccgcgatgctgtagatccgaccatcggcgtggtggatggaggcggcgagccgttggtcgtggttgtaggcgatgagcgcaccagcgacagcacaatgggatatttctgcttgtgttgaaagtgctattgtttgacatgttttttttttgttttttgtttttggtggacacaaatttgtaccatgtatattttttgcaatttaatattcactaattgggtt

SEQ ID NO: 6588 - DNA, 1422 bp, Oryza sativa
  ref <308>: DATABASE ACCESSION NUMBER: AK063737
  ref <309>: DATABASE ENTRY DATE: 2001-12-06
acctcgagaggaggcggcggcgggagcggcgcgcggcgcgacccgacggcgacagcgacggcgacagcacggctctctcatccggccgccaccttctctccggtgagcacgctgcctttcctcctctcccctcctcttccaaatctagggttagggtttccttctcttctccctttcctgtcgtcgccgccatcccatcgagcaccgctcccggtcgcagcatagcgtcggcgcatccactctgcagccgccgcccatcgccctcgcccacggcgccacgccgccaccggcgtggcgccctcggagaagaagaggcggaggagagcacaaggcgattctttggctattcttgttgttcttgctgttcttgtaaactccaccttgtcgatagcgtccttgagctgcagcgaccagttcatcatgctggggtcgttgatccgctgcttcttcactaaactcactacgctgttcatctcctccaggaaatttgccacgctgttaagcttctcctggaaaccgtccatccatttgtgcctcttttctctgttaagcatgatgatctatttatcctagtttaggattccaaaattttgattatttgggtgcaaacattttaagtagtactgcaggtactgccattgcaaattcacaatttggctttaggataggtgaaaaaagattcaataccatataatatgcttgtaattgttgaggctgcaaagcgggagctaggcagttacagctagctgaagtgaaaatctagtggatctcctgatatgcagcagttgatgctgaaggacatcatgtgaggcttctatttgagcagtttttgtcatcttacaagctgagtcactttcatttcaatatctattttcatttaaaattactgagcctatagaatttttcacaccaagcttcactactaaacttgacatttggtataatagaaccgcttcagtaattaaaatgtgatgcctataacatcttattgctttaccttgatcccaaaattggttaatttggactaatttgccaattcttagagtgtgaagacaggttgggttgtactgcactaatttctttattgttgttccaagcataactgtcttgttgaaaagcataacatgtgaagtggcagacttgttgcagagacatgcatctgtgtatccctcaaaaaaagacatgcatctgtgtatgatgagaagtagagatggagcagggcttcttgtgtactgcaatcctgaatttacagcattcactgcaatcaccattgcttatcatctccctggttccatgccctctcttttttgttactgttaaattctgatgatcaattggcaattgaggtgtctgttccttttgaagtttttataattgataaggacaactgcttgatattcgtatataagcatctcttcttgg

SEQ ID NO: 6589 - DNA, 1337 bp, Oryza sativa
  ref <308>: DATABASE ACCESSION NUMBER: AK063738
  ref <309>: DATABASE ENTRY DATE: 2001-12-06
atcttcctcctgcggatgttgatggccggacggttgggatggacggccgccacgcgtcgcagtgcctcctccaccttcctcgtcaccgccgaaccaccgccatctcccgtgttcttgtaccaaacctcgacgcgaacgtcctcgagcgaagggaggttctgcatgcccagatcgcgcagcccaagcctaagcccaccaccaccgccgccatcgccggcggcggcgaagtcccatgccctgaggctgaacgagagccgccgaaccctcggcatggcgcctcgcgggaacatggacggcgccgtcacgaagtgcaggagcgcgcacgccgccgcgcaggggaacgcgccggcgcgcaccgcgaaccgctccaccgccgggcgcgcgtctatccggccggtggcccgcagccggagagactggagggccggcagctccccgacgacgccgatgtcgccccgcctcacccgatccacccacacgtcgaggaaggcgaggcgcggcagaggcgagcagcgcacccacgccggcagcgccgagaacgcgctcgtgggcccgttcgacacgaaccggcggaggcacgccggaggcacccagccgtcgccgacgttaccgacgccgccgccgccaccgccgtaagcgtaaatctcgatgctctggatcccctgcagctcgccgagagcccccaccacagctctgcccgcgccgtgctccatctctccccactggagccggagcaccctgagcttcttcagacagcgaagctctctgacgacgccgtctgcagaatcacggcgaactctgagcccggtcatctcctccagcgacgtcagggttgcgagcccaccatttcttggtagcctggtgtcccaatcgaggcgaaggcacatcaattgcctcagcccggtgatcgcgggcggcaactcccgtatgccatgagctcctctgatgtccagcgtctgcaaaaccttcagatttccgatctctgtagggagctcagcgatgtatgttcgtcttagcccaaggtacctcaggtgagagagcttaccgacatgcctcagattaagattgctaaatttactgagatcacagccttctaaatccagtacacgaagaacctgaaacagtgacagggatggcatcgaattaacaccaggtctgaacaaagtgaaggatctcacttgtgacatgctgcttgctgtagcctcttctgccattcttcaagtgttttggatggctaacctgcgaatcttattatcattcttatgttgccaagatgttctgtgctcactgtcatctattatagtaataaaattttcttcttttgatagggaaaggat

SEQ ID NO: 6590 - DNA, 536 bp, Oryza sativa
  ref <308>: DATABASE ACCESSION NUMBER: AK063739
  ref <309>: DATABASE ENTRY DATE: 2001-12-06
ctcctcgacctcgatcttccactcccccacccacgccgccgacgatgccacagcagcacccacagccgccggccggctcgcgcctcctcgacgccgtcccgctcttcgtcgtcgtcctcctcgccgcccacgtcctagccctcgtgtactggatgtacaggttagcctcggacaagcagccgccgcggaggaagacgcagtagccaccaccaccacgggccccgacggcttcgtgctcgcctttgtgtagccgatcaaatcgtgagctgcgtgagcaagattttacctctagaaagcttaggttgttcattattgttgcagagtttgtgtttccgtttgttttatggtaccagtgacatttggtatataatcaagaagaattagtggaggacttgttgtatgaattgccttgggttctttttaatatgagaattccataattgttctgtgacagggagtcgtcagtggctttacttgtttctcacaaatcaattaccagactcttgatcgattaaaccgttcagttcaaactactc

SEQ ID NO: 6591 - DNA, 749 bp, Oryza sativa
  ref <308>: DATABASE ACCESSION NUMBER: AK063740
  ref <309>: DATABASE ENTRY DATE: 2001-12-06
ggataaggattccacatcgacgacgacgactcagatccaatcgaagcagcgagacgacgacgcctctacgctgcgctgcgcagatcagccatgctccgccgaccgccggtgatcaggtgatgcctctcgaatcaaccacgctgggcaacgccgcgtggatcaaccagctctgtggtgcttcgccgtcatcacatccacgctgcagctcctgccgttgccgcctccgcgccgcgcgacagcgcttggtttcgtcgccatctccccgccgatgctttgctcctccgcatgcgctaccgccgcctctccgcatcacgccgcctctgctcgactactcctcgcaccacactgacgctacctctcagcatggcagacgcttctccttctcaccgtcgggggtgaggaacccagcgggtgtccagtacccgcacggggacggggacgggagaaaaccacgccccgtgtgcggggatagggacagggaacgggggagtttttccgctagggggcggggacggtcagcttccctactacgaagtttaccccgtccttactttggaaacatggggagggggagtttcgtagggagccagaaagataagtagagaactctgaaaaattaacaaaaacattaaaaacaacagaaaaaacacagaagtatctatttaaacaagatagaatggaaaaggcttacggaaattccatgcaaattatataaaacgtaaaaaagcataaaagagtaaattcagggg

SEQ ID NO: 6592 - DNA, 1028 bp, Oryza sativa
  ref <308>: DATABASE ACCESSION NUMBER: AK063741
  ref <309>: DATABASE ENTRY DATE: 2001-12-06
aaccagaagccaaccggagttaaggaagaagggaaggaaagccacccgagcaagcggatcacatcgaggtaggggaggaccggaggagctgagctcagctcggtgaggggtggactgggagtgcgtgggtgggtgtgatggagtggacgacggtggaggcggcgaacggggccaagctgagcgtgcggctgttcaagccggcggcgggggcggaggcggcggcggcggaggacgtcgcggtggtgctggtgcacccctacacgatcctgggcggcgtgcagggcctgctgcgcgggatcgccgagggcgtcgcgcggcgcgggtaccgcgccgtcaccttcgacatgcgcggcgccgggaggtccaccggccgcgcctcgctcaccggctccaccgaggtcggggacgtcgaggccgtctgccgctgggtcgctgacaatctcaacccgcgcggcgtcctcctcgtcggctcctccgctggagcaccaatagcgggatctgcagttgataaggttgaccaggtcattggttatgttagcattgggtacccatttggtctaatggcctcggtcctatttggcagacaccacaatgctatcctcaagtctgagaaaccaaagttattcgtcatgggaactaaagatggcttcacaagtgtaaagcagctgcaaaacaagctcaagaatgcagcaggacgggttgatactcacttgatcgaaggagctggccacttccaaatggaaggccctgcttttgatgcacgaatggttgaccttattgttaatttcatcaaatccttgcccaaatagcattgacagtgactgtgtgcaaatttgtcatgattgtagtgagttagtgacaaacaaaagaagctattgaacagtgcattcatggtgtgtattttctcatcttgtaattgtacacttggtgttgtaattttagttcaatccgtgtttctttcgaagcctagtgtaagatgatgagtttcagatacaatacatttacaggatatgacatttcatggtttc

SEQ ID NO: 6593 - DNA, 694 bp, Oryza sativa
  ref <308>: DATABASE ACCESSION NUMBER: AK063742
  ref <309>: DATABASE ENTRY DATE: 2001-12-06
ccaaatccactcacctcctccaccgttcgtccccttctcgcgccaccaccgcctgccgccgagagctctctcagccgtcgccatggccaccgctaccaacggcaacgcctccgccgccgccgccgccgctgactccgccgtccaggagcccccgcacaagatcgccaaggttgctcccttgctcaaggtcaagaagctctccgagaacgccgtcctgccgtcccgcggctccgccctcgccgccggctacgacctgtcgagcgcggcggaggtcgtcgtgccggcgagggggaaggcgatggtgccgacggacctcagcatcgccatcccggagggcacctacgcgcgcgtcgcgccgaggtctgggctggcgttgaagcactcgatcgacgtaggcgccggggtgatcgacgccgactaccgtggcccggtaggggtcatcctcttcaaccactccgacaccgacttcgccgtgaagcccggcgaccggatcgcgcagatgatcatcgaggtgatcgtgacgccggaggtcgccgaggtggaggacctcgacgccaccgtcaggggagttcatttggtctgtgatggatggatgggtgatgtcgtgatgaaacacttgtatcctcttaatgcctcggatgcttttgtggtgtcgaatggaatcatctagcctaatgaatctaatgaaattcgt

SEQ ID NO: 6594 - DNA, 726 bp, Oryza sativa
  ref <308>: DATABASE ACCESSION NUMBER: AK063743
  ref <309>: DATABASE ENTRY DATE: 2001-12-06
acactccaatccatcctccctctccaccctccaggctccagctatgtccgcctcgcccgagttctacaggccctcgccgccggccttctcgccctcctgcgccgccggtaccagtaccacggaggtcgacgagtacagctgctgccggacgccaacgccgggaatcagggagccagccacctgcccgccggcgccccggaagcccaggccggtggcctgcaggaagctcctcttcgacccagctcagcagcaggggaaggggaaggccatcagcctgcgtctcgacgagctggagcgcctcttccgccccatcaccaataatgccaaccttcacctccaaaccaacaagcccacccatacctgacctcactgcacttcaacttcattcatccgagtgcatactagtactattatatactaaatgcttcttcttcttcttctttggataatcaatctcttttcgctttaatttcctcttactactaggattagtagtagtaggattttagtctaggagtaatcgttaccgccacgagctgcagtgttgtatttgtatgtatgtatgtatcagcaatcaagccaagcttcacgtaagatcgagcagtgatttcagtcagtatgtatgctcaaaatgatttagttgtacaatgaatcaaaagcttaatttgcttacacttatgtagtatactcctgtctaatgataaaattattactattaattggact

SEQ ID NO: 6595 - DNA, 977 bp, Oryza sativa
  ref <308>: DATABASE ACCESSION NUMBER: AK063744
  ref <309>: DATABASE ENTRY DATE: 2001-12-06
aatggattccccaactccgatgcttctagaaccttccgagcctcgcgcgcgccgccgccgccgcggccatggtgctggcctccgacgagttcggctggtcgatctcgttcaccatcctcgaggaggaggaagaaggagtagaagacgcgtcacgcgactgtgggggctcgactcgacgcgcagaaggcgggccaatgtcgccgccggcgaggccgtggcggcgcgcatcctccgcgcctacctcgacaccaagggagatggtccagttcccctgacggcgaagccaccattacaaatgctggagcaatgatgctggacagctggaggcctggagcaaatggatgttgataaccagattgctaagctgatggtggagctctcccgcatcaagattgtgaaattggggatggtaccactgcgatggtggtcatgtttggatcacttctagaccaagctgagaaactgttagaatatggtattcttccaattaggatttctgaaggttatgagatggcgtcaaggatagtttttgattatctcgaacacatctcccaaaagttttagttcagtgctacaaatatagaacctgtttttttgtacaaacctgtacgataattgacaaccctaaccccatcattatcttcatatgctttgtttgttcaagtttttattttgggtactttcaccccatcattggtgaatctaaccaagacaccttgtgctagctgttagcagaatttatctgtaggtggtttgaacattctgcattgattttgcaggaaacgaaatgattattgaggagaccaagtgaagtattcatgatgctctgtgtggctaggaatctgattcgcaagaactctattgtttatggtggtggctcagctcagatatcatgctcaatctattattttattaaaggaatagaaaaaggagtctccacgttcgctctcatggcctagaaattctcacattaatcg

SEQ ID NO: 6596 - DNA, 683 bp, Oryza sativa
  ref <308>: DATABASE ACCESSION NUMBER: AK063745
  ref <309>: DATABASE ENTRY DATE: 2001-12-06
cgaccccaggtcaggcgggactacccgctgagtttaagcatataaataagcggaagaggtcgaggtagtggagagcgccggcgacgagggcccgtacgagacggggcctgtgcagccgggtggacgcggtggcggacggggttcctggccgccgatggcgctggcctcggcatcctccaccggccgcccgtcgacttgcgtccacaccaccggctccagcaaggacgtcgaggcggcgaggccagcgccctggcggattgcaggacgcgcggcatggagacgacgaacgggagctcgtccccccggacgacggccgtggtccggaggaggagccggcgaacgaacggcgtggatctgaaggtggtgaggtcggcggcggcaggcgacggggtccctcagatacgatctgaggatgtggcgcggtgaagaggtggccgtccgcccggagcgccggtggcggtggagcagatcggatcggaggtggtggtggtggccggcgccgccgatgatccagatccgggagggctggcggtcaggtgcgacgggatcggggatgccagtgaagaggaccagtagccagcggagggcgcccatcatcgacgcgagatctgatccgaggaggacgacggaggtggaggacgatgtgctgcttgctgcttgacgaagaacgacgatgacgacgc

SEQ ID NO: 6597 - DNA, 1752 bp, Oryza sativa
  ref <308>: DATABASE ACCESSION NUMBER: AK063746
  ref <309>: DATABASE ENTRY DATE: 2001-12-06
agtgcatcacgcagtcgtaacgtagcatatctcccataatacaggtaccgaaggagcatcttcataaaaaaggtttcaggttcaagatggatcagcatgcacggtaggattttccttagctgcttttcattttcatgtttaagcagagctatagctttactaaggaagaaatcgagaacataaccggggctatctgggttgaagattttatacgcagagaaagactcggccactttatcatcatctgtggtgattatgatggcactaccagcagaacaatcatctgggaaggcaagctttatatgactccagattgattcatcacggacatcgtgaagaacaatgaggaagattttacctcgcaaatagcagcgcagcttttccaccagctgctcctcgttccagccaatcatctcactcctgaacttgttcagagggagaacaagttgacatagtatatctttgagaatctgaagatgagattgacaatcacggacagtgatccaagccttgcagtcaaacaggctggtgacagaggagtgctggtagactctctcagcaataatcgcacttgtatccacgcagattccgaccacagtgttcttcaggtcggccggtggttcagcagaagccaaataacgcctccaagcagcttcatcttcctgttcaccgccgttgtcctgctcaggtggacggtagctgttgaggttggcacaaatgtcatacgccttccgccggtggctcacctcgcccagccggaccttgatgtcttggatctgcacggccagcctgtggcgttcggggaggctccggacaagccgggacacccggcggaggcggccgaggaggaggctcttggaggatggcccagctgcgatgcactgcgcgtactgctcgacgcagtcctggcagtcgcgggcgagctccatcgcctgcctgatccatggcgtgcattggttgtggtagtggtggtcgagggtgccggcctgctggtgcaggaggagcaggaggaaggcgtccatcatctccatctcgtccttgatgaactgcatgtcgcggcggacgcggccaagcagctgtgcctcgttgacgagcatggtgctgatgcggcccagcagcgacctcacggcgcccttggccgagctgaccacgagctccgccattgcaggcgcctggtggccacaaagcttgatttgctggttggttttcagactctcagtgcgtggtgatcattccaagcaagctaagggagtgaagctaagtaggagtgactagctagctacctgcatgtggagtggcttgcattcgtcgtatggctgcatggaacagctgacccatcttccgttgaccattattgtggattagttttaacatggaacgcgtggttgactttctccaaatattactacgcgtattcgtgtcgtcctagaagggagagatgctgtagcctctacattaatggtgagtcaagaggattcagttgtgttgatcaacctgttcaaatattctgtagcaccacatcttgatgagctgttaaaaatattctgaagctctgaatcttgatcgaactgatcttccactatgcttcatgccagggtgatttctatttacttcttgtctatcataacagatcagcaagtctagtgctggaactcatcatgttatccctacacattctttaatcttgttcttgttgaagtgtaagcctggaattcaagaagcaaatatgtaactgtccagagaatttttgtc

SEQ ID NO: 6598 - DNA, 667 bp, Oryza sativa
  ref <308>: DATABASE ACCESSION NUMBER: AK063747
  ref <309>: DATABASE ENTRY DATE: 2001-12-06
tgtgaaactgcgaatggctcattaaatcagttatagtttgtttgatggtacgatcaactcatcaacccgtgcagcaatccatccatccatagccgatctcagcttttccattcgcatttctgcttaattagcttagcaagcaacgaattaactgcaagagagagcgatgccgtcgctgacgacggggaggtcgccgtggcggaggaggaagagggggacggcgacgacggcgaggaggaggaggacgccgacgtcgctccgggcgctgtggcgccggatagtgcccaggacgtcgacgacgacggcgccgcgcgtgcgcacgaggaagcccgggctgctgtcgcgcgcgttacgggtgctctcctgcggcggcgggaggaggtcgcgcgccgcacggcggtcgtgatcatgatatcatcgtcgccggcgccggcgaggttaactgctcctctagtcgcttgcgatactacgtggagtacgtgagactagtggtgactgtgccgtgtgtgtataatttactgcagtaacaagtgtgttctgtgttctgctttgctttaccgggagcaattacgtgttgtatgttgtacactactatcttcttgtttaatatgtgtatgttgtactatttcatcaagtgacaactatatgaaaccagtttgttttctct

SEQ ID NO: 6599 - DNA, 647 bp, Oryza sativa
  ref <308>: DATABASE ACCESSION NUMBER: AK063748
  ref <309>: DATABASE ENTRY DATE: 2001-12-06
ctcattttcctctctctctctcaccttctcctctcctccaggcgcatggcgccgacacctcctctcctccgggcggctctcgatggaggggtcgacggcggctggcgggcacggcgggctcgcgggaggacgtggggaggcagccgggagcaacgtgcgtgcggccgacgacgacgaggacggcgaggcggcggccgggagcagtgtgcacgtggctaacgacgatgacgacggcagcgaggcggcggccgtgagcagcatgcacgcggccgataatgacgacgaggcggtagccggaagtggcgtgcgcatgacgacgacgacggcggcaaggaggcggtcgggagcgggctgacgatgtgtgccgggagtgggaggaggcggcggtcagcagcgtgcacgcggccgatgacgacgacgacggccaggcagcggccgggatcggtgccgccctccccacgcccgaatccggcggcggtggcagtctcccacccggatccagcgacggtggggtgccggatctggatccatggttagggtttgtgttttttgaaaatttattttttttcggtttttgttttcccgtgcaggcggcataatttttgcgtgcggttgcgccaccagcacaagaaaatcgcgattttctc

SEQ ID NO: 6600 - DNA, 849 bp, Oryza sativa
  ref <308>: DATABASE ACCESSION NUMBER: AK063749
  ref <309>: DATABASE ENTRY DATE: 2001-12-06
acacaacaagtcgattcgatccatcccggaggatcctccgccgccgccgttccggagcgccgccgccgccgccgtcgtaccggagatcttcataagcctacggcatggcaaccactctgaaagatgcagttgcacggaagcctgtgttggcaacaatccgccttatcgttccagctggtgccgcccgccctgcgccaccagttggtccagcgctaggtttctacaggctgaacctgatggcgttctgcaaggatttcaatgccaggactcagaagtataaggcagaaactcctatgcaggttaccttaactgcctacaaggacagcacattcgagtttgtagtcaagtcaccatctgtctcatggttcctcaagaaggccgccgggattgagacagccagcggccgtccagggcacactgtagtgtcatccctttcacttcgccatgtctacgagatcgcgaaattgaagcaatctgatccctactgcaagcacatgtcactcgaggcgctgtgcaagtcaatcattggcacagccaactccatgggcattgagattgttaaagatctatgagctgcttggccccatctttgtcatgaggggagttggtgagttgcttaatgattttgtgtattactaatttttagttggggaagtaaattgtgtcctggtttattgagcagagatcttgagagttccatgcctctgaaattgccttcagcacagctttttttctctctgcaattctgatctgaaacatgtagttcccacaaatcgttctcaccgatgtcaatttgttcaatgtggtgatggtacaatgaaaataatagatttctctgatgatggactc

SEQ ID NO: 6601 - DNA, 1344 bp, Oryza sativa
  ref <308>: DATABASE ACCESSION NUMBER: AK063750
  ref <309>: DATABASE ENTRY DATE: 2001-12-06
aactaacgctaaaaaagtaacagtttctgtactttattggaacccagctcagctcggctcagcttcttttggcaccgttgtaatccagaagaaagcccccccaaacaaacaaacgcaccgcgatgccgtccaccactcatgctgttgccctgccttacccagttgcaatgcggctccttgagttcatgccgaatagccccaccacaacgggttgtcggtctgagccttctccggtgacttccttgctgaaagcatcgcccgagctgcaagaaacggtcgctgtgggcctggcgttgggttttgtgcggcgcgttcgcttgtacgcggagcagcgtcgtcgggcggagctgggacgccaagtcgagtgggcagagctggcgtgtgaccctctgacagcgcaggtgactgcactctgctgctatccccaacaactgatgcaggacggcggtcgcccattacggtccttgctgctcgacgcgctgttgccatcgccaggcttcaccaagctcgtcctgagtgcccagggagcggattcgtgggtattagcgctgttgaaaccctcccagagcgcctcgcccattcttcaagcgaaaaacgcagaagacgagccgagctgtcttttcgtggggtcgaatgatcgtgatcgcacgctggtgctatgggcagctcgagcgccttgcggcgccgaagttctccgcttcgcggccgaggaaggccgcaccgacttcctccgcgattttttacactggtgttcgtcagtcacctccggcacccaactcgagcaatttgcacactacgccgttgtacacggacacattgacgtgttacgcctccttcgccaaagtgccgtctcgtggacccttgccttccaaaccaacggacgcacttgccttcaccacgccgccgcaaatggccaggcagaatctgtgcagtttctgcttgactgctcgtggaatgcaagcgctggcgatgcggctggtgtgaccgctgcccatctcgctgcggaggcgggacacgtggagtgcctgcggttgctgcacaaacgcgtcggcgatcgcattttcgacgttcgaaacaagcgcggcgagacgtgcttgcacgttgtggcggcgaaggggcacctgcctgcgctgcgagcagcattcccgacatcgcacgctttagcgagctttgcggcgctcgaaaactgcggcgcgccagcagcgccttgatcgcgggaggatcccctccaatacatttcgatctggtatttcccccgcgagtaacatcctccctcagtgcagtgccggcgctgctctcaccccctttgcctcagggacgcgacaagttcttcgcgcaggaaag

SEQ ID NO: 6602 - DNA, 530 bp, Oryza sativa
  ref <308>: DATABASE ACCESSION NUMBER: AK063751
  ref <309>: DATABASE ENTRY DATE: 2001-12-06
aaatccaatcgatccatctctgcacagctgctctccctcatcatcaacaccttctactccaacaaggagatcttcctccgcgagctcatctccaactcttctgatgcgcttgacaagatccgcttcgagagcctcacctccggcttcagcctcgacgacccaaacaccttcgccgccaggatccaccgcatgctcaagctcggcctcaacatcgacgacgacgacgccgccgcggccgacgacgacgctgacatgcccgcgctcgatgacgccgccgccgaggagagcaagatggaggaggtggactgaattaaataagtactcgctgccatgtcgaaatgcatcatggtgccatggttgggtgtgtctgcgctgcacttcaacagtgtgtggtcgtgtttgcgtcgtgtcgccagtgttagacatgagtcttacgtaagtatatgtcgccagtgttagtatgttgcatttgcgttactcatgcgtacatctttctaagccatcgttgagaaagtagtagtatcagtatt

SEQ ID NO: 6603 - DNA, 750 bp, Oryza sativa
  ref <308>: DATABASE ACCESSION NUMBER: AK063752
  ref <309>: DATABASE ENTRY DATE: 2001-12-06
atggcttctcccctcccgccgccgccgcctcgcttcgccgcaggagtttgcaaagatggtggtgccgttgctgacgaagaagatcgtgaagaagcgggtgaagcagttcaagaggccgcacagcgaccgctacattggcctcaagacaagctggcgcaggccaaagggtattgactctcgtgtcaggagaaagttcaaaggatgcaccttgatgcccaacattggatatggttctgacaagaagacaaggcactaccttcccaacaagttcaagaagtttgtggtgcacaatgtctctgagctggagctgcttatgatgcacaacaggacatactgcgctgagattgctcacaacgtctccacccgcaagcgcaaggagatcgtcgagcgcgctgcgcagctggacatcgtggtcaccaacaagcttgccaggctccgcagccaggaggacgagtgaaattttctgcagtttttcgtgcttatggctgcattgttcgtagggcagtgccttggtaccttaaaattatccattttgtgttgctgttagatttgcccgtatggacatcattttgctgtgagtgacctgtctagttttagcaacaatgagataaaaagactttcagcttttcatcatcataaacttatgtggtttctcttgagcgctccaagttttctagatcctggaaacacttgttagttattattgccctctatgagaatacaactaaatcaatccattattatagcatc

SEQ ID NO: 6604 - DNA, 1415 bp, Oryza sativa
  ref <308>: DATABASE ACCESSION NUMBER: AK063753
  ref <309>: DATABASE ENTRY DATE: 2001-12-06
agcagccgccaccgccgccggaatccgagacctctcgccgtcccgccacgcgcgcgcgcgagcgagcaaagagagagagagaaatggccaccgctgccgccgcctcgctgcagtacgcgctgcacggcgccgcctccgcctccgccaagcccagatccgccgcgccaggcaggagcgtgcgcgtggtcgcggcgaggaggtcggtgcgggcgcgcggaggggcggtggtagcgcgcgccgcggttacagcgagtgcggatgcgacggcggaatccaagtccggcggtcatgaggtcctgttgtttgaggcccttcgagaagcattgatagaagagatgaaagaagatcctacagtttgtgtatttggtgaagatgttggtcactatggaggttcatataaggtgaccaagggcttggctgagatgtttggagaccttcgggttcttgatacccctattgctgagaattctttcgctggcatgggagttggagcagcaatgaaggggctaaggccaattgttgaaggcatgaacatgggtttccttctccttgcttacaatcagatctcaaacaattgtggtatgcttcattatacctcaggtggccagttcaagatcccgattgtgattcgaggccctggtggtgttggtcgccagcttggtgctgagcattcacaacgtctcgaatcgtacttccagtccattcctggacttcaaatggttgcttgctctactccttacaatgctaagggcctgatgaaggctgccataaggagtgagaaccctgtggtgctgttcgagcatgtccttctgtacaacctgaaggagaagatccctgatgaggaatacatttgctgcttggaggaggccgagatggtacgtccaggtgagcatgtgaccatcctcacgtactctcgcatgaggtaccatgtgatgcaggcagccaagacactggtgaacaaagggtacgatccggaggtcattgatatcaggtcgctgaaaccattcgatctgcacacgatagggaactccattaagaagacccaccgcgttctgattgtggaggagtgcatgcgaacgggtggtatcggcgccagcctgaggtcggccatcattgataacttctgggactaccttgatgcccccatcatgtgcttgtcatcacaggatgtaccgacgccatatgctgcaactctggaggacgcaaccgtcgtgcagcctgcccaaattgtggccgctgtcgagcagatctgccaataattcaattcttaatgacattgttgaacatcatgatttgtggattcagaaccactgtcctttgttcgtcttgtcacgtagtgacctccattgtggcgtagacactgtattctatttccccaacactaaggttatacccttacccatgcattattggtc

SEQ ID NO: 6605 - DNA, 577 bp, Oryza sativa
  ref <308>: DATABASE ACCESSION NUMBER: AK063754
  ref <309>: DATABASE ENTRY DATE: 2001-12-06
gggcatgctgttggtcatgcaagcaggatgcatccttctctttcttgcaatgcagggatgcagaccggtttggatgtatctaaagaggaagtgacacaggctggcaaactattgatcgctggtgatgtgccaatggggttagattatgaccctcagaatggattaggagcaacaaatggagaaaatgattttgaatcaggacttccagaatttgatcctgttaagcatcacaacagttactgcccatgggtaaatggaactgtggcagcagcttgctgtagcaacactgaatcaagctcaagtagttcaccactttctggctggcaattaacagttgatgcacttgacacattccaatctcttggtcaagctcaaaatcatgctatgcgatctgattccgcagcctcgttatatatggatgatcatgtaactcctaaccacaagctcgccagaagggcatcagtgagcagaagccatgggaaatgctgatttgaggcccttccacgcatgctagcctttactaatcacccaagtttgcagcaatactataccagtaatttcacagcttatccgaatc

SEQ ID NO: 6606 - DNA, 1744 bp, Oryza sativa
  ref <308>: DATABASE ACCESSION NUMBER: AK063755
  ref <309>: DATABASE ENTRY DATE: 2001-12-06
ctgctctagcgtgggcggagaacacgaggcgtggccgcgtcgtcgtcggaggagggagcagagatggacggccgcaaggatgtcgggatcctcgccatggatatctacttcccgcccacctgcgtcctccaggaatcgctcgaggctcatgacggcgccagcaaagggaagtacaccattggtctcggccaagattgcatggccttctgcagtgaggtggaggatgtcatctcgatgagcatgacagttgtcacatccctgctgaaaaaatacaaggtcgatccaaagctgattggtcgattggaggttggcagtgagacagtcatagacaagagcaaatccatcaagacttggctgatgcagattttcgaggaatgcggtaatactgacattgaaggagttgattccagtaacgcgtgttatggtgggacagcagcgctgttgaattgtgtgaactgggttgagagtaactcctgggatggacgctatggccttgttgtttgcacggacagcgcggtttatgcggaaggcccagctcgtccgacaggtggtgctgctgctattgcaatgctcattggtcctaatgctcctattgcattcgagagcaaatacaaagcttctcacatggctcacgtctatgatttctataagcctgatcttgcaagtgaatatccggtcgttgatggaaaactatcccaaacatgctacttgatggcgctagactcatgctacagacagttttgtaagaagtatgaaaagctggcggggaaacaattctcaatttctgatgcagattactttgttttccattctccatacaacaagcttgtgcagaagagttttgctcggctttactataatgatttcacgcgcgactgcagctctgttgacaatgatgctaaagagaagctccagcctttctcaaatttgactggcgaggagagctaccaaagtcgtgacttggaaaaggcttcacaacaagtagcaaagcccttgtatgacatcaaagttcaaccatcaactttgcttccaaaacaaattggtaacatgtacacagcatctctttatgctgcgttggcgtctgtactctataacaagcatgctagtctggatgaccaacgaattgttatgttctcgtacggcagtggcttgacatccactatgttttcgttgaaacttaacaatggccaggaccccttcagtttatcaaacattgcttcagtgcttaatgccacggagaagcttgagtcaagacatatgaccttgcccgagaaatttgtggagacgctgaagctgatggagcaccgatacggcgcaaaagatttcgagacgtgcaaagacacgagcttgttgcctcctgggacgttctacctcaccagggttgactccatgtaccgaagattctatgagaggaaggccgacgaggagatcgctgcagccaaagccaagtacagtaatggacatgccaccaatggccatgccaatggccactagtggcacgcatggcatgatggctgctgctgatattgatttctggtttgataagttcatgattaggtgtttccagcctagtgtagtagtttctcaaataagtgttctccacacctgttatccatatctcctctaatttttttgtattgaatcagacagactagtgagacatttctgtagtatcaatcattcttgtttcttctagcttgtgtttctgctgtcacttgaagttattactatggactagtttagc

SEQ ID NO: 6607 - DNA, 1617 bp, Oryza sativa
  ref <308>: DATABASE ACCESSION NUMBER: AK063756
  ref <309>: DATABASE ENTRY DATE: 2001-12-06
tttgcaaactacaagaatcttgactatgagaagacaggaaagggatccatgaagcttcagctaatcaatcagagggaggatttttcatttgcattgttttctggaggcctctcaaatccaaagctcattgcacactcaaagagagtaaccttcacgaacccaaaggcccctgtgtacccacgcctagcgcaaggaaaatcctggaatgaaatgacagtgacttggacaagtggatatggcaccaatgaggctacaccatttgtcaaatggggcctacaagggcaaatccaaagcctttctcctgcaggcacccttacgttcagtcgcagcactatgtgcggtcctcctgctaggacagttggatggcgcgatcctggtttcatacatacaagtttcctcaaggatctgtggcctaatttcaagtatacatacagaattgggcatcggctatcagatggctctattatttggggacatgagtatagcttccaagcacctccttatccaggggaagactctttgcagcgtgtagtcatttttggagatatggggaaggctgaggccgatggttcaaatgagttcaatgacttcgagcctggttcactgaacacgacctaccagctaattaaagatttgaagaatattgatatggtaatacatattggggacatctgctatgccaatggttatctgtcacaatgggatcaatttaccgcacaagttgaacccattgcatccagtgtgccttacatggttggaagcggcaaccatgaaagagattggcctggatcaggttccttctatgggaatttggattcaggtggtgaatgcggtgtaccagctcagaatatgttctacgtgccagcagagaaccgtgagcaattctggtactcgatagactacggcatgttccgtttctgcatagccaacaccgagctcgactggaggccaggcaccgagcagtacaagttcatcgagcactgcttctcctccgtcgaccggcagaaacagccgtggctcatcttcctcgcccaccgtgttctcggctactcatcagctagcttctacgtcgaggagggcacaaccgaggagcccatgggcagggagagcctccagccgctctggcagaagtacaaggtcgacatcgccatgtacggccatgtccatggctacgagagaacctgcccagtctacgagaatgtgtgcgtggcgaaggcggcgagccactacagcggcgcgttcacggcgacgacgcacgtggtggtgggcggcggcggggcgagcctggcggactacgccggcgtacgggcgcggtggagccacgtccaggaccgggactacgggttcgccaagctgacggccttcaaccacacggcgctgctgttcgagtacgtccggagccgcgacggcagcgtgcacgacagcttcaccgtctcccgcgactaccgcgacatcctcgcctgcggcgtcgacaactgccccaccaccaccctggcctcgtgaggatctcgccgaagctcaggttgcttactgctgctgtgccgtaagccaatttgtacattgtgacattgagaatttgggatgcttggcttatcaatccaatttgatctgagactg

SEQ ID NO: 6608 - DNA, 495 bp, Oryza sativa
  ref <308>: DATABASE ACCESSION NUMBER: AK063757
  ref <309>: DATABASE ENTRY DATE: 2001-12-06
gagatatgcaaaggtgcagatggatgtttatgggcaggccacctttggatggtcctattggactctcaagaatgttaacaaccactggaatctagagtggatgatcaacaatggctacatctccttgaaaacctaacaactgacatgcctctagctgccattgttacgaggtaatctcgatgtctggaggatgttgcttatctctcttagattttacttctggttaaaaatgtcttgaaaggagccgtattcatgttgagttttcaagttgaactgctgcatggaagttctccgtagttttgatgtcgaatgtatgcaccacttatattaaattatgtcatatgaagtcagagttggaacttgtaagcttgatttgtcatgtttcacaacatctcgtatcatcgtatcaggtgaagtttcttctaagtggaaagctgtaacatcctgaaaattaactattttctaattatgcattatgccgattcttatgttttc

SEQ ID NO: 6609 - DNA, 775 bp, Oryza sativa
  ref <308>: DATABASE ACCESSION NUMBER: AK063758
  ref <309>: DATABASE ENTRY DATE: 2001-12-06
aaaaaatcagttatggttttgatgctaatgatctccgccagtgtctctggagcctttctggtgttacaaacttggagttcaattatgagggtacagagctgacattcgaaaacaatttgcaatggtgcccagaattcatcgatgttgtcaacctgactcttggtcagtggtgcctggatgcaaacttctatgcactaattgtcttccttcagaactcaccgagactagagaagttaactctgaatcttgcgaagtgcattgcagataaatctccaagaattgttggcgagcttatggaaagatcatttacgtgtgagcaccttaagattgttgaagtcaaatgcttggaggatgatccccaggtcatcagtgtggaagatttctttgctagtaatggcatggcctctgttcagtttgatatcaaacactggggccaatacaaggacgagttacctgcatttattcggtatgaggagagatgaaatgccaaaggatcatgcatttgtttgtcatcccattgaagaatcaactcgctttctgctacattcactggttacagtagagttttaaggtctcctgcatttttgctggtctctaggaatggcatccaataacttgctagttttcaactgaacaaatcgagtaatgtgtcattctactcctaatctctggttacattagcagttgttcaaccaagaacctatttatcccttgtacaacagaatttctttccattcatcaactatttttgtcgagtctcttcagtttcgttttc

SEQ ID NO: 6610 - DNA, 1942 bp, Oryza sativa
  ref <308>: DATABASE ACCESSION NUMBER: AK063759
  ref <309>: DATABASE ENTRY DATE: 2001-12-06
ttgaaactagttcaatgctcatatcgtttatccttcttggaaagtaccttgagatcttggcaaaagggaagacctctgaggctattgccaagcttatggatcttgcaccagaaactgcaactatgttgatatatgatcatgaagggaatgttgtgggcgagaaggaaattgacagtaggttgattcagaaaaatgatgtgatcaaagtagtcccaggtgggaaagttgcttctgatggctttgttatatggggacagagccatgtgaatgaaagcatgatcaccggagaatcacgacctgtggcaaagaggaagggtgacactgtcataggagggacggtgaatgagaatggtgtgcttcatgtccgtgcaacatttgttggatcagagagtgcccttgcacagattgtacggctagtagagtcagcgcaaatggcaaaagctcctgtacaaaagtttgctgatcagatatctagagtctttgttcccctggtcatcattctttctttgcttacttggcttgcttggttcttagctgggaggcttcatggttaccctaactcatggataccatcttccatggatagctttcaactagctctccaattcgggatatcagttatggttattgcatgcccttgcgccttagggcttgcaactccaacagctgtgatggttgctactggagttggtgcctcacaaggagttcttatcaagggtgggcaagctctggagagtgcacagaaggtcgactgcatcgttttcgacaagacagggacactaaccattgggaagcctgttgtggtcaacacaagactgttaaaaaacatggtcttgcgtgaattctatgcttacgttgcagcagcagaggtcaacagtgagcacccactgggtaaggcagtcgtggagcatgccaagaagttccattcggaagagagccatgtctggactgaagcaagggatttcatttcagtgacagggcacggtgtcaaggcaaaaataagtggcagggctgttatggtgggaaacaagagctttatgttgacttcaggcattgatatcccggtgaaagctttggaaatcctaacggaagaagaggagaaggcccaaacagcgatcattgtggctatggatcaagaagtcgtgggcattatctctgtatctgatccaataaaaccaaatgcccgcgaagtgatttcgtatctcaaatctatgaaggtggagagtataatggtgactggggacaactgggggactgccaatgccattagcaaagaggttggcattgagaacacagttgcagaagcgaaaccagagcagaaagctgagaaggtgaaagaacttcagtcggccggaaggaccgtggcaatggttggtgatggaatcaacgattctccagcgcttgtatcagccgacgttggcctggcgattggcgcaggcactgacgtcgccattgaagcggccgacatcgtcctcatgaagagcaacctggaagacgtgatcaccgccatcgatctgtccagaaaaaccttcttccgcatacggatgaactacgtctgggcgctcggctacaacatcatcggcataccgatcgctgccggggtgctcttcccgtcgacccggttccgcttgccgccatgggtcgccggcgctgcgatggctgcttcctccgttagcgtcgtctgctggtccctgctgttgaggtactacaagagcccaaaactgggccgttgatcatgcagtacacacgcatagcatttgcttagaataagaggtgtagatatctgttgacaatgtgctaatgtggttctaaaagaaatgtgctagtgtgtgttgtgtggcacctgaaatgtgtacattacctacgtatatatgcaccgtgtgtttacaagtgttaaatatggagcactttgccaacactagcaggtgatacgttgtagtgc

SEQ ID NO: 6611 - DNA, 1532 bp, Oryza sativa
  ref <308>: DATABASE ACCESSION NUMBER: AK063760
  ref <309>: DATABASE ENTRY DATE: 2001-12-06
atgtcgcattccaggtctttgcctgtgaagcctccgcggccaggagattcgcagcaacggcaaaagcattctagtcaggctgaaggagtaaaagattccagtaggttggcatcttcccgagacaagaaaaccaaaaaggagaagtcaattgatgacgcgctaactccagaacaaccagccaaagttcacagggaaccatcttcagatcctgtccggaagagtaggaggattgctaagaaatccatcttggacagtgaattagatgaggactatgatacaaatgttcttgatgattttggaacttctgaaggtgtggaagtccatactcgtgagcctgcaaaaaaaacaggaagtagctctaagaagaatgctgcaaagaaagctaaaactaagagcacatcatacgagatcgataatgattttgttacctccagatcaaaaagggatggcaataaaaggtctagggaatctactgatgctgataatagtgaagaggaacctacatctgacagtgagcttgatgcacaaaacaggaagcagaaagcagtcactgaatcacctgctaatgtaagaagcgagcctctgacaacacgtcgccgtgcccttcaatcatggatggatggaaacagcaacagtgctattgagttccctgatggtttgccaccagctccttcaagaggcaagaaggataagctttctgatgcggaaatgcttgccaagaaggcagaggctgctcagcggcgcaagatgcaagtcgagaaggctactaaagaaagcgaggctgaagctataaggaaaattttgggcctggattctgggaagaagaaagaagaaagaaagcaaaaggagcgagaagataaggagagagcagccagagcacaaactattcctgaaaacaccatcaggtgggtcatgggcccaaagggcaccgtggtttcattcccggaagaagtaggccttcccagcatcttcaactccaagccttgcaactaccctcccccgcgagagaaatgtgccggaccatcatgcacgaacgcataccggtatagggactccaagctgaatctccccctctgcagcctgaaatgctacaaagccgtcaatggcaacgcttgattgacgggacgctcgggccgtgcctatttcccggtttcgcaatcaactctgatctataatgttccctcaagaaagcattctcgtctatatactggtggaaataagataggatgatcatcagccgcggagatgcacatttttggttgagttgatagaaagatacagctgtccaataagtgcatatacatgtgtatcatgtatgcatatttacatacatatagatttgtcaacctgttttcagggcttgtgagcagatgtactgctgctgccctctgatacctgtattgcagatagtagacatatacacatatgaaggagcagaaatgtagaataagttgttgtaccaaagttccttgtgtttgttcacttcttcattcagtttatgcacacactcggccatcatgtcgtttgtgtag

SEQ ID NO: 6612 - DNA, 1716 bp, Oryza sativa
  ref <308>: DATABASE ACCESSION NUMBER: AK063761
  ref <309>: DATABASE ENTRY DATE: 2001-12-06
ccaaacccaaacccatccatcaccgcatctcatcgtctccgtctccgtctccggcgatggccaccaagccccgccgccgctccccgtcgctctcctcctcctcctcaacatcctactcgcgctcccccgcatcgccctcctcctccccgtcgcgcagccgctcccctccccgccccgcggggggggcccgctcgccttcgccgccgccgccaccgcctcctcccaggaaagcgtctccgccccctgagtccaccgtcctccatgttgaccatctctccaggaacgtcaatgaggatcatctcaaggagatttttgaaaattatggtgaagtcgtcaatgtggagctctccatggatagggtggtcaatcttccccgtgggtatggatatgttgagttcaagaatagagctgatgcagagaaggctcttctttacttggatggtggccaaattgatggaaatgttgttaaagtcagattcgcgcttccaccacagcagcaaagagctgctgcttctccaaaagctcttcacccttcaccaaaaagggatgtggttgatcataataaagttggtcctagtgctgaaaaggccaccaaacagcagcccaggaaaccagcatctcctcaaagaaagccagctccatctccaagaaggcgatctcctccaagtcgaagagttgaatcacctaggtgtaggcctgattctcctccaattcgccgtcgaacagctccttctccaatcaggcatggtggaactcctagcaggagaccaggatccccaatcagaaggcgctcaccctctccgccccctcgaagactaagatcaccaaggcacctatcaccaagaagagatcggggcagtccaatccgcaggcgctccccattgcctcgtagaaggctgactcctccaaggaggatgtggagtcctcccagaagaccacagtcacttcgccatcgcagtagatctcccattcaccgaccaattcgctccccttccagatcgatttctccacgcaggggtcggggtcctcctgtgcgccgtggacggtcatcctcatcgtattctgattcacctactcctccaagaaggggaccaagaagggtgctcagaagtcgcagtcctagaaggcctttaagaggaagaagtgcctctagctacagccgtagtagcagcagctcaggttcccctatccgcaattaaaactcttggcatggcatggcatggaatggaatggtgtggtgatcctggtaggtaaatctttccgtctcgtccctttttatcgctgattttgtgtctttttgtctttgctgctgctgtttttgttgtcaagctttggttcttcgtgtgagtttggggctttgcgcgatggtgcatgcgttccctacgatcaagctggcactggaacatttagatattgctggaagttaaacattttcaagcttcttggaggctctgtctgaactctggatttctcctcttggagggagcgatgacttatgcatgtcaatgctgcagtaaataaagtggagtacattagtattctgtagtagcctattaaagcacagatttctgtgggttgggaatccaggagcaccaacatttactggtgaaattgaattcaccactcacttgtcgaacctgaaggcaagattgacttgacaatttctctttgtaatggttatgttttgttatctacgtggagttattttggacatct

SEQ ID NO: 6613 - DNA, 1484 bp, Oryza sativa
  ref <308>: DATABASE ACCESSION NUMBER: AK063762
  ref <309>: DATABASE ENTRY DATE: 2001-12-06
tgaatgtttttatttgctttcttctagaattgattcggtgattttggatgaactgtggatgaattgattcggtgatttttggatgaactggatgtattgagtggattggatggggaatgggtgggaactagattgggaactggaagtgctgccctttttttagcgctcgaagctatttttgcaggcggacctattgcgcgcttgcgaaaatcaactattttcgtaggcgttgaggtgcaggcgtatggcttgtccgcctgcgaaaatatgattctgccgactgggaaaagagtttttctagtcgtgagagctcgtaaaaaatatctagtatccaattagtatacccatttgctcagaagattgcgaatttcactgatcaaattccatgctctgcattaattatctaatatttggtgtaggttccaggagggtggatcctcaatgggcagaagcgatggtcggccaacggcagttttgcggatgtattcgtcgttcttgcctgcaataccagtaataatcagattaacgggttcattgtgaatggtgggtccccagggcttaagatcagcaagatcgagaacaagacgtcgctgagggttgtccagaactgtgacattctgctggaggacgtgttcgtccctgacgatgaccgtcttcccggcgccaactctttccaagacctagtgaaggccctctctttctcttgcgtcatcgttgcctggatcagcatcggcattgcagcaggggtttatgatgcatgcttacggtatctgggggagaggaagcagttcggggcgccattagcggcgttccagctgaaccaggagaagctagtgaggatgctgggcaacatccaggcgatgtggctcctcggctggcgtctctgcaagctgcacgattccggcaggatgaccactggccaggccagcctggggaaggcatggatcacaaagcaggcacgggagacggtcgccttgggcagggagttgctcggtggcaacggcatcgtcaccgattttcacgtcggcaaggcattctgcgacatggaatccatatacacgtatgagggcagctacgaagtaaacgtgctcgtcgctgcccgagagatcacgggcatcgccagcattaggccgactagccggctctagttgctgaacatcgtgctgtgcacatatggcacaccaagtaacagctagctagcgcgtataagaaggaacgtccatgcgaccaggcccggtgttaaagcacaaatttctaggctagctagctgtctctgaaggtctgattggaacatctttccaataattttatggtatatgaagttcatctcgtaatatatacttgttggtatacacagtacatccaaccatcaagttaaattaacacttcatagcttttttctgtacacaatatatgtgtcgtggtattgtaacacatatacatatatatataacaggttacgcgtatgattattatctcttatc

SEQ ID NO: 6614 - DNA, 1565 bp, Oryza sativa
  ref <308>: DATABASE ACCESSION NUMBER: AK063763
  ref <309>: DATABASE ENTRY DATE: 2001-12-06
ttgatgcaatggacatcagtggacaagagcaccttgatgtgaaacatgatatattcaagcagagaattgatgtccatggtaatgttattgcaactaagcaagatgcagttggtgggatgaaggtggaacagcccctacagcggcatggcggcaggcttgaacacaatgagacctattgtggctcttgttatggtgcggaagaatctgatgagcagtgttgtaactcgtgtgaagatgttcgagaagcatacaggaaaaaaggttggggtgtatcaaatccagatttgatcgaccagtgcaaaagggaaggcttccttcagagtataaaggatgaagaaggagaaggatgcaatatttatggtttcctggaagttaacaaggttgctggaaatttccactttgctccagggaaaagcttccagaaggcaaatgttcatgtccacgacttgcttccattccaaaaggacagcttcaatgtcagccataaaataaataagttaagttttggacaacgctttcctggtgtggttaatcctcttgacggggcacaatggatgcaacattcatcatatggaatgtaccaatacttcatcaaggttgttcccactgtctacacagacataaatgaacacatcattctttcgaatcagttttctgtgacggaacattttagaagtagtgagagcggtcggatacaggctgttcctggagtatttttcttttacgacctttcgccaattaaggtcacattcacggaacagcatgtgtcatttttgcacttcttaactaatgtttgcgctatagttggaggcgtcttcactgtttctggaatcatagattcatttgtataccatggccagagagcaatcaagaagaagatggaaatcggaaaattcaactgaatattgaatgtagccttcctgttggtactacccacaactcattccattttcaggacttacttttgaagaactattgtcacagtagggggcgaggccgctccaagttcaaaaaacgccagtgaaccaacccactaatatttctcatatgctttctgctctgaaactattgattcccgtgcatagtttataaccaactggtcatcaaagtacaagtgacttggctgcttgcttccagcagaagctacctgtaaaggaaatggttcatctggatatactgccctggggcaaacggagcatttcagagatgctcaattttgtacaccataccaggaaacattttgtgtaagctgcatttttttttcttttgttgtaaatcggtgactccgtgttaatgagctcttgcttctttgtagaacagaaaattttcctgactccgtgttttatacatcatattcttttacttacctgtagctttcacatgctaggtaaaagaatgtgtaattatttcgaggaaaagtttcttttctcccttgctccccgttctctacaaagtttactgtaatcggtagaagtcaatgaccattgtattagatataaagtaaccatgtgacggtgtggatggtatcccataatgaatgcaccatgtcttttgctccgtccgtc

SEQ ID NO: 6615 - DNA, 2110 bp, Oryza sativa
  ref <308>: DATABASE ACCESSION NUMBER: AK063764
  ref <309>: DATABASE ENTRY DATE: 2001-12-06
atatccacctccagtagtcaaagcacacttgcatcaactccttttcgctccactcacttgcactcatagactgactccagcaatggttcttggagcctggttgatgagtccagcctccgtgccatggagcctcctggcgtacggtgtcctgggcctggtgctcctgtggcaggccggccgcctgctgcacagcctgtggtggcggccgcggcgtctggagctggcgctgcgcgcgcagggcctccgcggcacgcgctaccgcttcctcaccggcgacctcggggagcacgggcggctgaacagggaggcctgggcgaggccgctgccgctgcggtgccacgacatcgcgccgcgcgtcgcgccgttcctccacaacgccgtcagggagcacggcagcgcgtgcttcacctggttcggcccgacgccgaaggtgacaatcaccgaccccgacctggccaagggcgtcctgtccaacaagttcggccactttgagaagcccaagttcccgactctgacgaagctgttttcggatagcctcgccaaccacgaaggcgagaagtgggccaagcacaggaggatccttaacccggctttccatctcgagaaactcaaggtacctacccagactatttttactagtagtattagatagatttattttttctgtttttctgcacctctctgcattgggatataatgtacgaatgatactctgcagctcatgcttccggcattttctgcatgctgtgaggagctggtcagtaagtggatggagtcccttggttctgacggctcgtacgaagtggatgtctggccggagatgcagatcctcaccggagatgtcatttctcgcactgcattcggaagtagctatcttgaaggaagaaggatcttccagctgcaggccgagcaaactgagcgtctcctgaaatgcatgcagaagattgtcattcctggttacatgtgagaattcagcacttaatataccgaataatttagtatgagttgagggttagtttggtcatcttctttttgatgattctccctgtttatgattgtgttgggatatattcttcatctcaggtccttgcctactaaaaacaaccggaagatgcatcaaataaagaaagagaccgattcgattttacggggtctagttgacaaaagaatgcaagctatgaaagaaggtgaatgcaccaaagatgatctactgggtttgttgcttgagtcaaacatgagacacacggaagaggatggccaatcaaaccatggattgacaatcgaggaggtcatcgaggagtgcaagttgttctacttcgcgggaatggagacaacgtcagtgctactcacctggactatcctgctcctaagcatgcacccagagtggcaagaccgtgcaagggaagagatccttggactattcgggaaaaacaaacctgaatacgaaggcctgagccgcctgaaaatcgtgagtatattgtagaattcgacaataccacttcgttctcatgagatgacttaaacaatttgcagctagaagtagtactaaaactcacttatatgtgcattgtgtaggtgacaatgatcctctatgaggttcttcggttgtacccaccagccgtaaccttcactcgaaagacatacaagcaaatggagatcggaggtgtcacttacccggctggtgtgattgtcgagctcccggtgttactcatacaccatgacccaaacatctgggggggtgatgcccacgagtttaagccagataggttcgttgaggggatctccaaggcatccaagaatccgggcgcgttcctcccattcggttgggggccacgtatttgcataggtcaaaacttcgcattgcttgaggccaagatggcattgtgtatgatcttacagtgcttcaagcttgagctcatgccgtcgtatactcatgcaccatatagtatggtaactttacgcccgatgcatggtgcgcagattaagcttagagctatatgattatttcagattcatgtgttttagtacaacaattggttacgagggcatatttgtaatttacaaccaaatttggagttaactataataaaatttcttaagcttaattttt

SEQ ID NO: 6616 - DNA, 2215 bp, Oryza sativa
  ref <308>: DATABASE ACCESSION NUMBER: AK063765
  ref <309>: DATABASE ENTRY DATE: 2001-12-06
agcgtcgcctaaccctagctaaaccccccttctcccttgcgcctccgcttcgcgagcctcatctcctcgatctctttcgattcagtggaaaacctaggagaccggcgcggcatggcggagtcgggctcgtcgggcctggaggagaagctggcgggtctctccgcgggctgcggcgaggagccgcagcagctctcgaagaatgccaagaagagggaggagaaaaggaagaagcaggaggaggagcgccggttgaaggaggaagagaagaagaagaaggccgctgcaacagcagctgctagtggagagcccccgaaggaatctgccgccgacgatgaggaaatggatcccactcaatattatgagaatcgcctcaaggcacttgattcactcaaggccacgggtgtaaacccctatccccataagttcctggctaatattaccgtagccgattatattgagaaatacaagagcatgaatgttggggataagcttgttgacgtcaccgagtgcctagcagggaggatcatgaccaagagagcgcaatcttccaagctcttattttatgatctttatggtggtggtgagaaagttcaagtttttgctgatgccaggacctcagagttggaagataatgaattcattaagtttcactctactctgaaacgaggtgatattgttggtgtatgtggttatccaggaaagagcaagagaggggagctcagtatattcccaaagaaaattgttgtgctctccccatgccttcatatgatgcctcgacagaagagtgagggaagtgctgttcccactccatgggctccaggaatgggtaggaacatcgaaaagtatgttttgagggaccaggaaacccgatatcgtcaacgatatcttgatctcatggtaaaccatgaagtgaggcatattttcaagacaagatcaaaagttgtctcttttattcggaaatttcttgatggtcttgactttttagaggtggagactccaatgatgaacacgattgcaggtggagcagctgcaaggccttttgtcacacatcataatgagttaaacatgaggctttatatgcgtattgctcctgagctctatctgaaggaattggttgttggggggctggatcgtgtttatgaaattgggaagcagttcaggaatgaaggaattgacctgacgcacaatcctgaattcacaacatgtgaattttatatggcatatgcagattacaatgacttgatagagcttactgaaaccatgttatctggtatggttaaggagttgacaggtggctacaagattaaatatcatgctaacggagttgagaaaccaccaatagagattgatttcacacctcccttcagaaagatagacatgattgaagaattagaggctatggctaaactcaatatacctaaagatctctcaagtgatgaagcaaacaagtatttgatagatgcctgtgccaaatatgatgtcagatgcccacctccccagactacaacacggttgcttgataagctagttggccatttcttggaggagacatgtgtgaatcccacgtttattatcaaccatccagagataatgagtccattggcaaagtggcataggtctcgacctggattgactgagaggtttgagctctttgttaacaagcatgaggtgtgcaatgcatatacagagttaaatgatcctgttgttcagaggcaacggtttgaggaacaactaaaggatcgtcaatctggtgatgatgaagctatggcattggatgaaacattctgcacagcccttgagtatggcctaccaccgactggtggttggggattgggaattgatcgccttacaatgttgctgactgattctcagaatatcaaggaagttcttctattcccggctatgaagcctcaagattagatatgtccacaaagcaggaacctgtcagaaggattaaagcagactgaatgctgactgagaggatttcaattggccctcgagatggaggatttgaaggaaacttataattttgttttaattgtgcatgtgaggtttccatgtcctattgtactttatttttggagaacattggtggtcagttaagcaaacagttaatctcgctgcaaagatatcaagcgtaacttataagatgacttaagtttgtgcaatttctgtggccttacttgaaaatgatagcgcgttatttgcggtcttg

SEQ ID NO: 6617 - DNA, 3049 bp, Oryza sativa
  ref <308>: DATABASE ACCESSION NUMBER: AK063766
  ref <309>: DATABASE ENTRY DATE: 2001-12-06
cattaagcaccatgcggagttcacaccagtattctctccagagcacttttcacctctgaaggcttaccatgcaactgctaaaagtgttcttgatactctgataatgaactggaatgcaacatatgactattacgacagaacaaatgtgaagcaagcgtattacctgtccatggagtttttacagggaagagctctcactaatgccgttggtaaccttgagctaactggacaatacgcagaagcactacaacaacttggacacagcctagaggatgttgctacccaggagccagatgctgcccttgggaatggtggtctaggccggttagcttcctgtttcttggattctctggcaaccctaaattatccagcatggggatatggacttcgatacaaacatggcctctttaagcaaatcataacgaaggatggtcaggaggaggtagctgaaaattggctcgagatgggaaatccttgggagattgtaagaaccgatgtctcctatcctgtgaagttctatggtaaagtggttgaaggcactgatgggaggatgcactggattggaggagaaaatatcaaggttgttgctcatgatatccctattcctggctacaagactaaaactaccaacaatcttcgtctttggtcaacaacagtgccatcacaagatttcgatttggaagcttttaatgctggagatcatgcaagtgcatatgaagctcatctaaatgctgaaaagatatgtcacgtactgtatcctggggacgaatcaccagaagggaaagttcttcgcctgaagcaacaatatacattatgctcagcctcactacaggatattattgctcgtttcgagaggagagctggtgattctctcagctgggaggacttcccctctaaagttgcagtgcagatgaatgacactcacccaacactgtgcattcctgagttgatgagaatattgattgatgttaaagggttaagctggaatgaggcttggagtatcacagaaagaactgtggcatacacaaaccacacggtgcttcctgaagctctggagaagtggagcttggacataatgcagaaacttcttcctcggcatgttgaaatcatagaaaaaattgatggggagctgatgaacatcattatctcaaaatacggaacagaagatacttcactgttaaaaaagaagattaaagaaatgagaatcttagacaacattgacctaccagattctattgccaaactatttgtgaaaccaaaagagaaaaaagaatctcctgctaaattgaaagagaaattgcttgtcaaatctctggagcctagtgttgtggttgaggagaaaactgtgtccaaagtagagataaacgaggactctgaggaggtggaggtagactctgaagaagttgtggaggcagaaaacgaggactctgaggatgagttagatccatttgtaaaatcagatcctaaattacctagagttgtccgaatggctaacctttgtgttgttggtgggcattcggttaatggtgtggctgcgattcacagcgagattgtgaaagaagatgtattcaacagcttttatgagatgtggcccgctaaatttcaaaataaaacaaatggagtgactcctagacgttggattcggttttgtaatcctgaattaagtgcaatcatttcaaaatggataggatctgatgattgggttttgaacactgataaacttgctgaattaaagaagtttgctgatgatgaggatctgcaatcagaatggcgtgctgctaaaaaggctaacaaggtgaaggttgtttctctcataagagaaaaaacaggatatatcgtcagtccagatgcaatgtttgacgttcaggtgaaaaggatccatgagtataagcgacagctgctaaatatccttggaattgtctaccgctacaagaagatgaaagaaatgagtgcaaaagacagaataaatagctttgttccaagggtatgcatatttggtgggaaagcatttgccacttacgtacaggcaaagaggatagtgaagtttattacagatgttgcagctactgtaaatcatgatccagaaattggagatctattgaaggttgtatttattccagattataatgttagtgttgctgaggcgctaatccctgccagtgaattgtctcagcatatcagtactgctggaatggaagctagtggaaccagcaacatgaagtttgcaatgaatggatgtatccttattggaactttggatggtgctaatgtggaaatcagagaggaggttggagaggaaaactttttcctttttggtgctgaggcacatgaaattgctggtttaaggaaagagagagcccagggaaagtttgtgcctgacccaagattcgaagaggttaagagatttgtccgcagtggggtctttggaacttacaactacgatgacttgatgggttctctggaaggaaatgaaggttatgggcgtgcagactattttcttgttggtaaagatttccccagctacattgaatgccaggagaaggttgataaagcataccgcgatcagaaactatggacaaggatgtcaatcctcaacacagccagttcctccaagttcaacagcgaccggacgattcacgagtacgccaaggacatctgggacatcaagcctgtcatcctgccctagacaggcaaggcaagcactagccactccctgccagcgaccttcagagctaaggtgcgcgcaaccggtgatgcgatgacagcatctgcctcccagctctccttggcaggaaggtttcgctttgctcccagttttgagtagacagaagcaagttcagttcaggcttcgataaaacgctggaactatgcaaattgtagccgtgttgcctagcctggaacacccttgttttacctgtaatgtgtagcagcctctgctgatcagctcatgtgctatatggaattctgaagtgaaaccatagttaaaagggatcggttagtggcatcctttacaatctccgagatgtgctatatggaattctgcattgat

SEQ ID NO: 6618 - DNA, 1323 bp, Oryza sativa
  ref <308>: DATABASE ACCESSION NUMBER: AK063767
  ref <309>: DATABASE ENTRY DATE: 2001-12-06
aaaaaaaacgaaaaaggtttaatgtcaagggtgttatcccccaagtttggaggatatctaacctttggactcttgatgctacaaagatatcagcacctgggcagccaaccgtcaaagaactgttggacatttataatataaggcgtataggacctgatacaaaggttcttggtcttattgccaacccagtaaaacagagcaagagcccaattttgcacaataaatgtcctcaatctattggatacaatgctgtttatcttccacttttggcagatgaccttgctcgatttctcagcacatattcatctccggatttttcaggattcagttgctctcttcctttcaaagtggacgctgtacagtgttgccatgaacatgacccagttgctaagtcaatcggtgccataaacaccataattaggagaccagatggcaaactagtgggctacaatactgactacattggagcaatttctgctattgaggatggcataggaggcccaggatcaaaggatgctgccatctcacctttggctggcaggcttgttgttgttgtaggtgctggtggagctggtaaggcaattgcttatggggcaaaggagaagggtgcaagagttgtagtagcaaatcgtacctacgaaaaagcagtaagtcttgctgctgcagtgggtggtcatgccctgagattagccgagcttgaaactttcaggcctgaagaagggatgatccttgctaatgcgacatcattgggaatgtaccccaatgtggacggcacccctatcccaaagaaagcattaagcttctatgatgttgtatttgatgcggtatatgccccgaaagttacccggcttctacgagaagcagaagaatgtgggattaaagttgtcagcggtgtagagatgtttgtcagacaagccatgggtcagtttgagcatttcacaggtggtattgaagctcctgaaagcctgatgcgtgagatagctgccaaatacacataacaggcgaatggcgaagcgacggttgtgagtaattagcccaaatattcctctgggttaagttaataaaagttttggatgccagcccaattttgtgctaggtggagattagttgttgtaatgttcgatttcgccgacttaacctgtcagagatgtaaacagaaagtgttcaatctcatcatacttgcaataaagaatttgcatgcataactgcgcagttgcttgatgatcatgatgagttttaaggaaacaatacacatcaagctatgatcaggtggtttcatgttcatcattcgtaatggaaccaatatctgtgattggcaatgat

SEQ ID NO: 6619 - DNA, 621 bp, Oryza sativa
  ref <308>: DATABASE ACCESSION NUMBER: AK063768
  ref <309>: DATABASE ENTRY DATE: 2001-12-06
ctttgcttcaagagttggggaaacaaaatccacagattttgcaactgattcaggaaaaccaggctgagttcctgcgcttaatcaacgaacctgcagagggagctgaagggaacttgctagaccagtttgctgcgggaatgcctcaaacagtggctgtcacacctgaggagaacgaagccatacaacgtctggaacaaatggggtttgatcgcgatctggtcctggaggtattcttcgcgtgcaacaaggatgagctgttggccgcaaactatctcttggaccacatgaacgagttcgacgacgacgcccctgaaccaccgcaataagatgactgacccgtttttaatgatacatgccagtcacacaagagacattgggttgcagacagtggtcaccaagactggtgattatccccgttttagaacatccaaatccacccatccatccaggcgtgagaaaaatgtttttgagcttatctcatcatcattcttttttctgctttgggatttttatgatgattagtacatactctagatgacatttacagactacatataaccaaatgtttcaagtcttcagtgtcggttaactgcattgagggagaatgagttgaagttagag

SEQ ID NO: 6620 - DNA, 2589 bp, Oryza sativa
  ref <308>: DATABASE ACCESSION NUMBER: AK063769
  ref <309>: DATABASE ENTRY DATE: 2001-12-06
gctaaagtccagtagccgaaagcatcactagcttacgctctgacccgagtagcatggggcacgtggaatcccgtgtgaatcagcaaggaccaccttgcaaggctaaatactcctgggtgaccgatagcgaagtagtaccgtgagggaaaggtgaaaagaacccccagtgggtagtgaaatagaacgtgaaaccgtgctgagctcccaagcagtgggaggggaaagtgatctctgaccgcgtgcctgttgaagaatgagccggcgactcataggcagtggcttggttaagggaacggaacccaccggagccgtagcgaaagcgagtcttcatagggcgattgtcactgcttatggacccgaacctgggtgatctatccatgaccaggatgaagcttggatgaaactaagcagaggtccgaaccgactgatgttgaagaatcagcggatgagttgtggttaggggtgaaatgccactcgaacccagagctagctggttctccccgaaatgcgttgaggcgcagcagttgactggacatctaggggtaaagcactgtttcggtgcgggctgcgcgagcggtaccaaatcgaggcaaactctgaatactagatatgacccaaaaataacaggggtcaaggtcggccagtgagacgatgggggataagcttcatcgtcgagagggaaacagcccggatcaccagctaaggcccctaaatgaccgctcagtgataaaggaggtgggggtgcaaagacagccaggaggtttgcctagaagcagccaccctttaaagagtgcgtaatagctcactgatcgagcgcccttgcgctgaagatgaacggggctaagcgatctgccgaagctgtgggatgtcaaaatgcatcggtaggggagcgttccgccttagagggaagcaaccgcgaaagcgggggtcgacgaagcggaagcgagaatgtcggcttgagtaacgaaaacattggtgagaatccaatgccccgaaaacccaaggtttcctccgcaaggttcgtccacggagggtgagtcagggcctaagatcaggccgaaaggcgtagtcgatggacaacaggtcaatattcctgtactaccccttgttggtacggagggacggaggaggctaggttagccgaaagatggttataggtttaaggacacaaggtgaccctgctttttcagggtaagaaggggtagagaaaatgcctcgagccgaggtccgagtaccaagcgctgcagcgctgaagtatgagccccgtggactagccattgcttctccacgaggctcataccaggcgctacggcgctgaagtatgtaacccatgccatactcccaggaaaagctcgaacgaccttcaacaaaggggtacctgtacccgaaaccgacacaggtgggtaggtagagaatacctaggggcgcgagacaactctctctaaggaactcggcaaaatagccccgtaacttcgggagaacgccctcctcgacctctccaagaagcgagagatttttcaggatcttgctccactcctgtggcactcttatggaacaattgctgcactactccaggagattgtgtcaatctatccatcactttcacccccaacattatctccaggggcttcaaaccgtgtctgcaatgcacttgcacttcttcagtgtgttgcctcacacagtgacacaaggattcctttcttgaatgctcacatcccactgtatctgtaccctttcttgaatactactagcaagacaaggccttttgagtacttgaggcttaccagcttgggtgtcattggcgcacttgtgaaggttgatgattctgaagtcattgggtttctgctgcaaactgaaataattcctctgtgtctccgtactatggagatgggcagtgaactttcgaaaacggttgccacctttattgttcaaaagattctgcttgatgatgttgggcttcgctacatatgtgctactgctgaacgtttctttgccgtagccagtgttctatcacagatggttcaggcacttgctgatcaaccttctccaagactgctgaagcacataattcgctgctacctcaggctgtcagaaaattccagggcatgtaccgcgctgaacagctgcctccccaacgcgctgaaagatggaaccctcaacaacttcctccaggatgatcatgtcacaaggcgttggctccagcagctgctgcacaacatgactatggccggcatgggaggagctcctcatggaggccttgatcacatcatggggatgtgatcatctgaaacgaagctggctgtttgcaactcatcatatgcctgaagtcaggactcaggactagtccatctgtagttagcctaccaaaaggattatacttttagttttacctttaaaaagaaatggcgtgtgccattgaaggataagaaatgtgttggttgtagttaaaaggtactgcttgctatcctgtgatgctgtaaaaatgcaacagaattgcgcagctctctgcacaagtagttctcagcttttggtgaacagtccgaaatggagaaacaaaggtaaaaacatcagacttacatggttctcttc

SEQ ID NO: 6621 - DNA, 1577 bp, Oryza sativa
  ref <308>: DATABASE ACCESSION NUMBER: AK063770
  ref <309>: DATABASE ENTRY DATE: 2001-12-06
aatagatgctgaagctgtagagttgtggaagaaactaaatgagaaggagacatcaagagttcaacaaactcaagaagaccatgcaaaaactacggaaaggacttctgctacaactgttgagtcattcaaagaagcactctctgaagtccgattctgctctagaatggaagagcttttactgaagaaaaaaacatctactgccggagactcccttgagattcgttcccaaaaggttgacaaattaaaggtcttagcaacttccctctctaattcatcttccaaggctgagaagcgtattttggatcacaggcgccagaaagaagaggctcttaacttccgtgctaaaaaggagaatgaagtgagtgcagttgaaaaggagttgacggctgagatttctgaattggagaagcaacgtgacgaacttgaggctcggttgaagaaggtcaacatttcactgaatgctgccattggacgtctcaagcaaacaagggaagagagggatcaatttgatgaagcaaacaatcaaatgatatttagtttaaaagcgaaggataatgaactttcaaaatctattacctcatgtaatgtggaggctggcgtagtcaagacttggatcaatttccttgaggatacgtggcagcttcagtcatcatataatgaacagaaggaaaagagaaccaatgatgagcttgagagatgtacagacaatttcctgaaattgactaaatatcacctttctacattcaaggaaattctgagcccacaattgagcgaatctgcacatacgtggataatttggcagttctgcagtcaagggacgtgtcaacagaacatgacaatgaggaactatcagaaaagacaagtccacagaaatcccttgaggaagaatatttggaaactgaaaagaagattgtaattgcctttagcatcactgatcacatgaagaagctcttttattctgaacaaggggttaattctaggagggatgatgaggacgtcaggaacttattttctgagatagaggaacttagagagagattcgagtctgtagaacgaccgacgttagacattgaagtccgccgagcaaaggttccaacaaaggagagagctgagtcaagcccttcaccagttcaggtaccttctacacctaaagctgaaactgtggtctccccaaaatctccagcgaaacctgaccagccgctggatcttgattctgaacttgcaaagttagaattagaatttggtcaagttaacaaatgctcacctgaagagataagtgggtgggagtttgacgaacttgaagaggagctgagagctgacatctccaaatcgcaataaaaaataatgactgcatgttacccacttcgccgtgttctggctctacccgcagttgtatagttgaatgtatagaactttctattgtgttcattgatattgtgttactgtatgaatgcacccaagttaacaaggaattccctatttgtttgttattgtcatggttttatgtaacgtgtacagaaaatatttcagtacgtcacatttgaatgtgcatataaaaagatttaagcttgatattt

SEQ ID NO: 6622 - DNA, 2113 bp, Oryza sativa
  ref <308>: DATABASE ACCESSION NUMBER: AK063771
  ref <309>: DATABASE ENTRY DATE: 2001-12-06
aatcttgttttagatgccctctgtatccttgcccgtgaccttgtatgcatcaaatccattgacacacatcaaaagataacaagctctcatggcagatttcacccctactttcagggatgcataggagccctggatggtacacatattccagcatgtgtacctatgcatatgcaagaccggtttaggggtagaaagaaatttcaatcacaaaatgtgctagcagcagttgattttgacttaaggttcttatatgttcttgctggatgggaaggttctgcccatgattcttatgtgcttcaagatgctctatcacgtactaatggccttaaaataccagaaggtaaatatttcctagctgatgccggatatgcagctagacctggtgtattacccccataccgaggtacccgatatcacctaaaagaatataagggcgctagagaaccagagaacccaaaggagttattcaaccttcggcattcctctcttagaacaactattgagcgagcatttggtgccttgaagaaccgcttcagaatatttaaatgccaaccattttttcctttgaaaacacaagtgaaaattgtgatggcttgttgtgcacttcataactggattatagaggacggtcctgatgtctatgtgtatgacgatgctgcttggtatgcagcgctgccacggagtgtaagaaaccgtactgatatgcaccaggagaatttgtcatgggcaaagaaaagagatgatacggctaaaaagatgtgggaagataaagtaggacaaactgtaccttagatttaagttgttctctaaattatgtaactaatgtattgagctgtctcttgtgaatgaaaacagaatggctaaaggaaaggcgaaggctgatgcttttccaacctctcatgagaggtccttgacttggcatgaggatcaaacaaaattcatgctagagtggtacatggaatacttgaaaaaacaacatgcaggttttaaggtaaagaagagtcaccacatgttgtgtgctgatgctttaaacaagaagtttggtatgggggtgactgccgatcaagtggatcgtcactacaggtatcacaaagaaaattggaagtatattgcagcagcattgagcaagagtggcaacgcatttgaccatacaagattcttggtgactatttcagaatctgaaaaggcaacgctatgtgatagagcaagacgcctactctctaagcccatcagattctttaatgagatgcaggagctattcacgggatctagtgccgatggttctttggctatggatcaaaacacatgcatgaacgatagtgatggttcaaatagcgatgattcaagagatatgcttgacctcaactgctacacacaacctgaagagccaactggtgaggattctgacactttgccatctccaaccacgaatgcaactgttgacaactcttccagcggtagtcaaggtaaaaagaagcgtccaagaggcaacaaatcaccaactaaaagccacaaaaaagcaagagtcgctttgccgagtccaatgatgaaatcgctactacgatgaaatcacttcgagaaacacttgctaccacagctcctccaccaatgccacagcttactgatccacatgcaattctgtggcagaaactagaggcaatcccaatgacacctgatcaaagggttcttgttggtgagtatttgtctgacaaggagaataaaggtaagcgtggttggttgtgcaatgcgagtgatgctacactaaatgcttgggtgttcaagttcttatgtgagaaagatgggcttaacctgtgaagcatagcttgttaaagtagttttttggcgaactgtctgtgtgatgtgcacatgaacttctgtatggctgtgcactcattttggctttgtgttataaggaatgatggctagaatatatgtattagttgttggttgtctaattttagcagtgtggtcatgacaaatggctagaaaatgtcattgaaatagttttagttggatggttgctgatattattgtaatagctcaactagtgttactggagtgttatctttagctggactaatatttcaatatatgtgcactttaattccaatct

SEQ ID NO: 6623 - DNA, 3260 bp, Oryza sativa
  ref <308>: DATABASE ACCESSION NUMBER: AK063772
  ref <309>: DATABASE ENTRY DATE: 2001-12-06
gaaaatctcccgtcccgtctcgcaggctcctcgcggctgaacagtggaggggcgctgatctccatctggcgagcggagcaggggaggagaggggatcctggagaaaatggtgatgatgaatttttaatgctcgccagttgcacaaccaaaagaaattctcaaatggacgtggctcctgttgaacaggatcagggtctaatgaaaatcaacagcagtgactgctctggcgatggtgcaagctgtgagaatgaaactaattacactgatcatggcaaacagtcaaatgagcttggtcatgcaagaatatcggttactggtgggggttattttcatcagctgcttgctgagcataccattatctctgaagcatttctttctgcagcaacctattcatggtttgagaaagagaaagatttgctttcctcccagcttagttctttgaaaagaatttggtcacaacctcagtggcaagcttgcctaaagcacttatgctgtcatggtgaatttaggagtgctgtgctgaaaattataaaaatatttgaggaagagctttcaaagtgcagagaagagaccaatatgttacatcaaccagaccaaataagccattcaactttaatgtcccttgtttcattgatcattcctccactacttaagttgattcgatttgtacatgcactatggatggatggagctgtacttagattcccagaagaacttatagaagctagaaagatgaaaaatgttgatcagatcttgagattccgaggagaaacactggaatttctagatgtttggcctgaagagttggaagagggattagcacaatggttacagctaatccgagagagtgggtacaacttattaggtttatgtgcaactatcaagggcgcattctcagagctgttagacaattcatcaatcaacaatgctatcatggaaaacataagatcaatggaaattcggcatctaaccaaacttatcgatcttgtcattgttccattcatcaagcattgccctcataatctatgggtagaatggatgttgaagctcttactacccttatttgactactgtggagacgtgctttactactcatggttcagtcttctacataatggtcaggctaatgttccacttttctttggttatatttgtggatcagaagaaactgtaagcaaaatggaaaattacctacttcttgacctgactcgtaaagtatccaagttgcttggggccttagcttcgcaagaactgaatcaaggtgtttaccgtgcgggtcttgtccttgacatgaatagtgcttctcacgatttcaagtgcacaccctctacctctttagttggatatattttactcaatgattgctttacaaggttaagcatgaatctctttggatgttgggtggatggtgaagcagcaatagattccattcccttttgtcattctttggttcaagtcgcggttgctacaaacaatgaaaagctcaagcgatttattaaagatgatatgcttcctgctataatccgacgcctatatgatgatcttccatgtgcagttcaaaagaccatcagaaagttatctcccttgatgaactcaatcaattgcaggaaagccaccaaggatctcttggttctatgtcaggagatctataaagtttacatacgatgtcagaatttggaaggtgaagaccaggatactgataacatagcatactggtttgatgattggttaacaaagcagaagaaagaactttgtgtaaaggcatcctatgctattcctgatgaatttccagctacgctgtggaattgggagtttgaagaagaatttcaaaggtatcttcctacatatcttgatgtgctgcatgaagttgatacaatggattgtcaagagtgttgttgtttggatagcgccaagatttttgagaatctgagcctggaatttcgatccaggcatggtgttaggagccatacagatcatgttgtttggatgatatcaaatttgttacaacggaagatgcctggagcatattcagagcaacgtgctgatcgaatttccaaatggacttgtgaacttattaaatcgaagccttacatcaagctctctaatggttggaacaatgctatgaatcgattgaaggaaaactttgtgataaatgtagatactaaaccggatgcaatagatgcagttaatatcttctacaattcaatattgcttctttgggaacctcagtttcatcctttaatcagggagggtcaaatggatgttcttgtagagatagctcatcagttagcttttgcagaagagagaaaaaactacgagccattggaaccagattcattagatttcttggaccatttgcaaccttatgcaaaattatacatctatagaaagaagacagaatctgggtattttacagcaatagaacaagtccagttgcataaagaatttgacagatacttggcttcaggcgttttggatggtgatatttgtaaatttagttctttccaggatgactttattgaggaattcgctgataaacacattgcgaaaagtcaatttgtgcagttggacagaaaactcattacattgtctttggagcaacgagctcagattctggagaagcaacgccaaataaacacttatgctgaatgcttgagaaatatcctgacagatctgaagctgaaagatggtcttcaaagtttgatgagtgagctagaagtggaaggtttcttcgacgtgaataacaattgcacagattgggagaaagggtgcttcttacgacttattgacaattttgaagatttagttttcagaggacattgctttcctagataccttgtcattcaaggaattatggattattgggaaatgtcacaacggagcgacagtacctgggaagattcttttgaacaggttgttgaagtattatgcgataattggagacaagatcttacacagatttggatggaaacaagatactatgaaggcttatattatgatgtacttaggaaacctttaaaaaagatcttcatgcggaagattgaagcttcagaactgtagctacagcttatatgataagtacgacatatgcatgccagctagcatttctagcagtaagggccgccactgtgctaaacctgaaactgagttgttttccttattctggatgtaaccccattataatataatccttggtccttggatttatagtctcgatcatatttcagttgtcagatatatgttgcctcgttctaaacttc

SEQ ID NO: 6624 - DNA, 833 bp, Oryza sativa
  ref <308>: DATABASE ACCESSION NUMBER: AK104965
  ref <309>: DATABASE ENTRY DATE: 2002-08-28
aactcgtcaatccccaaaccctcctcctcctctccggcgatccacccatcgatcggcgatgacgctggggagctccggcgccggatcgagcgtcgtcgttccgcgaaacttcaggttgctagaagagcttgaacgtggtgaaaagggcattggagatggaaccgtgagctatggaatggatgatgcagatgacatctacatgcggtcttggactggcaccatcattggtccacataatagtgtccatgaaggtcgcatctaccagctgaagctgttctgtgacaaggactacccagagaagccaccatctgtccggtttcattcaagaatcaatatgtcgtgtgttaatcatgagactggagcggttgactcgaggaagtttggtgttctagcaaactggcagcgcgagtacaccatggagactatccttacccagctcaagaaggagatggcaaccccgcagaatcgcaagttggtgcaacctccagaagggacgttcttctagaggagtatttacctcctggctcatctccagaattcagattcaacatcatcaacttgtatttatctggctcccgcgcttaattgttttctagttcaatttgatatatgccctgctttctgtgtaccaacaaccgagtccaactttgcgcctcgtgattcgtcgggtggctgttgattaaggagatgagtcggatgaaaagggtgatctggtttggcaaaattggcagtatgagggatgtaaaattggaaacagatgctgtgtcaagaaatgtgtaactgcaggtcctttatattgcctacatgaatatagtccgtgcatgcttttcttt

SEQ ID NO: 6625 - DNA, 886 bp, Oryza sativa
  ref <308>: DATABASE ACCESSION NUMBER: AK104966
  ref <309>: DATABASE ENTRY DATE: 2002-08-28
acagacttatattcagagtttcagacaccaagagcatcttgtaccacctacgcagagttttgtttgcttgcttgtttgcttgtcagtgtccagaatggcagcgagggtggcgtggatcggcgcggcggcggcggtggtggtggtggcgctgatggccggtggcgcggcggcgcagccgccgtcgtcgacaagcgggtgcacgcagacgctgctgagcatgtcgccgtgcctcaactacctgaccgggaacgagacggcgccgtcggcgtcgtgctgcggcaagctgggcgaggtggtgaagtcgcagccggagtgcctgtgcgtcgcgctcaacgccgacacggcggcgctcggcctcagcatcaaccgcacccgcgcgctcggcctccccgacgcctgcaaggtccagacgccgccggtcagcaactgcaagagtggcgctgctgctcctcctgcgggacagacgccgacgactccggcggggacagggtcgaaggcgacgccggcgacgcccgtgggctccggcgtcgcgccgctccgtgtctcgccggtggggatcctcgccggcatcgtcgtcgccgccgtctacgccgtctccgccgtgtgagctcgacgtcgacgacgaacccggcaagcctatcaccgtctgtatcaatcttgatcggtgcacgcatttgaggatttcgatgtgatgtgagcatggcacgcgtgcgtgtaggaattcgttacggatttgagctgttcttcctccattggtttatgctactgctgctcccatttgtgccacgatcagaggagcttgtttgattatctttttattattattattatctaggattgattcatcacttccattaattctgaataaaaacttgtatttctccct

SEQ ID NO: 6626 - DNA, 987 bp, Oryza sativa
  ref <308>: DATABASE ACCESSION NUMBER: AK063773
  ref <309>: DATABASE ENTRY DATE: 2001-12-06
caaccaccaaacagaacagagctcgcaactcacaagctgatacagagcagagaccatcggagttcagagttcagacacgagaaagccatggccggaggaggagacgagctgaagctgctgggcatgtgggcgagcccgtacgttctgcgagtgaagctcgcgctcagtctcaagggcctcgactacgagtacgtcgaggaggatctcaagaacaagagcgagctcctcctcagctccaacccggtgaacaagaaggtgcccgtcctcatccacaatggcaagccagtctgcgagtcgcagatcatcctgcagtacctcgacgaggcgttccccgatgccggcgccaccctgctccccgccgacccccacgaacgcgccgtcgctcgcttctgggccgcattctgcgacgacacgatcgcgaaggcgtcgcagcaggcgtcgtcgggaaagacggaggaggagaaggcggaaggggagaagaaggtggtggaggcgctggagaagatggaggtcgggctgagcgagtgctccaaggggaagcccttcttcggtggcgacaccgtcggctacgtcgacatcgtgctcggcagcttcctggcgtgggttcgcgccggcgacgcgatgaagggcgtcaagaggttcgacccggccaccaccccgctgctggcggcgtgggccgagcgcttcgtcgagctggacgtcgccaaggccgccatgccggaggtggacaagctgatcgagctcgccatggcgaggatggctggcgccgctgctgctgccaccaactgaagatacaccagttctcttctagttctagttctgtttaaggtgttattttcttcgatgaaaataaatgttgaatgaaggggtgggtcagtgtgtgtgagtatgggagatctttcacaacttaagaagcacatgtatgcccttttgttcttatatttctatcaaaaaatttaccaataaatatctgatagcgttgactct

SEQ ID NO: 6627 - DNA, 786 bp, Oryza sativa
  ref <308>: DATABASE ACCESSION NUMBER: AK104967
  ref <309>: DATABASE ENTRY DATE: 2002-08-28
aatctctccctcaacctctctcttagatccatttctcctctcccctccactcccacctctccctcaatcgtggttggcggcggcggcaagtggagctgcggcggcggatcaggcggcgaggaggctcacgcgtggcgatccggtggcgcgaaggcacgtgggtggcatggaggctcgcgacggtgggcgggccagcagaagtcaggcgaggctgcgggaaggctcgcacgtggcggatctggcggcggggaggtacggaggcgtggaggctcgcgccggcgggcgaaactgggggcggggaggctcgcggcagcaggcgaggctgtgggcgggctatggagctcacgtccaacccgctttaccgtcagcggcagcgcaggggagggggctcggcagcggcaaggggatcgacggtgacagagcttggcggtggtggatggcacgtggcggggctcagtgatgacggtgcgtggtggcagcaaggggctcggtagcgatggcgcgcggctctctcctctctgcgcctccggcctcccacctccctccgcctctcttcggctcgacggcgactgcaccggcaggatgactttgtgtccgccagatctagtgctggtgcccctcgacggtggatggcgacgagatgcatgctgtgaaaatcgatttgcttcactgtaatggatttgttgatgttaatttgttgatgtgaatctgttgatttgttgaatttgttgatgtgaatccgctgatctattgatgaatatgttaatgggaatctagatgttgatg

SEQ ID NO: 6628 - DNA, 929 bp, Oryza sativa
  ref <308>: DATABASE ACCESSION NUMBER: AK063774
  ref <309>: DATABASE ENTRY DATE: 2001-12-06
gaagcaagaggaagggcatccagaatcagatccacaaggcagcagctgcagcagcatcgaccatggcgatggcgcgatccatcctcctcctcctcctcgccgccgccgcctccgcctccgccgacgcgcccttcctcgtcgcgcacaagaaggtttcgctctcccgccccaagcctggcgtcgagcgcctcgccgtctccctcgacctctacaaccagggatccgcaactgcctatgatgtgagcattaatgatgatacttggccaaaggaggcatttgagcttgtctctggagagatgtcaaagacattggaaaggcttgaccctggtgtcactgcttcgcatgcatttgtcttggagaccaaagtacagggcaggtttcaaggttcacctgcggttattacctatcgtgttcccacaaaggctgcgcttcaggaggcctattcaacccccatccttgcacttgatgttcttgctgagaggcctccagaaaagaagtttgaatgggctaagaggcttgtggcgaagtacgggtcgctggtgtccgttgttggcttggttggagtgtttatctacctggttgcaagcccgtcaaaatccagcggtgcaaaagcaagcaagaagaggcgttgatatacttgcctaccatatataaggcagtgtttgttcttttttattaaaaagaggaagagatggtggcaggttttttagattgatagcgcgagagctttaaggctgccgcatccttgaactgtatgaattttctctgtttgtgtttttggaagttgaaaacctaacccagagaattggagagtagattttgtaacagatgaaatctcaatgcatcattttgaagttgcctgatacagatacctattcattgcatttggtaacagatgaaatctcaatgcatcattttgaagttgcctg

SEQ ID NO: 6629 - DNA, 453 bp, Oryza sativa
  ref <308>: DATABASE ACCESSION NUMBER: AK063775
  ref <309>: DATABASE ENTRY DATE: 2001-12-06
gtctgtgggaacctgaagaacgaagatgaaattgatgctcctgatggtggtgattccagcatggcggattaggatgagctaagcataaccgatctgcttgctgcttcttttggtgggagctcataacactttggtggtaggacttgggagtacttctgtaaactggttggagttttgacaaaaacgggagtttaatacacctaaatatggagagatgtatgaacagaacaacattcattgactgaatgtggaactagcaatccttcttgtactcagcaacgtatatatgaatgtgtatccgttgtagggagtcctgcttgttctgtacaatttctaatgctccccctttatctagaatggtgatttagacttgagaaatttatgcagtcagaagctgatctcctgtgatacttgaaacattccgttttgtcatgtcatggtgtagttgattgt

SEQ ID NO: 6630 - DNA, 496 bp, Oryza sativa
  ref <308>: DATABASE ACCESSION NUMBER: AK063776
  ref <309>: DATABASE ENTRY DATE: 2001-12-06
cgctgccctccctcgtcgacgacaacgcctgcaggaccatcggccgcctcatcgccgagaggtccatggacgccgacgtcttcgccatgtcctacgagcccaagaagaacgagaggatcgaggggaagcttggcatcgtcatcgacaccattaaggagcacggcattatatttgtttaggcaagttcagcttacaacgttgattaaaatatgttgcgaggtttattgcatggtagctatgttcatctgttgggtagctgaagtctgttgtcccaccatgttcatcaaaaattatgtctggaagaaagtgggtgattaaacaattggataaatcaatttagcacagctacatattaaaagcaaagtgcacagaaaccatcctgatatggatcttccctgcatgaatacacaaatgaaagtgttttttttttcgcattcatcttgtatccctggaaaatgaagtaatctaattgaatgtggcatgtcattgatgagtt

SEQ ID NO: 6631 - DNA, 441 bp, Oryza sativa
  ref <308>: DATABASE ACCESSION NUMBER: AK063777
  ref <309>: DATABASE ENTRY DATE: 2001-12-06
attgtgcaattcgctaactaatttgggtttataaaagtcgaaacaacaacacgtatctcacaacagcagtgtatggccgaggtgatcatcaacgagttcctcaaaaagcacaacttggaagaggttgtatctggaacacccatagatgtagccaaagtgccaaagaacaaccaggagtctgtggcagccattctgctccattgttgcatcaatgggcctgtctctcctcacaagagcaccacctatccggtgattggggatgctcgtctgcaagacttggttggtgatcagagaattaccaactcaggcctcaaaaagacctgtgaggaagtggcaaagatcttgaaagccaaaggatttcactctgggtttcaggttcagaatggggatttctggcctctgaacattcgggattagtataccgaatattgtgagttttgc

SEQ ID NO: 6632 - DNA, 732 bp, Oryza sativa
  ref <308>: DATABASE ACCESSION NUMBER: AK063778
  ref <309>: DATABASE ENTRY DATE: 2001-12-06
cttcgcatcggtcgatctccctcctctcctcctccgtcgcgccgcagacgccaaccccgatcccgatggccgcctccgcctccgccgccggcgccggcgccggcaagtcgctgttccagaccttccgcaagttcttcaagaagccgtgggagatcaccggcccgtgcgcctcccccgagtaccgcagcgcgctcccgggcgccctggagtaccgccaccgctgcccggccaccctgacgaaggacacgatggccgtcgtgcccacctccgagcccgagaccgtctacgacatcaagtactacacgcgcgaccgccgccgtgaccgcccgcccgtccgccgcaccctcctccgcaagcccgacctcgagcgctacatggccgccaagcagttcgaccccgccaaggacttccccgtgccttacgtgaacaccgccgtggaggaggactacgacgccgtcggcggcggctaccagaagtgatggtcgaggtatctacctttcttgtgcttgcacttcgtcagaagttgcattgtcttcatttgtgcccttgaaatccattttgtatttcagaggaaaaaaaatctggttgtaagagatgatggcggcaataatatgacacctgtggactttgctgaatgtatctttcttgtaagttgtatcctaaaacttggaactacctgatgctgatgctttggtagtatggttcaatgaaagatgaaatgtttccttctgt

SEQ ID NO: 6633 - DNA, 937 bp, Oryza sativa
  ref <308>: DATABASE ACCESSION NUMBER: AK063779
  ref <309>: DATABASE ENTRY DATE: 2001-12-06
aagttgaacccatccaaacagcttccttcctcccccctcctggctccgctcgctggatctctcctctttctctctcgcaccctctccccggcgaggtaggagggatggggcgggaggtggcggagagctgcgtcgacggggtggtcatgcagatggtggcggcctactgcggcggcttctacgccgccaagccggagctcgccgcccgtcgcatcgaggccatcggcttccaggtcggccaccagctcaccgagagatatactatggagcgccctcgatttagtgatcatcttgaagcaatcaaatttatctgcaaagacttttggtcagagttattcaagaagcaaattgacaatctgaagactaatcataggggcacatttgttcttcaagataaccatttccggtggcttactcgtgtttctgtagatccatctgtagagagcatggatgcaactgagaatgattctacaacactaggtgatagcgcagcccaaacaacaagcatgcttctgtactttccatgcgggataataagaggtgccttgaccaatttggggatttcttgttctgtcactgcagacatgtccaaccttccagcatgttcttttgttgtgcgcataaagacatgagctgcaataaatgatttgaataccattatatgcatgcttgtggtataaagtggtctgtacattcaaggaggggggaaacccgccgtgtagctggtctttttttttttcctttcccctcttgttcttactggcacatgtttacttttcctcatacctgccttgtgcgcttattaagattggtgtaattctgtgatccaaaatgttgacaagggaagacaaatgtaatatttctcctgagagactggctatagctaacttttgttgtctagcagtggagagtgatttataatttattttgctgactt

SEQ ID NO: 6634 - DNA, 668 bp, Oryza sativa
  ref <308>: DATABASE ACCESSION NUMBER: AK063780
  ref <309>: DATABASE ENTRY DATE: 2001-12-06
aagcacccccgcgaatccccccccacaggccaacagcaaagcagaggcgaagggaagaagaagaagaagaagcggcggcggcggcggccatggcgtggcgtgcgaacctctcccggggcgtgaaggagatccgcttcctcttctgccaatcctcccccgccagcgcccccgcgagggagttcgtgaagaagaactacggcgacatcaaggcgcgcaacccgtccctccccgtcctcatccgcgagtgctccggcgtcgagccccagctgtgggcgcgctacgatatgggcgttgagaggtgcgtgcgcttggatggcctgacagaagcacaaattgacagtaagctggaggagcttgccaaggctggggggtcgcttaaacctaaataatgtttgcttagccaacctgttcagctttaattatttccaaataagagaaacgcatgcggaggttgttctttcatatgatctaagtactatgacatgtcaaattaagcgctgatctttacaacctactgctaggaatgctactgttttctcttgctcttcgttacttcgtatattgtcctccagtatgtgatgtaagaatggcagcgattctatggtctattttttctgtaactggtaaagacatcagaaagaaaaacatataagcacatgttcttgatg

SEQ ID NO: 6635 - DNA, 947 bp, Oryza sativa
  ref <308>: DATABASE ACCESSION NUMBER: AK063781
  ref <309>: DATABASE ENTRY DATE: 2001-12-06
agctcgcgccacagaaaaactccaccaccaccagccacgccatggcggaggcggacggcgaccgtggcgtcgctgccgccgccgccgccgccgtcgtccacgacgacgtcctagagtctgacgaggaggacttcaccttcgcggcggcggcggctgtcacgtgtgtggttggaggcggccgcatcggcgctgtcgtgtacccggtcttcggccgcccgcggtcgccgccgccggtgcaggaggtggaggagcctgacacggccaccgtgcgggtgccgctggggcagcttctgctggaggagagggcgtcggcgccgccgtcgggggagcaggccgacgaggatggcgttcttgacggcgtgccggcggagacgtactgcctgtggtcgcccggatcacccgcgccggcggtttctaactctccggcgaggtgccagaagagcggctcgaccgggtcggtcctccggtggcggcagcggctcatcgggcggagccacagcgacgggaaggagaagttcgtgttcttgagctcgggctccgacgtccgtagtaaggggaggacgaccacgacgtcgcgcggcgatgccggtggccgtggcggcggctggagatattacgcgagtggaggcggcaatggcggtggccggaggccgtcgttcctcccgtacaagcaggatctcgtcggcttgttcgccaacgccggcgcgttccgccggagctaccacccgttctaacgtattgtagcgttctttctcgctgatcgtttgcttaattaattccttaattatatatatttttgtcaagtcatggtgtgacttcggattgccttgtggtagaactgaagtgtgacagatttgtagtagcagaaaatctttatgcagattttttttgtatgtgggtaatactaatacttatgtatatatcgtggattttgtattggtttgatc

SEQ ID NO: 6636 - DNA, 921 bp, Oryza sativa
  ref <308>: DATABASE ACCESSION NUMBER: AK063782
  ref <309>: DATABASE ENTRY DATE: 2001-12-06
aaggctaaagctcaccgtccatcgtcgtcctccgacctcaagccccctctccgagctgacacgaccagcttcagcacttcagttcggctccgtccccgagttcggcagccgaggcgagtggggcaatggtggctcccgcgacgctgtccctccgccccttcgcgaccctcgcgccgtcccgcgccgcgctgccccgcgtcggcgccgggttcgcgctcccgcccgccgtctcgtgccagccgaggcggcggcgcctgtcgctccgcgccgtggccgtcgactccgaccagcagggctcccccgagcctcccgatcaggaggcgaagccgaagaagtaccacttcctggtggcgaacgccaagttcatgctggacgaggaggagcacttccaggagcagctgaaggagaagctgcggctctacggggagcgggagaaggagcaggacttctggctggtggtggagcccaagttcctcgacaggttccccaacatcaccaagcgcctcaagcgccccgccgtcgcgctcgtctccaccgacggcaactggatcacaaacgcttgaggaggcattggcttctaacccggtcgacttgaaatttgacaagcctgagaaatggacagctccataccccaagtatgagtatggatggtgggagccctttctacctccaaagtctagcaatggaacagcatagagatgatcggcaatccatatgagcaatgtaagatttcttccatgcaagtgcccaaatgtaatctaaatttttaacaatgcctatgtaatacttggggtgctgtgagtacagttagctacaatagttgcagagttgctgtactttctggtaataccagataagcagtggttttgttttggaagattgtggacggctgtggttggggtataattttcttcatgatgc

SEQ ID NO: 6637 - DNA, 776 bp, Oryza sativa
  ref <308>: DATABASE ACCESSION NUMBER: AK063783
  ref <309>: DATABASE ENTRY DATE: 2001-12-06
ttggagatttggatgaacagacacgtgcaatgactgaaatgaatggacaatattgttctagcaggcctatgcgtattggaccagcatccaacaagaaaaatataggtggccaacaacaaccaagtgctacataccagaatacacaaggaacagattctgatagcgatccaaacaatactactgtatttgttggtggtcttgatccaagtgtgactgatgaggttctgaaacaagctttcagtccatatggagaacttgtctacgtcaaaatacctgtaggaaagcgttgtggatttgttcaatattccaatagggcttcagctgaggaggccataaggatgctaaatggaagccaattaggaggtcagagcataaggctttcatggggtcgtagccctggaaacaagcagcctcagcaagaccagaaccaatggaatgctggctattatggatatcccccccaaggatatgatccatatggttatgttcggccgcctcaagatcctgccatgtacgcttatgcagcatatcctggatacgggaattatcaacaaccagcgccacagcagccccctcaacaggttaaggcactctaggattccacactggatatggaattttacattgcttactcttgcacagataaaagtgacagttttctgttttttttttccttccgcttttgcagtaagaacaagtgttggtcaagtgccctatcacaacatatgatgaaatagttttggcaactttggtgtaattggcatgaaaattttttg

SEQ ID NO: 6638 - DNA, 850 bp, Oryza sativa
  ref <308>: DATABASE ACCESSION NUMBER: AK063784
  ref <309>: DATABASE ENTRY DATE: 2001-12-06
atcgatcacagacaaattaaagcatacagcaattgattcagagtagttagcttaactagctcctctgctttaattagtttgccccttccaggtagagtatatatgggtagtataggaggagtagcggtggtgctggtgggcatggcggcgatgctggtgggcatggcgtcggcggcgacctacaacgtgggcgagccgggcggcgcatgggatctcaccaccaactacacaaactgggtcgcccaaaagaggttccatccaggcgaccagatagtgttcaagtactctgctcagcggcacgacgtggtggaggtgaacaaggcgggttacgactcgtgctccacctccacctccatcgccacccacaccaccggcaacgacgtcatccccctcacctccaccggcacccgctacttcatctgtggcttccccggtcactgcaccaccaccggcaccggcaacatgaagatccagatcgacgtcgtgcaggcagattcctcctccgccccggcgcctgtggccaccactactcccccttcgccgccctcctccgccgccacctccctcaaggccaccgccgcagctgccgtcctactcgccgccctcctcatcatggcttaattaattaatactcctagctgctagcttatttgttttcttttccgatcctgagagagccatgtatactaccagtcccagctagctttttgcttgtatcctcatccatccggattgattgtacttatatgattagtattttagtctttagaggaggcatttgattatatatatgtctagtactatgttgattatctctcatgcattattattatttaattaattgtagggg

SEQ ID NO: 6639 - DNA, 934 bp, Oryza sativa
  ref <308>: DATABASE ACCESSION NUMBER: AK063785
  ref <309>: DATABASE ENTRY DATE: 2001-12-06
catactttgctacggctgtttcattgtgggatgcagacttttatgtgaaggttgatgatgacgtgcatgtaaacatagcaacacttggacagattttatctaatcatgcattgaagcccagagtatatattggatgcatgaaatctggacctgtcctaactgagaagggtgtgagatactatgaacctgagcattggaaatttggcgaaccaggaaacaaatattttcggcatgctactggtcaattgtatgctatttcaaaagatctagcaacctacatatctataaacagacatgtcctccacaagtatataaatgaggatgtttcattaggaagttggtttattggattagatgtcgagcatatcgacgaccggagactttgttgtggtactccgcctgattgcgagtggaaagctcaggcggggaacacctgcgccgcgtcattcgactggagatgcagcggcatatgcaactcggaggggaggatctgggaggtgcacaataagtgcgccgaaggggagaaggcgctttggaacgcaaccttctagcgtgaccgaaacaaccggtcaaacaaaaaaaaggaaaaaaccggaagcacaagcaggaacttcctcctgcttatagtaggtgtgctgtacattggccacggtctgtttgtatgtaattcttgtgtagtttttagctgtgatgattcgtttctgtaactgggtctggatgaacaccgacgaagcggaccacaattttacgtagcgtctgtctgccggtggcggtgaaggaggtgggtataccagctgatattgcattctttggagaagaggtaaaatgtttttgagttttttgaggtggtcattttgtatcgatctcctgtactgtatactgtatatggctgccatgatgtatgaccaaaataaaacttacctgatgatgcttc

SEQ ID NO: 6640 - DNA, 794 bp, Oryza sativa
  ref <308>: DATABASE ACCESSION NUMBER: AK063786
  ref <309>: DATABASE ENTRY DATE: 2001-12-06
attccgtttcccccaaactatctcctcgtgaatccatcagcgagtcgccgaagcggaggaagaagcagcagcttgcggcggcggcggcgaggcggagatgtcgtaccttctgccgcatctgcactcggggtgggcggtggaccaggccatcctcgcggaggaggagcgcctcgtcatcatccgcttcggccacgactgggacgagacgtgcatgcagatggatgaggtgctagcggcagtagctgagaccataaagaactttgcggtcatctacctggtcgacatcaccgaggttccagacttcaacaccatgtacgagctgtatgatccgtcgacggtgatgttcttcttccgcaacaagcacatcatgattgatctggggacaggaaacaacaacaagatcaactgggccttgaaggacaagcaggagttcatcgacattgtggagaccgtctacagaggtgctcgcaaagggcgtggtttggtgattgctcccaaggactactccactaaataccgttactaagctatattttgccccacgctgccgttgagtggcccttagtacaagagctgtaagcttatggagttgtggtggggtgttgttgactaaaaactgtaatattgttcgaaactcgagtgtcggaacataatttacatgtcaattggtacatcaatgacaagttgattggtgtggataccaatcatccattaattatcaatactctttccagtcttataagttttaacattttggataaggttgaggtctaataattatacctttaaatatc

SEQ ID NO: 6641 - DNA, 622 bp, Oryza sativa
  ref <308>: DATABASE ACCESSION NUMBER: AK063787
  ref <309>: DATABASE ENTRY DATE: 2001-12-06
ggatcgtccaatcaatccgtcgtcgtcctcctcctccgcctccgtctcaagaatgacagaatcaccgtttttgccgcgcgagaggctctttaagcagcagcagtattttcagaacttgaccaagcacacgtatctgaaagggcgttatgatgtggtcacctccgttgccattcccctcgctcttgccgcctccagcttgtttatgataggccgtggggtgtacaacatgtctcatggagtcgggaaaaaggagtgaacgacatggtttcctctcatttcagtacttcagcataggggtgatagcttcaaggcttcctatggtgtcttttaagttgcacaaataaatactgttgaagttaactcttgttatattactgttggtaactgtggatttctgatttaagcaagctgttgtcaagatgatggtagtattggaatatcagtttgtttacagtatctattaatttctacattcttacctcacctttttctccctttctcagcagtattcatatagccttgtagggctcatggtatatactgtgttgtttgtatgcagcaagtccatgaacagtttcaggctggtgttggtagcctaatctgcatgtttttgttctggagc

SEQ ID NO: 6642 - DNA, 502 bp, Oryza sativa
  ref <308>: DATABASE ACCESSION NUMBER: AK063788
  ref <309>: DATABASE ENTRY DATE: 2001-12-06
accgagcttacattgctgagccccttccggccgcgcttccgctcaatcttgcccatcgtttcggactggaggacgttagtgatgcctacgtgatgagctcatttggtggtcaggaccggcatttcaccaaggagatcggtggccatttgctccatgactttgttggttgaagagcagatatgattgtttcaccaaggagatcggtggtgattattgtaggatgcagatgtatgatctacctatattgtagttggaagtaggaggtgaagaaaagaggggcattggcacgcctgtcgtagatccacgaatgcttgtcgatatttgacattgtggggctatagagagcatatgactatacctttgaagacctgtttgtagtgttgttccctatttgttctgatccgcggttaagccgtgttaaccctgtactattcatctgacttgcaaatgtggttgctcccactctggcaaataaagggtgctcagttaatttgtcgccagc

SEQ ID NO: 6643 - DNA, 701 bp, Oryza sativa
  ref <308>: DATABASE ACCESSION NUMBER: AK063789
  ref <309>: DATABASE ENTRY DATE: 2001-12-06
agggttttcggcaccgagctcgcgccgccgccatcgcacccaccgaaggagggagaggaacccaaagctcggcgccatggtgaacgtgccaaaaactaagaagacttactgtaagaacaaggaatgcaggaagcacaccctacacaaggttacccagtacaagaaaggaaaggatagcctttctgctcaggggaagcgtcgttatgaccgcaagcagtcaggatatggtgggcagacaaagcctgtttttcacaagaaggccaagacaacaaagaagatcgttctgaagctgcagtgccagagctgcaagcactactctcagcacccgatcaagaggtgcaagcactttgaaatcggtggagacaagaagggcaagggaacttcactcttctaagatgctgatattgccctgttccccaattctctgccaggagttagcattaagaatgttcttgtcttgcctttctagtacaagttatatatcctcttgttttcagtcaggtctttttgatacataactacactactagtatgtatgtgatgacaagtgattatcgttgtcacgatcattttgattttcggcgttcccttaggattggctggagatgctgtgtgattgcaacttgtgagtagtccagtcagcttctctgccccatttcactggatcaaaaggatgaaaacctgtcatactgtattgttcc

SEQ ID NO: 6644 - DNA, 874 bp, Oryza sativa
  ref <308>: DATABASE ACCESSION NUMBER: AK104968
  ref <309>: DATABASE ENTRY DATE: 2002-08-28
gaagatgccgccgcccgtgccgccggaggagcggcggaagccttcgccggcggagtcccgccagtggacgcagcgcttcttccaggtcctcggcgccggggagcccctcccggcccccgcggagctccccgctgcctactccgcgctcgtccgcggcgtcctctcctccgccgccgtctcctcctccgcctccccgcgcgtctcctgcacgctcaccgtctcccccgccgccgttaacgggtacaacacgctccacggcggcatggtggcggccgtggcggaggccgtcgggatggcgtgcgcgcgcgccgcggccggcgacaaggagatgttcctcggcgagctcagcaccgcctatctctccgccgcccgactcaattccgaagtggaagttgaagcgcagatactcaggaagggcagatccgtggtggttactacggttgagtttaggctcaaggataccaagaagctctgctattcatctcgagccaccatctacatcatgcctgtggtgagcctgtgaaaaaccacatggtacgtggatgaccaagtgtttgtttacacaacaattactgtgtagtatatatatgtgcatatatagcaaatctatatatgccacattcacaaacatagatgagaacattatcatatgcctatccagcaaccttccaaagctcagatgccttgaaaggcttccctttaagttccgcatccttgttattttcacttggaacttcagccaacaatgaatgtatgttagtcaggacatccagacaagaagtatataaaagattaaaccatgcgagctagtatatgatacagttctgttttcacgctttgaccttcaagtcttattgctccgcagtattcatcc

SEQ ID NO: 6645 - DNA, 635 bp, Oryza sativa
  ref <308>: DATABASE ACCESSION NUMBER: AK063790
  ref <309>: DATABASE ENTRY DATE: 2001-12-06
ctgcaaccttatgcccagcgttctgtggtttctcgcctatttcccaagttggctttcaagtactttggtcccttcgagattctggctgcgattgggtcggtggcttataaactcaagttacctgaggattgtctcatccatcccgtgtttcatgtttctcaattgaagccctttattccggataacaagcctgtgttttctctgttaccgactgctgctcagttggatattgctgaattacttccttcagagattttggactgggcacatggtgaaaaaggcaatgctgcggtggttcagattctggtgggttggggctctcttcctgctgctttggcaacctgggaggattttgatgttgttcgcacaagatttccagatgctgtcgcttggggacaagctccaattccagggggagcaactgttacgcctgtgccggatgagccacagtgaaggcgggattcagaaatgtgtaatcgagtagcagatacgtatgaaatgggtctgttgagtttagatgctaatatgtgggaccgggggttgttgagttgtgtgtgaggcgtatataacgctagcctgtaagcgtgagacaatctatcgatgaaatggaaaaatattctccgtcctctacttct

SEQ ID NO: 6646 - DNA, 652 bp, Oryza sativa
  ref <308>: DATABASE ACCESSION NUMBER: AK063791
  ref <309>: DATABASE ENTRY DATE: 2001-12-06
tcctaataagacttgatgacaacaaccatcacaggggtgcttctgacattcaaataaacaacctgccactatctgtagttgaggtctgaatcggtcttgctcgatatggatatgctttttttttttttgggggggggggggggggatttagtagagctaatcttgcattctcctttttatcagggagagagttgttctgatgaaccctgtcctatatgcctggattgccctgctgctggtgaatacctccggcgtttaccgtgcctgcataaatttcataaagagtgcattgacaaatggcttcggatgaggatttcatgcccagtatgcaaatctgaggtgatctgacaggagtccataccattggcaagtaatttttttttttggaatagcatgacaaaccgtgtccatacggaccaccatcggaaatattttttggaatagcatgaatatctgtttaagccgtctcttttttttaccaatagaaagcgttgttacttgtaacctgttagctgttactgccggtgccgcagtgtgtaaatagcacggtagtgtgtgctgctttctgctctttcatggatctctatgaacatgagatatttgaaagctgtggagtattttacgctgcgagaagaaaagaaaggcatttcat

SEQ ID NO: 6647 - DNA, 837 bp, Oryza sativa
  ref <308>: DATABASE ACCESSION NUMBER: AK063792
  ref <309>: DATABASE ENTRY DATE: 2001-12-06
tgtgatgcttgttaaaatgtgtgtgagaggcggtcggttcgtggaggctgcaaactaccttgttgagatgagtgaagctggattcgctcctcgtgctccgacctttaattctgtagttgacgggttgcggcattgtgggaagcatgatctagctcagaggatggagcagcttgagatgtcgatgaatgggaattgaatggattatgaactgtatccagttctctttttccattgggccttgcaaatggcatggcagtgctcctggatttccaggatctcaggttggcttgatgaggactccataattatctgcaattgatggggatgtttgaatgttgcactttgctcgtgccgtttagaatattcttacatttggatgttctagagctaaacataatcacgagaattgtgatgcttctatggaattgatcctgcatccaataggataacactgtaaatgaatcgatcagactggcagcaagtcatagaaaagggtgaattccttattgtaccaaaattttcatttggttgctgttgtcttgtgcattaatgtaattttcacaatcttgtaaggaagtgaggtgagtgtggactatgaggaattgttgatgtaaacagcgaagcataatccttgtgaactgtgattatcattggttgcactaaatagcagatttaggcatgccttcaaaactgggaagtagagtgggctaaagtaggcactaggcagtactggaatgtggatactggatgtctggatgttgaagaaggtgcaatcagaacccaatatgtaaatgatgcagtgaagagtgatgctgacgatcttgttttgttcccttt

SEQ ID NO: 6648 - DNA, 982 bp, Oryza sativa
  ref <308>: DATABASE ACCESSION NUMBER: AK104969
  ref <309>: DATABASE ENTRY DATE: 2002-08-28
acgagctccccgccgctgctgctcgccctaggggccccgacgctccagcggtaaaccctacctcctcctcctcctccgtcgccgggatggggtccacctcctcgccgtccccgccgccgccgccgatgatcgggagggccgggaacctcaccgtcttcatcacgccgccgtcgccggcgagcacgccgcgctcctcgcgcccgtccgagtcccctcggtcgggcttctcgaccccggcgacggccccgcgcacggccgcctcgccgtcgccgccgtctccggctccctcgccgcagcagcagagggtggccagcccgccgcccacgatcccggtgaagttctccccgcctgcggctccggtgaaggtccctcctccgcctccggtgcaggtgcccccgccgcagtacgagaaggcctccgcggggggcaagcacgacggatcggcgtttggtttcttctgggacgccgtcgcgcgcgtgcaggaagcccacgcgagcctcgacgagtacgtggcgaactggtttgggctggatcaatccaagtaccaatgggctctcaacgactactacgagagcaccggcaaggaagtggagtgtggcaaagctggcaagccaaaggagcttactactagcaaagtgcagaaagtttagaaggtctgttcacatgataaaaccagcagttcttttctggaattacgctgaggagcattttgcagcgacttctttctgggttgaatgtgtagctaagcaaatgtgtggagaagttcgatttgttagatcttgggggcgtaaaggtggttgtctgtttttcaactgcatggagtctcttggcaggtttacgggctgcgctggaagggaattgagactgctaggcgttttgttcactcctgccaggatctctattgtaatcctatgttatgacaaaattgcatattcgcaatgcctaatagtgtttttttttttttgccttccgtgaaatatgc

SEQ ID NO: 6649 - DNA, 577 bp, Oryza sativa
  ref <308>: DATABASE ACCESSION NUMBER: AK063793
  ref <309>: DATABASE ENTRY DATE: 2001-12-06
catgttgatgatgaaattacacaagaaaagattgctctggcaccagctccaaggcgcctggtgtttgagtggcaattacagctggcccgtcgatttagtccattctaatttttgcagaggaatttgtacattaaatatctaactaatgcaaagtacatatgtgcattttctgccttaatgaggaaaggattattggcgaagccattgtagatgggatcaggcaagctaaacctcctttcatgggcatttggcactttagaactctgcggaacttgtagatggtattgaatagaagtggaagctacatgattggaaaccacatcttttttctcttcttgtacatagtgttgtatattatatcagtatatcactcaaggcttgtaaccatgcttatattctactgtagaaccttgtaatcatgggtaattttagtaaagcagataatattactatctagctaatctagaagctcatgctgtacttagattgatatagcaagacacttttgcagtgttcccgacagcaatcggtatattgtagcaactgcccagtccttaagttctgttccaagttacac

SEQ ID NO: 6650 - DNA, 780 bp, Oryza sativa
  ref <308>: DATABASE ACCESSION NUMBER: AK063794
  ref <309>: DATABASE ENTRY DATE: 2001-12-06
gtgccgccagccaaacctctgccgcgctcctcctcctctcctctcctctcctctcctctcccggtggcggcgcggccaactccagccatgtcggactccaaggccgcggcggcggtcaccctccgcacccgcaagttcatgaccaaccgcctcctctcccgcaagcaattcgtgctcgaggtgatccaccccggccggcccaacgtctccaaggctgagctgaaggagaagctggccaagctgtacgaggtgaaggacgcgaactgcatcttcgtgttcaagttccgcacccacttcggtggaggcaagtccaccggattcggcctcatctacgataacctcgacgccgcgaagaagtacgagcccaagtaccgcctcatcaggaatggtcttgctaccaaggttgagaaatctcgcaagcaaatgaaagaacgcaagaacagagctaagaagatccgtggtgtcaagaagaccaaggctggtgatgccgggaaaaagaagtgaaaactcatttacatttgtactactggctctgggaacactgttgggtctagtggcaatggcgtaatcatgtttctgttagttttttgttgttttccctcgtcactgaagtcaagttttgtgattgtggatggaacttagctagtttggctatagcatgttatgatgttaaatttatgctagcgttagaggtactcattggaaggctgtaacttgtaagccgacctgttttatcttgcaaattattatgtggtttgattatccctttttctcctcagc

SEQ ID NO: 6651 - DNA, 732 bp, Oryza sativa
  ref <308>: DATABASE ACCESSION NUMBER: AK063795
  ref <309>: DATABASE ENTRY DATE: 2001-12-06
ctaatccagcatcagtcccagctcgatctccctacaactcgcaaggaaaatcctctgaatctctcccatggaaggcatcatcccgttcatcttcaaggcggtagcgcagtacaaggagggagggcacgtatccctcagcgacatgatctccgacaggccgtcgccggcgtcgtacgtgctcctgccgggggactctgacggccgacacgccgatgacaagacccagccacttcgtcttcaggcttccaccggctccgaggaggaggtcaccacctgcaccgcccgggcgtcgcacctccggtgctccacgctgcgccggcgagcttaggatgccgtgaactgctacgccgatcaaactgcaggtgccagtcgttcagacaatttgaggtttgtggtgctgtgcttgtgcagtgcagacagtgagagatgtaaggagcctagtactttagctagtttgggcttttcagcctatagcatctataagcgacctttactttttttttttagctgtttatgctctgtaacgaggtgcaggtctccaaagggaagatttgtgcgtcgaagggcgaaacgctttgtatcttgagaaaaacgaatttgtaaaacaatactgtgcgtgtaactgtataaatttggtgataggttctgtatgcagagaggtacgcatatgcaagtgctatctcggtcactgtgattgatttgcctctgaagaaaaaattctcctgttacctg

SEQ ID NO: 6652 - DNA, 935 bp, Oryza sativa
  ref <308>: DATABASE ACCESSION NUMBER: AK063796
  ref <309>: DATABASE ENTRY DATE: 2001-12-06
gtacaataatagacgcccagggtagcaacaaaatgggccgatgagcagcaactatatatgtaccaacaaagtgcagggcaaattcagctgcaagaaggaccaatggcgccgatgaaagtgtacgggtgggtggtatcgccatggatggcgcgggtgctggtggccctggaggaggccggcgccgagtacgaggtcgttccgatgagcaggtccggcggcgaccaccgccggccggagcacctcgccagaaacccgttcggtgagattccagtactggaggatggcgacctgacgctctatcaatcgcgagcaatcgctaggtacatctttcgcaagtacaaaccagagttcctgggactcggagaaggtggaagcctggaggagtcggcaatggtggacgtgtggctggacgtggaagcccaccagcacgaggccgccgtgaggcccatcctgtggcactgcatcatcaacaagttcgagggccgcgaccgcgaccagggcgtcgtggacgagagcgtccggaagctggagaaggtgctcggggtgtacgaggcgaggctgtcgggctccaggtacctcgccggcgaccgcatcagcctcgcggacctcagccacttctccaacatgcgctacttcatggcgacggagtacgccggcgtggtcgacgcgtacccgcacgtgaaggcgtggtgggaggcgctgctggccaggccgacggtgcagaaggtgatggccggcatgccaccggatttcggcttcggaagtgggaacataccatagtgtgcttgctgttgtccagctttgcagcttgttattagcatgtctgcatttccaataaatgggatagccagctctgagaacctccaaacaatgtcaatgctctgcatcaggcgctcgttgcagaagcaaaaaatcatggcgttgctttttcttct

SEQ ID NO: 6653 - DNA, 529 bp, Oryza sativa
  ref <308>: DATABASE ACCESSION NUMBER: AK063797
  ref <309>: DATABASE ENTRY DATE: 2001-12-06
atatatcaagcatacacaagaaggatttattgaaggccaaccatggcgtctcttagagccaccacactccttgtgttgatgcaaattattatggtgttttacaccgtcatcttaagctgctcgttttctgatgcccgaactttcccaggcggagaaggtgggttagacccaaatcatccagtatgcgttggcggcgcgtgtccaacaccaggtctaccatacactaatccacgtgatccttgcatataccgtaacaggtgcaatccaccaggacggatgggtgatccataagtaattttcatcatcaatatttatcgttgtgatccagtatacgtccacatcgtccacatgacaatagtgtgtgtttgtgtatgttatactagtattcactagctgctcacactgcatgagagctagttaattaagagaatgtctatgtatgacaaataatgtactgtggtactatatatgtatccccctgtctcggcaatatatggattaataagacatgtgtactctggatctgatt

SEQ ID NO: 6654 - DNA, 872 bp, Oryza sativa
  ref <308>: DATABASE ACCESSION NUMBER: AK063798
  ref <309>: DATABASE ENTRY DATE: 2001-12-06
acgccggccggagaatccgcctgccatggattattactaccccatggaggaggaggaggaggtgcacgagcgcccaagattccggcgcccggtccacccgtggcagtggcaccattggcagaatctcctcggcctcctctcgtcgtcgtctccgtctccggcgacggcggcggcggcgcagaggtgcagccatgtcagctgggaggagaccgccgccgcgcacctctactccgccagcctccccggtaatcaatcaaaaacatcatctcatcgaatcttttggtgctttgatttccttgattgatacgaagagaggaatggtggggttaggtgtgaggaaggaggagatcagggtggaggtggaggacgcgatgtacctcgtcatccgcaccgagcttgatgacggtggcgatggcgacggcggaggcggcggtggccggaggagcttcgcgaggaagttccggctgccggcgatggtggacgccgacggcatctcggcggagtacacccacggcgtgctcagggtaaccgtcccgaggctgcatacgcgggctcgccccgtcgtcaacctcgccggcggcggcggcggtggcggtggcccggcctgcgaccccgtcgcccgagcagcctgattagtgattcgatatcaatcaagaaaattacttaattacttatttaagttgcactgtgagcttaggattggggaagtaatagcagtatagtgaactgtacaattctcaggcatttcagaatttcagaaaattgccaaattggcagtgcctgttcgttatcttgtagtatcagttgttttttgtgctatagtactctatttctgttctgtcgcagtaaaacgtgaaggatttagttttgac

SEQ ID NO: 6655 - DNA, 1112 bp, Oryza sativa
  ref <308>: DATABASE ACCESSION NUMBER: AK063799
  ref <309>: DATABASE ENTRY DATE: 2001-12-06
gggcagaggacggcgtgggtgggcggtggagcaggcgagctccggcagcggcggcgggcgttgtcggcgccgccccccgaccggagcgccgccgctccgcgtgaaggcgagcagcgcggcggcgccctggaagacgccatcgacgccgccatccatgtcgccgccgccgaccacccggacgccctccgcgcgcgccgggacggcattgccaagctcctctacaccgcgctcgtcgtcctcccgccgctgcttcacaagccgcctacgtcgcgctctcccctcccgacgccgtgctccgcctcctcgcctccctcccctgtgcccccaatttcttcatgctcaacacacgctctgtgccctagcatcctcccccggcccggcctccgccctcggcttcttctccctcctccgccgcgacagcggcaacagcagcggcggcggcggcggctcgtactcgcctcactccctcccgggcacgcgcgtatgggaaagggaaagaataacgaaggagccgagctccctcctctcccgccggcgagctggaagggcggcggacggctaggcaagctccctggcctaccggcgagcgcgcgtgcgtcgctccctcctctcccgccggcgccgctcctgtgcgtcagccatccgtgtgcggttcgtgcgaggcgccgctccgggtgtgcaggcttccgcgcgcctccttcctcgctcgccgtcgccctcccttcgactggtaagtgattcgctctgctccctgtgcgtgcgtagcttcgagttagagatggcgaatttgagttaactccggagctcttgaacttctgaaattgtttcggattctgtgtgccttgttcttaatcgagtgtggtttcaatgtgcgcgtgtgtttctggaagttcagtggattggaggaagggaattggtttgaactttgaactaacttggagttcctcggttggatttgagcatctgtgatgaagcagtggagaatcgcctcatgaattgcttgtctgtgtttgcattgcggtgatttgaaccttgctggttgctgctgtgatttcagtttggtcgcaacataacccagtgaagcagttctggtgctgctgtttgaatcctct

SEQ ID NO: 6656 - DNA, 526 bp, Oryza sativa
  ref <308>: DATABASE ACCESSION NUMBER: AK063800
  ref <309>: DATABASE ENTRY DATE: 2001-12-06
gcattcctcctccttaccttgccctaggtcgagtcgacgcgacgagatttgcggcggcgatggctctcccggcgtcgagctccggcctcttccgcttcatctctccacggcgccgcccccagtccaccgacatcgccgccgccgccacctggggcgtcttcgccggcaccgccgccatctacctcgtccagccatttgactggattaagaaaactttctttgagaaacccgaaccagaggcataagtctgccaggcatatggaaggctgcaacttttgatacatttacgtttccgggatgatttctgagtgaagagaacttggatgaccctgcaaataatataaaagacagtcatgttcccttgtttgattttaatgtaggtttctcttgcatgtaaaccccaggaggggaatgatgattatattgagttatttctcatctcagcgaaacctttttcttggttttttctcatctcagcgaaacctttttcttggtttagcagtgatataaattcgtggtcctgatg

SEQ ID NO: 6657 - DNA, 517 bp, Oryza sativa
  ref <308>: DATABASE ACCESSION NUMBER: AK063801
  ref <309>: DATABASE ENTRY DATE: 2001-12-06
agatgaagaggaatcctcgtaaggttaaatggacaaaagtatacagatgctcccgaagaaggataccatgctgtcaacacaaaagacaaaggtcgtggtcaaagtttctcagcagcagaccgaagaaaatcttatggaagagtaatgaaatggaatcatgttgcatgcgctctcattttgtcatctttatgcaacacttgtgtttctaattgttactttgcaagttgtatttgactgattaccagcaagttttgcacgtactgtgtgcctgtgtgctttgtgacttccatctatatttgagccttgggcctagtaatggtgtctgtgcggacttgcgctaagcccaaggtggtgtgcaccctagggctaaccctaggatatctctaatcatatttattttatttagtagccattattgtttagagttggattttgcttagattattatgccaaatataatttcgcagctaattcgatttgtagaactccaacttcaagtgcctaatcatttatttgc

SEQ ID NO: 6658 - DNA, 455 bp, Oryza sativa
  ref <308>: DATABASE ACCESSION NUMBER: AK063802
  ref <309>: DATABASE ENTRY DATE: 2001-12-06
caccgccaccgccaccgcgaggaagacgcggtcgccgtagcagccacgtctcctccaccacctcgtctccctctcgagagagacaccgcgcgtctcgtctcgtctcatggcgccgccgcctcgggctcgcttggtgcagatcgggacccgccgccgccgctgccggggccggatcccgccttgcaccaagtgaatcggagccggcgtagcgccctccttccgccgatccgccgccgatgctgcgctgcttggttgtttttattgtctctccttcgtttctgggtcggtatcgggacggggttagcgatgaatcggatcgaattgctgatcctcctcgtgttcgtgttcgtaggtgtggggcgtacgcgtttgtattagatttaatttttttttcagatctagatctggtgcctaattctcgattacttattctatctatgattcgtgtcggcgtt

SEQ ID NO: 6659 - DNA, 605 bp, Oryza sativa
  ref <308>: DATABASE ACCESSION NUMBER: AK104970
  ref <309>: DATABASE ENTRY DATE: 2002-08-28
acacgcagtgacgcagacgcagccgaatccgaggagaagagagagaaagcgcgtggccggcggcgagaggagcggcggcgatgggcggcggcgggcacggcggcggcacgacgtacaaggggtacaccatcccccacaacaagcgctggcacaccgtcgccggcaagggcctctgcgccgtcatgtggttttgggttttctacagggctaagcaggacggtgctgttctcttgggcatgcgtcatccttgggatggtcatgatgatcactcacatggtcatgggcatgagcatgagggatcatcatcaacatcgtcgtctcactaaatcaactgcttcttggcggctgagggagactcgctgctttggttgtcgcgatgaaatcctcgaagataataaagtttcacactattaattttattaagatgggttcatgttgttggcaactgtttaaggcaaactggttatgtattttgcttttgagatagcctccctcgatggaaaacccatgtatgttgttgcttattaggctgtgtacatccttttggatgtagaggctgggtttttaatccattatctaaaaaaatgttgttgcttcttgtgatc

SEQ ID NO: 6660 - DNA, 591 bp, Oryza sativa
  ref <308>: DATABASE ACCESSION NUMBER: AK063803
  ref <309>: DATABASE ENTRY DATE: 2001-12-06
gacgtgcagacaaaaacctcgaggccagcagttgttgacgatgggtacgatgaagaagaacacagtgaaaccctatgtggaacctgcggtggccgctacaacgccaacgagttttggattgggtgcgacatttgcgagcggtggttccacggcaaatgcgttaggataacaccagcgaaagcggaacacataaagcactacaagtgccctgattgcagcagctccaagaagagtaggcaataaaaaccatggagctgctgctgtggctctctactgctgactaagctgatcaatcaaatgatacttgccatccctcttccagtcccaagttggcggcagatgtgaagaatttgctctagaacattgcgcactgttgtggtagatgctggaaaacaaaaaagaagaaactttacaggatagtttgtttcataaactggtcggttactgttgtggttgttcatttgagatatggatactgttacattgtagcctttagaggaaatttgttcatgccttgtttctaatttggtatgtccttcccttgctgcatgacattgatttctctctacaagtttctgtctgtcactgtgc

SEQ ID NO: 6661 - DNA, 1043 bp, Oryza sativa
  ref <308>: DATABASE ACCESSION NUMBER: AK063804
  ref <309>: DATABASE ENTRY DATE: 2001-12-06
atgccgcaggcagggcgcaccccccaccacgttatcctcatgtcctgttccttccgcttccactcctccgccctacccgcagccgctgcacggctccacctctcccgcggactccggccgccaccgtcacgccgtcgcctgcacaacacattctcacccaccctttccatctccccgccctcccgtcacgccgccatcgccgccgccgccgcttctcccctcggcgcatctcaggaggcatcggcgatggcggtgtccgcgtcggagggcgttggccagtacgatctgctgattgttgggcctggcgtgcttggccggattgtggcggagagatggcagcaggagcatccaggttgcaaaatttttggtcatactgcaaccacagatcatcacagtgaattgactcaacttgggatcattccctccttgaaaggaccagctgttcagaaagttccgtacgttattttctgcgctcctccttatcggacagatgattacccaggagatctgagagtggcagcatcaaactggaatggacaaggctctttcctgtttacatcgagcactgctgtgtatgactgcagtgacaatggattatgtagtgaggatgctgcttctcttgcaattgccattatgaaaaggagactacgtgctcgtgtttttgttggttgtgacaatcagcctctatctaggcaagaaataatggaccttgttaatagaagtgggaaatttgatacgaagtttcaaggcttcacagggactgatggtcctttagggaagaggatggagaattccaaaactcgtgctgagattgggtggcaaccgaagtatccaagcttcacagaattccttggtttgagcaattagtatccatgtatatcacaacattttacggtttcaattcaatattaaagcattgatgtgaatgtgattcctctggcagttgttttttctttggttattctcagtatgtgagagcatatgtgttgatttgatttgtaatgtatgataattcattattacataatcgactgtaccatacc

SEQ ID NO: 6662 - DNA, 522 bp, Oryza sativa
  ref <308>: DATABASE ACCESSION NUMBER: AK063805
  ref <309>: DATABASE ENTRY DATE: 2001-12-06
cagatgtgtatagcttcggcgtgctactgatggaaatggttaccggccggcgaccaagctggccggtgaagatcaacatgaaagggaaagaggtagagatgctgaaatgggctagggataaggtagacaagggccaggcattggagatcctggaccgtcagatggggatccaatgggaagggagagaggctgaccaagatgaaatgatagcgtatttggatgtggcacggcgttgcacggaggagagccctaagcaccggccatccatggaagaagtggttgagatgctcaacaagatctaaacctgattgagagcacatagattgaaatgctttagatagctgtagccatgtgaagttcaatcaaacttccggttagattttctgtctagtttgggctgattatgatgcaagatcatactttggaattgggaattaattataaaccatggtgagtatgaatgttgaagggcaaacatgccaatgcctatcgttgtatggtaatgtttgtaacttggtgatg

SEQ ID NO: 6663 - DNA, 863 bp, Oryza sativa
  ref <308>: DATABASE ACCESSION NUMBER: AK063806
  ref <309>: DATABASE ENTRY DATE: 2001-12-06
gcttcgcttctccgcagccgccgccgccgccgccgcgttccaccacctaccacccccaccggagaagaagaagaaaaaggagaggaagatggtgtcgggttcggggctgtgcacgcggcgggtggtggtggacgcgcggcaccacatgctggggcggctggcgtcgctggtggcgaaggagctcctgaacgggcagcgggtggtggtggtgcggtgcgaggagatgtgcatctccggcgggctcgtccggcagaagatgaagtacctccggttcctccgcaagcggatgaacaccaagccctcccatggccccatccacttccgcgccccctcccgcatcttctggcgcaccgtccgcggcatgatcccccacaagaccccccgcggcgaggccgccctcgccaacctcaaggccttcgacggcgtcccccctccctacgaccgcaccaagcgcatggtcgtccccgacgccctcaaggttcttcgcctccagcccggccacaagtactgcctcctcggccagctctccaaggaggtcggctggaactaccacgacaccatcagggaattggaggagaagagaaaggagaaggctaaggttgcatacgagaggaggaagcaattaacaaggcttcgtgtcaaggctgagaaagctgctgaggagaagctgggttctcagatagatattttggccccaatcaaatattgattggcctgattgtcatcaattttcttttcgcctttataatatttctgcttatcggtaccatgagaagtgaaatgatatgtctgtcgaaacatgataattttgttccaattgaatactagagagttatattggcttgatctgattttccctcttg

SEQ ID NO: 6664 - DNA, 666 bp, Oryza sativa
  ref <308>: DATABASE ACCESSION NUMBER: AK063807
  ref <309>: DATABASE ENTRY DATE: 2001-12-06
gttgcagacagtcagatggctcggacatggaaataatactcggtggcttagcttcccttagtgatgagctctcttggttcaagaaggaagctgaaaaatggagtgttaatctagctgaagtttctcctctgaaatccaatacagaatactgcaggtttctccaaagcttcagcgagccagagatcagctacgttgttgccataactaccttttggataattgaaaccgtgtaccaggatagctttgctttctgtatagaagaaggcaacaagacgccacctgaactcctggggacctgccagagatggggaagccctgagttcaagcagtactgccagtctctgcagagaattgcagatcgctgcctcgcagaagcgtcagctgatgctgcgaggagtgctgaagaggccttccttcgggtgcttgagctggaaattggtttctgggacatgagctcttctcgatcatgaacggcaacagcatctcgatcatgaactacttgggagaaataatcgaataatggtgcagccggttccataccgaaccctgcagtgtactactgtgttttcctcttccttttatccccatttctctccttactcccatgaacattgatgtatcatcgtaactatgaaataaatgaaataatgccgtttcctcctaatc

SEQ ID NO: 6665 - DNA, 863 bp, Oryza sativa
  ref <308>: DATABASE ACCESSION NUMBER: AK063808
  ref <309>: DATABASE ENTRY DATE: 2001-12-06
ttgaaatgtttgagttaagttggaagaaagtccttgataagtatgacttgcatgacaactcatggctccagtctctgtacagaattcggcaaaaatgggttcctgtatatttcaaaggtgtatttactgctgatctttcagcatctcagagacctgaaagcttgagaaacatctttgagaagtacttcaacagaagaacagctttaccagttttcatttcattgtttgagcatctgatggccggttggtcagaaagagaagctgtggaggatctggccacatcttttaccagacctgtcctaagaaccccctcaaacatgatgaaacaagtgtcagaaatatacacaacaactgtgttcaacattcttgaggaagaattcattggatctttaggctattatatctctagtcttgacaatgatgggttgattgctgtgtatagtgtcacaaaggaggatactgaagccacatgcagagtcaggtatgatacttctggcaatatagctaagtgcagctgctgcaagtttgagagttgtggtatcttgtgccggcatatactaagagtattcttggcccttgatgtacgcaccataccagatgtatacatattgaaacggtggacaaaagaagcaaagaatggctttgtgttggacgaatgcttgcggtacagtgagcttcaccgtgatgcccttagatatgcaagggaaggatcaacgtctggggaagtttttacctttgcacaacaaactcttcaggttgcttttgctgaggtggttcaaatgaaacaggaaacttttagccaatgtacaatccgatgaactttgatgctatacagattgagtaaaagataactcttccagtgc

SEQ ID NO: 6666 - DNA, 447 bp, Oryza sativa
  ref <308>: DATABASE ACCESSION NUMBER: AK063809
  ref <309>: DATABASE ENTRY DATE: 2001-12-06
tgcaaaggaggcgaaagaaacacaggaacttaatggtggggtggaagaagctgctggtgctgagcctgatgaagaggtagcttctatggatgtcaaggatcgtataaagaaggtagcctcaatgaagaaaaagaagtcaagcaaagagatggacacagcagcaaagattgctgcatctgaggccgcagcaaggagcgcgaagcttgcagctgcgaagaagaaagagaagagccattacaaccagcagcctgtgcggtgaattactgcccagattttggatgtcgaaaactcctaatacaatccttgttcgctctggactcacaatagacaatgttggtccactgtacttatgttgacttggggttgtaggaggttccttctgaactgttcatcacaggaaaccttttgaatcttgattacatgcaaaaatacagtacatttcgcgcc

SEQ ID NO: 6667 - DNA, 561 bp, Oryza sativa
  ref <308>: DATABASE ACCESSION NUMBER: AK063810
  ref <309>: DATABASE ENTRY DATE: 2001-12-06
gaatttgaataagcagttccgtgtatttgaagctgccccacatgaatcaagaggtgttcctgcaaagaggccagcgccagattactttctgtgaggccgcagattcagcagtgggtacagcgtatcctgcaaacaagcaccggcggattaagtcttgcgagctcccattttctgagatgagctgagctcatgctttacaagactcttaagccaggagtgctttcgagatgtataaattgattttatgtccccagtcctatcatttgtaagccaagagagtggctcacatttgagcttgagaaaatgcccctgtgaagggagtggtgtagatgaggccactcctttgattccatgggtgtgcgttggtccatgatgtaaaattttgttgctagcccgtttgccccctaggaaatcctgtgctggagaatgatatgcaaatgctgtgcctgagtatttattgttgtcagaatgcaaatgcaggaagttttgtagttggcatttgtacaaactgtccgaagaatgcatatccattcctgctaggaaatgccagtatgtgatggt

SEQ ID NO: 6668 - DNA, 585 bp, Oryza sativa
  ref <308>: DATABASE ACCESSION NUMBER: AK063811
  ref <309>: DATABASE ENTRY DATE: 2001-12-06
ctgaatcatggctccatccacctcatgacataaagataatgccacataatgcgaaggtcccagcgagtttgttcagtggctcgtagctcattctatccatttccgatggagaaccgtaacacccattatggtttctgtgtccgacccgagagtatgaactgccatgccactgcatctggttagctgatgaataaagcttgggtacacccaacccaacatacgtggcgccaactcagcaagatgtggctagtgctgcgattgacagaagagaagtgatggttgttatgttctgtaccgttatttgaggatgatttcggtctgacaggcgtggttttctgtttccaagacatccagaggactaaacaaccaaccaaatgatggttgctaataagaattgttttccaatcatccatcttgtttctcattgttctattctccttttggatgagatatgtaaaacacacatgattcgtattccgttaacagtaaaatctcccaaattatgggtaatccttttccttcaagcttcttttgaatgatcagcaagcaaggaatggataaacatatacagtatttgaatttgac

SEQ ID NO: 6669 - DNA, 869 bp, Oryza sativa
  ref <308>: DATABASE ACCESSION NUMBER: AK063812
  ref <309>: DATABASE ENTRY DATE: 2001-12-06
aacagctcttgaactacaggagaagttcagagaaaacttacaatgggggcatcgccgtcgcgagaagaggcgcattccaactcttctttctctgggaacggcaaagccatggcggtggcaagcagcgcttccagttctggtagcaaccaggcccaatcaaagagagcaccagctcttcacatgttccaagagattgttgccgagaaggattttactgcatcttcactggaagatcagatctacaccggcatcttcttggcagggaaaacaaagaagtactgggtggatgagagaactaggaacaactgcttcatgctgtttcccagaggcttgtctatcacttggagtgaagaccccagattctggacttggaaacctctgaaagaaggaagcagtgatgctgacactgacacccagatcgaagtgccgtcgctgcagaacgtctgctggttagagatccatgggaagcttgaacggtcctatcttacaccaggagtcacctatgaggttctctttgaagtaatgcttattgatcctgcatacgggtggtctgtcccagtgaaccttcagctcaagttccctgatggaacagtccagcagcgtaaagagaatcttgaggagaagatcaggatgaaatggctggagctcaaggtcggggaggtgaaaacccagcaggggcagaagggagagattgagatatccatgtttgagtatgatggtgggctgtggaagagagggctactaatcaagggaatcaagattctcccaaaacaatgatgtgttactcttcgatgatcattgatcattagctatattttgtcagttatgttaagatccacacaaagtatcagaataatgtgcttgctgct

SEQ ID NO: 6670 - DNA, 420 bp, Oryza sativa
  ref <308>: DATABASE ACCESSION NUMBER: AK063813
  ref <309>: DATABASE ENTRY DATE: 2001-12-06
tttgttgatccagtgatgcttaagaagagtcttcaaattggactagaaaagtttggctgagcatgggagtagcaccgaagcagattcaaggttgctagttcttcgtggtttctagattgtatttcctggtactgtcagaattatgttgtcggtttgtattttcacctctattgtgccttattttgatactgtcgtattaacttgtgttaaaacatttgtcattttctagttatctgttcgtgagacgggttgctgttttctagtagaatgatattgcacgggatcgcccatgatggatgatgttctagctattagtctttgttgttggtgtgatgcccgcgatggtgcagctgatgattgtggtgatggcgctgatgctgattatgggcagatcttggtattgacacactgatgttgttc

SEQ ID NO: 6671 - DNA, 716 bp, Oryza sativa
  ref <308>: DATABASE ACCESSION NUMBER: AK063814
  ref <309>: DATABASE ENTRY DATE: 2001-12-06
tcttcaggtttgcctgtcctggcgaaggccttcccccagagattgttcaagacatgtttagtaactcccgctggacaacccaagagggtattggcctaagcatatgcaggaagatcctaaaattgatgggtggcgaggtccaatatataagggagtcggagcggagtttcttccatatcgtacttgagctgccccagcctcagcaagcagcaagtagggggacaagctgatatggtgtatgctcgtcgctaacctcgcataactattcggtcaaccaggtgacctgggatcttctgatggagaacccagtttatgagagttccagaaaccaacatttcgtccactctgatgaagcacatctgaactttggaacggcatcggtgattctcggtgtcgaggtggtccctccagtctcctgattcctggcatgcccgactgtaagttcagctttggacgatgttgttctattagagttctatggcggcaagcaatgcacactgacggtcatgtaactcgtagcataggcccactaccacttggttgaagtacatatatgttctaaaagctgccatgtatataacatcggttatatatgtactacgtgcataaggagagctgtgcagctcccagggtggtattttgtagggcttcccaagcctatgacatcttattatatcatcttaacataaaagcatttggtttccttggatgtcggc

SEQ ID NO: 6672 - DNA, 528 bp, Oryza sativa
  ref <308>: DATABASE ACCESSION NUMBER: AK063815
  ref <309>: DATABASE ENTRY DATE: 2001-12-06
acgcacgccacgcgcaaacccgatctctccaaccttgcgaaggcgaagcccccgtgagatctccggccgccgccgccgccgccatggacgccgtcgactcggtggtcgacccgctgcgcgagttcgccaaggacagcgtccgcctcgtcaagcgctgccacaagcccgaccgcaaggagttcaccaaggtggcggcgaggacggcgatcgggttcgtcgtcatgggcttcgtcggcttcttcgtcaagctcatcttcatccccatcaacaacatcatcgtcggatccggctgatttgagcactaaggcaagaattcgcaggagttgagggtggcgtcaaacatcgcagagacggctccacttctccgttcctgatgatttcgtaaagcaatctctgtaggaccttgttgttgagtacaattccccatttctttcatttgaaagaaacaaaatacattttgctgcctggaacgttttgtacctgataccgagtaaactttatgaagtagtagagagtaacaaagtttac

SEQ ID NO: 6673 - DNA, 979 bp, Oryza sativa
  ref <308>: DATABASE ACCESSION NUMBER: AK063816
  ref <309>: DATABASE ENTRY DATE: 2001-12-06
gcagctccctcttttttcctctctcttcccgtctttctccgcctctctccctcctcactttctccgtttattcctctccctcaacgttgccggccgatccaccacatcgtcgacggcctatccacaacatcgtcgcaggccttctttttccctcgagttgccggccagatccacgatgccatcaccatggaggtcctcctggagggcgaagacgtggaggcggtggtggtattcggaggcgagcagcttgaggcggagagagtggtcggagacggggaggccgagtgagccacggatggattcgcctcgctcgccatctcctcctctccatctcgcctccctcccgcggtagatccggcatcgatggcggcgtcggcggcggccgcgggtggatccggcggcggatgaggacggatccagcggcgacggctccctctgccccctctctcctccctcccacggtggatctgacagcggggacggcgaccgcgtgtggatccggtggcggtggcgctggctgagagtggatcgggtggcagcagcttcctcctgcggcggattcgagggcagcggctcctctagcagttatccggtggctgctgctcccccctccccggagtggcggccgacagctgcttccctcccctggtgttggcagcaactccccgcctccctggctgcccctcacctccccgacgtggagccgacggtggtttgatttttttatttgtgaatattttgaggattttgtgatttggaatgttgatatagtaaccacagtacgacgccggtttgatttgggatgttgattttgtggagattttttattttggtttgggattgcaattgagtaattttgttattcatgtattttgggaattaggggcaatgggattgggagcaattgactcgattagccgattgatcgagttggcttcttttattttcactccaatgccgattgatatatatttgtttt

SEQ ID NO: 6674 - DNA, 1329 bp, Oryza sativa
  ref <308>: DATABASE ACCESSION NUMBER: AK063817
  ref <309>: DATABASE ENTRY DATE: 2001-12-06
acccacacagccacactcgctgtgtttctcctctgccgcttaaccacctccctccgtaacaaactcctcatttcgctcccctcccttgctcttcttcttcttcttcttcttcttcctcctccgcgaccaccaccgatccatccatccaccgtgtcttctcttccctctccaatggggaaccctcccgagctgtaccaccgcatcctcaacatccccagggagacctcgccgcaggaaatccgcgccgcctacaagagcctcgtcaagaaatggcaccccgacaagcacccgccgtcctccaagcccgaggccgaggcccgcttcaaggccatcaccgaggcctacgaggcgctccttgaccagcaggagaacagggcggtgttcggggtgtgctgcaacgacggccgcgcgggcgagaaggccatggcgtgcggcgtggtcggcggcggaggggcacacatcgcgaggacgcgcagcgacgacttcggcgcgaggatggcgcccggcacgccggcgagggagttcaagaaggtgtacagctccggcaactccggcgggcggcgcgcgttcgccgagttctccagctcaatcatgcgcaaggcgccgccgctggagcgcaagctcgactgcaccctcgaggagctctgccacggctgcaagaaggaggtcaagttcacccgcgacgtcgtcaccaagaacgggtcaatagtcaagaaggaggtgagccagatggtgctggtgaaaccagggtggaagaaagggaacaagatcacatttgaaggcatgggggatgagaggccagggtgcctaccggccgatgccgtcttcgtcatatcggagaagaaacaccctgtcttcaagagggtaggcaacgacctggtgctgaaagccgaggtgccattggtgagcgcgctcaccggctggtccttctcattcaggctcctgagtggcaagaaggtgagctgctcatttcaggatgagatcatctgcccaggatatgagaagatcatcaaaggggaagggatgccaattgccgatcagaaaggagcacggggtgatctaagggtgaagtttgagatcgcgttcccgaagcagcttactgacgagcaacgcgacggtcttgctcaaattctgagaggatgtgcatgggattgatgagattgaaatgcaaggtccaagtgtatcaaattttctcagccttgtgttaaacaatcagaatgagtacataaagagagatgcccttgtatatacaggtataatatatgatgaaaaccaagtcttctgtggatagtacatgcctttccagatgagctgtatgggtttattttg

SEQ ID NO: 6675 - DNA, 851 bp, Oryza sativa
  ref <308>: DATABASE ACCESSION NUMBER: AK104971
  ref <309>: DATABASE ENTRY DATE: 2002-08-28
aatctccggcgccccgatcaccgggagatccgggaaagcacccagaacaaccggagttgccgccggcgtaaagaggaggaggaggcggcggcggcgtcggcggccgtggcgaagtcgtcggcgtcggcggcggccgcggcggctggggtatctgcgatgataacccggtcgaagctggttgagcagctgcgcgactaccagatccgatcccaacacaagcgtgacataattggagcagtctcatggggcttgctgtgttgctttctgataatatcatcgtacatgacgttgtacttcaggcacttctggctgtccgctgttattatctcactcggtattcttcttcctgctggcctttacattttgaggcagagaaagcttgctaagaaaagagagagaagattattgctgcccctctccatgtaagagtgttggttggttccctgattttctggttaattctagccatgtagaatccacattcttggcttgctacacactcttcattcatgttactctgcctcaatatacatctcattctttagtctctactgaagtgctagaagatatatcatcatttttttctgagctcaatgttgtgcgagtatataatctccaatgcttggtgggtatagtaccatccgtctctgctacagtcttttttttcttcttcttggggttttatatgcttgcagggtgagacgtgtttgccttgggcatcacacttttgtaactgatactgattgttttgatactgaatttgtaagccatatccaccctagttacttgtactccaatctgtttctggactagaatgtgtgcatggaatgatcagtccctctttttcatcc

SEQ ID NO: 6676 - DNA, 602 bp, Oryza sativa
  ref <308>: DATABASE ACCESSION NUMBER: AK063818
  ref <309>: DATABASE ENTRY DATE: 2001-12-06
caccaaagaagacgacggatgctggcaaaacaaagggtggatcgaaacacaagacagctttaacaccaagcagcaaatcccatgaaggcagtgacaagaccaaacggaaggcgtcaactttgtcataccaaggccttagggcaagcaaatctggtgtggtgaagaaggcgaaggtgagccagcgtccaagttaccaggggaagcagcaaggcaggactagtgagacaggacatgatgctagttctcaaaaagccaagcgccctgctgttgcagcaaggaaggcaaagcaactagccaagaaacgcaagttggatgctcaaactcctgaaaatacacatcggagcaaaaaagcaaagaagtaaccatccttaacttgaagattgtcatcctgtctttgtacaagggggttgagtcagattttggacaaaatgagctcctgacattgttaaaccccatgcaagagtgatcttgaaatgcaaggctgatacaaattcgtagtactgtattacttaaattaaagtttgcgctcatgtatactgacattaatgttgttttttccctgtaacatcgtgcactgatatcattcattctgcttttgattg

SEQ ID NO: 6677 - DNA, 405 bp, Oryza sativa
  ref <308>: DATABASE ACCESSION NUMBER: AK063819
  ref <309>: DATABASE ENTRY DATE: 2001-12-06
taacaacaataacgtacctagagataagaatagctgttccaggtaattgatactggatttcttcagcctaggctagtcatagaatggaggtgagtttgatgtactggttgagttgtgttactatctcagaggcaaataaggaagagtaggagccgggcgattgtcgcggttgagctgttcagtgcgtattgcagtgagtttgtgggaggggctgtttctttttttttttttttttttaccttgatgatagatgttgatgtagcacaaaaggaagataaggaacgaaggcctaaagttggctctctgtttcatgttgttaatgttctagtatgagatgtaaaatgtaacaatattcggtgttttaatgggaactcgctgcaatttgtccggcggttgatagatgat

SEQ ID NO: 6678 - DNA, 742 bp, Oryza sativa
  ref <308>: DATABASE ACCESSION NUMBER: AK063820
  ref <309>: DATABASE ENTRY DATE: 2001-12-06
acgcaggtcccaaccgcttctggtggatagcaagctaggctcgggggaatctcgccgtcgcatcaccgccgccgccgccgcccgccggttcgatctgagaagccgccacctcgccgcccggatcccgatggcgcggcttcactggctggaggcgatgctgccgctgggaatcatcggcggcatgctctgcatcatggggaacgcgcagtactacatccacagggccgcgcatggcaggccgaagcacatcgggaacgacaattgggacatggccatggcccgccgggacaaggtgctcctccatcaggcctcctccgagaacaactaggatattgatcaacaatatctagcctggatgttgatgaagttatttcaaatgcccagaattactcctgttagtttccgtgtataatgggaagctgggcttatgtttttgtttacaacttttgaatattggatgaataatgtgtatctggaatctgtttaattacacaaagtgggtgtcgcttgtcaattgtgtacccatttctccccaggagctgatcatgacgaaaatatttgttgttgttgttgttgttgtgtttttttttctctactgtacaaattgagctagtcaccgcggtactggagtttgccatccccagtgacattgtgaactctaccgttgatgccttgggtcgtctcctgatagctgttttctgccaagagtgctgaataaatgaacattagcaggacttgtttc

SEQ ID NO: 6679 - DNA, 567 bp, Oryza sativa
  ref <308>: DATABASE ACCESSION NUMBER: AK063821
  ref <309>: DATABASE ENTRY DATE: 2001-12-06
gcgactgcgatgtgctgcccctgccgccgccgcatctcgcctctcaccccaaaaccaacaacccctgccgccaccgcgtgtcttggcgccctctggcgcatgccggccagccacacctcgaggaagccgtgtgcgggagctggagacctcggcgacggaggacgtcggccatgagcaaaaagatgggagccacagtaacaacaatggcaggaggcgatgggatggatgggatcttggtccctggagccatatggaaaaagtgatagcagagatcgatggggagtatcaatttgctttttcttttctttttcttcagaatcccatcgatctgctttttttttctttttctttagaattgtgctcgatttgctagtggcatcaaattgtagtgtgtcatctatgtgttttctttgactcattgatcttgtaccgattacttgtcatattttggctgttagaacttctgttacggttagttcggtctatggccgagaccaaagaccgaagtactcggtcttgagtttttttaagaccgatcggtcttgatattctaaagaccgaattttc

SEQ ID NO: 6680 - DNA, 923 bp, Oryza sativa
  ref <308>: DATABASE ACCESSION NUMBER: AK063822
  ref <309>: DATABASE ENTRY DATE: 2001-12-06
actcatccaagtatccaacaaagaacaaacccacccccgccgctgagatcgaatccgaccttaattttcacctgctcgctgatctcgccggccgtcgaccgccatggggatggtgctgggcaagatcacggtggagacgcccaagcacgaggtgctccacaccggcgccggctacgaggtccgcaagtacccgccgtgcgtcgtcgccgaggtcacctacgaccccgcggagatgaaaggcgaccgcgacggcgggttcaccgtcctcggcaactacatcggcgccctcggcaacccgcagaacaccaagccagagaagatcgacatgaccgcgccggtcatcacctccggcgagcccgagagtatcgccatgacggccccggtcatcacctccggtgagcctgagccggtggcgatgaccgcgccggtgatcacggccgaagagcgcagccaggggaagggtcagatgacaatgcagtttctgctgccgtccaagtacagcaaggtggaggaggcgccgcggccgacggacgagcgggtggtgctgcggcaggtgggggagaggaagtacggggtggtgaggttcagcggcctgaccggagacaaggtggtgaaggagaaggcggagtggctcaaggccgcgctggagaaggacgggttcaccgtcaagggccccttcgtgctggcgcggtacaacccgccgtttactctgcctccgctgcgcaccaacgaggtcatggtccccgtcgagtgatacggcgagactccattgttggtgtctagtgatgtactgatgcgcatgtacttttatcagggtgtccttgttactcctaggccctagctatttctctatttctttatccttttgactttgttctgtactgatgtatgtttggatcaacgaataatggacatatcttggg

SEQ ID NO: 6681 - DNA, 712 bp, Oryza sativa
  ref <308>: DATABASE ACCESSION NUMBER: AK063823
  ref <309>: DATABASE ENTRY DATE: 2001-12-06
gtgcgattgagccaaaccccagcagcgagcgcaacggcaacggccttgttggcgactggccgccgccgcccgccggcggccgggcggccagcggggggtggctaatgagggctccgctgggcggccagcatatgcggggtgcgggggccgcagtccgtagaagcgcgggaaggctgcgactgggtaagccaggcgcgtggagcggtggaggcaagcggcggccggtgggggaggcggctgcgtgcgctcggtgtctgcgtcgcatcgagcattcgagctggtggaaggagcctatcgaggagctgagcaagcgagctgtggttcccgattactgatttcctggtggctgaaaatcagcgacggaaggtatctcaaagaggtaggttaggttagatttgaatagctattttaaccgtgggtgatgtgccaccaaccccaactacttgtggcaatggaattgttgcggtggaagaggctgcgctgaacaggtagaaggggtcgtggaagtacaattgggttcatttcatattgctggacgagcggaagagagaactcaacgtccagtggctagtgaatccaagtgaagatgcacctgttatccaggctctggttcagggagaatagttgggtgttcttgtttgcaagtttgttgtgtaccgtctatgcagtatacttttattatttgatttgcagacattttagcttcggtttc

SEQ ID NO: 6682 - DNA, 629 bp, Oryza sativa
  ref <308>: DATABASE ACCESSION NUMBER: AK063824
  ref <309>: DATABASE ENTRY DATE: 2001-12-06
aaataaactgaggagagcttggatttctcatctccattatcttgcattcttgttcttggtttgcatctcttcttgctctttggaggatttactactattgagtagtagtgatcatgagctaccaaggtcctcctcccggcactgcagcgtacccgccaccggggacggggtacccaccgccggcgtacggcgcgccgccgccagtcgccgccgactacggcgggtatcagcagcagcagccgccgccgccgccgcaggactcgcagagccgcggcgacggcttcttgaaaggatgttgtgctgctctctgctgctgctgcctgctcgacatgtgcttctgatgagaagatggcatcaaggatgatgtgatactctacttatagagcagcttgtgatcgtcttttcacatcatttgtgctgtgtcatgatcgagattttttaagtatgtggtgagatgtgtgcatctagtattatgtagttactgttcttggatcatttggatttcatgtgttgtcaaattcaaaagtggatccattttgtatcattcatcgtaatctgggacacttctgtttatcaatgatttcgattttagtactatacgaatcaccctaaattttattgatcggatt

SEQ ID NO: 6683 - DNA, 397 bp, Oryza sativa
  ref <308>: DATABASE ACCESSION NUMBER: AK104972
  ref <309>: DATABASE ENTRY DATE: 2002-08-28
atgagatcggccatcatcgacaacttctgggactaccttgacgcacccatcatgtgcttgtcgtcgcaggatgtgccgacgccgtatgctgcgcctctggaggatgccaccgtcgtgcagcctgcccagattgtggctgccgttgagcaaatatgccagtaatctagacaaccgtttatacattgttctttgcgtggaaagtttttgttcatcgttttgcccatgtagcgaggtatccattgtggtataggcttatttatagccatttttattcgtattctgagttgtactttagctgcgaggacatgctccacaggatatattcgtgcactgtatcatgctgaattctaggatttaaacatgtttttactgcaagaagattttataatgttcgatt

SEQ ID NO: 6684 - DNA, 784 bp, Oryza sativa
  ref <308>: DATABASE ACCESSION NUMBER: AK063825
  ref <309>: DATABASE ENTRY DATE: 2001-12-06
atcatccctcccccaaattccccaactccgggcctccggcaagccaagaaacccccaacccaactccggcgatggcgtcgcagctggtggaggagcaccggtcgggcgcggaggtccacacggggcacgagctctgcgagcggaaggcccgggagctgctggtggagctcggcctccccgacgggctcctcccgctgccgtccctggaggaggtcgggtacaaccgcgccgccgggttcgtgtggctccggcagacccaggcgggcggcgccacccacacgttcgacaccatcgggaagcaggtgtggtacgcgggcgaggtgacggcgttcgtggagcaggggcggatgcacggcgtcgccggggtgaagagcaaggagctcctcatctgggtctccatctccgagatcgtcctcagcccctccggcaccaagctcgtcttccgcaccccggccggcctcggccgcgccctccccgtcaccgccttccagctcaacccggcgcccccggagccggagaagaaggacgccgccgccgccgacgaggccgacgccgccgccaccaactgatccaagaagacatgggcgttgcgttttagcagcggtaagtaagtagtgagatccgggccgtcgtggtgaaaaagattgtagttgttgttatatgcttggaattcgtgagcctacgagctcgatctgatctcccatctctctccagtctccagtgtgtctgtccatggatgatgctgaaataaatatatgttcttgtggattcctaattgcagttt

SEQ ID NO: 6685 - DNA, 767 bp, Oryza sativa
  ref <308>: DATABASE ACCESSION NUMBER: AK063826
  ref <309>: DATABASE ENTRY DATE: 2001-12-06
tcccccaactccattattgattcttgcaaggaggaagagcagctagaggcgaggcaagaaaagaagtgaaatctctccgttagacaggaagaggaaaagcaagggggaattggggatggcgtcaaagaggatacagaaggagctcaaggatctgcagaaggatccccctacatcatgcagtgcaggtcctgttggtgaagacatgttccactggcaggcaacgataatgggtccatctgatagcccatatgctggtggagttttcctagttaccatccacttccctcctgattatcccttcaaaccacccaaggtggcgtttcgcaccaaggttttccatccaaacatcaacagcaacgggagcatttgccttgacatccttaaggaccaatggagcccagcactaaccatttccaaggtgttgctgtcaatctgttccctgctgactgatccgaaccctgatgatcctctggtccctgagatcgcccacatgtacaagacagataggcacaagtacgagaacacagcaaggacctggactcagaggtacgccatgtagcacctcagatatcgatggacatgtcgatgttgtaacaacattatcaacgggtgtgtctccctctcgccttgtgtggtgtaaggatcaaaaccggctttgcagtgcactcttggtgttgctccattgtgtcactcactcattgcagtgatttcgaatagtatcaaactggtggtttttttcggtcagataatgtttgcaacttgccaac

SEQ ID NO: 6686 - DNA, 569 bp, Oryza sativa
  ref <308>: DATABASE ACCESSION NUMBER: AK063827
  ref <309>: DATABASE ENTRY DATE: 2001-12-06
cgtgctttttgttttttgtttttttgttttttgcctattcctcccaacaaagatcatccaaactaaacccattgtagtataaaccctcgtcatcgacccagcctatcctgatggatgaagaagtccttgagttcttgcagcaccgatttctggctaattgttgtgtagagtcggcttttcgacctccgaaatggtatatgttctttgcaaactcaccatgtaagaattgatgtttcaggctgatggatggacaaggcacataccatccaaagctgcatggaatgtcttgtgactcagacgttttagctgcaatcgaatacgtccggttatgctgctggagaaaggtcattctcattgccagattatcagcttctgtagtcagagattttggcatgcagtgcaacaacttgagatagaacaacgttaagtatgaagggcctatttgtcttgagctcaaatgctatgctaaatatgatattttttacatgcaacaacttgagattatcttgatgtagaacatgaacaaccttgatgatacctttgagctaaaatgctactgatactctggt

SEQ ID NO: 6687 - DNA, 412 bp, Oryza sativa
  ref <308>: DATABASE ACCESSION NUMBER: AK063828
  ref <309>: DATABASE ENTRY DATE: 2001-12-06
tagtcatggagcagaaggggtggagttctgcttcacattaggccacggattttctggagaaggtctcagcacatggaacatcttgctaggatctttgcaggatgtttggctatcttcatttctgtgttgttaggttgattcgctttcttcagtttttctcctttgttgcttgtgctgaaagggtccctcttttcccaattgataggcctaggtagctgaactaatgatgaacttgacacgtacgtgttgtacaggtttctgatttgcaagcaaagttatgcgatgtgcctccatttagctcggtatggttgaggggagtgtcgttttggaatgtaaagatgctcttgttttgctgtgtcttctgtttgacttagagaacctaaaaaaatcttacctgattgatatttattgg

SEQ ID NO: 6688 - DNA, 418 bp, Oryza sativa
  ref <308>: DATABASE ACCESSION NUMBER: AK063829
  ref <309>: DATABASE ENTRY DATE: 2001-12-06
catagctttcacctttgagtccatatctgttgcataattcaagtgctgaggaagtgaggtcttaattattgtttggagttggtccgtgttgctttcgtggcaccaatggcggccttggttggtcatgacgcgaggcagtattcgtggtggtgggttagtcatatcagccccaagaactccaaatggctccaagaaaatctcaatggtggggtctttttctgtgtttagctcatattctcatgtttattcattgctttgaggtttgagcatatatcatgaaattgccattagtgttgcactagatatttactggccaaagaagcagcgatatgcttttttttgattgtttcaatgtagcagtatattttcaaggcacatggtgtgcatgcaagccagttattcatacatggaatttttt

SEQ ID NO: 6689 - DNA, 625 bp, Oryza sativa
  ref <308>: DATABASE ACCESSION NUMBER: AK063830
  ref <309>: DATABASE ENTRY DATE: 2001-12-06
ctgggctcttaaccaaatgagcaggagccaactgatgcatatgtataagcttggagatctgacgcctgctccatccatgacgattccaatggcacattcctcaaggccaactctgggttttcccctagggacggcgctcctgatctttgttatcttctccctcagtggcatcttctcatgttgctaccactgggacaagctccgtgccttcctctggtctcggcatcctgatgtgatactccaagaaggccagcacaccgtcatctccattgcgtctccgagcaagacaacatctgatcacaagaacgagaaagcagagaaagagtgtggtttgcccgttattatgcctggggacaggatccccaaattcttcgccaggccgtgcccgcatgagaagtgtttgcctgcagcagaggaggaggaagctgaggtgcaagtcaaatgttctgttccacaatctagttagtagctgtaaatgaagccatacagagtgggtgtatataagcttttattagaacctctaaaaaaaattccatttcctctttggtcctatgaaaatattcaatttcttcattgggtatctttatctttggagttagaaaagtaaggattatttcattctcgc

SEQ ID NO: 6690 - DNA, 1099 bp, Oryza sativa
  ref <308>: DATABASE ACCESSION NUMBER: AK063831
  ref <309>: DATABASE ENTRY DATE: 2001-12-06
ttaatcaatgtctggagatctatctgaggtgctttgttcattcagctcctagcaagtgggcagcttggttacatcttgcagaatattggtataatacctcatatcactctgctgtccagtctactccctttgaagtgctctatggtcattccccttgtcattttggcatcagtttacaagattgtgccattcctgatttacatgtttggttaaaggaaaggcagttgatgcagaagcttgttcaacagcatcttcacagagcacagcagcagatgaagcattttgctgataagaaaaggagttttcgtacttttgctattggagactgggtgtacctcaaattacagccctatgttcaaacttctgtggctgtcagagctaatcacaaattggctttcaaatattttgggccatttcaaattacagcacagattggaactgttgcttataaattgcagttacctcccaccagttctatacacccagtttttcatgtgtctcaattgaaatctgctactggctttacaggacatgttcagtctcatctgccatcgtctatctctgccttgcaagttccttggcgcattctggacaggcggcttgctaagaagggtaattctactatctctcaagttttggtgcagtggtctgagtcccctccagaagatgccacttgggaagactatgaagaattgcatgctcgatttcctgctgcattggcttgggggcaagccaattctcaaggggtggggcttgtcagggactctccactgtcaactgttgagggtggtgccattggcgggaaggatctgaatgcagaagaggaggaggacgtccagacttctcaaagcgacatctccacaggcaatggtcatcggccggttcgggagcgtaggcccaacccaagagtgttaggccctgaatgggtggcgtaagacaccagctcgcctgtgagctgtcacgtgagggagagggatgtattaaatcaaacgatgaacacttgtatgaacgatgaattggcaactggaggcgtaggcggcggcggctcgatcctgtcggatctgagaggaaataccacatagttgccacaatttcgcat

SEQ ID NO: 6691 - DNA, 994 bp, Oryza sativa
  ref <308>: DATABASE ACCESSION NUMBER: AK104973
  ref <309>: DATABASE ENTRY DATE: 2002-08-28
accattgcaaagccactagagatcgagaagaagaagaggaggaggcgagctccgtttggtgcgaggcgccgccgcgcgctgcgggcctctcctcctccccgcgcgctccactccaccatgcttccgagccggcagagaagcatcttccatctcggggaggagggtggcggcgccgccgacgccgagcacctcggcgctgaccacggcgacggccatggcgatcacggtatcatcagtatccaccagcagcgccttcgtgtcgtcgggctgcagatcgtcctcgcccagacgaggcaccaccaccgccagcagcacggccatgtcgtcctcaagcagatgcagatggtgtccccgccgccggcggcgcgtcaccggcggcggcggcgtccttgcggtgacttcttgagcgcgtgctccctgtgcaggctggagctcggccccgacaaggacgtgtacatgtacaggggtgaacaggggttctgcagcgaggagtgcaggtggcagcagatcatgacggacgaggcgagggagcgggacgccatggccaagaaggagcggctaggcctgcatcatcggacgccgcggccgccgccggcggcgatccgcggcggctcgccgaggagactactcgccgtagcctagcacgagcgaagtacagtatgctatacttgatgagaccgtgacccatgcttggatgatatatgatcaaaagaaaattttctactgtactctctgtaaaatatggagaaatcgatgtaattaagaaaaacttgataaggaggaaggagagagagagagagagagagccaggttttgagtaatttgaggcaaatttgaggaaacgtatacgcataactgcatgcagtttcatatttcaaatgaacacgaaatgtttggtgggggaaagaagctttccaggtctcatgggtacaagtgtgcaacttaactgtaacctgctcctgcttatgtgcaaaaaacctggtaaattctggat

SEQ ID NO: 6692 - DNA, 682 bp, Oryza sativa
  ref <308>: DATABASE ACCESSION NUMBER: AK063832
  ref <309>: DATABASE ENTRY DATE: 2001-12-06
agactctgttcgatctttgctttcatcaatccaccttgtttgatctctgctctgagttctgaagaaactgtggtcgatcggcgatcggatcgatcgggatcgatgtcgagcctggtagacatttggacggtggaacgggagaggatccgggtcagcggcgcgcaggcgttcaggacgacggtggcttcgaagcgaggctgcacggctcgttctgacgacggccagaacaagcctgacggcgcggccgtggaaacggctgccaagaagcagcaggccgctgccgttggtggcgcgccggcgagcgtgatccaagaagacgctttcttgtccatcctgatcgattgcttcggccagtagagtaggcttagcttggcgttacagggcactctctccatcgtaaaatagctactatacctttagctatgaatctgaacctggtgatttcgacggtctcgtgtgatttttgtgtaaatcttctgaaatatcactgcagtactgtctgaatcctggaagtctctgtagcgaaagcccacttttcttcaatcgagatatgatggtttagcgggttcgaagtacacgatcatgagacgattcgagtgaaggggattctataattcatcgccaccactcggttaaatcagatattttcatctttttcttgaaaaccagatattttgatttg

SEQ ID NO: 6693 - DNA, 452 bp, Oryza sativa
  ref <308>: DATABASE ACCESSION NUMBER: AK063833
  ref <309>: DATABASE ENTRY DATE: 2001-12-06
atgaactctacaagtcattttgtcgccatcagcttctttcatcaccaactcgatcagaccgcagagacgagggaagatgagctcgtcggcgaagacgtcgtggccggaggtggttgggctgagcatagaggaggccaagaaggtgattctcaaggacaagcccgacgccgacatcgtcgtgctgccattcggcacggcggtgccagaggattttcgcttcaaccgtgtccgaatcttcgtcgacaccgtcgccgagacgcctcgtgtgggctagctagcagaatatatatagctttaaattaaaattaataatggttagtagcgatgctgctgtgccccgaccgtatcctttctctaaaattgatatcatatatatgtattatatgtgtgtaaatcatcaatcctgggatgaaaaagatgaatcagctgtcaggaccactgcatggtcttct

SEQ ID NO: 6694 - DNA, 1370 bp, Oryza sativa
  ref <308>: DATABASE ACCESSION NUMBER: AK063834
  ref <309>: DATABASE ENTRY DATE: 2001-12-06
ttgtcccaagtctgaatcaaaatatcagatacagccaatcagccatgcgtaccaatctgcacacagtgagcggcggctacccgatctggtactggtagtagcaggaacgacgatggcggaggagtcagggaggaggagcggcggcggcgtcagggtgtgcgtcaccggcggcgctgggttcatcggctcgtggctcgtcaagaagctcctcggcgccggctacaccgtgcacgccaccctgcgaagcataggggacgaggtgaaggtgggcctcctgcggcggctcgtccccggcgacgcgccgccggagcggctgcgcctgttcgaggccgacctctacgacgccgccaccttcgctccggccatcgccggctgccagttcgtcttcctcgtcgccacgcccttcctccatgacgccaccagcacgaagtacaataacacggcggaggcggcgctggacgcggcacgggtgatcctccggcaatgcgaggaatccagcacggtgaagcgcgtcatctacacgagctccatggctgcgacctcgccgctcaaggaggactccaccggcttcaaggactccatcgacgaatcctgctggacgccgctcgccgtcgactacccttaccggagcgcacggttcgatgagtacatcctgtcgaagctgctgtcggagaaggagctgctggggcacagccacgctggcgagaggcggaggccggcggtcgaggtggtgacggtgccgtgctccgtcgtcgccggcgggacgctgcaggggcagtcgacgacgagcctggactgcgtcgtgtcgccggtgtcccgggacgagggccgcttccgggcgctcaggctgctgcagaggctgatggggtcggtgccgatggtgcacgtcgacgacgtctgcgacgcgctcgtcttctgcatggagcagccgtccctcaccggccggttcctctgctccgccgcgtacccgactctcgacgacatcgtcgaacacttcgccggcaagtaccctcacctcgacctcctcaaagaaacggagacattgccgagcattcaagctcacactgataagctgggggagctggggttcaagtacaagtacggaatggaggagatactggacgagagcgtggaatgcgcggtgagacttggttgccttgatgcgtccaagcttagtttacaaggatgataatatcatcctgattagtgcaatttaccatcattattgtgttggtgtgcctcttcaggcgttctaattactatacttaaaataaaaaggagcaatggagcattccttggcgtcattggtttacagtcgtgtactcgtgtactaccagcaatctgaaatctgaacttcatttttcactgtc

SEQ ID NO: 6695 - DNA, 636 bp, Oryza sativa
  ref <308>: DATABASE ACCESSION NUMBER: AK063835
  ref <309>: DATABASE ENTRY DATE: 2001-12-06
acttgtcttctacggcactaccacaatccatcaccagcgccactttcccagctcccaagtcccaagtagccgcaataatggtaatcacggctctgcagcttctccctccaatccttggccttccggcgacggcgagaaatggctacgccgtcagaaggccacggatgatgactgtgacttgctgcaggcacaaccaggcaaccactgtacatgaatcaaggctaacaagcagtttatcccgtagagatgcactgtcatacatgtcgtctgcgttcatagcaacgcttctggtggctggtcctgcagaagcaagaacctccaggcaagagaacaagagaaaagtaagggagaagctggagaagctccgggagaaggcactaggcccagatgataaaaatggagccatccgtaagaaggaatctttggcgaacttgttgattcctcctaaattggtcgaggctaccatttgaaaagccattgtatcgatgtgaacttatattcagacgttaaggaacaataatatggaagtctgaatatatggtgctcctctgaactgttgttgccaactcgccatcactcgtgtatgaaatatgatactagttgggatctcaatccaaattaaattatgccttttct

SEQ ID NO: 6696 - DNA, 1026 bp, Oryza sativa
  ref <308>: DATABASE ACCESSION NUMBER: AK063836
  ref <309>: DATABASE ENTRY DATE: 2001-12-06
ctcttgctctcaagcggcgtgcaaccatggcggccacggcctcctccttcctcgcccgccgcctcctcctcacccgccgcgtcctttcctcccccctccgccccttctccaccactgactcctcctcatcctcctcctcctcctcttcctccgacgactcccgtgcgggatctgatgcgggacccgaccccgagcagcagcaaccgccaccagcgggccaggatcagcaggccgccgcccggccgcgcgccggcgacacccgtcccctcgagaacggccttgaccccggaatctacaaggcgataatggtggggaaggtggggcaggagccgatacagaagcggctgaggagcgggagaacggtcgtgctgttctcgctcggcaccggcggcatccgcaacaaccgccgcccgctggaccgcgaggagccgcaccagtacgctgaacgatgctccgtgcagtggcaccgcgtctgcatctacccggaacggctcggcagcctcgcgctcaagcacgtcaagaccggttctgttctttatctggaagggaatcttgagacgaaagtgttttctgatcctataactggactggttcggcgcataagagaaatagctgtgcgctcaaatggccgtctcttgtttcttgggaatgattgtaatgcgcccaagttaggtgaagccaagggcgttggctacttctgaaactgaggtccactcgacatcaaggtatatcagttgataaaattgatttaaattagaggtatctcaactgtgcttagctttaagcgttcaacgtatggtgaagatctcagtagtggaccagctttatggaacaaatacagttggacatcattgtcgaaaccctctaataattgaacaactgattgtactgtataacttgattttgacaaaacaacatatgtggctgtgctatttattttagttctcccaaaatttcttttgaccttttgggtcagagaagtttgtgaatttgagcttttctacaataaaatggatctgtttactc

SEQ ID NO: 6697 - DNA, 846 bp, Oryza sativa
  ref <308>: DATABASE ACCESSION NUMBER: AK063837
  ref <309>: DATABASE ENTRY DATE: 2001-12-06
cgatccaagctccgtccggtttggcaacatggcaaatgtcaagtgtctgggaactcacttttatcttgcatttggacaagaggacttcggccacaatggcgattgtttaaggctgttgcagcgctttcagtttgatgccctcgaccgtctttccctcacgcttgcctatatgtcggaactaaatgaccttgaaaatgaatacttgatggaagaaatgacaatgctccctgacattatgttcctgggccttactgtattggcaagtggacatgccattggtcccagcgtattccatgttctgagaatgagcactagtataagaaggttggagctggcaacagatatttattctagtaatccgcaggcacgagctgcatgttcatcaagttgcacttgtgatcttccaccaaattggaaaactgaggaactaaagttggcattccttcatgaggtagaaatcaataacttcaggggaaccgaacatcaaattgctcttgtgaagcagctattcggttgggcagcaatgctgaaagacatgacaataaatttctgtcattcaatcactgagagcatggcaaggaaggtgtgccagatgttactaagtttctctaggccagaaatactcatgaatttttacatttaccaacaaacgacatcaggttttgtatgttccagaggacaaatgcaccgcactaaacttgttgcttgattgtactcattttgctttccagtgttgtatactttggtatgaactgtattgcatgtaaacatcaaaatggtaacagaatcctgtacaaggttagtgtcacaaattctattacccatgataaagactttttattggtt

SEQ ID NO: 6698 - DNA, 632 bp, Oryza sativa
  ref <308>: DATABASE ACCESSION NUMBER: AK063838
  ref <309>: DATABASE ENTRY DATE: 2001-12-06
gttgaatgttatagatgacttagatctatcagcctttgtatttcgtttaggtggaatatatgggccaggaagaagtgcagtggacacaatagccaagagcaaatctttgtcacgaagacagaaatcgagggaatccaaacagtacactgcacgaattcatgtggctgacatttgtcaggctatcctggctagcatgagcatcagaagtgcaaggaggatatacaacgtagtggatgacgaccctgccccaagatctgaggttttcgcatttgctcggagcttggttgagaggaagcatcctggcctgataatggattctgtagtactaccagctactcaggacagaatcgtagctgctgagaagcgggtctctaatgctcggctaaaagaggaacttggtgtaaagcttcttcacccaacctataaatcaggcctgcagagtattttggattcttggagtgtcgaatcttctttttcaaataggaatgttgacgtttagcatgtgtatataactatgtgaattgttttgattttgtgctttgctggaactatgaacccaaaaaattatatattccattatgtcctcttccattcgagtgactggttctgggcatatactctatattatatgc

SEQ ID NO: 6699 - DNA, 906 bp, Oryza sativa
  ref <308>: DATABASE ACCESSION NUMBER: AK063839
  ref <309>: DATABASE ENTRY DATE: 2001-12-06
agcttagggtagctactgctagttcctacacattgctcgctgcggtaaggttagcattggttggtgagagagagagagagagagagaggttgcagctagcagcagagaagcacctgcagaggcgagaggcatggagtgcggcggcggcggcagggagcagcagatgcagatcgtgtgcgtgcggggcggcggcggcggcggcggcggcggcggcggcgaggaggatgggtcgtcggagtgggaccagtcgtcgtcgcggtcggcgctgtcgctgttcaaggagaaggaggaggagatcgagcggaagaagctggaggtgcgggagaaggtgttctccatgctcggccgggtcgaggaggagaccaagcgcctcgccttcatccgccaggagctggaggtgatgtcggatccgacgcggcgggaggtggagacgatacggaagcgcatcgacaaggtgaaccgccagctcaagccgctcggcaagaactgcctcaagaaggagaaggaatacaaggcgtgcctagaggcttacaacgagaagagcaacgagaaagcaacgcttgtgaacaggttgatggagcttgtgggcgagagcgagcagctgcggatgaagaagctcgaagagctgaacaaaacggtagagtccctctactagacttgggcttttgggggcccatggctgccaccacaaagagcttgtttgcagtgtgcaatttcttcttttttttttatgacacgaggatgagccaaatttgtgtgacctcacatgtgtcgtcgcgtttgatatagctgatgggatcacgagtttatctattctgtatggttcagtttaattgcaacgtcattgtcaagagaaatccttttttttcccaattagagggctcgaaacaggattaatttggcagc

SEQ ID NO: 6700 - DNA, 429 bp, Oryza sativa
  ref <308>: DATABASE ACCESSION NUMBER: AK063840
  ref <309>: DATABASE ENTRY DATE: 2001-12-06
cggatgcttccaacacggcagtggggctatgtcgtgatcacaactccaaatggtgtactggatcatgaggaagcaattaagcagaatgtgggcgggcaagtgcttggttattttcattgagaagtaacattgttttcctgtcttgttatgtctggccttgttctcctgtgtgttatcactgaactctttttttttttttgtacttttgagtgttgttgcttttgttcatggccaacaggaaatgcaataacgcataaaagatacagctcagagcactagaaaatgccaattgttaaagaaaaagattgtaatccttcgttggactgttctttctgtagactattgcatcttgattttggagttactcctacatagctatcctctcgaccggagaagatatggtccagagtatgacagtttgtatctgat

SEQ ID NO: 6701 - DNA, 539 bp, Oryza sativa
  ref <308>: DATABASE ACCESSION NUMBER: AK063841
  ref <309>: DATABASE ENTRY DATE: 2001-12-06
gaagaaaggaaaggaattgtctaaacaagctgcaacatacacaaaaaatattgtgtatagagaggtcctcacagattagaaaagcagtaaacatttactttcttggtctgccccttctcctgtatatgcctacatccactccttccccgagcagtccctccggccgcctcctcgttatggctgactcagagaccaaaaccgttgtagtcggctgctcgccgaggagttgcaggtgatcaggagagaagcagccaggtccaggatgaagcaattcactgttatgaacaaattcaagatgaagtccttacttgtaagctgacagttatttcttcttcttttttaaaacaatcgtagttggtttgtacatgtcttgcagcttagtactgatgttagcagatttatgaggttctgctttagttcagatttccaattgcagtttagcatttcttgtaatcatgttgtggcagtccagtttccagtggggtactgaataacacttgagtggagatcatctgaactgaaagccaacatttgagctc

SEQ ID NO: 6702 - DNA, 1024 bp, Oryza sativa
  ref <308>: DATABASE ACCESSION NUMBER: AK063842
  ref <309>: DATABASE ENTRY DATE: 2001-12-06
gaaagagaagaaggacagcaaaaggcttgagatgtgggaccgccaaaaggcaaagcttcaggaggacattgctgaatgcaagacaaagattacgcaggtggacagggaacttgctgagatcaacaaggcaataagaaatatggagatgaaaataagagaagacacaaaagccaaagaagaaaacctggcgcttgcagaacaggagcacgcgaagcgggaatctgccaaagcgaatgctgaacgccgactggaagaaatacgccagaagacagaagtggagtctcggtgcttcaaagatgatatcaagaggcttgaagatgaactagcccgtctacaaaagtcgatgggtgttaatcatccaactgttccctcaacccaccctcctggtgtggccgatcgaaactccacgcgggcgccaaagcagcccaccaaccaaaggccatcgcccgcgtcgaacaagcagtcgcaagcgcctacccagaagacaagccgtcgcagggactgcgtgatctgcaagagggaggaggcgtgcgtgatcctgcttcagtgcgcccaccaggtgctctgcgtcggttgcaacaagaggcatgaggagaagggcgtggcccggtgcccctgctgcaatgccaaagtcgaggagaggatcagggtttttggcgccagctccaactgagggtcacctggtggtggtgctgccgattgggttttggtgctgatgctgctctctgctatgcctacctgccttctgttttttctttcccccggggtgaggagaagtttgtggttttgcttcctttacctcctttactgtgaagaatgtcttataggtctgcacctgagatgtttttaccttgctgcttcagctgtttcatggatgttatgctgaatggcgactctcttggggtacatgggtataattgaaccttttttttggttataggaaaaacaaacaaacagcaactgattggatacatgcaacaacaatggtacatttcccaccctatacatctgtctagtggtggtt

SEQ ID NO: 6703 - DNA, 480 bp, Oryza sativa
  ref <308>: DATABASE ACCESSION NUMBER: AK063843
  ref <309>: DATABASE ENTRY DATE: 2001-12-06
atcgtttcgtttcctctctctcctcgtctcgtctcttctctctccatttttctcgaagcgagagtgcgttgcgttgcgagcgggaagcgaaaactcgaaaccatggccacggccggcgacgagcagcagcagcaggcggcggcggcgcagacggcggaggtgacggaggcggcggcgaaggaggtggtgtccgtggagatgccggcgccggaggggtggacgaagaagtttactccccagagaggggggagatttgagattgtttttgtttcaccaactggagaagagattaagaacaagagacagctgagccagtatctgaaggcacaccctggaggccctgcatcctcagagtttgattggggaactggtgatactccaaggcgctctgctcgcattagcgagaaagttaaggctttcgatagcccagaaggggagaagatcccgaaacgttctaggaactcatctggcagaaagggc

SEQ ID NO: 6704 - DNA, 477 bp, Oryza sativa
  ref <308>: DATABASE ACCESSION NUMBER: AK063844
  ref <309>: DATABASE ENTRY DATE: 2001-12-06
aaagcaacttcacacacacagtgtactgatcaacacttctggaagtggagcaaggttgagttacctgtgagacagtaatgaagaggaacaccatccttgctctcttcatctgggccatggctatggtgatcttcgccacggcaatgccggccaaggcaaggatggaggggatccatcctcaaggatgcagatgctgctatttcagacttaggccgatgatccagtgtgccaaggcttgctgtggctctgacgatgagaactgctgccttgtgaacaactagttcatctcgggaataaataaaccgagtcggtcttggacctttgcttaatttccttgtgtttcaacgatctcgctgaagaatgcagttatatatatgaaataaaatccagctcttgctgttcatacctaaatgtgtgtgtcctcatttccaaatctattgtgtgcggtcagcaccttgaataatactgcatcttatt

SEQ ID NO: 6705 - DNA, 715 bp, Oryza sativa
  ref <308>: DATABASE ACCESSION NUMBER: AK063845
  ref <309>: DATABASE ENTRY DATE: 2001-12-06
acgccttatcgccacacacaacacaacacgcagaaggagattgcagcggaggcatagacttccaaaggaagaacagaagaagagaataataaaaaaagggctcgtgggagggagggaggaaggaagaggaggaggaggtcaattcaagcactagtcgtttaattgggagagaccgagagaaaaatggctctgggagatgactcccctgcctcttacatccacatggtgcagcacctgatagagaaatgcatgacgttcgggatgagcatggaggagtgcatggagacgctgtcgaagcgtgccgacgtgcagcccgtcgtcacctccacagtatggaaggagctggagaaggagaacaaggagttcttcgacaagtacaagcagttgagatcagaaaagggaggcgtgagcagctcctgattaattaaccaggagatcgattagatgcatgcagctagccagttaattgtgataattaagctagcatccatccctttattagtttctaattagattttattgtactacttagaaaataagagtgggaggttgatcgatcaggctagctagctgctggctatatatggtggtgcatgcgtgtacaggggttggcaaggaagcagccatctgatctgatcatcgctataatggcgctatatgtagctcccgaactgtatccatcgtcaatcttatctccgagatcacggttcagcct

SEQ ID NO: 6706 - DNA, 670 bp, Oryza sativa
  ref <308>: DATABASE ACCESSION NUMBER: AK063846
  ref <309>: DATABASE ENTRY DATE: 2001-12-06
gaatttgctgctgctgctgatgctttgccgtctcctactcctactcgtccactttattaacccttattaaatccaccgtcctcttcctcgtctcccactactacaccccgcctctcccgccgcgagatccggctccgcttccggaagcttctggaagggcgtcccccccacatgagcgtctgatcgatcggccgtcgtcgccatgggctgcgctggatccactcccaaagttgatgagaacagtaagaagctcaaaaagccaaaaccttggaagcacactcaggcaataacaccaacacaactctcaaagatgcgtgaagaattctgggacacggctccacactatggaggccagaaagagatttgggatgcacttagggctgctgctgaagctgaattacctcttgcacaaaccatagtgaacagtgctgggattgttgtttcaaattctgacatgacgctttgttatgacgagagaggtgccaagtatgaactgcccaagtacgttttgagtgagccaacaaatttgatccgtgaaccgtgatggttgagtgaagatttatgttatgtgaatagaaaaacagatcctgtaaatgatgtaaatcgttcattgatcgctgactcaggactgtatttctcagaacataaatgaagtttaagttactttcgt

SEQ ID NO: 6707 - DNA, 805 bp, Oryza sativa
  ref <308>: DATABASE ACCESSION NUMBER: AK063847
  ref <309>: DATABASE ENTRY DATE: 2001-12-06
acgaacagaggcggcgctgcaaaatctcgcgaccaagcggcggcggcggcgggagagaacgagaggtgaccgatggcgacgggcggcgccgccggcgaggacgtccccggcggcggcgagttctacctgcggtactacgtggggcacaaggggaagttcgggcacgagttcctcgagttcgagttccgccccgacggcaagctccgctacgccaacaactccaactacaagaacgacaccatgatccgcaaggaggtcttcgtctccccctccgtcctccgcgaggcccggaggatcatccaggagtccgagattatgaaggaggacgacaacaactggccagagcccgaccgcgtggggaggcaggagctcgagattgttatgggcaacgagcacatctccttcaccacctccaagattggctccctcgtcgacgtccagaccagcaaggaccctgagggcctccgcatcttctactacctcgtccaggatctgaaatgtttcgtgttttcactcatcaatctccacttcaagatcaagcctattcaatcttgagctcctttcagtctcttaattgtgttatggccagttttagagaattctgtattattatgtatgatccagcgggttaaccatggtggtggggtgtttgtggaacagagggtggaatcttaatactttggtgcctgggattgttgttggattgtgcaagctttgggtgctcgttactcaagtagtgatatttattattgtgaaatctttttctactccaaggagtctctccctgaagtagcattgctgtttt

SEQ ID NO: 6708 - DNA, 862 bp, Oryza sativa
  ref <308>: DATABASE ACCESSION NUMBER: AK063848
  ref <309>: DATABASE ENTRY DATE: 2001-12-06
acgagccttatcgcctcctagatctctctcgcgtttctccccgccgccccctcctcgatcgattccatcgacgcggcggcgtatgcgcgacctacgaagcttccgactccctccctaccttcgtcccgctcctccccacacatctctccccgctccacaccgctccccatcgctccacgccactccccatcgctcccgcatctacggtgacggcgggagatagatgcggtggatggatgcagcgacaacaacgatggatggatgttgcggcgacggcgggagatggatgcatcgtcatcggctgaggtgacggggagatgcggcggcggcggcgacgacggcggtggaggaggagacgaggagatacggtgtcgtcggcggcggcggaggcgacggggagatgcggcgtcagtgtcggcggaggagacgaggagatgcggtgtcgttgtcggcagcggaggcgacgtggagatgcggcgttggcggcgacagaggcgacgaggagatgcggcgcgtcgtcgtcggcggtggatgcctcggcgtcgcggggcgcccgcaccacgtccttccgtgcgtggtttcgtgccgcgtgacacggtcaaggcacaagccacaacgcgatgcagacgcttccccaactgtcctcttttcttcttttttacaagctctggaactcgctgttgtgtctctgcatttcggtctctgctgcagtgctgcttcgtggcggttggtttcttgcttcttgttgatcttggaagaaagtgtgattgtttgagcggcagatgtgatgcgcaaggcgttagcgatcgatggatgcggtgctgttgatggatctgatgcagttttcttttcttgcagtttt

SEQ ID NO: 6709 - DNA, 466 bp, Oryza sativa
  ref <308>: DATABASE ACCESSION NUMBER: AK063849
  ref <309>: DATABASE ENTRY DATE: 2001-12-06
cagtcagcatgaatttcttcgatagtttcggatttccctttgtatttgttcctctgttcgtattaattttgtgattgagatagcacagatgaccctgcgacacctagattggggaaagagtaggcttgcatctgacatcggctttgctgtaatgtagtgaaggtaatccttcggtaaggtttaaccttgcggcacgctcccattttgtcaaggcagtgcacgttgtggttgtataggctggaggaccttgtcttcttcccttctgtaatttagatagtgtgtttgcttttgcttgtcagggttgtgaatatattattatcgcaatatattagggtcaccctctcccgctctatttgagcttggttgggctgtaattgatttctcgtgtttaactgatgtagcacaattaactcttgatattttgtttcaacctcgagctgaatcagaatggtggtttcttgcttgc

SEQ ID NO: 6710 - DNA, 630 bp, Oryza sativa
  ref <308>: DATABASE ACCESSION NUMBER: AK063850
  ref <309>: DATABASE ENTRY DATE: 2001-12-06
accactgatcatactagcacagagcgccgccgccgaggagagtccaatcgagaagaagggaggagaggcaagcggagaggaagaagaagaagaagagaggatgggcttcgagaagacgatcctgaaagccggcaccggtcccaagcccgtcaagggccagaaggtcaccgtccactgcaccggcttcgggaaagataatgatctcgctaagaagttttggagcacaaaggacgcaggccaggagccattcagtttcaatataggccagggttcggtgatcaaaggatgggacgagggagttatgaccatgcaagtgggtgaagttgctcgtattcagtgcaccccggattatgcgtatggagctagtgggtttccggcctggggaattcgaccaaactcagtgctggtgttcgagattgaggttcttagcgcccagtaaacgcatcatgtaattccggatggatctaaaattccatgagtactgaaataattgtaacgtcacaacactgctgcgtgctaccgctggaatgttctatgttattgaccaagtaacgttacaccatcgtctatggacacgataataagtttcgggccgtacattttcgtattacttttgctgaattcgtcgtc

SEQ ID NO: 6711 - DNA, 429 bp, Oryza sativa
  ref <308>: DATABASE ACCESSION NUMBER: AK063851
  ref <309>: DATABASE ENTRY DATE: 2001-12-06
ctcgagaggaggcggcggcgggagcggcgcgcggcgcgacccgacggcgacagcgacggcgacagcacggctctctcatccggccgccaccttctctccgaaggctatagttcgtcatttggagcaatcactgatgttgtattttatgtgattaaaatgtgatggtagcagcttcatgaagtacttaaactctcattttgggataccctaggagaagtttgggttttgttgtgtatttagacttcgctagtgcaacctgttttgagtttgctatgtgagatacttggaaagtgaaaagaatgtttgcgatgtgctccttgcttgaagaaacagacgcatacactgttatcttcactgttatgtgtacgacttaaaaacatcaaactgtcatccttgttgcatgcatgaatgacacggttggagttaaag

SEQ ID NO: 6712 - DNA, 1282 bp, Oryza sativa
  ref <308>: DATABASE ACCESSION NUMBER: AK063852
  ref <309>: DATABASE ENTRY DATE: 2001-12-06
tcaggaaaaaacattttcagacacgaccgaaaagcatcggcttcagacatctagaaaagaacatgaccatgatgaatttctctttacaaacgactcgatctacattgaccctgggatatctggtgaaatgaggaagaaggtatctgatgctgctactagagaaggtgcaaaattgttggaccactggtttattggctgtcatgcgacatatgttgtgtgtgaggacgcttctgtcaagagatatgttggtcattcagacaacattgtaactccactttggatattgaaaaccgcaaaggaaaaaggtttgcagcgtcttgtccatttgtcttcggacctggctaggcaggttgccacgattcttgaaaatgcccagacatttcaagagaatagaaaaattggggatgttccttctgtcaattcaaactccagtggagtaccatcaacccaaggggagatagatgaaattcatcaagagaggcaaaaatttgttgaagtagcaaagaaaaatgtccgagatcgccgtgctcgccgtatgcagtcatgtgaagtaccaatccatccaatcacgcctgtgaaacttatggaatcaatctgttggaccgtatctgagccaactacgtccgcatgcatttatacggagttttcatggtcagacgatgcctttgagcaacaaagcactactttcttcgatgcgaatggggatggcaaggatgatcagtcaagcgatagtttcacccgcccactaagagaaagtgagaagagtgaagtgatctttaagaaccacttccttaccgtactcttccccattgatcgttttggtgagcttggaccttcctcaaggacattcttcagcaatggtggtttcacacgcatacaagtgcttgatcacatctacaacttctaccaggaaaatatgtcttccgatgagataaatgtagccctgcaaacggattcacgacatgctgatcgacttcgctcgctgtacgcaagtactgaatcagcagaaagaggttttgtaacattcaaaagaattgattttttgggaagccgaagaagttttgaggggctaaaacgcctcagcagagagaacaatagcaatgtatatgagcttgtgattagggcataaactgcaccatactcggtgttatttagtcaaatttgtttgttgtttacaggttgatagtgatgtactaccatgtatgcacgccgaataaaattgtaggagataatgatatatttatagatcaatgaaaaagatcatgttgggcagttcagccgc

SEQ ID NO: 6713 - DNA, 514 bp, Oryza sativa
  ref <308>: DATABASE ACCESSION NUMBER: AK063853
  ref <309>: DATABASE ENTRY DATE: 2001-12-06
catgtatattctctgagggttgctatacaaaggatctgacaattcttggagttgacctggcaaaagttgtaatagttgacaatactccacaggttttccagttgcaagtggacaatggtataccaataaagagctggtttgatgacccctcagaccaggaattggtcgagttactcccattcctggagacacttgttggtgtggaggacgttaggccaataatctcgaagacattccaccatacacttgagcagaattagatctagagaattcatgattttcctcgactgagcctgtcactgaagcttactaggttcactccataaggtgcaccccactattgggggggaattaggcataggatcaagattcaccatttatgttatgttagctgttacaaatagcgagcataaactgcagtcgtcgccatggcttgtatatgtgtgcatcagttttctgtttcagatccttgtacaggaacaatagtgttgaataaaacggttctgaatcaaac

SEQ ID NO: 6714 - DNA, 552 bp, Oryza sativa
  ref <308>: DATABASE ACCESSION NUMBER: AK063854
  ref <309>: DATABASE ENTRY DATE: 2001-12-06
catggtgaatcaaatgggaagtcagggagagatggattatctgattgccgcctgatggatcttaaaaatggaacagaacttgtgctcacttatgaggacaaggatgaagattggatgcttgttggtgatgttccgtggcgaatgttcacagacagctgtaggaggctgaggattatgaaggggtcagatgcagtgggccttgctccaagagccactgacaagagcaaaaatcggaactgagcaaaagatgaacccaatatgaatatccgacccctacaatcacatcacttttacttgtaaggtcccattctctaaaccacaagggtaatggtctaagttgcgagaaggggattacttatacctatgtgtcaccctcttttttttttgtttttatttgtaccaattatgttagattttaagcgtaagttgtgtaagttcctgtaagttgtctacttaaccttgcttgtagtttcttctgtaaattgttgtgctgtatgatgcaaactatttttggtattttacttggtgcttgcaagttgcaattgtccgtgc

SEQ ID NO: 6715 - DNA, 624 bp, Oryza sativa
  ref <308>: DATABASE ACCESSION NUMBER: AK063855
  ref <309>: DATABASE ENTRY DATE: 2001-12-06
agacagatcggtagatactggttctgtgcgtggttggaagcaggagaacacacaaaagccatggcgagatcggcgtcagggaggagtttgctggtgatcttgctcgccgtcagtctcctcctcgtcgcctcctctgacgcagctcgtttcacaagaagtaacaggatggcgatgatggtggtggaggctccggcgcgtccgggtgttggtgtttcaggttcagcagaggatgacgtgagcacaagcgatgcaatcgtggagatgtttggaaggatggcgctgcagacgactgattaccccccctcaggcccaaacgatcgccacactcccaaggcacccggcacatgatgacgccgcaaaagccaagaacaccaaagctttctaagctgaatcaggacgccaccatgtacagattaatacgcaattttcccttttattttacattacgcatcgatcgattaacggacagctagtagtaagagtggcaaatcaatttgtaaatttttgtatctgtgggagtagtattttcataattgttgttgcccatgatcagaggtgatcgttttgctgcgtttgaagattggttttaacgaatggcagacgaaataatgcccaattggatct

SEQ ID NO: 6716 - DNA, 1022 bp, Oryza sativa
  ref <308>: DATABASE ACCESSION NUMBER: AK063856
  ref <309>: DATABASE ENTRY DATE: 2001-12-06
tagatgagataaagagcttgccccgtcctactgatgtaccggatacaggtctgctatgcgacctactttggtcagatccaggaaaagacgttcaaggttggggcatgaatgataggggggtctcatacacttttggtgctgacaaagtttcagaattcctggaaaaacatgaccttgatcttatttgccgggcacatcaggttgttgaggatggatatgagttctttgccgacagacaacttgtcaccatattctcagctccaaactattgtggtgaatttgataatgcaggtgcaatgatgagtgttgatgaaactttgatgtgttcttttcaaattcttaaacctgctgagagaaaaggcaaatttatggcatcaaacaaaatgtgaaatggtgaagcccatttcgctcatagcgactctgaggctgtcctgtggatgcatctagacatcaacgtgcaggcgttaggcttgaagcaacattgggctaattctaccggagaagccaaataatatcatatctaacagttggtctggaaggttactcttcatggcaagtgccaattttttttccattttctgttatgatgcgtgaaactatcttgtagatgtagatatattgattatggaaggatgaagttgccaattgacctgaggcggtttccttctgcagccaggaaaaatctgaatatggagtttctgtttggtagtttcactatttaaaagcacatgtatcacttgtatggaggtaacaactttacttatgcaagcccgtgttttctgttgcttgtaagcaaaattggatgagtttttatcttgttttctatagcgtgctaatattgccaatggcaacaatttgcgaactgcaattctagaatgtactggatgattgaacctttaagcatttgcgaactgcaattctagagtctagaagtcctctggaaaggctaatgaatggtttatcctgtaaactggaccagcttgacaggtgctgcgtgatctacattgtatacttattttgtc

SEQ ID NO: 6717 - DNA, 554 bp, Oryza sativa
  ref <308>: DATABASE ACCESSION NUMBER: AK063857
  ref <309>: DATABASE ENTRY DATE: 2001-12-06
atcagcagcagccacagcaaaatttggtttgggataggtaggtgttatgttaggtctggttttttggctgtagcagcagcagtggaaggggcatgcagaggagcaggagattcagtttgaagctggacttcacttttgcctctctctcctgtgcttgcctcttccattcctgctgctaggctgttctgtggaagtttgcagagtttatattatgggtttaatcgtccatggcatcagcatcagcagcggtatgtcatgacaatgcggccgtgcgagctccatgagctcgaatgccattgcagtggattcaggacaacgaaatggacactgtttttcgttggaaatttgggcgtatgccgttgtaaaattcatgtttcagagaaatgccgctacaaaatgtatctatgagcttgaagttatctcaaagctatcagtaacacattatttggtcaattgttcagatcggggattagatgcgaaagaactacagagcgtggaaaaaatgtattaaaaaagagggttttctacagttaattaagctgtataccttgact

SEQ ID NO: 6718 - DNA, 390 bp, Oryza sativa
  ref <308>: DATABASE ACCESSION NUMBER: AK063858
  ref <309>: DATABASE ENTRY DATE: 2001-12-06
aaccacccaagaaaaagaaaaacagaggagtcgaagaaaaaggatagcttcagtaaagcctagcaaagcgcccatcagaaaccctagcaggagcgccgccgccgccgccgccgcccgccgtcgtcatcctccctctcgccctttcaggtccccagcccgccgcgccgcggatcgagtcgccgtgtgaagaaggccagcgtcaccatggcggacgaggagcaggtggagaggaaggaggaggtctccgagcttactccttttgacccaaccaagaaaaagaagaagaagaaggttgtgatccaagatccatctgatgaggtggataagttggcagagaaaactgagagcttgacagtcgctgagactggtgagccaagttttacaggcatg

SEQ ID NO: 6719 - DNA, 668 bp, Oryza sativa
  ref <308>: DATABASE ACCESSION NUMBER: AK063859
  ref <309>: DATABASE ENTRY DATE: 2001-12-06
gagctcccagtctctctccggcggcagaagcggcggcgacgacgagatggtgaagggacgcaccgggcagcgcgtgcggctctacgtccgcggcaccatcctcggatacaagaggtcgaagtcgaaccagtacgagaacacgtcgctggtgcagatcgagggggtgaacaccaaggaggaggtggcgtggtactgcgggaagaggatggcgtacgtgtacaaggccaagaccaagagcggcggcacgaactaccgctgcatctggggcaaggtcacccgcccccatggcaactccggcgtcgtccgcgccaagttcaagtccaacctgccccccgcttccatggggcgcaaggtcagagtcttcatgtacccgagcagcatctaaagactcttgaagtgtggaggatgttgcttatctctcttagattttacttctggctgaaaatgtcttgaaaggagccgtattcatgttgagtttgcaagttgaactgctgttccctgagaacccctggaagttctccgtagttttgatgtcgaatgtatgcaccacttctattatattatgtcatatggacttatgatggagtcagggttggaacttgtaagcttgatttgtcatgtttcacagcatctatcttcttcgtatcatttgctcgcatttctgagtc

SEQ ID NO: 6720 - DNA, 875 bp, Oryza sativa
  ref <308>: DATABASE ACCESSION NUMBER: AK063860
  ref <309>: DATABASE ENTRY DATE: 2001-12-06
gcggccgtctccccaaaccagatcggcgtcgggtctttgccccttttcacgagcccaccagcgcattctcgcagccggagagaggaggcggcggcggcggcggatcgaggagagggagcggagaagatggggggcggcatggaggtgcacaagaacaagtggatcgaggagtggaacgcaggccgcgagaacctcgagttcaacttccgctggacccgccgcagcctcgccgtcgtcggcctcttcggactcgccgtccccatcctcgtctacaagggcatcgtccgcgaattccatatgcaggacgaggacgccggccggccgtacaggaagtttctgtgagtgctgcctccggtggatgcctcgagactgcgaccgggagaaggactctccgttcggtttgttctccatactgttttaattggacagggagtattttggagtgctcagactgttgcgtgggatctgtttgttgaataagctgtcatgacttgttgtcttttcaattgctgaaatcttggagattttattcggttaattcggctgaataacagtgttgcaatgttgtttgtgcgttcttcaggtactaattagaaccgtagtttgcttgtctcatttattaaaatctgaaatggattacagtgaatggttttagcatgtcgtttctctagtgtggcctacgtagtacgtgctattggattggctgaatagatgcagaaaattgatagcaccgatgcccatgaggcaaggtattgaccaagaactttcttacgattaattatggctttgggagtttgagtgcattgatgttatacgggctgtttcatagcaacccaatgtaggctctaaataaaattgtatggattggaagctgc

SEQ ID NO: 6721 - DNA, 488 bp, Oryza sativa
  ref <308>: DATABASE ACCESSION NUMBER: AK063861
  ref <309>: DATABASE ENTRY DATE: 2001-12-06
gaaggtgcttggtttgggatggtcctccattttctacatcgaaagcattgcaagagtgaagaagctttcattaagcggtttactgttgtacaagctacgaatagctgatcagttcttcgtgcagtggccccagctgcagcaaaaataccctcgagcatgctatgccggccgtttaatgtaaagattcacgcatagatgataatattgctttacagcaaaatgctaatggttttatattgcagatgttcttctgattagatgtgacgtttgtcaaatatttttcttccttttcaacagactggactggtcattatctaaaaaaaaacagactggactggagtgatagatagatgccatgaaccgaggagatattgcatctgtatagaagtaattttgtgtaactatactatgtaactatactcattttgtacctccagttccttctattactggtgaaactaatgaatatatcttcgtgcattatggcc

SEQ ID NO: 6722 - DNA, 504 bp, Oryza sativa
  ref <308>: DATABASE ACCESSION NUMBER: AK063862
  ref <309>: DATABASE ENTRY DATE: 2001-12-06
agaagagagctccagattggaatctcgagagagggaggaagggggaaatggcggactgggggccggtggtggtggcgacggtgctgttcgtgctgctgacgccggggctgctgtgcacggtgcccgggagggggcgggtggcggagttcgggagcttccacaccagcggcctcgccatcatcgtccacgccgtcctctacttcgcactcctcaccatcttcctcatcgccatcggcgtccacatctacgccggctagctatgtactactcctttcactgattgattttggtggattggttggttgtctggtgaattggggatctcgcgtgtgtgtttgctgtactagatgtcatactgtcatgtcaggtcgcttgtgttgtactagtacggcagaatcaaagggtgtgtagtaattctcttttgttcatctgattagtactagtactactaatttggtgctgtactactgtgatattgtttcagtgtttttggttgtactagct

SEQ ID NO: 6723 - DNA, 604 bp, Oryza sativa
  ref <308>: DATABASE ACCESSION NUMBER: AK063863
  ref <309>: DATABASE ENTRY DATE: 2001-12-06
tatcgaagcgcgtaggcgacttctttcagatcgtgcttacgggacgtgatgcattgctctgcaacctcaggatctcagatgcagcaagcaaggtcgccgaggtcagctcttgatattttatgtaaggtttcttgccgtataatgtttgtgtggctaagtgtgcgcccagcttggtagcacagctttgaacattgtgcttctgacctgtggcccctgctcagccccacagaaactaagctggggccacatctcagaagcattgtgcatagtcctgtgctgctagttgtgcttgtgccgtgcaaatcttctaagtccatcggcatcagactctgtgactgtaaactcagccttgtcaagtcctatacagtcattttgtttactttttggtaagagttagtgctctactcgttgtagcgcaggtcatatgcgagtgtatagaggcgtgagtgtagtaactgtatgtaagctggagtgtgttagcaatatacgagtagattaatgtgttctgcaaagagcagatcattgtgtgctattgctgaactagcaaatgatatggccaacttgtattcatcgtgtgattctgattgcttggctgcttgccccc

SEQ ID NO: 6724 - DNA, 458 bp, Oryza sativa
  ref <308>: DATABASE ACCESSION NUMBER: AK063864
  ref <309>: DATABASE ENTRY DATE: 2001-12-06
acagattgcatcctggaccgcggagttggcgcatcaagaggccttggcgttggtgccgggcctcttgacgacgacgacggggcacttgcagtgctggacgcagtggttgctgacgctccccagcagcgtcctctgcaggaaaccgtaaccatggctccccatcaccaccatgtccgcgccggccttctccaccgccccgcagatcacatccctcgggtcccctttctccacccgcgtctccaccttcacctgcacatcagaggagacgagatgatcagtcaatcgtaccaccataagtgtgattcgtgtgtgtacgtcttccatgtaattgactttaggaaaaaaaaatcctccgcttgtaaggcccgttggtttaaggcaattgaatggtaaagtcaaaaaaaatcctccgcttgtaaggcccgttggtttaaggcaattgaatggatattattaac

SEQ ID NO: 6725 - DNA, 492 bp, Oryza sativa
  ref <308>: DATABASE ACCESSION NUMBER: AK063865
  ref <309>: DATABASE ENTRY DATE: 2001-12-06
agggttggtcaaggtagtggctgagaaggagaccgatagaatcctcggtgtacatataatggcccctaatgcaggtgagataatccatgaggcggtgcttgcacttcagtatggagcatctagtgaggatattgcacggacatgccatgcgcatccaacagtgagcgaagccctgaaggaggcttgcctacagacctacctgaaggcgattcacatttaaatcatgatacagtttcaactgccatctaaaaatattccccaaagttttgaaataatatggaacgatgtggttaaaacatctagtttgtttaccatttcctcagcggaactgtgaattcgcaccttcacttcttattgtagttatattctttttccttgctagctggcgcgtctgttcctactccttaataatatggtaaaaacttaatgctgaatatgtttcttttttctgttgatacctgagacaagaataccacagaggctggctcccct

SEQ ID NO: 6726 - DNA, 1029 bp, Oryza sativa
  ref <308>: DATABASE ACCESSION NUMBER: AK063866
  ref <309>: DATABASE ENTRY DATE: 2001-12-06
caatttggagacgcggatgtaatggtggctggtggaacagagtccagcattgatgctttgtctatagctggattttctagattaagagcattgtctacaaaatataactctcttcctcaagcggcttccaggccatttgattgtggtagagatggatttgtgattggtgaaggttgtggagttatggtgttggaggcacttgatcatgcaaaagaacgtggggcaaaaatttatgcagaagtgagaggctatggaatgtctggtgacgcacaccacataactcagccacaaaatgatggtagaggtgctaccttagccatgaaacgagctttggatcagtcaggccttcaggcagatcaaatcgattatctgaatgcacatgcgacctcaactcctcttggtgatgctgtagaggctaatgcaatcaaatctgtctttggtgaccatgcaacatcaggtggtcttgcattgtcctcaacaaagggagcaattggtcatctgcttggggcagctgggtcagtggaagcaatcttcaccgtattagccatccaccatggcatcgctccaccgacacttaatctagaaaaaccagacacgctgtttgaaggcgcgttcatgcctctatcttccccaaagaagatgcctatccgagcggccatctcgaattcctttgggtttggtggaaccaacacgtcgctgctgttctcgtgccctccttagttgtttctaacagcaccctgtctgttttgcctgaagagctgtagctgaacatccacagagattttttttttccctgcacaaacaccgggaggcaccatccgcgtgcactgagcagaagctgagatttcagtcattttttcaccctgtgtgcggcatgccccattgttcttgtgtttgctaattttgtgactcggaggagtatctttttttttttgttttcaattttatcttaagttaaatcataaattcatatattgtctcgctggattgtgaattacctcgtacatagagatgatgtatttgtaattt

SEQ ID NO: 6727 - DNA, 485 bp, Oryza sativa
  ref <308>: DATABASE ACCESSION NUMBER: AK063867
  ref <309>: DATABASE ENTRY DATE: 2001-12-06
catgctgcatccattctgccgaaaaccgagcatattgttagccataagcttgtgccgcttggttctggttcccagcagctgccaaggataacaataacttcagtgaggtattctgctgcactgactccttcagcctcagccgcaactgtctttgtatatcccagcgagccgaaattcaatttggaaaagggctattcgtcaactgatccgtgcgttagctagacttgtatatactcagatactctggcagctcttagctttgttccggagaagcgaggtatgctcctgaaaaaaacacgccagttttatcttaattcttgaataggcctggagcagattctgttggtgaacagcggttggatcattgcaaaagttttggcattcttttcaggtgttgatttcgtatacctttttggattgaccacatttctgtaacttacgatttttgtaccgttgattttggctaaggataatcaatcatacac

SEQ ID NO: 6728 - DNA, 470 bp, Oryza sativa
  ref <308>: DATABASE ACCESSION NUMBER: AK063868
  ref <309>: DATABASE ENTRY DATE: 2001-12-06
ttgcaaagagacatggaaaactctaaaggacagactgttgtgctcagcactggtttgaaggacaaaaatcgtgctacggatatgatggatgatgctgatgaggaggaagaggaggcggcattagaagatttcaggatttctgaggatgatgaggatgaggatgaggatgaaggggaagatgaagaagtggagcattttggcttataaggtgactgaacgtagcgtttacttgacggtgtttaggagaacctagtcatgcctggtgtttctttccaggtgattaaaacggaaatgaaattgtcaatatcatatcagtaggggtggctgattgctagtctgtaaatcgactcttctctgggtcaatctcgtatgctcatgtcggcaatgtatgccacgattctataaaacttgatattgaacttctgtttcctacagctgcaatgcccaaagttcatcgcaaattcttggcg

SEQ ID NO: 6729 - DNA, 655 bp, Oryza sativa
  ref <308>: DATABASE ACCESSION NUMBER: AK063869
  ref <309>: DATABASE ENTRY DATE: 2001-12-06
agcagcacagcacacggctgcaacaatggccacctctcctatgctcttccttgtctccctcctactagtactagtcgccgccgccactggcgacgaggcatcgccgtcgaacgcggcggcgccggcggcgcccgtgctggtcggcgggaggacggagatcagggacgtgggcagcaacaaggcggtgcagtcgctgggccgcttcgccgtcgccgagcacaaccgccgcctccgccacggcggctccggcggccccgccgaccccgtcccggtgaagctcgcgttcgcacgcgtcgtggaggcgcagaagcaggtcgtctccggcgtggcctactacctcaaggtcgccgcgagcgcgagggacccccgcggcggcgccgccgccggcggtgaccgggtgttcgacgccgtggtggtggtgaaggcctggctcaaatccaaggagctcgtctccttcacgcctgcttcttctaccaaataatcatgctcaaatatatgtattagtttcactctaattatattaattattactagttggactttactccctccgtctaataaaaaatcaaccctagtacggatgtaatacattatagtactacgaatcagacatccggtaccatagttttttatggaacggagatattagtttttt

SEQ ID NO: 6730 - DNA, 468 bp, Oryza sativa
  ref <308>: DATABASE ACCESSION NUMBER: AK063870
  ref <309>: DATABASE ENTRY DATE: 2001-12-06
taagtaaatcctttaagacttagagcgttgcttctgggtacctgcagatgggttcaaggcctgtagtgtatgctgttgcttgcttgaaatgggaatttttgtccatgcagatcgatcctccaggcggtttttatatgccagatagtagaagagttctgtagctaggatgggctcgtttgaatgttctcaatgttattttcgcgaggcaattttttttgccaccaggaggaatgtcggaatgtaggacagttgaatatatcccatatgtagaacaagagaaattttactgtctttgtggatacctagagagatcattttttttttattttggtttctcttaatagccgaggtattgtggatacctagagagatcaattttttaatgtagattttggtatctcttaatagccgaggtattaagagaagaggtataccaagtttcttaataaaaaaaggatacctcactgt

SEQ ID NO: 6731 - DNA, 589 bp, Oryza sativa
  ref <308>: DATABASE ACCESSION NUMBER: AK063871
  ref <309>: DATABASE ENTRY DATE: 2001-12-06
cagtgttggaaatagttaatgcatttgagaaagtttctggaaagaaaatacctttggttattggtccacgacgccctggtgatgctgagattctcttttcgtcagctgctaaagcagagagagaattcaagtggaaggcaaaatatggcatcgaagaaatgtgcagagaccaatggaactgggcgagcaagaatcctttcgggtacgcctcgcccgactccaccaagcagaatggtcattcacactgatcaacgccgattggtctgtgtgaactcagttgtacatgcaacgtagaactacaggtcgagatcgatgtagatctagtcggtcagtcatacagagaaagcttagaaaagatttgttctcttcttttggaccagtattggtataaatctacccttctgcatatagttcaaaattgttgtaggaacattgctatagtcagtcagctaattcaattctttttcttgctaatttagtggcattgccttgcacagtacttgatgcagattcctgcatcaccaagaatgcagctgtatacggattttgtatctgaaatatgaatggatagaaccacagttatacattc

SEQ ID NO: 6732 - DNA, 710 bp, Oryza sativa
  ref <308>: DATABASE ACCESSION NUMBER: AK063872
  ref <309>: DATABASE ENTRY DATE: 2001-12-06
aaagaaaggataactcgatcaacccaatctactcgtaaccattgcaacgacatggcatccttaaccctccaccccctcttcccagcaactgcaccaggcgtctccacgacatcaactcctagccgcgatattctccgacgcggcaccagacggctcacgaccacgtgcaaggccgagcctagcggtggcaacagcaccctcgagctcgccgccggtgcggccgggctggcgtctagctcggtcgttgcctggtccctctacacgctcaagacaacgggctgcggcctcccaccgggccccggtggcgctctcggcgcagcggagggtgttagctaccttgtggtggcggcgctgattgggtggtcgctgacgacgaaggtgcgcacagggtcgggcctcccggccgggccgttcggactcctcggcgccgcagagggcgtgtcgtatctagctgccgctgccattgctgtcgtcttcgggttccagttcttcgaggttgggtcgctcccgggtccattgccatcggaccagtgttttggctaggtgggattttgggaactcacatgttttcgtgagttgaatatgttattagtaactgaacatactaccctgttaatcttagttttgtgcaattatcgtgctcaattccgatgcttttctgctggaagattccaaatcaaaatcatatatcataataaatttcatgagcc

SEQ ID NO: 6733 - DNA, 731 bp, Oryza sativa
  ref <308>: DATABASE ACCESSION NUMBER: AK063873
  ref <309>: DATABASE ENTRY DATE: 2001-12-06
tcttatggatgaactggaaaatttacggaagcttcatcctgatgtggccatcatctatgccgattactatggagctgctatgggaatcttcttttcccctgaacaatttggaattgagaatcctttggcagcttgctgtggtggaggaggaccttatggtgtatctgaaactgcaagatgtggacatggtgaatacaaggtgtgcgatgaccctcaactgtatgggtcatgggatgactatcatccatcagaagctgtgtttaaggccattgcaattggcctgctacggggttcatacacacaagctccactcgcgtgcccacaaattacagagctcggttcttctgttgaatacaaggtcctctatgatttgtagttgtgactatatttttgttattttcatagagtgtatgtgtggataaaaggttcacgtgaaattgtcaaaataagctggtattgtgctgaaatcgagttaaacttaggccatcgatcttgtaaaggattaggtctatgacttccacctcaagtgtgccacctccatgaatcaaagcacttcatttttttatattttccatcgtaagttgtgttttatttagttaataatttgacatgtacggttcatcttgtctttagttctcaatggcttagttgaagactaatcattcatatatcccaatagtttgtttgtttgattatctgggttgatgtaatctaaatatattcgaccatgt

SEQ ID NO: 6734 - DNA, 341 bp, Oryza sativa
  ref <308>: DATABASE ACCESSION NUMBER: AK063874
  ref <309>: DATABASE ENTRY DATE: 2001-12-06
gcaatatcatgttaaattgcctggccattttctgactggagtgcaacataatcattttgaagcctggcgtatctggcgatgaggatcaggtggcactcacattttgtctccccgttgttcttgcccaagttgtagacgtccatcttttctcagttcatctgtggacgtatgcctgtaattttgacaagaaggaaacacatgctgttttgaagattcccgacaacaaacattccaatctagaactctcaagattcggcttggctatatcagaactcactctgtttatttggttttctcattgtcatactatctttattaatctgataacaataagattagac

SEQ ID NO: 6735 - DNA, 563 bp, Oryza sativa
  ref <308>: DATABASE ACCESSION NUMBER: AK063875
  ref <309>: DATABASE ENTRY DATE: 2001-12-06
ctcaatcagcgggacactagctgcagcagtggcctttcttattgctagatactttgccagagagcgaattctcaaattggttgaaggaaacaagaagtttctggcaattgacaaagcaataggtgaaaatggatttaaggttgttactctgctgcggcttagtcccctattacctttctctcttgggaactacttgtatggcttgacttcagtgaagttcttgccttatgtcttgggaagttggttgggaatgcttccaggatcatgggcctatgtcagtgctggtgcatttggacgagctataattcaagatgagtcagagatcggtttgggaggaaacagccagctactgacactgggcatcgggctattattcacagccattgctgctacatatgtaacacgacttgcaaaggatgctgtaaaggagatcgatgaatagaatggtaggattctctagtaaaatgcggccttctgatactagcatactagcccattgtacatcatcactgtcatctttgatgcaatctgatctactagaaattcaagcaatttttcaaagg

SEQ ID NO: 6736 - DNA, 971 bp, Oryza sativa
  ref <308>: DATABASE ACCESSION NUMBER: AK063876
  ref <309>: DATABASE ENTRY DATE: 2001-12-06
ttattgaattgcaagatttaaaactccagttgctgggagatcatcagcgccagaatgctgtaacagcttgctgcacagctttatgtctccgtgagctaggatggaatatttctgatacatcaatccaagctggtttagagaagacacaactgcccgggagaagccaatttcttacaaaagaggagacttcagtacttgggcttgatggaacatccagtgtacttgtcgatggagcccataccgaggcatcagcaaaggctttatcagatgtgataaaaactgtccaaccaagagggcctttggctcttgttgttggaatggccaatgacaaagaacacttggcctttgctgaacagcttctgtcaggcccaagaccagatgttgtattgctgacagaggcgagcattgctggaggacgctcccggtctatgccagcttcatcactgaaggagatatggatggctgctgcacaaagccagggcatcagctgctactcggacatagggacgatcaccggcgttgaagctccgatcatcgccagccgtcccacgacatcccggtccttgagcggtgacaaacccatgctgattggatgttgcacgccattttcgtccgacctgatcagggttgcctctcggctgcttcagacccaagaagatggcgacactgggctgatctgcgtgaccggctccttgcacatggtttcgtcagttcttggacagcttaggcagtagctgcctctgttgatgaacatgactggaggtagctagcttgcaacaggctggtacacaattactccctcagtttctaatcactaataaatacattgtcatttcacaaatgtcaatacattttccctaaactttcctcatcttacttgtctaaccaggtttgcctaccatgtttcctgtgattgagatattaatgagggtattttgatctatatattaaaaccagctatcttactatgt

SEQ ID NO: 6737 - DNA, 410 bp, Oryza sativa
  ref <308>: DATABASE ACCESSION NUMBER: AK063877
  ref <309>: DATABASE ENTRY DATE: 2001-12-06
ctcgagaggaggcggcggcgcaacgaagacgcggcgcgcggcgggcggcgcgacccgaaggcgacggcgacggcgacagcacggctctctcatccggccgccaccttctttccgtcacagaaggctatagttcgtcatttggagcaatcactgatgttggattttatgtaattaaaatgtgatggtagcagcttcatgaagtacttaaactctcattttgggagatcctgggagaagtttgggttttgttgtgtatttagacttagctagtgcagcctgttttgagtttgctatgtgagatatttggaaagtgaaaataattgtatttattacgcaaccctcctactacacgaagtagtctaagagggtcccataatcgtataaaagtggagacacaaagtttaggggtg

SEQ ID NO: 6738 - DNA, 754 bp, Oryza sativa
  ref <308>: DATABASE ACCESSION NUMBER: AK063878
  ref <309>: DATABASE ENTRY DATE: 2001-12-06
tttgtggtggaaatgatgcatcggtgagtggaacagattgggatgacaacaggtcaaatagcgagatcagtgaagtctgttcaacaacagcagagaagtaccggaagaaggggtcttcatttggcagactgtggagatcgtcgaatggtgatggccataagaagacgggatccgagttactgaacggcaggctctcaagcggtcgaatgtcaaatgctgcactttctcctagcttgaagaacggagaagtgtgcacagtttcaccaagcgtcggagaatggagtccagacctgctaaaccctcatgtggttcgtgccatgaaaggatgcatagagtggccccggggcgcgcagaaacagaacacgcataacctcaagtccaaacttctggaggcaaagctcgacgggcataaggtccagctgcgtcaggcactgaagcagaagatataagcaatgccgaatcaagcaatctcatgtgttcagtggttcagaaggagaacatttccatgcctgatggacggtgtatcctcttctggagcaggcaggcaccctaccgggtatatggtagaggaggaagtgttgcagcactgatcctcaaagggggtgctatcggtggctgtaactaattgatgatccgatagcacattagcttgtttagaagaatcaggtgctccatgtaatcaaatgtaaaactagtaatttcaatcaaatgcattattcaaccatgtttattactactactaacttcttgggct

SEQ ID NO: 6739 - DNA, 894 bp, Oryza sativa
  ref <308>: DATABASE ACCESSION NUMBER: AK063879
  ref <309>: DATABASE ENTRY DATE: 2001-12-06
aactctccatctcgggatctcgcccacccaccactccaccccctctcctctccgtgcgccgccgcagaattcctcgccgccgccgccgccgccgccgccgtgaggtccatcgagatcgcgaccggagcgggtgcaggttgcgatggcccgcgtgtacgtcggaaacctggatccccgcgtgacggcgcgggagctcgaggacgagttccgcgtctttggagttcttcggagtgtatgggtcgcaagaaagccaccaggttttgcattcattgattttgatgacaggagggatgctcaggatgcaattcgtgatatagatggcaagaatggatggagagttgagctgtctcgtaatgcaagcagtggtcgtggtggccgtgatcgatatggtagctctgagagcaagtgttatgaatgtggtgagactgggcactttgctcgtgaatgccgtttgaggattggttccgggggtctaggcagtggaaggcgtcgtagcaggagccgcagccgcagccgaagtcccaggtaccgcaggagtccaagctatggcagaagaagttacagccctgcagggcgctctccaaggcgtcgtagtgtgtcaccggctcgtgcacgcagctatagcaggtcaccacaatacaaccgtggccgtgatgaatctcctgcctatgataacggatatcgccgcagcagaagttagagctgaacctgatgtctaaagactgctgttacaaatgttactttgtgggttgtcagctatgaacaatgccctactccaaatatcatcatcaactctggactttgattaaggttctcataacttatctaccttattatgctttgtgtttgaagttatattactcgagaaacttatgattggatgtgtattcaact

SEQ ID NO: 6740 - DNA, 567 bp, Oryza sativa
  ref <308>: DATABASE ACCESSION NUMBER: AK063880
  ref <309>: DATABASE ENTRY DATE: 2001-12-06
ctgacaatgagctgattgaaatcaacaagcagttggaggagcttcggcaaatggtggtccagaaatgccggaaaatgactacatatgagaaaagaaaactgggtgcaggtctctgccacctgtctccagaagagcttactaaggcattggagatggttgcacaagacaaccctagcttcgaagctaaaggagacgaactggaacttgatatggatgctcagagtgagacaaccctctggaggttgaaattctttgtgagggaagcattggaacgacaggccaacgtcgcttctggcaggactgatgaaaatgcgaaaagaaagagggagatatgcaatgctctggccagaactgcttcaaaaagagtcaagcagcaacctaattagtggcctctgaccattgtgcatttgtgtcttcacttgttgtttagaatgtttctgagaaatagccttgcaaaataatctcttccttctatggagcatgtaaataactagtctctgcttagctgtgtgaggttgcaacaatagcgaaatgtttcccaaaaaaagggtcttatgttccacctgt

SEQ ID NO: 6741 - DNA, 834 bp, Oryza sativa
  ref <308>: DATABASE ACCESSION NUMBER: AK063881
  ref <309>: DATABASE ENTRY DATE: 2001-12-06
ctccatctcgccacattcgccgcgcgcgtcacacgagcaagggagcaagcgaggagagaggagaggcttagcgagagaggtgaggagaggagaggatttggaacttttgatctttgggatcgcgagacgacggagatggccggtggcggcagggccgatgacgagcgaaggatcggggtggcgatggactactcggcgagcagcaagagggcgctggactgggccatcgccaacctgctccgccggggcgaccacctcgtcgtcctccacgtcctgcatcacggcggggaggaggccaagcacgccctgtggggcaagtccggatccccgctgatccctctctccgagttccgggatccgacggcgatgcagcagtacggcgtgcactgcgacgccgaggtgctcgacatgctcgacacggcggcgcgccagttggagcttaccgtagtggcgaagctggactggggcgacgccagggagaagctctgcgacgccgtcgaggagcagaagatcgacacgctcgtcatgggcagccgcggcctcggctcgatccagaggattcttctggggagtgtgacaaactacgtgctgtcaaacgcatcatgccctgtaacagtcgtcaaggggaagtgatcgatgattcgacttgagtggatatactgttactgttgctactgtatctgaataaagcgtgtatggaacttcttttgtgtttgtaatgttgcagccttcccaggttcttctagacagttcactttgcaaacagtccatgcttgtgtgctcaaccatgtgaatcactttatatatatagaccgaatttgaggttttactttc

SEQ ID NO: 6742 - DNA, 593 bp, Oryza sativa
  ref <308>: DATABASE ACCESSION NUMBER: AK063882
  ref <309>: DATABASE ENTRY DATE: 2001-12-06
ctgcaaccatggaggaatagcactcgtgtcatcgttcatcggtgtcgcgctcatgctggccctgaatctactgtcagcagcagccaactcaccccgctctaatgtgaccggccaatgagttgtccatatctctcaggacagctcattcatgacaaaattaacaatgcactgtttctgtctttggattgtactcaggttagggcagaagaactgtaagtctattatctgctccatgtgggagctggatcacaaccttcagtgagccagtgtgctaaatttggcatgcaactgttccatcttgcttggcctgaaatgagcaggccaagagtacaaacacataaactccaattggttatggggctttagctagatcaagttgttacactattaaattctactactttgtgggtgtaaattttatcttgtactaatagtcctgccaatttgtcctcttttttttttttttgcttaggtggatgcaacttttcattatttaacaggcttgtctggtgaaccatgggctttccagacaattagtacctgttgtactgcattgagctttgttttattgtctgagcagtgaagttgtttgg

SEQ ID NO: 6743 - DNA, 595 bp, Oryza sativa
  ref <308>: DATABASE ACCESSION NUMBER: AK063883
  ref <309>: DATABASE ENTRY DATE: 2001-12-06
cagctgccttgcaaaacatgcaaaagaccgcccaactatgagagaggtggtggagagcataaagcaagtgatgcagcacaacgaattggatggtgacgtcgaggcatcaggggagagctcaccacctcatgaggttcctgggaagccaaccgcagatgatgttgctgtggcggcagcaaggcggcggatgcttcacctggctgcgctaggtgaaaatgcaaacaatattgcgaggaggagattcatgctcatgagggcagctgctgctccaactccaacataaacttctgcaagagttggtgttcttgactgtattattctgatgtgcttgtaaaggtaggtccattagtcaacttttttatcactataaatactttaaaaagatccaacattttgcttactgtagatttgtaatacacaattctgtaggttcagtcaaacatcagacttacagttaatactgtgaggagttctttgtggtgtctttgtaaatacaaaatgtaattctgctttctcttttttgttacgagttctgaacttgtgaatgtagactctgaaaatgtttccgtatgaaaaaaattgtgattgatttgat

SEQ ID NO: 6744 - DNA, 720 bp, Oryza sativa
  ref <308>: DATABASE ACCESSION NUMBER: AK063884
  ref <309>: DATABASE ENTRY DATE: 2001-12-06
atcccttcggcctccgactcccctcccgtctcctcgcgccgccgccgccgccgccgagcagcgccgatccccacccaccccggcgggcaagcggcgccggcgtcgtcctgctccccacacccagccgccggtgggcacacgcacagagagatcctagcaactatggtgatccctccaccggaaagggcggctaggatcacgcgctttctgaagccctaccttctgaggatgcatttctcgaacaagtatgtatccgctcaggtggttcacaccccaacggcgacggtcgcctgttccgcgagctcgcaggagaagctgctgaggccgaacatggagtccactcgcgatgtcgctgccgctgccaagatcggtaagctgctcggcgagcggctgctgcagaagggcatacccgctgtgtgcatccacatgaagagagagcagaagtaccatgggaaggtcagggctgtcattgactctgttagagaagctggagtcaagctgttgtagtctctaaaacagtagaatcttttattaaaatttctgcaagcttgttcctctgaatctcaggcaaaatctgaaagatgtcggatcagacaggaaattttcatttcggtattgagggctagatggcctatgtggagatgttcctggtgaataaaggattttgtactattgactactgggacaaaaaaagttattttatcatcggtaactttactc

SEQ ID NO: 6745 - DNA, 529 bp, Oryza sativa
  ref <308>: DATABASE ACCESSION NUMBER: AK063885
  ref <309>: DATABASE ENTRY DATE: 2001-12-06
gtgcatcctcccgccgccgcttccccaccaacgccgccggctgcgcggctgcgacggcgacggcgacgctctcccccggctatctcgaggtttagtgcaagaatgggtcggaaggcgggtgcgctttacataaacccaaagaagttcggtggtgtcacgaagccttgcatgatcgagatggtttccttcctcaattgcctggccttgaacaaacagaacgatgacaagtgtgtccgacagaaggatctcttggttgcttgtgctcaggctcagaaaggaaggccaaagaatgcagcaaagaccatcaattaccatcttcagcgacttgcacgagacaagggcatttagttccggtaatatggaatctttgttgatcatgatgtttgttgccttgatgatatggagtcgtaatgcaatggcctatttgtaataatctttatatctcagactaggcatttcaacacaatatcgatattattttcctctgaacttctttacactataaaacgtggtttgcggcttttgcggt

SEQ ID NO: 6746 - DNA, 753 bp, Oryza sativa
  ref <308>: DATABASE ACCESSION NUMBER: AK063886
  ref <309>: DATABASE ENTRY DATE: 2001-12-06
tgatccttcgatgtcggctcttcctatcattgtgaagcagaattcaccaagtgttggattgttcacccacctccacctccacctccacgccattgttctactcctctagctccatctccaccaccaccaccactcccttctcctactcgtctccgccgccgctcacccggactcgcccaaaggctccgcgtcgacgacgaccacgacgtcggagggagacgagtcggcgatctccgcctgttcgcctcctctcccgccgccgccaccgccgccgccggcggcgctccccgagatggcaaaccttgacttcacggaggcgccatgggacgaatccgacgccttccacctctacaagtgtccgtcatgggagatcgactgggactccatcctctcgtgatcaaatcaactttaattaattaaaattaaattaaattaaattaatgtaatcagtagcttccatgatccgatggaatattagacatcggccatggctgctgcaattagggtttaaggaggtcgtcgtcgtcatcgtagtaggattaagtcattaagaagggtttaagataagtgttcttagcttattattgctgtattaattttctgtacttagtagttattatgatctcctggttacttcgccggttgtttttttttcactcggcaaggccagttgagggtgtaatgtaatgtaacttttggttactgctgttgcaattcactctttaaaatttttgtaatgtatttactttgctc

SEQ ID NO: 6747 - DNA, 999 bp, Oryza sativa
  ref <308>: DATABASE ACCESSION NUMBER: AK063887
  ref <309>: DATABASE ENTRY DATE: 2001-12-06
agtcttctccgcaaccttggatcgatctcactcgcctctctctcgagtcttccttggactcgccggagagatgggcgacgcggcgtcgtcggcgtcggcggcggagatggtggggcgcgcggtgggtgaggtgcgggaggcgctgaacgagcacgccgacgtggtggcggagctctttgggcgcgtctcctccgacctccgctccggattccgccccgccctcgactccttcctcggcttcttccacgccgtcgactggaaggaaccttggttgatcagcatgttaatttttcatgccattctgctgctggtaacaatcatctcaaggagaaatgtcaacttccaacttatcttgtcagctttaacattttctggtgtatttctcgctgagagaataaatacattcttagggcaacactggaagagcttctcaagccagaattattttgatccccaaggtctgttcatttcagttgtctggtctgggcccctccttttgataacgatccttattttggtgaacactcttgtcacactctgcctgctgatggtaagatggaaaagggcggagcttaggcaccgtgctcgtgaggttcgtaacaagcaggattgatcttaagctacctgaaaagctgaaactacgctgtttggtggccagcagacaagttgcttcccttggactgttgatctaaccgaaggaatttttttgtgtgaacttaccatgtgtagacatgtagcagtcgttcacaaaaacagtgtttatttagggatcatttcacatttgaagaaatcatggccagaggcccagagcttgactcttttgcctgtagcttgtgtattcccacgcattcttgtttttcatgcgaaggcaggagtcgagttactgtatttgctgaaatatgtgtaatagggcaaatcctttttccattgagaatctggctccatgaatgacagggtattttgcaattgtaatacttattcaataactcattttgattt

SEQ ID NO: 6748 - DNA, 728 bp, Oryza sativa
  ref <308>: DATABASE ACCESSION NUMBER: AK063888
  ref <309>: DATABASE ENTRY DATE: 2001-12-06
aacttcaattggtattgttgcggcatttatttcagtcttttgggcttttggttatatccgtctttcacaaaggcttaagagaacagcaaacaaacctgcaaaggctcctccacgtgccgatgtggtaaaaaatctcaaaaatggtattgtgctcaatgttcttggaatgggtgctgcaattcttggtatgcaggcaactgtaggggcattggtagcaaaagccctcactacatctgcagtgccgtactaccagggaatatctcctggccagagccctgttctatctttagatgttttccttgttcaggcttcagccaacacgatcctctcacattttcttggattatcgagcacactggaattactgcgatctgtaaccctgacaaaagtagaagctgcctcaacccctcgatctcagccagcatgagcttaagctttccagagtccagaccaatgttcctccgttctttctttggttgtatttttctctgcaattgctttgtgttttcttaaaattttcttttagtgataagcttcgatcagtctagttgcgttgcctttgctgagtgcagatttgaaggacgcattcaaatctgctcgtctttcttattacctttgtttatttctgagcatattagaagtttctgtgagaagtgagcaagtttcgtgattcctatgatgtgcggtgctgcttcattgctgttatggaaattggaaagaagttagac

SEQ ID NO: 6749 - DNA, 658 bp, Oryza sativa
  ref <308>: DATABASE ACCESSION NUMBER: AK063889
  ref <309>: DATABASE ENTRY DATE: 2001-12-06
tcagccttcatataggaacatacagtacagaacacaatactgggtaagtatacactggattattccgtattcgttggatatgatactccaaacaggagatgctttttagccttcccactagcctgcaccaagtggcttggcaaacaaacaataggtgatgctgacacctttcgatggcatcagcacaagtgcacaacacatgttgagttttgagattgtctacctcatccatttctttcttgggagcctgttcaactcattatagatgcattgcatgtatatatgtctgattaaaaaggcctgagcctgcagttccgtgcttttccaccacggcacagcttgccaggttgaagcagtatatagttataaattgtcttcttttgtcactatcagggaggttgggttgagagggagatgctttgtcaatttggttgtataagttgcatcgtaggcacagttgagcccacatcttgcttaggaacagttcgcctccatttggctttgcatactatagttgtcttccatttagttttcagccagcataggatttcagatttcttctaattttgcctttcctgcctggattgtatatattgatttatatatatcttgacgacctgcctctcatcgttggtgcagaggccgaattccattatcc

SEQ ID NO: 6750 - DNA, 655 bp, Oryza sativa
  ref <308>: DATABASE ACCESSION NUMBER: AK063890
  ref <309>: DATABASE ENTRY DATE: 2001-12-06
caaagaggaagttgtgaaaaaggttctcaagaccaacgttcagtcactagtagaattgaacgtcatcaagaaccttgctggttcagctgttgctggagctttgggtggcttcaatgcccatgctagcaacattgtaacagccatctttattgccaccggtcaggatcctgcacagaatgtggaaagctcccagtgcatcacaatgttggaagctgtaaatgatggcaaagatcttcatatctctgttactatgccatcaattgaggtgggcacggttggtggaggcacacagctggcctcacagtctgcttgcttggacctacttggcgtgaagggcgcaaacagggaatccccaggatcaaatgcgaggctcctggccgccgttgtggctggcgctgtccttgctggggagttgtccctcatctctgctcaagctgcaggccatttggtccagagccacatgaaatacaacagatccagcaaagatatgtccaaggtcgcctcttgagcgtatcatttggatcattgccgaggaaatggacaaaaccccgtaatgttaactactgtctaattgtcttcttgtacccgctggagagagactggaagtggacacccaagagcttcacatgctgattccatgtggcatgctcgaggt

SEQ ID NO: 6751 - DNA, 394 bp, Oryza sativa
  ref <308>: DATABASE ACCESSION NUMBER: AK063891
  ref <309>: DATABASE ENTRY DATE: 2001-12-06
cacccacagtatcagaaatcagacacgtctgctagaggtactgtgtggaaagcgaagaattcctcaactggagcggcgcctgttgagaaccccgttattactagaacaggatctgacccacaaactcttgacagccgcccaggtaaaagcttccgaaacttcaggttcgacacagcgagtatcctgcagtccatggaagcttccttcctacgtacctaggagcctgacaaagcatcaccccatgtgtgtatgcttgatgtgtatagactatgtaagccaagggcgtgtcttctgttgttaactcagctttttcttcacttttctagttgtatctgtaatcctgaatgcaacagatgcttctaccattgtgataatatccctacatttcgtgcac

SEQ ID NO: 6752 - DNA, 555 bp, Oryza sativa
  ref <308>: DATABASE ACCESSION NUMBER: AK063892
  ref <309>: DATABASE ENTRY DATE: 2001-12-06
gttagggtttaactccgactgaacgatcccccccgccggccaccgccctcgccggcgtcgatccgatacggcgtgcgcctggtcgctgcaccatggggtacctgcaggaggccagggagaatcacgtcaagaagaaggtcgaggaagctttgcggagcaaaatgaagcagaaggcccttaaggagtgtgatttctactgctcaaaatatgctgagtgtgctcgaggtagaactttttcggtggtatggcaatgccgcaaacaagcaaaagagttgaatgattgccttcatcaattcacaaatgatgcagtcctggaagaaatgaagaaggcttacatggttgagcaagagagcaaggaaaagaaccaataagcattatgcaatggccaatggccaatgggtttctccatgcttgtacgtacattgctccttttggaatttgttagttgcttattagtcatcttaattgatttgatgccgagttcctggagacttgaaaacattgattttgttccacatgcataatctggtataacatcaaggtccctatgcgaat

SEQ ID NO: 6753 - DNA, 673 bp, Oryza sativa
  ref <308>: DATABASE ACCESSION NUMBER: AK063893
  ref <309>: DATABASE ENTRY DATE: 2001-12-06
ggcaatctaatttggggccgaacacaccagggtctgcgacgctggcgaaggccggcggtcgggaggcggcgcgacgacgccggcagcggtgatggagatggcgcacacgtacgtgccggggagcaagcgcgggcgtgggctcgcggcgcggctctgcgacgccgccttcgcccacgcgcgggagcgcggcatgcgcgtcctccccacctgctcctacatctccgagacttacctccctcgcaacccggagtggaacgagctcgtgatcacggagaaagaacccaaacccagcagcatgtagaagaaatattcatgcaactctgctacaaattagccaccctaaataatcagctatatatacagctcatggaagtgtatcttctcataatgtcataatgcccctttcaagccatatacaacgcggatgataccgctgggaatgttcatcttcagtacaagtatatttcagaatgtatccgaggaccaaattctcctaatctgcagtcctggcaatgtagaaagagcagtcattacattacattatattacatgtggttctcatctgtactacatatcacaaggccagtgtttggtgagaaatgtactgaaccacaaatgtattgtttcatcagttgcaccatgatctatttacaaggcaacaccatgtactagt

SEQ ID NO: 6754 - DNA, 971 bp, Oryza sativa
  ref <308>: DATABASE ACCESSION NUMBER: AK063894
  ref <309>: DATABASE ENTRY DATE: 2001-12-06
atcgcggtcgcagtggtggtgtgccggcggcggtggaagaggaagaggaagacgaagaagcagcagccagcagcaggtctctgctacacactacactcaagagagcgagaggcatggaacactactcgaccaagttcagcaatggaggagggagactagtagaccccatgcccgaccgaaggtcaagattttggcagatggattcccaacccaccgagctcatctgtcccatgcctcgccgcccgtcaccccgccctcctttcctatccgactccatcaacaggacattaccggtgtacagagctgactctgcttctgatgtcctcgacctcatcctcagtaagaatgaccctgatgttgatactgattcgagcacccaggtgggctttttctgtggctcacctcctgtgcgcgctaacaaccccattgtccatgatccacagtttggtaaaaacataccttccttttctcctttagggagttctttcggcaaaaagtctgctggaagagctgaagtaggttctccatcttgcggggcaagcagcccaaaagttagaattgaaggttttgcttgtgggaacaaggagccccactgtgcagtcacctttgcctgagcattctcattgaccctaacgctatcctgccaccaaaacttgtaaattttccgtgtgctgaggagggcataaattagtttattttgggcttctttttgtcgagttgagttggcattgcccttctgattgtggcttttgaaactgcacaatcgcagagagctttcggatgtacataaatgaggtctcccgtctgtagctatatcatcttgtgtgtgtacaaaaggtagtaacatccaggtccatggtgtcggtcagtctgtaaatatgtgtcggtcagtctgtaaatactgtagtgtactggcatgtaagatgcaatcaatcgatcaattaatgtgaaaaatcctcattagtctgctg

SEQ ID NO: 6755 - DNA, 712 bp, Oryza sativa
  ref <308>: DATABASE ACCESSION NUMBER: AK063895
  ref <309>: DATABASE ENTRY DATE: 2001-12-06
acgcatctcatggcggcgagcctgtggcgggcggtgatgggcgccggcgcctcgtcggcggacaccgacaccacgggcggggtggagttctggcgttcgccggagcgcgcggggtggctgaccaagcagggggagtacatcaagacgtggcggcggcggtggttcgtgctcaagcaagggaggctcttctggttcaaggactcgggcgtcaccgtcaagggcgccgaggacacgctcaaccggcagttcgccttcgagctctccaccccggcggagaccatgtacttcatcgccgactccgagaaggagaaggaggagtggatcaactccatcggccgctccatcgtccagcactcccgctccgtcaccgacgccgaggtcgtcgactacgacagcggccgtcctgccgcctcagtcaccgcagacggcgacaagtgatcgatttcatcgattgattggtgagcaaaaggacctgtggttcctgtaatactgcagcatatccatggtacttacttaggttttgcgattatggttcatgtttcttgatttgcgaacgtaagtgtgcatttgtatattactgatgcttatcggggaataaatttgggagtttagtgtataggatgcgctctgatactatccaccagttcactccatgtaactttctttaataaggtacgatttgtttggtcaattggtctgtgtttagttgtct

SEQ ID NO: 6756 - DNA, 579 bp, Oryza sativa
  ref <308>: DATABASE ACCESSION NUMBER: AK063896
  ref <309>: DATABASE ENTRY DATE: 2001-12-06
atttgttttggggtttttctcagttcagttcagttcagtccagatggtggtggccatggctgcagctgcagtacaagaagaagaagatcagaaatggatcaagatatgtggttaaatcttgttttgtacatagtgtgtgtgtcaagtgtgtatttttacttgagatcttgtggagagatgaagcatgcatagagcatgatctgatgatctgatcacaacaacggcgatgatgaagatgaagaacaagaaggtggtggtttggccggattctgcgccagtttctgcgattccagaacgtcgtcatgatgattattattgttattgctgttaattaagtctgaagaatttaagctcgttttcgtcggatggtatagccagccgatggttcagctagcacctccattattattatcactattgttcctcttttttttttgttcattttgtttctcatcaagatgggatcgatccggcgacatattattgctctgtattttgatcatcaatgttattgttgtttacctactgatctagtagctcacaaattagtaccattattatattgtggtactttttact

SEQ ID NO: 6757 - DNA, 912 bp, Oryza sativa
  ref <308>: DATABASE ACCESSION NUMBER: AK104974
  ref <309>: DATABASE ENTRY DATE: 2002-08-28
atcagcacacacagtctcagtgagctcaagataagagtatattcacagagaagagatatctagagcgtgtgtgtgtgagagagagataggcattcgttcgatctcgatcgatcacagctagcaatggcagcgccgacgtccaagaaccttctcctcgtcctcgtcgtggccgccaccgcggtcggcatcgtcgcgccgcacggctccgaggccgcggcgggtagggctgtcacgggcctcgtcaccggcgtagtcccgtgcagcgccgggagctccatcaacgccgcgtcggtccccgcgttccccgacgccggcgtgcagatggtgtgcggcggcagggtggtgggcggcgcgacggcggacggcacgggggcgttcaccatcaacatgggcgcgctcaacgcgacgatgctcatggccatggccgggaaccagtgcaaggtggtggtgaccaccccgctggcggcgtgcgacgcgtccctggccgccgtcgccgggacgctcacggcgccggtgcagctcctcggcggcaccggtggcctcggagggctcggcggcctcatcaccctcatcacgcagatcctcagtggcctcctcggcgagatcctcaacatcatccccttgccattctccctcgtctagatcgatcgatcatcgatcgcctgcgcacaaacctgcagccaggcggcggcgtgtcaaatggacgatggattatgatgatattaatatgtagttaagcatataaattaaattaatacgtgtttatatatagcaacggggcggcctaactaatgcgtggtcaattaattaccctgctgctttagattgtatatcgtgccatgcgtcgtttctctatgtataccagttcatgtgggcttctaaaattatgctatatatgtactgtctaatact

SEQ ID NO: 6758 - DNA, 407 bp, Oryza sativa
  ref <308>: DATABASE ACCESSION NUMBER: AK063897
  ref <309>: DATABASE ENTRY DATE: 2001-12-06
gtggttgcacgcattctgcattcagtttgtttgcaccagatagatgtatgcttttctagttctactactattcttttcactcagtgttgcgccccaatgaagccatgacatggagcgagttttgcccgtttgccccctttgtacagtatatttcgctgcccaatcgtttcatcataaaatgatatatcagtgatgggtatagttttagtttaagcccagggaagagtctatggttgctcggtgttagtatcgagcgtccgaatgcctgtatcctaaaagacggttttgccttgcaaaatctgacaaggttggttggtaaggatacgcaaaacaaatttgtgttgcataaagttggtggtctgtaccagtataagtttggtgatttcagtcgatcactggtgatttgc

SEQ ID NO: 6759 - DNA, 412 bp, Oryza sativa
  ref <308>: DATABASE ACCESSION NUMBER: AK063898
  ref <309>: DATABASE ENTRY DATE: 2001-12-06
cagctcaagctgcagatcgccaaggccctgggcagcctcgtggtgcccggaaagaacagggatcacagcttcaggagatgagcgtcgtggtgccccggaggcaagaactgggagccacagctcaacacttgagcagcagcgcctgcaaactgatggaagttctggtgtactacggtggtgggcataggaattgtgcatagttgttggtgtgtagttttcccccctttccgccccgtagcgtatggcttgagacttcgagagtatctcgcttcctcggcaattgctttgttcttgagtgaagaaatagttagggagagactcggaggtgtgttcctggcagtctcatgtctggtttggtaatgtactgatgtgcagcataattttgatggtaatgagagtgttattagtactt

SEQ ID NO: 6760 - DNA, 1090 bp, Oryza sativa
  ref <308>: DATABASE ACCESSION NUMBER: AK063899
  ref <309>: DATABASE ENTRY DATE: 2001-12-06
cactgaataaattggttgacaatgtaccaattccacttcttttcatgagaacagttattcaagcacttgatgctttcccagctttggttgattttgtcatggaaatactctccaggcttgttaataagcagatatggaaaatgccaaagctgtgggttgggttcttaaaattggcatatcagactcagccacgctcgtttgatgttattttgcagttacctccaccccagcttgaaatagctttgaataagtaccccaatctacgaactcctctttgttcctttgttaatcagcggaacatgcacagcatcttgcccagacagattttgaaagttctgggcttcatcaatgaaccgcaccaggcaccaattccatttgtgcctgctgcaatgcaaacggcagatgcaacctcctctcttcctggtgcaactcttatgtgaaatgtgatgtataaactccaatcagatgcgagaaggctttcctgatcacaagtacacacactgccttgtgaacaacgatgatatgtgagtaaaacagagcccagacaaggacagcggtgtcactcaaaagggtctgcgtttgctggacttgtttcaaacaaagttacaggttgtcagcaagggataccgaggtggtttcttaaaggttcattgcgcttgtgctcgaggggctcctatgattttgcagcccgtgcaagttgtacagtagttgtactctttcgtcctgcaattgcggactgaggcttctgtgacaagcaaagaatagaaggaatattgtttaggacgatgatatgacttatcatcatcatgtcttccgccaaggaaatgacatggttgcaagctgcggcaatgcggcattcctttccgagctgcacggagacggcatccgactgattggctaaccatttcttctgttctaatgctaacaatgtctgagtattgtacattaactatttgagtccgctgtcagccgatgttaaacctttcatctcagaagataataatttatagatgttttgattgactagcatatcaaaggtaatagacaatattagcgccgttgattttcttcggtgctgcgttactttcgt

SEQ ID NO: 6761 - DNA, 866 bp, Oryza sativa
  ref <308>: DATABASE ACCESSION NUMBER: AK063900
  ref <309>: DATABASE ENTRY DATE: 2001-12-06
acccaaacccaaagcagcaattgcaagaagcaaaatctcttctcctcctcctcctcctcctcatcatcatcctcctctcgcccttcgacaacgcaccatagtttaacccaagctagaagaagaagacgatagatatgagcactactcgcggcgtctcctcctcttctgctgctgctgctcttgcgctgcttctcctcttcgccctctgcttcttctccttccacttcgccgcagctgctcgcgccgttcctcgtgatgaacaccaagagaatggcggtgtcaaggcagtagcagcagttgcagctgatcagcttgtgctccagctggaaggtgacaccggcaatggcgacgaggtctccgagttgatgggagcagctgaggaggaagcagcagcatgcgaggaggggaagaacaacgacgagtgcgtgcagaggaggctgctcagcgacgcccacctcgactacatctacacgcagcacaagaacaagccttgatcgatcgatccatccatccaactacacgctgaaatccaaagctaatacaaggaagatcgagatcgagataaattaaccaactctatatgcatatctatctatccatctacctctgcatgctgttttcactgcatcgatcgctactgttctgcagtgccaatcactgtccgtttctgtacaatctgtgatactactagctagtagcagtacatggcatcgttttccttcaagtgttcgttggcttttacttagtccggtgagtgcttgtgggttatttctgacgagggagtgtgatcagtacgcgtactaatggtattttggtttgtcatggcatgatgaaattaagctgtggtagcaatataatgcatatat

SEQ ID NO: 6762 - DNA, 490 bp, Oryza sativa
  ref <308>: DATABASE ACCESSION NUMBER: AK063901
  ref <309>: DATABASE ENTRY DATE: 2001-12-06
taccagtatcagggcctgaggggctgaatgaacttcaaaagttagcagtgcgatttgaagagaaaatctatactggagccaccagccggtctgattacttgcggaagttgtctctaaaaatgctctctttggagacaaagactcaacagagtcctggaaacgcccaagtgattcaaaaccaaaatccccctggctcaggtgttacaatgttaccaaaaaaacatttgtcaggtgctcagaaaagaaacaaaagaaaacggggagatcaattaatcggttcacaaaagaaatgatttcgcttcaagaaatacgtgaagaagctcttttttataagggatataggatgtttgtggtctcctattaatgtattcatactactttgtttctatagtgttttttagttgtcaattatactatcgatattatttatcgataataaattgttgtattgcaacttgcaaactatttgatttactatttaccatgttag

SEQ ID NO: 6763 - DNA, 445 bp, Oryza sativa
  ref <308>: DATABASE ACCESSION NUMBER: AK063902
  ref <309>: DATABASE ENTRY DATE: 2001-12-06
tcaacaacgtcgagtcggtgctctaaagcttgggtgattagctcttgaaatctcctgccttctgctactgcttttagttggctgcaatggactagtggaacttggctaggtggtgttcctgctgactttaagggcctgtttgggggagctggagagagctggagattctgagaagctagctggagattctgagaagctgaggagggtctgtttgggggagcttctttaggtttgttggctggtgagctgagaggctgaattgtctgaaatacccctgaggtagatggtggtcctgatctcttgttaattatttggttgatagattacacccttccatatataatttgtgtgcatataattttgtaaatattcatttttcataatgataggaataaaaaaatgtgttcatttttaaggcaatgagaaaggttaaattaattatcgc

SEQ ID NO: 6764 - DNA, 498 bp, Oryza sativa
  ref <308>: DATABASE ACCESSION NUMBER: AK063903
  ref <309>: DATABASE ENTRY DATE: 2001-12-06
atgctctccagtttccaccggcctacctagatcgggagaatggctgacagctccgccgcctcccccattccggtggcctattcatccggtgatcctccgtctgcgacgccggtgcccgttccaggcagtgatcttccagctgctccggccgccaagtctcaagaagcctctccagctgttccggtgatcgatcctagcaaagaggagcgtatgggttctgggcatccacttcccgggggtaaagattaaatacactgggcacagggacgtgttaaaaccgttctcctacatcgaatgtccggaactgccttacgtgtactgtgcaccgtgagattgtgatgttgtttcagataatttcagacactatgatcagggaataaatccccactggcgttaggctagttactgctagggataatgcagatcaggctgtgcaattgtagacaattgtcttgtatcaataaagtgcagccagttggtgccaaagtatacctctct

SEQ ID NO: 6765 - DNA, 564 bp, Oryza sativa
  ref <308>: DATABASE ACCESSION NUMBER: AK063904
  ref <309>: DATABASE ENTRY DATE: 2001-12-06
cctcttaagcccacgtatgctcaagggcagggcacactccacattatccatgcatatgcatcatgtaatccacaagatcttcttagcttatgtcatgcgataactaccatcatcttgttcttaattttggagtgtgtccgtgcaatgggtggccgtgcttcacacgcctatagagcgtgggctaatggtggccatggaggctagctaagctacttcttcttggggaggaatggctatgcatggcctccatagtcgacgacttttacctctactaaggtagggcaacttgtatcctttggcaattattcggtggatgtctgttggtggtggtgttagggattggagccggatgaatcttgagtttgatcttggctgtatgatgttagacataaagaggatggtgaaatggtatatggatgtacgatgtttgtgtttcggtccttgctctaataatcagttgttcttagtgttttgttttttttttgccctctttgttaaattgtaaccaccctacatatatgtactagtatcaccaataaagtgatgaatttgatattagtaatt

SEQ ID NO: 6766 - DNA, 400 bp, Oryza sativa
  ref <308>: DATABASE ACCESSION NUMBER: AK063905
  ref <309>: DATABASE ENTRY DATE: 2001-12-06
gcttccatggccggaactgagctgagcgtgcgtgcgctgctgccgtacgtgtgcagccatgtcagccagtggaggaagctttttcggccggaagaggagagcaagctgaaaacaaaaggtggaacagatgaagcaaatgatgacaagattaagacctccaagagcaggagtgggatagttgtgatgtttgctttccctgtttatagttgctgtaggagttctactggttgtgtttagagcttgtgactgttgtcattggggtccttttgccgtttagagttatttagctaagtgtggtccctgtaattgaatataagtgcaatataactacaagttggatatacaataacacgaatcttaatgcaagattttatggatgaaaaagtgaaagataggtgcc

SEQ ID NO: 6767 - DNA, 399 bp, Oryza sativa
  ref <308>: DATABASE ACCESSION NUMBER: AK063906
  ref <309>: DATABASE ENTRY DATE: 2001-12-06
ttgggattgtgaagtgaaagaaatcattttatctactaatagtggccaaattggcgtattaccaaaccacgcccccattaacacagctgtagatatgggtcccttgagaatacgcctcctcaacgatcaatggttaacggcggttctgtggagcggttttgccagaatagttaataatgagatcatcattttaggaaatgatgcggaactgggtagtgacattgatccggaagaagctcaacaggcacttgaaatagccgaagctaacgtgagtagagctgagggtacgaaagaattggttgaagcgaaggtagctctcagacgagctaggatacgagtcgaggctgttaattggattcccccatctaattgaagacaacccaacggtttagttgatac

SEQ ID NO: 6768 - DNA, 727 bp, Oryza sativa
  ref <308>: DATABASE ACCESSION NUMBER: AK063907
  ref <309>: DATABASE ENTRY DATE: 2001-12-06
taaagagcaacagaagaacaataatggacgatcctttcatccgtaattatattgaggacctattgaagaacatcagaactcaagttctgctcaagcttattaagccatatactagaatcaggattccattcatttcacaggagctaaatttcccagaaaaggatgtcgagcagctcttggtctcactcattctggataaccgaatccagggccacatagatcaggtgaacaagttactagaacgtggtgacaggtcgaagggaatgaggaaataccaagccatagacaagtggaatactcagctgaagaacatctaccaaacggtgtccaacagagttgggtgagagagatagcaggatgcctgggctgcactgcgcttggcacctgcttgcacgttttgttgtggtgggtaaatgcagcgagtgtttggtgcgtgcattacatttgagataggctcttggataggtaaagaaaaaaacagtctcgtgtattaaacatggtactcttttgcgcgccatgtgaagatgctgggattttgtcctgaactgaatctatctgcaaattccaacccctctgaaactatactagcgtcaatggctcgaaacttttggttttgttggcattgccgcactagcaaattttggtatggtagagagaatgtttggttccgtgtaaaatatgcaccaggtacaagacatactgctaatattgtgccgttgccgagttc

SEQ ID NO: 6769 - DNA, 579 bp, Oryza sativa
  ref <308>: DATABASE ACCESSION NUMBER: AK063908
  ref <309>: DATABASE ENTRY DATE: 2001-12-06
agatgtcctctgaaaagcaaaagagagaatctgcaccgcctactattcattcccataagcgtgctgagaaggcccagtacttccttgctgaggcggtgcataacttcaatggtaccacagaaaaggagttgagtttaattgttggtgattatgtcgttgttcgtcagattgctccgaatggttgggccgaaggagaatgcaagggggtggcaggatggttcccggctgcctacgtggagaggcgtgaaaatatcccgccaaacaaagtcttcccgcaagcataaaccgccaaatgctagttgaaaatctagatttgcgctgctaaaatctgtaatttggtttgggactgccatgatttttggtccttttggagttgtttaggccgtatgactggtatgttctttgttctaccttgtacatgttttagtaacttgtgatcagtatacatgttttcctggcagcagattagacagtagactaaaagctttggccattcatgatgatgcctttcgaatgtaaagttatttatgtaccaaattctttcgctaatgatgtgcttattgattgatgattcccttc

SEQ ID NO: 6770 - DNA, 617 bp, Oryza sativa
  ref <308>: DATABASE ACCESSION NUMBER: AK063909
  ref <309>: DATABASE ENTRY DATE: 2001-12-06
ctctctctctccgcctttcccccttccttcgccgtctctccctctttccctctctcgattcccaaccgcaacgccgagcggcgtcgccatggacgacgaagccggggagtgagctcgccggcggcggagcatgatgggtttgggccgtgcgtggtctggccaacctacacgcgtgatccatggtcgctctgcccggatctgtaccggtggcgaggagagtttgcttcaaagtcctgtgtaatattttttcttccctactatgtccccttcggcgctgctgcctccacagatcaggccgagtctgatggcttccttcgtcggctggatgatgataggtgatacggtggatctgattcttcttgcaccggagatggctccagatctcgttcatcggctggcatctggtggtttcgttcatcggctggaggaggaaaggtgagatctttatggcttagtcggctggagatggaaagatcccatcttgttggcttcccttcgtgcctgtcctgttatttccccctctcccttctggtttttcatcaataagactgcacacattgtcaggcatgagcggccaaatatatgatcagtataaagacttctttgtcaggcatgat

SEQ ID NO: 6771 - DNA, 1227 bp, Oryza sativa
  ref <308>: DATABASE ACCESSION NUMBER: AK063910
  ref <309>: DATABASE ENTRY DATE: 2001-12-06
ctaacttcattaacatatcaatgtcaagcattacatcgaagtggtttggcgaaggagagaaatatgtaaaagctgttttctcattagcaagtaaaatagctccaagcgttatattcattgatgaggttgatagtatgctaggaaggagagagaatccaggggagcatgaagcgatgcgcaagatgaaaaacgaatttatggtgaattgggatggattacgcactaaagataaagaacgtgtactggttcttggtgccacaaataggcctttcgacctggatgaggctgtcattaggaggttcccgcgcaggttaatggttaacttacctgacgcatcgaatagagaaaagattctgaaagtaatattggcaaaggaagagttggctccaggtattgatatggattctcttgccactatgaccgatggatattcaggaagtgacctgaagaatctatgcgtgaccgcagctcattaccccattcgagaaatccttgagaaggaaaagaaggagaaaaatgtggcaaaagcagaaggcaggcctgagcctgcattgtatggtagtgaggacattcgtcctctgaccttagatgatttcaaatctgcccatgagcaggtttgtgcaagcgtttcatctgattcagcaaacatgaatgaacttcttcaatggaacgacctatatggcgagggcggttcgaggaagaagaaagcactgagctacttcatgtgagagcgattccatcataacatgtgagagagattaagaccctgccatattgatattgtacagtcgctataccacccctcttggcaagcgcttcgcgacttggccggccaaaaccagtcgggttttttcctcttctcccttcaggagcagcggccgccctaccttcgtcctccatcgtgtaattaaattgtgtactgaaaccagttcaggtttatttgtcagctgtttgttgctcgagttaacttgtaatgttatcattgccttaccccaatgccacctctttttttcccccctcttctgcatccttggctgtagtagcatatagtccttgtgtacctctgtacatgttgaaatcaaaggacatgggaataagaacattgtcctgttgtcgacagtataatgattctgactagccatgggttgttgacattataaggaggaactaagacgtctttgcgtcttaattttttttctatatatatcttgagctgatagattatct

SEQ ID NO: 6772 - DNA, 1389 bp, Oryza sativa
  ref <308>: DATABASE ACCESSION NUMBER: AK063911
  ref <309>: DATABASE ENTRY DATE: 2001-12-06
agtaccaaaccagaggtcgatccggttcccagccatggccaccgccgccgtcttctccgcctcggcccgccgcctcctctccaccgtcgccggcggcgccggggccggatccgccgccgagctccccgtcttgattggccacctccgcagcctcgcccgcgcgggccgcctcgccgacatcgacgccgccctcgcgccgcacctggcgtcccactccgtcgcggcggtctccgccctctcctcggtgggcctccccgaccgcgcctccgcgctcctcgccaccatccggaacccaaccgccgcgcacctcaacgcgctcctggccccgctcctccgccgccaccgcctcgtgggcctcatccccaccctcctcgcggcgcacccctccgtcccgcgcgacgacgccacggagggcatccacgccaaggccctctgcatcgccaccggcgccgactccgcgctccacctcctccagcgggagtcgccgccgccgtccctccagctcttcaccagcgtcatcgactcctactataagcagcgcaagccccaccgcgccgagcagctgtggcgcgagatggtcgaggaccacggcatcgtccccgacgccgccgcccacaacgtcaggatcacctacaaggccgccaccggcacggtggaggaggtcaaggagctgatccgcgccatgcgcgaggatgccggcctccagccggacatcgtctcccacaacgggctgatgcgcgcgatggcgcggcacgggagggtggacgagatgatggaggtgtacaagaggctggagaagggtagcgcctccgccgcggcggagggcaagtcggcgccggactgcgcgacgtacacctgcgtggtggccgcgctgtgcaaggcggggcggtggtcggaggcggacgacgtgttctacgaggcggtgaagcggaggaagctggccgacctcgggacggcgcgcgttctggtgcgaggcctcaaggaggccggcaaggggcgggcggcgaggcgggtggtgatcgggctgcgcaagaagttccccgaccgcttcgacggcccgtggaaggatctcgaggagttggccgggatcgccggcgaggatgaggagagcgatgtcgaaggggaggacgacgagcagccgccggcgacgacgacgaccactgccgcgtgagctctcgcagtaatttggtcgtgttcgtggttttagcaaatttgcattcgtggtaatacgaagaccatataatggtttaggattttagggctggatcaataagaagcaaattctgaggatgcgagaatcactcaaattttgtcaaactagcttcttgaatcacaccataaaacttctttaatgtgatgtctcgttgtaatgattgatcttgtttctac

SEQ ID NO: 6773 - DNA, 2380 bp, Oryza sativa
  ref <308>: DATABASE ACCESSION NUMBER: AK063912
  ref <309>: DATABASE ENTRY DATE: 2001-12-06
catattccagtctttgggtaggttagaattgaagaactatgctgagaagcttcttcagcagatgaggtcgaaagaatctggtgttggaaaattttcatcgataatatttgagtatgcttcaaatataccaaacatagcggttgaagatgttatagtatcattcaatagatggcatgagcagtttgaggtagcaccctctatttctgcatctgagaagatcatctctgtttgttgcaaatcgtcaaagatcagcttagctcttgatgtagctgagtgcttatgtaaatccaaccccgatatgccagttgaattgtttcatccaataatacaggcctgtgaacaaggctctgaatttcacttggttcatccaatatatgatttgatgcgtcgccacaagatgaaattgaaaaccgaaacattcagaaacatgataaatttatgtgtaaagatgaaagattttgaaggtgcttaccgtatactcacagatgcagaagagtctggggatatatccactgtaagcctgtataatgctatcatgcttggatatttcagagagaaaaaccacaatggagcacagatggtcatggcgcaaatgcagattgccggagtaaaaccagattctgaaacatactgttatttgatatttaactgtgagttcgaagagaaaatctctgagtatcttgatcaattacggcaagatggaatacacatgtccaagcatatatatatgtcactagttagtgcatatgcaagacttgggaattttgacatggctaaacaggttctcgaaaacaaggaaataccacctaagtacctcaatgaaattaagagtgcgcttataggagctcttgcatcaaatgggaaggtattagatggacttatcatgtatgatgaaatcaagcaatctggatgccaccttgagccaaaatcagcaatagccctgattgagaatacccaaacaaaaggtgagctggatagactgtatcaacttctggaagagcttggtgactcaaacatgtggtttgacgggtgcagtagagtacttctgtactgtgttcagcacaatcaccctaatgctgccattggtttgcttaagcagcttaaggagaaagatgaattgagtacatatatggttattgatcaggtcttcagtcaaatatgggatatggatcctgtaaatttggattttggaatgaagattctccatgctgtgaaagagcttgggcttaatgtttctcggacaagccttgactttcttcttagtgcttgtgtaaaggcaaaggattcaaatcgtgcccagctgatatggacagaatatgaatctgcaggccttccacataatgtactgacttccttgaggatgtatcaggctcttttgttgtcccagaagaagaaggcgactaagaagttgctgcggaagataccaaaggaagatgttcatgtgcgttacataatagattcttgtcaaatggcatactgcagccagaatcttaagctaccttctgccagtaggtccagttcaataaagagagctgcttccaaggctgggagcacctgtaagcctgctgcttcaggaaccgaggtgtttcgaaatgaagctgaagaggcacatactggcccttgataatagacagacttttcctgaacattgcctctagtttggtgcctggaattacctgcacccgcttcaaggagctacatgtgtttctgtttctggcttgaaacaagcaatcatacatgggagccgtcaccgaaagacggcgagaccactggccacatttgaggcctttggtgtgaccactggccaccactccctgcattgcaattgcattgcagcccccacttggcttaatggccaagacctagctagccagcctctctgctcatagtgcttcccatgtgaccacaaggctagggtttggtcacagtgaaacaatcactgccccacagcctcaccaaccaggaaaaagatctgccctgtttgattttgggagtggagtgaggggagagattgagattggtagggcagaatagttgtactcctcagcctgcaaccaagatatcacaggataatatcttaaccagataggtaacagccacacatttttgcacctgttacagctcaagtcattactaaaaccagcattgttgtagaagttatgatttgtgttctagtttttctttattggggtatgcctttgattacaggtacaatggttatggtgaagattgtcttttgatcttgtcatctaattcatggtatgcaattgcaaaacgggttgcatagctgaatatatgatggcttatgatcagttcctttcactaacagatattgggcactgccattttattaccttaaaacgtgctaatatgtttggat

SEQ ID NO: 6774 - DNA, 1494 bp, Oryza sativa
  ref <308>: DATABASE ACCESSION NUMBER: AK063913
  ref <309>: DATABASE ENTRY DATE: 2001-12-06
aattgatagcctgtgcgtctccaagaagaggcttgccgctgccgccattggagccctctcgtttctgctcgagctctgcatttcttcagtaggaggaggaggaggaagagttggagtcgccatgtcgtcgtccctgctcactgacctcgttaacctcgacctgtcggagagcacggacaaggtcatcgccgagtacatatgggttggtggtactgggatggatgtgaggagcaaagccagaacgttgtctggacctgttgatgacccaagcaagcttccaaagtggaactttgatggctccagcaccggtcaggctaccggtgacgacagtgaagtcatcctccaccctcaagccatcttcagagacccattcaggaaggggaagaacatcctggtcatgtgtgactgttatgcgccgaatggcgagccgattccgacgaacaaccggtacaatgcagcaaggatcttcagtcatcctgatgtcaaggctgaagagccatggtatgggattgagcaggagtacacccttcttcagaagcacatcaactggcctcttggctggccactaggtggctatccaggccctcagggtccgtactactgtgcggcgggagccgataaatcgtacgggcgcgacatcgttgatgcccactacaaggcctgcctgtttgccggcatcaacatcagcgggatcaacgcagaagtcatgccggggcagtgggagttccagattggccctgtcgttggcgtctccgcaggggatcatgtctgggtggcacgctacattcttgagaggatcactgagattgctggcgtcgtcgtgtccttcgaccccaagcccattccgggagactggaatggcgccggtgctcacaccaactacagcaccaagtcgatgaggagcaatggcggctacgaggtgatcaagaaagcgatcaagaagcttggcatgcgccaccgtgagcacatcgccgcctacggcgacggcaacgagcgccgcctcaccggccgccacgagaccgccgacatcaacaacttcgtctggggcgtagcgaaccgcggcgcgtcggtgcgtgtcggccgggacaccgagaaggacggcaaaggttacttcgaggacaggaggccggcgtccaacatggacccgtacctggtgaccgccatgatcgccgagaccaccatcctctgggagcccagccacggccacggccacggccaatccaacggcaagtgaggaggagtcgcctcgcccgggttgatgaactgctttctcgcgttctgggtttcatggaaatctgtgtgtgtgttctctgacgctggtgctgttagaaacttccaataattcagaaataactgcgatgtgctctcaaatttctcatgaggccatcacctgcagcatctcatgaaatagatctattgcaatgacaataccaatggcaacgcaaaattttatggtacctccagataccatctactctcctcaataatgacaat

SEQ ID NO: 6775 - DNA, 1004 bp, Oryza sativa
  ref <308>: DATABASE ACCESSION NUMBER: AK104975
  ref <309>: DATABASE ENTRY DATE: 2002-08-28
ggcaaagcgctatcaacgacacgcgcgcgtgtgttccactcctcctctacgtagtgtacgactgtacgttagttgccagccatggcagccgtggggaagtcgaaggaggcggacgcggcgcggtgcaggaggcacccgaagcaccggcacgcggcgggggtgtgcccgttctgcctgcgcgaccgcctctcgcgcctctccgccgaggtcgccagcgctgcctcgccgtcgccgtcgtcggcgtcgtcgtcgggatcctcctcctcgctgtgctcgtcgaccggggaggggagttactccgccgcgtcggcgacccaggcgccgcccgtcggccgccgcgcgaggctgggcatgctgatgcgacaggaggagcagagggagacgaccgcgacggcggcgacggtgctcggcgccgcaggtcatgacaagaaggaggtgccccctgcggaggaggagaagaagacggcgaggaggagcggcttctgggcgaggctgcagcagcagctccatcacgggagctggcaccggaaggccgacgggtgctcactggcgcactccaaggcggtcagcgagaaggccgccgccgccgccgccgcgccggccaagcggccaccggcgttgttctgatgcgcgcgtgcccgcgcgcacgacgagaggaagcgagcaccatgcagtacgtgcaggcgtgagccagccagcgcggcgtgatcgatgtttggttggtagtggtagcctctcgtcgcgtcgcgtgcgctgttcatccggggggctcacgttgatcacctggcatgtttcgttatctttcggtgcgctttttgggtcgtggcttgtggtgggtgcggggggtgccgaaaggacggcctaatggcaaacgtcccgttttgtatagatctaagatctgagggaagaaatggcactcggctcgaatcggctgcgtgatttccgtgtcatgactcatgatcaaatcatcaagctcgtgatgttcttttgccaaaaaaaaaaac

SEQ ID NO: 6776 - DNA, 1886 bp, Oryza sativa
  ref <308>: DATABASE ACCESSION NUMBER: AK063914
  ref <309>: DATABASE ENTRY DATE: 2001-12-06
ggagaagatggaaagaaagtagtcggaagattaatagatatttgggatgaacggaaggtctttggaacccgtattgaaagtctgaaagatgacattcttggtggtagcactcatacaatgggtaacaatggcaatagctcaaatccaagctctcacccctcttcagtttccaaagctgtgcgaaaagattctggtacagtaacaaaaaaacttactattggcgggatgccagaaaagattgtaacagcatatcagtctgtgcttgatcaacattttgacgaagacacagctttaaacaaatgcaataatgctgttagtgttttggaaaggatggataaagatgtagatgatgcttgtacccaaggtattcagcaaggatcatcgttgatttctgaccttcaagggcaggaaacagtccttaagcagtgcattgagcaacttgaaagtgtcaacatggctagaataaccctaatcaataaactaagagaagccctcagcgaacaggaagcaaagtcagagcttcttcgcaatcagttgcatgtagctcgagcaaaggctgaacatgccatgcaactaaaacaacgacttgtagtgccttgaacaatggtgcaggatctagttctagtccactgatggttacacttccaccaggacaaacagctgccatgatgcagaattcagctgcaatgccaatatttccccactatcaaccactgcatccagcaacctcacttcctgccacatctagtgctgttggtgatgagcccaaaaaaactgcagcagctatggcagataagcttgcatctttgtcagctcctgagaaggtgctctcctccattttctcgtcccttgctgctgaacaagcaaggaatagtggttcgacttctggagatctctctgcaggacctccaggctttgagagcaataagaagcctaggcttgacaaccctattcatgtgagtgacatgggtgctcccccattctttgggcaagtaccacaggtgcaaccacagattggagcaacagctgctcttggaggcacacagccaccaacacaagcaaaccaagcaaccggttcatttccaccacctccacctccattaccacttatgccacaatttgttcaaaatactggaggaatgtttggaatgggaccttttgggatggtgagtggctctgcgccgcctccacccctattgcccaacattatgtcagcaggttttccaagactaagcgcgcctccacctctgcctctgcctacacaacctcagaaccagagtcagccccagcagcagcagtctccgcaggcaccacagcaatcgccgacctcgacaggattttttcaaccaccaggtgctggcttcttcccaccagtgcaggttcagcaatctccatctgcccaacggcaatgatgattctacaacaattgttgggctataaaggaagcaccttgtgctaactttgtatattaaacaataccctgaggattgatctgatagttggcgagtcctgcgtcgtgaagcaggattaatgcttatgaattgggaagatttgtaggataggcttgcggcttatgtgatgtacaactattccttttggtctgaggagttgttcaactcttcttggttatgtgaagttagttagactttacttttgtttgcatagccagatcttatttttagtcctgaggcaaacaaatgttggcattacattttttacttaaagaggtgcccaagtgaaaacctttttgggctcctctatggtagaacttacctttggctctgttagtttgctagagaagccatatatccatagatccttacttgaagttgtgaactgcaaatatttgtcatgttcaagtttatttgtttatttattttttattc

SEQ ID NO: 6777 - DNA, 2236 bp, Oryza sativa
  ref <308>: DATABASE ACCESSION NUMBER: AK063915
  ref <309>: DATABASE ENTRY DATE: 2001-12-06
gaaacaagccgtcggagagaaagagaaatattcgccaccggctgcaggcggcggcggcggctgaacccctaaacccaatgtcgccggcggcgaggagcctcctgctatcggccgcccgccgtcaacgccgccgcttctcgacggaggccccgtcgtcgactccgcagcagcagctcctccccaaggggaagcggtgggacgcggtggtgatcggcggcggccacaacgggctcgccgccgccgcctacctcgcccgcgccggccgctccgtcgccgtgctcgagcgccgtggcgtcatcggcggcgccgccgtctccgagtccgacctcgtcccgggcttccgcttctcccgctgcagctacctcctcagcctcctccgccccgccctgatccaggagctggagctggagaggcatgggctgaagctcttgccgcggagcccgtcgtcattcacgccatgcctagacggcaggtatctccttctcggccccgacgctgagctgaaccactcggagatcagcaagttctccgagaatgatgccggtgcatacccgaggtacgaggagaagctggagaagttctgcaaactcatggactttgtcatagactcgcctccccctgagatgaggcatgaataccacctctccatggtggacaggatgaaggataaggttgacaagtctgtgttctggagcaaacttcttgggattgtgatgcagcaggggcagaaggacatggtggatttctttgaccttctcctttcaccagcatccaagatcttgaacaactggtttgagggtgatgtgttgaaggcaactcttgcgactgatgctgtgataggttctatggctggtgtccacactccaggatctggttatgttcttctgcatcatgttatgggggaaactggtggccaacgtggagtatgggcgtatgttgaaggtggtatgggttcagtatcgtcagctataagcaaagcagctcttgaagcaggtgtggaaattttaacaaatgcagaggtttcccagatatctgttcatcacacttctgggaaggtacagggggtagttttggctgatggaacagaggtgctgacatcagttgttttatcaaatgcaactccatatagaacatttgtggacctagtgcctgccaatgttcttccagacaacttcctctctgctatcaaaactgcagattatagctctgcaacaacgaaaattaatgtggctgttgacaggctgccacagttttcctgttgcaaagactttaatcctgaaggcggtccagaacacatgggcaccatacacattggatctgaaagcatggaggaaatcgatctagcgtacagggaagctgcaaatggcgtctcatccacaagacctgttatagaaatgacgattccttctgtgttggataagaccatctccccaccaggccagcatgttattaacctttttgttcagtacacaccatacaaactttcagaaggcagctggcaggattctaatgttagaaaatcctttgctgaaagatgcttttccttgattgatgaatatgcaccgggttttagctcatcagtggtaggctatgatatgctgactccacctgatcttgaaagggagtttggcctaacaggtggtaacatctttcatggcgcaatgggcttggattcacttttcctcacgaggcctgccaagggatggtcagattacagaactccagtgaagggattgtacctctgtggcagtggtgcacacccaggaggtggggtaatgggcgctccgggccgtaacgctgcctccgttgttttggaagatctcaggacaaaatagatggtgacccgaggaaacatggaaacggtgattgacaccaggctgggtctcgttcaagcactgcactgcaaaagcaaccgaattccatcagaatgaaaagcacctcatcagacatcaggtataaacacctgtgccatgtgagctcacatattaaggaaatggacaaacatttcttgaggagaggcacattttctgaattaattggccgactttctagtttagagaggggaacattctttgccacctgaccctatttcccagtatgaagatattttgcatttgttctcttctatttgcagcctgtctgaaatatattattcatcggattatctacttgattgtaggataaattaaatatttttttaacaattatcaaatatcttggaacaagtggtctatgc

SEQ ID NO: 6778 - DNA, 1621 bp, Oryza sativa
  ref <308>: DATABASE ACCESSION NUMBER: AK063916
  ref <309>: DATABASE ENTRY DATE: 2001-12-06
gtgccgccgccgccgacgccgacgctgacgccgacggcttaattcagtcttgtcggctacatctcttggcgtgctgaaattggtgggagcacgagagcggcgccaatggggacgaggccgtgcgccggcgtggcgtcggcggtggcggcggcggtggccgttctgctgctcgccgtgtcttgcttcgccgcggcggcgacgacgacgcagaagcatggcaggatgtcagggaagggcggcgacgtgctggaggacgacccgacggggaagctgaaggtgttcgtgtacgagatgccacgcaagtacaacctgaacctgctggccaaggacagccggtgcctgcagcacatgttcgcggcggagatcttcatgcaccagttcctcctctccagccccgtgcgcaccctcgacccggaggaggccgactggttctacacacccgcctacaccacctgcgacctcaccccgcagggcttcccgctccccttccgcgccccgcgcatcatgcgcagcgccgtccgctacgtcgccgccacgtggccctactggaaccgcaccgacggcgccgaccacttcttcctcgcgccgcacgacttcggcgcctgcttccactaccaggaggagcgcgccatcgagcgcggcatcctcccggtgctccggcgcgccacgctggtgcagacgttcggccagcgccaccacccctgcctccagccggggtcgatcaccgtgccgccgtacgccgatccccgcaagatggaggcgcaccgcatcagccccgcgacgccgcgctcgatcttcgtgtattttcgggggcttttctacgacatggggaatgatcccgagggcgggtactacgcccgcggcgcgagggcgtcggtgtgggagaacttcaaggacaacccgctgttcgacatctcgacggagcacccggcgacgtactacgaggacatgcagcgggccatcttctgcctgtgcccgctggggtgggcgccgtggagcccccggctggtggaggcggtggtgttcgggtgcatcccggtgatcatcgccgacgacatcgtgctccccttcgcggacgccatcccgtggggggagatcagcgtgttcgtggcggaggaggacgtgccgaggctggacaccatcctggcgtccgtcccgctcgacgaggtcatccggaagcagcggctgctggcgtccccggcgatgaagcaggccgtgctgttccaccagccggcgaggcccggcgacgcgttccaccagatactcaacgggctcgcgcgcaagctgccgcaccccaagggcgtcttcctcgagcccggcgagaagggcatcgactgggaccagggcctcgagaacgacctcaagccatggtagccgccatggatgatgagctatatacacacagattatagagacgagacatggattggatcgcgagagatgtacattgattggttcgtttcttctgattaagccgctgttaatttcttcttctttctttcttttttctagttttttttccttgttgttttttctttcaaggaggcgatccgtgttcatgtattgtgcaattgtgcgtgcttaattaatcgttgcaatgtgcacgatttcttctatagtg

SEQ ID NO: 6779 - DNA, 1449 bp, Oryza sativa
  ref <308>: DATABASE ACCESSION NUMBER: AK063917
  ref <309>: DATABASE ENTRY DATE: 2001-12-06
acacgctgacacacgagacgaacacttgtgctacagcttctcgccaccagctactgatcgaccatgggcggcctctccatggaccaggcgttcgtgcaggcccccgagcaccgccccaaggcgtccgtcgccgaggccggcggcgcggacacacacacacactgatacacagatcggcagaaaggaaggagaagcagccaagcagaggccccggtcttgtcaccggaaagagagaaaaagagaagtgaaattgaggaagaggaggagaatgtgatggcgcagcagcagcggcgatggcgacgccgacggggtggacgcgctcgcggcggaggtcgggagggcgagccgggactggggcttcttcgtggtggtgcgccacggtgtgcccgcggaggcggtggcgcgcgcggcggaggcgcagaggacgttcttcgcgctgccgccggagcggagggcggccgtggcgcggagcgaggcggcgccgatggggtactacgcgtccgagcacaccaagaacgtcagggactggaaggaggtgttcgacctcgtcccgcgccagacgccgccgccgccgacgaccgccgtggccgacggcgacctggtgttcgacaacaagtggcccgacgacctgccgggattcagggaggcaatggaggagtacggcgaagcggtggaggagctggcgttcaagctgctggagctgatcgccaggagcctcggcctgagacccgaccgcctccatggcttcttcaaggacgaccagaccaccttcatccggctcaaccactaccctccctgcccgagccccgacctcgccctcggcgtcggccgccacaaggacgccggcgcgctcaccgtgctctaccaggacgatgtcggcggcctcgacgtccgccgccgatccgacggcgagtgggtgcgcgtcaggcccgtccctcactccttcatcatcaacgtcggcgacatcatccaggtgtggagcaatgacaggtacgagagcgcggagcaccgggtggcggtgaacgtggagaaggagaggttctccatccctttcttcttcaacccggcgggccacaccatggtggagccactggaggaggtcgtgagcgacgagagcccggccaggtacaacccctacaactggggcgaattcttcagcaccaggaagaacagcaacttcaagaagctggacgtggagaacgtccagatcacgcatttcaggaagaattaacgcgccggctagatcatgttcagtaaattttcagatgatgatgcgtggacaaccatatagcctttgcgtcataagttaataatgtctgtgacagtatatcatgtaaacaatcgtatgatgtggcttctctatctgccggtgatggtaatgtgacattgtagaagagggtttgtgagatacttccttcacttaacttttacgaatgaatatagacaacc

SEQ ID NO: 6780 - DNA, 1943 bp, Oryza sativa
  ref <308>: DATABASE ACCESSION NUMBER: AK063918
  ref <309>: DATABASE ENTRY DATE: 2001-12-06
cagtagcagcagtgatgatagcagtgatgagagtttatcagatgatgaacctgtgaaaaagcctgctgcccctttgaagaagccagttgcacttgctaccaatggatcaaaaaaggttgagacagacagcagcagctctgatagcagctctgatgaggagtctgatgaggatgataaaaaaactgctgctccagtgaagaaaccttcagttgctgctatacaaaagaagacccaggagtctgacagttctgatagtgactctgattctgaatcagatgaggatgtgccgactaaagcaccagcagtagccaagaaaaaggaagaatccagtgaaagctctgattctgaaagtgattcagactctgatgatgaggctgctgctgttaaaaaggaagaagaatccagtgatagctcagacagtgactctgaatctgagtctgattctgatgaaccagcaaaacctactattcctgcaaaaaggccactgacaaaagacacaaagaagggacaatccaaggatgaatctgaagatagttctgatgagagttctgaggaaagtggtgatgaacctccgcaaaagaagattaaggattctacaacttctggtactaccaagccttcccctaaggctaccaagaaagaaatcagcagtgatgacgaaagtgatgaagatgacagttctgatgaaagctctgatgaggatgttaagcaaaaacaaactcaagctaagaagcaagcaccagtagcacaagagagtagcagctccgatgaatcttctgaagaagatagtgacatggaaagtgatgaaccagcaaaaactccccaaaagaaggaaactgctgtgtctgttggttcgaataagtctgcgacaaaaccgggacaagaggaaccaaaaacgcctgccagcaaccaaaatcaagctaccgggtcaaagactctttttgttggaaatttaccatacaatgtggagcaagaacaagtgaagcaatttttccaggaggcaggtgaagttgttgatattcgtttcagtacctttgaagatgggaacttcaggggctttggacatgttgaatttgccacagcggaagctgctaagaaggcacttgaacttgctggtcatgacctgatgggacggccggtcaggcttgacctggctcgtgagagaggcgcgtatactcctggcagcgggagggacaatagttctttcaagaagcctgctcaaagctcaggaaacactatatttattaaaggctttgatacttctcttgacatacaccagatccggaattcacttgaagaacattttggctcgtgtggagagattacacgggtttcaattccaaaggattatgaaaccggtgcaagcaaagggatggcgtacatggattttgcggacaacggttccttgtcgaaagcatacgaactgaatggatctgacctcggtggatacagcttgtatgttgatgaagcgaggcctaggcccgataacaacagagagggtggcttcagcggtggaagagactttaacagcagtgggagaggaggaagacgtggtggacgtggtgatggtagccgtgggcgcggtgaccgtggacgtggtagaggctttggtaggggtgacaggggccatggtggacggggtacaccgttcaagcagagcgctggtacacctagtgcaggaaagaagacaacattcggtgacgacgactagacgaacaatttgagccgattttgttctagtactgtagtaatctccatcccccctaatatatgcgattctagtgagccgtgaattggctacctccggactgttacattctagccgtgttatgtactttgttggcagttgggaccgtgttggtaaatttgcccgacagatttggcaattttggaacctcttgacttcgtaatcattcttatcataatatagtgctttgtggctt

SEQ ID NO: 6781 - DNA, 1402 bp, Oryza sativa
  ref <308>: DATABASE ACCESSION NUMBER: AK063919
  ref <309>: DATABASE ENTRY DATE: 2001-12-06
atgtctagaaagcaacaaaaataaagctttcagcaacagcatcatcacagtatactagtagcagtagaataccatcattcacctaatgacctacttgtgacatcatcccaatgcaagcttaacttatctttgcataatctttaatttcttcctgatctgcatccatatactgttctgtttgattctgaaacagtacatacaatacatacagttgcatgttctgtttcgtataattcggtaacagtagtataataactcaaacatatataattaagtaaaggtgcaatattattagacttttgcataatcttttctttctgatccctgcattcatatatactgctctctgttggattcttgaacagtaatctaactgaaaattataattagagcaagtttaatagtatagctaactgctgactctaaattatctatagttaacttaatagccaattaatagccaattcatacaatagttacctataaacatatactacataatcaatatttggtcccacctgtcatacacatatgcattttacagtctgtgctgtagctggcttacaaatctgtaacccgctactcttacctctactcttttatcttcttgaaatatgcttatagctgacttatagtcagctattgtacctgctatcacgagatgatagtaattaataactgattggattggattggattgcagaacgcggtggagcggccgccgaggttcgccggaggatggacgggggcgtacgtgataaactcgttcgtggtggcgtgggtgctggtggtcggcttcggcttcggcgggtgggcgagcatcaccaacttcgtccaccaggtcgacaccttcggcctcttcgccaagtgctaccagtgcccgcctcaccccgccgccgccgccctctcgccgccgggtgccatcgctccggcgccggcctcgatgctgccgccgttcaactccaccgccgccggcatctttgccgctccggtgccgtctcctgctccggctccggcaccgatgcatttcgtccttggtcaccaccaccatcaccggcaccaccgccacggcctctagctaattaatcgagatcaatcaagatcatgattatcagaggttgggtttgcattattgcactagtttttagtgagctactagctagttgatcatcactgcaagattgttaattagcgctagtaattagtaaaagtaagcctcttttcctaatcctattgtatgctttgcttctttcttcttcttctggttactgagagagagtgagagtgagaatgtttggtggtggggtatgcatgtcagagacacgtttcaagtctctcgtcttgtaatgtgtcctttttgtgtggagctgcttttgagaaagaaagaagagagatcaaattt

SEQ ID NO: 6782 - DNA, 2205 bp, Oryza sativa
  ref <308>: DATABASE ACCESSION NUMBER: AK063920
  ref <309>: DATABASE ENTRY DATE: 2001-12-06
aacgcagcagcagctgcagcaaggcagtaggagaggagttggagggaggagagggagctccaagaatcaccagagagcgagcaagagagaggtgagaagtaaggtgagctcagaaggatttggtaagggatctcattatgcagacttcaaaaaccaggaatgggccttcagatgccccacagaaggcttctccggcaacaccacggtcatctcgggtggcgaaaactggagggaatgaaactgactctgcagggatcacaccaacaagaaccactccagagaagagccctaaggtcaccgagcgtcggtcaccacgaagcccaattactgagcgcccaagtaggctgtccgagttggagtccagggtcagccagctgcaagatgagctgaagaaggccaaggagcagctgagcttatcggagtcacgaagacgccacacacaacaggaagcagaggaagcaaaaaagcaggagcaggctgcaacctcaaagctcgaggacctacagcgccagcttgccgagttctcagctgcggaggagtcccgactccaggaactgcggaaggtctcacaggagcgtgaccgtgcttgggagtctgagctcgaggctgtgaagaagcagcagtcagtggattcagctgctctgagctcagccttgtctgaaattcagaggttgaagcagcagctgggggccaccacagagtctgatgcagctcgtgccaagcaatgcgagtttgcggagtctgagctcgagggcttgaagcaggagatggagctccggcttgcgaccatcgagggcctgaaggtaaacgttggcgagagcgacaaggctgtagctgaggcgaacgcggtggcagctgagaccaagaagcagcttgagatggcacaagctactattgactcgctgcttgctgagggtgcccggttgcaagaatgcctgaggtcgaaggacgcagagctcggccagtccatggctcgattagccacactggaggaagatctgaagaaggcacataacaaggatgatgttgatggcagctttggcagccctgatcatggtgaagctgtggagaaggtggtggtaactatccccaatggcaatggcagctgtggtggttctggcgcagagattgagcagctgcggacggcgctcgaggtggctgagattaggtaccaggaagaacaaactcgcacgacgatcgagacgaagaccgcctacgaaatgctggagaatgccaagtcagagtacgaccgcagagtgcgcgatcttgagctggagctgaagagcaagaacgatgagctcactgaagcgaaggccactttggctgtcaggtgtgacgggaagagcgatgtgatgcagccagagcttgaggcgaagctgatgaagtcgatcaccgatgcgacggagctgaaggcgagcctgatggacaaggagacggcgctgcagagcgtgatggaggagaacgagacgctcaagtcggaggcggggaagaaggcggcggaggtgcagcggaggtacgaggcggcggtggcggagctggagctggccaaggcggcggagcaggacgtccggatgcggctcgggtacgtgacggaggaggccaacaagagcagccggcgcgccgccagggcgtcggagcagctggacgcggcgcaggcggccagcgtcgagatggaggccgagctgcggcgcctccgggtgcagtctgaccagtggcgcaaggcggccgaggcagcggcggcggcgctgggaggaggcggtggcggcattggcaggaacgtggagcggacggggtctctggagccggcggagtacaccaactccatgatcggcgggaagctggcgagctcgccgttctccgacgagccggaggaggagtcgccgaagcggcgcaacagcggcgtgctccggcggatgagcgggctgtggaagaagagccccaagtgaccatcgacgccatggacagcttggtgtggtgtgtgtactagaaagaactgaaactgactagctaggctgagctgatctgatcacgccatggatgggtttagctgcaaacactgtgaatcaaagctagttaagttaattactactggttggttagttggttttgctgctgtggtcgcagtaaaaaaagaatgttaagaactcttgtaatgatgttggagatgaggagcatctacattttgggctgcatgctgtctttgac

SEQ ID NO: 6783 - DNA, 2024 bp, Oryza sativa
  ref <308>: DATABASE ACCESSION NUMBER: AK063921
  ref <309>: DATABASE ENTRY DATE: 2001-12-06
ctctcgagctccagactccagtagcagcagcagcagctctcctcctctccactgctagttcgacgatatcgatggagggcacggtgctctgctccgccaaccacgcgccgctcacgcccatcagcttcctcgagcgcaccgcgctcgtgtaccccgaccgtctcgctattgtcgcctcggatggcagcgccggcgtggccgtgtcgcgcacctggcgggacactcgggcccgctgcctccgcctcgccgccgccctcaccggcctcctcggcgtccagcgccacgacgtggttgcggtgttcgcgcagaacattcctgctgtttgcgagctccacttcggcgtccccatggccggcgccgtcatctgcacgctcaactcgcgcctcgacgccgccatggcggccgtcctgctgcgccactccgaggccaaggtcgtcttcgtcgaccgcgctctgctcggcgtcgcccagaaagccctcgtgctcgtcgccgaagccggagccaggcgtcccgtcttggttctcatcagcgagctcctcgacgaaaacgaacgatcacctcctgatgccaagatcaaggtcacccgagtcgattacgagtacgagcacctcctgagcgccgccgccgccggatcgtcgccggacttcgcgatccggtggccggccgacgagaacgagccgatcgccctgaactacacctccgggacgacgtcgaggcccaagggcgtgatctacagccaccgcggcgcgtacctgagcagcctcgccgccgtgatcgtgaacgccatggcggagacgccggtgtacctgtggaccgtgccgatgttccactgcaacgggtggtgccaggtgtggggcgtggcggcgcagggcggcacgaacgtgtgcgtccgcagggtgaccgcggcggccatcttcgacagcgtggcgcggcacggcgtgacgcacatgggcggcgcgccgacggtgctgagcatgatcgtgaacgcgacggcggacgagcggcggcggcagccgggcgggaggaggaggagggtgacggtgatgaccggcggcgcgccgccgccgccgcaggtgctgttccggatggaggagcaggggttcctggtgatccactcgtacgggctgacggagacgtacgggccggcgacggtgtgcacgtggaagccggagtgggacgcgctgacggcggaggagcgcgcccggatcaagtcgcggcaggggctccaccacgtcgggctggaggcggcggacgtgaaggacccggcgacgatgcggagcgtgccggcggacgggcggacggtcggggaggtgatgctccgggggaacacggtgatgagcgggtactacaaggacggcggcgcgacggcggaggcgctcgccggcgggtggctccggtcgggcgacctggcggtgcgggaggaggacgggtacatcaagatcctggaccggtccaaggacatcatcatctccggcggggagaacatcagcacggtcgaggtggaggcggcgctgttcgggcacccggcggtggaggaggcggcggtggtggggcggccggacgagtactggggcgagacgccgtgcgcgttcgtgaagctgagaggaggaggaggaggaggaggaggcggcgcggcggtggaggaggagctgatggcgttctgccgcgcgcggctgccgcgatacatggcgccgcggacggtggtggtggtggaggaggagcttccgaagacggcgacggggaaggtgcagaaggtggcgctgcgggagcgggccaaggccatgggcagcctccccgccgccgcctcttcctcctccaggcgcgcacccacagggacagctgggtctgggagaagcaagctctgaaccgagtttctcaatcgtaactgctgctgcgagaatgcgactacgatgttgcaaccagttaacgcaatattggcagtcgattctaatcagggtggatgtacatccatttattacatgacaaataaataattatgaaaaaatttgtcatatattattgac

SEQ ID NO: 6784 - DNA, 2257 bp, Oryza sativa
  ref <308>: DATABASE ACCESSION NUMBER: AK063922
  ref <309>: DATABASE ENTRY DATE: 2001-12-06
gatccctgttttggacttggaatttcactagagcaccggcggcgtggttgcgggcggcggcgctggttcggctccttcgctcggctcggctccgccaccgcgccggaggctagggttctgcgaggcgggaggcttacgcggcggcggcgacagtcgacggagcttccggagcaggagagctccgacggcgcacgctcctgcggctcctcctgcttcccgtccaatctcgcgacgccccccgggcagattcgaggacgaccggaggcggcgaacggcgacccccccgccggataccggcagactaggttttctttgttagcataagcttgtgaaaatttagcttgtttcttacttatggataactcacacgaacagccattaccccctggtgtcggggcatggccgccgccaccttccattcatcctgcaaaatttcaacctaatccacaacccaccatgcctttccctaacatggatgctgggggtgcacaatcaaatcagacagctcatgaagtttccaaccataatgatagtgcagcagacattgaatctgctgtccaagaggctgttcttcgtgaacaggacattgagactcagcaagtcatacaaaatcaaagacaagcaaaagcaacaattgagcctacgcagtatggagaagacctcctttcaaaccgccgcaaccctaatgcattgaaggagcacttactaaaaatgacagccgagcatcgtgcagagatggcaaacaaaagggggaagccgcttcatgcagataatggcaatgttgaaattggcaatggctatggtgtaccaggagggggtgcttattatgctgcaaacatgtcaagtggtcaaatgaataaacccaaggatatagctgataaagcaaaaggtgccgatgatctccctgaatttttgaggcagagattaagagcaaggggtattcttaaagatgaggcgacaaataatagattcacgattaaacaaaatgtcgattctccagtagggcagataaaagctgcccaagagttgcctcctggttgggttgaagcaaaagatccaacaagtggtgcttcttatttctataatcagagcactggaacgacccaatgggatcgccctggtgctcctttgaacaccatgcaacatcaagctcctccatcctcgtccttgccagagaattgggaggaggcacttgatcaatcaacaggccagaaatactattacaatacaaatacacaagcaacacagtgggagccgcctactgctgtgaacccaggtgttgcgcctcatgctcccaccaatgctgctgttgagatggctgctcaaaatacagatatttggaactctcaaatgcagagatgtttaggctgtggtggatggggtgtaggtcttgtccagccatggggttattgcaatcactgcacaagggttcaaaatcttccttttcaacagtatccatcctacccaaacaatactacacactcaagcagtaacaaaaatccagggaatgtagcagccaaggacagatcaagcgcaaaacctccatttggcaaagcaaacagaaaagatcaccgcaaaagaaatcgccctgaggatgatgagcttgacccgatggacccaagctcttactcagatgctccacggggtggctgggttgttggcttgaagggtgtgcagccacgggcagcagatactactgcagctggacctttattccaacaaagaccatatccgtcacctggtgctgtgctgagaaaaaatgcagaggttgcatctcatggcaagaaacgtggtatggctccgatcaccaaaagaggggatggcagtgacggtctcggggaggcggattagatcaatcgtcgtaaattttccttgcaacccagtggactagcggtcattttggctttggcaatgactgaaacatcggtgcactgtcgtccaaaaagaagcaaactgtcagcagtaaatcactccagtgcaggagaacccagagctgagtgcattgtgagactgagcttaataagattcacatcctaaatgtgcccatggtgtaattctcgtgaaatctgcagaagttttcggtgtaaatttttgacagggtgaaagaattcgcaacaggaatagtgatgtagagctaatgtgtaatttttggtattaaccgaaacagttctgttgaatactagaatctaggggttgttttgtggataattcgacctgttaatgctaccatcttaatggaatttaacgtattaatgct

SEQ ID NO: 6785 - DNA, 748 bp, Oryza sativa
  ref <308>: DATABASE ACCESSION NUMBER: AK063923
  ref <309>: DATABASE ENTRY DATE: 2001-12-06
aaaacacctacaacacctgaaccagctgagagctagccaagaattcgatcgggcgagatgagcgtggagattttggatgggaggacggtggagagcttcgtggaggacgagggggccttcaactcgacggtggacgaccggttcgcggcgctggacggcgaccgggacggcaggctgtcctacgccgacatggccggtgagctgatgagcctccgcgtgctggagacccacttcggcgtcgacggcgccgccgccacggacgccgagctcgtcgacctgtaccgcggcctgttcgcccggttcgaccgcgacggcgacggcgccgtcgaccgtgaggagttccgcgccgagatgaaggaggtgatgctcgccgtcgccagcggcctcggcttcctccccgttcagatggtcgtcgaggaaggcagcttcctcaagagggccgtcgagagggagctcgccaaagctgcctgatcatcgccatcgccatcgccaggcgtcagagattctgcctacagatttgcaggtgtatcgagagatttttgtagtatttacagagtgtatactaatcaagtgcgtactgtcctcttgctgaaatggcatttcagcctttcagctatgtaatccgggatggaaaattttgtttgatctgaattatttggtgtcagcaataaaatcaacgtttcgatgaaacgatttcgagtactacaaacatgatttcagtgggaattgtgaaattattttcgtgttc

SEQ ID NO: 6786 - DNA, 1897 bp, Oryza sativa
  ref <308>: DATABASE ACCESSION NUMBER: AK063924
  ref <309>: DATABASE ENTRY DATE: 2001-12-06
aaaaaccctcactcccccttcgcgatctcctccgctccaaaatgtggcgccgccacctcctccgccgcctcctgccgtctccggccaccgccgccgccgccgccgcctccccctcgccggcgatccgcctcctatccaccgcctccccggatcccgccccgccggcgacgctcgcctcctccctcgccggggcgctctccgcgctgtcctccaccccgccaccggccacctccccggacgcctacttctccctccacttctccgacgtgcgccccaccaacgcgctgctcgccgaggcgctcgcgctcgccccgccggccacgtcccgcgccgccgcggagctcttccgcttcctcgtccgccgccgctcgctccacccctccgactccgcgctcgcgcccgtcgtgcggcatctcgcccgccgccgcgacttccccgcggtgcgctcgctcgtccaggagttcccctccgcgctggggcacgacacgctcgacgcgtacctcctcagcctcgccagggccggccgcgccaccgacgcggtcaaggtgttcgacgaattgcccccgcagctccgcacgcgccaggcgctcacttccctggtctcctcgctctcggctgagggctggccctcgcacgcggaaggcgctgtcaagaaggtcgctaatgagatcttcccggatgataacatctgcactctgttggtatctggctatgccaatgctgggaagcttgaccatgctctgaggttgatcggtgagacgcgccgtggtgggtttcagccagggttggacgcctacaacgcggttcttgattgtatctgccggctatgtcgcaagaaggacccgttgaggatgcctgcggaggcagagaagttcttagttgacatggaggccaatggcattccccgcgatgcaggtactttccgggttctgatcactaatctttgcaagattcgcaagactgaggatgcaatgaatctgttccggcgaatgggtgagtggggatgctcaccagatgccgacacctacttggtgcttattaagagcttgtatcaggctgcccggatttctgaaggggatgagatgatgacatggatgcggtctgcagggtttggtgctaagcttgatagaaaggcatattatgggttcatcaagattttatgtggcattgaaagggttgagcatgctgtcaaggtgttcaggatgatgaaaggatatggacatgcacctgggacaaagtcatatagcttgctgattgagaagctgactaggcataacttaggagatcgtgctaatgcactgttcagggaagcagtggcacgtggtgtgactgtgacgccaggagtgtataagattgataagaagtatgtgaaggcgaagaaggagaagaaggtaaagaagaggctgactttaccagagaagatgagattgaagagcaagaggctgtacaagcttagaatgagctttgttaagaagcctaagcgtcgaatggtccgggtttgagcaggctttgggttggagcggatgatcatgggaagagagaatcagaaagaggccatttataattttgaagagcagtaaattgtcgtccttcaattttccccacattacaagtggctcactgaccgcaacatttttctgatcggagtccttcgtgtggtttctatctcttggacaatggattgctgacactttgctgtgctgttttatgttctctgcaatgccttgtgtttcattaacacaaataatgaatgtatcattttacttaagtttatgttcaccacagttgagaggaaacttttggtatatgatgaagcaactgtcttgcagatccgtagttatcgtttgagcaatgttttgtacactctagtttctcatgaactcatgaaatattttat

SEQ ID NO: 6787 - DNA, 1517 bp, Oryza sativa
  ref <308>: DATABASE ACCESSION NUMBER: AK063925
  ref <309>: DATABASE ENTRY DATE: 2001-12-06
aaaaaaaacagttctaaacctgtttgctgtccaatcccattgccaccttgcttacaaccaagtaataacaggagcagtacttgctcagagaggtgatgagaagaaaaacagagatgattcagactaccccctgcgtcgcgctgctcttgctcgtcggcgttgcttttgctgctcgatcggcgtcggctatcaccgatggcctgctgccgaatggcaacttcgaggaggcgccggacaagtcgcagatgaacggcacgagggtgacgggtcgctacgcgatacctcagtgggagatctccgggttcgtggagtacatcgggtcgggccagaagcagggagacatgctcctgccggtgccggagggcgcgtacgccgtgcggctgggcaacgaggcctccatccagcagcggcttaccctgacgcggggaatgcactactccatcacattcagcgcggcgcgcacctgcgcccagtccgagctcctcaacatcacgatcacccccgagtccggcgagatccccatccagacggtgtacaccagcagcggctgggactcctactcctgggccttcaaggccaagcacagcgtcgtgttgttcatcgtccacaaccccggtgtctctgatgacgaagcttgcggccccctcatcgactcgttcgccattaagaccctgaaccctcctcaaagaacgaaaggtaattaattaattgagccgggtgctaacctctccacaaagctgctatcagtgtgcatctctacaaaattgaatacaaggatgtgctcacagtcatgaaacaatcgaacaaaatgaaccaggtaacatgctgaagaatgggggcttcgaggagggcccgtacatcttccccaacacgtcctggggcgtgcttgtgccgcccatggacgaggacgactactcgccgctgtccccgtggacgatcctgtcgaccaccaagtccgtcaagtacatcgacgcggcgcactacgctgtgccgggcggcgcccgcgcggttgagctggtgtccggcatggagacggcgatgctgcaggaggtgagcaccgtgcccgggcggtcgtacaggctggagttctccgtcggggacgccggcgacgggtgctccgggtccctgaccgtgcaggcgtacgcgtcgcgcgggagcgtgaaggtgacgtaccagtcgcagggcacgggcggctacaagcgcgggctgctcgagttcacggccacggagaaacggacgcgggtagtgttcgtcagcatggcctacaccacgaagtccgacggcacgctgtgtggtcccgtcatcgacgacgcgtcgctcgtcagtgtccacagccaccgccggttccttctgtaatattattactatcgtcaaagtcactagaatttaaaatgacttaaagttgtcccatatgaaggaatatctcaattccttttatatgattcttatgccaaaagggtgagatgattttttttaccgaggaaaaaaatgtgagatattatggatgcaattgatag

SEQ ID NO: 6788 - DNA, 1699 bp, Oryza sativa
  ref <308>: DATABASE ACCESSION NUMBER: AK063926
  ref <309>: DATABASE ENTRY DATE: 2001-12-06
taggtcttcttctcggtgaccggcgaggcagccggcgcggctttgccggcgagggctataggttgccggcacgtgcgacctgctccgtagcgagcgcacggggggctgccgtgactgagcagccgcaccgcgcggcaattaatgcttcgtgcctcccagtgagctgccttgatcggctgacaccctctccgcagcttcacccgagatggaggatctccccatggggcggcggaacccggcggccagcctcaccgacgacctcgtcgtcgagatcctccgccgcctccccgtccgctccgtgtgccgcttcaagcgcgtctgccggtcctggcgcaacctcatcgccgaccgtgagcaccgcaagaagctgccgcagacgctgtccggcttcttctacaaaagcatcagcggcgagcgctgcccttgctcggcgcaccacttcaccaacgtctccgggaaaggggtgcctctcatctacccgtcattctccttcctgccccagtgcgacacggtcgtccccttggactgctgcaatggcctcctcctctgccgctgcttccagcccgggcctaacaacagcgatgatgagattgagccgttccattatgccgtgtgcaatcctgcgaccaaggaatgggtgatgttgccggatgccgactgggctaatggcgagacccgcattgcctgcctgtgtttcgacccagcaatctcctcgcatttccatgttcttgagtatgtggaggctgaatatgaagatgtcacgggggttgagatctactcttccgaaactgggttgtggactcttcatgtgagtggatggggcgatgatgtgtttctaaggcattgggccaatccgagaagtgttttccttaatggttttctgcattctgctacgtgtgctgctgagattgcggtggttgacatggaggggaagaaatggaggaccattgctatgccggagcctgaaggtgatactggcataattcatcaaactcagggtcgcctatgtgcttttaatgttgatccagatgacatcttcaaactgtcaatttggattcttgaagattatgatacagataattggatattaaagcacaccgttagctccttgaggctgtttggagggaagaaatatcagtttggatttgactaccaaataattgtggttcatccagaatgtaatttgatattctttgtttatggatgggacaaaacgttgatggcatatgaaatggatcgcaaggaagtgcgtgttatacgcaatcttggacatgactcctcggatccatatctaccgtatgttccactcttttatgagtcatttgcagatgggcgctaacatgcagagcgtcggctccacttttactactgcgaaaacatccttttgcactaggagaaccaagcttagagtgggcagaaagccattctctagtacaaggatttagcaaggtctgttttattgtacttgaattaagaagtcagatggtagtactagtactatgtagattgtcttttggaaggtttgttctgttactctgaaggttgtcttgttttattctactggtgtttaccctattatagtgaagctttgatgtaatatgctaacactgaaaggtcttttgactgtatcagcacaatctgtttagggtactgtgacagtgtgactaatgttttgaatgttggagcacaccacatatgt

SEQ ID NO: 6789 - DNA, 1416 bp, Oryza sativa
  ref <308>: DATABASE ACCESSION NUMBER: AK063927
  ref <309>: DATABASE ENTRY DATE: 2001-12-06
gagcggcggccgagccgagccgaatcgaatcgaatcgaatcgaaaccctcctccttccaatccaggcggcggcggcggcggcgatcgccggcggcatgaacaagcggccccgcgacgagccctcctcctccttcgcctccgcccccaagcgccagtacggcgcaggcggcggagggtatggggggcatgggtactcggaggagcggagcagcgcgcggcgggtggcggaccactacagcgcgaggtcgaaccagacgctcgaggagcgggagaacagccccatcatccacctcaagaagctcaacaactggattaagagtgttctgatccagctctacgcacaccccggagactgcgttcttgatctggcttgtggaaagggaggtgacttgataaagtgggacaaagccaaggttggatattatgtaggagttgatatcgccgaaggctcgataaaagattgcatgactcgctataatggtgacactgatcaacaacgaaggaagaagttcagttttcctgcacggcttatttgtgctgattgttacgaggctcgtttggatgagcatttatatgaggatgctccgtttgacatatgtagctgccagtttgcgttacattactcatggtcaactgaagcacgtgcaagacaagccctagctaatgtatctgctttgcttcgtcctggaggagttttcattgggacaatgcctgatgctaatgtcatcatcaaaaggcttagagaaactgatggcatggaatttgggaatggtgtttactggattagttttggcgaagagtatgctgaaaagaaattccccgcatccagacctttcggtatcaaatacaagtttcacttagaggatgctgttgattgcccggaatgggttgttccattccatctcttcaaattgctggcagaggagtatgacctggagttggttctgacgaaaaacttccatgaatttgtacacgagtacttgcaaaagccagagtttgctgagctcatgcggaggctgggtgccctaggtgatggaaggcaggaccaaagtacactgtcacaggatgaatgggaggtagcctatctctacctcgcatttgttttgcgcaagagaggccaacccccctcccagcggagggccaacaatgcaaacagaggaaagatgtttctcactgagaacgacatcgatttccttggggtataaagcaaacagaactgtactctagagcttactaacaacttaccgattcaatgcttcatacagcataaaaagaagaaagttgtacctttagtagctcaccagttattcctcgaagctgtacctgttgtatactaaatgtataaaccctataaggactcttgatgcaattttgcagaaatgaatgaaatgaataataggtcccgtaataattctt

SEQ ID NO: 6790 - DNA, 1214 bp, Oryza sativa
  ref <308>: DATABASE ACCESSION NUMBER: AK063928
  ref <309>: DATABASE ENTRY DATE: 2001-12-06
gaacccggatgctggcgcatcgcacgcacagagggagaggggggtgaggggatcacacctttctctcgctttctctctcgtttgcgagcggcggcgcgggcgctcgagctgacggtcggtagagacggcgccgggcatctggaggttaggaggctgatctagtgagattgtttttcaacggaccgcttcctgtgttgtcaagctaggatatggacaccaacaacggaaagggagttgtagcctcatggacatcatccatgtcatctttgatgctctccaatttggccaatctggtggctagtggcacaaggacatcggctggttttaagcaggtgcatctcaatgcatgtgctagagttgtgaatgaaaagttttcgacaacactcaccggggatcagattagaaatcatttgaagacatggcataagaagtttcaaaagattagtcgtcttaggaaggtgagtggagctatttgggacgaagagaacttcattattagccttgacgaggagcactacaatgactatatgcagcataacaacaagagcgatgctgagtttttcaacaggcctattaccaactatggtgagatgcttaccatatttggtagtaccatggctataggaaattttgcaaaggactcaagctcagttctaggcactgaagatgtcgagggtacagagaatgaagtgaatgaagatgctcccacaatagatcatgatgagagatcatcggctagcaagcccaagagacaaaagacatatgcacatgacgatgatggtttggttggtgcatttgacagagctagtgacaaactagcaaatgccataataaggtctagcacagttgggaatgaactacctgatgatctatgggacaacttgaatagccttccaggttttgagcaacatcacatctctttctactatcactatttggttgctaatccacatattgctagagctttcaacggtcttccatttgcgaacaaacttgattgggttgctatgtacatcagcgagaagtttcccggtgctatgtaggataccatcttcatggaaagattggttatttcactattatgaactatttgtaccctctcattttgtattgtgtgtgcaccgttaatttgggctatgtgtaagacttcatgcaattatctactattatgtgagactttgaattggaaaatttgtggatttcaattttgtttg

SEQ ID NO: 6791 - DNA, 1548 bp, Oryza sativa
  ref <308>: DATABASE ACCESSION NUMBER: AK063929
  ref <309>: DATABASE ENTRY DATE: 2001-12-06
actgccatcagccatggggggcagccaccacctcttccgcttcctcgccgccgacgaccaccctttcttccccaccttcccaacctcctcctcctccttcctcctcgacgacacccacccatttttcttccctccctcctcctcatgcccactcggtttcacctctcctccttcatcgtcttgcccactcggcttcacctcctcctacgacctcgacgccgccttccaccaccatctcgacctcgacctcgaccttgacctcttcctcccaaccccgaccccacctgtaaccacctcctgccccgccctccgcgatcccttccttctccaccactccctcgcccaccgcgtctccgcgcttgagctcgccgccccacgcagcaagtacacctacgaggccgaatccgccggcaggaagatcaagtggaccacccacgacaagcccgacggcgaccggaccttcaagtgggaggcccagatcgacacccccaacgacgatggcttcgaccgcaagtggaagtgggagtccaaggcctccgccgccggcaccaccaagctcaagtgggccaaggaggtcaagggcaagggcttcctccacccatggtcgcacgcctactccgtcgaggaggtcttcggggacgacgaccaccaccacaaggcagacaagacagcagaaaacaaggtcaagcagcacaacaaggatacttctgccaaggaggagaagaagaagacgaacaagtctaatgttcagatcgttgagatcgacgacaacactgccggatgcgtcgccatcaacaaggcgtttgcaagcagctacgccaagggcaagagaaagcagctgtccccgcaggatgctgcattgttgatccagatgaactaccgggctcacctagcccaccgctcgcaagtgctgcgctgcctccgtcatctggcggtggccaaggccaagctcaaggacattaggtccttgttctacaacatctcttaccgccgccgcatttcgcatgactctgaagagcgtcagaggtttgccgacaaaatcattgccctgctcgccactgttgatgcccttgagggaccagactatatggttcgcaatgcaaagaggtctatgctggaggagctggaggggatgctagagatcgtaggtcctcagtcactagggaagccaaggactctgagccgcagaaagtttgagaaccatatctaatgatatgaggactggtgtcaagggcaagtgaaaggcaccatcggttctatttcgtagtgcggcgtatgaagatgcttgatgggggacctacctttctgaatgtgtttacggtttagacagaatgttgtgtctgtaactctagttgtatgatctatcttctgcttgaactagtacttatgtgttgctagactagttagagcttctttataacctcttgttgtttgaggaagcttcttgtagaaactgtttcataatttgtcatgaaatgatgtgcggcatgtgccccctaataaataagaccattaccatatggtatgcatattggcatggtgcttttc

SEQ ID NO: 6792 - DNA, 2109 bp, Oryza sativa
  ref <308>: DATABASE ACCESSION NUMBER: AK063930
  ref <309>: DATABASE ENTRY DATE: 2001-12-06
acattgcttgcctcgcctccctctcgagttggcttgctctctctgtcccggggccactgatcttggcaaccacgagacgctactgcggcgagccccacgccgccggcgaagccgctgcacctgccactgccagcctccatctcgatggtcgccgtcttcaacaaggacgtcctgagctggtacctgatcacggtcaagctcaaggagaccgtcgatgccaacctcaacaagtccgcgccgccgcccggcgcgctgccgctgtggcaggcgctgaaccgcaacctgccgctgctcaccaacggcgaggccgccggagcgggaggcgacgcgctgccgccgcgccaggagcgggagcgggaggtgaaggtccaggtgcagtcgccggcgcacagcccgaagccgcaggacccggaatgggtggtggccatccgcgggaagctggcgcaggcgcgcgccgaggaggcagcgtgcccgtgggcgcggctgtccgtgtaccgcgtgcccaagtcgctccgcgacggcgacgagcgcgcgtacatgccgcaggtggtgtccatcggcccgctccaccgcggccggcggcggctgcgggagatggagcggcacaagtggcgcgcgctgcaccacgtcctgaagcgcacggggcacgacgtcaccgcctacctcgacgcgctgcggccgatggaggagcgggcgcgcgcctgctacgacggccgcgtcgccgggatgcaggggaacgagctcgtcgagtgcctggtgctggacgggaccttcgtgctggagctcttccgcggcgcgcaggacggcgggaaggggttcggcgacgacctggggtactcgcggcacgaccccatcttcgccatgcgcggcgcgatgcacgccatccgcaacgacatgatcctgctcgagaaccagatacccctgttcgtgctcgacctcctgctcggcctccagctcggcaacccggagcagaccggcgccgtcgccggcctcgctgtgcgcttcttcgacccgctcatgccgaccgacgagccgctgctccgcaaggaccggtccaagctggagtcctccatcggcgcctcaccggcggcggcggcgttcgagttcgacccgctgtccggcccgatgctccattgcctcgacgtgttccggcgcagcctcctccgcgcggggctgcagcccaccccgccgccccccgcgcggctgtggctcaagaagtggtcggggctccggcgcgtggcggacaagcggcggcagcagttcgtccactgcgtgtcggagctccgggaggccggcatccggtgccggcggcggaacacggaccgcttctgggacatcaggttccacgacggcgtgctccagatcccgcgcatcctcatccacgacggcaccaagtccctcttcctcaacctgatcgcgttcgagcaatgccacatggacatcgccaccccgggcggcaacaacatcacctcctacgccatcttcatggacaacctcatcaactccgccgacgacgtcaagtacctccacgaccgcggcatcatcgagcactggctgggcagcgacgccgaggtggccgacctcttcaaccggctgtgccaggaggtggtgttcgacatcaacgacagctacctctcggggctctcggaccaggtgaacaggtactacgaccacaagtggagcacctggatcgccagcctcaagcacaactacttcagcaacccatgggcgatcgtctcggtggtcgccggtgtcttgttgctgctgctcaccatgacgcagaccttctacggcacctacagctactacaggccgatgcattgatccgcacaaaatgcaggggctcgaggcaatccaaaatttgatatttttattttttgggtttggcattgtgcgataggcatcaagtttagctgattttgtgacagcgtgagattgctggctttgcaattacagctttgatggggagaattcttccttggacttcggagtgcgttgtgtgggagagaaggatttgattagcaaatccttttgtcaaaaagttgcatgttgtgtacatttcaaaaacacagccacatacaaaggttaaaaagggttttttgcataggg

SEQ ID NO: 6793 - DNA, 530 bp, Oryza sativa
  ref <308>: DATABASE ACCESSION NUMBER: AK063931
  ref <309>: DATABASE ENTRY DATE: 2001-12-06
catcacttgtccttcagacagcgagagcgatagcgctagagagagagagaaggggggaggatttggagcgcagattgaggagaagcgatggcggattgggggccggtggtgatcgcgacggtgctgttcgtgctgctcacgccggggctgctgttccagctgccggcgcacggccggatcgtgggcttcggcaccatgcacaccagcggcgtcgccgtcctcgtccacgccgtcatctacttcgccctcatcaccatcttcctcatcgccatcggcgtccacatctacgccggctagctagtctacccaagcccctcctgatttcctgcagctttaattaattatctgccttttccctactctctatgtgcttaattaatttattactgcctctacctgctactctatgctagtagaaccgttgttgctgtgtgcttggaagacatgccatggttgtataactatgtgttgtattggttgattctctctgcaatggtttatcggctcaagtttgaactaaaaaaaaaaac

SEQ ID NO: 6794 - DNA, 1447 bp, Oryza sativa
  ref <308>: DATABASE ACCESSION NUMBER: AK063932
  ref <309>: DATABASE ENTRY DATE: 2001-12-06
aattgaaaaagaaatctgccgtctcgctctcgttgtctcctccgctccttgcgccgccgccaagacgagtcgcggctgaacaggggagcgccgggcggcgagctccatctggcgagcagagcagagcagcggaggggaggggatcctggaatcaggacatagatggatccagaggtgaaggactcaaggccatcgaggtctcccggcgaaccaaatcttttcctgcaatggggcagccggaaacgactccgctgtgtcaagacgagggacgacggctcgccatcacctgggcggaccgatgttcttaggcgcaccataccacgagtgaatcgcccgcttggcggtgatgttgccccgtttcgttcgccgcggcgcccgagcacgctgaaccgaaggaaaaccgagccatttgtgagcgataacaggcactccatgtcactctcgccagagaaggatcgatattactccactaggggttctccattcccattcgagggaaatgggtttgattttggtggtggaatggaagaaaagggaaccacagcactgccaaggttcttcatttcattatccaacaaggagaaagaagaggacttcatggcaatgaagggatgcaagctcccacagaggccgaagaagaggccaaagttgatgcagaagtgcttgcttatggtaagtccaggagcatggctgtctgatttgtctcatgagaggtatgaagttagagagaagaagtgcgctagaaagagggctagaggattgaaggctctttgcaatgagagtgattcagaatagaaatacagagcgggatcaattttttttgacttttgctggagacagttaggtacaatgctggttcattcattaactagacagatctgagcggctaatttagagagggaggatcaccggctctcctactatccttatttcaccacccctgtatctccatcctttttttgttcattcgttgttccaaacaaatcgtcatctagaactaagcctatcgaccgaaatagttgtatattagatcattcctgatctagcaagtttgtagctcagaccttaaaggcaccgcggagtttggtcaccactgaagtgaaagtaaatgaaaacgaagagagagagcttaagatggaaggcagcaatgcatggtctatgagtctatcatgatttgggattgagaaagaagatgggaggttgttgggtatggtgcatggtgcattttggtgcctcaattgttgtaacagtaacaccaagttgggaggaagatttgaggccagctggccattcaaataggttactactgaatcccaaatattgtaatcctagttgatgttgaagagaacgccgtgtgcaggccatgcctgggcatgatcctggattcatggttagactgtttctcctgaaatatatatcaaattcgcagagttgtttgaccttctcc

SEQ ID NO: 6795 - DNA, 2029 bp, Oryza sativa
  ref <308>: DATABASE ACCESSION NUMBER: AK063933
  ref <309>: DATABASE ENTRY DATE: 2001-12-06
ctcgtttttgcttgcctttcgcgacgccgcgccatcgccttcacttcttcccgcctctcgcctccaaaaatccccttcgaaacgagacgcgggagctcgcgatcgccgggcgcaaccgaggaggaggaggaagacccttgccgttgtggccgccggagctggtcgccgttgatgcggcaggccgataccctttaaattattagatggctcaggctgcaagactgaatctgcgaatgcagaaagaggttaagcttcttctaaatgatccacctcatggggtctcccttaatctttctggggatgaaagtgccttgtcatcgttgttgagtttcgaggccagaatacagggacctgatgaaactgtttattcaaaaggagtttttgttctgaagatccaaattcctgaaagatatccttttcaacctcccaatgtgacatttgttactcctatttatcatcccaacatagacaatggaggacgaatttgccttgatatactaaatttaccaccaaagggtgcctggcaaccatcgctcaacattgctactgttttgacaagcattggtttgctgctaagtgacccaaaccctgacgatgggctgatggctgaaataagtcgagagtacaaatacaacagacaagtttttgacataaatgctcggtcctggactgaaaagtatgctaatccttcagcaattggcgctagtggttggagctctgtagatgtttcaaccctggcaccaaacatacaagaggagaagctaagcctggagcctttgccaaaagcttcaaataaaaattgtgatgggagtagaaagaagatgaggctacttagtcaaaagttatctctgaaatcagtacctgaagagaataccaccactggcaaaaaggacctggtgacaaaccacttatcatcgacagcaagacccactgatcctactgcatgcttgtctgatgtttcaggcaaactgaatgatacctcagaaagcatatctgtcatcgcagatagtgcagtgacttcaaagaaagaataccaaggaactagaaggaacttgcagttacttgggcaggggcttcctgttacatcagaaggtcctagcaagaacagtaatggcagtgtggaagataagttacctaatcatcttctagcatcagcatcatcgaacactaagcatcctgtcatgggatcttctgataatgctttagagaagagtagtgcaaagcgcattggtgagtcattagatagcttgtataaagcatcagaaggcgatggtacaaatgtgaggtcacttggtcagaagttgtcactgaaatcggcaaagcctgaaagcaagagcaatgttcagaaggaaaacatggctccaaatcatctgccttcattgtcaggcttcagtaatctggataaaagacaatcgcatgttatttcagggggaaattccattgggcatactaatctggttcaacaaaattctaacaacgaaaatgtacttccaagtacccagttgataccaagtaaagaatgcaatcaaggccgaaagaagctgcatttactaagtaagaggctgtcattgaaatctgagctgcctgcagacaagaccattgagaaggaatatatgcaaacagattgttctcaaaacaacaggaagcccaatgaacttccgttgtcagcgcctgtcctcaaaaatcagatcttgggtaccattgatccacagaaagatgccaggcaaagcaagtcttccatccaacaaaacacaactcctgtggagaggattgttgtttcagatagtgaagatagtgctgatgaatgtgaaagaccttcaagatcaaggctctcattgatgaggagacgattggctggaaaaccaagaagctaacttgacccaaaatcttcggcgtttcataggctaccgtgtaaagtcatggaagatggcaatgcttcagtaaattctcttgactgtttatgatcacatatgtgatacgttcttatctttatgttgccctatctatgatatgggtgttcggacttcgg

SEQ ID NO: 6796 - DNA, 1549 bp, Oryza sativa
  ref <308>: DATABASE ACCESSION NUMBER: AK063934
  ref <309>: DATABASE ENTRY DATE: 2001-12-06
aaaggccacgctcccctccctcccaccaacccaccaccagcgtcacccatggcggcccagcgactcgccgccctccacgccgccgcgccgtcggccttctcctccacctcctccgcctcgcatggccgccccgcggcgcgatccagcaccaccgctctcctcccggtggccctcccgcgcgcctccgccaccctccgcgccgcaccttctcggctcctcccccaggaggcgaaggcggcggggagcggcaggtcggtgatgtgcatggcgtcggcgtcggcgtcggcggcgtcggcggcggtggcgtcgggcgcggcggagctgaaggccgctcgcgaggacatcagggagctcctcaagacgacgcactgccaccccatcctggttcgtcttggatggcatgattccggtacgtatgacaagaatattaaagagtggccacaacgaggtggagctaatggaagcttgagatttgatgttgagttaaaacatggagccaatgctgggctggtaaatgctctaaagcttgtccaacctatcaaggacaaatacccaaatatctcatatgcggatttattccagctggcaagtgctacagcaattgaggaagctggtggtccaaagattccaatgacatatggacggattgatgtcacaggtcctgagcagtgtccacctgaggggaagcttcccgatgctggcccaagtgcacctgcggatcacttgaggaaggtattttacaggatgggtcttgatgacaaggagattgttgtgctgtctggagcacatacacttggaaggtccagacctgaacggagtggctgggggaaaccagaaacgaaatatactaagaatggccctggtgcacctggtgggcaatcgtggacagctgaatggcttaagtttgataacagttatttcaaggagataaaagagaaaagagatcaggatctcctggtcttgcctacagatgctgcattatttgaggacccaacattcaaggtctatgcagaaaaatacgcagaggaccaagaagcattctttaaagactatgccggagctcatgctaaactgagcaatctgggtgcaaaattcaatcctcctgagggattcacgttggacggttaatgcgatgcgcatgagccagatcgctgaagtggccaaccacttttacagaaaggtctatatactctactaccccatccacctcccaatttgtaggttcatgtcagctgttctacttactcgatactgtgattcaacagaaggttcgctcggttcttggctaaaatgattccaatctgctatttatcttgctcgtaggatcaagagagaaacactacacaatccaatttcctgctccaacgttgtgtcatcattccagatgaagcttttcctgaccacgagtcatattggatttggaaactgagtattcgaataaaaaaacagactggctagagaggcaaatttgagccgaacttgcggaccaaattcgacgagaaaccaaaaagaaaaacattttaatactattctttacttattatgcttt

SEQ ID NO: 6797 - DNA, 1560 bp, Oryza sativa
  ref <308>: DATABASE ACCESSION NUMBER: AK063935
  ref <309>: DATABASE ENTRY DATE: 2001-12-06
actcgagctcgaacaatctatatattgtcagagacgcacactttactgatcagctagttagtcccagttctgaagaacaactggaaaaagaaaatcgagctgtaaaaatattagtaccagtgatcagtgacagttcagagcatcaaccatgtcgtccaacaattccatggaggccaacaatggcgatgatgagaagaagcaagagcaggtggtgtgcgtgacgggagcgggaggcttcatcgggtcgtgggtggtgaaggagctcctcctccgcggctaccgcgtgaggggaacagccagggatccccgcaagaacgcccacctgcttgatcttgagggagccaaggagaggctgacactgtgccgcgccgacgtcctggacttcgccagcctacgcgccgcgttcgccgggtgccatggcgtcttccacatcgcctccccggtgtccaaggaccctaatctggtgccggtcgcgattgaggggacgaggaacgtgatgaaggcggcggcggacatgggcgtgcggcgcgtggtgttcacgtcgtcgtacggcgccgtgcacatgaaccccaaccggagccccgacgccgtcctcgacgagtcctgctggagcgaccccgaattctgccagcgagaggacatatactgctacgccaagatgatggcggagaagacggcgacggaggaggcgtcgaggcgtcggctgcagctcgcggtggtggtgccgtgcgtgacggtgggtcccatcctgcagccgtccgtcaacttcagctgccaccacgtcgtccgctacctcaccggcgccgcggccacctaccccaacgccgtcgccgcctacgccgacgtccgcgacgtcgcccgcgcccacgtcctcgtctacgagcaccacggcgcgcgcggccgctacctctgcatcggcaccgtcatccaccgcgccgagctcctccggatgctcaaggagctcttcccccagtaccccgtcacttcaaagtgtgaggatgaggggaatcagatggtgaagccgtacaagttctcgaaccagaggctcagggatttgggtttggagtttactccactgaggaagagcttgcatgaggcgatcgaatgtctgcagcgcaagggtcacctgcctgttgtcacggtggcacaacagcgtgcatgtttgtagaaccaagattttatacacggtgaacttccaagttccaaagataataaaagcagagacatgacagcggcggcatatgcataacaaatttatattttggcggcggcttaaatttgaaattttgtctacctgaagaataaagtaggagtaccatataaagggaagttcagcgtggaagaacccgtactactactactcctagctagccagttcatatcgtaaatctgcatgtgtaacacaagttctttctttggtatgaattacatctgtatctctactttgttcatacttctacgatataaaatgaaaaaaaatattatataataccgatcgagaatgtatctaagaaacaggaatgaaattaagggaggaatagcgcacctctcctctactct

SEQ ID NO: 6798 - DNA, 1447 bp, Oryza sativa
  ref <308>: DATABASE ACCESSION NUMBER: AK063936
  ref <309>: DATABASE ENTRY DATE: 2001-12-06
atttattagctgggctttcactgtgcaggtgggttgctcgaactgtccagtccggcgtccgccgccgatggcccctcccgccgccggcgcggcgatcccccgcgacgccctcctccgcatcgcggcgccgctccgggactccctcgccgcggcgccctacgcgcctccggagggctcctccacctccaccaagtccctcctctcttccctcctcccctcgtcccatccccaggctccggctggcggcggcggggcccgcagcaaggaggccgcgggcctcctcctcttctgcgccgccgcgcgcgcggcctccccggagtaccccgcgctgcactgggttcccgtggcgctctctgacgctgccgccgccgcggtggaggagatggcggcggcgggcggctggggcgatgtaggggagatggtggtggggatgatgccggaggtggtgccgccgctgaaggatgttgtgaaggccacgtgcgtggacacggaggatgaggaaattggcaaggagaagccgcccaaagagcacgccgttgtcgccgctcaccagttcaggtggctggtgtctcaggttacttatcctaagcttggcgacttgtgttggctagtgattccgtgtgctttgactgccttggaccattggtcaccggaagttaaggaacagggaatggttagcttcatgcacatagcaaagagtgtgaaagcaacagaattaaatttgtatgaagatgcaatacttgacgcatgctgccataacattcccgccaatgatgagttgtggtatcgcgctgttgaggtatccgtgcttttgttgacttgcactcaaagaagtaatccacgtagcccttggtatgatcgtatgctagctgagatgttgggccacctggagcggcaaccattaaataaaaaacgccgtgttgcatggcttacccttattgggccagtttttgaagctatgggcctcttcctattagcacattttcgtctccttttctctctcttctttcaatggatgcatgccgatgatgacaagacagttcttctggtcttagagcgaatccatgaagttattaagctcacatggatcaggaaatcaccttatacttcaaggctggtggatgagcttgtccttttatacaaagagtcagccacaaggagcagccgtgaggtcgtgtggaatcacatcctggaaatgctcgctacactccagaaatgcaaggggcagcaatttgaggaagcttggaagaagcacgaagttgacccagacttgacgatgttgctatcatgtttcaatgaattatgtaccaaaaatcattcttcctgatttccagtgtgactggtattcttgttgtaaatactagctgttagatgaaattgagccttgaaaatcttggccgttggtcccttctctttatgagatttctttaccatggaaattcgagtt

SEQ ID NO: 6799 - DNA, 1188 bp, Oryza sativa
  ref <308>: DATABASE ACCESSION NUMBER: AK063937
  ref <309>: DATABASE ENTRY DATE: 2001-12-06
aaaaaaaaaagggaccccgagccgatcgatcgatcgaatcgaatcccccgccgccgccgcctcctcgccgtcgagctcgaccgcgccgccgcgttgcccccctctcctcctcctcccccggcgacgcgtcggtcgctgagggagcttgtcttggtgctcgccgcgttaaaccccgcgaggcggcgagcaggggctgtgatggtggtgatcgagcaggagccggaggtcgaggagacgccggcggcggcagaggagccggctgccgaggagcaggcggcgggtggtgcggccggaggggaggcggcgagggcggatggggaagacgaggaggaggccttcgaggacgcgctgaccgacgagcagctccgggagaaagctagaagccaagcaaatgatgcaaaggcagaagggaacaagttttttggtgctggagaatatgagagggcattgtcgcaatatgagacagctttgcaaattgctgctgagctggaatctgccgaagacatacgctccgcatgtcattcaaatcgtgctgtatgcttcttgaagttgggcaaatatgatgaaacaatcaaagaatgcaccaaagcacttgagctgaatccttcatacttgaaagccttgctccggaggggagaagcacatgaaaagcttgaacactatgatgaagctattgctgatatgaaaaaaattattgagctggatccttcaaatgaacaagctaagagatcactgttccgactggagccactggcagctgagaaaagggaaaagatgaaggaagagatgatcggaaagctcaaagatctggggaattctgtgctcgggcgctttgggatgagcgtcgacaatttcaaagctgttaaagacccaaacacaggctcgtactccatttcgttccagcagtgacgacatggggtagtaacgagttgtttaaatgaatatggacaagtacacatgcagtcactgtaaatcctggaatgctaatgtcatttggttcaaaaactttggcccttttgtatcaataggtttgttaccatcgcccgcagttaaatctgaagatggtgcatggacgtttgcagttatgttctgagagaggtggtttagatgagtgaacttgtattataggcgtttgccacgctgtgattctcttcattttatcatagcaattcttgtttgcttgaacat

SEQ ID NO: 6800 - DNA, 2105 bp, Oryza sativa
  ref <308>: DATABASE ACCESSION NUMBER: AK063938
  ref <309>: DATABASE ENTRY DATE: 2001-12-06
aaatattcagtcttgaagaaggaggagaggggagggggaaggcgatgaagtctaacaggaacctgaccaggggagacggtaggaggctggggaatgcggcactgatagcgtttatgctgggatccctacttgtgctctccctcgtcagggcaaggttctcccccatcgggaagccaggggaagccatcaaaacagaggagcaggaggcgatgaggaaggggagtgtgaagatggagaccctcgaggccgccgatgaggctgcagcatcagctgcagcagaagaggaagaagaaacgcagcccaaggctggagacaccacagctggtggcggtggcggtggcgcaagcagcgcagctgttgcagcagcgtccaccacggccacggaccacctgactaagccggtgtgttacgagtcaagccggcggtcggacacgtgcgaggccaccggcgacgtccgcgtgcacggccgcagccagaccatccacatcagcccactggagcaggagtggaaggtgaagccgtactgccggaagcacgatgccttcgcgctgtcgcacgtcaaggagtgggcgcttcggcccctctccaccgccgacacatacccggcggtgccgcattgcacggttaacagttcggccaccgcgttcgtgctctccaccggcgggttcacgggcaacccgttccacgactacacggacgtgctcatcccggcgttcatcaccgcacaccgcttcgctggcgaggttcagttcctggtgagcagcttcaagtcgtggtggacgaacaggtacatgcaaatcttccagcggctcagcaagtacgaattggttgacatcgacaatgatgacgaggtccgatgttaccggagcgtggtggtcgggccgacgttccacaaggagctcggtgtggacgcgtccaggacgccgtcggggtactccatggtggacttccgcacgatgttgcgtggagcgctcgggctggagcgcgctgtggctgagcccagcggcgaccggtgggacatccggcgccgcccacgactgctgatcatctcgcggcgcaactcccgtgcgttcctgaacgagcgtgccatggcggacatggccatgagcctgggcttctacgtgcgtttgggcgagccggacatcagcacggacgtgtccaagttcgcccggctggtgaactcggcggacgtgatggtgggcgtgcacggcgcagggctgaccaacatggtgttcctccctgccggcgccgtgctcatccaggtggtgccgtatggtggcctggaatggctcgcccgcggcacgttcaaggagccggcggccgacatgcagatccactacctcgaatatatgatccagctcgacgagacgacgctgagcgagcaataccccaaggacgacccggtgctcaaggacccctactccatccacaagcagggctggaacgctctcaagatggtctacctagacaagcagaatgtgcggccacatttgggcaggctcaagaacactttcatggaggccctcaagctgctgccccatgggcacaccaactgagtaacatacttattgatcatggagcccaggtaattaccaggaacaccatatcatgtacttaatttgcgtgatcggtcgactagatagtggttgaagatgctaggttctcttcctttggatgtaacaagtctgagtttcaagggtggagtttctcattgatctgtaaatgcgagttaggaggcgcattccctcctctctgtttttctgctctcttgtagtagtattttgggagtagtactacaaaatgtagtttggaggatgtggaatctaataagaatggagggattgcatgggatcagatagaagggtgttggtgattgaacaagagaagagaagagtaccaaaatataatgctatctgttgttagatgtagtagtgtgaaatgtatcaccgatggtctgttttacactatgggtgtgtttagatggtggagaagttggaaagttgggagaaagttggtagtttggagaaaaagttggtactttacgtgagtaggaaagttttcgatgcaatgtgatatgatggcaagttgggaatttgggtggaact

SEQ ID NO: 6801 - DNA, 1234 bp, Oryza sativa
  ref <308>: DATABASE ACCESSION NUMBER: AK063939
  ref <309>: DATABASE ENTRY DATE: 2001-12-06
aaaaaaaaaatcatccccaatcttacatcaactacctacttcctacgtagcccagtaactatacattattaaggctaaccagtaactaactaaggcacacgtacgcaatggtggcgctcggacgccgttcatggctggtcccgctggccatggtgctcgccgtctccagctgcctcgccggcccggcgatggccgccggaaagaccgggcagatgaccgtgttctggggccgtaacaagaacgagggaaccctcaaggagacctgcgacaccggcctctacaccaccgtcgtcatctccttctacagcgtgttcggccacggccgctactggggcgacctctccggccacgacctccgcgtcatcggcgccgacatcaagcactgccagtccaagaacatcttcgtcttcctctccatcggcggcgccggcaaggactactccctcccgacctccaagtccgccgccgacgtcgccgacaacatctggaacgcccacatggacggccgccgccccggcgtgttccgccccttcggcgacgccgccgtcgacggcatcgacttcttcatcgaccagggcgcgcccgaccactacgacgacctcgcccgcaacctctacgcctacaacaagatgtaccgcgcccggacgccggtgaggttgacggcgacggtgcgctgcgcgttcccggacccgaggatgaagaaggcgctggacaccaagctgttcgagcgcatccacgtccgcttctacgacgacgccacctgctcctacaaccacgcggggctcgccggcgtcatggcgcagtggaacaagtggacggcgaggtaccccggcagccacgtctacctgggcctcgcggcggcgaacgtgccggggaagaacgacaacgtgttcatcaagcagctctactacgatctgcttcccaatgtgcagaaggcgaagaactatggcggaatcatgctctgggacaggttctacgacaagcagaccggttacggcaaaaccgtcaagtactgggcttaattaattaacctactactactatttactgctactatgcgttaatttgtgcgtgtgtgtttgagaataaaatatgttggtgtgtgttggtttttttatgtaggtatatgaataaaacgagatccatatgtaacgatggagatctcgagttgtttgtttgttggtcatcaatcgaataaagtgtatgaacaatatatcagaaatggttattatgt

SEQ ID NO: 6802 - DNA, 1634 bp, Oryza sativa
  ref <308>: DATABASE ACCESSION NUMBER: AK063940
  ref <309>: DATABASE ENTRY DATE: 2001-12-06
aggaaatggcagctctgacgagctacgagatggcggcctccatcttgctctgcgccgaggacagcagcagcgtcctcggcttcggcggcgaggaagaggaagaggaggaggacgtcgtggctgggaagagggccaggtgcgctggtccgccgccgccgccgtgcgtggacgtcgctggcgtggatttcgccgtgccgtcggaggaatgcgtcgcccgcctggtggagacggaggcggaccacatgccgagggaggactacgccgagaggctgcgcgccggcggcggcgacggcgacctggatcttcgcgtcaggatggatgccatcgattggatttggaaggttcactcctactacagcttcgctcctcttactgcctgcttggccgtcaactacttggaccgcttcctctcactctaccagcttccggatggcaaggattggatgacgcagctgctagcagtagcgtgcttgtcgcttgctgccaagatggaggaaaccgatgtgcctcaatcgctggacctgcaggtcggggaagaacggtacgtgttcgaggcgaagacgatccagaggatggagctgctggtcctgagcaccctcaaatggaggatgcaggccgtcactcccttctcctacgtcgactacttcctccgcgagctcaacggcggcgatccgccgtcgggacgctcggcgctgctgtcttcagagctcatcttgtgcatagctagaggaacagaatgcttgggattcaggccgtcggagatcgccgccgcggtcgccgccgccgtggtcggagaagaacacgccgctttctcccatgtaaataaggagaggatgtcgcattgccaggaagtgattcaggccatggagttgatacatccaaaaccttcaagccccagcagagtcttcgtctcctcctccattccacggagccctactggcgtgttggatgcagcaggctgcctcagctacaggagtgacgattcagctgttgcctcacactacgcagcaagcagctggggatatgaacatgatagctccccggttagcagcaagaggaggaagattagcagatgatgcagccaatgatggatcaattaaaagtctgtttatatgtgttgcgaaactgatcgtgcatctctctttcttgggaaagtcaaatggttttgattgcaaatgactgtggagcctttcgatgccgtatgggagctagagcctgaaaggcgatgaaggaccaaaagcaaggcattttcgacatggcaacagagcaaagatactgatggataaagagagtctgaggtagacatgtgctccaatattttcatgtgctttagcgttagttgctaggaggcaggcagccacaaaagagtagaggatttgtgggaagagagccgggcgagatgaaaatgagatgaccaaaataaaggcagagacgaggtgacagtggcacaaggcaaagcgagctaggcactgacactccagatgtcctgcgtgtgtttcagttttgcgttgttctgtaatttcccctgcttaattcctttgtgaagaaaaatcataaaaaaggagagaaacaaacaattttggtgtcaaactccaataattcagcataactaaactacaagaagaagctgaagc

SEQ ID NO: 6803 - DNA, 1925 bp, Oryza sativa
  ref <308>: DATABASE ACCESSION NUMBER: AK063941
  ref <309>: DATABASE ENTRY DATE: 2001-12-06
atcatcctccccttcccacaaatttcaaaagttctcaccacctaatccgatccaagctccgcgctaatcgcgcaaaggggaaggaatccgctcgaatcaaccgaccgattgatcaatcgatcgattcgatccaggaggaggaggcgaagggggttcgtcggcggaggcgatggaggaggacccgctcatcccgctggtccacgtctggaacaacgccgccttcgacgactcctcgtgttccagatcggcttggctcccccaaagccccgccgtcgcggccgtccgcaagggcgacaaggagaatcaccgccccgaggttgttgatgtcgccgccggctacgacgtcgaggccgagatcggccacatcgaggcggagatcctgcgcctctcgtcccggctccaccatctccgcgtctccaagcagccggagcccaaccgcgacgacgctccgatgggggagatggtcgcgaaggtgaggccccggccgaggggcctcagcctcgggcccctggatgtgatctccatcgtcaatcgtgagaagcatccgctgcgcaccaagaagcctccggcgacgcggggcagggggctcagcctcgggcccatggagatcgccgcggcgaaccctagggtgcccgcggcggcgcagcatcagcaacagcaacgcgctggcacggcgcggatcctgaagccaatcaaggagcctccggtgcagcgtcgcaggggcgtcagcctcgggccgttggagatccaccacggcgtcggcagcaaggcaccagcggcggcgcgagccaagccgttcaccaccaagctcaacgccattcgagaagaaacccgaccctccaagcaattcgccgtccccgccaagccatggccgtcgagcaatacaaggcagacactggactcgaggcaaggaacagcagcaagtcgagcgaaggcgaggagcccgagccccaggcccaggaggcaatccaatggcaaggctactgacacaaggggaggcaacaaggtggtggatgagctcaagcccaaaggtgcgtcgtcaagtcagagcggcagcgccgccgccgccgccactgccaagaggatggcggggagctccaagatgagggtcatcccgagccgctacagcctcactcctggcgcttcccttggaagcagtggagcacaggagaggcgacgcaagcagtctctcccaggatcatcaggggatgcgaaccagaatgaggaaatcagagcgaaggtcatcgagccttccaatgatccactctctcctcaaacgatatccaaggttgctgaaatgctcccaaagatcaggaccatgccgcctcctgacgagagccctcgcgattccggatgcgccaagcgggttgccgaattggtcgggaagcgctcgttcttcacggctgcagccgaggacgggcgggcgctcgacgtcgaagcacccgaggcggtcgcagaagcttgagatgaaccaccatggtttgatccgttccttccatcagctcagctccgtcttcttcttgagtgttcaaggtgcctgcttatcttgagctagcattcgagtgaggcttttctttttgcaggggcgtgttgcataaatggtccggctactgttacattcatatctcatggtctggttcctctttctttcttttttttttgtttcttttgtcaaggccttcctatgctagtcaatgtgtgaaaagagatagtagtagtgatgagtccattctatggtttcttgttttggaattgtaagtgtgctctttggtttgagacttcgagtaagtacaggattcatggtgtggttaagtcaataagtggcttactgatttccctacattttgtctttagctgcttccttgtgtgttgggacagcaagaaacaactatccagtgacaaactgacacctctattttttcctc

SEQ ID NO: 6804 - DNA, 1827 bp, Oryza sativa
  ref <308>: DATABASE ACCESSION NUMBER: AK063942
  ref <309>: DATABASE ENTRY DATE: 2001-12-06
atccaccactcttcccggcgagcatctcgctctcgctgccggcacggctcgcgactcgtcgccgccgccgcccgacgcggggcgccccaaaggccgcacggccgccgctccgtccagcgccgcggcgtggcgcgggcggtagtacgacgacgcgctcatcccgggagcggcagcggtggcgaacctccttgcggcagcgcgtcctgtcgtcgtcgcgccgagctccggcctcctactcggccagcggccggcggcggcggctacggctacggaggaggagaaggagagcgagcgaggcgccccattttttcggcttccatcggccgcacttttgacagcattttcgaaagaaatccccaattgaagaagaattggagaggagaggcggcggcggcggcgatggctggcggcgacagggagagggatgtcgaggaggagacgaggaaccagatgatgcagaacctcttcggcgaccagtcggaggacgaagaggatgacgacgaggccgtcgaggtcgtcgacgaggacgaccacccgcatccgcagcagcagcagctgcttcgccaccaggtggtggacgacgacgacgacgaagacgacgtccgtagcgaaggccatgcccgctccggctaccactcggaagaagtggaaggtgaggctgataatggaggggaaggtgaagcggaaggagaaggtgaaagtgaggggcaagttgggatggaagaagaaagcgaagctgaagctcatcaagctgatcttgatcaaggagaaagtgatggggaaaaggtccagagctccccagaaagagaatttagtgaccgggtgatgcaaaatgatgcagcaggcatggatagtgaagacggaggctatcagcagtggccagtagctagcggaagaagaggagttgttgcctctgaatctgaagggtctgaagatgactattatgctggccgaggtcatgaagatgaggaacctcatcaaacaaggaaaacaccaagctcgccagttgaggaggagagagatcatgaagttgtccgtgatgtatttggtgaaagcgatgaagatggacctgctccatatcgtgatcaacatgaaattgatgaagattcccatagatcacctatggaagatgaaggtcactatgagaaggatttgcagcctgaggatgtagtagctgatgaagatatgagatatgaatcagatgaaaatcgtgaattgaaaccaaaagagaaaccagttggtccaccgttgaacctggtggttccacttaagcagccgccagctcaaccggacagaatgaatgtgatcaaggtatcaaacattatggggattgacccgaagccttttgatcctaaaacatatgtggaggaggatgtatttgttacagatgaatctgggactaaaaaaaggatacgactggaggacaatattgtgcggtggagaaccgttaagaatgctaatggcactacatcttgtgaaagtaatgcgcgcattgtaaaatggaaagatggaacgatgcagctgctgattggtaatgaagttcttgatatatctgtacatgaagcacatcatgatcagtcccatctgtttctgaggaatgggaagggagtccttcaatcacaaggaaggctcttacggaaaatgagattcatgccatcttccttgtcttcgaaatcacatcgtttattaactgctcttgttgattctcagaataagaaaactgttaagatgcaaaaatggatcgaatctaaggatcctgagaaagtgaagcaggaaaaagaaagggccttgggccaaaatattcgagcccattcaattcttcaacgc

SEQ ID NO: 6805 - DNA, 1562 bp, Oryza sativa
  ref <308>: DATABASE ACCESSION NUMBER: AK063943
  ref <309>: DATABASE ENTRY DATE: 2001-12-06
atctcaaatcagatcatctcaagttcccaaaccctagctatctctgctggtctcccccaagctctcctttatataacacaaactacatcatctcctttctcttgtgtgcaacatcacaaacacaacctttcactcccatcttggctttctttcctgtctctagcttagctacctgttgcttccaagctgagaaaaaccaagcaaaagaagctgtttgtgtgcctttccaagagtgaaaaaaaaaaatgcatcctaatggcgcgccgctggccgtgccaccgggtttccggttccatccgacggacgaggaattgctctactactacctgaggaagaaggttgcttatgaggccatagatctcgacgtcatcagggagattgacctcaacaagcttgagccttgggatctcaaagatcgatgcaggattgggacgggggcgcaggaggagtggtacttcttcagccacaaggacaagaagtacccgacggggacgaggaccaaccgcgccacggtggccggcttctggaaggccaccggccgtgacaaggccatcttcctcggcagcggcggcggcacgaggattggcctgaggaagacgctggtgttctacaccggaagggccccgcacggcaagaagaccgactggatcatgcacgagtaccgcctcgacgacgacaatgtcgacgtcccggaggaaggatgggtggtgtgtagggtattcaagaagaagagcatccatcagaggggcttcgaccagccggacatggcggcggcggccgacgaggacgagctccggtaccagctgctccacggcgcgggcatgtcgtcgtcgccggtcgaccagaagcacgtgctcctccaagagcagctcgtcgcgcacggcgcccatggcggcggcttcgtcgtcccggcgttcgaagcctccatgcacctcccgcagctcgccagcgccgacgcggcgccgtgcggcggcggcggcggcggccatgtcgcgttcgcctccatgaacccgctcgacgccgccggctgcggctcgcagaacatgatgacgatgaagatggcagcgacatccggtggcgagatgctgctgatgagcggcggcggcgtcgacggcggccgcttcggcgccgccgccgactggtcgatccttgacaagctcctggcgtcgcaccagaacctcgaccagctcttccatggcaaggtcgccggagcgcatcagcagcagcagcagatggccatggacgccgcctcgtcgttgcagaggttgccgttccaccattacctcgggttggaagctgcagatcttctcaagttttctatgtagaaattttttagctatatgtaatgtagtatctgcttcttgattaattaagcaggcgaattcttgtttttttttctcttctagttttgtcaaattattagtactagtttcagtttgataaggttaatatcggagttctgctagctactggcctactgttctataagcatgtgtatacagacagtctgaatgccgtatgaacttctttctaaatgtttcaattcaagtttgttcatctcg

SEQ ID NO: 6806 - DNA, 2221 bp, Oryza sativa
  ref <308>: DATABASE ACCESSION NUMBER: AK063944
  ref <309>: DATABASE ENTRY DATE: 2001-12-06
cacaacgatctctctctccagtctcgactccccagctaccacctcctctcctctcctctctcctccatgagctttgcctagatcacagctggatttcttggccgcatcctcctcttcttccaggtctcttccagctagctagcttgttcttcccttccctttctttttgccttgtgcgcgtgaggatcagtgagctgtgcggctctcttttcttgttcttgctggactgctgctgccttaaaagatcctgcctttcttgctcactttccccggaggagagagagaggagatccacatctctgatggttcttgggatctcctaggagttgtttctacctgtgctgctgctgctgatttcttcttcgatttgctagcggctgtgtggtcggagctcgtcttcttggttcgagatctcgacaccttctgagatggattttttcaccgagtacggtgagggaaacaggtacaagatagaagaggttataggaaaagggagttatggtgtggtttgctctgctttggacactcacaccggtgataaagttgctatcaagaaaatcaatgacatctttgagcatgtgtccgatgcaacacggatacttcgcgagatcaagttgcttagactcctgcgacatccggatatcgtggaaattaagcatattctacttcctccatcaaggagagaattcaaggatatctacgttgtttttgaactcatggagtctgatttgcaccaagttataaaggccaacgatgacttgactcctgaacactaccagtttttcttgtatcagttgctccgaggactgaaatatatacacacagcaaatgtatttcatcgagatctcaaaccaaaaaatatcttggcgaatgctgattgtaagctcaaaatatgtgatttcggccttgcaagggtagcttttagtgatactccaaccgccatcttctggacggattatattgcaacaaggtggtaccgagcaccagagctgtgtggatcttttttctccaagtatacaccagcaatagatatatggagtattggctgcatatttgccgagcttttaaccggaaaacctcttttccctgggaagaatgtggttcatcaacttgatataattacagatctactaggaacaccttctccagaaacaatatctaggattagaaatgagaaggcaagacgttacttgaacagtatgaggcggaaaaaacctataccatttacacagaagttcccaaatgcagatccacttgcaatgcggttgttagagagaatgttagcttttgatccaaaagatcggccaagtgctgaggaggcgcttgctgatccttatttcaagaacatagccaatgttgatagagagccttctgctcaacctatcacaaagctagagtttgagttcgagaggcggagaattactaaggaagatataagggaactcatatatagagaaattctggagtatcatccaaagatgctgagggagttccttgagggaactgagtccactggtttcatgtacccaagtgcagtagaccattttaaaaaacagtttgcataccttgaagaacattatgccaagggatcaacagcagctccacctgagagacaacataactcattaccaaggccttgtgttgtctattcagataaccggccacaaagcacagccagtgtcactgaggatctttccaggtgtttaatcagagacaacaatctaaaatcacaggattctgcttcagtcggtgcaagcagaatccctcaaggtgctgctgcaagacctggtaaagcagttggttcggtgctgcgttacggtaactgttcgacatccgctgctgagcaacaatatgagcagcgaagggttgttcggaacccagcaattgctccaaacagcagtgttcctctggggagctcataccccagaagaaaccagacctgcaagagtgaaacaggtgatgttgaaaggatcgattccagccaaaccggtccaccgaagccatatgtggcgaacaaactgcctgctaccgtcgatggtcggagtggccactggtaaatttctgcagcgcaccagcgaaaacgctagttattaccacagcatcagcatgggtttattgttctatgtagtaaattcttagacatttaaaacatgtcattctgtacagacttgtattgtttcttgggggcttttccatgataaaaacagtagaattgtactgc

SEQ ID NO: 6807 - DNA, 1932 bp, Oryza sativa
  ref <308>: DATABASE ACCESSION NUMBER: AK063945
  ref <309>: DATABASE ENTRY DATE: 2001-12-06
acgagttaaaaccctcttcctctctctctctcgcttcgtcttcctcctccacacgaagcggcagcgccaccaccacctccgccgctctctccactgcgccgccggcgccatgagcctcctcagcaactccctcctgctccaagggcggttgcggcatgcggcggcttcagcggtggcggcggcggcgatggggcggcgcggggtggcgacgtcgacggaggagtacaatcgccggaactacgccaacaacatctccgagtacaataccgtcttcgggtccctcaccgcgcagcgcaggcactacctattgcgtgatgcttatgatgacatgatgcttgatggggttcagcctgtgcgggacacattccacaatctcatagtcggtgccatgaaaggcagccggctacaagatgcattctactttcgtgatcagatgaaagaaatgggtttgcagcctgatgttaacctttacaacttcttgatctccacttgtgggaaaagcaaaaactcagatgcagcgatcatgcttttagaagaaatgaaggcacatggcgttaagttgaaaggtgaaacatacacttgtcttttgaatgcacttgcagcaacagggcgtacagatcaagtgtatgctatagttcgtgatatgaccgctgctgggcttggattaaacaagttttgttatgctggactaataaccgcattcaagaacaaggcaccaaccactgaggagactatgacaaaaattgtcgagtttgttcagcagtcaaaaggttggaaaaatgttgaaagagtatcaaaagatagctccgaaaatataatgatgaatgtgtcagaggaagagctttataacctgccaacagctgaatatgtacatagacaagcatttgtctataaacagatgacaatttatcatgttgctatccatgcttgtgcagacctgaagagcaaagagacacttgaagtacttcttgacatgcttattaaagatggatttacttatgatgccttcattgcgatgcaagctatgaggtgttatcttcaatgtggagatattgattccgccgttaagatttttgaagagtacacaagctcaaaatccccgcctgcagagttgtatgtgacacttgctgagggagctatgattgggcatacaccaagaggaatgcaacttgctcaagaaaccatagagaagatgacttcgagaaatttcttcttaaacgcaaggatgggaactgatcttctacttgcagcttcaggtgaaaagactggtggatatacaatagcaaattatgtctgggatctcatgcaaaaccgcagaatcactccatcacttcctgctgttgaagcatactacaagggtttgaaggaacgtgaaattccttctgatgatccacggctcatgaatgttagccgtgtcttggacaatctgagcattcgttttggaccaaggagaaacagtaacgcacaggcataatgtcgtcgtcactaatccaatgcgagttagattttgtgttaataaaactgctggatacatcatcaatatgttagcacttgagaagatcaacgaactgaaattaggatagcacaaagcgaatatgaaaccatcaagagatgaaaccatcaagcatgatgacaaggatcagggtacccaagtccaacctgaaggattttcatccgcatcgcggaaaatctgattctcaagtttcttttaacttttgtaaacttactgttgtcggaatgttacttatcacactggtttagagagtttattctgctgagtaatttgacattagatgtccattccattgctacctttcaggcttcagctgcgagtgtatctgaatggtcatttctcagtttgacaaataattgttgtgagtttaacttcaaagaatcactggaagaattttatgcaaaggaatattatgactc

SEQ ID NO: 6808 - DNA, 1617 bp, Oryza sativa
  ref <308>: DATABASE ACCESSION NUMBER: AK063946
  ref <309>: DATABASE ENTRY DATE: 2001-12-06
gctccgcctcctgaaccgctcgccggcgatgcccctcgccggaggcggcgaatccccagcgaactgacgcgctcctcctcctcatccccctccccggagatctgcctcgcccccgcctacttcggaggctgctactccgcgccgcttcctcttctccgccgcgcgctaccccctactagtcccatctcctccagctctcggcgaccggcggcaagtaggcgatcacgagtaagccccgcagtttcgaagtcttgcatgatggcagccacccagtcttcatcttgggcagatctccagatggatatcctgggccttgtcctcaggcgccttccctccttagctgatcgtgttcgactaagagcagtgtgtcgcccatggcgctccaatgctcagctgctgaccctcccccctccattcccttggctcaatctcctcgacgggaccttcctcagcatctcagatggtgaaattcaccgcatgcctttaccagatgatgcttcttgctatggctctattgataactggctcttcctcacggatagtgacgatgggtgctcactgatgaaccctttctccaaggctacactacagcttcctaagctagcccgcatttggcatcatgagaggggaaatgcgtacaatgcatgtactcgacttttctataagttggcagtgcccttgcccctggacttatcatcagattcccttgttgccgtgctgatgaatgaccctcttcgtcacagtgtagtttgtattgttcatcgatcaatttctactgactcattcagatttcatgatcgtccaatcaagaacaacttctatgatatcgcattctgtggtggaaagctgtatgcacttagttgtgggaagctcttcaccgttgagatgagtgaggtacatatagaaaagccaaaggttccacatgtagaatgcatagtggaagattttccaactgaatcccattctcaaccttgtcctgagaaccatatctgtgtgacatggccatatctagttgcatctggtggcagactgttgaacgtgattcgacttgttggtgtcccattccctccggaagatgatgatgatatcttcaaagattcacttaccttttcatttgaggtctatgaggcagacttgaacaccggctctcgtatgtggagaagggtggaatctttgggagaccaagcactcttcgttggcagacattactccaagtctctctctgctgctgaatatgttggagctcaggaggactgcatctacttcatgtgtgatgactacttccgatctgatgaagatcctctttgcgacgctggcatctacaacatgagaagcggggtgatcacgccgttgttgcaggagaacacagcgccgcgactgcatcctacaggcgaggggcatccgacatggttcttccctgcagatggtgctatgtaaatgtaatcagccccatttcatggcactctctgttgactgtttgatttgggttttctcattgcacttgcaacatgtaaaccggcggatgttgcttaatattttgctacttgtcatgtctactcttatgctagaatgatttgctctggattcagaaagcattgagttcatgtttctcatttt

SEQ ID NO: 6809 - DNA, 1601 bp, Oryza sativa
  ref <308>: DATABASE ACCESSION NUMBER: AK063947
  ref <309>: DATABASE ENTRY DATE: 2001-12-06
acactacccagctcactgaagtagcaacgcagctcatcagtgtcaagatggctactactaagcatttggctcttgccatccttgtcctccttagcattggtatgaccaccagtgcaagaaccctcctaggttatggccccggaggaggaggtggaggtggtggtggtggtgaaggaggcggtggtggttacggtggatcgggctatggttctggttctgggtatggtgagggaggtggtagtggaggtgctgccggtggcgggtatgggcgtggtggaggcggcggcggcggtggtggtgagggtggtggctccggctctggctatgggtctgggcaaggctctggctatggtgcaggtgttggtggtgctggcgggtatggtagtggtggcggaggtggtggtggccaaggtggtggtgctggcggctacgggcaagggtctggctatggttccggctatgggtcgggtgctggtggtgctcatggtggtggttatggaagtggtggcggtggcggtggcggtggaggccatggccgactccggcgactcgtccccgcactccgccgcggccaccgacgacgcgcaccacgagggctcggaggcggcggcggcgcaggcggcgcccccgccaccggcgccgccggcgaaggtgcggttgatggtgagctacggggggcgcatccagccgcggccgcacgaccaccagctctcgtacgtcaacggcgagacgaagatcctgtcgctcgagaggcccctccgcttcgccgacttcgccgcgcggttggccggcctcgcgggttctccgggggacttctgcgtcaagtaccagctccccggcgaggacctcgacgcgctcgtctccgtcaccaacgacgaggatctggagcacctcgtcctcgagtacgaccgcctccacctgctccgccccgcgccgggatctggcggcggctcgtcccgcggcggttccacgcccaggctcagggttttcctctcccccgtcttcttcatccccgcgccgccgcatggctacttcaccaccgccgctggccccggcgccacctccttccccgccgtctacgccgtcgtgcagcacaatggcaatgccaatgcgagcggcaatggcccttcccccgccgccgcgtcgaatgctcaggcctacgcgccgcaggtggcgtatgacagcaatggccacgccatctactacaccagcgtcctcccccagtatgcttcggctgtcagcggcgtgccggcggcggccaccgtgctcggcactgacccagccaagccggtggcggtgaaaccaacagtttcctgagcagcatgccagtatcttaacctcgccgccgatgggttaaaaaactaaaaaagagtttggcaattttctctgtctagtccgtcaatatgcgttaatatgtcagttggattcgttattgtctctagtatttacctataatattctttttctctctctctcttttgtttagagttttggttttggccttcatgatatgcgactagagttcttggtgtgcttagatgtacatagtctttctggacataatggatattatattagcctattggatgagttcattaacg

SEQ ID NO: 6810 - DNA, 1697 bp, Oryza sativa
  ref <308>: DATABASE ACCESSION NUMBER: AK063948
  ref <309>: DATABASE ENTRY DATE: 2001-12-06
taaataggtaggacggcgcggctgctccggtgagccgcgccacggaatcgggagctccaagtgggccatttttggtaagcagaactaagtccttgacaaaggtcatagcagggtgccggtttattatgagaagaagacaaacattattggattgatattggtgaagaatttattatccatcaaccctgatgatgaaattcctataaagagcgtaactatccgcaaaattcctcgtgtttcagaagacatgcccctctatgacatcctaaatgaatttcagaagggccacagtcacatggcagtagtcataagacaaaccaatgcaaattatgcagctgaacctcctgccaacgacggtggaactcttgaggttgcgatctcaattgatgataagcatggtgagaaggttgtgaagaatcttcctccactaagaagatggaagagctgccccaactctcagaattctaatagagggaacaggaatagaaaatggtccaaagatcaatcagatgttcttcaaatacatgaagagccattgccgacactgaatgaagatgaagaagctgtcggtatcataactatggaggatgtcatagaagagctgctccaggaggagatatacgatgagacagacgtacatgttgaagaacaatgacacatgccgcagtcacttcccattttgaaccagaaaatcggtgccatacctttcttttggctgaggggaagtgccgggtgcaaatatgtgtttatattagtacgtaatactgtacttcagcgtagatagaaacgggggttgaattggttcatttgaacagctggtacgaatagtagtgcagtagtagagagggacaaagggttgtgtgattttgcttggtcctgggacagtaggattgcgtagttatgaaactgtactggttatcccgggattttgacgcggtaatagtgccgctctgagtcaatggtgctccttcggaaggcttcgctttcttgtgatgttggcctcactcgaagcgtctgcacagtaacaataaaaagcatgacagccttatatatttctcgaaatctgggaaaaatctcactcatatgatgggaacgagcgtcttcaatgagtgagccacatgcgagaaatcgctcccgagtcccggctccatgagcactactcgtccggtcagaacaacatcaaatcgcttatatacaaacctgccgagatttgcggctcctggagatttttgagctggcgtggctacctgcgcgagccgacgcgtcatcggcgctgggtctggtgggatagatttgcggctcctggagatttttgagctggcgtggctacctgcgcgagccgacgcctcatcggcgctgggtctggtgggatttaataccctttgttttcctctgaaaaggaggaagaatgccgtgataatagcgcgtagccggcaggagatacaaatccagaagagcattcttcgtcatccttcatcctggttgttgtctgccattgttgtggtctaagcgtatgatcaaatcattctaaatagctatcttgttttaaatcaagatgtgatatgtcattctaaatacttctatccattcacaagagtaatacctatttcatattttagttttttaaaacaagttgtttttatttgtagtctttttacaccaagattcaaatgaagaggtaaattaaatgtttgatc

SEQ ID NO: 6811 - DNA, 1619 bp, Oryza sativa
  ref <308>: DATABASE ACCESSION NUMBER: AK063949
  ref <309>: DATABASE ENTRY DATE: 2001-12-06
atgttcgtcccaagcagagagaattaaaacattggagctgcagcttgcatcagctaacgaaaagttaaagagatctgatttgactactatggagacgatgactgagtatgagaagcaaaaaagaatgttggaggatctgcaattacgactcgaagaagctgagcaacaaattttggacggagagaatttgcggaaaagactccataatacaatactcgagcttaagggaaacattcgagtattctgtagggtgcgacctttattgccaaatgaatcaggagctgttgcttatccaaagagtggagaaaacttaggtcgtggcattgagttgacacataatgctcaaatgtattctttcacatttgacaaagtatttgagcagtcggcatcacaagaagatgtgttcattgagatttcccaactcatccaaagcgcccttgatggctacaaggtgtgcatatttgcatatggccaaactggctcgggtaaaacatacacaatgatgggaaatccagaattgcatgaccagaaaggattaattccgagatcacttgaacaaattttccaaacaagccaggctcttatttcacagggatggaaatataagatgcaggcatctatgctggaaatctacaatgaagccatacgtgatctgctagccactaatcgcacaactgttcaagatggtggcgcttcaaagtacagtatcaagcatgatgccaatggtaatacccatgtatcagatctcacaattgtcgatgtatcgagtatcaatgaagtttcttctctcctcaagcgggctgctcagagcagatctgttggaagaacacagatgaacgaagaatcatctagaagtcattgtgtgttcacgcttcgaatttttggtgtcaatgagggaacagaccagcaggtgcaaggagtgctcaatctaatcgatcttgccggcagtgagcggcttaacaagagcggtgccaccggagataggctaaaggagacacaggctattaataagagcctctcatgcttgagcgatgtaatcttctccattgcaaagaaagaggagcacgttccgttcaggaactcaaaattaacgtacttgctacagccatgccttggaggagactcgaagacacttatgtttgtgaatctgtctccagaggtgtcgtctacaggggagtcaatttgctcgctacggttcgcagcacgggtgaactcgtgcgagattggcatccctcgtcgtcaaacccaagtgcgtagcttggcgcaaggatgagttggcttggacaaaatgaatgtccatgactaattgtatttgtgtgttgtttgagggatgcaatggatcatttgcatcccctccgtgtgttggttgcttagagggtgtgtataatattctgatttggcatgtggctttgttgattgtacgagcatcgcattgcattacattacagatagtactgtagtatctaatttgtggctgcatcaatgtgcagtggtagtaacaagatgtgaggttggttgtattttattggagaagtgccctgtgttgtgttgggctggctttgtttggatgataaagacagacaagtaattggaattgaaatgctctgttgctttttagt

SEQ ID NO: 6812 - DNA, 1962 bp, Oryza sativa
  ref <308>: DATABASE ACCESSION NUMBER: AK063950
  ref <309>: DATABASE ENTRY DATE: 2001-12-06
acgcttttgcgcccacgaccccccgcgactcccccgctaattacacaactcgccaccaccgtaacgggcaacgcccagaagcgtccgcctccccctccctccgagggcgagatcggaacaaggcccccacccaaccaccgccgccgccgccaccggcgatcgccggcgacccccgggccacgggaggcgccccgccctcctcgccattggagaggaccttctctcctgctcggattcgtttgctctggtggtggtggtggggctttgctggcgcgaggccgcgcctgccatgccggagaccgggccctacggccacaagaagaccgacggcatctgcgacggcgtgtgcggcgagcctgcgtcaaaggcagttctgaccatgtcgaggctgagatgtgcacttcggggatttgatttcagagcactattggccctattgataggagtgccaattctaattttaatgatatatgctcatggtcagaaggtcacatacttcctcaggccaatatgggagtctcctcccaagcccttcaaaactatccctcattactaccatgagaatgtcaccatggcgaaactctgcaagttgcatgggtggaaagtccgggagaccccacgacgtgtcttcgatgctgtactattcagcaatgagctcgatattcttgaaatacgttggaatgaactaagcccctatgtctcagagtttgtgctgcttgagtcgaactcaaccttcactggattgaaaaagcccctgcacttcaaggaaaatcgtcatcgatttggatttgctgaatcacggctgacatatggtatgattgggggaaggttcgtgaagggagaaaacccatttgttgaggagtcatatcagagggttgccctggaccagcttattaagattgcaaaaatagaagatgatgacctgttgatcatgtcagatgttgatgaaatcccaagtggccacacaattgatctcctgagatggtgcgacgacattcctgagatccttcatcttcagcttaggaattacctctactcatttgaatttttcctggatgacaaaagttggagggcatcgatacacaggtacaggtctgggaagacaagatatgcacacttccggcagacagatgagcttcttgctgattcagggtggcactgcagtttttgctttcgctacattagtgattttgccttcaaaatgcaagcttacagccatgtcgatcggattagatttaagtacttcctgaaccctgaaaggattcaagatgttatatgcagaggggcggatctttttgacatgcttcctgaagagtacacgttccaagagatcattgccaagttggggccgattccaagcacattttctgctgttcatcttcctagctatctgctacagaatgttgatcggtacagataccttctcccagggtactgcaggagagaaagtgggtagattttgatgatctacactcttcaatctgatgtgcaggcctgtcactgccatgttctccacctccgagattggctggccgtgacggttgcatctgatatgattggctaacttagctggatgattgcttgggatgagtggctatggatgatttcatcatccttcactgtgcaatctaacaccggacgaccctacaggctacagcatagtgtatgctcggtcgtggcatggttaccttcccagaggagctcattaccctgtggtagccaccacaagttcacctgtcattcatattacttccctgattgatacataaactgagaactgctgtagattgcaaaatcaagtgagatttcagatttatatgctgtagaactagcattaccctgcagataatccacacatgcttttattctctctttctttttcgcgttggtgttctgttcctttctttgatggctgcatccaatttctggttgaccaaaaactctggcttccgttgctccgtc

SEQ ID NO: 6813 - DNA, 2412 bp, Oryza sativa
  ref <308>: DATABASE ACCESSION NUMBER: AK063951
  ref <309>: DATABASE ENTRY DATE: 2001-12-06
atcctgcagactcgccccactctcttgctcagctcctcttcatccagtcctcaaaactctctctgatctctctctcttgctgaaaattctccgcacactccggtgggcttaagcggtggcggcgtctcgcctgggtgggcgagatccctctcttgctcgtccgcaaggtcgctccccctgcgagtccaatctactgacgagctgggaggagcaaaggagggggcaattggagctccgctcggttccaattcagccccaattttgagccccccggctgcggggttcggccagttgagacgccatgtatcgggtgaagagcgagagcgactgcgatatgatccatcaggagcagatggactcgccggtggccgacgacggcagcagcggggggtcgccgcaccgcggcggcgggcccccgctgaagaaggggccatggacgtcggcggaggacgccatcctggtggactacgtgaagaagcacggcgaggggaactggaacgcggtgcagaagaacaccgggctgttccggtgcggcaagagctgccgcctccggtgggcgaaccacctgaggcccaacctcaagaagggggccttcaccgccgaggaggagaggctcatcatccagctccactccaagatggggaacaagtgggctcggatggccgctcatttgccagggcgcactgataatgaaataaagaattactggaatactcgaataaagagatgccagcgagctggcctacccatctatcctaccagcgtatgcaatcaatcctcaaatgaagatcagcagtgctccagtgattttgactgtggcgagaatttgtcaaacgatcttctgaatgcaaatggtctttacctaccagattttacctgtgacaatttcattgctaattcagaggctttaccttatgcaccacatctttcagccgtttctataagcaatctccttggccagagctttgcatcaaaaagctgtagcttcatggatcaggtaaaccagacagggatgctaaaacagtctgatggtgtgcttcctggattgagcgataccatcaacggtgtgatttcctcggtggatcaattctcaaatgactctgagaagctcaagcaggctgtgggttttgactatctccatgaagccaactctaccagcaagattattgcacctttcgggggtgcacttaatggcagccatgcctttttaaatggcaatttctctgcttctaggcccacaagtggtcctttgaagatggagctcccttcactccaagatactgaatctgatccaaacagctggctcaagtacactgtagctcctgcgttgcagcctactgagttagttgatccctacctgcagtctccagcagcaaccccttcagtgaaatcagagtgcgcgtcgccaaggaatagtggccttttggaagagttgattcatgaagctcagaccctaagatccgggaagaaccaacagacatctgtgataagttctagttcttctgtcggtacgccatgtaatactacggttcttagcccagagtttgatatgtgtcaggaatactgggaagaacaacatcctggtccattcctcaatgactgtgctcctttcagtggcaattcattcactgaatccacccctcctgttagcgctgcatcgcctgacatctttcagctctccaaagtttccccaggttggactctgaaattcctcatccctctttgatgtgattattcggttatttatgatgtactgttttgcagcacaaagcacttcaatgggatctggagagcaagtaatggggcctaaatatgaacctggggacacttcacctcatcctgaaaacttcaggccagatgcattgttttctgggaatacagctgatccatcagttttcaacaatgccatagcaatgcttctgggcaatgacttgagtatcgattgcagacctgttcttggcgacggtatcatgttcaattcttcctcgtggagcaacatgccacacgcctgtgaaatgtcagaattcaaatgaattctgtatttggtatttgccagacgctacagcagattcttggtatcgttcttgctcattgtttggatcataacttgaggaagatctcgtcggttgtaattctgcattgctgacagagtccttgatggcatgcaggcactatcagatgttctcttatgcgactagcccttttgtccaataaagtagtgcatggagataagccggttaattattgttttcttttttgtattagagaaccctttttgtcatctctattgcccgaattctgttggaaattcgtcatgtttgtttgaacaatgtaagaccaattattgcatttgtggtgtactatcttgttgagcatttaccacttgccaatcaatagcaatttgttactact

SEQ ID NO: 6814 - DNA, 1526 bp, Oryza sativa
  ref <308>: DATABASE ACCESSION NUMBER: AK063952
  ref <309>: DATABASE ENTRY DATE: 2001-12-06
gtgcgtctctctctgtctcactctctgtgtgagtgcgagacagtgagacactgcagcctttctcctctccccttcttcttcctcctcttctagctatggctttcttggtggagaggtgcggggagatggtggtgtcgatggagatggggccgcacggcggcggcggcgcggcggcggggaagccggtgccggcgccgttcctgacgaagacgtaccagctggtggacgacccctgcaccgaccacatcgtgtcgtggggcgaggacgacaccaccttcgtcgtgtggcggccgccggagttcgcccgcgacctcctccccaactacttcaagcacaacaacttctccagcttcgtcaggcagctcaacacctatggtttcaggaagatagtagctgacaggtgggagttcgccaacgagttcttcaggaagggagccaagcacctcctcgccgagattcaccggcggaagtcgtcgcagccgccgccgccgccgatgccgcaccaaccctaccaccaccaccaccacctcaatcccttctcgctgccgccgccgccgccggcgtaccaccaccaccatctaatccaagaagagcccgccacgacggcgcactgtactgtcgccggagacggcggcgaaggcggggacttcctggcggcgctgtcggaggacaaccggcagctgcggcggcgcaactcgctgctgctgtcggagctggcgcacatgaagaagctctacaacgacatcatctacttcctccagaaccacgtcgcgccggtcaccaccaccaccaccaccccctcgtcgacggccatggcggcggcgcaacaccaccttccagccgccgcctcctgcaggctgatggagctcgactcccccgatcactcgccgccgccgccgccgcccaagactccagcaaccgacggcggcgacacggtgaagctgttcggcgtgtcgctgcacggcaggaagaagcgggcgcaccgggacgacgacgacggcgtccatgaccagggaagcgaggtgtgagcgagctttgcagccgccatgcttgctcgatctcgtgtacatatagagaagagaggatgatgatgagctagctcgatcgatcagctcagctcatgctgctgcttgatttcttgaggaggatgacgacgacgacgacgattgatttgcgcaagggtgcaggtgttaattagtttgttaattagtctttgagatgagatgacaagagttgattagcgttaaggtaggagtagctagctaggaggtaattaggatcaatcaaatcaattagtagctagctgctactgctagtgcttaattgcacttaggtagctcttgttttgttcttgcttattttgatcttgccatgcatcatgcatgccatgcatcatgtgagagagtactgatcacctttcatgctggtgaagagtgatgatcagatgaggaactagcttaattagctagctaagtggatgttaaatggtactaatgaagtccaaggcatctaagtttttgcacctt

SEQ ID NO: 6815 - DNA, 2157 bp, Oryza sativa
  ref <308>: DATABASE ACCESSION NUMBER: AK063953
  ref <309>: DATABASE ENTRY DATE: 2001-12-06
gacgatcaggagcgagcattgaagcatacgtatatccatctccagaaactcgatcaagcatactagctgagacagatcgagtcacctagctatttgagcaaatgggagctgtcaatggtgtttgctacggtgttcttggcgacaacctcccgccgcggagcgaggtcgtgcagctgctcaagtcccaaggcatcggcgcgatgcgcatctactacccggacaaggaggccctcgacgcgctccgcggcagcggcatcgccatcatcgtcgacgtcggcgacagcggcgcggtggccaacctcgccagcaacccctccgccgccggcgactgggtccgggacaacgtcgaggcctactggccgagcgtcatcatccgctacatcaccgtcggcaacgagctccccgccggcgacatgggcctcatcctcccggccatgcagaacgtgcacaaggccctcgtgtccgccggcctctcgagcagcatcaaggtgtcgacggcgatcaagatggacgtggtcgccaacacgttccctccgtcgcacggcgtgttccgccccgacgtgcagcagttcatggctcccatcgcgcggttcctcgccaacaccgtgtcgccgctgctcgtcaacgtgtacccctacgtctcctacagggagaacccgcgcgacatcagcctcaactacgccacgttccagccgggcaccacggtgagggacagcgacagcggcctcacctacaccaacctcttcaacgccatggtggacgccgtgtacgccgcgctggagaaggccggcacgcccaacgtccgcatcgccgtgtcggagaccgggtggccgtcggcgggagggttcgcggcgacggcagagaacgcgatgaaccacaaccagggcgtgatcgacaacgtcaagaacgggacgccgaagcggcccgggccactggagacgtacgtgttcgccatgttcaacgagaaccagcagactggcgatgagaccaggaggcatttcggcctcttcaaccctgacaagacgccggcctacccgattacaccttatcctcgtccagccgtgcaatccatcggcgtgtgctacggcatggtgggcaacgatctcccgtcacgtagcgaggtggtgcagatgtacgtgtccctgggcatcaatcggatgcgcatctacaatcccgacagggaggcgctggacgccctgcgcaactccggcatcgacctcatcctcgacgctggcggcttcgacacggtgtcctatctcgccgccagctcctccaacgcggcgtcatgggtccacgacaatatcagcccctactacccggccgtcaacatcaagtacatcgccgtcggcaacgaggtggtaggcggcaccacggagagcatcctcccggccatgcgcaacgtcaactccgcccttgccgcggccggcatcggcggcatcaaggtttccaccgcggtgaaatccgacgtgatcgccaactcttaccctccctccgccggcgtgttcgcgtatccctacatgaatggcatagctcagtacctggcgagcactggcgcgccgctgctggccaacgtctacccctacttcgcctacgccggcaacccgcgcgagatcagcctcaactacgccacgttccagccgggcacgacggtgagggacgacggcaacgggctcacctacaccaacctgttcgacgccatggtggactgcatctacgccgcgctggagaaggccgacgccgggaacgtgagggtggtggtgtcggagagcgggtggccgtcggcggaagggatcggggcgagcatggacaacgcgagggcgtacaaccaggggctgatcgaccatgtcgggcgtggcacgcccaagaggcccggacagatggaggcgtacatatttgccatgttcaacgagaaccagaagacaggggctgccaccgagaggcattttggcctcttctaccctaacaagtcgccggtctatcagattgccttttcgaattagcagctgccaatataaatgagttacagccttacaggtgatcgatcgagtaatgcttcattaaatgttgggcgtattttaatgttctcagtatgttactttatgttttataataaaagctacatgaatataaacttttcaaggtttcttatcgattgac

SEQ ID NO: 6816 - DNA, 2212 bp, Oryza sativa
  ref <308>: DATABASE ACCESSION NUMBER: AK063954
  ref <309>: DATABASE ENTRY DATE: 2001-12-06
acgtcactccaccaatccacttcatcggaatcatccatcacttccgctccctccgccggcttccccttcgccggaggagaggacgaaggaagggatggctcctccgggccaactgctccccttggcccgctcgctcctgcccctttccgctcctcccttcgtctccggccgccgccgccgcctccctactctggtcctcggcagggcgctacctccgcctacatggctgccgcacggccgcctctcgccggcgcatccacttccctttgcgcctccccggcgtctgtccaggccgcctcctcccgctacgtcgcttcctggggcttcgcccggcggcggagccgaggcccaggcggtgttggcggagttcgtgacgtccgagagggtgaaggtggcggcgatgctggggctggctctcgcgctctgcaacgccgaccgcgtcgtcatgtccgtcgccatcgtgccgctgtcgcaggcgtacggatggaccccgtccttcgccggcgtcgtgcagtcatccttcctttggggttatctggtgtcaccaataattggtggagcactggtcgactactatggcggaaagcgagttatggcttatggcgtggctctatggtccttggctacattcctctccccttgggcagctgctcgctctctctggttgttcctctcaactagagttctgctgggtatggcagaaggggtggcactcccaagtatgaacaacatggtgttgaggtggtttcctcgcacagagcgatcaagtgctgtcgggattgcaatggctggttttcagcttggcaataccattggtttacttctttcccctatcatcatgtcacgagctggaatttttggaccatttgtgatatttggattatttggatttctatgggtgttggtgtggatatctgctatatcagggactccaggtgaaaatgcacaaatatcagcacatgaactagattatataaccaggggtcagaaattggtaaaaactcaatctggaggtgaaagattacgaaaggtccctcctttcagcaagctactctctaaatggccaacatgggctttaatttctgcaaatgctatgcatagttggggttattttgtcattctttcatggatgccagtgtatttcaaaacaatatatcatgttaatctgagagaagctgcatggtttagtgcactcccctgggtcatgatggcagttttaggctatgttgctggtgttgtatcagacaggcttatccaaaatggtacaagcatcactttgactcggaagataatgcagacaattggctttgtgggtcctggtgtggctcttcttggactaaatgcagcaaagagtccagtcatcgcttctgcttggcttactatcgctgtaggtttgaagtcctttggtcactcaggttttctagtaaatcttcaggagattgctccacaatatgctggagtgctacatggaatgtcaaatacagctggaacatttgctgccattttaggaactgttggagcaggtttctttgtcgatcggatgggttctttccgtggatttttaatattaacatctcttctatacttcagtagcacactgttctgggatatatttgctactggagagcgtgttgattttgatggcactggctagcgcctaagagaaaatctacagttgctatcctagaatatgatgattggttggagaattatgtgccatcatcttctggtatgctattggaaagctccatgcacacaagcaaacagagttatgacgtctaccgattatggcattgtgcttccatttagtaggggtagcagtgaagaaaaaatggaaccagctactgtgatcattcgaattttcgtactatggagactggagagtccaaaatgtgagtcaaggatagctgaagcagttacacagaactaatgactggagagtccaaaatgtgagtcaaggataggtgtggtaatattagttgtagagatctgaaaatgattggcacttgacaagaattaagcttggaatcaagcacggtttgatgagggttgtcaagtttttaaatggaaagtagatggaatacgttttagtcctttatagttttatagttaatagaaaatatgactcaacagtcatagcctcatagggcaccttcgactttgtaaatgccacaacatgtggatggctttaaagatccaacgaattgcaagg

SEQ ID NO: 6817 - DNA, 957 bp, Oryza sativa
  ref <308>: DATABASE ACCESSION NUMBER: AK063955
  ref <309>: DATABASE ENTRY DATE: 2001-12-06
caaatgcaataaagtcggggatcctggagtctgtaaatttgctgaggtctcttcatcgtcattggtatcattaaaactgttggattgcaacaaagtgggtgataagtccatacatgcactagctaagttctgccataacctggagacactcgtcattggtggatgtcgtgatgttactgatgcgtccatagaagcactggcttttgcctgctatagcagactaaagtgcttaagaatggattggtgcttgaagataacagactcctcactgagaagtctattgtctaactgtaaacttcttgtggctattgatgtggggtgctgtgaccaaattacagatgcagcatttcaggatatggatgcaaatggatttcaatctgcactgagacttctgaagatcagcagctgtgttaggatcacagttgcaggagtcaggaatgtgatcgaatcctgtatggcccttgagcacctagatgttcggtcatgccctcaggtcacaaggcagagctgtgagcaagctgggctgcaatttcctggtagctgcaaggtaaactttgaaggcagcttatctgagtctgatccatctgttgctatattcttttaggacgatcaatagcgtcccataattcttttctagatttcgccgaagaacttgagaactcatcatgtcaaaatgtacctgatattgtggttggttttgggcgtgtgttgcacaatttgaggtagaactggatgatgccgtggatgaaaaaatgtgcaggtgtgcactgttcaattctcatgtgctgtacctgtagtcctgtactatgtagaaagtagcacactacagattcttggaatctgttggttagtacttagtagttagcttttgagaatatagagaaactggcttctagttcatgattctacaactacattttcttagaatttaggcgacaatctggatttctttgggtg

SEQ ID NO: 6818 - DNA, 1804 bp, Oryza sativa
  ref <308>: DATABASE ACCESSION NUMBER: AK063956
  ref <309>: DATABASE ENTRY DATE: 2001-12-06
agctgccccagaaaatttaccaggagattgcaggagactagagagcgccactcccaatggggagtaggagcagaggagggagacacctcctcctcctcctcctgcttcacctcctctccctccattcctctctgctaccatgggcggcggtgtcggcggcgggagggggtggttccggagacccgtacgtcggcgtgacgatcgggacggcggtgacgaacctgctgtcgccgtcggacctccccgagttcctccgcgcgcagcgcatcacccacgtgcgcctctacgacgccgacccgcgcatgctgtcggcgctagcgtcgtcgggcgcccgcgccatcgtcggcgtccccaacgacgagctcctcgcgctgggctcctccccggccaccgcctccgcctgggtcgcccgccgcgtgctcccctacgccggcgccaactccagcaccccggggctcatcgccgccatcgccgtcggcgacgaggtccccaccgcgctcccctccgcgctccccgtgctcctcccggccatccagtccctcgctgccgcgctcgccgccgccaacctctcctccatcccggtctccacaccgctccccttctccgtcgtcctcgacccgttcccaccctcccaggccttcttcaaccagtcgctggccaagtcgttcattctcccgctcctctcccacctcgccaacacctcggcgccgctcatgctcaacctctacccgtactactccatgatgcagagcaacggcgtgatcccgctcgacaacgcgctgttcaagccgctcccgccgtcgctggagatggtcgaccccaacacgctgctccactacaccaacgtgttcgacgcgatgctcgacgcggtgcacgtcgccgtgaagaacctcaacgcgaccggcggcggcgggccggtgccggtgctggtcacggagaccgggtggccgtcgtacggggaccgcagggcggagccgtacgccacgcgggacaacgccgacgcctacaactccaacctcatcaagcacgtcaacgacaagcccggcacgccgatgcgccccggcgcgcaggccagcgtctacatctacgagctcttcaacgaggacctccgcccgggcccggtctcggaggcgaactggggactcttccacggcaacggcacgccggtgtacctgctccacgtgtccggcgccggcggcttcctggccaacgacacgacggaccggacgttctgcatcgcgtccgacgacgccgacgagaaggcggtgcaggcggccatggactgggcgtgcggccccgggcgcaccgactgcacggcgatccagccagggcaaggctgctacgagcccaacgatgtgcggagccacgcctccttcgcattcgacagctactaccagtcgcagggcaaggccgctggctcctgctacttccagggcgtcggcatggtcaccaccactgatcccagtcacgatagctgcatctttccaggaagcaagctgttgagcaacgtcaccaaatctgacggggcaaacacaaccactgcgcagacgagtgatgcagagggctctgcaatatggaggctaagaactggaagggagacagggttcttgttcatcctccggtggttgttgagcttgtcagtggtgcttatcacgacgaattcaaacttttggacatgacaagagcatgtagattgtaacaaaaatggaatttttgggatgacactttagaggagcaggcaggggctgtatgtttagtgattctttattgttagataagcgtcaataaatcattcttcttttct

SEQ ID NO: 6819 - DNA, 1471 bp, Oryza sativa
  ref <308>: DATABASE ACCESSION NUMBER: AK063957
  ref <309>: DATABASE ENTRY DATE: 2001-12-06
tttgcacaaacaaggcagatcgagctagctcatccctgcagcttagcttagctagctaacctttaccttgccatggattgatcgatcattaattcttcttcttcttgctcgatcgtcgccatgagagccagctccttctcctccttgatgctgccttgctcgcatggccatggcggcggcagggccaccgcctcgacgtgcgccgcggcggcggcggcgtgccttgcgcttgtggccttggtgatcttggtggtttcaatggatccgagggcacaagcttcttcttggttcttcctttcttcttcttcttcgtcttcgtcttcgtcttcgtctaccttggttcgtcctgcagctagctctcacgctgcctccttgcgtaagccgagttcttggggcggcggcaatggcggcggcggcggcggcgagcacctcctggtcacctctagtagctttggtagtggtggtggcgctcgtggaagctggagccggaacagcacgagcaaggaggtgctgtttcagggaggaggcggcggcggcggtgatgagatgacgtcgacggcggcggcgccaacgccggcgttgatcatcggttctagctccggcgatggcgtgtcgccgtctcgcgtggccgtcacggcggcggcagctgaacctacaccggcactggctccggctcctgctccggaatggggtgttggtgatgctgctagtggagatgatattattcaagtaatgccgcaagcgcaaaggcgaagggatgtgaaattggagctattagaactcggtcttgctaaagctcgggcgacgataagggaggccatctacctggagtgtgtccccgtggtgatcggcgacgactacacgctaccgttcgctgacgtgctcaactgggcggcgttctcggtgcgcgtggcggtgggcgacatcccgcggctgaaggagatcctcgccgccgtgtcgccgcggcagtacatacggatgcagcggcgggtacgcgccgtgcgccgccacttcatggtgagcgacggcgcgccgcggcggttcgacgtgttccacatgatcctccactccatctggctcaggaggctcaacgtcagggtcattgcacgggaggactgaaccaaatattctgtgatcggtcggttgcttgcttctagtttctctcaacttgtgtgagagctcgttcgaatgtttgatgtgtgtatattttggttaaactctgaaattgcatttttgtaaagaggatgttcatggagcgacgttgtgcagtttgtgcaccgtgtacaaatgttttaaagaaagtgccactgtgccaggaattatctatgctggtgaattcgggcagtaacccactgggagtaactctctgcacaaagcaccaaatggggttccgttggattctatggaaagtagaaacaatgagcttttcaactgtatgtaatatgcgaatttgctatatatacgtctgctt

SEQ ID NO: 6820 - DNA, 1737 bp, Oryza sativa
  ref <308>: DATABASE ACCESSION NUMBER: AK063958
  ref <309>: DATABASE ENTRY DATE: 2001-12-06
tgtgaagggttcgagttggagcacgcctgtcgggacccgaaagatggtgaactatgcctgagcggggcgaagccagaggaaactctggtggaggctcgaagcgatactgacgtgcaaatcgttcgtctgacttgggtataggggcgaaagactaatcgaaccatctagtagctggttccctccgaagtttccctcaggatagctggagcccattacgagttctatcgggtaaagccaatgattagaggcatcgggggcgcaacgccctcgacctattctcaaactttaaataggtaggacggcgcggctgctccggtgagccgcgccacggaatcgggagctccaagtgggccatttttggtaagcagaactggcgatgcgggatgaaccggaagcctggttacggtgccgaactgcgcgctaacctagaacccacaaagggtgttggtcgattaagacagcaccatagcaatgttgggcggcgacgggagaacgaagacggtgtgcgtgaccggcgccgggggcttcgtggcgtcgtggctcgtcaagctcctcctctcccgcggctgctacaccgtccatggcaccgtccgtgatccaggcgacgccaagaacgcccacctgatgtctctggacggcgccgcggagaggctgcggctgttcaaggccgacctgctcgactacggcagcgtggcggcggccatcgccggctgcgacgacgtcttccatgtggcctgccccgtgctcctctccgcccccaacccagaggttgatatacttgctcctgctgtaacgggcacgacgaatgtgctgaaggcttgttcagaagctaaggttgggagggttgtggtggtgtcatctgtctctgctgcgatggtgaatcctaactggtctgagggcaaggccatagatgaagattgctggtctgatgtcgattactgcagagccactaagaattggtatacccttgggaaaacacttgcggagattgaggcctttgattatgcgaagagaagtggattggatcttgtgacactctgcccatcgttggtgattggacctttgctgcaaccaactgtgaatgcgagcagtacagtcatacttggatgtctgaaaggtgattgtgaggtaaaaatcaaactgaggaactttgtggatgtcagggatgttgccgatgctcttcttttactgtatgaaaccccaggggtctccggacgatacatctgcagttcacacgcaagaaggatgcctcatatcattgacttactaaagagctggtatcccggttacaaatttgccgacaagtttgtggaagtgagcgatgagccgcaattcaactcggggaagctagagaagctaggatggaaaatcaagccatttgaggaaacactcagggacagtgttgaatcttatagagctgcaggtgtcctggattgagcaaatggtgtcctgtgtatataccaacacaattgaaggaattaccaacacattgatcgggttctaggcttagtttaatagatctactacataggtgtttgttttgatcgaccttaattggatctggcctctttggcaacatctgtatgtaagagctgcctatttggcagcagctgggagtagaagataaaattatcttttggtgatggatttgcgctgagaattatgccatttatgccctgaacatgagagtgacttgatgtacctgtgtgataagctttatatgaggccttacgggag

SEQ ID NO: 6821 - DNA, 1687 bp, Oryza sativa
  ref <308>: DATABASE ACCESSION NUMBER: AK063959
  ref <309>: DATABASE ENTRY DATE: 2001-12-06
aatggcgtcgccgccgcagcccgggccgtacatgccggacctgccggcggtgccggcgtggctgaacaagggcgacaccgcgtggcagctggtggcggcgacgttcgtcggcatccagtcgatgcctgggctggtggtgatctacggcagcatcgtgaagaagaagtgggccgtcaactccgccttcatggcgctgtacgcctacgcgtccacgcttatcgtgtgggtgctcgtcggcttccgcatggcgttcggcgaccggctgctcccgttctgggccaaggccgggccggcgctgacgcaggacttcctggtgcaacgcgcggtgttcccggcgacggcgcactacggcagcgacggcacgctcgagacgccgcgcaccgagccgttctacgcggaggcggcgctggtgctgttcgagttcgagttcgcggccatcacgctggtgctgctcgccgggtcgctcctggggcggatgaacatcaaggcgtggatggcgttcaccccgctctggctcctcttctcctacaccgtcggcgcgttcagcctctggggcggcggcttcctctaccagtggggcgtcatcgactactccggcggatacgtcatccacctctcctccggcgtcgccggcttcaccgccgcctactgggtgggcccgaggctgaagagcgacagggagcggttctcgccgaacaacatcctgctcatgatcgccggcggcgggctgctgtggttgggctgggccgggttcaacggcggcgcgccgtacgcccccaacgtcaccgccacggtcgccgtgctcaacaccaacgtcagcgccgcgacgagcctcctcacctggacctgcctcgacgtcatcttcttcggcaagccctccgtcatcggcgccgtgcagggtatgatgacggggctcgtctgcatcacgcccggcgccgggctggtgcacacgtggtcagcgatgctgatgggcatgttcgccggcagcgtcccgtggttcacgatgatgatcctgcacaagaaatccaccttcctcatgaaggtcgacgacaccctcgccgtcttccacacccacgccgtcgccggcatcctgggcggcgtcctcacgggcctcttcgccacgccggagctctgcgctctcgattgcccgatcccgaacatgcgcggcgtcttctacggcagcggcatcggccagctcgggaagcagctcggcggcgcgctgttcgtcaccgtctggaacctcatcgtcaccagcgccattctcctctgcatcggcctcttcatcccgctccgcatgtccgacgaccagctcatgatcggcgacgacgcggcgcacggggaggaggcctacgctctgtggggggacggtgagaagttcgacgtgacgcggccggagacgacgaggacgggaggtgcaggcggcgcgggcagggaggacaccatggagcagaggctgaccaacatgggagccaggggtgtcaccattcagttgtagaagacgggaagggtgtgcttgctcgttccagtgattctgatgatgtatggcactgatgtatgttactttcaacgtttagtgttaattcggtgatgtaatgctggtgtagtttctgttattgttaactgaattagttcatcgaaaacatgagaattatctggttaacaaaaagtttatgaggtgaacttacgt

SEQ ID NO: 6822 - DNA, 1965 bp, Oryza sativa
  ref <308>: DATABASE ACCESSION NUMBER: AK063960
  ref <309>: DATABASE ENTRY DATE: 2001-12-06
gaccgtcaggcgtcagctcgtgtcctcgcctgctcgtcctccttcctctccgctggtgctctctctctcttccctccacgactccacggacggtcagggcaagggcacggtctcgcaccgagccacgggcgcacgcatcgcgaaagcgcggccaccggcttgtgttgggtaggaggactggcaggggcaccaggcggcggagcggagctcgggggctcggacgccaatggcgcatgtggcttttgttgcgctcctcttcttgctgctcgtcgggcattgcctcggaggcaaggttggcatctgctacggccgcaacgccgatgacctgccggcgccggacaaggtggtgcagctcatccagcagcagtcgctcaagtacgtgcgcatctacgacaccaacatcgacgtcatcaaggccttcgccaacaccggcgtcgagctcatggtcggcgtccccaactccgacctcctccccttcgcgcagtaccagtccaacgtcgatacctggctcaagaacagcatcctcccctactacccggccaccatgatcacctacatcaccgtcggcgccgaggtcaccgagagccccgtcaacgtgtccgccctcgtcgtgcctgccatgcgcaatgtgcatactgccctcaagaaggccggcctgcacaagaagatcaccatctcgagcacgcactcgctcgggatactgtcccggtcgtttccgccgtccgcgggggcgttcaacagcagctacgcctacttcctgaagccgatgctggagttcctcgtggagaaccaggcaccgttcatggtggatttgtacccctactatgcgtaccagaactcaccaagcaatgtctcgctgaactacgcgctgttctcgccgcagtctcaggatgtgattgaccccaacaccggactggtttacacaaacatgttcgatgcgcagatcgattccattttctttgcactgatggctctgaactttaagactctgaagatcatggtcaccgagacagggtggccaaacaaaggggcagctaaggagaccggagcaacacctgacaatgctcagacctacaacactaatctcattcgtcatgttgttaatgacagcggcacacctgcaaaacctggggaagaaattgatgtgtacattttttcattgttcaatgagaacaggaaaccaggaattgagtctgagaggaactgggggctgttcttccctgaccaaagctctatatacagtctagattggactggcagaggcaatgtggacatcatgactggaggaaacattacaaatgcaaatggtacttggtgtgttgcttctgctaatgcgtctgagacagatctacagaatggtttaaattgggcatgtggaccaggcaatgttgattgctctgctattcaaccgagtcagccctgctaccagcctgatacattggcatcacatgcttcatatgccttcaacagctattatcagcaaaatggagctaacgatgtagcttgtgactttggcggtactggagtgcggacaactaaagatccaagttatgacacttgtgtttatatggctgccgggagtaagatgagcacaacaaattcatccaaccttccagttcaaagtgggttcagcccatcgcgattcgacaaaaacttctacctgttgttctccatgctacccattatgattgctgcatgcattgtgtgatatgttcggagagagatcttgcagaagccttttgccatggaggatggaacggtaatcgcctgatactggaaaccagtactggtttgtttgtcatagttagcggagtgttgtagtatgactatgtagtaggaaactaggaattctcttgccttgcgcggacagcatatatgagttagcattatgaactaggaacattgcagatgatgtctcttggtagttataatcctattatgctcgctggatttttcagtgccact

SEQ ID NO: 6823 - DNA, 1829 bp, Oryza sativa
  ref <308>: DATABASE ACCESSION NUMBER: AK063961
  ref <309>: DATABASE ENTRY DATE: 2001-12-06
atcgcaccacgcacacaaccaaaacccttctcttctctctcgactctcgacgacgctgcggcggcggtggcggcgaggtgggaatggacatgccgcccacgccccttccgccggagaccgccaacacctcgcccgctcccaacggcgccaccgccggaatcagggttgagaactgctacgtcttcaagagccggctgcaagagtatgcgcagaaagccggcctccagactccagagtatcataccttcaaggagggaccttcccatgagcctgtcttcaagtccacagtggtgattaataacaccagctatgactccctgcccggattcttcaacagaaaggctgcagaacagtctgctgctgaagttgccctcatggaaattgtcaagtccataccagccaacgcaaacatcccagctgttcaagagactgggctgtgcaagaatcttcttcaggagtatgcacagaagatgaattatgccattccatcttatatttgcaccaaatcagcctcaggcttagctcctttcatatgcactgtagagattggtggaatacaatatattggtgctgcagccagaacaaagaaagatgcagagataaaagctgctcgaactgctcttctggcaattcaaggtcaatcagagggttctgcaaatggtgcgacaaaatatattgtagttcctggtaaaagggtaggtaaggaggtagagaaaatgccaattgaaacccccaaaccacttaaaataaagaaaggtggtttcaagaagaaatggaacaagaggaaattcatgaagaaggatggtcaagctgttgtggaaaaggatgaagctagagtggctggagatgctcacgattctgacgtcctaatgcagccaacagtaataacacaggaggcatcttgtggcactctgttccttcaaccttgtgaggaagctaaaagagtagaagctgagccacctagagatattgaaatggtacaacctgataaggagaaccaacacagtgacgctgcattggtgcaacctgatgatgaagctagagtagaacaggagccatccagagatatttcagtggtgccacctaatgaggaagctataagtgttaagcaggaaccatccatcgatgctgcaattctgcaacctaaagaggaagcttcaagtgtaaagcaggagccattcatcgatactgcaatgctgcaagcttgtaaggaagctggaagtgtagaacttgggccagccagagatactgtaatttctcaacttaatgagcaagataggggtgtaaagcaggagccagctggtgacactgcagtgccacaacctgacgtggacgctagggtcgtaaaggaggagtcaccaagaacggaacctaatggggaagctacgaacatgaaggagacaccaaagaactctgcagtgtgtaattctccagagacaaaggaatttggagatattacagcaatgggttcagatcctcccgcaactaatatgagcgaagaataagctgtggttgttgaatcaaaatgcaatagctttagtgtgttcacctgcagagggcgaagaataagctgcggttgttgaatcaaaatgcaatagccttagtgtgttcacctgcagaggtgtgaaacatgaatggctggcttttccagtttaaaaggaggcagctggaataggaagatgtatgtgggctgagaatagttagttcatatttgtcattgttagctaggcatgtgtatgcctaatgatatgaatgaaatgtattacctgctgctttagtgagcactactttgaaaagaaggggaaaaaatgaattcgaggtttctgatc

SEQ ID NO: 6824 - DNA, 2293 bp, Oryza sativa
  ref <308>: DATABASE ACCESSION NUMBER: AK104976
  ref <309>: DATABASE ENTRY DATE: 2002-08-28
acgccaccgcgatggacacgccgcctccacctcctccgccgccgccgccgacgccgacgcagtcgtcgccgccggtgaactgggacgcgctcgacgccctcgtgctcgacttcgccagatccgaccgcctcctcctcccgccggcctccccgtcgccgccctcctccccgtcctcgtcctccaccaccaccgccacctcctcctcctcctcggcgccctcgccgtcctcctcctaccgctcgcgcctcctcatccgccgcgcccgcaccgcgctcgaggagggggacgtcgacgccgcgctcgcgctcctccgggcccacgcccccgccgcgctcctcgaccaccgcctcctcttccacctccacaagcagagattcgtggagcttgtgaggaggggcacggaggcggacagggaggcggcgctggactgcctccgcacggcactggcgccctgtgcgctggatgcctacccggaagcttatgaggagttcaagcatatactgctagtattgatatatgacaaagatgatcaatcatcccctgtagcaaatgagtggtctataaagaagcgatttgagcttgctggattgctatcatccatattgagaactcatttacaagcttatgatcctattctatcaatgacattacggtacttgataagcatccacaaactactttgctcgcgccaaggaatttcttcgcctatatctaatctgactgaaaggctgctgtttgatgaccgtgatccacctgcagttcctcaggaatgctcgctagaagcgccaccatttgatgaggtagatgtgcaagccctagcacatgctgtggagttgacaagacaaggggctgttgacagtttgaagtttgcgaaaggagatttatttcaagcgtttcagaatgaattgtgccgaatgaagctggatctgccacttctggataaacttatacacgagtactgtatatacaggggaatagttgaaggtggttcccatgtccttcctggattgcaaagcaataaccaaagtaatgatgtcaatttcgtagataaacaggaagacagtactgaaacacggattgattttgaaatgactaacaatcagaatggaaattgtagcaccagtgatacttcccatcatgattcctggtccaggagattacgtagggttagaagtagtgcatcggggcaacgaaggcggaagagatggagaggacgggtagatgatctggattatggttgtgagaccccattggatgcaaataaacatgctattttatgttctgctcttgacatggatgaagatgatatgatagttaaaccagacttgatggcagatactggtttgcctgattctagatgtaatcaagatcagaaatatgaagttattttagagatgagggatctcacacgcaaaggaatggcttcaaaagttgttgaagagataaacaacatggatcctgatttcttcttgaaaaaccctattcttctatttcagctgaaacaggttgaatttcttaagctagtagcttctggtgatcacggagctgctctcaaggttgcatccactcatctggggcctcttgctgccagtaaccaagctttactgaaacctttgaaggaaactttagtaacactaattcaaccctgtgaagatgtactcacaaagtcagtttcattacccgttcttgcaagttctctccagattgcaatgagcaggaggcttggtattgaagaacctcagttaatgaagataattagaacaacacttcacacgcacagcgaatggtttaagcttcagatgtgcaaggaccgttttgagcactttttgaagattgattctctaaaagaggttgatccatctgcggggagtcacaatatgtccaaggttcttacagatgaatgtgctaatggatcttctcaaatcacaacatgctctagtggcaaggtgctagatgaaggtagtagccctcaggagtcatcagaagttacctgtgatgaaaacgccatactcaaggtcatggaatttcttgctttgccaagggctgacgcgatccaactgcttatgcaatatggtgggaatgccgaggaagtcatccaacagatcttttcgtagtgctttgtgtaaatatcagatacgtttcatttgttttagaaatcaattatttgttcatacttttcttgtatatgaagttctattggaactaggtttctggtcccagtacctttgtccactacgttttcttccatgtaatacagaaacaaagatgaaaaaataatccggttcacacttct

SEQ ID NO: 6825 - DNA, 1320 bp, Oryza sativa
  ref <308>: DATABASE ACCESSION NUMBER: AK063962
  ref <309>: DATABASE ENTRY DATE: 2001-12-06
cttcctctcctcctctctctctcccccgctcctcgcgccgccgacatcgccggagaaaatgagtcaacaaggggagtaccacgccgacatgatggcggagttcctgcgggggagcggcggcgcggccgtgattgacggcgggctggcgacggagctggaggctaacggcgccgacctcaaggacgccctctggagcgcccggtgcctcttcacctgccccgacctcatccggaaggttcatttggactatcttgaagctggggcaagtgttctgataacaggatcatatcaggccacaattcagggcttcctttcaaagggattttctcaggaggaaagtgaatcattcctgaggaggagtgttgaactagcatgtgaagcacgggctatttacctggaaaaatgttctaacggttcggacgaagccaaagacgtaacaaaatacaggaagcgcccaatactaattgcggcatcagttggttcttatggagcatacctagcagatggctctgagtatagtggtgactacggtaatgagggcactttggagttcctcaaaaactttcatctgagaaggcttcaagtccttgctgaagctggtcctgatgttattgtttttgaaactattccaaacaaaattgagactcaggcatatgttgaactactagaggagtgtaaattacgtattccggcatggtttggtttcacttcaaaggatggagtcaatgtagtaagtggtgattccctgatagagtgtgcctctattgccgattcatgcaaggaagttgctgcagttggtattaattgcactcccccaagatttatccatgaattagttttatccatccggaaggtgacaagtaaaccaatattaatatacccaaatagtggtgagagctatgatcctataagaaaggaatgggtggaatgctcagggatttcaaatgaggattttgtttcatatgtcaaaaaatggcatgaggctggggcctcactgatagggggttgctgcagaacaagtccagatacgataagaggaatatcgaaggctctgcatggagtttagttgatggagattgagtagagttgatagccagtttttggacagagtcgctaactcactctgtttgcccgatgtgacacaggtcttattggtcaggtagtcagatttcttatggaatttgaatagctattgaggacaatgatttaggaaaaaaaaaaaactaatgctgtgttgttctttcattagcttgtaccagcacctttattgatgaggaaatgatgccaaatgttggcctagaaggagttgctactcttctt

SEQ ID NO: 6826 - DNA, 1944 bp, Oryza sativa
  ref <308>: DATABASE ACCESSION NUMBER: AK063963
  ref <309>: DATABASE ENTRY DATE: 2001-12-06
acttgctcttctcatggcgtcctcccacatcatccttccgccggacgacgacgacgaggagcagcgccggctggaggaggaggaggacgaggatccgtgggcgcggagcgggcctccccccgcggcgccggagcacgcgatgaaggcggcgctgccgttctccgcgacgtgcgtgcggatctcccgcgactcctaccccaacctccgcgccctccgcaacgcctcctccgtcagcctcgccgacgccgcctacgtgaagatctccgagggggacttcggctacgtcctcgacgacgtgccgcacctcgtcgaccacctccccgatgcccccacttatcccaatccactacaagatcatccagcctattcaactgtcaagcaatattttgttaatgaagatgacactgtaccccaaaaggtggtcgttcagaagaacagccggcggggggttcacttccgtcgtgctggacctcgtcagaaggtttattttgagtcagatgaagtgaaagcatgcattgtaacttgtggaggcctttgccctggtcttaacactgtcatcagagagctcgtctgtggtttggcgcacatgtataatgtcagcaaaatctatggtatacagaatggatacaagggcttctattctagcaattaccttactctgacgccaaagagtgtcgatgacatccacaagaggggtgggacagttcttggcacatcacgaggtggccatgatacaaaaaagattgttgacaacattcaggatcgtggaattaatcaggtctatatcattggaggagatggaacacagaagggtgcatatgagatcttcaaggaaatccgaaaacgtgggctaaaggtttctgttgctgggattcccaagacaatagataatgacatagcgatcattgacaagtcatttggttttgatacggccgtagaagaggcccagcgtgccattgattcagctcatgtggaagtttgcagtgctgagaatggaataggcttagtaaaactgatgggccgttatagtgggttcattgcaatgtatgctactcttgcaagtcgagatgtggactgctgcttaattccagagtccccattttatatggatggtgaaggtgggttgcttcaatatgtagagagaaggctgaaagagaacaagcacatggttattgttgttgctgagggagcagggcaggatcttatagccaaaagtttatctacttctgagcagcaagatgcatcaggaaataagctactgcttgatattggtctttggctgactcacaagataaaggaccacttcaagagcaaaaagatggagatgactattaaatatatagatcctacctacatgatccgagctattccaagcaatgcatcagacaatgtctactgcacgctgctggcccacagtgctattcatggtgcaatggccggctatagcttcactgttggaaatgtcaacggcagacatgcctacatacctttctatagggtgacatccacacggaacaaggtcaagatcactgataggatgtgggcgaggctgctatcatcaaccaaccagccaagcttcctaagccagaaggacatcgacgaagccaaagagaacgataggacggccaacaagccaccacttcccaccggcctcagccatcatgtggcaaactctttcgaccagtctgcatcatcttcgtcgaacagccagatatgaactccatcatgtggcaaaccctttcgaccagtctgcgtcatcgtcctcgaacagcgagatgaatccaatctgtagttctatatagaagctgttgctattcccgttgagaaacctgggccacgctacgcagttttgatttaatatgcataatatcacctgtatgaatccacggatactctcctggattgctggtaactacaagcgtaataagaaaagcgctattgatg

SEQ ID NO: 6827 - DNA, 1633 bp, Oryza sativa
  ref <308>: DATABASE ACCESSION NUMBER: AK063964
  ref <309>: DATABASE ENTRY DATE: 2001-12-06
taccagaagatgaaatcattatgctgtaatctacgtaatgaaatctttacagacattgaaattcataaccagcacatacttcccagttttgttgacgcaaaagagctatttcatttgtacattgtcttatggatcgaagacaagcgcaggacgttgctggaaaattgcaggatggataaggttaaatggtcaggagttaggactcagcatatgaccacaccttttgtggacgagatgtatgatttgctgaagaatacattgacagagtacgaggttatcatttgccgatggccagaatacatatttgttcttgagaatgctattgcggatattgagaaagcagtgatagagtctcttgaaaaacagtacggggatgttttggctccacttaaggattgtattgccccaaagaaatttggtctcaaatatgtgcagaaactcacgaagcgcaattcagttggcccctatactgtacctgaagatctgggcattctcctgaatacaatgaaaagactattagatgttttgcggccaaggattgagagtcatctgaagtcatggagttcttgtatgcctaatggaggaaactctgcagctattggggagagacttagtgaagttacggtaacactgagggccaaattccgaaactacatgcaagctgttgtggagaagctctcagaaaatactcgcatgcaaaatactacaaagctcaagaagatcattcaggattcaaaagaattggtgatggagtcagatattcgaagcaggatgcaagcgttgaaggaccaacttgttgaggcaataaatcatgtacacaaggtcactgaagtccatgtgtttgtagctatatgccgaggtttttgggaccgaatgggacaggatgtcttgagtttcctggagaatcgcaaagaaaacagagcctggtacaaaggcgcacgtgttgcagtatctgtgctggatgatacatttgcatcccagatgcagcagctgctgggtaattcgatccaacagaaggagctggaaccacctagatccatcatggaagttcggtcgatcctctgcaaagatgcaccccgacagaagaactctagcttctattactgagcatttttggtgtacataccagtcactggaagaataaggacgtgttgacatgctgcggaagatgcaaagtgaagatgtgggaatctatgtaaaggaaaaatgtgaaaaatataaagatataagtacaacaaaaaaacaaggctacagaagggtcccattgaagacttgaagtgcatgaccggagaagatggcctaccagataagtccatcaaatgatactttgctggttaaacctggttcaagtatgcttctgctgcctgtgggatggtctgcattgaaaaattggactgcactgtaggtagtgtagtttaagtgatgctttaggttagatcatcgatagcatctatctgtgctcacacaattgccaatgttagtgtttcgaggtcgatgactcgttgatagaaattattttcttctaatgtatggacgggacaattgattgttcgtgacggcttgtatagtatagtaatggtggtcgagctagtgaaaggcaaagctacatgccactatgctagagattctggcg

SEQ ID NO: 6828 - DNA, 2119 bp, Oryza sativa
  ref <308>: DATABASE ACCESSION NUMBER: AK063965
  ref <309>: DATABASE ENTRY DATE: 2001-12-06
aaaaaatactgtagcttcggaagaagaagaagaagaaaggggtttcccttccgtacaccagcagcagcatcagcagctgctcctccccgcccaaaaaaatccaatctttccccatggcggagcccggggaggatgcagcagcgtcggcgtcgtcctcaaggcctgcggcctccgcgtcacctgcatcaagatcgatccatatttaaacacagatgctggtacaatgtctccttttgagcatggtgaggtctttgtgcttgacgatggtggagaggttgacttggatttagggaattatgagcgtttcttggatgttactctgacaagggataacaacattacaactggaaagatatatcagtctgtcattgagaaggagaggaagggtgactatcttggaaagacggtccaggttgttcctcatgtaactgatgaaattaaacagtggatacagtcagtatcttctgttcctgtggatgggcagactcgtccagctgatgtttgtgtcattgaattgggaggcactgtaggtgatattgaatcaatgccattcattgaagctctgcgccagttgtcattttctcttggtaaggacaatttctgcctcatacatgtgagccttgttccggtattgggtgtagttggtgagcagaaaactaagccaacacaacacagtgtacgagaactaagggccttgggtctgactcctgatcttctagcatgccgatccgcacagccactaataggatctgtcaaggagaaactttcacaattttgtcatgtaccggttgagaatatacttaacatccatgatgttccaaacttgtggcatgttccacttattcttagaaaccaaaaggttcacgaggctataatcaaacaacttaaccttggaaggtctgctggaccccctgagttacgagattggacacagatggctgagtcatatgatgacctcaaaaactctgttaaaatcgctttggttgggaaatatactaatctgaccgattcctacttatcagtggtgaaggctcttctacatgcgagtgttgcatgttcattgaaaccttctatccagtggattgcagcttcagatcttgaagatgcaactgcaacaagtgcaccagatgcccatgctaaagcttgggaaactcttaagggttcctcttgcattttgataccaggaggattcggggatcgtggaatatctgggatgatattggctgcaaaatatgctcgtgagaataaagttccataccttggcatttgcttgggaatgcagatatcagtgattgagatgtccagaaatgttcttggcctaaaggatgcagacagtgaagagttcaactcagaaacaccatttcgtgtggttatgtacatgcctgaggtttcaaaaacgcacatgggaaatacaatgaggttgggttgccgaagaacgttctttcgcaggacagattgtcttacatcaaaactatatgggagccctgagcatgtagatgagcgtcatcgtcacagatatgaggtgaacccttctttcgttgctatgcttgaaaacgctggccttcattttgttggttgcgatgaaagtggaaagaggatggaggttgtagagctacaagaccacccattttacataggtgttcaattccatccagaatttaagtcaaggcctcggagaccttcacctccatttactggtctaatattggcagcagctgaatacatgggaacacctgcaaataactcaaatggacatgttggaacatctgagtaatgccatccttaatctatcagatggaggtcattgatccctttttggtgttttgttgaggcatctgcttgttgctgctgagatgaggattctagtcattttggtcacatacataatcatgtaccggagataacacttaaagctggaagagaatttttgttatcccagagacctgtaattgcatagctgatcatggattcatgatacagtgtgcaacggattttagcgtggtaattttgttgggtgctcagagttttaacttctgatagtaattgtatcctgttaaacccgtgctccgttcaagttaaaatgaaaacttgcattatcttacctgtttattcttctgtg

SEQ ID NO: 6829 - DNA, 3193 bp, Oryza sativa
  ref <308>: DATABASE ACCESSION NUMBER: AK063966
  ref <309>: DATABASE ENTRY DATE: 2001-12-06
aatgaacatgcatgccactcaatgcatgcagtgcagtagaggaggagtactgacactgctcagcgtccctctccctgcacatttactcgtatgcacagcacaacacacactcctctcctctcctatctccaggctcacagatgagctgtgagctgtgtgtgtgacacagtctactgctctctctgtacaaagggagagggtgagaggaaattaacagaggaaggagggagaagaaatgcgagaaatgctggcgtctctctcttcttcgtcccgtgcggccatctcctgcatcccgttgtgtctcctcttcctgaccttggcgagcagcaatggcgtgtttgccgcagcaccacccaaggttgggtccgggtacaagcttgtgtccctggtcgagcaccccgagggaggagctctcgttggatacctgcaggtgaagcagcgcacctccacctacggcccggacatccctctcctcaggctctatgtcaagcacgagaccaaggacaggatacgagtccagatcacggacgcagacaagccgaggtgggaggtcccctacaaccttctccagagggagccagccccgcccgtcaccggcgggaggatcaccggcgtgcccttcgccgccggcgagtacccgggtgaggagctcgtgttcacctacggccgcgacccgttctggttcgcggtgcaccggaagtccagccgcgaggcgctcttcaacaccagctgcggcgcgctggtgttcaaggaccagtacatcgaggcgtcgacgtcgctgcccagggacgcggcgctgtacggcctcggcgagaacacgcagccgggcggcatccggctgcgccccaacgacccgtacaccatctacaccacggacatctcggcgatcaacctcaacaccgacctctacggctcgcacccggtgtacgtggacctcaggagccgtagcggccatggcgtcgcgcacgccgtgctgctgctgaacagcaacggcatggacgtgttctacagggggacgtcgctgacgtacaaggtcatcggtggcctcctcgatttctacctcttctccgggccgacgccgttggccgtggtggatcagtacacgtccatgatcggacgaccagccccaatgccgtactgggcatttgggttccaccaatgcagatggggatacaagaacttgtcagtggtcgagggcgtcgtggagggctaccggaacgcgcaaatccccctcgacgtgatctggaacgacgacgatcacatggacgccgcgaaggatttcacccttgatcccgtgaactacccgcgtcccaagctgctggaattccttgacaagatccatgcacagggcatgaagtacattgtcctcatcgaccccggcatcgccgtgaacaacacctatggcgtgtaccagcgcggcatgcagggcgacgtcttcatcaagctggacgggaagccatacctggcgcaggtgtggcccggccccgtctacttcccggacttcctcaaccccaatggcgtctcgtggtggatcgacgaggtgaggaggtttcatgaccttgtgcccgtggatggcctctggatcgacatgaacgaggcatccaacttctgcaccgggaaatgcgagatcccgacgacgcacctgtgccctctgcccaacacgacgacgccatgggtgtgctgcttggactgcaagaacctgacgaacaccaggtgggacgagccgccgtacaagatcaacgcctccggccagacggcgcggctcggcttcaacaccatcgccaccagcgcgacgcactacaatggcatcctggagtacaatgcgcacagcctgtatggattctcgcaggccatcgcgacgcaccaggcgctgcaggggctccagggcaagcggccgttcatcctgacgcgctctacgttcgtcgggtcgggcgcctacgccgcgcactggaccggcgacaacaagggcacctgggagaatctccgctactccatctccaccatgctcaacttcggcatcttcggcatgccgatggtcggcgccgacatctgcgggttctacccgcagccgacggaggagctctgcaaccggtggatcgagctcggcgcgttctacccgttctccagggaccatgccaacttcgcgtcgccgaggcaggagctgtatgtgtgggagtccgtggccaagtcggctcggaacgcgctcggcatgcggtacaggctgctcccttacctgtacacgctcaactaccaggcgcatctcaccggcgctccggtggcgcggccggtgttcttctcgttcccggacttcacgccgtgctacgggctgagcacgcagtacctgctcggcgcgagcgtcatggtgtcgccggtgctcgagcagggcgccacctcggtgagcgccatgttcccgccggggagctggtacaacctgttcgacacgaccaaggtggtggtgtccaggggcgagggcgccgtgaagctggacgcgccgctcaacgagatcaacgtgcacgtgttccagaacacgatcctcccgatgcagcgcggcgggacgatctccaaggaggcccgcgcgacgccgttcacgctggtggtcgcgttcccgttcggcgccaccgaggcggaggccgagggcgccgtgtacgtcgacgacgacgagcggccggagatggtgctcgcggaggggcaggcgacgtacgtccgcttctacgcgacggtgcgcggcaaggcggtgacggtgaggtcggaggtggagctaggcagctacagcttgcagaaggggctcctcatcgagaagctgtccgtgctcggactggagggaacaggcagggacctcgccgtccatgtcgatggcgcgaacgccaccgccattgcaacgtcgaggccgtactttgcaggtgccgaggcggagctgcacgggcaccgcgacgtggagggacacaagaagagcgtgatggtggaggtgggagggctggcattgccgctgggcaagagcttcaccatgacttggaacatgcagatcgaagcatagatcgaagctttcttatgctttcatctgcatttctccattctgtctctctgattattttaggttctagatcagcaaggttatgtcaacgtgttcaacgacacaccaccatctctgattctcttctgcatttgaatccttgtggaaataaaacatgattct

SEQ ID NO: 6830 - DNA, 1375 bp, Oryza sativa
  ref <308>: DATABASE ACCESSION NUMBER: AK104977
  ref <309>: DATABASE ENTRY DATE: 2002-08-28
aaaccgagagagagaggcgcacacacgaagacgaggcggcgatggtgagcggcggaggagtagcggcggagaacggcgagatggtggggaacggggaggggaggaagggtgcgggggcgagcgtgctggtgacggggggagcggggtacatcgggacgcacacggtgctgcggctgctggagaaggggttcgcggtcaccgtcgtcgacaacttccacaactccgtcccggaggcgctcgaccgcgtccgcctcatcgccggcgccgccctctccgcccgcctcgacttcatcgccggggatctcaagagcaaggacgacatggagaaggtgttcgccgccaagaggtatgacgccgtgatccacttcgccgggctgaaggcggtgggggagagcgtcgcgcacccgcagatgtactacgagaacaacgtcgccggcaccatgaacctctactccgccatgaccaagtacggctgcaagaagatagtgttctcgtcgtcggcgacggtgtacggccagccggagaagaccccctgcgtcgaggattccaagctgagcgctctcaacccatacggcaccaccaagctcgtcctggagaactacttccggcaggtgcaggccgccgacccggagatgagggtgatcctgctcaggtacttcaaccccatcggcgctcaccggagcggcgacatcggggaggaccccaggggcatccccaacaaccttcttccgtacatccagcaggtcgccgtcggccgccgccccgagctcaacgtctacggcgtcgactacccaaccagggacggcaccgcgatcagggattacatacatgtagtggaccttgccgatggccacattgccgcactggagaagctcttcgctactcctgacattggttgtgtggcttacaatctaggaacagggtgtggaacaacggtgctcgaggtggtgaaggcgttcgaggaggcgtccggaaagaaaattcctatcaagatttgccccagaagacctggagattgcactgaggtttacgcttccactgacaaggccaagaaggagctcggatggagtgctcggtttggaatagaggacatgtgcagggaccagtggaattgggccaagaagaatccgtacggatacagcgccaatgctgagcagaattagggcgatcatattaccacttatatagtactagtatcaaaattgtccatggtcttatgaactgtgtgactagaaaatgttaataagacatgcgtgcctcttaagtggagtataccaattcttatttagtcgaatccgttgtgattttagatactggcaaatgttaatcaggtttatttaaatactatactagtagcaagatcaaattgaacaat

SEQ ID NO: 6831 - DNA, 1334 bp, Oryza sativa
  ref <308>: DATABASE ACCESSION NUMBER: AK063967
  ref <309>: DATABASE ENTRY DATE: 2001-12-06
acaaccccaaccattcgacccgcgcagcgagccccaaccccacatcgccgcgcgcccccgatggcgtcctcctcgtcggcggcggcgctctggacggcggcgccccacccccacggcagctgcatcaggatccacgccatcttccaccagcgtcaccagcggagggggaggaggccggtcgtcgtcgcctcgtcggtgaggccgctgcaggccgcgagcctggcggtggccacggcgccggtggccgtggcgtcgaggaggacggcggcggagaagaccttctacctaggtactcagcttatgactcctgaaaggcgcaaagctgtctgggcaatctatgtatggtgcagaagaactgatgaactggtagatggccctaactcgtcttacattacaccaaaggcacttgatcgatgggagaagagattagaagatctcttcgaaggcaggccatatgatatgtatgatgcagccctctcggacacagtgtcaaagtttccagtagatatccagccattcaaagacatgattgaaggaatgaggcttgacctgtggaaatcaaggtataggagctttgatgagctctacctctactgctactacgttgctggcacggttggtctcatgacagtaccggtgatggggattgcccccgactcgaaggcctcaaccgagagcgtgtacaacgctgcgctagctcttgggatcgccaaccagctgacgaatattctcagagacgtaggcgaagactcaaggaggggaagaatctaccttccattggatgaattggcagaggcaggtctgacagaagaagacatattcagagggaaagtgactgataaatggaggaagttcatgaagggacaaattctgcgtgccaggttattctttgatgaggcggagaagggcgttgcgcatctagactctgcgagtagatggccggttctggcatctttgtggttataccggcagatccttgatgctatcgaagcaaacgactacaacaacttcaccaagcgcgcgtatgtaaacaaggcaaagaagctgctgtctttaccggtcgcttatgcaagagcggcagttgcatcatgaacaatcactagatcagatgccttattattttttttctttcattttcttttcttttgatttcgcacgatttcttggctgttgtatatattcaagcagctacctgtatgccataagcctgccacagtttttctttagttcaagggactgatttcaggtccctcaatactcaactcttgttagaaacaaatacagagggggtaagccccacagttcaagaagcatattactcttcatttgtcttc

SEQ ID NO: 6832 - DNA, 1286 bp, Oryza sativa
  ref <308>: DATABASE ACCESSION NUMBER: AK063968
  ref <309>: DATABASE ENTRY DATE: 2001-12-06
accggccggaagctgttcccacttcccacggcagcacaagacaatgtggggcctactgaggcggcgaagcccctccgggttctcgccgtcgtccaccgcggaggaggtcaccgccgccgtcgacggttccggcctcgtcgccgtcgtaaccggtgcctccagtgggattggtgctgaaacatgccgagttctcgcgatgcggggactgcatgttgtgatgggggtaaggaactcatctgccggtgcgcgtgtgagggatgagatagtgagacagcttccggctgcaaagattgagatgctggatcttgacctcagcttgatgtcttctgtgaggagatttgcggagaattcaatgctctgaatcttcctctgaacatcctggttaataatgcagggattgcgtttgtaccatttaagctatcagaggagggcattgagctgcatttttcaacaaatcaccttgggcattttctactgaccgatcttttacttgagaagatgaaagttacagctatagaaagtgggatagaaggaagggttgtgatagttgcttctaacagctacaagcacccttatcgagaggggattcgttttgataagatcaatgatgaatctgggtataacaaaatcttcgcttacggccaatccaagcttgccaacatactgcattccaatttactatctagcaatctgaaggagcaagatgcaaaagtaacagtcaactctctgcatcctggagctgttgtcaccaacattatgcgtcactggtatttcgtaaatggtatgctatctacacttggtaaatttttcgttaaaggtgttgaacaaggtgcagccacagtgtgctatgtggcattgcatcctcaggttgctggagtcactggcaaatactttgttgactgcaatgtcactgaattaaaatctcatgcgctcgacatgggcctcgccaaaagattgtgggatttcagtctcaacctaatccattagtagaaactgttgcaagtggtgtgtaaagcctattttttggaaacgaactgaatcaagttagggcactgaagtgtgtgaagaacatgataaaagtatttctacaaaaattgcgaatggaggacatgttgttaatagatgtgaaatttatccagttgttcggtaggtgtgatatcaaactgctggaagacagcccgaaccagccacatttgtaaagcttgaataaattgattggatgtacttcttcatatgtttgtacttcttcacagcgtttgtggtaatacattgcagtgaatactggc

SEQ ID NO: 6833 - DNA, 1558 bp, Oryza sativa
  ref <308>: DATABASE ACCESSION NUMBER: AK063969
  ref <309>: DATABASE ENTRY DATE: 2001-12-06
aagattctccgcgacggcgcggccgtgcccttctcctccccggagcttcgagtcgctcagcctctcgtcggctgctcccgccgctcgccgcctgcgccgccgccagctcgcgcggtcatcaccatgaagatcgcggtggaggggtgcatgcacggggagctggacaaggtctacgacacgctgcgcgagctcgagaaggccgagggcgtcaagatcgacctcctcctctgctgcggcgacttccaggctgttaggaacgagaatgatttacagtgtcttaatgtcaaaccaaggtttcgtgaaatgaaatcattttggaagtactactcgggacaagctgttgccccatacccaacatctactttttggggttcgctggtgttgttaagtttggaaacattcgaattggtggactatcaggaatatataagcaacaacattatcacttaggacactatgagaggcccccatacaatgaaaacactataaggtcagtgtaccatgtaaggcattatgatgttctcaagttaatgcatgtgaaggagcctctagatatattcatgtcacatgattggcctctgggcattactgagtacggaaactggcagaagcttattcgggagaaaagattctttgaagaagaggtcaacaagagaacactaggcagcgaaccagcagcaagactactgaataaactaaaaccaccatactggttttcagctcatcttcattgtaagtttccagctgttatccaacatggagagggtgggcctacaactaagtttcttgcacttgataaatgtcttcctcggcggggctttctccaggtaatagacattccatccggtccaggaccacatgagatccagtatgatgaagaatggcttgcaataacacggaaattcaacaatgttttctccttaactcggatgccatttacaatgctggatgaacaggttgacactcaagatgacttgcaatgggttaggaacaagttaaatgccagaggggctaaacctattgattttgtccagactgctgcatcttatgatccttcttgtcaagcatccaatccctccataacagttcattgtaggaatccacaaactgagtcttttctgcagcttctaaatctcccgtatcttctggactcatcaaattcttatggggttagtagaaatgagtcaagctcccagacaggacaagcacttgatagtgacgacatagagctccctgacgatgaagatgatccggcggacgatgatgactgaagaactgaaagcctgaaagtacatggcattagctctgtagggaacggaacgagctagggaaactgacctgtagacagtacaatttacgctgcttacgtgtagaagaattgaatgggatgtgtagacgaatgatctttcattgtgtgtattaacttgatttgcaggctaggtgatgaatccttttttttttttttgaaccagaaaactcattattcatgatccgaggtatcttcggcaaccaaacgacgggtacaaactggaatatcaaccagtactggttcagactg

SEQ ID NO: 6834 - DNA, 1379 bp, Oryza sativa
  ref <308>: DATABASE ACCESSION NUMBER: AK063970
  ref <309>: DATABASE ENTRY DATE: 2001-12-06
acatcaaatcaggaagatcatagcacaggctcaagctctggctacgggtcgggtggagtttcctaccgctcacgtggtcatggcgggtcttctagtattgggtcaggttcgggggttggtttaggagcaacttctggtgttggtgccggttctaatgttgggccaagtggtggttgctcgacttgtggttctggttctaggtcgggatcaggtgcgggtgggggttcatattctggatcaaatagcggctcgtcatcgagttctggctctggttcaaactcaaattcaattggagggtcaggatcaagttcgggtgctggctctggctcaagtgcaagctcaggttatggtggctctagttctggttctatgtcaggatctggttcaagttcatcatccggttccacagggatgtcatatggttcatcaggtgctggctcattcagtggatcaagcagcggttcaaactctaatgccggctccatgtcaggtgcaaactcaggagccggttcaagctctagtgcatatggtgcatcaggcagtggatcaaactccatgtcggattcagggtcaagctcaggatcggttagtgcttccggaagtgggtcgtccaactctggtgcaggttcaggttccagctcttcttcatggtccggttctaattctggctctggcacaatgtcgggaattgacgctccgtcaagtacaggaacatcgtctactgctgaatcaaactctggatccgccacctctgtcaccggtgcaaactcaggctcatattcaagcgcatggtccaactccaactccaactccggctcgactatgccatctggtataggggttgcttctaatgctggctctagctcaggttcttggtctaatgctggctcaaacactggcacactctctggggctggatcctctaactggtcaagctcgacgtccgggtctacctcaagctcaggtttaggtggtgggcaaggggttggaagcagattcggttccggagcccaaccgacttttggtatgggtggaggaggtgggtttggagcgggttacggatttggagccggagccggaggttggggtaagcaccattaagataaggtgttgggcagattcttatataaaaaagaagggggtgagaattttggatccccttgctctcatggttgatttacatgttgtattgagttccctgggaataagcgatcatcagttttcagtacgctcagttcctcttgtacactagcagtagctgctctttgtttccaacaaaatgcttgaatcgttgtggtcatcgtgacgcatcagtacgtacttcttcatatgtaccggcagatgctatcttggaatgaaatcatgaaatctttgtgacc

SEQ ID NO: 6835 - DNA, 2861 bp, Oryza sativa
  ref <308>: DATABASE ACCESSION NUMBER: AK063971
  ref <309>: DATABASE ENTRY DATE: 2001-12-06
actatccctcaaactactaagggaatatgtgcagaaaaattatccatctcatttcagtactggtggtctaactagtggtaaatccagaatgagctctaaagctgttccttccctagttagcacaggtagatctgcccatactgaacgaactaggctgaatgattgggcctccaaattaatggaaattggggagaaaatgtcagtaatggtggtcaatgatggagaaagtatttcgtacagaagtgatagccaaggtagtaccgataatccattatatgatattctaacaaaactgatacacaaaacaagaccagcacataggtcaaagaaaacaaagataagttttgttgcaaaagatgttgccataaagaagctgtctgatgattctgaagtccaagtggtggaatctctgtcaattcgagatagtcaacttgaaagaaatgaagggtcatgtgccagttcagacggtggtaatgatgattacactgaagattctgttcatgaaaacagggcaacagaagctgaatatatcaatgatagacaagcacccattaaacttgagaaaggtcctgcaaattactgtgataacaatgaaaaacatcttgaatccagtgatacagaagtggaggaagaacacaaaacaaaggcctcagatgtaagccttgatctgcaggaagatatttctgttgatatgcacagtagcaatgctcctaaaaatttctgtaagatcaataaagaagatcttgactgtagtgatacaaaaatggaggaacaagaacataaaactgaggcttcagatacaagtgctgatcttcaggaagaggtctccactgatgtgcattccagcaatgaagttggtcatatattacacaaacacaaagatgaggaaacagttagagaagctttagacattttggaacccgatgggacaaatgtgaattttaaccaacagaagtcaggatcagcaaatcagcaagatgctgtgttttcagtcctgggtcaagaatctcgaagaattgaggatgccatttatgaggataacctatttattctagatgaaggatcagaagaaagtgatagcaaatatcctgtgcatgcagcattaagctcttccagtagccttgtgggcgataacacatattatacagagcaggaaactccaagtatacctgatgaacattttgcgggttcactcttcttctctgatggtggttataggcttctgcaaactttaactggtggatcgagaatgccatcccttgtaataattgacccaattcagcaaaagcattatgtctttccagatgagattgaatttacctacccttctttagcaaattttctcgaccattttatgaatcgaagtctatctccatattatcgttcagccttatctgtcataagttcgaaggagcttctgagaccaccttttattaaccgtgatttccacgaggcagattccatcccccagttgacaacaagtaatttttgtatgttggtctttggatttgaaggttgtgtttcaaaaagtgaactgccgttttcaaacactgaaaatatttcatctgcttggaagaaggatgtattggtgcttttcagcaactcttggtgcggattttgccagcgaacagagcttgttgtccgtgaggtatatcgatcattcaagaactttttgagttcaaattctcaatttttacaggctcaagacttgcagattgaagagaaagaagaagaatctaccatgaagggttttccagctatttatctaatagactgcacatcaaatgaatgccatcatttactgaaatcagttggcaaggaggagcgttatcccacattgttgttttttccggcagagaacaaaagtgcaatatcatatgaaagaggaatttcagtttctaatttatttgaattcttggagtctcatgctagcaattcaccccacctgttggaatataaaggatttctgtggaagaagaaaacggtcgtgcaaggtgatgcaccacaggcaattcagtttgataacagcgacaaaatcagcaacgatgttggttcccattcaccaagtcattcagagaggaacgaggcacgtgtcctcacaggttccgtgctcactgcaacttcgaagctcgggtctgccgttccatttgacaactcccaggtgctcatcgtatccgctgactctcgtgagggctttcatggcttgatcatcaacaagcgcttaagctgggacaccttcaagaatctggacggctccatggagccgatcaagcacgccccgcttttctacggcggacctgttgtggtgcagggctattaccttgtgagcctttccagagtagccttcgatgggtacttgcaggttatacccggtgtgtattatggaaacgtagccgccacagcccaggtcaccagacgaatcaaatcaggggagcaatctgctgagaacctgtggtttttccttgggttctcgaactgggaatacagtcaactatttgatgaactatctgaaggagcttggcaagtgagtgaagagcctatcgagcatttggtctggccagagaattaattagggcattcctcttctatttttagagaatagactagagttttgagggttcccgaattgcaagtgttccatgcacatacatgctgacactgcaatatgacgttgtactgcactcttttttttttggatcagacaagacagcattacactaacagttttgatatttctactactgaactgtactgctttctttgtggattagaaaagacaacattgcatacagttttgatatttctactactgaatccacagtatgcagtattttttcactgttactgtatacaattgtttt

SEQ ID NO: 6836 - DNA, 1754 bp, Oryza sativa
  ref <308>: DATABASE ACCESSION NUMBER: AK063972
  ref <309>: DATABASE ENTRY DATE: 2001-12-06
ctctctctctcgactctcgacgacgacgcggcggcggcggcggcgaggtgggaatggacatgccgcccacgccccttccgccggagaccgccaacacctcgcccgctcccaacggcgccaccgccggaatccgggttgagaactgctacgtcttcaagagccggctgcaagagtatgcacagaaaaccggcctccagactccagagtatcataccttcaaggagggaccttcccacgagcctgtcttcaagtccacagtggtgattaataataccagctatgactccctgcccggattcttcaacagaaaggctgcagaacagtctgctgctgaagttgccctcatggaaattgtcaagtccataccagccaacgcaaatatcccagctgttcaagagactggcctgtgcaacacaggaagtcagcaactgaacctgagggaaatgcaccaccaccttctggcaacccttgcacgccaccgccgtcttgctgccgctgccaccctcttctcctccaccctccgcactgctcgtgccctcaactccctcctcgctgctatctgctcttccccagcgttcctccgctttgcccctaaagtcctcctgctcgctgccccatcagtctcccctgatgccaccaccttccacatcctcacctccacactctgccaggcccaccgccccgctgctgccgccgacctcctttgctgcatgccctcgcttctccttgaccctgacccggccagttgtcgtgctgtcctttcctccctgtgccagtacgcttccgctcaggatgcagtagcattcttggacaagatgtgccattggggcatttccccaagcagatctgactaccacgccgtcttcgaagcgcttctgcaggagggaaaggtagtggaggcatatgaggtcatgaagaataagatgggctctaacagggtggcacctgcacttgcatacttcaaattgacaatgcaagctttcagcaagtgcttggagtttgattctgtggaggaggtgtttgatgaaatgctcctgagagggctggtgccagacgtggatgtgtacaacgtgtacattggcgcgctatgcaggaaaggtgaccttgccagagcgcgacagatgatgacctgcatggagcatgccgggtgcccaccggatgtaaggacatttggtgtggtagtcgccgggtgcatgtctgccggggacatgggcacagtgagggagttggtgcaggaggcaacaaggcgtggcctgcagtgggatccaccggcattgtcggagctgataggcttgctgcaggcaggtggcggtgccacacaggcacaggagttactgttggagccactatttgtgcacgatgcaccggtgttggggcagctgattggagcattgtgcaagcaagggctattgggacctgctactgtagtagatgattattagaaagcattgtaatggtctttttgtttcaaactttcactacagttgttggttttgaattttcaaaaatctgaagaacggtataagaattataaaaacagagacagaaaaggcaaaccatggactataactccaggaatactcggagctttcggctttgtagatcactagattgtcggctaaaggtaggacccagtgagcaagaagggagggtatttgtatagatgggccaggtaggagattgcagaaagtctttattgttgtcttctgtcatgatttatttgtattttctcaagctcacaactctactaagtt

SEQ ID NO: 6837 - DNA, 1637 bp, Oryza sativa
  ref <308>: DATABASE ACCESSION NUMBER: AK063973
  ref <309>: DATABASE ENTRY DATE: 2001-12-06
acaagtgcaaacgtgcagcagcagaggcagcaacacctcccctgttcttgctctgtttcctcactctgttggtacacaacaaaaagaagaagcttaattaggtggtttttgatctgatcacgcgccatggtggcgatcacggcgccgagctccatcgagcacatcccgctggtgaggtgccccaagggcgccaatgccgggccgcaagctgtcatcccgtgcatcgacctgtcggcaccgggcgcggcggcggcggtggccgacgcgtgccgcaccctggggttcttcaaggcgaccaaccacggcgtccccgcggggctcgccgacgcgttggagtcgagcgccatggcgttcttcgcgctcccgcaccaggagaagctcgacatgtccggccccgcccggcccctcggctacggcagcaagagcatcgggtcgaacggcgacgtggggtggctggagtacctcctcctctcggccggcgccgcctcgtccggcggcgcggcgctgccggcggcgctgagggcggcggtggaggcgtacacgggggcggtgaggggggtggggtgcagggtgatggagctgatggcggaggggctggggctgggggcgtcggaggaggggaggtgcgtgctgcggcggatggtggtggggtgcgagggcagcgacgagatgctgcgggtgaaccactacccgccgtgcctcctcccgccgggccgcgaccgggacgagtgcggcgtgacgggcttcggggagcacacggacccacagatcatctccgtgctcaggtccaactgcaccgcgggcctccagatcctcctccgcggagactactcctcccctgcccgctgggtccccgtgccccccgaccccgattccttcttcgtcaacgtcggcgactccctccaagtgttgacgaatgggaggttcaggagcgtgatctacttcggcgggccagcggcgtcgcagcggatcgcgccgctggagcaggtgatgcgggagggggagcagagcctgtacagggagttcacctggggggagtacaagaaggccgcctacaagacgcgcctcggcgacaaccgcctcggcccctacgagctgcagcacgccgctgccaacgatgaggccgcgacgaagaaataaatcgatcaacccgacgactgtgaacaactgtgaagtgttactgtactagtgtagttagctccgtggtactggtagctgtgaatatgatcgagatcgatcgatcgatcgatctatccttgtgttgtgttacttttaacccatttctggtaactaaaggccgccgttgccttggcttgcttggccagcccaaaactggcactggcgagctgcctcctcctgcatgcctctgctgtgcagtagtgcagcagtactcctctgtcctggggttttctgcagcagagcagtggagtgcagttcagtgcagcgttgtgcatgttgtgtaaaatagcttgccgcatgcatatgtgattatgtgctgctcctgtcgacgctgccgccccttttgtagcatggtttttaccggctgggcggtcggcaggtgcagtagtagctaatgatgcttactgcgccatacgagtgtacctatatgtgtgctatatgtgtgctacctccgttcc

SEQ ID NO: 6838 - DNA, 1712 bp, Oryza sativa
  ref <308>: DATABASE ACCESSION NUMBER: AK063974
  ref <309>: DATABASE ENTRY DATE: 2001-12-06
cgtgcagaataaccacttcaccgccggatctcacggcgccccaagtttaggcggttacctaaccaccccacgaatcccagccgccgccgccgacgagcaggaggagcgatctgactagtaagccggagcacatggagagctcgtcgccgtcggtgccgttcccgctgctgcaggcgccggtggagagcacgtacagggcctgcaccatcccctaccgcttcgcctccgacaacccgcgaaaggccacccccgtcgagatccagtggatcgacctcttcctcaactccgtcccctccttcaggcagcgcgcggagaacgaccccacggtgcccgatgcgcccgccaaggccgagaagtttgcccagaggtacactgcaatgctcgaggagttgaagaagaacccagagagtaatggagggccaccagattgcattcttctttgcaggcttcgtgagctagtccttagagaactgggatttagggatatattcaagaaggttaaggatgaggagaatgctaaggctatgtcactctttgagggcgttgttcagcgaaatgatgagattgaagatgatggaaaacgagcagagaacttgatccgtggaatcttagcaggaaacatatttgacttaggatctgcacagcttgcagaagtttttgctaaagacggtatgtccttcttagcgagttgccagaatcttgtatctcgaccttgggttatcgatgacctggatgcatttcaaaataaatggactaagaaatcttgggaaaaggctgttatttttgttgataattctggcgctgatatcatcttgggcatattaccatttgcaagggaattgctccgacatggcacaaaggtgattcttgctgccaatgacatgccatcaatcaatgatgtcacttacccagagcttgttgaaattataaacaagctcaaggatgaaaatggaaagcttgcaggtgtggatgcatctgacctactcgttgccaactccggtaacgatttgccagtaattgatttgtccagtgtgtcaccagaactagcttatttggcaaatgatgctgacttggtcgttctagaaggcatgggaagagcaattgaaaccaacctatatgcacaaatgaaatgtgactcgattaagatcggaatggtaaaacatcctgaagtggcgcaatttttgggtgggaggctttatgattgcgtcttcaaattcaatgaggcctaaactttgataacatcagacacacatgcggttgctttatttcgttttcaactggtgcgaggctacactgaacatatcacatgtgctcgtccctttcatattaatagcaaggaaaataagttagatcatggcatttttagggaatgcaattacggaacttttaattcgtattgcactacgtgccttttcatctaggtagcggaatagtaaaaaggaaaaaaaaatcccttctgcgattcagattaataataacagttcaactaaagtacctccgtgttttatcatgttatttaattcgaacattgtttgataccggttctgcttctgataaaagtgccattgaagatcagttgtgttctgtattatactagcctaactacttcgcagaaaaatgggtgtatagtgtagcctttacttcggatttgggaagaagatgaattttgtaacagattgcgtggttgctgccaaaagattgaagatttcatg

SEQ ID NO: 6839 - DNA, 1532 bp, Oryza sativa
  ref <308>: DATABASE ACCESSION NUMBER: AK063975
  ref <309>: DATABASE ENTRY DATE: 2001-12-06
catggtcggcgccgtcagcttcttcctcggcggcgccgtcaacgccgccgccgccaacgtcgccatgctcatcgccggccgcctcctcctcggcgtcggcatcggcttcggcaaccaggccgtccccctctacctctccgagatcgccccctacaacatccgcggcgccgtcaaccagctcttccagctcaccacctgcctcggcatcctcgtcgccgacgtcatcaactacttcaccgacaagatccacccgtgggggtggaggctgtcgctggggctcgccatgggccccgccaccgcgatcttcgtcggcgcgctgttcttgccggagacgcccaacagcctcgtcgagatggggcggctggaggaggcgaggcgggtgctggagaaggtgagggggacgaggaaggtggacgccgagttcgaggatttgagggaggcgagcgaggcggcgagggcggtgcgcggcacgttcaggagcctgctcgccgcgcgcaaccggccgcagctcatcattggggcgctcgggatcccggcgttccagcagctgtccgggatgaactccatactcttctactcgccggtcatcttccagagcctcggcttcggcaactccgccgcgctctactcctccatcatcacgggatccatgctcgtcgtcggcgcgctcgtctccatggtcgtcgtcgaccgcctcggccgcagattcctcttcatcgaggccggcatccagatgatctcctccatggtggtggtggcggtgatcctggcgctcaagttcgggcacggcgaggagctatcgaagggcgtgggcacggtgctggtggtggcgatctgcctgttcgtggtggcctacgggtggtcgtgggggccgctggggtggctggtgccgagcgagctgttcccgctggagatgaggtcggcggggcagagcgtggtggtgtgcgtcaacctgttctggacggcggcggtggcgcagtgcttcctcgccgccatgtgccacctccggtggggggtgttcatcctcttcgccgcgctcatcgtcgtcatgtccatcttcgtcatcctcctcctgccggagaccaagcaggtgcccatcgaggagatctggatgctcttcgacaagcactggtattggaagcgcatcgtcaggaaggaccccaagtatcagggccaccaccaccaccagatggccgccatgccaaccgccgccgccaagtccggctcgtcggaggtttagatgatgatgataatgaattgatgatggtttaataaggttttagtgggtggtgattaagacttgatcttgaattgttcatgtggcagtagcttttttgatcttcgattgatgcaaaagaagaggtcagagggttaatgcatgtgtgtgctcgtgtgtctatagttttagtttcatgttcttcagaattcgattcagtgtagtggtgggctgattaatggatcttgatgatgcacaaggaatgcagtgttctgaattcttgaaattattctcaatataacttgtagatttgtgt

SEQ ID NO: 6840 - DNA, 2126 bp, Oryza sativa
  ref <308>: DATABASE ACCESSION NUMBER: AK063976
  ref <309>: DATABASE ENTRY DATE: 2001-12-06
aagaagccactccactcggccgctcctgcatgtataactagctagttctagctcgctcaggcactcgatccaccgccgggcgcgttggattgagataggctgaggagatgatatccgggcacgacttctacacggtgatggcggcggtggtgccgctgtacgtggcgatgttcctggcgtacgggtcggtgcggtggtggggcatcttcacgccggaccagtgctccggcatcaaccgcttcgtcgccatcttcgccgtgccgctcctgtccttccacttcatctccaccaacgacccgtacgccatgaacctccgcttcctggcggcggacacgctgcagaagctgctcgtcctggcggggctcgccgcgtggtcgcgcctcccctcgcggaccggcgcgccgcggctggactggtccatcacgctcttctccctctccacgctgcccaacacgctcgtcatggggatcccgctgctgatcgccatgtacgggccatactccggctcgctcatggtccagatcgtcgtgctccagtgcatcatctggtacacgctgatgctcttcctcttcgagttccgcgccgcgcggatgctgatcgccgaccagttcccggacacggcggcgtccatcgtgtccctgcacgtcgacccggacgtggtgtcgctggagggcggccacgcggagacggaggccgaggtggcggcggacgggcggctgcacgtcaccgtgcgccggtcctcggtgtcgcggcggtcgctgctggtcacgccgcggccgtcgaacctgacgggagcggagatctactcgcttagctcgtcgcggaacccaaccccgcggggctccaacttcaaccacgccgacttcttcgccatggtcggcggcgggccaccgcccccgacgcccgctgcggtgcgcggctcgagcttcggcgcctccgagctctactcgctgcaatcgtcgcggggcccaaccccgaggcagtccaacttcgacgagcactcggcacggccgccgaaaccaccggcaacgaccacgggggcactcaaccacgatgccaaggagctccacatgttcgtgtggagctcgagcgcgtctcccgtctcagaagtcagcggcctgcctgtgttcagtggcggcggcggcggcgctctcgacgtcggcgccaaggaaatccacatggtcatccccgccgacctgccgcagaacaacggctcaggcaaagagcacgaggagtacggcgcagtggcattgggtggcggcggcggcggagagaacttcagctcgacggcggagctgcacccgaaggtcgtcgacgtcgacggaccgaacgccggcggcggcgccgcgggcgcggggcagtaccaaatgccgccggcgagcgtgatgacacgcctcatcctcataatggtgtggcgcaagctcatccgcaaccccaacacttactccagcctcctcggcctcgcctggtccctcgtcgccttccggtggcacgtctccatgccagcaatcgtcgagaagtccatctccattctctcggacgcaggcctggggatggccatgtttagcctgggattgttcatggcgctgcagcccagcatcatcgcgtgtggcaaatcagccgccgtcgtctccatggccgtccgcttcctcgcgggccctgccgtcatggccgccgcgtcaatcgccatcggactccgcgggacgctcctgcacgtcgccattgttcaggcggctctaccacaagggattgtgccttttgtttttgcaaaagaatacaatgtccacccggccatcctgagcacagcggtaatttttggcatgctaatagctcttccaatcacattgctgtactacatccttcttggactatgatcaagaaagcttatggacgctctcacataaaacggaagaaatgggggcaaagagagagaaaaaaaagcgatcctgtccatctcaaacagcgtatgcttatatgtatagcctgttgtcggacattgcccatgatgacaagacaacgaagttgttacagagctatatatctctgcgacatttgtacaagagataacgacagaatgtactcaaatataaccgatattagatatgtgttctgttaaagatctcaac

SEQ ID NO: 6841 - DNA, 1205 bp, Oryza sativa
  ref <308>: DATABASE ACCESSION NUMBER: AK104978
  ref <309>: DATABASE ENTRY DATE: 2002-08-28
aaaacacactgcaaacattacggtatctcttgcgttgatgtcttggtgatcgacaggatgcaaggggaacaccatgaccatgtccctgtctacgagtcaggcaccgaggtgttccaaaagcttcaggagaaatggaattccaccaagcacaagcgataccgcgcgatgtactccagcgtcgtcggcggaatcatcctcgatccatcgatgatggtcatccccatcgacgatcacatggtccacagaggccatggcgtcttcgacaccgccatgctttccgacgggtacctgtatgagctggattcgcacttggatcggctgctgctatctgcatccaaagcaaagatcagctccccattctcccgcgaaacacttcgcgccattttggtgcagatgacggctgcgtccaagtgcaggaatggctcgatcaagtactggctcagcgccggccccggcgacttcctcctctcgccaaagggctgcactgcgccggcgttctacgccgtcgtcatcgcgtccgccaccgccgccgccgccggcgggcacccgcggctcagggagggcgtgagggcgatcacgtcgacggtgccgatgaaggacccgttcttcgcggcgatgaagagcgtcaactacctggcgaacgcgctggccatggcggaggcagaggagcgcggcgcgtacgcgtcggtgtgggtggacggcgacgggggcgtggcggagggcccgatgatgaacgtggcgttcgtcacgggcggcggcgacctggtggtgccggcgttcgacagggtcctcagcgggtgcacggcgaggcggctgctcgcgctggcgcccaggctggtggacgccggcgtgctcaggagcgtcggcgcggcgaggatctccgccgccgacgcgaggaggtgcgccgagatgatgttcgtcggcagcggcctcccgttgctgcccatcgtcgaatgggacggccagccggttggcgatggtcaagtggggaaaattgcccttgccctatctgacatgctttgcgaagacatcaaggccggtctcgacagagtacttgttccttatgatcaagcgagctagacgacgactaatagagctttggaagatcaactttgtataataataataataatgtaatacttccatttatgtgaacgaaatttttccgtattatgagtggaggatccgtcacattgacagaattg

SEQ ID NO: 6842 - DNA, 1188 bp, Oryza sativa
  ref <308>: DATABASE ACCESSION NUMBER: AK104979
  ref <309>: DATABASE ENTRY DATE: 2002-08-28
aaaatcaaattgaaacggaagaaattggaatccctcttctgtaccctactctctcgctcccttccgatttcctcgagcgctaatctggcagcgaatagcagcgaatgctgcggccgtagcgagatctgtagcaaccagtgcgccttcgccgtcggcggcggctgcgggcatggcggtccagaacggcggcggcgatggcagcggcagcggcgcggcgtcggtggtcgtcaacgtgtacgacctgacgcccatgaacaattacctctactggttcggcctcggcatattccactccggaatcgaagtccatggcgtggagtatggatttggagcacatgagttcccaacgagtggggtgtttgaggtggaaccaaagaactgccctggcttcgtctatagaaggtctgttcggatgggcacaactgggatgtccagggcagagttccgctcgttcattgaaaaactcactgggaagtacaatggtaattcatatcacttgatttcaaagaattgcaaccattttacagatgatgtgagtaagaacttaactggaaaaccaatccctggatgggtgaatcgactagcaagagtgggttcctttttcaactaccttctgccaaaaagcatccaagtttctgcagttagacacgtcccaacacatcctgcattttctgatgatgatatggattcaagatcttgttctattagtggggacagtgatgtggatgagctggaccaacacctgctgtcagcaacaaccatcgagcttcattctatagaacaccaaagctagccaaaaatgatatctgacatcggcaaacttttgtgttccgtggcagcgacagttgaagacttcaattcctgtatctagcatcgaagcgcttctctcgtgctccactactgcaatgtgcaaagtcctggcaaatgttgccacctttcctggcagtgttgctagcagagacggaactgacactgagccgtcgatcctgaatccatatagcgcatgctaatatggaaatcatacctgcgatatagggcaatgctgaggcggccacagcatatgttgtaacacaaactagtgccgtatagccttaagacagtgatctaagttagtaacatcacacgaaattgattctttgtgttatattttttttggaattggcaattatattgtgtccagttatatat

SEQ ID NO: 6843 - DNA, 1988 bp, Oryza sativa
  ref <308>: DATABASE ACCESSION NUMBER: AK063977
  ref <309>: DATABASE ENTRY DATE: 2001-12-06
ctaaaccccaaacgccctctgattgcggtgcggagggacatcagatggcggcctccaacaccaccaagaagggcggcggcggcggcggcccggcgatcggcatcgacctcgggacgacctactcgtgcgtggccgtgaggcggcgctaccgcagcgaggccatcaccaacgaccagggcaaccgcatcaccccctcctgcgtcgccttcaccgccgccgaccggttcgtcggcgacgccgccgagaatcaggccgcgctcaaccccaccaacaccatcttcgaagtgaagcgactgatcggccgccggttcagcgataagtctgtacaagaggacatcaagctttggcctttcaaagtcattgctggccgtgacgaccggccaacgatcgtggtccgccatgagggcaaggagaagcagttcgtccccgaggagatctccgccatggtgctctccaagctgagggacgccgccgtggcctacctcggcgagccggtcacggacgccgtcatcaccgtccccgtctacttcaacaacgcccagcgcgaggccaccctcgacgccgccaccatcgctggcctcaacgtcatgcgcatcatcaacgagccctccgccgccgccctcgcctatggcctcgacaagatgccgccggccagcggcggtgcagggaggatggtgctcatctttgatcttggtggcggcaccctggatgtctccctccttaacattggtcgtccgggcaacaacaacagcagcgacagcggcagcttcgagttcgaggtgaaggccgtcgccggcgacactcacctcggcggcgccgacttcaacaacgcgattgtgaagcactgcatcaacgagttcatcaggaagcacggcgtggcagcagaaggcatctggagcaaccagaaggcgatcaggaggctgaggaccgcgtgcgagagagccaagaggatgctgtctttcacgacgcttgccagcatcgaggtcgactcgcttcacgacggcatcgacttctgcggcaagatgagccggtcccggttcgaggagctgaacaaggagctcttcggcaagtgcgtcaaggccgtgaagaagtgcctcgaggacgccaagatggacaagaacgccgtggacgacgtcgtgctcgtgggcggctccagccgcatccccaagctgcagagcatgatccacgacttcttcgacgagaaaaagctccgcaggaacgtcaaccccgacgaggccgtcgcgtacggcgccgccatccaggcctccgtcctcaacggcgacgccgacgaagccgacgacaagaagcaggtgatgatcctgcgcgacatcacgcccctctcgctggggatcgaggtcggtctcgatcacacgatgagcgtcgtgatcccgaggaacaccttcatcccgaccaagaacgtgcggcgttactccaccatattcgacaatcagatcgccgtgagcatcaatgtgttcgaaggagagagcgcgagcatcctccgcaacaacctgctcggcaagtttgtgctgtccggcatcctcccggcgcccaggggagtgccccagatcgacgtcacgttcgagttcgacgccaatggcgtcctgcacgtgtccgcgaaggacatgggcactgggagcaagaacaacatcgccattaccaaccacagcggccggctgaagaaggaggacgtcgaacgcatggcgcgggaggccaggagctacaacaggaccagatcatctctagcgataacttctgggaacctggtgatctttcaatgatgttctgcttctgcacctgcttgctggatgtcttacatctgcccatcgaactgatttcaatgacggggaaaagtttgtgctactaaatttttttgctaaaactaatctaggtctagtgactacttatctaaatgagctaatgcggaagatgatggcatactgacgtgtgtttgatggagccataattaatcttaagtcgcatttggcgtt

SEQ ID NO: 6844 - DNA, 1279 bp, Oryza sativa
  ref <308>: DATABASE ACCESSION NUMBER: AK063978
  ref <309>: DATABASE ENTRY DATE: 2001-12-06
accgccaccttagccgcgcgaggcattgccctcctcctgcgcggccgccccccacgaccgcggcggaggctgctccggctggggcgggatcgacgacgactgattcggttcatgatccatcagaaggaatgaacgggagtcggcagatggagctgcactacataaatactggatttccatacaccatcaccgagagcttcatggatttctttgagggcctcacatatgctcatgctgattttgctattgcagatgctttccatgatcaggctaatccatactgggcaatgatgcatacaaactcgtacaagtatggatattccggtgcaggaaattattacagttatgggcatgtttatgatatgaatgattacatgcatagggcagatggtggacgcagaatctgggataatgctacacctgtaaacaacactgaatccccaaatgtagtcttgcagggtggagaaactcctcatgcaaatacaagctctactactgaggaatgtatccaacaacaagtacaccagaattcgagcagtccacaggtcatttggcaagacaacattgatcctgacaatatgacatatgaggaattgttggatttgggtgaggcagttggaacccaaagccgtggtctctcccaagaacgcatttcattacttccagtcaccaagtacaaatgtggtttcttttcaaggaagaaaacacgccgtgaaaggtgtgtaatttgccaaatggagtacaggagagggaatctgcagatgacgcttccctgcaagcatgtgtaccatgccagctgtgtaacaagatggcttagcataaacaaggtttgccctgtttgctttgctgaggttcctggtgacgaacccaagaggcaatgagtcaaggccgccaaaatgttcttgcgcccagactcagcccacactgtaccccaacggatgcatgatttctgcttgaaggcagctttcccctttctctctagatttgtgtattagaatcatatcgcaaatataggttataaccagatgtagttggatcttggaacctgttctgagaggtttgccgtagactgtagagttcgaatgtgaagtgtaaccctgtgctagatgaagcatgctggatcacgcgcgcttgcgaggtgtttttgtccactgcaaagagcattgcactagcctgtgttatttgaattcaattaagattttgtggacagaaaaaattcatttgttacatcccctgcttttagcctgtcaatcacagtatgtcccctgtttttcccatg

SEQ ID NO: 6845 - DNA, 2419 bp, Oryza sativa
  ref <308>: DATABASE ACCESSION NUMBER: AK063979
  ref <309>: DATABASE ENTRY DATE: 2001-12-06
agagctcttcttaatttgccagctgcttgtgtgttctccttgccgatcccttgcgctagccatcttccgcgaaaaatggccatcgtttggggttttcggttttgttgtgttggtgtggttcttgctgcttgatttgtccgcctgagttagctgacaggatcttgcatgctctagaccagattttctctattggttccacatcccgcaacctcttctttgctccttgctgtgctgcttctgtctttgaagctcacatttcttcgaagggatttcacgctgtcggctaggctgcgctacaaggctgtgccgccacttccctgatacctaaataaatatgcatgcgcacgcagtgcacctttttggggtcttttttgagcattccgctggttatttggacgcagtgcaccgtgtgaagaatgcaaacaggagctacaagccagttgccaatgaactaatgatcactttcactaggtggacaactgttgaggagtgcattgaagttcctattgatttccctactgtggttttctccctgacacctttcgatgatgttgctaagtttgtggacaataatgatttttttattgatgttatgggtgtcattactgacatatctacacccacaatgcttcgtcctagatcaagggatgctgacagcttgaaaagaactattcagatacgcgatgcaaagtattctttatgcctcttattttgttccttgcttatttatttatcctgaccactaacaactaataaaactagcacaaacacagccaatagccactctaataaaatttattgatattcttaacatgtacaccacatttttcctgtttttttacacaaatagcaattctaccttgaatgtgtctctctgggctgaacaagcatctgcgtttgaggctgacgctatacacaaggctggtaagagtgaacctcagattattctgtttgttggaactcttgcgaagaactacccaggcataggattggcactatctggaggttctgcttgcaaatggtacattaacattgatgtacctgcgatagttgaattaaaggacaagactgggacaaacttccagccaatcaattggattgaggctccagccagagcagctgttgaggaagtcgctgagaacaagactgtgcgtgaacttctagagatcaatcctcacaagtgcaagaaggttcgatttcaagctcatgtaaccgttcgaaggatctgcaatgataagtgttggtggtatggttcatgtcaaagatgcttcaaggttgcaaaaccttatgggtccacctataaatgcactagctgttccaacatcgcagtggcagtaccaaggtacaggatagtagtcatagctggagatgactctgatgatgctatgtttgttctctttggatgaacagcccagcgcattgtgcgaaggccagttgaagctcttattgaggaagcaccagctgacagtgattttatccctgatgaaataacggctttagttgggaagtcgtttgtgtggaatgtcagcttcacagaaaatacgcttaagtttggggatatctcattccaggtcaacagcattgtctccattgatgctcctggtgaacctcttatgttgatgtccccaggtgcttcccagagttcttcagccatgatttcacctggaccaagtggctcattgatgtcaccatcaaggggaagtgaacttggcatagcttcacccggttcaactgcagccagctctccactgccaaggcgtgttattaccacggacaaaagccaagttgtgcacacaccaaccagcaagtgctctgtcagcatagatcaggatgacatttctgctgctttttctccaccaatgtcccagaaagtgcaagctccagctattcctgatgatgatacactactggctcatgcatctggctcaaagagcaagtctaggaagagaggtcctccttctcaagcaccaccagcagttaagaaactattcaaggaaggtgacagcgatgagaaagaaaccactgttagcctgtcagctgacgcttgatccagtatacatgcatgcccactcaagcattttggccaccaagttgtagcatcttcgtctgcctgaaccgaagcgcatggaagaatgctgtctttgccatatgtctgaaccttttgctataaactgttgatctccagctattacttcttagtgactttcgaaattattgttcccatctcttttggaaccatctttagcaatgtttgtaagcttattatggttacattagctatagtccaaccacgtgctcaaagtccattacagttgccaatatgtcagtacggcaatggactttgaacagttggcattggcttagctccatgataccttctcaggtttcgcttagtaatgttagaccaatcttaagactc

SEQ ID NO: 6846 - DNA, 1350 bp, Oryza sativa
  ref <308>: DATABASE ACCESSION NUMBER: AK063980
  ref <309>: DATABASE ENTRY DATE: 2001-12-06
aaatttcgactgatcgaaaccctagccctaggccaccggacgcggcgacgccggcgagcccgcgactgcgaccttcgcctcgacgaccgctcatcgtcgcgcttcaactagccggggaaggcaaggcggagcagcggcggcggcaagaagaccgcagcaaggcggtagatatggcgacggctggggccagcagctttgaggacgagatcatggagtctgacattgagttggaaggtgaagctgttgagccagataatgaccctcctcagaagatgggagatccatctgttgaagtctccgatgagaagcgtgaccaggcgcagctgtgcaaaaacaaaggcgtcgatgcattttcagaaggtaaattggatgaagctattgagcatctgacagaggctattgtactgaatccgacttcagctatcgcctatgcaactagggctgttatttttgtgaagtcaaagaaaccaaatgcagctattcgtgatgcagatgcagcattaaagattaatccagattctgctaaaggatataaatcacgagggatggcaaaagctatgcttgggaaatgggaagaggctgctcaggaccttcgcatggcagcaaaattggattatgatgaagagattggagcagaacttaagaaggttgaacccaatgtactcaaaattgaggagcacaggaaaaaatatgaaagattacgtaaagagagggacattaagaaagctgaaatggaaaaacagcgtaaacatgcagaggaggtctctgctgcttctgctgctctgaaggatggtgatgtgatcgctatccactcatccagtgagctggacacaaagctgaaggcagcctcaagcctgtctaggcttgtggttctctatttcactgcagcatggtgtgggccatgtcgttttattggacctgtttgcaaaagcttagctgaaaagcaccggaatgttgttttccttaaggtggacatcgatgaactaaacagtgtcgcatatcgctggaacgtctccagtgttccatcattcttctttgtgaggaatggaaaggagatcgataaagttgttggtgctgacaagaatggccttgagaggaaagttgctcagcatggatcatcctaaactgtgagcagtcctgttacttgtcttacttctatgctgtatgttttatgacgtggaataagtgcttatggataaaagttgacatacacatcgagaactttttagctgttctgtgtactttctgtgttgctctatgccttgctggaggctggatatattttgatgatcgttgcaaataacttcagcaatcttatgttggcccaaaaactaatattggttttactgg

SEQ ID NO: 6847 - DNA, 1281 bp, Oryza sativa
  ref <308>: DATABASE ACCESSION NUMBER: AK063981
  ref <309>: DATABASE ENTRY DATE: 2001-12-06
tagtagtttagtcgggttagtctcgtagtcaagttagtctcgttctatgtccttcctgttctttgtctttggtcctctatgaagagtccagtattcccttcttcagatctgaaatattgtgggtggatcagccagggaggtcggtctttgctgtgccagacctcgatttcgtcggccctagcgacgcctgattgtggaaaattcagctacagtgccggtggccgaaagtcttcaagctttgaggtcgctggccatagtttgcggtggatctggatggcttcaaccgatttccgcgacctctttgtccatctaatccttggcgctgtgcccttcctcagcgatgcactcagccgcgtcgtgtccggtgagggtgggctcacacatgcccagatcgtcgtcatatttggtgggcttggaggtgcagagttagctgagctgttggagcagttcgtgcttgctgattcctctcatgcgagcatcccgaacattgtctcgacagacaacacctccatcaatttgctgctgtgcctaaatcaattatgcctaaatcaattatccaagcagcagcacaagtcatgggccagcaaggagcacgccatgaatcccctgcatcatacaggcaaccaacaagctacacaacaaggcaaagctggtccagcaattctgtgcatgccggcaacgaagtctccttctcaatcctcacccatgggatacatcttaagttcgtaagactttatcatcgccaccatctagcttctctaaagcttaaggtcagctgggttttggatgcatcttttatttcattcctttgcagcagtatccatgttgaggttatcgttcgggttgagcaccgactatctgttagactttggtcggcagggatattgttagtgttcctcagatttaacgatgacttccatggcaatcattggttgagtccggtgaagccaccaacatatctacgactcaactccaaagctcaattagtgccaaatccgtggaggcagccggagggatcgctggcaggtcaaatgggaagcacgtttgaagaggcccttgggtgcaatcgtcgcggcaatgccgcggatctccgacgattgtattcactactactgctgtatcagatgatctggaagtttgcttccatcattcaatcattacctttcaggaagatggtccttaacgtttgttgttatcaatttcttgcaaggtgatgtttcagggaatgttgttcccttccaatgtactatgtttaatatgcaataaaactttatgagtttc

SEQ ID NO: 6848 - DNA, 2290 bp, Oryza sativa
  ref <308>: DATABASE ACCESSION NUMBER: AK063982
  ref <309>: DATABASE ENTRY DATE: 2001-12-06
gacgggagagagaggagaggagtcgaactagggttagtgaggtgaaggggggcgattttgctcatcgccctccgcctagatcgaatccgaatcccgcctcctcctcctcctcctcctccccccgcgccgatcttgccccgctccctcgccgcaactgcgggcttgccctagcccgccgcatcgccgacgtactacgcccgctcggctccaggctccagatccggcctccagggcgtgcccgctgctggacggcgctctcccgcgtccgtggctacctcctcctccgggtttgcgttgccgtcgccgaagcgatccgttggtggattgtgtgtagctctgtaacaaaggatcttggtccataggagtgaaccagaaggtacaaaacttcttggctattatgacatcggtgggtctagtagattcttcatcaggtttcccggaaacgagtactagtggagccactgatcgtctgacagatgatatcagcgagatgagcataagagataaggaagttgaagctgtagtggtcagtggcaatagtatggacataggtcacactattgtgacaactgttggtggaagaaatgggcagccaaagcagacaattagttacatcgcagagcgtgctgttgggcgtggttcatttggagttgtcttccaggtgggccattggtatatgccattctgtcattacctttctgtttagagattactaattaaattatctttgacaggctaagtgtctagaaactggtgagagagttgctgtaaagaaagttcttcaagatgcgagatacaagaaccgggagctgcaaacgatgcaagttctcgatcacccaaatgttgcatgcttgaagcattacttttgctcgactactgcgaaggaggagctatacctcaacttggttcttgaatatgtgccagaaactgttcatcgtgttattagacattacaataagatgagccaacgcatgccattgatttatgttaaactttatatgtaccagatttgtagggctttggcatacattcataactgtgtgggagtatgccacagagatataaagccacagaatatattggtgaatccacataatcatcagttgaaattgtgtgactttggcagtgcaaaagtcctggtgaaaggggaaccaaatatttcatatatctgttctagatactacagagccccagaactcatatttggggctacagagtacacgacagctattgatgtgtggtctgctggctgtgttcttgctgaactacttctagggcagcctgtttttcctggtgacagtggcgtcgaccaacttgttgaaattatcaaggtactgggtactccaacaagggaagaaatcaaacatatgaatccgaactacactgagtttaagttcccccaaatcaaagctcacccatggcacaagatcttgtgtctcggcttctgcagtactcaccacacctccggtgcagtgcattggaggtgttaattcatccattcttcgatgaactacgagatccaaatgctcgcttaccaaatggccgtactcttcccccactattcaatttcaagcctcgtgagctgaaaggagcatcaatggaatttcttgtgaagttggttccacagcatgctaagaagcaatgtgccttcttaggattatgagcagacagttcatacactaatcgggtattacgttggtctacttggttccgtagaacagcatggcctgcagtattattgaatgggccctaattttgttctacgtgcaccctgcttgggcatgccttctaccatcatattctgtaaagcagatgaagacatggagtgagtggttattgattggggcttgtatattggtctgcccttgacttgagaactttattcactctgctgtatcaagcaagaaagaacacgtatgtatgcttgagccatatttcattccagagcctctatcaggtttcaccgaccatcagatttaagtcttccagtttgtagggctaagccaaaaaagttctatgtgtgaagagttggagacatctgtttggttacaagctatttgattgtatttgatcattcttttgtattaacactctgataaacttacatgagttaattctattgttatgtgatatagttgtgtgccacttttaaacacctaaacaactctgttcaatgttgaaatgtttggcatgtatcaacatatcacctcattatttcgaggttgattttgtacacctgatatctgttagcttgaatgcttgattacaagcaaatgattaaatattttat

SEQ ID NO: 6849 - DNA, 1523 bp, Oryza sativa
  ref <308>: DATABASE ACCESSION NUMBER: AK063983
  ref <309>: DATABASE ENTRY DATE: 2001-12-06
aaagcaccattactaaagaccgcggcgtgtgcttgcgttgcgagcgagcgagagcgagagagagattgagagagagagagggaagggatggcgatgccgtatgcctccctgtctccggcggtggccgaccaccgctcgtccccggcagccgcgaccgcctccctcctccccttctgccgctccaccccgctctccgcgggcggtggtggcgtcgcgatgggggaggacgcgccgatgaccgcgaggtggccgccggcggcggcggcgaggctgccgccgttcaccgcggcgcagtacgaggagctggagcagcaggcgctcatatacaagtacctggtggcaggcgtgcccgtcccgccggatctcgtgctccccatccgccgcggactcgactccctcgccgcccgcttctacaaccatcccgcccttggatatggtccgtacttcggcaagaagctggacccagagccagggcggtgccggcgtacggacggcaagaaatggcggtgctcgaaggaggccgcgccggattccaagtactgcgagcgccacatgcaccgcggccgcaaccgttcaagaaagcctgtggaaacgcagctggtcgcccagtcccaaccgccctcatctgttgtcggttctgcggcggcgccccttgctgctgcctccaatggcagcagcttccaaaaccactctctttaccctgctattgccggcagcaatggcgggggcggggggaggaacatgcccagctcatttggctcggcgttgggttctcagctgcacatggataatgctgccccttatgcagctgttggtggtggaacaggcaaagatctcaggtatactgcttatggcacaagatctttggcggatgagcagagtcaactcattactgaagctatcaacacatctattgaaaatccatggcggctgctgccatctcagaactcgccatttcccctttcaagctattctcagctgggggcactaagtgaccttggtcagaacacccccagctcactttcaaaggttcagaggcagccactttcgttctttgggaacgactatgcggctgtcgattctgtgaagcaagagaaccagacgctgcgtcccttctttgatgagtggccaaagggaagggattcatggtcagacctcgctgatgagaatgctaatctttcgtcattctcaggcacccaactgtcgatctccataccaatggcatcctctgacttctcggcggccagttctcgatcaactaatggtgactgaatgctgcgtggatgatgatcctgctgcccagtgaactcatactggccttgttgctgtcttgctctgcgattttctgcctgctcgcgcccaccgtacgatagtagcaaaacattctatgcttctgtaatttaccagtgttcccctgtcagatttgcgtgtgaaatcgatcaaactccgtggtctcctttggacgaagggagatgtcaacgttttccttgatgtttactgctagtaacatcttattacttccc

SEQ ID NO: 6850 - DNA, 1277 bp, Oryza sativa
  ref <308>: DATABASE ACCESSION NUMBER: AK063984
  ref <309>: DATABASE ENTRY DATE: 2001-12-06
acagccagtgcaaatctgatcgatcaagataatcgagcaaaatccatcagagttctaacattcgcgcgtgaatttcgaggttaatttttgaagcttaggatcaatggcttcccaccaggaccaggctagctaccgcgccggcgagaccaaggcccacaccgaggtcagcgtcagccaccaccggccggccatcttctccagctccggcgagcttccagttaatttgttgatcacttgattgttcttggtgtgcaggagaaggcggggcaggtgatgggggcgagcaaggacaaggcgagcgaggcgaaggacagggcgtcggaggcggcggggcacgccgccggcaaggggcaggataccaaggaggcgacgaaggagaaggcgcaggcggcgaaggagagggcgtcggagacggcgcaggcggcgaaggacaagacctccagcacgtcgcaggcggcgagggacaaagccgccgagagcaaggaccagaccggcggcttcctcggcgagaagaccgagcaggccaagcagaaggccgccgagaccgctggcgccgccaagcagaagaccgccgagacggcgcagtacaccaaggactctgccatcgccggcaaggacaagaccggcagcgtcctccaacaggtacacacaggattaaaagcaattctacctccttttttttttttttttgcggggagcagaggtaccgtgagataaaaaaatacggtaccagttattaaatttacaatagaaaaagtagtaccttcttaagcactgtaaaattgctctttgattagtttctcctcgtcgaacaccattgttgtggatcttgaggagaattgtttgtgtttcaggcgagtgagcaggtgaagagcacggtggtcggcgccaaggacgcggtgatgagcacgctggggatgaccgaagacgaggccggcaccgacgacggcgccaacaaggacacctctgccaccgccgccgccacggagacgacggcgagggatcactagacgccgtgaatgatttccctttgggtctatttatgtatgttttcacttcaaattcggtgcaagtttgaatttgtttttgtgtcgttttgagtctgtatcgatgctgtatgaagtggtggtcgtcgcaggggaggatttctgacgggtgtgggtgatgtgtactgatgatgttcagttgttttcgtcagagtttctcgtctgtgttctgtttattatggcgtaacaataataaaagtttgggcctaaagcccgcatttgtggtttatc

SEQ ID NO: 6851 - DNA, 1759 bp, Oryza sativa
  ref <308>: DATABASE ACCESSION NUMBER: AK063985
  ref <309>: DATABASE ENTRY DATE: 2001-12-06
actaacgagaagctaccctcgagtccgacggagaaggggagggctaccgccttctgcgccgccgccgccgccgccgcggcaggttggccgcctccgatcgagtcccgctggggtgagcttgccccggcgcccgccgcttgttcgacaaaatggctgaccggaagaagtgcaaggcggcggcggtcgccaccacggatggcggtggcgaggaccgcatcagcgcccttccggacgaggtcctccagcgggcgctctccttcctgccctcccgcgacgtggtgcggacgtgcgtgctctcccgccgctggcgccaccagtggaagtccgtgcccgccctgcgcatctacgcgttcgatgattgccgggacgtccagcacctgagtgatttcgtcaccaactttctgctccggcgcaaccggttggctctacatgaatgcgacatcacatgctttgacgagggagacggttgtgaggtgttcggggagaacgccagacagtggatccggtatgctgtatcgtgccaagttcgggtgcttcgtgtttctgttgaagcgcacacccgtctatttggtgcgcctctcaaagcccagcgtttgaagagattagaacttttcagcgtggagttgggggccttctcccttgatttctctagctgcagggagttggaggagttggagctgggaggttgcatcatcaaagacaaagtaaagcagatcttatcagaatcattaagacgtctgagaatcgaaggatgtgattttttccgaaatcgcactcgcatttcttgcccaaatctcatttccttggagattaccgattttaccttgtacactccagtgctcatgagcatgccttccttggcatcggcatttatcaggtttggtgaacactgtgctgattcttgtgactgctactattacggcgaatttggtcccgattatactggatgccatcacagtacagttaagggcaatggcactgtgcttctcaatggtttatcagatgccatccaattagagttgataagtggtgccggagtgttcattttcagaagggattttagatgttgccctacatttaacaagctgaaaacactgttgctcaatgaatggtgtatggctgctgactccagcgcactaatttacttcctccaacactcaccggttctagagaaacttactcttcaacttcggaagagccaacgtactatggtcaaaagaggtagcacgaacaaaaatcagaatgaaaaattcttggtgtcaaagcatctcaagttagttgaaattaaatactgtgaggatgagatggttcaacaagttttacatgtcctaagtgcttgtggcataccatccgagaaaattatcatccaacggataagctcatgggcttctggaggttttagtttcgagcagaggaaataggctcgttgattgttgagaattgtgcccctgaatctggcgccacgaagctgctggcttccacgtctgtctatcaagatcatgggtagagtgacattcttaggaactagtagtagtagaatgagcagcctgacttgcttgttgggactagtatgtttcgtgtgaatatctgatggcacatggcatgtttcttgtgcttccttctgattaaactcattcatgtttggtaatgcctggagaaattgtgttaatatgtgctgttcttgagtagaagctgaaactgcagcctgaactgaaacactgctgaaacttgtgtgtccaacagagctctatgttgcctt

SEQ ID NO: 6852 - DNA, 1907 bp, Oryza sativa
  ref <308>: DATABASE ACCESSION NUMBER: AK063986
  ref <309>: DATABASE ENTRY DATE: 2001-12-06
actctcctacgcttccaccccccattcccatcccctccacccagatcgccgccgccgccttcgcctcggacggccgtacggcgccgtccaccgcgcacgtctccggcgatctacaggtgtagatcgcttccggagacatccaaccgcggccatggcgaccttcgcgaaacctgagaacgcgctcaagagagcggaggagttgatacatgttgggcagaagcaggcagcgctacaggcgttacatgatctcatcacttcaaaaagatacaggtcatggcaaaagccactcgaaaggattatgatgaagtatgtggagctctgtgtagacctgaggaagggcaggtttgcgaaagatggccttattcagtacaggattgtctgccagcaagtgaatgtgtcatccttggaggaggtgataaaacacttcatgcagctttccaatgagaaagcagagcaagcaaggaaccaggcgcaagcactggaagatgccctggatgtagaagatctggaagcagacaagcggcctgaggatttgatgctcagctatgtcagcggagagaaagggaaggaccgatcagacagagagcatgtcacaccatggttcaagtttctctgggaaacatacagaacagttcttgagatattgagaaacaattcaaagcttgaagcattatatgctatgactgctcacaaggcttttcaattttgtaagcagtataagagaacgactgaattccgtaggttgtgcgagataataagaaatcatcttgctaacttgaacaaataccgtgaccagcgagatcgtcctgatctgactgccccagaaagcttacagctatacctggacactagagttgaacaactaaaaattgctacagagctctctctctggcaggaggcctttaggtctgtggaagacatccatggcttgatgagcatggtgaagaaaacaccaaaaccatctgtcctggttgtgtattatgccaagttgactgaaatattctggatatctgattgccacttgtatcatgcatatgcatggcttaagctattctacttgcagaaaagctacaataagaacttgtctcagaaggaccttcaattaatagcttcttctgttttgcttgctgcacttgccgtgtcaccatatgaccataaatatggcgcatctcatcttgagcttgaaaatgagaaagatcgtaatctgcggatagctaatctcgtcaacttctcccttgactccaagcgtgagaatagagaagtgccatcaagagcatctcttttttctgagctggctgccaaaggtgtcattgcctgtgcttcacaagatgtcaaagatttatacaaccttttggaacacgattttcttcctctggatctcgtatccaaagcacagccactgctatctaagatttcaaagattggagggaagctttcatcagctcccttggttccagaagtttttctgtcacagtaccttcctgctttggagaagttaacaactttaagggtgttgcaacaggcttcccagatatttcagtctgtgaaaattgatatgctctcaagaatgatcccattctttgacttttctgttgttgagaagatctctgttgatgccgtgaaacacaattttgttgctatgaaagtcaaccatttatcaggagctgtccattttgggaaaatggacattgaatctgattgtctcagtaatcacctaagtgttttggctgattctctaaataaagcaaggagccttatccatccacctgtgaagaagccatccaagcttggtgaaaacttaacgagtcttgctgcagtagtggagaatgagcacaagcgtcttcttgcgaggaaatcaattattgaaaaacgcaaagaagatcttgagcgccaaatattggaaaagg

SEQ ID NO: 6853 - DNA, 1589 bp, Oryza sativa
  ref <308>: DATABASE ACCESSION NUMBER: AK063987
  ref <309>: DATABASE ENTRY DATE: 2001-12-06
aactgaattagttcgatcgatgcaggcaggcaggccttctagttctacaaagatgcctctaatggatcgttttcctttcctatcgatggcttgattgatacaaagccggttttttcactcctcgggcgtgcgtttcttgacaccggccggattgatctatcatccatccatcgagtcgagtcgagatcgatcttgatctcgatctcgatcgatggaggaagccaagatgggagacgttgccaccatccgagccgttctggcgatcctccaatggtggggcttcaacgtcaccgtcatcatcatgaacaaatggatcttccagaaattggagttcaagttccctcttactgtctcgtgtgtccactttatatgctcttcgattggagcttacatcgcaatcaaaattctcaagatgaaaccactgattgaagttgccccagaggatcggtggagaagaatattcccaatgtcatttgtgttctgcataaacattgtactgggaaatgtcagcctgagatatattccagtctccttcatgcagaccataaaatctttcacccctgcaacgacagttattctgcagtggttggtctggaggaagtatttcgagtggcgcatatgggcttctctggtaccaatagtgggaggaatcatgttaacatcaataactgagcttagtttcaacatgtttggtttttgtgctgctatggttggttgcctggcaacatctaccaagaccatccttgcagagtctctactccatggatacaaatttgatagcattaacactgtgtactacatggcgccatttgcaaccatgatactgtcagtaccagcgattgtgctggaagggagtggcgtcatcaattggctctacacgtatgattccatcgtccctgcactgatcatcatcaccacctccggagtactcgcattttgcctcaacttctccatcttctacgtcatccattccacaacggctgtcacctttaacgtagccggcaacctgaaagttgctgtggctgtgttggtgtcgtggatgatcttccggaacccgatctccgcgatgaacgctgtcgggtgcgcaatcacgctcgtcggctgcaccttctatggctatgtgaggcatctcatctcgcagcagagcgttaattcgagcccacgcacgccgaggagccggatggagatgcttcccctcgtaggagacaagcaagagaagatttaattggccaccaaattaaaacaagttgatactcaaaagaggagggaattgttggtgcatgatcaataggaataaaggagcatcatctaacagctttcaggattaatcctgaggcacttttgtcatagaaaattattcagagttttcagttgagttgttcgtatagagctaatagaacttccttcttgtcatctgaacatgctggggtgctcctcagctgtatctctctctctctctctctttctattcttttcttcctttttctcacaggattaaaagatttttgtttgctcgtaactatgctactattgctacacatttgatcacacagcattgttcagttgactatagatattattattatgtt

SEQ ID NO: 6854 - DNA, 1636 bp, Oryza sativa
  ref <308>: DATABASE ACCESSION NUMBER: AK063988
  ref <309>: DATABASE ENTRY DATE: 2001-12-06
acgcagcaagagccgatcgatcattgtccaagtctccaagcgatcagctagctgacttgacgacgctgcgagcagcggcagcaagagagcagcagcacaaagggttcccctttcacaagtgtccggccggctgcacgtaggccatggggaagcaaatggccgccctgtgtggctttctcctcgtggcgttgctctggctcacgcccgacgtcgcgcacgcgcagacgcagatcctcttccagggttttaactgggactcgtggaagaagcagggtggttggtacaacatgctcaaggaccaggtgggcgacatcgccagcgccggcgtcacgcacgtctggctcccacctcccacgcactccgtctcgcctcaaggctacatgccgggacagctctacgacctgaacgcgtccaagtacggcaccaaggcggagctcaagtcgctcatcgccgccttccacgccaagggcatcaagtgcgtcgcggacatcgtcgtcaaccaccgctgcgccgacgacaaggacggccgcggcgtctactgcatcttcaagggcggcggcccgcgcggctgcctggactggggcccctccatgatctgctgcgacgacacgcagtactccgacggcacgggccaccgcgacaccggcgccgacttcgccgcggcgcccgatatcgaccacctcaacccgctcgtccagcgggagctctccgactggctcaggtggctcaggagggatgtcggcttcgacggctggcgcctcgacttcgccaagggctactcggcggccgtcgccaggacgtatgtccagaacgccaggccgagcttcgtcgtggcggagatatggaactccctgagctacgacggcgacgggaagccggcggccaaccaggacggccagcggcaggagctcgtgaactgggtgaagcaggttggcggcccggcgacggcgttcgacttcacgaccaagggcatcctgcagtcggcggtgcagggcgagctgtggcggatgcgggacaaggacggcaaggcgccgggcatgataggctggtatcccgagaaggccgtcaccttcgtcgacaaccacgacaccggctcgacgcagcggatgtggccattcccgtctgacaaggtcattctgggctacgcctacatcctcacccacccaggagtaccatgcatcttctacgaccacgtgttcgactggaacctcaagcaagagatcaacgcgctggcggcgacgaggaagcgcaacgggataaacgccgggagcaagctgcgcgtcctggcggcggagagcgacatgtacgtggcgatggtcgacgagagggtcatcaccaagatcgggccgagaatagacgtgggcaacataatcccgtcggacttccacatcgtggctcatggcaatgactactgcgtctgggagaagagcggccttagagtcccagaaccagaaggtcggcgctagaaacggctcgcaagctagctacacagttcttaataacttggtcgcaaaaaaaaaagttcttaataatttgtacgagaaatgttcgtttctgtttgcatatatagcttatgaaatcttaccaatatatactgctctgttttctatagttcatcccggaaatttgaacttgc

SEQ ID NO: 6855 - DNA, 1376 bp, Oryza sativa
  ref <308>: DATABASE ACCESSION NUMBER: AK063989
  ref <309>: DATABASE ENTRY DATE: 2001-12-06
gtgccatctcgcatcgcaccccagaccagaccatggcggcggcggcgctctgctccgcctccccggccatctccacggcggcagctctcggcgacggcgtggccacgctccgcctcgcggtcctactgcgccttcgcctctccaccgcgggctgtgggctgtggctgcggtggggaccccatcctggcaggcgcgtcggcggcttccacgactacggaggaagagggatcaggtgttagagatgatgatcccgacggcttcctccgctccgagaaggatcgaaagtgcggtatctgaagagtcacatgatgaccgcacagagaatgaacatattatacatgaccatgaacaccgtcatcaccatcatcatcatgagttcatgaccatgaacacaaacatgatcatcatgcacacgagcatacccatgatcctggtgtttcttctgtaagcattgtttgcaaaggggagatggatcttgaaaagggagtgcacatcattttccggggaagaataatgtgggaaccaaatgagccatgcatcaacaagattgtattcatagtcaataatctcaaatggggaagaactggagaaacggcttcaaagattgcctactctactgaaggaataagcgagaaacgggactccaacaggtggtgtatacttcaatccaaccaatcaaccacatgaaagtgcagcagcctaaagcaactaatataaggaggaggtgatcagtctaatgttttcatgtacacagcctgaaagcaagaagaatgcatgaatgggctggctatccgctgaggtcaaggagatggtccgtagaggctccggagccgggccaacttatctacaatgacagctgcaatgaagtcatgagtgtaggcggcgtatggcacccgtctgcagtcggtgaaccccaagctgtaccagtcctcagccggcctccgtcccagccttgctgccccatgccaagacttgaacacggcaaagaccgtaggctcctccaccaccaccatcggacgtgccagcgacgcggacgacgaagacgcacctcaggtggagatccgcgtcctcgtcgtccagcaggtaccgaggcggcacgagcgaccggaggagcccaggctcgggctcagcagtggtcctccgcctctccgcctcatcgtccagtgcgtccaagatgtatccgcgcgggtcgccgcgtccgctcgcctgaacaaatccacattcacattgtcacggagtactagctagtagtagtagtagtagtaattagttcacaaaatgtaactagcctggcaacatcatctcggctaattgagttgtttactgattcatttcttgtgtaataaaaagcgcagaatcatgccttgaatcctatt

SEQ ID NO: 6856 - DNA, 2047 bp, Oryza sativa
  ref <308>: DATABASE ACCESSION NUMBER: AK063990
  ref <309>: DATABASE ENTRY DATE: 2001-12-06
gtgcattctgtagattttcttttgctcagttcgacacatagacatctgaggctaattagctctgttaatcgcgcggtttgtgtaattctcacaaataattagtttctcgttcattgcaaattgcagcgagattttgtcgaaataataaacttggtgttcagttattctctgcaaaaaattgcatattgcagagtagctgagattggcgccatggccggcgagctcaaggtgctgaatgcgctcgactcggcgaagacgcagtggtaccatttcacggcgatcgtgatcgccggcatggggttcttcaccgacgcctacgacctcttctccatctccctcgtcaccaagctgctcggccgcatctactacttcaacccggcgtccaagagccccggctccctcccgcccaacgtctccgccgccgtcaatggcgtcgccttctgcggcaccctcgccggccagctcttcttcggttggctcggcgacaagatggggcgcaagaaggtgtacggcatgacgctcatgctcatggtcatctgctgcctcgcttccggcctctcgttcgggtcgtcggcgaaaggcgtcatggccacgctctgcttcttccgcttctggctcggcttcggcatcggcggcgactacccgctctcggcgaccatcatgtcggagtacgctaataagcgcacccgtggagcgttcatcgccgccgtgttcgccatgcagggcttcggcaacctcaccggcggcatcgtggccatcatcgtgtccgccgcgttcaagtcgcggttcgacgcgccggcgtacagggacgaccggaccggctccaccgtgccgcaggccgactacgcgtggcgcatcgtgctcatgttcggcgccatcccggcgctgctcacctactactggcggatgaagatgccggagacggcgcgctacaccgcgctggtcgccaagaacgcgaagcaggccgccgcggacatgacgcaggtgctcaacgtcgagatcgtggaggagcaggagaaggctgacgaggtcgcgcggcgcgagcagttcgggctcttctcccgccagtttttgagacgccatgggcgccacctgctgggcacgacggtgtgctggttcgtgctggacatcgccttctactcgtcgaacctgttccagaaggacatctacacggcggtgcagtggctgcccaaggcggacaccatgagcgccctggaggagatgttcaagatctcccgggcacagacgctcgtggcgctgtgcggcaccattccgggctactggttcaccgtcttcttcatcgacatcatcggccgcttcgtcatccagctcggcggcttcttcttcatgacggcgttcatgctcggcctcgccgtgccgtaccaccactggacgacgccggggaaccacatcggcttcgtggtcatgtacgccttcaccttcttcttcgccaacttcgggcccaactccacgaccttcatcgtgccggcggagatcttcccggcgaggctgcgttccacctgccacggcatctcggcggcggcggggaaggccggcgccatcgtcgggtcgttcgggttcctgtacgcggcgcagagcacggacgcgagcaagacggacgccggctacccgccgggcatcggcgtgcgcaactcgctcttcttcctcgccggatgcaacgtcatcgggttcttcttcacgttcctggtgccggagtcgaaggggaagtcgctggaggagctctccggcgagaacgaggacgatgacgatgtgccggaagcgcccgcgacggccgatcaccggactgcgccggcgccgccagcttgataccccgcggcaaaacccaaatggtcaatcatcagtgttttgttgtaatatatgtgcaatggatgattattctggttctgctagtgtaccaaacaaaattacaaatactagtcgtcaacccaggcaacgcacgggttactgttgatattataaatgccacttagattatgtattaaatatattttctaaaattattgtggcttaaattttgtaaaaaaag

SEQ ID NO: 6857 - DNA, 938 bp, Oryza sativa
  ref <308>: DATABASE ACCESSION NUMBER: AK063991
  ref <309>: DATABASE ENTRY DATE: 2001-12-06
acactcgatcagtactgctcattttttcagttccactcgagctaagtgcggtacactgatcaacgatggtgtcctccaagatccactgcgccatggccgcgctgctccttgcaattctcctcccggtttctcatgcgtcggggaggtatgtagctccggctccggctcctgttcctgttcctccgccgccgcgcacctcgccgccgagccgtatccagccggtcgtcgtcgtccagggcacaatctactgcaagtcctgcaacctcagcggctacaaccgctacatggacgcgtctcccctaccaaatgcgacggcgcagctggtgtgctacggggacaaggtgctgaacatgacgagcacggcgacggacaagaacggctacttcctggtgatggtgtacaggctggacgtgttccggcggagcaggtgccgggtctacctgggctcgtcgccgtcgccgctgtgcgcggcgccgttcatcccgtcgaacaagtggctggggctcacgctggagagggagagggtggcgtcgctgcccaagggcgtccgcggcgtgtaccgccccaagagcacgctcatgttcggccccggcaccggcggcaagtgcccggccgccgccgccgccgacgccgccggcgtgccgatgatgtgatgagacgatcgatattgacatggagaattcgagatgtgcgttcacgcatatcgccaatttagttagtggtttggttggatgatgcatggtttaattaagttcgtgcacgttatttggaattaataatgggtaaaaattagctagctcgtcttttggtcgatggagcatttgttgtaaccttgtagtagctcgtcgcttaggtttgcagtggttttagttcgctcgtcagtgtaatgtcatgagaaaaaaaaattatctgagtacgtctatcctttcggtcgattt

SEQ ID NO: 6858 - DNA, 2428 bp, Oryza sativa
  ref <308>: DATABASE ACCESSION NUMBER: AK063992
  ref <309>: DATABASE ENTRY DATE: 2001-12-06
ctcgcggcggcggcgccggcgagtggctcccccgagcgcgcctcccttccgcgagccctccttccaccaccgaagcacgacctccacctcgctctccgctctactggactgtagccgagtggagattggcggcaagcccaaccatgctcggattattctgagagtgagtgtgtttgttcatccagttctcttcatccaatccaaatctttctttctaggagggagggagtgcccagttcgccgtggatttcttttcttgcgtcagtgatactgatacagtgatacatacagtttgttctccaaaaagttttgggggattcagctgaatctccatgctccggtcagtgccagccgctcgccacaggtggcttccatggaatggccttgccaggggctcatccagaaccccacattgtcatgctgctgctgctgctgtcagttcttggcatgtccatgattcatcatcaccatgtgcgtcgagctggagctgggccagtcaggttggtgacaggattcagctgcggccattctcggccgctccggcgatcgtcggggatgggattgaggatgtggatgatcggagggtcaagcagatgcggaggaggcgcgacgcccgcatcgcgcagaaggcattcatggagtacctccatgtcacgcgtgggatttgcttcagtgatgccgagcacatgagcaagcgctcgccgatcttcatcagcaagctgctggagaaggtgaaggatgcggcgaaggagcccacggaggagggggaggaggtgcccttcaggtcgaaggtgaagaagagggagatgagggatgagagggtcagcaaggcgttggtgcggctgttcaacttccaccctatcaacgagttcgagccgttcttcgagagtatcggcatcgcgccgggcgagtatgagccattgttgcctcgtgatctcatgtttctcaatgatgatgagacgatgctcgacaatttccgggtgctttgcaactatggcatcgcgcgcaccaagatagggaggatatacagggatgctaccgaagtgtttagttttggccatggagttcttgcgtcgaagctgaaggcccttgaggatcaagggttgagtaagaccagtgtgatcaagctagtgatgtcgagccctgtcatactggtccgtgatccaaatgtggaattgaagattctgcgctggctagatgatgttggaattcagagagactggcttggccgattcttatctgtaaagaagtcttataactggggaaagatggtccaagtccctcagttcttcagtgatttaggattcactaatgaaggtattggcaaattggtcagacagaatcccgatttcttgtttagtggttcaggaaagatgctgttctcggcagtcctcgtcatgctaaaagctgggtttggaaaaaaggaattggttgatctttttctgaatttcccaaatttgtcagtcgacaatttcacgaggaacctgcgaaggggcatattcttcttagctgagattggtgttagtgaagaggacattaagaaatttgtggtgtctaacggttcaatacttggttccgtccaattgaagaaaccaaacagcattatgacacatctcagtgtagggaagaagcgcctttgcaggatggtaatggaggatccacaactgttgatgaaattctcattaggggcaaaggtcagccgcataccgaaagttgatctccatgaagcatccttcaaggagaaggtgaaatttttacagaacttaggatttatggaaggatccgaacgaatgacgaggggactcaaagcatttcgtggtaaaggtgacgagctaaaagatcgctacgacttcttggtcaagaccggtttggacccggaacatgtggtgcagatgatcactatggctccacatgttctgaatcagaagatccatgtccttgaatccaagatatccttccttgtaaatgatatgggatatcctctgagtaccctggtaattttcccttcattcctctcgtttaccgtggagagaaccaagcttaggtttttgatgtacaattggttgttggagaaaggagtgattgctactggactagctcttagcactctcctagccactgcagacaaacatttcgtaaaacgttatgtagtaaggcaccccatgggtttagaagtctgggagaaattcaagacagaggtagcttcaacaaaaaacaacacaccctgtactccagatgattagcctgatatgttatatttttctttctcatcaacttacttttttgctggctaagcaactcgttttgctgcacaccaataggttgccccaactttgtctggagtttttctccctctcttaactttaggtgtgtatatctctgttaatgattttgtccacagagaagattgttgatcttgccattgatc

SEQ ID NO: 6859 - DNA, 2729 bp, Oryza sativa
  ref <308>: DATABASE ACCESSION NUMBER: AK063993
  ref <309>: DATABASE ENTRY DATE: 2001-12-06
aaatgacctcactcttttgaggacgaactaacaatggcttatgggcttgatcactctgagtggctggaagttaaatatatcaacaaccatgctctgtttgtagggtacctgtcgatggccgtcaaaggggtgggcttcttggtgggtttatggaccaccgttgttcttcttggtggcttcgtctctatgcttgagaagaaggatttctggagtctcaccatcatcacactcgtccaaacagcaggggtgttcgatgttctcctgaacgaaaagctgcgccatgctgtgaattcagtcgatggcttcttggttactatggacatggtgttcaggtgcgaagacgaggagttcgactcgggcatccagttgtggcgttcacgagcaggacgtcttgtgacgttcatccaggcggtggtgttcgccatcatactgtgccctctggctgtgctctacctgtctgggctggtcatcagcactagtctatcgctgtggcgcctcatacagcacgactacggcgacggcgacggcagcgccaacctgactccggcgctcaatgtgctctactcactggcactcttccagggcgtcctcttcttctaccagtgggtgtcctacttcgccgggaaaaggttgatcgaaaaggtggccagtaaatattggcaaaacagtaaggaggctggcggggcgggggcgcgggcgggggcgtggcgcaaattggtgaaggtgtacatgaagaagaccaagatccggtgcgagaaggatccatccttcctagaagagtggaacctggtgacgtttgccgtggagctgatgaagccggagtccaagtccagcgactacgtgtccggggcgatgatcctggacacgatcctcgggcagaaggacctgacggcgcagcacgcgctgatcaggaagctggtcggctcggcgtcctccaggaaggtgatgaagaagctgctgcggtcgcttcggtccgcgagccagtacaaccggaacatccgggtgcacgccgcccggatcgtgtcgcgtctcgccggcgagatcagcctcgccagcttcccggaggcgctctcgtgcatatcgtcgctgctcgacaccaccaccacggagcagcaggaacagcagcagcaagacggagacagtgcgccgtccgctcactacagggatctcatggtgctgggccgcgtcatccttcagaagctcgccgccgccgacgagcacaacctttttctcatcggcaaaaagcagagcactatctccaaggccatgctgcccgtcagaaaagacctgctccacatccacaacaacggccatgtcgacgcatggaaggacatcgtgaccgagtcactgcagctcatgtcccagcttgtcagcgcccctgggaagaccggcgacgatctgcgctcccacatcttgacgattcacaaagacgacatcagagtgaataacattatcatctgtaagcaatgccaaagcaacaagaagctccacatgcaggccattaacatcttcacacagcaacagcatcctatggaagcactttcgacgacgtcttcgaatatagacacaacatatagcgaaacgaacatcaggctgctcgtagacatcttcttgactaacaaggacgcctccacaagaaaaatggcagttggcatactggcaatactgctgtccgaccaaaataaaagcaatgccaatgccaatgccaccattatcttcaaggcaagtgacaccgttgtccgtgatctcaagacagtgcttttagatgatgaggaaacagaatacagaatatgcgcagcagaaatactcgagcatctacacaggacaaaggaagcctcctatctcaagaaactgatggaagccatgcaaaatgtgctaccgaagattctcaacgaaatatttatctctctctctccacctaagcaaggagaaaagcaagcagaaaaggcagaaaaaggaacagacggaaccaagacagatcctgacattgaagaaggtgctggtgccgttgcttcgaaagataatgtcgacgtcaatgaccagaaggaggacattggtaagaaaaaaaaggacaggacgaggaaactacatgcagctttactgtcacttagtgtggcaatatttgaaaaacggatcagagatggtaaagatttggatacacttgctggtgaaattgcccgaggagactctgcatccagctttgtcggtaagctgaggacgatggtagatcaaaacagtgaacaaacagtcaattgcctgagaattctgaagattgccactaggatgatcatatcactgctaaaacttgaaggatgctaccccaaacaagagctggagaacttgatggtatctctgtccaaagcttccgaacaaatgtttgaactggaagcgttgatgatgttatctagcagcgaccataccggaaagaagactgaaagcttcggttctctcgtgaaagaagcagaaggccttatgaagaataagaaggaaaaaaatgtggcaactacaccagctagcactatgaatggaaaccagtagattgagtagattatcaactaatctgctgatattcacaataaagaactttggcgttcccagaaaattgtttgtcataaagatattctgtaggataaactccttattctgtagcatgtgtgctgaaatctagctatttgtcccatctacttatcaaacattcaagtaaaaactcactatgaaacggttgagat

SEQ ID NO: 6860 - DNA, 2950 bp, Oryza sativa
  ref <308>: DATABASE ACCESSION NUMBER: AK063994
  ref <309>: DATABASE ENTRY DATE: 2001-12-06
aaaaatggagcccaatcccccgccgccgcccgccgccgccaccgcaacctaccgccgccgcggcaagcccaagcccaaacccaagcgcaaggcagccaagcccccctcgccgtccccgccgcccaagcgccaggcccgggacgaccccccgcacacggggccactcacccgccactcgccgctcaaccctgcgccggaggatgcaccgccccagctccacgccggggagcgcgacccgcctccgcgcgcctggatagagcccgcaaagcttccgccggtgagcgaggaagtccaggccgtcctgtcgcgcggagccggcgtccacgtcgtcccctccttcgcaggatggttttcatggaaggaaatccaccaaattgaaaagcaagcattgccttcgttttttgatgggatatctttacggaggacacctgagatatatttgggaattagaaattttattatgaagaaatttcattctaatcctcaaatgcatttggagttgaaggatttgtctgagttgtcagatggggagatggatgctcagttgaaagtcttggagttcttgtcacactggggtttgatcaatttccacccttttccaccagctgtacagggggtgagtgagctggttgagagcataacaaatgctgatacagaagagaaaatttctgtagtggataaattatttcagtttgaaacattgcagtcatatctcattcctgctcctaaccaagcagaggtgacagctccgattcacaccccgagcttgctttctgagcctactctaactgaagattcgattacccaagctgagtcttctgttgagtaccactgcaactcttgctcagttgattgctcaaggaagcgctaccattgcagaactcaggcagactttgacttgtgttgtgactgttatgacaaaggaaatttggatgcaggcatgtcacaaactgatttcatcattatggaatctgcagaaattccaggctttggtggtactagctggactgaccaggagaccttgcttcttttggaagctttagaaattttccaagcaaaatggggtgacattgccgagcatgttgctacaaaaagcaaagcacaatgcatgctacacttccttaaaatgccaattatggacccatttctgcatgatggagatgttaatgaaatatctcaggaaactgcagagcaggtctcagcagaacaaggtacttctcgtgtaactgagaaaatggaagtagaagacaaaacaaaagaaataaaaactaatgatagaaaaactgctgcaaaaccaaaattgaacttgacagaaacagaagtaaacctagacgacaatgttgttgcaaataatgataccaagagttcaggtgatatcaatgtggatgtatgtagcaatactggtgtatcaaatagatcttcagataccgaacctacaaagaaggaaacttctggggaaaacacatcaaacattgttaatgatgtcctgaaatatgcttttgaggctgttggtcacattccaaagatagagggcttgggttcatttactgaagcaggaaatcctgtcatggcactggtggcatttctatctggccttgtggatcatgacgatgttactacgttgtgctgtagttcactgaaagctatatctgatatgtctcctgctcttcaactggcaacaatgcattgttttattcttcaggatccaccaaatgacctcaaagatccaccggtcagtataagctttgcaaacacagattgtgggcaacaaaaagacaaggatgctacttcaaatccaagtgttactgacaatgatgacaatttaaaagaagagtctgctttatctgtggaagagccaaataccacatccacatcatcgaaaaacaccaggaaattatctaatgcgaaggaatctaaggatgaatctccccaagtggagcccaaacccagtagtgccaacgattgtgacaatccaatttctcaggtggcaaagagggcttctgataatataagaggacacagttccactgtgcttcctgtcagtctgaataatacaaatgaaccttgttccatatcttcccaagaggctagtgcaggaaacacaaaggatacaagtcatacagaacacatagaaggagataaaccaatttatgaggatccaccattagaaggaaaggtagagttgaacaagatcgaacatgaagtcactgacttatctgctgtacagcaacatgagtccatccaaacaagtttgaagaagggctacatacaagatcataacagtattaagaaaacagttgccgatgatgtctccgtacaaaggctacagcgggcagcagccagtgctatttcagcagctgctgtgaagtcgaaactccttgcaaagcatgaggaatatcaaatccagcgactagctgcacttgtgattgataaacagctccacaagatgcaagcgaaaatgtcagttttcactgaagcagataatttggtcctgcgagcgagagaacacaccgagagaactcggaagaagcttctgatggagaggagcgcgataatcgcttctcggatggcggcatcgccacccagaccaaaccaccaacctgggatgcctgggagcagattgccggtagggtatggtgtgaatcagcatctgaggcgatcttgaggcctacttcgcacgtgctgatgacctaatgtccaccttccaagaaggatagatatagactgtagggctggcttttgtagttgtgctaatccagtaatccaccatgaccatgtgcaatatcccatgttagtatgttacaggcttaatattttgaagcgtaatattattgcctcacctagcttttagttaccccctggtagtgtagaactgctgtcacctggaatgtagtatgtattataatggtttcaagatctaggttttggtgctcctgtcaccttgtgcttc

SEQ ID NO: 6861 - DNA, 1556 bp, Oryza sativa
  ref <308>: DATABASE ACCESSION NUMBER: AK063995
  ref <309>: DATABASE ENTRY DATE: 2001-12-06
atcacctgctctctgcaaacactgtgactttgggtgagtgagtgagtgagtgaagaggaggaagatggggaagggagggaaaggagccgaggcggcggcggcggcggtggccggagccggtgaggaggagaacatggcggcgtggctggtggcgaagaacaccctcaagatcatgcccttcaagctcccgccagttgggccttatgatgtccgtgtccggatgaaggcagtgggcatctgcggcagcgacgtgcactacctcagggagatgcgcattgcgcatttcgtggtgaaggagccgatggtgatcgggcacgagtgcgccggcgtgatagaggaggtcggcagcggcgtgacgcacctcgccgtcggcgaccgcgtggcgctcgagcccggcatcagctgctggcgctgcaggcactgcaagggcggccgctacaacctctgcgaggacatgaagttcttcgccacccctcccgtccacggatccctcgccaaccagatcgtgcaccctggtgatctgtgcttcaagctgccggagaacgtgagcctggaggaaggcgccatgtgcgagccgctgagcgtgggcgtgcacgcgtgccgccgcgccgacgtcgggccggagacgggggtgctgatcatgggcgcggggccgatcggcctggtcaccctgctggcggcgcgcgcgttcggcgcgacgcgcgtcgtgatcgtggacgtggacgaacaccgcctctccgtggcccgatccctcggcgccgacgccgccgtgagggtgtcggcgcgcgcggaggacgtcggcgaggaggtggaacggatcagggcggcgatgggcggggacatcgacgtgagcctggactgcgccgggttcagcaagacggtggcgacggcgctggaggcgacgcgcggcggcgggaaggtgtgcctcgtcgggatggggcacaacgagatgacggtgccgctgacgtcggcggcgatcagggaggtggacgtggtggggatattccggtacaaggacacgtggccgctctgcatcgagttcctccgcagcggcaagatcgacgtgaagccgctcatcacccaccgattcgggttctcgcaggaggacgtggaggaggcgttcgaggtcagcgcccgtggccgcgacgccatcaaggtcatgttcaacctctagatcgatccatccatcgatcgatcgacagcaaaatatgtgacgggtttggaacgtatgtcgatcggacaaaaaaatgtgtgcttgctttgctggttgccgtgtctgtctgtctctacatgaataaaaggcggcaacgttctgtcctcatggactaagcgtgtgcattgtctgtttcaattcattcgatggttgttgaacactaggggtgggaggggggaaatcgaaactcgcagctcggatcggcttgtagcaagttcggcttggatcagcttggactcgtaatcttaatgagtcgagctgagctagccttttaactcatgagctgctcgtttaactcgttagtacaagatataaccaaaccttcgtaaacttggtgcttttt

SEQ ID NO: 6862 - DNA, 2143 bp, Oryza sativa
  ref <308>: DATABASE ACCESSION NUMBER: AK063996
  ref <309>: DATABASE ENTRY DATE: 2001-12-06
ctctatccgattcaaagctcgaatcttgctgaaaaaggagggagcttttggggtagggatcatggctcacctgctgcagcttccagacctcgcggcggcgaggccgccggcggcgcggaggaggatcgcggcggcggcggtggtggtggcggaggccaggggcggggtgaagcagcagcagcagcaggtggcggtggggagggtgatcagggtcgccgaccccgtgcgggaggggaggctgctgctgctgccgccgccgctcttctccgtgccggtcacgccgtcggagtcgccggcggcggcgaggcggcgggaggaggacgaggaggagcggcggaggtactacctcaacatggggtacgccatccggacgctgagggaggagctccccgatgtcttctccaaggagcccagcttcgacatctacaggttagtattgtcgtgctttgatttgaggagaagatttttgatccttaattgatgcaagaatttgagctagatttcatgaattgggcgtgaattagtggcgagtgctccgattggtagcttaattacatgttttacttggagggcatgcagttgccagtttatagactttgtatgttgtatcttgattggagtagtttgcaataagttgtgtcatgtggatgtacatgtttgggaattagaccatgtgtttgctgtaaactgaatagctgatatcaatttctagcctgttctgcagtactcccaaccagggtttctagcctgtagatgtacatgtttgggcgtatttgtttctgttagtttcaaattggcggtgtagcttatcgctgggtggcttagcttggagttgggttctcttggtggagttgggcttgggcagcgtatcatagttatcaagcatcagaattaccatacataggacatgaaactgctatatctagctctgtgatgtatcagtaggtgtctcttgctgatatggttgtaaacacaaccttacgattgctcagatgccttttgtggtgagcttgagccaactttgccctttctcattaccttcatgttctaattccatgaattgtttcaaacaataaacttctaattatcctgcgagtctcactccatccgatggttaagtactagtattgcagtatgtgcccggttttgaatatgtacaggaccatatagtaactacattttgatctgaacttgaattactatatacagagaatatcatatattattatatcacatgctattttctaggttaggattagtcctgtatgctttattgttccctcaatcttggccaagttcaaattttagtatgtcttatgtcttgcttgacacttgacactgttgctctgtttagttgattaaccttagtgtgcttctgcatgtatctacttatgtgattctttctaaagatgcttatgtagtctgcagtggtaggttgcatttgcttatatagcttgttaacctattttagtcttatcatcgatcttttcacatctccatttgttactgcttgttcagagatgatattgtcttcaaagatcctctcaataaattcgagggcattgataattataaaaggatattctgggcattgcgcttcaccggccgaatcttcttcaaagcactatgggttgatatagttagtatatggcagcctgctgagaatcttatcatgattcgctggattgcccatggcattcctcgagtcccatgggaggcccatggtcgctttgatggtgcttctgagtataaactcgacaagaatgggaagatctacgagcataaggtgcacaatgttgctatgaatccaccaacaaagttcaaggtcctgccagtccacgagctaatcagatcgcttggctgcccctccacaccgaaaccaacttattttgagacttcatctcaatctttgagcgttgagccaggttatttaagattggcatggacaagatgctacctactgttatgccatatgctttcgctaccaaatctgggagaaggatagcatggatttagcatgatatttctaaatttttgccctttttttgttgaatgatagtgtaccaagtcactaattggtagtacttgctgtatatatatgtacagtgataatttttatagaataagagttcttccggttgat

SEQ ID NO: 6863 - DNA, 2063 bp, Oryza sativa
  ref <308>: DATABASE ACCESSION NUMBER: AK063997
  ref <309>: DATABASE ENTRY DATE: 2001-12-06
ggatttctcgcctcacacacactctccccctctcttccctcgccgccggcagcggcggcggcggccgagaagagcggctaccggcgctgctacgcgcggcgcctgcccccgtttcgtcttgctgggtttgccggtgtgatgttggtgctatcgatttagagcggtatctgagttcctttggaggagaccactgaagtcctatgctaccttgccgagattttgtacataagacctttgtaggatgaaaggtggttgtctacagagacctcttgtcagtaaactatgcctcggcttcgcggctctcctcactgccctgattgttatcatgtcactggaagaagctccagtcctcacaatcttcagctcaacgccagaaaaattgaaagttttatctcaaggtttcctacagcagcaggagcaggaacatcttgaagatagtacagccagacagaacgaaaattgcaattatgcaaagggaaaatgggtggcagacaagaagcggccactctattctggcaatgagtgcaaacagtggctatcgaaaatgtgggcttgtcgaatgatgcaacgcgcagatttctcttacgagaattttcggtggcagccgcatggatgtcagatgcctgagtttacggggcctaacattttgaaaaggttgaggcataaaactcttgcttttgttggtgattctcttggtagacagcaatttcagtccatgatgtgtatagctacaggtggtaaatacagcccagaagttgaagatgttggatggaaatatggcctagttaaagctccaggtgctttaagacctgacggatgggcttactggtttccagggactaattccacaatccttttctactggtctgctagtctatctgaactggaacttctgaatacaacagattcagtgacatcctatgcattgcatcttgatcgtccagttacatttttgaagaagtatctccacagttttgatgtgttagtacttaacacaggtcatcactggaacagagggaagttcaatggaaatcactgggaactgtacgctgatgggaaacctgtaggcaaaggtagacttgcagatctgaaccgtgcaaaaaatcttacattgtacagcattgccagatgggtggattcagaacttgtgcgatatcctcaagtgaaagctttcctgaggacaatatcacccaggcattttgtaaatggtgactggaatactgggggaagctgtggcaataccgttcccttgtctaacggaagtgaggtattgcaggatcattcaagcgacttacctgtggagagtgctgtgaatggaactcgggttaagattttggatataactgctgtttcacagctacgagatgaggggcatatatccaattctactttcaaaggtagagcttcaacagggattaacgattgcttgcactggtgccttcctggtataccagatatgtggaatgagctcctctttgcacagatttagtgctgcacttcagtgaggggattttttttttttacacaatccgaagagttcctttggtgttctgcacagatagcacagatatgtggaatgagctcctctatacagaagctgttttagcgtagcatttaattatggaacttctggccacccatatggaagcagtcgacaatttcaagatgatagtatgcacccataagactagagatgatgctagtgtaaagttcggttcagattatttagccttttctcaagtcaagatatggaactagatgctgctacagagccttatagagtagtcccccaggtacatcgattttttgttttctttttttttttgagtaaaatgctaccacagtccacagtttaccatgtgcaacatatattttttagatacacacatgcaagttgaccaaagtgctgtatgctcttatacttttaaggtagaattcttgttttatgcctgtaacaacaatctcatttcagatgttgtaacatttgaaaagtttcatgtaatcattgtagagtttatacatagtccagaagaaatataaacatggcatctgtccattgtgcg

SEQ ID NO: 6864 - DNA, 1824 bp, Oryza sativa
  ref <308>: DATABASE ACCESSION NUMBER: AK063998
  ref <309>: DATABASE ENTRY DATE: 2001-12-06
atccaccaatccaatccaccccaccacccatcgatccaaatcccattccgacccctcccccgagtcccaatcccggacccggccccgcggacctagacgcttctagaaccacggtaccgattcccgaccccacccctcgggcccacgtgtcggcgtgagagcccagagagagacggctgtacggcactcgacgcgcggccccggattgggaatgggaatcccataccgtcaccgccgccattgactccccctcttctctctcagttctctcgcttcgaatccgatcgaagcgcacacaaaagaggagaggagaagcaaacaaattcggcttcttcttcttcttcatttttttttcgatttttgaactcgcggaagcgagccgccgccgccgagtccactcgctttctccccccgctccgccgccgattcgatccgaagggaggcagcgagcgagagagagaggtttgtcctgtgaaggcggcgatgccgctggcggaatcgcctcagtggcgccagaaggccacgaatttcttctcttcatccagcttcaagctgaagcaggcagggcaatcagcaggggacaatatagctgatgttgctggcaaggttggttcagtggttaagagtcggtgggctgtcttccaggaggctaggcagaggcagccgccaccaggggagactgtgcaagagcgtttcatctctgctgctgccaccactggggtgcttctgaggaagggcatttcagagacaaaggagaaagttgcagtgggaaaggtcaaagttgaagaggctgctaaaaaaactgctgacaaaagcaagactattttgaacaacattgaacgctggcagaagggagtcgccagcactgatgtctttggtgttcccattgaagccaccgtacaacgagagcaatctggtaaagctgtgcctctggtacttgtgagatgtgcagattatctggttatatcaggtttgagtaatgagtacttgttcaaatcagagggtgaaaaaaaagttcttcagcaattagtctctctttacaatgaagattcaggtgcacctttccctgatggtgtaaaccccattgatgtggctgcactgataaagtgctatcttgctagcatccctgagccacttactacattctctctttatgatgaacttagagatgcaagggttagcattgcagatttaagaaatatactgaagaagcttcccaatgtgaactacatgacactagagtttgttacagcactgctacttagagtaagccgtaaatcatcgcttaacaagatggactctcgtagccttgcagtggaatttgcgcctttgatcatgtggcagcaaggtgactctggaacagatttgcggaatcatcttagatttaccctaaaagcacctccaaaaattgtggatacaacatcaaataccacagaatgggatctgttagatgaggatgatgtggatgcatcttcccaaatccccttggatgacgcgtcgcccccagattacagctcaattgaggtcatccaatctctcattgagcatcacaatgccattttcactgatgcgaacgagaccgtatggagatagccagcgtctctagatttcactggtgttattagctcgtgcaatgtacaagttccaggtaggaggatggagtatttgcacattgtcgtcagggagacgcattttggtcgaaatatttcttaaaatagatttgtatatatactagtattaattctccataggaggaatctatttgtaggaccctcggcacgtctcatcaataaagctttctggtgccttataatgttcggttgt

SEQ ID NO: 6865 - DNA, 2497 bp, Oryza sativa
  ref <308>: DATABASE ACCESSION NUMBER: AK063999
  ref <309>: DATABASE ENTRY DATE: 2001-12-06
acaacacaaatcgatttctcccaaaccccccctaaactccccaccgaatctccaatgcaggtcctgctgctgccgctgctcgtcgcggcggccgtcggcctcgcgcgcgccgccgccaccgacgaccccttcctctccggcgcgccggggaaccacagctacaacatcgactgcggcggcgcggcggacttcgtctcggtgttcggccgacggtggctcgccgaccagttcttctccgccggggggcaggcgggcatggtcgcggagccgcaccggttcccgcagccgcaggagcgcacgctccgcttcttcccgccatcgtcggcgggcaagtccagctgctactccctcccgctcccgcccggccgctactacctccgcctcttctccgtctacgacaactacgactccaagctccgcaccccgtccttcgacgtctccgccgccgccacgctcgtcctctccttccgctccccgtggcccgagccggcatcgcgctacggggcatactccgacctcatcttcccctccgccacctcgcccacctccgacatctgcttctactcgctctccaccgatgcccccgtcgtcgcctccatcgaggtcgcgcccgtgcacccgctcgcctacgacggtgccaccaccggcgcggacctcatcctcgtcaactacggccgtctcacctgcgggaacaacctcttcggcccgggcttcaccaacgactctgacgccttctcccgggtctggcagtccgacatcgatttccggaacaatgacctcaactacgacgccattacggccggggggaggaagattttcggcagcaaccagccgcccaactacttccccaccaagctctacacgtcggcgatcaccaccggcggcgatgcctccaacgagatcgagtacctcatgccggtcgacaccaggatgtcctacatggtctggttgcatttcgcggagatcgatgctggcatcggctcagctgggcagagggtgttcgacgttatgcttgccgggaagaacgtgacgaggattgacattttcaagcaagtgggagggttcaccgcgttcaagtggacatacattgtggagaatttgacgagctccaccatgagtgtgaagcttgtgccagtagtaggacggccgatcctgtgcgggcttgagaattatgcaatggtgccacttgagacgaggacagtgccaaatcaagtggctgcaatgaaggcattgaaggattccctgaaaattccagcaaggatggggtggaatggggatccatgtgcaccaaggacatgggatgcatgggagggagtcacttgcctccgcaaggacaaagggcttgtgatcacccaactggatcttgcaagtcaaggactaaaaggttacatcactgatgaaataagtcatctgacagacttggtaagcttgaacttgagctataattctttgactggaagcttacctccgggcttagggcaaccttcacttgctacattggatctgtcatcaaaccagtttactggaggaattcctggcaccataggttcatcaaaattacaaacagctttactgaacaacaatcaactcgatgggcaagttccagaaagactttactcgattggcgtacatggtggtgtgatagatttgtcaggtaataaaggcctttgcggggtgcctactttacctgcttgtgcattattttgggagaaaggagggctgaacagaactggtaaaattgcactaggggcctcgcttgggtttgttctacttgtcacactcatagtggtctacatattgtgcatcagaagaggaccgtacgattatgattttgagttcccccaagatttgacttcgatatcagcaatctctgcaaaaaggaataggtatcagagggcgaagtctgtaatgcttgccgagatggaggcgcacggcccggacggttattataccaacgggggcgctcactgaattgatgggcaccggaaatggatatcttcacaggttgttgtatttctacttacagagcaaacactcattgacaattgctggcctgaagcaaggacagttgtgacttgtgactcgtgaacacaattcaccagcatcatcaacatgacgtccctgtaacttcagtcaagcatccatggcattattttgcagttacactcacagcttaattacaaatgtaaaatatgtgcatgttttatgtgtactataatacgatgaagtggtggtggggtggtagtagtagtttggtaatagtagtaggggtgccttattttttgcagaggctttgctgtctcgtattagctttagctttaggcgtgtgcactccatcagcaatgtaaatggaaccaggttgggtcaggacagattcaggcgttgaaatgcttggggggtaaaagctggtgtactcataggtgtattctttctgtataaaacctgacttcgttggcactgtctgacttcaggagattgaaaacattagctttggatc

SEQ ID NO: 6866 - DNA, 1929 bp, Oryza sativa
  ref <308>: DATABASE ACCESSION NUMBER: AK064000
  ref <309>: DATABASE ENTRY DATE: 2001-12-06
atcgcggcatcgctcgcctcctctgcttcgcttccttctccagcaagcacccgaccacaacacacacgcgagctcctcgacctcgagagagagagaaaacccaaccccgaattcggcggcggaggcggaggcagcggcgatggacccctcgtcggcgggcgccggcggcaactcgctggcgtcggcgtcgtgcggcgacgcgcagaagcggcgggtgtgctacttctacgatccggaggtgggcaactactactacgggcagggtcacccgatgaagccccaccgcgtgaggatgacccacgcgctgctcgcccactacggcctcctcgccccggccaagatgcaggtgctccgcccgctccccgcccgcgaccgcgacctctgccgcttccgctccgacgactacgtcgccttcctccgcgccgtcaccccggagacccagttcgactagatccgctccctccggcttctgctacgtcaacgacatcgtcctcgccatcctcgagctcctcaagctccatgagcgagttctgtatattgatattgatatccatcatggagatggagttgaggaggcattctacacaacaaacagggttatgacagtctcatttcacaagtttggggattatttcccgggaacaggggacatccgcgatattgggtattcagaagggaagtattactgcctgaatgtcccgctggatgatggaattgatgatgacagctaccagtccatcttcaagccgatcatcagcaaagtcatggagatgtatcgtcctggtgcagtcgtgcttcagtgcggcgctgattcgttgtccggtgataggttgggctgtttcaatctctcaggcaaaggtcatgctgaatgtgttaagttcatgaggtctttcaatgttccgttgcttcttcttggtggtggtggatataccataagaaatgttgcacgctgctggtgttacgagacaggagttgcacttggtgaagagctacgggagaagttgccttataacgagtattatgaatattttggtccagaatacagtctttacgttgcagcaagtaacatggagaacagaaatacaaacaagcaattggaggaaataaaatgcaacattctggacaatctctcaaaacttcaacatgctcctagtgtccaatttgaagagcgaattcctgaaacaaagctacctgagccagatgaagatcaagatgatccagatgaaaggcacgaccctgactctgatatgctgttggatgatcacaaacctatgggacactcagcaagaagccttattcacaacatcggagttaagagagaaattactgaaacagagaccaaagatcagcatggtaagagattaacaactgaacataaagtaccagaaccgatggcagacgatcttggttcctccaagcaagttcctactgcggatgcaaattcgatggccatcaacgcgccaggcaacgccaagaatgaaccgggaagctcactatgaactaacccacttcaggccaccagctcttatgccacggattcctgcatgctattagttacttactccgaggtgttgtatgactgtttcttctgtaggagtttacaaattacaactgtttcttttgttgaagaattccaaagtgtccaggcaatactggacgtggagacattagtctgatcaatgtactgcagagtacagaacatgtaacatgaaccaagttacagtgtatagtcttttagactgttagatggaactttcaggcgaaatgcctgtgcctacttgtgtgtgctctctgttggttgtttttcgttaaaatattttgttccggtttatcatgtacttcctacgtttttatgtatgagttgttttaaagagacaaataaatctattttttaatttataatagttaatacttaattaattatgtgct

SEQ ID NO: 6867 - DNA, 2293 bp, Oryza sativa
  ref <308>: DATABASE ACCESSION NUMBER: AK064001
  ref <309>: DATABASE ENTRY DATE: 2001-12-06
aaatattatcgatataataaggatgtgccttttgtatcatgtttgtgtggtgtacaccggcttttcctgggacggggattaatacactagcattctggaaaaggtatttttctgggcgcgacactagtgctataaattttactaagaatcctgttcaacactcacgcacaaagcacattgatattcgcttttactttttgagggatcatgttgagaagggagatgttgaattgtagtttttggacacaaagttgcaacttgctgatattttcactaaacctttggattctaatcgctttgcttttttttatggtgaattgggaataattcatcctttttggcatggtttgagggggagttttgcacctcatggttttatcaagcaaaaatatgacaatgagaaaaattgatataagagagctttgtgttatatatatggtattttcttgtgcatgctagcaatactatgaaggtttatttgtctccagcatagcttgtatgtgttctatttttttatgagacttagattttgcttttaagggagttgatgcatgacacttaaattctatacttgaattaagcaaatatgcaatgttgatgctagcatatggtttgatctataaatgatctatatatatggtttattgaattgttattcctcaaatagcttgtagttgcttattgtgcaaagagaataaaaatatgaaaaaaatgaatatcgaatccatggaaacagtcttgacgacaaggacgtattcgatgtgagcaaaataatgggtgccgaatccctggaaacagtctcgacgacagggacgtacccggaataaaagagaaaaatatgagaaaaaggctcaagaaaaatattaaaaaattctcttggttgttttgtgcaaaagctaatttgagaaagagtgataaatgcaataggtatatatgtttagtgtttatctttcaacctatatgcttgttaagatgttgcattataaatcgtatgaaatcatgatttttaattgttgattcaagcttaattgtaaaatcgttgggtcatgattatactttaatgcatgcttattatattatagatgggttcatcttctttttattgcaacacatgacatgatatgctatatgtatgctaagctcttgaacattaatgaatataattcctatacttgatgaaatcattgtcaaaagggggagaagagaagaatttttggaaagttgagagattgttgtttttggttcaattgggaatttctttcttttcaaaagtgagagaagttttcctttggaattccgagcgcgatgtgtacgtttgtacgaagtgcgctttttaccactttcgtttttatttttccaaacaccgaaacatttttgatgggtttgccaatgtgttcatcaagggggagattgtgaaatcaaaggtgttttttattattattctgtgatgaacaattggcattggagattattggttttcatatttagaatttatttgcgaagtggttttggagatgattggatttcacaggtgatctacaggtactgctggatttgggtccggttggaccgggcatgtgctgctggtcagaccggcgtgtattgcgcggtcagaccggcgcagcccgcggtctgaccggccgactctgtcggtttcggtttcgggttatttgtttggatatccgtgattgtttcatgtttatggcttctagatggatattatgcgtatgtaatactgttgtttgctaacaatgagccaagttgaggatagcttggtctcggaatatggtttctttatttgttctatgtgtaggtgactcgagatgtcgggagagtatttgcggtgatggaccgggagtcggcttggggataaaacgacgtccatggtggtcagagatcatgtgggatactaaggctagagttcaatgcacgtggttggtgaagattccatatgacatacgatggaggtattgtgtgcgtatgggatgcggagtcgaatttcaaaggagtccaaatttggtatgattggttatgtaaagtttgtttcttgtactagagggttttctagggtgattaggacttctagtatgagtttggttcgtggctttaggctgcctaccttgggtataaatagagagggagcgtgaggctttctagtattgcttttgagagcaattgagttgatagtcgagttagagtttcgagtttagtcgagatttttgtaaggagtgctattagtgcactttgtaaacacagagagaatcaataaagtcgtcatccactttaagagttc

SEQ ID NO: 6868 - DNA, 1859 bp, Oryza sativa
  ref <308>: DATABASE ACCESSION NUMBER: AK064002
  ref <309>: DATABASE ENTRY DATE: 2001-12-06
ctctcacactcgactccggcgagagcacgggggccaaagccggcagagcgcggctagggcttcggctgctccggccatgcgggtgctccccctcgcgctcgccgccgccatcttctccggcgtcaccgccatcctcgtctacctctccggcctctcctcatatggcggcgctagggtttccgatgcggacttggcggcgctgggcgcgctgcagagcggcttcagcaagtgtgtggatgcaaatggtctagggctgaaagcaattccaggagaggattactgtcgagttgtaatacagtatccaagcgacacagattctaagtggaaagatccaaaaactggagaacctgaaggtttatcatttgagttcaatctctgtgaagctgtggcttcatgggagcaggttcgcaatagcacaacaatacttacaaaggagtacatcgatgcgttgccaaatggttgggaggagtatgcatggcgcaggatcaataaaggaatccatctgaacaagtgccagaacaggactctttgcatggaaaaactttcattagttcttcctgagacaccaccatatgtacctcggcaatttggtagatgtgctgtagttggaaactctggggatcttcttaaaaccaaatttggggatgaaattgattcttatgatgtcgttattagagagaacggtgcacccatccagaattatacagaatatgttgggacaaagagtacatttcgacttcttaacagaggatctgcaaaggctctagataaagttgttgagttagatgaaacaaaaaaggaagcccttatcgttaagacaacaatacatgatatcatgaaccaaatgatccgggaaattccaataaccaatccagtatacctcatgctaggcacatcgtttggttcctctgctaaaggaactgggcttaaggctcttgaattcgctctgtctatgtgtgacagtgtcgacatgtatggatttacagttgacccaggatacaaggaatggaccaggtacttttcggagtccagaaagggacacactccattacatgggagagcatattatcaaatgatggaatgtcttggtcttgtaaaaatccactcacctatgcgaggtgatcctggcagagtagtaaagtgggctccaaccaaggacaccattgaagctgctagggttgcttctgagaaactgttgaagagacctggggctggaagcgagggccctttgagctcttgcaccatgataaagaagcgcgagaaagggaagacaccaaaaagatctgttgtccgccatgctgccttgaagcatctggagtacatgagaggtgccaccaggtaccctctggagcggaatgctgggggtggttacctctgcatgatcaacgaaagatagacatatagctgcccatattctaggagtggctgaattcatggtaccatgaagcagaacactgtaccccgatgaatgaatcctacacggataaactattttgagggaacattggtgctcatttttgtacagagccggcagttgagatgattttacgcatgagtagtcacaatgtgttgtaacttacattgaaactacacaagtgttgtgtgatggaatgaacagatagcggggcagtttgctgcgcaatgcatcgggtcgccaaatttgtcacctgtaactagaagaaatcttaactatgtacatggagcctgtaattcgtttggcagtagacatgcactatttgattggcatgatggcatcacattctggaacttactatgtcttaacttgcatagatatgttgaccaacaacttgaggcaaatcattagtatacaaatgatctctctgatactatttccaatc

SEQ ID NO: 6869 - DNA, 2108 bp, Oryza sativa
  ref <308>: DATABASE ACCESSION NUMBER: AK064003
  ref <309>: DATABASE ENTRY DATE: 2001-12-06
agagtacgatttgatactatctgcgattccgcctcccctccccctcgccgccgccgccgccgcggggaaatctaggcgagactccactactaccgcacgtgtcgtaatggctcggaacaagaagaaggtagccgtggcggcgcccaaagcccggaagccgaagcgtgatgcagaggagaagaagttcgcgaagaaggccgacatgacggagttccgggcgcagctggactcgctggggttgaagattatcgaagttagtgcggatggcaactgcttctttagggcaatgggcgaccagctcgaaggcaacgaggaagagcacatgaagtaccgtgcaatgattgtgcaatacattaaggagcaccgtgtggattttgagccattcattgaggacgaggaaccgtttgagaaatattgtgactctatgcttgaggatgggacttgggctggtcatatggagttgcaagcagcttctattctcaagagaaaaaacatatgcatccacatgcttaactcaccacgatggtacataagaaacttttctgatcgtgaagctaccagtatgattcatttatcgtatcatcagggtgagcactacaatagtgtcagactgagggaagatccatgtcaaggtcctgcaatgccagttattatcaaggcagatgccaatgtagctagcacaagcaataatgctcaaacaaaagcaaaggcgaaacagctcagaaacacaacagttcacattctaaaaagggaaagtcaaaaaccaaggaatgctcttgtggatctgctaggaagcacaagccttcttgtaatttagccacaactgtagcatcgagagaacctccaaaaacaactgcaccatcgagagaacctccaaagtatggctttataatggttttgctaaaaatatggcgccacatttttgacttgatttcagtcatttttttcccattcggattgctaccattcttttatactcctatgtaagtatgtttcgctctactatctcctctttcaagtaggtaattaattgttttcatcctaattctcttatatagtgtgtgctgcaaaaaatatggtgtaagtattgagatttggttttaattttttttgttttttggtggaaaatgtggtgtcttaaatatagctaatcccctttataatgtttctgtccttttgtttgtcttttaccatattctattctacaactgaacttatgtcctgctgttcgcattgtaagcattctttcaaatggaatttttggggggtgaaatcaatatttccagcgtatttgcatagtgcattgctgctgttgtatctggcctatgaaaccttaacagtattgctgcaaaatatgcacttatcccatatgccttaaagtcaccgacctgattactatttcctttttcactagggaggttagttgcattgcatgtttaacacaatgctggaagtgttatgtactaatactatctgcttaatgtgctttactatcaggaccaaaggtggccaagggaaaggccagaaggggaagaagcaaaagaagaaagaacaagatgaaacaccagccatccggaatcacgattctaaagttgcaccagatctaggagctctttgcatatgaacatggtcgacgagggtgatgttctcctcagtgtgtagccgccaggaatgtgcggggcatcagttttgaagagagatgtctgcggtctaccttgcttggacgccatgatctagatggtgatttttctcttgcccagttgacggcttcacgtcactgccttctgctgactgactgttgttaagcctgtccaagtttcaggatgggatcatgggactgacggtgaggtggtgatctcagtgggcacagaaacatgaatgagctgttgatacatagcttcttttcttcatacatactttacctgtggatcaatgccatgtaaaacaatgatcagtcgtgcaaagcatattaattttgtgagaattatatcataatagagtattccctgtcctaacaaaacaaaaatacgctctattgtttgagatggagggatagtataatgggttcatcctggagtatatatagccagtcagtcacaattgccttc

SEQ ID NO: 6870 - DNA, 2227 bp, Oryza sativa
  ref <308>: DATABASE ACCESSION NUMBER: AK064004
  ref <309>: DATABASE ENTRY DATE: 2001-12-06
acgaaaagagagagagagagaagagagttttgtagcgagctcgcgcgaatgcgaagccaaccgagagaggcattcaccaacgagcaagaggggagtggattggttggttaaagctccgcatcttgcggcggaaatctcgctctcttctctgcggtgggtggccggagaagtcgccgccggtgaggcatggggatggaggtggcggcggcgcggctgggggctctgtacacgacctccgactacgcgtcggtggtgtccatcaacctgttcgtcgcgctgctctgcgcctgcatcgtcctcggccacctcctcgaggagaatcgctgggtcaatgagtccatcaccgcgctcatcatcgggctctgcaccggcgtggtgatcttgctgatgaccaaagggaagagctcgcacttattcgtcttcagtgaggatctcttcttcatctacctcctccctccgatcatcttcaatgcaggttttcaggtaaagaaaaagcaattcttccggaatttcatgacgatcacattatttggagccgtcgggacaatgatatcctttttcacaatatctattgctgccattgcaatattcagcagaatgaacattggaacgctggatgtaggagattttcttgcaattggagccatcttttctgcgacagattctgtctgcacattgcaggtcctcaatcaggatgagacaccctttttgtacagtctggtattcggtgaaggtgttgtgaacgatgctacatcaattgtgcttttcaacgcactacagaactttgatcttgtccacatagatgcggctgtcgttctgaaattcttggggaacttcttttatttatttttgtcgagcaccttccttggagtatttgctggattgctcagtgcatacataatcaagaagctatacattggaaggcattctactgaccgtgaggttgcccttatgatgctcatggcttacctttcatatatgctggctgagttgctagatttgagcggcattctcaccgtattcttctgtggtattgtaatgtcacattacacttggcataacgtcacagagagttcaagagttacaacaaagcacgcatttgcaactctgtccttcattgctgagacttttctcttcctgtatgttgggatggatgcattggatattgaaaaatgggagtttgccagtgacagacctggcaaatccattgggataagctcaattttgctaggattggttctgattggaagagctgcttttgtattcccgctgtcgttcttgtcgaacctaacaaagaaggcaccgaatgaaaaaataacctggagacagcaagttgtaatatggtgggctgggctgatgagaggagctgtgtcgattgctcttgcttacaataagtttacaagatctggccatactcagctgcacggcaatgcaataatgatcaccagcaccatcactgtcgttctttttagcactatggtatttgggatgatgacaaagccattgatcaggctgctgctaccggcctcaggccatcctgtcacctctgagccttcatcaccaaagtccctgcattctcctctcctgacaagcatgcaaggttctgacctcgagagtacaaccaacattgtgaggccttccagcctccggatgctcctcaccaagccgacccacactgtccactactactggcgcaagttcgacgacgcgctgatgcgaccgatgtttggcgggcgcgggttcgtgcccttctcccctggatcaccaaccgagcagagccatggaggaagatgaacagtgcaaagaaatgagaatggaatggttgatgaggagaatacatgtaaaatgtgacagcaaaagagagaaggcaagttttgggtttgtagagtttggctgctgctaatgagttgttgatagtgcctatattcttcagaacttcagatggtgcctcaccaaggcctaagagccaggaggaccttctgataatggttcgggatgattggtttgttctgtcaggatgaaccctagtgagtgacacagggtgatgtgctccgacaacctgtaaattttgtagattaacagccccatttgtacctgtctaccatctttagttggcgggtgttctttcctagttgccaccctgcatgtaaaatgaaattctccgccaaaatagatttgtgtgtataataattttgcttggttgatataatggtatggcatggtttgc

SEQ ID NO: 6871 - DNA, 1579 bp, Oryza sativa
  ref <308>: DATABASE ACCESSION NUMBER: AK064005
  ref <309>: DATABASE ENTRY DATE: 2001-12-06
ctagcagcctcgctctcgcctccctcgtctcctcgacgcgatgccgccttcgccctctctcaaaccctagcctccgcctccgcctttccctcccctccccgtcgcgggcgcctccgccgccgcgtcccccgtccccgtccccatccccatcctccgtccgctagcgccgccgctccgtccttcccatccagatcgcgccaccccgtccgcccgcgcgtcgtacgcctccaccagctgccggtcctccgcctcccggtcaagatccggcaccgcgccgctttcctccgtcgccgccatcctccgtcgcctccgcctcccgttcgagatctgcagccccttctctgcacgtcggtttctgcgctgccgccaagaaggtttcaattttggtaggaacaccatctcaagtgcttatttagcagatatttgcttgtggcgagacagaaattggccctgtttgtgcaactaattcctttcttctgtaaccaagacagttcgcatttggcaagagagcgagggtggaaaatataattgcatccacacattgaaagatcatactgctgaggatattccgccattcgccaccatggctaacatcagaaccgtctccagcctcggggaggtcaacggtgccctgcaagagatgggtatcaatacgattgatcaagctcatcaagttcaatttcgtttacacaagcaaacatcccttaaagaagcaacagaaataaagatgatgatccaaactggaaggcatggattcaggttggttaaccctgagcttttagattgtaagtttgatgccagggttaagctagaggagtggtacaataccatgctcgacgcatgcatggcacagtgtgatcatgagctgttctcgcttgaagctagcattgcggagctaaaggatctcatgctttccacagacgatcagattccacatattggacctgaagttcaccacaggaaccgtggagtgcaacaaatgctctacccaaaccctccattcccgatcgatcctgattatgagtttggtactccgcaacaacgagtcccatatcaagcggcatacactacagatgcagagagaaatgacgcagtttctcgtgacaagcgtgctcagagggcggtttggaatactaatctccgtcttctagaggtgaagaaatccgccctggagaagaagaagactgagctggagagacgtctgaaggcggagttcaagaaagtgaatgagcagcaatctgacttgggggttggatatgcgaactaccagtctccttaccaggcataatttccaaggtgccaattatgtttctttacctctggaatctacagtcacgaaaatgcagcagtggtaggctgtcaatgtactggaccaactatcctgataacatcagggactgtacctaccaccaagcaactaatcatgtagtttctgacagaggatagcatcttttcagtgtttgtaaattttgtattccttctgctgtataatttcaagatataatctgctgtgttatattgagacatgtcgacatctttgctgctttgtgacatttgaaataagattagtttatatgtc

SEQ ID NO: 6872 - DNA, 1911 bp, Oryza sativa
  ref <308>: DATABASE ACCESSION NUMBER: AK064006
  ref <309>: DATABASE ENTRY DATE: 2001-12-06
agaggctcgtgctccgcttgattcccccttcctctttccggccatcccactgccccttcccagcctcctcctctcgccgccggctagaagcgccgatagctgccgtcctccgtcacttcctgctccggtcgcgttcgtaccatcgtgttactcccgtgtatgcccgttccagccgttcgggacaccatgcgcaccacctgtttgcgggattgtctagccaagctgttgcgccgcgggggccagcgccagggccagagctgattctgctgccccacacagttatctttcgcgcgggggatgacgcggagccgcaacgtgaggcaacggagcaagaaaaagcgggtgcacgcgctcgaggtggccacggagcggtggaaggtgctcaccaaggtgctcgccgtcgtcgacgcgctcaagaaggaggaggagcacgtcaccccgctcaagcgcctcgagatcctgcgcccgcagcttgggctcaccaagcccaacaaggtcgcccacttcgtgagccgctcgccgcagctcttcgaggtctgccgcgacagccgcggcgtcatgtgggcgggcctctcgccgcaggccgaggcgctcatcgaggaggaggcgcgcctgctggaggatcactcgcgcacggccgctgagtacgtcaccaggctgctgatgatgtcggtggaccgtcgtctggctatcgacaagattgcacatttcaggcgcgacatggggcttcctcatgatttcaagacacgatgggttcacatgttccccgagcagttcagggtggtcaggttggaggatggcgattacctggagcttgtctcttggaacccaaactgggcagtcaccgagctcgagaaaaagacagcagcattgactggtgatgcaaatgctaacggcattggcagtccaccaggagagctctcactatcattccccatgaagttcccaccaaattttacaagttactacaaattctacggaaaagttcatcattatgtgaaaaaagggaataccgagcagtttcagaagacaacatacctatatccttattcagaggcaagaggattgactcctggctcgcctgaatttgataagagggcagttgctgtgatgcacgaggtactgaacttcacgttggaaaagaggctggtgattgatcacctcacatatttctgtcgtgagtttgttatgccgcagaagttgatgaggctgcttctgaagcattatggcatcttttatgtgtatgagagggggaagcggtttagcgtgttcttgacgaagtcttatgatgggacaaaattgatagagaagtgcccactggtgaggtggaaggaaaaagttcttcaacttaccagctatagagggaggatcaagaatcttggtaaatttgccgagttgtttgattcagaggactatttgtttggtaatgatgatagtagcagtgctactgattctatattggatgtcaaaagtgaagattcagatgatatcatggatgatggcgctcttgcagatgatactgagatggatgtaggggatctaagtgattgttgcatagagtgaataagtgacatccattaatttaaagagcagtttttgatatttgttccctaacaatcaagctccaaaagtaaattcttgtgatcctagggcaatggttatattctcttactccctcgctcatggcatatttggattctttatattaacccggggcttaaatagaaactcttgctgattggatatgtacttcttgcttattgctaaaaatataaaccatgcgtactttatgtttatgtagatcagttggttcttccttttttattcacagaagatgatatttgcaaaaaattgtgccaaagcattatatattgaagttatgaaacgtcaagcaagatttgttttaacagt

SEQ ID NO: 6873 - DNA, 2518 bp, Oryza sativa
  ref <308>: DATABASE ACCESSION NUMBER: AK064007
  ref <309>: DATABASE ENTRY DATE: 2001-12-06
acttcgctcgctccctcggtcgctcggccgccatgtcgtcgcaaggagcaggaggaggggtaggggacccggagctgttcgcggagctgtggcgggcctgcgcggggccgctggtggaggtgccgcagcgggacgagcgggtgttctacttcctccagggccacctcgagcagctgcaagagccgacggacccggcgctgctggcggagcaaatcaagatgttccaggtgccgtacaagatcctctgcaaggtcgtcaacgtcgagctcaaggccgagacggaaaccgacgaggtgttcgcgcagattaccctgcagcctgacccggatcaagagaatctgccaacattacctgacccgccctgccggagcagccgaggcctgtggtgcactccttctgcaagatcctgaccccatccgacaccagcacccatggcgggttctccgtgctccgacggcatgccaacgagtgcctcccgccactggatatgtccatggcgacaccaacccaagagctcatcacaaaggaccttcatggatctgagtggaggtttaagcacatctacaggggccaaccccgtaggcatcttctgactactggatggagcacgtttgtgacatcgaagaagctgatttctggcgacgcgtttgtctacttgaggagtgagacaggagagcagcgtgtcggagtgaggcgtcttgtgcagaaacagagcacaatgccggcatctgttatatcaagccaaagcatgcatcttggtgtgcttgcaagtgcatctcatgctatcaagactaattcaattttcctagtgtactacaggccaaggttaagccaaagccaatatattgttagtgtgaataagtaccttgcggctagtaaggttggatttaatgtgggcatgaggttcaagatgagttttgaaggggaagacgtcccggttaaaaagttttctggaactatagttggtgaaggtgatctttctctgcagtggtcaggttctgaatggaagtccttgaaggtccaatgggatgaagtcacaaatgttaatggccctgagagggtttccccttgggaaattgaaacatgtgatggcactgcacctgccatcaatgtacccctgcagtcagcaacgaaaaacaagcggcctagggagccaagtgaaactattgaccttcaatcactggaaccagctcaagagttttggctatctggaatgccacaacagcatgagaagacaggtattggttccagtgaacctaattgtatctctggacatcaagttgtttggccaggcgagcatccaggatatggtgccgtgagtagttcagtttgtcagaatccgctagtacttgaaagttggttgaaggatttcaactcttcaaacaagggtgtctcccctaccttgtcagagatttctcagaaaatttttcaggttaccagcaatgaagcaagaattgctacatggcctgcacgttctgcttaccaagctgaggagcccacttccaagttgtcttcgaacaccgctgcctgtggttaccgaactgaagaagttgctccaaatgcgtccaaggttgttgaaggaaaaaaggaacctgccatgtttcgtctgtttggtgtggatttgatgaaatgtaccagcatatctactaccactgatgacaagtcaagtgtgggagcaggagaagcttcagccaaaggtactggttctcacgaagactctggtcagctgtcagcattctcaaaagtgacaaaagagcatattgctgcggatgaaagcccccaagagatccaaagccatcagaattacaccgctagaactcgcataaaggttcaaatgcatggaaatgctgtgggcagagctgtggatctagctaatctagacggatatgagcaactgatgaatgagctggaagagatgttcaatataaaggacctcaaacaaaaatggaaggtggctttcactgatgatgagggtgacacaatggaagttggagatgatccttggctggaattttgccagatggtcagaaagattgtgctctatcccattgaagacgagaagaagatcgagcctcacccgaagttactgtcttcagctaatccagagcaggatcagaagactgggttttaggagggaggctagggctgaaaggtggattttttagcctttcaccattgaagcgttggtggctatcgttttgtcgttggagatggtcgtagctgaaaaaatggtggctactggctagttcatcgtattgatgcaacagatttgttgctggtgtcaaaactgtttcttcacaagcattttgaagaacaaattgatgtaacataggtttcaagaaaaaaaaagatttgacaatgtctctttagtagtttgctcaagtttagtcaaaaccttaatggtgcttaaggaataacgtgaagctataaaactggtgtgtaagttctgtaaatattataagggagattataattttgtgatattagctttcaccctttaatttattggtatatattg

SEQ ID NO: 6874 - DNA, 2027 bp, Oryza sativa
  ref <308>: DATABASE ACCESSION NUMBER: AK064008
  ref <309>: DATABASE ENTRY DATE: 2001-12-06
tttgtgcaaggttttggcattattagcaaaccattaactcagttactaaggaaaggggtaccataccagtggactgccgacactgatgcagcattccagaaactcaaacaggcactagtgacagcaccagtcctagccctaccaaatttcaatgaaccattcatagttgaaacagatgcatctgaatcaggtattgggccagtattgtcacaaaacagccatcctctggcttatgtcagtaaagcattgggtccaagaacaaggggtttatccacatatgagaaagagtgcatggctatccttcttgctgtgcaccactggagatcttattttcaattaagggaattcatcatattgacagaccatcatagtcttatgcatttatcagatcagtgacttcatacaccctggcaacataaggcatttactaagctattgggtctcaattataagatctactatagaaaggggactagtaatgcagcagctgatgcactctccaggaaatatcaagaagatggcaaaagattttgtgcatcagtgtcaaatctgtctacaagctaaacctgatagaaatcggtacccaggactattgcaacctttacctgtgccagaaggggcatggcaaatcatttccatggacttcattgaaggacttcctcgatccttcagatatgattgtattctggtcattgtggacaaattttccaagtatgcccatttccttcctctatctcatccctatactgcaattgatgtagcaaagctattcatggtcaatgtctacaagttacatggcttgcctcagaccattatttcagatagggatagagttttcactagccagttatgggagcagctattcaagggagctggaacacaattgcacatgagcacagcctatcacccacaatcagatgggcaaactgaaagagttaaccaatgtttggaaatctatctcaaaagttttgttcatgctactcctactaagtggttttcttggcttcatttggcagaattctggtataaaactagttatcattcttccctgtcatcatcaccttttgatgttttgtatggtcatcctcctagacatttcggcatcagttcagctgattgcgctatacctgacctggctgtatggctcaaggaaagaaatctcatgcaagctcttatcaaacaacatctcaatagagcacagcaaaagatgaaacacatggcagacaagaagagaagttttcggtcttttgcagtgggtgattgggtctacctcaagttacaaccatatgtccaatctttagtagctcccagggcgaatcataaactgtcatttaagtattttggacctttcatgttttcgagaagttgggttcagtggcttacaggttgcagcttcctaaatccagtactatacatcctgtattccatgtttctcagctcaagggtgctaaggatttccaaccaccagtgttgtccgacctgcctggccctaaccaagacctgcaattcccagctcgtctcctggattcctgtacttacatgaaaggtaattctccagtccatcaagttttggttcaatggtctcattcggtgccagatgaagcaacctgggaggacttggaggatttataaacaaggttccctgctgcattggcttggggacaagccaattgtcaaggaaaggggattgtcagtgaacctgaagggatgacgaagccaagcattgtcgatgacggtgaacagttcactgaagaagaaggagatgctgatacaagagtgggccggatatatccaagacgcgcaagaaagaagaacccattgtatactgggccagattgggccatgtaatagttgcgtgtagctgttgtgttgctgtcacagctggcaagagaggagtgggtgagagagagacttaactgtatataactgaagaaactcaagaacagagtcgatcttggcaattggtggcgatggtggcggtggctcaatcctgttggatttgagaatatattggagaggagattgcc

SEQ ID NO: 6875 - DNA, 2271 bp, Oryza sativa
  ref <308>: DATABASE ACCESSION NUMBER: AK064009
  ref <309>: DATABASE ENTRY DATE: 2001-12-06
accgattcctccgcaaaaaaaaatataaaaaccgcgactttgtgagcgatttgggagacggttttgttgctcccccacttctgactccacacgccacgccacgcccgcgcgatggcttccgacggcgacggcgccgcggcggtggcggcgctggggatctccggcggcgggggcgacgactgggcgccgccgctgcggcggaatctcccgctgctcgcgccccacgaggttaagcttgcaaaattgctgctgagtgaaggacagtcacatttgtttgaacactggccggaaccaggtgttgatgatgacaagaaaaggaacttctttgaccaggtctgccgccttaattcaagctatcctggtgggctggcatcgtacatccagaatgcaagaaagcttttagcagattcaaaggcaggaaaaaatccatatgatggcttctcaccttctgttccttcaggggaagtattgacctttggtgatgacaactttgtttcgcttgaagaagctggggtaaaagaagcccgccatgcagcatttgttcttgtagctggtgggcttggtgaaagacttggttacaaaggaattaaggttgcacttcccagggaaacaactactggaaaatgctttcttcaacattacatagaatctattctagctttgcaggaggcgagctgcaaattggtagagggtgaatgcaatacaaagatcccatttgttattatgacttctgatgacacaaatgcactaaccgtcaaacttttggagtcaaactcctattttggaatggaaccatcacaagtgcacattcttaagcaggaaaaagtggcatgtttagctgataatgatgcaaggcttgcattagacccaaatgacaagtacaaaatccagacaaagccacatgggcatggagatgtccacgctcttctttattcaagcggcttgcttgagcaatggaagagcacagggcggaaatgggttctctttttccaggacacaaatggattgctcttcaatgcaataccatcagcattaggtgtcagcgccaccaaaggttataatgttaattctcttgcagttccacggaaggcaaaagaagccattggaggaataacaaaacttactcatgtcgatggtagaacaatggtcatcaatgtcgagtacaatcagcttgatccactccttcgtgcaaccggacatcctgatggagatgcaaattgtgaaacagggtactctccataccctggaaatataaaccagttgatactggagattggaccatatatggaggagctccagaaaacacacggtgccatttcggaatttgtaaaccctaagtatactgattctaccaagacagcatttaaatcgtccactcgtcttgagtgcatgatgcaggactatccaaaaacactacctccctctgcaaaagttggatttacggtgatggatgcgtggcttacttatgctcctgtaaagaataatcctgaagattctgctaaagttccaaaaggtaatccttaccatagtgctacttcaggagagatggcaatttacagggcaaacagccttattttaagaaaggctggtgcacagatagctgaccctgtaattgatactttcaatggccaagaggtagaggtttggccacgcataacctggatcccaaggtggggtcttatattcaaggatgtcaaagccaaagtccatagcaactcttcagtttctcagaggtcagccttggtcatcaatggcaagaacatcaccattcaaggcctctccttggatggcactcttatcgtaaatgccaaagatgaagccaagttcaatgttacaggtcatatagagaataaaggctggactatccagcacgtcgatcacaaggacacctcggagaaggaagagatcagaatccgcgggttcaagttcaacaaggttgaacagctagagttgaactactagccagggaagcattgcatgaacaaatcatccctggtttacatcatctgcaaccaaaatgttcagttgaaaataatccacattaggtggccatatatgtgataagctgatactattcgttggtctcccaagtgataaataaggagctaactgcttcaccaattaagcaattatcaatcctaagtgtaaatttttacagtagccgttatttacagccaagtcattttaatgtaaaataactgaagttacgtaggatgcttgtactgaacacttagtattgaagcaaccaagatgccttgaaatgtccttgtc

SEQ ID NO: 6876 - DNA, 2020 bp, Oryza sativa
  ref <308>: DATABASE ACCESSION NUMBER: AK064010
  ref <309>: DATABASE ENTRY DATE: 2001-12-06
acgacaacgggagccgaaaaccgcagggggttcacgggccgccgcccccactgcaccctctcccacccccatcacggcgcctcctcgccctcgcgccgcccgccgtgtgccatggcggaagtagcggcgacgcagcacggccacgccgtcgccgcgcgcgcaatgccgggccgcggcgaggtggacacgtcgtccccgttcgagtccgtgcgccaggccgtcgacctgttcggcggcggcgccctctccccctggcgccaccaccacccgcctccgcctccgccgcccccacccctgcaactccgcccggaggaggtagaacttatgaaagttgaggaacaaactgtgaagttagagatggagctttttgtcaaggaaaaagaaacgtttaaggttttgaaagaattacaggcaacaaagcaggttgctgacaacttgaagttacagttagagaaggcggcatctgagagtgcagcttctgcaagaggtcacagtgatgcagggaaggtgtatccactccctgacaccgaacggaaatgcagttaccatactgggcagccggtcgagagcgcaaaaggaaatcagtccgcgctaaccacattgatcaagctgaatcaggcaaaggcattcctaaacatggatactgtcatgacgattaagaggcagatagaggaggagaaaggatcacttgaaaaaactcgtgagaggttacagttgaacagagcgaaggcttcatcacttgaagcagacttaaacaaaattgtttcacagttacaagcagcaagaggccccaaacctactcttgaaccttctgatatctggttgcagatgaaacagttaaattcagagaaagagaaacacaggaagattgctgatgactcgaagaatgagattggcgaattaaccgccacgattgagcacacaaagtccaggacgaagaccctacaattcaggattgtcatggctgaaaaattgaaggaagcctcaaggcgcggagaagctcttgctcttgcagagagaaagaacctgagcaatggggagcacgaggccagtaccgcatccgatgtcacactttctgtcgaagaacactcagtgctggtgcaaaaagcagaagaagcagatgccgcgtgtaggaagaaaatcgacgcggcaatgcaagagctggatcaagcaaaccggggcaaactggaactcttggaaagagtagaggaggcaatggctgcagttgagaccagcaggaaggctttggaggaagccctaaagagggaggaatccacgaacaaagcgaagctcgtagccgaagaatcactcagaaagctgaggtccgagcaaatcatccagaattggcggcccaccggcaacagctccgtcaaattcaagacctcagcagcgacgacggcggcggtggtggctcaccggagagccggctccgggatctacgacgtgaacgggctgagcctggtgacggcgacgcccaagagcacgaaggcgatgtccatcgggcagatcctgagcatgaagctggaccaccgggagctcgaggtcgccggcaagggcggcgacgccaagaagaaggtgtcgctggggcagatcctgagccagaagtacgacgccctgtcgccgctgaggatcgatcacggcggcgcgtcgcgcaggcagttccaccccaggaggaggaagctggggttcgtcgtgtacgcgctgctcctcgccaagcacaggcacaggaagaagaggcagcccgccgccgccgccgccgccgactcctcctcttgcacccatggcagcttcagcaccaaggctgtgtattaattagcaacattttttttttcttctggatcaatgagtagtagctatgcagtgtaatagtacagacttatgaataatcagcatgtgtaattagttagttctatgcacaaagttgaaattcagcagctactccaggttgtaagtatgtacaaacatctactgttcttgcggtttcgagagaaatttcaaccgcggcgatgaatgctctgtt

SEQ ID NO: 6877 - DNA, 1868 bp, Oryza sativa
  ref <308>: DATABASE ACCESSION NUMBER: AK064011
  ref <309>: DATABASE ENTRY DATE: 2001-12-06
agatggatcaaaaccgccactgaaagggatcaactaaactactgatgaaaaaaagttgagtgctttagacaaaaacacaaaactttcacgtgcctccctccaatcccagattatttttctatagatcgatcgatcgagccccgtgaatgcgattctgcgcgcatttccggagcgtcttttgatcgtggttgggtttgtctgaaccgaactccaaaggtctcgcctttcttgctctgaagcttttctttagcttttcgattcgcctgtcggggaccgggatcatggcggcggtggaggcggagaaggtggtggcggagctgcgggagaggtgcgcgacgccggcgtcgctgctgcgggatgtggcggcggcgatggccggcgagatgggcgccggcctggagaaggagggtgggagcagggtcaagatgctgctctcctacgtcgacaagctccccactgggagagaggatggattgttctatggattggacctaggaggaacaaacttccgggtgctcaaggttcatcttggtggcagcaagaagcatgtcgtcaactctgaatccagggaagtcagcatcccaccacacctgatgtcagggacctcctcggaattgtttggtttcattgctggggaattaggcaagtttgttgctgaagaggaggagggtactgacatgccaaacggcaagaagaaagagctaggattcaccttctcttttcctgtgaggcaacgatctgtggcatcgggtacccttgtcaagtggacaaaggcgttttccattgatgatgcagtaggtgaagatgtggtggctgaactacaaacggctatggtgaaacaaggtctggacatgcatgtagctgcattgattaatgatgctgttggaacattggctggagcaagatactacgatgaagatgttgtcgcaggtgtgatatttggtactggcacaaatgctgcatatgttgagaaggcaaatgctataccaaaatgggaaggggagttgcccaattcaggggatatggtcatcaatatggaatggggtaatttctattcatcgcatcttccagttactgaatacgatgaagcattagacaaggaaagcttaaaccctggagagcagatatatgagaagttaacatcaggaatgtatttaggtgaaatcgtaagaagagtgctgcttaaactgtccttgcagtctggaattttcggttctatagataactccaagctcaaaacttgtttccatctgcggactccgcacatttctgcaatgcaccatgatgaaacacctgacctaaagatagtggctgaaaaattgcatcaaatcctagagattacacatacatccttagagataaggaaaatggttgtcgaaatatgcgatatcgtggcaaggagggcagctcggctggctgctgctggtgttgcagggatcctcatgaagcttggaagaaatggcggcatcaacaatcagcgctcggtcatcgccattgatggaggtttgttcgaacactacaccaaattcagggaatgtttggagagcacgttgggtgagttgctgggagaggaggcttccaagtcggtagccgtcaagcacgcgaacgacgggtcagggataggggctgcccttattgcagcctctcaatctcgatgaaaatttgctagataaatagtagtatatgccgtccatttttgctctggagtgaaaaaaattattgaaaaaacctagctttgttgtatgtgctgcttgggcatggtggaactggaagcagtctgtaaccaaaatgaggcttgatatactgtcgccctgcatagttgtaacctgaaataaaattggaactgcaaaaccttcattgttacctat

SEQ ID NO: 6878 - DNA, 1794 bp, Oryza sativa
  ref <308>: DATABASE ACCESSION NUMBER: AK064012
  ref <309>: DATABASE ENTRY DATE: 2001-12-06
aaaaccaacacccccactcatctcacttcactctctttctcttctcttcacttcaccaccgccacctctctcatcggatccctgcagaggaggagagggcagtggcggcgaaaggcgacatgggctcgctgtcctctctcgccgccgcggcggtgtttctctccctcctcgccgtcggccactgcgccgccgccgacttcaacgccaccgacgccgacgccgacttcgccggcaacggcgtggacttcaactccagcgacgccgccgtctactggggcccctggaccaaggccagggccacctggtacggccagcccaacggcgccggccccgacgacaacggcggcgcgtgcgggttcaagcacaccaaccagtacccgttcatgtcgatgacctcctgcggcaaccagccattgttcaaggacggcaagggatgcggctcttgctacaagatcagatgcaccaaggaccagtcgtgctccggcaggtcggagacggtgatcatcaccgacatgaactactacccggtggctccgttccacttcgacctcagcggcacggcgttcggcaggctcgccaagcctggcctcaacgacaagctgcgccactccggcatcatcgacatcgagttcaccagggtgccatgcgagttcccggggctcaagatcgggttccacgtggaggagtactcgaaccctgtgtacttcgcggtgctggtggagtacgaggacggcgacggcgacgtggtgcaggtggacctgatggagtcgaagacggcgcacgggccgccgacggggaggtggacgccgatgagggagtcgtggggctccatctggaggctggacaccaaccacaggctccaggcccccttctccatccgcatccgcaacgagtccggcaagacgctcgtcgccaacaacgtcatcccggcctactggaggcccgtcgccgccgctcccgccgcctccgggaagcccgtgaccgcccccgccgccgcgaccgccaccaacgccgcctcccgccgcctgtacaacaccgagggcgcgccgctccgccgctacgacgtcgtcgacgagtccggcaccgacagcggcgacgagtacgacgccaccgacgacggccgccgcctcaccgtccccttcttcttctccgcctccgacgtgctcgacccgttcggcgcgccgacgagcctgggacgacgacgcggtgcacctcaaggtctcgatgcccgggctggggaaggagcacgtgaaggtgtgggcggagcagaacagcctggtgatcaagggcgagggggagaaggacccggaggacgacgccgacgccgcgccgccgcgctacacccgccgcatcgagctccccgccgacgcgttcaaaatggacaagatcaaggcggagatgaagaacggcgtgctcagggtggccgtgcccaagctcaaggaggaggagcgcaaggacgtcttccaggtcaatgtcgagtaggaggtccgaccaagtaagctctagtgctaatggagagcgaggctatctagagtaggagtaagtttgagactagatcgagagcgaggctatctagagtaggaataagtttgagactagatcgagaggcctttttgtgatggtgtccgctactcgtgttctgatccctgcttgcgttttgttcatcctgtgggggtttctgatgttttgttcatctgtggagtttctgatggtggtgaaaacagtaacaacagtgcaaatctttgctgatgatggtaaaaaaaaagtactagtgctccgagttactgagctatt

SEQ ID NO: 6879 - DNA, 1670 bp, Oryza sativa
  ref <308>: DATABASE ACCESSION NUMBER: AK064013
  ref <309>: DATABASE ENTRY DATE: 2001-12-06
ctctgtcgcgcgcgctccttcctcccgtctcctctcctctcctccgctcctcgcgcgcgccatctcgcggaggggatcctgatctgcaagaagttcttctcttaatttcagagccttaataacagtttgagtttgtttgttcccccgcaaaaaagagtttgggggggttcaattgaagttggatccgccgcccctgcagatttggtcgcctagcttccttacctatggcggttcaatctgcagagcgcggcgtggaggctccacctctgacgctgtcgatattcgagttcaacagtaaggtgatgcaggacgagctgcagaagctggcgctcaaggtgaaccaccacgaggagaacatcaggtttctcaagtcggagctcaatgccgtcgaggactcgtgcgctgacctgggcattaaaataggcaattattattcatcgatggcggcaattgcaaataatgacacatctgttgaagaagctgaacaacgcactattcaaagtatactcaaacaggacgagacagcagctgggattatatgccaactgaagattcgtcattatcagcatgcatcaaagctgccactgatgaaagatgtccttggtgtcgtagctaccttgggaaaaataaataatgacaacctcagcagggtactctcagagtacttgggattggacaatatgcttggtgtcgtctgcaagacttatgatggtgtcgagggtcttgaaacatatgacaaggaaggtatggttgataaaaccagtggcattcatggactaggtcgcacaattggaaaatttttagatggaagattcactgtcttttgtcttgaaaatataaggccattttctggtgattttatgatcgatgatcctcagaggaaacttcttttgcataaaccaaggttgcctagtggagagttcccacctggttttcttggttttgcagtaaatatgatacatttggaccaggcaaatttgagttgtctcacagctgggggccacggtcttagggaaactttattttacagcctgttttctcagttgcaagtctataagactagagctgaattgcgaaatgctattcctttgataaatgatggtgctgtttctcttgatgggtctatactaagacctaatggctcattctgcctaggtaatagggcaagcttaggaatacaatttcctgtaactgcaaatcttggggtctcaaacttacccgtaactatcactgaactggaggagcaagttaaacataagaattgggaaaaggaaaggcttctcgaggatataaaaagacaagaagatttgttgaaccaagttaaggatttgttcagcaagaaaaaggaacagttcatggcttatatcactcaaccaggaatgttacagagagcatcgcaggcttcaccgacaattccttcaccagctactcctggaagcaatccatttggatcaaggcctccccacctgcgaggaagataatagagcaggtagcgaagaattgaaggaacatgcaaacgggatgtaccttctccattaatttgttgaaatgcgtgtggtttcagaactttcctgctggatgatgcaaggaatttttgttttgaacatggtgtagaaagcagctttatcatcaatgaagaaacccaactttgatgagaatttaccagtttc

SEQ ID NO: 6880 - DNA, 2575 bp, Oryza sativa
  ref <308>: DATABASE ACCESSION NUMBER: AK064014
  ref <309>: DATABASE ENTRY DATE: 2001-12-06
caagattcatcgcaagatttgctagtacaaagtggataaattttcatggcactctgaagattatgccaaaaactgaccgttggtttgttggttagtcctaacatctaagtttgaccagttgagcggtggccacagctagtttgaatgctaccaatgttcattacatcaaagcagatgatctgatcggagattggaaggagtttctccttctaaatcatatcatatcatttgagatactgcatactatatgttggttcttgtgcagattaaagcttctggattttacacaatcctcctaccgtttaccagtcaaacctttaacatgttgctgtgctctttttgtgaaatttcaacttagtaataatattttgtgacatgcactcaaactacatactccctccatcccaaaaaaatccaacctaggataggacaacaaatctggacaaacactttgtccagatttgctgtgacctatcctaggttgttcttttttgggacggatggagtacttctgaagcgttcgtccttatagttctgtttcattgtttcaggttgcaagccatgaaacttttggtactttgggtgcaattgtgaaacggcgcactggcaacaagcaggttggtttcctcactaaccatcatgtcgcggttgacttggactaccctaatcagaagatgtttcatccattaccacccaatcttgggcctggcgtttatcttggagctgttgaaagagcaacttctttcatcacagatgacgtttggtatggaatctatgctggaacaaacccaggtagagcagttacaaattagctggtcagggctttatctacaattgtttgtctatttaaaaacaatgtcttaagtaacattaaaagacacttcaactcactgtataaatataaaaaataagtttcctgcttcctagttcccatcattcatattaatgccggattgcattttttactagttagaaacaaatcaacatttagttttgattgtaaaaaaaacatactatgtttgtgcttttctggtcatttaacacatttaccattttattgattattccaaatgatgtatataccagtctaattcccaaacatatatgccgccccattatggatttgcagagacatttgtacgagctgacggtgcatttatcccatttgctgatgactttgacatttccaccgtcacgactgtagttaggggagtcggtgacattggggatgtcaaggttatagatctgcagtgtccgctcaatagcctcatagggaggcaagtatgcaaagttggcagaagctctggtcacacaactgggactgtgatggcctatgcccttgagtacaatgacgagaaaggaatatgcttcttcacagacatccttgttgttggtgagaaccgccaaacatttgatttggaaggtgatagcggaagccttattatcctgactagccaagatggtgagaagccgcgtccaattggaattatatggggtggcacagcaaatcgtgggaggttgaagcttacaagtgatcatggccctgaaaactggactagtggggttgatcttggccgtctactcgaccgtctggaacttgatattatcattaccaatgaatcactccaaggttgattcttttccctctattcatttgcattcatcttcagatattccagaaatacgttggactatccaatttacttgatgttttcatactactttgtattgaatctgtacacttttgctccattacaaagctgacagaatttgcctactataaagatgccgtgcagcagcaaagatttgctttggtggccgccgttacctcagctgttggggagtcttccggggtgcctgtcgccatcccggaagagaagatcgaagagatcttcgagccattggggatccaaatccagcaactgcctcgccatgacgtggcggcctctggaactgaaggggaggaggcatccaacacggtggtcaatgtggaagagcaccagttcatctcaaacttcgtcggtatgtcgcccgtgcgcgacgaccaagacgctccgaggagcatcaccaacctgaacaacccctccgaggaagaactcgccatgtcgctccatctgggtgaccgagagcccaagcggctccgttcggactccggatcaagccttgacctggagaaatgaagtgcaaaaagtgctggttctgaatttctgattctggttcttcagagtttattgtcattgtggacagccaaaagtagtagtagatcaaaagacctcatatgcagttcagaaaaattgaacctgcagtaagcttcggtgagcttgaatggctttggcaagcatatcatgtaacatgatgtattattattactacaattgattcagccccttgtaggatgttaggtgctagtcctgcagttttgctgtgctcatgatcgtgagacctgatatacaccattgccggatcccttcctctttgtagaagaagaagaacaatgtgcagggaattatgataatgatgatctttgatctatttccccctattattatttaccaattatcaggtttcaattatc

SEQ ID NO: 6881 - DNA, 1680 bp, Oryza sativa
  ref <308>: DATABASE ACCESSION NUMBER: AK064015
  ref <309>: DATABASE ENTRY DATE: 2001-12-06
cagcggcggggttggggcggcaggcggctgtgaggttcttgatttgatctgtggttgttgttgaggttgtggttgggcgccatggcggcggcgggagggctggagcagtggcagaaggacgggttcttccaggccgccgaggaggtgcaggagtcggcggacttgatggaatctatttatagaacttggatgcgggaacgcgatagcggagctaatttagaggagctgagcgatttgcaaagggagctgaagacagcattaggaactgcaaagtggcagttggagcagtttgagagagctataagcatgagcaatgataagtattctttggaagagggtacattggccaggcgtcggcagttcgttgtagcaatggaggaccagatttctcaagtagagaaacaaataaatgattactcgattgacaatgataggcgagggctcaactgggtaaagttagatgatgaggaacgagatgatcttgtggctttcctttcagcacctgcacagttatctcaagatacaaagaaaagagacaacacttaccatagtccatcaaaacaaaagaatgcgttgattggcgcgaatgatcccagggacatggctgcaatcagtaaagaccgacataaaactgaagcattatgcagagaaatttcaaatggtcagagtgaagcttgttgtctagccgagcagttaaatggtcacagtacaagcccgagttctggtggtgaacactggaagatcgatatttctgatgataaagacgatgatagaaaattgtcccctaacaaggtcgaggcatcaagtcaggcaactgcattttctggtatcatgaaaaccaccgaatctttcacaagagtaagatggttgaggaatagcttgtggaaagccaagagtgatgaacatcttccgttaagatatgatatgccaaatcacttagactggagggttataaccttattagcacagaggtttaacgggcttactgaaagaagcaggagttgtttcagcggttggaaggaaaactctagagtatctggaaggatgggtggacttcatatacaagggccgcaatacaacactcagtttggtcgttccattcgaataacccttttactggtgttgagcatctttctgattgtgccatttctcgtgtactcagcttgacaatgctcatattggtggctgctggtgaaggaaaaagtatccgttattgtacttgcaaaccgtggttggtgttattcacatgctcagatgaaacaaacgagcgggtaattacagatggagctgtacataggaggggaaaaagaaacaaaacgggaacgacttcatttgtggagaggaaaaagaaacaaaacgggaacgacttcatttgtgcaatgcaaaatttccaagatcagaaaacgtgttgtcaccagcagaaaatcatcctgagatggatccatagttaatggctatttggagtctgttgtgatggatgattcattgattcctgccaatttctccttgctgctgtaccctcaccaaggcaattgtaaaaaaaaaatgtagagctgttgggaaatggatttgaacgactattgtgaatgatttatacaatttgtggaagtgaacagtttcggtgaaatgaactgtttggctgatctgaaggcatttcatcagaaaaaaacattcaaaagc

SEQ ID NO: 6882 - DNA, 1643 bp, Oryza sativa
  ref <308>: DATABASE ACCESSION NUMBER: AK064016
  ref <309>: DATABASE ENTRY DATE: 2001-12-06
acttcagctgcaacggagaaatcgacgcaaaaacaaaccgcagaaagaaagaaaaaaacaagaaaggttgtgttcacggggagcttggtgccattgctgcaagttggggaactttttgggttgtagaaaaggaagctgatggcgtcgggcaagatggagaacggccagcagcagcagcagcaggaggtgaggaggaggaggaacggcgaggtggtggtggacgggtcggagatcctgcagctggtggagaacaaggaggcgtttggtaagttcgtggagcagaagttcaggctgctcgacgccgacggcgacgggaggctgtcggtgagggagctccagccggccgtcgctgacatcggcgccgccatcgggttgccggcgagggggtcgtcggcgcaggccgaccacatctactctgaggttcttaacgagttcacaaaagggaagaaagaatcggtgagcaagtcagagttccagcgtgtcctctctgacatacttcttggcatggcggctggactaaagagggaccccattgtgatcttgaggattaacggtgaagatttgaatgaatttgttgagagcccaaggtacgaaccggagatggctgccatattttcgcaagttgaatcaggaaattcaaccttgcagcagtgcatgctagctgctattcgacaactgacggtcgaccacggcatgccaccggcttcagattcatgggttatggagaatatcatagaacctgcattgcaagaactccatggtgataacctggagcaacctgtcactcaagaggtcttcttccaggaattcagaaagttcttggcaatcctcacgcagcgactccaagggcaccctgtgattgtagcacataccgagaacacctttgatgggaatggtatcaagaagctgctgtcaaacaagctcgaattagataagctgttggattgtgtttggagaggcgtaccgaaagaaaaagatagaacagcgaagcagtacattcgggttgcgttcgataggatggctgactccataaatctaccaccatatggagctgttgaacaggtagatgctgtggtcgatgaggcgttcaagatggcgaaagccgaggacgggaaggcggtggatgaaacggagttcaagaaattgctcactgagatccttggggcagtgatgctgcagctagatggcaatccaatatcggtttcgaccaacagtgtactccatgagccaatgtccacttcttccaccctgctttcgccatcgccgccgtcgccaatggtgtcatcaccgagtgaatagaagcaagatggaaggaagctgatcatagaatggacagtggagaatataatttccactggtggtaacagtaactgcaatataatgctggttttcttctgatcaatgaacaaactgcagtaacttgatagttgccatgtaactggagacctggtgcaaatatgtttgtgttggtgtttgtaactacgttctaagtgtttagtgtcggaataataaggcttctaattaagccagcagttgaacaacggggaataatttatttcaagcttttgttttgggtgcagcagatgcttggaaatggcaagcttggggaccaataatggtatgataaaactatgttagtaact

SEQ ID NO: 6883 - DNA, 1650 bp, Oryza sativa
  ref <308>: DATABASE ACCESSION NUMBER: AK064017
  ref <309>: DATABASE ENTRY DATE: 2001-12-06
gatgtgcagggtcaaaacaaacacacacacacacatctgtctcttcttcaggtttcaggtctcctggctgctttgcttctgctgcctctgtgtggggctccagccttgctcagattgatgattggtgatccaaccatcttcatcacttacagagatggggtgtggtgcatcaatccctaagaaatgcaaggtaggagggaaggggaagaagcgccggagcgtcatacaggaggttgccatattcgtgccgacaattcgcattccggtggacagtgatgttgcccatccactcagaggactagtatccaaggagctcgtcgaccgcctctcaaagttcagagaccgcgttgtcgcgctctctgaagatatctattgcgcggatgtttcggatgtttcagagttacagcatgcccttgaggagtacttgccagttgttcttggtttaacaatgaaagaaagccgtcttgaatcatcggtggaattcagatggaggaccttggatgatgacgaagagtgttgtctttcaagtgcatggtatgaagttctgtcagtcatccacatgatggcgatgcttgcattgtttgaagccaacctgatacttattccgaagaacggtcaagttggaggtgaaaggaaggtatcagaagatgcaaagaaggatgtcgtcgattcgttgctcagagcatcaggatgtttagattactgcgtgcaccgtatacttgtacagatgccggcacaagtcaagaaaagttttcctagttattttcaggaaggtatgcttgaggccatttcaattcaagcattggctcagtgtgtagaaatacaacttggattggcttcagagtgtgagaaggcaactctgtcagtaaagaggaggctagcctgtgagctagtcagttatttctcacaggctcactattgcttatcgggatgcgacacgagcgactcgtttgggaagaagctcctgctgtttctgaagtggaaatgcatggaagccaaggcagtagcatactactaccatggccttgtgcttgacaaaggcaatgaagccagcagccacatcagtgcagtgtgctgcctctctgcagctgatgatctagttgcagatagcaagagggcttgtttgagcttctgcttggcaaaccccatcacaagggtacctcctccttggggtatcatgaggaatatgcacaagaaaatcccagattctgcgtgcaagagattccaaatgtatggatatctttttgaacaagacaataacagtgcacttcaatccttaccagatctaccagaatttgcgctgtcgctgagacccgaagggtatgaactgcctagcactgattcaatctgggataatgttgatagccagcctcagattcagagcctcaaggagcatctggatgatgaagacgaagtggaaacaaaatgatacttcagacatccaaaacgcttcatttcattgtgccatgaaaagtagcattagtactagcaaagacatcggaatgctcaattcagaagtgtttggattcagcatatggcattgagccaaaaagaaatcagaatatgtaccttctgtgtagttgaaagtatctatcactgattataaacagaatcaacaataataggaaagaagggtgtttcttatttttc

SEQ ID NO: 6884 - DNA, 1951 bp, Oryza sativa
  ref <308>: DATABASE ACCESSION NUMBER: AK064018
  ref <309>: DATABASE ENTRY DATE: 2001-12-06
gagggctcgaggcggcggctatctccctcctttcttctcttctctctcgtttcgaagccgacgcgtcgcggaggaggaggaggaagagggcaaagccgccgcggggatttctagggttagggtttcgaggttgagagggaaggagggagagaagagcgggtatcagccatggggatgaaatttctgaacaagaaggggtggcacacggggagccttcggaacatcgagcgcgtgtgggtggccgaggagaaggagaaggaggagcagcggaagatccaggagctgaagaagcagcaggacgaggagcgggagaaggccgccttccgcaagctccaggaggacgccggcctcaagccgaggcaagagagattggacttcctctacgagtcagggttggctgttggcaaggggagctccgagggattccaagcgctgcaaccatctgccccagcagctgctgccgccgcctcttcttctgcccaagcgagtgccggctcttccaaggcagctgctccaggtgcattatttgaggataagccccaatctgcaaatgatgcatggagaaaactccacactgatcctcttctactaataaggcagcgggagcaggatgccattgcaagaataaaaaataatccaatcaagatggctgagataaagaaatcagtggaagctgagaaaaagcaaaaggaagaaaagaaagagaagagaaagcacaagaagcgccatcatcacaaatcaaagagtaagaggcatcactcaagtgagaactcagattcagaggaaagtgatggcagggatgagagaagaaagagtgttcaggcctcagagcataagagagaagagaaaaggtcaagacatgataagaaggatcacggacaagattcagaagacgatgaacgaaggaaaagacggcatgcaacgtcagaagatgatgagccaaggaagtcacagaaggagaagaaaggacagagggaagattcagaagatgacaagccaaagaagtcaaggaaagaccgcagaagacatgattcagaagatgaagaaccaaggagaaaacaccagaggtcagaagatgatgaaccaaaaagaagacaatctgaggtttccggagatgatgaaccaaggagaagaaggcaggagatgccaaagcatgacgaatattcacgacggggtcgttcggatgctgatgataggagagggagacactatactccgtcagatgataggagagggagacactatactccgtcagaccacaacagtgcttatccaaagcacgacagttcagattcaaggcataggcgaccggaatatggacgcggcaattccacttctgaactaggttcagaaggccaacgaaggcaggaaagccagcagggcaggaacggccctacattcaaccgtcgacggggtgtccagcacatgtcagaggaagaaagggaagctcgacttcgtcaaatgcaggctgacgcagaggtccacgaagaacaaagatggagcaggctcaagaaagctgcagacgacgatgccaaggaggcggcatctgtgaacgcaaaccaattcagagggaagaacttcttggaagaagaaaagaagagcatatttggaaccgagaagggcggaagcgccacgatcgaagagagcatccggcgccgtgcgtattattcgcagcgtaatgcccatgagagcaatgcattcaggcggtgaaatccctgaagcagagcagcagctcaggcggcctgacctcgttgatgtcagtgttctgcatttgctttagcttcttttgcctttctggtgtattgttccttgtttagtatggaagaatttttgaatgttgtacaacgcattgtccagatgttttgaatccatatgttttagtaacaatttttgccaaaatgaaaatcctacatgtgtattatagagggtttgctaacacaaaggtatgatt

SEQ ID NO: 6885 - DNA, 1661 bp, Oryza sativa
  ref <308>: DATABASE ACCESSION NUMBER: AK064019
  ref <309>: DATABASE ENTRY DATE: 2001-12-06
taacgtcgccgcgtccgttccgactccccggagagccgccgatggtgcagacgttgccggcgagatcaaggcgcagtttgtccgagcggcggacgcggtcagggcgctcgcgccgattcttgaagtcgggaggcggagctaccatccccggagctcagtgtaccatgtttcatctcggatggtgtcagtgattgcgctgccgcattcaggatacggaggcagcgacctgttggatgtcggaggaggggagaaggtggtgggagcaaggaacttgtctttgactctgcaaaagctctatatctgggagaagaagctgtacgacgaggtgaaggctgaagagaaaatgcggctcctgcttgccaagaactctaagaggctgaaattcttggatcaaaaaggcgctgaagctcccaagattgatgcaactcgtaatttggttaggaagctatcaacaaaaatacggatagctgtgcgagttattgctaaggtgtcgaaaaagataaacagagtaagggacgaggagttatggccacaagttaataccttaatccaagggtttgtgaaaatgtggcaagataagctgaactgctaccacatccagtgtcaagcaatatcagaggcaaaaaacttggattcaataatttctggtggaaccagtcgagatctggcaatggagcttgaactagagttgattaaatggatcgtcaatttttcctcctgggtgaatgagcagaggagcttcatcaaggcactgaatggatggctggcactctgtcttaactatcagcaggaggagacggctgatggagttcctccgtattctcctggaagagtgggcgcaccccttgtgtttgtcatctgtaatagctggtcccaagctatggatcggatttctgagaaggaggtgattaccagcatgcaagctcttgtgtctagtgtacggagcctatgggagaaacaaaatgttgagcaaactgaacagctgattgcaatccgggaaagagaaaaatggaacaagatattggaaaggaagaccctggagattaacaaggaggccgacacactcaacagaaagctagctctagtaccgggccggcaaagccttcttccaacagcacaaacgtaccaggtccattttcttgaggcaaacagtgtgcaggttagtttgaagcgtgttcttgaagccctagaaagttactcttccaattccctgcgagctttggatgagaccctgaggcatgccgaagaggaaaggttgtctagagaaagagccaaagtttcataggcattggcatagaggttccatctgacactacagtgaacacagcttgtaaaatacaagggtctcctctccaggtggttataatttatcagatcaatgcagaatgttctgggcaaatgctgcttgcagatcaaatttttgtggggaagttctgactttggagttttgctaactgaccgttgtttgtcgatgcagttcaggcaaatgtcctgtgttgatccatcataatagatatagttgtgttgaagtagcaggtacattaggtacatataggtgaagtgctcgtttcggtgctagtatgcaatgtactgatcttctgtgttgcctttttcttggcctccatacaattgaatgaatgagcaagagtgcacttggaatg

SEQ ID NO: 6886 - DNA, 1595 bp, Oryza sativa
  ref <308>: DATABASE ACCESSION NUMBER: AK064020
  ref <309>: DATABASE ENTRY DATE: 2001-12-06
gaaggatgctaactaagtactcttgatgggaaatattggaattcggttgcaactaggaagaatgaaggatcgtatacctctgtggcagtggatccagttgacggttgcaagaggaagatgcttagctgtgtggcaaactggcaatggatgctagtagctctgtagcattggttacaattgctcacttttcactagatgttggcagtaccaacagccaagcaaagggaggcaaagttgccagcgttggggatcaggcgtacggtttcttcaaggggccatggcggctgcggcgccgagttcggtggtagccggactcgtgtccgggctagggctggcgcgctcctcgttaacgcccagcgacggccgctctccttccctctcgcccctgcatccgccatggcccgcggccccgcggctcgtctgtaggagcagcggagcccggccccccagggagagagccgtggccgccgccgccgccgccgcaaattctccgcggcagcagcagcagctaggagagcatgagcatgaggaggctgtggcagcggcggccatggagccggagaggagcagtccccatgaggtcaccgtcctttctttctccttggtttggcgattgattgattggttggtcccgtgcaggtgagggaggagatagcgaggtgcttcgatctcgtgcgccgcctcggccgtggcgccgtctacctcggctcctccagggtgccgcccacccatccccattacctccatgccgccgagctctcaagggagatagctaggctgctggactgcaccacatggtccggagctggtccaggtttcatggatgctgccacccaaggcgctcttgaggcgggcaaaccggtcggtggcttcaagattggcaaggaggcgggtgaatggacaacctccaattttcatccttacctgccatcagagtcatatctcacctgcaggttcttctctgcaaggaagcatgggttagttgatgccgcggtgcggaactgccctaccgatagaactgccatcattgcattacctggtgggatagggacgctggatgagcttttcgagatgatggcgctaattcaactggagcggatcggttccacgcttccagtcccattcttgctcctcaattatgattcttactactccaaactattggactttctgaatgactgcgaggagtggggaaccgttgctccgggagaagtagcatctctttggaaggtttgcaatgggaatcatgaagctttggagtacctggcacagttctacaatgtacctcttgctgaaagaaattactgcatatcaccacagttgaagcagcaggcaacttcataggccacaagttgacgattcaggtttttctcaagaaatcttggagcaaacttattccgtttagttgatcattgtagtaccccctaccattttaaattgaattagcaaacgtcaaatacaaaaaacagagggagtacaaccttttcaccccagttcttgaaataaacttgtacagttgaatttcagtctgaatatctgatgaacatcaaggatgatgcaatcaaagtttcagttactcagtgaattcaaatctc

SEQ ID NO: 6887 - DNA, 1802 bp, Oryza sativa
  ref <308>: DATABASE ACCESSION NUMBER: AK064021
  ref <309>: DATABASE ENTRY DATE: 2001-12-06
atgggctcatggcgttcgtgtctgaattaaccaacgcaaaataaacacgagtctgctgagacactgctcactgcttactttactcatggctcagcggcggctgctactcgccatcatggctctcgccgccgtcgccgccgccaccggcttcgagttccacgaggccaccgtcgacgccatccagctcggcttcagcaacggcagcctcacctccacggcgctcgtccgcttctacctcgaccagatcacccgcctcaacccgctcctccacgccgtcatcgaggtcaaccccgacgcgctcgcccaggcggcgcgcgccgacgacgagcgcgccaccggtcgccgctgcgggccgctccacggcgtccccgtcctgctcaaggacaacatcgcgacacgcgaccggctcaacacgacggccgggtcgttcgcgctgctcggctccgtcgtcccccgcgacgccggcgtggcggctcgcctccgcgccgccggcgccgttatcctcggtaggccagcctcaccgagtggtccgcttaccgccccgccccgaacggctggagcgcccgcggcggccagacactgaatccgtacgtgcgctcgttcaccccgtgcggatcgagcagcggttcggcggtggcggcggcggcgaacatggcggcggtgacgctggggacggagaccgacgggtctatactgtgcccagcgtcgctgaattcggtggtcgggattaagccgacggttgggctcaccagccgcgccggcgtcgtccccatctcccctcgacaggacagtgttgggccaatatgtcggacagtgtcggatgctgtccatgtgttggatgccattgttgggtatgatgcacttgacgctgaagccactggagcagcatccaagtacattcctaatggtggatatggacaattcttaaggatggatggattcaaaggcaagaggattggtattcccaacggcttcttcactcaagaaatatttgagaagaaacagctgagggcataccaaaaacatattcaattaatgaggaaacatggagccatggtgattgagaacatcgacatcgcaaaaaatctgactgaagtacagaatgttcttttttccaacgagcatatcgcaatgatagcagagttcaagttaagcttgaatgcttatttgtccgacttgttgtattccccagttcgttcccttgcagatgtcatagcattcaacaaggcacatccggtggaggagaggcttaaagattttggacaaccctattttattgaagccgaaaagaccaacggcattggaccggtggagaaagcttcaatccaacatctcaataagctgtctgctgatgggctggagaagttgatgaggatgcaccagttggatgcgattgtcacgcccaatgacaacgggagagtcttcttcgccgtcagtggcatgccagcgatcaccgtgccggctgggtacgacagtcaaggagtgccatttggtacttgcttcggtggattgaagggctatgagccaaggctgattgaaatggcctatgcttatgagcaagctaccaaagttcgaatgatgcctggcttcaagatgtagtgtatataaaatttgtgttatataattcacggagctttttgatccttgcccaaataaattgatggaactaaatagccatctagttttgttgtccaattcagggatgccaaaaatttggtagtccagagtattatatgttcaatgtattataataatttataattcaaaaattaaatatctggtaaataggatatcctattttg

SEQ ID NO: 6888 - DNA, 1986 bp, Oryza sativa
  ref <308>: DATABASE ACCESSION NUMBER: AK064022
  ref <309>: DATABASE ENTRY DATE: 2001-12-06
cttcccccccttcctctccaccacccccgattcgtcgtccaccaccgttcgacgagtttctcgcagatcgggcgggggcgcgccgggatggcgtacatgtgcgcggacagcggcaacctcatggccatcgcgcagcaggtgatccagcagcagcagcagcagcaacagcagcagcagaggcaccaccaccaccaccatctgccgccgccgccgccgccgcagtcgatggcgccgcaccaccaccagcagaagcaccaccaccaccaccagcagatgccggcgatgccgcaggcgccgccctcgtcgcacggccagatcccgggccagctcgcgtacggtggcggcgcggcgtggcccgccggggagcacttcttcgcggacgcgttcggggcgtccgccggcgacgcggtgttctccgacctcgcggcggccgcggacttcgactctgatgggtggatggagagccttattggggacgcccccttccaggactccgacctggaacgcctcatcttcaccaccccgccgccgcccgtgccgtccccaccccccacgcatgccgccgccaccgccaccgccaccgccgccaccgccgctcctcgacctgaggctgcaccggctttgctcccccagcctgctgctgcgaccccggtggcgtgttcgtctccgagtccgagttccgcggacgcctcctgctccgctcccatcctccagtccctcctgtcctgctcccgcgcggcggcgaccgaccctggcctcgccgccgcggagctcgccagcgtccgcgccgccgcgactgacgccggggacccatctgagcgcttggccttctacttcgctgacgcgcttagtcgccgccttgcgtgcggcaccggagctccgccctccgcggagccggacgcgcggttcgcctccgacgagctcacgctctgctacaagacgctcaacgacgcctgcccctactccaagttcgcgcacctcaccgccaaccaggccatcctggaggccacaggcgcggcgaccaagatccacatagttgacttcgggatcgtgcagggcatccagtgggcggcgctgcttcaggcgctcgccacccggcccgaggggaagccaacgcggatacggatcaccggcgtcccctcgccgctcctggggccgcagcccgcggcgtccctcgccgccaccaatacccgtctccgtgacttcgccaagctcctcggggtggacttcgagttcgtcccattgctccggcctgtgcacgagctcaacaagtcggatttcttggttgaacctgacgaggccgtggccgtcaatttcatgctgcagctgtaccaccttcttggcgactcggacgagctagtgagaagagtgcttcgtcttgccaaatcgctcagtccagcagtggtcacacttggagagtacgaggtcagcctgaaccgagctgggttcgtcgaccggttcgccaatgcgttgagctattaccggtcattgttcgagtcgctggatgtggcaatgacccgggactcaccggagagggtgagggtggagcgttggatgttcggggagcgaattcagagggccgtcgggccggaggaaggcgcagaccggacggagaggatggccggcagcagcgagtggcagaccctgatggagtggtgcggcttcgagcccgtgccgctcagcaactatgccaggagccaggctgatcttttgctctggaactatgattccaagtacaagtattcacttgttgagttgccaccggcgttcttgtccttggcatgggagaaacggccattgcttactgtgtctgcttggaggtgagggtagtttttttgggagtatttgggggaatgtgtggcgttgtgatagaacctgggaggaaatagttaggagaaatcattttgcagcttttgttgtagtttcctccaaaactgtgtttaggatgattggtataattgggaaattttagctgaattatcttac

SEQ ID NO: 6889 - DNA, 2140 bp, Oryza sativa
  ref <308>: DATABASE ACCESSION NUMBER: AK064023
  ref <309>: DATABASE ENTRY DATE: 2001-12-06
gctcttcaaggactcggagccgcggggttggtccattcgcagagctcagcggtggaattagctcgaagctcgatcatggccgccgccgccgggcttgccgcgccgcctcctacctcccggatttcctccttccccagggctttctccaccggggtgtacagaaagactgtcctgtgcccaaatatgaaaactagacacatgttttagccaatgcaattgtagaacagcatttattgggcctgagctagtattagcattgatttcagaaacctcaagacagccaccacgcaaatttatcactgtttgtccccaaatttgaatgtctatatcaaggagccaaggcaagcgtggaataaggagggcttctgacagcaccaattcaggacagtatttgatgttgattttaccaagctttgggaaccaacacttgttttctctactccatagaaaactaggaattctactcagcttgggacaatcttctacagtcaaactggtcaggctagggaaaacattggagtcatctacattccagtcttccaattctggcattgttttgataaatagcccttccaaacatggaaaccccaccacctgaccactgctatagaactcagagccaattcttcttagcgcgtgcatattgactatatgcagcttcctaaggtgagggaggagtcccagtggaggaagaatttccaattcagaacaataatctagataaagatattctagtgagctaaggctgagatttctagcaagccatgatggggtagtactgcccctatagcctgtaatatggagacaacttacatttgaatgtggtgcaagaccttccaggacgtggtattgttctgaaggctcttgtacacaagaaccggcactccatgacagccacagctcagttaggtgccttttgtcactcaatctagcctttgctgcttcttcattgccatcaacattctcgagattctgaactttcaacaaacctcttaggttcctcaaccttttcagttgtccaatgtcaaagcccctggttttcctaacacagaacttatccaacagaagcaaggaagtcatattgccaacacatggaactcctgtgagtaaatgttttccttcatcagcaatcagatgctcaaagtttaataagttggctatccttggaggtaaatgaagaaggcacggacagtgctttatgttcaaaacttgtagtaggtaaagcttgcatacggcttcaggtaattcttcaaggcgtgaccatctgaggtctaggtaacgcaaatgtatgaagttactaactgctgcaagttgctcttttcggaaagtgcagggcagagacaacagtctgatagtactaggccaattgctctggacaaagactacctcagaacctggagaccaaattgatgaagaggcagagaacattatagtccgcaaattttttagatgcagcaagccagcccatgagttcttttggatgcggcgtttcatctgaataccagaacaatcgagtggatgacataagcccatatcacgagcatgatcagaatgagagatatacaagtgacaagcctcaactgagatagggaatttaccattagttgcctggaattccccttctgcaacaagttgagcaagatcatgtaacaacccaggtatcatgtagtggccactctcgattatatggaagaatgagcaactgagtaactcgttaaggtactcctttcctacatcttccaatgtctgatcctctccaggtgttggaacaaggccttgtgccatccaagcaaatataagctcttgctcagtgaacttatagcctcttggaaatatggcacaataggtgaaacatcgctgcaagcttagagggagatgctgataactcaacaacaaaaccggcataacgtcgtcaggctcttgttttagttcccatatgtttctattcagaaacttgcaccaatgctcctcctcgtggttttccgaaaggaatctccccatggtcttggcagccaaggggttgccatacaacttgagagctattttcctgcctattcgagccaagctgtggtcctctgtgatgtttgtgcactgtaggaagaaagcccaaaattcattatcatgtaaaccgtgcagtgtc

SEQ ID NO: 6890 - DNA, 2436 bp, Oryza sativa
  ref <308>: DATABASE ACCESSION NUMBER: AK064024
  ref <309>: DATABASE ENTRY DATE: 2001-12-06
gtcgtctcctctcctctcctctcctccccctctcctccgcctctctcgcatctgaggctccgatcgccggcgaccccagccagaatccgccgccccgtctcgccctccccgctcgacgagaccgcgccgagcggcgaagaggcctagtgttcttcgcacctcgcgatgagtagcgcggtgaaggaccagcttcaccagatgtcgacgacatgcgattcgcttctactggagctcaatgtgatttgggatgaggtcggtgagcccgacacgacgagggacaggatgctgctggagctcgagcaggagtgcctggaggtctacaggcggaaggtcgaccaggcgaaccggagccgcgcccagctgcggaaggccatcgccgagggcgaggcagagctcgccggcatctgctcagccatgggcgagccgcccgtgcacgttagacagtcaaatcagaagcttcatggcttaagagaggagttgaatgcaattgttccgtatttggaagaaatgaaaaagaaaaaggtcgaacgatggaaccagtttgttcatgtcatagagcagattaagaaaatttcgtctgaaataaggccagccgattttgttccctttaaagttccggttgatcagtctgacctgtcattaagaaagcttgatgagttgacgaaggacctggaatcccttcagaaggagaagagcgatcggctaaagcaagtgatagaacatttgaattctttgcattccttatgtgaggtgcttggcatagatttcaagcaaacagtatatgaggtgcaccctagcttggacgaagctgaaggatcaaagaacctgagcaacactacaattgagaggcttgctgctgccgcaaacagactgcgtgaaatgaagatccaaaggatgcaaaagcttcaagattttgcttctagcatgctcgagctatggaatctcatggatactccacttgaagagcagcagatgtttcagaatataacatgcaatattgctgcttcagaacaagagataactgaaccaaacaccctctccacagatttcctgaattatgtcgaatctgaggtgttaaggcttgaacaactgaaagcaagtaagatgaaagatcttgttttaaaaaagaaagcagaactagaagagcatagaagacgtgctcatcttgttggcgaggaaggttatgcagaggagtttagcattgaagctattgaagctggagctattgatccctcactagtacttgaacaaattgaagctcacattgcaacagtgaaagaggaagcttttagccggaaggatattcttgagaaagttgaaagatggcaaaatgcttgtgaagaggaagcctggctggaagattacaacaaagatgataatcgttacaatgctgggaggggagcacatctaacactaaagagggctgaaaaggctcgtactttggtcaacaagattcctggaatggtagatgttttgagaacaaaaattgctgcatggaaaaatgaacgaggaaaggaggatttcacatatgatggtgttagcctttcgtcaatgcttgatgaatatatgttcgttcgtcaggagaaagagcaagagaagaagagacaaagggatcagaagaagctccaggatcagctcaaagcggagcaggaagctttgtacggatcaaaacccagtccatccaagcccctaagtacaaagaaggcacctaggcactctatgggtggtgcaaaccgaaggctatctcttggtggagccaccatgcaacccccgaagactgatatactgcattcaaagtctgttcgtgctgccaagaaaactgaagaaatcggcactttgtcccctagtagtagaggtttggacattgccggattgcctatcaagaagttgtctttcaatgccagtactctacgtgagacggagacacctcgtaaaccttttgctcagatcacaccaggaaacagtgtctcgtcgacgcctgtgcgccctatcaccaataacactgaggatgatgagaacaggactccgaagacatttacagcactgaatcccaagactccgatgactgttacggctccaatgcagatggcaatgactccctctctggccaacaaggtttcagcaactccagtttcccttgtttacgacaagccagaggtaacattgcaggaggacatcgactactcctttgaagaaaggcggctcgccatctatctggccaggcaaatggtttaactgttgatcaatttatgtacgtagttgaaatctgactgcattttcttgtcggtggccattgcgtatgttggtcaacaatagtcggcctttccagtagcactattctgatttactgcaattgttttaatgttttctacaaccagtaaaacagctctatacattagcttactcactactcagtacagctttctcggcagcacg

SEQ ID NO: 6891 - DNA, 1595 bp, Oryza sativa
  ref <308>: DATABASE ACCESSION NUMBER: AK064025
  ref <309>: DATABASE ENTRY DATE: 2001-12-06
actcccgtctccatccttcccaaaccgcgccgcctctccccgtccctcctcctgcgccccaggtgcagccgcaacggcgacgaacgttaacgcggccgccggcggtgggggtatccgccgagactcagtgaccgcggcgccgcagcttcagggcaacaaggaatctgtggaattcaatttttctgcgggatatcggcaagggaggggattaattgattgattggtcgatggaggaggcttctgttacaggggaattgttggagcaagaagctccatcttcttcaatctccggtgtcgattggtcccagcttccggcggacttgctcgtctgcatcttcggcgtgctggaggtcccggatgtcttcagctccggtgtggtttgccgcgcctggcatgccagctttctggaggcccgccgccttggcatttgctccagtaaccctgggccctgcctcgtgttctcttccggcgaccgtgatcctagcgtggtcaccctgcacagcctcaccacggggaagaactactatgtaaccatgccggaccctcctttccgtacccgctacatcgttgggtcttcccatggctggcttattaccgccgatgagcggtccaatctgctccttgtcaatcctgcgactcaggctcagatccccatgccaccaccggagacaatagcgaatgtcaggatacgttgcaatggtgagggagtgccacatggctatgatctttttaaattggatatgtcatcacaagattttgatactgaaacagagccgaatgatctttcctgggaagaaggccgattttatttctataagagggttgttctgacagcagatccatccagtagaaactgcacagtaatgatcctgcacctgctagatgatttcctttcctatgcaagggtgggtgacaatcattggacctggatcgatgttgatgagctatgttgctgctatcatgatgttttgtacaaggacgacgatagattgttctctgcaatccgagccactggtgatgttcatgctattgataccaatggaccctctccaatgttacgggtcgtcctagacaccaagaattcactcatcaataataccaagtatattgttctgtcagaatcaggtgatcttcaagtatggaggtattataaacacgtcaataacgacaggaggaccagagaattgattgtctataaggttgaccttggtgaacaaaagcttgctgaacttaaggattttgatggtcgtgcgctatttattggtttcaatagctcgttcttcctacgggtagaagatttcccaatgttagctccaaatagtgtctactgtacagatgattcaatggaatatatttattgtgtgaggtttggtttccgagaggttggtgccttccatttggatgatagtagcttcactgatcagcttattggctcacggttgaattggccatctcctatttggttttggccatcatttactaaagttaattagatttattgcttcaagttttacatatttcaatttgtttacatctctgtaatttgctattgcataccctattaataatagaactctggtggtagtttacaagtt

SEQ ID NO: 6892 - DNA, 1970 bp, Oryza sativa
  ref <308>: DATABASE ACCESSION NUMBER: AK064026
  ref <309>: DATABASE ENTRY DATE: 2001-12-06
atcaagagaagatggtattgggaagacaatggttaatcaagaaattatatctgacatgatgcttacgaatggtcaggctaatacatctgcttgtggaacaagtatgaatgaaggctatgctatgctttcaactaaaaagtttggaaaacagaaaatggcattatctcgcagatacaatcctgtacggaaggcacggggagggctgctctctgtccagcaactacacactaaaaaaatcatgccttccgagctcaaacggggtaaaatgagacttattcatgcacttcaggacatgaacgatccctctgataatattcagttaaagggaaacagtacttctccaagcagagaaattatttgtgctttgagtgtctcttcacaatgcaataccccatctcctctgggtaaacaaataaaggcttttgacttcgtgtcaagagaggctgatagtggttcaaatactaagtttcttatcttgaagaaatttgctagaaagaagggctccaaagaatcagatagcccacataactcattggatgcaaccagtactgtccagccaatacgtagaaagaaagctgcagggcgactgaaaggatcttctgtggagagacagttggagggtgaaactcatattcagcagcagcttaataaggctttggaggataacctgaatgcaaatgaagtaacaaatcaagaactgttgccactaacacctccaggctttgaatcagttgtcaatggaaaacgttctcgtgattggaacactgatggtttctctgaagttaacttaaattctagtctgttcgatgaagagctgactgctacaatcaatagcatttgtcaagataatcataatagagatgcagaatctgacaatgtggctaccgaagtagctgaaatcagccatcttatggagaaatctatgttacctcttgactgttcagttgggcatgaggtgggtgggaaagtgggacagggatcaatccaattacatattgggaacagtgggagtttgccgtgcaccagtgacaatgccatattaaggcgctgctcatttggtgggaattctatggtctcagatatatctaagtgtcaactcactggtcagcaggccccattcaccaagaggtcccatgtttggtctttatttgaagagatggatgtgtttcgaaagatgccacagcagccacatttccttccactcaagcaccatccactagggctgcgtgaaggaacggctttaggtctaatgtggtcatatactgatgcagtggataatataagtaaattatgcataacggacagcatggaaatatttgaagaccacatcaaaacacttaccattttagaagaaaatggattcagtgttcagtctttgcagcagattctgaccaaattgctccagatcagatcagattacaccaattctctcagagacggggagaaactgaaagaacagatagcggataaggcctttgctgtgtcccgtgttgatgctctgcttgatgaaaatgatagtgctatagccaagcttgaacaggaacttgggaaactccgatggaaaggccagaagatgtcaaagaaaaaggaggatgaagatgcagagctgtcaagactgaaggcggagaataacaatgctgaggaagcacacggtgatgctaaacgacagtttgacagcatccgggctgagctgcggcaacacttagcaattgatagtcagtaaccatcctgatgagtcccaacttaggcactgtatgctgggtgcttatctaagactaggaaccctgcctgttgaatgtgtcagtcctgacctattatttctagaccatctatctgtgctaatctgatctacctatctctgtacttatttcttcctaaaatttgccagctatctgctgttattagttcctaaaattcgcctatcggcatgcgggttgttttgattgacaatttagtgttggtgttgttct

SEQ ID NO: 6893 - DNA, 1603 bp, Oryza sativa
  ref <308>: DATABASE ACCESSION NUMBER: AK064027
  ref <309>: DATABASE ENTRY DATE: 2001-12-06
attttcgcccccctccgcaagcaatccaccactgcatcggcggcgagggctcaccggcggcgagccatgtgcggcggcgccatcatccaccacctgaaggggcacccggaggggtcgcgccgggcgacggaggggctcctgtggcccgagaagaagaagcccaggtggggcggcggcgggaggcgccacttcggggggttcgtggaggaggacgacgaggacttcgaggccgacttcgaggagttcgaggtggactccggggactcggatttggagctcggggaggaggacgacgatgacgtcgtcgagatcaagccggccgccttcaagagggccctctccagagataacttgagcaccattaccactgccggatttgatggtcctgctgcaaagtctgccaaaagaaagagaaagaaccaattcaggggcatccgccagcgcccttggggtaagtgggctgctgaaatcagagatcctcgcaagggtgttcgtgtctggcttggcactttcaacagtgctgaagaagctgcaagagcttatgatgctgaagcacgcaggattcgtggcaagaaggccaaggtgaattttccagaggctccaacaactgctcagaagcgtcgtgctggctccaccactgctaaagcacccaagtcaagtgtggaacagaagcctactgtcaaaccagcattcaacaatcttgccaatgcaaatgcgtttgtctacccatctgctaacttcacttcaaacaagccgtttgttcagcctgataacatgccatttgttcctgcaatgaactctgctgctcctattgaggaccctatcatcaactctgaccagggaagcaactcatttggctgctctgactttggctgggagaatgataccaagacaccagatattacatcaattgctcccatttcaaccatagctgaagtcgatgaatctgcattcattaagagcagtaccaacccaatggtccctcctgttatggagaacagtgctgttgatctgcctgatttagaaccctacatgaggttccttctggatgatggtgctggtgactcaattgatagccttctcaacctggatggatcacaggatgttgtcagcaacatggacctctggagctttgatgacatgcccgttagcgatttctattgaggaattcgaagtcttctagtcggagcatgtacacagggaaaaaaaaggaataaatactattggagattgggaggcacctgcatggcaccttgggggtagcatatcgttatgtttagcttagatgcaaaaggctgcatcctgaaactctttggtgattggacctgttccctatccgctgtctatgtatggcagccatctatgagactcaagaactgcttttttttttccgttctagttttctgtcgttgctacctgtatatggctatgaacatcgtgaatccatggccattatgttttaatctatgttgttgactgctctttctttcggtctttgctgtgctgcgctatgttggtgataactagctaccatattgattttctgtacataattcatttgttgaatccgaaattaaatagtgcattgactatatatttatat

SEQ ID NO: 6894 - DNA, 2158 bp, Oryza sativa
  ref <308>: DATABASE ACCESSION NUMBER: AK064028
  ref <309>: DATABASE ENTRY DATE: 2001-12-06
aaagccccgcaaattctctcgctctctctctctctctctctcccactcctctcccctctcccttctctcatctcgcgcgcggcgcgccgccgtagagacgaaatggtgatggctcagaagacgaaggaggcggagatcacggagcaggattcgctgcttctgacaaggaatttgctccgcattgctatatacaacatcagctacatcagaggtctattccctgagaagtacttcaatgataagtcggttccggcactagagatgaagattaagaagctaatgcccatggatactgagtcgaggaggttgattgattggatggaaaaaggtgtctatgatgcactacagaagaaatatctcaagacccttctcttctgcatctgtgagaaggaggaaggcccaatgattgaggagtatgcattctcatttagctaccccaacacgagcggtgatgaagttgcaatgaacttgagccgcacagggagcaagaaaaacagtgctacatttaaatcaaatgcagcagaagtcactcctgatcagatgaggagctctgcttgtaagatgataagaacactggtttcacttatgaggaccttggaccaaatgccagaggagaggaccattctaatgaagctgctatactacgatgatgtcacacctgaagattacgagccacccttttttaagtgttgcgctgacaacgaggccataaatatatggaacaagaaccccttgaagatggaagttggaaatgtcaatagcaagcatctcgtgttagctttgaaggtcaagagtgtccttgacccttgtgatgataacaatgtcaacagtgaagatgataatatgagcttggataatgaatctgaccaagataatgatttttctgacactgaggttcgcccatctgaagcagagcgttacattgttgctccaaatgatgggacttgcaaaggtcaaaatggtacaatctcagaagatgatactcaagatcctgttcacgaggaagagctaacagctcaagtaagagagtggatatgctcaagagacactgaaagtcttgaggtttcagatgtccttgttaatttccccgacatatcaatggaaatggttgaagatattatggagaggctacttaaagatggtttactatccagagcaaaaaaggatagttattctgttaataagattgctgatcctacaacaccacacataaagaaagaggtcatcatgcaaaatgtctcacctactgaaggaactaaaaatagcaatggtgatctgatgtatatgaaggcactgtaccatgcacttccaatggattatgtgtcagtaggcaaacttcatggcaagctagatggggaggccagccagaacatggttcgtaagttgattgaaaaaatggtgcaagacggatatgtcaagaattcagccaaccgaagactaggcaaagctgtcattcattctgaagtcaccaacagaaagctccttgagataaaaaagattctggaagtcgatatagccgaacaaatggccattgataccaatgcagaacctggtgagcctgagcgcaaagaccacctgagtggccatgaaatgagagatggatcgacgatgggttgcctccagtccgtcggatctgacctcacccgcacccgggagcttccggagccgcagcagaacgtgtccatgcagagcgggcaggaagcttccacggtggataaggatccaagcaggactcctacaagcgtgcgcgaggcgtccgtttgttccctggagagtggggttctcgggcagaaggtcagaaagtctttggctggtgctggcgggacgcagtgctcgcaggacaagcgattcaggaaggccagcacggtgaaggagccgatcctccagtacgtcaagcgccagaagtcccaagttcaagttcaagttcagtgagggttcgtgtcgcaagcgtcaggagcaactaacatcgtagttcaggtgcagaagaccacaagtagatatatccatcctattcctagttccggtgctcaagtttgtgcagatagtcagagagcactcacgcacacgtagatatctgtccatgccgctgtcccaaatggcaaatggagatagacgctactatgtgctaacacacactcaaattaagcattcaaaacgc

SEQ ID NO: 6895 - DNA, 1479 bp, Oryza sativa
  ref <308>: DATABASE ACCESSION NUMBER: AK064029
  ref <309>: DATABASE ENTRY DATE: 2001-12-06
aaaaacaaatgtgttgatgtgtgtgtattgcaatgctggtatttttggtggtgtcagggactcgacgtggtcgtcgatgaggaacatggtgatcccgctgtaccagccggcgaggctcgccggactcatcccgacgatgcagtcgtacgtggacgctctggtggacaacatcgccgggtgcccggaccaggactgcatccccttctgccagctctcgctgtgcatggccatcgacatcatcggcaagacggcgttcggcatcgagttcggcctgtccaggaaggcggccgacaccgccgccggcgacgacggagacggcgacgacgacgacgacgtgaaggagttcttgagggagtacaagaagtccatggagttcatcaagatggacctgtccagctcgctgtccaccatcctgggcctcttcctgccgtgcgtccagacgccgtgcaagcggctgctccgccgtgtccccggcacggcggactacaagatggaccagaacgagcgccgcctgtgccgccgcatcgacgccatcatcgccggccggcggcgtgaccgcgacgccggcgacggggcggcgctggacttcatcgcggcgctgcttgacgcgagagagagcggcggcggcgggcacggcggcttcgcgctggaggaccggcacgtccgggcgctggcgtacgagcacctgatcgccgggacgaagacgacggcgttcacggtgtcgtcggtggtgtacctggtgtcgtgccacccgcgcgtggaggagaggctcctccgggagatcgacgggttcgcgccgcgcggccgcgtccccggcgccgacgagctccacgccggcctcccctacctcaaccaggtcatcaaggaggccatgcgcttccacctcgtctcgccgctcatcgcccgggagacctccgagcccgtcgagatcgccggccacctcctcccaaaggggacgtacgtgtggctggcgccgggggtgttggcgagggacgcggcgcagttcccggagccggaggagttcaggccggagaggttcgcggcgggggcggcggaggggagggcgaggcacccgtacgcgcacatcccgttcgggatcgggccacgggcgtgcgtggggcacaggttcgcgctgcagcaggtgaagctcgccgccgtcggcctctaccgccgctacgtgttccgccactcgccggcgatggagtcgcccctccagttcgacttcgacctcgtcctcgccttccgccatggcgtcaagctcagggccatcaagaggaccaacacctgagctcacctcagcctgagcctagcactgtgtgaagtatgtgtacagtatatgtgtgttgctaatctgctagtggtgtgtttgctaagagagcaaattgcaaatctggctagtttgtattttcaagttaaatttgtaatttagaaatcttgcagatatttctcaagtataaagcaagttatattatgtacagt

SEQ ID NO: 6896 - DNA, 1386 bp, Oryza sativa
  ref <308>: DATABASE ACCESSION NUMBER: AK064030
  ref <309>: DATABASE ENTRY DATE: 2001-12-06
acacactcgctgtcgccctcgccccgactcgactccgccgctcgcgcggcgccggagccctaaaccctaggtctcccacgcggcggcggcggcgggcgggggtttctcgccatgtcgcacttcgggaggtcggggccgccggacatccgcgacaccttctcgctcctcgtcctcaacatcagcttccgtaccacagccgacgacctcttcccgctcttcgaccgctacggcaaggtcgtcgacgtcttcatcccgagggatcggaggactggggactcgaggggattcgcgttcgtgcgctacaagtacgctgaagaggcgcagaaggctatagatcggcttgatgggcgtaatgtggatgggaggaacatcatggtgcagtttgccaagtatgggcccaatgcggagccaatacgaaaaggaaggatcatagaagaggttgagaaatcacgggacaggtcaagaagccgtagcccaaggcgaaggcacagagatgaccacagagatagagaacgcaggggccgaagtcgcagcagaagcagagaaaggcatggccgtgacagggatagggatcatcgtcgtcacagcagaagcagaagcagaagcagaagccgaagccgaagccgaagcttaagcccagactacaagaaccgtcgtagaggaagagatgatgataagcgtaggagcaagagcaagagcaagagcaagagcaggagcaaaagcaggagcaggagtaagagcaggagcaaaagcagaagcaggagcagaagcaggagtcggagccgctcatttcatagtgcatcgcctactcggcacagcgctagccctcctctcaagggatcaacaccacgcaggagccctgctcgcaatggaagtcctgaaaaagagacaaatggaaaaggttcacctccttcacgcagtgtttcaccatcaccacagcgtgctggctcccgtagcccaggtagtgatgacaaggaataaagtttgttgatccagtgatgcttaagaagagtcttcaaattggactagaaaagtttggctgagcatgggagtagcaccgaagcagattcaaggttgctagttcttcgtggtttctagattgtatttcctgttatctgttcgtgagacgggttgctgttttctagtagaatgatattgcacgggatcgcccatgatggatgatgttctagctattagtctttgttgttggtgtgatgcccgcgatggtgcagctgatgattgtggtgatggcgctgatgctgattatgggcagatcttggtattgacacactgatgttgttcactgctgacagagttccttgaattgtttttgttcaaaaggttacaaagaaaatcatgaagttccatatggatctcatgattggt

SEQ ID NO: 6897 - DNA, 1809 bp, Oryza sativa
  ref <308>: DATABASE ACCESSION NUMBER: AK064031
  ref <309>: DATABASE ENTRY DATE: 2001-12-06
atatcaactctctgaaaatgatgtttgtagagaaatttatttataagtggcgcttaaaggcaagaaaatgaaacagagcaaacaaacttaatggcttgttagttccaaaacttccaaagcagcatgttgcctattaaccttacaactcaccagttctttttacttggcattaatgccattgatgcaatcttcaatgctcatgtttgatcattgattttttttctcattaaaatcattaagaatatagctacgcaaaagtattttcatgatgaatcataacatttttgcacatactagtgagataacttttaatatttgactgcaagaatgttataagggaaagccatctctaccgagagcattaggttcagaatctagagtaacgtggcttcaatggtgatgaagagctgcaacaacatgaccagaaatttttcatggtgttttctctaaagctaaacgagtaaactttcagtggtatcaaactatcttttaccaactgtggcatttattccgaaaaccatgtgttatgtacaaccatagttagttcattttgcatataaggccaaacaacaatagatattcatatcttggttgtctgtcagaaaaagaaaatacaatagtgaacaaatgtttgcttactttcatattgtctgtactgaatcgtagttgtatgtcttttttttggcaattaattacggtcaagggccgcaaaatggctcttactgcaaatatcaattcaaatttaaataataactgttgtacaggattaattatggtgcactaagttattattaaacaaaattaactgacagtgaaacatttatccaatttaattgctctattttttttctgatccttatcaagtactagcattgacagtgagttgaattaagcaatcctctgtctctgcctcaactgctatgggattaggacagtacttgccaagttttggccatataccatcagttttcttgggtgctaccttttgttttgtggcaggcttagcgctacttggcagtgttctaaaaatcaccattagaggcggcacctcggtgccaagcaccagctcagcgctgcgaatagcacattggtccacgtcagcgcgatggtcaacatcggtccacgttggcgcctaggtgcagcagcgattagtcaactaggcggctgactggtggtggtggtggtctggttctggcggctgcttggatagttggatgcatgttgctgctgtggtgtaagttgccgatttcagcctttggcatgttggcaactatcaaacaaatggtagaatcaaatattcaaatcctaaacacatgtattttctacaagttggatgttggcatgctgcaatttgttatgttgtatacttaactcactatctaggacctggtcaattctccctcccaagttggctctaggcgctacgcatcaccctggtgccagactagcgcctagcaccttcttgaacactgctacttggtcatggtttcatggtcagagatgatcaggtacagtaaaaaaaaaactggcaagaatctgtgggatctggctaaggcgaagaccagggatattggaagtgtacaaatggtcagtgagtttcttctctctttttttttttttttgtggtgatctcgtcaagtagatattgagttgcaaatacctagtactagtatctgggctgtctgaacacaacaatgttgaacgatgatcacatgatatatttcagctgatgtataaatcaagagaattattcatgtattccgaacaaggtcatatcaatactatattacagtacgatccgacggctct

SEQ ID NO: 6898 - DNA, 2006 bp, Oryza sativa
  ref <308>: DATABASE ACCESSION NUMBER: AK064032
  ref <309>: DATABASE ENTRY DATE: 2001-12-06
cagcaataagtgtgatgcaaagagcacattcatactgcaatatatggtttatttgcaacgggaagctaacatgtgtcagggaggccagttgttgccctgtaaaaaggtcaaaatcagcacgcctaccttcttctgtagacagttgcaaggtggatcttcaaagtttgcttgagcctaatatagaggctaaaagattgggatgcatgtatattaatgaaatggaactaaggaaagagacagaggcaaaactctcacaagaaaaggaagagtcagaatctctcaaacatgccactatggtgctccaaaatgacctggactggctcaaatatcagttgaatgagaaagccaatagattacaagatctaaaccaacagaagcacctccttgaacaccgcatctcagagtcagactcagttgccacttatctagaagagagcatgaaggttacggaatctcgtgtccagtcactgaagttagagtacagtaaaatgaagcgagagcgagatgatgcagttaaagaggcaaggagcatgcgtatagagaaggagctgacgaattcttgtgcctatggagcaataagctctgagttctccttgatggagttggagcaggcaactcagaatttcagcaatgcacttaacatcggtcaaggtggatttggatctgtatacaaaggttctctgcgcaatacgacagtagctataaagatgcttagtactgacagcttgcatggccaatctcagttccatcaagaggttgctatactcagtagagtaaggcatccaaacttagtcacccttattggagcctgcactgaagcttcagcgcttgtttatgagctcttaccaaatggaagcctggaggaccgactcaactgtgttgacaacaccccgccactcacttggcaagtgcgcatccagatcatcacggagatttgctctgcacttatcttccttcacaagcaccggcctcacccagtggtgcatggggacctcaagccaggcaacatccttcttgatgcgaatttgcagagcaaactcagtgattttgggatttcacgcctccttctggagtccagtgtcactggaagcgacgcacactacacctccaggcctatgggaacaccggcatacatggacccagagttcttcgccacaggggagctgacgccacagtctgatacttactcttttggtgttaccatcatgcgtctcttgaccggacgggcacctctacgcctgattaggacagtgcgggaggcgctgaacgactatgacctgcagtcagtgttggaccattctgcaggtgactggccattggtgcatgtggagcagctcgcacacattgcgctgcagtgcacagagctcagcaagcagaggcgccctgatcttgagcatgatgtgtgggaggtgattgaacctatgaagaaggaagctcatttgccattgtcccagtcttttcgatctatctgtagtgccattgaaactgccaccccgtcctacttcctttgcccaatctctcaggtgaccatgagagatcctcagatggcagcggatggcttcacctatgaagctgatgctataagagattggctggataagggacatgacaggtctccagtgactaaccaaacacttgctaactgtgacactatccccaatatcgcactgcgttcggccattcaagaatatctcaagcagaacaacatgaacaagtcatttgcactatatgaacagcagcattagtggcctgtattgagtttcatctgtgcttcgactgtaatagatcgtttctgtgccagtaagaaactaaggaggtagtgttagaatagtgtttttcttttttcagttgagctgtaaacctaagttaaaacttaggaaccaattcttttcattttacctgagtttttgaaaattaagggttgggtcttctttgaactaattcatgtggaaatcctacaaaactgtgtgttaaattccagcattctaaatgagatcttaatggat

SEQ ID NO: 6899 - DNA, 2382 bp, Oryza sativa
  ref <308>: DATABASE ACCESSION NUMBER: AK064033
  ref <309>: DATABASE ENTRY DATE: 2001-12-06
accaaagtcacgccgaagaagaaccgcgttagggcttcctcccccgccgccggcgagagtgggctttgactcccctcggagccgcctcctcttcgtctcatctccccgcggccttgttcatccccttctacgagccttagcgccgcaccgcaggttccagctcggtggctggagtttaatttttatttgttctccatggcgcttcggttcgaggtattaggaagattcaatcgtgctcgtgcagctcgattaacactaccccactttacttgtcagacaccactgtttatgcctgttggaactcaaggtacaataaaaggcctgactactgaccagttagaggaaataggttgccagattatacttggaaacacctaccaccttgaacttcgtccaggttctcaacttattgacgacttgggtggccttcacaaatttatgaattggaaaagggcgttgctgactgactctggtggtttccaaatggttgctccaaatcttcatttttttaagacattgaatatctatgtggatcgttataacataaataactaagtcatcaactttaatgttttgccattgtatgtaaataccttctgctgtattagtttaaatacatcgctggtaattgtcaagtcttgttgctttgataatgttttcccatgagtaccattttgttatagtgatcccaacaaccagttgctccacacatgaaatctgaattgcacttaatttgatcacttgatgtaaaatacaatgctgatttttaaaagacgagaaacctattgatgctggctttaaaggaaaaaaaatgagatgacaatatcttaaatatcactggtattttttcttaacagcagatttaatcaaatttctgttttatttgaaagaagacagtaattgttcaagatctctatcaacatgagcacatacttgtttccaaagtgcttactcctttccaatgttaatatatattccctgctgaaattttactgatcggaaacatgctttttaggtttctttgctacatttggctgacattactgaggaaggagttacatttcagtcacctgttgatgggaagcccatgctcttgacacctgaggaatctatccatattcagaacaacattggagctgatataataatggctcttgatgatgttgtgaagaccacaattactggcccaaggatagaggaagctatgtatcgtacccttcgttggattgataggtgcattgctgaacttatttgggattgtacaaggaggattagatccagttcttagagatatctgcgtgaagggcttggttgagcggaaccttccaggatatgccattggtggtcttgcaggtggtgaagataaagactcgttctggcgtgttgttgcccagtgcactgctggactgcctgaagataaaccacgatatgttatgggtgttggctatccacttgatattgtagtatgtagtgctttgggtgcagacatgtatgactgtgtttatccaactcgtactgctcgctttgggactgcacttgttcctgagggtgttctgaagttgaaacaaaacgcaatggcaactgatgaacgaccgatagatccgacctgtccatgtatggtctgcaaaaactatacacgtgcttacttgcattgtcttgtcacaaaagatgctatgggttcccaactgctgtcgtatcacaatctatcatttatgatgcggttaagtagagacctccacatgtcaattctggaaggacgattcccagaattcgtgcgaggattcttgaggatgcagttcccaaagggcgatgttccgaagtgggttcgcaacgcaatggttgttgctggcattgacatatcggagtgctgcacccccgcgaagtatcctcgtgatgcaatggatgctccgggtactgacatacctgagctcttgcctcctaccaagtgctcctgaggcagagaaccaagaattaagggactaaccttataactgtttaccacgacacgcgcgattggagtgctgtcgcatgaaggtgatcccacttctttaacaaagtcaagttttcacaagaatcttattggtcatcaactcatcataggtgtaggcctcactgcttcatcagcatataattttccaacagtatatgctgaatatagctgattggattttgaacttttgataattacaaaggtttttgtactcctatcttttggaaccatagggttattatgcggattgatgcatgaatatcagaatatgcatcatgtcgtctgtagtgtaagctgttgcaaaatgatttctactggttttaatgtagaagcattatctactcattttgttaacgaagaacattctattccatacaagatggcatctcttc

SEQ ID NO: 6900 - DNA, 814 bp, Oryza sativa
  ref <308>: DATABASE ACCESSION NUMBER: AK064034
  ref <309>: DATABASE ENTRY DATE: 2001-12-06
aaatgaaaacgcgaatataccagccgaaagtaaagctgcggcggctggggtgaatggctccctcctctccccgccgcgacctcgacggcgaggggaccggcggcgggagctcggcggcgagggagaaggagcggccgaggtccttcgacgagaagacccggtcggcgtgctggcggaaggcggcggtggtgatgggccggcacccggagcggtggcggcaggacgccgccggcaacgtcgtgtgccgccgcttctggagctgccacggctgcctctgctacgagtacgaccacatcgtccccttctccaaaggaggggagtctactgttgacaattgccagattcttcagacaagggtgaatcggtcaaaatctgataaagcatggatagagcaggcagaaatgcagggattttcttgtgatatcaagttcactgataaagaacttgatgtgattgaaatggctgtctatggggatgtcatccgtcctggaaagcaatgtcgctgcaggacagtagctgagatgcttgggaaggtgaagtcaaagaatcagatggctgcttgcgagttgccacataatgatgcctcctagcataagtcatatcgttctgcacaactacaccagattcattatggtccgcacgggcagcaagcctgagatcactaccctgatttcatgctctattgtgataatgaacatatttgactttaggatctcttacattggttgtaacaccgttacaccaacatggtgtgctaggttagatcagttccgtgttgatttgtgcaattggactggctagttcggttcctttc

SEQ ID NO: 6901 - DNA, 1476 bp, Oryza sativa
  ref <308>: DATABASE ACCESSION NUMBER: AK064035
  ref <309>: DATABASE ENTRY DATE: 2001-12-06
accgaggcccgggtggtagaccgcgggacccgagccgagccgtgccctgccctgcccttcctccgcccagggtcgcagccaggtcgtcgtcgtcgtcggagggggaagagagccgcggcggcgtcaggaggaggaggaggggcgagatggaggcggagaagaagccgccggcggtgtccgacgtcggggcgtgggcgatgaacgtcgtcagctccgtcggcatcatcatggcaaacaagcagctcatgtcctcctccggctacgccttctccttcgccacgacgctgaccggattccacttcacggtcacggcgctcgtcggatggatctccaacgccaccggctactccgtatccaagcacgtcccgctctgggagctcgtctggttctccctcgtcgccaacacgtccatcaccgggatgaaccttagtctcatgctcaactccgtcggtttctatcagatctcgaaattgagcatgatcccggtggtttgcttgatggaatgggtgctcaacagcaagcactacaccaccaaggttatatcggccgtggtcgtcgtggcggcgggtgttgggatttgcacggtcacggatgtggaggtcaatgccaagggattcatctgcgcttgcgtggctgtcttctgcacgtcgcttcaacagattacaattggctcctttcagaagaagtacaacatagggtcatttgaacttctcagcaaaactgcaccaatacaggctgtgtctcttattatacttggtccctttgctgactattacctcaatgggcgatggttattaaactacaacttctcaactggggcaactttcttcatattgctttcttgctccttggctgtcttctgcaacatgagccagtacctctgcatcggccggttctctgcaacttcgttccaggtcctgggccacatgaagaccgtgtgcgtgctgattcttggctggatcctgttcgactcggccctcaccgtgaagaacatcctcgggatgctgctcgccgtgatgggcatggtggtctacagctgggccgtggagaccgagaagaaggcctccgccccaatcccccggaacaagagcgacatgctggacgactccgaggacgttcccctcaaggccagggtgagcggcctcccctcgtccgacctcgaggaaggcgagatgaagagctagctaatgacatattatttattcattcttcttgttcctttcttttttgtacgtgttcaaatccatatattgcccccattctgggggaagttcttgaagctatcggcacttgtgttaattttgcctcctcccttgttcctggggttcatagatgatgatgatgctgatgaaccccagccggtctcgacgtagatgaccattttagaagccatgttcttgatggcgtgttgttattatagatgacaagacttataatggaatacaggtgtttatccgttgtaggatgattctgttg

SEQ ID NO: 6902 - DNA, 1331 bp, Oryza sativa
  ref <308>: DATABASE ACCESSION NUMBER: AK064036
  ref <309>: DATABASE ENTRY DATE: 2001-12-06
accaccattccctcttcttctcctcctccttgcttctcccgccccttaacccctactgctccctcccagtagccggtgctaaccctagcttgctagctagattgctctctctggtagtagtagatccgtggagtggagatctgcccgcggatcgagcggcggcggcagagcaccagccgtgtctgcggcgcggtgtgcgcgggtgttgcggagcggcggctgagcggaggtgtgggaggagggggagtgctgcggcttccggggtgttagatccgccgatcctggcgccggagatggattcctcgtcggtcgagaaggtgaagcttccgatccgtgggttcttggggggctcgatctgtggctggaatggcgccttggctgggtggttttttgacgctcgatctgtgggttgcaggggagtgggtcgatagatccggacgagcgcacggcctccggcgagcccaaggcgtgcaccgactgccacaccaccaagactccgctctggcgcggcggcccctccggccccaaggtgagatgagatccgatctgctcctcctgctcttccctttctcgatctgtgcatttttttcgcctgggttttcggtggttgatccgcccgatctgtgtttttttttttgctttgatccagtcgctgtgcaacgcgtgcgggatccggtaccggaagaagagacgggaggcgctggggctcgacgccggcgagggcggcgcggagcggcaggagaagaagaagagcaagagggagagaggggaggaggtgaccatggagctccgcatggtggggttcgggaaggaggtggtcctgaagcagcggcggcggatgcggcggaggagacgcctcggcgaggaggagaaggcggccatcctcctcatggccctctcctccggagtcatctacgcctgaaccaccaccctacctacctacccacctagcaacagcaagagagagagaagcagaggaaaggaggcagccatgggaaagagtgatttgcttgcttaacatgcatgatctcaaccgggagagactagacagatctctaccctttttttttcttctcccctgcttagtttttccagctaattagttcgatcaaagtggaagccaagttaataatgatgatgatgatgtagtagctgctgttcttcctgttactgttacttgttcttgcctagctgtaatgttactagtagtgtttttagtagagcgtgtaacgttgcaatgtaagaaagagcttatgatccatcttctttctcttgttctttgcaagagattagctcctggatctgcaccaagtaatgcagtttttcagctg

SEQ ID NO: 6903 - DNA, 1495 bp, Oryza sativa
  ref <308>: DATABASE ACCESSION NUMBER: AK064037
  ref <309>: DATABASE ENTRY DATE: 2001-12-06
tagaagtcagttggaagggatgttcatgaagaagtttgaaagcttcgacaacattatagttcgtatagatggcttaccgaaaattgacagattaatgtcacttgaggcttttgtgaaattgcctggaaatcattttgttgaaccaagaactttattcgctactgggagttcattaactgttgcaagtggtacaagagttggaagaatcatagcaacaggtgcgcttcaagaaatattgaaggcacatgctagtcgcaacagctggaatggcagttttaaaagaaagaacattttagtaagaaatggttgctattctgaaatctctatgcctttccatgctgagttcagcagggactctatgctcaatgattatatagcatattttgatgaagtgatctccctatttgaattaaaaggagtaggatgtcctgccttttttccttggatgcggaagtccttgttaagattcatgccagctccttctccatccttctgcgatgaattcaggcattttcaatgctttgcaatggcgcaatttgctttgaagcgtcctgtcgttaggattgggttcctttcaaatctttacaggctccggagatgtgcaaatcgacaagttagaaaaactctacttgccattcttaggagcttatcattaagatcagactggagggttattgttctattgcacagccatcccattctggtaaaagtgtacctattcaacaaaaaaaaggataaggaaggaaatggtggtggaaagacaaaggaaggaaatggtgagaattctaaggatcagaaaggtggtgaaaaaacaaatgatgcagattacaagatggcaaagttgacgaagtatgataattcagctaaccatcttgttatttacactcgccacgtgattgaacacgggatggatccagcacaacttgagagcgatgatgaagtcttggaagatgaaatgtatcaactagacgatgaatcaattgagatgctttcagagctagatttgctgtattcacattacctggagttgaatgacatgttggaagagttgttctacagtggtatgatgacgaaagaactttggcaagtgttcgaggagatattggatgtacacaacatggtggagcctctgtagtgactagatacacttttaatcactgattggaagatataactgaagatcgacagatgtccgttctggaatccatgccctcagctactagtggcaaagaacctgagtagtcaaacgaacagtaatcggctgaaagtttcctgtagatagtgtttagctggctctggtgtcttgtttagttgtttgtgactggttgtctgtctggttcctggtaagaggcaagaggacatataccaagagcttcgaacttggttcatgatggttttcatctgatttaggcagcttacacattgatggttgtgtccatcagtatattttgtactctctatcccaatttaactatcacctaagcaaagttcttcc

SEQ ID NO: 6904 - DNA, 1277 bp, Oryza sativa
  ref <308>: DATABASE ACCESSION NUMBER: AK064038
  ref <309>: DATABASE ENTRY DATE: 2001-12-06
agtgcaataggccgctttatcatcatctatctcttcttccagttccagctctctctctctcgtcttattgttggtcgttgacaagttttggttgggcatgaggatgagggagagcaacgaggaggagaagaagagcgtgtgcgtgatggacgcgtccggcccgctcggccacgccctcgtcgcccgtctcctccgccgaggctacaccgtccacgccgccacctacccccaccaccaccaccatccagaagaagagtaccagcagcacccccgcctgaagctgttccgcgccgaccccttggactaccacgccatcgccgacgccgtccatggctgctccggcctcttcgccatcttcaacaccccttcctcctcgcaatcgcaatcgcactcctgcttcctagatgaggaggagggtatggtggaggcggaggtgcgagcggcgcacaacattctggaggcgtgcgcgcagacggacaccatggagagggtggtcttcaactcctccgtcaccgccgtcgtgtggaggcctcagccggaggaggacgatgacgctgccttgcaattggacgagaacacctggagcgacctcaccttctgcagaagattcaagctgtggcacgctctggccaagacgctatcggagaggacggcgtgggccctggcaatggacagaggagtagacatggtggccatcaacgccggcctgctcaccggccccggcctcaccgccggccacccttacctcaagggtgcacccgacatgtacgaccacggcgtcctcgtcaccgtcgacgtcgacttcctcgccgacgcccacatcgccgcctacgagtgccccaccgcctacggacgctacctctgcttcaacaacgccatctgccgcccggaggacgccgccaagctcgcccagatgctcatctcctccgccgccgcgccgcgaccccctgcgccgccgagtgatgagctcaaggtgatcccacagaggatccacacaaagaagctcaacaaactcatgctggacttcaccagtggcgtatacggggacataaattaaattaaactaggggatttgccttcctttattttatatatcacacgtgcaactagacatgtactactcctcttgtatcttcttctatttcttttattctttctcctctaaagggagggaaatttggtttggtcaaatgtacatgttgtacatggccaagctgccacatgtattccattcttacagagggtaagatcatttcaatgattacttatataccaac

SEQ ID NO: 6905 - DNA, 1397 bp, Oryza sativa
  ref <308>: DATABASE ACCESSION NUMBER: AK064039
  ref <309>: DATABASE ENTRY DATE: 2001-12-06
acacacactgacctgcaagctcgctgggcagcttacacaggggagtgaagtagagtgagtgtgagagagagtgagtgagaatgggtggcaaggccgctctcctgatggccctggtggccatcagcgtcgtcctggaggccagggcggacgccggtggctacggcggcgggtacacgccgacgccgacgccggtgaaaccggcgccgaagccggagaagccgcccaaggagcacaagccgccgcaccaccacgagcccaagccggagaagccacccaaggagcacaagccaccggcctacacgccgcccaagccgacgcccaccccacccacgtacaccccgacacccaagcctacgccaccgccatacacgcccaagccgacgccgccggctcacacccctactcccccgacgtacacgccgacccccactccacccaagccgacgcctcccacctacaagccacagcccaagccgacgcctgcgccttacactcccactcccacaccgccaacatacaagccgcagcccaagccgaccccgccaccgacgtacaagccgcagccgaagccgactcccaccccctacactcccactccgacgccgccatcgtacaagccgcagccgaagccgactcccaccccctacactcccactccgacgccgccatcgtacaagccgcagccgaagccgactcccaccccgtacactcccactccgacgccgccatcctacaagccgcagcccaagccgaacccgccacccacgtacaagccgcagcccaagccaaacccgccacccacgtacaagccggcgccgccaacctacaagccgcagcctaagccgaacccgccacccacgtacaagccgcagcctaagccgactcccactccctacactccacccacgtacaagccacaaccgaagccgactcccactcccactccctacactcccacgcccaagccgaacccgccgccaacctacaagccacagcccaagccgactcccacgccgccgccctactagttgtgttccgccactctccgtcacgttccgaccaaaggaggtgaccgaccgaccagagttgtgcgagaggccaaagaggctcttccttccgtgaagattgctgtgcatgccgagctgcgctgcctttaattacctatagctaattaattagctagggccaatgttgcgaggagaataatgcatgcttgagtgccaatgttgctagctcgctccctctctagatgtgatgtgtatcatgtgttgtgtgttgctcgaatttgtactgtctagcgtacgtcgatcccgtggtgatttgtggagtatggtattgttgtgttacggtataaccaaaaataacagcggaaatggaagtaaaagctgttttcgatc

SEQ ID NO: 6906 - DNA, 1471 bp, Oryza sativa
  ref <308>: DATABASE ACCESSION NUMBER: AK064040
  ref <309>: DATABASE ENTRY DATE: 2001-12-06
gcaaatcgcaaccatctcgtcaacaaaaaggcgcctctaagaattcctcccaaactttttggtgttgtcaagccgtgcgtttcggggtacatcaacggcggcgatgagctcccggatggccggatcggcgatcctccgtcacgtcggcggcgtccgcctcttcaccgcgtcggcgacctctccggcggcggcggcggcggcggcggcgaggccgttccttgcaggcggagaagccgtccccggggtgtgggggttgcggctgatgtccacgtcgtccgtggcgtcgacggaggcggcggccaaggcggaggccaagaaggcggacgcggagaaggaggtggtggtcaacagctactggggcatcgagcagtcgaagaagctggtgcgggaggacggcacggagtggaagtggtcttgctttaggccatgggagacctacaccgcggacacttcgatcgatctgacgaagcaccacgtgcccaagacgctgctcgacaagatcgcctactggaccgtcaagtcgctgcgcttccccactgatatcttcttccagaggaggtatggctgccgcgcgatgatgctggagacggtggcggcggtgccggggatggtgggcggcatgctgctccacctccggtccctccggcgcttcgagcagagcggcggctggatccgcacgctgctggaagaggccgagaacgagcgcatgcacctgatgaccttcatggaggtggcgaacccaaagtggtacgagcgcgccctcgtcatcaccgtccagggcgtcttcttcaacgcctacttcctgggttacctcctctcccccaagttcgcgcaccgcgtcgtcggctacctcgaggaggaggccatccactcgtacaccgagttcctcaaggacctcgaggccggcaagatcgacaacgtccctgccccggccatcgccatcgactactggcgcctccccgccaacgccacgctcaaggacgtcgtcaccgtcgtgcgcgccgacgaggctcaccaccgcgacgtcaatcacttcgcatcggacatccattaccagggcatggagctgaagcagacccctgcgccgatcggatatcactgaggatgtttgtctactgccgaggatttgcatcactaataatcaaatcaaatgagtatacttcgtttttcagggaaagcaaatgagagctctttagctgtatcggatttggtaattgctactagtaactactaagtactgaaaaataaggagtctccttgtttgaagtacaaatctaggagattttttgaaccaactctatctgaattgggcctgtttttcgtacgccgcactgcttcatgtacatatattccatcccctatcttatgtgtggcaagtgtctttctaaattcttggatgtaatgacacctgaatttctttcgttgaactattggcagctgagttatatatactacataccattcttttgtt

SEQ ID NO: 6907 - DNA, 652 bp, Oryza sativa
  ref <308>: DATABASE ACCESSION NUMBER: AK064041
  ref <309>: DATABASE ENTRY DATE: 2001-12-06
gatgttggtggatccagagagtagcactttgcttctccctgaggtctcgtcttcttttcagctcagaaacaagccacaggcttcagagaagacatccaattggtgctgattccatcgatcgatcgggagaggagagagatgggcaagacatgggcgatcatcaccctcctggagatggtcgccgagcctgtcctctactggattccggtgtggtatccggtgaaggtgctgttcgtggcgtggctggtgctcccgcagttcaagggcgcctccttcatctacaagaagctcgtcagggagcagctcaggaagtaccgcgccaggggcggcgccgccgccaccgtcaccgccggcgaagatcacaaggtgcacattgccaaggctgagcacgatcatgggcactgatggggacatcaggggagatgatctgagcgaaccggaagcttggctgctctagattaattgctgatgtatgatagaaacgccatggtattctgtcgagaaacatttgggagtaccccatatgtactatatctgaaatctgaactgtgaaagattagctactactgtagtttctgctgtagggggaatgtgtactggtctgttttgagttgaggcacttaacagcgttacagtgctgagtgttcactgc

SEQ ID NO: 6908 - DNA, 615 bp, Oryza sativa
  ref <308>: DATABASE ACCESSION NUMBER: AK064042
  ref <309>: DATABASE ENTRY DATE: 2001-12-06
aatttcggtgaaacttcggcaccagtcctctcaactatcccatctcctttgcagatgaggaaggaaacgcgagcgagcaccggagcagaagccagaaggagagatggcaacggaacagaagcccgtcgcaccttgacgtacggcgggcggcggagcgcagtcgcatgcgagctgctcatcgccgatggccggaaacgaaggccgccgcagccagccatccatccatccatcttttggtcatatagcaacactgcacaccaaccggcggtggtgcgttggttcgattcttcaccgccgctcctcgctgagtgacgcggtgttgaaaggtataggtcttaccctgtaggttttttcgctcctacagggtaggtcttgagtctggtataagacaaaattcaggaacagggacgcgcaagtagcgagaagttgttaatgcagagggacatggattttctaaccttagatcatgcctcatccattcgttttggatcggtgttcccaaattgatcactgcagcctgcgagggaaaatgccgagaatttatttcccttagactgccgtgtaagttaaagtaacaagtaatttaattatcaaacgggtggactacacgacgcg

SEQ ID NO: 6909 - DNA, 1526 bp, Oryza sativa
  ref <308>: DATABASE ACCESSION NUMBER: AK064043
  ref <309>: DATABASE ENTRY DATE: 2001-12-06
aatgcccatgagtgaaggcggcgaggggtggttctgagttggccgttggcgtgctgcgtgtggagatgggggaggaggcggtggtgatggaggcgccgaggcccaagtcgccgccgaggtacccggacctgtgcggccggcggcggatgcagctggaggtgcagatcctgagccgcgagatcacgttcctcaaggatgagcttcacttccttgaaggagctcagcccgtttctcgttctggatgcattaaagagttgctaatgtcctcttacattacttgtcaggataaatgagtttgttggtacaaaacatgacccactaataccaacaaagagaaggaggcacagatcttgccgtctttttcggtggatcggatcaaaattgtgtatctgcatttcatgtctttgctactgttgcaagtgctcacccaagtgcaaaagaccaaggtgcctcaattgttcttgcagctcatgctgcgacgagccatgctgtaagccaaactgcagtgcgtgctgcgctgggtcatgctgtagtccagactgctgctcatgctgtaaacctaactgcagttgctgcaagaccccttcttgctgcaaaccgaactgctcgtgctcctgtccaagctgcagctcatgctgcgatacatcgtgctgcaaaccgagctgcacctgcttcaacatcttttcatgcttcaaatccctgtacagctgcttcaagatcccttcatgcttcaagtcccagtgcaactgctctagccccaattgctgcacttgcacccttccaagctgtagctgcaagggctgtgcctgtccaagctgtggatgcaacggctgtggctgtccaagctgcggatgcaacggttgtggctgtccaagctgcggttgcaacggctgtggccttccaagctgcggttgcaacggctgcggctcgtgctcttgcgcccaatgcaaacccgattgtggctcgtgctctaccaattgctgtagctgcaagccaagctgcaacggctgctgcggcgagcagtgctgccgctgcgcggactgcttctcctgctcgtgccctcgttgctccagctgcttcaacatcttcaaatgctcctgcgctggctgctgctcgagcctgtgcaagtgcccctgcacgacgcagtgcttcagctgccagtcgtcatgctgcaagcggcagccttcgtgctgcaagtgccagtcgtcttgctgcgaggggcagccttcctgctgcgagggacactgctgcagcctcccgaaaccgtcgtgccctgaatgttcctgtgggtgtgtctggtcttgcaagaattgtacagagggttgtcgatgcccacggtgtcgtaacccatgctgtctcagtggttgcttatgttgatctagatccttttttggttgttgtttttcttgtattttttagttgttaggcctttgattaagttcgaactttcataaatatatggtgtttatcctgtaaagaaatgatgatttcaaggatttttcatagctatgagacgaggttgaacc

SEQ ID NO: 6910 - DNA, 1340 bp, Oryza sativa
  ref <308>: DATABASE ACCESSION NUMBER: AK064044
  ref <309>: DATABASE ENTRY DATE: 2001-12-06
attcccaactcttcggcggctcactcgatcagcctctcctcctctctacctgccccgcatctcgaatatttggccagtaaagcgaaagtgaagggtttgcaaatcggctagcagttcagagaaaatgggggttgttggatggagggttcgttcgatggtccaacatttgggttggaactgtcgccggggcctctcgtccgctgcggttcaatctcagttggagaatgtaggattcataggactgggaaatatgggtgcccatatggcgaggaacctggtaatggctggatataaagtgactgttcatgatgtcaatgagaataccatgaagaaattctcggatgatggaattcccacaaaactgtctccacttgaagtgtccaagtctagtgatgtcgtaattacgatgctgccttcgtctgcccatgtattagatgtatacaatggacggaatggtttgcttgctaatgggggctgccttggaccttggttgtatatagattcatccacagttgatccacaaacatcaaggaaaatatccatggacatctcaagatgcactttgaaagaaaagaaagcctatgctgaaaaaccgatgatgctggatgctcctgtttccggaggtgttcctgctgcagaagctgggaaactcactttcatggtaggtggttcagaagaagcatatctagcagcaaaacccttacttctctcaatgggcaaaaaaacaatatattgtggcggggctggaaatggctcggttgcaaagatttgtaacaacatggcaatggccatcagcatgcttggagtctccgaagcttttgctcttggtcagaatctcggcatcaaagctagcgttcttacagacatattcaactgctcaagtgcccgctgctggagcagtgacacatataacccagttcctggagtaatgatggatgtgccatcatcgaggaactatgatggtggtttcacctccaaactaatgaccaaagatttggatttggccatggcctctgcatctggagttggcttcaattgtccctttggttctcaggcacttgaaatttaccgaaagctatgtgctgatggctgtgaactcaaggacttctcatgtgcatttcgccacaactatgctggcaaagatgaaaattgatcttgtagctctgccacctaacttgccacctgttaaaataaataaagcaataaaaagttgtgtgattgaagtgtactcaggcaaagttggactatcctttgtaaagtgaattatcttaattgacgcctttcagcctgtaaaatcaaatccattggctcaaagcaaagctttctctgacatttgtact

SEQ ID NO: 6911 - DNA, 722 bp, Oryza sativa
  ref <308>: DATABASE ACCESSION NUMBER: AK064045
  ref <309>: DATABASE ENTRY DATE: 2001-12-06
aaaccattccaaccttgctgctcatctcagcactacttaccggcgttgccgtcagcgacgagccatgaccatgaagcctaacgaggtgctcgtcctcgtactcgtactggccgtggtcacctctccaggcacggtgtgcggggcgtcccggacagcgccggcggccgcgacgaagtgcgacccgctggcgctgcgcccgtgcgcggcggcgatcctatggggagaggcgccgtccaccgcgtgctgcgcggggctccgggcgcagaagcgctgcctgtgcaggtacgcgaagaaccccgacctgaggaagtacatcaactcccagaacagcaggaaggtggcagccgcctgcagcgtgccggcacccaggtgctaacttggtgtaatcgtatttataagattacggtcttctccggatggtgtggtatggatcgatctcatgctccttggggcttcatctcgagcctcgactatcatcttttttctttgggtagtgttaccatgtgagattgcgagtgtgttatgtgatgtatccatgtggcagaagtattagctagctgttagggctttctgttaggttagtgtctttaggtggtgtgttgttttagcagtgatggaaaaatcagaacattaaaagtggtgttgttcatcttcatgcttaatggatcttttgttctcctgagattttccagaaataataatttcgaattcacctgtataat

SEQ ID NO: 6912 - DNA, 407 bp, Oryza sativa
  ref <308>: DATABASE ACCESSION NUMBER: AK064046
  ref <309>: DATABASE ENTRY DATE: 2001-12-06
agtagcaacattggcagagacgaggaagagaatgcgagcaagtgccagggcatcatcatcatcatcgccgtcgcgctgttcgaccagaacgtggtgtcgtgcttctacccggtgccatccgagggcacgaggcaggtgctcacggcgctgccgatcgccatcggcgtcgtcgggagcatgctgttcgtgagcttcccgaccacacgccatggcatcgggttcccactctcgccgcgctaatatttagtagaattctgcctgcacgtacgcctatatgtgcatatcctcgtcttagttctttggaccattaattgcatgtaattaaattgtgacacgaacgaacacactgtaaagctgatcacggccccaatgggctcgcaaggagtcgatgcttacaagtttaactt

SEQ ID NO: 6913 - DNA, 1770 bp, Oryza sativa
  ref <308>: DATABASE ACCESSION NUMBER: AK104980
  ref <309>: DATABASE ENTRY DATE: 2002-08-28
agcctcctcctagctagatgctggtgaggcaaagttcagtgatcacttgcttcaaagggtgcagcagtgtaggagaggtgaggaggcacaggaagaagacaaccacatactattgccactctctcctgtgactgtgtgtgtgtgcgcgtgtgcgtgcttgctagatccagacaagctgtggaagcaaaaggaggatggcttgtagcttccactttgttcccttgctcctcctcctcaccttgctcttgctcatctcctctgccagtagaactgctgcattgccctccatgcgcagtagcagtgaagacaccgccagtaatgctactgctgctgcaaggcttaggccagggaaggagctgcttaagtacaagaggatcagggctctcctcaagaaactcaacaagccttctctcaagaccattcagagcccagatggtgatctcatagactgtgttccctctcatctccaacctgcatttgaccatccaaagctcaagggacaaaagcttctggacccaccggagaggcccaagaactacaacctcaccattgccgtcagcagcagcagcagcagtagagtaggtgaggtggtggtgcaggcctggcatgccgccggcgaggagtgcccggaagggacggtggcgatacgccggacgacggagaaggacctgctcagggccagctccctccggaggtacggcaggaagccggcacgccggaatattcgccgtgattccaccagcaacggccatgagcatgcagttggatatgtgaacaatgataattactatggggccaaagctagtgttaatgtgtggtcaccaaggataggtgacccatctgagttcagcctgtcacagatctgggttatctctggctccttcggcaatgatctgaacaccattgaagctggatggcaggtcagccctgagctgtatggagacagtaacccaaggttcttcacatattggacaaccgacgcatatcaagagaccggttgctacaaccacaactgccgtggatttgtccaaacgaccaacaagatcgcgatcggcgcggctatcacgccagaatcggtgtacaacggaaggcagtttgacattaccctgatgctatggaaggaccccaagcatgggcactggtggttagagctgggcccgggtatggtggtggggtattggccatcgtatctgttcacccacctggcgcaccacggcaacatggtgcagtttggcggcgaggtggtgaacacgcggccgtcggggtcgcacacggcgacgcagatggggagcggtcacttccccggcgaggggttcgaccgcgccgcctacttccgcaacctgcaggtggtggactgggacaacagcctcatcccggcggccaacctcaagctcctcgccgaccaccctgcctgctacgacatccagggaggctccaactcctactggggcagctacttctactacggcggccccggcaggaatgtcaaatgcccttgaaaggatctcgctctctccatctcttgttgcttgatggccggtcactcttgtttttctttttttgttcgtttgtttgtttgttttctttcttctgtgttcttctttgtgatagagattggttagtgcattaatgctaggatattactctatttgttaggtcttagcttgagctgctgaatgcatatgggagcaattaaattgagagggatttgtaaatttgagaagcaccttgattttgggatcaatatatgcattcagttcacagagtaac

SEQ ID NO: 6914 - DNA, 524 bp, Oryza sativa
  ref <308>: DATABASE ACCESSION NUMBER: AK064047
  ref <309>: DATABASE ENTRY DATE: 2001-12-06
attaagcagacggagaagtggatgagaaaagagcttcacgggctacggggcctaacagatggattcgatcttggaattaacatgttcgtcgatggagacaaggataatgatgtcggttcaaccgaaccccatttcaagagcggaggtcggagaaaacaccataaaggcaagaggaagaggcattagtgaacccacagatggcgtttcacacagcaatgtcacattcaaaaccaaaattttgatctgtgcgaattgagtagtataaatgagtgattttcttcggcatgagagccatgttggttagaatcagcaggttttgtgcatctatctgtcaacttgttcttcagtacgcggttaaaagatattgatcgtcgatacttaagtcaattggtaatctgtcgttatgattttgtttgtaatcctgtgactcatgatcatgccaattgccagatagtgtttccggaatcctcctgtaccacattcttgaataaccgcttggtttaaaaccaacggcggctggtcag

SEQ ID NO: 6915 - DNA, 919 bp, Oryza sativa
  ref <308>: DATABASE ACCESSION NUMBER: AK064048
  ref <309>: DATABASE ENTRY DATE: 2001-12-06
aacgccaacgccgccgctttctcccctaaagtctactagtcctcctcgtcctctccaccctcctcggcggcggcggcggcagcagcggcgcttgaagctcgggctatggcgagcccgccgaggatcgaggtggagaagctgagcgtggagcagctgaaggccctcaaggagcagacggatctggaggtgaacctcctccaggacagcctcaccaagatccgctccgccgccacccgcctcgagaacgcctccgccgcgctccacgacctctccctccgccccaaagggaagaagatgctcgtgccgctcacggcgtcgctgtacgtgcccggcacgctggacgactccgagaaggtgctcgtcgacgtcggcaccggctacttcatcgagaaaactatgactgaaggcaaagaatactgtgaaaggaaaattaatttgctgaagtctaattttgatgaactagttgagatggctacgaagaagaaaaacatagccgacgaaatgggtcggcttctacaagccaagctgaggcagtcatcgccgagcccgagttcatgagacccgaccgcacctcctgtctccaccttgttagatggccaggttgagtagtttgtggcatctatctagccaacatagaaaatttttagctgctgctctggtcgtgtgtctgtgcaaaggcaaccggttcacttccatggtttactgaaagaacctgcctcatcaggttagcccagaagccggtgttgaacacgcaaattttattggctcaagtcgcaggtagccgaattgtgataatcatttgtgtggttgttaaatcagaatggctgatttcattagacattttgctgctgttccctgtttctggaagacgatattttagccatctttctatgtgatgaactgaccttgttgggactgt

SEQ ID NO: 6916 - DNA, 1453 bp, Oryza sativa
  ref <308>: DATABASE ACCESSION NUMBER: AK064049
  ref <309>: DATABASE ENTRY DATE: 2001-12-06
atcgactcgactcactcgagaatgcgagaatctcgactcgagcagacaggaagaatggcttcctccacctccgggagaagaggacgaggacgactcctctcgcctgcggcggttgtgctggcggccgtggctgtgctgctgtcggcgtcacaggcactggcggcgccgtgctacccgcgcgtgttcagcttcggggactcgctagctgacacgggcaacggccctttcctctacggcaacgagtcccgccggccaccgctgtggccaccctacggcgagaccttcttccaccgcgccaccggccgggcctccaacggccgcctcatcatcgacttcatcgctgacgcgctggggctgccgttcctgcggccgtactggggcgggcggaccacgggggacttcgccagcggggccaacttcgcggtgggcggcgccacggcgctcagcccggacttcttctgggagagaggcgtgcacgtgcgcgacaccgtgcacctcgacatggagatgaactggttccgcgatctgctcggcctgctctgcccagacgatcttgccgagaccgagggagccacggatccgggtgaaggccaagacccgcaagaccttgagcaagattgcaacgacatgatgaatcaatctctcttcttagtcggagaaattggtggcaatgattacaaccatcctcttatgggcggggtatccattagaaagattcgcagcttcactccgagtatcattgccaaaatttcttccacaatcactgaattgatcgggctcggagccaagacgttagttgttcctggtaatctcccaattggatgtattccacattatctcatgatattcaagagtggtaagaaggaagattatgagccagagacaggttgcctcaggtggatgaactagttctcgcaataccacaacagacttcttatggatgaactagaaaatttacggaagcttcatcctgatgtggccatcatctatgccgattactatggagctgctatggaaatcttcctttcccctgaacaatttggaattgagaatcctttggtagcttgctgtggtggaggaggaccttatggtgtatctgaaactgcaagatgtggaaatggtgaatacaaggtgtgcgatgacccacaactgtatgggtcatgggatggctttcatccatcagaagcagtctataaggccattgcaactggcctgatatggggttcatacacacaacctccaatcgctaccaccaccatttcgtgcctgcaaattacagagctcagttcttctgttgaatacaaggtcctctatgatttgtaattgtgtgactatattttgttattttcatagaatgtatgtgcggataaaaggttcatgtggaatcgtcgaaataagctggtattgtgctgaaatcgagttaaacttatgccatcgggtcttctaacggatt

SEQ ID NO: 6917 - DNA, 847 bp, Oryza sativa
  ref <308>: DATABASE ACCESSION NUMBER: AK064050
  ref <309>: DATABASE ENTRY DATE: 2001-12-06
aagctactactcgaagaagatgaagaccgccatgactacttccacccttctcttcctcctcctcgccggcctcaccgccgccgccctcggcacggcggacgacgacaccaccaccaacaccatacgcctcccgaccgacggaggatcagcacagcaggcgccgacgaagaagaagccgtggaagtgctgcgacaacatcgagcggctgccgacgaagaccaacccgccgcagtggcgctgcaacgacgagctggagcccagcaagtgcgtggcacagtgcgaggtgtgccaggaggcgccggggccattcccgggcccgctcatctgcagcgacgtctactggggcgccgacccgggtcccttctgcacgccgcggccgtggggagattgctgcaccaacaccacctgcaccaggtcgatcccgccgatctgccgctgcaacgacaaggtgaagaagtgcgccgccgcgtgcaaggattgcaagcgggtgaagtcgtcgaagcctcctcgctacgtctgccaggaccagttcaccggccagccagggcccaagtgcaaacactcgtgcgagaactagctgcagatcgatatgtatgatcgatcgatcgatctgtgtccgtcaataaaactcgccctagctagcagctagctgatcgttcgttcgatcattcagtgttgctagctagctccatattcagagctctgctatagcttgagagtgttttgctgcaactcgcttagcttaattacgtgtttaaattgtgtgttgtctcgtgtgaacgatggtctagccagtgaccaagagcaaaataaatgaataaatgttgccatgttgcgctgtcatcgt

SEQ ID NO: 6918 - DNA, 506 bp, Oryza sativa
  ref <308>: DATABASE ACCESSION NUMBER: AK064051
  ref <309>: DATABASE ENTRY DATE: 2001-12-06
tatgtctgagaaaaagataactgatgctcaatcccttgaggctagtttggaggaaaaaaggttggagatcgagggtaagcttcatgctgcagatgcgaagcttgctgaggcaaaccgtaagaaatctcaggctgacagggatttagaggaggtagaagctcgtcagcgtaggctggagaaggagaagctatgttttgaaaatgagaggaaggcaggggaggaccggatcaagcgtcaggaggattcattacgtgactgggacaaaaagcttaaggaaagtcagaatagaattcttgatttgcagagatccctaaatgatcgagaggagagagcaaacgagaatgacaaacttttcaagataaagcaagaagagttggaggaagcaaaaaaagctctggagcatactaaagctacactcaaaattaaagaggacgacattaacaaacgactagctgaattacatttacaagaaaaggaagctgaatcaaagaacaggaaattagaag

SEQ ID NO: 6919 - DNA, 793 bp, Oryza sativa
  ref <308>: DATABASE ACCESSION NUMBER: AK104981
  ref <309>: DATABASE ENTRY DATE: 2002-08-28
acccacaccacactccactccagcatagtactgcgcttagctaattaagcagcaacttaacttgatcttcgtgtgaccgatcgatggctcgcgcggcgaataataagtatgtggcggcggtgatggtggtggcgctgctgttggcggcgccggcggcgagcgcggtgacatgcgggcaggtggtgagcatgctggcgccgtgcatcatgtacgcgacggggagggtgtccgcccccaccggcggctgctgcgacggggtcaggaccctcaactccgccgccgccaccaccgccgaccgccagaccacctgcgcctgcctcaagcagcagaccagcgccatgggcggcctgaggcccgacctcgtcgccggcatcccctccaagtgcggcgtcaacatcccctacgctatcagcccttccaccgactgctccagggtgcactgagtggatcaacgtcaagtgatgccacaataataatggagagatggatccatcgatctgcggctctcattttgcggttgctatctgcaatattcgtcgtcgtcagagagatcgagctagaaatgcatgttactcctccgttctgttactatctgcttacctgttgcttcgtcgcggtttgatagtcgtcgttatagctagtgtaagagtgtgagggttgattttgatctgtctcctttacgggacgaggggcagacgaatcatgcatgaatcttagaggacctgcttgcattgtaccttactgcatgcatgcatgcttcaatatatatccatcaaatgaagagtcttttaat

SEQ ID NO: 6920 - DNA, 1881 bp, Oryza sativa
  ref <308>: DATABASE ACCESSION NUMBER: AK064052
  ref <309>: DATABASE ENTRY DATE: 2001-12-06
ccttgatagcctgattcttaacaacaacaatttggttggggagatccctgctcaattggccaactgcttcagcttaaataacctgaatttgtcatacaacaatttatctggacatgtcccgatggcaaagaacttctcgaaattcccaatggaaagcttcttgggtaatccattactgcatgtttactgccaagattccagctgtggacactctcatggacaaagagttaatatttcaaagacagcaattgcttgcattatcttaggctttatcatattgctctgcgttctgctgttggctatatataaaacaaatcaaccacagccacttgtcaaaggatccgataagccagtgcaaggacctccaaagctagttgttctccagatggacatggctatccatacttacgaggacatcatgaggctgacagagaatttgagcgagaaatacatcattggctatggcgcctcaagcactgtctacaaatgtgaactcaagagcggcaaggccattgctgtcaagcggctttacagtcagtataaccatagcctccgagagtttgaaacagaactagagacaattggcagcatacggcacaggaatcttgttagcctccatggcttctcgctatctccacatggaaacttgctcttctatgattacatggaaaatggttccttgtgggatcttctccacggtccatcaaagaaagtgaagctcaactgggacacaagactgaggatcgcggtcggagctgcacaagggctggcctatctccaccatgactgcaaccctcgcataatccacagagatgtcaagtcctccaacatcctgctcgacgagaacttcgaagcgcacctctcagatttcggcatagccaaatgtgtcccctctgccaagtcccatgcctccacttatgtgctaggaaccatcggctacattgatccggagtatgccaggacttccaggctcaatgagaaatctgatgtgtacagcttcggcatcgtccttctggaattgctcacagggaagaaggccgtcgacaacgaatcgaacttgcatcaattgatactctccaaagctgatgacaacacagtcatggaggcagtggactcggaggtgtcagtgacgtgcacggacatgggactggtcaggaaggccttccagctcgcccttctgtgcaccaagaggcacccttcagaccggccgaccatgcacgaggttgcaagggtgctgctctccctgctgccggcctccgccatgacaacgcccaagacggtggactactcccggttgctggcgtcgacgacgacggcggccgacatgcgagggcacgacgtgaccgacatcggcgacaacagctcctccgacgagcagtggttcgtcaggttcggcgaggtcatatccaagcacacaatgtgatcttctccaaacctccaaaattttctcctccccaagatgctaaaaggatagtagcacagtgcaggaaatagtagctagatgtaggatctgaagttagatgaccatgatgatgatgttaatgccattgttcttgactctttcttcttcttggtgttgatctaggattgcccaaagattgtccctaggaatttgcagtgacatactagtgttgttcatggtattcaagagagagtgagtagatcagtgtcaggttcagagatgtctcgtgagcgccatgaagtcgccgtctttatgatgtaatatattttgatcagagaggcagagggaggccatcagttcttggatcctggggtgtgtgacgacgccgcattgaattgaaaccatgcattcctgcatcgacaggattgtgctaatgtaaatgccctttttttgacggtatttattagttgctctgcctc

SEQ ID NO: 6921 - DNA, 1528 bp, Oryza sativa
  ref <308>: DATABASE ACCESSION NUMBER: AK064053
  ref <309>: DATABASE ENTRY DATE: 2001-12-06
gtgtcgtgtcgtcttctccaacccatccaaaccaaagccgcggcggcgcgaggaggcagcgagagctagggtttggggcggcggaggggagatgtcgcggacgctggtgcagccggtggggcagaagcggctgacgaacgtggcggtggtgcggctccgtaagcacgggcagcggttcgagatcgcgtgcttcccgaacaaggtgctgtcatggcggacgcgggtggagaaggacatcgacgaggtgctccaatcccacaccgtctactccaacgtctccaagggcgtcctcgccaagtccaaggacctcctcaaggccttctccaccgacgaccacaccgccatctgcctcgagatcctcgacaagggcgagctccaggtctccggcaaggagcgcgaggcccagctctcctcccagttccacgagatcgccaccatcgtcatggacaagaccatcaacccggagacacgccgcccctacaccatcaccatgatcgagcgcctcatgcacgacgtccacttcgccgtcgaccccaacctcacttccaaggagcaggcactgaaagttattaagaagctaacagagcatttccccataaagcgtgcaccattgagggtgcgcttcactgcaccaaagtcaaaatttgcaagccttacagagaagcttgaagagtggaatgctaatgttatttcaaaggacgagtctggtagccagccctctgttgtgtgtgagattgagccatctattctacggtcatgtgaggagagattgaaggatgtgcaggggagggtggaagtactctcagtgtcagcgcacgcagaaggtggctcttctgtggatcaatatgaaaacactgaagaatctcaatcagtgcctgcagtggagattgatcctgttgctcggataggtgaggccatgcagaaacagtccatctcaagtgagccagaaaatcctgggcagggacaaggcaagcagcagagaagatgcaaagaatgtgacgtgcttgtggaggacaagttgtatagggagcattgcaaatctgggtggcacaagcacaactacacacgccacaagaacggccttcctccactcagccaggaggagtgcttggtggaaatggaattagccgactccaagagggacctaaaagactatgatttctgaggctgatatggtaaacattccgtgtggtacatggagatgcagtgtttttgtctgaggagaaaggttgtctgtttgatgctgtatagggaagcagggaagggaatatttgtgtaaccgcaatgtacgctacttgcaatctactgaaatggagtggtctatccacattgtctaaccgccaaagagtagcagaaacctggttgttgctgtatagctgggccagtaaatctggtggcagttttgaatgttgcttattctgtaatgggatgctatgctatgctatgtgagactacatgttagtatatcatgtttcttgctctcattcctgtggacagaagtgaatgaaaatttggagatcgattttgc

SEQ ID NO: 6922 - DNA, 799 bp, Oryza sativa
  ref <308>: DATABASE ACCESSION NUMBER: AK064054
  ref <309>: DATABASE ENTRY DATE: 2001-12-06
agatcgaaaccagcagttgttttcagagcccagctagctctcgatcatttgttacagagaaattgatcaaagcaggaaattaaccagctgtcaggaagcaatggctctcgtggaggataacaatgccgtagcggtgagcttcagcgaggagcaggaggcgctggtgctcaagtcatgggcgatcttgaagaaggattccgccaatattgccctccgcttcttcttgaagatcttcgaggtcgcgccgtcggcgagccagatgttctcgttcctgcgcaactccgacgtgccgctcgagaagaaccccaagctcaagacccacgccatgtccgtcttcgtcatgacatgcgaggccgccgcgcagctgcggaaagccgggaaggtcaccgtgagagacaccaccctcaagaggctcggcgccacgcacctcaagtacggcgtcggagacgcccacttcgaggtggtgaagttcgcgctgcttgacacgatcaaggaggaggttccggcggacatgtggagcccggcgatgaagagcgcgtggagcgaagcctacgaccacctggtcgctgccatcaagcaggagatgaagcccgcggagtgatcgacaggcatgctagctgctccacctccatgatcctcgcctcgcgagtccgattagcttttgttgctttcaaatgctcgtttcatattcatcgtgtcccacaaaaaaaggagtgtgtatgtggtgtacgattggtgcacgctcctgctgttttcttctcgtgataagacataaataaagatggttttctacgcttgc

SEQ ID NO: 6923 - DNA, 863 bp, Oryza sativa
  ref <308>: DATABASE ACCESSION NUMBER: AK064055
  ref <309>: DATABASE ENTRY DATE: 2001-12-06
atcgatccatcgctagcttatctcaatctcgccacgaggaaataaagcctagcgcatattagccgttggttggtttagtatacgtacgtagggtagcttagcttagagcacgtacgtacgcatcgatggcgcagcaggcggagaaggcggcggagctgcaggacccggagatccgggcggagctggaccggcgcgcccgcgacgacggcaagaccgtcatcaagagcggcaccggcggcaagagcctcgacgcccaggagcgcctcgccgaagggcgtaagaagggagggctgagccgcacgacggagtccggcaaggagcgcgccgacgacgacaccggcgccgtgctcatcgagcccgacgacaagatgctcaaggaggccaaaaagaacctgggccgcaagtgagacgtacgtgcactagcgtgctggtgtgttgtggttgctcgatcatatagtagtgtactagtgtgtgcatttccttggtgtatccatgtgcatgcatgcatggcaggcgtacgtattagtattactctacgtgacgtgtaagctatgctggctacaaaattttggtccctgcaggattatattgtagccatatgtatgttagtatgtatgtacgtgttcttcacgtactgccctagctactagcaagtcgatctagctatatcgtgtgtgtgtacgtatattgtgatcgatgtacgaagctgctgctttctacatcctggctacaaatgtaattgtgtttgtgtgtctccgtacgctacgtttctgtgtgtctgtagccatgcattgtcctcttcaaggctccaatgttatataacaataagtggttgatttctactgatgaaagcttagtttatc

SEQ ID NO: 6924 - DNA, 752 bp, Oryza sativa
  ref <308>: DATABASE ACCESSION NUMBER: AK064056
  ref <309>: DATABASE ENTRY DATE: 2001-12-06
agtgcatccatcaacctcatcctcactccacagataacagccatggtaacaagcaagaaggtacagaacaacgaagctgcaatggcggacggcgctgttaaggaatatcgccatggtctgtgcatggatgtcccgatgtacattgaagattcggagtattgtggagaggagcttggcaccagactaacttgcaggcatggcctcacgccgaaacggaggacagcttgggaaggacctgacacaggaagaaggttcttaggttgtccgctggaggaagaggatcagtgcgataaatttttttgggtcgacgaaccatggcacccaagagttcagaagacacttgagcagatgtggcatgcagtggaacgtgctaccaagctaaccggttcgaaacaatatgactggtgttgtttcgttcggaatacaaaggccgaggaagaaaaaatgaagttagagttagatacggctgaccatatctctgaactagaattggcgtataaaaaaaattaatgaaaaagaaaaaagagctcgacgatactcgtgcgtggttaatgggatcgtttgtagtaattgtcattatgttagtgaaaattagtgatctcatgtacaacaagtgattacattggatgtaatattttctttaaacttccaacttttccatcaaaattatcctacacaccctaatgttaatttttcgacggaactgcattcatacttaaaccgtgtaaatgcatagttttgttgactgcttt

SEQ ID NO: 6925 - DNA, 1445 bp, Oryza sativa
  ref <308>: DATABASE ACCESSION NUMBER: AK064057
  ref <309>: DATABASE ENTRY DATE: 2001-12-06
atctgaactccccactggcctgtctccaatcttgagcagttctctcttgcaaaactttaaaagttggaagaagcctttgagagttctgcactctgcacgcacagacaaacgccacagagcggctgcagctaatactagcgcgaaacttctttgacccgaagaaacatccccaactggcagctcggagagaggatcatagcgctgcagcagctggtttctccgttcgggaagtcaccggccttcaagaagaagggatcgagaggttgtgatcagaggaaggctactgctcctgctgctgccacaaccacaaacaagagacccttaccaccacctgctaagcttcagtggtcaggatcagtaccacggtgatgacgtctttgggttacagtattacggcggcgatcaagtaattccggcggtggttccgcagaagtccagcccgaccaccgagtgctcctcctccgtctcctccatgtcgtcctcgccgacggccaccgccatttccagctctaagtcaccggcctccgttcttcacgaggagttgggatacatacgcttcctgcacgaccaggttcaggtcctgagctcgccgtacctgcagcgcctgcctccctctgctcgcgtcccggagcaggagagaggcacgccggcggcggaggagcaaccgccggcgctgcggccgagcgacctgaggagccgtgggctgtgcctggtgccgatctcgtgcaccgagcatgtcgccggcgccggcgccggcaccggccacggcaacggcgccgacctatggtcggtggcggcgggcatggcgaaggcgacggcgaccgtgacggccgccgtggagaggagcaaggaggcagccgccgccgccgccactgccgcattgctgcgtgctgatcgtccagggcagcagctggcctaatctgatgactgccatatactctactctactccactttcttcacagctgcagggttttagaactaagccagatcttttggggggctaatctgttttagaaatcgactagtactaccttttgctgttcttttggagaggctgctgctgagttcatgggaaattggaaagtggcgcagggatgcacattccatcgccagcaaagaactgaagtgtgtaaatggagggtggggttttagctgattaaagtacaagtactaatgctcctgcttaagctttttttaaggttagaaagacacttgatgcgatgatgccgagatgcattggacacgaatgtctctgtggcatcgaaaggtactcgattgtgctggagagcagtgcggttggcaggcttcgatatcggtggtttgtactactcctatagggctataggggatatctccagattatgctatcttcctttattgtcctcggtagtcggcttggccatccttggaaactgcgcaacatgtttcatccgttttgacact

SEQ ID NO: 6926 - DNA, 566 bp, Oryza sativa
  ref <308>: DATABASE ACCESSION NUMBER: AK064058
  ref <309>: DATABASE ENTRY DATE: 2001-12-06
aggatcgatccatcacttgcagcatttgcgatttctctctcagcttaattcgcatcaagtcaaccatgtcttcggcgacggcgacggcgtccggtgggctgcatgccgccggcggcgagtggctcggcgagctctccgccgcgctgcaggggaagtggcaggccatggtgagcacagaccagcggcggcggcggcagaggggagatgaggcagacgagaagaagggggtcgccggcgccggcgccgccctcggcgtggagacgaggaggaggaaagaggagggagacgtcggcgcgtgcggcggcgccatgtccgacaccaccgtcttcctcctcctcgaccacttcgcgcccagctgatcgtccgtgacgtcacccatggcgcgcccccgagctaatcgtgacgtcatagacgcgtttgtaaagagaagagtagtagacgatgacgcgtatccccgggaggaaatggcaagccacgctgtatatatttgacttgtcgctgctgctactacttgcttcagttcactctcatgtgtaaataaaaaataagaatgcagtatttttcct

SEQ ID NO: 6927 - DNA, 1757 bp, Oryza sativa
  ref <308>: DATABASE ACCESSION NUMBER: AK064059
  ref <309>: DATABASE ENTRY DATE: 2001-12-06
aaatcctccagcttgaaaccctaatcccctcccgcgcgccaaaccctagcaatcttgatccgtccctttccgcgagacccttctgccgccatggccgctgcagacgccgtggcacccgacgacggcgatcacgccgttctccgcgacgacgagcgcgggatccctcgatccctttccctcctcgccgcgctcgtggaggccgaagccctctgccacgccaccgccgccgacgccgacgccgactccgacctcatccgcgccttccgcggcggcgcgacgcccaccgtccggatcggtgagttccttgagcgcatccacaccttcatccagcaggagagcgtccgccatgtgatcgagatccagggcgcgtgctacgttctcgccgggatctacctgatccggttcatacgcagcggcgccgcgcgggaggcggggatcctcatcgacccgtccaccgcgcaccgactcgtcgccgtcgcgatcttcgtgggcgccaagttcggcgggcccatctacaggctcccgacgaggtggaccgtggtgttcgagaccagctcggacgccgcgatccgcgcgagggagatggccggcctcgaacggcgcttccttattgccgtcgattaccgcctgttcgtccgtgccgaccagttcgactggttctgtcgtgtcctggagcgagggccgcggccaagcgggagatgcggcggcggcggtgctggcaggaagaggacggcggcggaagctgtggagggagaagcggaggatggccgccgccgcgtccgggcctccctgccgccgccatctgtcgtcgccaactaggaccacgatatctgcatccacaggttcaattatatttacataatgtattttcttttgctgcttcttgtctatcagttgtttgcaggtggcaagggtggagaagatgcagttggcgttggaagagtttgatcagacgaggcaagggtggagaaaatgcagccggcgttggaagagttcgatcagcggccatcgtcggagtagagtgtaaaaaaaccagttttaatcgtaggatgtttagaaactgttaactctgtcaaattctatcaatccctgtgtcttagatttccatcttattggaagtagataaagaaatgcaggggcaacgccatgttgagcttgccgagtgcacaggcaccagggaaaaatttagcttttagttattagcatctaatctccaccttttgtgtactccctagaaaaaaaaaatatgtgcaccaccttcagctgcctagcaggctgcaggcagcccatgaaggcccaagaaagagggaaaatgaaaagccgcgacacgtccctcgccgcctcgcgcaaaatgcccagaccgacgcccccaaatcgcagaacggcggaagccggaagcagcggagcggaggcactgcacggcgcacccacttgccatgatcgctggccaccggctaaccgctcaggcgctcagcacggcagggtagcacgcctcatcgagcaggaatcgctgattgcaggttgcggcatcaaggcatcaagccctccacgtctgcattgtgatgggtttgcaattggggctatagttttgcttattgaaaagaaggtctaaagaatttggcgggacttgaggaccaggagttttagtactgaaatcatgtcaaacatgtactaccggatttttcattttggtaagcattttttgtcattgtatatgttacatttacatttctattacatgcgtaaattaagtgtgc

SEQ ID NO: 6928 - DNA, 1582 bp, Oryza sativa
  ref <308>: DATABASE ACCESSION NUMBER: AK064060
  ref <309>: DATABASE ENTRY DATE: 2001-12-06
atcatccaccccgacctccgcctccgcctccgcccgccgccgacgactctccgactcccactccacctccaatcgaaccccacccgccgccgccgccggaggcgtctacccctgctctcctcccccgcgcgccgccgatcgaatccgcaagccgcgatggattcccttcttgccaactacgcctcttccgacgacgaggccgacgaaaccctacccactcctcccgccgccgccgcggcccgaccgaagccgccctccggtggcggcatcttctcgtcgctcccgcagcccaagtcggcgctcctcttctcctccctcccggcgcccaaatccgggcccgtcttctccgccatcccgcctcccaagtcctcctccgggaaccctaagcgggtcgtgcagttccgcccgcctccgatccgccagcccacgggcgagagctccgacgaggaggacgacgacgccgagaagcgccgccctagcgaggccgagccgcgcccgcccgtatccgcgggcacggggcctgtctcttcgttcctcccgccgcccaagcgctccctcgggctcggcggtggcggcgccgccaggaggtcggccatagacaccgctgcgccggagaggtcgaatgttgtcgccgctggtccatcgtcctcggccgtcaacgcaattgcccccgaaaggcctgatactacctctgccgatgatgaagacgatgaatcgaatgggagcagcgatgacgatgagatgcctgtgccggaggagcagcaggagcagctcgctgttgattccgaagctggacagcagcagcagaatcagcagcaaagctatgatgctggagttgggagcagtaatggacaggaaggctacgcatgggatccaaattactacgccaattacggtgcaaactatggctgggatccgagcggcaatgtgaactatgggactgaagcgcagtatgcggcatatggaggagagcacggtggagtgtatggaaatacatacggagtagaacatggtgatggatatgggcattcgacggaaatggcatatggagggggctatgctggtgggtacgaacataatgcggctgcagcgacagcaccgccaatccagcagccaatactgccaccggaggttggtaggattggagggaagagaggtaggagcgatatgccggcagagattttagaggttaaccaggcagagctgatgaagaaccgaccgagggaggataagtccaagctcactgggatggccttcggccctagttaccagcccgccccttcagcaaaaggaaagccctccaagctgcacaaaagaaagcaccagattggttctctattctatgacatgaagcaaaaggagatggagcttgccgagaggcgttccaagggattcctcacaaaagcagagactcaagcaaagtatggatggtgagcatggtacgtcgggcataggatggaattgaacagtgtatttcggttttgttgtctaattattttgttgtaaattgttcttgataatataaactggaatttaaaactagtcgttggaagcaaccttttgcaccattcgatggggaact

SEQ ID NO: 6929 - DNA, 846 bp, Oryza sativa
  ref <308>: DATABASE ACCESSION NUMBER: AK064061
  ref <309>: DATABASE ENTRY DATE: 2001-12-06
aggctagatgcagcagcttgcagcctccctcctcgtgctcctctcacgctcgcaacgcccataaatacccaggtgctcgcagcccacggatcatcatcaaacgagacaagagtcacagttcgagtcagagctatctaaccaatccatccatcgagcaattgttgatccgtctgtgaattgtgatggcggcggcggagggggagcaggggaagacggtggtggtggtcggggtggacgacagcgagcacagcaactacgcgctggagtggacgatgcagcacctggcgagcggcatggcgggcagcggcggcgccgagctcgtcatcgtccacgccaagccctcgccgtcctccgtcgtcggcttcggcgccggccccgggtctggagaggtggtgagatacgtggaggccgacctgcgcaagacggcggaggatgtcgtcgagaaggcgcgccgcctctgcatcgccaacgcgatgcacgcgttgatcgaggtgatcgaaggggagcccaggtacgtgctgtgcaacgcggtggagaagcacagcgcggggttgctcgtcgtcggcagccatggctacggcgcaatcaagagggccttcctggggagcgtcagcgactactgcgcccaccacgcgcactgctccgtcatgatcgtcaagcaacccaaggccaagcgctctcgtgccgagaccgcgtgaaaaacaccaaatttcgggtgtgagctgagccgagcaatgtgtgtgtggttcgcttgggtagcagcagcttcttgcgttctgtacatgggatgatttgtatgtgttagtttcataggttttatcagtttatgtatcgaaatgtttgtgc

SEQ ID NO: 6930 - DNA, 1492 bp, Oryza sativa
  ref <308>: DATABASE ACCESSION NUMBER: AK064062
  ref <309>: DATABASE ENTRY DATE: 2001-12-06
agtcgccgaggcccgctcctcctacgcgcgcgcagcctcgccgcggccggcgacgctgcccccggtggcattgccggcggcggcgctcgcctccccccccagcaccacgacctccccacaccattaacttcctctccttttcttttccagatccaaaactctcttcatgctagcttgtctcccgccctgttcctcctgcctccggcgacggcagccggctgtggtggtgggtggccgtcagatccgcctcctacctcgccccagcagcctccggcgacggcagccggccgtggtggtgggtggccatcagatctgcctcctaccacgcccctgcagcctccggcgacggcagccggccgtggtggtgggcagccgtcagttccgcctcctaccatgtccccctgcctccggcaaggtcgtgtggtggggacggcttgctgcctgcaatgtcgtcggtgggctgcgacgtcgcctgttgccggtgcccagatccaccttccccttggcagcatggccggaattggtcagctcagtggcgaccgacaacgctgctgactttgccgatgtctgctccattttcttttcttcttgtctacccggcggttggaagcattttgagctttgccacgatcagctcagcccaaacctgcatgtctaggagtttgctggtgcctcggccgctctgaatctcctcaattctagcatgcttctccttggctcgcttgggtttgcctattggttggaacatgtgcttctccggcggtcgtgatgctcccgatctttgttctcttctgttgatgtttcatccatctgtagatccccatctctttcatttctcttttgttcagtcccctgattgcccttcaccctctctgcttgggtgtccctgactgcaatgtttagcggtccttcctcctatggggctttcttcccccgaagggcgttgaactggctagcaatttgataaagctcgattgaagacggcttgatgcgggtggcctatggcctcaactttcagtggccttccctcttttggggcttccttcccccaatagacgtcggggggcattgattcaagtagcaacatgactaagtcgtacttctgacggcttgatgcgggtggtcttcgataaccacagtctttcgactgccagagaaccaagccggtatgcgcgtggcactgaggccctccggcaccttcgattcttggtgtttcaagtctgcatgcgaagtggatgatgttcaattagggttctagcattagtttgatttggaatttggtcgggtgtttttgcaggtggcaaacgtcaaagcttctcagtgcgtggtagggaggttgtgatgcgtctgtattctcttctctgtatacccccgtgtattctttcttattatcctccagggctcctgtatttacgcaggtgaaacctgccctgtgtaagatcgttggaagtaatatattcaggtgggcatttcgccccctggtgaccagtct

SEQ ID NO: 6931 - DNA, 744 bp, Oryza sativa
  ref <308>: DATABASE ACCESSION NUMBER: AK064063
  ref <309>: DATABASE ENTRY DATE: 2001-12-06
gtgggtgtgggtgtatggtctgaccgtccatggagattcttggattcactgttatgggtggcggcggctcgccggcgtggatcgaggtgccggagaagagcaagagcgcgttctgggagctgaagaggaggaaggtgcaccgctacgtgattttcaagatcgacgacaggcgggaggagatcgtcgtcgagaagaccggcgcgccgggggagagctacgacgacttcacggcgtcgctgcccgccgacgactgccggtacgccgtctacgatctggatttcgtcagcgacgacaactgcaggaagagcaagatattcttcatctcatggtccccttctgtttcccgcatccgagccaagaccatatacgccgtgtcgaggaaccaatttcggcacgagcttgacggtgtgcactttgagattcaggccacggaccctgatgacatggatttggaagttctcaggggccgtgctaatagaacctgatagagattgacttcgatagtttgttaattagccttcttttgcataactttaatatgtagctcgctgctgaaaatgcatctcgggtgcatgatgtataagcaagctgctgatcacaccccagcattgcagttttaccttctttttttacagagataacatctttctgatatctgtctaattatatatgttccctctaatatgatatggaaattgtgccttgttatatctaaatttgtaatatactgtatttctgctgttt

SEQ ID NO: 6932 - DNA, 708 bp, Oryza sativa
  ref <308>: DATABASE ACCESSION NUMBER: AK064064
  ref <309>: DATABASE ENTRY DATE: 2001-12-06
agattaagccatgcatgtgcaagtatgaactaattcgaactgtgaaactgcgaatggctcattaaatcagttatagtttgtttgatggtacgtgctactcggataaccgtagtaattctagagctaatacgtgcaacaaaccccgacttccgggaggggcgcatttattagataaaaggctgacgcgggctccgcccgctgatccgatgattcatgataactcgacggatcgcacggccctcgtgccggcgacgcatcattcaaatttctgccctatcaactttcgatggtaggataggggcctaccatggtggtgacgggtgacggagaattagggttcgattccggagagggagcctgagaaacggctaccacatccaaggaaggcagcaggcgcgcaaattacccaatcctgacacggggaggtagtgacaataaataacaataccgggcgctttagtgtctggtaattggaatgagtacaatctatatctgtagaatctgtagatcaaggaaaggaagttccaggatagagatgcggattcttttgcttcatggtatatgaagctgttctgccctcctccctgtgacataaattgacatccatactatacagtagtcaatcagccacagaaggaagaaaacacctctgcttgagcaagtgctacgctctagtttgagtacaagtagtaccatccgttattattc

SEQ ID NO: 6933 - DNA, 787 bp, Oryza sativa
  ref <308>: DATABASE ACCESSION NUMBER: AK064065
  ref <309>: DATABASE ENTRY DATE: 2001-12-06
actacccagctcactgaagtagcaacgcagctcatcagtgtcaagatggctactactaagcatttggctcttgccatccttgtcctccttagcattggtatgaccaccagtgcaagaaccctcctaggttatggccccggaggaggaggtggaggtggtggtggtggtgaaggaggcggtggtggttacggtggatcgggctatggttctggttctgggtatggtgagggaggtggtagtggaggtgctgccggtggcgggtatgggcgtggtggaggcggcggcggcggtggtggtgagggtggtggctccggctctggctatgggtctgggcaaggctctggctatggtgcaggtgttggtggtgctggcgggtatggtagtggtggcggaggtggtggtggccaaggtggtggtgctggcggctacgggcaagggtctggctatggttccggctatgggtcgggtgctggtggtgctcatggtggtggttatggaagtggtggcggtggcggtggcggtggaggccaaggtggaggctccggctctggctctggctctggatatggctctggctctggcggaggcaacggacaccactaagctcatttcctctatcagctagctacaatatagcctgttgttataagtgaaccgtgatcagtgatgagtctctctcgctgctttacaaagagcttgtcggattgtatcgatatagcactgtgtactggcttgccgtttcatcacataaagttggcaaagcctagtaaataaaacgaccttttgt

SEQ ID NO: 6934 - DNA, 626 bp, Oryza sativa
  ref <308>: DATABASE ACCESSION NUMBER: AK064066
  ref <309>: DATABASE ENTRY DATE: 2001-12-06
aaaaaaaaattttcctctcccgatccgccgctctctcgcgcaaaagcagcgaccaagagcgggcgccgccgtgcctcctcctccggtgagacgcgccaccaccgggactcttcctccggcgagaaggataagcccttctcctctttcccctcctctcatcctcctagggttcccgttctcctcctctagggttttcgcctccgttcggtctcatctctcgcatcgcaggcacagaaacgcggcggtgacgcagcggcgcctcggcagcacgggcgcacagcaccggcggaggaccggggggagatccaaggtggcgcgacgcaccggcggaggaggcgttgaggcgcagatccaagttttggggatcaacaagtgacaagagtaaagattaagaccagttgcaccgagatgattatttgaaaattccaaggattatatcttttccacttaacctttgcttacatgtgtgtctatttgtgtgccaactgttaatgattgcacattagttgttgaaaagacatcacactaatgttttagcttgctttatctgtcattttaatgtatgcctatgtaaaatattccaatcatccaaggttcaatttttgtaatttttcatattttgtatt

SEQ ID NO: 6935 - DNA, 879 bp, Oryza sativa
  ref <308>: DATABASE ACCESSION NUMBER: AK104982
  ref <309>: DATABASE ENTRY DATE: 2002-08-28
ggtggactggtggctgcagctgttcctcatcgccattccaatccaatccaatggcgctcaccaaccacatcctcgcgccggcagccgcagcagcctgctgcttcggacggcgggttcctctgccgccgcctcatcagctcgccgtgcggaggaagcaaaagagcgtggtggtggccatggccgacctgctgggcgactttggcgcgcgcgaccccttcccggaggagatcgagagcaacttcggcgagagggtgctgggcaacgtcgacaccctccacaacatcctcatccccacgctctccgtgctctccatcgcgcgcctccccctcgagcctaaccccgcgcccgtcgacgctgccgacgcccgccgcctcctccacaaggtggttggctggcgcctcctcgacgacgccgacggcatgcgtctgcagtgcgtctggaaggtcagggacgaagcctgcggccacgagctcgtcgccaggatcaacgccgcggttgacggcgccccggccaccgtcgtcttcgaggcccccaaccaggtcagggccgagctgcagacgccctccgccggcggcctcaccgtcaatgacttcatcgtcgcggctcgcatagacaaggtcaagacggtcgaccttatccccaagaagagagtctgggcctgattcttcattcacatatatccccttaatcaatcaatcaaccaatcaatcaattagtagtatcttttttttggctttcaatcgcttgtggagtagtacactactacggagtagttgttgttttgaatttataaaatatttagtagtctttcaaagcaaaggcaccggcagaatttgtgcccaaaaccaaaaaacaaataaaaagggatgatatgatatt

SEQ ID NO: 6936 - DNA, 1379 bp, Oryza sativa
  ref <308>: DATABASE ACCESSION NUMBER: AK064067
  ref <309>: DATABASE ENTRY DATE: 2001-12-06
agccccacgcacatcgatctccccctcatcccgcaatccgcacgccctctcaccttcctccctccctcccctaaccgcgtcgccgccctgatcgccgcacccgcgatctccgcacaaatcccgcaaggccgccaccccttccaggccgctctagaccggcgtcgtcgcccgcatcgccccctccgctccgatccccatatcgcgagttgcaagcagagcatgggaggggaggggaggggcgccgtcgtcccactgcagaccggcccgttcctcgcgctctcctctcttggccccctccgcggccaggaagacgtcgccaccaccccctctatccgcgacgacgccacaacctccgtccgcgccgaccccacgctgcccatgccgccggtccttcgtccacgcaccgccgccgccgatcctcctttcgcgcgccgctatcgctgcctccaccgccgtccgcgtcgaccccacgctacccatgccggcggcctgctgccccacatcgtgttaacaccgggatcaggattctggccatcgtctccacgcagatataggagttgtgaatttcccccttttatctttcttggtttttctgctctcagttctaataggcctacagattgtctgaatccatttgaacaaggttctgcacaaatcttctgatagaattctgattttcacaaaattaaccgtggtggtattttacgcatgtggcaatttaattaccaaaataataactatttctatcactcttaatgtttaggtaacctgcccaagtgaattgtattaactaattgatgtttttttggggggtctctgttgctgttcctggatgattctcttctgtttcatggtctgcagtgcatggacagtgtttacaaggtagccctatactcctatattcatcacaacatagtaggtagcgtgactccgcgcgacggctggaggaggcgaggtcgggcctgccctccatagacggcagactccgcgtgacggctggaggaggcgaggtcgggcctgccctccatcgacactccacgccgccgcagcccgcagccccatcagcgccgtcgctccatcgccgtcccgacctcgaaggcgaaccggtttcgagtccctcgcgctgccactgatcccagggctcctcaaccctgcaagccgtcgatcctgcctgcgaacaagtatcgaggggggtcttggccggatcagttgctcatggccggtaggagtgaggagtacacaggcttccacactacgaggtaccatctcatgaggttcgtggtggttttcgattctatttatgtacaggtgatcactttatgaacaataatcatcttgattttcctccatcaatgttcatgttacttgctgttggtatt

SEQ ID NO: 6937 - DNA, 875 bp, Oryza sativa
  ref <308>: DATABASE ACCESSION NUMBER: AK064068
  ref <309>: DATABASE ENTRY DATE: 2001-12-06
cgactccgacctcgtcgtcgtcgacgatgtcgccaagctctggcgcaccgacctcggcggccgcaccgtcggcgcgccggagtactgccacgcgaacttcaccaagtacttcaccgacaggttctggtcggacaagcagttcgccgggacgttcgcggggcgccggccgtgctacttcaacacgggcgtcatggtgctcgacctcgccaggtggcggcggacgggctacacgcggcgcatcgagcggtggatggagatacagaagtcgccggcggggcgcatctacgagctcgggtcgttgccgcccttcctgctggtgttcgcggggcacgtggcgccgatcgagcaccggtggaaccagcacggcctcggcggcgacaacgtgttcggcagctgccgcgacctccacccggggccggtgagcctgctgcattggtccggatccggcaagccgtgggcgcggctcggcgccgggcggccgtgcccgctcgacgcgctctgggcgccgttcgacctgtacggcccggccgactccgccgcggaagggtcccggtaaccgcaacactaaagatgattcttttccttctttcgccgaccccgtacaaatttctgagttctcaattcttctccaccattacctgttcaaacacctacatgtttattttttcttcatttcttctttcttttgttctgttcgattaaatgccttgtgttagattgttcttgttggtattagtgatctcttcttccactttttttgatcgttttgttactaaaaaaagaggtcatttgtatcctactctacaggtttggaaggcttgcagcctcagcatcatcataaataaaaagcacagaaaaatagacattgcagcagc

SEQ ID NO: 6938 - DNA, 1660 bp, Oryza sativa
  ref <308>: DATABASE ACCESSION NUMBER: AK064069
  ref <309>: DATABASE ENTRY DATE: 2001-12-06
aggtgaggcgaggcgaggatgtcgtgacgacggaaaaacggagcagccgaggcgaggaagccgccaccgccaccgccgcgaccccaatgcgcgcgcctcccgccgcctcagatccccacccctaaccctagcctccgcctccgcccccgcctcgccgcctcctgctgccgcgacgagcgcgccacggacgtcgcgggcgaccccccggaggcggatgcgatcgggcgccctcgcgtagcgcccccgggcttcaccttctcctaggggtaggggagggtagcggtggctgtagccctagacgcggcggcgcgcggttccgtgccctgagggaggggaggagcagatcggtgtgtgtgtgggggagtatgccgggggacgtggcgacctcgccggcgccggcgccgccgtccgcgtcttcgcagcagagccaccacgccacctccgcccgcggcctgctctgccacgccgccgccggcgcctccgctggtgtggttgcggcgaccttcgtgtgcccgctcgatgtgatcaagacgaggtttcaggtgcacggctggcccaagctcgccaccggcacaattggaggtagtgtaataattggaagcttacaacagattgctcagagggaaggttttcggggaatgtatcgtggtttatctccaactattctggcactcttgcctaactgggcggtctattttactgtgtatgagcagcttaaaagcttgctttcttccaatgatagaagtcatcacctgtccttaggggcaaatgttattgctgcatcatgtgctggaggtgcaactactattgcaacaaatccactttgggttgtgaagacaagatttcagacccaagggatacgagctggggtgatcccgtacaaaggtacacttgctgctttgaagagaatagcacatgaagaaggcattcgtggactgtacagtggacttgtccctgccttggctggtatcagtcatgttgctattcagtttcctgcatatgagaagatcaaagcttatctggctgagcgagataatactacagtggaggcattaagttttggtgatgttgctgttgcttcatccctggcaaaagttgctgcgtcaaccttgacatatcctcatgaggttgttcgctcaaggttacaggagcagggagcacactccaaggcgagatatacaggtgtaatggactgcatcagaaaggtctatcatatagagggtttgaccggtttctaccgtggatgtgcaactaatctgttgcggacaactcctgccgcagtaataacatttaccagctttgagatgattcacaggttccttcttgatgtattccctcctttacctgaacagcaaccccaaccgctgaagcattgattgtacaatccttgtgcccctatccatgttgtcactgttgagtagaaacccagtaaaaccatccatggacaccgtttacctttgttagaaggctctcctaaaagagattttgataatgcaacaggtagctaccactgaaagcacaaatcatagtgtaggacagtaattagcatttctgtgtgtattattacttttgatagcatgcaatgaggaggtatatgggtttagggctgtggggacatggtgattttggtggggtatgttgtccgatgatgatgatgatg

SEQ ID NO: 6939 - DNA, 1033 bp, Oryza sativa
  ref <308>: DATABASE ACCESSION NUMBER: AK064070
  ref <309>: DATABASE ENTRY DATE: 2001-12-06
atctcatcatccaaacacatagagtacttaattagcaatggccagaaccaagttggtatctcttagctttgttgttctgctgagcgttggtctagccaatgccgcaagggtagctagatatgctagcgccgagggtggcggtagtggagggggaggtggtggagggtccgaggatggttctggatggggatccggctctggctctgggtatggtcaggccggcggatcttccggtggagcatatgctagtggaggcgggggaggtcaaggtggtggaggcggtcaaaatggtggatctggatatggttctgggtccggttctggttatggccaggctggtggctatggccctcatggtggagcgtacgctcaaggaggtggccaaggtggaggcggtggtggtggggtgaatggtgggtcaagatatggttccggctctgggtctggatatggtcaggctggtagctatggccccggtggagcttatgctcaaggaggtggacaaggtggaggtggcggtggtggacaaaatggagggtctgggtatggttctggctctggctatggccaagctggtagttatggcccaggtggagcatatgctcaaggaggtggacaaggtggaggtggcggcggtggacagtatggcgggtctgggcatggttctggctctggctatggccaagctggtagttatggcccaggtggagcatatgctcaaggaggtggacaaggtggaggtggtggcggtggacaatacggcgggtctggttctggctctggatctggttctggccaagctggtggatacgggccttacggtggaggatatgctcaggcaggcggtcaaggcggcggtggcgggggtgggcatccatagaacttctatatagtgaacaactgcattttatgcagttaaataatatcaaagaggcccttgttatgtggtaaccgataatagaataaaagtagtggtaatgtaaactactatgtaatgttactggtgcaatgaataacctcttgccttatgctt

SEQ ID NO: 6940 - DNA, 1466 bp, Oryza sativa
  ref <308>: DATABASE ACCESSION NUMBER: AK064071
  ref <309>: DATABASE ENTRY DATE: 2001-12-06
agagaagcagagtacagcaggcagctcttcttctctttgcgaaggttggctacttggccagccattaggaaacaagttagtttggagaagaagcagagttgagactgcatttgcattgctctgtagccatgggcaagcaccatgtcaccctgtgttgtgtcgtttttgctgtgctctgcctggcgtccagcttagcacaagcccaagttctcttccaggggtttaactgggagtcgtggaggaagcaaggcgggtggtacaactttctgcacgagaaggtggaggagatcgccagcacgggcgccacccacgtctggctcccgccgccgtcgcactctgtctcgccgcagggttacatgccggggcggctctacgacctggacgcgtccaagtacggcacggaggcggagctcaagtcgctgatcgaggcattccacgacaagaacgtcgagtgcctcgccgacatcgtcatcaaccaccgctgcgccgactacaaggacagccgcggcgtgtactgcgtgttcgagggcggcacgcccgacggccgcctcgactggggccccgacatgatctgcagcgacgacacgcagtactccaacggccgcggccaccgcgacaccggcgccgggttcggcgccgcgcccgacatcgaccacctcaacccgcgtgtccagcgggagctcaccgactggctcaactggctcaggaccgacctcggcttcgacggctggcgcctcgacttcgccaagggctactccgcgccgctggcgaggatctacgtcgacaacaccaacccggcctcatggggtggatgcccgatcaggccgtaaccttcgtcgacaaccacgacaccggctcgacccagtcgctctggccgttcccttccgacaaggtcatgcagggctacgcctacatcctcactcaccctggcatcccatgcatcttctacgaccatgtgttcgactggaacctgcagcacgagatcgcgacgctggctgaaatccggtcaaggaacgggatccatgcggagagcacgctggacatcctcaaggccgagggggacatctacgtcgccatgatcgacggcaaggtgatcaccaagctcgggccgaggtacgacgccggcgggatcatcccctccgacttccatgtcgtggcgcacggcaacgactactgcgtctgggagaaggaaggcctcagggttcctgccggtagaaagcactattagctttagctatagcgatcgagttgcatggtgctttgcaaccctagataatatatatacgtacgtggctctagctatgaatcatgcaattttgctgcgagatgtgtacgagcgagcttcgatcgatgtacgcttcgttataactagcgttcttcggaaataagtaagcggaatgtaccctgttaatcctgcagaaatgtaggatgaatggaattaactagctactgttcgtttcgatcct

SEQ ID NO: 6941 - DNA, 1139 bp, Oryza sativa
  ref <308>: DATABASE ACCESSION NUMBER: AK064072
  ref <309>: DATABASE ENTRY DATE: 2001-12-06
ctcctccttcccttgtctgaacggggggagctgtggccacacctctccccccacctcctcctcctctagggtttcctcccaatcccctccatggccaagaccaagcagggcaagaaggacgtcgaatcctacaccatcaagggcaccaccaagatcgtccgagtgggggattgcgtgctgatgcgggcgtcggacacggagaaggcgccgtacgtggggagggtggagaggctggagacggacgggagggggagcgtgcgggtgcgggtgcggtggtactaccggccggaggagtccaagggcgggaggaggcagttccatggcgccaaggagctgttcctctccgaccacttcgacacccagagcgcccacaccatcgagggcaagtgcgtcgtccactccttcaagaactacaccaagctcgacaacgtcggccccgaggacttcttctgccgcttcgagtacaaggccgccaccggcgccttcacccccgaccgcgtcgccgtgtactgcaagtgcgagatgccgtataacccggatgatctaatggtgcagtgcgagggatgcaaggactggttccatccatcttgtatgggaatgaccattgagcaggccaaaaaattagatcatttcctgtgcgcagattgtgtcaaagaaaatggcacgaagagaccttcaaattcatatccagcatcatcaaattctgattctaaggttgagccaaaaaagcggaagaggtaattgctgtgacacgagccatccgtggtgaggagatgcactgtttatggcgtcagctcttcattgctggtgcaaagtcaaaacgtggagggtgtacagtgcagatgaagagctaggctaggtccaagatcgcgttaacttatcatttgcccgaatttgggaacgtttccatcagtctaggcaaaagaacgaacttcattgatgctgttggctcgttcagttgtagccagtgtggactggatgagtgtcagcgtgttttagttttttgcctggtacaggaaaacgttcccagcgtggatgatgttgatgatagcttaactgtagtttcataatttgggtgtccctgagttctgtgacctgtttattgataagtgaatgccgcatgatgatgctgttgctgc

SEQ ID NO: 6942 - DNA, 1014 bp, Oryza sativa
  ref <308>: DATABASE ACCESSION NUMBER: AK064073
  ref <309>: DATABASE ENTRY DATE: 2001-12-06
ctagccccgccgccatgctgcgccgcctcgccgccgccgcgccgcgggccttcttctcgtcgtcgaccccgcacgcgccgccgccgccggcggggtacacccagcgccgcgagtacgggctggtccccatggtgatcgagcacacctcccgcggggagcgggcgtacgacatcttctcgcgcctcctcaaggagcggatcgtctgcatccacgggccaatcaccgacgacacggcctccctcgtcgtcgcccagctgctcttcctcgagtccgagaaccccgccaagcccgtccacctctacatcaactcccccggcggggtcgtcaccgcgggcctcgcgatctacgacaccatgcagtacatccgctccccggtcaccacgctctgcatcggccaggccgcgtccatggcctcgctcctcctcgccgcgggcgcgcgcggcgagcggcgggcgctccccaacgcgcgcgtcatgatccaccagccgtcgggcggcgcgtcggggcaggcgtccgacatcgccatccacgccaaggagatcctcaaggtgcgcgaccgtctcaacaagatctacgccaagcacacgagccaggccatcgaccgtatcgagcagtgcatggagcgggacatgttcatggatccagaggaggcgcacgactgggggctcatcgacgaggtcatcgagcaccgcccagtttcactggtttctgatgccgtcggcagcgatctgccaaacctaggcgggggcggagatggggctaacaaggcaactgatgaaccatctccagcttgatgaatggtcacaaggtgcaaatctttttgcgttcctgtagctgtgttgctggaattaaggtttaattcttgcacagcctgttcttttggtacttgaattaatctgtttcttataatgaattcaacccttgcctgcttagccccattgatgttgataaatgcagtgttaaaacagtttatcagaaagcaatgaatctcatatggacaggaattgcaacttt

SEQ ID NO: 6943 - DNA, 1006 bp, Oryza sativa
  ref <308>: DATABASE ACCESSION NUMBER: AK064074
  ref <309>: DATABASE ENTRY DATE: 2001-12-06
gtcacaaggcaagaggcaagaggcaagagcatccgtattaaccagccttttgagacttgagagtgtgtgtgactcgatccagcgtagtttcagttcgtgtgttggtgagtgattccagccaagtttgcgatggcttctcagcaggaacgggctagctaccacgccggcgagaccaaggcccgcgccgaggagaagacggggcgcatgatgggcacggcgcaggagaaggcgcgggaggccaaggacacggcgtccgacgccgcggggcgcgcgatgggcaggggacacggcgccaaggaggcgaccaaggagaaggcgtacgagaccaaggacgcgaccaaggagaaggcgtacgaggcaaaggacgcggcctccgacgccaccggccgcgccatggacaagggccgcggcgccgcgggcgccacgagggacaaggcgtacgatgccaaggacagggcggctgacacggcgcagtccgccgccgaccgcgcccgcgacggcgccgggcagaccgggagctacattggacagaccgccgaggccgccaagcagaaagcggccggcgccgcgcagtacgccaaggagaccgcgatcgccggcaaggacaagaccggcgccgtgctccagcaggcaggggagcaggtgaagagcgtggcggtgggggcgaaggacgcggtgatgtacacgctcgggatgtcaggcgataacaagaacaacgccgctgccggcaaggacaccagcacctacaagcctggaactgggagtgactaccagtaatacggtataagaagcatgtgtcgtctttggcactgatgccaaagtgtacgtgttgtatcctcttttttaagtttcagctcgacttcgacgtgttcggtgtcacactttggtttttcagttgtgctcaactgttcatgtttctggttccatggagggccagtgtggaggtcaatgtttaagctttcgttttaaaatctgataataaagttggttaagacctgaaagcgtt

SEQ ID NO: 6944 - DNA, 650 bp, Oryza sativa
  ref <308>: DATABASE ACCESSION NUMBER: AK064075
  ref <309>: DATABASE ENTRY DATE: 2001-12-06
tgttgaaataatggccccggtgttctccagagatgcatggagatgtgtatggcatatgattcagaatgacttggttcatggatggggtcttgatttcgctctcagaagatgtgtagatcctgcacatgagaaaatcggtgtcgttgattcccaatggattgtacatcaagtggttccttctcttgggaaccaggggcagtcagagcacgggagggcaccgtgggaaggggtaagggaacgttgtcggaaagaatggggaattttccagacgagaattgcggaggcagagaagtcatattacgagatgatgggcgtccccccaccaaacgtaacatttgtccactaggctactatacattacctgctgttaatccgctcacctattttttagccccaatacaatagtagcacttgtgtagagagctaagctagatatgatgatggtgatattcatgatacgtgtagagcatacgaaacgtcatatctatctattaattccattttttctgtttgatctccttgctgtgctgtgctatgctattttcatgagttgtcacagccctcctcactgtttctactttattttttttccctccatgctgtgttcttattattattatagcttaatattatatagtgtgaccacaacc

SEQ ID NO: 6945 - DNA, 1692 bp, Oryza sativa
  ref <308>: DATABASE ACCESSION NUMBER: AK064076
  ref <309>: DATABASE ENTRY DATE: 2001-12-06
agcttttctttcttggcctcgcctcgcctcgcctctgcccatctcccctcccactcgattcctccacctctgctccgaatctccctttccgcgtgcgcgcgtcgattcctccgtgctctcaccacccgatttgggggccggtctgagatggggcagtggcactgaccggaggaccttcgccgacgtcgtccatggcgcagccgcagaagcgagtctacgaagcttggaaagggaataataggttcttgtttggtgggaggttgatattcggacctgatgccaagtccctgctcgtctctgtttcgctcatcgtggtgcctgttctcgtcttctgcgtgttcgttgcgcggcatctccggcatcagttctccacctacaacgcaggatatgcgattcctgcggttgcagtactcttcatgatctatgtacttaccttgttgttcatcacctcagctcaggatcctggcattgtgcctcgcgcatcgcatccaccggaggaagagtttgcctatggcaatccattgaacgggggcacaccaggcaggctgcaatttccccgtgtaaaagaaataatggttaatgggatgcttgtgaaagtaaagtattgtgacacctgcatgatttaccggccccctcggtgttcgcactgttcaatatgcaacaattgtgtcgagcgctttgatcatcattgcccttgggttggacaatgcattggacagcgcaattatcgattctttttcctgtttgtttcctcctcgactcttctttgcatttaagtatttgcaatgtcggcgttatacatcaagttcctcatggaggagggctatcctacagtgtggaaggctttgaaacactctccagcatctttggtgcttatgatatactgtttcatcgccctctggtttgttggtggactcactggatttcattcatatctcatttgcactaaccagaccacatacgagaactttcgatacagatcagacaacaggcctaatgtctatgatcaaggatgtctgaataattgcttaggagtcttctgtagtaagacaaaaccttcaaaacacaaattcagagcctatgtacaagaggaagtacgagctccagtagttaactttggcaggcagatggaagaagagccagctggtggccctcgggcaaaagtagaagatgatcttgagatcggtagtgatctcctgcagatctctcagcggcgcaactatggggatgttgatcttgaaatgggaagtcaggactgcagtgagatggaaggcattcccaacgccaaacttgcgataggttctgaatcgcagattcctgcaatcggaagtgaggtacgagtgcggcactcgagctgggatcgtagaagtgggaattgggacatgtcattagatgtaattggaagaagtgcatcagatgtaattagaagaagtgcttctggccatgaggctgcacctccatttcaaacagaaactcactagtcagttattcgtgcattgagaagatgtgtcagaaacctgaacttggatttcaaggctgtttaactgatgatgacagtatgacacatacccagagagcaaggaagaaaaatgcacatgacgcattttgactttgactgccgtaattggtattttcaatcatttttcatgtatgaacagttactttagtcaaagattccgtgcggttggggtc

SEQ ID NO: 6946 - DNA, 1526 bp, Oryza sativa
  ref <308>: DATABASE ACCESSION NUMBER: AK064077
  ref <309>: DATABASE ENTRY DATE: 2001-12-06
atataaaccatggggatgcaaacttgcaaagggaggaggaggagagaacccgcactcccacggcaagaaagcaacccacgcgccgccgctcaccgccgccgccggcgccgccgtgccgtacgccgtggtattccgttcccgattccgtcttctaggcctcgtgcatgggcgtggttgtgagacccagctctgcgtcgagtaactgaccctttttttgcgatgagctcgtcgccggcgatcgccgcggcgtcggcggcagtggtggcgctggccgtcgccaaccgcgtgctgtacaagctcgcgctcgtgccgctcaagcagtacccgttcttcctcgcccagctcaccaccttcgggtacgtcgccgtgtacttctcgatactctacgcgaggtaccgcgcgggggtggtgacgggggacatgctggcgctgccgaagcgccggttggccgccatcggcttgctggaggccctcgggcttgcggccggcatgtctgcaggagctatgcttcctgggcctgctattcctatactgtcccagtcattcctggtgtggcagcttatctcctctgcgctgctgttgggaagaacgtattcaatgaggcaaatcattggttgtttccttgttgcttctggtgtgattcttgctgttgcaagtggagcgaatgagggtcaatttctgtctgaagtcaagtttatttggctagcactgatggttgcatcatcagcatttcaagcaggtgcttcaattctgaaggaatctgttttcattgatggtgcaaagcgtcttaaggggaggcgcccagatatctttgtggttaattcgtttgggtcaggatttcaggctctctttgtctttcttcttctcccacttctttctaatttgaagggaataaagtttgctgagcttcctgcttatttaaatggtggtgctgagtgcttcctaaatgtcgatgatagtctgattgattgtggaggagctccatttctaccattgctgtttatattggtgaatatggccttcaatatcgcattgctcaatttggtgaagctgtcatctgcgctggttgcttcgcttactgctacttcagcagtgccaatatcaatctacatactttcacttccgttgccctacatccctcatggcgcagagttaagttcatctttcatcctaggcggtgtggtattgctgatggggctgattatatataaccttccgcaatcatcgaagaaacaatccaagattgagtgaagataaagtgactgaatcaaccaaacactgtccggctcatctgacacgctacgggattttactgatttatttgagttgcaacatagtgaaatagggttccaaactgaagggcatgacataacacattcaaatttgtgaatacgttgatttatttgaactcaaaattcaagcagcacgtgtacgtaggatggccgtcaggccatatatagttatattatactcctgtagcctgtgtgttctcaaaaatataaaaataattgtaatggatttggtac

SEQ ID NO: 6947 - DNA, 3154 bp, Oryza sativa
  ref <308>: DATABASE ACCESSION NUMBER: AK064078
  ref <309>: DATABASE ENTRY DATE: 2001-12-06
aaatgattcagataaagggcttggagcacactatagtcctagtttaatggaattggataatgcaagaccaccagaacttggaatgaaatttgcaacacttgaagatgcacagagattctatgagacacatgctcttaaaactggctttgttgcaaagcgggggacgaactacaggagaaaaaagtttaccatagagtgccacaagactggcacatcaaagctaactccgaacccacagaggaagaggaagaaaaatattatagagaggactcaatgccaggcaaaggtggtagtgaagctcaataagggacaatgggagtatgcagcagtccggaatgaacacaaccatccattgtgtcctagctattcgcttagattctcaaagcgcaaacgcaggcgaaatcctccaagccagaaacagctggatgttcagagaaatagtgaccaactgacacaggcagataatcttgaggaacggttgtcgcaacctcttatttcagctgattcaaatgaagtaaacaacaaaaggatgcctagacatgcagagattagtatatctactgtagagaaggaacctgttgacaaactacagcgagctggtgattatcaggagcaatcttcaaatggcatagacaaaaatacagaacgaccaattgtagataaattgggagaccaaacaagctcgatagaccattcacttcagcatactgaagagcataacagatcacatgataatgtggaaagcagtgaagcgccaagcgaggatacaagcagtgaaagcaattcagacagcagctcaggtgatgagtcggataaggagcttgggaagtacttctatcctagtttcgacgaactgaagaattcaagaccaccagaacccggaatgaaatttccatcccttcaagccgcacaaagattctattacgcacatgctctccttactggttttgtaggaaagaggggaaccaactacaagagaaagaagtttcacttagaatgcaacaagagtggcaaaatgaagttaacgaagtcatctgaaaacccaatgaagaagaggagaagcaatcttgtagagaagacacaatgcaaggcaagggtgatagtgaaactcgataagggagaatgggagttcacagcagttcgccatgagcacaatcatccgttatgcccaagccctttgcttgcaagattcatagtagaccacaaacaaatgtcaactggagagaagtcatttttaagagttctgcaacaaaatagggtacctcctaagaaaattatgaagattttcaggaaactaagagtttgtttcggagacataccatttgaaaataaagatgagcacaacatagcacagacagaacatagaaaagcaaactcagatgttgaaagcgcattgaagcacttcacagaattgcagattcaaaacccagaatttctgtacgtaatgcaaaaagatgaggacaacacagttacaagcatcttctggactgatgcaagattgaggatcgagtatgatattttcggagatctcattatgtttgatgctgcctatagcactgatatgtataacatgccttttgtgcctattattggaataaatagccacgcgacacccttcctgttaggatgtgctttgttaaaagatgagaaagtagaaaccttcgaatggatgttgcgtacatttttgcaagtgatgggaggaaaaatgccaagagcggtcataacaaaccaggacacatcaatggagaaggcatttgcagaactcatgccgcatgtaaggcttaggttttgcaagcggcatgttatgagcaaagctcaggaaaagcttggagacttcatgacagcaagaggtaacataaatacagatctacataacttagtaggcaactcgctggtagaaacagaatttgaagaaggatgggttgagcttattgagagatacaatgcaagtgaaaaccaacacctgcaactcatgtggcaaacaagaaaaagttgggcacctgtctattttagagaagatctctacccatttattgactcagttggttccaacgagggaatgaactcattatttaaaggtaatatgcttccaaaggacacaatagataagttcattgggcaatttaaggagatacaagagaatatagcaaaagttcatgaagaagatagatttcagtcaggagctgaccttaaatacatctcaatgcaaccaatagaacaacatgcagcacatatttacacaagggaaatatttctgaaagtacaggaagaactactacattctactgcattcaacgtgcaggagatacaaatagggacagtgtacagacttgaaaaggtcttcaactatgagaacccagagtttgatagaaattattttgaagtgcttgctgaacctggcatcaatgcattcaagtgccaatgtgcaaaatttacaagggatggaataccttgctgccacatattcagacttttcactcagtttggaatcaatgaaataccagagcagtacataatgcccagatggactaaaaaattcagagaggagcagctaaaacagaacaaggaaaaattatttgacaagcatggtataaaggattcagaaaatacattgagatatgcaatgctaatgagtaaagcggctgaaatttgcccgaaaatttgccatgatgaagcaaaatgcagcatattcatgcaggaactagacaagattcaagagaagttgataacggagagcagagaaaatgcacagaatgataacccatgtcgtgaacaaggggccttgcaacaggagcatcgtgggagcagtagcaatacagagcaagagcaacagcatacaggtggcttgtaaggcacagtgatgtttggtccaaaatgtgcagtgggtcagtagagcattacgggagtgagccaattgatctctttgtgcgggttctggtcttctggaggagactattttgtccaggaagtagaatggttagtatagttagtttagctgaagttagttgtggtaaacttgtctgttaggaaagtgttggtcgagagcaggaagacgtgtaaagatgcattgtatctattagctctcctgtctaaacatgcatcttggttcgcggcagtatgggaagctgatagttaattgacatctgtgttcgcc

SEQ ID NO: 6948 - DNA, 1444 bp, Oryza sativa
  ref <308>: DATABASE ACCESSION NUMBER: AK064079
  ref <309>: DATABASE ENTRY DATE: 2001-12-06
atgaaagggtggtgctagtgagccagtaatagcattaccgtacttccacatgtcgccggcgagaggtggcacgccggaggaggagggcggtggcgccgacgtcgagaaggcggcggcggagacgggaggtagaggcacgtggaggcacgcggcgttccacgtggcgacgacgatcgccacgccggcggcctatgctcccctcccgtttgctcttgcctcccttggctggcctcttggtgtttgtagcttggtcacaggaacactagttacatggtgttctagcctggttgttgcctcactgtggcagtggaatggagacaagcacaccagctacaagcttcttgcaaagagcatctttggtccctggggttactggtatgtgtcgttcttccagcaagtggcatcaattggaaacaacattgcaatccagattgcagctgggagcagcctcaaggctgtgtacaagcactaccacaccactgatgatggcgccatgaccctgcaacagttcatcattctcttcggcgcattcgagctgttactctcccagcttcctgacatccactcactccggtgggtcaatgctgcctgcaccgctagcaccattggatttgcagggacagccattggtgtcaccatttatgatgggcatcggattgatcggaaggaagttgattacagtctgcaaggaagcgctgcatcaaagatcttcagagccttcaatgcactgggcacaatagcattctcatttggggatgcaatgctgccagaaattcagagctctgtgcgagaaccggtgaggatgaacatgtacaaaggcgtgtcgacggcgtactcgatcatcgtcatgtcctactggaccctggcattcagtgggtactgggcatttggctcaggagtacagccctacatcctgtcctccctgacttttccaagatggacaattgtgatggcaaatctatttgcagtcattcagatcactggttgctttcagatatactgcaggccgacattcgcgcaatttgaacagcggattcaggcgaaagacgcaggctacagagcaaggatgtggaggctggtgtatacctctgcatacatggtggtgatcaccctcatctctgcagcaatgctattctttggggactttgtgtcagtctgtggagctgttggctttacccctctggactttgtgctacctgcactggcatttctgaaggccgggaagttacctgaaaacccaggattacgccatgctgtgaaggtgatcacctctgctgtcgctgtcttgttctccattgtcggagctctggcatgcatcggcgccgtcagagcgatcgcacttgatgtcaaaacctacaaattcttccatgacatgtgaatgcagttagttagtatcatgttggtgatgaaatgaatgtctctgccatctgtgccagtggtttat

SEQ ID NO: 6949 - DNA, 1517 bp, Oryza sativa
  ref <308>: DATABASE ACCESSION NUMBER: AK064080
  ref <309>: DATABASE ENTRY DATE: 2001-12-06
attttttttcgaagtcgggggaaatttttcttgggcgggagaggggaggggattgccattgctgctgctgctaatggcggaaaccctagccgaggacgccgccgacgcgccgctcgacgcggcggccattcgaagccggttggagcggctcgcgctgtcgcggcgaggggaggaggaggttgcttcggcggcggcggcggcggcggacgcggtgcgccgccttccctccgtggaggacgtggaacctttgcaggggttggaattcgacgcatgggcctcgagcgccgcgccgatggagagcgactttgatgcgttcatggaatggttgagtaaggaggtaagcttggctgaggaggagaaccgcaaactatctgttgaaattagcagcgttgcagagacaactctcaaagattcgattcagttggatgctgatattgccgaattggagtcttcattgaagaaaattgattcacagggtttgaaacacttggaggcaagccacatcgctgagttatcagtttcaactgattcatgcagagaccaaattaaatttgacaaggactacaagtatgaggtactggaacttaaccaacagctggaaaaatatgagaatgacctgaagctgttagaaaaccaaaaaagtgctgaagcaatgtgggaacttgaatctatgttatcagaagcaaatgttttagactttaaagacaattgtctcagggtattcctgaaggaagctgtactcacgcctgaatgtttaatgtacgggaaagagtcagattgttctgttaattcattcgtttcagaccatgaattgctgatagaagttggagaaaacatggaaccaaagagagtgcagatatttcctgatgatacctgtgtagatatacttcttgataagctcaaggcctccagagagaccatttctactacatcactgggatggattattcggcaatttcaacaccacattataatcaacactttgaggcgttccttggtgaaagatgctaataattccaggcattcttttgagtacattgacaaagatgggacaattctagctcacttagcgggtggcattgatgccttcatcaagatatctgcagactggccactgtcatcctgcggcctgaagttaatctccattcacagttccagggcgcagtcagcagatatttctttagctttgctttccaaaacaaaggaactggccaatggattggagcttcagactcgtcgacatctggtgaagtttgtagatgcaattgaagatattctttttcgagagatgcggtcgtagcagctccattccagcaaagcatgtcttagaagactagacttgacccaaccagcctccccatcatcttgatgacaaggagaacgtagcatatcaatctccgggtgaccaccttgtaagcttgcacgttgtaaaggtctgatcacatttattaatgtgcgcatgagatgtttaagaaatgaccagtaaaagcatgggaaaacataaactgattaagccc

SEQ ID NO: 6950 - DNA, 1382 bp, Oryza sativa
  ref <308>: DATABASE ACCESSION NUMBER: AK064081
  ref <309>: DATABASE ENTRY DATE: 2001-12-06
aaataagcggaggagaagaaacttacgaggactcctcctccgcccgagcgagccgtcccggaggccgccgatactcctcctcccccaccgccgccgacggcgccgacgccgacgccgcccgagctcccgagcgtgttcgtggagacggagttcgcgtcgtcgtgggcggcgaaagggcgcgcgctgggggtgatccacgaggagttcgaggcggagtgggggccggaggagatgggcctcacgtggacctccgactccgactcggacagctacagcggcagcgacgacgacgtcgacgactaccgcgacggcgacgggatgatcgagatcgagctggaggaggacaacctcatcgagatcgacatctccaagtgccggtgatgatggattgcttacctattttgcccggacaatcttattatcaggtcttcttctctttttttttccttggggatttcttggtcctttgggtttggtaatttgatttctgacaaacaaattaaaaaaagtgtgctgattcggcgtgtgaattggagttcttgaagttaattagacggcttgaattactggattgctgcaatgtacatataggatggcgagatactgagagtgggaagaaaaaaaatgtttgtttggttcatctgagattatgataacttcagaattcagatcctacttcagtaagtacttcttgtgctatgttcgtcacttgaaatcaagtcttgatgattgcatttgtcccccattttatctgtgaaaccaagcactgtgacccatttttttttttcatgatgcaatctttgagtcccacttaacattacaagattggaatccctttttctctgagaaagttgtaacgtctgcagcaaatttatagactgattttgcaattgttcggagtcttgatgatgctgcgtcgatcccatctggagaaaaagagccccagaaattattcgtgactgattgcatttgtggtagcctacttggtaggtggatgtattggcgtggaagttggcttgccacatttgttcagacttcataacccaatgctacacagtcatcgacctactagcaggagtatgtgcatgccccttctgcagaatccagctcgagaagcagctgatgggaattcggcttctgaattctaggttcattttctagattgtatctgtagcttcttagaatctagctgcactaattgcctgattagagaagcttttgattatgaaagaatttgcttctaccagaagctctccaaacaggcacaaaagcagacaagcagttggttgcatagtaatttttgtttttcagtttatttttggcttctacttaatactgctgtactaccttcattttaaaatatagctatttctagcaaaaag

SEQ ID NO: 6951 - DNA, 1832 bp, Oryza sativa
  ref <308>: DATABASE ACCESSION NUMBER: AK064082
  ref <309>: DATABASE ENTRY DATE: 2001-12-06
ctagctcgcccgcccatgccgctgctcctgcgcggcggctccctcttccgtctctacgggtgtggctgtgggcttccaagcgcaaatttcagtcccagcaaactagcactgataagactaagcttgatgatggcagaaacacgagccacctattcgcgtcgagctgcctctaagaatactgatatcaagaaagatgatgaacatgtccttgaaaaggaggatgttgctgaaagcaaattggagatagagcaacttaggaatgaccccgatcgactccaatccatgacagtgaaggagctcagggaaatcacgaggatgatgggaattcctgtaaaaggcaacaagaaagatttggtatcagccctgatggattctctgggtaaagtgggaacttcatcagttgagaagattggtgtgtctgaagtaccttcaaaaagaaaaggtgcttcagtagtagttgaacaaaacatagatagttctgaggtcatttctgaaactcctagtaagagaagtagagcaaagaacaaaggaaccgctgaggagagttctggggctaatgtcaagcaaagcaagacatcagtccagaagaaaaagctagttgtccaaggtgccagtgtggaccatgaagaaccttggactgtacttgtacacaagaaaccacaacctgcctggattccttataatcctaaggtcatgaggtctccatctcttagcaaggatacgaaggctctaaagattctgtcatggaatgtgaatggattaaaagctttacttaaatcgaggggcttctctattcatcagttagctcagagggaggacttcgatatactatgcctacaagagacaaaaatgcaggagaaggatgtagaagtcattaaggaaggtctacttgaaggctatacccatagtttctggacatgcagtgtatcaaagcttggctattcggggactgcaataatttcaagggtgaaaccactctctatcaagtacgggcttggtgtgccagaccatgatactgaagggagggtcgtcacagtgaagttcaatgatttttacctcctgactgcttatgtaccaaattctggtgatggtctaaaaagattgacttacagggtcacagaatgggatccaagccttggtaactacatgaaagacttggaaaaatcgaagcctgttatactaactggtgatcttaactgtgcccatcaagagattgatatacatgatcctgctggaaatcgtagaagtgcaggctttacaattgaagaaagggaatcattcgagactaattttttgtccaaaggttttgttgatacatttcgaaaacagcatcccaatgttgttggatatagttactggggttataggcataatgcccggaagaccaacaaaggttggcgtctggattattttcttgtgtctgaatccattgcagaaagagtccatgattcatacattattccagacatatctgccagtgatcacagcccgctaggcctcgtactgaagctctaggcaggctgcatgcctggaacccaatacggacttctgggtttagttaacaatgttttcctgctgtgagtctgtgggagggtatgtggttttgtatcagtaggttctaatactagcctaacggatgtggatgtgttacaccaatccgatgttggaaaaaaggctggtttcgatatgtagccgaatgagtctgggtgatgtagtgttgttacacttccttaagctgcattgacagatcgtaatgcggggtctgcacttttcacgttttcagtggagtagctcagtattggaattcgatggtaatatcatgattcgtagtc

SEQ ID NO: 6952 - DNA, 1813 bp, Oryza sativa
  ref <308>: DATABASE ACCESSION NUMBER: AK064083
  ref <309>: DATABASE ENTRY DATE: 2001-12-06
taagtgtcattgatagacaactacaagagcttaatgaacggtttgatgaggtaaacacagatttgctcctttgtatggctgcatttagtcctatagataactttgctagttgggacaaagataagttgattaagcttgcacggttttatcctaatgatttctcaagcacagagatgaaccatcttccatcagcattgaaactcttcctcactgagatgcgtatagatgaaaggtttagaaaagtaaaaaatcttgctaatctttccattatgattgttgaaacaaaattgcacaatagacatgagattgtttacaagcttctcaaattggttctggtacttccagtagcaacagctagtgttgaaagaatattttctgccatgaattatgtgaagaataaattgagaaacaggatggggggtcaatacttgaatgattgcttggtcacatttattgagcgtgagatgtttttgaaagtcaaggagtgtgatattataaaccgctttcaagccatgaaggaacgcagaattaaagctactcttccaagccacgaaggaaccgaaatagaaaattagagacgggaatacccaactttcaaatcctggctccgccactgcttcatccgaacccaactccagtgctcggcttccagacggcagcaggagccatccatcctcatcagcccccacctccgccatgaccggccgaccaaattctccacccacatcagcttctaccagtgggagcaaggtgcctcctcccttgcgaggatcatggatgccaaggacttccctgtcggccacaagttccgcttaatcagccactacacccactgtgatggcctagtgctcgccccgactatcaccaagctctacctcttcaacccggcaacaagagaagccatcacgttgcctgacggccatggccacagccacaccgcagggctggggctggatcctggtaccggcaggtacaaggtggttcggtccttctaccgctccccctccatggatcctcccgtctccatggggatggaggtgctcaccgtcggcgagcccggcgcgcggtggagggagaccgccgttgatcctccacaccccatcacccgatggcggaccgcccttgccgtcaatggtggctacctgttctggtacatggacaggcgccgctaccccgacgatgctccccggggactcctccggttcagcctgcgagacgaggcgttcgccgtaacccgtctcccggaatcgatggacccgacgctcgacgagaacgtcttgcccgacgtgctgcacggggagctgtgcgtcgtgcaagctctgcccgacaaggctggggtgcttatctggacaatgtcgtcgtcgtccatggacaacgacgatgtccacctcgacgacgggccatgggaactgcgatattgcatctgtgtcaacgccctttgccatccgttgggggttcttcctgatggaggaggaatcttgttgtgggcgaatcgcagcgtccgtcgctacgacttctcggctaggaagctcgctggtgtggtgtgtaacctggatcgcatcaggtatcagggtggtaggccagcgagatggaagagtgtcgtcgacttcaccttgacgccctacaccgagtctctcgttagaattaccgctgcttagcttcttcggtcttgctactttttatcccatgagaatcagtttgtatgcactgcttgtatttccccccctctgtttatcactacaagtactcctgcaaatgacaaggctatttatttgaatgctctattattaatttattttactcccttcgtttc

SEQ ID NO: 6953 - DNA, 1705 bp, Oryza sativa
  ref <308>: DATABASE ACCESSION NUMBER: AK064084
  ref <309>: DATABASE ENTRY DATE: 2001-12-06
tgatgcaaatatgcagaagagccatgcagggtttatgacaattgcacatctagatttcaaagatagcatccttacagacgaggaaacctcagtgctttctcctgaaaagtatgatactatatcccctgtgagacaaggaaacctgttcccagacaaagagaatgtgacaccagcctccagggatctgaagcccatcattggtaggaaggttcttggaccaagggtggataattcgctgtctgtagaatgcacttcaaaaaggaggatccatagacaagaacccaatgaattatcagcaaagtccaaagtttgtcacgcagtagatgatgatgttttctattctgataaggaaaatttgacacctatatcttcaggaggcattaaagcaaggagatgtcttccaaagagcctcacagtggatgctgaccaagatcaagaggccttctactctgacaaagagaacttgacgccagtatcttctgcttctcggaaaacaaaggatttgtctgaaaaccgtgcacgaatggaaagtactatcacaaagaaaagggtggttgataggctccccttccagacactcttgtcgaattctcccttaagacacactagttcacttgatagtacccaggttaatcctagagcagttgatgtggcaatgaagttggagggtgaactgaataatgttccacacaaaggacaagagtctgaaaagaccaaagaaggaatgaaagtctggaccatggtaactgatatggaatgtcttcttgatgatgaatctaggaagtccatcatgctgctaagaggcttaaaaggaactcaattggtcataccaatgattgtgatcagggagcttgagtgcttgaaaaagcgggagagattgttcagaatgttatcaaaggccacctccatgctccaatggatcaatgagtgcatggaaaaggagagctggtggatccatgttcagagttcaaccgagatgctgccagtagcaccaactccacctgcaacccctacagcgctatgcaacaatggagaaagagaaatctctgccggcaccttcaatccgatagccttgttctccccgagaagcttctcagatatcgtctccccgaaaacagaagatcgcgttcttgactgcgccctccttttcaacaaactaaaaggaaaccagaacatcgtcatcctgtccaacagcgtcacgcttaagatcaaagctatggcagagggattcccttgcgagggagcaaaggaattcagggagaccctggtgaacccgtgctccagcaggttcatgtgggcggccagcgcgccgagaggttcagcctggtcgtgcctggacgagactaccctggaggagaactactacaacagccaccatggagccaggaggaggatcccaaggcccatggagcccgccaagggcctgaagctgatcctgctgcacaattctcactatgggcaggcgacgaacttcgtcgagaatcggccattggctccaatggcctcgtggtgaactgacgatggcacgatgccattgggctcagttaggccttgtgtgcctttgtatatagatattggatttcttcttcttcttggtatgtgattagagtaacaccgctggacttgtgaggtggattttgagggcggtggctacatttgtgttggtatgatttccatgcctaatgaaagtctgaaagaaactagt

SEQ ID NO: 6954 - DNA, 1505 bp, Oryza sativa
  ref <308>: DATABASE ACCESSION NUMBER: AK064085
  ref <309>: DATABASE ENTRY DATE: 2001-12-06
actccgccgccctccgcctcatctccttccccttctcccctcccatggcctccctgatcgtcgcctccaccgcctcccgccgcacgccgccgcccacctccatcccgacgccccactcggcgcacgagtagcgcgcgttggtctgctgctcggcgaagaagggccagcacagcatcggcaccccggcgctgaggctctccatcgtcgagttccaaccgcagtgcgtcaggaacgcgcccaccgccccgtgccgcagcacggcctcctgctcgcaccagctcgccaggaggcccctccccgccaccgcctccaggaactcccgcggcagcacggcggcgtcgcccctgacgaggtcggggcggacgatccacaggaagccgtggccgcagttggcgagcccccacgcgaattcgacaagctcgtcgttggacatggtggtgatgctcccgtagttgacgaacaccacggaccggggctccctgccgtcgagccacgccaggcaggcggtgtcctccttccagaggctggggcggatggcggcggccggggcgtcgggggcgacgacgcggtcggcgaggctgccgagcgggccgatggtgtagactggcgggaggatggcgcgcatggcgtcgagcgcctgctgctccagctcgtcgaacgtgtccaggaacccgttcgtcagctgctcttcatcttcacgtacgtcgaacaccacaccacaccacagaacgcgcgtcatgcatgcgtgcgaaccacttcgttcctcgttacggtgtttaactttaacaagacgatgcatgtggtggtgtcatatggtcgaatacctttgagaggcgagaggccctcgtccaggaagaatcggtggtggcggtagcccatgtagccgcaggcgctggccgtccagaacagcgcgcacggcacgccgagctccttggcggcgtcgacggcgaagctcatgacgccgtccgccacgacgcacgtcacgggcgggatcccggccgcgcggctgccgtcgaggtcgacgagcagcttcgtgaagtgcgggaggcaggtggtcatggtggagtagcagatcgacgccgggtcctgcgtggcgtcggcgtcggacggcgggaggccgtcggggatggtggcgaagcggaaccccgggaccccggccacggcggcggcgccgcgggagcggatgaggcggcggtggttgtactcggtgttgacgaacgtgacgtggaagcccctgcagtggagcaccttggccagcttcatcatcggcgtgacgtgcccctgcgccgggaacggcaggcacaccgcgtgcggcttgatctcgtcggcggcgaccatgtcgtcgtacgtcgtcgttcgtcgatcgatcggctggtggaaacgagatgcagcggtgtacgagatgcagcctctccgattgcaggcactgcacatatatactactagcgtgtactgttattctagtgttggttggtatactccagcttggccggggtctcatcgtt

SEQ ID NO: 6955 - DNA, 1750 bp, Oryza sativa
  ref <308>: DATABASE ACCESSION NUMBER: AK064086
  ref <309>: DATABASE ENTRY DATE: 2001-12-06
caaccaagcgaagtagcttgtcctcttcgccgaggccgaggtgacgcacatggcgctgcctcctcctctgctccgcttcttcatcgtcgccgtgctgctcagctcggtcgccgcatgggtggcggcggcgacgacgctgcacgagcgcgacgcggcggcgctcagggacgtccgggcggggctgcgggacctgccggggtcccggttcttcgaatcctgggatgacgccaccgacccgtgcgactatgccggcgtcgtgtgcgagcccgacgaggacgacccggccgcgctccgcgtgtccgtgctgacgctcggcaccggcctcaccgactctcccggcctggctggcacgctcccggcctcgcttgccagcctcactgcgctcacggacttcgtcctttatccaggacgcgtcgcgggagctattccgacggacattgggtcgggtctccggcgcctcaggctgctgtccatgtccggcaaccagctgaccgggcagatacccgagtccctcgccgggctgccagatctgcacacgctcgacctcggcaataaccacctcgacggctccattcccagcggcttgctgctgccgtcttcgcagagcctcaaggtgctcatcctagcgaacaatggcggcctctccgggcagattccagaccaattttccagctcacagcttttccatgtcgacctaagccggaattccatcactggctcgctcccaccgctggcgcagacagtccgctacttctccgtcgcggcgaactcaatgcaggggagcctcgacggcgcgttcggcaacggttcggctccgaccgacttggccttcctcgacctctcgatgaacaacttctcgggttcaatcccgcgggagttgttcgcgctcccgagcgcgtcgtcccttcttctgtcccgcaataacttcaccgggtccctcgccgtgccagcgttcgcatcggagcgtgccgcaacgccgccgtggtcggttgtggacgtcagccacaatggcatcacgggggaggtcccggaggagctagcggccgtggagagcctgtacgtgaacaacaaccggatgtacggcgaggtgccggaggcggtggcccgtagcgtgttcgccggccgcatgacgaccttctacgcgcagcacaacttcctgacgggcttcccggtgccgccgctgccgctgccggactccgcagcgctgtgcctctcttacaattgcatggagctaccgtccgcttctgccgccaacgggtgccccaccatcggcggcccaatggagtccaggcccgccgaccagtgccggagcagcaccgcagccaacgccggcagcagcggaggggacggctgagccgccaacattcctcaaggctgacaggtggggcccacctggttcagctcatcagctgggcacgggtgggggcgtgaggaagggacggccaggatagctaagcctggctcacacattttcgttttgtccgtttgtttcgggtgtggttttcatgtgattgggtttgaattcatcggcatccgggcttgtcgtcgggcgcgcaacggttacacggctacaaggttagcgcgttcttgtgcgtgtgtgcaattactcgctctggtagtttgtacgctgcgtctgtgttactctgttcattgtgagtagctggcagtgtccatttaaacaactctgttcatactctactaagtcagctaatgtaaagggaggcactattttagggggtgtttatttttt

SEQ ID NO: 6956 - DNA, 1372 bp, Oryza sativa
  ref <308>: DATABASE ACCESSION NUMBER: AK064087
  ref <309>: DATABASE ENTRY DATE: 2001-12-06
agctcccaacggtgattcgagccaagacctagccgccgccatggagatcgtgagatcccaccggcagatcgcggcggaggcggcggccggcgtaggatgtggcggcggggcgggaggcctgccaacctaccgggtggcgccgcagctggaggtgcggttggaagagtttgagctcttcgccatcgaccgcctccgagtattgaaggggatcgccgacgggctctcgcgagggaagagaccggaggaaatggagaaattggtcaaggaattgtggaaagcccatatgaggcaccaggatcctacagagactttgaacaaggatatgcttatgttgcgatgagtcaggttgtttcgcttgtggttacccaattccgctgcaatatctcgaaggcacttgttttaacaaatggaaaatggacggccaccattaaggaacaagaaaaggataggttgactcctattgtcgaagcattgagtaatgcatattttggacctgattactctcagccaaaggatgctgttgagatttctctgaaggatattgaccaactggctaaaacttctttccctctttgtatgcgccacatgctagagaagttgagagaaaaccatcatctgaagcatgggggcagaatgcagtttggtcttttccttaagggagctggactaaagttggaagatgctctagcattttggagggcagagttttctcagaaggttggctctgagcgatttgacaaggaatatgcctacagtatcaggcataattatggaaaggaaggaaaacgaacagattacactccgtattcatgtcaaaagattatctctgcaacacctggtgttggtgatcaccatggttgcccttatcgacattttggtgaagacaacttgagagcagctctcaataaaatgggaatcagtggtcatccattagaagagataatggataaagtgaagaacaggcactaccagctagcttgcacgatgacttttgaggcagaacatggtgtctcatgtgatactggaatcaatcatcctaatcagtatttcagtgaaagccagaaagtcttgaaagcaaagaatcaagcagtgcagagccaaggaacaacctaaactgtaatgctgctggcaaaagtcagtccatccaaatgcggaatttcaggtttcgacactactagtctgtcagctgttgcgatgcattgttttctaatatctactggttattggcaacaaatttctaatgttcaattgtgcgaacataaacatcattctcaccctttgcttttttatagctatttttcagtattcaacaatcaaatccatgatatgtgtacaattggcagcaattctaagttatttttcttttaatttc

SEQ ID NO: 6957 - DNA, 2363 bp, Oryza sativa
  ref <308>: DATABASE ACCESSION NUMBER: AK064088
  ref <309>: DATABASE ENTRY DATE: 2001-12-06
acagcaaagcaaaggcattcgatttcagagacgcatcttcgctttttgcctcggcgtcggtgctccacggcggcggcggcgggggcggcgccggagttccaccgcgcccgcctacatccgcgtgtgtgagagagagcggctacaaatggcctccgccgccgaggaggccaagggcgtggaggaaggaggaggaggagccagcgccaacggcggcgacaaccccgccaccgccaccgcctccgcctccgccgcggccgcggcctcgtcgtcttcccccgctgatgacaggggcctccccagatcaagcactatgccaggtgggattaataatgttgaaataaccaatgaaactgctggtccatctaatctggaaagatcaagaacagagaggcgtcgacaaaacaatccagctgatgatcctactaaacagttatttgatgataaaatttccctaaaaaagaagctcgaaatgctaaatcggatagctacagtgaaagatgatggaactgtggtggttgatgtgccaagttctctggaaacaagtacaactgatggtgtagcatatgatggctatagtgatgttactgttgaggaaccattggatggagcagacatatctgtgaggcctcctatggatattgttattcttattgtgggcacaagaggtgatgttcagccattcattgctataggcaaacgcttacaggattatggacaccgtgtgagattggcaacccatgcaaactttaaggagttcgttctaacggctggtctggagtttttccctcttggcggtgatccaaaaacacttgctgaatacatggtgaagaataaaggattcttgccttctggtccttcagaaattcctattcagaggaaacagatgaaagaaattatattctctttgctacctgcgtgcaaggagcctgatcctgacactggtattcctttcaaagtggatgctatcattgctaaccctccagcatatggacatactcatgtggcagaggcactaaaagtacctattcatatattctttaccatgccatggacgccaactagtgaattcccccatcctctttctcgtgtgaaacaagcggctggatatcgactttcttatcaaattgttgactctatgatttggcttggtatccgagatatgataaatgaatttaggaagaagaagctgaagttgcgtccggtaacatacctaagtggtgcacagggttctgggaatgacattcctcatggttacatctggagtcctcaccttgttccaaaaccgaaagattggggccctaagattgatgttgttggattttgctttcttgatcttgcttccaattatgtgcctcctgaaccacttgtaaaatggcttgaagctggtgacaagcccatatacgttgggtttggtagtcttccagttcaagatccagcaaagatgactgaagtcattgtcaaagcacttgaaataactggacagagaggtatcatcaacaaaggttggggtgggcttggaacattggcagagccaaaagattttgtatatctacttgataactgcccccatgactggctcttcctgcagtgtaaagcagtggtacatcatggcggtgctggaacaacagctgctggcctcaaagcagcgtgccctacaactattgtacctttctttggtgaccaaccattctggggagaccgagtgcatgctagaggggtagggcctctacctataccagttgatcaattcagcttgcaaaaattggttgatgctataaacttcatgatggagccaaaggtgaaagacaatgccgtggagcttgccaaggccatggaatctgaagatggtgtgtcaggtgcagtcagggcattcctcagacatctaccttcaagagcagaggaaacagcacctcagcagacatccagcttcctggaattcttaggtcctgtaagtaaatgtcttggttgctcataggtgacagtgaggcaattatacaaagaatgccatttctccctgttgaaagaagagaattttgaacatccctgcaaggatcaggagaacggatttcctggagagtgtgctttattatcttttatttttttcctttttgtgtattttttctcttttattgtgtaaaaggtgcttgtctatacatcattttgatgtgcatcgttgccctgctggtcctgcaacaagtaaagaatctcacatgtacgaccagtcctttctgtgtatatggagagaagtggagaggcacacgaatagttgagttgtcgattgctgcaatgattctaaccaaagcttcaggtttattgtattggtcatattgtaccttttataccattttctttagttctcgttt

SEQ ID NO: 6958 - DNA, 1276 bp, Oryza sativa
  ref <308>: DATABASE ACCESSION NUMBER: AK064089
  ref <309>: DATABASE ENTRY DATE: 2001-12-06
cttgcttgcaaccagcggccgccaccgaatggcaccgttcacgcgtgctccaaaagccgcccacctcagttggagccgggaaaagttggcaaaaagccaataaaaaagacgatgcgcattgcccggattcccacttcgatcccccctcaccttcgtcttcctctcgacctctccgctgtctctccgatgggctcagcttcagagcatgatgtcagggagcacctgctggacgtgggcggcgtcggggaagaaggggcggcggcggcggcggggccgaagatacgggtgcgggggctgacgcggcggtcggaggcgagaggcgaggagatcctgcggggcgtcgacctggacgtgccgcgcggggtggtcgtcggcgtcatcggccccagcggcagcggcaagtccacgctgctccgcgcgctcaaccgcctctgggagcccgcgccgggcgccgtgctcctcgacggcgtcgacatctgcggcatcgacgtcctcgcgctccgccggaaggtcggcatgctcttccagctccccgccatgttcgacggaaccgtggctgacaacgtgcgatacgggccacagctgcagggcaagaagctgacggacgccgaggtgcagagcctactgagcctcgccgacctggaccctgctctctgctccaagcccgcctccgagctctccgtcggccaggcgcagcgcgtcgcattggctcgcaccctcgccaacgacccggaggtgcttctgctggatgagccgacgagcgcgttggatcccatctcgacgcagaacatcgaggaggcgatcgtgcggctgaagaagacgagggggctcaccacggtgatggtgtcgcacagcgtgaagcagatccagcggatcgccgacctggtctgcctcctcgtcgccggcgaggtcgtcgaggtgctcccgccgtcggagctgtccgaggccaagcaccccatggcacggcgcttcctcgagctcagctgaagactggcacgacgatctcctcctcctctgtatgacgcttcttccgtttgtgtgattcggatgtgtacctgtaatcttgagaagttgagattatgcctgtatactatgtcggaaattttgtggtgagatgatctcaaccctactggccataaaatgcattttggtaaatattcttttatctaaaccctagtggcctccgaggctccgacattgtatttttgcctgtaatattggtacactactaaaatgaaatttggtactccctccgtcccagattataagggatttt

SEQ ID NO: 6959 - DNA, 1405 bp, Oryza sativa
  ref <308>: DATABASE ACCESSION NUMBER: AK064090
  ref <309>: DATABASE ENTRY DATE: 2001-12-06
cagatgcggcggcggcggcccagtttatccgtagcatccaccgcactggcaaatcaagcggcagtgacgcagagtattagcagcaggggagcccatggcgtcgccggggagcagcgggcggtgctcgaggaccccggggttcccggcggggccgctcggcggcggagggcgcgcggtgccggcggtggggctcggaacggcgtcgctccggtccgtgggggaggagagcttcaggggcgccctgctcgccgcgctggaggtcgggtaccgccacatcgacaccgcatcggtgtacggctccgagcgggtcgtcggcgaggccgtggccggggcggcgcggcgcggggtcatcgcgtgccgcgaggaggtgttcgtgaccaccaaggtgtggtgcacgcagtgccacccggacctcgtgctcccctccctcagggagagcttgcagaaccttcaaatggaatatgttgatatgtacttggtccactggccaatgagcgtgaagcccactaaacctcactacccaatgaaaagagaggatatcatgccaatggatttgagaggcgtatggcaagcaatggaggaatgtcaccagcttggccttgcaaaaatgattggtgttagcaatttcactacaaaaaaattgcaagaactacttgccttcgcaaaaattccaccagcagtgaatcaggttgagttaaatccagtctggcagcagaagaaactgatggagttctgcaaagcgaaaggcattcatgtgactgcttactttcccctgggaggccggcatagtacatccacagtcaatccagtcctggattcagatgttttgaaagagattgccgcagccaaggggaagtcagtggctcagatctcacttaggtggatctacgagcaaggagcaagcatggtgaccacgagtacgaaaagggagaggcttaaggagaacatcgatatcttcgattggcaattgagcgatgaagatcggctcaagataagtcagattccacagcacaagacggtcagcgtgctgtcgatcctctgccccgatggtgtctccagcgttgagttgtcggaggttgacgttgttgaagtgtagcggtcgttttcgcgttcctgttcacagtaaactgaacatttagggcatgtttagttcccaaaaagtttttctcaaaaaaatcacatcgaatccttgtagacatgtatggagcattaaatatagataaaaaaaactaattggacagttatgatggaaatcacgagacgaatcttttgagcctaattagtccatgattagccataagtgctacagtaacccacatgtgctaatggtggattaattagtctcaaaagattcgtttcacggtttccaggcgagttatgaaattagttttttaatttgtgttcg

SEQ ID NO: 6960 - DNA, 1478 bp, Oryza sativa
  ref <308>: DATABASE ACCESSION NUMBER: AK064091
  ref <309>: DATABASE ENTRY DATE: 2001-12-06
aaaaaatccatcagattatctgaaattctgatagacaacatggctaaccctcctatcaagtgcttgctccctcctgcaatcgtgtcactagttctgctgatctcatgcatggtggcaaccggtgagcagcaagcaccgtacaaacccctcgtcgtcccgctcgtcagggacagcgacacatccttctacaccatccccatcaagaacggcgcgccgctcgtcgtcgacctcgccggcacgctcgtctggtcgacgtgcccgtcgacgcacaccacggtgtcgtgcctgtccggcacgtgcggcgcagccaaccagcagcagccgcgtcgctgccggtacgtcgatggcggctggttctggtcaggccgcgaggcggggtcgcgctgcgcctgcaccgcccacccgttcaacccggtcaccggcgagtgctccaccggcgatctgacgacattcgccatgtcggctaactccaccgtcaacggcaccagaacgctgcacccggaggagttcgccgccgtcggctcgtgcgcgccgcagcgcctgctggcgtcgctccccgcgggtgccaccggcgtcgcggggttctcccggcggccgctctcgctgccgtcgcagctcgccgcgcagcgcaacttcggcaacaagttcgccctgtgcatgtcccagttcgcgacgttcggcgacgcgccggtgtacctggggatggagggccgaggcttcgtcgactacagggagatcctcccgtacaccccgctcctgacgaatccaagaatccccggctactacctccccgtcaaaggcatctccgtgtcatggagcgttcccgagacgccggcgtcgctgcccgccggcgcgctcgacctggacgcccgcactggccgcggcggcgtggtgctgagcacgacgacgccgtacacggtcatgcggcccgacgtgttccgcgcgttcgcggaggcgttcgacaccgccataatcaggaggagcaagtacacgtactccaacgtgacgcgccacccgcccgtgggacccttcaagctgtgctacaacggcgcgttcccgatgctgaagcggccggcgagcatggacattccgacgatccacctggagctggacggcgccacgggcacctggtcgtggttcaacgacaactacctggtgtttgcgccgggggcggcgttgtgcgtcggggttctcgagatgggtcccggcggcatgccggtggacggcgagccggcgatggtggtcggcgtgaagcagctggattggaacctgctggtgttcgatctggacaaaatgctgatgtggttcagtggggatctggcctttcgcttggcgggttgttcatattcttctcaaatcgggttataagatcgacctgatcagtgatcagtcactccgtcacggcctgaacgacgagttgtatgcttcagttcagaaactagtgttgaataagaatccgacagacttgatagtgcttc

SEQ ID NO: 6961 - DNA, 1343 bp, Oryza sativa
  ref <308>: DATABASE ACCESSION NUMBER: AK064092
  ref <309>: DATABASE ENTRY DATE: 2001-12-06
tggatggtggagcttacactgaaaaatgcgaagttgaagaaattgcttctgttgcagagtctggcatgcaccaagaagaacaagtattcaaggatgtgaaagaatgcgtgcaatctgaagctgaaacctgcactgagaaatgcagcaaggaccagcaatctgaagaaagcgtagtggtggttcagtctgaagaagaatggcaagaagagaacctcaaaattgttcttcctgagccagaaatgcaagatcaggagtacaaagatgtggaacctgtcaaagaattgcaggatcaggagtacaaatttctgcaacctgaagaagaagaagaacagcaagaacaagattctgaaaatgatgcacaacctgaagaacagttacaagagcaagattgtgacaatggcgtgcaacctgaagaagaagaagaatcgcaggagcacgagatgcgactgcaagaatcgcacgatgatcaggaggaggagttcaaggacgcggcggaccaagaatctccaagggaggatcccctccggccgtcgacgtcgatcgcgcggcgggtgcactcgcggacgtcgtcggagcacctcctcgtcgtcggcgaggggtcgccgcggaaggagaaggagtggaagcggacgttggcgtgcaagctctacgaggaacggatgcagctcaagctccgccgcgaccgcgccgtcgtcgagtcgtccagcgacaacatggacatgctctgggaggcctacgaggtcggcggcggcggcggcggcgccacctccaccaagggcggcgccagcaaggcgaaacgcaagcaagaacgggccaccgtcgaacgcaagcaagaacacgcgaccgccgacgaggaagacgacgacgacgacggcgacgaggaggaaggctcggtgaggcagctctgctgcctccaggctctcaagttctcgacgaggaagatgagcttcggcggcggcggcggcaagccgagcctggccaagatctccaaggtgctgaggagggtggccgcgttgtcgaggtccggatcgcggcgaagcaccaaaggttgaagaagaagaagaagaagaagaagaaacaccagcaatggcgatgaatccatccaatccactatggactcaatgcgttgcatcaaccagcaatggattgctcactgtatttgtgctcctttttaattgctcgaatttttcttctttttctttttctttttctttttcttttttgaagtttgtgtagatatatgatatatgtgtacccaatggtttcagagagattgggtctggtaattacagggctgtcactctggcatgctcaatgtaataaagcttaattgggtgtgtgtt

SEQ ID NO: 6962 - DNA, 608 bp, Oryza sativa
  ref <308>: DATABASE ACCESSION NUMBER: AK064093
  ref <309>: DATABASE ENTRY DATE: 2001-12-06
atcttcgattcctcctccccaaacgcaaggcactttccttctcctctctctctctcgacgcatcctccaacttgtgcacgtcttcctcctcgatctccatggccgagttccttcgccggccggagttttgtctgcccatgcacatatacacatcacgcggatcgaagatgggatgaacgtacgtggagcggtggaggtgcaaccggcaggcacggtggcatctcgatcgatctatcgatcgatgaggaggccacggtggcgtctcgatcgattcgcgacatgttcgccgagatctatcgatgaagaggccggatcccgaccgtgatgcgcgtgcgggcgtgcggcgtcctcggcggcgccgatatgctttgtggtcgggtatggatgttccgtctcaacgtcaacatatcgagctaattagtatttctttggacaataatggcgatggagatctgtgctgaagctttccctctctcaagattcccaacgctggagaaatcttactgcgcagactcgagagacaccgaacgctcgcacaacactaattggatcactgaagtgcatttttcaaaccgaggaagcaataaactttggatctctgaagtggc

SEQ ID NO: 6963 - DNA, 1302 bp, Oryza sativa
  ref <308>: DATABASE ACCESSION NUMBER: AK064094
  ref <309>: DATABASE ENTRY DATE: 2001-12-06
gtgcgcgccttcgtcgtcgtcgtcgtcggcggcggcggcatggcggacgacggagacggcgactgcgtgaacctggagcctttcttctacgacgaggcagcgaccgtggccgaggcggcggcggcggcggagaggcgggagcgggaggagcaggagaaggcgcgggaggcggcggcgaacgccaggagatgggcggcgcacaacgccgccctcgccggcatccgcgagtacgaccccgccgaggagacgtacatctacacccgctaccactacgcggacctgtccgagttcgacctcgacgaggagtcccgcctccctcccatgcgccacaccgccgccacctacgccccgccggcgcgagccctccacttcctctgcgatatgatcaacgtcctcgccgtccgcatcatcctcccctcctccgatcgctctgatggtggtggtgtcggcttccccatcagcgtctacagttctgtcatcgccagagaccagcttgattacaaatgtgtacatctcttccgccgctgcagagacgatcctcagctaatcacctcagaggatgaactgtcgttgatattgactgggcctcatcgaggacttgtgctgtatgacgctctgtacattgaggtcgatctcaagatgaaggtgaagggtgatcaacaacaaggctgcaaggacaagcgactcagtaaagggctgatagtgttggatggcgtactgctctcaacaaacttgagcgaccatttgcgtgctgcggttaaaaccgccactcttgataggagaagcaccatgccctgtgccgtgcaggtcacttacgcgtatgtcacgcgtgcagtggaggccaccgtctccgttgagcttctgcatgatcagggaggatgagctcatttctgtggggagatcactgcttgcaccagcactatccgagatagcattgtgctccatgatagcagattactagcagatgatggcattgtggctgatggatctactgtccggctattgcgccgcgtgattggcgtctgtttggatgaggtgctgatagtgacaattgttgctcaagatggtgaccttgcaaaggcaactaactactgcagacaaaccgttgattttacaccttgtgtcaatggtggagacgaagctcgagttgtgggtggtgtcggcagttttcttgtgaaggttatttggtcgttaatggacccagttattgacaagtagtttgttatctttatcatcacgaatgtaggcttttagttgtgtactgattgtctgcaatagttatgtactgttgagaggaaaaag

SEQ ID NO: 6964 - DNA, 987 bp, Oryza sativa
  ref <308>: DATABASE ACCESSION NUMBER: AK064095
  ref <309>: DATABASE ENTRY DATE: 2001-12-06
gactagggtttactcagtcaatcctcatccacgggtccttatccattctctccgctgccgtcgcctctcactctctcagatccaccgctgacgccgcctctcactctctcacatccaccgccgccgccttctccttgacgccgcccccgacgactccctccaagatccagcctccccgagcccggcggccatccacctcgtcctagccaccgtcgccctccttcaagccgtcgcctccacacctcccggttcaagatccggctgctccctgcctccccctccaacgccggctgccgttgacctcctacacgccgtcacctcccgaccaccaccgcctccctcaacacctcccggttcaagatctgggtgctgcctacctccccttcctcgacgccgccgcctcatcctcgacgccgccgccacctcctccctccaagatccagcctccccgagcccggcgccgcccaagaccggcgtccccgagcccccgtcgacctcctcaccgagcccaccaccgtccgaggtaggtattcctcaccgatgatgatgcataatatgatgatttattgtgtagatgttatatgtgatgatttgatgattcgatgataatgtttggattcgataatgtgatagtgcgattatttgttgattcaatgtttagatggtaatgtctatatatgatgacttgtgcatttttatatgtgttagctagtgatgatgaatttatatggctatgatgacttgtgcattttaatatgtgttagctagtgatgaatttttatatggttgtgatgacttgtgcatttttatatgtgttagctactgatgaatttttatatggctgtgatggatgaattatatgatttttgggggagaatggtatgttgggattaatgtttagatatgggctgtgatggatgaattattgtgggctatgatggatgaatggcagtgatgattgctcaagaacataccatttttgggatg

SEQ ID NO: 6965 - DNA, 1404 bp, Oryza sativa
  ref <308>: DATABASE ACCESSION NUMBER: AK064096
  ref <309>: DATABASE ENTRY DATE: 2001-12-06
agctctcatggccacgccgtcgatgccagcgccggcggccgaggcggcggcggcggcgactacggcgacggcgaactccatgcctctcgctccgccgcagccgccgtcctcgggggcgccgttctcccagcccccctcgacggcaggcaccgtcaagacggaggcccctccgccgccatccacctcgacttccttgaggaatgggggctgataaactatggagcttcgccgtcgggagcgaagcaggggagagataagaaagaggaggcagcgttatcgcagtcctctttgccgattggggcaacaatgcccagtaagctttgcaccgggtgccgcaccgtgtgcgggcttgcttatttctcttgtgagaaggcagatataagcctctgtgctagatgctatgtccgtgccaattaccggccaggtcttacttcggcagacttcaagcgaattgaaattactgaggacgcaaaatcagattggacagataaagaaactcttcaccttcttgaggccgtcctgcattatggggaagactggaaaaaggtttctcatcatgttggtagtcgatcagaaaaggactgcattgctagattcacccgattaccttttggggaacagttcatgggacccaaggaggacaaaattcagtttgggaatgattgtgatctcaatgaagaatctggatcacatatctcaaaacgactacgcctcacgccactggctgatgctagcaatccaatcatggcccaggttgcgttcttgtcagccattgttggttcagatgttgctgtagctgcagggcaagcagctatttctgcacagtcccaggttgatataagtgccagcgagactgattcttctatcaacatcagcaaggaagaagaatcttcttgcacaaatggtctttcagccaatgatttgctcaaagaggcgtctgccaacgcacaagtacaacttgaaaaggaacggaaggctatagagcagtctttatctgacatagtgggtgttcagatgaaggaaatccaggataaaatacgtcgtttcgagcagaaggagctgctgatggagaaagagaggaagcaactccactgcttgaaggaattgctcttttctgatcagctagctgttgtgcagcaccaacgcaggcccccggctgtcaccacagagagcaaggacgatgagaaaccgaagcccgttatcagcataagttgattctagccgagcttcgtcaattgacatggcattagtatgatacaatgcaatcctgtgatgtagcccgactttttgacagctttaggtagtagaatattcaaaaactgtgattagctgtagtatgattgtatgaatggtgtttgattaaactctttgcagtccagctaatgaaatggtgtgttcttgttg

SEQ ID NO: 6966 - DNA, 1759 bp, Oryza sativa
  ref <308>: DATABASE ACCESSION NUMBER: AK064097
  ref <309>: DATABASE ENTRY DATE: 2001-12-06
aagtcgccattcgtcttctctctctctctctccgcgccggcaaagcggccggtggcggcgccgacgagtcagcaagcggcagcgcggaagtcgacggccgcgagagtgggaggcggccggtcggtgatcgagtgcggaagtcttggtgaaggcccaccgcgtcgcgtccgtgtcctcctcgagccgcgtcgtcgtcgacctccttcaattccctcatggctcgcaacaaggaagcattggttttgctattggatgttggcccatccatgcatggcgttctgcaagaagttgagaatatctgctccacccttgtgcataagaagctagtttataataggagtgatgagatcggtgttgtcctttttggaactaaagaaacaagcaacgaactcgccaaggagcttgggggctataagcatgtggtggttgctcgtgatattaaagttgttgatgaagaaacaacaaatgctctgcaaaaccttccaaggggaacttcccctggtgactttttggatgctattgttgttggtttggatatgctgataagaaaatttggaaatatcaaaggaaaacagcgtatgtgtctagtcactgatgcacaacatccattaagagatccaccccaagggacaaaaaaggatcaggtggacactattgcagaccagatgaaaagacacgaaatcaagatggactgcattattttcagagaatctggagttcgtcacaatgctgtaatggatgaaaacgaccaattattataccacttcagagagaggtcagtaacaaaggtagttcatgttgacagcccaacgtcactcttaggtgctctcaggactagaaatgtacttccagttactgtcttcaggggagacttggaagtgagctctagctttaaaataaaggtgtgggtctataagaaaacatctgaggagaaattccccactttgaagaagtattctgataaggctcctgcaagtgataaatttgcatctcatgaagtcaaagtggattatgagtacaaaagtgttctagaaccagacacagtcgttccaccagatcaaagaattaaaggatatctttatggtccacaagttgttcctatatcatccgctgaatgggaagctgtcaagttcaaacctgagaaaggtgtgaagcttctaggttttacagatagatccagcatatctcggcactattttatgaaagatgtgttctcctttgttccggaaccaggaaacacaaaagcagttgctgccgtttctgccttagctagagcaatgagtgaaatgaacaaggttgcaattttacgatgcgtgtggaggcaaggtcaagggaatgttgctttgggtgtattgacaccaaacatatcatcagcaaaaaaaatgttctggattccttttacttcaatatacttccatttgctgaggacatcagagagtttcagtttcggtccttcagcagcctgccatcatcatctcagcctaccaaggaacagcaggaagctgcagataacctggtaaagatgttagatcttgcaccacctggaagggaagagatccttaagcctgatttcactccgaatcccatgttggagagattctacaggtaccttgatctcaagtcaaagcagccggatgcaaatgtcccacccctcgacaaatgtctaaagaagataactgaacctgatcctgatgtcattgattatcaagcaccgctaataaaaaaattaggcaatgtatttgagctgaaggagaacccc

SEQ ID NO: 6967 - DNA, 1334 bp, Oryza sativa
  ref <308>: DATABASE ACCESSION NUMBER: AK064098
  ref <309>: DATABASE ENTRY DATE: 2001-12-06
aagcattgacagatgatgagactatgctcaagctgcgatcatcaccagtaacagctgtgaggttcacaatgcttgcaatcacctggccatcagcatccgcgaccttgttgcagttgtccggattgtccatgatcttgttgaggattttcacaccgaaccaggtgaactccatgctcacagtcacatcgttgccagagttgtcagcagcaacgatcaacgatgacacgatcggcagcattgctgggaagctctcaaggagaaggtcccgagagagctccaagatgacgcctgcagcatgccctctggtattcacttccttccgggtgttgttcgtcagtcctagcatgctgaccacgccgccgaccgtgtcggcagaagctcggagcctcatgagcgccagcgctctgtacttgggcactctaaggatgctgtcaagaacaccgaccccgacgaggcgatccgcgatggagttggatcgcaccagctccatggcgaagctaaccaggtccatgttcatggcttcgcggacgttaccaccggagcatctcaggtaggtgacaagcatgtaatggctcaccatctgcttccccaaggggccgagctggtacgcctccgtgatcttgagcaccagctgaatgtcggcgacggtgaacatggcttgggctagcaagtcggaggcgccctgtacgagcaccaggccgtagaagaggttgagtgaacccttgatgctcttgtggtcgctgctgccctggtccgccggatcaacatagtcttgcttgctcaggcgcagcgcggcgaggacgacggaggcgacggcggcggagtacagcacgagcgcgaagcccatcagcaggagcttggcgaggaagaagccgcagctgcagcgcttggcgtagtatgacgcgaccttggctctcaagccttgtgctgtcacagacgacgacgacacctgccggttgatgcttatgtgtctttgccagcttccattctccatagcctcaaatctttcggtctctgccgccaccacttcaggagcattgaggatgaactgatcccttggatccacggcactgctgaaaagcctgccatttggaaagtgggattgcaaagtgcaagttagtgaggatccgtttaattcaccccggccttcttgttttgtacaaggcactatatgcgagagttgaagaaaggaagggacatgtgttgagttaatctcgttgtttatgttttcatcatgttcagtcaagtcctgtatggcggtctgagttcaaattggttagtgttttgtatggtgaggtgagctgatcagccgttagtgaaagcacaaaataagc

SEQ ID NO: 6968 - DNA, 1429 bp, Oryza sativa
  ref <308>: DATABASE ACCESSION NUMBER: AK064099
  ref <309>: DATABASE ENTRY DATE: 2001-12-06
aggtccaggtccaggcccaggcctcttgtgtcttgtaatgtaatctagggttttgctccttctctcatccagtagcggcggccggcggcgagggcagcggcggcggcatggcgaaccgcacggaccccctggcgaagagcatccacgggacgaaccctcagaacctggtggagaagatcgtccggtccaagatctaccagagcacctactggaaggagcagtgctttggcctcaccgccgagaccctcgtcgacaaggccatggagctcgaccacaccggcggcacctacggcggcaaccgcaagcccacccccttcctctgcctcgccctcaagatgctccagatccagcccgacaaggacatcgtcgtcgagttcatcaagaacgaggattacaagtatgtccgtgttcttggtgccttctaccttcgcctcactgccaccgtcgccgacgtctaccaatacctcgagccgctctacaacgactaccgcaagatcaggcacaagctcagtgatggaaagtttaccctgacccacgtcgacgggttcattgacgacctcctcaccaaggactactcctgcgatacggccctcccccgcatccagaaaagatgggttcttgaaacttctggaactctagaaccaagaagaagtgcacttgaagatgattttgaggaagaggaggaagacaaggaggatgaacaacctatggatatagatgagccaaatggtcgtgaaaagcatgatcattatcgtggaaggagccctactagagatcgagacagggagaggaaacatgaaagacaccacagggaccgagattacgacagagatcgggattatggtaggggacgggaaagagaccgagatagagaccgtgaaagagatagagacagggatagagatcgggatcgggatcgggatcgagaccgtcatcgcatacgagatgaggactacagtcgagatagggaccgagcaagagatagggatggcagggaaagagaacgctgggacagagaccgtgggaggcgcaggagccgttcaaggagcaggagcagggatcgacgagaaagagaccgagaagatggagagtaccgtaggaggcgtgatcggggtagtgccagtcctcgaggtcatgcggaggatggtggctcaagagatgagccgaagaagagaaaggaaaagaaagagaagaagggtgaaggaaatgcaccagatccaaatgacccagagattatagaaatgaacaagctccgagcctctctagggttgaaaccactgaagtagtaaccttgatgtaatgcacctgatgtttgagcgcctttagctttagcttgaaaccatgatttttctgacgacttaagcagtaccgcctgtcaaagagtacagcgtaggtgtaattacctgttgccatattattacttcgctgt

SEQ ID NO: 6969 - DNA, 1381 bp, Oryza sativa
  ref <308>: DATABASE ACCESSION NUMBER: AK064100
  ref <309>: DATABASE ENTRY DATE: 2001-12-06
agaggccgaaatccccaccgctcactccgaagtccaaaccctaggttactcatggtgcaagaagaacctaacatcaccacccccgacgccggccacccctccccgccatcccgcctcctctcgaagcaccgccctcgccgcggcgctgctgctccccgcgcgtccctgcatcctcctgctcccccgcacagccagcccaacctcaacctctgccactgctgcggtgtgcgcttcccgccggcgccgccgggggccaagcgccgaccggtccgccccctccggtccctctggcgcgtcgtcctcctctgcacggaatgcctctccctcgtccgctccgctgcagtttgctcctactgcctctccctcgacaacctcccgcccgaggactcctctgtcacttgccgatgctgcaaccgctgcgtccacccctactgtatcgcaggtgagcatcgcgccgccctaatccagcccatcgatgtggagaatttcatctgcgtcgattgctgcccgaccgtcaagccgggtggaaaaaatgggggcgcctcttccgtgcatatgctgcaggcagtcgccagggagccgaggaagggggatatcgtggctgaatcaaaagagaatgctgtgaggaaggctatggaaatgaagctggctttcaagcgtgcgaaggaagcgttggtctctgctgctggtggtaggggatctcagaggacggttggtggtaaaccagatttgccggatgaagagttggcgttgcagctacatctggcgatgaatgggtctcagaggttttcgcgtgccgggaacacatctggtggtgactcagccgagcagtgcaagggtcacaaaagtgtgattggtgggaagaatttttatggagatcaggaactttgtgttaccaatatgatggatcagcttgatgatgatgaagctggagtagaaccactgtgtcggatcaggaggccctctaggcggcgattggatccctcagtcactattgttcttgcgctagagtatgtggatggtaaacatgtcaaggagagtatgaaaggtaaaaggaaaggtcatcttgtgactaagaagcagaatgacttggtggatcgatataagagaaagtatagcaagtggaattcaaagaagcagacaaagaatgaaaaccctgaattcaaagacatctctggtggaaaagataaggatgatgagtgatggtggtaattacatagttcgcatgaaatataacttctctggaggtatgctaaaactttagcagaatttagttctttctgcttttattgattgtatcctgttcccttttccatttgttttttagtttttactctcccattcttctgttgtttaaactacaggaaaaaaattatgtgct

SEQ ID NO: 6970 - DNA, 1545 bp, Oryza sativa
  ref <308>: DATABASE ACCESSION NUMBER: AK064101
  ref <309>: DATABASE ENTRY DATE: 2001-12-06
acaaaatgcgatttgcgaagtaaaatcgacggcgacccaaaaagggaaaaatgccgcgcgaagaatatagggccaagcgccgccgtttgccggcggcggagccggacttcctggccggcctcccgccggagatcgtcgacgacatcatctcccgcctcgacatacgcgacgtcgtccgcacctccgccctctcccgcgcctggcgccgccgctgggagtccgtccgcggcctcgacctcagcttcagatcctccgcccccgccgccgccatctcctccgtcctgaagcgcgccgccgcgccggtccgcgggctcggcctccgagtccccggtcgccggttccgccgcgccgtccactggctccgcctcctcccccgcaagcgcgtccagtccctcgacctccacttcgagttcgtgttcggcgagaagcccagcctcgaccccagcatcctctcctgcctggagctcaccacgctggtcctcgggggctgcatcttcccgccgtcgccgccgccgccgtcgtttgtggggttcccggagttgaccaagctgtccctctccgagatcgacctcccgcgccacggggggaggcggctggaggcgatgatcgccgcgtcgccgcttctcgtcgagctgtctctctcgaacgtgcgcagcctccatcactgggagaggtggttcatccggggaccaaacctccggtccgtttggatctggacggattacgattatggctgcaggataggggagctcccgcggctagagcacgccatcgtcttcgcgtcggccatcaagactgaagttttgtgcaaaattctggaagggattagtcatgcggagactcttggattcgatgcaattacagaccagttcaatggtaacccaccggagaggttttcattcacttttcagaacttgaggtcgttggacctgcatgcttgtctagatcaaatctcaagtacttcttgggtcttttgcatacttagaagtgccccgaacctggaaacacttgaaatcgaggttgattgtgatgatgatgaagtggatgctggatctgtcgaaggattcgcaaacgcacaagcaagtgatgacattttccctagacttcgagatgtctggttacatagtattgactgctcctcaaatgagatgtgcttcatcaagtttgtcctatccaaagcaagatcgctagaactgttctctgttcgtgtcacctccagtaggttatcttatcaggaggcatgcatagagatggcaaaatacaaaagagcatcgccgttagctaagctcagactcatccgtggatgactggctagcttgactttgcagagcacctgaacttctcatgctttttcatcccattgtttgtattcagtgaaagatatctctgttgaactgtgtggatgttgaatttccatcaggcaacatgcatgacatctgcaatagtgtgcctatgtaggtaatgcatactgcttgcctatatattttgatgaagtttaaataatgccttcccattgttattaattcccgaatgaggattcaatcc

SEQ ID NO: 6971 - DNA, 1722 bp, Oryza sativa
  ref <308>: DATABASE ACCESSION NUMBER: AK064102
  ref <309>: DATABASE ENTRY DATE: 2001-12-06
attcccccccaaacctttaccaaacccaacaacaacgaccaatccactccacgtctccaccccagttccaccaccaccgccgccgccgcaaaacccggggcgcgagcccgggcggagcggccgtcggtgcagatcttggtggtagtagcaaatattcaaatgagaactttgaaggccgaagaggagaaaggttccatgtgaacggcacttgcacatgggtaagccgatcctaagggacggggtaaccccggcagagagcgcgaccacgcgcgtgccccgaaagggaatcgggttaagatttcccgagccgggacgtggcggttgacggcgacgttaggaaggccggatcgtcgctaggtgttccgcgccgccatgttgtacccggagcggccgagccgcgtcaacgggacggccaccgtcgactgctcggcctacccgctcgactgccacccggtctgcccaggcggcagctgctacgagatcgccgagcccccgccgccgtcgccggtggtcccgcgcgtcgacgtggccgtcgacgaccaccacctccccgtacgcctcctcctcaccgtctcactcctctccgccttcctgttcatctcgctctctgtctccacgatcctgctctaccgccgccgcgtcgtcctgcgccgccggcgccgggccgcgaccgcgccgctccccggcgacgacgggtacggcgacggggatgaggaggcggggggcggcggcggggatgtgcaccacgtgtggtacatccgcacggtggggctggacgaggccaccatcacgtccatagccaccgcggagtaccgcgccggagttgggtggggaggggactgcgcggtgtgcctcggcgagttccgcgacggggagttggtccgcctcctcccgcgctgctcgcatccgttccatgcgccttgcatcgacacctggctccgcgcacacgtcaactgcccgctctgcagatccccagtcgtcgttccctccgatctccccgccacggctaccgaaggtgaggcggagggtggtgggcaagcggaagagcaccaggtgtttgatgaaatctcgctatcggaatcacgtgccgatgtctccgaggattctgacacctcttcggacactcaaagtgaggacacagcagcttcaccagaggatggtgggagggtgatgcccaagccaatacggcgctcggcgtccatggactcaccgttattcctggtggttgtgcctgaagcgcaggacgatgccatgcggggtgatcgaaaatttccgaatggtcaagagatgaagttattcagcgtgaaagagaaggatgcaacagggacgtcttcttcctcttgtcaggcagggcggtttgggattggcagatcgatgtcgagcagtgggcaggggttcttcttctcacggaatgggcgctccagtagtgctgtgttaccactgtgagttggcatgattttgctgtcaaagggagttgcagcctcagcaaagctgggagctggtagtgtgtcatgtcttttgatagaaagcgtataccagataaccagagagctgaagtagctcttggagaaaatctccttctgagacaaatgagttgacaattgtaactgtggaggtgataagtacttcttgagttgatgagctcgtgtaaatttgtacctcccaggttgcctgtatcatagttttgagcttgggatctagtgaatttgaaggaacaaactc

SEQ ID NO: 6972 - DNA, 1505 bp, Oryza sativa
  ref <308>: DATABASE ACCESSION NUMBER: AK064103
  ref <309>: DATABASE ENTRY DATE: 2001-12-06
aaaaacacacacgccagtcgccgccggcttttgcttcctccgcctccgcctcgcgatggtaaccacccaccacctctgcctcctccggtcgaccgtcctctccgttcccgtccgcctccgtgcaccccgggctccccctcacccccgcctgcccaccgcctccgcctccgcctcctcctatcatgggccaacgcacctccgccgcctgcggccactgcgcgccgccgccgccgctgccggaggagcctcgccggatggcgctgatggggccaagcgccccgcgcccgcggcggcgtcttcctcgctgggagccgcgctggtcggcttcgcgcgtagcaacttcctcccgctagctctaattgctgggattgctctggccctcatggatcctacactcggatgccttgctcacaaatattcactgtcaaagtacagcaccttcgggatattccttatctcaggactgactctgcgaaccaaggaacttggtgcagcactagaagcttggcctgcagggctttttggacttgcctcaatcttgctgtttacaccctttttggctcagtttattatgcaaattaagttcttccctcatgaatttatcactgggttggctatgttttgttgcatgccaacaacattatcaagtggagtcaccttaactcagcttgttggtggtaacactgctcttgctctcgcaatgacggctatgtcaaacttactgggcattatgattgtacctctttctcttgcaaagtacattggtgttggagctggggtgtctttgcccacagagaaactatttaaaagtctggttacaacccttcttatccccattattttaggaaaggttgctcgagaaacatcaaaaggtattgctggctttgttgatggaaataagcagggcttttcagttacaagtgctattcttctcagcttagtcccatggatacaagtaagcagatcaagatcactgctcttatctgttcaaccaaaagcctttgctgttgctgtcactgttggagtgcttttgcactttgctctgttggctttcaatgctgcagcattgcatatcttgtcacgtcttgaacaaagaggagtgtctgtctttgcaaggaatgagtatgctcgagctgtcattttagtggccagtcagaaaacattgccagtgctggttgccgtggttgagcagcttggaggtgctctcggagaatcagggttgctggtaatcccatgtgttgctgcacatattaaccagattattatcgactctatcatagtaaattggtggcgccaaagagatcaacaatttgctaatgcaaaataaattcaaaatgggtaaaacaaaaaaataagtagcaagtaacatagaatcgtttggcaacgatgccctttgagtttaccgcatattagttttttatgattccgtaggaaacaacaatgaaactatttttgtgtagaaagttcattgagttgcttccatggagcactttctgttatgcatc

SEQ ID NO: 6973 - DNA, 793 bp, Oryza sativa
  ref <308>: DATABASE ACCESSION NUMBER: AK064104
  ref <309>: DATABASE ENTRY DATE: 2001-12-06
ccctaccggtgcacttctccccccttccccaaccagcgacgcctctcagcgcccctcccccatcagtgacacctcttggcgcccctccccaccggtggcgcccaacagacagcgacggcagcggcccagcggtagcggcgatgacgcctttctcccccgcaagcggacagcagcggtacccttcctcctgcgagaggcggcgacggcggcagcggcgccctgccctcccgcaagcggcggcggcggcaccttccctcgcagcgagcgggggcggtggtggcgcctctccctctccccatcgccggccccttctctcctcgtcgggcggtggccactgccccgctcctcgccagatccgacgccggttccttctctccttgtcgtgtggtggccgccaccctgttcctcgccagattcggcgggccgatggcgaggtggcgaggatcagcgtgcggcagcctccggttcgccccgccctctcctatcaccatctcgtgttaatattttggatgtttttttgatgattccgatttagatttggactcggattttatttttgatttggattgtgatgatttgagatttggagagaaggtgttctcaatgtgggattctatttgtgtgatgatggaattctgattgagatttttttttggggggggggacagatgaaaaatcaccgtacgtacgaggtgacgaaaggaaagtcatggatgttttaattagttaagatgtagttatatgtccgatccaaaatgtgattcccttgataataaagtcttgtactatagag

SEQ ID NO: 6974 - DNA, 1662 bp, Oryza sativa
  ref <308>: DATABASE ACCESSION NUMBER: AK064105
  ref <309>: DATABASE ENTRY DATE: 2001-12-06
aacacgtttggcctgaccgcggcgccgagcgtccgtccgtctgcacgccggaggagaagacacacggcgatgagctcctgcgaggcgaggcgggcgcacgcggtgctcatcccgcagccggcgcagggccacgtcacgcccatgctgcacctcgccaaggcgctgcacgccagggggttcttcgtcacctacgtcaactccgagtacaaccaccgccgcctgctccggtccagcggccctggcgcgctggccggcgccgcgggcttccgtttcgaggccgtgccggacggcatgccggagtccggcaacgacgacgtcacgcaggacatcgccgcgctctgcgtgtccaccaccaggcacagcgccgagccgttcagggagctgttggtgaggctgaacagcacgcccgggacgccgccggtgagctgcgtcatagccgacggcgtgatgagcttcgtgcagagggtcgccgaggagatgggcatcctggccttggtgttctggactacgagcgcttgcggcttcatgggttacctccacttcgccgagctcatcagacgaggctatgtgccactcaaagacgagagtgacctgacgaacggatacctggacactccgatcgactggatccccgggatgcgaggcatccgtctcaaggacgtgccaagtttcatcagaacgaccgatccggacgacgtcatgctcaatttcgacggcggcgaggctcagaacgcgcgcaaggcccgggggctcatcctcaacacgtacgacgcgctggagcaagacgtcgtcgacgcgctgcgccgcgagttcccgcgtgtgtacaccgtcggcccgctcccggcgttcgccaaggccgccgccggcgaggtgggcgcgatcggcggcaacctctggaaggaggacacgggctgcctccggtggctggacgcccagcagcctggctccgtcgtgtacgtcaacttcggcagcatcaccgtcatgtcgccggctcatctggccgagttcgcgtggggcctagcttgctgcggccggccgttcttgtgggtcatcaggccggacctcgtctccggcgagaaggccatgctgccggaggagttcgtcggcgagaccaaagagaggggcgttctggcgagttggtgcccgcaagagctcgtcctctcgcacccgtccgtcggcctgttcctgacgcactgcgggtggaactcgacgctggagagcatatgcgccggcgttccgatgatctgctggccgttcttcgccgagcagccgacgaactgccggtacgtgtgcgacaagtggggggttgggatggagatcgacagcaacgtgagcagaacggaggtggcgcggctcgtgcgcgaggcgatggagggggagagaggcaaggccatgcgagtgaacgccatggtgtggaaggagaaagccaaggaggcgacagaggaaggaggttcgtcgagcagaaatctggaccgtctgatcgaattcttgcattcttctgggagtgacgctcgctgagttcatattatcatatcacaaattatcttgtgcgtgctttccgctcatctagtggcactgagaaatgcagtgcaaataattggtcagtcaaaattcccgttcgtgtcagagtataacatggaaggatacggagtttgctagcac

SEQ ID NO: 6975 - DNA, 714 bp, Oryza sativa
  ref <308>: DATABASE ACCESSION NUMBER: AK064106
  ref <309>: DATABASE ENTRY DATE: 2001-12-06
gatctcctcctcctcctcctgcgtggctgcgtctcgcctgggacaagaagaagaagaagaagaagaatcggaggaagaagggggcaagctaggatgctgcggaagggagaggcgccggggcaccaaaccccaccccacctgcacaaggacgacggcgacgacgacgacgacgcaccgtccggcttcgtcaagctcatcagcgccgagggcttcgagttcgtcgtcgacaagaaggccgccatggtctccaacacgctccgcaacatgctcacctcccccggcggcttctccgagacgcgcgagggcgaggttaggttccccgagatcagcacccccatcctcgagaagatctgccagtacttctactggtcgctccactactccagtgggaaggagacatctgagtttcaaattgaaccggagataactctggagctgatgatggctgcaaactatctggacacctgatgagatgaggtggaagtgttttagcaggttttttttgttgttgataaggaagcaatcccttggtgtgcatccccatttgagtgatgtaaacattagaggattgtaactgttgtgttgtgttgtaatatgattatgtgggtgcttatggaggtatccctgagactttggatggcaaaggccttttgtgtgcacaaacgggtttgttacattacaggaatggacattcaagttgggggccggcttggt

SEQ ID NO: 6976 - DNA, 1488 bp, Oryza sativa
  ref <308>: DATABASE ACCESSION NUMBER: AK064107
  ref <309>: DATABASE ENTRY DATE: 2001-12-06
acctctccccatccgaacccccaatttttcttggctagatttggcgcgagatgtcttgcctctctcgcctcaacgcctcggcggcgccatgggagccgccggtggcacgcgccatggccgtcgagcagtactgcccgccgccacagtccttgctcccgccgccgccgctgccgccggtcgccgttcccaccacctgcggttgcgccgcctgcctccagggctgcttcgttccggtgggggttcaagctgcccccgcacgccgctgctgggtgcgcgccgccgccgccggtgatgccggtgatgatagtgtaccgcgtcgtgcagcctccgccgccggcagctcacgccacgcgctgccagatcacggagatcgaggacggcggcggcgtggagaccgcgaaagctgtggacggcgacgagccgcagccgttcatccgcacggtgcgcagcactcgtcgcagaaaggcggcggcgatccgccttcccaaggcttttcgagcggcgcttttgccgccaccgccgccgccatgcgcgttggggttcacagctactactacctccttgatgataaggaacatccccaataagttcctgaaggcgaggctgatggctatcctggaccagcactgcgccgacgagaacggcaagtgtcaccgccgcggcggcggcggcggccgcagcgtcgtgaagtctgaatacgacttcttctacgtacccatcgacttcaagactgggttcaacaaggggtacgccttcgtcaacatgacgacggcgaccgcggcgcggcggctccgcgcgttcctccaggaccaccgctgggacgccgccatgtccggcaaggtctgcgacgtcgtgcccgccgccatccaggggctcgacgcgttcgtggcgcacttctcggcgtcgtgcttcccctgccgcaccaaggagttcctgccggtgtggttcgagccgccgcgcgacggcgagcagcagacgaaggcgcacgtggtcggccgcctcgtcgtgcgcccacgctagctggtcgtcgtcgtcggcgtcgtctccggcgacggcgtgggttgcgcatggtatctatcttgcattctatccctaccgattgtccaaatcgatcaatggatgcatggaaggatagaacgggagatagattcatatagagaggctggcttggcttggttgttcgtagtctttccttgttcgtttctactgtagtagtagcagatagaactactagttctgccgttgttgtgttgtaatcatatgtgtagtggctgttatgtttgagccgatcgataatccttcgttgttgtgtgttgttaacttaactctactagtactaagtaccgcgtcctccgaccaataatccgagtatttgctatggcaatgcccggttgatgtcctactaaccacaacgaaagttgtgctaaatggaatgtgcggcttaaactatgaaggatttggttttagataatttttggttatgtattt

SEQ ID NO: 6977 - DNA, 654 bp, Oryza sativa
  ref <308>: DATABASE ACCESSION NUMBER: AK064108
  ref <309>: DATABASE ENTRY DATE: 2001-12-06
gaaaacccttgctcccacaggagtgaacacgacgcgacccgagccggagaaggggaagggaaggcggcggcggcggcggcggaggaggaggaggcgcgaggggaggcgagcatggtggtgcggatccggctggcgcggttcggctgccggaaccggccgttctaccgggtgatggccgccgacagccgctccccgcgcgacggcaagcacctcgaggtcctcggctactacaacccgctccccgggaaggatggtggcaagaggatggggctgaaattcgacagggtcaagtactggctgtctgttggtgctcagccatcagatcctgtgcagcgcatcctttttcgagctgggcttctgcctccacctccaatgctagctatggctcgaaagggtggacctcgtgataggcgcccaattcatccgatgactgggcgccccttggatcttgagggtgtcacggttgttgatgactccaatgttcccgaaggtggtgctgaggaacctgtgtcagaggagtgatgctgcagtaggtctccacttgtttgttgtgcctctgataagatcatgtgtactgtacaatatggaaacttcctaatcatgtaatcttccattgttttctaataatttacaaggtcgtagtgctgcactatg

SEQ ID NO: 6978 - DNA, 1483 bp, Oryza sativa
  ref <308>: DATABASE ACCESSION NUMBER: AK064109
  ref <309>: DATABASE ENTRY DATE: 2001-12-06
ctcaacagatccaacaacaacaactagtctcagtcatgccgcctctcttctccgcgccggcgctccaccgccgccgccttctccgccacgccgccgcattcgcccttgtgctcctcgccgtcgccctcctcttcctcctcctcgtacacccccgctcgctcggcaccccttccccttccccgtcctacggccaccgcctccccacgctcgtcgacctcaccctagtccacggcgccaaggagaagggcgctgtctgcctcgacgggaccccgcctgggtaccactggctgccaggcttcggcgacggatctaacaaatggctcctccacctagagggcgggagctggtgcaggaatcgcacgtcctgtgatcatcgcaagaaaaccagtcttggctcatctgcttacatggaaacccgggtcgagttcgtcggcatcctgagcgacgacaaggcccagaacccagatttttacaactggaacaaggtcaagatcaggtattgtgatggtgcctccttatctggaaatgtccaagatgaacaccagtatggcgccactttcttcttcagaggccagcgcatctgggaggccgtcatggctgaacttctacccaagggtctagcccgtgctaaacaggcttttcttacaggatgctctgcaggtggtctatccacatacattcactgtgatgatttccgtgcacttttaccaaaggattctactgttaagtgtcttgcagatggtggtttttttcttgacgtggaagacatttctgggagaaggtatatgcggggcttctataatgatgttgctcgtcaacaggatttgcggaaacggttccctggttgtagttcagatatggaaccagggcagtgctttttcccacaagaagtggcgaaaggcatcaccaccccaatgtttattctcaatccagcatatgatgtttggcaggtagagcatgtcttgactccagacggatctgaccctcaaaatctgtggcaagattgcagaatggatattaccaagtgtaatacgaaacagcttgaaattctacaaggttttagaaaatcactgcttgatgctataagtgaattcaagaagaaaaggggctggggcatgttcattgattcatgctttatacattgccaatccatgaagtctttggcttggcactccccatctgcttcgagaataaacaataagactgtggctgaagcggtgggcgactggttctttgatcggagagaggtgaaggaaatagactgtgaatatccgtgcaacccaacatgcttcaatgttgttcttgaacaaccctatcaggaaggctgacatgtggttcttcgccgttgtagtttaccgatgatttgaagcagaatatacccacccctatggggctctcagatacagtatgtccagttgaatgggacacacactagtagtagtgcacctcttgaggaccgttcaaacatagaaatattgacaag

SEQ ID NO: 6979 - DNA, 1627 bp, Oryza sativa
  ref <308>: DATABASE ACCESSION NUMBER: AK064110
  ref <309>: DATABASE ENTRY DATE: 2001-12-06
cattatccaaacatggccgagctcgagtgagcgagcatgaagctagagccacagctggcgatcacgatggagttgggtcgtagcagcgatcctaacatttccctgcagtcacggagacacagctacctgcaggagatccggagcttggccgtcgactcggccggcgggtggtcgccgtcgtcgtcgtctcggtcggcgagatccagtagttactacagcagcagtaagtcaagcagctctcgtcatcgctacgccccttactccatctcatcttcccggaggttggcaagacttgaagacaaaagccctcgcgacattgcgcggcggatggtccgcgacggcttcatgggcaagctgatcggggagttcggccgggcgcccagacctgctctggagaggtggttctccgagctcgacgtcggctgggtactccggtcggcgctggagaaggagaagagcgagctggccttggataagctgtacgatcttgccgtgcagaggtggacacgaggattcaccgtgatggccgaagcgctcagcgccacgcagcgccatctccaggaagagggccgttcgaccgcccaagtcgaccgggacgacgaccttcgactggtgcggttcgttgaggcgaccgtctgcaagatgcttgcctttgccaattccctagtcgccgtggccgataaaacctggaatccaatgaacaagctctcgggcctcatgaacgtgcgcagctgcatctcccacgcgtctgaaatcatcatgctctccttgaagaaggagaccctctggctaccagattcggacgaaatgctgcaaggcctgctcaacaagaccagcaatattttctcgactgcaaaagataatttgggtcaggccatacaaaggatggcaaacgatgctgaagctgttactcctgtcttgagtggcatgcattcctgggaaactttcccgcagagtgcagaaatccacaaggctactcacttaattatggactatgcaagactattttggggacacattgacgagctcaactccatactaggccaatgttggcctcatcgcatcctaaaatgcgacatcattgagcaaatgatcagcaacttaatagatcatctggagaagaaatcagagtcgttctcagaccctatcctgagctagcaagattcaaatcggaatttcagagaacatgcagacatcagaagctatggaaggttccgaaccctgagctcaggaggagcctgcgaaaagctatcattgacaaggttattactggtcctactggatacagaacatacctggaggcccatccagagcaggagaaatgtggcagtaatcaacaggacatggaagacatggtgaacgagcttttcgaaggatgaaggattattccagcttcatattggcatgcccatttatatatagagtataaattttaaagcagctacgacgagaagaggccaagactaaacaagttcagacgatgctcgtttttactgtactttgatattctcctcgttctatcccttttttaagatatcctcaattttaccttactgcaaataaaatgtattggacggcttctttgtgccacatctatcggcagacaaagatacatgattcctcttgt

SEQ ID NO: 6980 - DNA, 1405 bp, Oryza sativa
  ref <308>: DATABASE ACCESSION NUMBER: AK064111
  ref <309>: DATABASE ENTRY DATE: 2001-12-06
ctgtcacaacgggataaactggataagatctctgccttatctccttcccttcccctccacaaactcactcactctctctctctggataaggccgagaaggctgagaagaagccagccagaaggaagggatcgtcgtcgtcgtcttcggcggccgaggaggacgacgacggcacggcgtcggtgaggtcagggggcgtcgggggtgatctcgccgcacttcctcgacgccgtcctccgcccgctgcggcgccgcctccgcgcgcacgctccccgtcactgccggcgccggggctgctgccctcctccctcgcgctcctcgccaaggtctccatcgcctgcttctcatgagccacttgtgccgccgtccttgcccgctgctcctgccgcctccttgccggtgagcgcaggtggatcctccgctgccactgtagaagcagaagaagccggcggtcccggtgcctcggctgccgcaacgccggcgacaacctgctctagaacctctacctcctcttctttgccatcaacttgaagatgaagttgctgcagcgcgtgttcttggagatggtcaccgttgacttccggccggacctcaccaccttcagcgtctgcgccacagccttctccatcaggcatcagtcgtcgtgatacctcagtattaggcctggtatccacaagtatcaggcctggtacaagattacttagtgtcaagcgctcttcgtcgatgtcgacgctatcctcctctcatcagtgttatgtgcaggtacggactgatacctaggtatcaagcttggtaccaagtactaggggtatggtacctcaagggtatcatgcctggtacctaagtaccatccagtatccatgggtaccatgtgcatggtattaggtaccagatacctataattatcaggtaccacatggtacctgatacctattgtacctgatacctcgagggtatcatgcatggtacctaggtaccatccatgggtatctgttaacagtgaaatttggtaagcccagagtagtcatcggcttagagtcagcatcggcttcgaagtcctgagattagccgatgagagttgtcaagtcgtcagttgtcggattcttgctatattcggttaaggaaattgatctactaaaggaagcttatccaaaagagaccgagttcaaagagaatgcggcatggcaagttatctattaattaggaatagtttgttagtttccttttatctttaggaaagtgtgtttagtgtcctataaggactttatcttttccttttatctttaggaaagtttctttcttgtccgacaaggacttgtatcaacccatgggtataaatatgtacacctggggtctatgtaatctatcttcacgatcaatacaattcggcgcatcgccacccttttt

SEQ ID NO: 6981 - DNA, 1074 bp, Oryza sativa
  ref <308>: DATABASE ACCESSION NUMBER: AK064112
  ref <309>: DATABASE ENTRY DATE: 2001-12-06
agggaaggttgcagaaaaaccccacgctccgccgctaccgcgatggtcgctccgacgaccaccaccccgcctcctcctccgccgccgccgtcagagtccacgcctaccagcgacccaaagcccccgcctccgccgccgacgtcttcgaccgcggcaccgaagaagcggaagctggaggaggtggggtttcatcactcaccctactacaacatcagagcagccgtcgccaacctccgcggccgcttcattcagttatgcaaaggcactgatacccaaaagaaagatgccgctcttgagatcctgaaagagataaaagttctcatggaattatccaaggaaatgcgacttgatctcccaactgcagctgggcctgtaaaactgatggatgagcctacatcaagagatgccagaaatatgcctgcagggaaaatcccacccggagagaagaatcaagttcgtccagcagaccaggctgcatcctttatgcatagttctggtgagaaggtaccactcaatcctgtggacattaagcatgatgccaaaccgagtgtaacagattctacaaagaaatcaggacaatgtttgcaaggatcttatattgtcggtggatctcccattggctggaatttccttatgtggcctggaagtagcacaaggtactgtggtttaaccagatcagagtggttggcacgtcaatctgcaaaatgaaatgccacgatcctaccccccagcaatctaacaagtaaaggcagtcaaactaataccgtactttcagatattcctgggacaatagcacaattatttgctggtagccgatccgatattattaagcagcggatgacacctcagaatgatatatatgacatggtaaggcatggtagtatcaatagaaagcaacttttgaatgcttttgatcgctccctacaggatcaatcaccactagatatcatgtttttcttgtagtaaactgtatgagccaagcgctcttgctatgtttttctgttcagaaatggaaaaatcaagtaatgtaagcgcatggcaacgctgatatagtgatgtatgctcttgcttaac

SEQ ID NO: 6982 - DNA, 449 bp, Oryza sativa
  ref <308>: DATABASE ACCESSION NUMBER: AK064113
  ref <309>: DATABASE ENTRY DATE: 2001-12-06
attcattcagagcaacagaaaagatcaaggtgaacacatcagagagctagatcatcagcagatcgatcaagaaaaaacacatttcgtcatcgatctgcaggacgaacagtatgccgagtgttcaggagatcagcgtccacagggtggccaagatcgagccgacgacgccgacgacggtggcgaacgcggtgaagacgccggcgccgcctgcaggcggcggcattgacgcggcagcggcggggtacatcgccaagatgaagcggcggtgggcggcggagtcggcggcggcggcggctgcatcgtcgtcgtcgtcgactcgtgctactgcgaaaaagcgttagagattaaggaaatcaaggattatattgcatgcaacacatagatctacatgcatggatggatgaaagttaattagtttttggtgttaattttcattgacaggttgtttc

SEQ ID NO: 6983 - DNA, 1519 bp, Oryza sativa
  ref <308>: DATABASE ACCESSION NUMBER: AK064114
  ref <309>: DATABASE ENTRY DATE: 2001-12-06
aaaaacacacaagtcaatctcccgattccacctccgtaatccccgctaccgccgtggtcggagccgccgagcgccgccgtcgcgcctccctccaccgtcttcccacgccgccgcgcgacggctgcggcggtcgtcttccccattcgtcccatcgatcctcctccggctcagttccacagaagcgccacctcatcacgaaggcaattttacagttcgaacattaggaagcatgagctatttccaggctacaacatacaagcctcataatgggatcattgtggacaaggtagcaataggtcttgggagtacttgcaaattgcttcatgaaagggccaaatgttcgtattccaatagattcatcaagcttcaagagcaagtatacccaaggcttcttcttgttgctgcttgccataacaggattggtcctgtgtatgcctcaagtgggaaaggaaactctgagcgtgtcaatgatcccttctccatggaatctttgaacaaagctatagctggaactaaaaagcaatggcccatacaagatatgctgatagatcaaatttctaagattagagggtctggctctggtggaaatggtggtggtaataaaaacagtcatgaaggcagaggtggtggctcagaggacgaatctttgacggagtcattatatgaaatggtccaagttttgttggcaactattgcctttatactcatgtacatccatataataagaggagaggagttataccgccttgcgagggactacactagatacctggttactggtaagagaacttccagactgaaacgcgccatgttaaactggcacaatttctgtgagggcatcaccaacaaggatagcgtgcaagagtcaacatttgaaagatcaacttctgaaccaatgtggtggcagcagcccctaaagtttgtccatcgcattgaggaactttacagaggctattttcgcccacatgcccaggaatcatagttctgatgattgaggatccctttggactcttctcaagatttcagtgtatgttgtaaccgtgcataggtaggcactagttgcatggacggtgcagtgaagcgcatggaggaaactagacggtctgttctttactgcattcagtttttcttgcgtagtgcagctgaatactacgttatatattgtctgtattgttcattacagaacataaaggaaggtgatagttcgtctggacaattttgccgtttttgaaacctcgctgctatgatgtgatcgtctgccggtcagttaggtgcaggtgacaacttgaatgctgcatctgattcatcataactacaaagagtaccagctatacccaatgaatgcagcaaaaaatgtacctgtaagctgtggtcactgtaagctttgtaaattttgtgttctatgttttgtccaactccccatgttggttctttgttggcctatctgagctatctagagtgatttatgggagcaactatttcttccaacctggaacatgaaacatccatctttgtcatt

SEQ ID NO: 6984 - DNA, 2602 bp, Oryza sativa
  ref <308>: DATABASE ACCESSION NUMBER: AK064115
  ref <309>: DATABASE ENTRY DATE: 2001-12-06
ggactttttcacgcgacctgccatgtctgtgcttctgcttctcttcttgccgctcgccgccgcccaaccatggcaagtatgccaagacagccggggcaaatacacatcaaacagcacctaccaagccaacatccaatcgctgtcgtccacgctccccgcgaaagccgccgcgcccagcaccggcctcttcgccacccgcgtcgccggaaatgccccagacaccgtgtacgcccttgccttctgccgcggggacatcaccaacgcctccgcctgcgcaggctgcgtggcatccggtttccaggacgcgcagcagctgtgcccgttcaacaaggctgcctccctgtactacgatctctgcctcctccgcttcgccgatgaaaacttcctcgccaccaacaacagcgatgtagtcatgctgatgaactcacagaacttcacggcgagcgtcggctcggtccgcctcctcctcttcacgctgctgaacgccacagccgagtcggcagcgagcagctcgaggaggttcaccacctcgcggttggacgtcagctccctccccacgctgtactgccttatgcagtgcacgcctgacctgacggccggagagtgcgcggcctgcttcgaggatttcccgcggttgacgctccagtacctcgacggtgcgcgaggcggaaggattctcgcgacacgctgcaccatgaggtacgagatctacccgttctactcaggtgacacgatgctgcgtatcatcaacttggcaaccacggtgcccgagatgaacaccacggcaccaactactccggtcaccgtgtatccgcagccagcggggccaggtggtgcgagcgcgccaccaccgccgcagccaaaccccggcatcccggaacaggcacagcgctcgccctatcacaagagtaaggtgtggatcgttgctattgttgctccactactggcaattctgttttgtttcatgctttccattgtatggatcagaagaggtagaaaaggagaggtaaacatgcagaacaatattgctgcagtaaataggctggaagaagacgcacttgtttggagattggaagagaggagttcagagttctctctttttgaattttctgagttgctggaggctacagacaacttcgcagcagagaacaggcttggacaaggaggctttggccctgtatacaagggtcaattgcatgatggggtggaagttgcagttaaaaggcttgcttcacaatcaggacagggtttcactgagttcaaaaatgaagttgaacttatagctaaactacaacacacaaatcttgttaggctgctgggatgctgcattcagggagaggagaaaatattggtgtatgaatatttgccaaacaaaagcttagatttctttatctttgatgtcgacaaaaccagtttaattgactggaataaacgttgcggaataattgaagggatagctcaaggtcttctttacttgcacaagcactctcggctccgtgtcatacacagagaccttaaagccagcaacattcttttggaccaggacatgaatcctaaaatatctgattttgggctagcaaaaatttttagctctaataataccgaaggaaacacaaagagggtggtgggaacatatggttacatgtcaccagagtatgcctctgaaggtatctactcgatcaaatctgatgtgtttagctttggtgttcttcttcttgagatacttagcggaaaaaggaattctggtttccaccaatacggagattttcttaacctcctaggctatgcatggcatatgtgggaagaagggagatggcttgatataataggagcgtcaattcctcagacgatccctacagaagggttgaggaagtacatcaacattgcgcttatgtgcgtgcaagagaacgcagatgatcgaccgaccatgtcagatgtcgtagcgatgctaagtagcgagagtgcggttcttcctgaacctaagcacccggcatactacaacctaagggtatcaaaagtacagggatctactaatgttgttcaatcaatcagtgtgaatgatgtaactatcacttccaacccagagggtagatagctggtacctttgggtctcatttccagctctccatatctctcgtataacagcatcaaggcatcaattgtaataatgaaggtatgtggatgcagttgtcgtggcagccgatctcatccagtcttatttgcagacagtggcggatccagaaaatcgattcgttggtgttataacatgtctatcggtgtcataatatggtaattatgcttagatcatggtgttatgacatatggataagcagttttgctatatgtttgccgaaagtcgtcggtgtcgcctgacaccggtcctagtaatgtagatccgcccctgtttgcagagttgttttcatagtcaagtttcccttcccctttataaggatagttgcttttaagatattttgttttgaggcgatgtatcagggatttacttaataactagaaaggtagcccgcgcacatgcgcgggcagcttcttatgtaatgtgagtgaaattttattatgaatatttatgtgcagggtttttttattg

SEQ ID NO: 6985 - DNA, 1422 bp, Oryza sativa
  ref <308>: DATABASE ACCESSION NUMBER: AK064116
  ref <309>: DATABASE ENTRY DATE: 2001-12-06
gaaaataaaaagaagaggaaagctctctacccgcacgccctagtccccttcgccggcggcgagcgcggcggcggcctgcgtccaccaccgccatcgccatggaaccaggagctgcgttgcgcgcttacctcccggacgatctcgtcgccgacatcctcacccgtctccccgcccgctccgtctgccggttccgcgccgtgtgcaggtcatggcgcgccctcgccacggagcggcagttcgtcctcgcccacgccgcccgcgaccgcgccgccgcggtccccatgaatcaccaccaccgcaaggtccacccgcccttctctccctccccccgccgcggcggcggcgagcccaccgtcatgctcgccttcgtgatgatctgccgccgcaacgagcctgaccgctccttctacttggaatcgcgcgaggacggcgcctgcaagctcctgggttgctgggatgggatgatgtgcatcgatgtcaggagagactcgccggcttgccgcgacggcatcgtggtggtcaacccaatctccatggcttacgccgttgtccgcagcccgatgcccgatggcggcgagttcatcgccgggtacgcccatccggacaccttcgccttccaccccatgtattgctgccacaatcagggtaaggtgatcttccaggtcatcaaggctggagactcgcaatggcgtgagattgctgcagatcgcctcgcgatatctgggatcgattttgataagcaaggtatcagctctgtcgcgctgcacgggggattgcattggcagctgcgaacaaattcaggacaatgggtgatgctggtgtatgatatggtcacagagaagttcagatcaatagccgcgccgcaatgcgcgattacttgggtaagaggactctctgtgttgtccggcagactgtgcagcattgtcatccccgagtccatgaccgcggagatctgggttcttgaggactatcatgagcaccggagttggcattgcattagggaaattgacatggctgcttctgccgagcgaataaatttagagaatttttgggattcagacttgaggatgttcctcaaggtggacgtggagcagggtattgagcatgaggttcaagagatcataattcaccatgggaacaagatcatctcgcagccctgctctgtttatgaattgcggcgcaatgaggctgtctacaatgttaggcacaacgtctggcgcaagagtacgatgtgctttaatgaagagtccatcatgtacaaggagagcattgtgccataccagatgagctttggcatgaagtcacagttttgtgaaaggaaacgtggtgccttgcagttttctgaagggcaacatgtttaccatcttcctctttgagtagctgagaatgaacttacctattagctatatatctcttctgcct

SEQ ID NO: 6986 - DNA, 1466 bp, Oryza sativa
  ref <308>: DATABASE ACCESSION NUMBER: AK064117
  ref <309>: DATABASE ENTRY DATE: 2001-12-06
acgcgtgcagtgagcacccctaaaccctagcccccaaagcttcacctaaccgcgtgctaattgttcctcctcctcctccctgcaggcccaggcgcgacgcagcggctgctcctccatgcggccgccgacggtgacctccgcctcttcaagaggattgctagtaggctggacggcggggaaggacgcctcaaggaggcggtggaggccgtgaaggaccgcggcgctggggctctgcaccaagccgcccgcaacgggaggaccgcgatgtgcgtgtacctggtcgaggaactccaggtggacatcaacgccgccaacgattcaggtgctacgccactgatttatgcagttctgggtgggattgtgtatactgtgagttatcttcttgatcatggtgcaaatcctgataagcccaatgaacaagggcgtgctcctctccatttagcagttgaacaaggaaattgcgagatattaaaggtcttactagtgaaaggagctgatgttgattcatcttctgactgtgggacgccactgcatattgcagccgtgaaaagtcatgatggctgtatgaagattttattggaccaccatgcagattgtaataaggtattttccacattttatacacccctcatcgcagcgcttatggttcgctcactgaaatgtgtgaagcttctgattaaggctggtgctgatattaagggtgttggtacttttacccccttaattgctgctgcaactgaaggcttaactgatttctataagtgcttactcgaggctggtgctgatcctaatgtgcctgatgaaaacagacggaaagatgtggagatcctacttccagtaacttctcgtattccatctgtgtatgattggagtgttgatgggataattacttatgtaaacaaaaatgtgcaggatgaccccatgtacaaaataagaccagctgatctgaagttagaaggaagtagggcataaaagagagaggactatcttactgccacaaaactctacactatggcgacgaatcttgaacctgaagatggaacttgtactcgaataggagcatttgcttggcttaagatgggtgaaggaatgaaagctttgacagatgctcacctctgcaggatgttgtgtcccgattggccaaaggcctgctacagggaaggggctgctcacatgttcttaaaggactgataaggcttgcgatgcatttcttgatggtcttaaattggacccagcgaatatggagattgaaaatggtctacgggaggctttcaaatcattgaagaaatctcgtgctgcctgaattacctgtcagttcaagaattacatgtcagttcaagactcaaaacttgtactatgtaattaactcaatctggagtccggaaaacaagaacctggtaaaaaccttttgcaactggcacggctttgtaaattttacttgaaactgatcgcaactattatcactg

SEQ ID NO: 6987 - DNA, 1479 bp, Oryza sativa
  ref <308>: DATABASE ACCESSION NUMBER: AK064118
  ref <309>: DATABASE ENTRY DATE: 2001-12-06
agctcactgaagtagcaacgcagctcatcagtgtcaagatggctactactaagcatttggctcttgccatccttgtcctccttagcattggtatgaccaccagtgcaagaaccctcctaggtcatgacccctctctctccttgatatggaacttgagcttagtctaggggactctccagctccagtgaaggccaccattgcgcctacaccggtgcttataccaacatgcatgggcgatgaagaagacctggagcttgtgcttggagtaagagcaactagaagagatgaacaggatgaccagacaacatgcacacaatcatcagaagaagctatggagggagaagaagatgaaactcgccctcatggcgagctcctgtcgagagcttgagcttccctctgtttgtatcctctgcagagaccggcagtgcgaattcagagatgtgcacacgtggttttgatgtgaacactcggccagcagacggaggcgcagaggcagggaggccttcgtcaccatcttctatgcaggaggcatccacgagacagcaggtagctgatcaggaagctgcagacgatgaggataacggcggtggtggcgcgaggaagaagttgaggctatccaaggaacagtcctcgtttctggaggatagtttcaaagaacacagcaccctgactccgaaacaaaagagtgatttagctaatcggctcaaccttcgaccgcgccaagtggaggtctggttccaaaacagaagagctaggacgaagctgaagcagacggaggtggactgcgagcatctgaagcgctgctgcgagaggctgacgcgggagaaccggcggctgcagagggaggtggccgagctgcgtggcactctccgaaccaccacgtcgtcgtacccgccgctgtacggcctccaccacctaccagctgctgccggcacggtgttccgggtgtgcccttcatgtgagcatagcaaggtcgttgctgcggcagcttctgagagcttctctccgcgcgtcttcgccggcggcggcgcccctgccgccatcaccgctgccgccgccgtgccgtctccgggcgctggctcaccgccgtcgtcgtccgccgctttgttcggcgccagacggcctcattttggccccttcgccgccgccgtcatcccgccggtgctccgccgccagccatcggcgacgtcgtgaggtcttagcttgcagttttttttcttgcactgcatctgcatgcacatgctaattaaatatgggatatatatatacgcgtgcattgatcatgtaaatgttttcccttttatgtttgttgttcatcaaaatcatgcttatatagggaaatatgtacatatagttctgttcatagaaaagattaaagtcatacatatactttgtaaaaatgtaaaatctaagagtagagtagtgaatgtatctctctcatgcgtgcctaacaaatgctatgaagtgttgtgatcttgg

SEQ ID NO: 6988 - DNA, 1922 bp, Oryza sativa
  ref <308>: DATABASE ACCESSION NUMBER: AK064119
  ref <309>: DATABASE ENTRY DATE: 2001-12-06
aaacgattcggccatttggaggcatgtctcctcttgagcatctgctgccattgagtttcttgtgatcggcagctgtctactgttggatttctcttccatctggcagaaatctggctttgctggatttttcttctctgatcgattggttcttccttccactgtgttctctttgctcttggccttctcctggttggattttaatcacgtagaagtacagacaagtcattgtcgagcaacagaagaaatagaaaatgtctctgttttaatcaccaatgcgtgatctttttctctgcaacctctgagttcttgaagtacctgaaattgtggtagcagccgggcttcttcctccaagaaatgggctgcatgtgcctcttccaggacaagcgcaggagcaagagacggccggaggtggcggcgccggcgccggcaccggctccgccctccccgagtgccgctgccgccgtttccaccgatgcgtgctcgaacgtgtccgtgccagccgccgcgccgagcacgtgcacgtcgtcgtgggcgagcacgaggccgtcggcgagctcctcggcggtgagcaccccggagccgtacgaggcgaggcagggcgccccccgcgagctcgctctccgcgagctccgcggcgccacgggcgacttcagcccgctgctcatggtcggccggggcggcttcgggtgcgtctaccgcggcgtcctccgcctccccggcgagccgccccacggcacccctgtcgccgtcaagaggctcaaccccgacagccgccaggggcacaaggagtggctcgccgaggtgcagctgctgggcgtcgtggagcaccccaacctcgtcaacctcctcggctactgcgcggcgcagacggagcgaggcccgcagcggctgctggtgtacgagttcgtgccgaataagacgctggacgaccacctgttcgaccgatcccaccccgtcctcccgtggggcgtcaggctgcagatcgcgctgggcgctgccgaggggttactgtacctccacgagggcctggagtttcagatcatataccgtgatttcaaggctgcaaatgtgctgctggatgatgagttcagacccaaactgtcagatttcggattagcaagggaagggccatcagaaggtcagacacatgtctccacagcggtgatggggacgtacggctacgcggcaccggactacgtccggacggggcacctcacgaccaagagcgacgtgtggagcttcggcgttgtgctgtacgagatcctcgccggccggcggtcgatcgacaagagtcggcccaaggacgagcagaagctcctcgagtgggtgcggcggcaccccgccgggagcccgcggttcggccggatcatggacgggaggctgcaggggaggtactccgtgagagcggccagggaggtcgccgagctcgccgccggctgcctcgcgaagcacggcaaggaccgccccgcgatggcggaggtggtcgagcggctgaggcgggcgacgcggcacgccgagctggacggcgaagtgtatgatgatgccggggaggagagctcgagctcgccggcggcggcggccgtggaggacgacgtggccgtggccgcggcggcggcgaggcggcggatgctccaccttgctgcgctcggggagaacgcgagcgcgagcgctcacgcgaggagaaggctcatgctcatgagggcggctgctgctgccactgccgcgacgtgacctgttcattctcttgtcggagttgacaatcacaatgcaggattgacttctgaaggattttttttttgtgctgagatgatatttttttgttacgggttttgagaaaaacaaattacaggactttgtgactacaacttgtacagcatggttaatccaaataatacaattttcagtagagacattgtgacaac

SEQ ID NO: 6989 - DNA, 1275 bp, Oryza sativa
  ref <308>: DATABASE ACCESSION NUMBER: AK064120
  ref <309>: DATABASE ENTRY DATE: 2001-12-06
aaactcgcgaagtcccctcgaactcccaggcgcgcaaaaagtcccctggggaacttccagcggcgcgcacccaccgccagcagcagcagcttcgccgcccgccgacgccgtagcggagggcaagccatgaagttcaaggccttcttcaccgacgacggcatcgctctcctcgacaagcggttcctgccggcgatggacaaggtgggccgcctgtgccacgtctacctcacgcccacgcacgccatgctcctccacaacctcctcggacccacggggacggggcccgacggcggagggccgcagtgcgtcgcgcagttcgccaaggacctcctcttccgggagtacagcgtgtcgtcgcggaacggcaaccgcgtggccttcgccgtcgacgtcgcgctgctccaccgcgccctccgcagcgcgctcgccgtccacgcccagtcgccggccgccggggacgcctcagccgcgatacaggtgaagctcgtcaacaagctgccggccgggtcccggtctgcctcgccgttcctcactttcgagaccaagggagcccgctctgctgtcgtgcaggacgtgcccatctcgcggcccctttcacgctccgacgtcgagcggctgcaggctgccctcgactccgcccaagagcttcctcagactctagttcaggttccagatctgccacagttgcagagtttggtcgatcgtctaaaaaatgtcggcgatcttctgacagtagctgttactcaatatggtgacttacatctacacgttgccacttctcttgttactgttggttcagaattcaggaaacttcgtatccttggtgttcgtgcaaccgcacctgttggtgatcaaaatttgagtgcttccactcgtaccaatatggcaattgagagaggggaggcgctctcagtgcaagtgaatatgaagcacctagctaaaggtctacaatgtcatttggctaagcccgactgtaccttctatggtatttctcctggtggtgcttgcttgactgtgatattccagtatttcattccaggaactagactgacggacaagtccattagcttctactgcaggcttccagtccttgaccctggcagttaaacatattacagcgtggtaattactgacttgcttctgatatcatctaaggatatgcaatactattagcttagctactgtacctttctgttcaatatcttactatcttatgtgttatgacttgcttgtggactcaatatatgttggctcagcaataattcgctattttgg

SEQ ID NO: 6990 - DNA, 1545 bp, Oryza sativa
  ref <308>: DATABASE ACCESSION NUMBER: AK064121
  ref <309>: DATABASE ENTRY DATE: 2001-12-06
aagcactgcagtggcagtgcagctagcctaaagtttgccgattccccatggagtgaacgcaactagaccttgggagtgaggaggaggcggccatggcggtggcggaagtcgggggaatgcttgcatctgccgtcctcaaggtggcgacccagaagctgggcgccgccatagcgggccgggtcatgctccagtggaacttcgacaaggatctggaggggatgaaggccacgctggagtctgtggacgcggtgctcagggacgccgagaggcggtcgatccgcgacgcggcggtgcggctgtggctgaggaggctcaaggacgccgcctacgacatctccgacatgctcgacgacctggagaacatcacttccaaatcggatgcggggaagttgggatgtgtgatgatccccaatctgactattgctcacaagattaccctagctaataagatgaagacgataagtgatgaactgaaggagatcactaatcaacatcttagcttcagattcacggaagatagcagctataaggagcacagagttactgataaacgggaaacatcgtccaaggtggaagaagcactagttgttgggaggactgcagagaagcggataattatatcttctctgtccaagagaatgactgaagagaccgtaatccttcctatatatggcattggaggcataggcaagacaaccttggcgaaactggttttcaacgcttccaatttcagagactactctaaggtctggatatatgtgtctcagacatttgacttgaacaaaattagcaactctataatttcacaagtatcggaaagtgagagccagttgactgaaagggagatgataaataggcgtcttgatgagctactttccggtaggaagattctaattgttttagatgacctatgggagagggatcaatttcagttagatgatttgaagactatgttaaaggttggcaggggcagcagggtgattgccatcgtaaccacccgagataaggacattgcagagaagatttgcaccactgaaccgtacaaactagaacccctgacagatgacatgtgctggaaaataataaaagaaaagagtgtctttgaagcaagagatgacaaagaacaattggagaatataggaagggaaatagcatctaagtgtggaggtgtggctttagcagccaaatcacttggatatactctgcaacccatgaagtttgatgaatgggtatcagtgagaaacaacgatatctggaaggcatctactttcgaatgtacatctttgccatatcataatgtgcttgcatccttgtgattgagctgcagcaatatgcctccaaacctgaggttatgctttgcatattgtgcaatctttccaaaaggtcacatcatagtaaaagaccaaataattcaccaatggaatgctcttggtttcatagagcaatctgacatattctctactaggcagcttggtgaggcatatgttagacagcttttggggttgtgcttccttcaacaaacaaaggctccttcagtgagtttct

SEQ ID NO: 6991 - DNA, 1580 bp, Oryza sativa
  ref <308>: DATABASE ACCESSION NUMBER: AK064122
  ref <309>: DATABASE ENTRY DATE: 2001-12-06
cttccttctccagcccgtccgccgccgcccacgcctccgcgaggctctccggcgacgcaacgaagacacggacgcgacgggggcggcggcggcggcgcgcggcgcgtggcgcgacccggaggcgacggcgacggcgacggcacggctcactcctccggccgccaccttctctccgattgcacacgcacccattagacttggagaagaccaacctcctccttcctgggaccttgtaccctctccttcctgggaccttgtaccctctccaagagtactactatggatatgagagcaagatacctcgctagaaagaggagggaagaggaggacgatgatatgatgttgtttattttccctgcactacatttgttgagttctagtggagcaagggaaaagaagcgacaccatacatcaaagctaacaggtgatgagcgtgttcgggagttgcttgaagggcatgtaaaaaattgccgggtagcattcaggatggagccggaaatatttatatctttggccaattaccttagaactgaaaagttggtcgatgatactaggattaaagttgaagagaagctggcattcttcttatacatgcttagtcacaatgcttcatttgaggatttgcaagagaaatttgggcacagtggggatagcttttatcgtcacgtaaagcatttcttcaactcagttgtccctacgctcttgaagcggtttttgaagcctccaaatcctaatgaagttcattggaaaatagaaaaagatcctagattttatccctatttcaagaattgccttggtgcaattgacggcacccatatacccatatctatatcatctgacaaagcagctccatttagaaataggaaaaatactcttagctaaaatgtgatgatagcttgtgattttgatctgaagatcactttcatgtctattgggtgggaggggtcggctacagatgccagggttcttacctctgcagtaaacaaaggcttccaagtaccccctggaaagttctatttggttgatggtggatatgccaacacctattctttccttgcaccatatcgtagagtcaggtatcatctaaaggagtatggggcaggtcggcgtagacctcaaaactacaaagagttatttaaccatcgccatgcggtattgaggaatcatgttgaaaggactttgggggttgtaaagaagcgcttccctatcctcaaagttgcaactttccacaaaatcgagaaccaagtgaagataccagtggctgctgcagtgttccataatattattcgatcactgaatggggatgagcaatggttaaataaccaaccacataatatccatccaagcaattatgttgacctgccagatggtgatgaaggcaatgatcagagcactaatcaagggaaccttttgagggacacgatagcacatcaaatgtggaatgactatcgatagcataggaattagtgggctgtaataagtagtatatttgattttttttgatgttttgtgagctgtaataactacgacatattacaaatattatgttatgaatgaactatggtggttgcatgttacat

SEQ ID NO: 6992 - DNA, 1704 bp, Oryza sativa
  ref <308>: DATABASE ACCESSION NUMBER: AK064123
  ref <309>: DATABASE ENTRY DATE: 2001-12-06
gagcctacacccgcgagggtttaagggggccggaaagacggcgcggcagcctgagtcgcaggaatggccgctcgctcgctgtagggtttttcgccgctcgccgcctccgcctccgccgccgcgtgcccgcgtccacgcccgaatcgaatcagccgccgccgccgcaaactcgccgagcagcagctgagcctagcaccgcgccgcgccgcgctgcgcctcgcctggcggcggatggccgcaagctaaacccccccgactccgcgcgctccccgtgctgcccatggcggcggttcggaagatggcggccaatggcctcgcagcaaaaagggagaatacagggacaaagaaatctcccctgcaaatccagatgctggagagattctactctgaggtacaataccctcagtcggaggacattgcagagtatgcaacatctgttggtttgacttacaatcaggtcagaatatggtttaaggagcggaggaggaaagagaggagagaaacggaatctttaggggcgcatatggaaaagcaacttagtgcaagatcaaatgggttcagatgcagcagcagcaggagagaaacacacactccgatcacaagttctgtttcccaaggattatatcctgaggaaagtcttccgcaaggatggtccacctcttggaagcgaatttgatccccttccccatagtgcacctggccatctcagagatactacagacgaccatttctaccagaaccaaagagtaataaagaagagaaagattgtggagcctaccactcagagatcttccctgccatgtggggacaatggtcctgtgaggaaacatggagccgggaaaggtctaatgacagtgtggcatgcaatgtattcccatagtagcaaaattcaagatggatctaattttattgatgaaactggttgcttgaggtccttgagaccattagatgattgtggcagaatagaggattgcgatgatggaaagctaattcagaaaaaagttttggcacggaaaaaagtggtaaaaaggaccaggcctccatccaataaaagaaaggtgccaagtagcagagttactgatccgaagaagcatcctccaatggaatgccatctttcagttgatgaatcacaatccccagtgctacaggctaaccaagtgactttagttgatgatgaggagcttgaactccgtgaattgcaagcaggtcctaacccattgagatgttcagctcacctttcttcaagtgggagacatggctgccctctttgtaaagatttactttccaggtttcctccatcaagtgtcaagatgaaacagccattctccacaagaccttgggggtcatcaccagaaatggtgaaaaagcttttccaggattcgatgttgttgggggaagtacatgtcaatctcctcaagctacttttgttaaacacagaacggggcagcaatgatgtgtttgttccacgatcttctaaagactgcagatttttaagttttgtgaactttgtgagtctcgatagtaccaatttatgcttcagttaatttcaaatctcgagtattaaattatcttccgaagtttgaatgaatcaaactcatttttttctgcactggaaagttgaatatatattgttgtaacaccaagtgctgtgctattcgtttggtgatcttatcatcaattaatctgcattgttatttttaaaat

SEQ ID NO: 6993 - DNA, 1667 bp, Oryza sativa
  ref <308>: DATABASE ACCESSION NUMBER: AK064124
  ref <309>: DATABASE ENTRY DATE: 2001-12-06
acgatgcaggggactccggggtgggtgaggatgtaggcgtagccctgcatgaccttgtcggaggggaacggccaaagcttctgcgtcgagccggtgtcgtggttgtcgacgaacgtgacggccttctctggcagccacccgatcatgccggcggccttgccgttgccgtcgcgcagccgccacagctcgccctggacgcccgcctgcaggaggcccctggtggtgaagtcgaacgtcatcgccggcccgccgacggcgttcacccagttcaccagctcctgccggccctggtcctggttggccgccggcttgccgtcgccgttgtagctcagcgagttccatatctcggcgacgacgaagcccggcttgcagctctcgacgtacatcttagcgatgtccgtggagtatcccttggcgaagtcgaggcgccagccgtcgaagccgacgtcggacttgagccagttgagccagtcggtgagctcccgctggacgcgcgggttgaggtggtcgatgtcgggcgccgcgccgaacccctcgccggtgtcgcggtggcccgtgccgtcggagtactgcgtgtcgtcgctgcagatcatgccggggccccagtcgaggcggtcgtcgggcgtcccgccctcgaacacgcagtacacgccgcgggcgtccttcttctcggcgcaccggtggttgatcacgacgtcggcgacgcactggacgcccttcccgtggaacgccgcgatcagcgacttgagctccgccgccgtgccgtacttggacgcgtccaggtcgtagagacgccccggcatgtacccctgcggcgccacggagtgcgacggcggcggcagccagacgtgggtgaccccggccttggcgatgtcgtcgacttggcctttcaacatgttgtaccagccaccctgctgcttccacgactcccagttgaaaccctgcatgatgcatgttataagtagatgatggatgatcgatgtgttcgtggcgaatgacctcgacgtcggggggcatatatagaacaccgggggcacggtcaccgtggcaggggaatgagaatgatcaggagagacgaccaataaatggcgtggatatggataaggcaataaagcatggccacgtaggcgccgcgtcggccgcgtcggggcccggtctccaaggcgacgggatgcggcggcgtgatcgcgacgactgcctgaggcgggcgccggctacctcctcctccatccatcgccggcttggataaggcgagcatttctctgaactttcatcttcagagttcagacaaaaaagacagtgctacgtgttctagcaggctgatcgtatataatagggttgcagttagcctcttgactggccgcttgatctcccgtcatgtatatgcacatatggctcgtcctccttcaattcctgacatggcaattctatccacatctcggtgagaccctaatccggacctcgaaatgcgagaatcagataatgctggaatcaatgagtccgagttgttcatcgtcatcagccaatggagcaagccggaaagagagactactgttctactaagactagccatctcatctattgtagttgatgaatttatgtcagtatctatgaatgttacgagtatcagtatgtcataagtcataaccaagttcattacaaattcc

SEQ ID NO: 6994 - DNA, 2006 bp, Oryza sativa
  ref <308>: DATABASE ACCESSION NUMBER: AK064125
  ref <309>: DATABASE ENTRY DATE: 2001-12-06
ataaaagatggtcagcctgcagaaaagcaaaaataaggagatgcattcttggggaacgcatttttataggttggcgaaggcaggagcttatatctcgccttaaatctaaaatccctaaagaagctcatgatctgttggatgagatgttcaaatctttcaacgacagccaaacatcattaatggattttgtttttcatctgaaatctgttgttggaatagaagcttttgttgaggcggttgcgatcggtaaagggaaggatgatttgactggttttgttttggacccatccaaaccaaaccaagtcctttctgttcagcccggcatgcctgcaggcaaagattgttcctctcttgcttcagaagatataatcaaattcttaacgggtgatttcagaagaagcaagacaagatcaaatgatcttttttgggaagctgtctggcctcgtttgcttgcaagagggtggcactcagagaagccaaatgatgtcagcacaacgaagaattgccttgtattcattgtgcctggtattcaaaggttttcaagaagtgaacttacaaaaggcactcattattttgattctgttagtgatgtcctcaagaaagtggtagcagaccctgttcttcttgagatagaggttgatggaatgggcaatggtgttaatgctgagaaaaatggctttgacacagccatgaaactgaaccaagatgttcctttcgatggctatcacgagcttccaaagtttacaataatcgatactagcttggtccaaggggaagagccctcgcaagtgagggagctgaggaacttgcctgctgatgcaaatattagttttggccctttgcgtcatacacataatatggtgagtgatagttcctcagacgaacatgacacagatgacagatcatcagattacaaggaaggctacgcaggagttacagctgatgagaatggcactgaaatggtttcatccaagaatgcagacaatgaaagccaagtggactcttttcgaaatatggctgctacatcatgctcagtttttccagttaatggccattcttctaatggcaatggtgacacaattggtgcgacaagcttctttccccagaaaactaaaattgaaaagcgcaagtacttatccccagtgacgaagcgcagaagactaactagctgtagcaatgaccagaccagtcgacgcagcttttctttctcaaaaggccccggtttagaaaaagagaaagtcaagctgccatcaacttcatcaaaaccaactgctattgatgttggtggtagttttcaatccaaatcacttgcgagctgttctggcaaggagaagccatgtcagcagataaaggatgcatcaaactctcatgccaatgacagatcaaatgagaagatgaatgtggcaaggccaaaggagaagccatctgggcataaggtagatacactggcttctgttcattcgaagaccgccgttgaggatacaaaacctgccaaaggagtagctcagtctagtgatttggtggctaatcaggttaaactagaaacaccgcaggatgataagactgtcacaattgcgcacgccccttcatcagacacccatttcggcattgtgagagtgatcgatcgacaccagccttgccgaaggaagaagaacatcaggtgacattgttggaagcgacggtttatgcagatagggagatatgcaaaggtgagctgctgtagtttagagggagttgcgtgttgctgccatgtgaaggctttgcgtaggtgcggctcttgtaccgggagaggaaaagaacgagagaggcagtacaccgtacttttagagaaattcattctgtgattaacaacagggttttctttttttaatgttctcgttgatgatgcactgatcatccatggtggatatgttagcttagcttgatgatgatagtaggagcagcaagtggctgtatccattttaccgtcctttaacttaccatgcaatgcaatgttgttatgcgac

SEQ ID NO: 6995 - DNA, 1052 bp, Oryza sativa
  ref <308>: DATABASE ACCESSION NUMBER: AK064126
  ref <309>: DATABASE ENTRY DATE: 2001-12-06
gcataacgaatccacaccacacatagtctcacatggtgcaggttactacacgggatcctcaagccaaccactccagcccattctctctgctactttcccattctcagcgaccacctccactctatcccactttcccctttccagcgccgggccggcgaccacctccacacagcagactccagcttggggatggcgaggatgaggtccttggtgtccgccgtctgcataacgccgtgcgcgtagtagaatggcggggtgctcgacaacgccttgtgcgcggtggtggtagtcgccgtcgtcgccaccgacgccgtgtcgtcgtcgcccgtggcgacgcgcgccgtccccgccagcccgagcttcgcacgtcgccgggacaacgcctcctccttctccgcgcgccgcctctcgtctcgccccgcacgccgcacctcgccgagctcaacgagagtgggggactggagtggagagccgcgccggcgacgaggagacggagcgaggaggacggcggcggcggtgcggatctggagtggcaccgggctcctcctctctcggtggcgacgaggaggcggagcgaggaggacggcggcggcggcggcgcggatctggagcggcgccgggcccctcctctctcggcgtcgaccccgcctctcctcgccggcgctcctttgaggtgcagccgacgagctctccagcggagcaggggcaaggttccgagcggtggtggcggcggattttctccggtgatggcggtcctcggcgacatcgctgggaggaggctacggtcacgccctgcacattcacactgtgttcttttctctcttgtctccttcacatttgttcatggttgacttagggcaagtgtaatagtatagtcaaaccatttatagttaatttaatagccaatacatataaatagttacatataaaaatatactatactagtgtactattggtatatggtgccacctgttatacacacattacgtctttcagtccgtgctgctgaccataaatatatagttcgctgctcttctctcttctattttatc

SEQ ID NO: 6996 - DNA, 1408 bp, Oryza sativa
  ref <308>: DATABASE ACCESSION NUMBER: AK064127
  ref <309>: DATABASE ENTRY DATE: 2001-12-06
tagatgtcacataggatgtttaaccgggtgttagaagtggttttcgaacacgaatgaaaaaaaactaatttaaatcgtgagacgaatgtaacccacatatgctagctaatggcggattaattaggctcaaaagtttcatctcgcgatttcctcctaactgcgtaattaattttttaatatatatttaatgcttcatgatgtttccaaaaattcgatataatgtttttaagaaaaattttttttggaactaaaccaggacttgtgtttgtgtacatgcaggtgcacgctgagacgtacgcgttggtggtgagcacggagaacatcacgctgaacgcgtacatgggcaactaccggccgatgctggtgaccaacacgctgttccggatgggcggcgcggcggtgctcctgtccaaccggcgcgccgagcggcggcgcgccaagtaccagctgatgcacacggtgcgcacccaccgcggcggcgccagcgaccggagctacgcgtgcgtgacgcaggaggaggacggcgccggcaacgtcggcgtgtcgctgtccaaggagctcatgtccgtcgccggcgacgcgctgcgcaccaacatcacgacgctgggccccctcgtgctcccgctgtcggagcagctccggttcctcgccacggtggtgctccgccgcgtgttcggccacgccgccggcgtcaagccctacctcccggacttcaccgcggcgctcgaccacttctgcatccacgcggggggccgcggcgtgctggacgagctggagcggagcctgaagctgagcgcgtggcacatggagccgtcgcggatgacgctctacaggttcgggaacacgtcgagcagctcgctgtggtacgagctgtcctactgcgaggcgaaagggaggatcaggcgcggcgaccgggtgtggcagatcgcgttcggctccggattcaagtgcaacagcgccgtctggaaggcgctcaggacggtcgacggcggcgccggccgggacgccggcgcgtgggcgcaggacatcgacgcgctgccggtgcacgtgcccaaggtggtgcccatcgtcgacgacgacgacggcgccaatggcggcgacggcgaccgacacgacgcggcgtcgcacgtacgaccggaataagctacatacttaattatgtgtacttgcgtgtaaatcgtcacgagtcatggatggactgaaaaatactgtcgcgtgttgtttcatggacatgaggacatcgtatcgtgtcagggaaggactgataattccttgtgcggcattttgtctaggtatactgattaatcaatcgtgtgtgttaaatgtgtgaaaggttgagtatatacgacaataacttgagtattttctctttgttatgaatcttttttgttgttgtacgaattaagag

SEQ ID NO: 6997 - DNA, 1796 bp, Oryza sativa
  ref <308>: DATABASE ACCESSION NUMBER: AK064128
  ref <309>: DATABASE ENTRY DATE: 2001-12-06
gtgtcattttcgtccacgccgagacgagacgagacagtcgggcgacgggacagcagctgcagcctgcactgcagcacagccgtcagccgcctccccaacctcccgccgccgccgccgccgccgcatccgcatggagcccgacgccgcagcggccgcggccgccggcgagagggaggcggagatcgagaaggccttccgcgcccgcctccccgacttcaggaagcaggccgactccttaaccctcgaaggtgtaaggagagcactggagaaggacatgggcttggagaaacattcacttgacgcccataaaaagttcataaagcaatgtgtagacaaggttttttctggttctgatgatgacaatacgaataataatgcaccagagaaggatgaagctaaagatgaccgttcttctaaagaagaatcagaagatgcccaaccaacatctgactcgaacaaaatttcctccaatgctgatgagccggtggcaaaatccagtgagacagatagagatcaggagggagacaaagatcatagttctggcagtgacattagtgaagctacgataaaaaatgctattgtcaaaagggcctcatattttagagagaactcagaaactattactttacaaggagttcgccggactttagaagaagatctcaagcttcagaagaaagctttggatgcttacaagtcttttatttcgacggaattagacaatattcttcaagaacctgcaaatgggacaaagaaaactagtaaaactgaatctcataaggattctggccagaagacaagcaaaaactctaagagagctcgtcaagactctgatacttctgaaataaatgatagccattgtgagaggggagacagtgatgaggatgcaaggccaaaaaagaaaaaggctgaaaagggcaaagctgtaaaaaggcagaaaaaaactacagtggagaaacaactgtcaaattcaaaggctaaaaaggttgccaaaaaagatttagataaaagtaaagagcggagtggatcagaagaagataattcaaattcatcagctgaagaagataataagaaaaaacgacaagtagctccagcttacgggaaacgggtggaacggctgaagtcaataatcaaatcttgtggaatgagtatcgcacctactgtgtatcggaaggcaaagatggctcctgagagcaagcgtgaagcctgtttgataaaggagttggaggatatacttgaaaaagaaggattgtcaacaaacccctctgaaaaagaaattaaagcagtcaagaaaaggaaggaaagagcaaaggaactcgagggcatagatatgagcaacattatcacaagttctcgtcggagaagtacatcgaatttcatacccctgccaacgcctaaaatagtagctgatagtgatgaagatgacgaagaagacgcagaagatgacaatgatgaggaggtgaatgtggagggtggagatgaaggtgacaatgatgttggaaaagctggcgatggatctgctgatgatgctgagcacgacagtgattgattcttgcggtttctaaggtggaagcaggcaattctgaccatgcaagttcatctcatgttgatttggcctagacgcctagttggctgtccgtgcgtggatggaggcagttgtttagaagtttaacttatgagtttattctgtttattcgaaacatattctttagctctagcgttggtgaaacattagcgcagatgattcttgtagctcccatctcattattatgtataatatatatcaggtttgttatctg

SEQ ID NO: 6998 - DNA, 1287 bp, Oryza sativa
  ref <308>: DATABASE ACCESSION NUMBER: AK064129
  ref <309>: DATABASE ENTRY DATE: 2001-12-06
atgtcggggttgtcttcaacctccaaccggccagccgtgcccgagcgccgccgcctctccttcgaatccgcctccaccggttgcttccgagtccgattgattgagaggaaattatctcctccttatcctcttcctttcccctaaagtttcggagatcaattttacccggataaaccaaattgaactcgttttgattttatctctccaaactaaccctaggattttccggcttcgattcctctcatttggagtccgatctccctcacccatgcctatataaagcatccactagtcgtcctcttctgtttgcctcaagttctagccgcagctgttgcccatagcggtgccgccacgctagccctagcgccgccgccaccgacgccatttcagccgcgctgcaccgctgctgtggtcgtcgctgccgccttctgtcgccaccgttgggttcgccaggaggaggagcaccccatccgccccattgcagctgccgaagaccgccggtgcgtcgtcgccgacgttgatccgagccgagctgccgtcggaccttgtcgccggccgtcgttcgtcgtcgtccatcgttgttcgttgtgtcgtttccgacgttccggaggagagcgtttacgttgaggaaggttcggaagcgtttgaagaagctcaagatgccgcctcatccgctggaaagcttgatcgatgtggtaggattcgtcaggtagttgagaatgatggcatttaaagcagctcatgatagagaaaactggaatgggggcaggatttgcaagttggagagcaaggtgtaccatctgcagaaggaactggccgagcttaagggagaagcaccaccgccagcacccaagcttcgtctcaccgtaaggaagagaacccgtcctccacctcgtatccagttggcttcaaagactcgtgtggtgggagatgttgcgcctgatcatgctgaacctgtcatccatgttaagtgatgatgaagaggaggaagacccagaagaaagagtgccttctactctagaggaagaagatccatctctttgttctgacgcaaggcgggattagttgtctagttagaccgttgctgtggttcactgtgttagtttgcttgcttaagtttgcttgtgcgtgtgtggatttagcgtgttgcttacatcattggtgggatgtaactgcatgagtttagttcttttgcttgttagagagtaagttagctcgtgagatagtgttaattcaatttaaatgtaatcatacacagttaagagcaatatagaatttaaattaatt

SEQ ID NO: 6999 - DNA, 1393 bp, Oryza sativa
  ref <308>: DATABASE ACCESSION NUMBER: AK064130
  ref <309>: DATABASE ENTRY DATE: 2001-12-06
acatcaccagtagctcgggaagcactctgcatgcatatcctttcccttccaatggccgcagccgccgcctcaactgtgccccagtcgtcttccaccagcagcacaccgcaaaacaccatctccactcactccactgagcttgtcaggggctcgcatgagttcaccgtcgccggctacagcctacagaagaggaagggcgccgggcactccatcaggtccggctcattcgaggtcggtggatacagctgggcgatccgattctaccctgctggcagcacgaaggaagaagaaagacacgtgtccgtgtacctcgagctgcgaagcactgtggtagagaaagttaccgcgaggttcagtttccacgtccatggcgctagcgcgagctcgttgcatatgcgcggtagttttgacgactacacgcctaccagcaaatcatgggggtacccgaaatttatggagatagaaaccgtggagtcggagtacctgatcaacgactgcctgacgttgctctgcgacgtggaggttgtcaagacggtgaagaccggagcaaccattagctgcttcatcacggttccgccgccggccatctgccgtgatctcgagctgctggtggggagcaaggagggctccgacgtgacgctccagttggagcagagcgagtacgacgctcacagagcggttctcgcggcgcggtctccggtgttcagcgctcagttcttcggcccaatggcggacgaggacgccgccgccgccggcagccggaggaacgtgcggatccacgacatcaaaccggcggtgttcgaggccgtgctccactttgtctacaccgacacgttgccgccggccaccacgagctggtccgcgagccaccgcgacaagcgtcctaagctcagcgacgtcgcggccgccagctgctcggaagaagaggtgagagtgatgatcggagagcggctcgcggcggccgacagatttgacctggagaggatgaggctgctgtgcgaggacgcgctgtgggagaccatcgacgtggcgaacgcggcggcgacgctgcggctggctgaccggcaccattgcccgcagctcaaggagctctgcatggagtacatcgcctcggctggggtgttggcggccgtgatgacaaccgaggggttcagggagctcaagctggactgcccctcacttctgatcgagatcctggagaactttggaaaacgcagcgaggccgatgaggaataatacaatattatttctgtattatcattggacaagtaatttagttttcgaacaatgatcttggaatgaaaagtggcacgtactgtgcaatcattttttaatcccttgtatctggcttgtagtaagagcaagtttaataatattataaccgattgggggc

SEQ ID NO: 7000 - DNA, 2048 bp, Oryza sativa
  ref <308>: DATABASE ACCESSION NUMBER: AK064131
  ref <309>: DATABASE ENTRY DATE: 2001-12-06
atgccccaacccgctacctcctcccggcgctccggcgacttccctgactgggtcttcctcgacactgttgcgcacaccggccgctgccacgacaacgcgaccaccgctcgggcgaagtcgagcgatggctaccccatcgaggtgtccttcgtgttcgccgatccacccgccctcacccgctgctttgttcactgccccgccggcctgacggcaggtgagttctccatgtcgccgccctccatcaccggcgcggacggcgccttcctcctcctacgtgtcatcttcccccaccgctctgaccgatgcatggtcaccgactggttcgtctacaagtcgggccccgggacgccatctctcgagctcctgatccagcgccccaacccgcttgacgttgtatccagacgcgccggcgtcttatcctgtggcgaccactgtctggtcgtcgaccccgaatggcgattccatgacgacgactggatgaagttccacctccatatcttctcgagcaagaccaagcggtggagcaacaaggtcgcaaagctgggtcgtggcatggaggcgttcaaccctttcttcctacccaccaaggtgttgtgtgtcgtccgaggaggatcaatggcctgggttgatttccggaacagcatcctactgctcgactcggtccccgggaactgccccgaggtgagcctgatccgtctgcccccattgatgcccatcaacaacgttgactccggaggcagtcccgatggaccttgcgtggatctggtccgggatgtcacctgtagagatggctggttcaagttcatcgagatgggatttccgtacttggatcctaatgatgcacagttaaaccgtggatgggaggccaccatgttcaagaggaagatccgttcagataattattggcaatgggagccgtgcggcactgttgactctgctagccttttgcctgccgactcatgtgttgcttgtttgtttcctgagatctttgactgcaacgagcacaagctagccctgaacaatgttgtgagctcatttcccacattggatctatactgtgacgatgttgtttacatgatgaccaagatcaaggctgatgatccagacggttggatctttgccttcaacactgagaacaataggctggaggaaatatcgcccttttcacaagaaaattgtcatctccatcgcatctacctgcaatgtgacttgtccaagcacctgatgaacaaggctctagacgtcttggcgtcgaggaggagcggcggcggcaacggttcagggacgcggagaactggcgtcgaggaggagcggcggtggtggttcggggatgatgaggagtgacgaggcggatccggcacggcatcggcagcgtgcgcggtggcgacgggcgactgcgggtgcagcgttggcgggcgggaggcgcggcggctccacctgaaccgccgagctgcggcgggcgcaacgtcagcggtttcggcacggcatggttgcgggcgtggcaacgacgggctgatgcgggctggaggcgcggcagctctacctccatcgctaatcagaggcgggcacgacgtcggcggatccggcacggcacggctgccagcgcggcggcaactggtgactacgtgtagggggtgaggaggcggcgcatctggctgccgctccgcgccccacgcgcgtggatctggcgtggatattgcacgggtgacggtgggtgcggctgtgacgggcaactgcgggcaggaggcaaggcggcggcgaatctggccgccgttccgcccgtacgcgcacggcgcgacctctgcggcggcaagctcggactcggatggatatggaggaacagcggcggccacccccacgacacgccgcaatcgatgtccggagcaagcgctaacaaaaaattaacatatgatatagactgtgaggatgtatttgttgagtcaaaattttgttgtcataccaagttaattttttaattagtaaggataccaagcatatgatgtatatgaaaaagggtttctaataaaaacatagccgccagttttatt

SEQ ID NO: 7001 - DNA, 1377 bp, Oryza sativa
  ref <308>: DATABASE ACCESSION NUMBER: AK064132
  ref <309>: DATABASE ENTRY DATE: 2001-12-06
aaaaattacacaatcagccaccagatctcatcgccgtcggccgtcgccgtcgccggatggacccgagccggcctgcgcctactccgttacctccatcggggaataccactccggccccctcgcccgcaagccccgccgcggcgggaccaacgccaccgccccgccgcccccacccgcgctctcgcgctcccagttcgccgcgggcaagtacctctcttaccttggcggcggcgaccagtgcaagcccatgccgcattatcttcgtagtctcctctgctccatcgccgaggcccgctacctcaaccgcaccctcgtcctcgatctcagcgtctgtctcgccgccgcctacgccgggggcatgcccgaggagggcaagcgcctcgccttctatattgacattgagcacctgcaatccgtggtcgggatcgttgaacacaagcggttctgggaggattgggacaagtggggagcacagggtcagcttggagtccgcatcatcgaggacagcagggttgcgcccaccaagttctccaagtcgagggatcccctgatcgttaggaaatttggggacgtggagccagggaattattggtacaatgtgtgcgagggcgaagctgagcatgtcctccgtccaccgcagggagcaatacgcacggcgccaagcttgatggacattgttgatggtatcatatcaaggatgcaagtagattttgactctgttcatgttggtggcaatgatgggaacctcagaagaaggattgaggagagactcaatggaggaggaaggcaggtgtatgttgcgggagagggcatcaacgtggtcttgttggatgcgctgaaggcaaagtacagcagtgtgcattacctagatgcgtttgaggaactctgggcgagagatagcaagtggtttctggagatgaagaggctcaatggtggagttcctgtggagtttgatggatacatgcgtgagcttgttgacagggaggtcttcctcaaggggaagaagaaggtcgaagtgctcgtccgatctactctctgagattaaggtgtcgaagaacatggtatgtatccaagggaatcttctactcttatctgatattttctctctacatcactagatgattcagtcaaacattgcttaggagatttttttttttgttgatgttcaatgtagcacatgcaacccactgctgctcaagagcactagtaatgtgtaaatcttttccttcaccaaaggcgattcagtcaaaatcccttccaaggaaattttgttaaccttcagttgtaatacatgtagctcagtgttacttgatagcactatgtatatatcttttccttaaagaagggtgattcagtaaagatcgcatttcctttgtt

SEQ ID NO: 7002 - DNA, 1496 bp, Oryza sativa
  ref <308>: DATABASE ACCESSION NUMBER: AK064133
  ref <309>: DATABASE ENTRY DATE: 2001-12-06
ctcctcacccgcttgacctcgccaatcgccggcgagcgacaggcgagacgagagcccgcggcggcggcagcggcggcggcgatcaggacccgatcctcaccggcgcacttctcctgttcattgcaggagcaaagcagtaaaaatgaacgagcacctccgctttgaggatggctggaagatcctggaacaggggattgtgaaatgctcaaagcttttggaggattgccctggtggaaggccaactgtgaatgagtacatgaattactatgattgcgcttaccggatggctgtgcagaaagaccagtattgtcaagagatgtacaattcttacaaagcaacacatgaaagttgcgtctgtgcaatggttttaccccatctgatgcataagcaaggtgacttattttggagagagcttgtgaaaatgtggtcaaactattgtgccatgattagattcacaactggctttttggcctatttggaccgctgctttgttacacataagaaactaccttcgcttgaagacgctgctgctacttctttcttttctccagtcttttcctacttcaataatgaaatatcagatgttctactgactctgattcgccaagagcgtgatggatgcaatgttgatatggatcttttgatgggtattatgcgtggcatatgtcgttctgaagtcaaaaccaagctgaaaagtgctgttattcaagatacatacttgtactactccaggaaaagttatgaatggattgtgcaataccctttgcaagattaccttgctaaggtccaggaaactgtgcagaaggaaatgaagagactgattcactatctgtgtatttctgaggaagagggttcaggcctctgtttgaaggctgttagtgctccattgatgcaagcttatgaaaactatacgaaaaagaaacatattggtggtcaagttttgcttcaaacatacaagactgtagaggatgatcttctggacagatgcagtcgcttgacaattgacaatggcttggacaacaattctttcagtcacatggagtagtaaggtagcattagctaacatctgcctataagccaggttacatatagaagggttttagaacatggtctacatgaacgagaaccttttgtgcagctaggtttttgcgatagctcgaagctgccacgtatagatcttgttgacctatcactgatctcattggcaagattcagttagagttctatgtgcacgctatactgaatccatacttcttttttgcatggacacaagagattaattcttagtccacctaaacataatgattccggctcctttgcctcatggtgcatagcgttccgcagaatcagatgcgctcgagatgtacaggatgctagacagcattgtgtttcctgttactgcctttaggtgttagggtgagtgcatgtgcctgtccacatcaaaagtttgtggcatgacatctgatgaatgggtacgcgtaatctgttgccttgcc

SEQ ID NO: 7003 - DNA, 1518 bp, Oryza sativa
  ref <308>: DATABASE ACCESSION NUMBER: AK064134
  ref <309>: DATABASE ENTRY DATE: 2001-12-06
aatccaatccaacgcttccttcctcgcaaagcctctgcgaatctcgcgcacgcagaaaccgctcccaaaccctagacgcaatggtggtcaccatcgatctccgggaggtcaccatcgatctccgggaggagggcgaggcggcggcggcggcggcgatgaaggccatcgctgggaggagcgacgaggaggtcctcgcggcggtgctcgcgcgcaagggtggccctgtcccgttcctccaggcggcgatcgacgccgcggcggcggcggcgacgaaggccatcgctgggaggagcgacgaggaggtcctcgcagcggtgctcgcgcgcaagggtggccctgtcccgttcctccaggcggcgatcgacgtcgcgcagcggcgatccgacctgttcctcgacccctccgcaccgggggtggtggcggagatggcggtggaagcccaggccaaggcggaggcggaggagaggcggaagagggcgaagggggagccgaggaaggcggaggagatgctgaaggaggaggagccgatgaaggcggaggagatgctgaaggaggaggagccgatgaaggcggaggagatgctgaaggaggagccgaggacgccgatgagagaggcggggagggacaaggtggagagggcagcggtagtggagcgcgtaagagaccctaagcctaatgctggaaatggtctggacttggagaaatattcctggactcaggaaaggccagaggttaccataaccattccagttccccaaggaacaaaatcaagtcttgtcacttatgagattatgaagaaccatctgaaggttggactgaagggttgctcttttataattgatggggagctttttgagccagttaaagttaatgactgcttgtggaccattgaggatgggaatacactgtctatacttttgacaaaggaaaaccagaaggaatggtggacatcagtgataaaaggtgaccctgaacttgacccccgcgacatgaaagtacctgaactccgtgattgtgatgttgaggccaaagagactattgtgaggatactaagtcatggattgcccaagagagctatggatcctgcaacaagtgatgatatccagcaagaggaacttctgaagaatgcccagtactcgcatatggattcctaaggcaaaaattgaggatgttgaacccaagaagtgtacatacatcatcctttgacagagaatagaagttcagacacagaacagaaagtcacatcatcttttttgtaccgggttaggaagctcaaatactgaagacttctctgctagtacgatttagctctatggtaactagtaatcctcgaatcatagcctggtagtcacacaatgttagtctataaacatgaagctgcacctattcagaaaccttcctcttaaacaccttatcctgtatctactcagcagtaacatggtcgagattttgtgctctaagctctggtggttgtgcaaatggatatcggcatctacaaagcaaatgcagttcctctct

SEQ ID NO: 7004 - DNA, 1363 bp, Oryza sativa
  ref <308>: DATABASE ACCESSION NUMBER: AK064135
  ref <309>: DATABASE ENTRY DATE: 2001-12-06
ataaaccgccgtgtcgccgtgcacactcatcatcctcgcaatatctcattctcgggctcactttgttgatcatggaggtggaagcggcgacgacgcagcgacagccatgcaagaacgcgatcaccaccaagcagcagcagcagcagcagcagcagctgagcaccggtagactgttcaggagcccgctcctcgtcgtcaacttcgtcctcatggtggtcggctcggcgtgcgggccgctcctcctccgcgcctacttcctccgcggcggcaaccgcaagtggctctccagccttctccagaccgccggctggccgctgctgctcgcgccgctctgcttctcgtactcctcacgccgccgccggcgcgaggttgaggacgacggcgctggcgctggcgcggcggccacgccgctgttcctcatgacgccacgcctcctggtggcgtccgccgtcgtcgggctcatgaccggcgtcgacgacctcctctacgcctacggcctggcctacctcccggtgtccacctcctccatcctcatctccacgcagctggccttcacggcggcgttcgcgctgctgctcgtgcgccagcggttcacggcgttctcggtgaacgccgtcgtgctgctcagcgtcggcgcggcgatgctggggatgaacgccggcggggaccggccggcgggggtgtcgcgcgcgcagtactgcgccgggttcgccatgacgctcgccgccgcggcgctgtacgggctcgtgctcccctcatggagctcagccaggcgcaccacgccgccgcgcgcggcgccgtcacgtacacgctcgtcatggagatgcagctcgtcatcggcttcgtcgccacggccttcagcgccgtcggcatgctcgtcaacaacgatttccacgcaatcccaggagaagcccatgaattcggtctgggccaagcgggctactacctgctcctggccggatcggctgccatgtaccagtgcttcttcctcggcacgatcggcgccatcttctacggctcggcgctgctcgccggcgtcatcatgaccgtgctcatcccggtcaccgaggtgctcgccgtcatgttcttccacgagccattcaacggcacaaagggcgtcgcgctcgctctctcgctatggggcttcgtctcctacttctacggcgaggtccgggcggccaaggcggcgcatcgccgccgccactccgacgagcccccaaaaccggaccatttggacccttaattagaatgatcagatcactacaaaagtacaaaactgtactgtatttttcctcttgaggaaataattaagtaggcaatattgtacactggataacatatcatagagcattaagtttgtctc

SEQ ID NO: 7005 - DNA, 1895 bp, Oryza sativa
  ref <308>: DATABASE ACCESSION NUMBER: AK064136
  ref <309>: DATABASE ENTRY DATE: 2001-12-06
gatgctccttcatgacttttcactgtctaattggtatcgtgaagactctgaaccatttccatctggattcaggtttatgctgttcacaatctgcaaagctatcagtttaaagcactagtttcagtttcaaccagtttggtgtgagggcagcagtgatcaccaagaacatcctgatgtctgaggtcatcgcttctgcggtcgtcggtgaggctgtgagcaggatctccaccttcctcatcgacaatcataaccgcaaatcaagcgaggaagatggcctggagaggctggagatggcacacatcaagatggaggccgccctggaagtgtccagcaggtggcctttggccatggattcctcgcttatgcgttggaggaagaagctgaagcgagcctccgacgagtgcagccatgtcatggacagatgcaagcgccgcgccatggaagacgatgagacggagaagatcagtcggtgctctttccccaaacggatcgcccttgccacaagatcattcctctcctccttcgccgctgacgagaatgttgatagcctgaactccacttcaaccattcagaggtttgaaaggttcgccgatggcgccggcgagttcctgaaattcatggagtttggcagaataggcagcatcaactacatgctcgttgatcctctcactgggcatctcctcgcaggcaaagcactgcagtatgaaagttctcatggaaatcagtactacctaatatcaaagccaatgagtttcgcagaacgagggcaagaagccggtgtgttgcttcgctacaacaaccatgagaggccagaggagaactttgttcttggaattcttctacgtttgacagcaagcacgaacgtgactgggattgtggccaggtgcttggattcacttctccctagtttcaagccggtcgctgaagctgcaaagcaggagctcactcaggttcaccaccgagccttctactgcttcccctttgtggattctactgatccagagtactggagcatccaccattccgagactcaccgtgctcgtccaaatccggcatgctgccatggccagagcagaagcagtgacatggttgagctgtcagggacgacgacattcccggagcaggtgatcaaactgttcgtgcagcggcatgtctcggcgcgaccatcatcatctggtcacggcggcgacggcgagaggaggagatcctctgaagattccgggccgccgcctctgctgcaggtgacggccatcttcgcgccgcacgcctcgccggaggagctgccgccgtcaggatccgagagcgccgcggtcgtggcgatcgatgggagggaggagccagccgtgcgaacggacatcggattgcgcgaggtggatgagtttcttctgcctggcgccatcgatcgcctgtgccactgccacgacgtccatggcacggtggatggatcgtcggcggcggcggcgtacgaggtgttctggaggtcgggacatggcgtcgcctacctgtgcgtggagaagatgggcacggagatggcaaggtgcaggccgactcaatggcgggagtaaaggtagagacgacggtggcgctcgcctcttctgctaatatgtggtgactgacatgtgggccagtcagagaaacatggtgcttgacatgtagggtttcatgttagaggatttgcttcctgtccacccacaacatggaaaatatacagtgaaaatttactgttggatctaaaaatagatgtatagtaatatttttccacgtcataactgtgagtaaaattacagctgaatttgccatggtttttgcggtgaggatgcattggtgatgcacggaaatttttactcgcaattgtgacatgaacaaatctcaagcgtatatatattttttgaatt

SEQ ID NO: 7006 - DNA, 1530 bp, Oryza sativa
  ref <308>: DATABASE ACCESSION NUMBER: AK064137
  ref <309>: DATABASE ENTRY DATE: 2001-12-06
atttttttttcttttttttgctcgtctcttcctcatcctctcaccgccgccgccgccgcgagcgatttctggctgtgccgccgggatgcagaggaggtggcaggtgtgggggaagcccgacgggagcctcgtctgggtacccgcctccgacgggccgccgccaccggcggcggcggccagtgaggcgccgcttcctcgtcccgatccgcagccggctgcgacggagctgggagaggcgcgatccggcgatgcgattcccgaaggccccggcgccgccgatggatgcagcgtcccgtcgatggctgacctcttcaaccaagctttggataagctggttgctgctgatggaatggccgaagcgatcgaggattcagggaaaggtgcggtgttctgcactgggttggggggatcagttgccgtcagcgagagggctgtagagagggccaaggcattggttggggaggtcgcggaggagataagtaatgagagaaggcaaccatttggtgatggttctaatttggagtgcggattgggagaaagtaatgtttcatttaaaggtggtgtacataaagatagtttgtctccgatgttccaaaccggatcgggtaaaatggtttcactgagcaagggctcaattcagaaggctagagctgttttagaaggaaatgccgagaattcttctgtcattgctgtacagtctatgttccatactggattggttaggccagacccagtcagcaggagctccactgataatgcaatgactgttttggagggacaaacaaatccaaaacaaggagatgtggcagatgtgtatgacaaggaaaattttccattgttccaaactggttcaggtaaagctgtatcggtcagtgtagcatctatccagaaagctaaggctgtcctggagcaaaataatacaatagaaaacacggaagattttggtaggcctgaccaatctctgattttccaaactggttcgcgaagaccagtcttgatcagtgaaagatctagctctgtggtgaaggatggaggtgctgaaaatattgtgttccaaacggggttagggaggcctgttgtggtgagccagacctcaattcaaaaggcaaggacagtattagatcaagaatgtgccaaaagaagtggacatggagatactaatgtctccaccactacttttcaaactgaaacaccaacgtctgttctgatgagtggtggcctgactatgaatgatagatctgttacacctgaggggggtgtttcaatgcaaggaaattttttggaggctgatggtcacttgccattatttcaaactgggttagggaggtccatttcagtaagtaaaggctcaattaagagagcaagtgcacttctggagccaaggaacattacaaaagaactggaagatgaagctcactcagatgatggctgtgccactccaatgttcaaaactggatcaggaaggtctatcacagcaagtgaaaattctagaaagaaagcccacgttgtcttagagggcgaggaaccagt

SEQ ID NO: 7007 - DNA, 1313 bp, Oryza sativa
  ref <308>: DATABASE ACCESSION NUMBER: AK064138
  ref <309>: DATABASE ENTRY DATE: 2001-12-06
aaaccctaacccttcctccccttcaagccacctccgccacctagctcgggagggcgcagcgccgtcatcgccctcagccaaggccgccccgtcgggcaccggcgtggctggggccggccgccgcagccgaggctgctgcctcggacgtcgctgccatcgggctgccgccaccaccgctgaggatgccgctgaggacgccacccacgccgccgggcagccgccgacgccgtggtgacgctaatgccgctaccgccgccaccctgcaccctccccccacctcctggacccttcactgcccttgctcaggcctccccctcaccctagggtgggggacggctagacttgccgccgccgcttgtcttggccgggacatgcccggtcttgatgacacgacaggggtcggggaacggaggggccggtggaggggcagagttctcgccggagccccctgctgccatgtagaatggcggggctccgcgacatgcagcgagggttcctttgaggaggaactccggcggattagccggtgtcagtgtgtgcaacggcgtctccagcgaatagtccggcgatggtgatcgagaaatggcgcggcgaagatgctgggtccaaccgtgatgaggacagaaggccgtcaccatgtcgggcagctcctgctgcggccgcaccctcgctgtccacccatgggattcacggtgatgcggggactccaccagaatcctttctggtgcagtgcacatgtcgggcaccaccagaggcccttggtgagttgcgagggtgctggagtaggtgttgtcggctccggtgttccttcgggcagcagcgccgctgctgtggcgtcatccttcacgtccagcgaagccaaggggaggagatggggggccacggcccctgccgcatcgagcacgacgcactggagcccgaaggatcctctcaagctgatgcatgagttgacggagacgacgggcacggatgttgcgaggaagggaagaaccggcatcgagagaaacattggaaccgtggttcctaggccccatctattatgggccgggcaacactactatcagccactccatcttgatcgtgggctacgacgtcgacgacctgggagacctttactgggtcgtcaagaactcatggggtaaacagtggggcgatcaggtacatcttcatcagcgccgcggccaacgacgggatcgttagccagtcaggggtcgccggcatcctcaccagtgcgatatatgttcagtagctgtgctggtgctactggaatttggagaccaaggagtgcccaacgtgaaaataaataaataaat

SEQ ID NO: 7008 - DNA, 2570 bp, Oryza sativa
  ref <308>: DATABASE ACCESSION NUMBER: AK064139
  ref <309>: DATABASE ENTRY DATE: 2001-12-06
ttatggtgaggacatacttgagtacaaaccagagcttgagctactgggagttcatgttgcctttaaacagaattaccagctgctagttgacaacttcagtctcattagagatcaaattactcctgatgtcaccatactgatgctcaagtgccttcgatatgctgagatacctcaacattttgctaaaaagctgaaagagctgaaatggttgaagacttgtcttggcttcagagctcctcctggaactttcctcgttaatgatgattggaaatgtcttctgaatattgttgatgatgtaccgctgcttgatttgaagttctatggagatgaaattagggtgtacgcaggagagttaaggaaggttagtgtaatcgttggctttatagaggcaagtaaggcaattgcctgtagagtcacgaaactgttatgttcttccttgtttacagaggagaggggagttgccatgctggaatgctacagagaacttagtaccaagcatggaaagttacctgttgatcttgccaattgcatgaagtatgagagatggctgcatacatcacttggattcagagctcctcaggaagcaattatttttggttctgaatgggaacatgtttctaaaatttccaatctacccttcattgatgattattattattctgagtatggccaggggaaaggtatcagcatctacagagatgaactaatggccttgggtgccaaggctgaactaaaacatggagcaccctttgtcatctctggactcaaaattcctcatgatgcttcagctattacaccagaagctgttatatcattgctgaagtgcatcaggagctggaaaatgcttggctcagctttacctgacaatttcatgagctcaatcaacctgaggtgggtgaagacgactgcaggatataggcatcccaagaattgtctcctgtttggtcctgcctgctcttctcttcacagggatgatggccccttcgtagatgaagtgttttatgggcaggagatattgtcatatgagagtgagctgcacacattaggagttattgtggatgctagggctggctgtgcgctgatggcgcagtgcttaaagagttgctctaatggcgatgcaatttccaggatatactcatatttggaggcattacgttggaagcctcgcaatgctaacgataattggatttgggtaccacagggaagtgataatggacagtgggtgagcccagatcgttgtgttctttatgacagaaatagcctctttggctctcagctccatgttttggtaacatggtacgactacaagctacttaggtttttcaaaactgtttttggtgtgaagggtcatccaacgattggcgactactgcaggctctggatcatgtggcagaactccaaatccactccgacaccaaaagattgtgctgctttctttgaatttgttgataagaattggaacacagaaattggcaagtaccttgctggatccatcacaaaagttcctgtctgctcagaagatcggatcttgctacttccgaagcaggatgtgttcattccagatgatctgctgctggaggatttgttcaggatgcaggctgagcaacctttatttgtatggtatccaccagctagcttgtctctcttatctccagcaaaactaaatgagatttatagcactgttggtgtccagaaaatatccaaggttgttacgcgggatgaatctgaggacttgaagctcgatcattcgctaaccatggttcagaaaggaaccgtgatcaaacctggcttgctcaggatcatactagcatttcttgcagatcctgctctcgactttcctgctgaaaagaggcatgaaatggtatcatgcctcaccaatgtggttgtctatgagacagctatgcctctcacagtgagctatcaggtagggctttcttcaggaagaagcttgaacgttaaatctgcacggattttccgctggaaagggaggaatccagaattttcatgactaggaatttcgggtcggcgtcactggagaatgcggagagggtacagtgtgcagcatattttgctgaggagatatcaaaagggttgttgtttgagagaacagaccaagttcctgctctcgctgagcttatcatggctgggtttctgttggactttgatgttcctgctgttcggtttctgttgaagttcaagaacgtaaggctgcttgaggacgatgaacagttctgcagctaccttgcatagtaacaaatcatgttaaatgttactccatttggatactgcaactctgcgagtcactaattcccccctgtttatctgcatcaaagtttatttttttatgtgcaaagccgcactggatttctggaccactacatgtgtactcgtatggagaatggtggtttatcatcgtggcatagcaaacttttttgttcttgggagacagagtatgaggccgcaggattgagcgatgcaaattattgcgtagtcatgttcaagagtttgttgtttcgttatgctatctctattattaatgctaattatcaactatggcatgaatgcttccg

SEQ ID NO: 7009 - DNA, 668 bp, Oryza sativa
  ref <308>: DATABASE ACCESSION NUMBER: AK064140
  ref <309>: DATABASE ENTRY DATE: 2001-12-06
atgcgtcggctcggccgtctcaaacccgaagagaaaagaagtcgtcaagccgtcgacttgttcggttgtttgccttgcccaccgagcctcccgcagctgtctcgctcgcggtttttctactccatctcgcctccgcggctccgcctcgcgtcgctcgccatgggcaagtccagatccggggtgctgctggcgctgctcctggtctgcgccgcggtggcggcggcggcggctgctgccgtaccgggcagcaaggggaagggcggggcgggtcgggcggaggtggcgtgctcggatctggcgacgcggggggagtgcgtggcgagcggcggcgggagcaggtgccggtggtgccgcagcgaggcgctcgatgacatgtgctttggggccgccgaggcgtggaggctgcccaaccaggtgttctcttgcgacccgcccgccggcggcgtcgcccacgcccggagatgacgatgcagcctaggcggccactgctgtcgtcttgctcgcgattaatctgttgtaccctctccccctctgttctcgttggatttgagaatttaagaactactgtttcctggtgttaagtactccagatccttggatgccacatagacgattttccactctacttttctgtaatgtatgttttgatcagaaatctgccgatcgat

SEQ ID NO: 7010 - DNA, 622 bp, Oryza sativa
  ref <308>: DATABASE ACCESSION NUMBER: AK064141
  ref <309>: DATABASE ENTRY DATE: 2001-12-06
gcaaacaaatccaaccccccaccaccgcggccgatgtccaccctctccccggacggcgactccgactacggcggcggcggcggcggcggcgaagcagccggagcagtgatggccgacgtcctctccaagggccgggaagcctgctacaaggcccgggacgccttctacacgtgcgtggagaagcacgcggacaagaagcccaccgagatcgccaccatggggctcctctaccccgccgactgcaagaagtcccgcgccaacttcgtcaacagctgccgcccctcctgggtgaagcacttcgaccggcagtactccgccaagaagcgggtgcagcggctgctcgacggcggcgacgaccgccggggccccatctcgctcccccagccgtacacgttcaagcaatagggaaaagcttgtcaaagactcgaaatgctttcataatcaatggaaatggagatgttggttatgactgggctggtagtttgtttatgtgtatataagaatataataatagtgtttatagttctgtaaattgggttcttgaaagtatatcacttgatagttgtaatcatgtatttgtatttatgtgaaattcacacacataggaacaatttgatttgag

SEQ ID NO: 7011 - DNA, 2789 bp, Oryza sativa
  ref <308>: DATABASE ACCESSION NUMBER: AK064142
  ref <309>: DATABASE ENTRY DATE: 2001-12-06
aagctggacgaaagtcacatcttccgggttggtcttttatgcccacatgggtgtggaatatgggggaaagttaaagggagagaggacactaaggtgtaacgcgttaagaccacgctctctattgatgctcctccgttcccgtatgtagtttgttgagagactatcatgtttcatgtttgtttacttccgaacagctggtagacctctctaggaataaactccatacctcattcagcacattcccaaacaaaatacgagagatttgccaagaaggtgaaagatcaggcacagagaaatcaagaggttcgagctagacgacgcgcagaccaaggactggatgaagcaggtccgcgacatcgcctacgacatggaggactgcgtcgacgacttcgcccaccgtctccgtcacgatccccgcggggacggatgcctcgtcgaggtgtacagggcgctgtacgagatctacacctgcaggcctcgctgtgacatcgccgccaagctcgccgagctcaagaaccgtgctcagcaagtgggcgagcggcgcttgcgatacggcgtcgtcctcaacccgattccccctcagcgcggcgagacccgcaatggtgaccagaccacgggagagaaccaggtggccgggcgccggctcataaccgtaaaggagcccatcggcgtggcgcgcgccatcgagaaactcgaggcgtggatgaaaagccaaagtcacaagaaccgcggtgtgctagccatccatgggtttggtggcgggggcaagagcacaatcgcggcggcgctgtaccggaagcatggccaaaatttcgactgccgagcgtgggtgacgatgccccagaagtttgacgaccgtgcggtcctcaggagcatcctgagtcaggtcatgctgcctgccactgccagtggtggtggcgaccgcaggcgacgaggaggaagcagacacgcaaagattgaaaccatgtcccaggaacaactcatcaaagggctgaagaaccacctgcaaaataagagctacatcctcgtggtcgacgacgtacggtccgccgaagcatggcagacaatcagacaatatctaccggatgaagaaggcagcagagttgtggtcactacacgattcgaagccgtagcaggggaatgcatccttgacagacagaaagacatgctccatcatgtggatcgtctatctgatgatgacgctaagaggctattccaagagagcgtgtctgaatccatccacagcagcgatgtgaagcatgccaaagaaaccatggacagaatgaacctgtcccatgtccgatcagtcacagtgtttgggagcttgaaccagctgcctttcatgtcgctcaagctcggcattgtacaggtgctggacctggaaggctgcaagggcttcaagaagcagcatgtcaaggacatcttcaagatgcttcttctcaaatatctcaacctccgaggaacagacatcaacagcatcccttccaagattgggaagctacggtacttagagacccttgacataagggacacgaatgtccagaagctgcctgatgccatcgttcagcttgaacggctgacgagtatactcggtggaaacacaatggcacaggtaacactcaagttgccagcggaggcaacgaagaagccgttgcgaacactgcacatcctgtccgggatcgagatcactggggagccgacgtccgttaatgatttccacgggtacactgcccttaggaagctcgggatacacaagctacaaatccaggagggtactcctggcttcaaggccttgctctcttccatccaataccttggaggtagctcgctcaagaatctcttgatcaatgatgagtgctccggtttcatcgacgcactggattctctgacctcaccaccgagatacttccattccctccagctgtacggcatgttcatcaaggtgcccaggtggattgctcatctcactgaactgaagaacttaaccctgtcagttacggtgctccgaactgataccttggagctccttcagaagctacctcgtatgttctgccttatattttcgtcctggacatccagcaaggaccttgatttggtggacattcttgaaaagaacaagtcggactcagaggggcagatcttggtcaagcatggagggttcgactgccttaagctgctccgcttggacgcgccgctcctgccattgctcgtcttctcggagagggccatgggcaacctcgaaaggcttgatatgaagttcaacacgctggaaggcgtcttcggcatggataacctcacgagccttcgtgaggtgcacatgacggccggtgaaaaagccggtgagatcaccaagtcaatagtgcgtgagctggaggccgaggcaggtaaatacgccaatacaccaagagtggtcgtttacgagttagctggacgcggaagcaggtcacatacgccaaacgacccagagtagtcttctatgaattattatagctagtctctattcagaagtgctcgtcgtcgtcggtcatgtttgtgctgttctgttttagcttatgtagtgactggtgcttgtttgagtttacccaataagaatggttttcctatttggggatggtgccatggtggtgaatctgtcatcctgccattatatttagagtttctgagatttttgtaagagtggacagataaatcttttgtgcgtgtggtttgaatatttgtggattgatgctaatgtttaaacttgcgctccaagcgcaaatggaaaggtagtaagaaatgttgcttttgtc

SEQ ID NO: 7012 - DNA, 1555 bp, Oryza sativa
  ref <308>: DATABASE ACCESSION NUMBER: AK064143
  ref <309>: DATABASE ENTRY DATE: 2001-12-06
atcattattcccagctcagatcatcgttgcgagaccgatcgatcgatccatcttgttgttgcgttgctctgtttggtttccgtagtagatcgtttcttggttagccggcctgttgaattgttaatcacgagaatttgggtattttctgatcgatgacgcagtgggcggatctggacgcgctccggccggcggtggccgccgacgtgcaggtcgtcacgtcggacgggaagagcatcgccgcccattcgttcgttcttggcacggcgtcgccggtgctggagcggatgatcgagcgggcacggcgggggtggaacgccgagtgcaccatccgcgtcctcggcgtctcctccgacgccgtcttcgccttcctccagttgctctacgcttccagggtgacgccggaggacgaggaggtggtgaccgcgcacgggccgcagctgctggcgctgtcgcacgcgtacaggatcgggtggctgaagcgcgcggcggaggcgtccgtgacggcgcggctcacgccggagcacgcggtggacatgctgaagctcgccaggctctgcgacgcgccgcggctgtacctgcggtgcgcgcgcctcgcggccaaggacttcgccgccgtcgagcggtccgagggctggcgcttcgcgcgccgccacgacgccgcgctggagctcgagatcctccagctcctcgaggacgccgaccagcggagggagcggtgggcgcgggagagggcgtcccgggaggcgtaccgccagctcggcgaggccatggactccctcgagcacatcttctccgacgacggctgctcctgcgccgacgccgacgccgacgccgacaccgacgcgccgccgtgccgcggcctgcgcctgctgatgcggcactacgcgacgtgcggcgcccgcaaggccgcgccgggcggcgggtgcacgcgctgcaagcgcatggtgcagctgttccgcctccacgcctccgtctgcgaccgggcggcgccgcacgacgacggcgaccgcccatgccgcgtgccgctgtgcagtcatttcaagggcaagatgcgggcggagaaggcggacaagacgtggcggctgctggtgaagaaggtgacgagggcgagggcgatgtcgcggctggcggcggggcgcgagcgcgaggtggtgccggaggtggtggccgcgtcgtgggcgaggtacagcagcagcggaggggccgccaggttgagatgaccgtgagaactgtgttacgtacacagggccatgtggatggcgtgcgggaccttttcgtgcgtgttcctcgcgtgcaatttttcgtcgtgggagggaacaccgcggaaaatggcgtgccatatgcccctgctgctgccatgggtggggttggtgggctctcgtaggagtgtgacataagcctgtgatgtcaggaggggaattgaaggtggtgcacgattcgattagacagtgtagtgtcggtgtttcaagcttgttgtagctggaatgaactcaagcggaactcgtgtattaagtactgtatttgtgttccatcaaagaaaatacttttttttgtc

SEQ ID NO: 7013 - DNA, 1567 bp, Oryza sativa
  ref <308>: DATABASE ACCESSION NUMBER: AK064144
  ref <309>: DATABASE ENTRY DATE: 2001-12-06
accatcctgtactaataccccccggcctcacaggtcatactcctcaccccgccaccatggccgccgtagcgcctcctcccgacggcctagacccgccgccggcgacgccccccaccgccgccgcgggcaccccgccgctcgccgtccccgccaccaacacgccgccgaaccccgcgacgactcccaccccactcacgccaaaccctaaccctagcccgacgctgcccccgcccccgatgtccacccctccggtggtcgcgccgccgatgcactccttcgccccctcgttccgcccgctcggcgccccgcccccgcccccgccaccgcagcaggtgcaggtgcaggtgccgccgcagtacggcggcgtgccgaacccggggtacccgatggcgcagcagatgcagccgccgggggtcccccacgtgatgccgccgggcgccgtgcggccgcccgccatgtacgcgccccagcctggcgtgtacctccagcagccaggcgctgctcttcctcccggtatgcctcgctaccctggaccataccctatgatgcgccctggctttccgccacgcccgatgcctccagttggtgttatgccgcttcaacgaccaccaattattcctgggattcgtggtgcacctcctgtggttccccctactgcccgaccacctactccagctgttacacctcctgacaaaccgccaactgcagtttatgttggcaagattgctccaacagtggacaatgaatttctcctttcacttctccgtctttgtggccctgtcaagagttggaagcgtacgcagaatccaagtagtggaaagcctgtatcatttggcttttgtgagttcgaatctgccgaaggcatccttcgtgcaacgcggctgctcaataaattgagcattgatggacaagaacttgtggttaacattaatgatgccaccaaagagtacctgaagaaacatgttgaagaaaagaagaaagcacaagaaaagaccaaagaaatggaagatggaggtggtagtgggactactgctgtcactggaaatgaattgtcaaagcctgtttctgatgaaacagagacagggacaggagatgctggtgataagggcaatgaagaaaatcctaagaaatttgggattgttacagaggaagattctaaggctgataaggatgttgctgaaaaaattagtagtatgattgaagagtggttaaagactagaccaccaccgccacctcccccagttgaacaatctgctgacatctcttccaaacacaagaatggagagtatagtgtagatgtgacaaaaaatgattctgaagataagagtggcactggaagtgataaaagggtagttaatgagaccgaaaggatagaaactgggtctcctgataagaggaaggagagagagcgtgataaggagaagcgggacaaggataaagaacttgaaaggcatgaacgcgagcgagagcgagaaagagtcaggagagacagagagaaggatattaagtataaagaagtggagaggttgtacaaggagcgcctcaaggagtgggaatttagagagag

SEQ ID NO: 7014 - DNA, 1606 bp, Oryza sativa
  ref <308>: DATABASE ACCESSION NUMBER: AK064145
  ref <309>: DATABASE ENTRY DATE: 2001-12-06
gtttctccgccgccgcggcgatcacaaggagatctcccctctctctctctctctctctctctctctctctctcctcgcgctcgcttttaaatgccaccgaggcccacggtgtgggctggtccaccgcacgccgcgctgctccgcacccagcccctcccggcgccgccttccgcgccgccgccctccgggggccccgctagggtcgcctttctcttcctcgtccgcgcgggcgtccccctcgacttcctctgggacgccttcttccgcaacggcgaggagggcaagttctcggtgtacgtccactcggcgcctggcttccagcttgaccgcaccaccacgggatcgtcgtacttctacgggcggcagctcgccaggagcgtaaaggtggcgtggggcgaacctaccatggtggaggcagagaggatgttgttcgccgccgccctcgaggatccagcgaaccagcgctttgttttgctctctgatagctgtgttcctctgtacaatttcagctacatatatacttacttgatggcttcgactaaaagttttgtagacagttttgttgacaagaccgagaagcgttacaatccaagcatgtctcctgttatcctaaaggacaaatggaggaaaggatcacagtgggtagcattgaccagaagacatgcagaagtagtcgttggcgacaaacttgtcttgcaagtattcagaaggcattgcaagatggtagtaactaaggctttgcttggacagaagcctaattatcgaagattaggatttggacttcgtcgaaagcagatatcgaaaggatctactcgaatggagcatgattgcattccagatgaacactatgtgcagacattattttcaatcaatggacatgaaaatgaactggaaagaagaactttgacatatacatcatggaaccagtcctcagatcctaaagacaaaatgacttggcatccaatgacatttgagtatgagtcagcaagtcctgagcaaatcaattcaattaagggtattgatcatgtgaattatcagatggagcacagaactgagtggtgccaatgcaatactacatccgttccatgtttcctatttgccaggaagttctcctacagtgcagccatgcatctattagaggctgggacggtcggtccactaaaatctgctctactggcttaactattactgcaaaattttgatcacacgagttctcatttttagtttatcatggccggccatagtttatagtccatcagcatcattaggttcagtagcatctgcagctgaatctgcggagcgaccggagtaccatagtgtattattattgatagtgttcagatttgtgcatagaccactgggacagaagaggtttgatgtacagagcatcagttttggagcttgtcagctcggctacattgcaatatccaacgacagaatgaggcaggatcagatcaggtatcttgtgacgaagaatgaagaatgctcaacccttctcccgatggtatttactaattacaggataggaaagctgtaacaatatcttgataaatgatcatatacacattaacaaatttaataaagtacaaagaaaatattttttgtt

SEQ ID NO: 7015 - DNA, 1444 bp, Oryza sativa
  ref <308>: DATABASE ACCESSION NUMBER: AK064146
  ref <309>: DATABASE ENTRY DATE: 2001-12-06
gaaattcgatgccattgcaaccaggcactgctgatatagtcttcagcatctgctataatgctgatagatgggatttactctcaaaatatgcgagaagattcgtgaagtctgaagtcaagctgcatggtgcttcatttgacatttggatggacttcgctgccaaagtcggagactcccaatctatatggaacatcaatagcctgagaggcaagtcagtcaaacgctataatcttgcaacaggttttgcatgtgtaaaggggtttctgcttgagcgcaaaccagaaagcgccgctgccatgattaaattacttcacaagcattcacctgatgagaagaaacaattggtgacggatgagctccagaagcttgttgctgaatggccagcagaggtgataaaaaggcagaagaaagatgataggaaggcgctggaggaagctttgattacagatatccctcaaatgatcagttccatgtcaaagctgcgccttgatatttctgtgaatttggagaagcttacctctcaacctgaaacagcatgagaagtaacacaggtgcccagatggcctagcagctgaaattacatgagtacaggcaggcggacaatatcacagtccagccatttgtattcgactacattctatttgatgggtagcacactagcactagcctgcccgacaataacatgtatacaacacattccgttgtttaccttgccatgtgcttttccatgacagttttgtagaaaaccttggtgaaattgcacgcatgaaattcagacggcgccggcgacgcccggaccagaggcggaaggactcgccgccggtggtaagttcgccggcttcaataggcttccctgaaggccatggcaatgtatagcaaagtagcttgagattgcaggttcacaagacgtattaaccccacaactgatcaacctttattggcgggaaaggaaggctgatcgcttaattagccgcttcagttgcacagtaactgaggaaccgaaagtgggtgcagtgcaaaactgcaaatagtagctgtggaatttgcaaactgaaagggcacatgcatgcatggcccaagcccaactagctttaaggccctgtttgtggagcttctagctgctgcagcttctccgagaatcagaaactcccccaaacagttcagcttttggtgtaaattctgagaagctgtagttgtagaatccagaaaatgaactagaagctagaagctgggaaacttagcttttccagattcttagaagctggctaccaatcagctgcttctcagaatcttaagctccccccacgcgttgtgaaatttgtttttcacccttagatattctttggcttctaggttgtattggggtgtaacatttgcgattctatttgatcatggacagctttgcgggcttcaaattcagcgtgtaaaatgagatggaattaat

SEQ ID NO: 7016 - DNA, 2174 bp, Oryza sativa
  ref <308>: DATABASE ACCESSION NUMBER: AK064147
  ref <309>: DATABASE ENTRY DATE: 2001-12-06
attcaactatttctattttctcctctcaaaaagggggaaaaaaaggatcaaccactacgccttcgtcttcaacctcccgttgctctgaaggatcacgagattcctcgccatcgcagctgatctctccgccaggtgttcgacgaaatgtcgctggaagaaaccaacccggcggtggtggaggaggaggaagggaagcccggcagcgcggaggaggatgccgtcgcttacggtgaagtccaggtgttcgacgaaatgccgctgaacgaaaccgacccgccggcggcggcggaggaggagggggagcccggcatcgcggaggaggacgccgtcgcttcgggcgaagaccgcctcagcgagatgccggacatggtgctgcaccacgtcatgtcgttcctcaaggcgtgggaggcggcgcgcacctgcgtgctctcgcggcggtggcgccacctctgggcctccgcgccctgcgtcgacatcctcctgacgagcgaccgccagccgccgccgatgaacaggcgcatgcgccaccaccgggcctccgcgccctgcccctgcgccgacgtcctctggacgcgcgaccgcaatgcgccgagtgacacgcgcaggttcgtgaaccggctgctcacgtggatggtttcggggacaagtttaagaatgtcgatgtcgagaagtggattagtgaagctatcaagagaaaagctcgggtgattcagcttgaagatcattatgggatgttcgttgtatttgctcaccaggtcttcgcttccaaccatctcaaaatcttgaaactgtcgtacgccgagctggatgacgatgttttcaggggattctcctctcgatgcccttctttggaagaactggagctcaagaaatgcgtggtaagtgcccgtgagatttcatcagtcactctgaagagtttgatcatggttgaatgcaagttcactatgaatctctctgttggtactccaaacctcgtgtttttacaatgcatcacaccaatgaaatgggttcccgtgctcaaggactctgggtcgctggtcacaggaagtatcatgattgatgactcgctacttattggtgattctaaaaaaggacatgaggtggatggtttctcttctgattattcttatggtggctcttctgaagattattttgatgacctttccagtgacatcagtgatgactatgactataactatgaaaatgatatcaatagtgatgctgatacatatgagtacaatgagattgtgaatgaatataaatttgagcagtataaagaccatgatgatggaggtgattgcagtatgggtggtaaatatcatggctccagttctaacaatgggttcaatgatgataaaactttgggtggacaaaatgttcttcacagcctttcaaatgctagaagtttggagctgttagctcattcaggagaggtggttctgagcagggaatcaagaagttgtccaacttttagcaacctgaagactttgacccttggtgagtggtgtatcagtatggtcgctgacttcgacatattgattctcttcctccagaattcacctaatttggagaagctttttcttcaacttgaaatgagttacaacatccaaaaggaattggaaaaaggtatcaaaccaaaaggaggatcgtttgcctgtaaacgccttagtacggtgaagatcagatgcaccaaggatgatcttagagtccgtatgctggcacagttgttcaattctaatggcttgtccttagagaagattttcgtccgtcgaagtgggagcttccgccttcgcaactccaaacttaacagagaattaaattgcccgtggcggatgtcgtgactggtcgctgtgaaacccagaccttcaaaatattcaagatcgatgctctaaggatgatgtaagagactcaataatccatatgctggcgaaaattgttcagggcttttgatataccccttcagaatatttaccattcatgtccatttgaattggagttattcatgtccagttgaagccactgtcatcttagtttaccttgctaccagtatagttcgaatttacagttacagcagacgtcgtgtgctacggtttaaagcaaatgttctgggcatattgttctaaactcgttactttttgctttgggattaaatggattatgagagcaagtttaat

SEQ ID NO: 7017 - DNA, 1345 bp, Oryza sativa
  ref <308>: DATABASE ACCESSION NUMBER: AK064148
  ref <309>: DATABASE ENTRY DATE: 2001-12-06
tgcgggaggaagacggcggcggcgaagaacgtgctcatcctcatgagcgacaccggcggcggccaccgcgcatccgccgaggccctccgcgacgccttccgcctcgagttcggcgacgcctaccaggtgttcgtgagagatttggggaaggagtacggcgggtggccactgaacgacatggagcggtcgtacaagttcatgatccgccatgtccggctctggaaggtggcgttccacggcacttcgccgcgctgggtgcacggcatgtacctcgccgcgctggcctatttctacgccaacgaggtggtggccgggatcatgaggtacaaccccgacattatcatcagcgtgcacccgctgatgcagcacatcccgctgtgggtgctcaagtggcagagcctccaccccaaggtgccattcgtcaccgtcatcaccgacctcaacacctgccacccgacatggttccaccatggcgtgacgaggtgctactgcccgtcggcggaggtggccaagagggcactgctccgggggctcgagccgtcccaaatccgtgtgtacgggttgccgatcaggccgtccttctgccgcgccgtgctcgacaaggatgagctgaggaaagagctggacatggatcccgacctgcctgcagtgctactgatgggcggcggcgaggggatgggtccggtggaggagacggcgagagcactcagcgacgagctctacgatcgccggagacgccggcctgtcgggcagatcgttgtcatctgtggcaggaaccaggtgctgcggtccacgctgcagtcgtcacggtggaatgtccctgtcaagattagagggttcgaaaagcagatggagaagtggatgggcgcttgcgattgcatcatcacaaaggctggtcctggtacaattgcagaggccctgataagaggactcccaattattctcaacgacttcatacctggacaggaagtcgggaatgtgccttacgtcgtggacaatggtgccggtgtgttctccaaggacccgagggaagccgcgagacaggttgccagatggttcaccacacacacaaacgagctccggagatactccctcaacgcgctgaagctagcgcagccagaagccgtgttcgacatcgtgaaggacatccacaagctccagcagcagcctgccacggtgacgcggatcccttactccctgacctcatcgttctcatacagcatatgaaaaaccatcaaggttacaggatgtactatgctatgctctgcaaacatgctttgcctcggaaggttggtccgcttgctgaagaacttgtacatactgaattggatttgttcgtttgtcc

SEQ ID NO: 7018 - DNA, 2446 bp, Oryza sativa
  ref <308>: DATABASE ACCESSION NUMBER: AK064149
  ref <309>: DATABASE ENTRY DATE: 2001-12-06
gaactggtaaaaaagtctatctttcctccctcgaggacttgggaggcgacggcgctccgccgccgcagcgtcggaacgaatccccggcggcggcggcggcggccaacaaggggaagaagaagaagaagaagggcggcgctgccggcggcagaggcggtgggaggtggccaccgattttagccggagaaagatctccatatcaatcgtctcaagggcactaacctcctcacaataacggaggaagaacaatgaagctgcaacggggagtggtccacctaaagaaagtagcagacaatggggagtgatcgttctaaagaaagtggcagccaaccatcaagtacatcaggaaagatggccagtagtatctttgacaaattgcaagtggagttcatcgaccaagatgagggtgtgcaggttgttgcagacaccattggaagctctggcgaggttcctgaaaggtatgtgaggcatgagattgaggccaatattgtcataattgacaacgccaatggttatagtctaccagtaatagacatgtcaagattgattaatcctgacttctcggacttccttctggcatgattgttggtgatgggtctcggacttccttctggcatgattgttggattgcttcagaatgcttagctactaaatttcaggcactttacactcatacaatggacaatcaaatttcagtcaaatatgcacttcaacagggtttaacagcaagtttggtgccgcgactctctgaaacagctaggcaagagtgccaatgtctgcaggacctgctacaagacttttccttaaacaatgagcgggacattcgcacggggggaatcatgggaaaattcacaactaagaacatttatgacactaggttacccccaggaatttcttctcctaattggaacctaatctggaagtgccgagcacctttgaaagttaaattgtttgcttggcttcttgtcagagaccgtctgtcaacaaaacaaaacttgctgaagaaaaagatagttcaaaatggggtttgcgatgtctgtcaacaaggggatgaaacggcagatcatatgtgttttacatgtccttttgtgcagagtttctgggaacggattagggtgaatccgacaattcaggatgtgtggctactacaccagcttaaaccttctcccaatgtcccggagctccatcatcatgtcttcttcttgctctgtatgtgggcgatctggaatcatcggcatgatgtcgtcttcagggggcaaactccatcgattcgatgctgcctacaaagatgcatcaatgaagcagccctctgggcagaaaatttaaaaatagaggatagacatgtggggaagctctcccccccggtgatttagtcaaaaaaaaaaatcctgacttctctgaggaggagatcgcgaagcttggatctgcatgtgaggattggggatacttccatcttgtgaaccatggggtggatgcagggttgctgcaacagatcaaggctgacatcacggaattcttcagactccctctgcaggagaaggccgtggcgatcccacccaatggcttgcaggggtttggccaccactttttctttccaaaggagcagaagctggactgggcagatttgctgttcctcgtcacacggccagttgaggaaaggagcaatggatttctggcctacaaagccttccacattcagggactcacttgacaagtactcgttagagattgcatgtgtctactaagctgttcaagttcatggccatcaacctgggagtcgatgaggaagcactccttggagtattcaaggggcatactcagagtgtaaggatcaaccattacccccactgccgtcaggctgacaaggtgctgggcttttcagcgcacaccgatggcgtcggcttgacactgctcctccaagtgaacgacgtgcaagggctgcagatcaggaagaacggcaggtggttcgctgtgaagaatctccctggagccctcgtcgtcaatgttggtgacattcttgagatcctcacaaatggcaagtacaagagtattgagcacagagcggtaataaaccccgataaggaaatgatcacccttgctgcattccataaacccccgctttcctgcacagttggagttggcccactccaggagcttctaatgaaaggtaaggcgcactacaagacggttgatgtcgttgagttcaccaaaggctactttactgcgaagctggaaggcaggagctacctggagagattgaagctgggagtgtgatgatgtcaggatgggatttttctgcctctcttgatccttttgttttcgtgaaaggctaatgacactgtatcttcctcatcctggtacagttcagctggtatttgccttgaccatacactcaagtgtacctttcactatttatatatgatatttgctattatttgtgtactct

SEQ ID NO: 7019 - DNA, 1607 bp, Oryza sativa
  ref <308>: DATABASE ACCESSION NUMBER: AK064150
  ref <309>: DATABASE ENTRY DATE: 2001-12-06
atccattcctaaaccgaagaaaccaaccgaagaaaccgagaaggagagctccatctcccttttccttctcaacctcgccgccgaccgtgaagacgacgaccgcctccagcgccattacgctgcggtcgtttcctcttatcttgtgttccattatcacctctccacgccgactccatccctctaagtttcatcccctttcatgcagtggtttggtgggaacgcaaacctcgccgacgatactctggagcacgcaccgggtgccgccgtggcggcatcgtcgccgttgccatcgatctagaccaagccggagcgagccaccacgccaccagcttcacctcgagcgcctctccatttacccccaagaaacccatccaatggcgcagcgatcttggagatcgacatcgtcttctccaactccgttcaaccgcttccatcatcgaatccattctctctgaccgagcagccgacgtcatccctggagttgtgccatgccgccatggagcttcgccgtcactgtggctctgcagacacccccagccttgtctagcatctcggaatagggttgatctgcaccggcaagatcaacaacctacggagaggtgtatcgatcgctaaggcgcaacacaacgtctcgtacggttgtagtcggatcgtcaacgtttctcccaaatcgtagttatcacaactcaccgaaagatcgggccaacaacagccttgagtgttgagaggaactcagggttcatcaggtggtatcagagctttcgttgctcggtgagtttttatcttcctataaccagaaaatagccatacaaaaaaattcgtatcatttacctagccatattgtgccattgcattgttcttttcagtttttgctttgttgaattttgtgttgcatcgtcacgtcgtgttgctggtcttagcgtctagttcgtttagagtttcgagttctggtcacgttttgtaccacagtcgtcgctgccaccgtgtctctgttgttgtcgggacctacgaaaatggaatcggctcgctgccacggttctatttttgtagttttcagaagtttctatcggttagttttggagttcttgagttgtatctagagtttgccgatccttgtgtgtgtttgttttggccgtgcctgtgtcgtgcacgagaggaggaaggtgaattaccatatctgattttggaagtagtcaagtttgttttggaaagatatagtagattggattggttaaaaatcagtttcctttttatcccatacaccaaattcggctgccatccactccacctcctggccgagtcccactcgcccctttggccgagtccgactccctccctctcttccaccgttccgagttgtgtcaaacaccttggcgaatttttgtttggtgtcggtttcgagatctgtttggaaaaacggaaccggcataaattcagcattctattttttgtataattttaattttgggtttagacttttacatttgagtccctataaattttatatttatgtttgagtccctgtaatcttacattaaggtccttgagtcagtttttgttaaaaaaaataagaaaaaaaagtgagaaaaaaaaaggcagaaaggtgc

SEQ ID NO: 7020 - DNA, 1648 bp, Oryza sativa
  ref <308>: DATABASE ACCESSION NUMBER: AK064151
  ref <309>: DATABASE ENTRY DATE: 2001-12-06
gtgtcagtactctctagcgctcgctgcttgtacctcgcaagtcgcaagccccaggacctcgccgaggacggcagcgatggccacgcaagaacgggaacccgaacggcaaccccacgccggccgccgcgtcgcgctgttcccgctgccgttccagggccacctgagccccatgctccagctcgccgatctcctccgcgcgcgggggctcgccgtcaccgtcctccacacgcgctccaacgcgcccgacccggcgcgccaccgccacgggccggacctcgccttcctccccatccacgaggcggcgctccccgaggaggccacctcccctggcgccgacatcgtcgcgcagctcctcgcgctcaccgccgcctgcgaggccccgttccgggacgccctggcgtcgctgctccccggcgtggcgtgcgccgtggtggacgggcagtggtacgcggcgctgggcgcggcggcccggctcggcgtccccgcgctcgcgctccggacggacagcgccgccacgttccgcagcatgctcgccttcccgcggctgcgcgacgccggattcatcccaatccaaggcgagcggctggatgaggcggtgccggagctggagccgctccgggtgcgagacctgatccgcgtcgacggctgcgagacggaggcgctgtgcggtttcatcgcccgcgtcgccgacgcgatgcgggattcggcgtctggggtcgtcgtcaacacgttcgacgccatcgaggcgtcggaactgggcaagatcgaggccgagctgtccaagccaaccttcgccgtcgggccgctgcacaagctcaccacggcgaggacggcggcggagcagtaccgccatttcgtgcgcctgtacggtccggaccgcgcctgcctcgcgtggctggacgcgcacccgccgcgctccgtgctgtacgtgagcctggggagcgtcgcctgcatcgaccacgacatgttcgacgaaatggcgtggggtctcgccgccagcggcgtgccgttcctctgggtcaaccggcccggctccgtccgcggctgtatgccagcgctaccctacggggtcgacgtgagcaggggcaagatcgtgccatgggcgccgcagagggacgtcctggcgcacccggccatcggcgggttctggacgcactgcgggtggaactcgacgctggagagcgtctgtgagggggtgcccatgctcgcgcggccgtgcttcgccgaccagacggtgaacgcgaggtacgtgacgcaccagtggggcgtcgggctggagctcggcgaggtgttcgaccgggaccgcgtcgccgtggcggtgaggaagctgatggttggggaagaaggcgccgcgatgagggagacagcgcgtcgcctgaaaatccaggcgaatcaatgcgtcgctgcgactctcgccattgacaatctagttaagtacatttgttcgctgtgaactgctcgttgtagcatatcaagtcttcagataattagtactcctgtctcttcatgttatctcaatatctgctgtaaatttgtagccgaattgtaactggcaagcttctgttgatgaactcttggaaatctttgatgtataagatttcagtgggatcactcaactgaagtgttctgtccaaactttatccaagtt

SEQ ID NO: 7021 - DNA, 1403 bp, Oryza sativa
  ref <308>: DATABASE ACCESSION NUMBER: AK064152
  ref <309>: DATABASE ENTRY DATE: 2001-12-06
actggtgcacaaccaagattagtcttccgctcgtcaactagctggaagtaacgtgaactagaattactctgaaagggacagatgcattgcccacttgtgcatatcccgtactccccgcacactgttgggaaagcacaatcatcaacatgtaggaattccttcattacatcagacaccatgatccagcttggttctccacgagaccactcaaacagcctcaagtgcccatcagactctaaccttacgtactgggtggacttagcttcttggaattggatactttcatctggatttcctggatgtgtggactgcaaaaagatgctgaggctgccatttgtaaaggtaatccttgttggatctctctggctcatgtttctgctcagctcatgcttaaagtatagttgtggtggtgtggattcaacataaccatgtacaccatcacggagaacagttatatatatcttaccctcagtccaatttgtgggggaggcatttgctctgagcatcttgccctgcagcagtgactgccctgggaccaatgcgtcggtgggatgatcaaatgactgccacactgtcatgttcctctgaccaaacagcacaaggttgccttgctcagtgatctccatgcgtcgcacggattggtctgaagtgccgctcgaccagatgagtctgccattggctttttcacggaggaccaggtcgccatctccagtcagctcaagggtagcattctctcctacagggcttgcctggttggcacaccagacaacccgtgccattttatttaccgggaaagaatctgtgtcagggaaaatgaagactgcgaagatgaattcttggcagggtggggtgcagaagaaccctgcggcaaatgagagatcggaggtttgtggtgatcggaggactatggcacgtaccaacccatcttcatatgggacgctgtcaaggactttgtttttgacccacagtgtcgagaggttggcactgggatagacggagcgctgcccggacaccggtggtgcggcaactgcgaacaccacgaccaccagcaccgtgaagtcggcgaagagatttccaggagacatgtttcttggattggaaagggaggagtgaagccagcaagaagctgtggtcagttcagaggttgacaagatctcctgacctgatgacactaagtcgatgagctgatgtggtcaccggaaagatatatggcctcaccgtcgccggcatggggtcgccggactggcggactctgaagtgtttgatcggctacttgtgttctcgctctctcagtacttcataactatatattaccacccggtgctttagttttttggtttcttgggaagatggaattttggcttgaccagttctaaatggccaataatggttttggtttctgc

SEQ ID NO: 7022 - DNA, 1484 bp, Oryza sativa
  ref <308>: DATABASE ACCESSION NUMBER: AK064153
  ref <309>: DATABASE ENTRY DATE: 2001-12-06
gctagggttccgtccgtcccagcctggcctaccatccccaaattccccaattcccccacccgatcgccgccgccgccgccgccgccacccgcgccgcgcgcttcctttaccgaatacccgccgcccccgtcgtcgccgccgccgccgccatcaccaccgtcgaggacgagatgaccgtcaccaccgtcgtcgaggagacgaacaaccccgccgccaccgccgtcaaggtcgaggagaaaaccgccgccgccaccaccaccaccaccaccaccacccaggtcgacaagaagacgaccagtggggaggaggagaagccgaagcccgtcgtcacctaccgctatatctgtgagaatatccatcgtctcgatcgaaacgatccttttttcttcacctggggcatgaggaatgaaactgcctatgccatgtgcttgctctctctcctttacgccgtactctccctatgccttcttcttccatggcagcctatacccacagaaggcgatggcgaccacccactaatcaactcgatttggactttctcgctccttgctttgtcttacatgttctgttggattatctcgttgtccgaggctatcactaagctagttgccttcaccagtatcacctatggcattctaatggctttcgctgttgctcacctcctcggccgtgtggttggcatggccgtcatagttattgctgtgctatataccaccggcatgtttgctcatgccatcgccgagcatcgccagcacacgggcagtgacacggccgcagatgccctgctcaccaagaagctaaccacagagcagatgcagcgcgaggaattgcggcgcctccccttcatcgtcctcggcgcgtattcactctttgtgtttggttgcacggcatggctggtcttcactgagatgggcagcataagcacggccacggtgatcatcgttttggcggaggtctcaattgggacgtgcttcatctcatacctgtggagtatattgctctctgtgggtttgctccacgatacctttgtctctcatgataccatcgtcttcaaggctggttcatattcaattgcgctctacttccttgcttttctgcttatcgccatgtttgagagcaaacttcttggcttgtccgtgcttttactcataccaatggcgatggctgggttcctcggctatctcgtcgcggtgtactcacactacaagtcactgagagacaagcttgacatcaacaatctgaagtagaatggcagcttgaggtgaaggatctgaagtatgatggcaagcttcaagtcaagaatccagaggagcatgataataattgatgtgatgaatccagagtgttatgggagttctaatctctaatagtttccttgtgaactagtattagaatgctaatgtttagtggtttccttttaaattactggcttttgaactggtgttagtatgttgctatgctcgaattaaaactctgtttggcct

SEQ ID NO: 7023 - DNA, 2104 bp, Oryza sativa
  ref <308>: DATABASE ACCESSION NUMBER: AK064154
  ref <309>: DATABASE ENTRY DATE: 2001-12-06
accaatcccacaaaccactctccagccctctctgcctcctcgccgccgccgccgccaccgccgccgctcgccggcgcggcgccagccatgctccccttcgtccgctcactccgtaggctcggccctgccgcggccgatgggcgcctccttctccccctcgctccgctctcctcgaaggcggccgcgccgccgccggagtacgagatgccgtcggtgacgtggggcgtgatccaggggaggaaggagcggctcgtctcccgcgtgctcgcgctcgacttcctccgctccgccggcgtctccgaccccgccggcgagctcgaggccgtcgagctcccctcctccctcgaggtgctccaggagcggctcgacttcctcctccgcctcggcctctccaccgacgacctctccgcctacccgctcctcctcgcctgctccctccgcaagaacgccatccccgtcctctcctacctcgagaagctcggcgtcacgcgcgcgcgcctcgccgccttcgtccgcgcctacccggcctgcctccacgcctccgtcgccgtcgacctcacccccgtcgtcaagtccctccgcggcctcgacgtcgaccgccaggacctcccccgcgtcctcgagaggtaccctgacatcctcggcctcaagcccgatggcaccatcagcacctccgtcgcgtaccccgtcggcatcgtcggcgtggcgccgcgggacatcggccccatggtgacgcacttccctttcttcctcggcatgcgcgtgggcaccaccatcaagcctctgtgcgagtacatcacttctctcgggctgccaatgcggatcctcgcgaggattctcgagaagcggccatacattcttggctatgatcttgaggagacggtcaagccaaatgtggaggcattgctcagctttggcattcgaaaggagatgttgccgctggtgattgcgcagtatccgcctattcttggattaccgctgaaaacgaagttagcagcccagcagtacttcttcaacttgaagctccaaattgaccctgatgcgtttgcctgtgctattgagaaattgccgcagcttgtaagtttgcatcagaatatcatactgaagctggtggagtttctccgtgggcgagggattagtaatgaggatgttgcgcggatggtggttcgatgccctcagattttgttgcttcggatggagctcatgaagaacagtctttacttcttcaagagcgagatgaagcgcccaataagtgaattgttagattaccctgagtattttacttacagtttggagtcaaggatcaagcctaggtacatgagagtttcaactaaggggattagatgcagcttggattggttcctaaactgcagtgatcagagatttgaggaaagaatgagaggggattttattgaaggcgatgcaccaggaccctcctttacaatgggagggaagcttcagatgccaggcagccagttagtgtcggatgatgataatgcggaaagtgacgatgaggtgctatataggcgaacagtcatgctctaatttggtggaggataatcccaaagatctttcgtgatgtgctcctgacagcatcatgcacgcaagcatcctcaactgcaagatgaaaaaggctttggcgttaatggaacattctcacaccaacagaggtcattggagtgctggcctaagcaacagctcgaagggattaacaaaggtatcgtacagaacattgttgaagaaaaactccaacaactcacccagttaatccagtcatcagataggagcaagatcaagcatcatgtcaagatcagtcaatcaagtcatctaattagaacccaaatcacattagaaaaaagatcagaatcgtgtggtaaaccagatcttcagactaacaaatcctcacacactaacagaacaaaaagtttctgcaaacagaaacagaatgtcagtaaggacaagaggacagaaacaaatctttatctgcttttttctcccctattaacctttcacttttttctgtcttgttagagtgcaccgtttttgtgcgaacatttactcctttatccattaatcaggagtccaggaccatttcctttgctcc

SEQ ID NO: 7024 - DNA, 1470 bp, Oryza sativa
  ref <308>: DATABASE ACCESSION NUMBER: AK064155
  ref <309>: DATABASE ENTRY DATE: 2001-12-06
acctccaccggttccatctcatctcatggcttgtccgtctcgccgcgcgtggtcggatggcctcccgcccgagctactcgccataatcgtcctgcagctcaactgccttgccgaccgcgcctgcttctcggccgtctgccgcgcgtggcgtgacgcggcgccctacgccgacgccccgcagcgcggtgtcccgtggctcctcctcccggcccgcgacgcgccgtccttcttcagcctccactctggcgccacgcgccgcatgcgcctccccgatggcgtccgcggcacgcgcttctgcggcgtccacgacggtggctgggccgcggtcgccgccgatacgtggcgaggcttcgcggtcgtcaacctcttcaccggcgtgaggctccccctcccggagaagctgagggtcgaggtcccccccggcggcaaccacgaccagttcgcgttggccgccggcttcacccgccaccacatgctcatccgcaccgtcgttttctcctgccctcccacctcgccgtactgcatcgccgccgcgcacgtgtccagcgcctccaacatcgccttctgccagccggcgtcgctgtccaccagctggaccgcgtaccggcgcgacatggacatcatccaggacctcatcttccacaggggagcgctgctgcagggcttccacgtcctcaccaacaaggaggaggtcctggtgtacgcgcccacggcgccccaccgccccggcgcgccgctgaagctcgcctgcacccgctactcgctgcggccccgcgacgactaccagcccgacgacgccctgccgccgacgttcatcgcgacccgctacctcgccgagtcccgcgggaagctgctcatggtgctgcgccactacaccggcaaccccgtcgtgcggcgccgcacccgcatgttccggatcttcgagctgacgttcggcgagccggcggagcccaggcgcgccgccaccccgtgctggtgggtggagatccccgagctgaccggccgcgcgctcttcctcggccgcagctgctccaggtccgtcgatgtggcgcagttccccatgctccaggaggacaccatctacttcctcgacgacgcgaacctcgacctgtccatggtgctcaacaacgggagcacgtactgcaacgtcgacatgggcatgtacaggaagggcgagaagatcaggcctggcgctcgctaattcccccgtgaattcactgcagactgctcgcctccgatctggctcgtcccctgattattcagtgggtattccagcgtgttactgcctgtcgtttgggatttactccattaataaatcgctggcagttctgtagggtttcagaaaaatgaaaaatgtatcttgacatgttgtaatcagggtttcatttaccgccggggccgcggttaccgcgccccggcggtaagcacggttaccgcacggtaaccgcggtaaccgtgacaaaccgcgac

SEQ ID NO: 7025 - DNA, 1615 bp, Oryza sativa
  ref <308>: DATABASE ACCESSION NUMBER: AK064156
  ref <309>: DATABASE ENTRY DATE: 2001-12-06
aagggagcggcgttctgtcgaccgtctgcgagcgaatggccacggctgtgatggacagcgagttcggcagcctcgtcaaggtgtctgcggcggtgtgggcggcaatgttctacgcccgcctcgccgccgcaagccttcgccccggcgctccccgcctcgccgcgctccttcccgtagtcgcgctcttctgcgtggtccccttctccttctccaccaccactttccgcggctgctctgccttcttcctcagctggctcggcgtcttcaagctgctcctactcgccgcgggccgagggcccctcaaccccacgcatcccctccaccacttcgtcttctcggcctccctccccgtcaagctccggcacctcgcatccgccaagccggccaaaggtgtagatccagctccggccaacgagagcgcggcgggcaagatcctcgtctccggcgccgtcatccccctcatcatctacacgtaccagttcaagaacgccatgagccggtaccagctcctcatcctctacaccgggcacatctacttctccctgcagctcctcctggccgtcgtccacgggctgatccatggcgtgctcgggatggagatggagccgcaggtggaccggccgtacctggcgtcgtcgctgcggaacttctggggcaggcggtggaacctcatggtgccggccatcctccggccttcggtgtaccgcccggtgagggcgcgtctcggcgacgcggctggcgtcctcgcggcgttcctcgtctccgggctcatgcacgaggcgatgttcttctacatcatgtggcgtcccccgagcggcgaggtgaccgtgttcttcctcctgcacggcgtgtgcacggccgcggaagcgtggtgggcgcggcacgcggggtggtggcgcccgccgcgcgcggccgccgtgccgctgactctggcgttcgtggccgggacggggttctggctcttcttcccggccatgatcaaggctggcctggacgagatggtgctgcacgagtgccagggcatggtggccgtcatggagcagtccggccggtggctcgccggcgccaccaatctcaccttcgcgacacgctgaccagaggaaatgaaagaatgggacgtgagccacaccattactacgatctgacgaaacctgttgcatcgcgacgattctgacaggatgctgccgtttgtgattttttccgatttgggaaattaaatactcgagccgttcacatggccagcttggacagcactgggtgtttgcatcgtctgggggtctgggctgtgatgccagctagaattatgctagatcgatcgtgttaacaggggttaaagaagcattgattcggttggaaaatatctttaccattttttattgtacgttttcagctttgctatttatcaatccatttgattttttttcttattatcagccacctacactattagccctagttttgaacaacaaaaacctactatgttttcttgtatcaatccctgaattaaaagttggtatacacatttatagctagtagaaaatttcaaaatgaatttaggctaaaatagtttaatatctttacaaggaccaatagggtcttatcgaaaaaaagaatg

SEQ ID NO: 7026 - DNA, 1808 bp, Oryza sativa
  ref <308>: DATABASE ACCESSION NUMBER: AK064157
  ref <309>: DATABASE ENTRY DATE: 2001-12-06
aaataaaagaagacgaaaaaggaaatcgtcgtgcggcgtccgctcgtcgtcgactcgcgagttcggccgccgccaccgccgccgccgccgccgccgatccccatccatcccgcgagcaagcaagggcgcaggcatcctgatcttgataggtggctttgcaatctttggccccctgaacctgtccttctccatggctggggccaccaccacctcctctcccctgcggaggatggagtctgtctgccgccacctcctcccagcatcaccgcctatcctttaccagaatccgttaggtgccatcaggctggagtcatctccagtgattattggggggatggtgctggacatccatgccaagccatccatgcagccgcatcctggaacgactgtgcctgggatggttaagtacgtcagtgggggagtagcaagaaatattgccgagtgcatttgtaagcttgagactcgaccattcatgattagtgttgttggaaatgatatggcaggggatttccttttgaaatactggaggtcggctggactatgtacagatggaatactgcagattgatgacgtaacaaccccaatagtatcaaatgtgtttgatgggagcggtgaattaattgctggcgttgcaagtgttggggcagttgaaaaatttctctctcctagctggatatgtcagttccgtcttcatatctccactgcacctctactaatgcttgatgcaaatttatctcctgattcacttgaagccgcctgcaaaatagcacatgaatcaggagtgcctgtgttttttgagcctgtctcacttgcgaagggttcaaggattgcaccaattgcaaaatatattacttacacttccccaaatgagattgagcttgtggcaatggcaaattcattatctcctcctgagaaatatacttttgtcaaaatggagcagtccaagaacaaagccaaagctgtagagtatttgtttgaaatgctcagcccagcaatgtttttcctcctcgaaaagggcataaagtttcttctggtgacgcttggctcaaatggtgtttttgtttgttgcaaagagagcacaagtttgatggaccagcgaaagtctgaaatgatgtctttctcaactccactacttcaaaaattggagcgatgttttccatctaacatgcttgtagatttgcctagagaaggctcttccagaacatgtgtttttcattttcctgcagtatctgcctcagtggttagcctcacaggtgctggtgattgttttgttggtggagtcatttcagctctatgtggaggtttgggtatgatgcaatctgttgcggttgggattgctatagcaaaatcatcagtggaatctgaagctaatatacctgataagttttctgctgcaactatcgcagatgatgcaagaagaacattgctatcagctaaaatgatgtggtgcaaataaccattggtgttatctcgtgaaagtcttggtgggcatgtaatttcctaataccgtttgttgattaggctatatatatatatataaggctgagtgtggattcaggtcgtgggctggtgacaacttagcaagtttaatgtagtagattaaggagcacggcaggtttctaaatttgtttgcatgtacctatgcctttatacttcgtcagtttctgtaggctagtgatgatgccacgtttgcatctgtatgataatgtcacatcagcgtcacgtaggatctcgaaaatggtcgtggcaatcttgaaccagaatgatatattttgtggtactaggagttctggtggatatcactatat

SEQ ID NO: 7027 - DNA, 1445 bp, Oryza sativa
  ref <308>: DATABASE ACCESSION NUMBER: AK064158
  ref <309>: DATABASE ENTRY DATE: 2001-12-06
acaagggaattgcgtggcgtgtcgacttccaagtcttccgccttcgttggccccaccagtcagtgacccagtcaatctccggcgatgggggccggaatgagcagcggccggcggccgagcttctacggcggcggcggcggcggcggggtcggccggccgagagggatgctgcccctgctggcgctgcaggtgctgctcgagtacggccgcgcgggcgccagccggccccccgtgacggcggcgctgctcgccgccaacgcgctgctgtacctccgcccaggctccctcgacgcgctcctcccttcgctcaaccgcgtcgccttcaaccctcacctcatcattcactactgtgacctgacacgcttcttcctgtcggctttctaccacttgagcgaaactcacttcttcttcaacatgtcatctctcttatggaagggcatccagcttgaaacatccatgggtagtgttgagtttgcctctatggctgctgcattgcttggcatgtcacaaggcatcacactacttttgtccaaaggtttactcctgttcggcaatgatgaggcttattatgatcaatatgctgttggattctctggagtactatttggtatgaaggtcgtgctgaatgcctggtcagacgattatgtctttcttcatggggtggttattccagcaaaatatgctgcctgggctgaattactcctcattcaggcttttattcctgggacatctcttattggccatctcggtggaatacttgctggattggcctacctttggcttaagcgatcattctctgggccagacccgctttctcttctgatttcaggaattggaaaagctgtgagatggccagtagggtttgttcagaagcttttcaggtctggccgtcctcagggttacaccccaagtcgaggcagagttggccgtggttcagcaagagagaatggtcgaggtatatggagatgctcagcctgcacttatgacaactcgccgtcgacagatatctgtgaaatgtgcagcagtgcacgtgaggaccatgctttttctcatagacagcacctccaagctggggggaatggggagccatcggttgaggagattcgccgtaggaggctcgagagattttccagatgacgtgaaccattgctctagcaaatcaagttttttgtggtacaggaaggaaactaattctcatgaaaactgaaaaatgccctttcatgccttcctgtgctattgctacatagcttcagaacattcttgtgtccaatgaatactgaagttttaacttgcctattcaagtttattgctactaagtatttagctccattctttaggatcccctcataatatatctttaggttgtctcatcagctatgccttcaaagtatgtaattatgtccttttttctggataaatggggtattacagtagttgacttcggc

SEQ ID NO: 7028 - DNA, 1647 bp, Oryza sativa
  ref <308>: DATABASE ACCESSION NUMBER: AK064159
  ref <309>: DATABASE ENTRY DATE: 2001-12-06
agcacaaaaaagggaaaaagaatgcgccaccgtggcccaccgccgtgacctcgccgccggcgaggcctcccctgcccatggactccgccggcgtcatcctctccatcctcagcaagctgcagtctctcggcttctgcgcccatctccggatcggcgacgccgcggcctccggccccccctcggacctgttcgacaccgtcctcgccgcgttcctccgcgaggtctacccgggcggccgcgaggtgcgccctctcccggcgaagctcggcgacgggagccgcgtcgacctgctccgcctcttctccgccatccgcgccgccggcggctacgccgcgacgtcgtcgtcccccgccgtctgggcctccgccgccgagtccgtttgcctcgacgccaccctcgccgcgcccgtcaagctaatctaccacaagtacctcgccgccctggaccgctggatccagaggctcgtggaggcgcatggacccttcctggatggcaacgacgggaggaagaagccagagccattcttcgattccaatggaagggagaatgaagaaccactcttggaatgcaatgggggagatctgcagcatccaatcttgaagaggaagagggaggacatggttgggatgttggattgggtcagggagcttgccgagaatggcggtgaggcaggcaccatggctgccggctcggcgaatgggtactactcgttggcgttggcagcgaggaaggcggtgttcgcgaagagggctcgccgctcgagcatgacgatgaatggtgcactcatgcaggaaatatttccaatggattgcaagtgctgcatgagttccagcactactggaattgacacacaagaaaaatgcagtaaaaagattcaacttgtcattccacaggctggttcagatattaatgaattgataaatgttgtagaaaacataaatgtgccttcaattggaatggagcaagagaacaacattattggacaagcgaaatatgagagtaggaaacatcataactctgacaactggctttttacgagtcagcagaggaacaaaataccagtgggctctgagttccaagcacaagtaccacaatggactggtgagttgcctgtaagctatgataatgcagaaaccaggaaatggttgggcacaaaggtctggcctctggaaaatggtaacaggaaattatcatatttttgtaaccctgttggaaaaggtagagaaggtgtttgtggctgcaaccttccaggatctgtagaatgtgttaggtttcatgttgcagaaaggagacttcagctgcgacgtgaacttgattcagctttctatgcatggggatttgatcgtatgggagaggaaatcgcactttcctggacagataaagaggaagcaaatttcaaggcttgcgtgcagcttaatgccccatcttcaggaaggaatttctggaagcgtctccatatgctttttcagtcaaagggtaggaaagaacttgtgagctactattttaattgttttctacttagacggaggtgttatcagaataggatgactccaaataacatagatagtgatgatgaggatgagacagaatttggattcttgggtaaccgccttggtcataatgcaactaagtatgacagttccaagt

SEQ ID NO: 7029 - DNA, 1410 bp, Oryza sativa
  ref <308>: DATABASE ACCESSION NUMBER: AK064160
  ref <309>: DATABASE ENTRY DATE: 2001-12-06
gaaagctttttccacctcgacaatggccgccgcctcaaatgtgcccccgtcgtcttccacaagcagcagctcaccacacaacaccacatccacgcactccactgagctggtcaagggtacgcaccggttcaccgtcgccggattcagcctgcagaagagaaacggcgccggacacttcgccaaatcaggctccttcgatgtcggcgggtacagttgggcggtcatgttctacgctgccggcgagaaggaggaagatcaaggacatgtgtccgtgttcctcgagctgcaaagcaccggcgtagagaaagttacggtgaagtacacattcaacatcagtggcagctcgttgctgtcggcagggtggggtgatttcaagcctagcagcaaatgtcgtttggggttcaacaaattcatggagatcgaaaccgtggaggatgtgtacctgatgaacgactgcgtgacgattcactgcgccgtcgaggttgtcagggagaagaaggccagagcaaccgtgagccgccgcatcgcggtgccgccgccggccatctgccgtcatctcgagcagctgctggagagcaagaaaggctcggaccttacggtccaggtcggagagagtaagtacgacgtgcacagggcggtgctcgcggcccggtcgccggtgttccgcgcccagttcttcgggccaatggcggcggcgaacaggcgcgccagcggcggcggcaggtgcgtgcgcgtccatgacatgagaccggcggcgttcgaggccgtgctccacttcgtctacacggacacgttgccgccggttaaggaggaagagggcttcctgacgaacaactccgcgagccgccgccacctcgtcaatctcagggacgcggccgccggatgctcgaagggagaggtgagggtgatggtccgcgagtggctggcggcggcggaccggttcggcctggagaggatgcggctgctgtgcgaggacgcgctgtgcgagagcataggcgtggcgaacgcggcggcgacgctgcggctggcggaccggcaccactgcgcgctgctcagggcgttgtgcatggagtacatcgcctcgcccggcatgttggcggccgtgatggcaacaaaggggttcaaggagctcaaggtggcatgtccctctcttctcatcgagatcctggagaaggttggatgctgccgttcggaataaacgcctgaacgatgctctccctgtttgtttactttcctttggagtaattttacgatgctctctattcgtaatcggaattgctatatgtctggcgacagatttttgagtcccatatcttgcagattgatttatgtatgttggatggtgtcaagattcgtgttgcattcatgccgactccatcataatcgatttgagccgtgttttccaatgct

SEQ ID NO: 7030 - DNA, 1803 bp, Oryza sativa
  ref <308>: DATABASE ACCESSION NUMBER: AK064161
  ref <309>: DATABASE ENTRY DATE: 2001-12-06
ccgaatttcagtgatgtcactaggagctgtgcaactctactttcagatgatgtcagttgcaagaggtgcttaaactctggtctgtcatacctccgccatcttgtgggagaacaagataatgtcacattgaatacctgccgtgatgctgcctttgttgcatttgcgagtcaagggaatatatctaccgttgatacggcgagttgcttttttagcgtccaggggcttagtgctcttcaagtgaatatctccgtgccatccccagctggactaattgcaccgaatattgctcccagtccacttgcaatgcaaattcctggggagcatgttactggagtgctatccaagcatcatcgtagttacaagcttgcactattccctgcaattggggctttggttacaggattagcagttatactaatgatagtattgattttactcatccgtaaaaagagtagagaattagagaagattgaaggaactaaccctcttgatgcgtggagttcctgtttgaagaagggccaagaaggttcttccaccattttcgacagatttacttacagacaaatgaagaaggcaacaagaaactttggcactgtgttgggaggaggtgaaaagggcacaatattcaaagggaaactgagtgatggttctgtggttgctataagacgcatagaaagctcgccaaaacaaggtcagctggaattttgcaaagaaatggaacttcttgggcggctgcaccatcgtcatcttgttggacttaaaggcttttgtctaacaagatttgaggggttccaggtgtatgaatacatggaaaatggaagccttaaggatcaccttcattcgtcaggtaaacgtcttctaccatggaaaaacaggatccaaattgccattgatgttgcaaatgctttggagtaccttcatttttattgtgatcctccattgtgccatggggacataaagcctagcaatgtcctattggacagaaactatcttgccaagcttgccgtttctggtcttgtacaatgctcaaatggtgatagtaccaccatcagttccaccctagtgaacgtgaagatcccggcaactcctggctacgtggacccttgctacgtggtgaaccaggtggtgacgccgaagagcgacgtgtacagctacggcgtgctgctgctggagctggtgacggggaagcccgtggcgcagggcgacgacgatggcaacggcgacagcagcagcaggagcagcagcaagaacctcgtggaatggtcgcgcgagctgatcggcacggactaccggctgcacgagctggtcgacccggcggtggccgacgcgttcgacctggacgagctgcaggtgatggccgatgtgatccactggtgcacccaccgggacggcgccgcgcggccgtcgatgaagcaggtgctccgcatcctgtacgagcgcctggacccgctctccggcggcctcgcccgcgccgtcgccggcgaggaagggtactactacggcggctggcagagcgggcggaaggggaaggagggcgcggagatgctggccggcggcggcggcgacggtggtcggtgcctgccgtcgtcgtcgaacacgtccaggtcgtactgcagccgcagcgtgctgcttgagtgcaactcgccggaggaggcgccgtcccagtcgtcgccgcgcggcttgccgtgacaccgtgacacgccatctttttgtcggttgcatcgacagattttgcaggacacaacgtacagtgaacagtcgaaacactgactgaactgaaagagagatttttttttttcgttt

SEQ ID NO: 7031 - DNA, 671 bp, Oryza sativa
  ref <308>: DATABASE ACCESSION NUMBER: AK064162
  ref <309>: DATABASE ENTRY DATE: 2001-12-06
aaactcgcggccgttcttggctttgtctggctcggtttgcttctgcttttgctcctgcatgcgccgcgcaatggagaggaggcctcgtgacctcgtcgccgtcctggctctgtcctgcctcctcctcctcctcccactgctcgtctcctcggtgcccatgtcgagaagcctgcacttgagcagccagcagcagcaacacccgccgtctctgaacctctctccagatgagatggcggcggcggcggcggcgagagggctcggcaggaggccggcggcgaggatggacgtggaggtgaacgactaccccgggtcaggaccaacaaccgccatgaccctcccaaaggtcctgggagagcatgaattcagtcaagctgaagctgctgctgctgctgctgctggaacagcttgtagtagtttcatatccctgctagctattagcaaattcacataattaatccagcgtctaattacataagtcgagaggctgtatgtgtgatttggggtgtaattagtagagagcagatagctagcaagttacaactgcagatcgaattgagaaaatattcagggatgaagactgtaaagcttttgctagcttgggcctcctctttgcagcagtagtatagtaagtaaactagtaaattaattaatcagtgattttgtcgacatgc

SEQ ID NO: 7032 - DNA, 681 bp, Oryza sativa
  ref <308>: DATABASE ACCESSION NUMBER: AK064163
  ref <309>: DATABASE ENTRY DATE: 2001-12-06
acacacaagctttgatcgatctctcccacacggctcaaacgcgcatacacgtaaacacacaagctttgatccttctgttcgccatggacggcgaggcgacgagcttgatgatctcgccggagatccgcgacgcggtgacgaaggttgccgtgttcgtgctggtgcaggcgctggtctacctcatcctccgcagctcgtcgagcgtcttctccaaggacggcaagctgaggtcgtccatgagcttccggtcgatgcggtccatgagcgtcaggcgcttcctcgcgccgctctccgacgtccccgtcggcaccgacgagccctggccgtcgccgtcgtcctcgccgtcgccgaccttgtcgcgccgctgggctagccgccgcgaggattaattgaagcggttagtgctagcttctgggctctggccagctaggtgctagtttggttactctgaagaaacctgaattatcatgggttggtttggtttgtgattaatggaaatggaaaatttgggaactgggctctgaaagaggcagattattagagtggatcttgtagatatgtggattgaattaagttaatactgaatggtggattatttgattctttacaatttgtctgctttcctcaatctgtaaattggaagtatactattcagatggcgtaaatctgaagttcttatgt

SEQ ID NO: 7033 - DNA, 555 bp, Oryza sativa
  ref <308>: DATABASE ACCESSION NUMBER: AK064164
  ref <309>: DATABASE ENTRY DATE: 2001-12-06
aaatttccaatcccaaaaactcaccccagcgggtactgtaccagagcccgaacagaagcatgcgcagattggggaggatggagagacagtgagcggggtaatcggggatgcgtaccgtgtggaggtgtagggggatcggctccgatctcgtcgactccgccggttcccataccgcggggaaggggagcggcgccggcggtgcgacggcggcgaccgagacaccgcacgcggcatcccgctccgcgtggcagccggcacgaacaagcacaacggcgccgccggtctgacttggtcaccgtgctagtgctgggactggaggagcggagagcgggtgggccggtggagcaatacggcaagacgatgcagcgccgcggcggcctaagatccctagggtttgcggcgcctgggccgactggttactacatctaattcaaacccactccaacccaaaacatttttcctcgggttaatttgtaccaagccaccgcaaatttggctattcagaaaaaagtcattacaatttatgtattcataaccgtgccactaaaattttac

SEQ ID NO: 7034 - DNA, 1559 bp, Oryza sativa
  ref <308>: DATABASE ACCESSION NUMBER: AK064165
  ref <309>: DATABASE ENTRY DATE: 2001-12-06
atcgcgcccgccaccgaaaagacgaaaaaaatctcccaattccccaaccctaacgccgctctcgcctccaccccccaaatcccgaatccgccgcctcttcgttcgtcgtcgagctcgctcgctcgcccaaccctagcgcggggccctaccagccgcccaaggcccctgaatcggcgtggcagcacgacatgtactcggatgtcgcggcaggcggcggcggcggcagcggcggaggcgggagggtctcggctatcgagactggcaccaagctctacatctccaatttggacttcggcgtctcgaccgaggatatcaaggagcttttctctgaattaggtgatcttaagaaatacgtaattcactatgacagaagtgggaggtctaagggaacagctgaagttgtatttgcaaggcgtggcgatgctgtcgcagcagtgaagaaatataacaatgtgcaacttgatggtaagccaatgaaaatagagattcttgggaccaatactcctacagctgcagctgctcttccagcaaataacggaggctacgttagaaatgttgctaagagtgcaccaaggggtggcccagctggactaccgcagggtagacctcgtccaagggggggtgggaggcgccgtggtggcggaggaggcagtggtggtcctggtggatccggtggtcgccgtggcaaagagcgtagccagccaaagtctgctgaagaacttgatgctgacttggagaaataccatgcagatgcgatgcagaccaactagatcttcacggtgttgatatttcaacatgaaatctgaaggatgtttatctgcttgttcctgctatttgtgctaccatgttcagtggcaacaacaaaacctttgtttgtcgggtcttggtttactgaattgtacggttttatgtgtctacatagaactagagttaagtggatgctggtgaacactgttatgaatattacttggttgccacttatgttcctttttctgcggagtgaaggcctgctcgagttgctccacatacagaagttactgaagatgtatgaggtgctcgtatcttctgactcctttaacatacatcatcttcaacggcattgttgcatggttatttggacattgttcctctctgtacaagggttataaggctcagccatcctcaatgaggtggctggtgctttttttgttatttatcattctgctattgttgattttgggcttagcaatattcttctacccgttagtgattcatatgacagcggctggaggggtcactttcattttaaagttgatttcctccttgcaaaatctgcaccgtcatatgattattctatcttctagccagctgatcgtcagtttgaagaagcatcgaggtgcaaattctgatttaaaatttgctattgatatttgatagttattcaagtcttaacagcatatgtaggctttggacttcatttcttggccctccatccattgccttcttattctgtgtgatgttagcattgcagtggatcttcattttcattaaaaatagccatcaaactcctttagtatccc

SEQ ID NO: 7035 - DNA, 1510 bp, Oryza sativa
  ref <308>: DATABASE ACCESSION NUMBER: AK064166
  ref <309>: DATABASE ENTRY DATE: 2001-12-06
ttgtcaggtggggagtttggctggggcggcacatctgttaaaagataacgcaggtgtcctaagatgagctcaacgagaacagaaatctcgtgtggaacaaaagggtaaaagctcgtttgattctgatttccagtacgaatacgaaccgtgaaagcgtggcctatcgatcctttagaccttcggagtttgaagctagaggtgtcagaaaagttaccacagggataactggcttgtggcagccaagcgttcatagcgacgttgctttttgatccttcgatgtcggctcttcctatcattgtgaagcagaattcaccaagtgttggattgttcacccaccaatagggaacgtgagctgggtttagaccgtcgtgagacaggttagttttaccctactgatgaccgtgccgcgatagtaattcaacctagtacgagaggaaccgttgattcacacaattggtcatcgcgcttggttgaaaagccagtggcgcgaagctaccgtgtgccggattatgactgaacgcctctaagtcagaatccaagctagcaagcggcgccgaatacatttcatcgaacaccttgtgagcatgcttcatcatcactggttggagccgaagccggcgtagctgaccgcgggagctgtggctcgggccgcctctacttcttctgctgccttgcatcaacgccgggagccgctggacgtcggggagagtgcgtcgaacacctgcgtgcgctgccgacgtcgattcgcccctgcttcacccgcaccgtgccgcgcatcaccgacctatgccgttgctccaccgcacggtaaatacttgcgctcttagcaccctctactgacctagaaacatttggccccctcgatttgaggtgtgtgtgccgctgctagcctgccgacgggccgccattgcgccaccgttgagctcaccgtggacggcactagttccaaactaacctaggccatattattgcatgaattagttcactagagaccctagatggtgaatttaggctcggttaggtttaattcgtcctctcccgcgccatggccgagctcgccgtgagctccgtgccacccgtccgtcgcgtcatgccccttgtagccgccgcgcctcgttgctgccggcggtgggtctccggtggtgcgccgccgcttccctcaccacggccgagccgtcccggctcgggctggtcgcattagccgtgcgcccgcgccgctgccctgcgcgtcgggaggaggaagacgaccgagggagagaaagaaaggaagagagagagagaagctgtgggccccacatagagattagtgcacagtaatcacctattaatccaatgcaaattaatctattacacgtgggattggatgattagaaaaatcaaagaaaaattgattatgaagttactgtcaatggcatgcgggacccaccgggattaaagggctggtttggacccaggtcaaatagggccggtcccacttgtcaatgactctctgcattttctatgggaaaat

SEQ ID NO: 7036 - DNA, 1331 bp, Oryza sativa
  ref <308>: DATABASE ACCESSION NUMBER: AK104983
  ref <309>: DATABASE ENTRY DATE: 2002-08-28
gtgcagatgcaccgcctcttactcgctctttctcctcctcctccccgcctcctctccgctttctcctcctcgcaccgctcctctccgccttcttctcgcgtcgcgccgccgccttcctcgcaccgtgcctctccgtcttctcctcgcgccgtgccgccttctcctcctcgcgccatgtcgccaccctctacccacacatctgcgcgcccacgacctgactcctgaggcctcgatgacggaaggctaatgggagacacaagatggatgggatctggaccgtggagtggttgagatcgacgggatcaatggctggattgatttgcttgatttgattttttttccatgaatcatgctctacttgctacttgttgtggcatcatcaaattttagtccttcatcccagttgctttttcattcatcatgtacagagttctttttttgcaattattttttgggctgagttcggtctttgaccgagaccaaaccgaattaaccgaagaccgaaatactctatcttgagttttcttgaagaccgatcagtcttgtgatcgtaaagaccgaatttttcaaaagactgaagaacctaaccgaaattttcggttagaccgaatgcccacccctacctccccctctggtcgacctcccccatgcctgccctactgcagacctgggaagaagaagaagggaaggagaagaaagggaaagaaggaagcggagggaatcgaggtgaagatggaaatgaagggtttgattaccgctgcccatggaggctttccccctgttttggttttctattagggtttagatcaagtgttggaagcgagtaagtttgggatccaccgatttattcctcagccaggttttcgctgatctgccccctgcgcagttctgttttggatgccttttcggccaagataataggatttccttcgaaaagtctctatacaaaagttgtaaataacgtgtagatctatcttctgaccgaatggcatgattttatatcaagtggtttaggaggtatcaatttctgaagttggctgtctgaatgtcgatgcatttatctgtagtcgaggttcagagggattttagaggatcttaatgatggaatccgagaatcttgtatttacagaagttgtagcatatgttgtgatctacctcctacataaaaattgttagcttttatcttgtagtttgttgtcagtgctcttttgaatggttgttgcacagttttctgggcagatgcacttttctgttttgtgccatgttttaggccagctaaatggaagaattcagttttgttatctaaatgaaagttataactcttgttctgt

SEQ ID NO: 7037 - DNA, 1830 bp, Oryza sativa
  ref <308>: DATABASE ACCESSION NUMBER: AK064167
  ref <309>: DATABASE ENTRY DATE: 2001-12-06
ttgacaatgttgtttctcagcttcccaaagttagacaaacattgctgttctctgccacacaaacaaaatcagttaaggaccttgcaagggttagcctgaaggatcctgaatatataagtgtgcatgaggaggctacaacagctactcctgatacccttgagcagtatgccatgattgtgcctcttgaacagaagctaaatatgctctggagtttcatcaaacgtcatctaaagtcaagaatactagtattcttatccagtgtcaagcaggtaaaatttgtgtatgaagttttcaagaagctccgtcctggtatttctttgagatgcatgcatggacggatgaaatacgaagtacagcaggccatagtagcagagttcaaagagggacactcggttctattctcaactgatatatttgctagaggattggatatagaggatgttgattgggtcgtacaagttgattgcccagaaaacattgctctgtacatccacagagttggccgtacagctcgttataacaagagaggaaaagctcttatcttcctttgtccagaggaagagaaaatgcttgaaaaattgaaggcagctgaaagtaaaatacctatacatattaaaaagccaaacacagaacaactgcagcagatatctcagaatatagcgtcagtgctggtgcaatatcccaatttgcagcaactgggtaaaagggcttttgtcacctatctgaagtcagtgtacctccagagcgacaaagaggtgtttgatctgagcaggttctctatggagaattttgccgcatatgctgcttctcttggtcttcctgttaccccaaagattcgttttgttagccacaaaaagaatgtgccaaagaaatatatgggggatattgatgtgaaacggatgaaaagaagttccaaacctgaagttatagaaattaatccacaggccaaaagtaacttaattgaggatgatggagattatgatatcctttatcccaaggagcagcaaacagatgtaaatatggctgatggtcttgatgatgtcctttatcccaaggtgtccactgcagatacaaataatgaaccagagaaagtcacacagttgggaaataagtccgtgaaaaagaagaagctgaagataaacgtgcataggccattgggcacaagggtcaaatttgacgatgaaggccacactatccctccttttgcatccatagctgaggaagtgggctcaggagatgtaattgacaaggataaaatttcccagaggtacgcagagatgttgagagagatgcaggagcatgacaaggaggacaagctcgaacacaagaggatcttgcgcgagaagaagctacagaagaagctgaagctcaagcgcaagaggaatgaggaaatggacgcagggtcagagaacagtggctcggagtcggacagagaccagaggactgcctccaagggtaagaagaggtacttcaacagcgatgacgaagaaggcagcaaagatgcggcgaaggatggggatgttctcgctcaacaggaggcgttggccctgaagcttttgagtaaaatgcacagttaatttaatggttttgtaccgcgtgatgttaatgtaggcagctctctgcaaccggagagtgaaattttgatcagtgctagtctagttccccgggagttgatatatgcataggatctggaaatgtaccagattctgtcattctagtcgtacgtcgagaattttgatggaaaacatggtgttactatattatgtacttaccgttgagggtattgtaatttccatttattatatacacaaatgttttgctctttgaacc

SEQ ID NO: 7038 - DNA, 1372 bp, Oryza sativa
  ref <308>: DATABASE ACCESSION NUMBER: AK064168
  ref <309>: DATABASE ENTRY DATE: 2001-12-06
accggcaaccgccgccgccgccgccttcgattcgattccgatcgagttggagaaggccgccgctgcccaatggctccgctaccctcgccaccgctgctggccgaatcgctcgcgacgctgcgcacagcctcgccgtcgccgcccatcccctgctctcctcgccgcacccggccgttggtttcagctaggttcgcaagaacggccggccgccggagccggagcacggggggaaggagagaccttaggagctgtgcctatgcggcggaagctgagtacggcagcgcggaggatgaggtcgccgacgacttctactccgttcttggcgtcatgccagatgcaacccctgaggaaatcaagaaagcatactacagttgcatgaaagcgtgccatcccgacctcagtggggacaaccccgaagtaacaaacttctgcatgttcatcaacgaggtttacacggtgctgagtgatccggtgcagcgtgcagtgtatgatgaaatccatgggtatacagcaaccgcgaccaaccctttcttcgatgacagtgcacccaaggatcaggtgttcgttgatgagtttacctgcataggatgcaaatattgtgccaatgtgtgccccaatgtatttagaatcgaggaggattatgggaggtcaagagtatattcccaatcgggtagcacagagctaattcaggaggccattgatagttgcccagtcaactgtattcactggactcctgctgcacagctttctctccttgagaatgaaatgcggagaatagagcgggtgaatgttgggctgatgagtgctgggatgggagtttcagttgatgtattccgattggctagcgtgcgttgggaaaagagacagtcaaaagttttggaaaaaattaggacacggatgacaaacaaaaagtattcagatataagtagttcttggactgatatctggggatccccaactcgataccaaggaaatgatttgctgatgatatcagaagaagaaggaacagagagagcgaagagagcagctgctgctgctaggagatggcgagaatactcgagaaaaggcgcagacaggccaccggagtacaaacttccagaggcagcgggcaataaagagtaatagcagaacaaagaaatatttctatcctgcttacgttatctgatagcatttcgtcacccgtacatatagccttattgtttgaagagagctgacatgtagattgctctctcccaattcctcatttttcatttgtaatatatagctgataacaataacctgtagaatacaaacgtcaatagttaaacattcggaatgtaaaagatgaatatgtgcacattctccttcaacaatggtatacatcctgaagatc

SEQ ID NO: 7039 - DNA, 826 bp, Oryza sativa
  ref <308>: DATABASE ACCESSION NUMBER: AK064169
  ref <309>: DATABASE ENTRY DATE: 2001-12-06
gtaaaattctctctcctcgcgccgcctccccaactaaccttcctcttgcggcggcggcggcggcgccactgccggagaagaaacccgaccgcgcctcgcctcgccgagcggcgaagcggcatagggcggtagcggcggcacatggagggggtgaacggcggggcggtggaggaggagaggaagccgctgtcggaggtggtgggcgactgcgtgcagcgctggttccaggacgcgctcaaggaggcccgccgcggcgactccgccatgcaggtgctcgtcgcgcagatgtaccactccggctacggcatccccaagaacgagcacaagggaagagcgtgggctgagaaggcatctagatacaggccttcagtctggaaagttggcacaaagcgtccgggatataatgccagtgactcagattctgatgaaatgaatgatgatgagaagcaataacaatgaaagaatcaattgtgagtttagatagaagaatggcagggtaatgataaatctggttgtcaaaccctcgtcaattttaccaatttgtgtgagattggggcttctttcggctggagtctgccatgtgagctatcaagtaaattttgtaaaaccgtttggatacttggaacacacaatgtattcaatattgccccaaaaacagagggaaaaatgtcaatttagtggtgcttggtgcttacaggttcattatttcaaacttagctagtttgagtccattttatgggttcttgcttgcatatgcttcaggttccccatggtgaacagtcttgtattggtttatgggctaaatggttgtctgccgagttacaac

SEQ ID NO: 7040 - DNA, 1769 bp, Oryza sativa
  ref <308>: DATABASE ACCESSION NUMBER: AK064170
  ref <309>: DATABASE ENTRY DATE: 2001-12-06
acccccgccgccgacctcgacggcggcgttccgccgcggcgccatgctccacctccggagacgcctcctcccgctgctccgcgtcccctcctccccccatgcctccgcctcctactacgcccatctgcgccgcctccgccttcctctctccaccgccgccgccgccaccgcgaccccctcctccgccgaggactacctcgtcgccacctgcggcctcaccggcgaccaggcgctcaaggcgtccaagaagatctcccacctcaggtccgccgccaacccggacgccgtgctcgccgtcctctccggcgtcggcctctcccgcgccgacctcgccgccgtcgtcgcctccgacccgcacctcctctgcgccaggcccgacaacgtctcccgccgcgtcacgtctctgcgcgaccgcgtgggcttgtcggaccctcaaatcggcaggttcctcctcgccggcggcgcgatggccgtccgcaaatgcgatgtcgccgagcggctggagttctggatccccttcttggggggatccttcgagacgcttctcaagatgttgaggaggaacaacgcaattgtcagagctgatgttgagaaggtgatcaagcccaacatcgcgctgttccaggagagcgggctaactgttcgagatattgtcaagatgcccggatggctgttcacgttcaatccaaagcgggtggaagcggctgtggagcgtactggcaagcttggtgtcgagctcgcctccagtagattaaagtacatgctgtctattgctggcaacatcaccgaaggcaatgcatctgcgaggatgaagtacttgagtagcactcttaattgctccatggacaaggtcgagtgtatggtcggcaaaatgccaactattataacactttctgaggaaaagcttcgcagtaagattgagttcttgagtagcacccttaattgctgcgtggacaagatcggtcatatggtttgcaaagagccatttattctagcaatttctgaggagaaacttcgcatcaatacaaagttcttgagtagcgctcttggatgctccattgacaatatctgtgttatggtctacaaaatgccaagtattctaggactttctgtgaacaatctttgcagaaagatagagtttttggtcaccaaagtcgggttggagcctgattacattttgagtaagcctgttttgttcgcgtgcagcctggagaagcggttgatgccgaggcattatattgtagaagtccttttggctaagggattgataaaaaatgctggctttttaacatatgccatactgcgggagaaggatttcgtagcaaggtacattgatcaacacaagaatgctgttcctgggctcgctgatgcctatgccacaatttgttctgggaaagtgcctcctgagctgcaaccttgacatcctcagactgagatgttggagttcatttcggcaaggtgcctgctgaagtccaactatatcatttttggatggatatattggaggttaattatctttcaggcctatatctgacctaacacttcatgctctgaggatcagtacttgatgttcattcatggtcctatatttttccatacccattgatttctgctgtagtttaagttattgctatttatgcagcaactggattgttttaatcttgctgccctagtgcccttatagctttactgtctcatgtgatggctcgttgcttcaacagctgttttcctgttcagttattttgagaaaaatgggtttttgccgtgtt

SEQ ID NO: 7041 - DNA, 1665 bp, Oryza sativa
  ref <308>: DATABASE ACCESSION NUMBER: AK064171
  ref <309>: DATABASE ENTRY DATE: 2001-12-06
gtctagcctcccactaatcccggtgccttcttgatcccaccgatccccgtgctttcttctcttcggcatcgccacgaagcggagggtgccatcgcagcagccatcgccgacgagcggctcacggtcactgcggcctcggcaacgtccggcgatcgtcgtcgatccttaccttactccctcacgccccctagctgtctcctcgagaagaatcctgcttaagttgatttacctccgggtgtttacggtctttcaaattgctaagcataatcttgaactttccaagaaaaaaaacaggcctgcattaactagtgccagggcagcaataatggatttgtgcgacgacactcatttcccatgggaggggtcccatactattgttggcagcaagcggaaagctaaggatttaatggcaaaaatctgaacttgtttaatggaacttataagatggtggaaaccacagttgatgttatgataagaaaaggaacaaacatgagactcgaaagctacgagtttttgagtgatttcaagcatggcaacgctgtggtactcctggactacacagagtccggaaacaaggggagtttcatcgtcacacaagttgatgggtcattcactgcctggtttgaaacaggtggaaaagagctctgctttgactcatctggtcatattactcagttatttaaagacatgattgtcgatttttacgatctgacctggagtttgcacaagaggcacttagtcatgcagaattttgtaaaggaaaatatatacgtcaaaatctttgatggcgtacccaaacttatgattctactaactgaagttaaattggttgatcagctagggccattcaaacaggactggagtcatgtccaaggcctcatgacttggtgtaaagaacaatctggtttaaaaatggactttcttaccaagagtttctatgatttcatcggatctaccgactgcacagtaatcaagctgagaaactaccctgatgattgggatgaaaaaaagaaaggtgattatttgctcacactcgcagaagtaaaccacggagttcttaaagataagttgaagagtagggatgattttcattggccgtttgtgaagctgcctaagctggagcagaacttaccaccaatgttacagcaaattcttagtggggagagacagatgaaaagaaagttcgacgtgacattcttttgtgattatatcaacctcttgagaaactcctacaagaaattcaatgaattaccagaaaatgttaaggctttatgcataaaccaggatggcttcattaaactgatagatgggtggtctcctgagttttggaccaagatctacgagaaaattgggtggccagattataatatctggaagtggccttgtaaaaaatagctttagtgctttgcatttgaccagaacactgcttgatctcaatgatggcgatgccggtgcccgcgctgacattctcaggacatatggtgctgttctgcaggtccgatccttagatggctcctgttaggagtttttggttcttagaattatgtcagatgctatctcgaaactctcaagtaattttttgtcctcctgcatgaagcaaaacttagtgtattggttgaaaatctggcatgattgaatggagaactatcgagattcattactgtg

SEQ ID NO: 7042 - DNA, 1005 bp, Oryza sativa
  ref <308>: DATABASE ACCESSION NUMBER: AK064172
  ref <309>: DATABASE ENTRY DATE: 2001-12-06
acacactgcaacttaactaaaattagcgccaagcaaaagaaagtcaaggagttcagcaaagatgaggagccacacagccgtagtctgctcggcactgctcgtgcttgccgctgcattgctgctcccagcgcaccatgcgatggccgaggacgtcgtctcgagcagagacaacacggccagggcgccgtcatcttcgccgtccgctgctacggccacggcgccggcaccgtcgccctacaccgacacggccatggcgccggccccgtcgtcctccaacgacacggccgtagagccggtggccccgccgccgctgccgttcatcatcgtggagggcgtggtctactgcaaaacgtgcaagtcgaggggctacagcagcgacatggacgcgtcacctctcccaggcgcgacggcgcagctggtgtgctacgggaagaaggtggtgaacgtgacggggacggtgacggacgcgaacggctacttcctggtgatgttctacgacctgcgcaacttcaacccgcgcacctgcaaggtgttcctgggctcgtcgccgacgtcgctgtgcgacaagcccgtctacccgccaaacaagtggatcggcctctcgctcctcaaggagaccaggaccgtcccgcccgtcggcctgcaggccatctactgccccaccagcgtcctcttctacggccccgccaacgccggccagtgcccctccggctaaccagctggctctagctactccggcagctcatggccggccgttacgccggcgaccgggcatgcggcacgcgcgccgaggtgcgtgactgcgcgggatcgatcgatcgatcaaggaaggaataattaaagtaggcaactagacatacgtattgttaacgtgtgtcatggtgttccacttgcagtagcgactaggtagcgagactgtgtgtgtacgttcagttctagtttgagaggtagcgcggctgtgatgtttcgatcgcttgttgtcagtgtagcattggtggtttctcc

SEQ ID NO: 7043 - DNA, 935 bp, Oryza sativa
  ref <308>: DATABASE ACCESSION NUMBER: AK064173
  ref <309>: DATABASE ENTRY DATE: 2001-12-06
ctaccctttctcctccaccctccaaatccacccggggtccccctaccattttaaccccgcggccttagccgctaatgctccgcgtttgaaatcgctaagcgcacccgaaaccctagccccctcccctcccgagtcccgaccgccatgggcaagtacatgcgcaaggccaaggtggtggtctccggcgaggtggtggccgccgccgtcatggaactcgccgcggcgccgctcggggtgcgcacccgcgcccgctccctcgcgctgcagaagaggcagggcggggagtacctcgagctcaggagccgcaggctcgagaagctccctcctcccccgccgccgccgccgaggaggagggcgacggctgcggctgcgactgctgatgcgacggcggcggagagcgcggaggcggaggtgtcgttcgggggggagaacgtcctcgagctggaggccatggaaaggtggggattctctctctcttcttattgtgcgattctttttttgtttttcgtgggtttcttggttggattgattgggggaatcgcgtgattagggttcagggtttaagcaccgtacgggagttcttggggttcgatgtttctatccggtttttcgcatcggaaaattttggggattttttttcggtgcgattgtggcgctcggaattcctgtggccagttttggggtttcgaaagtatcgaaatggaggcgaggaatcttttttttttccatcacacgcggttgtaaagccccgatgctttcttggtgggattcttgtccctttgctaattgagacatgcaattcgtgctttccttgttgcctaaatttgttctttttccatgtttcttgtggcgatacagccttttctttttgccaatttcttgtcccttagcttgtttacaagttagaacccattttaacttcttttgaagaaggg

SEQ ID NO: 7044 - DNA, 1392 bp, Oryza sativa
  ref <308>: DATABASE ACCESSION NUMBER: AK064174
  ref <309>: DATABASE ENTRY DATE: 2001-12-06
gtatttgtcagtgcacatatttagcagagttagcatggtcagtacttaaattggaagaccatattgtagtatttatcagtgcacatattttcaaaatatcaagaagcggaatgttcttttctgaattgtaaggtttcttatcatttttccattttctatgctctataaatttgatatgttctgtcaattaatagtttagtactgtactttaatatgcttaacacattcaatttttggtcgattctatgaacactttataccgttataaatatacaactattagactttgtgggttggaaaaaaatattttatcccttctaatttcgaatacccaagttgaaaatcctgggcccgcccctggaggccagcagccgcccaacgccctcactgactctgtctgtttgtctatctatcttagcgtttgactgtttcaagtcctcactatcttgtctcaggtttgttccacggctccaattctgtatgtgctgcgactttacattttgtaagtttgcatgcatcaatagaactagagtcattaagggattttcttcaatgaactatataaaaacaatttaagaagcaagggcaaaaaaacttgaatggttgcttggttacatttattgaaagggatttcttctcaagttaaggatgaggacagcatcattcattttttttttaaaaaaaagcattggcaaattgtcctctaaattgtaagatttatttattatcatttgccatgttctagatattgatatgttgaaaaattgtaaattaaatgttgtaattctatatgtggaggattttatatgaaaattctatgaatatacaaaattatgctcaagtttgtgttatatccgctatagaatatacacaactaatagtttagaattgtgtgatattatacatgccaaacattagtcttttgctctaaaaaaaaattcctacccttttacgttttgaatacacaactttaaaatcctgggcctgctcatctatgatgagtcagcgatatgctgctgatttgctgccattgtagtttgtaggatttgtagattctgatgaagagtaatgtggatattgcatcgtttgaacttgcacattttgaacgtgctttttaaaattagtcgattattgatgttaaaagatattattgatttatttttatcacattttaattaaatttgtacttgtatatgggatttgcggtgttcggaaattttttatatgtgatgtgaacctttgaagtaggactacccaaccaaaaaatcctggctactccccgctccggcacatgcctccacatccgaggctcctactcaacgcagtgttaccgggacacgggcacaggtgtcggagtccgactcggactcgagtgtccgacttggcaagctg

SEQ ID NO: 7045 - DNA, 1910 bp, Oryza sativa
  ref <308>: DATABASE ACCESSION NUMBER: AK064175
  ref <309>: DATABASE ENTRY DATE: 2001-12-06
attttagcattcctatcttggcaacactggattggagttctttgctagcaagaaactggcgcaaatatatgagatgactgatttgcatgtgtttaggcactgtagtcatgcccgtccaatcctgcaggtctaagaatctcaagtgataatattcagggaggctagaggatgcttggattcttaagtaacgaaggtggataagtttggatggtagaaattcaagcgttgtttggaaaaggcggaggacacgaacatgtttgacatcctgaagtatttctttaaaagcttcagagaacctttcatcatattccccaataaacatcacagtgtgcagctagtcctgatggataagtgtcggatggatggtggggtatatgcaaacctaggattggagcagtcaatgctgaggcattcacgtgatgagacaatccgtgctagttcatgaagcaaaccatgcatgacataccctatatcttggattctatcatcctgaccactgcagtttataacaccaagtgccgaccacagcgagtggggagaacttgagcttcttcacaatctcccttcctaaatcaagcaattccttgtggtgctctgctctctcatcaccaagtgcgcatgctaagaagaaggcccagatcggccgactgtcaaggccacctagacgtatgagcaagttggtttcagatttaaccatgtctgcagtttcttcagatcgagttgttactatgaccgtgctacccttggcacttgtcttcctgaacggggccaagaacttgtcccacttgtactcgctgtcacatggccacatatcatccaagatgagcaagaacctcctggattgcagccttcgctccaccagcgtctggagttgttcaaggttgtgtggctccctttcattgccccatcttcgtctccagctcacctcactggcgaccatgttgttgaagatctccttggtgaggcgaagcacgtcgaaacggagagaaacatgtacccagatcctaacgtggaagtgcttcttcaccctttggtcgtggaacaggtgctgggtgaaggttgtcttgccgatcccccctggccctactaccgggagaacggcgaggccgtcgcggtcaccggttatctcattgatggcggcatagaactcggcgtacctcccgtagagctttgcctctaggctggttgaggtggttgtggtgacacgctcactgaaagcagctgcggctgtggtgttggctgcagtggtgcgggggtccatgagctctagcttaaggaagtcggagatcttggcgcacagaggctgcatctgcgccatgagcgacttgattctctcggacacgatggatctattgaagaactccacatcaaccgcggcacggccacggcaggacagcgaagaggccagagagcgacggcatttaccgacggcgtggcgggcgtggaggatggaacgacggacgaggcgcccgtcgacgacctggtcgtcgtcgaccgcctcgtgggtgcgtttgacgtggtcgcggatgcggtagtagtcgaccttgtcgaggacgttgtcggcgtcctcggcgaggtggctgagctgccgcaggagctccgccagcgccgggctgtgggcgacgttccggccctgcgccttgatggcgctcgcgttgccgcccaggttgtagctctcgtctagcgccttgagcagctcggcggacagcaggtccaccagcttgcccaccacccaccccgcggtgcccagcgccatctccatcgccggcgccgtcgaatatcactcaatctactacaatgctatgcgcgcgcgcgcggccgggggaataagtgtatgtatcgatcgtctatggccctgtcaaagacttgcctagctagtctctaaataaaaacgtacgatgagacttgtc

SEQ ID NO: 7046 - DNA, 1360 bp, Oryza sativa
  ref <308>: DATABASE ACCESSION NUMBER: AK064176
  ref <309>: DATABASE ENTRY DATE: 2001-12-06
aagccccaaacccctccttccccttcctctcaagccggcgcggccgacgagcccgcggcaaaaccacgcaaaaaatctgccaaaagaagatcccccaaatccgccaccgcgctcacgccggcgcagccatggcgacctccttctctttcggctcttccgccgcgtcgggatccaccggctcctccccattctccttctccaccggcaccgccccatcagccttctccttctctcagcccgccgccgcacccggtctgttcggggccgccgcgtccgctgcttccgcgccaagccttttctctggcgccgccacgggctttggctttggctcagctgcgtcgggcaccaccactgccgcgaccgctgctgcctcgacaccgtctttcggcttcgggtattccaggatgaacggctgttgcttcgtgaagatgaggctgcttctgcaagagatacaatgtttgagcaatctgaaactgtggagaatgaattgcaacatatgacagaacaagtgaagtccatcattcagacattgaatgctactcagggtgctgagtttgagactgctgatagtatgacaccatttgatgttgctgtccggatactggataatcaactgcgttctttaatgtggatcgatgagaaggctaatgagttctcaagtagaatacagaggctacctaacaacagtgctgcagctgaacgtgactctggaatgccaaggttttggttaagctgatgatccaatcctggatggacatttgcatcttgttctgatcgaagccagtaaacatgctatttttcggtggatgtgttgccccccagcaaaagttccactgttcctctcattcaagtacatgatgtaccgaactgatgttattcgttgggattttaactgctgatgttaacaatgccttgtaacagtcgcgtacattggcttcagcaatcagtgaactgtttcaactcactttggtctttggacgaggaaacaagaggctttgcgagataccgttcattattggttccaggtgtgttcagatctgttgagctgaaaagtagatgctatatgatgcgttgggtgggctaagtacctggctacctgcatcaattgagctacgccttatgagcttcttaccagggaccagcggatatcttgagccttttcttgcgatcctgtaatctcaaatcgctgtcctccagttgcactagaaagcttcggggtcctgtaagattgcacgatttgcatttctaaactacatgctatatgttcgcctaactacttgtgcatggcgcgtgttcatgatctgccattatcagatcaagattgcgcctatacaagaaagataatataattctttacctc

SEQ ID NO: 7047 - DNA, 1936 bp, Oryza sativa
  ref <308>: DATABASE ACCESSION NUMBER: AK064177
  ref <309>: DATABASE ENTRY DATE: 2001-12-06
cgccagcccattcggacccctctgcagaacacgattgctctgtactgggcactctctgatcgccagcttgtgactgttcgggacctcttccggttcataatgcacctgcttcatcaagcacgcaagaagaacgagacatcaaaacccacaactgatgaacacaaagaagttgcatctaatgtgctctgcaagtggacaaaggaagatattgatcgggcagaaactgcaatgctcaaggtcctacgggttgttcagcctggacagtgggtatcatggcgtgcacttcggggagctgcatcgaaggctgttgattcacaggagctacttgactattctcttcgaggactgggtggaaaactgatggacgatggccatttcatagctgtccgctgcaatgctgagacgagtgcaattgaatacaggctggaagataactccaaccagtcagttgatgcggctgcgtttgggccttctgttgatcatcttctgcacgatctgaagttcctctataacgctttgctgaacccagaaaccatgttggcttcacagccagaggttataggtgcatcatcacacagtgcagcagcaaagattctcgactgcaagcagttcatcaaacattacgatcagcacaccccacgggctcctttgaacccattcctactttctgtgaggtgttccattgaacttcttgatcacccaaaagactacactgcaccaccggtggaactagtgcttttaccagcaagtgctacccttgctgaactgaaaatacaggctacaagggcctttcaagaaacatacctcatgttccaaagctaccaggttgaacagctccctgacttcccaaattttagtgacacaaccctcgtgaagcatgtgcttggctcaagccagctcgtgagggtaagaggaaggtgcactggggataaccgaagaattgtgcaattcaggatggaaagggggttggagaactggacggtcgactgcacctgtggagccaaggacgatgatggcgagaggatgcttgcatgtgatgtttgtggagtttggcaacacaccaggtgttcagggattagtgattttgatgatgtccctgagaagttcatctgcaggaagtgtgctagtccacgcagaggaaagggtcgtggtggtggaggtggcaatggtggtagcagaatggatgtgagcgctgcagggaggtgcaaggatgagataggatcatctgttggcggtgcaggcaaatttgggcgcatggcaactgttggatgactgtacataatgtgtgaaatgtaaatactgaggggagagtggggagtagcacctgaggcctgtgtgaaccttcatggaatcttgtctttctgaccagtgatatgatgttaatctatcctccttggaagcaatcctttctcagaattgttcagcacgctcaattctgcatgcacaatcaagtatttttgccaagcttttaagttagaaatataacacaagtcaacaaaacgtacgtaatgatggatcaatatgagaatatatgtcagtgacaaaactaggcttctgggcgttacatttcctctagaatattgctatcaggatatatgcaaatgcagaaatggctaacagtaagcagatgaacaagcagcatcgcaaaaaagggataggaatgatctattatcacttgaagattatactaaacgagtagagcttccgaacgcacctgcaatacaaaaatgaggaaggcttagtagcacatgtttgttagggtagtttgctaaagacttactgcaaaattttcataacatgattgttaggcagttaactggtcaaaactggcttgcaaattttctttacccattcaagtgcagcataaagagggtgggatgaaagatgacaatcttgaaatgaataataagatatctaacgaacactcattaaattc

SEQ ID NO: 7048 - DNA, 2281 bp, Oryza sativa
  ref <308>: DATABASE ACCESSION NUMBER: AK064178
  ref <309>: DATABASE ENTRY DATE: 2001-12-06
atataaagtggttctcaaaaaaaaagtgaaagacagagaggtcggagaagggaaaagtggcgatgaaacaagggaaagtggagatgacgccggcggtcgccgccgcggcggttctgccggtggggttccgtttccggccgacggacgaggagctggtgaggcactatctgaagggaaagatcgctgggcggagccaccctgacctcctcctcatcccggacgtggacctctccacctgcgagccctgggatctcccggccatgtccgttatcaagtccgacgaccccgagtggttcttcttcgccccccgcgaccgcaagtatcccggcggccaccgctccaaccgctccaccgccgccggctactggaaggccaccggcaaggaccgcctcatccgctcccgccccgccggccccctcatcggcatcaagaagaccctcgtcttccaccgcggcagagctccgcggggcctccgcaccgcctggatcatgcacgagtaccgcaccactgagcctcacttccaatcaggcaaaaacggtagcttcgttctgtatcgcctgtttaacaagcacgaacaagatgatacccataccccggcctccaatttggaccaacaattgtccacgtcttctcaaggcaatccccaaaatggcacacctgctgtccaaccggccctcgcctcaataatgaaggatcatcagaccttaccatcatctggtttcagccaactgactgaaatacaagatgctagtacatctgtccatgacaaagagcaaactgtagcccatgacgatgcttttctggacgtgttatctcaacttccagacctagagcctgagcaaagatacaatggattccctaatatcacctctccaattcgcccttacagcgatcacccttttgtcggcaatctgggtgagcaagatctttcagcgcattttggcagtaccttgtctgagcaggacctgcaaagtttgttgtttagtccaaattacaccaaaatggataagcaccccactggaaacgtagagtctaatcctaccgcgtcgtccaacaatccaaacaataacacattactcatggatagttggaggaagaatgattcatatcagatgcttctaattcaggttagaatattctagaatttactcttacacattttgactaatctcatgagaacattttcttcccttctatttcctgttctaaacaaagcgtgcagacaacacagatgctacttgctgttcttcttcaatcaatgcaccacaaacagaaacaagtgatgctaatcttgaagcaagagcccagagtagcagcatggtctacagtggagtagccgagggctcccccttgtgcaaccaagatcaactacactccgcattcaatcctcacatggagtcacaaaagagtggagccttctgttgggctggattgtggaccccttatccccagcattggttcgatactatcgtagaaccgggcaggagtggcatgacattttcagatgccttgaaagaacaaggtcaggaacaggcaccttcaatgaagcacttgacagctcaagatctcgttgatccacaacaaggaactgctgcaagaaggatccgccttgtatgctctgttgagagggcatcagtctctcaacctgtatcctcacatttgcagagtgaatatgaagctggatcatgctgtaacactcgcaattcatctaataacaagaaggaaagtgtcaggagtgaagatgaagctggatcatgttgtaacactggaagttcatctaataaccacagcgaggaaaatgacgatgcagcctcccagattatggatggagaaccaatgcatattcagtgcaaagaggatacccctattcaagtggatcattcagcggaagttatggacaagctccaaggcttctcctttcatgaagagatgttggtacatgctaatcagccccgtggaactaatctaaagcagaggctgttgagagtggagtctagaaatagcaatgagaataatgtaccttcgttggagacacgagaacagcagcatgcacctcatattcagaaatggactagctctgttgtgcgactagggtgggggtggcagtggccggctctctttgtgatggccggctctctgcttttgttggttggtgtgtggaaatctctgaatcacactacctgactaatgtaaataaatggtcgcttagcttaagcttgggagcctcatatatactactacatatgttctttggaaagtactgcaggtaactggttcatat

SEQ ID NO: 7049 - DNA, 665 bp, Oryza sativa
  ref <308>: DATABASE ACCESSION NUMBER: AK064179
  ref <309>: DATABASE ENTRY DATE: 2001-12-06
gtctccccgccgccgccgtcgcccagcgccgcgcctccccgccctccgttgccggcgacaagcccccgcagggagcgggctatctggagtccaagctgcagcctcgccctcccgctccgtgcgccgggcagcagcaagcgccgccccaagccctagcctcgccgcctgccaggtgcctgaagccccctcggcccgtgctccccttcctgtctgcttgtcggattcaccgattgtagcccgcaggcattttcaggatgggcagtgaggacacaaaagatatgctgaagaatgtggactggaaaacagttggtggtggttcagtgactactgacccaagccaaccagttgttaaaaagcgtctcccaaagaaaattagacaagttcctgaatgctattttctgcctcggcgatatttgccttctgcattggcaatctatggcgctgtgtgtgctgctggagttggcgcagggatgctgcttgaggtttggataaacaaaaagatcaaaggtgcattcttgttttatctggtggcaggaggggccattcaactcacgttcttggaacactgctattttcttgaaagcttatgatgttggattatacaattgaaaacattactcttcttttgtcttagataatgttggattgaacaattgtttgttgcc

SEQ ID NO: 7050 - DNA, 660 bp, Oryza sativa
  ref <308>: DATABASE ACCESSION NUMBER: AK064180
  ref <309>: DATABASE ENTRY DATE: 2001-12-06
actcgctccccacctcccaatccgccgccgatgtcgccgacaacctctggaacgctttcctcgccggccgccgcgccggcgtgtcgcgtccgtttggccacgaggccgccgttgacggcgttggcttcttcatcgaccagggcggcgccgatcactacgacgaactcgctcgccgcctccacggctacggcgccggcgtgatctggacggcgacgacgaggtgctcgtacccggatcatcggctggagaaggcgctggcgacgaaggtgtttgatcggattcatgtgaggatgtacggcgccggcgagatcgagcggcggtgcgtgatatcgtcgaggtattcgtgggagaaatgggcggcggcgtatccgggaagcaaggtgtatatagggttggtggcgtcgccggagcaggacgaggcgtgggtttttcagaaggatctttattatgaatatctgcagtttgttaccaagctgcctaactatggtggtttggctgtctatgataggtactatgataagaaggctaattacactggtgagggttaaatggttaacgatcgatcgtctttgttgatgtactggctgaataattaaagaagatccctcgtgtttgtaatgttgtgatggaagaataatggacggataaaatgaggtctct

SEQ ID NO: 7051 - DNA, 1950 bp, Oryza sativa
  ref <308>: DATABASE ACCESSION NUMBER: AK064181
  ref <309>: DATABASE ENTRY DATE: 2001-12-06
aaaaaaggcccaaaccatagggagaaattcactctcctcctcgactccggcgacggcgataagcggctccttctcctcctccgcgactccggcgacggcgacggctgcgcctcctcctcgtcctccttccactccccatcgctagccttgcgctagacaaagcgcggaaggtggtggctgcctcgctgcaaatgagccaccgcaggcgacgtaacgccgctggcccgccgcctcccgaaggcatcggcggctcgtccaccgcagaggcctcttcgacgggggaggagaggccggatctgccgtgggcgtgggcgctgggatcggagcgaagggtgctcgcgctggcgctggccttccgcgcggcgaacgcgctgctggtgcgcacctacttcaaccccgacgagcactggcagtgcctcgaggtcgcccaccgcatcgtcttcgggtatggccaccttacttgggagtggaagcgtggtcttcgaagttacctccaccccttcatctttgctgctctctacaagattctttcgctgctccacttggattccccatggttcatggcgatggctccacgtcttctacaatcagtctttgcatcttttggggatctctacttatataaactttcaaaactcattttcaataatcacgttgcccagtgggcactattttcacagcttgttaactggttcatgttcttctgtattacacggactctctcaaacagcatggagacagttttgactgttactggactttactattggtttgttgcaatagagtctgtaaagggaaattcggttgtttcaaagcagcaggctgccagcaagcaaagccctccatcaagaaaaatggctctactcatagcagccttagcttgtgctattcggccaacaagtgccataacatggctatatgttggtcttttggattttattcagatgaaatcaaaatcccggtttatttttctcgaggtcgttccgctcggggtctttgtccttgccgtgacaacgtttcttgattgttggatgtatggttcccggatcatagtgccacttaattttttgaaatttaacctcttctcttcaggaggagactactatggaacacatgtgttccactggtacttcagccaaggttttccatcgatgatttggactttcttaccgttttccatttctggaattttgaagtctcgagaatggaggcttgcaggtcttattgtctgggtattagtggtttatagcatacttggacataaagaattcaggtttgttctcccggtgcttccttttatgttcatgttctcaggacataacttagctgcaatggcacaactcaagggaaaaggtcacaatgagaaaggacgactttcgaggttgaagctctctgtcattctgctcatcctaacaaatgttccaatggctttatatatgtccttataccatcaaagaggaactgaagatgctatgctttatctatcacgagaagcccatgatggaagagtaaagagtgtcctcttccttatgccttgccattcgacaccttattactctacattacattacaacctacctatgcgctttttggactgtactcctagtgaaaacaaagggaccttggatgagtcagaccgtttcctcatgaacccagcagattttgtgggcgaggtttttggaaatttatcttcgttcagtcatattgtattatttgaatctgaagaaaggcatgtcaagttgcttctgcgcaattcatttcaagaggttaggagattttttcactcccacttcaaggttgatagagaccttcaatcgtcagttgttgtttattcacagaagagtgtattgtgatcactgtggcagaaaaggctcgttagtgtactatcttgtctaacatttctaatcatgtttcaccctactttaatttatcattcgagaaatgatctat

SEQ ID NO: 7052 - DNA, 1382 bp, Oryza sativa
  ref <308>: DATABASE ACCESSION NUMBER: AK064182
  ref <309>: DATABASE ENTRY DATE: 2001-12-06
gtttagatcaaacgggttcgtaaaaaaaaagttttattctcgggttcgttgggttttatctatataggcggcgagcgagaccatctcattcagttttattccgcgcgcctcctaaatcgcgcttaatccggcgcatcctgattcagagagtggtttggattcgttggattcgaggtgaacgaacagggcgtggaattttcgaggactctctcctctcgcagaatcccgcgcgcctcctgattcggagagcggtttggatttggattcgaggcgaggaattttcgaggactttggcagcggcggcgggggctggtgagcttctgctgcggcttggagtctgcccccaccattgcgtggggaggtggaggtggaggcggtggtggcggcgggggcggcggaggacgatccttccgcggcttcggtggcaggtttgatccaaattgagcgccctgaggatttggggcgtgtttatggaggattagatcgagaattttggttgtttctgtgagatggccgccgattccagcatgggattccatcaggggatcacggcctcgatgtacaaccatcacatgctctccttccaatctaacagcgacttgggcggtggcgccggcgctgcggccggtatggtgatggccccgaggagcatgaacgggactagtagcagcgctgggctgttcgtctctccgaacaccggtgagctgaacacactgaaggaagggcttgtgagatatgctcgcgaaccgaatatcatgaagtacataaaaatagcagctatgctacccaacaggactgtcagggatgttgcattgcggtgttggtgggctacaagtaaagatagaaggaagaaacctgatggattttatacagggaaaaagataagagacatgaagccaatccaggacaagatggttgcatctgcctccatggctaattttcacctggcacctgcaaacactgtgacccctttctcaatatcgatgcaacatacaaatcagcaatgtcaggttcctaaggaagaagttcctgtcgtggatagtgcaacacagcatctcctggaagaaaacaatcatttactcaaccaaatcgccacaaatatcgaaacattcaagacgggagagaacacggatctcttttttcggacaaacaacaacttcaaaaatattttaagcagaatgagcgagacgcctggtatcatgggccagatgccccaattgccagtgcaagtaaacgaagaccatctgagttcacttcttcagctggacagaatggtaagaggggacccgtaatcacaagagattcaaacatgttccttcgtatggcgtaacgcaaacctctcatatgaagcaagaaccgcgaagctagtataaacatacacg

SEQ ID NO: 7053 - DNA, 1561 bp, Oryza sativa
  ref <308>: DATABASE ACCESSION NUMBER: AK064183
  ref <309>: DATABASE ENTRY DATE: 2001-12-06
gttttcgcggcagccggcatcaccaatggcttagcagcaatcaagctctcaccactccggcgtcgctcgtaatccatctgctttaccccatggccgacccagaggacgccgccgccgccgccgccgccgggaatgaagacgacgtggaggacctctacgcggacctcgacgaccaggtggcggccgcgcttgccgccgccggggagagcggaggctccaacccggccaccgacggcgaggccgaggccgaggcgccgggagcccaccacacggaggccgacgcgaacgaggcggtggacttgggcgacgggactgcgggctacatcagcagcgacgaggagagcgaggatgacctccatatcgtgctcaacgaggatggcgccgcgccgccgcctcctcctcctgctggccgatgcgaggaggggagcgaggaaggggaggtttcgggtagctgtgtgaaaggcctgtctactgatggcggtcggggcaagcttggtgagcttcaccggaaggggcttttcgagaaaacaacagcaccgatcacaggacaaggtgatcgaagccaccagcatgcatttcaaaaggaattcaattttttcttaccaaggaacaggacagtttttgacgtagacattgaagcatttcaagagaagccctggagacagcatggtgtggatctcacggactacttcaatttcggtctggatgaagaaagctggagaaaatattgttttgacatggaacacttcaggcatggaaccagaacacttgcaaatgaattgtcaggattgtaacaggagttccattacaatcttggattgagtaaatcagtgccaaagtcagagatttattctgtattgaaagaaggaaatgggattgctaagccaaagggtagagcaatccatgttgaaggtggtatgcatgaacgtcttccatcagcagatatgtggcctccaagacaaagggattctgatgtgatacaggtaaacatgatgttcccaccctcaaaccgctccagttcagatgacaggtccacagtaaatgacaaatgcatcactaccaaaagatgtgggccatccaataaccatccaggtgttgatgaatatctgaaggaaactagctctgtggtggacagagtggttgataaagaagtgcacaagagaggttcctcagagtgtaccaggagcaaaacggttctaggagattctgcctgtgcaggggctcaatcttctactcctgataattctgacatgctttctgaagaatcaacagaagattttcattttaagaggaagcgtggaaaatcaaattccaatgctttttatgtggaaaccaaccgtaaggatgagcatgtcttatcagatttttgccgtcatgcaagtaaatcagaccaagaaagtagcaagggtgagagccatagatataccccctctcctgctgatgacagatatcacaaggcaactaaacgtcagaggatggatgaagctggagcatgcatttctagtcgatctcttaataactgccaaagtgatcaccatctccatgaatctggacatagagc

SEQ ID NO: 7054 - DNA, 1022 bp, Oryza sativa
  ref <308>: DATABASE ACCESSION NUMBER: AK064184
  ref <309>: DATABASE ENTRY DATE: 2001-12-06
aaacaaacggagcaagactgcaagggagagggagagagagggaagcttgcaggctgcagctaactagctaggcaaggagagagaggagatagatcaagaagagattttgagaccgagagagagctagagagagatcgatggggcgagggaaagtagagctgaagcggatcgagaacaagataagccggcaggtgacgttcgcgaagaggaggaacgggctgctgaagaaggcgtacgagctgtccgtgctctgcgacgccgaggtcgccctcatcatcttctccacccgcggccgcctcttcgagttctccacctcctcctgtatgtacaagacactggagcgataccgcagttgcaactacaaccttaactcatgtgaagcatctgctgcactggaaactgaactaagcaattaccaagagtacttaaagttaaagacaagagttgagttcctacaaacaactcagagaaatcttcttggcgaggacttggttccacttagcttgaaggagctcgagcaacttgagaaccagatcgagatatccctcatgaatatcaggtcatcaaagaatcaacagttgcttgatcaagtatttgagctcaaacgtaaggaacaacaacttcaagatgctaataaagacttaaaaaggaagatacaagaaactagtggagaaaatatgcttcatatatcttgccaagatgtagggcccagtggccatgctagtgaagctaaccaagagtttctccatcatgcaatttgtgacccttccctgcatatagggtatcaagcttacatggatcacctcaaccaatgaatgaattgcttatcacattaatggacatctcctatgttggatgtggtgtttgacgtaatgctctcttttacatgcgggttttaccttaagtgtgtgtgctaaatttagtgcgtttgtttatgctcttttgaactgaacaaaggaatgatcccggtttgattgatgaatgctgcaagaacataatctatatgttagtctgaattcagt

SEQ ID NO: 7055 - DNA, 1711 bp, Oryza sativa
  ref <308>: DATABASE ACCESSION NUMBER: AK064185
  ref <309>: DATABASE ENTRY DATE: 2001-12-06
ctacaacctcctcctccaggcctactgcgactgccgccgccccgacaccgcgctcgagcacttccgcctcctcctcaaggacgactcccccgtcctcccctcgcccaccacctaccgcatcctcgcccgctccctcgctgagaatgggaagcttgaacaggccatcgagctcaaagatgggatgctggagcgtggcctcgttgcccctgatccccaggtgtacgcccttgtcatgggtggctttgtcaacgccggggatggcgacacagtggtctctctgtacgaggagcttgttgagaagctcggcggtgggcagattcttgatgggatggtttatgggaacttaatgaaggggtacttcttgaagggtatggagaaagaggccatggattgctacgcggaggtgcttggggagggttcgaaggtgaggtttggggctgtgagttacaacatggtgctcgatgcccttgggaggaatgggaagttggacgatgcgctccagctgtttgataggatgtgcgaggagcatgatccaccaaggaggattgctgtgaacctggggagctttaatgtcatggtggatgcatactgccgggctgaaaggttccaggatgcgattgaggtgtttggtaagatgggtgagaagaggtgtgctccggatgcactctcctacaataatctgattgactggcttgggaagaatgaacttgttggggaggcggaacaattgtacaaggagatgggtgagcgtggtgttaaccctgatgagtacacttatgtcttgctaattgagtcctactttaaggtggatagggtggatgactctgtttcttacttcaataagatgttcgttgctggcttgagacctaatgccaatgcatttaacaaagttattggtggcttggtgaaggttgataggcttgatgaggcacaggggttttttgataagatgccagaaaaggaagtcaagccaaatattggtagctatgagctgttgttgagggcgtatattgatgctgcgaggttggatgatgcaattaagatggccaagtgtattcttttggatgagagtgtagtgtttagcgatgaattaaaggcacttttggaaggggcactacagaaagatgggagagatggggatatgacgaagttgtatgaggatgttgagagggagaaagcagaggcagctgcacgtgcagctgaagagaaggctagagcggaggctttagctaaagaagaagaggagaggaagaaggccgaggcaaaggccaaggaggaagctgctgccagggctagtcgagcagcaattgaggcagtgcttggtcgcaagaaggaaggtgaaaatgatgattcaactgttaatgttgaggaggcgcaggttgttgagtcccatagtgacaccaatgatattacagaagagaatgaaggtgatgatcagaagaaatctggtgatgccttgccataggtcagacctttgtttcgttgttctattctcagttaatggttagttttgtttcaatagtagaattctattttaagagagtatctagtagatggttaacttgataatttgaatggaaagttattcaagttgctactgattgtatgctggaatcttatgtgccacatcggtcatttggagataatcagataaatatatttttatccctatgactgctagaatttaaattactagtcctgcttactagat

SEQ ID NO: 7056 - DNA, 1604 bp, Oryza sativa
  ref <308>: DATABASE ACCESSION NUMBER: AK064186
  ref <309>: DATABASE ENTRY DATE: 2001-12-06
caaaaagaaagatggttcctggcggttttgtgttgactatagagggctgaatgacattaccattaagaacaaatttccaatgccagtggtggatgaattacttgatgaattggctggagcaaagtggtttaccaaacttgatttacggtcaggctatcacaagatcagacttttgcctcaagatgaacataaaacagcatttcgaactcatcaaggattgtatgagtttagggttatgcctttcggtcttaccaatgcaccagcttcatttcagggactgatgaacaaaatctttgcactaatgatcaggaaaaatgtgcttgtgtttgtggacgacattcctgtttacagcaaaagcttggcagaacatgtgcagcatttgagacaggtgtttcagatactacagcaccatcagctgtttgtgaaggctagcaagtgttcctttgccaaacaacaattggagtatctagggcatataattggtgaacatggggtggcaacagatccagcaaaagttcaagcggttcaggaatggccggtgccaaagaatctgaaacagttaaggggatttcttggacttactggctactacagaaaatttataaggcattatggagttatcactcgaccactaacagagttgctcaaaaaggataagtcatacaattggacagatgctcaacaaaaggctttctgtcaagtcaagatggctatggtccaggctcctgtgtctgtgctggccatgctagatttttctcaagaatttgtgttggaaactgatgcctatgacaggggtattggagctgtgttgacccaaaatggacacccaattgcctatttgagcaaggcccttggagtgaaggctcaggcattatcaacatatgaaaaagaatgcttggccatcttaatggcagttcaaaaatggagggcataccttcaacattcagaatttgttattctaacagaccacaggagtttgactcacttgggtgaacaaaaactaaccacaagtatgcagcacaaagcttttgtgaggttaatgggccttcagtatagaattcaatacaaacaaggatctgaaaacaaggtggcatatgccctttcaaggagagatgctcagacagaattgttagcaatctctgttgggaggcccaaatggttggaaatagtggtagagcggtatgaacagggtgatgaggcaaagcaactattggcacaattgattttgaatccgactggtgttgagcatttctctctacttaatggggtcattcggttccaaggcagaatttggttgggtaaatttgaagatgcacattaagcagctttgctggctttacatgctagtggggtcggtggtcactcaggaataacagccacttataacaggatcaaaaatttgttttattggcctggcatgaagaaagatgtgcagaagtatgttgcttcttgtgaggtttgtcagcaagcaaaacctgaacattgcaaaagccctagaaaattgcaacccctaccagtccctcttcaggcttggaccaccatcagtattgtaacgccccgattttcgttcgggaataaaaatcaattaataatacattttctag

SEQ ID NO: 7057 - DNA, 1002 bp, Oryza sativa
  ref <308>: DATABASE ACCESSION NUMBER: AK064187
  ref <309>: DATABASE ENTRY DATE: 2001-12-06
actactagcagctaacctacctacactacactacaccacacactacacttggagagaagcacacgtagctagagtgatcgattcattttcttgctcgatcttgatcggtatggctggtgctacggctgccggcgctgccgctgccgcggcggggacgggagccgggtcgccgtgcggcgcgtgcaagttcttgcggcggcggtgcgtgccggagtgcgtgttcgcgccctacttcagctcggagcaaggggcggcgaggttcgcggcgatccacaaggtgttcggcgccagcaacgcctccaagctcctctcccacctccccgtcgccgaccgctgcgaggccgtcgtcaccatcacctacgaggcccaggccaggctccgcgaccccgtctatggctgcgtcgcccaaatcttcgccctccagcagcaggtcgcgatcctgcaagcgcagctgatgcaggcgagggcgcagctggcgtgcggcatccagagcagctcgcactctccggtgagctggccggacagcggcagcatcagcgcgctactccggcaggacatggcgagaaggccgcccggcggcgccctcgacgactgcttcggcggcggcggcgcgctgctgccggagctcatggcggccggcttcaaggacgacgtcgccgccgtgcagatgcagcagcattgctccaaggcggtggacgccggcgagctccagtatctggcccaggcgatgatgagatcaacctccaactactctcagtagaaagaaaaatcaaacaatgcaacgctttgcatgcaggagttagagagtggacaagcaaaaatttagcctgtgtactactgagcttttttatcagtgcaacgtcatagtgaagcaattagtctgcttcatgatgatgattagtacgtagtactactaaataacactaatagcttcttgcaacaaggtcttggtaatgacatcacacatcactggaccctggccatgcatgcatgtccaagtat

SEQ ID NO: 7058 - DNA, 582 bp, Oryza sativa
  ref <308>: DATABASE ACCESSION NUMBER: AK064188
  ref <309>: DATABASE ENTRY DATE: 2001-12-06
accgtcgctctcctccttccacccatctcttacccctcccattggcgatgaaccgctctacccatgttccttccctcccaccatcctcgcaaatagctcatatgcgacacctgcaccctgatgcggcagcttggatgtggccgcagaggcagaggcttttgaggaggcggatccaatacagatgatggcactgtcggacggattcggctcgaatatggcggcggtggtggttgaggcaggtgcatctcgttattttgcagatggaggtggaggctacgggtggatgcgacgcaatcagtggcggaggcagaggatctaatgcaagaggatgcacgagcgtacggtggtgaaggcaaacgattaatctctgttcttggtagttagttcttgctaattcttgcatttgaccgtccaaagcatttcttttttcagattggagatgttatatttctttcggcaagtgaaaattttgaatttttggatttttttttcgcaagatgtcgcttgtgttcttcgtatatgctgtgtaattattgggtttagagaaacaacagtatcggaacggaagtagttattgggggc

SEQ ID NO: 7059 - DNA, 1413 bp, Oryza sativa
  ref <308>: DATABASE ACCESSION NUMBER: AK064189
  ref <309>: DATABASE ENTRY DATE: 2001-12-06
gatatccgtccccgtctttccttcccccgccgccgccgccgccgcctgcgccgctgcgctatctccaacactgcgaacagcggtgccggcggcctgctcctgctacttccgccgtatactctcgcttctgaccccttgcgctcaagtcaatcttcccttgcccacggcctcgactcgcgtctgctcgcgagttcgcccgccgccgcctgcgccgatctccatcccgcgagcagcggtgccgtcgtcttgctgcttcggcctccggtacgcccccgctgctccccgcaccatggttgggctttcggaaggagagaagcacttcatccgcgggggcatcgcgcaggacctccgcaccgacggccgcaggcggctgcagttccgggccatctcggtcgagaccggagtcatacctcaggcaaacggctctgcgcgtgttagactcggtgcgactgaagtcatagctactgtaaaggctgagttggggaaaccaagcattcttcatcctgataaagggaaagtttccatttttgttgattgcagcccaactgcagcacccatgtttgagggtagaggttctgaagaattttctgctgagctctgtgttgcactgcaaagatgcttactcggtggtaaaagtggggcaggggctgcaattgatttatcctcactgattgtcgttgatggaaaggtctgctgggatctctacattgatggacttgttgttagttctgatggaaatttgcttgatgcattggctgctgcaataaaggtggctttgagtgatacaggtatcccaaaagtcaatgtttctcttagtgctacaacagatgaggaacctgaagttaatgttagtgatgaagaatttttgcaatttgacacctccagtgtgcctgttattgttacattgacgaaggtaggtaagcactacattgtggatgctacctcagaggaagaatctcagatgagctctgcggtttcagtatcggttaataggcatggtcaaatacgtggattgactaagaggggcggtgcagggttggatccaagtgtcatttttgatatgatatctgtggctaagcatgtaagtcgacaattcatctcggtattggattcggagacattagctgctgaagcggctgagtagagaggaaggagagcagaggttttgattattgacatgccaagtttgcaatgcatctaccggtttcagttttgctcacaaagatgaattgttgtcttctgaagcgtacaatcttactgtagctttatgctgaagtgaaaacgcatgggatgctggcatgctgctgaaatgtatgctttttaatttattcatagatgcatttaacttttttgagataagatacgtttaatttggtatgcttgctagataaaaaaaaaaaaaaaaaaaaaaac

SEQ ID NO: 7060 - DNA, 1170 bp, Oryza sativa
  ref <308>: DATABASE ACCESSION NUMBER: AK064190
  ref <309>: DATABASE ENTRY DATE: 2001-12-06
atcactcgattcgcgctctagctctagcttttctctcttctttcttgggctggctatctatagcttgctcgctgtcgatcatggcgagccgctctggtgatcggaggctggccgtggttgcgttcgcggcggcggtgttgctgtcggcggcggaggggctcggggtgaactggggcacgatggcgtcgcacccgctgccgccgagggcggtggtgcggatgctgcaggacaatgggatcagcaaggtgaagctgttcgacgccgacgccgggacgatggaggcgctcgccggcagcggcgtcgaggtgatggtggccatcccaaacaacctgctcgacctgctgacggactacgacgcggccagggactgggtgcacgagaacgtcagccgttacagcttcgacggcggcgtcaatatcaagtgagtccacgcaccacagctgcatgatgccaccatgatcatctcctccatccatggttcagatattgagatgctctgcatggtgcaatcctcctttttttttcttttaaagaaaaaaaaatccttcttacattcagctgttgcttcttcaggtgtcacatattagttgtagctgtcagaattcgataggatttggattgatgtgttgctctttttcaaaatagttattgagtttttattctgattatgattatgacatacttatatgtgcatattaattatctttgcctcgtgcataattggtcatggttctggttctattatgcattaattccaaagtccttttgagctgatcttgaataatgctctggagtagtttttgaagtgattgattactatggggtgacgtggatattctgctggctgattcggagaagctttctgatcagtaaagtggcaaccttaacatcaacaagttgaaagttaaaattatgcatatgcgtcgcatttgtccaattgttccgtccaaactctgtctgaagaatatagtagtactcttttaggcattatctgatactatattttcttcgtctaaaaaaccaacttttaaggataatcatctttagaagttgatttttatttgggatcgaggatgtattaggtgtttagatattgacaaaagatctgaatatgatgtgtcatcagtactagcgatcctacaaggatcatccctctgaattctagtctac

SEQ ID NO: 7061 - DNA, 1229 bp, Oryza sativa
  ref <308>: DATABASE ACCESSION NUMBER: AK064191
  ref <309>: DATABASE ENTRY DATE: 2001-12-06
ctggtagagtggtaattgctcgcgcgcattctgcatgcatgagcgcgcgcggcggtgtcacgatggcaggaggcggaggcggcgaccgcgcgccgtcgtcgtcgtcgacggcgatgatctcgcgactcctgccgccgggcttccggttccggccgaccgacggggagctcgtcgcccactacctcgcccggaaggcggccgacgccggcttcacctccgccgccatccgcgacgccgacctgtaccgcgccgagccctgggacctcctgccgccgccgcgttgtgatgcggcggaggaggaggaggaggaggaggaggagcggtgcggctacttcttctgcacggcggcggcggcggcggcggccgccccgtgggggtgaagaagacgctcgtgttctacagggggagggcgccgaggggcgagaagacgacagttgtcgcccgcagtgagtgggtgatttgcagggtgttcgtcaggaagacaccagatggtaacaacgataggggaactacagaacatcatcttccctcctacgacgctcatctccgttcgtcgccggcgccggcgaactctgtggacggcgcaggccatgcgagctgcagcttcttctccggtgctaatgagtccatggcgccaagcgaccatttcaacataggagacgacatgatcctccatggccacgacgaggaggagttgctgatgatgaactgttcttcggcttttgatctgccagagcttctcgactacgagagcttctcgctggacctttgatccaacgagcaatggcatgttctaaaatctaaagtatgatctggttacttctcttaatacaaaagatacataagtcttttgcgtattctccaaaaaaatctgaaggatgatgcagctagctagctagctagctagatcgatcaatcgagatatatatgaaggccataatttgatcattagatgcatatgcatcatccatgtctacttcttcagatcactagctacttaatatgtcccctctctgtaattaaacttgcacgtatctgtatatatatttgtactgtagtcattcatgtaatatacgttttgtgtttgcgtattttatacacgcctctatttcaggcgctcttagcatttcttttactttcttagattataaaaactagtgtgtggttgtgtgtttttgctgtgtacatcttacttatatagagagttaaataaaaactctactatcttt

SEQ ID NO: 7062 - DNA, 2066 bp, Oryza sativa
  ref <308>: DATABASE ACCESSION NUMBER: AK064192
  ref <309>: DATABASE ENTRY DATE: 2001-12-06
ataaaaacataggtccaatggctaaaggtgattccaagtcaaatcatgtgcttgcacctatgctcagaaaggaaggattgctagctaactcgattgaaaagtcaaatccacaactaacgtccccaattcgtgcgcacccaattcatgcattggtgcgcacgaagaaaggaattccagctagatcagttttaaagtcaaatccacaaccaattcgcccaaaacaaatgcgtggatcggtacgcggtgttagcttaaaggggcaatcaacaatggcaaatgataatagtggtgaagaattgaaatcttgcaaggtgaaaaattattctatttcaaaagagtctgcaaaggaactcatggtgcacaagggcaattcatacgaagacaataaatgtgataagatatgtggtgaagttacgatgggcgatcgtaaacatcatgtaaatttaggctcaactaagagtttgaagagagattacattccttctacatgtggtgatcattataaggataacacgaaggggaatgaagttccaaatcctagcccattaacaaaagatgggcctaagaaacatgatagagatgagtgtgaagattataagaatctaaggcctactaagaaacggagacgatatattgtaaatgttgatgaagaggatgattatgatgacaaaaatcctatggatattaaagattcaaccaaagtcgctatgccaattgccgcagagtctatcaagagacagttctatcattgtatacaaccaattgatgaacctatctggagcggaatctttaagattgggggcaatgattatataccattctcagcacatctatcaactaaatcatgcaagaaagtgtgggatttgtcggtatcaataccttcaattgtccaagtgacaaagctttctaggtcagtggtctggcctaagagtttggaggcatcaagtcccacagatgacagcattggcttgtatttcttcccccctaaaatgaggctagataaaggcatggatcagctagttaaggaaatcgtggagaaggatatggccttatctgctgttattggtgaagctcagatgctaatgtttccttctacactattgcctgaaaaatatcgaacttttcaagggaagcactacctctggggagtatttaaacgtagaggaggagacgagcaacaagctgcagccatggcggctgagcagcagcgtggttcagatcagcgtgtcaagcaggagcaagagaacacacagtttcagggtgacgagacacagcaacggatcaagaaaccaaacagtaacctgcaggaaacggcagtgatcaagcagcagccgtcgtcgccgtcctcgtcgtcggtgacggctgcccacattggcgtggacgtagtgcaggagaagagcacggcagctagcggagggcgtcctgctgtgcctgcagggagccatggaagggttatcggcttggtggtccggcaaactccgggggtggaggagctgatccagcagatgcggcgcggaggcgcgctgctggctaccatggagggggagatgatgggaggttttgaagcaaacgacgacgacggcgcgaagaaattcaagatggtggagtgacgcccttccttgggagtggttttacggctcttgagcaggtactcggaatacaccacacacactatctagtgataatttgtggtagatcctaataccttagagcactaagatatactcctttcgttttaaaaagaatcaatgctagttattaacctagactaagtactggtccaggtttatagctagatataggaattggtttattttttatggagggagtatgagttctctggttctatggatttattggaagcacgcggacattcgatcgtgttagcgtgtgcacaagattattctaaaggctccaaaattgccaatatcattaaattcaattttctagtttagttttaaaccatgtaagagtctgtttcatcttttcttgaactcctattttagacctcacgccatgtaagagtgtttaactttttttaactcatagcccctttatactgtctt

SEQ ID NO: 7063 - DNA, 1317 bp, Oryza sativa
  ref <308>: DATABASE ACCESSION NUMBER: AK064193
  ref <309>: DATABASE ENTRY DATE: 2001-12-06
accaaaatttaccgttgaccatgttactctccagccgcctccacctcgccacgccctcctcgccggcaacctgcccctctccgctccgccgccgccgccgcctcggcctcccggagccacgaacgcgtcgccctccgccactagcttccaagaaccccgcgccgccgcagccgcagccgttgccgctgtcctggctgtcgccgaggcggcaatggcggtggcggagcgactacggcgacgccgacgccgccgaagaagaatcaccggcgccgctcgtcgaggacggggtatccggtggaggggagaagaagagcttctgggcggcggtgagcctcatcgtcggaacggcggtggggccggggatgctggggctgccgtccgccaccatccgctccgggccggtcccgtccacggcggcgatcgtgctctcgtgggtctacgtggtgtcctccatcgtcctcgtcgcggagctcagcttcgccgcgatggaggacggcggcgtcgacgaggtcagcttcacgggacttgcgtcgagcaccttgggggcgacgctcggggcggtcgtggccgtcgtctacgccgccctcagcttctccctgctcgtcgcctgcgtcgccggcatcggctcgctggtgtcccagctcttcccggcggtggatccggccttggccatggtgttgtcctggaatgccgtcattctcgggttggcaagttccagtggcggtgcgagatccgatgatccaattaagctgctgctctcggtgaatccagcagcattgcctgccgttcgaggctttgcgtttgccgcattggcgacgagcttgataggatacgcggtgagctttccgaagcagctggctgatacagtggagttgattgggcagaggttttctccgaagcgaggaattgggcagctctctgaatctagcggtggccatggaagaaatggggctattctcacatggattgtgctgattattcctatcgttattgcgtcgttcttctcagcggccttctccaaggcactggattttgctggggtttatgcaaactgcttcctttttgggatcctccctcctgtcatggcctggattcaccggtcacagaagagaaagagatcgtctggttcatgtgaagatattttgcctggtgggaatgttgctttgttgatacttttcagtattgctgtggtcctagcattctggcactagatggtacgccgtacgcacatcagtgatgtactttgtttcttcgtatcaaacatttcatgagacaatcacaaatgttaagcctgatagaactttcagatttgctgtc

SEQ ID NO: 7064 - DNA, 1552 bp, Oryza sativa
  ref <308>: DATABASE ACCESSION NUMBER: AK064194
  ref <309>: DATABASE ENTRY DATE: 2001-12-06
aagcactgcagcgagccgaagaagcttagctttaagcagcagctagcaatggcagcagcaagggcgtgcttggtggtggcgctcctcctcctggtggctctcttctcgccatcggaagctacttcgtctacttctttgcggcggcggcaggtgcggagcctcctcaagcgcctcaacaagcctcccctcgcaacctttcagagcctagatggagatatcatagattgtgtgcacatctccaatcaacctgcattcgaccatcctcttctcaaggaccatacaatccagatgcgaccttctatccagccaagtggcctatatggagaagcaacacgtccattcacccaaacatggaatcagaatggcgaaaagtgccctgacaatactataccgatccgaaggaccaaggaggaggatgtcatgagggccacctctgttacaacgtttggcaagaagacgcacggcgggagccctcaccctcactctcacttgggtggtgtcacggacggccaccactatggtgtagcatatgcgactggggattccaactactacggaaccaaagtgaccatcaatgtgtggcaaccaacgattgcaacattcggtgatttcagcttgtcccagctatggatcacagcgggctcctatgaaaacaaggaccttaataccattgaagcaggatggcaggtgtacccagctatgtacggggatgataaaactagactcttcatctattggactcgtgatgcatataacacaacgggatgttacaatctagcgtgctcagggttcatccagacaaacccgcagttcgtcatcggtggcagcttatcccctgtctccatctatggcagcacacaatatgagtatgattatttagtttggaaggacccagcggggggcaactggtggttgcaactgcaaggcaattatgtgggctactggccatcatccatctttaccctcctgcagacaggcgttgccgatactgtggaatggggtggggaggtgtattctcctcaaattaccgcacccatgggcagtggacatttccctgaggaagggtttggcaaggccacctacagtagagcaatccaagttgttgattcctccaaccatctcaaaccaccaaatggtgtgggcttgatagcctcgctgcccaattgctataatatcatgactggttcctccagtaccactagttggggcacttacatttactatggtggacctgggtgccctcaaaactcccaaattgaagtgatgtagagagagatcgagctcacgatcaaactacgtacatcacattaataatttacatgtagtactacacgatcaacatcgctcgctcgcccaataatatagtattgttggatagggtctatactagctaatattacatgccgcatgtcaagctctgattgctagtacgtatgtatatgtatacatttgcatgtattggtaagaggtttgaaccaagctagcattacaagctggcaataaatgtattgtcacagtttactggaagttatgttatggaatatacttattt

SEQ ID NO: 7065 - DNA, 1814 bp, Oryza sativa
  ref <308>: DATABASE ACCESSION NUMBER: AK104984
  ref <309>: DATABASE ENTRY DATE: 2002-08-28
gaaacaaaacccgaagcccccatctcttcctcttcccaccttcgcattcgcctccgccttcgccttcgcacgcagtagtagtagtccacgatgatggccaccgcggggtccaagtcgccggggcgcgcgctgaggaggatcgccggcgcggccgtcgccgccgtgctgctccgcggctcgttcagcgcatccaaatgcaagacggaggcgaggatggcagcggcgaggatgaagctgctgcggaaccggcgggaggcgcaggtgcaccagatgcggcgcgacatcgccgcgctcctccgcgaccgccaggaggacaccgcccggatcagggttgagcatgtcattagagaacagaacattatggcagcgaatgagatcattgatcttttctgtgagctgattgttacacgccttcccatcattgcaaagcagaaggaatgcccagcagacttgaaagaaggtatctgcagtttgatttttgccgccccaaggtgctcagaactccctgaactcggtcggatccgcgatctttttgaaaagaagtatggcaaagattttgtttctgctgcagttgacctacggccagatgcttgtgttaataaccttctaattgagaagctatcagttaagaagccatctgggcaaactaagctgaagattctcaaggagattgcgaaggagcatcagatcgattgggatatgaccgagactgagcaggagcttctcaaaccttctgaagagctgattcaaggaccaaacacatttgtggaagctaccaactttccagtgaaaactactatgtcagcagcacatgctgtgcaaataaatccatctaattacagttctggatacgctgatgaatatgatgacgagcgtacgatgcaattcaaagatgctgcatcagctgctcgagcagctgcagaatctgccaatagagcagcttctgctgccaaggcggcagctgatcttgtcaataagaagacccattcatctgatgaggttgaggaccgtagaacttcttttcatgaatctagtcattccagcaagagacagtcaatgagcaactctagtagatcgtccaggaaggaagatatagtggcctttgatgaatcaaacccccaagggaggaggacgtcccgcacagggagctccattgaatcaaaccacgtagaagataaagaagacactgaacaagtggaattgagtgccaggaggatgcggaaaaggaacatccgttctactcggaaggtacactcagagataaagtttgatgattcagagggattgaattcagagacagaggacgaaagtgatacggagatacaatccattgaaaggccagctcctagaagtgaaccttatccaggaagtcgtcactccgaagatgaagagaaagaaaaccatgaattacctgatttgccgaaggcaaaccttagttctcgtgttcatccaaatatgcctctggactacgaaactcttactgcacgcttcgaggcgctcaaatctgggaagctcccatagtgtgcaattgaagatgtagcatataatgctaaatttctgctacttctacaaagaaccatatgatataccaaatactagtaggttacttccagtactctagggccttttattttggtgaactgaaagatttgctgtttcaaactgctcctacattcatattattcaagtatatatatgtgttatctgaagtgagaatttgaggcacctactgtaatctgcagagtgctggaaggtactcctgcactatttgtaaattgatttacatccgaagaaaacattagccccagtttctg

SEQ ID NO: 7066 - DNA, 1601 bp, Oryza sativa
  ref <308>: DATABASE ACCESSION NUMBER: AK064195
  ref <309>: DATABASE ENTRY DATE: 2001-12-06
gttgagagcaaagggggtggatcattttttgcaagagagttgtgaagagccttctgataaggagagccaagcatggagaatgtggaatacaacaaattccaccgtggtatcttggttgatgacctcggtggctccttctattagtaggatgatagagactattcagaatgcagcaattgtgtggaagacattgagcaacatgtattcaggagagggaaatgtaatgatgatggttgaggctcagaacaaagtagaaaatttgaagcaagaagggagaacagtccaggagtacgctagtgagttgtagcagttatgggcagatcttgatcactatgatcctctacagttgaagcatgaggaggacattgtgattggaaataaatagatgcagaggcaaagagtcattcatttcttaaaggggctgaacaaggagtttgaggacagaagagcggctatgttctaccaggctacattgcccactatggaagaggctatttctgctatggtgcaggaggagatgaggttgaaactgatgagaggtacaaatcctacaagatcagcatacactgtggctgataatagagaatgctacaactgtggacaagtgggtcatgtgagctacaattgtcccactcctcggaacattggcggtagggggttgattcgaggagggtatggtggatttggtggaacccgtggtggatttggaggagaccgtggtgactttggggggaaccacagtggtagaggaggtcgtggtggagatcgtggtggtggaggtcgtggtaggggcgaggtgctcctcaggccatgtagccatagaggagggtaaagctattaccttaacaggtgaacaggtgacacagtgggaggaatggcagaagaacaagatcaatgagagctccaacaccaccactcactttggtaacttcgccaactacgctcaagtgggcgaaggtattcaggcacaggcacttgcatctacatacagacatcctatagattggatcatagactcaggagcatcaaagcatttcacaggattgcataataccttcacatcatacaccccttatgtccactctgaaactatccaaatcgctgatggtacatccaaacctattcatggtatagggtcagtagagtgcacatcatcaataaacttatcctctgacttgcatgttccttcctttccagtaaaccttctctcagttagcccagctattgaccaactcaagtgcattgttgtatttgatgagaactctcatctgttccaggagaaggggactgggaggaggattgggactagagtcaggtgtgatgggttgtggtacatcaatcatgaggaactggggctagctgcggtggttggaaatgttgagaaggagatcagtttgcttcattgtcagttaggacatccatcttttgagagtttgagtaagttgtatctagatctctttagtaaagtggataagcatagattggtgtgtgatgcttgtgagcttggaaaacatactcggtctacatatgttgggattggtcttcgtaactgtgagcctttcatattaatacattctgatgtttggggaccatgcccagtt

SEQ ID NO: 7067 - DNA, 1769 bp, Oryza sativa
  ref <308>: DATABASE ACCESSION NUMBER: AK064196
  ref <309>: DATABASE ENTRY DATE: 2001-12-06
tataatggagatggtgttgaagagcactgatgacagggcgcgtcgggaaatgaaagcccttgttctgaatcttctgaaagacagcaaccattgcacagatggatcatcagacatcagttcagaattattgtacagttcatgccaaggttgcttagacagacttcgactactgttttcagaagcgacgggacaagaattttctgttgaacttacacggcaaataactctggagacagataatctcctctggttggttgagatattggttaaccagcgcatctgcgatgattttgtggctctatgggcaaaccaaagcaagattgcagaattacatggaaaattgccggttgcctctcgtcacactgttagctgtatcacagcaaggctttttgtcggaattggaagaggagagatgcttccatccaagaacacccgtctcctcctcttgcaagtctggctgcaaccactcattgatgactactcatggttacaatgcagctgccggtcattcgataggaagctcgtcgaggaagggatcgggcagacaatcctgacacttcccttggaagatcagcggtccatgttactggcatggcttgggagattcttgaagttaggggataattgccctaatctccagagggcatttgaagtatggtggagaaggacttttgtcaggccttatgtcagtcaggcaaggtaatgttttatgatcagacagaagttcatcttgaaaagacaagcggaccttttgcgtgttcggtgttcccccaaaaaattcatcttgaaaatatagggaagagtagtgcatttagcttatcgtagattctttgggagattgtcttggtcaatctgatgatggacatgaggtcagattagagttatcatgcaaagtgcaccagagatttgtataagagtgcatgcttagcttgcatgtaaaatcttgatcggtaatcgttatgccaaaacttttacacagtatttctttgaagtaatgatttggctttgctactctctaccttgattttggacagatgtggtggataaacttgcagttggatgttgttgggcatgattagggggaaagtaaagagctcggtgtgcatcagcttcagtgggatgccaatggtgatttttttggtcttgatgttagtggaagctccaccttacagaatgaattgaaaaggcaaagctgctatcatcttttgtcaagcgtctccatcgatgactcatgaggtatgccttgatcagattgttcagctcagggaagttgaggtaagtaagaatttcccggcatgttcaggatcttgttcatccaaaagatgtgctacataccaaattcgcagcattatagtgtgggttgtaactcagtacttcagtcccaacatgatgaaagctttgctgtcaagatggaatctgattcagtaaaaatcttcagtggtgagcatctggagaaagaaaagcatgtgccttaccagggggagattaccatcttgaataagctgaaaagggtcaaaattcagctgagtgatccctttgtcagaaggatggttgagaaaaatgtaaacaacttttcattatcttaagaagaagttaaataatgtgactcctaagttggtgactcctaagttgtgagtacctaacatgagctgtccacatgatgtgtcttaagagttgagattccggcaaaagaattgctttgatgtgtgccttcacctaaacatattgtgggctcaataacaaattagattacttgggctgtggtttgg

SEQ ID NO: 7068 - DNA, 1879 bp, Oryza sativa
  ref <308>: DATABASE ACCESSION NUMBER: AK064197
  ref <309>: DATABASE ENTRY DATE: 2001-12-06
gagttaagaaaataaataactaatttaaatatactcaatattagactcattttatcacatattttgagcaaaatggatcttaaaagtaatataaggtctaaaaatatataggtcatcaaagattctataaaaaaacattactagtgtaatgacatgttagcctcagtagcatgcacgtgaatcgacatgataactagcagatagtatgttgtcctcttttcctgtcaagtggtctcatttctttgactcttcgtcaatataatatttgcgtgtccgtgtctcagtcaacatcaattgattgatcaatataacaactttcaatgcttagatagttacctctattgcagagctaagttacttctacgattttactaaattacttttgaaattaagtaaattactttaaatgtttgaatatattaaatattaaatttgttttatcgtatattttgagtagagcacgatggtacaaacaaaaatgaaaataatatatgatttaaaatatataagtcatcattagaaaaagaatagactcgtgtaaccaatatttagtttcgatggttggtggtgtatagcgatacctgacgccacgaaggttcctcgctttgatgccattgcaatggaagcaagcctatctctccgacaacatgaagacgcggatggatggctggcggagcgtcgtgccataagacaaaatcaagaatgctctccatttagatttcccacttaaagaaatatccaaacgtaacttgtgcaatgtacgggttagagactagtagtaaattagctgctcctgtaattaattttaacatcttatcatctcatagagagcacggtagcagtagtaccttaatactacatccgtcccaaaataagtgcagccatggatattcgtgtctaacgtttgaccgttcgtcttatttaaaaaatttatgaaaaaattaaaaatatttagtcacatataaagtactattcatattttatcatctaatagcaataaaaatactaatcataaaaaattttgaaataagacgaacgatcaaacattgaatgtgaatagtataaaactgcacttattttgggacggagggagtaatagtttttctcacgcttttctccataaattgaagaaatgacagaaaagataatgcaatggaacgccgggctctccggcgaagccgacgcgtccggcagcacagcgctccacttcgccgcctcggcggacggaccaaagatcgacatcgagaacagctcactcctccggtggctcctcttgccgtgcccgttccaatgccgccggacaccaaccgaacttctcctggagaccgacccgtccttggcctgccagccggacggcgacggcgactaccccatccacgtcgccgcgtccgccggcaacctgaggctcgtcgccctcttgctcgacaagtgccccgagtgcgccggcctccgcgacgcccgcgggaggaccttcctccacgtcgccgtcgaccggaggaggcaggaggtcgtgggattcgcctccgacgtcgatggacggggtttccggcggcggcgatcctcaacgcgcgggacgacgacggcaacaccgcgctgcacctggcggtcgtggccggggtgctgagagtgttctggtgcttgtttcggaatcgcagggtttgcttggatcttgccaacaacgacggcctcacaccggctgacctggccaggagtaccattccagcgggtctttactccaacagaacggtacatcacttttacctcactagggcatgtacaaaaatagtgtccgatatggtcttttaagtaagacatattatttaaagaatatactgttacaatagttgagacaacaagaactcttaatcattaacgtacc

SEQ ID NO: 7069 - DNA, 2407 bp, Oryza sativa
  ref <308>: DATABASE ACCESSION NUMBER: AK064198
  ref <309>: DATABASE ENTRY DATE: 2001-12-06
acaaccacagcgatctccttcccctgcttcttccaatcgccctgacgccacccacactagctgctgcacccatgtccaagaagctgcttccgatcatggcgaccaagagcgcgaaggatttggttggcgactccaaggccttggtcgcagccagtgacgtcgtcaccagcagcgccatcgcggagtcctacaacgaccagatccgccctctcctcgacgccgtcgaccggctgcgccacctcaaggtgacgcaggaggggatccagctgccgaccatcgtcgtggtgggcgaccagtccagcggcaagtcgagcgtgctcgagtcgctcgccggcatcagcctcccgcgaggccagggcatctgcacccgcgtgccgctcgtcatgcggctccaggacgacccctccgccgactcgcccaagctgcagctggagtacagcaacggccgcgtggtgaccacctcggaggccaaggtcgcggacgccatcaacgccgccacggccgagatcgccgggagcggcaagggcatctccgacgcgcccatcaccctcgtcgtgcggaagcgcggcgtccccgacctcacactcgtcgacctccccggcatcacgcgcgtccccgtccagggccagcccgacgacatctacgaccagatcgccaagatcatcaaggagtatatcgcgccgaaggagagcatcatcctcaacgtgctctccgccaccgtcgacttcccgacgtgcgagtccatccgcatgtcgcagcaggttgaccgcaccggggagcgcacgctcgccgtcgtcaccaaggcggacaaggcccctgagggcctgctcgagaaggtgaccatggacgacgtcaacatcggcctcggctacgtctgcgtccgcaaccgcattggcgaggagacgtacgaccaggcgcgcatcgaggaggagcggctgttcaagtatcatcccctcctctccaagatcgacaagtccatggtcggcatcccggtgctcgcgcagaggctgatgcagattcaggcgaccatcatcgccaaatgcctcccggacatcgtcaagcagatcaacgaccgcctcagtcgccacagcagcgagctggaccagatgccgccggacctcaacaacgtcgccgacgcggtgagggcgttctttcacatcgtcaagcaggtgtgcgcctcgctcgagaaggtgctcgtccgaggcgagttcgacgagttccccgacgaccgccatttccacggcaccgcacgcatcgccgagaagatggacggctacaagaggaggcttcccgcggagtgcccgaagagcagcgacgacgacgccatgttcctgatggaggaggtgcgcgtcctggaggagaccaaggggatcaacctccccaacttcctcccgaggtccgcgttcctcgtcttgctcaagaagaaggtggagaccgtcatgcacgtgccgcacgagctcgtgaacgaggtgtggggttacgtggaggatgtggtgatgaacatccttctcaagcactccgagaacttcccccaggtgcagccgtcgtgccgccgcgccgtgcagacactgatggacaaggcgcgggcgcggtcggcgcagcacgtcaaggagctgatcgagatggagctcgtctccgactacacggcgaacccggattacatgaggacgtggacggagatcatggagggccacgatagtttcatggaggccgtggaggacggctccaagcccgcgaggatcaccctggagggctttggggaggtggacgtttcgcacctgagggcgcacgccggctcggccgggcaggcgttcgacctgagggcgcggctcaccgcgtactggaggagcatcgtgctccgcctcgtcgacgggctggcgctgcacgtgcttcgggtcgtcaagcgcctcgtggagcacgaccttgaggcggagctcgcggatgagctcctgggcaacaagatggccggcgtggagaggatgctggcgccgtcgccgagcaccggcgccaagcgcgagcgcctgaagaagagcatcgtcctgctgcggcagtccaaggaggttgtcgcgaacatcatggacaggatcagcgccgcaggtgaagtttaggctgttgccttaggtcaaaactttggatttatggtgttgccatgtgctgttgtggcgtgtcgctagctgtgaacctaagttgattgccgtctgctgttatggttaacttttgattcgtaatgttgcggtgggcatatgcatcactaattgtcctgttttgtttaactgaaacatatatgtatcagcgctgatacatatatgtatgcaaaaatcgtactaatttatcgtatgcattgtaattttctataagtatctttagtatggataaagcccaagtatatttgctgggtctagtgagg

SEQ ID NO: 7070 - DNA, 456 bp, Oryza sativa
  ref <308>: DATABASE ACCESSION NUMBER: AK064199
  ref <309>: DATABASE ENTRY DATE: 2001-12-06
aagaagctagagaaagaagaatggcatccatgaagctctccctcgccgtcgtcttcctcctctctgcggtggtggtgatgagcgccatgggcggcgcggaggaggcgaggtgctcggtggtgtgcatccagggaggctacatcacctgcgacaactacccgtaccagaagctggacggctgcgcctgcgagtgcgcgcccaaggacggccagaactgcgtcctccacctcgagcacggcccgccctccgactgcccgcctcaggcctaactaagcctagttaacttaagtaaccggggagatgtgatcagatcgatgatgatccatttccagaattaattctctactactgttgatgtgtgtgttactatgtaattcttgtgttcgtgttcgtgagatgggataaatttggttgttgaataatggaataaatggatatattgtgtgtcgctgttgt

SEQ ID NO: 7071 - DNA, 1606 bp, Oryza sativa
  ref <308>: DATABASE ACCESSION NUMBER: AK064200
  ref <309>: DATABASE ENTRY DATE: 2001-12-06
agaaaatgcaaccgagaaggattggggtgtcaactacagagctctgaatgacctattccatatctcacggagtagaagagacacggtgatgtataaagttagtgttcagatgattgaaatatacaatgaacaaatccatgatctcctcggcaacagtggttcagagaagaaacttgggattttgaatgccagccaacccaatgggcttgctgttcctgatgcaacaatgcatcctgtcaactcaagttcagatgttattgaactaatgagaacaggacttgagaacagatctgtaggcgcgacagcattgaatgaaagaagcagcaggtctcacagtgtagttactatgcacattcaaggagatagactaaaggaagcacaacacatcaacaaatctttgtctgctctcggagatgtcatattttctttgtcacaaaagaatgctcatgtaccgtaccggaacagcaagcttacacaagtcctgcaaaattctttgggtggcaatgcaaagacgctgatgttcgtgcaggtcaatccagatgtctcatcttatgcagagactttaagtactttgaagtttgctgacagagtgtctggagtggaactaggtgctgcaaaggcaaataaagagggaaaagatatcaaagaattcaaggagcagctctcactgctgaaagataaaattgcaaagaaggatgaagaaatcagccgactacaactacagagtcataatactccaagggcgacagctaaacgtgccgattcattgttaaaacattcgtcatcctccccaggcatatcatcactaggaagcaaaatccagcaccgaagaacagcatctggtggaaggataaagatcgttggcagtagagcagggtcggatgttgacaacttctctgacatcagtgacagacattctgaagctggttccatgcaatctgtcgatgatatccagcagtcaagggagattatgggtctctctaagctctccatgagtgagatgggacataattctgttgaccctgagcttccttgctttggctatgatgattcagaggggaggctaagcgacatatcggacagcggtctttccatgggtgcagaaactgattgttctatgagcagtgtggttgagcttacctccttgccagatcaggatagagtctctggcactcagaaagagcaacacatggcaccaagcactccaaaagatcggttgcataaggtggccactcgagcatcgaggacaactacaccaaaaacaccacaatcgcctaccttgtggcctaaactaagagatccaccccctcctagatctccaatatctacaagcacaggaaaggtcagagtaacacaggcaacatcttcatcaagaaattccagtactcagaaaaggtggacgtaaaagctgtgcatccttgacgaacatcttgcaacattggtataacctttttgtacattacatctagaaaagcatttgttttgttatttaatagatactactcattgattctgcactctggttttctttcacaattgaagaactgcaaaaccagttggaatagattgttccctgtaaatgctcttgtacatatgctatgttcac
